United States Patent Application Publication US 2007/0067865 A1 - sequence listing, part 50

SEQ ID NO: 304519 - DNA, 238 bp, Zea mays
gctcccatatccgctcccctacctctccagcatctcccgtctccgtcgtctcgtctctgctcctcacctcgccgccagccatgggcaagatcaagatcggaatcaacggtttcggaaagatcggcaggctcgtggccagggatcgcctgcagagcgaggatgtcgagctcgtccgcgtcaacgaccccttcaataacaaggaataacatgactacaatgttccagtacgacaacgtgc

SEQ ID NO: 304520 - DNA, 284 bp, Zea mays
atttttgtatgatggtgggctttgtcaggatggtaaagtcattggcatcactcagcctcggagagttgcagctgttacagtagcaaagcgtgtagcgaggaatgcaatgaccatattggcaaaaaggttggatactccatcagatttgatgattccacatccaatgcaacaaggattaaatacatgactgatggtttgcttctgagggaagcacttttggatccactcttatctaagtacagtgttatagttgttgatgaggctcatgaaagaactgttcatac

SEQ ID NO: 304521 - DNA, 303 bp, Zea mays
cccacgcgtccgcccacgcgtccgcccacgcgtccggctcgcaggactatgaatttctgtattgctttgtgctctggtgcttggataatttccccaaactggttaaaagaaagcttcagagaagggcagtttgtaggagaagcacaatatgttctggaagatgaagaatataggatgcaatataagtctcaacttagagatgcagttatgagagctaaagaaaggcctaactctttatttgctggttatactttctgtctgtcaaagtacatccagccctcttttgatgttctctcagccatt

SEQ ID NO: 304522 - DNA, 302 bp, Zea mays
caacgaagcaacagttgtacgtcatggcgctcgagcccctccgccatgggctggtgtcgctgctcgtgctgctgctgctgctggttcacgcggccagcacggcgcggcgcgcgacttgcacctggagatggtgaccacctccgccgcgacggcgcgcgccgtgccgtcgtgtgcgagctggcgactcggggtggagaccaacaacatccgggactggtacagcatcccctcggagtgccggggctacgtccgcgactacatgtacggcgacctgttcaggcaggactgcgcggtggtggcac

SEQ ID NO: 304523 - DNA, 234 bp, Zea mays
actgatgaggtctatggagaagctgatgaagatgctgtggttggtagtcgtgacgcctcacagctgcttccaacaggtgcgtattcggctacgaaagctggggctgagatgcgtgtggtggcatatgggagatcttatggtcttcctgggataaccactcggggcaacaacgtgtatgggccggatcagttccctgagaggcttattcgcaagtgcattcttttggccatgaga

SEQ ID NO: 304524 - DNA, 315 bp, Zea mays
cggacgcgtggcgcagagataggcgtcttcgtactcgcctacctccgcggctcaaacctttcccccttctcccaattccctccgtcggccgccgctccatcccgtacgacgacaccatgaaggagtgcatttcgatccacatcggccaggccggtatccaggtcggaaacgcgtgctgggagctgtactgccttgagcatggcattcaggctgacggtcagatgcccggtgacaagaccattgggggaggtgatgatgctttcaacaccttcttcagtgagactggtgctgggaagcacgtgccccgtgctgttt

SEQ ID NO: 304525 - DNA, 299 bp, Zea mays
cccacgcgtccgcccacgcgtccgatttttctaggtttcgaagtttttagtggaaaaaggtagtacaaacacgctccatggtcaagttacaattgggacgctaatacttcaggattgtgcagttggcctgctgtttgcactccttcctgttcttggaggtgctagtggcatttttggaggagtgatgtcaatggcgaaactgttgctagtgctatccatatttgtagctgttacatatatgatgacatggtcaattgttcctcgattcttaaaactgatgattcagttatcttcacaga

SEQ ID NO: 304526 - DNA, 296 bp, Zea mays
acgggatttgccaaggatacaaacttgttctcagtgtcgatgacaagaagggacattcctgccttgtcatcgaactgagacaagtgtatccacgggatttgccaaggaaattgcaagggttgcccaggggaaatattattacctccctaatgcttcagatgctgtaatttctgctgactccaagaccgccctgacagacttgaagagctcatgattttgcagcagcggcacccgttttctgtaccttttgatagggatggtgaaccttcattcatgcagtaatttttgcgtaggcc

SEQ ID NO: 304527 - DNA, 283 bp, Zea mays
aatctacaaggcaaccttgaccattgtaaagccacggtgtcaatcctgttaccgttgaaacaagtttctgaaactcttttctgaaatgtacaacgagtagttctactattttcttgtacagaattcaccttgttttgattgtgttagttgtggaacattgctctgctaagtttgacacatgactggacccgtatgcttgtgtatctaattttccatccatagctcttcagtgcagaatgtaccgcaacaatgcgaattaatccaaagattatgtgtacatgtt

SEQ ID NO: 304528 - DNA, 304 bp, Zea mays
aaaagactttcgagtttgtcaggggccatatgacccttttctgattagtgcttgggaagactatgatgcgaaacgtggatctgaaaatgaccatccaaaggagtttacaagggaacagtgctacattgtccttgttctagctgatggtggcactgatcctgaaagttttgctctagttgagtataatgaggttccacagtttactggttcaagttactgcttccttagcagtagctgaaagtgcttgtgaatttgaacatcgagatctgcactggggtaacattcttttggctccagaggaaac

SEQ ID NO: 304529 - DNA, 316 bp, Zea mays
ggaggccgacggcgtggaggtgcgcgtgcgccaggtgtccaacagcttcccgctgggcgcgtgcatcatgcgcaccaacatggacaacgaggatttcgtggacttcttcaccaagaacttcaactgggcggtgttcggcaacgagctcaagtggtactggacggagccgcagcgcgggcagttcaactacagcgacgccgacgacctgctccgcctctgctccgaccacggcatgtgcgtgcgcgggcactgcatcttctgggaggtggacaacgccgtgcagcagtgggtgaagacgctgtccaccgacgacctg

SEQ ID NO: 304530 - DNA, 304 bp, Zea mays
cccacgcgtccgcccacgcgtccgggaccgggggtggtgagagagaggaccgaggagggaaacagagaagatgacgacgaagcgcgacaccgagtcggacggcgaaggctccaaccccgtcggtagtggcgcgactccgccgcccctagccgccgcccctgtcgtatgcctcctccgctccgccggggacttcggtggcggcgccttcgttggatccatcttcggatatggacaaggcttgatcaccaagaagggttttaagggctcattcagcaatgcagggtcctctgccaagacttttgca

SEQ ID NO: 304531 - DNA, 129 bp, Zea mays
cagcagattgcctctgtgaaaattatacggaacaagcagactgggcactcagaaggttatggttttattgagttttactctcaagccgctgcagaacatactctgatgaacttcaatgggcagatgatg

SEQ ID NO: 304532 - DNA, 256 bp, Zea mays
ctttggtcctagtggccttactactgaggtgaagtctgttgaaatgcaccatgaggctctccaggaggcccttcctggtgacaatgttggcttcaatgttaagaatgttgctgtgaaggatctgaagcgtgggtatgtggcctccaactctaaggatgaccctgccaaggaggctgctagcttcacatcccaggtcatcatcatgaaccaccctgggcagattggcaacggctatgccccagtgctggactgccac

SEQ ID NO: 304533 - DNA, 292 bp, Zea mays
gaaagggatgggaaaatttggatgtggcacagatgtctgaaatgtccttggagtaatggatttcctccagcaactcagaggattgtcatgtctgatgctgcctggggtttgtcacttggtaaatttttggagcttagcttttcaaaccatgcagctgcaagtagggtagccagttgtggtcattctctccacagggactgcctccggttctatgggtttggcaaaatggttgcatgcttccgatatgctcctattagtgttcactctgttcatttaccacctcataaacttg

SEQ ID NO: 304534 - DNA, 298 bp, Zea mays
gaggcatgcaactcttaggataactgcttcagaggaaaatgcgcttatggagcttctaagctttatgtatagcggcaagttgacgacaaaccagccaactgtcctgctggatatattgatgatcgctgacaaatttgaggttggttcctgtatgcggcactgcagtcaattgcttagaaatttgcctatgaccacagagtctgcactgctctatctggatctaccttcaagcatttcaatggctgctgcagttcagccattgacggacaccgccaaggaattccttgccaacaaatac

SEQ ID NO: 304535 - DNA, 289 bp, Zea mays
gaacaaaagagttcctgtgatagttgatactcttgagaaattggagcttagtcccaagcatcgtggttcacaggttcttgaaattcaaaatttcaaccctgcttctctagatgatgttgcacgagttcattcaagatcttacatcactggactcgaaaaggctatgggcagagcttcagatgaaggtctgatattgattgaagggacaggaccaacatacgctacagaaactactttccgagaatcacttctatcagctggtgccggaatcacactggttgattcagtg

SEQ ID NO: 304536 - DNA, 293 bp, Zea mays
cccacgcgtccgcatggcattttctggaatcgtgacattcttccttgtccgagtttttaaggttgttgcacccgtcaagatgactttccatatatatgccacatgtgtgattccaattagtgcctttttcgcttcaagtctgtggtttggcaacacggcgtacttgtatatttccgtggccttcattcagatgctcaaggccttgatgcctgtagcaacatttataatggctgttttctgtggtactgacaaattaagatgggacctcttcttgaacatggtattggtcagtg

SEQ ID NO: 304537 - DNA, 290 bp, Zea mays
  unsure (1)..(290): unsure at all n locations
gcaaacaccgcgaaccgcccccgctcccaaacccgaccgagcaaagcgcaaagccccccaaccgcggatcaatccgcagcatcgatggcgcccaaggcggagaaaaagccggcggcgaagaagcccgcggaggaggagcccgcgaccgagaaggcggagaaggctccggcagggaagaagccgaacgcnagaaacgcctccccgcgggcaagtccggcgccggcgagggcaagaagggcaagaagaaagccaagaagagcgtggagacctacaagatctacatcttcaag

SEQ ID NO: 304538 - DNA, 287 bp, Zea mays
cttggcggctgcggcggacacggaggcgaaggaggaggagcagcagcagcaggcggcgccgaggagcggcatcccactcagtgcttgcaaccatggctaggggaatgaagaagcacttgaagaggctcaatgcgcccaagcattggatgctcgacaagcttggcggagcttttgctcccaagccatcttctggacctcacaagtccagggagtgccttcctctgatcctcatcatcaggaacaggctcaagtatgctctgaactaccgtgaggtcatttctatcctg

SEQ ID NO: 304539 - DNA, 284 bp, Zea mays
cagagttgttatgatgagggtaagcgtgtagcagagacgctgatgttcgactatcacaggcagcatggcattggtaatacttcatcttgcacttaaactgtaatattagctcatagccctctttattgtgtgataactctaggcttatgatttgtcctcagcaatatttataatctatgtctgtagaaatccgaattgccaggattttcaacacctatgggccaaggatgaacattgacgatggccgtgttgttagcaacttcattgctcaggctgtgcggtaa

SEQ ID NO: 304540 - DNA, 300 bp, Zea mays
cacgtcttcacgggttcagtttcttctcttgcttggttcatgtctgcccaggagacaagttttgtcactctggggcagcgtgttctggctgatccacttaaagtcagaatgcattatggccacccagatgtttttgatcgtctttggtttttgggccgaggtggtatcagtaaagcatcaagaataatcaacattagtgaggacatttttgctggtttcaactgtactctccgtggtggtaatgttacacaccacgagtatatccaggttggtaaaggtagagatgtgggcctcaaccag

SEQ ID NO: 304541 - DNA, 277 bp, Zea mays
gcccggtgacaagaccattgggggtggtgatgatgctttcaacaccttcttcagtgagactggtgctgggaagcacgtccctcgtgctgtttttgttgaccttgaaccaactgtcatcgatgaggtgaggactggcacctaccgccagctcttccaccctgagcagcttatcagtggcaaggaggatgcagccaacaacttcgcccgtggtcactacaccattggcaaggagattgttgacctgtgccttgatcgcatcaggaagcttgccgacaac

SEQ ID NO: 304542 - DNA, 123 bp, Zea mays
gtcactgatcagaagatatcatcgataagaggaattagtcctctgttggatcagataacacagttaggagcgccgattcttatagttgcggaggctgtaagtggcgaggcgctgacaacatta

SEQ ID NO: 304543 - DNA, 262 bp, Zea mays
gcaatgggtgccattatcgcggactattttcactgcgacctctttttcctggatcaagtgagccagatgaactttacaaaatctgtagcattattggcactccaaatcagcgtacttggcctgaaacggggggaaccttgggcccaagggggggtctagcatctatgggttttcagttccctcagtgtgaaggtgtacatctttcggaagtggttcctttagcaagcaaagatgcagtgaatcttatctcgtggctttgctc

SEQ ID NO: 304544 - DNA, 263 bp, Zea mays
agttgctgcagatttacttactgaagctggtagtgaccgtgtcattgtatgtgatattcattctacgcaagcgttggggtacttcgatattcctgtggatcatatatatggacagcctgtgatctctatgcggggaattttgaagacggctgtggttgtgcaagacgatatctgaagatcttgtggttgtttctcctgatgtgggtggcgttgttagagcacgtgcattcgctaagaaattattgaatgcacgtttagctatt

SEQ ID NO: 304545 - DNA, 263 bp, Zea mays
  unsure (1)..(263): unsure at all n locations
caactctatcatccgaggtgtctccacggtcatggtctcctactccagctggaacggagtgnagatgcacgcgaaccatttcctggtcacggattttctcaagaacaagctcaagtttaggggtcttgttggggtcgggaatttttttcccggcgtctggtgagggcattgatcggatcactactcctcctcacgccaactactcttactcaattgaggctggtgttggtgctggaattgacatgatcatggttccattcaga

SEQ ID NO: 304546 - DNA, 266 bp, Zea mays
cccacgcgtccgaaacgcggctgctagcacggcgcccctctcccactccgactccccagccgccgccagcccgcacacccctccctcgcgcgctcagggtttcggaatggaagccgaggcgtcgggcccccaaaaggttaaggagggaagcgcggtcgtagctgcatgggatgacgccgccgcggtgggggatctccgccgtcatcccgggatggttctccgagatcagccccatgtggcccggtgaggcgcactctttgaaggtg

SEQ ID NO: 304547 - DNA, 261 bp, Zea mays
catcctcgccttcgcggccagggacagcgtcgtgctcaccggcggcctcggctacaaggtgccgtccggacgccgtgacggccggatatccaatgccacgcaggccctgaacgagctgcccccggacacccctttttgccttttgcccgaggtttgtcacccaactcgtcgacaacttcgcctccaagaacctcagcctcgaggacatggttgtcctctccggcgcacacaccatcggagtctcgcactgcagcagcttcg

SEQ ID NO: 304548 - DNA, 265 bp, Zea mays
cttcccgtacaccgagtcgcacaagaggctgacctcccttcacccggagattgaggagctcctgtacagccaaaccgagaacacggagcacaagttcgttctgaacgacaggaacaagccaatcattcttgtttgctacctccaaatcgggggcgcttgttctcgaccgtgtgaagaacttgactgggctggtggagctgtacggccggaacaagcggctgcaggagctggtgaacctcgtggtcgtctgcggcgaccatggcaa

SEQ ID NO: 304549 - DNA, 256 bp, Zea mays
ccctgacatcgagaccggctgcccgaccccggtccggcgatccctctgcacccctttctttgcgctgccagccccaatctctcgcatccctgtcaaccatggcggcgtcacaggcggaggccggcccggggctcggtcggccggggcggctgtcccagaaggagcaggacatacagatgatgctcgcggccgacgtccacgtcggcaccaagaactgcgatttccagatggagcggtatgtctttaagcgtcgcac

SEQ ID NO: 304550 - DNA, 256 bp, Zea mays
ctctgtctgtcgctctcgctctcagacgactgggccgccgccgcttggtgctgaggctttcgttggtctcttcggcggcgacgagcacccaccagcagttctgtagaaatggctgatggatcggcaaagtggaacccaatttggcgcgtttgttcttgtctgcgacaatggcaccggaatggtcaaggctggttttgctggggacgatgcaccaagggcggttttccctagcattgttggccgtcctcgccacact

SEQ ID NO: 304551 - DNA, 252 bp, Zea mays
tccttttctagtagtagaaaatacagtcgcatctcgcctccagcagggtgagttcgcctcggcagggtgtggcataccatggagagctcgtcgccgtcagtgccgttcccgctgctgcacggggcccgtccccgggggtgggcggggcccgcacttgccgcgcatgcacgatcccctaccgtttcccctccgataacccgcgcaaggccacccctgtcgagatccaatggattgacgtctttctcaactctg

SEQ ID NO: 304552 - DNA, 248 bp, Zea mays
catcttttaagatttgccaccaactattctcatagccgtcgtgttggcatcgcaatgggaataccaaggggttctgcaaaaaatgacgctgagcttctggaccttgagacaaaacattcccaagggggttcccccttaaattggtcgtatactatggttgtcacatcattttgaggaagataactttcctcatgtgcagcaggctgaaaacatggcaataaatattgctgatttacttggcaagtcgc

SEQ ID NO: 304553 - DNA, 257 bp, Zea mays
gactagttctagatcgcgagcgagccgctcggatctagactgttttcctttcggctaccatgtcgaatgcgaccgaatttgctgaatggatatgcagcctgcacaagcagcccctgtgcaattgggttcttcggattgggtttgaagttctgaatttcaggcaccacaccattgcagcactatatgtttccaataggtggttctggtctttaccttgtagtagatgaaaatggccagtttagagaagataactttgc

SEQ ID NO: 304554 - DNA, 334 bp, Zea mays
cccacgcgtccgcccacgcgtccgcgtgtatcggctgtcagaacaaccagagtcatatggaaacagttctgtctacacggcaacagattgaatctcgcaatccattagcatttgctcctaaagtcattcatacatctgagcctggtatggacttaggggacttttccaataaaactcctgcttcagctcgtcacaaaaggggatgcaattgcaagaagtcgtcgtgtctaaaaaatactgtgaatgttttcagggcggcgtgggatgctccgtaagttgcagatgcgagggctgtaagaatgcttttggaaaacgggagggggcttctgtgtta

SEQ ID NO: 304555 - DNA, 330 bp, Zea mays
attggcaatgacatgtcaaacataccaccagcaacaggtatagtgtctatcctcaaagcaaaaaagatccagcatgttcgcctgcttgattcagaccatcaaatgttgaatgcccttgcaaatactggaatagaagtgatggttggggttccaaatgatcagctacttcgtgtgggccaatctcgttccacagctgctgattggattaataagaatgtcggtgcttacattccggcgactaacatcacatatattgctgtgggtaatgaggtccttactaccattcccaatgcagcacttgtgctcgtacctgcactgcaattcctccag

SEQ ID NO: 304556 - DNA, 327 bp, Zea mays
tgagcacacaaaccgagaggtacttctatggctaaaacaatgggactccattgtttttggatcccatattcgggctacaggtgatgatgtcttgtctgccttacgtcgacactcttcaaccatccaaaagaatgcaagtaacagaaatttcttttccaagagtaaggggggtcctgttgcaagtcaaactggcacacctctgaatgcacaaagcagcaatccagaaggtttaggtggctccttcagcaaaaagtcatcagttgataatgcaccagaacaaaaggtgttgctattatgcggtccacctgggctcggaaagaccacact

SEQ ID NO: 304557 - DNA, 327 bp, Zea mays
cattcaagaaggagatgatgaagagttttagtatgagtgacctggggctgctgacttactatctaggcatccaagtaacacaaaacgagggggtgatctcactgtgtcagagttcttatacactaaaaatcctagagcagacaggtatgaaagggtgtaatccctgtcatgtgcccatggaaaatcggttgaagctgagcaaaaatgacaagacaccttcagtcgacaagacaaagtatagaagtgtaattggaagtctgagatatctggtcaacactagaccagatattgcctactcggttgggatagttagcaggtacatggagg

SEQ ID NO: 304558 - DNA, 105 bp, Zea mays
cgtgacgcgtgtggaaaagcaagaatatgctttttgtcatctcgaagccagatgtgttcaagagcccaaactcggacacctatgtcatattcggcgaggcgaaga

SEQ ID NO: 304559 - DNA, 323 bp, Zea mays
cccacgcgtccgcccacgcgtccgcccacgcgtccggtgttcagcaaacactaaaatggggaaactgcgtgacattatcaaagcactagagaatgaagtaaaaaaggagaaagcgctgtgtgaagaattaacaacacagttacagataaaggttgaagcagctgtcgatgcagttaaagaatcattggaggcacagctgtgttcagcaaatactgaagcagggaagcttagagatgttgtcaatgaggtagaaaaagagaaggcgttgcatgaagagcttgcagcaaacatagaagtgaaaacaagagccgcaagaactgctg

SEQ ID NO: 304560 - DNA, 330 bp, Zea mays
cacaagtctaagaagggcggcggagtcccgcagccgcacctctcggcggaggcgcggcgcaactctacgcgcccgtgttcaagacctgcgccgctctgctctccaggctgatgaagcacaagcacagctgggtgttcaacaagcccgtagatgcgagcgcgcttggcctgcacgactaccatacaatcatcaccaaacccatggacctcggcacagtcaagtcaaagctaggtgccgggcagtacaagtcaccacgggaatttgcaggtgatgtgcgtctgacgttccagaacgccatgacgtacaaccccaagggccaggacgtgcact

SEQ ID NO: 304561 - DNA, 322 bp, Zea mays
gtaaagaaaccacctcacctcaagaacagctagctgcaaggataaaaaaaaacaaagctgctgatctatatataataattaggctttgcagtgtcttgttttggagagcaaaggatcatcgtcaagtgatggccaagtcaggggcgctagaacttgctcggagcaccggagggtcgcttagcaaggaccaagtcaaatccgccgttgatcagtatgtcaaataccacgacctccatggaggcaaacaagaatcaaggaagtcaaattacaccgatttggcaaacaagtactatgatcttgtcactggcttttacgaatatgg

SEQ ID NO: 304562 - DNA, 214 bp, Zea mays
gcaagggctgctgctgagagaggtgctctttctgatgccgtgtcaatccttgaagactgccggaggatactttcagaaactttttcaagcaggagcggggaccggctgtgcatggcccttgatgcagagctaagggagatgcaagagaggatggctaaccggcaacgctacgaggcttcagggaaggcatacctgctgtctggcctcagctcac

SEQ ID NO: 304563 - DNA, 170 bp, Zea mays
ctcaggaaggcgcattccagtgggttaccatcaattatcttttgggaaaattgggaaagccatactcaaacacagttggagttgttgatttaggaggtggctcagtccaaatggcttatgctatctcagagaaggatgcagcaaaggcacctttagtagcagatggtgaa

SEQ ID NO: 304564 - DNA, 167 bp, Zea mays
cccacgcgtccgagaggatacagaatgccgggacagaggtggtggaggcaaaggctggtgctgggtctgctaccctgtccatggcctacgctgctgccagattcgtcgagtcgtctctccgcgccctggccggtgaccctgatgtttacgagtgcacatttatccag

SEQ ID NO: 304565 - DNA, 304 bp, Zea mays
aatcccgtctcgttgctccggtccgctgcgcatcctcaggaatggaacttggcgccaccactgccctctaccctctgcaccgctgcaaaaccatttacctggtcaggcatgcccagggcattcacaatgtcgcgggggagaaggacttcggcgcgtacatgtcacatgaactgttcgatgctcagctcactcctttgggttggaaccaagtcgatggtctgcgtgacatgtgaagaaaagattgaattagttatttcttcccctttactgaggactatgcaaactgcagttagtgtctttggtg

SEQ ID NO: 304566 - DNA, 303 bp, Zea mays
cccacgcgtccgaccacgcgtccgcggacggtgggtgtaccgctgggccttggcacatctgcaagtacacgcgtctccaatgagctcggcgcagggcagcctgaagcagcaaggctagcagcgcgagttgtggtcatcatgaccttgcgtggaggggtggtgttggcaaccatcatgattctcctgcgcaacatctggggatacgcatacagcagcgaggaggatgtggtggcatacattgccagaatgcttcccatccttgctgtttccttcttcgtcgacggccttaacggttctctttca

SEQ ID NO: 304567 - DNA, 298 bp, Zea mays
cccgcccaccagggtcttcgcccagcgctacgccgccaaccgcaccgccttcttcgaggacttcgccgccgcgatgcagaggctcggcgccgtcggcgtcaagacggggcgccagggcgtcgtcaggcgccgctgcgacgcgctcgactgagtgtcgcgatgcttgttgtgccattgggtcggtcgatcgttgtaaggcttcgaattcgattacgggatatgagaggctcttctttctctgtacttggaaaaaaaaaagaagaagagagaaagggaaaaaaaaaagggcggccgctct

SEQ ID NO: 304568 - DNA, 317 bp, Zea mays
gtcattttgttccaagatatgcttgacgtggtcacaagggatataatggaggaacaggaccagctcggcacactgttggaatctgcacatggtgcaaatagtagaaaacatgaaggaattacaccgctagatcagcaagaccagttgtttgctaaagctattaagttccctgtggatgaatcaattgcatggactgaaaagataaagaggcttcatcttctgttaactgtgaaggagtctgctatggatgttcctactaatcttgatgctaggcggcggatatcattctttgcaaattctttatttatggatatgcc

SEQ ID NO: 304569 - DNA, 307 bp, Zea mays
cccacgcgtccgcattttttctgaaagcttatgctttggctgattcgagtcttgatccttctacctcagcaacagttgtatcacttctagaagatgcattgcggtgtccctcagatagacttcggaagggtcaggctctaaacaacctcggaagtgtttatgtggattgtgggaagctagacctggcagctgaatgctacattaatgcactaaagatcggtcacaccagagcgcatcaaggccttgcaagggttcatttcctacggaacaacagagctggtgcatacgacgaaatgaccaagctgat

SEQ ID NO: 304570 - DNA, 310 bp, Zea mays
ggttcaggaagctgtgggtctcaagggatgaacggcatgaacgagagcaagctggtggatctgctcaacggctccgagtacgtgccgacctacgaggacaaggacggggactggatgctcgtcggcgatgtgccgtgggagtgagcactgcatgcatgcgcttcttcctgcactatactccttattatattattgcctaatcggaaaataataataatttccatttcattttcaggatgttcgtcgaatcatgcaagcgccttcggatcatgaaaggatcagaagccattggcctggcgccaagggccat

SEQ ID NO: 304571 - DNA, 306 bp, Zea mays
aaaaatctggttcagcaggaaagcaattgaaagaagcgcaaagtataaataaatctctttctgctttggctgatgttattggtgctttatcttctgatggacaacatataccttatcggaaccataagttaacaatgcttatgagtgattctctcggaggcaatgcgaagaccttgatgtttgtgaatgtttcaccagctgagtctaacttggaggagacttacaactcgctaatgtatgcttcacgggttcgttgcattgttaatgatacgagcaagcatgttgccccaaaagaaatcatgaggt

SEQ ID NO: 304572 - DNA, 303 bp, Zea mays
ggacgcgtggcagcggaggcagcgtgcctgctcctcaggcgtctgctcagcacgctacccatgaagtatttggccagcgtgctgagcggcggaactcagcgtgcctgctcctcaggcgtctgctcaggcttgggccgccatggtgaccgagatgcagaagggcgctctttctacgcgtctgggtataccgatcatctacggtatcgatgcagtgcaagggcacaacaacgtctacaaagctactattttccctcacaacgtcgggcttggagctaccagggaccctgacctcgttaagagaat

SEQ ID NO: 304573 - DNA, 239 bp, Zea mays
gtgccgccgaggactccctcagcaggactgagatcaatgtagatgtgttgaaagaggctagaatgttccatttcaattcagaagtcctgctaaacccctcaatgcatgacacgctcttcagagccattgagctgtccaagaaatttggaagcaaagttttcttcgatctcaatttgccattgccattgtggacttccaaggataaaacaaaggaggtgataaacagggcgtggaaagag

SEQ ID NO: 304574 - DNA, 225 bp, Zea mays
ggctggttttgctggcgatgatgcaccaagggcggttttccctagcattgttggccgtcctcgccacactggtgtcatggtagcgatgggacagaaggacgcatatgttggcgatgaggctcctttgaaacccaaggccaacagggagaagatgacccaaattatgtttgagactttcaatgttcctgccatgtatgttgcaatccaagcggtgctctcactcta

SEQ ID NO: 304575 - DNA, 300 bp, Zea mays
  unsure (1)..(300): unsure at all n locations
gaaatttctagaccttgacattctaatggagaatgtatcacgagaaacaccactttatgtcatcaatgaaggaagtgaaccccaatatttcactaggttcttcagttgggattcagcaaaatcaataatgcatggtaactcatttgaaaggaggttatctttagtgaaggatggagtanaaccaagagcagataaacccaaaagaaggtcaacaacatcaacacacactggaaggtcgagtgtacctgataaatcccaacgttccagaagcatgtcattcagtcctgatcgtataagagt

SEQ ID NO: 304576 - DNA, 291 bp, Zea mays
ctggcatcatatcaccatgcaactccaagaacaagtttcagcttgttcaactggacagtgctgttgggtatgtcggcactagattcacactgcctgtgcccaagacaaacctcacaggatgcaggaatgcctgcatgggtaactgctcatgcattgctgtattcttcgaccagacttcaggaaattgcttccttttcgaccagataggaagcttgccacagagagatggaggggtccttgtgtatgttggtttctgcatttaccggaggaggagtcaccatacaccctcgc

SEQ ID NO: 304577 - DNA, 297 bp, Zea mays
ctcgtcagacgcttcagttgcatgtacatgcaaaaagtttgaaaattctgggctgttatgctgccatatattaaaagtatatgagctgaggaacattaaagagattcccccacagtactttctgaagaggtggaggaaagacgcgaagttggtgatggatgaaactgatgggtttaactttgacacaaaatcttccattccaggacgttatgcagctctctgccgtctgttctacagaattgctgctaaggctgcagagaatgaagagacatttgcgctgatggcgagccagtcaga

SEQ ID NO: 304578 - DNA, 281 bp, Zea mays
acgatccacagaacaagccaatcatcttcaccatggctcatcatcgacgtatgaagaacttgactagactggtggagatgtacagccggaacaagcagctgcaggagctggtaaacctcatagtcgtctacagcgaccataacaacccttccaaggacaaggaggagcaggccgagttcaagaagatgtttgaactcatcgaacagtacaacctgaaagggcacatccactggatctccacccaaatgaaacgcgtccacaacggcgagctgtaccgctac

SEQ ID NO: 304579 - DNA, 358 bp, Zea mays
ttcacgcgtccgcacacgcgtccgcggaccgggcgcccttttttttttagcttttgcgataatagggtgcttagcttagctgtagagtctagaaatagtactcaatttttccacaactgaatgtaatataacaccatcagatgcagcgaagaaacaagaaaaaagctggtggcagtaattccaaaaatcagaattattcttggcttgtagcaccgtttgtcgcctcctccatgggatctgcttctgctgcatctcctttcttgcctttcttcttcttcccaccagccttcttctttgatttcgtccccaaagcaagccatgcctttatctctgcattgtcttcaatggatttggtggg

SEQ ID NO: 304580 - DNA, 343 bp, Zea mays
ctgagatatatggtgagttccgctctggaaagactcagttgtgtcacaccctttgtgttacatgtcagcttccactggaccagggtggtggtgaaggaaaggctctatatattgacgcagagggtacattcagaccacaaaggctcttgcagattgctgacaggtttggactgaatggtgctgatgtgttagagaatgtggcttatgccagagcttataatacggatcatcaatctagacttctgctggaacagcttccatgatgatagagaccaggtttgctcttatggttgtagacagtgccacagctctgtacagaactgatttctcaggaagaggggaa

SEQ ID NO: 304581 - DNA, 343 bp, Zea mays
caccaatgctggtcttcagcaaatcaatccgcatggtaaactgaagcatatttctctcatgcgcaccaggaattcttagtaacatctttccgccgggtgaatgatctcggaatcctgttgatggccgacaggtgttcaaatcttgaaagtgtatgtcttggtggcttctcccgtgttacagacactggttttagggcaatcattcactcctgttctggtcttcataagcttcgggtttcccatggaagccatctaactgatttggttttccatgacattatagccacttctctttgcctaacccatgtgagtctgaggtggtgcaaactcctaactaatgttg

SEQ ID NO: 304582 - DNA, 145 bp, Zea mays
cccacgcgtccggagatattgagaaaataattgcttcaattcctagagaacggcaaacactgttattttctgctactgttccagaagaggtccgccaaatttctcatgtggcaatgaagaaagattataggttcattaacactgt

SEQ ID NO: 304583 - DNA, 336 bp, Zea mays
cagacagggtgccgccccatggtgcacacgtacacgcccatcgtgcagggctattgtcgtcagggccagatcgaggaggctaccaacctgattggcttcatggaggaagccggttgtcctcccaatgctgtcacttacaatgttctgataagggcgctgtgtgacgatgccaggttcgctgaggtcgagcaggtgttagcagagattgaaactaagggccacgagctcagtacggttacctataatatatacatggatgctcttggcaagaaaggcatggctaaggaagcactcaagcagtttgaggccttgcaatgtaaagggctgcatcccaca

SEQ ID NO: 304584 - DNA, 337 bp, Zea mays
gcattcagtgattcagccgccagtcccgctcgtctctgccaagtcccgcgcgctcgagcatcgatcagccgctggcgccgcgacgagcgacgacgccgcgccagtcgcgcgcagatggccgccgtctcgctcctgcgagccgcggcgctcgggctggttgtcctcgcgtcggcgctgccgtcggctcggccgtggagcaaggagggtcacgtgctcacatgccaaatcgcgcagggtctgctggagcctgacgccgcgcacgccgtgcggaacctgctcccggacgacgccggcggcgacctgtcggcgctgtgcgtgtggccggaccaggtgaggc

SEQ ID NO: 304585 - DNA, 330 bp, Zea mays
aaactgggtagcttcctgccttacatgccaacaagcaaagccagaccgatccaagtaccctggtcttcttcaacctctgcccataccaaagacagcttggcataccatttcaatggacttcattgagggattaccacgttctcagcgctatgattgcattttggtggtggtggatttgtttaccaaatatgcacattttgttaccttatcccaccccttctcagccctcacagttgctcagtccttcttcaaacacatatacaaattacatggtctgccatctgcgattgtgtcagatcgtgataaaatcttcacaagccatttttggaa

SEQ ID NO: 304586 - DNA, 334 bp, Zea mays
ccttgattgtgtttccatgccttctactggcgtacacagggcaggccgcctacataatttccaacaaaacacatgtggctgacgccttctaccgatcaattccagctgccatatactggccggcctttatcatagcaactgctgcagcgattgttgccagtcaagccaccatatccgcaacctactcgatcataaagcaggctcttgcgctgggttgcttcccccgcgtgaagatcgtccacacctcgaagaaattccttggacagatctacatccctgacatcaactggatccttctggttctctgcattgctgtgactgctggattcaagaa

SEQ ID NO: 304587 - DNA, 335 bp, Zea mays
cccacgcgtccgcccacgcgtccgcccacgcgtccgacaaaatcaaaccaatgaatggtatggagcatatcctgttgctgcccgtaatcttcgggaagatgagctaggaggagtgatttttggctgcaaacacaacacaatcggtgaatgcctctctaaacagctgtttggtttgccttcaagccatttctcatatgtgaagaatgtcaaacctggcatgcctctatttctgttcaattatagcgatcgaaaaatgcatggaatttatgaggctgcaagtgctggcaagcttaacattgaccactttgcttggagtgatggtggtagaataaaga

SEQ ID NO: 304588 - DNA, 211 bp, Zea mays
gtaattcttgtccactttcgagaagtcgaggtccacgactctgggcggcgcgtgctctgggttccttatcgggtcgtacagcggggacgccgcgtcggcgaactccggcggcacccgcatcccctccggcacgtcccagctccagaacggcacggcgaacccggggtcgcccaggagcctcgccgcgacgcgctcgaagaagtagaggtag

SEQ ID NO: 304589 - DNA, 344 bp, Zea mays
cactaggtggagcgtgtctccgtggtcttcttcaccgaccacgaggctgctgagaccctaggggggctcgacctggacatcatcgcagtgctccccaccgtcagtgccatcgtcggtcgaggttacagaatgtctctcgagtgtgctagagatgctttgctgcaaaagaccatggacaacaaagaaaatacaagtgaattattttcccgatctcgtgataagctcagagttgatctcatgaatatttctatgactactcttagttgaaaaatactttcccaagacaaggagtactttactaaacttgtgattgatgttgtcttgaggcttaagggtagcaccca

SEQ ID NO: 304590 - DNA, 313 bp, Zea mays
cccacgcgtccggtcctcgtcctcgagtggctcccgctcgacctcgccgccgttgtgcgtgacgcgaggaggcgcgcgggcgggggcgagggaggggaaggcatccccgcctcgcaactcaaacggtggatgctgcaggtgcttgagggggtcgccgagtgccaccgcgccggcgtcgtgcaccgtgacctgaagcctgagaacctgctcatctccgaagacggggtgctcaaagtcgccgattttggtcaggctaggatacttcagcagtcagcacctacatttcaagaaatgtacccacacgagcaaagtt

SEQ ID NO: 304591 - DNA, 306 bp, Zea mays
aaaaataggaagaagggaggtgcagggaaggtttctgtcacaaaaaggtcgaaaagagagggtgaagaacaaaagaaggcatcaccctccaaggataaagattgtgctgaaactaatgggaaaaggaagatgttgactggggataatgccctgatgtgccaccagtgccagaggaatgataaagggagggtggtctggtgtaattcatgcagaaataagcgcttctgtgtgccatgcattgaaagatggtatcctaacttgtcagaagacgaatttgctgcaaaatgcccatattgtcgcaagaac

SEQ ID NO: 304592 - DNA, 307 bp, Zea mays
cccacgcgtccgcccacgcgtccggtttatcagaaaaggagtgcaagagctggaagggacaaggggattggggagagcctggggagaaacctattccaagaaaaggattcctgcactgttcgtcatcaacatctccagtggtgaagttcgacctgtcaagcaaatacctagatcattaagtgttggccaagtgatttgggctccatcatcttcatatagcttggtttttgttgcatggtcatctgacaatgggttccaagggacaccaaggaagcttggtattaaatactgctacaacagaccatgt

SEQ ID NO: 304593 - DNA, 130 bp, Zea mays
ctgaccgtgggatcgtcatcctacctcaagaaagttggagtacaaccctgtataagattgccttagtacccatttctggttttgatggcgacaacatgattgagaggtccaccaaccttgactggtacaa

SEQ ID NO: 304594 - DNA, 336 bp, Zea mays
atccgcatcaccaagcgcttctccgtgcactacgacgtcgaggcacgcaacgcgctgctccgcggagactgctcgcttcccggaggagccgtccagctccgtgcctcgcatgatgtcaaggcacaacaaggagaagtttcggtgatcactagtttgggtgatccattgtatagaatggagttatcatctttggttccttacagtggtttgccaagggcaacattccactttcctattggtcaagtttcagtggaagagaagagaaatgaagatgatgagaaggtgctgtctgtatatgggattggaaaatctgatttcttggacggtgttcttact

SEQ ID NO: 304595 - DNA, 327 bp, Zea mays
  unsure (1)..(327): unsure at all n locations
cccacgcgtccgcccacgcgtccgacagccaggatgagcttctacaacgcaagcaaaggcgccgtgatacgtttctacgagacgctgagggctgagctggggtcccacgtgcacgtcaccatcctcacgcccggctacgtcgtctccaacctcaccaagggcaagggcctccagaaggacggccatgtcggcatcgacgaggaggcccgcgacatcaacgtggggccgatgccggtgggcaagacggagtcgctggccgaggtggtggtggccagcgtgcgccgtcgggactactacgtcacgtggcncggctggtactggcccttc

SEQ ID NO: 304596 - DNA, 375 bp, Zea mays
tacggccggaatcacgggtcgaacacgcgtccgggaccgtgggcagaaatgatactcctagagactacatgtgcaacttagggcctgatggtaggcgacgtgatgctgatgacaggcctgaattgtctagaggaacagttgaatttgttgctacgaaggaatttctggttcgtgatccaatgcctgctgtatacttcttccttattgatgtctctatgaatgctatacaaactggtgcaactgctgcagcttgcagtgctatttctcaggctatttcagatctgccgcagacggtggcgtcccgggtgtctccggagcgtcgcagggcttttgtttgggagtggatgcagctgccagagttgagatggagcaggg

SEQ ID NO: 304597 - DNA, 365 bp, Zea mays
  unsure (1)..(365): unsure at all n locations
ccgggtcgaccacgcgccgcttggtgtttcctgttaacgtgcatcttggccagcacttcactaaaccaccagcacgatattctgagggtgcattgattanaaagctagaagaacttggaattggaaggccatctacttatgcatctataatgaaagtgttactggatcggaagtacgtgacagcaaaaagtcgagttctacaccctgagttccgtggtcgaatggtctcggcattccttttgcaccatttctctgaggtttctgattacaactttacagctaacatggagacagaggtttttaaatatttctcagcctatgttttctgtgcgcttctttgttttcagtttatgccatagttttag

SEQ ID NO: 304598 - DNA, 168 bp, Zea mays
atttctggatctagcagtcaactgtgcatctgttttatgttgtcgggtttcaccaaaacaaaaggcactggtcaccagattggttaaaattaagaccagtaaaactaccttagctaatggtgaaggagccaatgatgttggtatgctaccagacgctgacattggggt

SEQ ID NO: 304599 - DNA, 338 bp, Zea mays
cccacgcgtccgttcaagatttggaggcagggaaggacggggtaccgctcgtcgatgctggcatgagggagctgtgggcgacggggtggctgcatgaccggatacgcgtggtggtggcaagcttcttcgtcaaggtcctccagcttccatggcgatggggtatgaagtacttttgggacacgttactggatgctgatcttgagagcgatgcgctgggctggcagtacatcactggctctcttcctgatggccgggagcttgaccgcatcgacaacccccagtttgaaggctacaagttcgacccgcatggggagtacgtccggcggtggattcctgag

SEQ ID NO: 304600 - DNA, 276 bp, Zea mays
ccaccccgggcaaaggaagagcacccgaggtggggaagcagagtagtcatcacgccttttcggggcaggggagtatgactgtggcctgaggagattaccaaagaagagtatgctgctttctacaagagcttgaccaacgactgggaggagcatcttgccgtgaagcacttctctgttgagggccagcttgagttcaaggctgtactctttgtgccaaagcgggcccccttcgacctctttgacaccaggaagaagcagaacaacatcaagctctat

SEQ ID NO: 304601 - DNA, 295 bp, Zea mays
aagttctgtgagataaagttagcacttagagaatggtgtgaaagtgccaatatcactatagcttctatggccgaagcaatgcagaaaaaatatgataagtattggaaaaagtccaacatagctcttgcagtggcttgctttcttgtatctaggatcaagaaaaaattggtagaatatttcatgttgaagatttataaggacagtgctgtcgcagaactcactcgctttatggatgttgtgaaccaattattccaatcatatttgagcagtacacgtgatgtttctattactcaaa

SEQ ID NO: 304602 - DNA, 278 bp, Zea mays
gttctagatcgcgagcagccgccctttttttttttttttcttcatatatgggctgctatgggctcaatctacaaggtatgccgtggcccaattcatcaagctttgcatagatcttatctgaaagaggatgtgaatcgtccccaacatagaacttgtggaccttatcatcaagctcaacccagctagaggcagcgaccttctcaatcccctttgccttcatttccaacctaagctttgcagcatcttcccatcttccactgttcgagtaaatgttagaa

SEQ ID NO: 304603 - DNA, 328 bp, Zea mays
tagagaatggctacaaaagcgactaacatctcttctgctgttggtacttcgatgactgccggttctgatgaggttgaaacaaaaaggtcttcaactgggaaaaagattaagaaagaaaagaatgatcttgcctctgagctcagagatctaggctggtcagatgcagaccttcgtgatgaaacaaaggctgcccctatgagtctggagggagagttgacacagattcttagagaggtggcccctaaaccattggagggcaagagaacaggtggtatcgataaatctcaggttaatgctctgaagaggcaagctttactgctaaagcggg

SEQ ID NO: 304604 - DNA, 308 bp, Zea mays
gcctcgtcatcaagtcgtgggcgccgcaagcggacgtgctcagcaaccccgctgttggcgcgtttgtcacccactgcgggtggaactcgtcgcttgacgccatcacagcgggtgtgccgatgctgtgctggccacagggcgcagagcagaagatcaacaaggtacttatgaccgatgccatgggcatcgggctggagctggatgggtacaacacaggtttcatcacggctgaggagatagagacgcaggtgaagcttctgctggagtccgatgaggagagtggattatgacacgggcggcagacgtga

SEQ ID NO: 304605 - DNA, 314 bp, Zea mays
atgttgacatggaaaatcctattggaagttccaccagtcttagggaacatggcctcatgtttactgttgataccagtgacattaagatattgaagtttgctgattacataaggaaagaggaagtatatggattgcctggatctgaactgactgatcaccaaggatcgtcattgaacgcaaatgagacagagccaggtgctggacccttggagctcattgttgaacttggagttgttcgaatatctttgattgatcataagccaagagagcttttatacttgcatctgcagaacggtttcgtctcatacttgact

SEQ ID NO: 304606 - DNA, 188 bp, Zea mays
  unsure (1)..(188): unsure at all n locations
cataagacatataactcctataagcatttctagtttgtctcctatcatgatacaaaaacgcatggttctttttagcactagtagtcatagggaccttcaatatctccttaacgtgtttnagagccttatggcttattaagttcttagcatccatcttgaagacaagtccatccttaattgaggggtgt

SEQ ID NO: 304607 - DNA, 313 bp, Zea mays
gaccggcgaagtgcacgacgtgattctctttttcgggataattgacatccttcaggattacagcgtcaaaaagcggctcgagcatagttacaagtcattgcagacagaccccaactcgatctctgccgtggaacccaagctctactcgaggaggtttcaagagttcatcggcagaattttcgtggaagatggctaacacgcattgggtacagattaaccggtggagcagcagctcatcggcggctaggtaactaaccgtgaagcctcgggtcagcggtgaaggggatctgagttcgaagcaaacttgccccga

SEQ ID NO: 304608 - DNA, 189 bp, Zea mays
ctcgagccgcgatcggcaagatgatcaccggcacggacttctaccacgtcatgacggccatagcgccgttgtacgttgccatgatcctggcgtacggatccgtcacgaggtggcgcatcttcacgccggaccagtgctcggggatcaaccgcttcgtggcgctcttcgccgtgccgctgctgtccttcc

SEQ ID NO: 304609 - DNA, 304 bp, Zea mays
aattaccatatgattctgtaaacacctctagctttaaattattgcggtcacccctgcaggacttgctcgagatggatgcacatcagatatggcagctgtactctttgcaagtgtcaaatcagcttgggattctgttgtccaactgcataataaggaagtcaagggagctactgtttgggctcgtcaacttggcggagagggctcaaagatcagaaaatggagagcgattgtcaggaacctgccattcaagagaaggagatcgtggatatgtttagttcagcagggtttgtctgggatgtgacaa

SEQ ID NO: 304610 - DNA, 270 bp, Zea mays
gcaaaatgccataaacactgagatgtatcatgagattatgcatgcacttaaaactgacagcaaggatgtctcaatcatcactgttttaccaggcaatagtgactattacagtagtgagcatgatctgactaacttcactaatattccccctagtggagtagcggagaacagctaggcataatgccgttttactaagggaatttgtggactgttttatagattttcctaagcctctgattgcagtggtcaatggtccagctataggcatct

SEQ ID NO: 304611 - DNA, 272 bp, Zea mays
aagtgccaatccactcgtactcccaaatgatgatctacccttactcatatgcttacaaactcggtgagaacaatgctgtattgaatgccctggctatagctactgtgaaagaaattgcctcactgcacggcaccaagtacacatatggcccgggagctacaacaatctatcctactgctgggggctctgacgactgagcttatgacaaaggaatcagatattccttccactataaactaagaaatacaagaccatatggctttctccatcca

SEQ ID NO: 304612 - DNA, 256 bp, Zea mays
cattaaccctcgttcctgtcgcgcgccacgacctccacttcacatctcccccgacggcggcgcggtcaattgaacaatagcggactccaaggccacctcggcgatcaccctccgcacccgcaagttcatgaccaaccgcctcctggcccgcaagcacttcgtacttgaggtgatccaccacggccgcgccaacgtctccaaggcagagttgaaggcgaggcttgccaaggcgtacgaagtgaaggacccaaacacc

SEQ ID NO: 304613 - DNA, 285 bp, Zea mays
gactcgactcctgatccttgcctttatgggagctgctatagctgtccccgttgatgatgatgacaagattgttgggggctacacctgtgaggagaattctgtccccgaccaggtgtccttgaattctggctcccacttctaaggtggctccctcatcagcgaccagtgggtggtgtcagcaggtcactgctacaagccccacatccaggtgagactgggagagcacaatatcgaagtcctggaggggaatgagcagttcatcaatgcagccaagatcatccgcca

SEQ ID NO: 304614 - DNA, 297 bp, Zea mays
cggctcgagcggctcgacgtacgacccctccatcctcgccaccgcctccgtcgacaagtccatacgcgtctaggacgtgcgcgcgccgcgggcgcccatcgcgcagatcgctggacacggctacgccgttaagcgggtccgtttctcgccgcaccgccagggcatgctcatgtcatgctcctacgacatgactgtctgcatgtgggactaccgcgccgaggatgctctgctcgccaggtacaatcaccacacggagttcgttgccggcatcgacatgagcgtcctcgtcgatggctt

SEQ ID NO: 304615 - DNA, 99 bp, Zea mays
cccagcagggcgcggcgctgcagaactacaacaacgagctggtcaagtgcatagaggagctgtgccagatccgggatgagctgtgccggcagatccagg

SEQ ID NO: 304616 - DNA, 286 bp, Zea mays
tagggttttactgctctccgaccccgagctccgaaggccgcagcatcaggcgaggcccccctcgcgtgtgaccgagatggcgctgccgaatcaggggaccgttgattaccccagcttcaagctcgtcatcgtcggcgatggtggaactggtaaaactacatttgtgaagaggcatctcactggagagtttgagaagaaatatgaaccaaccattggtgtggaagttcatccgttggatttcaccactaactgtggtaagatcaggttctactgctgggataccgca

SEQ ID NO: 304617 - DNA, 266 bp, Zea mays
ggctttgctagattcccctgtgcctcttacaacgtcttcactgcaaacaagtgtttaccttgtccaagtggcagctgcccacagatgggtcactatgctgatagatatcctgggaaaacaaatgatgtgggccagaaattttatctagacactggtgatgccagtaattttgcacgttggaggtcataaggtatctgtcacactgtctggaaacaaggttacaggacacatcctagtatctttgttcgagaataaaggaaactcta

SEQ ID NO: 304618 - DNA, 286 bp, Zea mays
cgggacttggatgactttgtttcccttagggaagaacctcgctctccctattctggacggccgactcgcttctgtgaggcttccaagtctgccattcccttggaggaggcactggatctggaatgggcacgcttctcatttcaaagatcagagaggagtaccctgatcggatgatgctgacattttctgtctttccctcgcccaaggtgtcagacactgttgttgagccatacaatgcaaccctgtctgtccatcagttggttgagaacgctgatgaatgcatggt

SEQ ID NO: 304619 - DNA, 213 bp, Zea mays
ttatattctggaaattgcagtattaagtgccttttcctctcctgaatattcaattgacctctatttaatgcatttttaaaccaaacttttaaacggactggtgcatgtgcaatgttagtaattagaagttttaccacatggaaaattcgtggttataaactttctaaatcatggtgacttcattgaaagccattagttgctattctcttaggg

SEQ ID NO: 304620 - DNA, 117 bp, Zea mays
agacagtgtccgccgtgtgcctgcccagcgccgacgacgacttccccgcggagacactgtgtgccaccaaaggctggggcaagaccaagtacaacgcaaacaataaccctgacaagc

SEQ ID NO: 304621 - DNA, 279 bp, Zea mays
caaaactcatgatgctccggctgctcagttccctcctccttgtggccgttgcatcaggctatggcgcaccttcctctcgcccttccagccgcgttgtcaatggtgaggatgcggtcccctacagctggccctggcaggtttccctgcaatatgaaaagagtagtatcttctaccacatttgtggaggcagcaaaaccgcaacggttgagagaaactacaggacaatgcatgtagagctcctggaactaccaggtggtgttgggcgagtacgaccgtgct

SEQ ID NO: 304622 - DNA, 114 bp, Zea mays
attgtgggctacgtggaaacccctcgaggcctccggaccttcaagactgtctttgctgagcacatcagtgatgaatgcaagatgcgtttctataagaattggcataaatctaag

SEQ ID NO: 304623 - DNA, 107 bp, Zea mays
atcccccttggttccctcagcccagccctgtccagcccggttcccgggaggatgaagttcgtgtacatgtaataacatccgttcgagaagcgccgctctgagggcga

SEQ ID NO: 304624 - DNA, 220 bp, Zea mays
ctggtggctggatttggccagtatctgggatgggaatgcctaggattctggatggatcgggggaaggcataagggagcagctggccattgtgcttatggctgttgatgcattgagggatatcgccacacacacattcagtaaatttgaggagctgagagggtgactggcccctgaaggcacagtgccagaggtctgtggaaagggggtcagcactggggt

SEQ ID NO: 304625 - DNA, 109 bp, Zea mays
ggcttaattttattagaagtagccagttatttattaaagcatgatgttaataaaataggcatattctggctggtgtgtataagtggttttctttttaaaacaaatcaga

SEQ ID NO: 304626 - DNA, 110 bp, Zea mays
gggctgcgtggagaatactttttgcgcggcctactggagactttgcagccgacgcccagttgggccgaccaggtggacgaggagggggacgccgacaactgtgtcaccag

SEQ ID NO: 304627 - DNA, 221 bp, Zea mays
cttagcaacccggaaacatggctgtcatttgaagacatgctggacaacccactgaacagcacccaatggatcaatgatccacaaacggggcctgtcatgctgcagatctctagactcttccagacactaactcgcaagcaggtagcgttgttccactcggctatcaggccacagcagcccccaggtgcggacccgagaccgggcagagtggaccgcacctg

SEQ ID NO: 304628 - DNA, 144 bp, Zea mays
tctcgagccgaatcggctcgagagcgaggaaaggtgcctgtggacactaggatcttcttccagctgtatgacactctcttggagcagaacctctgcaggctgattgagccctactcaagggtggagattgctcacatagcagag

SEQ ID NO: 304629 - DNA, 105 bp, Zea mays
catgattaggaccctgctgctgtccactttggtggctggagccctcagttgtggggtttccacttacgcgcctgatatgtctaggatgcttggaggtgaagaagc

SEQ ID NO: 304630 - DNA, 247 bp, Zea mays
gcgaaaccgacctttccccctcccccgcattccacctcgcggagatccagtccagccctagggtttcgccagcgggagccaaactccacgagcgggggaagaggggaaagcagggacgacgagggggcagccatggggcagcagtcgctgatctacgcgttcgtggcccgtggcacggtcatactggccgagtacacggagttcaccggcaacttcaccaccatcgcctcccagtgcctcatgaagc

SEQ ID NO: 304631 - DNA, 237 bp, Zea mays
cggctcgagaaggaatcccccgatggctcatcgcgttctcctccacctctctctcgcgtcggccgccgcggttgccgccgccgtcgacgcagaggacccgctgatccggcaggtggttcccggtggagatgacaacgatctggagctgaacgcggagtcccacttcctgaccttcgtgcaacggttcggcaagtcctacaaggacgccgacgagcacgcgaaccggctgtccgtttt

SEQ ID NO: 304632 - DNA, 267 bp, Zea mays
cgcgttattctctctccgccgccactctcctcccattcaccggcatcgccaattccatagcgtcctccgaccactctgctgagagcgagaagagatggcaggcaaaggtgatgggtcggcactcggcatcgctctcggcagacgtaatcttacgtcggcgtctggcagcacgaccgtgtcgagatcttcgccaacgaccatggtaaccgcaccacactctcgtacgtcgccttcaccgactctgagcgcctcatcggagatgcggcc

SEQ ID NO: 304633 - DNA, 265 bp, Zea mays
cgccgccgccgctgctcatctcacatccctcgagaagacgcctgctcctcgccgatcgatacgatggccgtcttctccgacctccacaccgccgacggcctcaagtccctcgaggctcacctcgccggcaaaacctatgtgtctggtgactccattactaaggatgacattaaggtcttcgccgcggtgccgtcgaagcctggcgctgagtttcctaatgccgcccgctggtacgagaccgtctctgcggctgtagcctcaagat

SEQ ID NO: 304634 - DNA, 111 bp, Zea mays
ccgtgcgcctcttccaggagaacacgccatccgtcgtctacatcaccaacctcgccgtcaggcaggacgcgttcacgctcgacgtgctcgcggtgccacagggatacgggt

SEQ ID NO: 304635 - DNA, 279 bp, Zea mays
tgccgtacaagtccggcgagcggcagaagcttgtggacgccgggtaccgcatcgtgggcaacatgggcgaccagtggagcgacctcatcggcgcgccggagggcgaccgcccttcaaggtgcccgaccccatgtactacgtcggctgagtgagacatggcacctactccaaataaagctccaatgttcgtcttattaattggcgtcttgtggtggctgtactggcgaccaaaccattgggaatgcagaacattgttcgtcataattcatcccgagtgaa

SEQ ID NO: 304636 - DNA, 123 bp, Zea mays
cggcacggtgggccacgtccgccaccccaacgtgtccgcgctcctgggctgctgcgtcgaccgcggccttcacctcgtcttccacttctccacccgcagctccgtctccgccaacctccacga

SEQ ID NO: 304637 - DNA, 160 bp, Zea mays
gaagcctccaccctccagcgcctccaccttcctcgccgcctcactccctctgaggtcgcagatccgtccggttagacgaagccgcccgcacccatggcctccggtgagctcgcctgcacctacgccgccctcatcctcagcgacgacggcatcgccatca

SEQ ID NO: 304638 - DNA, 105 bp, Zea mays
ggagaacctgcgcatgaagcttcccaagcctcccaagcctgtgagcaagatgcgcatggccaccccgctgctgatgcaggcgctgcacatgggagctctgcccca

SEQ ID NO: 304639 - DNA, 235 bp, Zea mays
  unsure (1)..(235): unsure at all n locations
ctcgagcgctgtgcttggcgtataaggatgtggatggtctcgacgacgacgacgatgatgcagatagcccaacaagtggtttcactctaatctgcatttttggcatcaaggatcccttgcgcccaggagtcaaggacgctgtggaggcctgtacgtctgctggcatcgtcgtgagaatggtgaccggtgacaacatcaatacagccanagctatagccaaagagtgtgggatact

SEQ ID NO: 304640 - DNA, 147 bp, Zea mays
gatgcttccaagcacatgtggcctggagacataaacgcacttttggacacactgcataatctaaacagtaactggttccctgaaggcagtaaacctttcatttaccatgaggtaattgatctgggtggtgagccaattaaaacagtg

SEQ ID NO: 304641 - DNA, 179 bp, Zea mays
ctggtacattgggccaggcggagaagaggaagacagaccagttcctgagggatgcagtggaaaccagactgagaatgctgatcccatacattgagcactggccccgggctctcagcatcctcatgctccctcacaacatcccgtctagcctgagcctgctcaccagcatggtggatgac

SEQ ID NO: 304642 - DNA, 101 bp, Zea mays
gagctcgtggtgtcctacccattcgacatgactcgcaccccgtgggctgcccgcgagctcacgcccacacgcgatgatgctgtgtttcgctggctcagcac

SEQ ID NO: 304643 - DNA, 108 bp, Zea mays
cgccaaccagtcaagttgtgttttggccagagatttagatatgtccaatttcctggctcatttcattgtgctctatgggtacgtataaaaagcaagaattctgtttcc

SEQ ID NO: 304644 - DNA, 166 bp, Zea mays
gtgagatccaagtgacagagcttctcgataagttagacttttatgttctgcctgtgctcaatattgatggctacactacacctggaccaagagccgattttggagatagactcgctcgacccatcctggatctagctgacttggcacagaccccaacagaaatttt

SEQ ID NO: 304645 - DNA, 163 bp, Zea mays
aggaagagaaggaaaaaaaagaatagggaagaagaagcaaatggagctgagagtcgggaacaggtaacggctgggcgaaaagatcggcagcggctccttcgggacatctatctcggtacggacttgctgcaggagaagaggttgccatcaagcttgaatgtgt

SEQ ID NO: 304646 - DNA, 249 bp, Zea mays
tctcggcaccgctgtgcaccatggcccgggccctgtgccgcctcccgcggcgcggcctctggctgctcctggcccatcacctcttcatgaccactgactgccaggaggctaactacggtgccctcctccgggagctctgcctcacccagttccaggtagacatggaggccgtcggggagacgctgtagtgtgactagggcaggaccatcaggagctacaaggcactgaccgactgcacctggcccatgg

SEQ ID NO: 304647 - DNA, 210 bp, Zea mays
acactctccaaagaacttgacctaccttatgggttccatatttttcttcttaaatgtgcatcaatcatgccttgcccccaacctttaaatatattcttagacctggtaaatgcactcagacttgcgtctttaggaatttttaactttctttcactacattggcacttaaatttgtttctttataaagctttttgaaggtcataaacaaag

SEQ ID NO: 304648 - DNA, 125 bp, Zea mays
gtaatgaggatgaagattcaccaaataagctatatactttggttacctatgtacctgttaccactttcaaaaatctacagacagtcaatgtggatgagaactaatcgctgatcgtcagatcagat

SEQ ID NO: 304649 - DNA, 229 bp, Zea mays
attttacaggttaaggacttgatgtgcctctgtgacaacgcatttaccagagaccagattctgaccaaggaaaaggccatcctggacatgctccattggaacctgacggttccaacaatgtacatgttcattgttaggtacctgaaagccgcaatgtgtgacacagagcttgagaacatgacattcttctactccgagctggcattggtccatacgcgatgctggttta

SEQ ID NO: 304650 - DNA, 274 bp, Zea mays
gttttgcctaaagtgtctatagatctttaactttaaagtcttatctcactttctttagtattgcagaaaaacttaagagtttttctgtttgcttttgtgtaccaggtggtctagaggaataattaaacattttagaactacttaacggtaaagtactgaaatgggtacaacttaaggcaaacaagaatgttgtcttctaacactgacattataccttgtttgtcaccgccagtgggaaattcattgcaggccgtgtgtcaccctgatcacgtct

SEQ ID NO: 304651 - DNA, 256 bp, Zea mays
cagccgtcctccaaaagggtggactggtcgtctccaacgctggagactgccgtgcggtgctcagccgagcagggaaggcagaggcgctcacctctgaccaccgggcgtccagggaggatgagaaggaaaggatcgagaatttgggtggatttgtggtgaattaccgtggaacatggcgagtccaggggtatctggcattgacaattcccgatgtgggtagacactgccacagagacctagacgctcctggttgacc

SEQ ID NO: 304652 - DNA, 270 bp, Zea mays
cgaagatctggagcaaagacctgagcttcagtccatttcttcgctgttggattatttcattcatgaactttccttcaggaataactttgagtttgtccaggctgttctgaaattgtttttgaagatacatggtgaaacaatacgacggcactcaatgcttcagagtaaggtgaagaagcttcttgaggtccagagcttagtttggcagaagattgataagatctttcagggtgcacgatgcatggttacattcctcagtaactcacaatt

SEQ ID NO: 304653 - DNA, 275 bp, Zea mays
ccttgacgggcagcccgggcagcgaccatgtttgacgtgacgcggctgccgtacgtagcgctcgatgtgctctgcgtgttgctggctggaatgccttttgcaattcttacttcaaggcataccctcttccaacgaggagtattctgtaatgatgaggtccatcacgtacccttagaaagaagacacgataccttatgcgttattaggtggaataatcattccattcaggattatcggtattatgcttggtagaaccatgtccgtatactgtaacc

SEQ ID NO: 304654 - DNA, 247 bp, Zea mays
ctccgacacgccggaggaggccgcggagaggctcgctgacatcaaggccgccgccggcatcccgcaggagctcgacggcgacgtggtggccgtgccaaagaagcgggacagcgaggaggcgcgggtgtggaaggagctcatcctgtccccgaccccggccatgcgtcgcatcctcatctccggcatcgccatcaattcttccaacaagcgtccgggcatgaagccgtggtgctgtacacccgcgcgt

SEQ ID NO: 304655 - DNA, 277 bp, Zea mays
ctttgaggtcaaggccacagctggtgacacccatcttggtggagaggactttgacaacaggatggtcaaccacttcgtccaggagttcaagaggaagaacaagaaggatatcactggcaaccccagggctctccggaggctgaggaccgcttgtgagagggcgaagaggactctgtcttccactgcccagaccacgattgagattgactcgctgtatgagggcatcgacttctactccaccatcacccgtgccaggtttgaggagctcaacatggac

SEQ ID NO: 304656 - DNA, 265 bp, Zea mays
ccacgcacccccccacctgccttgtgctcgccctccgtccatatcttccggcgccggcggccgtcgatcgatactttacaagcagcagcaaagagatgtcggacggcacagccacctgcatcgacatcatcctcgccatcatcctgccgccgctcggggtcttcttcaagttcggctgcggggctgagttctggatctgcctcatcctcaccttcttcggctacctcccaggcatcatctacgctgtctgggtcatcaccatgta

SEQ ID NO: 304657 - DNA, 220 bp, Zea mays
ggggacacgggccaaggaatccttggacctgagggcccacctcaagcaggtgaagaaggaggacattgagaaggaaaaccgggacgtgggagactagcgcaagaatatcgatgcactaagtggaatggaaagccgaaagaaaaagtgtgagggctcagcccatggctctcacactgtgctctgaagggcatctctgaggaataaatatctttaaactgga

SEQ ID NO: 304658 - DNA, 293 bp, Zea mays
cgccgacaagtgctcgtacaagaacggcgacgtgtccggcgtcgtggaccagtggagcaagtggacggcgaggtaccccaagagccagctttacgtggggctcgccgcggccgagagcggcgtgccggaccacgcgccgccccccgttgaggtcacctcaaatacctctactacgatctgctgcccaaggtgcagaaggcgcccaactatggtggcgtcatggtctggaataggttcaccgacaacaggaccggatacagcggcgccgtcaagggctgggcggcttgcagcta

SEQ ID NO: 304659 - DNA, 282 bp, Zea mays
caagaccaagcgcaccatccagttcgtggactggtgcccgactggcttcaagtgcggaatcaactaccagcctcccagcgtcgtccccggcggtgacctggccaaggtgcagcgtgccgtgtgcatgatctccaactccaccagtgttgtgaggtcttctcccgcatttgacacaagttcgacctcatgtacggcaaggggacttcgtgcacgggtacgtccgtgagggtatggaagaaggcgagttctccgaggctcgtgaagatctcgctgcgctccaga

SEQ ID NO: 304660 - DNA, 275 bp, Zea mays
attttattgattttgagtatgggtcatacagctaccgtggttatgacattgcaaatcatttcaatgagtatgcaggatttgattgtgactataatttgtaagttttctccatgtcaatgaaatactcaaaagcaattacggtgtcatgtttttagtcagcagtattcatttgattgtgtatttaggtacccagataaagatgcccagtatcacttcttcaggaattatctacaccctgatagacctagtgaggtatgtgaaacaaaaccaattga

SEQ ID NO: 304661 - DNA, 254 bp, Zea mays
ccaggacaaggagggcattccaccggaccagcagcgcctgatctttgctggcaagcagctggaggatggccgtaccctcgccgactacaacatccagaaggagagcaccctccacctggtgctccgcttgcgaggtggtatgcagtctttgcgaagaccttgactggcaagaccataaccctggatgttgagagctccgacaccatcgacaacgggaaggcaaagatgcaggacaaagagggcatccccccaga

SEQ ID NO: 304662 - DNA, 275 bp, Zea mays
cgcatgcatgtcgtcgccaggaacaaagatcgagaaataatacaagaccagcacgcatgcatgggcatactctatatatatatatgtatagcccgtgcccgtgcccgcctttgtaccaatacaagccaaaccaagtggagtgtataatattaataatgcggtatcaccataaatgaacccctgcctgctacctgaagatggatgtgtatcgagttatcaaattaaggcacagcagcagaaactatatgtattgcataagaatactcgtctcgata

SEQ ID NO: 304663 - DNA, 121 bp, Zea mays
aaatttagaaacaaattttatttaagatctgaaatacaattcctaaaatatcaacttttccagaaaaccgtggctacacaataatgcattgcctctatcatgttagaacgtgcattagact

SEQ ID NO: 304664 - DNA, 268 bp, Zea mays
caagagggtgacgttcaaacagacgtttacaaaaatcaaaatggactaaggtagagacaaaactttattgcactgacacttaagacttgggaagcctgacatttctatctggacagtgtgactatcttatgtcaggaccttcatgtgctaaacgtcagtgctgttttcatatggtaacttcgcaggagtcaggctagtggagagatgaccaggtgtacagttctgaccatcctgtgttgtaagtacccgtggaatggatttgtaaggt

SEQ ID NO: 304665 - DNA, 267 bp, Zea mays
  unsure (1)..(267): unsure at all n locations
ttttgcactttattactgtcagcaacgatacaactggcctccggagctaagttttggccaggggagcaagctggagatcacacgaactgtggctgcaccatctgtcttcatcttacccgacatctgatgagcagttgaaatctaganattcctctgttgtgtgcctgctgaataacttctatccctgatatgacaaagtacagtggaaggtacataacgccctccaatcgggtaactcccaggagagtgtcacagagcaggacagca

SEQ ID NO: 304666 - DNA, 179 bp, Zea mays
gcctccaccctccagcgcctccaccctcctcgccgcctcactccctctgaggtcgcagatccgtccggttagacgaagccgcccgcacccatggcctccggtgagctcgcctgcacctacgccgccctcatcctcagcgacgacggcatcgccatcaccgccgagaagatcgccaccat

SEQ ID NO: 304667 - DNA, 267 bp, Zea mays
gctagttttcagtggattagctagcttggcaatatatatttaactaataaggcggcggtggcatggacgcgatcagcagcctgctgctgcaggagggctggaggaagggcccgtggacggcgctggaggacaggctgctcaccgagtacgtgcagcagcacggcgagggcagctggaactccgtcgccaagctcacagggctgcgccggagcgggaagagctgccggctgcggtgggtgaactacctccggccggacctcaagcggg

SEQ ID NO: 304668 - DNA, 151 bp, Zea mays
cacccatacctggagcccagacactttgtggatgagaaggccgtgaatgagaaccacaaggactacatgttcctggagtgtatccagtgtattaccgagatgaagactggcccatttgcagagcactccaaccagctgtggaacatcagcg

SEQ ID NO: 304669 - DNA, 283 bp, Zea mays
cctgcaggcacctcatgggagatgttctttaaactttgaatctcaaagagcttcagcaactagagcagcagctggagagttcactgaaacatatcagaacaaggaaggtagtatgatctatatattagactgcagtgcattacttacgtgatgcctactacaccactgacagccatgcgctctgcatgttggaaaactaacaagtaaatattcaccgcatgcgcagagccagcttatggtcgagtcaatttcagcgctccaacggaaggtaaattgttgagct

SEQ ID NO: 304670 - DNA, 151 bp, Zea mays
ggcttgctgacttggttgatcgtactgatgttcctgtaccggagaagcctgacactgaagatgaaaccttgctaaagaactggaaatggcacttgagggcagccaagaagaagaacagtgaaaggcattctcagagatgtgatgttgaact

SEQ ID NO: 304671 - DNA, 272 bp, Zea mays
attgacaagcgtgtgatcgagaggtttgagaaggaggccgctgaaatgaacaagcggtcctttaagtatgcttgggtgcttgacaagctcaaggctgagcgtgagaggggtatcaccattgatattgctctgtggaagtttgagaccaccaagtactattgcaccgttattgatgcccctggacaccgtgactttatcaagaacatgatcactggtacctcccaggctgactgtgctgtccttatcattgactccaccactggtggttttga

SEQ ID NO: 304672 - DNA, 193 bp, Zea mays
gtaaagtgccatagtctttctttatgtgtagcatatttaaaaatatatatgtatattatacatacacaagtttgtgtgaaagatgtgcaataacaaaggtgtatgtatgtattgttgttctgttttggaaactggacaggagtcagaacagggatgtatgtctctgttttggcaaaggagagttccacatttt

SEQ ID NO: 304673 - DNA, 275 bp, Zea mays
caagtctgatcaggagcttctcgctgcaactgttgctgtgggtttcactaagacagtgttcatcttggttgcaattttcctaattgatagagttggacggaagccacttctttatgtgagcaccattggcatgaccatctgcttatttctctggggggttgacattacaatgcaaaaccaagcggtggggcttatgtctccacgtgttggtatcgacctagcattttcgcagtctgtggcaacgtggcattcctttcaattggcatggggaccat

SEQ ID NO: 304674 - DNA, 162 bp, Zea mays
aaagaaatgaactgatgaaaaaagaaagcagtcgactccagaagactggacatcgtgtacatactcacctcgtaaagagaaagcactaaaaatatatctggatggcgcccaaataaagatcctgactcaagactgactctgatagtgtagcattcccggggg

SEQ ID NO: 304675 - DNA, 102 bp, Zea mays
ccctggctaacaaggacagcctgacttggatcccactatgcaggaaggaaggcgactctccccgcacctcttgctacgattaggacttgcgacttggtgaaa

SEQ ID NO: 304676 - DNA, 163 bp, Zea mays
ggcaagggtggtagagaaaggaacagaggcttatgaagatattcagatactcttcatgccaggaagcacaaagactttgttgagatttgcctcagttcagtagatcttccttggcagccaccataggttgtttctttgtcttccgggtcctaaagagcacaga

SEQ ID NO: 304677 - DNA, 262 bp, Zea mays
ctcactccagtctttgagacccccagcaggccaggcaggtaaggagttggctgggaaggagtgtgaacacaagaggtcctcacctcactgtgagctgcacacctgccctgctcctaccgcaggcaatctcatgcttccacaccttccaccctggcccagcctggctctccctcaggaagaggggaggggctgcacttcgagccctgtgctcctaattggcttggccgttggtgggggagaggagcggacatacatggtggaa

SEQ ID NO: 304678 - DNA, 136 bp, Zea mays
cacgtcttgaccttgaacgcaagtggaatctttgcaagaagagattgcctttttgaagaaactccacgaagaggaaatccaggagctgcaggctcagattcaggaacagcatgtccagatcgatgtggatgtttcc

SEQ ID NO: 304679 - DNA, 116 bp, Zea mays
tactaccagctccccgctgccctgagctcggcgggctggcattcggcccggggaaaagcgcgacaggtctgcgaggctaagtgtctccgcagcgcacctcgcggcgagaatccgga

SEQ ID NO: 304680 - DNA, 274 bp, Zea mays
acaaaaccgcaggaacgcgcatcttagctcatttgatcgctttgccttgcttaggaagtgcagtttcgtgtcagctgttgcagaagatatgtagttggtcatctagacataattgctgaagatgaacttttggaccaacttctaagtcacgcagcatcattatcagattgattacacaacgacttttgtgctttcactctatttctgaggaaaaagccttcgcgaaatccgtaatgaatttctccatggtaacccctcttctgttttcacacag

SEQ ID NO: 304681 - DNA, 146 bp, Zea mays
gagacaccaagaagaatcggaacatacaggctttggtcaaccccaatgaatgttcatttctggccaccatgccttcctgaatatgaataagagatagaataccatttgatgtttgacattatgggggtaatctcaatgacggaaat

SEQ ID NO: 304682 - DNA, 119 bp, Zea mays
ccatgcagaagggttgtgtacatggatgttaccaggccgccagacggggaggaagcctctatatagaacatatgagttgggaggatgagaaatagagccctcttaactagactttggtg

SEQ ID NO: 304683 - DNA, 133 bp, Zea mays
gtgaagagcgagagatcatagaaagaatagaacgagttaagaaggctcgagaagagcatgagagagcccagagggaggaagaagccagacgacagtcaggagctcagtatggctcttttccaggtggctttcc

SEQ ID NO: 304684 - DNA, 141 bp, Zea mays
cggcgctgcttgggcccgtgacggattgtaagctgctggtattgcggctgggaagagcggcgagagggttcggcatctttcgtcgggatccccgcaaggatgagtgctgccagagagtctcacccgcatggggtgaagcgt

SEQ ID NO: 304685 - DNA, 115 bp, Zea mays
gattggtcactcggccactctctcctgtatctggactcatctcccttcactcccgtccagtctggttttgagagcaggggctgtacttcagcaactcagggaagggaggagagat

SEQ ID NO: 304686 - DNA, 188 bp, Zea mays
aagagggaacatcaaagttctcatggccactaataggcctgatacattggatcctgcacttctgcgtcctggtcgtctggacagaaaggtagaagtgcagcgtacaatgttggaaatagtaaaccagcttgatgggtttgatgcaagagggaacatcaaagttctcatggccactaataggcctgata

SEQ ID NO: 304687 - DNA, 186 bp, Zea mays
agatccaagaagagggaagagcaccaaggaccttcggcgcccgttcaggatccacatcttcccgagcgagttcttggttgacctcttcccccttcggaccacctccaaggctcttggtgtagcttgccactctcaccaatcaagttttcatgtctgatctcgacattcagatcccaactgccttcg

SEQ ID NO: 304688 - DNA, 188 bp, Zea mays
gatgcagttgcaaaaggaggtggaaggcatccagaacacaataatttttataaaatgagataaaggactgggaaacagtccaagatagctgtctagagcaataatacgcctcccctaattggagtgatagtattcattagatttattaatatccactgaaatacaaaatgaaataagaaacacatttt

SEQ ID NO: 304689 - DNA, 181 bp, Zea mays
aggatggcgtgcctacctctgaaatacagctgcatcttgatatactcgatgctaactggacaagtcagtcatgagagctttactatattattatttctggcggacaatggtttctgaggacagcggtctactgggagaacggtgcagtggttggtggtcataattctcagaacaagaacgt

SEQ ID NO: 304690 - DNA, 276 bp, Zea mays
ccgtccgagtgagtcccgcagcccctgagagacaggaaggcagcagcctcaccctgacctgtgaggcagagagtagccaggacctcgagttccagtggctgacagaagagacaggccaagtgctggaaagggggcctgtgctacagttgcatgacctgaaacgggaggcaggaggcggctatcgctgcgtggcgtctgtgcccagcatacccggcctgaaccgcacacagctggtccacgtggccatttttggacccccttggcatggcattcaac

SEQ ID NO: 304691 - DNA, 262 bp, Zea mays
tttgttttttaagccaagaaaaaaaatacatcaggagggacagtcacaattgagtagactgagaggaggcgtgaggggctggaccagagggccaggagggagcgaggcgtgatggggtgagggcccccctcccagcgcctgaagatggggaggagtggaataggctgtgggtagcagctactgcgattctccaccccgaccaaagcagttactcctcctgtgcccaggcccagcccatgctctgtggccatgcacctagcag

SEQ ID NO: 304692 - DNA, 196 bp, Zea mays
ccacgatcatgacgtgagcaggaagcgcatgtctgaagatggtggatcctgttcgcaggcagttcaatatcagtcctgggttatatggctagacaagtcaatgccgatctacacagcctgtgtgaagagctctactgatgcttccatcaaggagatgattcctccgggcgcattgaacatagctgactccactcat

SEQ ID NO: 304693 - DNA, 150 bp, Zea mays
ctcgccttcagactcacgtggcacttcaggcccggttcagcacagagctggcgagagagacgcgtatcagacagcagatggctgaccaggttgctcaaaagtcctctgaactggaacagtatttacagcgagtacgggagctggaagaca

SEQ ID NO: 304694 - DNA, 243 bp, Zea mays
  unsure (1)..(243): unsure at all n locations
cggcacggcaagtgaacaagaccgagatccacagcgagtcgtgagcaccctgaatgtcctcgtgaccccgcgagctgttggagacaggtgttgaatgcacggcctccaacgacctgggcaaaaacaccagcatcctcttcctggagctggtcaatttaaccagcctcacaccagactccaacacagtccccagcctcagnacttccactgccagtcctcataccatagccaacagcacctcca

SEQ ID NO: 304695 - DNA, 261 bp, Zea mays
ggagaagtgcggtggacatggatggtgtgcatgtgatgggaagggatacattttatcagatgctgatgcactgccttccatcaggggaggttggatcaggtgaacggcaaggggagcagcgtgctctgccattccgagtattaccatgggaagcagaggtgcatgctgcactatttgtgcatcgtgtctcagggcttcacagggggatttatttcctggtgagaaatgaggagcactttgatgcgttgcagcgtgctatga

SEQ ID NO: 304696 - DNA, 149 bp, Zea mays
cgactcccggacgtaggtagtttgttgggccgggttctgaggccttgcttcactttagttttccactctatgcaacgatgaagcagtaccagacctgggaggagttcagccgtgatgcagagaagctttaactcgctgaccctatgaag

SEQ ID NO: 304697 - DNA, 280 bp, Zea mays
accggtctcctccgcccgttgccttcgtcccctccatctccggctgcgtcgccggcgagcccgacaccgcgaatcggatccgccgacaaggtgagagggaagagatggggctcacgttcaccaagctgttcagccggctgttcgccaagaaggagatgcggatcctgatggtgggactcgacgccgccggaaagaccaccatcctctacaagctgaagctcggcgagatcgtcaccaccatccccaccatcggattcaatgttgaaactgtggagtacaa

SEQ ID NO: 304698 - DNA, 273 bp, Zea mays
gaacgcttgcagttcatgaagaaagctgcttccaaagggctgatcatggactgccaaatcgtgcctatcactggcagtgaagaaggcgccgggcagcgagggacagcgatcgtgatgggtccagagttcttgaagaagtgctacaaggagagccccgcggaggacctgaccctggcgacgatgctggtgaggcccggcaaccagttcatggacgacccggtgatgaaggacgaggcgctgctcacggccgccaactacgggtccgttaagaag

SEQ ID NO: 304699 - DNA, 272 bp, Zea mays
agcatgtacaacgaagtagtagtaggtggaagggaccgcctcggcgtagaacgcgaagtcctcggcgcccatcagcggctgcctgtccctcacgttcctcgagccgaccatctcgccggccacgttcacgaagaagtcgtggagctcggggctgttgatggtaggcgggaagaaaggacggtccttgctgaggaagtccacggcagcgctgcagcgctgcacgctagcttgacggctcgagctcgagccgctcggatgccaggggatgggga

SEQ ID NO: 304700 - DNA, 196 bp, Zea mays
gaacttccttccggtggttggggagaaagctatttgtcatctcaagaccaggtttacaccaatctcaaaggcaaccggcctcatgcagtgaacactagttgggccatgctggcgctgattgatgcaggccaggccgagagagatccaacgcctctacaccgagcagcaaaggttttgaccaacttgcaatcacatg

SEQ ID NO: 304701 - DNA, 211 bp, Zea mays
gcagcagcaagcggccccggctggtgtggacgccgcagctgcacaagcggttcgtggacgtggtggcgcacctggggatgaagaacgcggtgcccaagaccatcatgcagctgatgaacgtggaagggctgacgcgggagaacgtggccagccacctgcagaagtaccgcctctacgtcaagcggatgcagggcctctccgacgagggccc

SEQ ID NO: 304702 - DNA, 178 bp, Zea mays
gatgtggagaaaacacctttcccttctagttttgagagacttcctcttggctcccaggatgagggattccctgactttgacatacatggccaccttagcacaaaagccttgtggtatagactaacaaatttggttttatgtcctacttctccctttccatctttcagcagagacttaa

SEQ ID NO: 304703 - DNA, 283 bp, Zea mays
catcgagccgattcggctcagccatcactcttgaggtggagtcttcagataccattgacaatgtcaaggccaagatccaggacaaggagggcatcccgccggaccagcagcgtcttatctttgccggcaagcagctggaggatggacgcacccttgcggattacaacattcagaaggagagcaccctccacctggtgctgcgcctcaggggaggaatgcagatcttcgtgaagacattgacaggcaagaccatcaccttggaggttgagagctccgacaccat

SEQ ID NO: 304704 - DNA, 106 bp, Zea mays
  unsure (1)..(106): unsure at all n locations
gccgcagttancctctggcgccatgtcgcagaacggagcgcccgggatgcaggaggagatcctgcagggctcctgggtagaactgcacttcagcaataattggaac

SEQ ID NO: 304705 - DNA, 276 bp, Zea mays
gaagaagtgatcagcagcttacatgaatccttgaacatttgatatataagaactcctgaaacaactgaatcacaagtaaaagactcttctttgtgtgtttcaggggaaattctggcagcaggtacttcatcacctaaaactgaaggcaagcacgaagaaactgttaataaagaatcggatatgaaggtgccaactgtaagtttgaaagtatctgaaagtgtaattgatgtgaaaacaactatggaaagtatatctaatacgtctacgcagtctctc

SEQ ID NO: 304706 - DNA, 277 bp, Zea mays
aactaatcagctttattttaaaatatacaagtattttgaaatgtagagtttaaggctgttctatttcttaaactacacacaaaactgacaaatccataccaaattaatcacccacagactgccaatttcatccactaatttaacactacagcattcaggataaattaaaggatttaatagtatagacagttaaacaaaaaaaaagcagtcatttgtaacatgctgctataaatagaacaaccagtttatggattcctggtacaaaaagtttcaatgg

SEQ ID NO: 304707 - DNA, 265 bp, Zea mays
cagggttttgctgctctccgaccccgagctccgaaggccgcagcatcaggcgaggcccccctcgcgtgtgatcgagatggcgctgccgaatcaggggaccgttgattaccccagcttcaagctcgtcatcgtcggcgatggtggaactggtaaaactacatttgtgaagaggcatctcactggagagtttgagaagaaatatgaaccaaccattggtgtggaagttcatccgttggatttcaccactaactgtggtaagatcagg

SEQ ID NO: 304708 - DNA, 264 bp, Zea mays
ctcgacgcccatccgctccaccgtcctcagcctggtctggcagcccaacaatgtgctgctggctgccggctcctgtgacttcaagtgtcggatcttttcagcctacatcaaggaggtggaggaacggccggcacccacccgtgagactctacataacgctttggggaactgatgttcgaatccagcagtagctgcggctgggtacatggcgtctgtttctcagccagcgggagccgcgtggctgtaggtaagccacgacagcac

SEQ ID NO: 304709 - DNA, 100 bp, Zea mays
tagtcctctctggccccatccaggcaaccaaataaagtttgagtgtggcaggaacagaatcctggggcttgcaaaagaaaagaagagaggtgcggagaga

SEQ ID NO: 304710 - DNA, 123 bp, Zea mays
taagagtgatgtatatagttttggggttgttcttcttgaactgttgactgggaggaaacctgtcgaccatacattgccaaggggacagcagagtcttgtgacctgggctacaccacggacttt

SEQ ID NO: 304711 - DNA, 275 bp, Zea mays
ccagtatgggaattcaataaaaactggccttccctacgggagcaacggttatgattccaggatatatggtgcgatgggtcttgggatacatagcaggtacaggcctaggggccgtaatgggtactatgtttatggcaacgagagtcaggatggaacaatcgagttaaacagaggtcctagatctggccgtttcaagaaccatgaattgtacggccatactgtcactattgctgtgaaaggcgagaaccttccttctggtgaaagcaaggatgata

SEQ ID NO: 304712 - DNA, 178 bp, Zea mays
cgagtaatgtcaagctaccgttggccaagacagtttcaaaatggacacgatgttaatgattgggttgggccaccaaataataatggagtaattaaagaagctactattaatccagacactacttgtggcaatgactgggtctgtgaacatcgatggcgcaaataaggatcatggttat

SEQ ID NO: 304713 - DNA, 139 bp, Zea mays
cctccactcggaatgactatcctgctgccaagagggtcaagttggacagtgtcagagtcctgagacagatcagcaacaaccgaaaatgcaccagctccaggtcctcggacaccgaggagaatgtcaagaggtgaataca

SEQ ID NO: 304714 - DNA, 212 bp, Zea mays
gcctggaatcagatgggcccaacatgacagagaatggcctggaagatgaatcaagacctcagcgtcgtaatcgcagccgccgccgccgtaaccgtggtaatcggactgatggctctatcagtggagaccgccagccagtgactgtggctgactattctcacgagcagagtctcagagccgccagaggcccaccctggaacgcactaaaccct

SEQ ID NO: 304715 - DNA, 272 bp, Zea mays
gccattcagcatttgggtgaagacggaggtgggttctggacagacctacgctgtcagggagtgtttacttcgcctacacttctgttcctccccgccctggtgctgctccaggtcacatactcgtcctgagctggcttcagcctcgcacagaagtctcccggagccatggcctagtactcttatgtgaagtctactaagcgtgtgctcaagggaaccgatgtgtagagcttgggcctgcaagctccggcgggagtcgctctcagttctgttcg

SEQ ID NO: 304716 - DNA, 123 bp, Zea mays
aatgctccggctgctcagttcctcctccttgtggccgttgcctcaggctatggcccaccttcctctcactcttccagccgcgttgtccatggtgaggatgcggtcccctacagctggccctgg

SEQ ID NO: 304717 - DNA, 151 bp, Zea mays
ttagaaaccaacagacctgatagcaagatctgtcagtaccaagaaactatcaagataggagatctgctactaaacagagttcagaaactttccagagtaattaatatgtaaagccatgtaactaactaaggatttgctttagagataatta

SEQ ID NO: 304718 - DNA, 102 bp, Zea mays
cacgaatcgcatgtggcgcaagactcggtcgcacacaggatgctccctgtgtattggcgtggaccccaagaggtactgggacgctgactttgggttgtccgg

SEQ ID NO: 304719 - DNA, 139 bp, Zea mays
ctgtgatgaaacttactgtggacctgccgcagagtctgaaaaggagaccaaggccctggctgatttcatccgcaacaaactctcttccatcaaggcagatctgcggatccactcgtactgccaaatgatgatctaccct

SEQ ID NO: 304720 - DNA, 142 bp, Zea mays
ctgccctgcctgcccatctcagagccataaggtcatctttgctagagctatttttacctatgtatttatcgttcttgatcataagccgcttatttatatcatgtatctctaaggacctaaaagcactttatgtagttttgaa

SEQ ID NO: 304721 - DNA, 107 bp, Zea mays
ggcggaggtcgataagctggaactgatgttccagaaagctgagtctgatctggattacattcaatacaggctggaatatgaaatcaagacttatcatcctgattcag

SEQ ID NO: 304722 - DNA, 141 bp, Zea mays
gtcggacgggcgcggagacgcttctggaaggaacgccgcgatggctgcgcagggagagccccaggtccagttcaaacttgtattggttggtgatggtggtactggaaaaacgaccttcgtgaaacgtcatttgactggtga

SEQ ID NO: 304723 - DNA, 263 bp, Zea mays
aagccatggagcacaaggaggctgggtgccaggcccccgagggacccatcctctgcatcaataactgtggcttcttcggcagcgcggcgaccatgaacatgtgctccaagtgccacaaggagatgataacgaagcaggatcaggccaagctggctgcctcctctatcgacagcatcgtgaacggcagcgacgccgtcatggagccggttgttgctggcagcaacacggtagtagctgttgctcaagttgagttgcaaacaatg

SEQ ID NO: 304724 - DNA, 261 bp, Zea mays
cgcccctagatgtttgtttggatcagctagttttggagagaaagcaattatagccggaggcatggatgctgatggaagggtgcttcgctccgtcgagctgtataactcggaaaccaagaggtggacaacacttccaagcatgaataaggctaggcggaagtgctctggtgtcttcatggatggcaagttctatgtgatcggtggaatggccagtaacacagaagtgcttacttgtggagaagagtacgacctagatagagg

SEQ ID NO: 304725 - DNA, 280 bp, Zea mays
tctcctccacctcgctgtcttccaccacggctgctcgtcggcgagggcacacagacgcgccggcgacatggtggggagcatgagcaccgacgataactcgatgatagagcggttccagcggtggaaggcagcccgtggccgtgtccatcgagtccggcggcgacaacttccagcactacaagaagggagtgtacaacgggccctgcgggatcaacctcaaccacggcgtcaccgtcgtcggctacggccaggaggcggccggcggcgacaggtactggat

SEQ ID NO: 304726 - DNA, 236 bp, Zea mays
tgcaaaatgctttgctcagggctggatttttatggtatgtgctacccctgctgcttcagtatgattcgacagcagaagagaatgagatatgtgaggcacatggtgttggggcaagggtgcagattgctaagaatctgcatgctgttcatgcaactcaggctttgtctaagctttctggtctcagcaacgatgatatactgtacccagataacaaacctgcatacaatacgttaaag

SEQ ID NO: 304727 - DNA, 120 bp, Zea mays
cggcgcgtctccggcgtgctcagcaaggcgcccttcatcctgaaactcgcctgcgaccactaggtcgagaagagcaaggccgtgcgcgaggccatgtgcttcctcatggacccgcagctg

SEQ ID NO: 304728 - DNA, 241 bp, Zea mays
aggcgattcctctcccctcgcctcctcgtctccccctaggggatcgagcggagaggaatcgcaaagagggccgtctcatccgagttaaggaagccatggagcacaaggaggctgagtgccaggcccccgagggacgcatgctctgcatcaataactgtggcttcttcggcagcgcggcgaccatgaacatgtgctccaagtgccacaaggagatgataacgaaacaggatcaagccaagct

SEQ ID NO: 304729 - DNA, 251 bp, Zea mays
actggctgcccagcccacaggcccatgaggggatgcagttatgagctctgtcgccgtggattgttattttgtgtcagtaagtaatccataaagtgccaacatgggaaagaaacggacaaagggaaaaactgttccaatcgatgattcctctgaaactttagaacctgtgtgcagacacattagaaaaggattggaacaaggtaatttgaaaaaggctttagtgactgtggaatggaatatctgccaagact

SEQ ID NO: 304730 - DNA, 265 bp, Zea mays
catcactggtccaggtcttgagtttccgaatctttttcccttcgcctgtggtctattgtcgctatgtgacttgcgcttaatccaatattttgcctattctctatatcaaaaaacctttacagttagcagggatgttccttaccacggatttgtagccccaaatctctcatattcgctagtgtttaaaaggctaagaatagtggggcccagccgatgtggtaggtgatatagaggcatcttttctagagacacatggaccagatga

SEQ ID NO: 304731 - DNA, 265 bp, Zea mays
gcttcattgacatcttcgcgcggccggccgcgggcttcgtggcggggcttgaggacggtgcggccctactccgtctacctcttcagcttctccatgttcttcaacggcctcgcggacctggcgggctctacggcgggcgactacggcggcctcgtggccttctgcatctactttggcatctcctacggcatggttagggccctgcagttcgaggtgctccatggcatcgtgtgcacgcacaagttctcagtgccattggcctggt

SEQ ID NO: 304732 - DNA, 168 bp, Zea mays
gtttgcttaggcgcagacggggaagcggagtcaacatgctagtggcccggagctgagcttgtagcaaaacctatgtgagtccgcggagacccttcgagaaatctcgtctcgagtaagaggtgaagctgatcggggagtatgggctccggaacaaccgtgatgtctcga

SEQ ID NO: 304733 - DNA, 156 bp, Zea mays
gacgatctgggcctcctgcagggcagcagcggtgacagcagggctccgggagaccagggagagaaatacatcgatctgaggcattagccccgaatcacttcagctcccttccctggcctggacaattcccagctccctgctcattgttctctcagc

SEQ ID NO: 304734 - DNA, 277 bp, Zea mays
cggcctccgggcacctcccacggaccacggtcccaccgcatcggaactcggaaggcgaacgatggcgccgcgcggatcgagcgatggcggcggcgttggagcaactgagcagcagcaaaatgttcgacggcttcaacctccggttccgccaccagagcgccaccctcggctgcgcaatgaccttctccatctacctggccccgtccccggcggccaacatatccgtgctgtactggctctcgggcctcacctgtaccgacgagaatttcatcatgaa

SEQ ID NO: 304735 - DNA, 274 bp, Zea mays
  unsure (1)..(274): unsure at all n locations
gatggacaagagcagcgtccatgatgttgtccttgtagttagctcnactaggatccccagggagcagctgctgcaccctggggatctagtatagcacaacnagacttcttcaacggcaaggagctgtgcaagaacatcaatcctgatgaggccgttgcctatggtgctgccgtccagatcgctatcctcagtggtgagggcaacgagaaggtgcaggacctgcttctgcttgacgttactcctctctctctgggtctggagatgccggaggagt

SEQ ID NO: 304736 - DNA, 259 bp, Zea mays
  unsure (1)..(259): unsure at all n locations
gatgagatttatgttgtcccagatgatagtcaaaatcgtattaaaattcgagactcatttgtagataacacccaaggagatgaagaaaatgggttctctgatagaacctcaaaaagtcatttggaacggaggccttcaaaatacaaatataaatctaaaaccttgtttagtaaagccaagtcatactatagaaatatacatncagatgccagtgatgatgaggctttcaccacttctacaaacacagaaatcggggggc

SEQ ID NO: 304737 - DNA, 280 bp, Zea mays
tgccgccgtcatgtcgaagcgaggtaggggaggttcggctgggaacaagttccgcatgtcactgggtctaccggtggcggccacggtgaactgcgcggacaacacgggcgccaagaacctctacatcatctccgtcaagggcatcaagggccgcctcaaccgcctcccgtccgcctgtgtcggcgacatggtcatggccaccgtaaagaagggaaagcccgacctcaggaagaaagtgatgcccgccgtcatcgtccgccagcgcaaccgtggcgtcgca

SEQ ID NO: 304738 - DNA, 292 bp, Zea mays
ctcgagccggtcctggcatccgcagagagtttgttccgtccaggcaaccaaaaagcgttgccccgccgcgcagaggaagaagagagcagaggaggatggctcgtacgaagcagaccgcccgcaagtccacgggaggcaaggccccccgcaagcagctcgccaccaaggcggcgaggaagtcggcgccgacgaccggcggcgtgaagaagccccacaggtacaggcccggaaccgtggcgctgcgcgagatccgcaagtaccagaagagcacggagctgctgccgcaagctgc

SEQ ID NO: 304739 - DNA, 118 bp, Zea mays
gctcaggccatcaagggtatgcatatacgaaaagccacgagatatctgagcgatgtcactttacagagacagtgtgtaccattccgacgttacaatggtggagttggcaggtgtgcgc

SEQ ID NO: 304740 - DNA, 288 bp, Zea mays
gtagaaatcgccgccatattggagagcaatgtatgtctccagaagagagacttatgatcttggagaaacgccaagaatctgggaatgtgcaaggagatcagatgaaagttctacaggaactacgcagcctgaaggaaattatgacggattcaaaacagtgcccaaaatgcaggatggccatatctaagacagaaggatgcaataagatgcattgtgagaactgtggggagtacttctgctatcaatgcaaccgtgcgatcactggatatgagcatcaggggttcgtgt

SEQ ID NO: 304741 - DNA, 101 bp, Zea mays
atgttgtgtaacagttagccaaacccggagtcatcagtgtgatgggaacctaagcgtgggtggccaacatcatatacctcttgaagaagaaggagtcagcc

SEQ ID NO: 304742 - DNA, 264 bp, Zea mays
tcgccgtctgccttctgcgcctccatctcggcctctgtcccttgcaaggtcaatctcacctccaaccatgggtaaagagaagtcccacatcaacattgtggttattggccatgtcgactctggcaagtcgaccaccacaggacaccttatctacaagcttggaggcattgacaagcgtgtgatcgagaggtttgagaaggaggctgctgaaatgaacaagcggtccttcaagacgcgtgggtgctcgagaagctcaaggctgag

SEQ ID NO: 304743 - DNA, 191 bp, Zea mays
gggaggccgagccaagaggacaccaggagcccagagcaacgcgagagggctcttcctagcctcgtgccgccgggtcggttcctggctggtgtctgctgagggagtggggggcccagcccgttctcttctcgcccgccagaccacagtgggagctggggcagggggagagccaggcaatcggcggccaaaga

SEQ ID NO: 304744 - DNA, 293 bp, Zea mays
accgggttcgcggtatggacatcacgctggtgaccaccgcgaagaccgacgacgaaggccgggcgttcctgaagctgctcggcttcccgttcaaggagaacgactaatggcgaagaaagccctcatcgcgaaggccaagcggaagccgaagttcgccgtgcgcgcctacacccgctgccagaagtgcggccggccgaagctacgtaccgcaagttcggcctgtgccgcgtctgcgtgcgcgacatggcccacgcgggtgaactcccgggcgtccacaaggcctcctggtaatc

SEQ ID NO: 304745 - DNA, 152 bp, Zea mays
gtcattgtgctcatctggaccttggtcacatttcctttgcttgttttgggtggtaatgctggtaaaaacagcaaaagtgagttccaagctccttgccgtagcacaaaataccccagggagattcctccacttccctggtacaggagaaccat

SEQ ID NO: 304746 - DNA, 262 bp, Zea mays
agcccaggaaggcgcaaccgccgcaacacaccctagggcgggcgcggtcgatcgccgaggctctgctgatggccacgatctgcatagtgggtctgcccgtggaggtgcgggtccgcgacagatccacctactccggcgtcctccacaccgcctgcgtcgatgccggttacggtgtcgtgctaaagaaagcatagaagattgcaaacggaaagggagatgcgaatctgtcgctgggatccgttgtggacatcttgttgttcat

SEQ ID NO: 304747 - DNA, 279 bp, Zea mays
gacgtacaatttgaactgctacatgcgccttgattctgctgcagttcgtaccatagacattgccgaagggaaaactgatgtaaacaagaacttcagtgtgtttagtcttgatgaacctaagacttgtactgttgaggcatgggcagaaagattgctgaacagatcgctgaaccaacctctatgagatgttaatgaaattaataaccgactagacatggttcaggctcttgtagaagacccagaacttcgtcagggcctccggcaacaacttaaaaggat

SEQ ID NO: 304748 - DNA, 272 bp, Zea mays
ttctgcggttctgccgtttactcctccactttagcctcctcacttgcaagtttaatcttcgcctccagccatgcgtaaggagcagtctcacatcaacattgtggttattggccacatcgactctggcaagtcgttaaccaccggccacttgatttacaagcttgtgaggcattgacaatcgtgtgatcgagacgtttgataatgacgccgctgtaatggacaatcggtcctttaagtatgcttcggtgattgacaagctcaaggctgagcgt

SEQ ID NO: 304749 - DNA, 269 bp, Zea mays
gcatcacgccgcacacggacgggctgggcctcacgctggctgctgcacgtggacgacacgcccggcctgcagatccgcagggcggcaggtggttccccgtgcgcccgctgccggacgccttcgtcgtcaacgtcgccgacatcctggacgtgctcaccaacggcgcctacaccagcgtcgagcaccgggtgctcccggacgccgagagggcccggaccaccgtcgtcgtgttccaggaggcgtccgtcgggggcctggtggcgccgctg

SEQ ID NO: 304750 - DNA, 271 bp, Zea mays
gttggtggagattccagacacagagcagattcagatatgacacatgttgcattagcttttgaagtgccagggggctggcttcaagagagagacgctacaattatgactgtcatacagactttaatgggtggtggtggttcattctcatctggcggtcctggaaaaggaatgcattcacggctttatcgacgtgtcctaaataaatatcacttggttgattctttttctgcatttaacaatgtatatgacagcagtggcctctttggtatct

SEQ ID NO: 304751 - DNA, 280 bp, Zea mays
agttgcggaaggagatcgtgggcaagaagaagggccggcgacgggatgccgcggttgggctgtttgtcttcccggcgcagtctcgcgtgaccggtgccaagtactcctaccagtggatggcgctggcgcacagaatgggtggcatgtgatgcttgatgctggtgcacttggccccaaggacatggattcactgggtctctcgctattccggccggacttcattataacttcgttctacagggtctttggtgcagacccaactgggttgggttgccttctg

SEQ ID NO: 304752 - DNA, 223 bp, Zea mays
cggcgaccctgggccctgcgcaccgacccggtttccccgacgtggcactcgacccgcggcgttagcgaggacggcgtcgccgaggtggtggccgcgctgcgagccgacgtggccggcctcgcgtccaccgcgataaccaccacctcgtcctacttctacgggaaggcgatcgcgcgggcggcgcggctggcgctgatcgcggaggaggtcgggtgccccgacg

SEQ ID NO: 304753 - DNA, 282 bp, Zea mays
cttcggtattgctggcatacattggacaagctgcatatcttcgtatctacccagaaaatgttgcaaataccttctacaaatcaattccaggtccgttgtactggccaacatttgtggtggctgtagctgctgctataattgcaagccaagctatgatatctggtgcctttgcaattattgctcagtcccaagttctaggttgctttccacgagttcgtgtcacccacacatcaacgaagtttgaaggacaggtctacatcccagagatcaactatgtcttga

SEQ ID NO: 304754 - DNA, 282 bp, Zea mays
aaaatggcttctcaggtccctcacgttccgcctcgtgctgctactgtcctctcggcgacagagctcatcggaaatactcctctcgttagacttaacaagatcccccagtcgctgggcatcgagtgcgatgtctacgtcaagccagagctgttcagcgctggaggcagtgttaaggacagaattgctctgcgcatgattgaagaggcagagaagagcggaagaatcaagcctggcgacactcttatcgagcctaccagtggaaacactggtatcggtcttgct

SEQ ID NO: 304755 - DNA, 268 bp, Zea mays
gcaacttcagttagcttctgtattcttcacttttcatcttggaacaaagactcactactatggcaggacgatacttcatggtggagcaaagtatagagctactgggagagggtttgttgtgcgtcatgcaaagttcgctgagaattatcggatgtactcccggagtcactttgtcaaagcactggagctgcttattcttttggttgtctacctagcttatgggagttcatacagaagctcaagtttgtatttgtatgtcacagtttcg

SEQ ID NO: 304756 - DNA, 287 bp, Zea mays
attggaaaagtcgtaatacaatgccaaagcgaaacttggtagaaattggtcgagttgccttaatcaactacggccccaatgctggcaaatcatgtgtcatcttagatgtccttgatcaatcacgagccttggttgatggtcctcaacaaaagactggtgttgcccgacaaaccatccccttccgacaattatcattaacaaaagtcaagctcgatattgctcgatccatcggtgtttccagcttagtcaaggcttatgatacccaaaagattggcgaactctctcca

SEQ ID NO: 304757 - DNA, 292 bp, Zea mays
gtcacgattcacgacggaaacagtagtgctgtcacctgtcagtagagctctcccctgggccaagaactcgatccgagcaaaaaatgtcggaggccgccgtgcgagtgatcggcctatggcgagcccgttcgtgatccgcgtcctgatcgcgctgaagctgaagggtgtcgagtacgagttcgtggaggaggtggtgggcaggaagagcgagctgctgctcgcgtcgaacccggtgcacaagaagatccccgtcctgctccaccacggcaagcccatctccgagtccctaatc

SEQ ID NO: 304758 - DNA, 281 bp, Zea mays
attggaccaggaaacagaatcttagatatgattataggaccatacaagctgtctcggcggtgtgaagtgactgcaatccttatattatatggtctgccaagattacaaactggttccattcttgcccatgagatgatgcatgcatatcttcgtctcaaaggattccgaaaccttagtattgaggttgaagaaggcatctgccaagttctatcccacctgtggttagagtcggaaatcatcgctggttctagtagcaacgttgcatccagttcagaagcatc

SEQ ID NO: 304759 - DNA, 281 bp, Zea mays
ccaaaacctagctttctttgccgtgtataacatggagacaacggatatcgtttcacttcatcagaattcttcggaggagctctatgccttgtttgaacaattttatgaccattttcatgcaaacccacaagcttcatcacatggaaaatttatctcctctcattccaatgatattcatgctttggatcaacttcgggttataaaaaataaagcaagtagctcctcacagaacaaaatactgaactgtgtagataaatgtatacagcaacactaaatctcca

SEQ ID NO: 304760 - DNA, 281 bp, Zea mays
ggaagcgggggtatctcctgtacgggccgccgggcaccggcaagtccaccatggtcgccgcgatggccaaccacctcgggtacgacgtctacgacttcgagctcacgtcggtgaagaccaacaccgacctccggaagctgctcatagagaccaagagcaagtccatcatggtgttcgaggacatcgactgctcgctccaagtgaccggcaagcgcaaaagcaaggaggaggaggagggttcgaaagacgggaacggggacgacccttatgcggcgaaacag

SEQ ID NO: 304761 - DNA, 277 bp, Zea mays
aacagaacttaaaaaactaaagctgagttggttaagagaccaaacgggcttagtgagccaagaacctgtacttttcaacaacacaattcgcacaaacatagcatatggaaaacaaggagaagtaagagaggatgagatcgttgctgcggccaaggcagcaaatgctcatgagttcatatctagcttgcctcagggatatagcactattgtcggcgagacgggaacacagctctctggaggacaaaaacaacgggttgctattgcaagggccatcttg

SEQ ID NO: 304762 - DNA, 270 bp, Zea mays
gttctagatcgcgagcggccgccctttttttttttttttaaatatggctcacaaatcgcctgcatggttttattgacttattatgttcatcaacaatataatcatcgtaatataatgatatacagagttgacaacactatttataatatgcatgcatgctgaagttaatattaagcgtatatatatacaattgtagtatgcatgacagtctagtaggggctctcgccgacgacgttgcccggcgggttgtagctgcagatgatgaagacg

SEQ ID NO: 304763 - DNA, 283 bp, Zea mays
tcttcgtcgagttgtcttacagctttgttctattttctttcttgtgttcaaatgatgcatacttgctggtcatttgtgcaggctatggtcaaactggtcatcgagaggtacacgagagaagctggtgtgcgcaatcttgagcggaacctagctgcattggctcgtgcagctgctgttaaggtcgcagagcaagttaaaactcttagacttggcaaggaaatacaaccaattactacaacccttcttgattcaaggcttgctgatggcggtgaagttgaaatgg

SEQ ID NO: 304764 - DNA, 279 bp, Zea mays
ctgcgctccaggggcgcgcactccctctcgctggcggacaccgtcgacaacgtgatgggcatcgtcatcggagcgcacggcaccacctcgacgctcatcaccttcatggtgcgccacctcgccaacgagccagacgtcctcgccaagatcacccaagaacaagatgagatcgctggcagaaacggaagagacggtgctctaacatgggaagacgtttcgagcatgaagtacacatggagggcggcgctggagacgctgcgcacggtgccgccggtgttc

SEQ ID NO: 304765 - DNA, 266 bp, Zea mays
ggttgataaaggcatggtttcgggagcttccttcaggtgtattggatgcactgacaccagaacaagtaatgcactgcaacacggaaggggggtgcgctctccttgcttctatgctaccaccagtggaagcagcattacttgactgggccattaatctgatggccgatgttgtagagcaagaaaactacaacaagatgaacgcccggaacatcgcgatggtttttgcgcccaatatgactcagatggccgatccgttaactgctctg

SEQ ID NO: 304766 - DNA, 257 bp, Zea mays
cgacaaaatggctcgccgtcctgctcgttgctaccgatactgcaagaacaagccgtatcccaagtctcggttcaaccgtggtgtccccgaccccaagatccgcatcttcgatctgggccgaaagcgcgccaacgtcgacgacttccctctctgcatccacctcgtctccaacgagtatgagcagctgagttccgaggccctcgaggccgcccgtatttgcgccaacaagtacctcgtcaagcacaccggtaaggagg

SEQ ID NO: 304767 - DNA, 262 bp, Zea mays
aggctcgagtgccgctattagtcactgactcattatgcacaagatcttcacaacacaaggtgctgaaggcgagcaccgaggaagatggggctcgtgttcgggaagctcttcagccggctcttcgccaagaaggagatgcgaatcctcatggtcggtctcaacgccaccggtaaaaccaccatcctctaggggagatcatcacaaccatccccaccatcggtgagccccagccttgccttttcaacattgtttgatcattttg

SEQ ID NO: 304768 - DNA, 285 bp, Zea mays
cccaggtcaaatccctcccggaatccgtccaaaggctcgcgtaccttgacacgctggacgtcaggcaaaccagagtacagaggctgccacagggtgtcggcaaggccaggaagctacgccacatcttggcagacgcttgttgtcccgatggcagccagcagtcagaatttcgaagcttcactgcgttggagcccccaaaagcgctgacgagttttggagagctgcaaaccctcgagactgtgcaggctaacaaggacatggcgatgaagctagcgaggatgatgc

SEQ ID NO: 304769 - DNA, 274 bp, Zea mays
agctagcagtcgttgtagaaacaaagaaataaagagagacgatgggcggagaagaaggcggcgacgggctgaagctgatcgggcagtacgggagcgcgttcgtgacgagggtgaagcttgctctcagcctcaaggggctgagctacgagtacgtcgaggaggatctcagaaacaagagcgcgctcctcctcagctccaacccggtgcacaaggcggttccagtgctgatccacagaggcaagcctatctgcgagtcgcaggtcatcgtgcagta

SEQ ID NO: 304770 - DNA, 136 bp, Zea mays
  unsure (1)..(136): unsure at all n locations
ggatcgaatgtcacatctttactatataataggagttctgtacaaaataaatagttacattataaggagacaacggtccagcaaacccaaagtgtgactgggagatcgacgaccctagaccnctntcacgaacaca

SEQ ID NO: 304771 - DNA, 287 bp, Zea mays
  unsure (1)..(287): unsure at all n locations
gtcncctgctccattctcagccgccgccaatcccttcccgtgctccgcaaccgctgagtgagaagaagagatggccggcaagggcgatggcccggctatcggcatcgatctcggcacgacgtactcttgcgtcggcgtgtggcagcacgaccgcgtcgagatcattgccaacgaccagggtaaccgcaccacgccctcgtacgtcgccttcacggactccgagcgcctcatcggagatgcggcaaagaaccaggtcgccatgaaccccatcaacaccgtctttgatg

SEQ ID NO: 304772 - DNA, 285 bp, Zea mays
cacgagcgcctcaagaagccggactggatccgcgtaaaagccgcgagcccgtcgtcgcgcttctacgagatcaaggacatcctgcgcgccaacaacctcgtcaccgtgtgcgaggaagcgagctgcccgaacatcggcgaatgcttcggcaagggcaccgcgaccttcatgatcatgggcgacaagtgcacgcgccgctgcccgttctgcgacgtcggccacggccgcccggacccgctggacgtcaacgagccggggaatctcgccaagaccatcgccgacctg

SEQ ID NO: 304773 - DNA, 264 bp, Zea mays
actgccagtcaacttacatcatatatcactcacatacgactggatgagatcaacaaaaagttaagaagtggagagatctatccaacttacagggatcgttcaccgtccccggaacccatttataactcttctggtaaaaggatcaacagccgtgagcaaagatacaaaaaaaagcttgaagatgagagatctaagcttatcgagcagactatcaagaacaatcccgaacttaataaggatattgaccatcagacttacttggac

SEQ ID NO: 304774 - DNA, 237 bp, Zea mays
gctgcctgctcgctcgctcgctcgcttccttgctcactcaagctgctatgctgtgctctgccctgctgtatactgacggcggcatcgtttctgtttcttggccatggcagcaacaacatcctgtaccccaaggaggaccgggagcagaaggtgctcctctacgcctgccggaactgcgaccaccaggaggtcgcggacaacaactgcgtgtaccggaactggtgcacaaagcgccgg

SEQ ID NO: 304775 - DNA, 310 bp, Zea mays
cagcaagctccctcagctcggtcttctcggcaggacccggcaagcagagccaaagccaaagccccgctcttttctcgacgacgtggacgtgaatcgatcgggagatcgagacatggggcgcgctccgtgctgcgagaagatggggctcaagaggggcccgtggacgcccgaggaggacaggatcctggtggcgcacatcgagcgccacggccacagcaactggcgcgcgctgcccaagcaggcgggccttccccgctgcggcaagagctgccgcctccgctggatcaactacctgcgccccgacataaag

SEQ ID NO: 304776 - DNA, 272 bp, Zea mays
ggtcacatgatggaacaccaccagcctcccaccataccacgcaaggaaggcccaaatggcgaaagaaaggccggtgaaccccacagcgagacccttggcgatgccctgcttgatccccagcttgatcgtcttgtcgaggatcgccgtgtacctctggatgatcctcttctcggccgtgaaggagtagacggtcttgatggagcccagagcctggtcgaccagggagttcgccttggcgtactcgtggcgcgaccggcgggacaggtagagga

SEQ ID NO: 304777 - DNA, 303 bp, Zea mays
tgtgacattaaatattaattcacgtgccttatatattataatattaattaacaccacaaatacaagtggttttcctctctctttttttgcaaatcttaccgaagtctacatatttaagcacaccaatattttcttattcgtctgttagttataaccgtttcttgtttgtatatagagaatttacaatgctatcttgtggtttcaggggaagagaggtattgagaaacagcctttccagcttcctgacttcattgctgcaactggaatagaaaagataagacaggcttatattgagaaagagga

SEQ ID NO: 304778 - DNA, 283 bp, Zea mays
  unsure (1)..(283): unsure at all n locations
cgtcgacgaagccggccgcgnggagaggcgaccgtcagacaaggagctcttccgcgccgctgagtccggcgacgccgccgcgttcgcctccctcgcccccgccgacctctccctgcgcaacgaggacggccgctccctcctccacgtcgccgccgctgccgggcatccccaggtggtgctcgcgcttgcccagtgcggtggtgacgccgcggctagcgtgctgaatgcgcaggactatgaggggtggacgccgatccactccgccgcgagctccggcaactct

SEQ ID NO: 304779 - DNA, 187 bp, Zea mays
cggctcgagcggacgggcactacgtgaagccgttcgtggtgaagaacctcaacatctactcgggcgagacctactccgtgctggtcaaggcggaccaggaccccaaccgcaagtactggctcgcctccaacgtggtcagccgcgagccgcgcacgccggcgggcaccgccgtgctgcagctactacg

SEQ ID NO: 304780 - DNA, 297 bp, Zea mays
gtggatgtacctggccgtgcccatggtgctgtacgcgtgcgagcgcctcaccagggcgctgcgctccagcgtcaggcccgtcaggatcctcaaggtggccgtgtacccgggcaacgtcctctcgctccacttctccaagccgcagggcttccgctacaagagcgggcagtacatcttcgtcaactgcgccgccgtgtcgccgttccagtggcacccgttctccatcacgtcggccccgcaggacgactacgtgagcgtccacatcaggacgctgggcgactggacccgcgagctcaa

SEQ ID NO: 304781 - DNA, 295 bp, Zea mays
gtcctacggttctcgatgcgtccgacctcccatcattgtcggtgacatctctcgacctcagcccatgaccgtcaaggagtccaagtacgccgtctcggtctccaagaagcccatgaagggtatgcttactggacccgtcacctgccttcgatggtctttcccccgtgacgacgtccaccagtccgtccaggctgagcagcttgcccttgccctccgtgacgaggtcgtcgacctcgagaaggccggcatcgacgtcatccaggtcgacgagcccgctctccgtgagggtcttccc

SEQ ID NO: 304782 - DNA, 276 bp, Zea mays
agatcctgataattcgtctgcgcaacaatatgatgagaaaaatatccgaagaagagtttatgatgcgctgaatgtcctaatggctatggaaattatatctaaagataaaaaggaaatacagtggagaggtctgcccaagacaagtatgaatgatattgaagaactgaagacagaggtcaatggactgaaaggtcggattgacaagaaaaatgcatatctgcaggatttacaagatcaatatgcatgtctgcaaaacttggttcggcgaaatgagca

SEQ ID NO: 304783 - DNA, 265 bp, Zea mays
atagcttgccgcgctgctttatacgtttgcttcttgattgatgccatttgcttgaattagcattctttagaattcacacatcttcctttctacaagacgtttcgttttaatttcatcggtattcttaccaactttttatctttttactaggatgtcagtatgaaggtcatatctttctcccaacaaggtccaagggctatttgcattctatctgccaatggagttatcgcaaatgttacactgcgtcaacaagactcattaggtg

SEQ ID NO: 304784 - DNA, 288 bp, Zea mays
ggatcatcgacgggctgacgggggcgaacaagcatgcgcggctcaagggcacggtggtgctcatgcgcaagaacgtgctggacctcaacgacttcggcgccaccgtcgttgacagcatcagcgagttcctcggcaagggggtcacctgccagctcatcagctccaccctcgtcgacgccaacaacggcaaccgcgggcgggtcggggcggaggcgaacctggagcagtggctgacgagcctgccgtcgctgacgaccggcgagtccgagttcggcgtcacgttcgact

SEQ ID NO: 304785 - DNA, 248 bp, Zea mays
tgcctttaccggtggctgcacatccatgcacattcgccagactgcccagtgtgcaaggctcttgtggaggaagacaagcttgttcccctttatggacgcggcaaggatcgtgttgacccaaggtcaaagaacatgcccgacggtgagattcctcaccgcccaactggtcagaggcctgccccagccccccaggccgatgctaacaacaactttgccaatgccaatccaaatgcgaatccatggttcat

SEQ ID NO: 304786 - DNA, 298 bp, Zea mays
ccattcctccccaaaacacatcctgcgatcctcgaagcctccgccgagcatcgatcatgtcggcctactgcggcaagtacgcgggtacgttccatcgtctcctccttcgttgctgatctgcttgtgatgtcgtttggcctcgtgtgtcgtagatctacgatctactagttgttcgttgttgatgccctcagatctacctgcgtttgacgagtatgttaacgattcgtctagctctgagagacccaagggatttgcggatccttttttagatccgtacaggctcttgcggtcgtgccta

SEQ ID NO: 304787 - DNA, 278 bp, Zea mays
gtcacgggtgagtgagaggttctcgcgcgtgagtgatggtcaacagtcaacactgctgatggtgttgtgtcattgtgtgcccgtgcgtgtgtgtgcgcgtcaggcgacttcgagaagttcacgagggtgacgatgatcctcccgctgacgggcgagcagtacgcggagaaagtgacggagaactgcgtggcgttcttgaaggccgccggcctgtacacggacgccgagggcgtcgccgtggagaagttcagggaggtgttcaagccagatactttcgc

SEQ ID NO: 304788 - DNA, 268 bp, Zea mays
atcggcgacaacgggctgcacggcgagatcccgccgcacctgggcaactgctcggagctggagacgctcggcctggcctactgccatctgaatggcaccattcctgctgagctcggcaacctgaagctgttgcagaagctggcccttgacaacaacgccctcaccggtggcatcccggagcagatcgcgggctgcgtaactatgcgctttctgtcagtgtctgataacatgctgcaaggcaacattccttcgtttgttggaagcttca

SEQ ID NO: 304789 - DNA, 299 bp, Zea mays
cggctcgacgttggcttcaatgttaagaatgttgctgtgaaggatctgaagcgtgggtatgtggcctccgactccaatgatgaccctgccaatgaggctgctagcttcacgtcccaggtcatcatcatgaagcaccctgggcagattggcaacggctatgccccagtgctggactggcacacctcgcacattgctgtcaagtttgcggagctcattaccaagattgataggcggcttgtcaagagcttgacaaggagctcaattcctcaagaatggtgatgctggtatggtgaagatgg

SEQ ID NO: 304790 - DNA, 287 bp, Zea mays
ggatataatcctgcaacatgggcgctggaagttagctctcctctatccgaggctcgattgaacatgaattttgctgaaatttatgctaactctgtgctttataggaaaaatcaagagctcatcaaggagttgagtgttccctcaccagactaccaggacctgtcattccctacaaaatattcgcagaatttctacaaccaatgcgccgcgaacttttggaagcaataccgttcctattggaagaatccgccctacaatgctatgcgctacctgatgacatttctctt

SEQ ID NO: 304791 - DNA, 299 bp, Zea mays
cccaaaagcagccagcgcaccgcatgtcctcgtcttcggcgcaccagaaggcgtcgccgccgatagaggaggaagcgacggagcacggacccttccccatcgaacagctacaggcatctggaatagctgcacttgatgtgaaaaaactcaaagatgctggtctctgcacagtggaatctgtagcatactctccaaggaaagaccttttgcaaattaaagggattagtgaagccaaagtcgacaagataattgaagcagcttccaagttggttccactcggatttactagtgctagccaa

SEQ ID NO: 304792 - DNA, 285 bp, Zea mays
tgcaaaggtcacaactaagaatattggtacactggaggcttcgtataccttgacatttcactgctcaagtggcatcagttttatggagcatgttgttagtcaatgttgcaaatatacgttcaatatgtaatcagagcagtactatatcctcaaaccgaatgaagagagtacccgtttattttacttgcacgcatctacagatcaagcagcaaagtatcaatgtacagctattctgaaggcgtcggattctagtgaactcgacagacaagaatgtgttttttctac

SEQ ID NO: 304793 - DNA, 279 bp, Zea mays
ccaaagcctccgtgctgcctccgatgctcaatgcgctggagatctacgttcgcgtcccttatgagagtccgacgacactccctcaagaccttgacgccatcatggctatcaaaaccgagtatggagtcaggaaaaactggatgggtgatccatgttttccaatcaaatatgcttgggacggtgtgaaatgcagcaatgcaagtggtaacacatcgaggataacatcactagacctctccaacagctctttgcatggcacaatatctaatgattttacac

SEQ ID NO: 304794 - DNA, 287 bp, Zea mays
caccaccagaactcgaaggcttcagtctccgcccaacttgcggttaaagtgattgatttctcgtgttcctcttgaacctcctaaaaaactttcaaaatgaagcacctcgcagcttacctcctgctcaccctcggcggcaacgctccccctctgctgaggatgtcaaggctgtcctcagctccgtcggcattgaggccgaggatgagcgtcttgagaagctcatctctgagctctctggcaaggacgtcaacgagctgatcgccgctggctctgagaagctcgcttcc

SEQ ID NO: 304795 - DNA, 336 bp, Zea mays
taagatttcagattttggcctggctaggctatttggaggggatcaaacccgggagattacaagtcgcgttgttggaacatatgggtatatggcacccgagtatgccatgcgtggccactattctataaagtccgatgttttcagctttggcgtcttggttctagaaatcttaaccggaagaagaagcagtggttcctttaacatcgaccagtctgttgacctcttaagtcttgtttgggagcactggaccatgggaacaattgctgaggttatggacccatctctgagaggcaaagctcctgcacagcagatgctgaaatgtgtccacatcgcgct

SEQ ID NO: 304796 - DNA, 332 bp, Zea mays
gagcatagatagatcccgttacgtaaatactgcaacatgcgcaaacgattagttattctggacaaacagcatcacacaaacaaaagccatgcatggatagtaatcaaaattcaaaacacgagaccagatccctggagcttgtcttcgaaaacggcgtcgaccttcttgcccatctcttttgtcaagtggttctcccagtccccaaccttgcccttcctgaagaaggtagattttccgatcaccgtgttgtctccgcaatcaagatctccggtccgattgctttccaagccgctcagcatctcgaagctgcacagcctcacaatctcctccgg

SEQ ID NO: 304797 - DNA, 335 bp, Zea mays
ctggcgtcaactcgctgagataccctctgtattctttcttcttcttggactttttatgtgggtcaacttttcgtgggttgactccatgtttttatattacccggtggttttagtgttcatcactgtcgtgatgctctttgttcctcttaaagtattctatcaccacagtcggctttggtgggctgtctcgaactggcggctcttgcttgccggcttataccctgtcgaattccgggatttcttcctaggcgatatgtattgttcccagacatacgctatgggtaatattgaactcttcttttgtctttatgccaattcctggagtaatccaccga

SEQ ID NO: 304798 - DNA, 333 bp, Zea mays
acaaggggtgttcggctcttcgtggaaggaagagctctgtgagggaaatcacatcgatggtgagatcgccgtgggcagcccaacacttctggttatcagctcatctgctttgcgatctttagacctactgaggggtttgaagatgtttactaaagaatgccgaccagtaaagctctttgccaaacacttgaaagtggaggagcaggtggcgatgcttaatgctcgagtaaatattgcctgtggtacaccgagcaggatcataacactaattgacatggactgttactcgctagaaccgtatcctcgacgtggtctacaatgcatcaacaatga

SEQ ID NO: 304799 - DNA, 323 bp, Zea mays
caaggacgtcgccgtcctctccggcgcacacacaatcgggaaggcgcggtgctccacggtgtcgccgcggctgtacaacttcggcgggcagaacggcgcgtccgaccccacgctggacgccaactacacggccacccttcgcggccagtgcaagcccggcgacaacgccaccctcgtctacctcgaccctcccacgcccaccaccttcgacgccgactactacaccctcgtcgccggcaacaagggcctgctctccacagacgccgccctcctcctcgacaccaccactagcgcctacgtcgcgagccaggccaacgccaccg

SEQ ID NO: 304800 - DNA, 280 bp, Zea mays
ctttctgtggattatccggttgagaaggtctcctgctatgtttctgatgatggtgctgcaatgcttacgtttgaagcattgtctgaaacatctgaatttgcaaagaaatgggttcctttcagcaaaaagtttaatatcgagcctcgtgctcctgagtcgtacttccaaatgaagcagcaaccttgtctttcaggtagtctatcttctgttggaagtaccactcaggagcacgaggttgctgcttcatttggaagtaccactcaggagcacgatgaagaga

SEQ ID NO: 304801 - DNA, 304 bp, Zea mays
agacggaggagccatgtctgaggagaagcaccaccaccacctgttccaccaccgcaaggcagaggaggaggaaggcgcctccggcgaggtcgactacgagaagaaggagaagcaccacaagcacatggagcagctcggccagctcggcgccatcgccgccggcgcgtacgctctggtgagaccgaaaaaacccaacctccatccctttggtcgcctgatcgatgcatgccatggtccagctcttgatctgtgtgtgtctgtgcgtgtgcatcgacgtgtggctgcagcacgagaagcacaaggc

SEQ ID NO: 304802 - DNA, 294 bp, Zea mays
ggcggtctttgctggcctcgtgtcgtatccacggagacatggagagaggccaacttgtggcggacaagataatggatctggagcccacttcctcagcatcctacgtaattctctacaacatgtatctggatgctggcgagctgtcctcggcttcaaagactcgagatctgatgaaagagcgaggcgtgaagaaagagcctggtcttagttggatcgagctgagctctggagttcactcttttgttgccggtgacaagtcccatccagagagcaaagcaatatacagaaaagtgg

SEQ ID NO: 304803 - DNA, 287 bp, Zea mays
cagcaacgtcaccgtcaccgtctcggacaaggacgtgctcctggaggtgcagtgccggtgggaggacgctcctgatgacgcgagtgttcgacgccatcaagagcctccatttggacgtcctctcggttcaggcttcagcgccagatggcttcatggggcttaagatacgagctcagtttgctggctccggtgccgtcgtgccctggatgatcagcgaggctcttcgcaaagctatagggaagcggtgaaggggcagctggaaatttggacatcgacgggcatggaag

SEQ ID NO: 304804 - DNA, 276 bp, Zea mays
tggcgcgcagccgggtcgcgctaccatgcttgccgccgtgcaggcggcggcgcctccgccgtcatcaatcttgctcatgctcggcatgcagccacatgtaaggcagatgaggaaggcaggatgtcgcagcgtaagttcgagcagccgaggcacggctccctcggcttccttcccaggaagcgctcctcgcgttactgcggtaaggtgaagtcattccctagggatgatcccaagaagccttgccatctcactgacttccttggctacaatgctggc

SEQ ID NO: 304805 - DNA, 286 bp, Zea mays
cgggggctagtcgcaattttgaaccatggcgtgcacaggacgaggcagcagacaaagaaaagattaaacgagatgctgaggagatgggtgatgcaatgaaagcgttggaaaatagagcaatggattcaaagcaggatatggacatccttgcagctttggaagagatgcggtccatgaagtctagacatgctggtgtctctgttgaccagatgcttgaaattttgaagcgttcagctcacgagaaggaggaaaaagcaattgcagagcttgatgaagaagatgagga

SEQ ID NO: 304806 - DNA, 284 bp, Zea mays
gatggttaagataattttattacaaatttaattggaacatggagtgaccacccaggataacagtgcaaccacgagtgctatcatggctctggctttggtaattagctctatatgcttagtgtctagcaaccttacctgaaagatgggcaagagggggagcggtaggtgctggcagcccacgttaacatggggacgtattcttggctaaggtacctcacccagggggccaccaccatcgtcttagaaaccttagcgggttgcttcgtattaagtgtattttgtga

SEQ ID NO: 304807 - DNA, 286 bp, Zea mays
catgacggccgagctttacggcatgttctttgtcgccgaagatgtatttggcggggagaattcaggtcgtcctttggagttgacgtgttatcgccgcaacctgtggcagtgctctggacagattactttgccgaggaccttgaacaatgtcatggacgatcaaggccagcacatcgccatcacagaactgtctgcatccattacaggcatagaatcgattgaaggaaaacccgccgaaatcatttcgattccatggaaaggcgcaaaccctcaactggaggagacg

SEQ ID NO: 304808 - DNA, 276 bp, Zea mays
cggctcgagattcgttccaactcctgagcactttctcctcgtccccgacaagccaatcgaagccgagatacggccatggactccaccggcaccggagcagggggtaatgggaagaagggagcggccgggcgcaaggtcggcgggccaaggaagaagtcggtgtcgaggtccgtgaaggccgggctccagttccccgtcggccgcatcgggcgctacttgaagaagggccgctacgcgcaggtgtcggcaccggcgcccccgtctacctcgccgctg

SEQ ID NO: 304809 - DNA, 238 bp, Zea mays
gtaaaagacaattcacaggtggagaacatctttttacagtccaaaagcactccaccgggtacgtgagttcgtgcgcagttgtgcagtttgccaacgcaacaagactcagcaccttcatccagctggtttgctgcaacccttgcccattccttctatggtttgggctgacatatcaatggacttcattgagggctttccaaaggttggtggcaagtcagtagtgctgacaattgtagac

SEQ ID NO: 304810 - DNA, 275 bp, Zea mays
  unsure (1)..(275): unsure at all n locations
cggctcgagacaagcttgtacaaatccctgcctgctgtttccctttgtcaggagcttgaagggatggccgaccctacaaggaaggaggtggagtcgataaggaagcggatcgacacggtgaaccgtcagctcaagcctctcagcaagagctgcgtcaagaaggagaaggagtacaaggaggtcctggaggcgtacaacgagaagagcaaagagaaggctctgctagtgaacagactaatcgagcttgtgagcgaaacgangaggatgcggatgaa

SEQ ID NO: 304811 - DNA, 151 bp, Zea mays
  unsure (1)..(151): unsure at all n locations
tgcncaagcgcccgcgcgtccccgccctcgctagtgtcattgtggaagctctcaagatggacagtctgcagaaactctgttcatcgcttgagcccattctccgaagagttgtaagtgaagaagtagagcgtgctttagccaaactgggtcc

SEQ ID NO: 304812 - DNA, 284 bp, Zea mays
taacttctcattatttgtttgctcttggttcttatcgtgcattttatttattaaattggatttatcgttactttgacgatggtttccatgaatggattgctatctttgctggtatcattcaaactgtactttactgcgatttcttctacttgtatgtaacaaaagtaattcatggtcgttctttccgtttaccagcataaattgcaaatttatttatttaatttgattatcgtttgttgataatcaataagaaagcaatttaaacaatttcgatcaatagttac

SEQ ID NO: 304813 - DNA, 239 bp, Zea mays
cggacgccgcgcgcgcgtcgctgcagcgcatccgcgggcggtccgctgacgtgggcgtggagctcagggacatcgtgcaggccgcggaggaggaccggcggcacgagtccggcgcgttccggcgcatcgtgcgccgcgagtaccggccgcacctggtgatggccgtcgccatcccgctcttcttcgagctgacgggcatgatcgtggtgacgctgttcacgccgctgctgttctacacc

SEQ ID NO: 304814 - DNA, 284 bp, Zea mays
gtcatacaaagctgctgttgaagaagggatcaccaatggttttggcatgggttctgttttctgcatttttttctcgagctacggtttggccatatggtatggcggaaagttggttcttagtaaaggttactctggaggagatgtcatcaacatcttgtttgctataatgaccggggcaatgtctttaggtaacgcaacaccctgcatggcagcctttgcagaaggacaatccgcggcatacagactgttcacaacgatcaagaggaaaccagagattgacccag

SEQ ID NO: 304815 - DNA, 269 bp, Zea mays
cttaaacctttgttatcttctggggaagagttattttgttgagctcctgttttttgctacttgagtcaatacggagtactgtcaggcctgtgccaaggggtgtgcgagctgttcactcgtacagggtcccgcaaaatctagggccccaaatatgagtgctgtatctgcctatgcccgtatgaagatggcgtggaactacgtgagctcccttgcaaccaccattttcactgcagctgtatagacaagtggcttcacataaatgctacatg

SEQ ID NO: 304816 - DNA, 274 bp, Zea mays
gtgatgggcagtgtgttgtgatgctccagacaaaatttgagaagttctttgaaaaaattgatctgactctgttgaacaggcttctgcggttagtcttggatcataacatagctgactatgtcactgcaaagaacaatgtagtgctgtcttacaaggacatgagtcacacaaattcttatggtctcattcgagggcttcaatttgcatcttttgttgttcagtattatggccttgtgctggatctcctgattcttggccttactcgtgcaagtga

SEQ ID NO: 304817 - DNA, 277 bp, Zea mays
acctgctgtatctcattaccatctgcatctggttgcccgttgattgagaaggaggagctgagggccatggcgaccgagaagcccatcctgtacaacgcctggatcagctcctgctcccaccgtgttcgcatcgcactcaacctcaaagtctaagatgtttcgcaagaatcacatccaggctcgtctatttctggacaatttctgaagttcgctcagctagggattagcgatgactaccgatgctagcaattctgttgtatttcttggtctgttaact

SEQ ID NO: 304818 - DNA, 235 bp, Zea mays
agacgttggagatcacagatgatgtgctttcgtcatacaaaaatcaaggtggttttgatttgctgggcaggactgttgatcaaatccgcacgacagagcaagtagatgctgctaagtcagcatgctgtgatcttaacttggatggcctaatcatcattggaggggtgacctccattcagatgctgctcagcttgcagaattctttgcggagcatgactgccagacaaaagtcata

SEQ ID NO: 304819 - DNA, 251 bp, Zea mays
gacgagcttctgtgggcggcggcatggctgtacgaggcgacagatgaagggtgctacctcgagtacatggcccggaatggcgacgctctcggcggcacgggctggtccatcaaccagttcggctgggacgtcaagtaccccggcgtgcaggtcctggcagccaagttcctcctgcagggccgtgccggcgcgcacgccgcgacgctgcagcggtaccggcagaacgccgagttcttcgggtgctcgtgcgt

SEQ ID NO: 304820 - DNA, 274 bp, Zea mays
gctgtgcgcgccgtcgctggccgggttcatcgacgcgttcccggacctggcgctgttccacgccaactccaacaacttctccggcgacgtgccggacctgacccagctgcgctacttctacgagctggacctgtccaacaacaacttctcgggcgcgttcccggaggccgtggtgccgctgggcgggctgctgttcctggacctccgcttcaaccggtacgcgggggaggtgcagcgccggtgttcgcgctcacggtggaggcgctcttcctca

SEQ ID NO: 304821 - DNA, 263 bp, Zea mays
cgggcacctgtctccaccaccgtgcccctccgactccttcttcatccagccaagccagcgatcgccatgtcggactcggaggaccatcacttcgaatcgaaggccgacgccggagcgtccaagacctacccgcagcaggctggcaacgtccgtaagaacggcttcatcgtcatcaagaaccgcccctgcaaggttgtggaggtttctacctcaaagactggtaagcatggtcatgccaaatgccaccttgtcgccatagacat

SEQ ID NO: 304822 - DNA, 193 bp, Zea mays
gcctcattcatctccattcgaaacaccctcgcacccacactctcccttcgtccccagcctaaatccccgcaacgatggctcgcacgaagcagacggcgcgcaagtccacgggcggcaaggccccgaggaagcagctggcgaccaaggcggcgcgcaagtcggcccctgcgaccggcggcgtgaagaagccgca

SEQ ID NO: 304823 - DNA, 277 bp, Zea mays
ctattataatggggtccaatctgatcttcctgtgatgaaagatgctgagagggttttgaaagagttcgacataccttgtgaggtaactattgtttctgcacatcgtacaccagagcggatgtatgattatgcgaagtctgctaaagacaggggtttcgaggtcataattgcaggtgcaggcggagcagctcatttaccagggatggtggcttcattgactcctcttcctgtaatcggagttcccattaagacttcaacactatcaggatttgattcc

SEQ ID NO: 304824 - DNA, 283 bp, Zea mays
aggagcaccccagcctatcaaagagcgagaagaagaaactgtgcgggctgatggactgcaagcagctgtcgcaggacgcgtgcatgcacgccgtgcagaacgagcgtctccccctacgcgtggtcgtgcaggttctcttcttcgagcaagtccgggcatcgtcgtcggttgcttctgcaaggagcgacgctaattcgacgtcggggctcccgtctgccgttcgctcgcttcttcccagagagaacggcaactccattggcagctcgaggtctttcgcgacgac

SEQ ID NO: 304825 - DNA, 277 bp, Zea mays
ggagtggtcatctttgaaggtgtgtacactttacatcctgctataaggaaatttctggatttgtggattgcagttgttggtggagttcattcacaccttattgcaagaatacagagagacaagaatcgtgctggcttttctatttctcagactgaaatcatgaccactgtgtttccactgtttcagcaatacattgaaccacatcttgtccatgctcatcttaagattcaaaacgattttgatcctgtgctctctcctgaaagctcactttttgtgt

SEQ ID NO: 304826 - DNA, 266 bp, Zea mays
agcacatcctgtgcctgccaaatgtgaagtacgtggacctgcggttcaacgagctgcgcgggccggtgccgccggcgctcttcgacaagccgctggacgccgtcttcctcaacgacaacgccttcgacttcgagctgccggacagcctgggcaactcgccggcgtccgtgctcgtgatggccaacctgcgcctgcgtggatgcatcccgcgcagtgcggccgcatggcgggcacgctggccgagctggtggcgctcaactcgggcc

SEQ ID NO: 304827 - DNA, 225 bp, Zea mays
tgccactcctccagttgagccggacatatgcacctataattcagtcatccgggcccttgttgttggtgggcgggtacctgatgctttggtgatctatgatgaaatgaaatcttctggaatcgagccagatgtattcacttatcgagcagtcatgaatgggtgctgaaagagttttcggatggatgatgcactgcgtgtgtttcatgagaggcggggcatcatggg

SEQ ID NO: 304828 - DNA, 142 bp, Zea mays
cacatcccacaaccattattcttgttcaactgcatcaggtcgtccaactcaccaagcggcaagcgccatgccttcttccgcgcaggttctgctctgcctcgccgccgtgctcgcgtgggcggcggcaactaccgccgaggcg

SEQ ID NO: 304829 - DNA, 288 bp, Zea mays
ctcgaagtcgaagctgaaaggcgccggacagatgggctcgtcgtttacctcgtgaagggacgccaggtatgggtggcacagagcctcatcaactgcgatatgattccacggaaggaaaagcaacaacaagtaatcctcttgctgggatcgaacacgagcatcctctcaagcaagtccatggcgccgctagacatggtggggaaccgcacgcggaactgttgcttgggatgctgaggcagggacctcacgtatctgcgggcgtggtcgctccggaggaacccgaggctg

SEQ ID NO: 304830 - DNA, 288 bp, Zea mays
gttgtgaacacgcagatgagggacgcggtgcgcggcgtggcggcgcgcttcccgacagcgatcgtcagcgggcggtgccgggacaaggtgttcagcttcgtgcggctagcggagctctactacgccgggagccacgggatggacatccgggggcccaccgccgacgccaaccaccaccacggcaacggcaaggcggaggcggaggcgtcgtcggtgctctgccagccggcgagcgagttcctgccggtgatgcaggaggtgtacgcggcgctggtggccaaggtggag

SEQ ID NO: 304831 - DNA, 287 bp, Zea mays
tctattgctagatgccgatgtatatatagagaagtatatgtgagatattatcagtaaactttgtttctattatctaggctcgtggtatgaattatctgcataattgttcaccagttatagttcatagagatctgaaatccccgaatctactggtggacaagaattgggttgtgaaggtttgcgattttggtttgtcaagaatgaagaacaataccttcctgtcatcaagatcaacagctggaacacggagtggatggcaccagaagtacttcggaatgaacgatcgg

SEQ ID NO: 304832 - DNA, 196 bp, Zea mays
ctggcctaatgtttcggaaaatgcaaaagatttagttcgacacatgttggaccctgatccaaagctcaggctaactgcaaagcaggttcttgaacatcattggcttcaaaatgcaaagaaggctcctaatgtccctcttggagatattgtaaagtcaaggctcaaacaattttctaggatgaatagatgatgttcc

SEQ ID NO: 304833 - DNA, 314 bp, Zea mays
  unsure (1)..(314): unsure at all n locations
tcgtattcttcatgaaggagatatagacaagcgagtgcaatttttgattgaaggcctttttgcaattagaaaagctanattccagggtttcncagccatccgtccagagttggatctagtggagcaggatgaccagtttacacatgtcagttcccttgtggattacctagactttgtgagcaatctaaatgttttccaggcaaaccccaagtttgttgaagatgagaaggcatatgagaatctaaagagaagcatcctgggagcagagtcttctgaagatgaagaaggatcagatgctgcttctgatgatgatg

SEQ ID NO: 304834 - DNA, 289 bp, Zea mays
cggctcgagactcctccttcggatctcgcattcagcgcagctaggtgtgaaggacaggggacgcggatgaagatggggctcgcgttcgggaagctcttcagccggctcttcgctcagaaggacatgtcgatacttatggacggcgtcgactacgccggtaaaaccagcatcctctacaagctcaagctcggcgagatcgtcaccaccatccccaccatcggtttcaatgttgaaactgttgagtacaagaacattagcttcactgtctgggatgtcgggggtcaggaca

SEQ ID NO: 304835 - DNA, 199 bp, Zea mays
cacgcgtattgattgccacatgtgcctgccgcctggactggacctgcagtgcagctcctgtcctgtgcacgcctctcctgctgttctagtctcatcaacctcaagtttcattcttctttcttctccccgcaggtggtccctgatcgccggtcacttgcccggtcgaacagacaacgagatcaaaaactactggaactcg

SEQ ID NO: 304836 - DNA, 189 bp, Zea mays
agcgattcatgccaaagggggagaaagtattagcccaaagcaaaaggaccgcaccatcacctaattttaaaatataattttcaattgtcaatttggtatcttaatatgttcaaaaaggggagaaagtagtatttcaaaattgattcatcaaaaccctcttgaacactaagaggaagatttcatttaggg

SEQ ID NO: 304837 - DNA, 269 bp, Zea mays
cacggcgttcgcccggagctgctgcgcggcgccgcgcggcgtggcgtggcttcttcaagcagcccgcggaggtgcgcgacgctacgcgaactcgccgtcgacgtacgagggctacggcagccgcctcggcaccgctaagggaggccccctggattggggcgactactacttcctccacctcctgccgtcgtccctcaagaaccacgaaaagtggccttccctcccttactctctacggggcacgacggaggagtatggagaggaagtgt

SEQ ID NO: 304838 - DNA, 278 bp, Zea mays
tgtcacgtatcatttaaaactaatatataacttttaaattgaatatttatttgtaatcatttttaacgattatttacaagttttttctaatatggcatcttggtttatagaagttcttccaacagctccgatcgaaatttttgctcttgctcgagcttttcgggaagattcttttgcagaaaaagttgaccttggcattggagcctatcgtactgatgaaggtcaaccatgggtacttccagttgttcgtgaagccgaaatcagcattgccaatgata

SEQ ID NO: 304839 - DNA, 279 bp, Zea mays
  unsure (1)..(279): unsure at all n locations
aacagaaacgcaaggatggccagaggtcctaagaagcacttgaagcgccttgctgcgccaaagcactggatgctcgataagctcggtggtacctgggctcnccgcccctcccagggtccccacaagcttagagagtgccttcctctcatcgtgcttctcagaaacagattgaagtacgcccttaccagacgcgaggtcgttcagatctgcgctcagcgtctcgtgaaggttgacggcaaggtccgcactgacatcaacttccccgctggtttccaggat

SEQ ID NO: 304840 - DNA, 280 bp, Zea mays
atcgttgccctgaccactactgcttctgacaagatcggccgttccgttcccgctccaggccagggtgttctcaccacagctcgcgagaaccctggcaagttcccctcgcctcttctcgacatcaactaccgacgccgccagatcgagcgtcgcaagaagactatcaagcaatggcaagagtctgagctcgagtatgttcatgacgatattgatgctatgaaggctcagggtgcttcctttgacgagaaggactatgccgcggaccgcttcgctcacattg

SEQ ID NO: 304841 - DNA, 275 bp, Zea mays
ctccattcctctttcccagtgcccccagtccatcaccacatccgttcaaatgggccgcaaccgcaaggccgcaagtagggtttcgcacgacgccgacgccgacgccgacgccgatggcagcgaggatgagagggccaccactgcgggcaggagcctctacgagattctaggagttgagaagaccgcttctcaacaagcaataaagaaggcgtatcacaaattggctctgcgcctccacccagataagaatcctggggatgaggaagccaaagaga

SEQ ID NO: 304842 - DNA, 278 bp, Zea mays
aactgctttgtcattttgtgatatcattttgataactcctaaaatgcagttattcatggtttgttttgttctgcagtggcataattgaaataaactgttcaaaagatattaaagtccaaggtattattggaccatgcacatctttggagaagaaaggagccatgtgctctgacacagttgtcggtcaaggaaatacatcagcatggaaaatgtgtggtctcgatagaaatacttctcttacagtattttttgatgtctcaccgagtgaacgatcgagc

SEQ ID NO: 304843 - DNA, 301 bp, Zea mays
ctggtggtatgggccatcacggaggggcggcaggctgctgcagcggtagacaagtacatatcaaggcatgatcagaatgtcgcaggcgacatcactccctttggggcagggctcgttcagccggttggagcataaaaaaaacatagaccgaggcatgttttaggttctcgtcagtggttcctcacagcaaattttgttcttgtatattttgacgatagataaacagttgaaagttttggtgtctattgtttctttttcttctccggttattatgttttgcgtgtctgcatgtggttttcta

SEQ ID NO: 304844 - DNA, 277 bp, Zea mays
cggctcgaggggatggcctaagcaagcacttcttccaccggccgtccaaggcctacacgacgggcacgaggaagaggaggaagatacagacggagtgcgacgtccacaagggggagacgaggtggcacaagaccggcaagacgcggccggtgatggtgaacggccggcagaaggggtgcaagaagatattggtgctgtacaccaacttcggcaagcaccgcaagccggagaagacgaactgggtcatgcactagtaccacctcggcgacctagaaga

SEQ ID NO: 304845 - DNA, 276 bp, Zea mays
cattcgtagattggtcgcctactggattcaagtgcggaatcaaccaacagaagcctactgtcgttccaggaggagagctcgctcaaaccaaccgttctgtgtgcatgttagccaacaccaccgccattagcgaagtattctctcgcattgacaagaagttcgatcttatgttcggtaagcgtgccttcgtccactggtacgtcggtgaaggaatggcagaaggagaatttattgaggcccgtgcagatcttgccgctttagaaaaggatacgctga

SEQ ID NO: 304846 - DNA, 287 bp, Zea mays
ccggccgtgcatggctgcagggcggacgttcgtgtactggaccggcgcgaggccgaacgtgtgcgtggcggacgtgaacgtggtcaggcaggtgctcttcgaccgcaccggcctctaccccaagaacctcatgaacccgcacatctcccgccgcctgctcggcaagggcctcgtcctcaccgacggcgacgactggaagcgccaccgcaatgtcgtgcacccggccttcaacatggacaagctcaagctgatgacggcgaccatgtccgactgcacccgctcgatga

SEQ ID NO: 304847 - DNA, 277 bp, Zea mays
tagaaggcacaaaagttcgtgtatacactcaagttggcaagagtagccaagggaagtttgcactagatgttggaatcaaatcattgcatctttataaagattactttggtactccttatccgcttcccaaattggatatggttgctatccctgattttgctgctggagccatggagaactatgggcttgttactttccgcgaagtggctttgctttttgatgaggagtcttcaatggaatccagcaaacagagtattgcaattactgtagcacatga

SEQ ID NO: 304848 - DNA, 149 bp, Zea mays
tgctcttgtgccgtttgcgcacgggatggctctcatttcagagagtatatacaaggaagccagcactgcatgtcaagggaattactggaactctagcagtgcaaaatgcgacgaggcgctgtcaaaagtcgagacggaaatcgacggat

SEQ ID NO: 304849 - DNA, 283 bp, Zea mays
atcattcaattcaaatgcctgatgaaaatggagattatttcacatggccaacagtggaacactattaccaggctcataagtttgttggtgttgacaatcctcaagcaagagacattgttcaagaaataaagctagcaaagagtcctgaagaggctgctagaataggaaggacccgacaaaaagggttccctgaactggtaagaacagattgggagagtacaaaaatagatgtgatgtatagagctatcaaatgcaagttttcaacttatccccatctgactaa

SEQ ID NO: 304850 - DNA, 272 bp, Zea mays
gctacatcgatcaagaaaatgatcagtttagggcttcctcagtggccaggaccagtaccagccgacacagcatgtccagagcaagtccaatgccactaacaccagctgccttaaaggaaaatgattctgatgttcatccacctgcaccatctttctccaggcttcttgcaatgaacgcacctgagtggaggcaggcagtcgtaggcagtttatccgcattggtatatggttccttgcagcctatctatgccataaccatcggaggaatgatt

SEQ ID NO: 304851 - DNA, 280 bp, Zea mays
caagaaactcctgttgctggaaacacgtatactgtctgtgtagtggatgctgctttattcatgggtagatcatttcgtgttggttggggaccaaatggtttacttgtacattcaggtagtctggtcaatagtcctggaactggcctatcttctgttattcacatagagaaagttgcaagtgacaaagttgtgcgtgatgataaggataagattaaggatgacctaacagaactatgtttttctgctccaatggacctccataagagtcttgatcatgact

SEQ ID NO: 304852 - DNA, 278 bp, Zea mays
atccgcctcttaattaatacatacaaagcactgatcacgcatgatgcatgcagcttgtgacgaatgaccggtacaagagcgtggatcaccgggtgccggctaacaagagcagtgacacggcgagggtctcggtagctgccttcttcaaccccgacgagaagagaaccgagaggctgtatggcccaattccagacaccagcaagcctccgctgtacaggagcgtcacgttcccggacttcatcgccaagttcaacagcatcggactggacggtcgcgtg

SEQ ID NO: 304853 - DNA, 311 bp, Zea mays
cacccccacagcccctggtcgatcgctcggcaatcggcatggacgccggctcggtcaccggtggcctcgccgcgggctcgcacatgcgggacgagctgcacgtcatgcgcgcccgcgaggagccgaacgccaaggtccggagcgccgacgtgaagacgtgccgcgtgtgcgccgacgaggtcgggacgcgggaggacgggcagcccttcgtggcgtgcaccgagtgcggcttcgccgtctgccggccctgctacgaatacgagcgcacgagggcacgcatctagcccgcagtgcaacacccgctacaagcg

SEQ ID NO: 304854 - DNA, 346 bp, Zea mays
gcagggcaaggggtgccagcccaacgagcgcgcctacagcacgctgctcatgggcctctgcaagaacaagaagctggacaaggccgtcgaggtgtacaagtccatggcggcggctgggacgaagctcgagtcgccagcgtacgcctccttcgtcagggcgctgtgccgatcgggcagcgtcgcgacgcgtatgaggtgtttgattatgcgatccagaccaagagtttcgccgaggtgacggcgtattctgagctcgagaactcgctcaagtggctgcgcaggatgaattcatgacgcaaactgcctgcacagagagtatgcgatacgtcagtgccttcaatgcaat

SEQ ID NO: 304855 - DNA, 239 bp, Zea mays
  unsure (1)..(239): unsure at all n locations
gcgccgacgacgtcgtcgggaccggggaatctcacttcgcaggggatcacggtgtcggagcccgacggaacattgctgtggtcgacgccgtcgcagctgcgctcgcccgtcgtggcgctgcggctgcangacagcgggaacctgcagctgctgggcgccgggaacgcgaccctgtggcagtcgttcgataccgccacggacacgttgctcccgggccagctgctgcgcgccggcgcgta

SEQ ID NO: 304856 - DNA, 348 bp, Zea mays
ccatctcagtcaactacaagcttcaaatcttcaaatcttccaagttttcaaaaacttcaatcaatcaatcaacatgtctgacgccggccgcaaggatttctctaccaaggctaaggaggaaatcactcctgactcctccaagtccacccaggagaaggtcaaggagtccttcaccgacaccaccgaccgcctcgcccgcggtgtccagtccgatgacagcaagtctagcacccaggaggccttcgacaagacccagcgcagctacgacaaccatgctcacggcggtgccaccggctccattggtgacaagatcaaggacactcttggcttgggcaacaactagatgat

SEQ ID NO: 304857 - DNA, 99 bp, Zea mays
cggcaactacagcgatggcaacctagtcgccactctgctcgcgcacaagttgggagtcactcagtgtaccatcgctcatgccttggagaaaaccaaata

SEQ ID NO: 304858 - DNA, 281 bp, Zea mays
gtcattttctatttaggtgggtcggggggtgcagaatcaggcaattaggactacaagtctactagatactatgctgtattttgaaggtggctagcagtgattggttcctttttgttgtgttaatataaattgcaggaattgtgctttgtttgtcctggaacttcgttgctgtcatagtctgctggatcaaggagggagattcaaagttgtttttccttgcaacaatctatgctttgcttggaattcctctgtcatatttgatatggtacaggccactctac

SEQ ID NO: 304859 - DNA, 229 bp, Zea mays
ccaggggagagcgggcagagccaaaccagagacgcggcacgcgacgcggcagcaacgacaccatctacgacttctatggctttcccaagcccatgtaccagctcaagtaccccgctccgggcgctccggacttggccctgcggaccgtagagctcctggagcaagccgggttcggccccgtgaagcaggaccacagccgcgggctcgaccacggcgcctgggtgccgct

SEQ ID NO: 304860 - DNA, 291 bp, Zea mays
gtcatcgggcacaagcgcgaggccgagtcccagccgtgcggcagcgtcggcgtgctgggcatcgcctggtccttcggcggcatgatcttcgtgctcgtctactgcatcgccggcatctccggcggccacattaacccggcggtcaccttcggcctgctgctggcgcgcaagctgtcgctggtgcgcgccgcgctctacgtggtcgcgcagtgcctgggcgccatgtgcggcgccggcctcgtcaaggccttccacggcgcccactggtaccttcgctacggcggcggagca

SEQ ID NO: 304861 - DNA, 262 bp, Zea mays
cgaacccacaggacgtgaagaggatgcgacggatggtgtcgaaccgtgagtctgcttgacggtccaggaagaggaagcaagcccacctagctgaccttgagacacaggtcgaccagctgcgaggcgagaacgcgtcgctcttcaagcagctgacggacgccaaccagcagttcacgaccgcggtcacggacaacaggatcctcaagtcggacgtggaggccctcagagtcaaggtgaagctggcggaggacatggtggcgcg

SEQ ID NO: 304862 - DNA, 285 bp, Zea mays
gcagaacctggactacgcgtgctcccaggtgagctgcgccgtgatccagaagggcgggccgtgctactacccggacagccccgtgtcccgcgccgccgtcgccatgaacctctactacgcctacagcggcaggcacccctggaactgctacttcaacaactccgcgctcgtcgtgcagtccgacccaagctatggctcctgcacatactactgaggaggagtgtgaggaggagtggagagacgaggagaggagagagatccattcgtgcctggcggtggcggctc

SEQ ID NO: 304863 - DNA, 281 bp, Zea mays
ctcccactcctccccgcctccctcgtgctcctcgcacgatcgttgttcgcgccgctagtaccgatactagggtacagggccgtgctcgtgctctccggctatgtcctcaacaacgtcgcattcgttgctgctgcggcctacttctacagattgtctgtgctgattttgaaggaccagaaagctgcttaccgagcatctgttctgttttgtttcaaccctgcttctgtgttctactcatcattgtattcagaaagtctttatgcacttttttctcttagggg

SEQ ID NO: 304864 - DNA, 276 bp, Zea mays
ggcggcggcaaggtgatgggcacgtatgggtactgtgcgccggagtacttgcggacagggaagctcagcgtcaagtcggacgtctatagctttggggtgctactgctggagctcatcaccggccgtcgagccatcgacgccagccggccggatggcgagcaaagcctggtgggatgggcggcagggatgtttggtgactccacgaggttccatgagttgctggaccctcggctggtgatggcgattcgaggacggcctacagcatcacagctgaag

SEQ ID NO: 304865 - DNA, 279 bp, Zea mays
ggtaagcaaagcaaagcaacaatggaagatgaatagtaatacgtgcagagcgtccttaatttgctcctcgcgctcgccggcacctcgtcggcgcactgtccacgggcttctactcctactcgtgccccggcgtgtacggcgccgtcaagtcggtgatgcagtccgccatcgccagggagaagcgcatgggggcctccatcctccgcctcttcttccacgactgcttcgtccagggctgcgacgcgtcgctgctgctggacgacacgcccagcttccagg

SEQ ID NO: 304866 - DNA, 266 bp, Zea mays
ggcgtccatgaaccaggttgccgggaacccgatgcgtctctacgatctgccttccaagctgctctgccgcgtgctcaacgtcgagctgaaggcggagaccgacaccgacgaggtgtacgcgcagatcatgctcatgccggagcccgagcaaaacgatgtggctgccgagaagacgagctctgggtctgctgcgccaccgaggccagcggtcaggtcattctgcaagacgctcaccgcctccgacaccagcacacacggcggcttct

SEQ ID NO: 304867 - DNA, 130 bp, Zea mays
tgggtggaccgcaacatcgaccccaacaggacgaccgtcttcttcatgggcatgtctcccaaccacatcacgcctgaggcttggggcaacaagggcgggatcaagtgcgccatgggcacgctgccgatcg

SEQ ID NO: 304868 - DNA, 255 bp, Zea mays
tgcaggtgtaccgcgacgccgtggccacgggcgacgccgcgttcgcggaggcggtgtggcccgccgtgtacgttgccatggcgtacatggaccagttcgaccgcgacggcgacgggatggtggagaacgagggggtgctcgaccagacgtacgacatgtggtcggtctccggtgtcagctcctacacggtcggtgtctgggtggcggcgctgcaggcggcggcgggcatggcgcgcgtcgtcggggaccgccccg

SEQ ID NO: 304869 - DNA, 272 bp, Zea mays
gcagtactaatattgaactttgaagcctagtcagatcagatattaataaattcattgttttatgataatgatactcggtagaggtaaagaaataaagattgttcaagatttaccactatcgttatgcagtcacaaaataaatggtactaatatattgtttgtaaaatagagatctatgctaatgttttggtccacggtaaatacgaaattttggattgcaattaaccttctgcgttggcgctgtgcagaatgctcttctggggttcgagaag

SEQ ID NO: 304870 - DNA, 282 bp, Zea mays
atcaaaagcttgatcagctcggtgcctacaaaacctcaacaaccaagtttcatgtctgatctcgacgtccagcttccatctgcctttgatccgtttgctgaggcaaatgctgaggactctggtgctggtcctggaacgaaggattatgtgcatgtgcgcatccagcagcgcaacggcagaaagagtctgactacagtccagggtctgaagaaagagttcagctataacaagatcctcaaggatctgaagaaggaattctgctgcaatggtactgtagttcag

SEQ ID NO: 304871 - DNA, 208 bp, Zea mays
  unsure (1)..(208): unsure at all n locations
acctgaggatgagaggtataagcatctgcatggaagatatgcagtccacccttcaatggacgagaactcagaataatctgtgacgcggagttagttgatgccactttcggtactgnggctgtcaagattactcctgctcatgatgcaaatgactttgaggttgganagcgtcataatcttgaattcatcaacatattcacagatgatg

SEQ ID NO: 304872 - DNA, 260 bp, Zea mays
tggcaattgttctactccagtcagcgccgctttctgataagcttaacgtgtttttcttatagcttttctcaaacggcatgaaagaatcggatcagagacatgcaacccttagaattactgactcagaggaaactgccctcatggagcttttaagctttatgtatagtggaaagttggcaactactgagcccactcttctgctggatatcttgatggctgccgacaaatttgacgttgtttcatgcatgaggtactgcagc

SEQ ID NO: 304873 - DNA, 269 bp, Zea mays
gagtacttggattgtgcgatgctttatacatttgtttgttctagcagagtttgagtttatatttctattcttatgtagggcgtcacgagtgtcgtcaattgttacatccttacatccttgtgttcacaatatgatccatcaactctttcttctgcggtctcttatccctgtgttctcatgtccatgtttcctgcttcttgttgcagttaaagcctgaggaggttgctggtatcataaaggactttgatgaacctggtactcttgcacca

SEQ ID NO: 304874 - DNA, 290 bp, Zea mays
tgaaaaggcaaaggattttgcagattcattaggaattccctttattgagacaagcgcaaaggaatccatcaacgtggaggaagctttcctgaccatgtcatcagaaatcaagaaaaggatggcaacccaaccaacggtggagaggagacccacagtccatgttcacatgaaaggacagccaatacagcagaagagcagctgctgctcatcatagtcagggctcatagggcacttaaatttggctagtggttagatggacgccgcagatgttgttcacttaagattatact

SEQ ID NO: 304875 - DNA, 271 bp, Zea mays
gtatttttgttacagaaagagctatggtatagattaatgtttatggtcatatatataacacaagactgagaaagtggcaccctaatcgccactatcttggcaaccatatacatagtttcagattaccttgttgctttatagttgttcacgagtcttattcatgtttttgcgttctcagtatgagaagattaaaaagttcatattgaatgccaaaagcgaaggtgctactattctgactggaggtgttagacctgcgcatcttgagaagggg

SEQ ID NO: 304876 - DNA, 278 bp, Zea mays
ttgtctaagcctgaattcagtctgctttaaacggcttccgcggaagaacatatttccatctcttgaattcgtacaacattaaacgtgtgttgggagtcgtatactgttagggtctgtaaacttgtgaactctcggcaaatgccttggtgcaattacgtaattttagccgctgagaagcggatggtaatgagacaagttgatatcaaacagatacatatttaaaagagcgtaccgctaatttagcagggcagtattattgtagtttgatatgtacggct

SEQ ID NO: 304877 - DNA, 272 bp, Zea mays
tgcaaatgagatttattttccgaaaagtacacagttcactcaaagggccttatcctgaagaaccttgtttgattacatcatcaatcttcaaaatcattttgacaacttgagtagcgagcaaaagttgttgcttcttcgagatgaagcattcaaaaacattgctgtctttcatattctttactttcaattcgttacagtccacgccaatgaacggattgttttccagttgttgttgtgctttgatctcagcgagggtggagataggttgcata

SEQ ID NO: 304878 - DNA, 137 bp, Zea mays
accggtccggcatcagatagcgggggtgcacacacatcgagatccggaggccgcgagtcggagcgccaccaccagcgtctgcagcaattgcttgcaccgtgaccgtccctcggtcgtcgactacctccacgccgctg

SEQ ID NO: 304879 - DNA, 269 bp, Zea mays
tgccgtcgagctgggcaaggagctggtgtcagaggggcatagacctggtctacgggggcggttccatcggcctcatggggctggtctcgcatgcagttcatgacggagggcgccatgtgattgggtcactggcgagcctgttggggaagtaagggccgtctccggcatgcacgagaggaaggccgagatggcccgcttcgccgatgccttcatagcgttacctggtggctatggaactctggaagagctgctggaggtcatcacctggg

SEQ ID NO: 304880 - DNA, 283 bp, Zea mays
cggctcgaggtcggagagagaggggtccagctatccggtggccagaagcagcgggtggccatagcgagagccatactgaaggaccctaggattctactccttgacgaggcaacgagcgccctggacgccgaatctgagcgcatagtgcaggatgccctggacaatgtgatggtcggcaggacgacggtcatcgtggcgcaccgcctctccactatcaagagcgctgatatcatcgccgttctcaaggatggcgtcatagtggagaaaggaaggcacgacgcgc

SEQ ID NO: 304881 - DNA, 269 bp, Zea mays
ccgcaagtccaccggaggcaaggccccgcgcaacagctcgccaccaaggcggcgaggaagtctgcgccgacgaccggcggcgtgaagaagccccacaggtacaggcccgggacggtggctctgcgcgagatccgcaagtaccagaagagcacggagctgctgatccggaagttgcccttccagcgcctggtccgtgagatcgctcaggacttcaagacggatctgcggttccagagccacgccgtcctggccctccaggaagccgccga

SEQ ID NO: 304882 - DNA, 268 bp, Zea mays
cagcgccgccatacccagttcgtcgggcccttcgaccttcgtcggcaacgagcttccaccaggtcaagaccaggtaccacaagataaggagcatgaaggatgccgcgatgagttcgtgaggtctaggctgtcgtctcccagtcaactatggttgcggggatcattatcttcgtatgatgtaattatttagctattttgtatagaacttctattaaatagtaaatatgtgatattcgtttctgtacaatgagtcattatatgtgtgaga

SEQ ID NO: 304883 - DNA, 284 bp, Zea mays
acgttcagagctcacaccagtgacgacgacgagctgtgaggacagggcaaagacacaagcctgtgaggaatgcggcgatggagacgtacgaggtgatcgaggacataggatcgggcaacttcggggtggtcaagctggtcagggacgtcaggaccaacgagctcttcgacgtcaacttcatcgagcggaggatgaagattgatgagaatgtccagagggacatcatgaacctcatgtcactgaggcatccgaacatagctaactttaaggaggttgtgctagct

SEQ ID NO: 304884 - DNA, 279 bp, Zea mays
gggactgttatcagacgctcctgaagtactggccggtgacgaacagtcagaaggagatgatgtcctaggagaagtggaggaggtgctggagctgacagaaatggcagatttccagaagtgtgcggttcctttgtttcgcaggatcgcacagtgcctgaatagctctcattttcaggttgctgaaagggccttattcctgtggaataatgaacatttgttcgacctgatctcccaaaactgccaagttatcctgccaatcatctatccagctctggagag

SEQ ID NO: 304885 - DNA, 275 bp, Zea mays
aatggcttccatcgattctgtccttcagggtgtttccgtttctggcaaggttgacgacatccaccgcaagatcctcacacccgaggccctcgcctttcttgcactgctgcaccgttcttttaatgagcgacgcaagaatctccttgagcgccgcaaggctcgccaggccgagcttgatcgaggagttctccctgactttcttcctgagactaagcacattcgcgagaaccctacatggaagggtgcgctcccgccccgggcctggtggaccgtcg

SEQ ID NO: 304886 - DNA, 265 bp, Zea mays
tcttacgccagcttagaaatcgggggcctcatgatgtgggtgcagcccataaaaaactggtgtgtggtttcgaaccgaaaattttctgtttttttccgccacgagatgatctggaggcatactctccagcaccgtggctaataacgcattgttccaattcagtctggccttgtcatgcatgcacataaataaagtgatgggtttccctgttacagaaacgctggttagtcaagtccttgacgaaattggcatcgatatcaactcg

SEQ ID NO: 304887 - DNA, 264 bp, Zea mays
ggcacaaggtctgcgagacccacagcaagaccatcagggccgtcgtcgccaaccaggcgcagcgcttctgccagcagtgtagtagatttcacccactcgcggagtttgacgagggtaagaggagctgccggcgtaggcttgctgggcacaaccggcggagaagaaaaacccagccagcagatgtttcttcgcagttgctgctacctggaaaccaagaaaatgcagcaaataggacgcaggatattgtcaatctaattacagtga

SEQ ID NO: 304888 - DNA, 265 bp, Zea mays
taaaaagtgaacgagtgttggattggttgattctggaagaagaatttttgggacgtgctcgagttaatttagccaaaaatgaacacgaacaagatgaacatgatgaaagaagtaaagttgatgattttagaggttctcctatgtcagtaggaaatttggaagaaattattgatgataatcatgctattgtttctacttcagttggttctgagcattatgttcccattttatcatttgttgataaacaacaattagaaccaaactg

SEQ ID NO: 304889 - DNA, 241 bp, Zea mays
gtcagaatcatcactgaagcttacagcaagctactcttcatttgtaaggaccagatggcatattttgccatcagcctagtgaatgtccttaccgagcttctagaaagcaagcaggagaatgttcacatccttggctgtcaaactttagcaaactttattaacagtcaggtagacaacacatatgcacgcaatattgaaagcttggtgcacaaagtatgtgcacttacacgtcgacagggag

SEQ ID NO: 304890 - DNA, 278 bp, Zea mays
agccggaggattgggatcgcagatttctatacggggaagaacattctcatcacaggtggaactgggttcgtggccaaagttcttgtggagaagattttaaggacgagtcctaccatcggtaagatatacatgatggtgaaagccaaggacgcacaaacggctctcgagaggttgcaaaaggaggtgttagacacagaactgttcaaatccttggaagaaatccatgggaaagactacgagagctttgttgcgagtaagttgattcctgtggtcggcaa

SEQ ID NO: 304891 - DNA, 258 bp, Zea mays
ctctcaacaccacctcgcatgcgatgttcgtagcctccgtagcgtcgagcatcgatcatgtcggcctactgcggaaagtacaaggatgagctcatcaagaatgctgcctacattggcacccccggcaagggtatcgttgttgctgatgagtccactggaacaattggaaggcgcctttcgagtatcaatgtcgagacctttgagttaaccggcgttgcctccgtgagctcctaatctggtagcctggtggtctccagt

SEQ ID NO: 304892 - DNA, 277 bp, Zea mays
ccttgtttcagcgacagtttcttatcttcagacatcttgccaaatgctgagaaagtgccctcaaaaccgaagcttaaaaaaatttcaaaaaagccacgcaagtgttggtgcgcaagagttaaaagttgggtgagtaagaacagatggcaagaaagcatgccaaatgaacccgtggtgagctcttatttatacgcctagtgcgttgaaaattggagggtcccgcttgtcaatgactgttgctattctagcaaagggaaggtgttttttcggaccttcg

SEQ ID NO: 304893 - DNA, 275 bp, Zea mays
caccgaggcgcaccacaagacggaggagggggagcaccacaagacggacggcggggagcataaggcaggcatcgtggagaagatcaaggacaagatcaccggcgagcacggcgacaagtccggcgaccacaaggcaaagaaggacaagacaaagaagaaggagaagaagaagcacggcgagggccacgaccacgacggcggccacagtagcagcagcagcgacaggcactgacatctggtgtcgcagcacaggtgcaacacaagtatgcttgctg

SEQ ID NO: 304894 - DNA, 271 bp, Zea mays
cgcctggctcggcaccgcgctgctgctgctcaccgtctactacctcacgccgccccgccccgtgtacctcgtcgagttcgcgtgctacaagccggaggagcggctcaagatctccaagtcggccttcctcgagatgaccgagagcaccggctccttcaatgaggcggctctggacttccagaccaagatcaccagccgctccgcgctcggggacgagacgtacctgcccccgggcgtccaggcgcgcccgcccaggctcaacatggcggag

SEQ ID NO: 304895 - DNA, 269 bp, Zea mays
ctaattgctcctgctctgagattgttgccacttggagtgcctaagcttattgtatctactgttgccagtggtcacactacaccttatgtcgaaacatctgatttggtcttgtttccttcggttgttgacatctgtggaataaacagtgtcagtcgtgttatattatctaatgctgcagcagcttttgctggaatggtacatggaatcttgtcggcttccaatgagtctgatgaaacgtcaacaaagccaactgttggtattactatgtt

SEQ ID NO: 304896 - DNA, 265 bp, Zea mays
ctcgccgcagaagccatgtacctctacagcctgacgctacagcgcgcgacgggcgcggtgtgcgccgtcatcggcagcttcagcgggcgggactcgaagaagtccgccgcctccgggtccggctccacgcaagagatcgccgtggcccggggcagcacgctcgacctcctccgcccggacccggagacgggccgcctccgcacgctcctctccgtcgacgtcttcggcgccatccgctcgctcgcgcagttccgcctcaccggcg

SEQ ID NO: 304897 - DNA, 264 bp, Zea mays
gtccaaaccctctccccgccgcatcgccgccgccggaagcgcctccctcgatccagatccaggagatatgcctcgcaatgatgatcgctatgggaatacacgcttgtatgttggaagattgtctccccgcacccgttctcgtgacctagaataccttttcagcaaatatgggaggtttttcggttttttacacaaccatggaggtgtggtggaagggtgcccttgatggaattggtggccatagttccaatgtttgtggaggac

SEQ ID NO: 304898 - DNA, 258 bp, Zea mays
cgaggacaaggacggcgacctcatgctcgtcggcgacgtgcccttcagcatgttcatcggcacctgcaagcggctgaggatcatgaaggggtctgaggccagactaggcctcgggtcagccaagaacaacgactgagggagagggagacgacgaccattgtgcagacccgaccgagatccacgcacacggcggcttgtgcacgcgtgagcgggggattgttgtgcgtccgaggcatggggtagtatgggcttgtgttg

SEQ ID NO: 304899 - DNA, 268 bp, Zea mays
cacgcactgaagcaccactacttcctgcgctgctgctcatcacacaccgtagtagcaacagtccatcgccacaatggctcccaaggttgcgctcttccttgccctcagcctcctcttcgctgccgccgcgcatggctgcgaaccctactgtcccgacacagtcgtcccaacgtcgcacagccacgggcgctgcccgatcgatacactcaaactcaaggtttgcgcaaacgtgctgggcctcgtcaaggtcggcctgccccagcacgag

SEQ ID NO: 304900 - DNA, 281 bp, Zea mays
gtcggatctgagacgagacgagacgaccccccctcccctcaaccggaacttgttttaccccatctcatcccactcgcctccccccacccacccgcccgctgcctccgccggatctcgtcggactcggatccgcccgaccacgaccaccccgcgtcgccgccgcgcagcagcagcagatcagagaagatggccggactcgacaccttcctcttcacctcggagtccgtgaacgagggacaccctgacaagctctgcgaccaggtctcagatgctgttctgga

SEQ ID NO: 304901 - DNA, 275 bp, Zea mays
cgagacttttctgtttctttatgttggtatggatgcattggatatagagaagtggaagattgtcggtcaaacttatagcccggtaaagtctatcgctttgagcagcaccattttagccttggtgctggtttcaagagctgcttttgttttcccactatcctttgtatcaaatttgaccaaaaaaactccaaatggaaagatatcttttaggcagcaggttattgtttggtgggcgggtctcatgagaggtgctgtgtctattgcgttggcttaca

SEQ ID NO: 304902 - DNA, 209 bp, Zea mays
agccgcgccgccgcaagagcggaggagagagcggctccaacgccacctggaggagaggacagcgcgccagggaggacgagaaggaggaagaagaagaagaagaacatggggaagggcgtcctggaggtgcacctcgtcgacgccaagggcctctccggcaacgatttcttagggaagctggacccctacgtgatcatgcagtaccggag

SEQ ID NO: 304903 - DNA, 185 bp, Zea mays
ctcacccgtcgcagccaatcactccccagcagccgtcgtcgctaccgctgcagcgcggaggcgaccccccatcggacgtaagatgcagatcttcgtgaagaccctgacggggaaaacgatcacgttggaagtggagtcctctgacaccatcgacaacgtgaatgccaagatacatgacaaggagg

SEQ ID NO: 304904 - DNA, 271 bp, Zea mays
aggctcgaggctgaaaagagaaatgaggaaaggatgcacatttgacggttggttcgaaggagttatcagctttgccccaacatacaaatatgagtttgactcagaaaactatgtaagcgatgagagtgaatctgggagaagaactcctgcatggtgtgaccgcattctctcatacgggaagggaatcaggctactttcatacaagaggggggagcttacactttctgatcaccgccctgtggctgcagtctacgtggcagagattgaagtt

SEQ ID NO: 304905 - DNA, 272 bp, Zea mays
tgcggaatttgctttctgtcgcctacaagaacgtcatcggtgcacgccggcctcttggaggatcgttacctcgatcgagcaaaaggaggagtccaaaggcaacgagtctcaggtcacattgatcaaggagtaccgtcagaagattgagaccgagttggccaagatctgcgaagacatccttgaagttttggacaagcacttgattccttccgctcagaccggtgaatccaaggttttctaccacaagatgaagggtgactaccaccgttact

SEQ ID NO: 304906 - DNA, 242 bp, Zea mays
atctcgacaccggaggtgagcagaggtggaccgacaacaatgaccactcgccatcgtcgggaatgagatgaatgaacgtgagttatctgcgctgaaatctgtcattaagtgcattgaagagcacaaacttgagcagcagtaccctgtggatccacttcagaaaagggttttgcagctagagaaagcaaaggcagacaagaggatggctgttgaagcagcaaagccgcagtccaagaggcctc

SEQ ID NO: 304907 - DNA, 286 bp, Zea mays
agctgcgtgactacgtgtctttgagtagcgactggatttgttatgccatgattgacgatattgttgacagttttggtccaatcatgcgtgatgttgagattgagtccgaagcgattgaagatcatgtgtttgttgctcgcgtggaagattttggtactttcttgccacgcattggcgaccttcgcaagaaagtcatgactctgatgcgactcctaggcggcaaggccgacgttatcaggggcttttccaagcgatgcaatgagcagtattctgtcacaccgcgtgg

SEQ ID NO: 304908 - DNA, 280 bp, Zea mays
gtaccatcaagctctggaacactcttggtgactgcaagttcaccatcaccgagaagggccacaccgagtgggtgtcgtgcgtccgcttcagccctaacccccagaaccccgtcattgtctctgccggttgggacaagcttgtgaaggtctgggaactcgcttcctgccgccttcaaaccgaccacatcggacacactggatacatcaacaccgtcaccatctcccccgacggatccctctgcgcttccggtggcaaggacggtaccaccatgctctggga

SEQ ID NO: 304909 - DNA, 199 bp, Zea mays
acgagctcttcttctccatcgccaaccacacgctcaccgtagtcgacgtcgacgccgcctacgtcaagccgttccacacggacatcgtgctcatcacgccgggccagaccaccaacgtgctcctgcgcgccaagcccgacgcggggtgccccgggccacgcacctcatgctggcgcgcccctacggcacgggccagccg

SEQ ID NO: 304910 - DNA, 226 bp, Zea mays
cgccgggccgctcctcaggatgcacttccacgactgcttcgtcagggggtgcgacggctcggtgctcctcgactccacggcgaacaacaccgcggagaaggacgcgaaccgaacctgacgctgcgcgcttcggcttcatcgagagggtcaaggccgcggtggagaaggcgtgccctgacaccgtctcctgcgccgacgtgctggctctcatggccagggacgcatg

SEQ ID NO: 304911 - DNA, 294 bp, Zea mays
actcattacaagacgttttggcttttttagatacatagtttttgttatgcacttagatatacattatgtctaggtactctgtaaaagcaatgtatctaaaaagacaacatcttaaaatttgtaaatgagggagtagtatattcaagttgatgggggctgacaacaaattactgttagtttactgtactatgccctggttgtaagagttgattaactgattatcctagaaatgattcagttcagcttaatgtttttttgttaaaataatcaagatatttgtaaaacatgtttgat

SEQ ID NO: 304912 - DNA, 275 bp, Zea mays
gccagtccatcaagtagtttagttcttaaagcattatatatcattagtgatggtcttcattttaagatttaccaggtctatgcagaggccagtagtcctcatgtagtgaatacagcttgggcaatgttggctttaatttatgctggacaggttcagcgagatccaacaccattgtatggtgctgcaaaagaactgatcaatatgcaacaagagtcaggcgagtttccccaacaagaacacattgggagcttcaattgttccttttacttcaacta

SEQ ID NO: 304913 - DNA, 275 bp, Zea mays
gcgagacgagacactcgcccccgattcccctcccgctgccgaagcctgtgttgcagggatcgttcgcggaagggtttttgatcggagagagagaaagagagagcgacggacggaagccgggatggacgcggcggcagcagcggcggcgcagatggagaggcactcgtcggcggcggccttcgtggagggcggcgtccaggacggctgcgatgacgcctgcagcatctgcctcgaggccttctccgacagtgacccctccgcggtgaccagctgca

SEQ ID NO: 304914 - DNA, 266 bp, Zea mays
ccgcggcgcgaacacaacgccggacgcaccccggcggcgctgctcttcatccggccatggaacaacctgcagtacgtctccggcgccgccttcctcctcaccgtctactcggacgtcctcgcctcgctgggccagctcctacgctgcggctccggcgacgacggtggcgaacccgccgccggcgacgcgggcgacgtgctggctttcgccaagtcgcaggccgactacatcctgggcacgaactcgatgctcaccagctacctggt

SEQ ID NO: 304915 - DNA, 295 bp, Zea mays
tgccagtctcctctccacctcgcctccccgttactccccccgccatcaatgccctcttcctccacctgcgtccctctcctcctccgccgcttcgttctcctcctctgctccgaccaccacttcgcagctgggcacggtggggcacgcgcgccaccccaacgtgtgcggcctactggggtgctgcgtcgaccgtgacctctacctcgtcttcgacttgtcccgccgcggctccgtcgccgccaacctacacgacgaggcgttgccggcgatgggttgggcggcgcggtacggcatt

SEQ ID NO: 304916 - DNA, 292 bp, Zea mays
caaagggtccacggagacgagctgcgtcggcgactgcagcgcggcggcgtgcagcaggcagacgagcgactcccactggttgcgccccagcgagtcgcccacgaacatcaccgtcttccccttcatccgtgtcaggaagaccgtggcacaacgcctgatgtcacgttgtcccagcggcgccgcggccggcgtcacgccacgcggatggtcacccacgccacgtccctagaccggtgtggtacgccggcgcccacagcgtcgatgaggaggaggtcggagcagcagtagctgt

SEQ ID NO: 304917 - DNA, 229 bp, Zea mays
aggctcgagagcaatttctctagcacttcaaggaaggatatctctgaagatacaagagaatttgttggagagctgaatattacagtcgtgaaaggtactaacttggccgttagagacatgctaccaagtgatccatatgttgttttaacactcggagggcaggaagtgtatgaccatgatacgttctcagccgatgatatcatgggtgaagcagagatagatctcccac

SEQ ID NO: 304918 - DNA, 281 bp, Zea mays
cccttccgttcccttcccacgaaaaccggagagggagtgagaagaagcaacaagaagcggagagccaacgcgcaacgcaagccctgagatggcggcgccggcgccgaagcaggaggagctgcagccgcacgccgtcagggaccagctgccatccgtctcctactgcctgacaagcccgcccccatggccggaggcggtcctcctcggcttccagcactacctcgtcatgctcggcaccaccgtcatcatccccaccgcgctcgtgccccagatgggcggcg

SEQ ID NO: 304919 - DNA, 279 bp, Zea mays
cggcacctggtggccgtcaagcggctccgggagaagatcaccaaggggcacaaggagttcgaggccgaggcggcggtgctgggacggatccgccaccccaacctgctggcgctcagggcatactacctgggacccaaaggggagaagctactcgtcttcgattacatgcccaacggcagcctccactcgttcttgcacgctcgcgctcccaacacgccggtggactgggcgacgcggatgacgatcgccaagggcacggcgcgtggcttggcctacctc

SEQ ID NO: 304920 - DNA, 229 bp, Zea mays
acgtttttcgccgatcatggaggatgagaggaacacccagcagcaccagggcggtgagaggcccaggaccaggagaacgaggtgaaggacaggggactcctggaagcctctcggcaggacagacgacgacaggagagagacagagagagagagtcggacggatggagagtccgggtgaccgacaaagagaggcacagcgcgaaagagcagctctgcaagctgcacgaca

SEQ ID NO: 304921 - DNA, 267 bp, Zea mays
attcggggcggcacagacggaggaggaggtggagaggctgacgaggctcaaggccggccggatgaaggagctcgtgctcaagaggcggctggagctggagagcatttgcaggagcatgcacgtggagcccgatgcgagcaccgtgccggagaaatccattgcgctgatcgactctggcctcgtgaacccttccgagctcatggccagcatcgacgaacagatagcgaaagccagggaggagctccagtccaggagagaaatcatgga

SEQ ID NO: 304922 - DNA, 267 bp, Zea mays
ggaagcgctgcaaagggagataaacgaagcgaacgccgtggtgaactggacggacagggcgccgtacgcgtactggaaggggaaccccaaggtgggcgccgaacgcctgctcctcctccggtgcaacgcgtccggcgagcgtgactggaacgcgcgggtatacgcgcaggactggggagaggaggtgcggcacggattcagggggtcggacctgtccaagcagtgcacgcacaggtacaggatctacatcgaagggcgggggtggtc

SEQ ID NO: 304923 - DNA, 314 bp, Zea mays
tggcggccgggcgtcgtctggcttcttctggctcaacgcagcggagatgcagattgacgtgcttgcaccaggttgggatggggtcactgaccatgagaacgggcggatcgacacactgtggatggctgaggctggtgtcatcgatgcattcttctttgttggttctgagcctaaggatgtgatcaagcagtacataagtgtcacgggcacaccttcaatgccacaacagtttgctactgcgtatcaccaatgccggtggaactaccgggatgaggcagatgttgacggtgtagatgctggttttgatgagcatg

SEQ ID NO: 304924 - DNA, 282 bp, Zea mays
ggcaattattactggaaccttttcaatcatcaagcagtgctcttcattaagttgtttccctggagtgaagattgtgcacacatcctcgacagtgcatggtcagatatacataccagaaatcaattggatgctgatgatactctgcctggctgttactattggcttcagagacacaaagcacttggcaaatgcacaaggtaaaaaaaaactcggattcatatagctgatcccagctacttgtagtgcttgttcatgcattgaagtgaatctcgtatataattg

SEQ ID NO: 304925 - DNA, 246 bp, Zea mays
acgtcgagcgcttctacgacgcgctcgccgggaaggtgatgatcgacggcaaggacatgcggagactgaacctcaagtccctgcgcctcaggatcgggctggtgcagcaggagcccgtgctgttcgccaccagcatcctggagaacatcgcctacggcagggacggcgcgacggaggaggaggtcgtagaggcggccaaggtggccagcgtacacggcttcgtcagcgcgctccccgacgggtaca

SEQ ID NO: 304926 - DNA, 271 bp, Zea mays
gaaattttcatttcacaacctattctgctcgaacttgaagcgccaatcaagatttgcggtgatattcacggtcaatactacgatcttctacgtcttttcgagtacggtggtttccctcccgaggcaaactacctcttccttggtgactatgtcgaccgtggcaagcagtccctcgagaccatctgcttgttgcttgcgtacaagatcaaatatcccgaaaacttcttcattctccgcggtaaccacgaatgcgcctcgatcaatcgtatct

SEQ ID NO: 304927 - DNA, 230 bp, Zea mays
aatctatccgccaagatcttacagttcagagaatccagaatgaactgactataaaggtttatgaaacacatgcccgattagctatgcaagctggtgatttacatgaatttaaccagtgccagtcacaactgaagaggctatatgcacaaggaatcaagggttgctattttgaattttctgcttacaatttgctgtgtgtcatgctacactctaataataaacgagacttg

SEQ ID NO: 304928 - DNA, 292 bp, Zea mays
gcgtaccggagtcctcgtacgtgctctcccacaccatcgtcggcttcccgtcgctgatcgtgctctccttcgcgttcgcgctcacgacgttcttcgccgtgggcctggccggcggcgccgacgggttcttcttcttcgtggccatcgtgctagcctccttctgggcggggtctgggttcgcgacgttcctctccggcgtggtgacgaacgtgatgctgggcttccccgtggtggtgtcgacgctggcctacttcctcctgttcagcggcttcttcatcaaccgggaccgcat

SEQ ID NO: 304929 - DNA, 109 bp, Zea mays
tcgagtacacgcgccccaagcagccgcactacaaccaggataagatcccggagttcgtcatcaagatcctccagtttttgggtccccctggcaatactgggcctggctg

SEQ ID NO: 304930 - DNA, 271 bp, Zea mays
acatcgtctactctgcctactgacattgaaacaacatggcacgtggacctaagaagcatttgacgcgcatcaatgcgccccgatcctggatgttggacaaaatcggtggtgtctttgctccccgtccatcttgtggtccacacaaactacgcaattcacttccattggttgtaattttgcgtaatcgtctaaagtatgctttgaattatcatgaagttgtgaaaattgtaatgcaacgtactatcaaaatcgatggtaaagttcgtaccga

SEQ ID NO: 304931 - DNA, 208 bp, Zea mays
ccgctcgaggtgtgtgtgtgttttccgactgacatgtttacccctaaattttgtagtgcaccactaccatcataccattctttggcgatcaattcttttggggcagcatggttcatgccagaggattgggtgcaccacctatacccgtggagcaattacaattgcattcgctgattgatgcaatcaaatttatgattgatcctaaggt

SEQ ID NO: 304932 - DNA, 184 bp, Zea mays
tcgagcaaagctctagttctagctagctagcaaagggggggaaaatggctccgcttctcgctgctgccatgaaccacgctgcagcccatcctggccttaggagccacctagtaggacccaacaatgagagtttctcacggcaccacctgccgtcttcttctccacagagcagcaagcgaaggtg

SEQ ID NO: 304933 - DNA, 250 bp, Zea mays
cgcatgccgtgcagtcgggaagggatacgccgggccgtgaattcctgaattcatacgggcccgcggggcagagcatcgttcgacggctgggcgaccccgacgcggtggcgcgcagcgtgctcgcgttccgctccgcgctctggtactggatgaacaacgtgcacggggccatcgtctccggccagggcttcggcgccaccatccgggccatcaacggcgcgctcgagtgcgacggcaagaaccccaactc

SEQ ID NO: 304934 - DNA, 281 bp, Zea mays
tcaacgtttcgtcgttttaataacctggatgttatctatctagtcaaccttattatgcaggttgaactttttgctgtagtaatatacattttctgtgaaaccacgattatgaggaaagtactgaaaaagcagtgcaatggttgaatgatatagtgactaatgctctgattcatgaacaagagttatgtttttctgtgaaccaggatttcaaatatgaggaaaataccgaaaaggcagtacaatgcttgaacgatatagtgacgaatgcactgattcatgcc

SEQ ID NO: 304935 - DNA, 276 bp, Zea mays
cagagttgttggtcatctggttggaaaagttaaccatgctgatgatgaaccatttgagttgacaaaggaaatcgaggcccaaataattggcaacctgctccctgatgacgacgacttattgtcaagtgtttgtggtgatattgggtataataccaatgcgaataatcaggatgagattgatgatgatattttttgtactggaggtggaatggaattggaagcagatggaaatagcaaattgttaaactttaatggtggagccagtcagactaggtc

SEQ ID NO: 304936 - DNA, 281 bp, Zea mays
taatgtagtggctattgctggagacgactattcaattattgcatcagacacgcgtttggttaatggatatcaaatttacactcgtaatcaatctaaactttttaaagtaactaacaacactgttttaggatctactggttgttggtgtgatgttgttactttcaatcgtattttagaaacacaagtcaaaatgtattcttatgatcataaccaagaaatgtcttgtcaagctgctgctcagcttatttcaattatgctctacaatcgacgatttttccctt

SEQ ID NO: 304937 - DNA, 281 bp, Zea mays
ttgagggggagaaatataggagcaggaaaagatgaagaggaaatggaacaaaaagttttcagctgtatatgctagatcttgtaagtaactgctggtgagttccgttgtaaatgcagcttagttttcttgttaggccttcggcttctctcgtgaataggagtaccaaaattgccttcaccggtggagaaaatttcatactccctccgttttgttttagttgtcgctggatagtgcaaaattgaactattcagcgataactaaaaagaaacggagggagtatt

SEQ ID NO: 304938 - DNA, 275 bp, Zea mays
tggcgccggtgtactggctggcgggtctccgtcgaacggcggcggcgttcggctacttcctgctggtgatatggctgatcctgtacacagcgaactcggtggtggtgtgcttcgcggcggcggcgccggacttcgtggtggggaacgcggcgatccagggggtgatgggctccttcttcctcttctcgggctacttcatcgcgcggtcggcgatgcccgggtgctgggtgttcatgcactacctgtcgttgttcaagtggccgttcgaggcgctg

SEQ ID NO: 304939 - DNA, 273 bp, Zea mays
ctgcgtgtgcgtggccaagggcggcgcagagacgctcaagttcaacatggcgctgatcctgctcccggtgtgccggaacaccatcacctggatccgcaaccgcaccgccggagtggggcgcgtggtgcccttcgacgacaacctcaacttccacaaggtggtggcggtgggcatcgcggtcggggccgggctgcacatcatctcccacctgacgtgcgacttcccgcggctgctccacgccacggacgccgagtacgcgccgctggggcagta

SEQ ID NO: 304940 - DNA, 271 bp, Zea mays
ccgaggccagggaaatgccctgcggccacatctaccacgccgactgcatcctcccctggctcgcgctccgcaactcctgccccgtctgccgccaccagatgcccaccgacgccaacccccttgagcagcagcaggaggaggaggccacggtcgggctcaccatctggaggctccccggcggtgggttcgcggtcggtagattcgccggcgtcgggacgctcgatgagcgggagctacccgtcgtgtacacggagatggacggcgccgggtt

SEQ ID NO: 304941 - DNA, 277 bp, Zea mays
attgggcttcaatgggtcctccttcactgacgtaaataccgtccaagaattttctgatatctttgttgtggactcgggtactttggtgaatttgagcagcagaagtggtgacgttttcaatgtcatttcctctgagaataatttcatctttgttggctgatcgttcaacaacaactccatcaagcataacagttcgtaaaacgactcgttgaccaatgaaattacgaacttcaaaaatttttccatcctcgctaatgctaacgtttacggggtaatg

SEQ ID NO: 304942 - DNA, 282 bp, Zea mays
ggacgaagcggatggacggcatcgtggtgttcgccgacgagaacagcatcctccgcaccgagctgttcgacgaggcgcagaaggtgaccaccgtgggcgccgtgcccgtcggcatcctgggcgaggacgacggcgccagcgagtccttcctacaggcgccgtcgtgcgacgcggaagggaatctggtgggctaccgcgtctcggaggagaccgtgctgccggcgaaccggagcgacatgctgatggccagcaggctggagtggtccggcttcgtggtgaacg

SEQ ID NO: 304943 - DNA, 294 bp, Zea mays
gcaggttccaccagctacatgaatttgaccaagggaaacgtagctgccgccgccgcctcatcggtcacaacgagcgccggaggaagccaccacctggacctctcacttcacgatatggccggctcgctgcatcacttcaagagcctgacaggttcagaagcttcctgctcgacttctcgtacccaagggttccaagcagcgtgagggatgcgtggccaggaatccagcacggtggcgacaggatgctgggcaccgtccagtggcatggtgcacaagaacctcctcacccacacc

SEQ ID NO: 304944 - DNA, 222 bp, Zea mays
  unsure (1)..(222): unsure at all n locations
gggngaagcttccgaagcacaacaatataccatggcgtggtaactcttgcatgaaggacggactttctgatcctgcaattcggcgaagctggtcggcgggtactatgatgctggcgacgctgtcaaattcaatttcccagctgccttctccatgaccctcctcagctggagcgtcattgagtacagtgctaagtacgatgctgctggggaacttggccatgt

SEQ ID NO: 304945 - DNA, 261 bp, Zea mays
atcgtcgataccccacctatgatcgttgttggtcttgtgggatacatcgagactccccgaggcctgcgatccctcaccaccgtctgggccgagcatctgggcgacgagcttaagcgccgattctacaagaactggtacaagagcaagaagaaggctttcaccaagtacgccaagaagcactccgagaacagcggtgcctctatcacccgcgagctcgagcgcatcaagaagtactgcaccgtcgtccgtgtcctcgcccac

SEQ ID NO: 304946 - DNA, 282 bp, Zea mays
tctcctgcttagtacatacatccacactcgcaagagaaggagaagagatctccgcgtccgcaaccgcatcgcttccctcccggcgcaagaagaagattcggttggattgtttgtctcttgcaaactgcaatggctgctgctgccactgctactccgtccgtggcgccggaggcggcgaccggaaggcggtggcaccgccggtcgacgcggtggatctggatctggagctggagctggaggagaagcacgtgctggcggtggacgacagctccgtggaccgcg

SEQ ID NO: 304947 - DNA, 274 bp, Zea mays
  unsure (1)..(274): unsure at all n locations
tcggtactggcgccggtttattcgaagttgttaaaattggagatgaatacttttcatttattaatgattgcaaaaatccaaaagcatgtaccgttatgttgcgaggtgcatccaaagatatgctaaatgaattggaacgtaatttacaggatgctatgagtgttgcaaagaatttgcttattgaaccttacatcgttccaggtggtggagctactgaaatgttggttggaaagtatttacttgaaatctanaagtattactgatgtggcacaat

SEQ ID NO: 304948 - DNA, 199 bp, Zea mays
  unsure (1)..(199): unsure at all n locations
tgtcncaagatgaatttgtggcctacataaggagacaaagcagttgtttctcaagaggtacttcatcataccggggtgtaaccagacggaaggatggtaaatggcaagcaagaattggtaggattggtgagagtagagacaccaaagacatttaccttgggacctttgaaactgaagaagaggcagcagaagcttatga

SEQ ID NO: 304949 - DNA, 292 bp, Zea mays
cgccaagctcggcggctacgacatccccgccgagagcaagatcctcgtcaacgcctggtacctcgccaacaaccccgacagctggaggcggcccgaggagttccggcccgagcgattcctcgaggaggagaagcacgtcgaggccaacggcaacgacttcaggtacctgcccttcggcgtcggccgcacgagctgccccgggatcatcctcgccctgcccatcctcggcatcaccatcggccgcctcgtccagaacttcgagctgctcccaccgcccgggcaggacaaggtc

SEQ ID NO: 304950 - DNA, 265 bp, Zea mays
gcactgccgccactcaccagcaaattcccaagccgccccttcccccatctctttcgcgccccatttgatcgattcctgatggcgcccaaggccgagaagaagcccgcggagaagaagccggcggaggagaaggccgagaagaagccaagggcggagaagcgcgtgccgagcaaggagggcgccgagaagagggaaaagaggaggccgagaagcaccttcgggacgtacaagttctacttcttcaaggtgctcaatcagttccacc

SEQ ID NO: 304951 - DNA, 279 bp, Zea mays
gctgcctccgcctctcgagtctcgtccacccgtcgtcctcctagctcctctactcgccagtcgccatgggcaagattaagatcggaatcaacggcttcggaaggatcggcaggctcgtggccagggtcgccctccagagcgaggatgtcgagctcgtcgccgtcaacgaccccttcatcaccacggactacatgacctacatgttcaagtacgacaccgtccacggccactggaagcacagcgacatcacactcaaggactccaagacccttctcttcg

SEQ ID NO: 304952 - DNA, 274 bp, Zea mays
cgcctccatcgcccgccacgtctacctccgcaagaccgtcggtgttggccgtctccgcaaggtccacggcactgccaagaaccgtggcagccgtccctccaagcacgtcgatgcctccggctccgtcgaccgaaaggtcatgcaggctcttgagaagatcggtgtccttgagcaggacgaggacaagggtggccgccgcatcacccaggccggacagcgtgatttggaccgaattgcccagaccaccgctgaggccgaggaggaggaggatgac

SEQ ID NO: 304953 - DNA, 267 bp, Zea mays
acgtcattttggaatgatccaagtgaatttcaagacatatttgacgttgaacattttataatctctctaagagatgaggttcgcatacttagagaattgccaccaagagtaaaacggagagtggagttaggaaagttctactcagtgcctcctgttagttggtcggatatctcctattaccataagaagattctacctgcaattcagaaatataaggtactccatcttaatagaactgatgctaggcttgctaataatggtctgcct

SEQ ID NO: 304954 - DNA, 289 bp, Zea mays
tggcgtactactgtgggagacgcttctctctcctcgtcgggttcgttcctaatcgatcctattggttagggttttgattcgatttggatttggtcgggtttgggcaggccggctctacgcgatggagatcgggctgaggataccccagaaggagcgcaccaagaccacgaactccatcctcatctccctcatgaaccagctcgagaaggacaagaaatcgttgactttggggcccgacgacaatcttcatttggagggatttgcattaaacgtctttgttaaagcagat

SEQ ID NO: 304955 - DNA, 197 bp, Zea mays
gtgcaggcaagtaccatgacgtgcctgctgtgatcttttccctgacaggctacactggaaatctgttccacgacttcactgacgtgatggtccctcttttcacgacagcaagcgagttcaacggagaagtccagttccttataacggacatggcgctctggtggacaatcaagtaccataccgttcttgagaaactg

SEQ ID NO: 304956 - DNA, 167 bp, Zea mays
cgcgggagtactacgactaccgcaagtctatctacggcgacgtcacgcaccgcgccctcctcgtcgacgccgtcggcaccctcgtcgtacccgcccagcccaccgcgcaggtgtataagagcattggtgagaagtatggagtgaagtactcggaagactagatcctg

SEQ ID NO: 304957 - DNA, 175 bp, Zea mays
gagcatcactggaattatatcgaaaactatttcaaagaagggtatgcttgaagtgtataactccttgactgaagaaggaaagaagcagtttattgaggcctatagtgcagcatattacccatgcatggacatattgtatgagtgctatgaagacgtctcttctggaagtgagatt

SEQ ID NO: 304958 - DNA, 186 bp, Zea mays
caaaaccagaccaccaaacaagtgccagcgccctctcgcagtcgccgcaatggagagcaccttcatcatgatcaagcctgatggcgtccagaggggcctcattggtgagatcatcagccgttttgagaagaagggcttctacctcaaggccttgaagcttgtcaacgtggagaggtcgtttgccga

SEQ ID NO: 304959 - DNA, 162 bp, Zea mays
gttccgccctcaccctgcccgcgatcgcgacctctgccgcttccacgccgacgattacgtctccttcctccggtccgtcacccccgaaacgcagcaggaccagatccgcgcgctcaagcgcttcaacgtcggcgaggaatgccccgtcttcgacggtctcta

SEQ ID NO: 304960 - DNA, 278 bp, Zea mays
acgcgtagtagctcggcatcggtcgactcgaccgtggagatgcatttaatgtctatttggattttaaggagtctggtctaaaggcagatgttgttctgttcagctcttttattgatactttggccaagaatggcttggttgagtgtgctttgtctttgcttgatgagatgatgaagatgggtatcaagccaaatgttgttacctacaacacaatcattgatgcatttggcaagtcgaagatttttactgaggaggattctgatattggtgccatggga

SEQ ID NO: 304961 - DNA, 293 bp, Zea mays
ctggctcaggaacctcagtctcctctcatatctttctgctggaggcgtgatcgcgacgatcacggtcatcgtctgcctatgctgggttggcatcggagaaggaattgggtttcgcttttccggtgctgtagtgaacgtgacccaccttccagtggcactcggcctgtatgggtactgctactcaggacactcggtgttcccaaacatctactcgtccatgaaggagcgctcgcagtttccattcgggctcatgttctgcttcacggtggtaaccttgtgtacgccggagttgc

SEQ ID NO: 304962 - DNA, 275 bp, Zea mays
caggaatgaaggttttagatgtgggctgtggaataggtggaccgctgagagaaattgcaagatttagctcaacttcagttacgggattgaataacaacgaataccagataaccaggggaaaggttatttgaatccacatttgttaatcgacacctttcactgttataatacttatcatgttgctcatatgctaacatgatgtttcaacattcaggagctcaaccgtttagcaggaattagtggaacatgtgattttgtcaaggcagacttcatga

SEQ ID NO: 304963 - DNA, 265 bp, Zea mays
cccaaatcgaccgagcgaattcaccacagcttctcaccaccgctaccttcgatggcacccaaggcggacaagaagccggcggcgaagaagcctgcagaggaggagcccgcgacagagaaggcggagaaggctccggcggggaagaagcccaaggccgagaagcgcctcccggcgggcaagtacgccggtaaggaggtcggcgaggggaagaaggggaaaaagaaagcgaagaagtccgtggatgactacaagatctacatcttca

SEQ ID NO: 304964 - DNA, 265 bp, Zea mays
gatcaatgcaggagctcaagcctttgtaaattgttggagtgtgaccttggggagagcaagtgccactccccgagcacaatcatgaagatgttccagagttctatgttctgtttgcagccccagggtgactcctacacaagaagatctgcctttgactcgatgttggctggctgcgtgcctgttttcttccatcccggttcagcgtacgtccagtatacatggcatctcccaaagaactatacaacgtactctgtattcatccctg

SEQ ID NO: 304965 - DNA, 275 bp, Zea mays
agctcgagcgaatcggctcgagatcgaccgagcgaattcaccacagcttctcaccaccgctaccttcgatggcacccaaggcggacaagaagccggcggcgaagaagcctgcagaggaggagcccgcgacagagaaggcggagaaggctccggcggggaagaagcccaaggccgagaagcgcctcccggcgggcaagtccgccggtaaggagggcggcgagggcaagaaggggaaaaagaaagcgaagaagtccgtggagacctacaagatctac

SEQ ID NO: 304966 - DNA, 170 bp, Zea mays
cacccgctcagtcacaaagcctcagatctcagacgcctacgacgccgcttcgttcgtgtggaggggcgaagacaggcaatggcggcgactgagggcgtgctcttggggatgggcaaccccctactcaacatctccgcggtcgtcgataacgccttcctgacaaagtatga

SEQ ID NO: 304967 - DNA, 187 bp, Zea mays
ctgctatgttgctcgcgtgcaagtatgaagaagtgagcgtaactgtggtcgaggatctgatcttgatctgtgatcgtgcatacacaagggctgacattacttgagatggagaggaggatagtgaacacacttaatttcaatatgtcggtgccgacaccatactgtttacatgagaaggttctaaagg

SEQ ID NO: 304968 - DNA, 181 bp, Zea mays
catattgtagggggcatcatggcttgtgatgagaccaggtttgatgcaattatagagaataagataccctacttgatacttagtgttggagccttggatatggtaaactttggagctcgagatacaattcctcttgctttcgcagaccgaaatattcatgttcataatgagcaggtttcat

SEQ ID NO: 304969 - DNA, 190 bp, Zea mays
aggcgccggacgtgcttgatgcatcatcaacccaagtacgtgacctccgctaccggaacaaccgaacgatacacgcaaccatgtcgaggaggaagaccagggagcccaaggaggagaacgtcaaccttggacccactgtccgtgaaggagagtatgtctttggtgttgctcacatctatgcatccttcaa

SEQ ID NO: 304970 - DNA, 135 bp, Zea mays
agacaatcatcttctccatggctcgtctcggccgtgtgacgaacttgactgggctggtagaactgtacggccggaacaagcggctgcaggagctagtgaacctcgtggtcgtctgcggagatcatggcaaccctt

SEQ ID NO: 304971 - DNA, 269 bp, Zea mays
cggcaatagcgccacactggacgctttcctggtgcagcacgacatggagaacatctacatgtgggtgtttaaggagcgtccggagaatgccctggggaagatgcagctgaggagcttcatgaatgggcactcacgccttggggagccacagttccctttcagcgcagacaaagggtttgtgcgctcacaccggatgcagcggaagaactaccggaggctctctaacccgcagtgtcttcaatgggatcgaaatcgtgagggcgccaaat

SEQ ID NO: 304972 - DNA, 229 bp, Zea mays
gtgggactggcttcacacccagagatgtcacaccggatgcataacaaatgtgagaccaggcgcttctttctgtatcacatttgttatgcttcaagaaagtttgaagattacaccattcgcaatgctatcccgggccacagctggaatcagaggatcaacacttatcatcaacatgcctggcaacccaaatgctgtggcagaatgccggtagcactcctcccagcgctca

SEQ ID NO: 304973 - DNA, 266 bp, Zea mays
tgtgaaggaagcagggcgcggtggaaagggaaatcttcctctgaacgttgcgccgacagtagtcacttccgagccgtgggacggcaaagacggagaggtcatcgaagaggatgaattctcccttgacgagctcatgggcgacagctcctcagtaaacgatgagttgtagttctgacgattctgtaactgatctgcgtgccgattagcctgactgtaaatctgaggaactctgatgttttaaaaactcgttaaattttcagattttg

SEQ ID NO: 304974 - DNA, 100 bp, Zea mays
aacgcattggtcttaggcatagaagccccagaggaacacggccactgccatcatgagcagggcattgaggttgaccacacgggcccagctcgggtcctcg

SEQ ID NO: 304975 - DNA, 242 bp, Zea mays
tagaaaagctgtatcaaaattttgtgcgaggcatttgcataaacaagtgcttataaatgatgcaaattcatctggtgatttgccaacctctctccataaagctttcttaagaatggatgagatgatgaaagggcagaggggttggagagaactaactgagctgggagataagggaaacaaaatctcaggtatgatagacgacataatatggcctcccaagggtggtgattcagataagataa

SEQ ID NO: 304976 - DNA, 274 bp, Zea mays
ctgatgacgaggacaaacgatgcaagtggtggtgggaagcttccccggaagcgcttctatcgcgccagggcacacagcaacccgctcagcgactcgcacttcccagtcccaatatcacctgaagaggtcgatctctcacagcactacccgcggtacttccctgctgacaagggcagcgacggtgaggaggctgcagcgccacaacagatccgcttcgccgatgtgggttgcggatttggcggtttgcttgtagggctctcgcctctcttcccag

SEQ ID NO: 304977 - DNA, 279 bp, Zea mays
gttttatgcgggtgttgttgaatcattcgatgcctcgtcaaagaagcacaaggtttcgtatgatgatggtgatgttgaggtactagctcttaagaaggaaagatgggagttcattgctgaggaacaaggcgctgatcctgatgtggcatctaatatgccacgtggcaggaaagctaaagggagctcggttcaacaaatggagggaaaaacaggaacacctcaaagtgatgttaagaattctcccaagaagagagggcgcccaaaaggtgtgcgctccac

SEQ ID NO: 304978 - DNA, 276 bp, Zea mays
agctcctctcttcctttctctctcgccgcacgcaggcagttcgagagggcgtgcgttgctcgaggggcggtaaatggcagcggcgacgacgaggggcagggccgacggtgacgccggcgccggcgcggtggcggatgtggacgccgtggccaacgacgtccacgcgtccatcaacaacatcacggctcggcgaaatctcgggtacctgtcgtgcgggataggcaaccccatcgacgactgctggcgctgcgactcggactggcacacaaccggaag

SEQ ID NO: 304979 - DNA, 122 bp, Zea mays
ctgaagcaccacttcctgcactcactgtgctagctgctcaaaccgtagtagtaacagtccatcaccaccaatggctcccaaggttgcgctcttccttgccctgagcctcctggttgctgcca

SEQ ID NO: 304980 - DNA, 273 bp, Zea mays
cttcccggtctcctccgcccgttgccttcgtcccctccatctccggctgcgtcgccggcgagcccgacaccgcgaatcggatccgccgacaaggcgagagggaaaagatggggcttacgttcaccaagctgttcagccggctgttcgccaagaaggagatgcggatcctgatggtgggactcgacgccgccggaaagaccaccatcctctacaagctgaagctaggcgagatcgtcaccaccatccccaccatcggattcaatgttgaaactg

SEQ ID NO: 304981 - DNA, 135 bp, Zea mays
cgaggacatccgggtaaactgcgtggtttcaggaattatcaacactgacttcagcaacgtgtttcatgggaatgagtctctctggaagaccttcaaggcacatcatcagctgccgaggattggggagtcagagga

SEQ ID NO: 304982 - DNA, 259 bp, Zea mays
tattgctgcatatcgtgccaagggcaaaagtgaagcaggaaagaagggccctggcaggccaacaggctcaaagaagaagaacgaaccagaagatgaggaggaggaggaggaagaagaagatgaagatgaggaggaagaggatgaagatgaagaataaatggctatcctttaatgatgcgtgtggaatgtgtgtgtgtgctcaggcaattattttgctaaaatgtgaattcaagtgcagctcaatactagcttcagtata

SEQ ID NO: 304983 - DNA, 243 bp, Zea mays
ccgagtcgctcgtcagatcctccagcaacacagcaccttcgccgccgccgccatgggtaaggttcacggatcgctggcccgcgctgggaaggtgcgcgggcagacgcccaaggttgcaaagcaggacaagaagaagaagccccgcggccccgctcacaagcgcatgcaatacaaccgccgcttcgtcaccgccgttgttggattcggcaagaagcgcggccccaaactctcggagaagtagat

SEQ ID NO: 304984 - DNA, 258 bp, Zea mays
aagagcatttggggtaatacttccagaagtgcggggtaggggaagaagagctatcatggaacagcttgggtctgtgaacaagcttcagtaagttatctttgaatatgtagtatctatatgactatgcgtggctggaaccacattgaagaatgttagagtaatgaaatggaggatctctaaagagcatctgattcttgttgctgtaccaaagcaatggttgatgatacttcccacaccacaaatgggacacatggtctg

SEQ ID NO: 304985 - DNA, 255 bp, Zea mays
gcgacaaacattggcttgatgatgatcagtggcctgtttgttaatggaccctatgctctgataacaaccgctgtttctgctgattttgggaactcacaaatctcttaaaggagattctcgcgcattggccacggtaaccgcaattatagatgggacaggatctcttggtgctgcactaggaccattcataacgggcttcatttcaagaaaaggatgggatttagtattcacaatgcttgcactctgtgcactggt

SEQ ID NO: 304986 - DNA, 152 bp, Zea mays
tagtagctggctttgatcaagaagctgcagctgcagtcatggcacgcttggtgtcatttaagatggaaactgaggttgattttgacccagtaaggtggcttgatcgagctttgatacgtttatgctcaaaatttggagattatcagaaggag

SEQ ID NO: 304987 - DNA, 257 bp, Zea mays
ggaatgtatattgttaagtcactgttatcaagggacacataaaagcagaatcataaaactggactgcagccatcatcacagtacccgagtctatgcatgtaggtcatcctcactcagatcttagagtcacaaccaagactccaaaaaaccaacgaagtcccttcaatgtgagtaaaggcaacagcttcaagcactgacaatttttaacagtgattattcaaggaatgcacagtagccacagttcagacaaatcaact

SEQ ID NO: 304988 - DNA, 186 bp, Zea mays
ctagatgggcgcgagaatccccaagcaaacaaacagggtagaggtcgagggcgaggagaggagaggcgaggagaggagaggttgggtctgggacaccatggctaccgatgaagctgtacggggcggtgatgtacgtggaagtgacgaggtgcgcaacggcgtaggaggaggctggctccgactacg

SEQ ID NO: 304989 - DNA, 164 bp, Zea mays
gtacaatatccccaaaccctagctcccgatctcgatggcgaaccctcgcgtcttcttcgacatgaacgtcgtcggcgcgccggtggaccggatcgtgatggagctgtacggcaacgaggtgcccaagaccgccgagcacttccgcgcgctgtgtacaagcgaga

SEQ ID NO: 304990 - DNA, 250 bp, Zea mays
gtgcgggatatccagaaactttgttgtttccaggaccccgactcaagttgcaagccatgctcaaaagtactttgttagacagacaaactcatcgagacggaagaggcggtcaagcttatttgatatggtcccagaaatgccaatggatgagtccccagctgctgtggaacattttactctccaaaatactcaagatgaggatacaagttcaattcacgtgccaaccttacatcttggacaacggaaggaa

SEQ ID NO: 304991 - DNA, 231 bp, Zea mays
gtgaaatgcgcccaacaagctttgtcaagaggaatttatcaatcaattcctcttgggaaaggcgcccaacaagctttgtcaaacagttgataaattgcctacatttctgccagcattatttgatgcttttaacaaccagagtccagatgtcccgaagactgttgtgttctgcttggtggatatgtacatcatgcttgggaaagcatcggctccatacttggaagggcttag

SEQ ID NO: 304992 - DNA, 207 bp, Zea mays
ccttctcctcggctgacctggtggtgtttgctgagctgttttggaacccaggggtgctgatccaggctgaggaccgcgtgcaccgcattcgacagaccagcttctcccgtgctcactacctcgtggcaacgggcacagctgatgactacctttggcccctgattcaagagaagattaaagttctggcagaagccgggctttctgaga

SEQ ID NO: 304993 - DNA, 229 bp, Zea mays
cctcgagccgattcggctcgagatgcgaacaagattaacccattggctccggtggatcttgtacttgatcactcagtgcaggaggatgtagcaaggtcgcagaatgccgtacaagcaaacatggtgttgttggcaaatttgttgaattctatggtgaaggtatgggtaagctgtctttagctgacagggccacaattgcgaacatgtcaccagaatatggagccaccat

SEQ ID NO: 304994 - DNA, 224 bp, Zea mays
atcggcgagataccgaagttgtcgggagacgtccggacctgtgggacgacagcgtacgtcagccagtcggcgtggatacagagcggcaaaattcaggagaacatactgttcggtatggagatggacagagacaagtacgacagggtgctcgagtcgtgcgcgctcaagaaagacttggagaacctgccgtttggcgaccagacagtcatcggcgagcgaggcat

SEQ ID NO: 304995 - DNA, 276 bp, Zea mays
actcaacacattgcctgtagccgaacccggccaccgtagggagcatgccgaccgcgcctgctacttgctgttcattctggccgcatggccattgccacaggcacttggctgcatggccatctctatctgattttgttcttttttatttcttggttctagccttaacgaacgtccagcatgcctcctctgtgttatattttttttcagccgcacaagaacagcttcctgtttatcgatctgtctctcttccttctctctctgcgagttcgcctgtct

SEQ ID NO: 304996 - DNA, 273 bp, Zea mays
acaggtttggtcaaggagaatcactggtgttagtgatgggctagttcaagggactgaagcatttgctcagggtttggctttcggggtttctggtgttttaagaaagccagttgagagtgccagacagtatggtgttataggtattgcacctggcattggccgtgcttttgtgggtttcattgtccaacctttaagtggggctctggattttttttcactgacggttgatggaatcagtgctagttttatgagatgtgttaacattttaagtaa

SEQ ID NO: 304997 - DNA, 266 bp, Zea mays
cactcgagccgattcggctcgaggcagatgggaatgaagtgccacaccctgagaagaaagaatgcgagtacaggaatgggaactgggtttctgacaatcgtagaccactatactcagggtttggttgtaagcaatggctttcagagagttggtcctgcagactaacccagcgacaagatttcgcgtatgaaaaattcagatggcagcctgaagcttgtgagatgccagagtttgaggcctcacacttcttgagaagaatgcaggat

SEQ ID NO: 304998 - DNA, 261 bp, Zea mays
  unsure (1)..(261): unsure at all n locations
gtctcctaaaatttcccctttccacacaacatatgagcccanaaatggctaacgggagtgtggcatcacgtttacgagagnggtctccatctgagtcacctcttagctgggaaccaagaagacggattgcactgggatctgcaagaggactttcttacttgcatgatcactgcgatcccaaaattcttcatcgggatgtcaaagctgcaaatattcttttggatgaggacttcgaggcagttgtgggtgatttcgggcttg

SEQ ID NO: 304999 - DNA, 205 bp, Zea mays
tcctcctcctccctccctcctttccatcccgtttcttcgccgcctccatctccaggccgcgtcgaattcttccatccaccgcaccggtcgacgacgacgacgaggatgctgggcgcacgaggaggcagcttggatccggtcccatgctgagacatttttcgcaagctctcagacaagcgtgttcggttgaggtggcgaggggcta

SEQ ID NO: 305000 - DNA, 174 bp, Zea mays
ccatatccgctcccctacctctccagccatctcccgtactaccgtacgactcgtctctagcacctacacctacgccgccagccatggcccgcatcaagctcggacatcacggtttcggaaggatcggcaggctcgtggccagggtcgccctgcagagcgaggatgtcgagctcg

SEQ ID NO: 305001 - DNA, 174 bp, Zea mays
cagccgagttcgcgtcgccatggggccgctcgagtgggccatgtgggccaacgctacagacgctggcgtccgacctgatcctcattcccgggggcatcgtggccacagctgggcgcttcacccagtggtactttggtgcctactccattgtggcgggcgtgtttgtgtgcctgc

SEQ ID NO: 305002 - DNA, 102 bp, Zea mays
acagatccggggactcttcaccagcctccgaccgccctccgatttcctatccgcttgccaactccgggagccatactttcggaccatctcctgcttctggga

SEQ ID NO: 305003 - DNA, 159 bp, Zea mays
actcatgcacaccgctagagatagatgtgaacgagactaagcttgacagcgggataagtcttagcttgcttttgctacccaaaaggttgttgaggttgatgcacttgctaaggcattggctggtcaaaaggatgaggcttacttacgacagcaaatgct

SEQ ID NO: 305004 - DNA, 188 bp, Zea mays
caggatgagctggacgacatggccaaaacctatcctggccgctttaagatctactatgtgttgaatcaggtttgtgtcacattctttagaaaatttgaaggtattactgtatcaacattctttatttcatgtataggaacacattagtttttttttgtaaaaagaacagcaggcttcactgtttcaac

SEQ ID NO: 305005 - DNA, 273 bp, Zea mays
gactgagggacctttagccttagaggtggctgctgcagagaattcgaccctccaggatggtgctggcgcttacctagcccccgagggtgttggcggggatgattcggctcggatgggtagcgcaagtgcgacccagcccccgaggtgttgccggagatgatccgactcggatgggtagcgcaagctgtgacccagtcctcgagggtgtccgagcgggttctccctcttgcacttccatggatgttcacgtagggtcttctcctccacactgtg

SEQ ID NO: 305006 - DNA, 263 bp, Zea mays
ccatttcatccttcaaagaagcagtatcggcaagaaccgagctgaagctgccatggaattcttacaagaattacatagcgatgtctctggaagttttgtggaagagagtccagaaaaccttctagacaatgatccctcatttttctgcaggattactgatgtagttgcaactcagcttcctgaaagcacgtcactacgcttagcagatgtcctctggaattctcagattcctcgtttgatctgtatgacatatggactagttg

SEQ ID NO: 305007 - DNA, 274 bp, Zea mays
acgagatggtggacgacccgtcgagcgacgcggtggtgtcatggagcgacgcatccgacgggagcttcgtcgtctggaaccagcccgagttcgccgcgcggatgctgcctacctacttcaagcacaacaacttctccagcttcatccgcagctcaacacatacggttttcgcaaaatagacccagagcgctgggaatttgctaatgagtactttgtcaagggacagacgcacctgatgacgaatatccacaggtggttatccatccacagccat

SEQ ID NO: 305008 - DNA, 277 bp, Zea mays
cggctcgagacacaagatagctagctaggaacaatggagcagaaggttctcgtcgccgtgggcgtggccgtgctactcgtcgtcgtcctctccaagctcaagtatgtgctcgtcaccaagccgaagcttaacctgcccccagggccatggacgctaccattaataggtagcacccaccacctggtcaccagcccgtcgatctaccgggcgatgcgtgatctcgcgcaaaagtacgggccgctgatgatgctccggctgggcgaggtgcccacgttgg

SEQ ID NO: 305009 - DNA, 183 bp, Zea mays
acaagtttgtggccaatgaaccaaccactaagggtggcacctactatcctcttactgtacagaacgctctgcgagctcaggacatgcttcggagtgcaaactgccttggctatatctacgttgacagcggaggtgctaatactacccaggcggctgacgttttacctgaacgtgataattttg

SEQ ID NO: 305010 - DNA, 172 bp, Zea mays
ctcaatccaaaccagacaagcaaggtatcccccgatggctcatcgacgtactcctccacctactactactacgacgtacgaccgcgcggttgacgccgccgtcgacgcgcaggacccgctgatccggcagtggttccggtgagatgacacgatctgagctgaagcgagtcca

SEQ ID NO: 305011 - DNA, 178 bp, Zea mays
gcagccggactcctcctccgcctcccgcaacagccacaccccgtaccgtcaccagcggcagcggcggcggatgtcgggatacgaaggtgtacacccttgaggcggtggccaagcacaacaccaaggacgactgctggactcgtcatcggaggcaaggtgtacaatgtgaccacgtttc

SEQ ID NO: 305012 - DNA, 284 bp, Zea mays
gtcggcatctcttgggaagccatccgcaggcaagaccgtggattagagatatgtcctcgccagcacacatttccgacgcctcttctcggacgtgtccaagaagaactacgagaactattaccccaagggtaagaaggaggtgcctaaaggagatggtacaaacaagtctgaatctaaacaggaatccaatacagatgaacgatagaattttcaggataatgctatgaaacacatgcagaatttccttgcgcctttattgatacttggactgatgctatcatcct

SEQ ID NO: 305013 - DNA, 131 bp, Zea mays
cagtagggtagcttcgcgtgtcggtaattatatggtatgaaccatcaccttttggctctacatggtatgacgcgtaagatactaccttccaactgaataactcagatatgctcacataaagcggatggggc

SEQ ID NO: 305014 - DNA, 260 bp, Zea mays
gcgcggtaggctgcacgatgcctgcagttactgtaacaggcgtgaagcagcaggtgctcgtcagagctctgggaatcttcctcataaagaccgggaagctgacagtccccgaatggatggataccgtgaagctggccaagcaccaagggcttggtccctacgatgagaactagttctacaggcgagctgcttccacagagcggcacctgtacgtccggggtggcgctgaggttggctccatgaccaagatgtatggcgga

SEQ ID NO: 305015 - DNA, 281 bp, Zea mays
ttcgagcgcggattaattccgggtatggttttgtctgcactggaacggtgaggtcgctgttaagataattagctgagattagtcattgatatatttctattccattcactgagtcatgtctatacttttaacttttagctacatattcaaagggaagtcaccttatacattgaagcatgggagacccgatcatgaagcaacagacacggccaatctgcatgcgcctattcaatatcctaaaccagatggacatataacatttgatgtcccaacatctttat

SEQ ID NO: 305016 - DNA, 281 bp, Zea mays
ggtcagattggcgtttcccgtgttcttcttcctcgcagcggcggagttcgcggcggggacgcggtcgccgtcggctttcgtacaaaacgccatctactccaaccgcatcaccatcttctccaagacttactgcccctacaccatgcgtgctaagcacatatttcgagaccttaaggaagatccatatgttgttgaactagatacccgagatacagtaaatgcgctttcaaatggacagctccagaaacttctcgggaagagtcagtcacaatgatgggtcg

SEQ ID NO: 305017 - DNA, 280 bp, Zea mays
cggctcgaggttttgctgctctccgaccccgagctccgaaggccgcagcatcaggcgcggttcccctcgcgtgtgaccgagatggcgctgccgaatcaggggaccgttgattaccccagcttcaagctcgtcatcgtcggcgatggtggaactggtaaaactacatttgtgaagaggcatctcactggagagtttgagaagacatatgaaccaaccattggtgtggaagttcatccgttggatttcaccactaactgtggtaagatcaggttctactgct

SEQ ID NO: 305018 - DNA, 254 bp, Zea mays
atctcgcatatccgctcccctacctctccagcatctaccgtctccgttgtatccgtctctgctcgtcacatcgccgccagccatgggcaagatcaagatcggaatcaacggtttcggaaggatcggcaggctcgtggccagggtcgccctgcagagcgaggatgtcgagctcgtcgccgtcaacgaccccttcatcaccacggattacataacctacatgttcaagtacgacaccgtgaacggcccatggaacc

SEQ ID NO: 305019 - DNA, 281 bp, Zea mays
acctgatgtcgccatgactcttgctgtggttgccctctttgccgatggcccgacagccatcagagacggtaaaacattctcagccctacaaccatgcctcttctacatcactacttgacaagactaaaaactattggctcgttggcagtggcttcctggagagtaaaggagaccgagaggatggttgcgatccggacggagctaaccaaggtaaggctacatacttcacatgtctcacgtcgtctttccatagctcgctgcctcttagcggcttgcctgcg

SEQ ID NO: 305020 - DNA, 277 bp, Zea mays
accgcatgttcatcacacggacggagtgggcgactgaatggggcggcgccaagcagaaggacgtcggcacaccgttcaagcgcctccccttctactgttgctcgctcacgtttcttccattcgaggatccagtgtgcaccgtcgatggaagcgtctttgatttaatgagcataatcccataccttaaaaagtttgggatgcatccagtaaccggagcaccactcaagcacgaagatctgattcctctcacattccacaagaactcagatggagagtt

SEQ ID NO: 305021 - DNA, 192 bp, Zea mays
catcaatgttcaagacggggcacttccccaacctgctgcaagacgtgctgcacacgttgggaacctacgtctgacccttgtatgagacaaggcgagtgtgcgagcttccccgggcttgctactacatcactcgaatccatgtcagggtgatggatgcaggggatagagggttctggactctatcagctcatg

SEQ ID NO: 305022 - DNA, 252 bp, Zea mays
ggacttctgtgattttatctcaccttctactgaagagcaatcttcacgagcagctgctgtgcaagatgtctctgatgttgtcaaacatatatggccacagtgcaaggtggaagtttttggatctttcaggacaggtctctatctaccaacaagtgatatagatgttgtgatatttgaatccagagttaagactcctcaagttggtctatatgctcttgcaaaagcattatcccagaaaggtgttgctaaaaa

SEQ ID NO: 305023 - DNA, 260 bp, Zea mays
cgcctctcgagtctcgtccacccgtcatcctcctagctcctctactcgccagtcgccatgggcacagattaagatcggaatcaacggcttcggaaggatcggcaggctcgtggccagggtcgccctccagagcgaggatgtcgagctcgtcgccgtcaacgaccccttcatcaccacggactacatgacctacatgttcaagtacgacaccgtccacggccactggaagcacagcgacatcacactcaaggactccaaga

SEQ ID NO: 305024 - DNA, 266 bp, Zea mays
ctcgagcagctttctactcataaatcttgtggcaaaggcttctgatatggtccctggattaagctggctgaggctggatgagagtgttcgccagttcgcagtattcatgatgtctcaagttgatctttctagggaagctgctcatttgagtcgttttatctacaacttccgcagatggagacatgtgtctttccctaagcccttatatccatttgtgcatccatctgtcctagttgagacttttgagaatggagaaagtgtttctc

SEQ ID NO: 305025 - DNA, 189 bp, Zea mays
atagattatgatatttctgtacagatgattgagctatacaatgaacaagtgagagatctccttcaggatagtggaaacagaagattagaaattagaaatacatcacagaaaggacttgcggttccagatgcaagcatagttcctgtcacatctacgtcctgatgtggttgaactgtgaatccaggccaa

SEQ ID NO: 305026 - DNA, 256 bp, Zea mays
cccagccatccctagccgaccccttccatcctcactcgctcgatggcccgcacgacgcagacggcgcggcagtccaccggcggtacggcgccgaggccgccgctggcgcctcaggcggcacgccagtctgcccctgcgaccggcggagttccgacgccccatcgcttccgccccggccccgtcgcgctccgggcactccgcccgtcacagacgcgtccggcgctgctgatccgccagctgccgttctcgcgcctgg

SEQ ID NO: 305027 - DNA, 272 bp, Zea mays
ccagaaacacagtgaagagactatcgagatcattctacggagaagaacacccagtcgcccaccagatcacttgttaaactttgttgaggggtgatggcggtttctttcgcaaacctcaactccgaggcagggcttaacacacttgatgagtaccttctcactacaagaaacatcactggctaccaagcttccaaggctgacttggctgtctacacttcgttttcggctgatccctcgtccaagtatatcaacgtagcaaggtcggtttacca

SEQ ID NO: 305028 - DNA, 248 bp, Zea mays
ctagaaacgatcgcctcgggtcaaatcctaagcagggagttgaacaaacacaacacaacatgagtaagttgcagtactgagtctgtcaaggatgccatctcccagatagttggggatgccaaggagaagaataggaagttcactgagactgtggaacttcagattggtctgaagaattatgatacacagaaggacaagagtttcagtggctctgttaagttgccccatatccctcgacccaagatgaa

SEQ ID NO: 305029 - DNA, 265 bp, Zea mays
ccatccaagggcgccgccaaggccgatgccaagctggcggtgaagagcaagggggcggagaagcccgccaagggcaggaaagggaaggccggcaaggaccccaacaagcctaagagggctcccagcgctttcttcgtgttcatggaggaatttcgcaaggagttcaaggagaagaaccctaagaacaagtctgtcgctgcggtggggaaagctgctggcgacaggtggaaatccctgagcgagtcggacaaggctccctatgtag

SEQ ID NO: 305030 - DNA, 260 bp, Zea mays
ccgagagtgaccctaccgggcgggagagagccaggcagaggagggcgacgatggcgtccggctggggcatcaacgggaacaagggccgctgctacgacttctggctggagttcagcgagtgcatgagccgctgccgccagccctccgactgcggcctcctccgcgaggactacctcgagtgcctccaccactccaaggaggtgacctatctacccccgcctgtccctcggcttcctccgtttcattcgattcgtcgcctc

SEQ ID NO: 305031 - DNA, 266 bp, Zea mays
ctcgcctcgggtcatacccgaagcagggagttgatttagccgctgcagccatgagcaagttgcatctgagtctgtcaggatgccatgtccgagattgttggtgatgccaaggagtagagtaggacggtcactgagactgtggtacttcagattggtctgaagaattatgatccagagaaggtcaagcgtttcactggctctgtgaagttgcaccatatccctcgtcccaagatgatggcgtgcatgcttcgtgatgcccagcatgt

SEQ ID NO: 305032 - DNA, 122 bp, Zea mays
acggcacacaagcgcactctagcaatggcttctgaggttgtccgccctagacgacgaccgagctaactaaagagcacaagacggaacatatggacggctgcagactacaacctaacctacac

SEQ ID NO: 305033 - DNA, 248 bp, Zea mays
agtccgcagcggcgcctacgtggccaggcaggccgccaagagcatcatggccagcggcgtcgcccgccgctgcctcgtgcaggtgtcgtacgccatcaggtggccggagcccctgtccgtgttcgtcaactcgtacggcaccggcacgatcgccgacaaggagatcctcaagatcgtgaaggagaacttcgacttcaggcccgggatgatcagcatcaacctcgacctgaagaatggcggcaagaggt

SEQ ID NO: 305034 - DNA, 192 bp, Zea mays
ggcaagcagctggaagatggacgtactttgtctgactacaatattcaaaaggagtctactcttcatctggtgtagtctcttcatggtggtgataagttaaggtggaagaagtcttacaccgctcccatgaagtataatctcaagagagagtaggttaagtctggctgtcctgaagtattatagaggtgtatg

SEQ ID NO: 305035 - DNA, 163 bp, Zea mays
taaaagtctattttattatgagctttctttgcacttaaaaattagcatgctgctttttgtacttggaagtgtttcaaaaaattatatgaccatatgtactctttctaactttctttactccatcatggcgggttgattttgtagagaaattagaccccatacc

SEQ ID NO: 305036 - DNA, 165 bp, Zea mays
gcagcctccaaagccactcgcaaacccccgcttccaaaaccttctcgaagctcaccggcgcctcctccactcgcaccgatggcgaaggatccaatgcgcgtgcccgtcactggcgccgcaggacaactgggatatcccctggttcccatgattgctacgggtgtt

SEQ ID NO: 305037 - DNA, 262 bp, Zea mays
agcgtgacgcgcgcaggacgtggacgtggcgtggttccggaacccgctggtgcacatcacgatggcggcggacatcacgacgtcgagcgacttctacttcggcaacccggacgacctgggcaacttccccaacacgggcttcatctacttcaaggcgacgccccggaacgcccgcgccatggcctactggcatgcggcgcggcggcggttcccggagaaccacgatcagttcgtgttcaacgagatcaagcgggagcacgcg

SEQ ID NO: 305038 - DNA, 269 bp, Zea mays
tcccgtcgcatcccatcccactaccacccatctcgtcgtccgccgattcgatccggttcttccaacccaggggctgtgatggcgacgaagaggagcgtgggcaccctcggcgaggcggatctgaaggggaagaaggtgttcgtgcgcgccgacctcaacgtccctctcgacgacgcccagaagatcacagacgacacccgcatccgcgcctccgtccccaccatcaagttcctcctcgagaagggcgccaaggtcatactcgccagcca

SEQ ID NO: 305039 - DNA, 183 bp, Zea mays
ggggccgtggcggcgcggtaccccgggtcgacgcgcgagtacggcgccgcgggcctcaacgtcttccgcctcgtgtggcgcacggcgttcgtggctgtcatcacgctgctggccatcctcatgcccttcttcaacagcatcctgggcatcctcggcagcatcgacttctggccgctcaccgtc

SEQ ID NO: 305040 - DNA, 279 bp, Zea mays
  unsure (1)..(279): unsure at all n locations
ctaggtatgaagagcttgacaaggaagcgcaagctcagatgaatgaggaactatctggttggaagcttgtcgtcggtgatgtattcagagagccatcttgctccaagctgttatgcataatgattggtgatggggttcagattttgggtatggcagtcgtaacaatcgtttttgccacacttgggttcatgtcgccagcctcaagaggaatgctccttactgggatgattgttctatatcttttccttgggggggggtgcccggtnagtcagtgttcgg

SEQ ID NO: 305041 - DNA, 263 bp, Zea mays
cacgggcattgcgagacgttcgtaggcaacggttacgtgaagcgagcatacttcgtcgggcccctatcgttgtcgccgtcaccatcatcgccggtggcagccggcggcggcgcctacggctcacggtgcatcgactggctggacaataaaccgccccagtccgtggtgtacttgtgcttcggtagcttgactcacgtctcagcggctcagtcacgtgagctagctcttgggctagacgcctccgagaagccattcctttgggt

SEQ ID NO: 305042 - DNA, 265 bp, Zea mays
ggcaggttcaatggcgacctcgacctctggttccggtacctcgagttctgccgcgacaagcgacacggcaggatgaagacggttctggcacaagctattcgcttccatcccaaggttcctgggctttggatctatgcagcagcatgggaattcgatcagaacctgaacgttgcgcgggcacgtgcactgatgcagagcggtctcaggtcttgccctcagtcagaggatatgtggatcgagtatcttcgcatggagcttacctacc

SEQ ID NO: 305043 - DNA, 100 bp, Zea mays
gccgaagccagctgccaagaaggccggccgctccgccaaggcggccaagacgtcggccaaggccacgccaggtaagaaggcgccggtggccaagaagccc

SEQ ID NO: 305044 - DNA, 122 bp, Zea mays
ggcgtccgtgagcgcttccaccctgtgcactgatcctggctccctcttatttattctacatccgtggcacccaacttgcactgaaagaggcttcttattaaatagaagaaatgaggtttctt

SEQ ID NO: 305045 - DNA, 256 bp, Zea mays
gtatcctcagtctgcatgtaacttttatgatagttattccaaattcaagaagaagcagtattaacatcaattgatcgacacaaagtaatttttaatttaattcatcatttcacatgtttgtactttgtcttcccattaacctttgccagtgttatgattgtataaatttttttaaatgctggttgtacaggaatgcttaaagctttaaaagtttaacagtctaaaacatttttgctattattcaactgcagaataa

SEQ ID NO: 305046 - DNA, 267 bp, Zea mays
ggagagggaatcctttgcggagaaacttagcaaggttgtttaaaactaagcttgctcttagtcttatgggctgtgtgtttaccccatggattatataatctggattatttttggaggattatataatctggattatataatctgagtagtcctgtttgtttacccagattatttgagttgttaataggattcttttgtatgaggaagacaagaatgccctctatatttgtactaggttgaaactcatatatatacaaaaaataattc

SEQ ID NO: 305047 - DNA, 258 bp, Zea mays
cgcaaatgatgatttggtatttcttcgcattgtttctctacccaagggccgggggctactttcacgctatatcaacctcatggtacctggtagcgatcttgcaaggatagtttgcatggcagtattcatgcacctgaggtctgtgtttggaaatctgccctccgatgacggcgcagctgagacagtaactacactggctagcgctgtagcatcatgcattcgtgggatggacttaagtggcctcagtgcttgtctcgc

SEQ ID NO: 305048 - DNA, 273 bp, Zea mays
aatgacagtttggcaaggctggtggtgacaagtggaagtccctgtctgatgccgtgagtttgtttgttccccagtcccattttaaccgtttgagtccgcagttggttgcggtgtgcgttgttcttacgataagcgtgttgctctagatgtatccgcgctcgtcccctgtgtgtttgtatgtatatcagtaattatattatatatcatgtttacccgatccatcgttagatctgctaaaattccatatgttaaattcgaaatgggttggtatta

SEQ ID NO: 305049 - DNA, 278 bp, Zea mays
gcggcgaggagctcctcttcagcagcagcaaggcaatcttcaagccgccaagagcgacccgtggtggcattccgctatgcttcccacagtttggaaactccggaacattggagcagcatggatttgcaaggaacaagatatggacaatagacgatgatgctccacctctaaattatggtgataataacagcaacaaagcttctgttgaccttctgctaaagccatctgaagatgacctgaagtgctggccacactgttttgagttccgtctcagagtc

SEQ ID NO: 305050 - DNA, 301 bp, Zea mays
  unsure (1)..(301): unsure at all n locations
cgcacgtggctcggcttcggctcagggaacttctggggattcatcgaagatcgccctagtgaagaggtcagtctcaagtgtatctgctgatgtatctgaggatcacctaaacatcacgaactggcagatcgaaagctacggcgagcgcgagtaccacagggacactctngcattaagctgtccgcgtgggcagtccatttccgcaatcaaattcgcaagctttcggacacctacgggaacctgtggagatttccagcaaggagattgccactcagctaactctcacacagtcctagagaag

SEQ ID NO: 305051 - DNA, 127 bp, Zea mays
ggaattatcatcagattcatctcagcatgttcgttacagtttggcatcggttattatgggaatggctcctgtattgggaaaggacgccactcttgaacaactgcttcccatttttctttctttgctg

SEQ ID NO: 305052 - DNA, 268 bp, Zea mays
ggtagatttcgcggcagagggggaagctgtttcttccacaccgcagttcgcgcccaccctgtgccaggcactgctgttgtgcacgccgcacagcagcacacggctgtacaaacgtcctggagtaccatcgaggcgactccgggggcattgtcagcagccagggagttgttgtgacaccctccaagctccacggcctcactaggggccatgaagcaattgcgggacgacgtcgaccgactactcggtatggcacattctatctcgacca

SEQ ID NO: 305053 - DNA, 273 bp, Zea mays
atcaatcacaggctcagtttgtttgtgattgattattactctaagaagggcttggtggtaaatctgcctgcggagaaaccaccaaaggaagtgactgctgaggtgctgaaagccctctcatgatgaaatgccccttttctgagtttattcaggttaagcatgatatgtaccgaaatccctttgtctgggtttcttcacaccagcatcatgcagtttcctttttgtgcgattacaccattttatcatagctttgacaagctcggtaactgtctg

SEQ ID NO: 305054 - DNA, 276 bp, Zea mays
caaggtggtgtggggcgaggccaccatggtggaggcagagaggatgttgtttgccgccgcgcttcaggatcccgcgaaccagcgctttgttttgctctctgatagctgtgtcccactctacaatttcagctccatatatacttacctgatggcttcacctaacagttttgtagacagctttgttgctaagacggagaagcgttataatcaaaacatgtctcctgccattccaaaggataaatggaggaaaggatctcagtgggtagtattaatcag

SEQ ID NO: 305055 - DNA, 284 bp, Zea mays
gacaaggacattgacaggtttagtaaggctttgctcaattcatggttgcatgacaaatctctagatggcaacaattgttcaaaatgttgccagctaacaatggagcttgagtccatgagtattgcttccaaggaaaatggtaaagcaagacgacaaggcacacgaggaaagatgcaacaacatataaatgatagtaccaagtgctgcagctgcaagcagaggcgaatagcttcatatataagtgaagctaggagggcttgcaggcttccacttttgataggcgc

SEQ ID NO: 305056 - DNA, 279 bp, Zea mays
aaggaatctttgaggtcaaggccacagctggtgacacccatcttggtggtgaggactttgacaacaggatggtcaaccacttcgtccaggagttcaagaggaagaacaagaaggatatcactggcaaccccagggctctccggaggctgaggaccgcttgtgagagggcgaagaggactctgtcttccactgcccagaccacgattgagattgactcgctgtatgagggcatcgacttctactccaccatcacccgtgccaggtttgaggagctcaaca

SEQ ID NO: 305057 - DNA, 268 bp, Zea mays
ggagcgtatacaagatggattactaaggcatcctgcagattcacctctctggaaggattttgaccaaaagcacccagtgtttgcttctgatagtcgcaacattagacttgctttagctacagatggttttaatccgtttaggtccatgaatgttagctatcgcatttggcctgttattctcatcccatataactttgcaccatggttgtgtatgaagcaaacaaatttcataatctcattgctgattccagccggtagatctcctggt

SEQ ID NO: 305058 - DNA, 271 bp, Zea mays
cactgggtctaccggtggcggccacggtgaactgcgcggacaacacgggcgccaagaacctctacatcatctccgtcaagggcatcaagggccgcctcaaccgcctcccgtccgcctgtgtcggcgacatggtcatggccaccgtaaagaacggaaagcccgacctcaggaagaaagtgatgcccgccgtcatcgtccgccagcgcaagcgtggcgtcgcaaggacggtgtctacatgtacttcgaagataatgctggagtgattgtgaat

SEQ ID NO: 305059 - DNA, 278 bp, Zea mays
gacaatgctagagtccatactatctaggttttatgctggtgaaaaacttttgaagtaaaagaaagtctgttagacttgtacttggtccttttgtcatgcaacattttcaggaagatgtcgacctcatgaaaagtttgaattttgatgcctaccggtttcccatctcatggtccaggatcttcccagatggcgagggaagagtcaatccagaaggtgttgcctattacaacaatctgataaactacctgcttcggaaaggcattacaccgtacgccaat

SEQ ID NO: 305060 - DNA, 259 bp, Zea mays
tgtgagcatatcttactttaacattgtgtttcattcaactacatatgctaactgatccatgaatacatagtacttcagagttcagagtaacctgtgatggagagtatcgaagcaaatgtaaaatgccgatcttatctaagaaaatacatgcacatataagaatatcggtgtaattaacgttgaactttgttgcaagattgctaaatatgcaacaacctgtggagtgtgtattcaaaaatggcattctcaacactggtac

SEQ ID NO: 305061 - DNA, 276 bp, Zea mays
aggacttggagcgtgcggcgtcggagttcgccggcggtgaggaccagaagaggaagggaaccaaacaaagatgggctgctccatctcggggctcaacgcgctctacgacgcggccacgggcggcggcgacgtctggatcaacgagcgccgcttccgcgtccttcgccagatcggcgagggcgggttcgcttcgtctactcgtcagagagcacagctcgctcggcgcggcgttcgtctcgtgacccgcacgtctaaggatggaagatgcatgagaag

SEQ ID NO: 305062 - DNA, 297 bp, Zea mays
  unsure (1)..(297): unsure at all n locations
ttcattatgggcatcctgatatctttgatcgacttttccacctcacacgtggagttgtaagcaaagcttctaagattatcaatcttagtgaagacatatttgctggatttaattcaacactgcgtgaaggaaatgttacacatcatgagtacatgcaagttggcaagggcagagatgttggtctcaaccagatctcactatttgaagcaaaaatagcaaatggtaatggtgaacagacgctgagccgtgacgtgtaccgtcttggacatcgtattgacttgnggtttatgtgtcctg

SEQ ID NO: 305063 - DNA, 292 bp, Zea mays
ggagagagcagcgaccatggcctaggtgggtttgagatccgagggaacagatggattactagctagggagtgacaactaagagcaacctgtggagatgctatacaaatgtcacaggagttagcctagccagtgggttcaagtgtaggatgaggtatctggcatgatgttgtagcatgggcaaatcgagatgagtgagcaatcaggttgttgtctgttgattcttttagctgagctgctgaggccttgatcctgtatttaagatgtcaggccttgattctttcagcaagcgtt

SEQ ID NO: 305064 - DNA, 249 bp, Zea mays
attgcactgacgatggaggatcaatatctatgcattcgtgcaacgtgttctgagatattgcactgacgatggaggagcaaggtctcttgataaagagggatatgctgaagaagatgatggtgatgctaatgcagccatttttgtcaagtatgatagaatgctccatggtcacgatagcagaagaggaaagaaatccaagcaggacaggctaactgtcaaatttctgaagaaatatattcattatgcaaa

SEQ ID NO: 305065 - DNA, 261 bp, Zea mays
gacaacggtctctaacgtccgagaccccaagcaccagcgcggcggcgggggcggcggcgaccatggctgtcggaaagaacaagaggatctccaagggaaagaagggtggcaagaaaaagaccgtcgaccctttctctaagaaggattggtatgacatcaaggcaccgtcggtgttcagtgtgcgcaacatcgggaagactctcgtatccaggacacagggtaccaggattgcttctgagggtctgaagcacagagtctttg

SEQ ID NO: 305066 - DNA, 239 bp, Zea mays
ggtgctcttaacgtggatgtgaatgagttccagaccaacttggtgccctaaccgaggatccacttcatgctttcctcctatgctccagtcatctctgctgagaaggcctaccacgagcagctgtctgttggcgagatcacaacagcgccttcgagcacctccatgattgccaagtgcgatcccggcatggtaagtacaggcctgctgctcatgtaccgtgtgatgtgtcccaatgagtg

SEQ ID NO: 305067 - DNA, 289 bp, Zea mays
agaacccttgctgattacaacatgtcaaaggcaatccacccttcacttggtgcttcgtttgataggtggtatgcagattttcggtaaaactttgaccggaaagaccataaccttggaggtggagagttcagataccatagacaatgtgaaagcgaagattcaggacaaggaaggtatcccaccagaccaacagaggcttatctttgccgggaaacatcttgaagatggaagaacccttgctgactataacatccagaaggaatctaccctgcactggtgttgcggcttc

SEQ ID NO: 305068 - DNA, 266 bp, Zea mays
caagcaaccaccgctccccgatctcgtcgagaggaagcccaatcccgaaaccgccgccctattccaatggcgcccaaggccgagaagaagcccgccgccaagaagcctgcggaggaggagccggcggcggagaaggccacggcggggaagaagcccaaggccgagaagcggctccccgcgggcaagtccgcaggcaaggagggtggcgagaagaaggggaagaagaaggcaaagaagtcggtggagacgtacaagtctacatcttc

SEQ ID NO: 305069 - DNA, 268 bp, Zea mays
atgaatccgatttcttgggattcacatctccttttgtgggactctggtgcttaccaagagaaagtccgagaagaagaggggggtgccagtcaatgtgggtggagagcctggctgcgccatccgtaaccacagatttgaaagacctgttaagacgcgctgggaggggatttccacgcttgctgagctatttgagcaatcgtgcaagcagtttgcctctacacccctgtttggcaccaggaagctcattgcaaagaaatggtagtggctg

SEQ ID NO: 305070 - DNA, 263 bp, Zea mays
caattactgcgctattgagaaagatttatggggttctggaactgtgaatgacgagtatctggaagccttaaattctgtatttaccaacttcccaagacttagagcaactgaaccagcaacccttagcatatcccatctggttacagccttaaagacaggttcagaggcttgtcaggaagctgcattggatgcacttttcctgctcagacaagcttggtcagcatgcccagctgaagtttctagagctcagtaattgcagctgc

SEQ ID NO: 305071 - DNA, 260 bp, Zea mays
gatgactgatgggagatctctctgctgatatcaaggtaggatccagatgtgaggttgaacctggggcaaaaaggggtgttgtaaaatttgttggccgggcagaatcactgggtcctggtttctgggttggtgtccaatatgacgaacccacgggcaaacatgatggcatggtcaaaggagtacgctacttcgaatgccctccatctcatggtggaatggttagaccagagaaagtgaaggtcggtgactccctgaacgag

SEQ ID NO: 305072 - DNA, 269 bp, Zea mays
agttgttttcagtgtgatgactccaaagaaaacaacaccttctgaaaatgggtccaaggaatcaacaagttccagttcagcaggtgttgttttcagtagtgaggcctccaaagtaaagctggaaaaatattgccaatttatctggtggtgagaagacacttagttcactggctttggtgtttgctcctcaccactataaacctactcctttatatcgtatggatgagattgatgctgcgttggactttaaggactatcaattgtgggac

SEQ ID NO: 305073 - DNA, 273 bp, Zea mays
acgcgacatactagattacttgaggagagacatgataggaaaagaaggtgaaattttctcagcagaagatgctgacagtgcagaatatgaaggtgctccaagaaaaaaggagggagctttttatgtgtggaccagtaaagagatcgaagagacacttggggagaatgcagagctattcaagaaccattactatgtgaaatcatctggcaattgtgatctttcaccgatgagcgatcctcacaatgagttcagttgtagaatgtgctcatagaa

SEQ ID NO: 305074 - DNA, 148 bp, Zea mays
aagcaatcccaaaccccggtttcagaaccttctcgaagctccccggcggctcctccactcggaccgatggggaaggaaccaatgcgcgtgctcgtcactggcggcgccagacaaattggatatggcctggttcccatgaatgctaagg

SEQ ID NO: 305075 - DNA, 281 bp, Zea mays
ggctcgaggacaaataataaaatgtgaagacccaaatgcgaacctctactcctttgtcggttcaatggaatggagaggccagcagtatcccctgtcacccctacagcttcttctccgggactcaaaactacggaacacagactacatatatggggctgtcatcttcacaggtcatgatacaaaagtgatgcaaaatgcaacagatccaccatctaaaagaagtaagattgagaagaaaatggatcaaattatttacgttctgatgtcttctctactcatga

SEQ ID NO: 305076 - DNA, 303 bp, Zea mays
aagagatcctctgaggctttatcttttcattgtactcaacaaggctagtcagaccttctaggctgaaatgctcagataaagcctcagaggatctcttagctgagcatttcatcaaagaaggtctgactagccttgttgagtacaatgaaaagaagatgtttgcagttaaacttaaagagataaagtcaacactgaccactatgatcaatgatgaggctgcaatacctgaagtgattgatcctgtcagacagcaagttaaggatgctaaatttcctgatctagaggtcattcgcatgttgtggg

SEQ ID NO: 305077 - DNA, 311 bp, Zea mays
atccagtatggcttgagctgcggcatgcacatatagctcatgttaatgaaacgctacatgaaaagatgaccagttttgtatcaaagaacaaagcagctcaactacagcaggcaagatctggtggagagttatctaccaagcagttgcagaaaatggttcaagctcttccacaatacagtgatcaaattgactagctcacccttcatgttgagattgcaggaaaactcaataacataatcaaagaacaccaccttaaagatgttggacagctagagcaagatcttgtgtttggtgatgctgggacaaaagaa

SEQ ID NO: 305078 - DNA, 255 bp, Zea mays
aagaactggttgccaaagatctccatggcactgaatggcattttcggcacatttttcgagggcaacccaagaggcatctccttaccaccggctggagtgtctttgttagctcaaaaagattggtttctggggatgcattcatcttcatgagaggtgaaaatggtgagctacgggttggtgtaaggaggctcatgagacaagtaagtagcatgccgtcatctgtcatatcaagccacagcatgcatcttggagtat

SEQ ID NO: 305079 - DNA, 269 bp, Zea mays
ggagcttatgttgctgtcaagcaagagatgatgcaacctactgccagcatcaaggacagaccagcatatgcaatgatcacagatgctgaggaaaagaatctgataactcctggaaagacaactctgattgagcccacgtcaggcaatatgggtatcagcatggcatttatggccgccatgaagggatacaagatggttttgaccatgccctcttacacaagcttggaaagaagggtgaccattaaagtgtttggagctgcatgaatcct

SEQ ID NO: 305080 - DNA, 246 bp, Zea mays
tgttgctggattttctgatgcactcaatggaggatatgaatcatggggatccagaaggcaaagaagacctttccaaaaagtggtccccatgattcatatcctccattgagtgcatcatggggaccactttttggaaaggtctactttgccttctgggtcattttccatctctacccattcctcaagggtctcataggtcgacacggccgaactccaaccattgtcattctgtagtcagtgcagttg

SEQ ID NO: 305081 - DNA, 253 bp, Zea mays
ctgaagctaacttaagggaaatgagatggccaatggcaacactagtcatcgcttcaagctcttgcttttccttctaactctgcactcttcattcgctgagattttcttcgaagagagattcgaagatggatggaagagccgttgggtgctatccgattggaaaaggagtgaaggtaaagcgggtaccttcaagcacacagcaggaaaatggttcggggatcctgatgacaaaggtcttcagacatataatgac

SEQ ID NO: 305082 - DNA, 193 bp, Zea mays
atggccttaaaccaggccagaggaagattctgttctgacacataaccagagaagtgattcaccttagattccttgacaaaattcctcttgaatgaacaaaacagaatcttcctctggcctggtttaaggccatcaaccattgaagaggaattttgtcaaggaagctaaggtagctcagttctctggttatgtg

SEQ ID NO: 305083 - DNA, 288 bp, Zea mays
gactggcaaaaaatggaaggatgtatgaagttgatacaactaagcacctgaatgaatatggtgaggcaggcttgcgaacattggcactatcgtacagggtgcttgcatgaatcagaatattcttcttggaatgctgagtttcttaaagcaaagacctctattgggcctgatagagagttgcaacttgaacgtgtctctgagttgattgaaagagagctgatccttgttggtgcaatgctgtagaggacaaattacaaaaaggggttcctcagtgcatagatcgtttgg

SEQ ID NO: 305084 - DNA, 292 bp, Zea mays
gtccttcaagcagaccaaaacgatgatacctgtggatcatgtggcgatggtggtgaactgatatgctgtgacaattgtcctgctagttaccatcaagcctgcttgtcttgccaggatattccagatggcaactggtactgctctagctgcctttgcgacatttgtggtgaagtaatcgattcaaaggagcttgtaacttcccttcctgctttagattgctcacagtgcgaacgccaataccatgtaaaatgtgtatctgccaaagttccgtgcaatgaggatggatctggta

SEQ ID NO: 305085 - DNA, 281 bp, Zea mays
gatggctgctcaggtacctgttagcggcccgtgcgtcacatgtattggcaaatgtggatcagggaacttcgtcaagatgcttcacaattgaattgagtatggttgcatgcaacttatcgacgaggcttatgatttactcaagtcggtgagtaagctcatcaacagcgagctgcatcaggtattctctgagtgtgaatcaaggtgagctcctcagtatcttgattaagatcacggccgacatcgttggtatctaggatcacaagggtgaatgctacctcgtc

SEQ ID NO: 305086 - DNA, 266 bp, Zea mays
taggccttttacactttccatggccaatgcgggacctaacaccaatggttctcaattcttcttcaccactgtagcaactccatggctagataacaaacacacagtgtttggtagagttggaaagggatggatgttgtccagcaaattgagaaggtcaagactgacaagaatgacaaaccatatcaagatgtaaaaatcttgaatgttacagttcccaagacataagcgcgtgatcagttgggttcggaaattgtgcctgcactcct

SEQ ID NO: 305087 - DNA, 144 bp, Zea mays
agtactgaaaccaccccggcgagctacatcgactcaaccggctgaaaacttgctactgtacatctcttgcacaactcacgtggtaagcaccgcgttggtagtcgagcgagtagaagaaggacatgcttatccagtacaacatcc

SEQ ID NO: 305088 - DNA, 152 bp, Zea mays
aaatgcaatacttcagccaagtccagagcatttcccgaagtatcaagagcaaccacctgccattccagactgcttcagcccacattgtgttgatcatctgcatcgtagtttcaatggtcctcaattgtcggcaattcattgggctgcaacac

SEQ ID NO: 305089 - DNA, 275 bp, Zea mays
agaccttctcgctgcattctggaataaactcactgtggatgatgccagcaaaattttgtccttgacaggtgttgttattgagggtgtaactggttcatcaattttgacagcactgtcatcatggatgtgtaaaccagggtatgcttcgttgccagttgcatatgccagagctggcagtgagcttctggatctaattcaagcaaagccttcaatgcatctgcctgtttcatcggatgaactatttagtttgctcgatgaagcaagtaaaaaaacat

SEQ ID NO: 305090 - DNA, 266 bp, Zea mays
gaatcaggtaagctcagagtatgcattgattttcgcaatttgaatagagaaactcctaaagatgaatatcccatgcccatagccgacacattgatcaataatgtgtcaggacatagaattattagctgtcttgatggtaatgctggatataatcagattttcatggccaaagaagatgcgtctaaaacagcctttatatgtccaggcttcattggtttatttgagtgggttgtcatgacatttggtctgataaatgctggtgctac

SEQ ID NO: 305091 - DNA, 162 bp, Zea mays
cacaaagtagtgattgccttggtgctgagaatctaattagattgctcaagaattattccagaagccacgagctcaaactggcaattacggtgggtattgttggactccctaatgttggcaagagcagtctgatcaacagcctgaagaggtcccgagtggtta

SEQ ID NO: 305092 - DNA, 290 bp, Zea mays
ctttcttggcatcagaggccaagacagcatggtacttcttggccaagctcttaacaagctttcttggcatcagaggccatcatctagccatttccccgtctccttggacctggtctcaacaaggcatgcaagttcacgaacctggttactacccaggaatccctcgagtccaatgtgtacgagactaaggctaccgtcaaattccagctccagaaggctcattgcatgggtgatgccgtcggcaacttggcgatagctgagtagcagatccagcagaccatccagatgag

SEQ ID NO: 305093 - DNA, 284 bp, Zea mays
agtgaatcctcgcagagcgacggcggcggcaccgacgagtttatgctagtgaaattagcagagatacggaaggaggttcagtgccctatctgcttaggcattatccggaagacaaggacagttatggaatgtttgcaccggttctgtagagactgcatcgacaaatctatgcgactaggaaataacgaatgcccagcgtgtcgcacccattgtgcaagcagacgttctttgagggatgatcccaattatgatgcactgattgcagccctgtatccagatattga

SEQ ID NO: 305094 - DNA, 275 bp, Zea mays
aaataatgttgctcaaatatgtgtttttgagcttaatggaacacacaaatttgtactcgggaatattcatgttttgtttaatccaaagcgcggtgatgtaaaactgggccagattcgcatgctacttgagaatgcaaatgctcttgctgaaaaatgggataaaattcccatcgtgcttgccggtgatttcaacagcacacctgatagtgctatctacaagttcttgtcgacaatgaagctgaacatttctttgcacgatagaaggcatttatctg

SEQ ID NO: 305095 - DNA, 266 bp, Zea mays
ggccactgtggaggcatggcttccacaacaaagatgagaccctgggtgttatggaagtaatgcctccacagtggcctgatcttgtcctggccccacgacatcccagacagtgaagctgatgtggaggcattacttccagaacacccagggtctcatctttgttgtggacagcaatgatagggaccgtgttgttgaagcaagggatgagcttcaccgaatgctgaatgaggatgagttacgtgatgctgtgttgatcgtgtttgcta

SEQ ID NO: 305096 - DNA, 183 bp, Zea mays
cggctcgagcacacgttcacggtagcgagagtttatcgtcgtcggcggtgaagatggtgtcgctgaagctgcagaagcggcacgacgctagcgtcctcaaatgtgggaaaggccaagtctggcttgacgccaatgaagtcaccgagatctccatggctaacgcccgccagaacatccggaagt

SEQ ID NO: 305097 - DNA, 258 bp, Zea mays
atggctttttatagcgttctgcgcagttcttctttgtcatactgaacaaaaccaaagctgcgcagaacgctataaaaagtcttaacgggatgcttataaatgataagcctgtttttgttggaccttttgttcgcaagcaagaaagagatcattcttttgacaagacaaaatttaacaatgtctttgtgaaaaatttgtctgagtctaccacaaaggaagatttactcaaaatctttggtgaatatggggatattacaa

SEQ ID NO: 305098 - DNA, 197 bp, Zea mays
  unsure (1)..(197): unsure at all n locations
cacaagggtttcaactagagagttcagggagatatgaacatgagcagcgaacgctgatggtagaaaaacagcgaatggagagtgaagaggctcagaggagaatcttcaaagctcaacctgcaatgaaagaggatcctttcccacatccggagaaagagccgnaacctctcagcgaagttgaacagtttgtgttgcat

SEQ ID NO: 305099 - DNA, 285 bp, Zea mays
cacatatctcctcgcatcttccttgcaaccgattgcctattcgcctcccaaccacagaccgatggcgctcaaggccgagaagcagctcgctgcgaagatgccggcggaggaggagctcgcggccgataagacgaccgccgtgaagaagcccaatgcggagaagctggtctccgcgggcaagtccgccggctacgatggcggcgatggcaagcgttgcaagaagaagggcatagcgagcgtggagacgtactagatctacatcttcaaggtgctgacgcacgtgca

SEQ ID NO: 305100 - DNA, 284 bp, Zea mays
ggaggaacaacaagaggttcctggacaccaaagcccgcagatgtctattgttagttctgttactggttttagcacagccagttcttttgggcctcttcatcgtggttcatggtgcactccaccaagattattcctggaagaccagtttgatgccattcctccagagattggcatttcacggaattcaggcagtaagaaaactaaggaagaggaaggagcaaggagaaaagctggagcagtgaaaatcagtccatggacattggcgcggcttaatgcagaggaag

SEQ ID NO: 305101 - DNA, 270 bp, Zea mays
tagactacgacagcgtccgtcgaaccggagggtcggaggcggaggcgaagatgaggaagaagctcggcacccggttccccgcggctcgaatcaaaaagataatgcaagcagatgaggatgttggaaagattgcattagcagtgcctgttttagtctcgagggctcttgaattgtttttacaagatttaattgaccggacttatgaaattactctactaagtggagcaaagacactgaattccttccacctgaagcaatgtgtgaagaggt

SEQ ID NO: 305102 - DNA, 273 bp, Zea mays
cctggaggttgagagctccgacaccatcgacaacgtgaaggcgaagatccaggacaaagagggcatccccccagaccagcagcgtctgatcttcgctggcaagcagctggaggatggccgcaccctagcagactacaacatcgagaaggagagcactctccacctggtgctccgcctccgcggtggtcagtaagccatgggtcatttaagctgctgctgtacctgggtatctgcgtcgtctggtgccctctggtgtacctctatatggatgtc

SEQ ID NO: 305103 - DNA, 270 bp, Zea mays
  unsure (1)..(270): unsure at all n locations
tgtgctcgtgangaacgagttggtggtctttgttggcgaatactcagtcacacgtgtgtaggtgcatgctctaatcagatcccaaatgatcaactttgtgcttctcattagtcgcgaagggaatgtgagattgacaaaatggtactcatcttattctcagaaagaaaggagtaaggtaatcggtgagctcagtggaatgattctttcccgtgcggcctagcattgtaattttgttgaatggcgtggagataaagttgtttataaaaggta

SEQ ID NO: 305104 - DNA, 267 bp, Zea mays
cgaagatcagccctggagaccaagccatgttgtcttcgggaaatcaactattaagcaagggcagattgatgcttcggagagtggctaatccagacacagtaggcaaactacagctgaagtgggaaggaccttttctcgtggtaccttcgtcaaggcctggttcttacaggttgaaggatatggacgacaacgatattcctagatcttggaatgcggatgagcttcgacgatattatgtgtaatttgatgtaatcttttttcattttt

SEQ ID NO: 305105 - DNA, 278 bp, Zea mays
gaggagcaattattccccagtgtgctagtccaagccatgagtcttgagaagctggttatagccccagaccttgcaattattagaaaacatatcaatgatggagtaaacggacttctgtttccaagaaagaatattggcatgttagctcaagttcttcttcgagcagtgtcaaatagtaaagtgtctctttcagggcaaaaaattgcttcagctgggaaggctcatgccaagaatcttatggcttctgagaccattgaaggctatgctagctattgaaa

SEQ ID NO: 305106 - DNA, 268 bp, Zea mays
ggtcccttgtatgctggatttgataccattctgggcttccatattccatcatacaagggaccttggaaacgcaagagaattaaaaatcctaactacaagggtaaatggaagaccccatggatcgataatccagagtttgaggatgatccagatctttatgtgctgaagcctttgaagtatattggaattgaagtttggcaggtaaaagctggttcagttttcgacaacattctgatttgtgatgaccctgagtatcaagaaaggttgt

SEQ ID NO: 305107 - DNA, 274 bp, Zea mays
tcggctcgaggaagatggcactgtgcgagtgtggaaccttgcaacccaaaaatgtgttgctgttcttaaagagcatttttcagcagtcacttcattggcattgtctgatgatggacaaacattgctcagcgctgggagggataagattgttaccgcatgggatattcgtaagtacagctcaaagaagacaataccgacatatgaaatgatagaagctgtttccttcattggatcaggaagtgagctcttggcttgtttgggcatagaactggca

SEQ ID NO: 305108 - DNA, 290 bp, Zea mays
ggtctttacagacgatttcgtgtcattctattatagaatgtaattgagaatgattgcacatggaacgtgtgttcgtcacacgcttgtaggaatcagtttattggcgcacatatgacgagaattttttttttctccttgttcaggtgaatggcacaaagaagaacagaatccactattcgggaccactgatgcctcacggagcgaatatggatgagattcttagagagcacgagcgacagatccaacaggcggtacgaagagcccgccttgacaagggaaggggaagcaca

SEQ ID NO: 305109 - DNA, 287 bp, Zea mays
gctcttctaacttctgttgtacagccttgatgatcccaacactttcggtaacaggattcacaggatgctgaagcttggactgagcattgatgaagatgctggtgaagcagatgctgacatgcctcctctcgaggacgccgatgctgatgccgatgctgagggtagcaagatggaagaagttgattaaatctaacttaattattgatttgcctttgtgtttttagaaacaatgattggggaacagtcttttactatgtttatgttttgaattttcgaattttggaatg

SEQ ID NO: 305110 - DNA, 281 bp, Zea mays
gggctgcccggtgtaggcaagtcaaccatcatgagcgagctttattaatatgatgcaagctacctggtttggtggtaatgcttatgtgattggtgattctgcaaagcataagcagaagtggcacgtctactatgccaccactgagcacccctgaggagcttgttgttactcttgagatgtgcatgactaggctggacaagaagagagcttatgtcttcttcaagacctctattgatggttacacatcttgtgctaaggatatgaccaagccttcagtgatt

SEQ ID NO: 305111 - DNA, 261 bp, Zea mays
gaatcgttcagctcaaggaagatgaattccgggaactaactcaaggtggaagatccatcagcgagtacgtgcacaaattcacagaattatcccgctacgcgcctgatgatgtcatctcagaggccaagaagatggcccgcttcttgaaatggctcagaccagaactcaagaccatcctagccagccaagacttcctcagcttctcgcacctctcaaacaaagccatactagtggaaagggcaagggaagaagacaagggtc

SEQ ID NO: 305112 - DNA, 276 bp, Zea mays
ggaactccggatccaccgctaccgccgccgcgtctaaaccctccaccgccgcggtgcgtcagaggcagaggcagagaggcagaggcagaggcagccatggggagccgcctcgggcgccgcgtgatccactttgccaacctcccgctgaaggtcatgctgccccccgcgccgctctcctccgtgcaggagttcgccgtgcggaccgtcccctccggcttcaaagtggacatccggcgctggctcgaagtcatgtacgggttttccgtcggcggagtc

SEQ ID NO: 305113 - DNA, 274 bp, Zea mays
atggcatgtgagcgaccaactcaaagggagggcagcattttagaggtagttaacaggaacaactatggtaatgatcattgtgccaaagaatttggtattaaggtgacaaatgaacttgccttggttgatgcacgtgtgctgccagctccgacgcttaagtaccatgactctggacgagaaaaggtgtgtagtccttccgttggtcagtggaacatgaacaacaagagattgatcgatggagtatccattcagtattgggcttgtgtgacttttg

SEQ ID NO: 305114 - DNA, 294 bp, Zea mays
gttacaggcttattgatatcttgtttatggcactgttgacacagttgctcatggggatatcaataagcctgtaacatcctccaataggaacagcaggggtggccccatgagcaactgtttcaacagtggcatacacaagatatttgttatgactcagttcaactcagcttctcttaaccgtcacattcatcgtacctatcttggtggggggatcaacttcactgttggatctgttgaggtgctggctgcaacacaaatgcctggggaggctgctggttggttccagggcacagc

SEQ ID NO: 305115 - DNA, 284 bp, Zea mays
gttataataaggagggcaagatgcggcagacttaagccccgtttggtttgaggtgactaaactttagtcacttttagtctctaaaaaagcaaacatgttgactaaattagagtaactaaactttaattgtttagtcactaaggggtaactaaaagggactaaattaatgctcttctcctctttcttcgtgtagctaacaaccactaattaataggggtaatacattcattattcacactaattaatgttctttagtcaggtttaatcaatgtaaccatacatgg

SEQ ID NO: 305116 - DNA, 296 bp, Zea mays
ggccgtcatggtggagacgcagggggagaagctcgacgacatcgagagccacgtcgccaacgcctcccactacgtgcagggcggcaacaaggagctgggcaaggccaaggagtaccagagcagcagccgcaagtgtctctgcatcggcatcataatcctgctgctcctcgtcctgcttgtcatcgtgccaatcgccaccagcctcaggaggtgatcgagttgtgatgggaggaacaacgccggggttgtgaattgtgaaatgaaatgaggggttccaattcgatccgatgggtggg

SEQ ID NO: 305117 - DNA, 275 bp, Zea mays
cttgctattcagttgtgcagttgatataagaagtattcaaaatgacgatcttatcaaggacactattcctttgtcataagagttttctgattgtttcacttaactaacatgatttcgttcaagatgttcaggatgtttagagtgtttgggcacaagaaagtctgggtactagacggcggtttgcctcagtggcaagcttctgggttcaacgtggaaaaggccagccctgacgatgacgcattctgaaatcaatcgctgcaaacagggctgtcaaa

SEQ ID NO: 305118 - DNA, 290 bp, Zea mays
cactgctgaacatgatgcatctgtactcacagcccttgctgcccaagatgcactatgtgcacccgctgtctgtgatacaggtggacaacctgaggcgccaagccacaagcattgtctccacaaggctgggccgtgcagagccaccgctgcggaaggaaatcgtggaatacatgcttgacgtggactcacacatgtggagcatgagaaagagcaaggcaaatttcttccgtatcacgggtgtcctgagccccctgtttgctgtggcgaggtggttcgatcagatctgtcac

SEQ ID NO: 305119 - DNA, 258 bp, Zea mays
  unsure (1)..(258): unsure at all n locations
cattcacacacattcgaaacaccctcgcacccacactctcccttcgtccccagcctaaatccacacaacatacaaatcaaaacgngagttcgtgtacaccggcgacgcttgacacgtcaaatttcgtgccgaccggtgacaagtggacatacgtgttgcatcgttgtggattgtgttaccgtgcgcaataattctcggccgtgttgaaaaaaaaaacaaggaaaaaaaaaaaaacaacaataaagaatccagacataa

SEQ ID NO: 305120 - DNA, 261 bp, Zea mays
cccaaccgcacaagcgcgcgaggcaggagagagagagaggcggggagcaaaacaatggaggggaaagaggaggacgtgcgcctgggcgccaacaagttctcggagcgccagcccatcgggacggcggcgcagggcgccgctgacgacaaggactacaaggagcccccgccggcgccgctgttcgagcccggggagctcaagtcctggtccttctaccgcgcgggcatcgccgagttcgtcgcaacttcctcttcctctaca

SEQ ID NO: 305121 - DNA, 256 bp, Zea mays
ggggtgacgaaaccgcgccgcaccagacaagacagaggagccgccgccgcgacccacaggccaccgggtcgccgaggaggggatccagcgagccatgtcgaccgacgtgcccatgagccccgagctcgagcaggtggacggcgagatccaggacatcttccgagcgctccagaatgggttccagaagatggacaagatcaaggactccagcaggcagtccaagcagctggaggatctcaggccaagatgagagagt

SEQ ID NO: 305122 - DNA, 283 bp, Zea mays
aactgaaaatcatatatccactgttaactatcatggagaggttccagctgaagagagagttgagaacctgaacaagttccgcaatgaagagggggattgtccaacattagtatgcactgatctggcagctagaggcctggacctggatgttgaccatgtcatcatgtttgacttcccatcgaattctgtatgtgtttgtgtttgcatttactcccatcatagcgatttttatgcagtctttgtggtaattcttgtgtttttagattgattaccttcacagaac

SEQ ID NO: 305123 - DNA, 273 bp, Zea mays
agcaaaacttctggtggaagaggatgaaggttgatgtttctaagtatgtggccgcctgtgaggtatgtcagcgcgtgaagggcgaacataataggcctgcaggtttattgaagccattggaaattccggagtggaagtgggagcatatcaccatggattttgtggttggcttacctcgttctcctcagggcagggatgctatatgggtggtagtggatcacttaactaagtctgcgcactttattctcatgaagaccacaaatttagcttcaa

SEQ ID NO: 305124 - DNA, 273 bp, Zea mays
aggctgttgccttcctctcggacttcaaacttggccactatatgaagatccctcccaagtccatgttccttgtccagtttgtcggtaccattgtggccggcacggtgaacatcgggacggcatggtggctgctgggctccatcgacggcatctgctccgactcactcccaccagacagcccctggacatgtcctaacgaccgcgtcttcttcgacgcgtcagtcatctggggcctcgtgggtccacggcgcatcttcgggccagacgggaact

SEQ ID NO: 305125 - DNA, 268 bp, Zea mays
tcactgactagcaatgtaactgatgataatgcggagaaagtaagatcaatattgaaaccatttgttcatatacataatggcaatattcttcgaactcttccaggactcagggagagtgtaattattttgaagcctcttccccttcaaaagagtatgattaaaaaggtggaaaacattggttctggtaacaacttcgaacatgaatatgtcatttccgtagcttctacacgcccttcccttgtagccgccattaacatgtctgaggagg

SEQ ID NO: 305126 - DNA, 266 bp, Zea mays
cagctctatggcattaatcatgtagccgttctgttgcataatgactgtctttatctctcccaggagatatttgggtttgcatttgagtatcgaacagactttccaaattccatgaaggaacatgctgtgtttgttgatttggctccaaggtttcagctgttggcagaagaaatattgcagagacaagttcaccttgatgaatataatttgaaggaggctatagatggtgctgatggatttcagaatactcatcagatgaaacaatt

SEQ ID NO: 305127 - DNA, 264 bp, Zea mays
agcataacataacatcatcacatcattttgcataacataagcatcatacagcataatgcatctggaacaagaaggggatacagtgttgaccttcggaacatattttggaaaagagaaaatcatgctaaggcacaagacaaatcgagatcaagtgtagcctcatcggaaacgcaaaacttttttacagcttcgaacaatatttcacgctgctaggacatttttcatcagagaagtaagcaaattcttatggtatagaaaggattt

SEQ ID NO: 305128 - DNA, 271 bp, Zea mays
caacaaatgggttccgagtcatgcttcgccacgtcgattcgggaaaaaattaaccaaactagagcgtgtccaacacgggatcaagcgtggaaagagcaggcttcagaagcttaatgcaatggtgttggcagcatcatcaacacctgattctgaagatcagttagaagcccctattcacgcaggaaatggagagtacttaatagagttagccattggaacaccaccagtgtcttaccctgcggttttggacactggcagtgaccttatatgg

SEQ ID NO: 305129 - DNA, 273 bp, Zea mays
agaagcttcaatcaaccaatttctgttataatgaggtgcagaatgcgatatgaaagtgacgatgcttctgaaagaaggtgcactggtataataattggaagcagagaagctgatcctatatggtatggttcgaaatggaaatgcttggtggttagatgggatgatggtatagagtgccgttggcccaatagggtatctccttgggagattgagctcacaggatctgtttcaggatctcaaatgtgcgctcccagttcaaaacgtctgaaacca

SEQ ID NO: 305130 - DNA, 271 bp, Zea mays
aacgaatctgtactagtatgcgaacgcaagtaggatggatgctatctggacagagcaaagaaaaatggaagctcttaagctatattatagggtcctcgaatctatgtgtagggcagagtcacagatcttgagtgggaacaatcttacatcacttttgtctaatgaacgtttccatcggtgtatgattgcatgttctgcggagttagttcttgcaactcacaagactgtcactatgatgttcccagctgtgttggagaagactggcattaca

SEQ ID NO: 305131 - DNA, 271 bp, Zea mays
ggatttttggaaacatgcaaaatctctatgaaactgttaagaaggcccaaatggttgtccaagttgaggctgtccgggtgcagaaggagcttgcagcgttacactttctggaaaccagcaacctattagagttgaaatcacagaagctgcaatggagttgggtgctgaaaaactttcggagctggtcaatgatgcttacaaggatgcgcatcaacggagcgtccaggccatgaaagagaggatgtctgacttggcacagagcttaggaatg

SEQ ID NO: 305132 - DNA, 152 bp, Zea mays
atagctgcttccaaaggagacgagcaatgtgtcaagcatcttctcagactacggagctgatgcaaatgctagaggtacgcataaaactagaactgtgatacatcgttttacagattgtccagaactggtgacgttctcgccaccaagaatac

SEQ ID NO: 305133 - DNA, 263 bp, Zea mays
ccttaggaacgacttttgagcagaaaacttacgctgtgctcccttgggaacgacttttgtgcagctttggatcatactttttggctctgcattcctttaggaacacttttgagcagaaaacttacgctgcgctcccttaggaacaacttttttgcagcttcggatcatgatttttggctctgcattcctttaggaatgacttttgagcttcagaattttactccgctttcttagacatgtctttcaagcttcgtaaatccatg

SEQ ID NO: 305134 - DNA, 279 bp, Zea mays
gcttgaagcatgccgtttggccagtccagatgaggcaaaggctgtaattgcccgtggtgtgatgtcaattccaaattctgtgaagctatggttgcaggcagcaaaattggagagcagtgatctgaataagagcagggttttgaggaaagggctggagcacattcctgattcagtccggctatggaaagctgtacttgagcttgcaaatgaagaggatgcaaggttgttgcttcacagggctgtggagtgttgcccgttgcatgtggaactttggcttgc

SEQ ID NO: 305135 - DNA, 278 bp, Zea mays
tatgattctctaggcatatgttatgtactaattgaattttaatttcagtatacactgtgtaatggtaaaaggagaaaacttgatgaatggagaatgtacaaagatcaaagtatggctaaatgaccttgctggaagtgaatgggcagcaaagacagatgcacagggagaaaggttgaaacaagcacagaacgtaaacaaatcactttctacacttggtgatgtcatatgcactcttgtaacgaagacttcacatataccctttagtacaggtggagatt

SEQ ID NO: 305136 - DNA, 168 bp, Zea mays
cggtgacagcggtagggccatctccctcttgggtgaaaaagatggtgcccttgacaccggatgtgcctcttgcctcaagcctggcctacatggcacccatggcggcaggcttgacgtagagaccttccgtgacagccgtagcggccatctccctcatgcctggcctcc

SEQ ID NO: 305137 - DNA, 280 bp, Zea mays
ggagatggccacttgttgatgctgaaattgaaagagtggccccgacccagtgtcttggaggcgtttctgttgtgccaaaggccagaatttattgtcaactttcctcttgttgattttattcatcctagatggggtctcctaaaccttgctgccaagttacccccagatgccttacaacctgaattagggatgaaactgctaattgcacatggaagtcaccgagaacttggtaaaggtgattcaatgacaatctaatgattaacatgagcgatgtgggtca

SEQ ID NO: 305138 - DNA, 273 bp, Zea mays
aattctggtccatcaaatggatcgactgtaaatccaccgcgaccaccgccgccgccgccgcctccaaagttttcctcaaaaagtactggggtcatgaagagggcacctcaggttgcagagctctaccattcacttatgagaagggactccaaaaaggatacttccggtggcggaatctgtgaagcagctaattctgcgaatgtgcggagtagcatgattggtgaaatcgagaaccggtcttcccatttgcaagctatcaaggcagatgttgag

SEQ ID NO: 305139 - DNA, 269 bp, Zea mays
catggaagctctgtacaagaaggtccatgcggccatccgtgctgatcctagcatggccaagtcaacaaaggcgcaaccaaaggagcacaagaggtacaaccccaagaagttgacctatgagcagagaaaggccagactcgtggaaaggctcaacgccctcaattcctcgggtggtgtcgatgatgatgaggatgacgagtgaagtgctatcctatttggcgatcagaacttgcgcaatggcatttgttgttccctttactcctgtaaca

SEQ ID NO: 305140 - DNA, 269 bp, Zea mays
gtcgcttccagccgccgccgccgcgtccgcctcgcccagcgcagagccgccgcagcacatcgctatctcgatctcagccatggcggaggtggagcagcaacaggacacgccgaagctgttcaaccgctggaccttcgatgatgtccaggtgaacgacatctcgctgaacgactacctcgctgtgaacgcgacgaagcacgcgatgtacctgccgcacaccgcggggcgttactccaagaagcggttccgcaaggcgcagtgctcgatcg

SEQ ID NO: 305141 - DNA, 279 bp, Zea mays
tccaagatctcaagtccttccttgttctcctggatgttcggagcaaaaccaccttcgtcaccaacattcgtgagaacaaggaaggacttgagctcttgaaaactgcaattgagaaggctggatacactggcaaggttgtcatcggaatggatgttgctgcttcggagttttacagtgacaaggaccaaacctatgacctcaactttaaggaggagataatgatggttcacagaagatatctggcgatagcttaaagatgtatacaaatcttttgtgagc

SEQ ID NO: 305142 - DNA, 296 bp, Zea mays
cttctgaaagatacaaaagtgtctctttctgcaaaccatctgcagaaactgtgtttatcttttcaactaaccacaccgcttgggcacacatttaaacctcaccaggtgttcttgaaattgaggcatgagagtaaggttgaacacttattcgtggtacctggctctgcaaggcagttcaaaattgttcttgtgagtatctctacactggaattggcttcgttagttctttggatgctcataattcattgtggcaatgtagccaatactctagaccaggcactgaactatcttgagaa

SEQ ID NO: 305143 - DNA, 284 bp, Zea mays
catcaagttgatgaatcgataagtggctagagacaaccaaagataggacagtctgcacagtagtaggcttcacgatggggctaaaagtcccatcaaaatcaatgccagggcgttgcgtaaatctacagtgaacctagcgagccttgtacctttcaagggagccatcaacattaaatttgtgcttgaaaatccacttgtcggccacaatgtttgcaccaggggggcgaggcaccaaatcctaggtgtgattctgcaacagtgctgcatactcatcttccatggca

SEQ ID NO: 305144 - DNA, 267 bp, Zea mays
cgccgtggccaaacgagcagtgtgtttggatggtagtgcgccggcgtaccatctcgcccgcggctccggctccggtgagaacagctggctggtccatttcgaggggggaggatggtgcaacaatgtcaccacctgcctgcaacggaagcgcactcggttgggttcgtccaaggagatggcgacgcagattgccttctccggaatcctgagtgacacgccggatgacaacccagatttttacaattggaacaaggtcaaggttcggta

SEQ ID NO: 305145 - DNA, 260 bp, Zea mays
ggtctgcagcccccaactacccccagcctcggaaggaaccttccagaagcgcaagactctaaaggccgtcgccttcccattcttcctcgccgcgggggtcgcctgagatcacataaacaatggtgaaggctgttgctgtgcttggtagcagcgatggtgtcaagggcaccatctttttcacccaagagggagatggccctaccgctgtcaccggaagtgtctctggcctcaagcctggcctccatgggttccatgtacat

SEQ ID NO: 305146 - DNA, 282 bp, Zea mays
agctgtggagctcttgcagcgtgaatgccatgtgaaaaaaccactgagagtcgttcctttgttcgaaaaactggcagatcttgagtcagcaccagcagcgttactcggctgttctccgttgaatggtacagaaacaggatcagcggcaagcaggaagtgatgatcgggtattcagattctggcaaggatgccggtcgtttctctgctgcttggcaactgtacaaggctcaagaggagctcattaatgtcgctaagctgtatggggttaagctaaccatgttc

SEQ ID NO: 305147 - DNA, 168 bp, Zea mays
ctggataaagaaggcagtagtactatagattcttttcaacaccaccaagcatcaatagtactactgccttctttatccatagatggccatagtactattgatgcttggtggtgttgaaaagaatctaaaaaatggcactcacttgagaggagatataaacatgatgat

SEQ ID NO: 305148 - DNA, 291 bp, Zea mays
atgggactctaaaagtagcagatatatctgtgaaggaagaatgcaaaacccgtccatctggccttaatacagttaatatgcttaaggttgcatcaagtgcacttggtattgggcctcagacagccatgcacttggctgagcggctttacactcaaggattcatcagttatcctcgtacagagagcactgcatatccgtcatcatttgattttcgaggtgcacttgctgcactattaaataatcctctatggtccaatgatgtccggaaattactggatgctggttttgtta

SEQ ID NO: 305149 - DNA, 279 bp, Zea mays
gccatgggctacctcgcgcccgagtacgccgccacggggctgttcacggacaagagcgacgtcttcgcgttcggggtcgtgctcctccaggtcctcacgggaaggatggacgtctcccagctgaaggtcggcgccgcgccgtcagcgacctcggcggcctggtcgacgcgaatctcgacggcgcgttctcgagaacggaggcggcgaggctggcggctgttgctgcgtattgcacgagcgagacgccaggtcagcggccgaccatggaggccgtggttc

SEQ ID NO: 305150 - DNA, 278 bp, Zea mays
gatctcagccatggcggagatcgagagagcgatgtgctgtttcgatctcagccatggcggaggtggagcagccccaggacgcggtgaagctcttcaaccgctggaccttcgacgatgtccaggtgaacgatatctcgctgaacgactacctggctgtgactgcggcgaacacgcgacattcctgccgcactccgcggggcgctactccaagaagcggttccgcaaggcgcagtgcgccatcgtcgagcgcctcaccaactcgctcatgatgcacgggc

SEQ ID NO: 305151 - DNA, 278 bp, Zea mays
  unsure (1)..(278): unsure at all n locations
aagaaacaatgaaagcaacagataatttcagcacagtcattggaaaggggggatttggaactgtctttaaagctcaatttaatgatggctctatagctgcggtgaaaaggatggacaaggtttcaaagcaagctgaagaagagttctgtagggaaatggaactcttggctaggttgcaccatcgccatctcgtgaccctcaagggcttctgcatcgaaaagaaagaaaggtttcttgtgtatgaatacatggcgaacggaagtctanaagatcacctg

SEQ ID NO: 305152 - DNA, 270 bp, Zea mays
atcaaccggaaccttctctcattctccacctgcggcctctgaggaagacatgcttcgtgcttctcaagctgtgcttccgtttgcaaactccatgatatcgacggcgcaagtgattttctctggtgaaccttcaatgactctcaaagtattgcctttacttctgttcggtgctaaatatgggggccttgttacagtgtggaggcttttagctgcaggatttttcatcagttttacagtcccaaagctatatagctgttattcaagtcgtat

SEQ ID NO: 305153 - DNA, 271 bp, Zea mays
agtgaacagcggaggagctccaataatctgatgtgggaacatgagctggcatgtttgaggataagaagataggtgatgagttcttttcctttattgttgactataaagatctgaaggcatgtactattctattgaggggagcaagttgctaattggtgcccactaatagtctggtgatctagccgaatgaaattgtcgacaaggccattagcatcatgcaggttacctccaagcatctcatgtatatctgcaaggagaatctgcacccacg

SEQ ID NO: 305154 - DNA, 113 bp, Zea mays
agagcaacctgaactgcacctgctcactgctcaaggccaggggcatgatccagactggggacctcgtgatcgatctctcggacattctgcagtccatccaggtgatgaacgta

SEQ ID NO: 305155 - DNA, 287 bp, Zea mays
cttcttcccaaaaggacgacgacaacgactacaggaagacggtcaattcgaacttttcgtttgattattctcgtattccacatagttcgaattcgcatttgctttccattcctcttggtaaacctccacactttgatggggaggactacggattttggagtcacaaaatgcgtagtcatttattctctctccatccaagcatatgggagattgtagagaatggaatgaaatttgatagctcggatagccctatgtttatcaatgaacaaattcataaaaatgcacaa

SEQ ID NO: 305156 - DNA, 277 bp, Zea mays
agaagttttacccctagctatatctcaaaagctattgggacgacaatgtactctgtaaactgggaaatatatcatcaataaaaagacttctaaggcattcgaattgttcactgtcaacctacatgcttacttaactcaaggtgaccactataccctactaacggagcaatcggcttaagttggcaatgacttaaggcggtgtgacatgctcacgcttacttaactcggggtgaccactatagcctactaacggagcaatcggcttaagtcggcaatg

SEQ ID NO: 305157 - DNA, 291 bp, Zea mays
ctttcagcacttaagtgctaagacattgaagttggatgttttacaaagaatgaaagttgaaatcccaatcattttgtgcaagcttgagaaaatatttcctccttctttctttgatgtgatgctgcatttggctattcatttacctgacgaggcaatcctaagaggaccagtgcaatatggcgaatgagtatccggtggaaagaaggttgtatacattgaaacgttttgtaagaaatatggctagacctgaaggatccattgcagaagcatatgttgctaatgagtgcttga

SEQ ID NO: 305158 - DNA, 275 bp, Zea mays
gcctgcgccacagctgccgattcgaaagccctcgtcctgacccctcgcaaaaccctagctccaaccaccatgaagggcaaggccaacgcctccaagaaggccgccgcgagcggcaagcccaagcgccctccctccgccttcttcgtcttcatgtctgaattcaggcaggagtaccaggcgcacaccctggcaacaagagcgttgcggccgtgagcaaggcagcaggggaaaagtggcgctctatgtcagagcaagagaagcaaccctatgtggac

SEQ ID NO: 305159 - DNA, 271 bp, Zea mays
gcggaaggcgaaagagtagcagcagcaggcggcgccgagtagcggctccccacctcgagcttgccaccatggctagaggattgaagaagcatttgaagaggctcaatgcgcccaagcattggatgctggacaagcttggcggagcttttgctcccaagccatcttctggacctcacaagtctagggagtgcctgccactgatcctcatcatcaggaacaggctcaagtatgctcttacataccgtgaggtcatttccatcctgatgcaacg

SEQ ID NO: 305160 - DNA, 270 bp, Zea mays
gcaaagaaagtggtgatatctgcaccatcagctgatgctcccatctttggatcatagctattctcattaactccaactacaaacatgggagcatcagctgatggtgccatgttgtttgttggagttaatgagaatagctatgatccaaagatgaatgttgtttctaatgcaagttgcactaccaactgccttgatccacttgccaaggttgtccatgaggaatttggcatcgtggagggccttaagacaactgttcatgcaacaacagct

SEQ ID NO: 305161 - DNA, 178 bp, Zea mays
gtcaagacaatattattgctgatgctttgtctcgtcgctataccatgctgtcacagttagattttaaaatctttggtttggacactgtgaaggatcaatatgttgacgatgctgattttaaagatgctttcggccattgtattaatgggaaaccatggggcaaatttcacatacagga

SEQ ID NO: 305162 - DNA, 125 bp, Zea mays
agatcctatagggttcctcccttctttgacgaatacatccgggctgacaatgactttcgtcaaagaagggaggaagcctataggttctctgagatgaccaggggcttcggaggaagaatccaccc

SEQ ID NO: 305163 - DNA, 246 bp, Zea mays
ggtggatggataacttagtgcaaggtcacttaattatacaacttattatttgtatttcattctctctactaataatttttatatcaaatcatgaactcgttgttcattacatagattttgtatcatgatatcatcagtcattacgatacctattgattatgagaagaacatctatattagagatgaaacccgcgggtaacccatgggtacccgctaacccgatgggtacgggtttgggcaaaatct

SEQ ID NO: 305164 - DNA, 218 bp, Zea mays
gtgcactgtctatatatgtccatcaagtttcaatctaaattgcttaagtgcccttgcagttatatggggacaattacaggaataagtgatcttgatcctgttcgctggccaaactcgcactggcgctcagtaaaggtaggtctcgaaacaaacacagctttgtttttcttaatgccattctacatgccttcacacttctttaactgcgtcatgagtga

SEQ ID NO: 305165 - DNA, 151 bp, Zea mays
agcaatagctgtataatcaatcgcatctgcaatgaagcgctttgaagcatgcaacgtatgtagtatctgtaggtgattgtatttatggtagtaacaataattctacctgaattttggataatacaagctacttcgcagtagtttctgatgt

SEQ ID NO: 305166 - DNA, 268 bp, Zea mays
atctcacgatccactcgagcaccaagccgagggaaggtgaggagcgatggcgcgcggcgtggtgtcggcgaagggcggcgcggtcgcgggcaagaagaaggggtcggtttccttcacgatcgactgcaccaagccagtggaggacaagatcatggaggtcgcctcgctcgagaagttcctgcaggagcgcatcaaggtcgccggcggcaaggctggcaacctcggcgactccgtcaccatctctcgcgagaagaccaaggtcaccgtc

SEQ ID NO: 305167 - DNA, 268 bp, Zea mays
acatcctgataaataatgcaggcgtcatgttctgcccttttcaactgtctaaagggtgtttcatcgagttgaagctagacctcagctccctcaagtctgtcagggcttttgtggaccagttcaactcgatgaaactcccgttaaacatcctgataaataatgcaggcgtcatgttctgcccttttcaactgtctaaagacggggtcgagatgcagttcgcgacaaatcatctaggacactttctgcttaccaatctgctccttgatac

SEQ ID NO: 305168 - DNA, 272 bp, Zea mays
agcgcaggcaagtccgggaagccgctccactacaagggctctacctaccaccgcgtcatcgcccagttcatgtgccagggacgcgacttcacccgcggcaacggcatcggcggcgagtccatctacggcgagaagttccccgagagaagttcgtccacaagcacaccggccccggggtgctcgccatggccaacgccgtccccaacatcaacggcactcaactcttcatctgcaccgtggagacgccctggctggatggcaagcacgtcgtc

SEQ ID NO: 305169 - DNA, 268 bp, Zea mays
cactcgtagagagaaggaaaaatatccccataccctagctcccgatctcgatggcgaaccctcgcgtcttcttcgacatgaccgtcggctgcgccccggcgggccggatcgtgatggagctgtacgccaacgtggtgcccaagaccgcggagtacttccgcgcgctgtgcacgggcgagatgggcgtgggctagtccgggaagccgctccactagaagggctccaccttccaccgcgtcatccccgagttgatgtgccagggcggcga

SEQ ID NO: 305170 - DNA, 136 bp, Zea mays
cgaagtaatcataaggatgaatatctttgtgtgggctgtgaggagccaaggcttggaacctgatgcaaaaagcttctgcaacatgcacgaattgttatacgagacaaaaccctggggtaaggaacaatatcacaac

SEQ ID NO: 305171 - DNA, 260 bp, Zea mays
atctggactcaatggggagcttcttatgctcagcaggctgcatatcctgcatatggaacttatgactacagccatcaaatgccacaacatactcctcaaacagctgcctatggtgcttatcctccaacatactctgttcaggcctatacaggaaggaaggtggccattgttggcagtggaccatctggtttggctgctgcagatcgactaaataaaatgggccacttcgtaactgtgtacgaacgtgagatcgcattgga

SEQ ID NO: 305172 - DNA, 255 bp, Zea mays
ctcagccgatcaggcttgtcataagaagggatctctttctttacgaagcatgaaaagaagggaaggtgttttttcgccgaaggtcaaaaacggtatgtgtgtaaatttcatgcatcacaaagaaataaattacaataatttacatattcgattcaaagttacatacatcaaatgtcacatagttttgttataatagaaacttaatgttcattccattgtcccatacatcaagcatttcaaatattattacaatga

SEQ ID NO: 305173 - DNA, 256 bp, Zea mays
ccttcctgtgttcactggacggtcatggtcgcccggagctacgtcagtcacaccctctccaacactctctatgataccgtcaggcgaccatgtccttcctgtgttcactggggagtgcaaggagtgtgcccactgcaagtcggcagagagcaacatgtgtgatctgctcaggatcaaagacgagtgcggtgtgatgattgccgatggcaagtcgcggttttcaatcaatgggaagcctatctacactttgttggga

SEQ ID NO: 305174 - DNA, 192 bp, Zea mays
ggcaattggccggaacccagactccaagcgagctaattttgtagatctgccatggtgtgctttgtcccgttagtcgatatatgtggcgttatttctagattcaagtccatttgcttctctatgatttttgtacaccgctaaataatcttcttaagcccctgaatggatgcaaaatatttaagatgttttagg

SEQ ID NO: 305175 - DNA, 273 bp, Zea mays
actggttctatcatcttgcatggcccgcaccagttgttggcaagctctcgaaggactacgagaggaagctgaaatgctacaagctaaacacagatgagagcccggacatcgcaagccagtacggggtccggagcatccccaccacgatgatcttgcaagatggcgagaagaaggattcggttatcggggccgagagagagagcacactggtcacatgcatcgagaaatttgtcgagacgtagaatgcgtagtggatctcttgagcggtttcct

SEQ ID NO: 305176 - DNA, 183 bp, Zea mays
gccatcctcggcgtggacggcttctcgtcgctccccaagaactgcctcaccctctgctacatcttcttcgcggcggccatcgtcgtcaacctggtcagggacctggtgccgaagaaggtcgccaggttcatcccgctcccgatggccatggcgatcccgttctacctcgggtcattcttcgcc

SEQ ID NO: 305177 - DNA, 274 bp, Zea mays
cctgggcgcgcctcgccacctcagacgtgcacgtaggcgggtaccttgtgcccgcgggcaccaccgccatggtgaacatgtgggccataacccatgaccccagcctgtggcctgagccaatggagttcaggcccgagaggttcatgggccctgccgccgaggacgtcccgataatgggttcggatctccggctcgcgcctttcgggtccggcaggcggactgccccggcaagtcactcgcggtggctaccgtcggattctgggtcgccaccctg

SEQ ID NO: 305178 - DNA, 279 bp, Zea mays
gtcttcatggaggagttcaggtagacgaagaacgcgctcggaggcctcttgggcttgttcttcgtcttcatggaggagttcaggaagccctacaaggagaagcaccccaatgtgaagcaagtctccctgattggcaaggctggtggtgacaagtggaagtccctgtctgatgccgagaaggctccctacgtgtctaaggcagagaagctcaaggctgagtacaccaagaagatcgacgcttacaacaacaagcagtctggagaccccacggcgtctggt

SEQ ID NO: 305179 - DNA, 194 bp, Zea mays
cagctgcaggagcagatcaatcgccccatcacgcgaagttcggcgctcagctcgtgaagaacgtgcaggcgaatgccgcaatcaagaatgccgcaatcctacccgcgaggcacgcgccgaggcaggaaaggaaggctcctgccaagcagccgcctcctgaggatgtcaagtactcagctccgactctgaacaga

SEQ ID NO: 305180 - DNA, 214 bp, Zea mays
gcgagacggagacagagagagagatggtgacgacggactgggggccgatcatcgtggcggtggtgctgttcatcctgctgtcgccggggttcctgttccagctgccggcgagggtcagggttgtggagttcggcaacatgggcaccagagcgctcgccatcctcgtccacgccatcctctacttctgcatactcaccatcgtggtggtagccat

SEQ ID NO: 305181 - DNA, 158 bp, Zea mays
  unsure (1)..(158): unsure at all n locations
atatgaccgtgccacaggcacatcaattacatcctcactatagtagacctctctgatgtcagaagcatgtatttttctgtgcacttatgtatgaccgtgacagtggagatctaangacatgaaatctaaatgtaaggtttatgtcaaaggtgcaaagg

SEQ ID NO: 305182 - DNA, 261 bp, Zea mays
aaaggacaaaaggagggcatttcttaaaatctgcagcaactttaggcctgtgatgcaccacttctttcttgaaagattcttgctgcctgctgattggttccaaagtagacttgcttacacaaggagtgtagcagcaagctcgatggtagcatcatatagtcggtcttggggatcgccattccatgaatattctcatcgaccaagacacagctgaggttgtacacattgatcttggtgttgcatttgaacagggtctcatgc

SEQ ID NO: 305183 - DNA, 271 bp, Zea mays
gaccaggaatgctgtttcagggaatgtatatacatttacagctcttatcagtggtttctgcaaggatggaaatatggatgaagcaactaggttgtttcataaaatgatggagagttccctagtgccaaatgaagtgacttttaatgttatgatagaaggtattgccgtgtaggcaatattaggaaggcattccagttatatgatcagatgctagatagaggcctaacgcctgacaattacacttacaggtcactgataagtgtagtttgtt

SEQ ID NO: 305184 - DNA, 286 bp, Zea mays
gcccatcgggacggcggcgcagggcccgtgacgacaaggactacaaggagcccccgccggcgccgctgttcgagcccggggagctcaagtcctggtccttctaccgcgcgggcatcgccgagttcgtcgccaccttcctcttcctctacatcaccatcctcaccgtcatgggcgtctccaagtccacctccaagtgcgccaccgtcggcatccagggcatcgcctggtccttcggaggaatgatcttcgcgctcgtctactgcaccgccgggccgatccggagaca

SEQ ID NO: 305185 - DNA, 155 bp, Zea mays
  unsure (1)..(155): unsure at all n locations
tgattggtcncgtgaggcttttacaatggatgagcagagatcaaaagccgtaactgaagcttttgtcaggttacataaggaaggcctgatatatcgagattatcgccttgtgaattgggattgcacgcttcgaactgcaatttctgacattgagg

SEQ ID NO: 305186 - DNA, 275 bp, Zea mays
gtggatcctaatgtcaacaagtgggaccaaccttttgtgttgggagttgttgatctgcatgactcattatctcatcctgccggggtttctgatgtccaggctgagtccaccacttgtctagatcctgatctatttacgaactttttggtacgtgagctatatattcctttcattattgctatcttatgctagacttgaaaaaactcaaatgcagttaaaaaagttttatgatgagatatctcttgctttgacaacatgttgcgctgatgcatctg

SEQ ID NO: 305187 - DNA, 137 bp, Zea mays
atttagaggacactgctggattctctatatatagagtttctctaaatagttctctatccatttgaatactttaaataatcggtttaacaaaactaaaatatatacaatacatgagagtatgacaaatatgtatttac

SEQ ID NO: 305188 - DNA, 270 bp, Zea mays
cctcagacccgagaagcgcactgcggccatggacgccaccggcactggagctggagggaaggcgaagaagggagcggccggtcgcaaggccggcgggccgaggaagaagtcggtgacgaggtccgtgaaggccgggctccagttccccgtcggccgcatcgggcgctacctcaagaagggccgctacgcgcagcgcgtcggcagcggtgcccccgtctacctcgcggccgtcctggagtacctcgccgctgaggtcctggactcgccggc

SEQ ID NO: 305189 - DNA, 275 bp, Zea mays
aaggctagcaggtaggctggctctcgccgagcgatggatctcgagttcggaaggggcctgaggtccccaaagagagactcgtggaagaccaccttgctgctggcgtaccagagcctgggggtggtctacggcgacctcagcatctctccgctgtacgtgtacaagagcaccttcgccgaggacatccagcactcggagacgaacgaggagatcttcggcgtgctctccttcgtcttctggacgctcaccctcatccctctcgtcaatacgtctcc

SEQ ID NO: 305190 - DNA, 269 bp, Zea mays
aaacaggatgggaatgaacgaatccattgtgagaagagctcttctgattatgcatcaaagagacgaggtggagtacaagagagagcgccatgtgatcgtccggaaggcttgatgtggagagtccagtcagactcattcatggcatacaacgaacgttcatggcgtcctctcctcagacgcgtccataccttcactgagactgcacatctgtccgtcctgaggggacgagacacgccttagttggtctctgacatgactactgttgtaat

SEQ ID NO: 305191 - DNA, 296 bp, Zea mays
cccttacctgagactgctcctatttctaaacggccatacaggatgtccatagaagaactaaaggaacttaagaagcaattaacgggattacaagaggctgattacattcgtccgagttcctcaccttagggagcgtcggttctgtttgtacaaaagaaggatggatcacaaagagtgtgtgtggattatagatttcttaatgatgttacgttgaagaacaagtattcgttaccccatattgaggatttattcgatcagatgagatgtgcaagggtattttcgaagattgatctccg

SEQ ID NO: 305192 - DNA, 282 bp, Zea mays
tgttgccaggccatttcaaacgtaccacactatacccagccagggttatgtcatctactctattcgaagaaagttgaaaaaacagtatgctcatttgaagggtagtcaaataatgaaactgaagcaatcaggaaccgagattacggataccatactgtacccagaagttgccttcacaggagatacaaagtctgattttatcttgacccaagaatgcagatgccttgagagcaaaggttctcataactgaggcaacgttcctagatgaccatgttgatgttg

SEQ ID NO: 305193 - DNA, 287 bp, Zea mays
cgcttagcacgggcattcaaacccctcacattccaagataaaatacaacagtttgtattcattaaaagatgaaccctcctctacttgaacagacattgccacataaagaatataacatagttaacatttgatgcagactggcaaccttgttcaccaacagtaagatacacatggcccacgacacacacaaaagttccaaactgaaattagtaagatacagaggaacaaggatccattgattcgaaaaccacctccagaccaccagataccatgcaacgaccaacagt

SEQ ID NO: 305194 - DNA, 153 bp, Zea mays
ccatcatgaagttcacccttgtaaacagtgccaaaccctcctcgagcaaggatgaacttcatgatggcacgaaaattgctgtaaagcggatggaggctggtgtgatgggtaacaaggggctaaatgagttttaatcagagattgctgttttga

SEQ ID NO: 305195 - DNA, 265 bp, Zea mays
gtacatcaagcaagttctcagtagcgtcgatgagagtctagtggttggatcttctggagttgatggtatcctcattgaccttggcatgtcatccatgcaggtgaataaatctaataggggattcagtgtactccaggatggtcctcttgatatgcgcatggaccctaaggcaactttaagagcagagattatcttgaattcttggccggagcttgaacttgggcgtatcctgcgtgaatatggggaggaaagcaactggcaatcc

SEQ ID NO: 305196 - DNA, 265 bp, Zea mays
ctttggaagatggggattttagagcagatatcagatattgaagcagaaatttcaagaactcaaaagaacaaagcaacagaacatcatttagggttactcaaagcgaagttagcaaagttcagagcacaacttctcgagccaagcaaaactcccggccaaaaaggagatggctttgaagtttcaaagagataagacggtagaatagcactcattggttttccatcagtaggaaagagtacaattctcacagagttaacagacactg

SEQ ID NO: 305197 - DNA, 263 bp, Zea mays
cgcctcggcgtcgaccagttgccgccactagctatcctcacgggcggcggcgcaccgctcgtcggcggcggagtaggtcccggcgcgggcggcgaggaggcgaaggccaaggaggagaagatggcgtacgacgtgaagctggaggggttcgacgccgcggcgaagctcaagatcatcaaggagctgaggaggttcacgaatctgggtctgaaggaggccaaggatctcgtggagaaggcgcccgccgtgctgaaggctggagt

SEQ ID NO: 305198 - DNA, 266 bp, Zea mays
tgcaaagagtctaagccaaccggcggaaaggatggaagcaaactggacgttaatacgaaacaacaacccaatgttagaccttcgggcggtgattacgattacttgttcaagctccttttgattggagacagtggagtgggcaaatcttccctcttgcttcgctttgcggacaacacttttactgaatcctttatcagtaccattggtgttgattttaagatccgtactatcaacattggcggtgcgaacgtgaagcttcaaatttg

SEQ ID NO: 305199 - DNA, 170 bp, Zea mays
gttagttctatctccagtaggcctaatgcttgaataagcaagatgtctaatcaatgaattattttcatgctcagaatttcaggtttttgtactccagcataacttggtcttatttcttactgtgatgaacgcttaacagcaatgtggtttaaggttttgttttaaatggg

SEQ ID NO: 305200 - DNA, 230 bp, Zea mays
gccattttcagtggatgagcgtgaagatctgaaacttatcgtacgaagcaacatatacatctaccttggcatattgcttgaagggcgtgatcggtttgaagaggaatctttagctgatagaagaaaaaccagtcagtgtgacccttctagctctgggtgttgtgaagcgggattatgtgacgagtcactgagtactgccttattccacgtttgtgagcattctcagattg

SEQ ID NO: 305201 - DNA, 235 bp, Zea mays
gtcgtctacactgacgctaactgggccgggtgcccagacactcggcgctccacctccggctacgcgtcttcttagggggcaacctagtttcctggtcgtcgaagcgccagccggtcgtttcccgctcaagtgcagaggcggagtaccgtgccgtggccaacagcgtggcggaggctgcttggctcaggcagctcctcgccgagcttcacagtcccctctccaagagcacgttggt

SEQ ID NO: 305202 - DNA, 248 bp, Zea mays
caacgctccagctgtggataaagtaaaggacttccttgccggtgctggaactgatgctcctgatgtggatgatgaggaatacatgaactcgaggccatcagtcggctatgatgatatgtgggctaagacaattcttgaaacttacgatgcagaggaagatgatggtaggtactctggtggatcctctcctgaatcaactggttctgttgaaacctccatatcgtcccattttggaggcatgaactatc

SEQ ID NO: 305203 - DNA, 283 bp, Zea mays
tgaacggatgcaggtgttcatgctttatcaaatgtttgtcatgttgatgttgagcggataagtaaaaggaagcctggcgaagttttaacacctcatgagcctggagttgtaaaacgtgctgtgaaccactttctactgaagagtgaaggtgacataatggtgactgatgtctgctgtgttgcaccagattttcatgctagatacaaatctctagagcgcacagatcactatcgcttgcttgctggacctgaatcaagatctgtttttgagaaaaactctgttt

SEQ ID NO: 305204 - DNA, 279 bp, Zea mays
aaagctgaccccgccgacgtacaccccttctcccaagcctccgacgcccaagcagaccacgccgacgtacactccaagccccaagcctccgacacacacgacgcccatgctgaccccaccgacgtagaccccttccccaaagcctccgacgcccaaactgaccccaccgacgtagaccacttccccaaagcatccgacaaccaagctgaccccacagacgtagactcccacaccgaagccgccggataacaagcagcacacatagactccgacgccgcc

SEQ ID NO: 305205 - DNA, 165 bp, Zea mays
atccggcaagaacttcgtctgggtcgtcggggcgcggacaccgaggagtcggaatggatgcccgatgggttcgcggagctggtggcgcgctgcgaccgcggcttgatcatccggggctgggcgccgcagatgctcatcttgactcacccggcggtgggcggtttc

SEQ ID NO: 305206 - DNA, 267 bp, Zea mays
tcagaagccatgttgtgggatcaaattactgcttcatgaatgtctatgaggatagaagacctggtagggccagcatcatctctgtcagagagaatcttgtgaagggagcatctggtcaggctttgcaaaatcttaatctgatgatgggactgcctgagaatatggggctgcaatacgagcccctgttcccttgatcttttgtgtcatgagcgaggaggacgagagtgaggagtcgtgatacgaaatgagcaggactgtcaagtggtg

SEQ ID NO: 305207 - DNA, 285 bp, Zea mays
tgagtctccagccaaccgcatccaagtctccggcaaggagggcggcgagatgtaggggatgatgaaggcctagaagagcgtggagacctacaaaatctagatcttcaaggtcctgaagcaggtacaccccgacatcggcatctcctccaaggccatgtgcatcatgaagtccttcatcaacgagatattcgagatgctcgccggcgaggccgccaagctcgcgcggtacaacaagatgccgaccatcagctcccgcgagatccagacctccgtgcgcctcgcctc

SEQ ID NO: 305208 - DNA, 285 bp, Zea mays
atggagcacaggtcagcgtcaacttgtgtgtctgggaagggtgattctgaaacggaggaagatcttggttttggatgaggcaacttcatccgtggatccaattagagacagcttgattcaaaaaagcttaaaagaacaatttctcaaatgcacaatgattagaatagctcaccgtatcagatcagttcttgatagcgagaaagtcttgcttctggataatggtgaaattgcagagcatgacgccccagcaaaactgctagaggacagttcatccctattcccaaa

SEQ ID NO: 305209 - DNA, 242 bp, Zea mays
ctcatgggaatattgtgtcggaccttacaattattgatgtctttggtattgctgatgtgactagtctactagagaaagcatcccagagtaggtctgtgggtaagactatgatgaatgaacagtcgtcagaagtcattttgtattcacattaaagatatctggatctaacgagaacacaggccaaaatgtccaaggagtccttaacttgattgatttagctgggagtgagcgtcttgctaaaa

SEQ ID NO: 305210 - DNA, 262 bp, Zea mays
aagactttcacttccttcagtcaaagccaaaaggagatcttagaaaagcctcttggtgtgaagtataaagatattactattgccaggcttgggccaggacaggctatcgagctcgaggcacatgctgttaagggaactgggaacgttcacgccaagtggtctccagttgctacagcctggtacagaatgctccctgaggttgttattcttaaagaagttgaaggccctcaggcagaggagctggtgaataagtgccgggtta

SEQ ID NO: 305211 - DNA, 243 bp, Zea mays
ctcttctcctccatatagtggcgggcctccgtcggcccccttccaccccgttttgccgccccacaggccacagcccaaaatcctcctcgtcgctggtgccctctccgcggcctcctccgccagccatggccgccgctgggcccgggctctactccgacatcgggaagaaggcaagaggtctcctgtacaaggactaccacactgaccggaagttcacgctcaccacttacgccgccaacggag

SEQ ID NO: 305212 - DNA, 242 bp, Zea mays
ccattatcttgtgaaacactgtttagttctttggcatattcatcgttgcaggctgtgcggcgaagatttgacaagcgtatctacattccgctacctgacacgaaagcaaggcagcatatgtttaaggtccatctcggggatacaccacacagcttaactgaaagcgatttcgagagcttggcccgtcgaacagatggattttctggttctgatgttgctgtttgtgttaaggatgtcttatt

SEQ ID NO: 305213 - DNA, 240 bp, Zea mays
ggcgttctcgctgtctctcgagcatttggtgataaactcttgaagccgtatgttgttgctgaccctgaaatcaagcacatctgaaaacgacttttgctattacaatcaggaggaggtggtcgacagctccctcgaattcctcatccttgctagcgacggactctgggatgttgtcactaatgaggaagctgttgccatggtcaagcctatccaggacccccaggaagcagcaaacaagct

SEQ ID NO: 305214 - DNA, 234 bp, Zea mays
tcgtcacatgcctgtcgttgaagccagctaagcgtactggatcttggatgtttgactgctaagtgcattaccgcacttattataatgagctgactgacgtacgattaaaaaaatgaacattgaactgccatgagtagcttggagtttcgagaacataaagatgtccatgttctcatgtttgattgccaagcccagtgaaacgtggctttttcagggtctggaaagactgaggaa

SEQ ID NO: 305215 - DNA, 242 bp, Zea mays
gcggctccccaccaacgagacgccccctaaggagctccacccggtgttcttcctcttcgtggcggcgcccagcgttgcgcgcatggcgtgggccatgatcacgggcgagttcggctacgggcccaggctggcctacttcatcgccatgttcctgtacgcgtcgctggcggtgcgtatcaacttcttccgggggttccgcttctcgctggcgtggtgggcgtacacgttcccgatgaccggcg

SEQ ID NO: 305216 - DNA, 339 bp, Zea mays
atctttttaaacactctatacaggtgcacacaaagggttgttgaaacagaaacacaaacgcacggcgaaataatattatttattcgacttacgaatttttcaaagaaatcgtactggtgtgaagtggaaagtttcaaagatagtttgaaaagcagggaaaaaagaacatagtgaaccttcatcgccacagtgacaggttcaaggaaaaaattcacacacacacacatacgcatacgcacacagagcactcagctctatatacataacaaagaatattgtaattcgacactatgtggtacattcagagggtcctaagacagcacaaatcagttatataga

SEQ ID NO: 305217 - DNA, 355 bp, Zea mays
  unsure (1)..(355): unsure at all n locations
tggacacaactcttaggcgccacattactctgatcctggccgctgttgggacattgttgataaatatggagtgacaatattctataatgcaccaacacttatacgttcacttatgcgtgatggtactgagtatgtggctcggtactctcgcaagtctctccgagtacttggaagtgttggttagcgaatcaaccccaccgcatggaggtggttttatgatgttattggtgactcacgatgcccatatcagatacttggtggcagactgaaactgggtgattcatgatcactcgtgtacctggtgcttggcctcacgagccangatcagcaacgttagctgtcttcggtgtgcagc

SEQ ID NO: 305218 - DNA, 167 bp, Zea mays
  unsure (1)..(167): unsure at all n locations
caacaagcgcgtcncggacgccatcgtgcggccctcctcccggcgcgcctccgcctccgaccccgtcatcccctggtaccatgccaataggatgctcaacttttatgctccaggttggtgtggggaagttcgtgatgttatttacactgacagtggaaaggtgacgg

SEQ ID NO: 305219 - DNA, 206 bp, Zea mays
attggttgacctttaatgagccgcaaacgttttcttctttttcatacggacacgggctatgcgccccagggcggtgcaccccaggacagaaatgtgctaacacaattggaaactcgctcactgagccatacactgttggccataaccttctccgagcccacgctgaggctgttgatctttacaaaagtattacacgggtgagaatg

SEQ ID NO: 305220 - DNA, 214 bp, Zea mays
ctagcacttggattgtcatgtgtgtacattctgtgatcaggactgaacagagagaactcaccatggagtttgggctgagctggcttcttcttgtggctatttcaaaaggtgtccagtgtgaggtgcagctgttggagtctggggtaggcttggtacagcctggggggtcactgagactctctgtgcatcctctggactcacctttagtaactat

SEQ ID NO: 305221 - DNA, 168 bp, Zea mays
tgagcagcataaatatgtacaagtatctcttctcaacggatagaattatggttgtggatagactatagaccgagtttgtggatagaatatgagcagcatgatatgcacagatatctctcctcaatggagaaaatcacgtacgaaatataagaaccagtttgtggatgc

SEQ ID NO: 305222 - DNA, 155 bp, Zea mays
attttgataaggtacaaatataggttcaatccctgttagtttcacccagtctggtgaacgtagacaagtgaccctaaagtacaaaaaggtacacacggccacacgccataattagctgcctggcttgttttgcgccctttgtaaatatgtgtaag

SEQ ID NO: 305223 - DNA, 316 bp, Zea mays
  unsure (1)..(316): unsure at all n locations
tataaacgctgttgcatattactctacatcggtgttccgtaatgcaggcattacatctgatgttgctgctagtgctcttgttggagcagccaatgtttntggcaccatggttgcattttctctaatggacaagcaaggaaggaacagccttctgatgacaagcttntctggaatggtaaatgccttgtgtttcacaaatcatgtgtctatgttctctctcaatcagcanatggagggttcatattcactttttttctcccttgaagggtgcttcaatgctactcctagcattgtcttcactggaaagctctggcac

SEQ ID NO: 305224 - DNA, 314 bp, Zea mays
  unsure (1)..(314): unsure at all n locations
ggctcgaggcccacatgctctacatccttactgaaccgngcacttccccngtgacctacgatgtcagatcgagactagatctgccgacctacctaggtggccaataaaccactgttgcccacttcccctgccccacaagacctgccacacatgaacaagaacgtggtctccgtgattgacatcagtggctccatgataggccagaaagtgaagcagaccaaggaggcatccttaaaattctagcgtacatgcagccatgggactcatttgactagttctctttgtggactcgagtacaatcgtggcagggctcg

SEQ ID NO: 305225 - DNA, 340 bp, Zea mays
gcagcatttgcttggcctgctacgttgcttgccgctacagattttattgatagtaaatggtctgttgctatcgacaggtaaatgcaaacccttgtagtacaatgtcttgtgtcaaactggcgaagtttccaatactaaaatttctctgtgctaatatactagttatctgtagtgtacctaacagcttgtttagcgaactgatgaactgtatcctctcagatcagataaggcaggaaaaatgcttgcagaagtgcttcttaagggactgcaaggaaacaggcctgtgactcttgttgggttctcgcttggagcgcgagtcatattcaagtgcttacaggag

SEQ ID NO: 305226 - DNA, 319 bp, Zea mays
atcggaacacttctcttcttcgtcctgataccagaaaggctgcatacctagctgcaatgcagaatgtaactgcttcatacagatctgcttataatgatcttctgaaagtctacagggagtcagatgaagcagaggaaagggggcgtgtcctaagcacactgtgcttttgtaaggacgagaatattgttcttgaatcactgaatcttctttttaccaatgagtttcgcaagcaagatgcatattatgtacttcaaggtcttgacgtggagacgcgtgataccgcatgggtgtggttgaaggataactgggatcgtgtgac

SEQ ID NO: 305227 - DNA, 315 bp, Zea mays
  unsure (1)..(315): unsure at all n locations
tttatcatgtgaaatcattcattttctgggtgttttcttaaccatatcattgtgaaattattcataattattatntggccctctgcccagaaacctttgtgtgcatctgaaaattgatgggatttggtcaacactaacatgattagcggaaggagcagtcagatagaattagtactcgcactcttgaactangttgtagtccaaagaggctatgtaggcatcatgtgctcaacatgtcggtttttaaaacggtagaactagtgatattataaataaaacctggatgcgcgcgatagtactgtgaccggattatcg

SEQ ID NO: 305228 - DNA, 285 bp, Zea mays
tccatgtggtgtatggttgtcacctggctctttagcccattactgtttaatccttgctgggttcgagtggcagaaaatggtggatgactggactgactggaataagtggatcagtaaccgtggaggtattggggtgccgccaaagtaaagttgggagtcatggtgggaaaagagcaagagctcttaggcatctggaagcgtggcatgttctgaatagtgtttcgttggctcttattaccagtatgtctgttatcattgaaatcacatcacagagacgtctgttat

SEQ ID NO: 305229 - DNA, 307 bp, Zea mays
  unsure (1)..(307): unsure at all n locations
tgtcaatggacaagccctgcagtttgtttacgggagcaagcaagtctttacccaagggggcattcttgcggcgactgatgacgacaaatctgtacatgagtcaacgtttcaatgaagcgatgaaggacgtcatgactcagtgctgcagtcctgatgaagtcatcataggtcctgacttccatcagtctttgtactgccatctattgtgtgggttaatctactcagacgagtgcagtntgtattctcgccatttgcgacgagctcgtccatgcatgtcacagtctcgaggaggtgtgggaagactatg

SEQ ID NO: 305230 - DNA, 334 bp, Zea mays
  unsure (1)..(334): unsure at all n locations
attggcttgttgaggtttcggacgaatataagcttgtggcagatacactttaccttacagtatatcttattgaccaatttctttctcagaactgtatccanacgcacaagctgcaacttcttgggataactagtatgctgattgcctcgaaatatgaagagtattctgctcctagtgctgaagaattttgtaacataacggctggtacatatgcaaaggctgaggttctggaaatggagcaacaagtgcttaatgatctgggctttcatttatctgttccaacaacaaacacatttctcaggagattccttagagcagacaggcttctcgtaca

SEQ ID NO: 305231 - DNA, 326 bp, Zea mays
gaaggagagcccctccatctggtgctccgcctgaggggtggtatgcagatctttgtgaagaccttgactggcaagaccataaccctggaggttgagagctctgacaccatcgacaacgtgaaggctaagatccaggacaaggaggggattcccccagaccagcagcgtctgatcttcgccggcaagcagctggaggatggtcgcacccttgcagactacaatatccagtgtctctgccattgcccatggtggtactgtctttcaaagtatttgtatggtttgtgtcgtgagtcgtgactgagctggtttcatggaccagttgtgtt

SEQ ID NO: 305232 - DNA, 299 bp, Zea mays
  unsure (1)..(299): unsure at all n locations
taactttcactaagagccccctgataatgcaaagaatatgtcttcactgctcgattccattttacgacatgttccttcaccanaagctgatcttgaggctccattccaaatgttggtttccatgatggaacgtgatttttatctaggacgaatactcactgggagagtaaggtccggagttgtccgtgttggtgacaaagtccatggtcttcgcagtgcagatgatggagttcataaaattgaggatggaaggttgtcaaactcatgaaaaagacaggcacaaatatggtaacagtaga

SEQ ID NO: 305233 - DNA, 292 bp, Zea mays
cgtaagtcgaatcggtcagtccatctacccagagagtgggtacaccctgataagattgctttgtccccatctctggatttgatggcgactacatgattgagaggtgcaccaaccttgacttgtaaaaaggcccgaacctgcttgaggctcttgaccagatcaccgagtccaagagaccttcggacaagcccctgcgtctccccctgcacgatgtgtacaagaattgtggtattggaactgtacccgttagtcgtgtcgagactcgtgtcatcaagcctggtatgggtgtcac

SEQ ID NO: 305234 - DNA, 240 bp, Zea mays
ctctcttgcactggtacacgggcgagggcatggacgagatggagttcaccgaggccgagagcaacatgaacgacctcgtgtcggagtaccagcagtaccaggacgcgactgccgacgaggaggagtacgaggagagaggaggtgcaggcgatgacattgagggaggctggatcttaacctttggcctaggcagcgactcatagtcgggtccttcggtgtgcactctatgtacgacactcg

SEQ ID NO: 305235 - DNA, 237 bp, Zea mays
  unsure (1)..(237): unsure at all n locations
ccgccgcagacatggcgctgctgaatcagcaaggtctgnattactccaacttcaagctcgtcatcgttggcgacggtggaactggcaaagccacatttgtgaagaggcatcttattggcgactattagaagatatatctagccaccattggtgtttaagttcaccctctcgatttcagcactaactatggtcacattcgttactattgctgggacactactgggcaagaaaagttcg

SEQ ID NO: 305236 - DNA, 347 bp, Zea mays
  unsure (1)..(347): unsure at all n locations
gtcgacggtacacggtgaatttgggcttgtgggatactgcagggcaggaagattacaacagactgagggcaactgagttaccgcggacaagatgtgttcgtgctcgcctcctcgcttgtcagcggagctagctacgagaatgttatgaagaagtggctacgggagcttcagcattacgcaccgggtgtccccatagtgttggccggaactaaattggatcttcgtgaagacaggcactacttagttgaccatcctggtgcggtacctgttactacagcacagggggaggaatgcgcaacacattggcgcacttgctacatcgatgcagctcanaatcagcagatgtg

SEQ ID NO: 305237 - DNA, 348 bp, Zea mays
ggctgcatctgcttcttgcctgcttagcctcttggtggtggtggtgctggcggcgctggcctcggcgacgcgtccgttctgctgaacgacacgtccggggagcagaaccagattccgaaccagactctgaatcctaggggcttcgatgtctttgacagcatcaaggcgcaggtggaggcggtgtgcccggggatcgtctcctgcgacgacatcctcgccgtagccgcacaggacggaatggtcgcgctcggcgggccttcgtggacagttgcactggggagaagggactccactgcttcgttcccggcacagacgagcgacctcccgactcctacgtcagcctccagc

SEQ ID NO: 305238 - DNA, 330 bp, Zea mays
gttgttacagtttgccctactatggctttaggaccgctcttgcggcctatgctcaatgtcagccatgaattcctcatgtacattattaaaggaggtcctactatgatgaagaacattccatggcacatagttgatgtccgagatgtggttgatgctttgcttatggtatacaagacagaggaatcgacagggagatacatctgtgcaccagattgcatcagtgcaaaagatctggtgaacatgctgaagagggattatcctaattacaattatgtaaactgcgacaatgatatggtgcttaactctatagttacaccacttatgtcggag

SEQ ID NO: 305239 - DNA, 361 bp, Zea mays
ctccttttgctcggaacgcacacaacggccgttcccgatctccgagtccctcgtcgattcaaagattcaagatctcggtacagaccctcattggaagaactatcaccttccaggtggagtcctctgacacaattgacaacgtcaaggccaagatccaggacaaagagggcatcccccggaccagcagcggctcatctttgctggcaagcagctcgaggacgggcgcacacttgccgactacaacatccagaaggagagcatctccaccttgttctccgcctcagtggaggcatgcagatcttcgtcaagacctcactggcaagactatcacctcgagtggagtctctgacacatcgacacg

SEQ ID NO: 305240 - DNA, 332 bp, Zea mays
gcagcaccaactaccccagcctcggaaggaactttcagaagcggaagaattttaaggcgttgctttccatccttctggcgcggggtcgcttggatccataacaatggtgaaggctgtgtgtgtttgtagcacgatgtgtcaaggcacatcttttcaccaagaggagatggcctaccgctgtcaccggaagtgtctcatggctcaaagctggcctccatgggttccatgtacatgcacttggtgacaccaccaatggatgcatgtcaactggaccacactacaatcctgcgagctaggagcatggggcacagaagatgagaacgccatgtggt

SEQ ID NO: 305241 - DNA, 99 bp, Zea mays
tgttgctgtcattcacgtaggagcacagacagaaactgagctccaggaaaagaaattgagggttgaggattccctgaatgctacaaaggcagcagtcga

SEQ ID NO: 305242 - DNA, 245 bp, Zea mays
tggaaagtaagggagaagatgaggaacaacttagatagaagaacagtgagtgaatccttgctacaagatcccatcgcttctgcgcagtttggggcactgcagacagatgccgtaagtctgtccatgtggatgggaaagagttgtgaagcaaaggctatctgggaagacagcaggaagatttgagtgtactttatcagcccacaaggactgaagttcagatccaaaagttcacttgctaattatct

SEQ ID NO: 305243 - DNA, 124 bp, Zea mays
ggatgactttgcctgtaagtacggggacaagtgccagttcgcacacagcatccacgttgtccgcagcctgagccgccaccccaagtattagacggagctgtgccgcaccttccagtcaacatag

SEQ ID NO: 305244 - DNA, 180 bp, Zea mays
cgagcagacaaaccatattcatcagtcaaaaagggctgtgtatacttgcatatcattgtggttggtaattgtgtgcacctagctttataactgcagtaatctgaaataccatgaaatacctaagccttgatgagatcgataatcatctgtgtgtgtgtgtgtgtgtgtgtgtgtgtgtgt

SEQ ID NO: 305245 - DNA, 242 bp, Zea mays
cacacactcgagaactccatttcgatctcatttgaaatcaacccatcctcgtttcctccgtctagcagcctctcaccctcatggccaagatcaagatcgggatcaatgggtttggcaggatctgaaggctggtggccagggtggccctgcagagcgacgacgtcgagctcgtcgccgtgaagaccccttcatcagcaccgattacatgacctacatgttcaagtatgacactgtgcacggac

SEQ ID NO: 305246 - DNA, 262 bp, Zea mays
acgcatgcgtctgcgagtcactgactgaacatgcagctatctctgagatgtggtatgcacatctcgtcactcttatcggttgctgcgctgaaggctctcacagaatcctggtttacaattacctcgagaacaacagccttgcgcagacattgctaggatccagatacagtaacattcggttcaattggcgggctcgtgtcaaaattgcagttggcattgcctgtggacttgcgtttctccatgaggaaatccgtcctcacat

SEQ ID NO: 305247 - DNA, 359 bp, Zea mays
acgctctctaccgtccgagacgccaagcaccagcgcggcggcgggggcggcggcgaccatggctgtcggaaagaacaagaggatctccaagggaaagaagggtggcaagaaaaagaccgtcgaccctttctctaagaaggattggtatgacatcaaggcaccgtcggtgttcagtgtgcgcaacatcgggaagactctcgtatccaggacacagggtaccaggattgcttctgagggtctgaagcacagagtctttgaggtttgcctagctgatcttcagggcgacgaggatcaagcttacaggaaaatcaggctccgtgctgaagatgtgcagggcaggaatgtgctcacaaactttt

SEQ ID NO: 305248 - DNA, 354 bp, Zea mays
cttgccagggctgaaagagaaccatcctgtcagccaatcagaaaagcggaatttgactttgagcacaaaagaatgtcaaaggaagagataggagagttgatataccgcgagatactggaatatcacccacaactgctgagtagctacattaatggcacagagaggacaatctttctctacccaaggttttagcttttctgtgtttgcacatgtatgttgctttgcacatgcatgtaattgctcatgtatccattcgtttgaacacttgacggaacagttgctggctacttttatgcagtgctgttgatcaatttaagaagcaattttctcatcttgaagagagtggtggtaacg

SEQ ID NO: 305249 - DNA, 352 bp, Zea mays
ggcgagcaggagcacccggagctgagcaaggcgcataagaagcggttgtgccggctgatagactgcaggaagctgtcgccagacgtgcgggcgcaggcgatagcaagccaccggatgccactgcgcaccattgtacagcttctcttcgtcgagcaggagcggaccatcggtgcagccgccggcagccatgctgcttccggtggcgccgcagatcgggcctccgtcggtgttatctcccagctcgcggcgggaaccaaagatgaagaaccagcctcgtctgctggccacaagtcagacgtgcacagaccacgccgggaccatgctcgggtagccgatggagctctgccatggc

SEQ ID NO: 305250 - DNA, 354 bp, Zea mays
acacagaatatttgatgaagaagaataatgatagtttgtactggcaaaatgtacaattatatacgtttggagttatctttaacatgggctggctaatttatggcgattttaaagctggatttgagctaggtccatggtggcagcgcctttttaatggttattcgatcacaacatggatggtagtgttcaatttaggatctactggtcttctagtatcatggttgatgaaatattctgacaatatagtcaaggtgtactcaacttcaatggcaatgcttttaacgatggttttatctatatatcttttcagtgtgaaagctacaattcagctcttcttgggcacgtcttttgtat

SEQ ID NO: 305251 - DNA, 355 bp, Zea mays
  unsure (1)..(355): unsure at all n locations
tgctctttttactctcgctatgcttgttttcatatatgttgccgtttattcagcagtggattttcattattctgcagttaatgtgaatgaaatcgaggctctgtatgagctgttcaagaagattagcagtgctgtggttgatgatggcttgattaacaaggtttgtaggttctaagctcttagtgtgaagtggcagtgaatgacaactttgtttccatgaagtcattgtgtctgatctctccttggagctttgatgtattatctgcaggatgaattccaattagccttgtttaagaccaacagaaaggatagcatgtttgctgaccgggtatttgacttgtttgacacganacac

SEQ ID NO: 305252 - DNA, 99 bp, Zea mays
gcttcaacgactgatggcttaatcaccaccgcgcagtcggagcaccacgtggagtgtgctgctgtatctcggctatccagtgtctctgccattgcacat

SEQ ID NO: 305253 - DNA, 313 bp, Zea mays
agcacggctgcgaaggaggaggagcagcagcagcacagctgcgccgagtgagcggcgatctcactcagtgcttggaaggacggctacgggattgaagaagcacttgaagaggctcaatgcgcccaagcattggatgctcgacaagcttggcggagttttgctcccaaggcatcttcggacctcacaagtccagggagtgccttcgtctgatcctcatcatgaggaacaggctcaagtatgctctgaagtaccgtgaggtcatgtctatcctgatgcagcggcatgtacttgttgatggcaaggtcaggactga

SEQ ID NO: 305254 - DNA, 257 bp, Zea mays
  unsure (1)..(257): unsure at all n locations
cagagattataagattttgacaagattatgggtgcagcacaccaacatggcacacatatacatatgtaagaaacctgcatgttgtgcacatgtaccctagaacttatagtatgataataaagatttttacaagattactattttaggttcattttcagatgtccagaatgatttatcagctctaagtcaggataacctgtagtaactctagtgttaacatttctgctttcatttcagcttcacgggtgagacgancg

SEQ ID NO: 305255 - DNA, 328 bp, Zea mays
gtggggatcagaagcaaaatagaaagaaaaaagagacatccccagaggaatgtgatcaggcattggaaggctgaatttgttactacactgcagcattactggttagggacaaagctactatgggcagatgttagaatctcatcaagattactggtgaaacttgctggtggaaaaagcctttctagaagagagaggcaacagctgacacgcacaacagctgatatcttcaggctggtaccatttgctgtgttcatcgttgttcctttcatggagttcttactgccagtgttcctgaagttatttccaaacatgcttccatcaactttcc

SEQ ID NO: 305256 - DNA, 336 bp, Zea mays
gtggagcactcctttcaatggtcaatcaaacgaaaaattgaaaataaatacatgaacttgagaaactgcgctgtttatgtctctgtatcgttctgtaccattgtaatttgagatgttcgagaggatgcataactgcaacttactgataaatactcgtgttggctctacacaacctcggcaggtgttatgtggattgtggggagctagatctggcagctgaatgctacattaatgcactagagatcggtcacaccagagcgcatcaaggccttgcaaggggtcatttcctacggaacaacagagctggtgcatacgacgaaatgaccaagctgatag

SEQ ID NO: 305257 - DNA, 341 bp, Zea mays
ccaaagggagcagtggtgttcaatgggacaaatgaggatgacttcctatactgcctccctgataacaaagaattatctgtctgccgagagatggctagaagtatggggttcccgaagctcgaagctggattatgtgctatgacgaaggaggatctcgcggacagtcttgcgtataacagcctaaagggcttaatcctaagcaacgcattaagagcacaaaagagtgccgaagatgagagctatgaaattgcgttcaacaaccttcggtcagaagttattaaactgagacacgaagctctggagaaggataaaattttgctcacattggtagacaaggtaaa

SEQ ID NO: 305258 - DNA, 145 bp, Zea mays
acagatatgtatgcttcttgtcttggttaccgtacaagataccaatgactcgagttgtggattgcaagacactcttatattaaactaggaacgaccatttaaatgaaggattctgtgagatagaattcaattacagcgatttgac

SEQ ID NO: 305259 - DNA, 356 bp, Zea mays
gggagaagggcgctgtcgtctaataagggaggaagccagcagcagcaaagcgccctaaggattcgccagctgctggtgtactgcctgttcggcgtcctggcaggactcgtgggcggcctgctaggcatgggcggtggcttcattatggggccactcttcctggagctcggaatccctccacaggtgtctagtgctacagccacgttcacgatgatgttctcgtcgtccatgtcggtcgtggagtactacctgctgcaccgcttcccagtgccttatgctgcttacttcacgggcgtggcgttcgtgggcgccatcacggggcagcactgcgtgaggcagctgatcgcgtggctggg

SEQ ID NO: 305260 - DNA, 326 bp, Zea mays
  unsure (1)..(326): unsure at all n locations
gattgttctcctactaccccgcgtccgctgtgtgctctctcgctctctcggtggaagttggcgacgactgcagcatatgacgnagccgttcgccangtcatcaggtctccgtcagactcttcgacaggtcttcttcggcggcgatcatcgccaggtgtgcacccaatcttcttcactgggtcctccgctcttctagtcacgcatctagatccggagttgccagcattcgcctgctgtgctcggacacagcacaccatcatgcaggctagcgataggttcaacataaactctcagcttgagcatcttcaagccacatatgttggtac

SEQ ID NO: 305261 - DNA, 270 bp, Zea mays
ttggcatttgctaggttagtcggttgctctgagagatagagcgctcctcttcttgcattgtgcagagaagtgtgatctggacgaggcattttcagtatgactgtgtgatctgtagcaaatccatgtgctggtgctcgagtgtagatacgaggcttagccaacacacgctatggctactatgtgaaacgagctgatcgtgtgtcggtaagcagcagatctcgtgcgttcggaaatgagttcgagcctctcaggcctactctgagctactgg

SEQ ID NO: 305262 - DNA, 243 bp, Zea mays
aggatctgttctataggatcgtaccgttgcacccttgattattaaggaggcaaggttgatgaaccatgacctgtgggccagagcgtgattaacggctattaaggaggcaaggttgatgaaccatgacctgtgggccagagcgtgattaacggccaggacctgcttgatgtctgtttccggagctgtagaggatcgttccccccttctggggtgggctcataggttgttgacaggttctctttt

SEQ ID NO: 305263 - DNA, 278 bp, Zea mays
cacggccatccaggagctcttcaagcgcatctctgagcaggttacggctatggaccgtcggaagggtttcctccactggtacacgggtgagggcatggacgagatggagttcaccgaaactgagagtaacatgaatgacctcgtctctgagtatcagcagtaccaggacgctaacgcagatgaggaagaggatttcggagatgaggcataagaagaagtctaaggcggaagcctgcgtcaactcaggctggctagtatccttagcgtatttccaactg

SEQ ID NO: 305264 - DNA, 359 bp, Zea mays
gaactttctagatatgaaagagtagatgatggatgaagtgtcaagtactcagagttgttctatggtcgccacttcagtgttggtcttattggcacaacgctctttgctttactacagttatccggcatagattctgtgttctatttctcatcaactgtattcagaagtgtgtgggtgcctctaaccttgccaacatatgcgatggggatttctaatctatcatgatcaattgtagcaatgcttctaatggacaagctaggtagagaagtgcttctttcagagagtcttcttgtgatggcttatgcaatggggcttcatgctgttggagcagacgtcagtatcatggtctgcatgtgtat

SEQ ID NO: 305265 - DNA, 355 bp, Zea mays
ctatccaagtggaattcccagcagcattgaatgaactggtgcagaagtttcaagtctattacctagggaacgtgcctgtggctagactcgttggggtagatgtgattaatggagcctggagtcagtcgtgtcttccagtagtcgtgagcagtcggacccaagtcacgtcagcgtggcccctgccaccctcaccatctggcaccatcatgcaggagcagtgctggaggagtgtcgagtgcggttcctctccttcctggctgtgggcagagatgtgcacacgttcgcattcatcatggctgacggaccagcctccttctgctgtcacatgtattagtgcgagctcaatgctgccagt

SEQ ID NO: 305266 - DNA, 346 bp, Zea mays
tggcggcaaggggcatcgagtgatgacgatgcacgggcctctatgggttgtctgtatacggagacgtggacaagcgcgcgctcgtaagttatcgggacttagccttctgtcagatgtcttgcttccaaggattgttgttctgtcgagaggccgtgtcgttgttgcttcacaatttctgtgtgtaccagatcatacctcgagggcacgagttatgttttgctccgatttcagctgatgtgcatgtgccgtgtgtcgatgaccttgcagatcaggtcgatgatgtgctcgattgtttcagtttgggtactgtcatgtgcttgggtgtcacgctggtggtatgtctcac

SEQ ID NO: 305267 - DNA, 317 bp, Zea mays
ataaagagggcatccccctgaccagcagaggctcatcgttgccggcaagcagctggaagatggccgcacgctctctgattacgacatccagaaggagtcaaccctgcacctggtcctccgcctgaggggccgcatgcagatcttcgtgaagaccctgaccggcaagaccatcacgctggaggtggagccagtgacaccatcgagaacgtgaaggccaagatccaggatacagagggctcccacctgacagcagaggtcatcttgccggcagcagctgagatggcgcacctcctgatacaaatcagaagatcacctga

SEQ ID NO: 305268 - DNA, 347 bp, Zea mays
atattagtttggaagatggataatcgaggatcggcaaggcgagggctgcattttgagggacaactgaagtacaacattggtcgtgttgatgctgaagatcaattagataggggctgaagtggttaatagagaagggccttgcataacctggccatattggtatctatggctggagctacggaggatttctctcagcaatgtgcctcgcaaggtttccagacacagagaagtacttgggtctgcacgcggagcatccggatgcttacgagtacgggtcaataatgtaccacgccaagaacctgataaggaagctgctcctcatccatgggatgattgacgagaacgtg

SEQ ID NO: 305269 - DNA, 299 bp, Zea mays
tcgctggagaactactcctacaacatgcgcaacacgatcaaggacgagaagattgcgtccaagctgccggccgatgacaagaagaagatcgaggacgccatcgacgcggccatcagctggctggacgccaaccagctcgccgaggcggacgagttcgaggacaagatgaaggagctggagagcctctgcaaccccatcatcgccaagatgtaccagggcgcgggtgaagacatgggcggcgctggcggcatggacgaggacgctcctgccggcagcggcggccctggctccacgatcga

SEQ ID NO: 305270 - DNA, 290 bp, Zea mays
caccattagagcgcgcgcgacaagctcgtggtgaggttttcgagatggaggttatcgattagatcctggacgcggcggtggatggtcggacggcgttctcgtttaagtacttccctccttctgcgacatcacctggggcgtcgggggatccaccgctgaccttaccctcgatatcaccaaccgtatgcagaacatggtgtgtgtggaaaccatgatgcacctgacatgtacaaacatgccagtagagaagattgaccatgccttggcaaccatcagatccaatgggattc

SEQ ID NO: 305271 - DNA, 296 bp, Zea mays
gggtggaatgggactgttgggggccttctccttccgaagatcctaaaaaacgtgactaatcatatgttttcagtatggcatggactgttacaggagactttgacttcgggatgaaagacctctcatgataaaggcttgtgtgatatgaagatacaacccgaaggtaacatggatggacgctgaaactatggctaaaggagctttggcttgatatgatagcaaagatgaaggacgaaaccgacctaagagggaaaatactacttagtccttgacaactcgcttaataattaagagta

SEQ ID NO: 305272 - DNA, 277 bp, Zea mays
gtgactcactcactagtaagcatttgcatttcctgcagagatgagctctctggcattgggtagacttcagtagataggtgagctgacaagagggcttgagctcgatctcatgatctgttacctagtggtgaagcactcacagagacaagttatttcgacaggacggaacacttggcttttaccagagatgtaatgtaattttgctgtagttgcgcaagggcagatccagaatgcattcatccagttgactatccagatagcttaaccacattcatgt

SEQ ID NO: 305273 - DNA, 287 bp, Zea mays
atgaaacaaaacttctagttggactagatgatgaacttagaaagcgtgtcataggtcaagacgatgctgttgtggccatatctagagctgtgaagcgatctcgtgttggcctgaatgatcctgacagacctattgcaacactactattctgtggtccaactggagttggaaaaactgaactcacaaaagcactagcagcgagttatcttggatctgaatcagctatgattaggttagatatgagcgaatatatggagaggcatgctgtgagcaagcttataggctct

SEQ ID NO: 305274 - DNA, 165 bp, Zea mays
  unsure (1)..(165): unsure at all n locations
catttagctnttattcattgaacacatactctgtttctgtattagctcagtcacctgttatgtactttattataacaactggcacacgtaactagtaagtgttcttaatcggttgattgtgattgctggtgtctggctattaggaaactattgttacagactaca

SEQ ID NO: 305275 - DNA, 282 bp, Zea mays
agatgatttcacgcatgagtgagccagtttctcatgtgtgcatgacagagtccacagtattatcaatgcggggttacatggggaagtactctgtgggttgtgcaaactcttcgacgatgatgtctctaaacagcagtatcactgcaacggatgtgtgatatgtagaatcggatggatggaatatttcttccactggtccaaatgtggatgttgctattcaattgcgctgaagaatagtcatgcatgtgttgaaagggcgatgcatcatgactgtccaatctg

SEQ ID NO: 305276 - DNA, 281 bp, Zea mays
ctcggctgggaaaggacttcaatcctaatgagatggcaagaatgatcagctgtgcagctgcatgtgtacgccattctgcacgtcgtcgggcacgtatgagtcaggttgttcgggctttggagggcaatgtgtctttggaggaccttaatgaaagtgttcggccttgccattagcggctctatggggcatacagcagctccgattacgattctgagcagtatcacgatgacatgaagcagttcaagaagatggcattcgacacaactataccagcagcaata

SEQ ID NO: 305277 - DNA, 297 bp, Zea mays
gtcgagctcgtcgccgtgaacgaccccttcatcagcaccgactacatgacctacatgttcaagtacgacactgtgcacggacagtggaagcaccatgaagtcaatgtgaaggactccaaaacccttctctttggtgagaaggaggttgctgtgtttggctgcaggaaccctgaggagatcccgtggggttcggttggtgctgaatatgttgttgagtctactggtgttttcactgaccaagagaatgctgcagctcacttgaagggtggtgtcaagaaggttgtcatctctgctcct

SEQ ID NO: 305278 - DNA, 264 bp, Zea mays
  unsure (1)..(264): unsure at all n locations
canaggctgcaggtgcagcggtagaagaagagcttttacaataaaccctaaagccttacaatgctgattttgatagagatgaaatgaatgtgcatgtcactcagacggaggaagctcgcactgaagcgcttaattctcatagggtatcaaaataatttatgtactcctaagagtgtgatggggggtacttcaatgcaataatgagcttcccacagaattacccaaacagcccgccatcagtcagatctacctctgaaatgtggc

SEQ ID NO: 305279 - DNA, 334 bp, Zea mays
gaagcacgttccaagggccctgtttgtcgacttggagcccactgtgattgacgaggtgaagactggggcttaccgccagcttttccatcctgagcagctcatctcacacaaggaagatgcagcgaacaacttcgcccgtggacattacacagttggaagagaagtaatagatctttaccttgatcggatacgaaaattggcagacaactgcactggtcttcaaggttttctggttttcaatgctgttggtggtggaacaggctccggcctgggttcgctacttttagaacgtctatcagtagattatggtaggcagtcaaagctcggtttcacc

SEQ ID NO: 305280 - DNA, 324 bp, Zea mays
cgttcagactatgctgagaagcaattgaagatcatgcaacaaattgatgaagaccatacacttacacaacttgcaaacgcatggctgggcattgctgttggtggctctaagatccgtgaagcgttgaacaaggacgcaaaagatcctgaaactcttgcgaatctaattgtatgtaatctccacttaggcaaaccatcatcacgatacctcagccagctgaagctatcgcatcctgaccatgtgctagttaagaatgcggcagcatcagaagcgaccttcgagagggccctcgaagccgttgcttgagctcgacacaccccacca

SEQ ID NO: 305281 - DNA, 160 bp, Zea mays
tattcatggaggttaacctggtaagagtaatccttcatggctctattgaggtgtcttaaaaagtttcctgtttcaaacagctacattacttgattagaacaatgttataaaattaaattgctgcctgcttgaatattaagaaaaaagaaaacaaaaagga

SEQ ID NO: 305282 - DNA, 113 bp, Zea mays
cgatgttgccacattagacaacttgcttcagggtggtgaagtagaagaggtgattcttcaggctgaaaaagaactaagtctggcgatgaaaatgttgcagtggacgccctggg

SEQ ID NO: 305283 - DNA, 190 bp, Zea mays
cggcttggggtcacttccttcacacaggacattgggcggaatctctacacccgtgtctcgtcatccacttcgagagcattaactatttaaaaaccaggagagaagcgctgcgctgtccctgctgggctcctgttagctcataaagtccagcttgtcgcctcaatccagaggccattttctcgaggggggg

SEQ ID NO: 305284 - DNA, 327 bp, Zea mays
gcaaaatcgtgttaaactcgtggtcgtattgcgttgggtgctgtaccagggcatcacttgttgttctatgcccccttacctactagattttcttttctaccctgggcctggagatatgtttctgtcatgactgtcattgtggatctcgcgatattgctatattgaagcttttgtgcttgttcagaaaaagatgtccaagcgcgccggatgaggagtgatggcaagccacaggagtggcgagacagaggacatcttcattgctgacctctcagttggcctgtctacgggccaaatcgagacgggagctccttgccggtctgagcgctg

SEQ ID NO: 305285 - DNA, 349 bp, Zea mays
cggcatatctgctcgcatttccttgcaaccgattgccttcagccgtcccaacccacgaccgatggcgctctacgacgataagaagcccgcggcgcataatccggcagattatgaccccgcggcggtgaacacgaccgccgggaacaagcccaaggcggacaagcggatccccggtgtcaagtccgccggcaaggaccgcggcgatggcaatcgtggcgagacgaagtgctagaagatcgtggagacgtgcaagatctacatcttcaaggtgctgaagcaggtgcagccggacatcggcatctcctccaaggacatgtccatcatggactccttcatcaacgacatcttc

SEQ ID NO: 305286 - DNA, 286 bp, Zea mays
ggtcaacatattctgccaggtccatgaccacacgtctgtaccatgccatttaactcttacctacattgctgtgctaagattggtcatttgcttaggtgtgcatacattcattcagcgagtgctgagcaacagccacgtgcacagcagtagcttttactagtcatagctctacgatttaactccatgtgtccaaaggggtgaacatattctatttgtcaccaaaaactagtagtttaccagatgactgaagggagctatagatgagttagttcatgggtacaaaaat

SEQ ID NO: 305287 - DNA, 312 bp, Zea mays
gacctggttagaagggccgtgccgctcgcgctcgcgccagagaacgacccaagaaaagaggagttcgagcggctccgagagaagaaggaagcgatcgacaggctggcacacaagcaagtccggcgcatcctgtggtccggcctagggttcttcatgtgccaggtcgggctcttcttccgcctcacgttctgggagttctcgtgggacgtgatggagccgatcgccttcttcaccaccgcgtccggcctgctcgtcggctacgcctacttcctcatcacctcgagggacccgacgtaccaggacttcatggag

SEQ ID NO: 305288 - DNA, 336 bp, Zea mays
agcagagtcgtcaacaacagcaggaaacataactgaaagagctagcactacctgatcgagcaccatgggcatccccaaggctttgcttcttgccatcctcggctgcggcgtctgcttgtgcagcgctgctgtccttgcagctcgcgagctggggggcgacgacgagctggccatggtggcgaggcacgagcagtggatggtccagcacgggcgcgtctacaaggatgaaaccgacaaggcacaccggttcctagtgttcaaggccaacgtcaagttcatcgagtcgttcaacgctgccgccgccgccggcaaccgcaagttctggctgggtgtgaa

SEQ ID NO: 305289 - DNA, 228 bp, Zea mays
  unsure (1)..(228): unsure at all n locations
gganacctaagtgatggttaccacggcaacgcgaatgctcgattgttctagaaaaccatgagcctgcgctagcccatcgccgtggtgctcaacaatggccacaacgtgacgtatgacgtcagcaagtcgagacacagccgttgccgcgggcgactcatggatcacagcaagttcgtgcgacatatgatccggcgacgtgtgcggcttcgcgccctacgagcggcgtgc

SEQ ID NO: 305290 - DNA, 360 bp, Zea mays
  unsure (1)..(360): unsure at all n locations
gttgaggtcanacgaatccataactgccgcaggttaagccatgaatgcttgacatctatttccgtgaagggcatatattatcaggctgaagttcaaggacaaaagatcacctggctaactccgcatgctcttcagcaagtattaactgatgatgttgatttcaatgtgatgctttcttttctagaattctatgagactcttctaggatttgtgaacttcaaaatctatcattcaataaatgtaaattatcctcctattctggatccacgtctgaagctttagctgttgagctctatgcattgtggcgatacatctctgctggttccagaagaatgattgggaattcacaaactgacgcag

SEQ ID NO: 305291 - DNA, 365 bp, Zea mays
  unsure (1)..(365): unsure at all n locations
tatcgtgtactacgacaaagaaaagaagcgtcacattgaagaattgaagaatagaacaagtgctgtgaagcctggacaatcagtaggcactgcagccattggcggtccattcaagcttttgaatcatgatggaaaacctgttactgaaaaggatttcttgggcaaatggacgctgctttattttggatttacacactgtcctgacatttgtccagatgaactccagaaaatggctgcagcgattgacaanattaagganaaggcaagactggatgtgtgccagtatttattacagttgatcctgaaagagatactgttgagcagttcgggactatgttaaagagtccatccagtctagtaggctc

SEQ ID NO: 305292 - DNA, 357 bp, Zea mays
cggcagccgggagatcaagatgatgcctttcggcgccgggcggcgcatgtgccccggctactcgctcggcgtccaccacgccgagtacttcgtggcgaggatggtgcgggacttggagtggcgcccgccggtggacggcgtggcggtggaaatggacggacgctggacttcaccgtcgtcatgaagcagccgctccgtgcacgcatcatcgccagatattagctccatgcgtggtattctgctggggataagataagctactattctgttacatcagtatcccttcgtggatgtactactaatctgttggcgatgcttgatgcttccaagagctggagtagaatacatgtagctaca

SEQ ID NO: 305293 - DNA, 285 bp, Zea mays
ccaaacatctgtacctgtcagatctgaagctacggcgatcgcgattaccagactgccaaagtgcacttgagatgtgcgcgtaggcagttcacttccgtaatcggattcgcaagctttcggacgcctaccggaacctgtggagatttccaggaaggagattgccactcaactaactctcacacagtcctagaggtgacatgcattggagctccaagatgcgtcgtacgccatctctcccgagagctttggactacagcactgtcgacgtgacgatacggtggctgt

SEQ ID NO: 305294 - DNA, 313 bp, Zea mays
tacggctggatttgatttgattggatccccaattgggtgtccgggtccgcgcgttcgggcgggcgggcggggggattgctttagggtttcagcgggtgcggtcgctgtgtaggcgggtagggttttgccatggcggagaagggctgcctgaagcggctccagaaggagtaccatgcgctctgtaaggaaccgccgccgcaggtcgtggctcgcccactgcacaacgacatattggagtggcgtaagtagcctcagctaaccctatactcgtagatacgatccgtcgccttgtgattggctaatgtctggagtc

SEQ ID NO: 305295 - DNA, 194 bp, Zea mays
caggaaatgcctctggtctcgacgtccaccattccagccgccgccgccgacgcgccgcgcctgttcaagatgaatgtcggcaagctccagcagatggcgggtgctgtgcgcactggaggatagggcaggatgcgcaaggagaagaaggcagtccacaagatcgcagacagcgatgacgagcagcttcagagcac

SEQ ID NO: 305296 - DNA, 358 bp, Zea mays
ggcaactacaacctccccaagcactgcgacaacaacgaggtgctcaaggcgctctgcaacgaggccggctggaccgtcgagcccgacggcaccacctaccgcaagggatgtaaacctctggcaacagagcgtccagatccaattgggaggtctgcatcaccaagcccctgctcttcatatcaaccaagtccgcgagcctcatacaactcaagcgcggcatcctcctcgttcccaagctctgggtcctcctcccacattactcttggcgggagcaacttcatgggaggcgtcgagggcagctcccttatcccgtggctaaagaacctctcgtcgagctcctcgttcgtctcctcctcca

SEQ ID NO: 305297 - DNA, 331 bp, Zea mays
  unsure (1)..(331): unsure at all n locations
gttctcctttagcattgggtgctatattctctggagtgttgcagctgggaccagatatgccattgattacatcagatcacgacagctgggatttctggttcaacagatctgcaagtggtgctcaattgttttgaagagccctgtcttcttattgtaccaggattgggcactggggttaatattcttgaaaatatggactagactggttatgttggatcagatggcacctttggttgatgatagctggaggtcaaagtttgagagagttagagacgatggcttctcccgtantaagggtctgtaggtctccatgaaattatatgccgatctc

SEQ ID NO: 305298 - DNA, 238 bp, Zea mays
atcttaccagggaacaacatgaatgagggaaaactggttgatccggtcagcggtgctgatgtggtcactacttacgaagacaaggatggcgactggatgctcgttggcgacgtctcgtgggagatgtatgtcgagtcatgcaggcgtctgaggatcatgaagagctctgaagccataggtcttggttagtgtctccagataaaattatcttccatagttccattataagatttacatg

SEQ ID NO: 305299 - DNA, 323 bp, Zea mays
cgtgagcacacgcgtctgagtacggtcagcgcagggcaaacccgaaaatagagaactggggagacaccaggactcacccttgccccccacggcccccgaccagcttttcctcctggaggaggtgcgagagcgaaagttcgatggctttgcccgaaccatccagaaggcctggcggcgccacgtggctgtccggaagtacgaggagatgcgggaggaagcttccaacatcctgctgaacaagaaggagcggaggcgcaacagcatcaatcggaacttcgtcggggactacctggggctagaggaacggccgagctgcgtcagtt

SEQ ID NO: 305300 - DNA, 333 bp, Zea mays
gcctcgcggtctcggatatacagcgacggagaggagagcggcgggcggagagaagtggatgaagaagacgaagatggtcacctatttcacgctcaacaccggggctcgcatcccctcggtagggctcggcacctacaaggccggacccggcgtcgtcgacgacgcgatcaacgtcgccgtcaaggccgggtaccggcacatcgactacgcgccgctatacaagaacgagaaggagctctgtgatgacggcgtcgtcaagcgagaagaccttgtcatcgactcacagatatggtgcagctatctcgcacatggcgacgtgccgttggcgtcgac

SEQ ID NO: 305301 - DNA, 303 bp, Zea mays
  unsure (1)..(303): unsure at all n locations
agcgagcgaggtgaccggggcggaagaagagagagaagacgtctctctcctctcggcgttcccgttccccaacctctcgtctgctagctgcctgcctgcctgcctgcaanaaggagtttgtcatggcgtcacagcgcatcctcaaggagctgaaggacctgcagaaagacccccccacatcatgcagtgcaggtcctgctggtgangacantgttcattggcaagcaacaattatggggacagctgacagtacctatgctggtggtgntttcttagtgaacattttcattcacgcagattacc

SEQ ID NO: 305302 - DNA, 274 bp, Zea mays
gtgaattccacaatgctgctagaaaagttataaatggttcaatgtcagatgcacgggtcaaagctgttaccgtgtacttcaagaaagtgaagggtcaaagaatgaccaacaagcaggcatgtgaaatccacttgacagctgaggagtacaaacaaagtgaagtggactggctcactgctcatcctgaagcttgggtcaagctatgcgagtactgggcctcagatgagtacaaagtaattttcagatagaatcgtttgaaccggggagagcaacc

SEQ ID NO: 305303 - DNA, 295 bp, Zea mays
  unsure (1)..(295): unsure at all n locations
agcanatattgatagcagaaggttaataactcatgcaaatgcgaagagcaagagtgaaaagttccctccgccgcatcaggatggcgcacttggatttcccttgggctgttcgaaccacatggaaccttcatttgaacccccagacccttcttccttcagcactgtatttccttacgaaaaaagcaccgtgccaacctggtccggaccattggcggactctgcagctggcaaccagaagcggatacacaagtctggccgctcctcgaaacaaccagcaacgcccgtgctagatgat

SEQ ID NO: 305304 - DNA, 267 bp, Zea mays
gcaaaatccttcgcatcctcaaagctcacggacttgcgcctgaaattccagaggatctgtaccatttgattaagaaggcagtttcaattaggaagcatcttgagaggaacaggaaggacaaggactccaagttcaggttgattcttgttgagagcagaatccaccgacttgctcgctattacaagaagactaagaagctcccaccagtctggaagtacgaatcaacaactgctagcactctggttgcttagagaatgtatcaacttt

SEQ ID NO: 305305 - DNA, 221 bp, Zea mays
gttcaatatcctagtataccttaataaataatttaagatactatgatgagagcacggttcccattactgttgctgggacttgtttacctggcttcagtttctgtctcatttggcattgcttactgggaaaaagagacccccaaacacaacaagtgtctccagagttgcaatagcgagagagactcgtacaggaaccaagcatgccacgctcgttgcaacct

SEQ ID NO: 305306 - DNA, 218 bp, Zea mays
gcgatagggatggcgaagttcaatgtggtgcagaagaaaagaagagctctaatagcagacaagaagagacagcttcacggagaccctttaaccggcaagctcaagatcaaggaccaacccctttccctatccggaaaacgcagacgcaagctcttcaaaaaatggcgccgggaccacaaggacgccttgcagaatggtttggtacacatgtaagatgt

SEQ ID NO: 305307 - DNA, 256 bp, Zea mays
  unsure (1)..(256): unsure at all n locations
cggctcgagctccgaattagttatcttgagaaacattattcccattgctatgttctatggctagcatgaaggttacatgggtggttgtgatcatgtgcatggccgtggtgggtgcaccgatgatggcgcaagcantgacatgcaatgatgtgacggtgaacatggcacagtgcctatcctacctgatgcagggaggaacaccttcaacactttgctgcagcggagtcaagaacattcttggctctgctgtcaccac

SEQ ID NO: 305308 - DNA, 257 bp, Zea mays
ccctgatgcagcagttgcctatggtgctgcagtgcaaggaagcatttcgcatggagagggtggtgaagaaaccaaagatatccttatcttggacacagatcccctcaccctttgaattgaaacttatggtggtgtgatgacgaagttgattcccagaaacactgttatccctaccaagaaatctcaggtgttcaccacctaccaggatcagcagactaccgtctccattcaggtttttgaaggtgagaggagtctca

SEQ ID NO: 305309 - DNA, 253 bp, Zea mays
ggtcatcgttgggatctccatacgccggatctgctaaaatacgcttgatccatatgggcctcctcgaccacttgtgggacgacaccgtcgccggcccaaggcggaaaacggtctcggcaagctccgaaaacaccacaccttcactttccgacctagctccggcaaggaaacggagggcgggagcgtgagatcgtacggagacgaatcgtcggaggaagcgacgagagtgacgcgtagtatcatgatcgtgaaa

SEQ ID NO: 305310 - DNA, 253 bp, Zea mays
ccaacgctccccacaacttcagaatttccgagactaccgcattttggagttcaactccagacccaacaccctccttctccccaagcatgctgatcctgattacctcatcgttatccttaacgggactgccattctttgcttggtgaacaacgacgacagagactcctagagacttcgatctcgtgatgccctgagagtcccctcaggaaccacatactatgtcgtcaaccctgacaacaacgaaaatctcaga

SEQ ID NO: 305311 - DNA, 333 bp, Zea mays
cggctcgatcgccagtatcgccaaaccctagctcccgatctcgatggcgaaccctcgcgtcttcttcgacatgaccgtcggcggcgctccggcgggccggatcgtgatggagctgtacgccaacgatgtgcccaagaccgcggataacttccgcgcgctgtgcacgggcgagaagggcgtgggcaattccggaagccgctccactacaagggctccaccttccaccgcgtcatccccgagttcatgtgccagagcggcgacttcacacgcggcaacggcaccggcggcgtgtccatctactgctagaagttccccgacgagaagttcgtgcgc

SEQ ID NO: 305312 - DNA, 345 bp, Zea mays
  unsure (1)..(345): unsure at all n locations
tgagtatgtcacctgccatgatggagcctatataagcagcttgaagagcctggatacatctaggcatgatgatcttgaaagtatttgacctccatgggagaagcggttgttttgtgtggtgacccctccaaatgactacaagataccaataagatggccaacaagccgagactacgtattggcgagtaatgtcaaccattcacatcttgctgaggtcanaggaggacagaactgggtgcatgagaagggcaaactttggtggtttcctggaggtggcactcacttcgaacatggtgcatcagaatacatagagaggctaggagatatgacgacacatagtactgg

SEQ ID NO: 305313 - DNA, 348 bp, Zea mays
agcagctagggttccgtcctcgatccgatccgccgagtgcacaccacctttccgcactccgatcgaatcgatggccgctgagggcgagaagctgatgatcaccctcaaaagctccgatggcgaggagttcgatatggaagatgcggtggcgatggagtcgcagaccatccgccacatgatcgacgattactgcgtcgacaacggcatagcctcttcctaacgtgaactcgatgatcgtatccacggtactcgagtactgcaacaagcacgtacatggcgccgcagccgcagctgacgtctcgacagccggttccgatgacgtgggtgacgagtccggcaacagcaccg

SEQ ID NO: 305314 - DNA, 346 bp, Zea mays
cacaacttggccaacaaagactgctggaatgaaattaattgctgcaatgtttcaggagatgttaactggcgaagaaattaatttcattccagagtctttgatgtcacaacttggccaacaacaagctggacaggagcggacacaatcaggctctggtgcaggcaatgtcaacttcaacaacttgatgaacatgttcagcgggcttggtgctggtggtggcctaggtgttccaaatgctcctaatgtgccgccagaagaactgtacgccacacaattagctcagctccaagaaatgggtttctttgacacacaagagaacatccgagccttggccgctaccgctgga

SEQ ID NO: 305315 - DNA, 289 bp, Zea mays
ctcggctatagcggaggccttgactgtgagggcaatgaagtgccacgattggtatatcgctctagtaggcaacgacgaggctataaccatcatgagatagctcgtgctacgcatgcactggcccgtgtctctgctgtactaacaaatgctccatatctgttatacttccattgtgatcactacatctacaacagcagggctataatggcagcactgtgatttatgatggagccttgactaggtaagaaggtatgctatgtacagttcgctcaaagatttgatgggattg

SEQ ID NO: 305316 - DNA, 358 bp, Zea mays
aggccggccaggttggtatttatggttacactgcctactcagcgagcaagtttgctcttcgtggattgggtgaggcgttgcagcacgaggtcgtcggggacaacattaatgtctcgttgatattccctcctgacactgaaactccaggattggaagaggagcataagaggaggccagaattgacaaacatcatagcaggattgtctggtggaatgaaggccgacgatgttgccaagaaggctcttgatggtatcaaatctgcaaaattcattgtcccatgcaatttcgagggcacaatgttagctgtagccactgctggtttatccccacagagctctgcattaatggcattcataga

SEQ ID NO: 305317 - DNA, 357 bp, Zea mays
tgctagagacaatcgctgcgtaaacggatccatcgccatggcgtctcgtctcgatgcggacggagactcctcgaccaccttctcctgatggtcatgcctggctcgtctaatctcttgccgtgccttcacggtagaggagacagccatggtacctgagcaagttcgtgaccggaagcttgaacccagtatggaatcatactttgaattgtatcgttgaagatggcttacatgacatgcttatgttggaagtatatgatcatgacactttccgtagagattacatggggcggtgcatcctgaccttgacaatagttttgctggaggaagagtacaaggtaagcttcaacctggagggag

SEQ ID NO: 305318 - DNA, 205 bp, Zea mays
  unsure (1)..(205): unsure at all n locations
cagcttgttatctctggagcaatccgtgtccacgaggatattggtcttgccgnctcggaagcactagctgctcatggtatacaggagaacttcgacaagcgatcaatctgcgcggatctcaccagcatgagaaagatctctgcgcgcatttcagcagccgtgcctgagagagcttatgaactcggtttggagacccgtctgcctc

SEQ ID NO: 305319 - DNA, 132 bp, Zea mays
  unsure (1)..(132): unsure at all n locations
ccgtggaganctacaagatctacatcttcaaggtcctgaagcaggtggacgaccacatcggcgtctcctccaaggacgtgtccatcatgagctccgtcatcaacgacatcttcggaaagctcgccgcggagg

SEQ ID NO: 305320 - DNA, 279 bp, Zea mays
attagcttggctagatgagtcactatgacaatgaccgggtccagtgatgtgctggtctaatcgggatcgtccggcaagaaaagaaatgaaatcaggtgcattgaacctgagcttgtcatatacccaccacatctcaaatataaacatatatcatcatcatctacgatgcaattgtatgacgttatattagtgggtgttgtatggatatattaccagttaggtagtcaaagtgtcgatatatatcgggagtatatccaacaacaccctattacatcatct

SEQ ID NO: 305321 - DNA, 342 bp, Zea mays
  unsure (1)..(342): unsure at all n locations
ggctcggagaacgccgcggcgaccgccaagtccgacgtctacagcttcggcgtcgtgctgttcgagctggtcacgggcaagaaaccgctgggcgacgagtaccctggggcgcagaaggaggcgagcctggtgagctgggccagggcgatggtgaaggcgagcctcgcgccgagcatcatcgaccccaagatccgcgacaccggaccggaacggcagatggaggagcgctcaggatcgcctacctgtgcaccgcggagctgccgtccaagaggctcgccatgcagcagatcgtcggccttctcaaggacatcgagccgaagtgngaagatcgaggggactgaa

SEQ ID NO: 305322 - DNA, 340 bp, Zea mays
ctttccgtcgccactagagaaagaaagagagagtccgctgccatcgaatcacaccatcctcaccgctcggcacctgtaacctggttctggatgttcaggcgtgtgcgcgggtcgcgctcagggaagaagctagaagcgcgaggcctcggggtgaagggaattctttgcgtagttgaatctccgccgcgggatcgcgccaccgcgtgggcaggagagtcttcacccctaaccgaggagaagaacaggtgctcaaggaggagccttacaatgaagaatatgagctcatctaggtggtgtctcccagtcaacttgttggcgccaaggattaatatgtagtcgt

SEQ ID NO: 305323 - DNA, 266 bp, Zea mays
ccgcgacttcgtgctcgtcctcaacaaggcgctcgccgccgacgaccgcgtcgagatctgccagctccccgtcggcagatcgcgacgttaggaagtccgcatcctcattccaatcataatagacgacccgcagcattaattatccaccggctttttttttggctctttcttgcccctgtaatcttactcctcctcttcctacttaggaattgtcgtcgccgtttcgatacgtaaatcacgagatcggtaatacagtaatgctcctc

SEQ ID NO: 305324 - DNA, 343 bp, Zea mays
tcagataccattgacaatgtcaaggccaagatccaggacaaggagggcatcccgccggaccagcagcgtcttatctttgccggcaagcagctggaggatggacgcacccttgcggattacaacattcagaaggagagcaccctccacctggtgctgcgcctcaggggaggaatgcagatcttcgtgaagacattgacaggcaagaccatcaccttggaggttgagagctccgacaccattgataatgtgaaggctcaaatccaggacaaggagggtatccccccggaccagcagcggctgatcttcgccggctagcagctggaggatggtcgcaccttggctg

SEQ ID NO: 305325 - DNA, 340 bp, Zea mays
gggcgcggatgccgtactggaaccgctccgccggggccgaccatgtcttcgtcgcgtcccacgacttcggcgcctgcttccatcccatggaggacgtagccatcgccgacggcataccagagttcctgaagaggtccatcctgctacagacatttggtgtccaaggccatcacgtatgtgccgcccgaggtggctcacgaactaccggagccagagaaggctcagagggacatttttgccttctttcgaggcaagatggaggtgcaccccaagaacatcagtggccgcttctacagcaagaaggtgaggactgaacttctacaacattatggccgcaatc

SEQ ID NO: 305326 - DNA, 346 bp, Zea mays
ccggcattttccttgcacaacgtgctctccctcccatttcctgcgaggtggttggtagcgatggccttcaagctgatcaccaagcccgcggcggcgtcgcccgctgctgcttactggggagatctcgcccaacaactccgcaacgcccatagctaaggtagagagggttgatcgaagtgacatattgacattggatagcatcagacaagttttgattagactagaagacagcatcatatttggccttttggagagagcacagttttgttacaatgctgatacatatgatagcaatgcctttcacatggatggttttggaggatctttggtctgatatatagttaga

SEQ ID NO: 305327 - DNA, 153 bp, Zea mays
cttttacagggctgctgttcatggggcattggctgatatattattacgaggcagtaatcttataacagatgttcagggaatggcatcattgaccggtgtgctgcctccagatgttccatttgctcaggcatttgcagctgtacttactgctgt

SEQ ID NO: 305328 - DNA, 269 bp, Zea mays
ggaaaagatatcacctcaatgatctcccttcccgtatggatttttgagccgatgtctttccttcaaattatttgtgaaccaatgcaatttgaagaattgctacgacaggcaagcaccaacgaagactccgctctccgtcttgcttatttggcttcctttgcgattgccggatataattgtgccattagaacaaaaaaaccattcaatccactacttggagaaacatttgaatttttgtcacctgaaggaaaatataaatattttgcaga

SEQ ID NO: 305329 - DNA, 243 bp, Zea mays
catgtgtaggcttcgtgattaaaatgctcctaatcaagattgtttgcacacatgtatttataaaacagtgccagagaaaaatacagatgaacatgtatatacatatgggaatttgaattaaatactgtatcatactttcaaaggaaaacctaaaaatacgactagaaggtaacaacgtccaatttccagcctcaacaagaggaagaacgagcaacgtctggactggagaatgaccatcaggag

SEQ ID NO: 305330 - DNA, 264 bp, Zea mays
cgcacgcgtcggcacgggcgcccccgtctacctggccgccgtcctcgagtacctggccgccgaggtgctggagctggccggcaacgctgccaaggacaacaagaagacccgcatcatcccgcgccacgtgctccttgccatccgcaacgacgaggagctcggcaagctgctgtccggcgtcaccatcgcccacggcggcgtcctccccaacatcaacccggtgctcctgcccaagaagaccgctgagaaggcggcggccaagga

SEQ ID NO: 305331 - DNA, 168 bp, Zea mays
ggaagttgtcaaaagaggggtggctcaccctgataaaattgctgtcggtggtcattcatatggtgcatgcatgacagctaatctgctggctcaggctcctcatctgttctgctgtagaatcgctcgctctggagcttacaaaaggactctaacttcattcggcattca

SEQ ID NO: 305332 - DNA, 262 bp, Zea mays
tgatgatattaggaaaaagcactatagaggagttaggcagagaccatggggcaaatgggcagcagaaataagagaccctaagaaagcagctagagtgtggcttggcacctttgacacggcagaggctgcagctatggcttatgatgctgctgcattgaggttcaaaggaaacaaagccaaactcaattttcctgaacgtgttgttatgccaatacaaccacaaacaaataacaataattccacttcttcatcagctcctact

SEQ ID NO: 305333 - DNA, 140 bp, Zea mays
ctcaggcagatcctgatctctaagagatccctagacctcaccacgaccccagctctgtctctgcccttactccactaagagagtagctctgcagaagtcttggtaaactatgtttgtacctctttcttcactctgtgtgg

SEQ ID NO: 305334 - DNA, 277 bp, Zea mays
gtggctccatcctggcctcactgtccaccttccagcagatctggtcctcaagcacgagtctgtcgagtcaggcccctccattctccaccgctaatgcttctcgatggactgagcaggtgccaggcatctgctgcatcagctgattctgacctatcgccctgccctggcaaagtacacacctcatgctagctcatgaaactggaataagcctttgaacagcaatttgtccttgacgcttttatctgatatcagcactggctcgtagaacttgttgctg

SEQ ID NO: 305335 - DNA, 285 bp, Zea mays
gcctaccccacggtgaacgaggactacctcaaggcggtcgacaaggccaagcgcaagctccgcggcctcatcgccgagaagaattgcgccccgctcatgctccgcctcgcatggcactccgcgggcaccttcgatgtggcaacaaaaaccgggggccctcgggtaccataagaccccgccgaacagcgcacggagcatcgccggactggaattgccatcagtgctagagcctctcaggattcccatctatctacgtgattctacacttctgatcgtgcatcgagt

SEQ ID NO: 305336 - DNA, 320 bp, Zea mays
  unsure (1)..(320): unsure at all n locations
gtcgaatgcagaacacaagctgtcggatgagcttcgcgccacgtgcaaggagcgcggccttgttatctcttggtgcccacagtccgaagtttctntcnataaagctacccgctgtttcttcacgcactgtggatggcantcgacactagatgcgattgttaatggcgtgcaatcagtggcgatgccacaggggtgccggggtgggcctggcaccccacaacggtaccacactgggctgacccggcgaccatatcgaaatacatggagagcgtgtggggcttgggtgtcaggtgcgcaagatgagaaaagttggtgacgag

SEQ ID NO: 305337 - DNA, 242 bp, Zea mays
gtttcttcacattggcattgactcttcgggcaacaggttcttcagctatggaccttcgaaatatgcaaacttacagaactgggaactgatggcgccatggacaggagcaaatgtgcaagttccaaccaagttcatcgttggggacggtgacctggcgtaccatcaccctggagtgaagaggtatatccacaagggcgggttcaagagggacgtgcccatgcttgatgaggtggtagtcatca

SEQ ID NO: 305338 - DNA, 257 bp, Zea mays
gtgactggctcaccaagatcttcaagtctgatggcctgaagggtctctaccagggcttcagtgtctctgtgcagggcatcatcatctacagagctgcctacttcggagtctatgacactgccaaggggatgctgccagaccccaagaatgtgcacattattgtgagctggatgattgcccagagtgtgacagccgtggcgggcctagtgtcctatccatgttgccctgtccgtcgtaggatgatgatgcagtctggc

SEQ ID NO: 305339 - DNA, 266 bp, Zea mays
tccatgttcgcctacaagaaggagcgtgacggttacgccaagtggatggccggtaacttggcctccggtggtgctgccggtgccacttccctcctcttcgtctactccctcgactacgcccgtacccgtcttgccaacgacgccaagtccgccacgaagggtggtgagcgccagttcaacggtctcgtagacgtctacaagaagaccctcgcttccgacggtatcggtggtctctaccgtggtttcatgctccgtgctgtacggtg

SEQ ID NO: 305340 - DNA, 349 bp, Zea mays
gtggtgatgttgatcgagttgttggagtggtggaaggaactggcttggttgtcgatgctggagagggactttagcacaactaatttgtgctttcaaaagcttggaagtattgcttgcgtccagttctgctcctcaacaaggttgataagccttcagtttctggagaaacctgcgatctagtagagagctttgtttgtgatcgttgtacgaatcttggtgctacagaagaacagttagatgtcccagttctttatgcatccgctaaagagggttcggcttccttaactttcaccaagagcccccctgataatgcatagaatatgtcttcactgctcgattccattgtacg

SEQ ID NO: 305341 - DNA, 339 bp, Zea mays
ggcaggttcatatggcagtggtcctcaatgaatatggtggaactattggtattgtaacactagaagacgtagtggaagaaatagttggtgaaatcttcgatgagaatgattccaaggaggaaatccagaagaaaacaggctatatagtaaggcggggggatggaacatttgatgttgatgcaaacacatcgatagatcacctatctgaagagcttggtatcaaaataccagagggacatcagtatgagacggtgtctggttttgtctgtgcatcttttggctatattccagaagaaggtgggagaatgcttgtgattcttgaaaagaatttcagagaag

SEQ ID NO: 305342 - DNA, 209 bp, Zea mays
  unsure (1)..(209): unsure at all n locations
atgaacttgatatcagttaatctaatgttgggcccaccatctttgcttgtttgttgttgtaggattattattttccttgcatctttgttgtgcttttggtagaaccgaattaataaagggtccaactatcttgtaaggtttaacttataagatgatgttgtaacagtgtntgttaatgaaaactatatatcaagaaaattcttatgttt

SEQ ID NO: 305343 - DNA, 261 bp, Zea mays
aacacttttgcaccgccatccaaaccgcttttggggggtactatctcaggaaaccaactcctgctgatatcgctaggcttctccaagttggagaggcacgcggcttccccggtatgctaggtagtgtcgattgcatgcattgggagtggcgtaactgcccaactgcatggaagggatgtttaccggtcacggtaaacaccctacaatgatcctcgaagctgttgcctcatatgacctgtggatttggcatgcatacttcgg

SEQ ID NO: 305344 - DNA, 340 bp, Zea mays
ccagttttaacctctagtatccatgaccaaactatccctgacacatgtggacgggggcctcttctggctgtcaggagcaaagcctgaagacttggagctgcaggactggaagaacagtggagccccgtgggtctcaccctttaaggatgctgaggcctagagatgggaagtgacttgctcaaggtcacacaattggatagtgacatagctagagcgcagagttcctgattccaagtcacctgtgctttctgggaccaaagaatgggcacctgctggagtccgggcagagctttctcagttgtattgctactccagacctcaccatagttggggtccagta

SEQ ID NO: 305345 - DNA, 336 bp, Zea mays
gatctgcttcagatgatgggtcatgccagtagaccacttcaagataactcagggagatgtgttatattgtgtcatgcacctcgcaaagagtactacaagaagtttctttttgaggccttccctgtcgaaagcaatctgcaccagttcttgcatgatcacatgaatgctgaggtggtggttggtgttgtagagaataagcaagatgctgtggattatcttacttggacgttcatgtatcggcggctagctaagaatcctaacttctacaatcttcagggtgtaagtcacaggcatctgtcagaccatctttctgagctagtgagactattctgaatg

SEQ ID NO: 305346 - DNA, 334 bp, Zea mays
cttccagaacgtgcaaatgagtgtcaacttcctcgtgtcgctcttgaaaaagaattggcagaatgtatgttcctcaatgttcctcacatctgtataaaattaatgcttatgttctaaaatatgactatccactgggctaactgtcatcttgtgtgtttgcaggtgagatgcttgtacctgaagagcactatgggaaaggtgtaccggctgttctaaattttccaattaggcttagaatttccaggagactcgagtgcttggacacttgccattttccctaccatccattttttttgagcaactatggattaactattaaaaacttggtcttgta

SEQ ID NO: 305347 - DNA, 271 bp, Zea mays
ctagcacaaatcaacttatccaaagattcttgtctggctacttttgctattaccacaggatgacttgacaaccactcttgtgcaacaatgctaccaatctcagcacactatccagatgattattgagaccgttggagacaatgaagctgtgctctttgaggccttgagcgtgaacgatgagatccagaaagtattatcgaagtacgaggagatgaagcagcccagggcctccgagcatgcagaacatgtaccagttgtcataccgattgct

SEQ ID NO: 305348 - DNA, 267 bp, Zea mays
aacactttgagttgcatatattcacaacaacaacatggctgccactgctgctgcaggcatagcgcccatgttttacttcttctattaacagtgtcaaatgtcttcgttcctccaagaactgctccataatagaccctcttataacaacagtgccctcaaaccgtggcatgtttgggtcacacttggtggaacctttgtccattaattcgcacaagttgtggggacctataatttctgctgctgttgcacaagaagaggctgttgttg

SEQ ID NO: 305349 - DNA, 282 bp, Zea mays
aagagatctataatgggatctggggacggcaatttcctcaaggtgcttctcaaaaacttcgatgtgcttgctgggcctgtcattagtcttgtttatcctctatatgcttcaattagggctattgagatcaagtctcctattgatgatcagcagtggctcacttactgggttctctactccttgatcaccctctttgaacttacttttgctaaagtccttgagtggattccaatatggccctatgcaaagctgattgtcatctgctggttggtccttccttac

SEQ ID NO: 305350 - DNA, 282 bp, Zea mays
ccagactgagaggaagagagagggagattctttgtttgctaccttctctcggaaaaatggttacgttcaggtttcaccagtaccaggtggttgggagggctcttcccacggaagcagatcagcacccgaagatctaccgaatgaagctctgggccaccaacgaggttcgcgccaagtccaagttctggtattttctgaggaaactgaaaaaggtgaagaagagcaatggccaagtgcttgccatcaacgagatttttgagaagaacccaaccaaaattaaga

SEQ ID NO: 305351 - DNA, 273 bp, Zea mays
agagaatccgaggcgaagagaagagaaaaattaagatggaggggaaggagcaggatgtgtcgctgggagcgaacaagttcccggagagacagccgattgggacggcggcgcagagccaagacgacggcaaggactaccaggagccggcgccggcgccactggttgacccgacggagtttacgtcatggtccttttacagagcagggatagcagagtttgtggccacttttctgtttctatacatcactgtcttaaccgtcatgggagtcgccg

SEQ ID NO: 305352 - DNA, 183 bp, Zea mays
tagttctgcagttaacaatcgctcctcagatatcaacaaaaagattcgcacagcacttgggaaaggtaagaaaattgtttttcttaccagagttgatccttttccagtagctttactggctgttctttttggcgttaagagtgaaattctgagttctaacgccactaaccctatgctgacgcg

SEQ ID NO: 305353 - DNA, 273 bp, Zea mays
aaacaattcaattcaatctgcctcgatcatggagaggaaaacatttgggtttttgttcttgctcctccttgtcttagcttctgatgtgacggtgaagagagcagaggcgaaagattgcttgacaaggaggcacgggttccagggtagatgcttattcgacaggcaatgtgcacatgtgtgcaggagcgatggtttcatcggtggtcagtgccgaggccctcttcgcaaatgcttttgcagcaggccatgttgatcgagattactactgccaaa

SEQ ID NO: 305354 - DNA, 270 bp, Zea mays
ctcgagccgaatcggctcgagggatcacacttatacaaaattctgcaattagtaacttgtagagagttgctgcttggaagaaaggttgtttaatggtcaagattgtgatgtctgggaatgcagcagtcaaaaggagtgattgggcctcattggtacaagtgtttttaacaaacagcaacagtacagagcattttgatgcatgtaagtggacaaaatcagaaccacattcctgggaattaatcttcccaatagaggtatgtggtcctaata

SEQ ID NO: 305355 - DNA, 241 bp, Zea mays
agtgatttcagtgagtgatcggtagtcacttgatctcatcataatcgtcagcgtcaattggagtagatggcgatcagaaacatcgccgtcggaaggcctgaagaggtgactcaccccgacacgttgaaggcggctttggctgagttcatctcaaccttcatcttcgtgttcgccggctcaggctccggcatcgcctacaacaagctcaccgacaacggcgctgccaccccgaccggcctca

SEQ ID NO: 305356 - DNA, 265 bp, Zea mays
ctacagacttcaatctggtcattccctgagactccattcacgaaccacatactatgtggtcaaccctgacaacaacgaaaatctcacattaataacactcgccatacccgttaacaagcctggtagatttgatcgattcttcctatctagcactgaagctcaacaatcctacttgcaaggattcagcaggaacattttagaggcctcctacgataccagattcgaggatatacacaaggttctgtttagtagagaggaagggcag

SEQ ID NO: 305357 - DNA, 268 bp, Zea mays
gttgtcctctacaggaatggaatttactctccacattggaacttgaacgcgaacagtgtgatctatgtgactcgagggaaaggaagagttagagtggtgaactgccaagggaatgcagtgttcgacggtgagctaaggaggggacaattgctagtggtgccgcagaactttgtggtggctgagcaagggggagaacaacgattggaatacgtagtgttcaaggcacaccacaacgccgtgagcagctacattagggatgtgtttaggg

SEQ ID NO: 305358 - DNA, 267 bp, Zea mays
gttaccatttgctcccagcactgagcttaaccgagcttcacaaagatgaatcgggaaaaattgatgaagatggccggttcggttagaactgggggaaaaggcaccgtgagaagaaagaagaaggctgtccacaagacaacaaccacagatgacaaaaggcttcagagcaccctgaagagaataggggtgaatgccatcccggctattgaggaggtcaatatctttaaggatgacgtgattatccagtttctaaatcccaaagttcaa

SEQ ID NO: 305359 - DNA, 160 bp, Zea mays
accgactccacgtggccttgagggtgttgagctcccgcagcctcgcgatctcggcgcgcctcttggcctgctgtgatgtcgacgaaaacacctttgccatgccatgccatgccacccttgttgttcttgcgacgacggagtcatgtgattgttacagaag

SEQ ID NO: 305360 - DNA, 361 bp, Zea mays
agacgccattacgatcaagcaaaccggctcgggcgacgtctcgtacatcattggtggaggagcattccatgccgaggacaagattgttcagcataacggtgcaggtactgtctcgatcaagaacttctacgccaatgacttcggaaagttgtatcgtgcctgtggcaactgctccactagctatgctcgtcacgttattgttgacaacgtcgcattggcgagtggatccgcgggtgttggtatcaacgagaatttcggcgacaccgccaccctcagcaacatttgcaccaacggcaagcccaccactgccaacctctgctgccgttacacaggaacaactcctggtaacgagcccacgaag

SEQ ID NO: 305361 - DNA, 343 bp, Zea mays
  unsure (1)..(343): unsure at all n locations
atcaaatgcgtcatcatagacttgtatgttgccggtggcgagacgtcggcgacggccatgcagtgggcaatgacggagctgatacgtggacctcgggcgatgcggaaagcgcaggccgaggtccggtcggcgctcgcagggcagagcacggtgacggaggccggcctcaccgacctacactacctgcggctagtcatcaaggaggatgtgccctggcgcaaccttgggcttagcgcatgtgggagctcgcgctcgctgctctgctgttccatttcgactgggagatgccacccacgctggttgctgangagatggacgtgacgaagcggctgggatcaccatg

SEQ ID NO: 305362 - DNA, 343 bp, Zea mays
  unsure (1)..(343): unsure at all n locations
cagaagatccagaagctgatggatgtgggtctgatcgcaattcggtgataacttgcttttcccgtctccacttcgccgatgaggaaaggcgagctgtgacggtggcaatcagtactgggcagaggggggttaagaaaggcttatctgtatatttatacatgcctacaaggaagacagactcatccagtgccagctcgggccctcccagcacacgcatagttctnttcacgtgtgcccccaattccgaatatccttcgctgcacattcccagcgtccccgtcattgtctcagctgcttccctatagttattgtgtatgtgacgcagtaggtgcatacggggagg

SEQ ID NO: 305363 - DNA, 347 bp, Zea mays
  unsure (1)..(347): unsure at all n locations
ccaattctcacactgaagctcgcactctcgcctccagcatgaaagtctctgccgctcttctgtgcctgctgctcatagtgagggccttcattccccaaaggctcgctcagccagatgcaattaatgccccagtcacctgctgttataacttcaccaatagggagatctcagtgcataggctcgcgagctataggagaatcaccagcatcaagtgtcccaaagaagctgtgatcttcaagaccattgtggccaaggtggtctgtgctgaccccaagcagaagtgggttcaggattccatggaccacctggacaagcanacccaaactccgaagacttgtacactcact

SEQ ID NO: 305364 - DNA, 334 bp, Zea mays
gtgctttataggagcaatcaatacgttatcaaggagttgagtattccccgaacagacaaccaggacctgtcattttctacaaaatattcacaggatttctacggtcaatgtgccgcaaacttttgggagcaataccggtcgtactggaagaatccaccctacaatgctatgcgctatctgatgacatgtctctttggccttgtatttgggacagtattttggcgaaaagggaagaacatagattcacaacaagatttatataatctgcttggagccacttacgctgctacattctatcttggggcttcaaataggatcacggttcagcctgttg

SEQ ID NO: 305365 - DNA, 334 bp, Zea mays
tacaagtagttagaggagctttacaagaagaaacaatccgatgttcttcgattcttatccagagtaagatgctgggaatacagacaattaccagctattgtccgagttcaacacccaacccgtgtcgataaagcacgaagacttggatacaaagccaaacaaggattcgttgtctatagagttcgagtacgccgaggaggacgaaagagacccgttcccaagggtattatctatggtaaacccaaatctcaaggtattacccaacttaaattccatagaagcattcgttctgttgccgaagaaagaattggtcgaaaagctggtaatctcagag

SEQ ID NO: 305366 - DNA, 319 bp, Zea mays
tcgagcgagatggcgagatcgtcgattcgcgtaatacgtctcgtcgccggccacgacatggtgcaacagcttcaacgacgtgcgcgccgtggagaacaacctggccaccgccgccgcagtggccgccgccgccgccaagaaacagcagcagcagcaggcatcctcgcacgtcaacctcatcaggacctgcccctcctgcggccaccgcgcacagtatgaacaggtgcaggcggcggcgacgatccaggacctgccggggctgccggccggcgtgaagttcgatccgacggaccaggagctgctggagcacctggagggg

SEQ ID NO: 305367 - DNA, 344 bp, Zea mays
atccactccatcatcgacatggatgccgatgtgatcacgatcgagaactcccgatctgacgagaagctcctgtccgtcttccgtgagggtgtgaagtacggagctggcattggccctggtgtctacgacatccactctcctaggattacctccaccgaggagatcgcagaccgcgtcgagaagatgctcgccgtgctggacaccaacatcctctgggtgaaccctgactgtggtctcaagacacgcaagtacacggaggtcaagcccgccctgaccaacatggtctcggccatcaagctcatccgcacccagcttgccaacgcgatatgagtcgtatgatagct

SEQ ID NO: 305368 - DNA, 304 bp, Zea mays
atcgcggagaaggaaaccgataagattctaggtgtgcacataatggcactcaatgctggtgaaatcatccatgaagctgtcatcgccttgcagtatggagcatccagtgaggatgttgctcgaacatgccacgcacaccctaccgtgagcgaggccctcaaggaagcttgcttgcaaacctcataaagcatccactatgattctcatttctattccttgcatcaacttttgtcacaagtcaagttatggatttgggctgtggacagaggctcagttgtctttgtttgtcgcatatgtgatcttg

SEQ ID NO: 305369 - DNA, 323 bp, Zea mays
  unsure (1)..(323): unsure at all n locations
tgcagttaatcatctatgtagtagagagaagcattatgccactacttaacttctgcaggtaatgaacaccgcaaaagccccaattactatagaaatatacaaagatgcttctgctgacgttgtggatagatttatcaacttgtgcaagagtaatcatttcaaaggaatgccatttcggcatatcataaaaaattttgtaattcaaggaggtgattttgatttcgatggagcttcccaagaatggataaccacagctaaagctagtggaaaaaatgatctcagtccanaacatgaggcatttatgattgggactgcaaagaatc

SEQ ID NO: 305370 - DNA, 302 bp, Zea mays
  unsure (1)..(302): unsure at all n locations
cttacagatgctcttgctcacatctagaatattaatgagatgcacagctacttacgaatngttatgatggaggagatgctcggtcagcgctcatcaccatagctcaagctttgaaccatgcaaagaatggcgttgacaatgtctctggaactaaaagtccggacacactttgcaagaccaaattgggaaaaagtcccatcctaaattgcctcgaagcatccaattgccnagataggtgtattctactgtggagctcccagttcttgcactggactannacaactgtgccatgaattcaatgg

SEQ ID NO: 305371 - DNA, 337 bp, Zea mays
acacgaacagcgtcgagtacatgccgctgttcctgtcactggcttccctggtcaacggcatctgctggaccgtctacgcgctcatccgcttcgacctctacatcaccatccccaacgggctgcgcgtgctgtcagcgctggcgcagtgcatcctgtacgccatctgctacacggtcacccagatgatcctggatgcacgcaagcgcaaggcgagccaggacgccatcacggacgtggtcgtcgacggcagcagggcctccaacgacaacaacaacggcggcacggcacctactgatgatgatgagtacgacgtaatattgtgcatggctgacacgcc

SEQ ID NO: 305372 - DNA, 333 bp, Zea mays
ggcaaggatatcaatgctcttgagcagcacatcaagaacctccccagccctaccacctcatcatcgtgcaggacggcgacccgaccaagaccatcaatgtgcccgagggcttcgactacgagctctacaaccgcaacgacatcaaccgcatcctcgggctctaagcctcctgcatctacttcaaggactccgcctgccgctgcttcggctacatggtctccaagaagaagtacatctggcacagcaaggctagcaaccccttcggtaacttgaagaaggaatacaagggcatcttctggcaggaggacatcatccccttcttccagaacgtga

SEQ ID NO: 305373 - DNA, 338 bp, Zea mays
tgattatgtagcttgcagagggcatccaagttggctgctgggagggtacataaaccactatggaagcatgctgatccacgttttgtctggaacatcaatctgtctacatgaacttattgaagctaagctggatgagctcatcatcccgctgatacaaggaagttttcagtcagcacaatttgacttgaaggatagaccagtgaggataacattgttctcaaggagatgcaacaggcgtttaggatcaagaatgtggagaaggggttcgaatcttgaaggcgccacagcagattctgtcgtgacagaacagttggttgagtatgaagatctcacgtcct

SEQ ID NO: 305374 - DNA, 271 bp, Zea mays
gccgttaacctttgctgagatcaccacacaagacacgccatagccatctaagacagttcttgcatttggattgcctggaaatccagtgagctgtatcgactgcttgaatctgctggatgttcctgcgatccgtctactcactggctggtcaaatcgtcatctgcaaagagtgcatgtgcgcatatcacatgcttgaagagcatacccacatcgaacagaggttcaccgtgcagtacttagatcggtgctagatgacggatcaggtcgacct

SEQ ID NO: 305375 - DNA, 273 bp, Zea mays
gtcttctacctcaagatgaagggtgactaccacaggtaccttgctgagttcacttctggggcagagaggacggatgctgttgagatcaccatggatgcctacaaagctgctcaggacattgctctcgtagatttggctgtaaggcatcccatcagggttgtggtcgctcttaggttctcagtgctctacgacgtgattctggacttacctgatatcgtcttcatgcttgcaatacaggtcttctatgatgcgatccctgtggtaggcagtctg

SEQ ID NO: 305376 - DNA, 253 bp, Zea mays
gcaaggccgacgaggggttcagcgccacggtccgcaacggcgccgtgtgcctcgcgcccagcaacccgcgcgacgagtaccagcactggatcaaggacatgcgcttcagcagcccaggtcaaggacgacgtatggaagcctgcgttcgacctcgtcaacaaagccactgggctcgtcatcaaggagtccctgtgtggatgagtatagttccagtcgtttgtgacgaagtcagttatgtatgagtgagaagggt

SEQ ID NO: 305377 - DNA, 109 bp, Zea mays
cgctgatatggcagtttgagcttccagcatttatggtcctgatcattgcgatcctcaatggcggtaccattatgactatatcgacggatagtgtaagaccatgtacacc

SEQ ID NO: 305378 - DNA, 304 bp, Zea mays
gctggcttctcctccacctcatatcaagtcctcctcgggttagggttccttagggatttgtggaggggcgatggcggcggctgatgtggagtaccggtgcttcgtcggcagacttgcctgggccagcagcaacgagtagctggagaatgccatcgacacctacgtcgaggtcctcgattccaaggtcatcaccgaccggtagactgggatgtcacgcggcgtcggcaacggtaccttcacatccgagaactgcatgctcgacgctatcgaccacatgaaccgcaaggagatccacggacgtaac

SEQ ID NO: 305379 - DNA, 313 bp, Zea mays
ttctgcggttctgccgtctacgcctccaatttggcctctctcccttgcaagccatgggtaaggagaagtcccacatcaacattgtggtcattggccacgtcgactctggcaagtcgaccaccaccggccacctgatctacaagcttggaggcattgacaagcgtgtaatagagaggtttgagaaggaggctgctgagatgaacaagcggtccttcaagtatgcttgggtgctcgacaagctcaaggctgagcgtgagaggggtatcaccattgatattgctctgtggaagtttgagaccaccaagtattactg

SEQ ID NO: 305380 - DNA, 324 bp, Zea mays
tcgaggactagatataaagaatgtggattgggtggtgcaggttgattgcccagaaaacattgataattacatccacagagttggccgtacagctcgttacaataagaaaggaaaatcacttatattcctttgtcctgaagaagaagcaatgcttgaaaaattgaaggcaaccgaaagtaaaatacctatacatattcgaaagccaaaggcagaacaactggagcagatatcgcagagtatagcctcagtgctggttaaatttcccaatcttcaggaattgggtacaagggcttttgttacctatcttaaggcagtatacctcca

SEQ ID NO: 305381 - DNA, 273 bp, Zea mays
cactcctaccccacacagaagcggcggcggcggagaaacgcaggcgaaggcgagggtgtgagggaaggagcaccagccatggtgcacgtcaacttctaccgcaactatggtaagacgttcaagaaaccaaggcactcatatgagaaggagcgtcttgatgctgaactgaagctggtcggtgagtatgggctgaggtgcaagcaacgactttggagggtccagtatgcactgagcaggatccgtaatgctgcaaggcacttgctcacccttgac

SEQ ID NO: 305382 - DNA, 297 bp, Zea mays
tttttttttttttttaaaaaaagtgagctataccatatatatgatctatgctctcaacaaagaattagatcatccaggtttatccccaacggttcaactggaattttttttgtatagctaatggctgagcgaactgagagagaaaaaatacaggagaaagaatagcattacagcatcaaccaaggtatttcagcgacacattcccgacgaactacatggccgtggttttgaataataataaatttgtaacacgtagcctgcattagcagcgcgttttaaataaaggaacttcctgat

SEQ ID NO: 305383 - DNA, 349 bp, Zea mays
caggcattgctgaaaatgctggaaggcacgatagtcaacgttcctgagataggagcaaggaagcatcctcgtggtgataatatacagatagataccaaagatattctttttatatgtggtggtgctttcgtggatttggaaaaaactatatcagagagacggcaggattcatctattggtttcggcgccccagttcgtgcaaacatgagggctggtggcatttcaagtgctcaatgacatcatccttgcttggaatctgttgagagtggtgatctaatagcttatggacttatccttgtgagcctggccgctctaaatgaggaccagcttgttaggttctgattgagcc

SEQ ID NO: 305384 - DNA, 180 bp, Zea mays
  unsure (1)..(180): unsure at all n locations
ctatgagctggctggcatgcgccacagcatccgtgagcgcactgctgctcctgctgctgctggcaacaccactgctgctattggaccggggtttgccattggttccgntgctcttgtgctcctggcgctttttggtgcctttgttcgccgcgctggcgtgccggtcgtcgcacgtctctc

SEQ ID NO: 305385 - DNA, 106 bp, Zea mays
  unsure (1)..(106): unsure at all n locations
agantatgtgcctggattgcaggttgctggacatcgatgttcttgctgctgaagaagcgtgcaaatttgcaaaagatcatgctgtcgccacatggaccattgtctt

SEQ ID NO: 305386 - DNA, 207 bp, Zea mays
ctctcgttccatttccccatctcccagatccaattcgcgagttctccctcctctgcggccatggcgctctctgtggagaagacctcgtctggacgggagtacaaggtcaaggatctctcgcaggcggacttcggccgcctcgagattgagctggccgaggtcgaaatgcccggcctcatggcgtgccgcgccgagttcggcccgtcc

SEQ ID NO: 305387 - DNA, 207 bp, Zea mays
agatgatgtaaatgaccgaggccctataatgttaaatgaagcactggaactgttgagccaacggtgggacaggataaatggtgctcaggctcttaggctgttaccaagagatactaaactccaggatcttgtatcatttcttgagccactattgcgtaactctagtgaacatcggcgcaattatttggttatcaaaaacttgatttt

SEQ ID NO: 305388 - DNA, 207 bp, Zea mays
gagaaaggttccattactgatcagataaaagagacaaaacttgaaactagaattgcgcagttcatatccctgatctgcaatattagcatgatgaagcaaagaatggtggaaataggttataatgctgaaaagcttccccttggaaagctaaggaaagctacaatacttaagggttatcatgttttgaaaaggatatccgatgttatt

SEQ ID NO: 305389 - DNA, 330 bp, Zea mays
cactgatgttaaaactccaatcaggcggacagtgttcacttttgataaccaaacgaaagtctggccatgtggggaggtctgctgcagatggctaggacgctcactctgtcacagccgtgctgtggctgcttctcctgcactgtgtcctcatctacagtggaataatttgtattttcagtgttaatttcatgaatggatagacttgcttgcttaatgtttaaaataatgtacagattttaatgagtggaacagatctatatacaggctgtagatgcacccttattcacttggtttaagagtagtgttcatttatttgaaaggagctgtaat

SEQ ID NO: 305390 - DNA, 253 bp, Zea mays
aagacatccaaatcttgttaccttggtaggttaccatctaggcgagtctgaaatgtgtctcatatataactacttgtctggaggaaaccttgagaggtttatacaggagagatcgaagagaccggtagactggaaaatgctgcacaagattgcattggacgttgccaaagcacttgcttatctgcatgatacctgtgttcctcgcatccttcagcgggacgtgaaccgagcaatatttcgttggacactacta

SEQ ID NO: 305391 - DNA, 266 bp, Zea mays
accttcttgtgagaaaactcgtgctccattcacgtgggaagcttttcaagggattggcagtttcatgcggttggctgtaccttcggctcttatggttagtcttaaatggtggtcatatgagctgcttgttctgctttctgggatgttaccaaatgcagcacttgaaacttctgtgctctctatatgtatctctacagtaatactggtgtacaatctcccatatggcatcggaacagctgcaagcgtgcgtgtggcaaatgaactag

SEQ ID NO: 305392 - DNA, 259 bp, Zea mays
cgagaaggttcagtataagaatgtggcattcactgtgtgggatgtgggtgggcaagaaaaactcaggtcactgtggaagatgtacctgagtaattctgatgcactgatctatgtcgttgattctctggacagagaaaggatcagagacgcgaggcaagagttccagaccattatcaaggaccctttgatggcaaacagcataatcttggtatttgcatacaaacagggcctgagaggcacgatgagcacggacgaggtc

SEQ ID NO: 305393 - DNA, 264 bp, Zea mays
ttgccatatcgtccaactcagttaggacgcatccccaggattgcccagatcgcatggctgaagaagcagagctgttcaaatatcctttcccatatctttacgatgagtctcaagaggtagccaatgcttttggagcggtctgcacgccagagttctacttgttcaaaaaggatggccggatgctttttgaacttttctaccatggacagttcgatgactcaagacccagtaacaacgtgcctgtaaccggaagttttgcaggga

SEQ ID NO: 305394 - DNA, 153 bp, Zea mays
tccatcatgcccaatgacatccagctcgcccgccgcatccgcggggagcgcgcatatgcggctcgacggataggccggttgcccgtttcgcagtctcttctcggaattttgtactagtggtcgggtcgtctggtaggattggtgtactgatct

SEQ ID NO: 305395 - DNA, 106 bp, Zea mays
ctaccaggttcagacatagcaaggattgacagactgagagctcccccagcaccttaccatgggaacaactatcatcggcctccaaccacatccatgcctaacgatg

SEQ ID NO: 305396 - DNA, 349 bp, Zea mays
gcaactgctgcagcttcttcaaaagcacagctgagcctgagcaggtccatgggttgcacgaattgacttgatccaatctcgatgcattgtgtatgcttgggggagaggagagcacgggaggcttggatttggagatgataagagtagtcacatggtgcccctaaaggttgagcttctagctggagaggatattgttcaggtatcatgtggaggaacacattcagttgcgctagctcgagatggccgaatgttgtcttacgggaggggcgaccatggccgtctaggctacggcaggaaggtgacgacgggtcactcgatggaattgcccatcacctgccgccgctcagca

SEQ ID NO: 305397 - DNA, 298 bp, Zea mays
tcagcagctccagataaatcccgattctcgggatctgcacgagtcactcctactccaccgctgatggccagcagaggaatggccactcttctcattggcacagccatcctttgccgggggggcatccagcccgggtggccacccctccttatctctgggtggtgcacatgcccttctttccccactccctgactagagccactgcacaggaggctatctgtagccccaagctgcctttctgttggacaccaactttagtcttgggctgcaagccagctcagctgaggcgaagttgact

SEQ ID NO: 305398 - DNA, 167 bp, Zea mays
ggcagccatagaaaaggctggctacactggacaggtggtcattggaatggatgttgctgcttctgaattctgcggtgaggtagacaagacttatgatcttaatgtctaggtggctaacaacgacggctcaaacaagatttcaggcgacagctgcatagacctggaca

SEQ ID NO: 305399 - DNA, 296 bp, Zea mays
gcacacccctcttggctggcaagcacgcagatctcatggtcatttggggaaagggctcctccggctgctggtgaacttctgtggcgaccacctcctgctcctgacctccctgggagggcgctatcagttctgtcctggccctttcagttttataagttggtttgcagtccccgtgtcctgacttctgtctgccacatgaggtaggaggccctgcctgtgtggtagggtggttactgcgggtggactagtggaggccttctactgattagacaatgcccgcccacatcttggagggc

SEQ ID NO: 305400 - DNA, 288 bp, Zea mays
atccattgacaccattggagggtctattcatacagggacctatatcgatgagctggttctttgctatatcaaatatggttgagatagtcccttctatgaaaggaggtggtgtgtattggtgtactgatttgagaactcctgataatgtatgaatcctcccagtgtaacatcactgacctttttggctacagtagagcttaatatgctagatggcatggaagggaatcatatgttaaaaccaatgataaagcgcgtccggttttttggagttttgtttgttcgcattta

SEQ ID NO: 305401 - DNA, 286 bp, Zea mays
tggctggagggataaggagtggctccgagattcctggggtcacccagggcttcttctgtctctgggaaatagtctggtgaccacatttaggtctcgaaccatccacctgcttctcctctttctcccaaggcctgactatggtacctattagggatgtgatactgataggatagcttatctgggacattactggcagtaggctctggaggccagtccctagctccccttgccccgtatttcttccctgcttccctcgaacccagagatttctgagggatgatcgggt

SEQ ID NO: 305402 - DNA, 347 bp, Zea mays
acttggttgagtggctcaagaccatggttgccgagaggaaagcggaggaagttctggacccaaagatggctgaaaagccttctcccaaaacgctgaaacgggcgctcctggtcgcgcttcgctgtgtcgaccctgatgcgaacaagaggcctaaaatggggcatgtgattcacatgctcgagatggacgatctcctcttccgagatgataagaagcccgggagagacgttcatcctcacggttcagacagatacagctccaaggaggaagggagcatcagcaagcgcgagcatatgaggattgccattagagagtagcgacattaccatgttccccacttctttccc

SEQ ID NO: 305403 - DNA, 333 bp, Zea mays
gttcaatgtcactctcgcctgacttggtcggatctggggcagcattgtgctgcagatcgtctgactggtgaactgtgagcctgacgctaattcatcaggactcttgggatgatggtatgctctgtactgtgtgacctgggtgggatcttcaccccctgcatggtgctcaggctgatgcaagtgtggcaagtcctgctcctcattgtgtgttgggttctgggcctgacttgctggggccatgactcttcttctcccagagatcaatggcgtggctctgactgatactattgaagaagcagagaagctgtggagaggaaatcataggccagagat

SEQ ID NO: 305404 - DNA, 299 bp, Zea mays
tcatgctacatctctcagcactctccagactcttgaagctgttgtttggaaggacaatcttgacgtatcaacatcctgctcgctcaaacacaccgctgtggatcttgtgaatgaggctaagcttgacagcgttattaagtcatggatatctctcgctggccataatgagtatgaggttgatacgctgactaaggcattcgctagtcataacgatgatgcgtacaacgcagcagatgctgatgctctacgccgcgaggaaatactcacgccgtgtgtagcactgttgaagtccagaatgc

SEQ ID NO: 305405 - DNA, 247 bp, Zea mays
gtcgcacagtgacccagagcctgggctatatctctgaccctcaaggaagaccacttctggggacatgggcttgtagggcaggagctagaagcaccaagggaatgccccattccggggctgttccccgaggaggaatggaaggggctctgtgtgccccccaggaggaagagagcctgagtcctgggatcagacaccccttcacgtgtatccccacacaaatgcaagcttaccaaggtcccctctcagt

SEQ ID NO: 305406 - DNA, 155 bp, Zea mays
ggctgatgacatggaagctctgtacaagaaggtccatgctgccatccgtgctgatccttctgtggtcaagtcaaccaagcagccaccaaaggagcacaagaggtatagtagccgctggcttttgttgatactatggtcaccataatcctattatt

SEQ ID NO: 305407 - DNA, 221 bp, Zea mays
tgaatcgtcagcagttccttcagccccaactccagatgttgctgaagcacaggccccagttgctgaggaggacgacgacgatgatgttgacctttatggtgaggagaccgaagatgagaagaaggctgctgaagagcgtgctgcagctgccaacgcttctggcaagaagatagaatctgggaagtcatcagttttacttgatgtgaagccatgggacgatg

SEQ ID NO: 305408 - DNA, 266 bp, Zea mays
gcaggtcattaagaatgaagatcttgaagagctgcgagaactaggttctggtacctttgggactgtgtatcatgggaagtggagaggaacagatgttgctattaaaagaataaagaagagctgcttcactggtcgatcatctgagcaagagagactgactgtagagttctggcgggaagctgacattctttccaagcgtcatcatccagatgtggttgcgatctatggtgtggaacagcatgggccatggaggacaatggccactg

SEQ ID NO: 305409 - DNA, 237 bp, Zea mays
tcttcttctcttgcggctagggttttagcgcacttgcttctagatctaaggaagatgggtaaggaacaggttcacatcagtattgtggtcattggccatgtcgactctgggagatccactaccactggtcacctgatttacaagcgtggaggcgttgacaagcgtgttattgcgaggtttgagaaggaagctgctgagatgaacaagaggtctttcaagtatgcctgggtgctggac

SEQ ID NO: 305410 - DNA, 256 bp, Zea mays
gaaaaaatgttcttcgaaaagagccaatgagcaaggacatagctgaggatgatgcattcttctttaatgacaaattcaccagtaagttcttcaaggtaaagatagggatgttgttgctcagagggagtctgaaccagaaaacctagaaactaggcaaagagtggaagaatacagaaagccacagatcgaagcagccattgtgaggataatgaagtctaggcggactctagatcataataatattgttgctgaggtc

SEQ ID NO: 305411 - DNA, 254 bp, Zea mays
tcttgggagaagaggtcgagtttcacagcagcaatggtgtacgtcaaggctcagaaatcaaaagcctacttcaagagatatcaagtcaagttcaagagaagaagaggggaaaaaccgattaccgtgccaggattcggttgattaatcaggacaagaacaaatataacactccgaaataccgatttgttgttcgctttagcaacaaggacattgttgcacaaataatatctgctagcattgctggcgatattgtt

SEQ ID NO: 305412 - DNA, 253 bp, Zea mays
caatgaacctatgatgggatcaaacagattgacaccaatggctcctcatggatgctttcccgcatatttacctgttccttttcccgtgtggccatcaacttgggttcacccctttgaagaagttaagggaggagagacatgccaccatcagatccacaagccaatcccagtcattccaaaggaacctgttaatgttgacgaacttgtgggaatgtctcatctaagcattggggaagcacaggtacgtgataga

SEQ ID NO: 305413 - DNA, 241 bp, Zea mays
cacccagagatctatgagtactattcactacaactcacatgcaacgaagatagcacttgtgatcgatggcagatggcatcttcaaatatcatgtccacacatgtcatcaaggtcgtcacactcgaagcatgataagagtagcccttcataccatagaatcagttccgatttgaagcctggaatggtgtttgttgtccctcccggtcatcccttcgtcaccatagcttccaataaagagaat

SEQ ID NO: 305414 - DNA, 257 bp, Zea mays
ctcgccgccggcatccaggacgacgccggcaacgtcacccgcttcgtcatgctggcgcgggagcccatcatcccgcgcaccgaccggacgttcaagaccagcatagtgttcgcgcacgacaccgatcggcacctccgtcctcttcaaggtgctctacgccttcgccttccgcgacatctccctcaccaagatcgagagccgcccgcaccgccaccgccccatccgcctcgtcgacgacgccaacgtcggcaccgcca

SEQ ID NO: 305415 - DNA, 276 bp, Zea mays
cggctcgagggcgcccgcgcgccggccgctacatctgcgccgacgccgtgctccaccgcgaggacgtcgtccgcaccctccgcaagtccttcccgggctaccccgtcccggagaggtgctctgacgaggtgaacccgaggaagcagccgtacaagatctccaaccagcggctgagggagctgggcctggagttcaccccggcggcgcaggcgctgtacgacaccgtcgtgtgcttccaggagaagggcatcctccctctccctgtccccgccccaa

SEQ ID NO: 305416 - DNA, 197 bp, Zea mays
gaggaggagtgcctgcggtggctcgacggcagggaccccggctcaatcgtctacgtcaacttcggcagcatcaccgtgatgaccagcgaccagctggtggagttcgcgtgggggctggccaacagcggcaggccgttcctgtggatcatccggcgcgacctcgtcaggggcgacactgccgtgctgccgccggagtt

SEQ ID NO: 305417 - DNA, 321 bp, Zea mays
ctcggaatcggctcgaggctcagctgattgagcagtccaagaaccaaaggataagtgggtgggcgcctgggcggggaccgcggagcccgaggaggagaagcgagcgaggtgccgtcgtcagctagcactagcagccatggaaggcggcgcgcacgagttcgacggctccaccttcaaggagtgcttctccctctcgtggaggaacccctacgtcctccgcctcgtcttctccgccggcatcggcggcctgctcttcggctacgacaccggtgcgttgcgactgcgtgcgcgtccttcttcctgcctgtgctgtgtgtcact

SEQ ID NO: 305418 - DNA, 138 bp, Zea mays
tacagacggaggtgaggacgacgatgcgctcgccggacggcaagaagctggacatgctagcggaggaggacctcggcagcatgccctacctcaaggcgaccatcaaggagacgctgcgcctgcacccgccggcgccgt

SEQ ID NO: 305419 - DNA, 346 bp, Zea mays
tttctatgttaggagtggagttatctgcgtggaggactgacgacgctcgaccgggactacggatggatcaacaacatccatcacgacatcggaactcatgtcatccatcacctcttccctcagatcccgcattaccatctcatcgaggcggtaagggtttcccctactcttgcctttttcttttcttttcagtgagtttcttcgcctagatcataagacctgcttttttttggatgtggcctgcagaccgaggcagcaaagccggttcttggcaagtactacaaagagccgaagaagtcgggtgctctgcagtggcacctattccgggtgctggcacagagcttga

SEQ ID NO: 305420 - DNA, 269 bp, Zea mays
  unsure (1)..(269): unsure at all n locations
atagagtcttgcagaaacatttcctgagataagaaaagcgctgaaagagaacgagcccaaaaaatgcttatttaatgattgtgttcacctgngtgagcatggatgtgctgtgatgggggactgggaaaggtatccatactatctccagatgcttgatgagatcaaaattagagaagaaatccagctacggacatttggaacaaaaagagaaggtgatgtcaggtacaaaacaggtgtcatgggggtgaagcaagcagagcctcgtcttg

SEQ ID NO: 305421 - DNA, 181 bp, Zea mays
  unsure (1)..(181): unsure at all n locations
gtgaatcatcacacagacagcatcacagcactcactcacccagcgcgcagtacaatgcaaatggccaggctaggagcactgattccgctggccatcctcctgctcgccgccgtcgcggccactgcacggcctccttccgacatgccacccaaggcgcangggcccaagccgcacaaggaga

SEQ ID NO: 305422 - DNA, 190 bp, Zea mays
gtggggtcctaacagtggagattgagcatgttgatgtcaccacactggagaaactggaaaaacagggcgttgactgcgagcctaacgcctccacaatcatgattattcaggacaagtacaggcagaaaaagcatttctcaagatgcgagatcccattgcctgacttcatggaagtagatactttacgcag

SEQ ID NO: 305423 - DNA, 333 bp, Zea mays
  unsure (1)..(333): unsure at all n locations
aacctctgtctgcgtgctctcgccttggctgtcgattttactaatttggttgcttggatgtggaccgttggcttagatagtcaattagcatgaattacttcgcgtcctttacccagtttttatccattgcttcatggatctagtggcagagggacatatgcacaatgctcggtcatttttccatacatttcgggaagctcataaggtgatgcattcaagggatcttcagaagctggaaggcatcctctctccttcacacttggaggaaacggaactggctcgatcttttaggaaaaaataaatttanaattacattatgcgagtactcgtatg

SEQ ID NO: 305424 - DNA, 250 bp, Zea mays
aagccaacaactacaggcaggcgcggcacaccggacaccgtaccggcctagacacttggagaaaggagaagcacgcaggcatgggcaccagtccgtcatccctgcgacgatgctctctcgtctcctgtcgcatagtactgtctgttggcgcacgcacgaaccgaacgcgggcatcgctccagagtcgtgtgtgcacgtggtgtgacagtcaagacgttaagcgccgtgctgacatgtgaatgtccgtcaa

SEQ ID NO: 305425 - DNA, 332 bp, Zea mays
  unsure (1)..(332): unsure at all n locations
gtgatagtgaagctcgcacaattttgtcatgtcncggtaaatatgtttcctgataccaaatatcattaatctccatgatgtcaccaacatttggcacattcctttgttgctcagagatcagaaggcccatgaagctattttgaaggtgttagaccttcagtgcgcgagtacagttgctcgagaaccccaattgtctgaatggactgaaagagtcagcagatgtgacagattgaaatctccggttaggattgcaatggttggaaagtatactggcctgtcagactcctacctatctgttatanaggctcttttgcatgcgtcggttgctttgg

SEQ ID NO: 305426 - DNA, 323 bp, Zea mays
agtcctcctgtatgtatatctttgattttttttattgtaatatgcatattggtaactagtgaataatatttactacactaatttgcagatgggaaatccatggatctacatgtaccctgagggcttgaaggatctccttatgatcatgaagaacaaatacggaaacccacctatctacatcacggagaacggaatcggggatgttgataccaaggagacacctctacccatggaggatgccttaaatgactacaaaaggctagattacatccagcgccacatcgctactcttaaggaatcaatagacttgggatcaaatgtgc

SEQ ID NO: 305427 - DNA, 149 bp, Zea mays
cggctcgagcaggaatacctttatcaagaaatccaaaaagtctgcggcaataagacagttaccgaggatcacctgccagagttaccgtacttgaacgcggtgttccatgagaccatgaggcggcattctccagttccattagtgcctcc

SEQ ID NO: 305428 - DNA, 166 bp, Zea mays
  unsure (1)..(166): unsure at all n locations
ctggtgggcaggcgttaaggtacaactacatgcggatgaggacacttaccgatcaatgggtanagagcatgcactcgtcatatcaaatcatcgaagtgatattgattggcttattggatggatattggcccagcgctcagggtgccttggaagtacgctcgctgtc

SEQ ID NO: 305429 - DNA, 233 bp, Zea mays
ctaccagattggtatgttcgcatacaccggcctcaagcccgaacagatggaggctcttgccaaggatgactccgtttacgctaccaaggatggtcgtatttccgtcgctggtatcaccaccggaaacgtcaagagacttgccgagtctattttcaaggtcactggttaagggttaaattatacggattagaaggtggctgtactctggtctagaccgcgaaaaagattggatg

SEQ ID NO: 305430 - DNA, 246 bp, Zea mays
gtgttgctgaatgtggactggcagaattgatgccaccaagttcagtcactcagctgtcaggtcggatgcgtgcattactgaactacgaagcacctgagttgcaggattctggggtcgtttcagaaaggggtgatgtatacagctttggtgtagtgatgctggaacttcttactgggcgtaaaccatatgacagttcacgcccgcgtcatgagcaacatcttgttagatgggccattctcagcttca

SEQ ID NO: 305431 - DNA, 244 bp, Zea mays
ggacttcagcgaccccgtcgtcaccctgttcggctcgatcgactacgtctcgccggaggcctctcgaggcaggatgtctcggctgccagcgacatgtggtctgttggggtgattctgtatatcctcttgtccggatgcccgccgttccatgcaccaactaatcgagagaagcagcagaggatactgcagggagagttcagtttccaggaccatacatggaagacaatctcttcatcagccaaag

SEQ ID NO: 305432 - DNA, 337 bp, Zea mays
agcagacagagggcagtcacaaggtggtaacagcagcagcagcaggtggctttcttcatcctagccagctccgtggtgttcctcctcctcgacagagaagccgggctccaagaagaaccggcgataagagccggcggcggcggcggcgacgaggagtgcagctggtctcgggggcgctgggtgtacgacaacgtgtcccggccgctgtacgacgggctcaagtgcgccttcatcttccccgaggtggcctgtgacaagtatggcaggaaggatgtcatgtaccagcactggagatggcagcctcatggtcatggatgcgacctcccaagattcgatg

SEQ ID NO: 305433 - DNA, 185 bp, Zea mays
gcgcctgagtggtgagagactgccctcgaagaaaacatctgtcaagatgagcaacctgaatcctgagtggaatgaacacttcaggttcatagtcaaggatcctgatacccaagtccttgagcttcacatgtttgattgggaaaaggtttctagcagttaagatgcatgataaattgggcatgcaa

SEQ ID NO: 305434 - DNA, 318 bp, Zea mays
ggccgccgcgactacctccgctacgccctcgacaacgccgaggcgttcggcggcaccggctgggccgtctccgagttcagctgggacatcaagtacgccggcctccaggtcctcgcatcccagctgctggtggaggccaaggaggagcggctgcggctgagcgcggaggaggtggcggtggtggagcagctgcggtccaacgcggagtactacgtgtgctcgtgcatgaaccggaaccccggcggcgcgaagcacaacgccggacgcaccccggcggagctgctcttcatccggccatggaacaacctgcagtacgtc

SEQ ID NO: 305435 - DNA, 317 bp, Zea mays
  unsure (1)..(317): unsure at all n locations
gtttatcattctcncaacgttcttgtgtcgttttcgccaaacttactttcatttgtcctcacttgttgattttggatgaacctaccaatttcttagatttggaaagtgtcgattctttgattggtgcatgcaacaaatacaaaggtgctttattattagtgtcccacaatcgtgatttcttaacccgatgtgccaaagagttcctttccgttgttccaggacaattcttgttgttcgataacttgaaagccgctgaacgtgctacttatactttcattgaagaaatggaagatggtggtagtgtgaacaacgtcgcc

SEQ ID NO: 305436 - DNA, 210 bp, Zea mays
tgcgcttcgtgggaggcgacggcaacaagttcctgttccacggccggcgggacgccgacttctgcctggtgtcggacgccaacctgcacatcaacgcgcacttcatcggcaagcgcaacgacgcgcgcgtcgccgcgccggcgcgggtacttcacgtgggtgcaggcgctgggcatccggttcggcgggcacggctgtacctgggcgtcc

SEQ ID NO: 305437 - DNA, 205 bp, Zea mays
  unsure (1)..(205): unsure at all n locations
gcagcagcagcgccgcgacgcggaggcggagctcaacctgcccccgggcttccggttccacccgacggacgaggagctggtggcgcactacctctgcgcgcgcgccgcggggcgcccccgccggtgtcatcatcgccgggtcgactgtaccgttcgaccctgngacctgcgagcgcgcctcttggcgcgcgatggactcttcagc

SEQ ID NO: 305438 - DNA, 306 bp, Zea mays
agtagtaatccgtcactttgtagatcctgaatctcatggacaactttatcttgctccgcacgtaatcctaatgatattcagattatctacacagccagattctctccacagctagattctcggaaaagctagtcagaaaaaagctgaaccaaacacagcccatatcgcctggagcccgaagaatgcgagcagcgcgaggagcgtgccagccggcgcggcggaagctccggcgccggacttcttgacggtgaaggagaagggtgcaggcggcgacgagctcggcgtggacccgatgatcacgtcgat

SEQ ID NO: 305439 - DNA, 339 bp, Zea mays
caggtctgatgattcgagggaggaaagcgaagtggtttcctcgcacactccaagatgctcaggccggcattggaatcatcgcgtttcggtatgccgatttgcagcgagcaactaggaacttctcagaaaggttagggggaggcagttttggttcggtattcaaggggtgctacctaggtgaccgggacaccctggtggatgaaaagctccacggtgcccacccaagggagaaaccatttcagagcagaagtgaattcagttgggataatcaagcacttcaatctagtcagactgatcggatctgttgcgaggatgataagagctacttgtgtatgaata

SEQ ID NO: 305440 - DNA, 357 bp, Zea mays
  unsure (1)..(357): unsure at all n locations
tgtcgcatccagataccccgcatcagagacaggcagggagggaaccgagatcctccgtccgagtcgatggagtcaacggtggagcggataagctcgtcggtgcagtcctgggtgaaggaccacgagctcgcagccatcggaggcgtgtgggctgcggcggtgggcgcttcggtggcgtacagccggaggaaggcgccgcagcactcctgcacagagctcggcagcactcccgcatagagccagcgcgggatccgcggcgggggcgagatccgtggcggaggcggcgggggacggtgcctcggtcgtaggggnaggagcagacgggggctagcgtactgctttcatgcgcgcgcgtgg

SEQ ID NO: 305441 - DNA, 327 bp, Zea mays
  unsure (1)..(327): unsure at all n locations
ccagtgtgtcgtccatggcgacatcaaaccgagcaacatcatgctggacgagtccttcaacgccaagctcggcgacttcgggctggcacggctcatcgaccacggaatgagcctgcagaccatgactgccgtcgctggcacgccagggtacctggacccggagtgcgtcatcaccggcaatgcctcncccgagtccgacgtgtacagcttcggcatcgtgctgcttgaggtcgctgcgggcgccggccgatggcgccgcagcgagcacgggcgatggcaangacggtcaagtgttccggttggtggagtgggcatgngacatgcgcg

SEQ ID NO: 305442 - DNA, 349 bp, Zea mays
ccaagaccgtggcggtggcgctggcggggagcctgctgggccacgacgaggcggcggcgttcccggcggggtgcggcgagaccacctgctacctgcggctgaatcggtacccggcgtgcccgttcgcggcgaacaccttcgggctggtgccccacacggacagcgacttcctgacggtgctgtcccaggaccaggtcgggggcctgcagctcatgacggacgccggctgggtggccgtcaagccccgccccgacgcgctcatcgtcaacatcggcgatctgtttcaggcctggagcaacaacctgtacaagagcgtggagcacaaggtggtggccaacgccacggcgga

SEQ ID NO: 305443 - DNA, 347 bp, Zea mays
gctcgagctgcggcaattgtcatgcgtacagtaagaaatacggttaacactgggcgtactgtggtctgcacaatccatcagcccagcatcgacatatttgagtcttttgatgagcttctgcttttgaaacgtggaggtcaggttatttatgctggtgaacttggtcgccactctcacaaactagttgaatattttgaggcgattccaggtgttccaaagatcacagaaggatataatcctgcaacatgggtgctggaagttagttctcctctatctgaggctcgattgaacatgaattttgctgaaatttatgcaagctctgtgctttatagggaaaatcaagaggt

SEQ ID NO: 305444 - DNA, 273 bp, Zea mays
  unsure (1)..(273): unsure at all n locations
tgcatgtgtgcttcaagggttaacaacttctgcggcgangtgccggcggccatcttcgacaagaagatcgacgcgcttttcatcaacaacaaccacttcgagttcacgctgccggcaagcttcaccaactcgacggcgtcggtgatcgtgctggcgaacctgccgcgggtgagcggctgcctaccgagcagcatcggcgacatggcacgcacgctcaacgagctcatcctcctcagcagcgggcatctctcctgcatnccgccggagatcggc

SEQ ID NO: 305445 - DNA, 348 bp, Zea mays
  unsure (1)..(348): unsure at all n locations
tggccagcacggcgccatcgccgccggcgcgtacgctctgcacgagaagcacaaggccaagaaggacccggagaacgagcacggccaccgggtcaaggaggaggtggccgccgtcgccgccgtgggctccgccgggttcgccttccacgagcatcacgagaagaaggacgccaagaagcacgcccacaactgatccgtcgcaggctgcctcagccgaagcagcagcacatcgtcgcagttgctgtttcatcagttctcccagcctcgtcttcgtctactgtgtgccgggcaagcccttgattganngcttgagctaccgatatntgcacggacgtaggaactgtgttg

SEQ ID NO: 305446 - DNA, 258 bp, Zea mays
  unsure (1)..(258): unsure at all n locations
ctttaatatggttggatttatgggtgccatgatatccaaccttgcatttgttttccgcaacatcttctcgaagacgggcatgaaggggaagtccgtcagtggcatgaattgctacgctgcctgtcattatgtcctggtcatactgactcatttgtatagctatgangcctcaatgggctgctgtgcanagcctgcagagtgaccattgctgtgatctgaaacgtgtcacataatacaggctatgcccgtaatccatgc

SEQ ID NO: 305447 - DNA, 332 bp, Zea mays
  unsure (1)..(332): unsure at all n locations
ccagtttggaagaatattgggttcaagttcacgcaggcattttgctgaccgtggctttggtccattccttgctctatacagggctgctactatctcctttcatgttgtaaaactcactatttggcatttgttgctcaatgatatgcataaaagagcagaaaagtttcgagagaccttgatacgcttgggtcctttttatatcaagcttggccaagcattgagcacacgccctgatatacttcctagtgcgtactgtcangagcttgcacagctacaggatcaaataccaccgtttccaactcgcattgcactcaggaccatagagtctcagt

SEQ ID NO: 305448 - DNA, 322 bp, Zea mays
accgcctcatccacgccaggatgcacgcgcaggcgctcacgctcgccgtcctcgggggagccgcgctcgcgcaccactaccacggcaagagcaccaacgccgggaagaggcagcagcaggaggacctggactacggcttctactcgcagctgccgccggccaccgacgccgacggcaacgagaacgagcgcttgctctttgatttccatggcttattatcgatcagcctccgattcttctcctgcactactactacttgtaccatttcatctattgattgaatgaatggtcacgatgatgacgataattatgtcttgtttgt

SEQ ID NO: 305449 - DNA, 324 bp, Zea mays
gtgcgtctctgtctcgagtgccgtattatctcgtgtttccgcacctgattcatgctccaagccgtgtagctagccgagctgcaacggctgtccacgtcgatgaagaagctggagaaggagctgaagcaccaagagctgtacaagaacgagcagtaccgcatgaagctgcacaagtcgaacgagcggctgctggcgctcgtcaagtcgagcctggacatcgtggtggccgtggggctcctgcagctggccccgaagaaggtgaccccccgcgtcacgggcgcgtttggcttcgcaagctccctcatcgcttgctaccagctgctt

SEQ ID NO: 305450 - DNA, 309 bp, Zea mays
gtcaccccgggcctgctcttcctctacatcgccgggtggatcgggtgggtcggcaggagctacctcatcgccatcagcggcgagaagaagcccgccatgagggagatcatcatcgacgtcgagctcgccacccgcctcctccccagggggttcatctggcccgtcgcggcctaccgcgagctcatcaacggagacctcgtcgtcgacgacaaggacatcggctactactagctgctgcacctgtgcttgcacatcgctgctggcgaagcaaggcccgatccatggctagcggctgttgaacaactctct

SEQ ID NO: 305451 - DNA, 204 bp, Zea mays
tggcccgcccgtcggcagcagcggctggctcgtgcgcttcttcgactccgccttcttctgcgagtggattgccgtcagctatctctacaagcacgaccatgctggagtgcgcgactacctctgcaaccgcatgtacacgctcccgctgccgtggctcgatgcctacctcttccaggtctgctacatgctcgtccacaagcccag

SEQ ID NO: 305452 - DNA, 199 bp, Zea mays
  unsure (1)..(199): unsure at all n locations
gatctaccgggacttcanaacgtccaacgttttactggacaaggacttcagagcaaagctatcagacttcggcctagccagggaggggccaactggagcaaacactcacgtctcgactgcggtacgtacgttacatccatcaatacgtgggcaatgcagtgtacctgctcgatctacgcgtactgacggacgacgaagc

SEQ ID NO: 305453 - DNA, 312 bp, Zea mays
  unsure (1)..(312): unsure at all n locations
cttcagagtcagtcttcaagagggtccaacatgctagcattgggccctccgcagcaacatcaaagtttcgaattcccagcgctcggccagcccgttcagccaacaggcctgaaccctttcgaatattggtcgcagcagcaggagaaccgtggcggcggtgtcgacgactacctgatggaggagatccggatgaggagccacgagatccanggacaacgagagatgcagcagatgatgcggctcctgagcatnnggcgtgcggaaccagctagccgagacggctcaattcgctcgacatgctgagctcgcgac

SEQ ID NO: 305454 - DNA, 320 bp, Zea mays
  unsure (1)..(320): unsure at all n locations
cggttcaattgctcttctcgtgcattctctcaatcatccgcaatcatgtctactgctttctttgacattgagtacggccctgctggcaacacccagacaggtcgtgtcgaattcaagctctacgacgacgtcgtccccaagactgccaagaactttgctgagctctgcaagggcttcactgacgagactggcaaggtctttgactaccaaggctcttccttccaccgggtcattccccagttcatgctccagggtggtgacttcaaccgcggcaacggtaccggtggaaagtnatctacggtgagaagttcgccgatgag

SEQ ID NO: 305455 - DNA, 261 bp, Zea mays
  unsure (1)..(261): unsure at all n locations
cttcctggtgttgatgccaatgatccatctgttanagatttgttcgcatcattgcacaacccccgagagcaagagaagaaggaagacaagtaagactanacagaagacgagaagaactgcttcaagctggagcgctgtcgctgtggtgcttntgtgactgatcatctctggagcttntgtcgatgatctagctagctanttgtanatgatctagtcgtcgatgactatataattgtgatactcttgtcgatatataattgt

SEQ ID NO: 305456 - DNA, 168 bp, Zea mays
  unsure (1)..(168): unsure at all n locations
agaggaagagtggcgaaatcggtgaagcacaacaacgtcatccccaacgggcacttcaagaagcactggcagaactatgtcaagcatggtcaaccagccgccgcaacagagagcgcatgtcgcanagagctggagtatcccgcgatgtgtcctagcatgtcatgcact

SEQ ID NO: 305457 - DNA, 318 bp, Zea mays
cggctgctgcacgggcgacgccctctgcgcctactgcctgccggcgcaccgagaccaccacgtcgtccagatacgtcggtcgtcgtaccacaacgtgatccgggtgtcggaggtggggaagctgatcgacatctcccacgtgcagacgtacgtgatcaacagcgccaagatcgtgttcctcaacggccgcccgcacgccaggcacggcaagggcgtcaccaacacctgccagatctgctgcctgagcctcccggactccttccgcttctgctacctcggatgccagccggtaggatgcagtgggacccgagctgacgt

SEQ ID NO: 305458 - DNA, 335 bp, Zea mays
catcaatccacaacacactgtgccgactattgtcgatgatggattcgctttgtgggaaagtcgtgctatcctcacctatctcgtgaacaaattcgctccaggacattctttgtatccacttgatgtgcaaaagcgtgccaatgtagaacgtgctcttaatttcgatggtactactttgtatccggcttttggcgcagtcgtttatccgattttgcaccaacaaattgctttcaatcctacttcagctctaccattgtaccaaaaattagaaattttagatactttgctcggtcagcacgattatgttgccggtgacgaattgtctattgctgatt

SEQ ID NO: 305459 - DNA, 327 bp, Zea mays
atttctttgcggaggagatctctttttcatctatttttggttattttgttctctggttgtattgtttttgaatacagtttacttagattttattgctccactttttgataaatatgttccacttccggacagcaatttaaaatcgtgtattgaaaaacttacttcatctttgaagtatccattaagtcagatttatattgtggaaggatcaaaacgttcttcacattctaatgcctatttatatggtctttttaaccgtaaaaagattgtcttatacgatacactgatcgatagatccgtagtggatgtatccgacttttctctaat

SEQ ID NO: 305460 - DNA, 353 bp, Zea mays
agcacacggagagcaacgaggagatcctcggcgtgctctccttcgtcttctggacgctcacgctcgtcccgctcctcaagtacgtctgcctcgtcctccgcgccgacgaccacggcgaaggaggcaccttcgcgctctactccctcctctgccgccacgcgcgcgccgcgctcctcccgccaggacgaaccgccgccggggacgaggaccagttcttggacggagccgacggtggcaccaagaaggctacggcgcagaacggcaatgcagtgacgctgggcgggggcgctgctgccagcgtcagaaggctgctggagcggcacaaggtgctgcagcgtgtgctgctcgtcctg

SEQ ID NO: 305461 - DNA, 336 bp, Zea mays
  unsure (1)..(336): unsure at all n locations
gttcttttcacaaataatggtggagaatttgtctgtcctgcgcttctcaaatctcgtttttgaggctctctggtcaagacaatatataagtttcacatttcttatatattgtcttgaccagagaggctcaaaacaatatataagaaatgtgcaacttatattctcattangatttggtactgaaggacgtggaggatactttgatggctacggtattattcgagacataatgcagaatcatctgcttcagatactagctttatttgctatggaaactcctattagtttggaagcagaggatataagaaatgagaaggttaaagttcttcgttccat

SEQ ID NO: 305462 - DNA, 263 bp, Zea mays
ttctcctcgcacctcgcctccctccacctgcagagagcgccacaagagcgcttcgttctagcagcagcggacgagggagacaagaggaggaagagatggcaggccgtgatggagccaagtcatcggcgtccatggaggaagaggcatgcggggagaagaagtacggaggaatcgcacccaagaagaagcctttgatatccaaggaccacgagcgcgcctacttcgactctgcagactgggtgctgggcaagcaggctgcgaac

SEQ ID NO: 305463 - DNA, 229 bp, Zea mays
cgctgttgtaggttggtcatcgtggatgagattgactacttaataacaagagaccgtgctgtgctgcatgatcttttcatgctcacaacttgtccattctctagatgcatactcataggaattgcaaatgccatagacttagcagatcgttttcttccaaagctggaatccttaaattgcaagcctcttgttgtgacttttcgagcatattctaaggatcaaatatctg

SEQ ID NO: 305464 - DNA, 222 bp, Zea mays
cgcatgacgactacgtgagcgtccacatcaggacgctgggcgactggactcgcgagctcaagaacgtcttctcaagggtgtgccggccgccgacggagggcaagagcgggctgctccgcgccgagtacgaccgcgacggcagcgccgtggccaacccgagcttccccaaggtgctgatcgacgggccgtacggcgcgtcggcgcaggactacaagcagtacg

SEQ ID NO: 305465 - DNA, 221 bp, Zea mays
cgccatcggcgtgccggagccctgtccgtgttcgtcaactcgtacggcaccggcacgatccccgacaaggagatcctcaagatcgtgaaggagaacttcgacttcaggcccgggatgatcagcatcaacctcgacctgaagaagggcggcaacaggttcatcaagaccgtcgcctacggccacttcggccgtgacgacgccgacttcacctgggaggtggt

SEQ ID NO: 305466 - DNA, 232 bp, Zea mays
  unsure (1)..(232): unsure at all n locations
cggctcgagctagaagactacaagaactctgttgtccctttaattgaggaatatttcagcaatggggatgcancattagctgcttctgatcttaaagagttgggtcatgatggtttccactgttactttgtcaagaagcttgcttccacagcaatggataggcatgacaaggagacagacatggcatcagtgcttctgtcgtatctttatggcaacgtggtcagttcaactc

SEQ ID NO: 305467 - DNA, 128 bp, Zea mays
  unsure (1)..(128): unsure at all n locations
cggattcggctcgaggcgacactccaagacctctcgtgtcncccgccgacccttcgagtctgcccgacttgactccgagttgaagctcgttggcgagtatggcctgcgcaacaagcgtgaggtctggc

SEQ ID NO: 305468 - DNA, 230 bp, Zea mays
gacttctcgtgaagccattaagcggcaccagcattttttggcactacaattggggctcaagaagggtatgaaggttttggatgtgggatgtggaattgggggacctttaatagaaatcgccagattcagctcaacatcgataactggactgaacaacaatgactaccacatctcaaggggcaaggagctcattttttcagcaggtttgagtgagcaatgctgcttcttga

SEQ ID NO: 305469 - DNA, 161 bp, Zea mays
  unsure (1)..(161): unsure at all n locations
gtggcgctgctcncgtacacggtgccggcgtcgttcgtcctgttcggcgacggcgtcaagaaccccagctacaacgatctggtgcagagggtggctgacggcttcttcgacgcggcggtgggcgacatctccatcgtcacgaaccggacgcgggtggtgga

SEQ ID NO: 305470 - DNA, 227 bp, Zea mays
  unsure (1)..(227): unsure at all n locations
tgtttgcgatttgatgggatcaggcataagtctanaataccttccttgctgttattctcggaggtttcttgtactcaatttagttgtagtctacgatttgcagtgtcctacgactattgtacctttctttggtgaccaacctttctggggcgaccgggtgcatgcaagacggctagggcctccgcctattccagttgatcagtttggtttgcagaagttggtggatg

SEQ ID NO: 305471 - DNA, 167 bp, Zea mays
  unsure (1)..(167): unsure at all n locations
gcagcagacgctcatcgagagcgtcgcgaacgcggcgaagaagccggtgatcctggtgctgctctgcggtgggcccgtggatgtgagctttgcgaagaccaaccccaagattggggccatcctgtgggctggctaccccggcgangccggcggcattgccatcgcac

SEQ ID NO: 305472 - DNA, 248 bp, Zea mays
agcgcacccagtcacgccgctccgccgccgccccctatataaattaatgagccaagcccgagttaaccaaattaaagaaaaaggaaattttcttgggcgttcttcggcttcattgtcacaaggttcgagttcgtcaccgtctagtacgactgtgcgagggaggaagaggcgaggagaagatgcagatcttcgtgaagaccctgacggggaagaccatcaccctcgaggtggagagcagcgacaccgtc

SEQ ID NO: 305473 - DNA, 196 bp, Zea mays
agtgcgagggaaggtgcaccagccatggtgcacgtcaacttctaccgcaactatggtaagacgttcaagaaaccaaggcgtccttatgagaaggagcgtcttgatgctgaactgaagctggtcggtgagtatgggctgaggtgcaagcgtgagctttggagggtccagtatgcactgagcaggatccgtaatgctg

SEQ ID NO: 305474 - DNA, 197 bp, Zea mays
ttctgcagtgagttactacgcctactacgggaagaagctggacccggagccgtggcggtgccgccgcaccgacggcaagaagtggcggtgctccaaggaggcgcaccccgactccaagtactgcgagcgccacatgcaccgtggccgcaaccgttcaagaaagcctgtggaatccaagaccgcctcctcgccgcccc

SEQ ID NO: 305475 - DNA, 207 bp, Zea mays
cggagtccccgagatcgcgtcggtcgccgccgtcttcgtgtacggcctggtcccgcagatcttcgagtacgtcgccaacttcgccatccagaagttcatgcaggcgcagagcatcatggggctcagcgcctacatctccgacgccgcgctcgcagcgcacctcgccctcagctacctcgtcgtctaccgcctcggcctcggcctcct

SEQ ID NO: 305476 - DNA, 312 bp, Zea mays
cgtcttcctcactctctcctccagctcactgtccggcggctaagggaaggcaacatgtacaccgcgatgaagaagatccataatgagaagggccttgagccctccgagttcgaggactccgttgcgcaggctttctttgatctggagaacgggaaccacgagctcaataccgacctcaaggacctgtacatcaacaatgctatccagatggatgttaccgcgagcaggagtgctgttgtcatccacgtcgcataccggctgcgcaaggccttcaggaagatgcatgtcagactcgtcgaggagctggagaag

SEQ ID NO: 305477 - DNA, 311 bp, Zea mays
cggctcgaggcttggtccagctgcgcccactaactatgctcttgaagggccattgcaattgcaggccacagttcagtggctgagggacagccttggaatcattcagacagcagctgagatcgaaaagttggctgaaacagtgccagattctggtggcgtgtactttgtgccagcatttaatgggttgtttgcaccatggtggagagatgacgcaagagggatttgcatcggaatcacaaggttcacaaataaggggcacattgctcgagcagtgctcgagagtgatgtgtttcacgtgaatgatgtcctga

SEQ ID NO: 305478 - DNA, 242 bp, Zea mays
gtcgcgagacggctggcgtacctgcacgagggctgccgcgagcgcatcatccactgcgacatcaagccggagaacatactcctcgacgcgtcgctcgtcccaaagatcgcggatttcgggatggcggcgatcgtgccgagggatttcagccgcgtcctgactacgttcagaggaaccataggctaccttgccccggagtggatcggtggagaagccatcacccagaaagtggatgcctacag

SEQ ID NO: 305479 - DNA, 293 bp, Zea mays
tgatttatatcactgggagtaaggatatataatcaattagcagataatcggccttcctgtccagctctgcttggcggacagtcatgccggaagagggaaggaagaagggcgtgccggcgctggggtggtggctaatgctggtcggctccctccgcctcgcctccgtctggttcggcttctttgacatctgggcgctccgcgtcgccgtcttctcccagacggacatgactgatgttcatggccgtacttttggtgtctggactcttctgacctgcacgttgtgcttcctctgt

SEQ ID NO: 305480 - DNA, 331 bp, Zea mays
  unsure (1)..(331): unsure at all n locations
catggtattgctcagtactgtgggataccacaattagcaaagaagctanaccagatcctggtccaacatataaaaacagttttgccggggcttaagtcacgcataagcagtcagttgactgctgttgctaaggagcttgctgtgtatggtgatcctgttgattcaaaggctggccaaggtgctaagcttttgaacatactagctanatactgtgaagctttctcctcaatggtggaaggaaaaatgaagtatatcccaattgaatctctggtgagcaagatccatacatttccagctacattgtcagagttagacgagtgatctgtgagag

SEQ ID NO: 305481 - DNA, 241 bp, Zea mays
tcgacatgtgtgaatatggagcgtgtctgacgatccttccggtgcgcgtccgtccgtccgttacgtacgtggtgccgacgagcaggtcgtggagatcaccaaggggagcaaggtgaagtacgagctggacaagaagacggggctcatcaaggtggaccggatcctctactcgtccgtcgtctaccctcacaactacggcttcgtgccccggacgctctgcgaggacaacgaccccatggac

SEQ ID NO: 305482 - DNA, 157 bp, Zea mays
ctcgcgctgcaggtggcgctgctgcggcggctgagcaacgtgccggagtccaccgtctacgggggcccacgcccgcaagagtcctcggcgagcgcgcgcgtgacggtgaccagactccgtgggaagcaccgccgcggggagcccatcaccgtcgtca

SEQ ID NO: 305483 - DNA, 314 bp, Zea mays
  unsure (1)..(314): unsure at all n locations
ctcgcagcagccanaacctacctagccgcgccgcaggccccccatcgccgccaagatgcagatctttgtgaagactctgacggggaagaccatcactttggaggtggagtcctcggacaccattgacaatgtgaaggccaagatccaggacaaggagggcatccccccggaccagcagcggctcatcttcgccggcaagcagctcgaggacggtcgcaccctcgccgactacaacattcagaaggagtccacctccagcatgtgctccgcatccgcgggtggcgcaagaagcgtaagaatgagacgtacaccaa

SEQ ID NO: 305484 - DNA, 153 bp, Zea mays
  unsure (1)..(153): unsure at all n locations
ctactacttcgcatcgctggccttccacaatgccgccggcgggttctgcggcatccgcgtgctcagcacgccgcagatccccgtcccgttcccgccgncggccgccgactacaccgtcctcatcggcgactggtacaaggccaaccacaccga

SEQ ID NO: 305485 - DNA, 324 bp, Zea mays
gcctcatcagtcgtagcttgttgtcacagtgcagatttcagtatgtctttcaagattcagctcttgtcctccattgccatttttgcttttgccttgcatcttcacccttgtgtgtccactgagtttcgccgtgagctctccagctggaccactggcatagctacgtggtatggcgatgctaatggcgccggaagtgaaggtggtgcatgtgggtaccaatatgctgttgaccaaccaccgttctcgtccttgattgctgccggcagccccttcatctatgactctggcaatggatgtggctcttgctatcaggtggtatgctct

SEQ ID NO: 305486 - DNA, 310 bp, Zea mays
  unsure (1)..(310): unsure at all n locations
acggattggaggggattttgacttaccagtgatttaaaccccctcaatcctcctcaatccatatggattggggtagaaccgaacaagccctgacggggaagaacaaggaggcgtggagcgagggcaagatccgcggcacggtgaggctggtcaagaaggaggtgctggacgtcggcgacatcaacgcctcgctcctcgacggcgtccacaggatcctcggctgggacgacggcgtcgccttccagctcgtcagcgccaccgcggccgaccccagcaacgggggccgtgngcaagtggggaaggcggcgca

SEQ ID NO: 305487 - DNA, 159 bp, Zea mays
  unsure (1)..(159): unsure at all n locations
atcttcttccactaccgagtgatgcatccggtgcctgatgcatttgctttatggctcatatctgtgatctgtgaaatttggtttgccatgtcttggattcttgaccagtttccanagtggattcctatcgagagggaaacctatcttgaccggctgagt

SEQ ID NO: 305488 - DNA, 181 bp, Zea mays
  unsure (1)..(181): unsure at all n locations
agttcccgacgagaagttcgtgcgcaagacaccgcccccggtgtgctctccatggccaacgccgggcccaacaccaacggctcccagttcttcatctgcaacgtcgcgaccccttggctcgaaggtaagcacgtcgtcttcgtgcaggtcgtcganggcatggacgtcgtcaaggccatcg

SEQ ID NO: 305489 - DNA, 340 bp, Zea mays
tgtggagaacagctctgctcaggtagccagaagcaaagaagacttggtgccgaagtgtggacagatcacacagaatggaaactgtaatggcgtatcagtgttacaagtgtcgatgcagttgaaggcaatggacatcggtgctgagaacggcaacaaggagaacgtccctggtgctgatcttccgaaacccatgagcattgagccgccttttgccgtagattggctggagatatcatgggaggagctcgagctcaaggaacgcgtgggcgccggttctttcggcacggtttatcgcgcagactggcatggttcagatgttgcagtaaaagtgcttacagac

SEQ ID NO: 305490 - DNA, 355 bp, Zea mays
  unsure (1)..(355): unsure at all n locations
ctctcctccgctctgctcctttgctcnccacggcaaaccgtaaaccctagcctgaggggcaccctgtcgcagcatgggcgcaagcggaagctgcagggcgagatcgaccgcgtcctgaagaaggtccaggagggcgtcgatgtctttgacagcatctggaataaggtctacgacactgagaatgccaaccagaaggagaagttcgaggcggacctcaagaaggagatcaagaagctgcagcggtacagggaccagatcaagacgtggattcagtccagcgagatcaaggacaagatagctctgatggatgctcgaaagcagattgaacgagagatcgaacgatttaaagtatgtg

SEQ ID NO: 305491 - DNA, 242 bp, Zea mays
cgttcggcccgtctacaagggcttcgtggacggccgcctccgcccggggctccagccgcagcacgtcgccgtgaagtacctcgacagcgacggcgtagcagggcaccgcgagtgagctggcggagtggtgtagctcgggatgctgagccatccgcaactggtcaagctggtgggcttctgcaagcaggacgaccaaccgatgctcgtgtacgagtacatgcacgggcacagctcgagagcat

SEQ ID NO: 305492 - DNA, 333 bp, Zea mays
cggaggcctcatccacggtggtggcgccgcagcgcggcggcgcgtcgatccgggcgtgatcatcaagaacgacgtcgcgcaggcaaagtgggaattcgcagtcagtagggagcaacggcactgactcgagctcagctcagaacacaatgtctcagatggagttggtgtccccagcctcctctgcgccgcggcaggaggtcatgatggtgaccactgatgattacagctacaagccaggcctcgccgctgcgcccgctactgccgccccgccgagctttcagcaagcacaaccgctcccgctgcagctgcacggtagagaaggtaggggagaca

SEQ ID NO: 305493 - DNA, 301 bp, Zea mays
agccgagcgcatcgtctactacacctacaagctcatgggcatcaggctcgtcgtcaagggcaccccgccgccgccgcccaagaagggccacccgggcgtcctcttcgtctgcaaccaccgcaccgtgctcgaccccgtcgaggtggccgtggcgctgcgccgcaatgtcagctgcgtcacctacagcatctccaagttctccgagctcatctcgcccatcaaggccgtagcagtgtagcagcgtcgcaaatggagcaggaagcgagatcgactggatagagaacttcggcgacctggtcat

SEQ ID NO: 305494 - DNA, 328 bp, Zea mays
aacaaaggttatgacggctcgatatctgacgtatggtcctgtggtgttattctatatgtaatgcttacagggaatcttccattcgacgaccaaaatgtggttgtcctttaccagaagattctcaaggggaatgctcacattccaaagtggctctcccaaggtgcccaagatatactgagaaaaatcctggatcctaacccggttacacgcatagatgtggatggaataagggcacatgattggttcaagcaaggctatgctccagctatgccatttagcgatgatgaagaagatatcagcatggatgaagacagctaaacatcacgag

SEQ ID NO: 305495 - DNA, 265 bp, Zea mays
gccagcgaagtgcttggacccgaaccggtgcgtgtaccgcccctgcggtatgggcccgcacagctggttgtagctgacgtcgaacgccagccacttcctctccgccgcggcggccgggatgctcccgtacaccatgttgtggtcgatctccaggatgtccatcgcctccggcagctccacgcggccgaggtcgaacctgaaccggttgcgcgacagggacagcgcgttcagcggcttctcggcgccgaacagcgccgacgcgtcg

SEQ ID NO: 305496 - DNA, 282 bp, Zea mays
cgacgatattcatgtcggctttgatgatattggcggtctggatatgatcattgaggaactgaaagaatccgtcatctatccattgacaatgccccatctctaccagcatgccgcttcattgctgtctgcaccgtctggcgttttgctatatggaccgcctggttgcggcaagacgatgctggccaaagcccttgctaaggagagcggcgcatcatttatcaacctgcatatatcaacgctcacggagaagtggtacggcgattccaacaagatagtcagagc

SEQ ID NO: 305497 - DNA, 275 bp, Zea mays
gctaactggagataggtttcctaatgttcttaatctgatgccaggtatgtagcacctgagtacgcaaatagtgggatgctaaatgaaaaaagtgacatatacagttttggagtggtgttgttagaatgtgtgacagctagggatccagttgattacagtaagcctgcagatgaggtgcgagttttccccgtttcagagaattggtgcgattgcatttttcatttacttcttaaacctcttctattgtttgtttcaggtgaatctcatagagtggc

SEQ ID NO: 305498 - DNA, 252 bp, Zea mays
atgctcttgaggttctgaattcaaacaaagatctgtttctcaaatttctcgaagaacctaactctctctttgcgaacagtctcgggggactcggttctgcaccaacatcacctcagagaaagcacattactgtgttgaagccctcgaaatcagtggagatgaagggtgacaaagcaattagaaggcagacaaaccatgcagccggaaacagaacagacaggagcaacgtgcacaagtctgatgcagctcatg

SEQ ID NO: 305499 - DNA, 268 bp, Zea mays
aatctctttccgaccaggccaggccgaatcgggccaccacttgggatgggaatggctcagcccacatgcatcatttgatgaaagcactccagtccagtcgcctccgatcagtggcttgtcaaccaccggaccgtagctcctcaccgaatgcccctgcgttggggcaacacagcacatgactagttcgctcaaggaccacaccctctcgagagcaggatgccggccgagatggagcaccaacctagactttccttgggcttgcaccaat

SEQ ID NO: 305500 - DNA, 229 bp, Zea mays
gtggtggccggcgagctgcggcgcgggccttggacggtggaggaggacctcctgctggtcaactacgtcgccgcgcacggcgagggacgctggaactcactcgcccgatcagcagggctgaggcgcactggcaagagctgccgcctccggtggctgaactacctccgccccgacctccggcgcggcaacatcacgccgcggagcagctgctcatcctggagctgcactc

SEQ ID NO: 305501 - DNA, 297 bp, Zea mays
  unsure (1)..(297): unsure at all n locations
gtnccgttgacaagccccttcgtcttcccctccaggatgtctacaagatcggtggtattggaacggttcccgtcggccgtattgagactggtgtcatcaagcccggtatggtcgttaccttcgctccttccaacgtcaccactgaagtcaagtccgtcgagatgcaccacgagcagctcgctgagggccagcccggtgacaacgttggcttcaacgtgaagaacgtctccgtcaaggacatccgacgtggtaacgtcgctggtgactccaagaacgacccccccatgggtgccgctt

SEQ ID NO: 305502 - DNA, 218 bp, Zea mays
tggggggttcagatcggatcggaagcttccataagtttccatcgggcttcgccggtatggcgatccgcaaggggtcttcgtacgccgtcgcggcacttctcgcgctcgcctctgtcgccgccgttgcaggggaggtcttcttccaggagaagttcgaagatggctgggaaagtcggtgggtcaagtccgagtggaagaaggatgagaacatggctggt

SEQ ID NO: 305503 - DNA, 125 bp, Zea mays
tgtcgcctcaaattcgttccgtccaggcaaggaagaaatcgagcagccaaggagaggagaagatggctcgtacgaagcagaccgcccgcaagtccaccggatgcaaggccccgcgcaagtagctc

SEQ ID NO: 305504 - DNA, 310 bp, Zea mays
  unsure (1)..(310): unsure at all n locations
atcatttctatacacacaacagtanacatgtcagcaacctcttgtattgttatgttagatggataaattctgttaacatgtggtatatanatggggccaatcacttgtgttctgaccacattcgtgagaaggatggcatctgggctgtgcttgcatggctttcaattattgctttcaagaataaggacaaccttggaggagataagcttgtcactgttgaagatattgtccgtcagcactgggccacatatggtcgccattactacacacgctatgactatgagaatgttgatgcaggggctgctaagga

SEQ ID NO: 305505 - DNA, 349 bp, Zea mays
attgccggggatgccaaggagaagaataggaagttcactgagactgtggaacttcagattggtctgaagaattatgatccacagaaggacaagcgtttcagtggctctgttaagttgccccatatccctcgtcccaagatgaaggtgtgcatgcttggtgatgcccagcatgttgaggaggccgagaagatgggacttgactacatggatgttgaggctctcaagaaaatgaacaagaacaagaagcttgttaagaggcttgccaagaagtaccatgctttcttggcatcagaggccatcatcaagcagattcaccgtctcttggtcctggtctcaacaaaggcagcaa

SEQ ID NO: 305506 - DNA, 156 bp, Zea mays
cttacttttgattaactttattacaatggcgccacgtataggacaaaagactcaaaaagaagaaactgtggtgcaattgggcccacaagttcaagaaggtgaaaatgttttcggtgttgcccacatttatgcatctttcaacgatacttttgtaca

SEQ ID NO: 305507 - DNA, 302 bp, Zea mays
agacgatgggcaaggacgacgtgatcgagagcggcgctggcggcggcgagttcgctgccaaggactacacggaccctcccccggcgccgctgatcgacgcggcggagctggggtcctggtcgctgtaccgcgccgtgatcgccgagttcatcgtcacgctgctgttcctgtacatcacggtggccaccgtgatcgggtacaagcaccagacggacgcgtcggcgtcgggcgccgacgcggcgtgcggcggcgtaggcgtgctgggcatcgcctgggccttcggcggcatgatcttcgtcctc

SEQ ID NO: 305508 - DNA, 103 bp, Zea mays
tgcgagtgttcgggtgtcaaacccgtccgcgcagtgaaagcgaacggaggtgggagcctttcggggcgcaccatcgaccgatcctgaagtcttcggatggatt

SEQ ID NO: 305509 - DNA, 163 bp, Zea mays
gtcgagaggaagcttggcaaaggtggcttcggccatgtctttcttggccgacgtctgactgccgcccacgccgcacgctccgcggcgtccgctgcccaagaggttgccatcaagtttgagcacactagcagcaaaggctgtacctacgagcctccagctgaat

SEQ ID NO: 305510 - DNA, 167 bp, Zea mays
  unsure (1)..(167): unsure at all n locations
caactcgccgtctgccttctgcgcctccatttcggcctctgtcncttgcaagttcaatctcacctccaaccatgggtaaagagaagtcccacatcaacattgtggttattggccacgttgactctggcaagtcgaccaccacaggacacctgatctacaagcttgga

SEQ ID NO: 305511 - DNA, 208 bp, Zea mays
gccatggacaaagatcttcgctctcacgccaccctagactgcttctgcagtggcagcaccgccgtcaccgtcctcaagctcggctcggatctctacatggccaacattggtgactcgcgcgccgtgctaggctcaagggacggcggcggcatggtggccgtgcaactgactgtcgacctcaaaccagatgttcccagcgaggcagaac

SEQ ID NO: 305512 - DNA, 210 bp, Zea mays
  unsure (1)..(210): unsure at all n locations
cgntcatacagaagctcaagtttgtatttgtatgtcacagtttcgatatggttccttgttttctgttggctgtttgcaccttgtgtcttcaacccatcctgctttgagtggcacaagactgttgatgactggaatgactggtggaagtggatgggcaatagaggtggtattggattagcgcctgaacaaagttgggacgcttggtgggtg

SEQ ID NO: 305513 - DNA, 202 bp, Zea mays
ctgccattgtcgattctcattgtaggcgttggaaacgctgatttcaaacaaatggagatcttagacgcggacaatggtaagcgactggaaagctctacgggtaggatcgcgacacgcgacatcgtccagtttgttcccatgagggaagtccaaggtggcgagatctccgtcgtgcaatcccttctggaggaactgcccggtc

SEQ ID NO: 305514 - DNA, 163 bp, Zea mays
  unsure (1)..(163): unsure at all n locations
acccaaagcctccgacacccttcctctctcnctccgccgccgctgcgcacgcagggaacaagcgacatgggcgtctacacctttgtgtgccgcaacaacggcggcgagtggaccgccaagcagcactccggcgagatcgaggcttccgccgctaccccatacg

SEQ ID NO: 305515 - DNA, 100 bp, Zea mays
caccactgcaccctcacaaacctcaagcacgccaccaagtactactacgccatggggtttggccacacggtcaggaccttctggttcaccacgccgccca

SEQ ID NO: 305516 - DNA, 299 bp, Zea mays
cgccaaatcgctcgcgctcgccgtggcgctggacctccgcatccccgacgcgatccaccaccacggggccggcggcgccacccttctccagatcctcgccgagactgcgctccacccaagcaagcttcgcgcccttcgccgcctcatgcgcgtgctcaccgtcacgggcatcttcagcgtcgtcgagcaaccaccagcaggtggtggtgatgattcaaccgtccacacgtcggacgacgaagctgtcgtcgtctacaggttgacggcagcctcccgcttcctcgtcagcgacgacgtga

SEQ ID NO: 305517 - DNA, 286 bp, Zea mays
tgttggtgccacttagatctgccacaactgggagcaaggtcttgttgaccactcggatgaaactagtagctgaggttctgaatgcgggttatttggtttcgcttgatggattaagaagcagtgattgttggttgctgttgaaggaagttgctttgggtggagaaaccatggattttccacctgagttgcaagaggttgcaggaactcttgttgcaatggtgaagggttcacctttagctgctaaagctattgggcaaatggcaaggagcaccaggagcacacggaa

SEQ ID NO: 305518 - DNA, 279 bp, Zea mays
  unsure (1)..(279): unsure at all n locations
aanaaatcatggatctcaaatcaccggcaaatggtaccccacgttcgcacgacaagcgcaccaacaaagaaactcagctcgagttgacgttggtggttgagaccgagatgtcaggcgcttctagtagtagtgcagtggtcgtcacgacgttggtgcatggtgatgacttgtatgcagtccgaggtgaacttcctcgggaggctttcgcatcccaatctggtgaggctgctggggtactgctgggaggacaaggagctcctgctggtgtacgagtacatg

SEQ ID NO: 305519 - DNA, 290 bp, Zea mays
aactccaatagttttgccaattgttcactctggtttcgaaaaggtcatgccagaaaactcgttctttggacggcgaccaccggtgccactctgcagtaagaagatagacatcattgttggagagccaatagagtttgacttgccaagcttgaagcaagaagcatcaacggtaccccatgactcatcctctgaacggaaggggtggccggccattacaccagatgggctggacgaggccgcccagagatggctttaccagaagatgtcagacaaggtccagtctgtgatgg

SEQ ID NO: 305520 - DNA, 290 bp, Zea mays
caaaccttggtcttgttgacaaccactccaggccatggttccataacgtttccgcaatggagtggctttctttcaggctaaacatgctatccaactttgtctttgccttttctttgactctgctagtgagcctccctgaaggttttataaatccaagtattgctggacttgcagtgacttatgcattgaacctcaactcacagctggcatccataatttggaacatttgcaacacagaaaacaaaatgatatcagttgaaagaataatgcagtactcgaggatccctagt

SEQ ID NO: 305521 - DNA, 272 bp, Zea mays
  unsure (1)..(272): unsure at all n locations
ggcctgcggaggagcggcaagagctgccggctgcggtggctgaactacctgcgcccggacctcaagaaggagcccatctccaagcgcgaggaggagaccatcatctccctgcagcagtcgctcggcaaccggtggtcgacgatcgcggcgaggatgccaggcaggacggacaacgagatcaagaactactggaactcacgcatcaggaagcgcctcaacgcctngcgctccagagctgcangctgcgacggcggtgacagcgcggccgagcc

SEQ ID NO: 305522 - DNA, 306 bp, Zea mays
  unsure (1)..(306): unsure at all n locations
ctcagatccaaagaatactgtcttcgtagtcagtgggcggacaaggatgaactggctcgatggcttgagccctgtgaaaggctggggatctctgcagagcacggctacttcacaaggtggagcaggtattccccatgggagtcacccgacctgaaggtagactatggttggaaaaagatggttgagcctgtgatggacctttacgtggctgtaactgacgggtcatccgttgagactanagaaacagcattggtctggcactacgagggaactgatccagttttcggaccaagtcaggccaaggag

SEQ ID NO: 305523 - DNA, 292 bp, Zea mays
gactagttctagatcgcgttgcgcatgttgtaggagtagttctccagcgagttcttggcctccaccttgcgcaacacgatcaaggacgagaagattgcgtccaagctgccggccgatgacaagaagaagatcgaggacgccatcgacgcggccatcagctggctggacgccaaccagctcgccgaggcggacgagttcgaggacaagatgaaggagctggagagcctctgcaaccccatcatcgccaagatgtaccagggcgcgggtgaagacatgggcggcgctggcggca

SEQ ID NO: 305524 - DNA, 379 bp, Zea mays
  unsure (1)..(379): unsure at all n locations
gacgagatcaaggccgcgctggagcacgcctgcccgcgcaccgtctcctgcgccgacatcgtcgccgtcgccgcgnaggactccgtcgtcctggtacgtaccaagcagctaatgcagagcaataatggtttatttatgtatgtataaattactccggtgacgatggctggttgcatgcgctgcaccacagaccggcggacccggctgggaggtgccactggggaggacggactcgctgacggccagcctgagcggctcgaacaacctcatccctgctcccaacgactctctccccaccatcatcggcaagttcgccaaccaaggcctcgacatcgtcgacctcgtcgcactttcaggtacgtacgtatacacacagtag

SEQ ID NO: 305525 - DNA, 192 bp, Zea mays
agggagagagatatatagagccaatttttgcccgatttgcctgtctgctcgggactgagccggtattcctcttcctcgtcgacgagaataaataagctaagccagggccccggggaagaagaagatgagctccgccggaggcatggacgggtctccgccggtcgccgaattccagccgacggtgacgcacgg

SEQ ID NO: 305526 - DNA, 301 bp, Zea mays
tatacacttggctcttcaaaatgattcaactggttcagtattgagttggcagaatgatgtatttgtggtcgctgaacccggggaacttgcagacaggtttctgcaatctgtcaaaactatcttgtcaaccttgttgcgtgggtgtaatagaaagggtgcatattccctgtccaagatttcatgtttatctgagttggttgctgaatggccatcttttgaaatcggtgggatacaccaccgctatataggtcgacaaacacaagtaatggaagataaccaagaaattggtgcatatatgttt

SEQ ID NO: 305527 - DNA, 220 bp, Zea mays
gcacaaggagggtcttgcgatggtgaacggcacggccgtgggctctggccttgcctccactgtgctcttcgaggctaatatctttgccatcctcgccgaggtcctgtccgccgtgttctgcgaggtcatgaacggcaagccggagtacaccgaccacctgacccacaagctcaagcaccacccgggacagatcgaggctgctgctatcatggagcacatc

SEQ ID NO: 305528 - DNA, 320 bp, Zea mays
tgcgccccgccactggatgctcagcaaactcggcggcgtctgggcgccgcgcccgtctacgggcccgcacaagctgcgcgagtgcctgccgctgtcgctcatcttgcgcaaccgtctgcgctatgcgctgacgcgccgcgaggtgctgcagatcgtgatgcgcaagagcgtgcaggtcgacggaaacgtgcgcaccgacctcaactaccccgccggattccaagatgtgatcacgattccgaagacgtctgagcagttccgtctgctgtacgacgtgaagggccgcttcgtgctgcaccgcatcacgccggaggaggcga

SEQ ID NO: 305529 - DNA, 235 bp, Zea mays
  unsure (1)..(235): unsure at all n locations
aagaaacaagacacctttgcacgtgtatcaggatactgtgaacaaaatgatatccactcgccacaggtgacagtctatgagtccctgcttttctcagcatggctccggcttcccaaggacgtcgattcaaacaaaagaaagatcttcattgaggaggtgatggagcttgtggagctgaaaccactgagaaatgctttggttggacttcctgnagtgaatggtctgtcaactgagc

SEQ ID NO: 305530 - DNA, 313 bp, Zea mays
atactatcgagatcttctttgtgaatttggtgctatatttgccattgcaaacagagtcgatactgtacataagttaccatggataggtttccagtcatggcgggctgctggaagaaaggtatccttgtctgaaagagctgaagaaaccttagaggaaattacatctggagaaagtaacgaggatgttatatactactggtcaccaatggatatggaccaaacttctgacttttggttgacatgtgattctctaaatgctggcaattgcagatctcttttcgaagatgcatttagggctatgtatggattacca

SEQ ID NO: 305531 - DNA, 306 bp, Zea mays
cggcgttccgggcgacgcagcagtgccggtcgcagtgcatcaaccgcggcaggtactgcgcgcccgacccggagggggacttcggcgccggctacgagggcaaggacgtggtggtggagaacctgcgccagctctgcgtgcaccgcgtcgccaacgaaacgggccgcccctgggcctggtgggactacgtcatggactacaagatccggtgctccatgaaggagaagaagtacaccaagacctgcgccgaggacgtcgtcaccgcgctcggtctggatctcaagaaggtgctggagtgcatgggcg

SEQ ID NO: 305532 - DNA, 276 bp, Zea mays
cgcgcagctctcatcgtctcgctcgcctagagaagcagccgccgttgctgcatccgcgtccacagaatggggggattcgtgatgactcatatgaccagtgcgtatttcaaacgtatcctagtgatattcaagagaatgcgggctgtcaagacagactacagggccaggataaggctgattaaccaagacaagaacaagtacaacatactcatatacagatttgttgtgcgatttaccaacaaggacatcactgctcgaatcatatctggtagtata

SEQ ID NO: 305533 - DNA, 305 bp, Zea mays
  unsure (1)..(305): unsure at all n locations
ccaccacagcacagggacagcagcagtgccaccgccaccaccaacaccaaccatggcctccacagcgtccctgcagcgcttcctgcccgcctccccgcacgcgtcgtcccggcgccgcgccggccgcgcccgagcggccgtctccatcccgtcgtcgtccccgccggcgacacgggataatgaggtccccgcggaagtnctggagccgagggtcgaggcgcgggatggagggtactggtccctcaaggagaggtaccggaccgggctgaacccgcacgagaaggtgaagctggagaaggagccca

SEQ ID NO: 305534 - DNA, 296 bp, Zea mays
tgtgagggtgtgaagtacggagctggcattggccctggtgtctacgacatccactctcctaggattccctccaccgaggagatcgcagaccgcgtcgagaagatgctcgccgtgctcgacaccaacatcctctgggtgaaccctgactgtggtctcaagacacgcaagtacacggaggtcaagcccgccctgaccaacatggtctcggccaccaagctcatccgcacccagcttgccagcgcgaaatgagtcgtttgatagctccatggtctgatagcgcggaatgagccagtttg

SEQ ID NO: 305535 - DNA, 300 bp, Zea mays
ttccattcctcttctctctctctctctctctcccgtgctccgttagctatagctcttcgacctccaagaatcacacggccgggtcggtcgagcaggatgtggatgcgctgttgggcgagctgaacttcatccctggcacggtgttcacgacggacctgccgtacgtggatttcctggaccgcgtgcacaaggcggagctgaagctgcgcgccaaggggatgtgggaggtgccgcacccgtggctgaacctcttcgtgccggcgtcccgcatcgccgacttcgaccgcggcgtcttccgcg

SEQ ID NO: 305536 - DNA, 294 bp, Zea mays
gttttctctctcttgtaggttggcggctggactgtggtgtacgacggcctgacattcgtcaccgtgagatctgccgggcacatggtcccgtccacgcagccgcagcaagcgctcgagctgttcaagcacttcctggccaacacgaaactgccctccgagcccttctagatatataatagtgtgcaacaaagctctccactcctggataaacaagcaggagcgatcgtccgtgcaccacatttattagacctgttgtacctgcgttcttggaaggtgtaatggaacagtgctgtg

SEQ ID NO: 305537 - DNA, 295 bp, Zea mays
ctcgctgctcgttgccggctgcccccgcccactccaccgctgatatttgtcatcgtctcgttcctgccctcggccctccccaactccagcaggcagatcagatacatccattcgcggaccggaagtaatcatcaggaaaggaaagggttgaaccatgagcgccgtggctgtttcgtcgtcgctgaacccggacgcgccgctcttcatcccggcggcgctgctgcaggtggaggacttctcgccgcagtggtgggacctcatcaccaccactgcctggttccgcgaccactggtcc

SEQ ID NO: 305538 - DNA, 293 bp, Zea mays
tcgagcgacaacacctcatgtccaagtgctatagttattcatgaaagtgtccaccgacgaaggagaagccaaagcacaggagcatggtgctatgttcatggagaccagtgcaaaagctgggttcaacgtcaagcccctattccgcaagatcgctggatcccttctaggactagacgcactttcgtcaggaaagcaggaagacatggtcgacataaacctcagacctgccagcggttcgtcggcttcaggtgcagccgcgcagctggagcagaaatcaggcggttgctcctgtt

SEQ ID NO: 305539 - DNA, 306 bp, Zea mays
cggctcgaggcctggcggagagacccaccgagtggtccaccacagtaccgcagcagcacaatcttcgaggacgcgtcaccggaggttgtgagagatttcttctgggacgatgagttccggatgaagaacagctgggacgacatgcttcttcagcacgagacgctggaggagtgcaccgagactggaaccatggtggtccggtgggtcaggaagttcccgttcttctgcagcgacagggagtacatcataggccgcagatatgggcgtctgggaagacattttactgtgtgaccaagggtgttcctc

SEQ ID NO: 305540 - DNA, 294 bp, Zea mays
accacaacaaccgcctcctcgccatgtcggaggacgacctcccctaccacgtgcgcgtcaccgccgacggggacctcgagaccgccgggcgctacgacttcggcggccagctcgacaccgccatgatcgcgcaccccaagcttgacccggccaccggcgagctcttcgcgctcagctacaatgtcgtgtccaagccgttcctcaagtacttctacttcaccgccgacggccgcaagtcccccgacgtcgagatccccgtggacgcgcccaccatgatgcacgacttcgccgtca

SEQ ID NO: 305541 - DNA, 295 bp, Zea mays
  unsure (1)..(295): unsure at all n locations
caacgtttgctcacccagaccaagatgctccgccgcgccgccactacgtcggctgcactctgccgccgcgcgctctctaccacgccatcctcttcccgcaccgcggcggaaaccgcggcggtctcctctgagttgaactccgtcctcctccgctcgctcaaggagcactacctcgacgtctgcaagatgacgccgccgcccaaggtcagctcgcccaatgccttcaccatcgtcanaggcgcactggacnagccgtcgggcaccgtgctgcgccgcgaatacggcgaagacggag

SEQ ID NO: 305542 - DNA, 300 bp, Zea mays
agcgcagggtgcaagaagctgtccctccctccctcccctgtgcttctgctagctaggtgcctgcggaggagagatagggatacgatggccggcggtggcatcgtgaacacgggcggtggcaaggactaccccggcaagctcacccgtggcggaacatcctgcgccgccggtaccgcgcgcagctcaccatggccgtcgcgatccccttcttccagcagctcacggggatcaacgtcatcatgttctacgcgcccgtgctgttcgacacgctgggattcaagaacgacgcctccctcatgt

SEQ ID NO: 305543 - DNA, 307 bp, Zea mays
cgtggaccaaggccaagcacccgctgcactcggcggcgctgacggggatgtgggagtgccccgacttcttcccggtgtccgggccggggatgcaggccggcctcgacacctccgcgcccggaaggaagtacgtgctcaagagcagcctcgacctcacccgctacgactactacaccatcgggtcgtacgacggcggcaaggaccggtactaccccgacgaccccgccggcgactaccaccaccgccgccgctacgactacggcaactactacgcgtccaagacgttctacgaccccgtggagcgccg

SEQ ID NO: 305544 - DNA, 311 bp, Zea mays
cggctcgagcttctctctctgctcctccgcctccgcctgatccatccaagacagggatcgccatgtcggactcggaggagcaccacttcgaatcgaaggccgacgctggggcgtccaagacctacccgcagcaggctggcaccgtccgtaagaacggcttcatcgtcatcaagaaccgtccctgcaacgttgtggaggtttctacctccaagactggtaagcatggccacgccaaatgccactttgtcgccatagacatattcaatgggaaaaagcttgaagatattgttccttcatcacacaactgtgac

SEQ ID NO: 305545 - DNA, 327 bp, Zea mays
  unsure (1)..(327): unsure at all n locations
actcggaatcgtcccnagtactcgactgctgagagagtctgatgaaaccaactcgaactgcaaaacgctgcaagaccgtggaggaggtgatccagaaagcgaacaacacccggtacggcctggccgccggcatcgtgaccaagaacatcgacgtcgccaacaccgtgtcgcggtccatccgcgccggcgccatctggatcaactgctacttcgcgttcgacccggacgcgccgttcggcgggtacaagatgagcgggttcggcaaggacatgggcatggacgcgctcgacaagtacctgcagaccaagaccgtggtcactccgctgt

SEQ ID NO: 305546 - DNA, 295 bp, Zea mays
tgggagtcatcggagggctccggcgagttcctgcagctggcgtggtccatgcgcaatggctccgacatcgctaacttctcggagctccggctcactgcgcactccggcacccacgtcgacgtgctaggacacgtcttcgagcactactacgacgcctgcttcaatgtcgacaccctcgaactcgccgtcctcaacggaccagcgttgttggttgacgttcccagagataagaacatcacaggagttgactacttgtcggtgggcgcatttgatgaatgcattccagctcatctag

SEQ ID NO: 305547 - DNA, 232 bp, Zea mays
caaccatccggttcttattcactgcaagcgaggataggtaagcagcttgactatgtcatgcagtcagtctgttccccatgtagtatgtatgagcctgacgtttgaaacatgaaccaagatttgcagcatcgaaccgggtgtgtggttggatgctttaggcaattgcaacgctggtgtcgaacttcaatatttgacgaataccagcgtgttgctgcatgccagaacaagagtt

SEQ ID NO: 305548 - DNA, 308 bp, Zea mays
atgggattgttcaaactgcaaatgatattcatcgttatgtgcggtgtacgctgcttaattccacaagaccttttgatgatgtcgtgaagtcagctcaagactcccttcgttggttatgccataaaagctttcttgagtggaaccatgagaccaagatatactccgctactccccttggtagagctgcttttggaagttcactcaaccctgaggaatcattggttgttcttgatgatctttcgagggcaagagaaggctttgttctggcatctgatttacatttagtttacttggtcacacccataaat

SEQ ID NO: 305549 - DNA, 309 bp, Zea mays
gctgattgttttgccacattagagattatccatcacctatggcctagaattcctggcaagttcaaagattatatcaacagccccaaacccaacaggtatcagtccctgcacacggttgttctcactgaacaaacgctgccactcgagatccaaattcgtacgagggacatgcatttgcaggcggagttcggaattgctgctcattggagatataaggaaggtgaacggagttgctgcacctctgtttctgaaattgttgagtgggtcagatgggttacatggcactgtcgaactctgaacacaggctat

SEQ ID NO: 305550 - DNA, 311 bp, Zea mays
tgcagccatcaaaagccatggaaggccgcgcgcgcctctccctcgtccacgccgccgccgcgctggtggtcctgctgcagctgcatggcggcgccgtcgtggttgcgtctgaggcgccctacacctgcagcgccggagcgccgcccaacatcccgttctgcgacgcggggctgcccatcgaccggcgcgtcgacgacctcgtctcgcggatgacggtggcggagaagatctcgcagctcggggaccagtcgccggccatcgcgcggctcggcgtgccggcgtacaagtcgtggtccgaggcgctgcacggg

SEQ ID NO: 305551 - DNA, 287 bp, Zea mays
gcaggttgcggtgttcgcgcagaacatcccggccttctgcgagctccacttcggcattcccatggcgggcgccgtgatctgcgcgctcaactcgcggctcgacgccggcatggcgaccgtgctgctgcagcactcggaggccaaggtcgtgttcgtggacgccgcgctactgggcgtcgccgggaggcgctccgctcatctcccagcaggccggcggacgagcagggtgcccgcgtggactaatcacgaggcgtcgacgaccgccgtcacgggacaggaacgacaag

SEQ ID NO: 305552 - DNA, 222 bp, Zea mays
cttcaacgcgtccgcctactgcaacagcaagctcatcggtgccaagttcttctaccaggggtacgaagctgctctcggccaccccatcgatgagaccaaggagtcgaagtcgccactggacactgagggccatggcacgcacaccgcctccacggcggctggctcgccggtggccggagccgggttcttcgactacgccgaggggcaggccgtgggtatgga

SEQ ID NO: 305553 - DNA, 225 bp, Zea mays
acagcgatcaccacacacgaatcgcaaatatgggtaaaggaaagcctcgtggtcttaacgcagcgcgcaagctccggaacaaccgccgtgagcagcgttggtccgatcttgcctacaagaagcgtgccctgggtaccgctttcaagtcgtctcccttcggtggctcttcccacgccaagggcattgttctggagaaggtcggtgttgaggccaagcagcccaact

SEQ ID NO: 305554 - DNA, 224 bp, Zea mays
acagctgtgatatgaaccaaaatccattgtcacaagtgaaatatgtagcaattgtgcttgaagctgaggaattttgtaaccttataagcaatggatcgttctttgatcatgtccaaagagtttgtgatggatacccaggattcaccatttgctacatcattaataaattgatgaactacatcaacaaatgtgagcaaagtcaatacaagaacccttcaaatact

SEQ ID NO: 305555 - DNA, 292 bp, Zea mays
gtgccgtccaccgaccaccggtgacacggcgccgatagcaagagttcaggaggagcgcggagccgtttctggtggtagcggtgtccgagaggcgcggcgagatgtctgtgcggataaaggcggtggtggacaggttcgtgatggagctcaaggaggcactggacgcggacatccaggaccgcgtcatgaaggagcgggagatgcagagctacatcgcggacacgagcgcgaggttgccgagagggaggccgcgtggaatgccgagctctcccgccgcgaggctgagatcgcg

SEQ ID NO: 305556 - DNA, 291 bp, Zea mays
gtggtgttagaggtggtggcgaacagcctcgcaggcgatgttttggcgacccagaaatgacctcagcttggtgctagccttcgagagcactcgagaacgcaacacggccatcatgctcgctcggcgtttcgctgtagactgcaatatcatccttgctgggccaggcgacaaaactccctggtgatggcacctgtgctgctctgccaatccccaccactcttaacaatccgcgattcgcacagcttgcttgcaccagttcctctgattttccttcctcgtcagtctgggctg

SEQ ID NO: 305557 - DNA, 292 bp, Zea mays
agctgatctatgtatcacatttgtctacattttttactggcgctgaatggtgggcacaggattttcggaaatcactacccttttttggttggattccacttccatttctttctgaaattgaaattcctttatatgttcttgtgctgattcttatgatcgtatgtgctgttatacctactgttagatccaatgtcagcaatgtccaagaggtagttgaggcacgaaaaggaagcatggcattagcattagccatgatccttccttttattgtactgatagctggagtagctat

SEQ ID NO: 305558 - DNA, 291 bp, Zea mays
  unsure (1)..(291): unsure at all n locations
agaanaactacttttcttttataaaaaaacttatagaaaacatttcagaaggggagtttggctggggcggcacatctgttaaatgataacacaggtgtccaaagatgagctcaacaagaacagaaatcttgtgttgaacaaaagggtaaaagctacatttgattttgttgattttcaagtaggaatacaaactgtgaaagcatggcctatcgatcctttatttattttcttttaaaaaaaaatgtgtagaaaagccactacttggcgatagaggtgtcagaatagttacca

SEQ ID NO: 305559 - DNA, 200 bp, Zea mays
cactgcactgctgctccgctgccgctaccctttccctctcccttctcgtcctctgtcctccccaatccatggccactgccatcaccacccactgccccttctcccaccactctatttatcgcggctgcacgactcctgcccatcatgcgccatagagacgcgtgggacctaagccgccgatctatcgctgctcggggcgg

SEQ ID NO: 305560 - DNA, 290 bp, Zea mays
gccgtcgcatacctccccacccgcgccttcgccgcccgccccgggctccgccctccgacgccgagtcccagtgcgtcatttgtctcgaagaatacgaagagagggacgtgctacgcgtcctccctcactgcggccatgacttccacatggcatgtatacatgtatggctggagcagaactcgacctgccccgtctgtagaatctcgttgctcgataatcccaacagcgagcacaatgcccctccgccgccgccgccgccgctacccggtgtagcagtgacgatgagctct

SEQ ID NO: 305561 - DNA, 294 bp, Zea mays
cgataggttcgcctcccgccccgccgacgacaccgttgacgggcaactcaagtgtgagaaatggatccgtgacgatgacagcaagtcagaggaatcaaagatgaaatggtgggtgaagcgtttgattggcaggcctaaggatgtccgcatcatttggccatacccattcacggaaggcaagctatttgttatgactttaacagctggtttggaaggttaccatgtcaacgttgatgggcggcatgttgcttcgtttccttaccgcactggttactctcttgaggatgcaactgc

SEQ ID NO: 305562 - DNA, 305 bp, Zea mays
cccaagacctcctcagacccgagaagcgcactgcgagccatggacgccaccggcactggagctggagggaaggcgaagaagggagcggccggtcgcaaggccggcgggccgaggaagaagtcggtgacgaggtccgtgaaggccgggctccagttccccgtcggccgcatcgggcgctacctcaagaagggccgctacgcgcacgcgtgcggcagcggtgcccccgtctacctcgcggccgtcctggagtacctcgccgctgaggtcctggagctcgccggcaacgctgccaaggacaacaagaa

SEQ ID NO: 305563 - DNA, 292 bp, Zea mays
accgccgtaacatccacggcatgctgaacgcgatcgcctggggcgtcctgatccccgtcggcgccatcatcgcgcggtacctgcgcgtgttcgagtccgcggacccggcgtggttctacctgcacatcgcgtgccagtgctccggctacatcctgggcgtggccggctggggcctggggctgaagctcggcagcgagtcggccggcgtcacctaccagccgcaccgcagcatcggcatcgccatcttctgcctggccacgctgcaggtgttcgcgctgctgctccggcccga

SEQ ID NO: 305564 - DNA, 283 bp, Zea mays
aggaggaggaggaggaagcaagtatccatctgacagcagggtgccccccaatggcgacaagatcgacatctacgatttcggcgtgatcctgctcgaggtcgtgaccgggaggcccatcacgtccatacacgaggtggaggtcatgaaggagcagctgcagtcggcgcggacggtgatggagatctgcctgcgctgcctggccaaggaggcggagcagcggccgtcggtggaggacgtgctgtggaacctgcagttcgcggcgcaggtgcaggacgactggcgc

SEQ ID NO: 305565 - DNA, 134 bp, Zea mays
caaaacgagaacgaggagctcatcaaatacggcctccccgaggacgtctggttccatgtggacaaggtatcctcggcacacgtctacctgaggctaaagaaaggtgagacgatacacaccatcagcgaggccct

SEQ ID NO: 305566 - DNA, 196 bp, Zea mays
gcggaaccagtcgagggcatgagcggcaaggagctggacggccgcaacatcagcgtcaacgaggcccagtcccgttgcggccgttgaagctgcggcggtggggtcggtggtggccgttgatgcggcggctacggcggtggctggcgccgtgattgcggcggctgctactgttgtggtgtctgctgctatggcggtt

SEQ ID NO: 305567 - DNA, 223 bp, Zea mays
ggacggacgacaacgcctccatgatggaggccttcatggcttctgccgacctccccaccttcccctggggagcgccggccgggggcggcaactcgtcggccgccgcggcgtcgccgccgccgcagatgccagcggcgatggctcccgggttcaaccaggacacgctgcagcagaggctacaagccatgatagaggggtcgatggagacctggacctacgccat

SEQ ID NO: 305568 - DNA, 295 bp, Zea mays
tcatgctccaaatatttgctcccttgcgctgagttcgttacttcattgtcgcgaagtcatctgtgtgcgtcgtctgcgctccagcagcctgccagccagactcgtcgccggagttcgccgttcatcgccggagctacgccacccgtcatccgaagccgagccctgctcttctccacccggccgaaaccccgtcgagccatccctgtcacacgtgcgaacccaagaagccgactgtgtggtagagaatccgaactcgttcggggacgacccgcaagacgctgttgagcaagagggt

SEQ ID NO: 305569 - DNA, 307 bp, Zea mays
aagtccaccaacatcctgctcgacgaggactacgaggccaagatcgccgacttcggcattgccaaggtcgccgaggattcctccgactccgagttcagctgcttcgccggaacgcatggctacctcgcgcccgagctggcctactcgctcaaagtgacggagaagacggacgtgtacagcttcggcgtggtgctgctggagctggtcaccggccggagcccgatcgacccgcgcttcggcgagggcagggacatcgtgttctggctttccagcaagctcgcctcggagagcctccacgacgtcctgg

SEQ ID NO: 305570 - DNA, 292 bp, Zea mays
gtcggaggtggaggacgaggcggcgacgccgctgctcgccaacggtgcagccgacgtccgccggagggtgcgccgccgcgacgcttcctgtcgtttgattttcgttttctcttttctcggatttggctgcttttatgagccctgatcttgtccggcgggtgccgtggtgtgcagagggaccaggcgaaggcaattctgtccacgcaggccgtcaggatcgccaccaaggccgagcagcatgagcgcttcatctttaaggtcacacacttgctgggtgttcttggatttgggg

SEQ ID NO: 305571 - DNA, 117 bp, Zea mays
actgggtcactcagggtcattggccttttccgtcagatcatattatggagggatatgcttatatactcaccccacctggcatccccacggtgttctatgatcacttctatgaccagg

SEQ ID NO: 305572 - DNA, 172 bp, Zea mays
cggaagtacctgttcgacctccagaacaaggtgtccatgagatggatcctgaacctgggcccgagcctgggcatcgtgcgcgtgcccgggatcggcctcatctacacggagctggtgacgggcgtgccggccatcttctcgcactttcgtcacaacctgccggcgttccaca

SEQ ID NO: 305573 - DNA, 165 bp, Zea mays
tgtgtgcgctacaaccagcatatcgccaactgctgcaaggccggcgtggtgtcggcgtacgggcaggacccggcgtggtccgtctccgcgttccaggtctccgtcggcctggccggtaccaccaacaagacggttaagctgtccaggaacttcactctcatgggg

SEQ ID NO: 305574 - DNA, 283 bp, Zea mays
atttcagtagaaaacaaagacggcatgtcaagatcagccatatttaaatttatttcatcaattgataaaagattccggatactttgttatctgatgaagttctgggctaaggtacatgatgtgaactgccccaaagatcgaacaatgagctctatggcaattatttctttagtttcttttcatttacagactcggtgtcctccaatattacctgcattttctgccgtattgaaagatggtacagattttgcaagtattgagaagaatgtatcactattccagg

SEQ ID NO: 305575 - DNA, 383 bp, Zea mays
cagatttttacaaccacaagggacaaagaaagatgaaagaacaattgtttgtggacaagtttcaggaaacagtccagcatactttcttagattatatatccagtggatttgagctcaatttcatggtggctatagattttactgcttcaaatggagacccacgtgtaccccagtccttgcactacattgacccctctggcagacctaattcgtatcaacaggcaatgctgggggttggcgaagttctgcagttttatgacaatgataggcgatttcctacgtggggttttggagcaagggtacatggttatgtatcacattgctttaacttgaatacagctacaaatgactctgaggtggttggagtttgaagcatcatgtca

SEQ ID NO: 305576 - DNA, 222 bp, Zea mays
cgaccagaagaacattctatgaatttatagatcgttttggtattcttgcgcctgatgttttgagtggaagttctgatgaggtcagtgctgtaaggaggttgttggacaagatagatcttcaaggttaccagattggcaagacaaaagtattccttcgtgctggtcagatggctgaacttgatgctcgtagaaatgaagtgctagggcgttcagctagcatga

SEQ ID NO: 305577 - DNA, 367 bp, Zea mays
tgaaacagcccttgtacttggtggagctgcttctgctgcaatccccccttattccttttttgcttcttctggtaattcagtaccattgcacagtgaagtagtggagcatttagcatctgtcattgcaccagcattgtgcccttcggatattttaccaaaaatcaagttttccacttttttatatggcccgccaggatgtggaaagcgcacagtggttaggcatgttgctaaccatcttggtctgcatgtggtcgagtgtagctgtcatgatctgatgacatcatcagaaagtgggggcactactgcacttgcaactacctttaaagaagctcagaagtaatctccttgtataatacttcttcgccac

SEQ ID NO: 305578 - DNA, 309 bp, Zea mays
ctcttcaccatctggggcgtcctccagctgctccgtcgccaccccggccgcgtccccgatctcgacctcatgttcgacaccgtcgactggcccgtcgtccgctcccacctctaccgcgggaagaacgccgagatgttgccgccgctgttccgctactgcggggatgataaaacgctggatatcgtcttcccggattggtcattctggggatggccggagatcaacataaaaccatgggatgccttgaaggaggacttgaaggctggtaataacagagtgagatggatggatagagaaccttatgcttac

SEQ ID NO: 305579 - DNA, 221 bp, Zea mays
ctcagacattacaccagctttcccatatgttgcaccgttttcatggaccgtcccagacatttgccgtattgttcgtacggtcattgaagactctgtgagcttcatggcacatgggggacgtggggatacctatgcagcagtgaagaagtaccttggtcggatcctatctgaggtagtggatgcttcgattaaaaaacttttggaatcaggcagtggtctaa

SEQ ID NO: 305580 - DNA, 288 bp, Zea mays
acgccgcctgctggatccggcgggaatgggggcgacgataaccggaccatctgggtgggcgacctgcagtactggatggatgagaactacctccacagctgcttcggccccagcggcgaggtggtgaatattaaagtaattcgcaatagacactcgggagtttccgagggttatggttttgtagagttttactctcacgtttcagcagagaaggcactacagaatttttctggtcatgtaatgcctaatactgagcgagcttttaagttaaactgggcatcatatagt

SEQ ID NO: 305581 - DNA, 218 bp, Zea mays
cttctaattattatgattttgatgtacttgtatggtggcatatgctgcagctatgtgtagattttgaatacccagtgtgatgagcatgcatggcgccttcatagttcatatgctgtttatttcctttgagactgttcttttttgttgatagtcaccctgttgtttggtgattcttatgcagatgcagatcttcgtcaagactctcactggaaagacta

SEQ ID NO: 305582 - DNA, 367 bp, Zea mays
cggctcgagctaggacgtttctccgccagagctcctgcgcttcatgcgggagcagcggtcgcagtgggccgacagcaatctagacgcgttcttcgcttctgcgatgaaaccggatttctgcagcttgcctattcctcctcgccttggagggtttggtggccaggtcatacttcctctagcccacacgtttgaccctgaagaattcctcgaggttataaaagtaggaaatgccggtaactaccaagacgcgctcctgcaccgtgatctgtttctgttgcagatgtacaacggggtagacgagaacatggcaggcacttgttcagagctcatgctttgccctatagacgcatcgttcagcgacgactcg

SEQ ID NO: 305583 - DNA, 177 bp, Zea mays
  unsure (1)..(177): unsure at all n locations
agccgtggtatcnccaaacatttaaagcgtctcaatgcccccaagcactggatgctcgggaaaatgggcggcgactgggctcctcatccctcgcctggtcctcacaaactccgtgagtgccttcctttggttgtcctcttgcgaaacagactgaagtatgccctcacccgtaaggag

SEQ ID NO: 305584 - DNA, 308 bp, Zea mays
aggaagagagtatgatatggaaagatatcagttgtttaagcatttccgattcgattggccagtgaatcacacgtcattgagccctgatggaaagcttgttattattgttggtgatgacacagatgctttacttattgatgctaattcaggaaagactattcattccatgaaaggtcacttggatttctcctttgcttcggcttggagcccagatggcctgacattcgccacaggtaaccaagacaaaacttgtcggatttgggatgccaggaatctcaccgagtctgtctatgtcctgagaggcaacg

SEQ ID NO: 305585 - DNA, 327 bp, Zea mays
cccggtctgacgagaagctactgtccgtcttccgtgagggtgtgaagtacggagctggcattggccctggtgtctacgacatccactctcctaggattccctccaccgaggagatcgcagaccgcgtcgagaagatgctcgccgtgctcgacaccaacatcctctgggtgaaccctgactgtggtctcaagacacgcaagtacacggaggtcaagcccgccctgaccaacatggtctcggccaccaagctcatccgcacccagcttgccagcgcgaaatgagtcgtttgatagctccatggtctgatagcgcggaatgagccagttt

SEQ ID NO: 305586 - DNA, 336 bp, Zea mays
gccacagcgacgagctggggggtgaacgtgaaagggtgggtgccgtacgcggtgacggtgcccgcgtggtttgcgtcgacggtgtgcctgtgggcgttcgtgccgcagcaggcgcgcccaagttgtggggcgtgccgctagtgccgtggctgccgtcagcgtccatcgccatcaacgtcttcctcctgggatccatcgactacaagtcgttcatgcgcttcggcttctggacgggcgggcttctcgtttactacctcttcatcggcctgcacgcgtcctacgacacagccaaggcgctcgccgccgagtctgccatggccaatgtggaggatggcg

SEQ ID NO: 305587 - DNA, 320 bp, Zea mays
gaacgcccccggctgccccaccacctccggggcaggggctggagccggtgccggcagcaccttcagcggcccagtaggccggtcctctaggtcctccggctacctcggccgcgcagggccgcagccgatgctcccgttcctgccggcgttcaacgacacgaacacggcgaccgccttctcgaacaggctccggagcccagtgccggtgaaggtgcccggcccggtgacccaggaggtgttcaccaccgtggggttcgggctcttcaactgccgccccggcccgttctgccagggccccaacaacagcccgttcggcgcga

SEQ ID NO: 305588 - DNA, 323 bp, Zea mays
tccgctatgagtccctctcagacccatccaagctcgactcgggcaaggatcttcgtatcgacattattcctgataaggaaaacaagaccatcaccatccgcgataccggtattggtatgaccaaggctgatctcatcaacaacctcggtactattgcccgctccggtaccaagcagttcatggaggctctgactgctggtgccgatatctccatgattggtcagttcggtgtcggtttctactctgcatacctcgtcgccgacaaggtcaccgtcatctcaaagcacaatgatgacgagcagtacatctgggagtctagcgcg

SEQ ID NO: 305589 - DNA, 325 bp, Zea mays
agtcagatatgtaaatcgtttaaagctttgtgctagtctaatcttgatctgtggttccttttagtcatgatgtttatgccgatacaattatatataaagcagtttttggttaataaacagtaaacttcctgaattaataattaaagtttattttgtattattcaggatggcctcctgatttgataatggaagtcattttgtattattcagtatagccttggtacctggtagatagccatgcttattatgcatattgttttgcagatgagctcatcaagaatgctgcctacattggcacccccggcaagggtatccttgctgctga

SEQ ID NO: 305590 - DNA, 334 bp, Zea mays
ctcgctcgcaagaacaacagacagagctcagagtaacaatagtcaagaaaagctccagctcgaccacacctgcgcatatagccatggccgccgccggcagctacgcagccctgtcctcctgcctcctggcgctcgccctgctggccgccaccgcgtcggcgcaggagaaggagacgcacctgcgcgtgttctggcacgacgtggtgaccgggggcccgaacgtgtccacgatagtccaggtggccgaggccccctcgtccaacgcctccgccacgggcttcggcaccgtcatcgtcatcgacgacccgctcaccgagggccccaacctgacgat

SEQ ID NO: 305591 - DNA, 316 bp, Zea mays
gtagccattagcagctggaacttgttggaggagatctagagcttagctttgagagagataaaaatgggcgtgggaaaagttctgaacgacgtgaagccgtacctggccatggtcctgctgcaggtaggcttcgccgggatgtacatcgtggccgtggcctcgctcaagcgcgggatgagccacttcgtcctcgtcgtgtaccgtaacctctgcgccaccgccgtcatggcgccattcgcgctctggttcgagaggaacgcgaggccaaggatgaccatcaccatcttcctcaagataatggggctcgccatgctcg

SEQ ID NO: 305592 - DNA, 320 bp, Zea mays
atctcctcgcattttccttgcaaccgattgcctatcgccctcccagcccaagatcgatggcgcgcaaggtcgagaagaagcccgcggcgaagaatccggcggaggaggagcccgctgcggagaagacgaccgccgggaagaagctcaatgcggagaagctggtccccgcgggcaagtccgccggcatagagggcggcgagggcaagcgtggctagatgaagggcaagaagatcgttgagacgtacaagatctacatcttcaaggtgctgaagcaggtgcacccggtcatcggcatctcgtccaaggccatgtccatcatg

SEQ ID NO: 305593 - DNA, 221 bp, Zea mays
caacaacaaacaaacaaacgaaacaactcaaaaccgaacttctgtttctttcagttatcgaaatggctaaggatccaatcagagtcctcgttaccggtgctgccggtcaaattgcatactccttggtcttcccaattgccaagggagagctcttcggaaaggaccaacctttgattcttcacttgttggatatcgcacaagctcaagaagctctcggtgga

SEQ ID NO: 305594 - DNA, 320 bp, Zea mays
caccattagagcgcgcgcgccaagctcgtggtgaggttttcgagatgaaggttatcgagaagatcctggaggcggcgggggatggccggacggcgttctcgttcgagtacttccctcccaagacggaggagggggtcgagaacctgttcgagcggatggaccgcatggtggcgcacggcccctcgaaatcgccaaccgtatgcagaacatggtgtgtgtggaaaccatgatgcacctgacatgtacaaacatgccagtagagaagattgaccatgccttggaaaccatcaaatccaatgggattcaaaatgttttggccc

SEQ ID NO: 305595 - DNA, 316 bp, Zea mays
  unsure (1)..(316): unsure at all n locations
cggacactatttgggagtagatggcaaatgtcacgaaaaagatgtacaatacgcatttccattgagtggatttgttaatgttactcaatacaatgtagatgatttgaaattggctttgttcgaaaatggtccagttactgttgccattaatgccgctgtacgtactttctcgttctactcaaacggtgtatactatgacagtgattgtcacggaggtgaagacgatttggatcatcaagtgttgttagttggttatggcactttgaacaatgactcctactggctcnatcaaaacagttggtctactcattggggt

SEQ ID NO: 305596 - DNA, 330 bp, Zea mays
ggagaactgccacgagaacgccatggtgctcaaggagggcctggagaagacgggccgcttcgacatcgtgtccaaggacgaaggcgtcccgctggtggccttctccctcaaggaccgcagccggcacgacgagttcgagatctcggacatgctgcgccgcttcggctggatcgtgccggcatacaccatgccccccgacgcgcagacgtcacggtgctccgcgtcgtcatccgggaggagttcagccgcaccctcgccgagcgcctcgttctcgacatcgagaaggtgatgtaccagctggacgcgctcccgtccaggctcccgccccct

SEQ ID NO: 305597 - DNA, 316 bp, Zea mays
tgagcgacggcatcattggtgtcgggtcatcggggacggtgtactgtgtgaagatgtcgtacggggatgtcattgtggtgaagtagctgtggcaaccgtcggcgcagtaggagggtggagctcaggcgccggaggagccatcaaagcggaaggacgtggcagtcgcggacgacggcaacaggagcatgtacgccgtggtggtggtgctgggtcacctccggcaccgtaacatcgtccggctgttggggtggtgcatcgacggcgatgcgacgctgctgctctacgagtacatgtcgtacggcagcctggacgagct

SEQ ID NO: 305598 - DNA, 318 bp, Zea mays
gccttctgcgcctccatttcggcctctgtcccttgcaagttcaatctcacctccaaccatgggtaaagagaagtcccacatcaacattgtggttattggccatgtcgactctggcaagtcgaccaccacaggacaccttatctacaagcttggaggcattgacaagcgtgtgatcgagaggttcgagaaggaggctgctgaaatgaacaagcggtccttcaagtacgcgtgggtgctcgacaagctcaaggctgagcgtgagagaggtatcaccattgatatcgctctgtggaagtttgagaccaccaagtactactg

SEQ ID NO: 305599 - DNA, 307 bp, Zea mays
gtcagtcagacacaggcacacagctagcaagctagcgtacgcaccagccgagctcggacatggcgtaggggaggccgagcacgccggcgccgaccatggcggtgacattgtggaaggcggagtaccaccacttggcgttcctccgcgcgttgatggggagccagtcgtcgatggccttctcctctgcgggccgccactgcgagtccggccagcgccctccgggtgtcacagggcggctggcgagctgcagggagttgagtcgatttcatcggtcatccccaaattaagcgcacagtcagatctttgt

SEQ ID NO: 305600 - DNA, 231 bp, Zea mays
aaatttcgatgacaagtatatcatcggcacaggtgctcacggaactgtttacaaggcaacactgaggtcaggggatgtttatgctataaagaagcttgcgatttctgcacacaaaggttcatacaaaagcatggttagagaactgaagacactgggtgaaattaagcacagaaacttgataaagctgaaagaattttggttgagaagtgataatggattcatactgtatga

SEQ ID NO: 305601 - DNA, 207 bp, Zea mays
agagacctgaagccggagaacgtcctcgtgagagaagatggccacatcgtgctctccgacttcgacctctcccttcgctgcgcggtctcgccgacgctggtgagaccttccctgggctccgaccccaggaacaggcaggcctgcacccagcccaccgcctgcatccagcccacatgcttcatgcccaagctcttcggccagaggagc

SEQ ID NO: 305602 - DNA, 205 bp, Zea mays
cgcagctcagcttagcaatccgtctctctatctacaggcgggggaattagtagatggagggcaaggaggaggacgttcgcctgggcgccaaccgctactcggagcgccagccaatcggcacggcggcgcagggcacggaggagaaggagtacaaggagcctccgccggcgccgctgttcgaggcggacgagctgacgtcgtggtc

SEQ ID NO: 305603 - DNA, 334 bp, Zea mays
agacatcatggagaatgggctagtcgactactccccacacaatccgacgcagatcgaaaaactcgactctgcatctaatgtcattctcattgacaactatgattccttcacttggaatatctatcaatacctggccctcgaaggtgcttcagtaacggtctatcgcaatgaccagattacgctggaggggctgattgccgagaaacccacccagttggtgatcagtcctggccccggccatccggacaccgatggggggattagcaaagcagcaattagggaattcagtgggacaatacctgttgtcgggggttgcatgggtcatcaatgcatg

SEQ ID NO: 305604 - DNA, 304 bp, Zea mays
cagggagaagtgtgtcggatgcagcaagacagtctatccaattgagagggttactgtgaacaacaccatgtaccacaagtgctgcttcaagtgctgccatggaggatgcaccatcagcccttctaactacatcgcgcacgaggggaagctctactgcaagcaccaccacgtccagctgatcaaggagaaagggaacttcagccagctcgagaatgaccacgagaagacatcgcaggctgggtcgctggaggacgacgaagaagaagagtattaattaatcgctgagcaaaaatacataccacca

SEQ ID NO: 305605 - DNA, 172 bp, Zea mays
cgaccctctcacgtggtggaggtcttcgtacgcgtgacgggacgcgaagtcggcacggcgtcgtcgctggacctcaagatcggtacgctcggtctctccacgaagaagatcggttacgacatcgccaaggagaccgccaacgactggaggggcctccgcgtcaccgtcaagc

SEQ ID NO: 305606 - DNA, 317 bp, Zea mays
aagggacacaagaattacgagctcatgctgcagctgcaattgggcatcaggcattccgtgggaaagtcttcggccgtgccgacgcgagcactgcaaccgggcgattttgacccaggggagaagttctggacacggttcccaccagagggttcgaaggttacgctaccacattcatctggagagttccgatggaaggactactgccccatggtgttcaggcatttgaggaagttgtttgctgttgatacagcggattacatgcttgcgatctgtggcaatgatgctctgagggagctgtcttcacccggcaaaagtgg

SEQ ID NO: 305607 - DNA, 321 bp, Zea mays
  unsure (1)..(321): unsure at all n locations
gctcacttgtacgttgacccccgggaaaaggtcactgctcggtatcagctcatctgtccatcaaagagagaggtcatgatatttggaagcctgaagcaggctgggacgctgctaccaaaagcgccgaatggctgngcgctggcgcactgctatactatttgatgagcttgctgatcttctccagggtggtgccctgcgaattgctgcagtggtccagcttgtctagattagttgcagaaaacaactgcttgcaaggatggtgatagcacatgcagttgtgtaattgatatactccctccgtcctanaatatagttnttctg

SEQ ID NO: 305608 - DNA, 318 bp, Zea mays
atcagctcccatatccgctcgcctacctctccagcatctgccgtctccgtcgtctcgtctctgctcctcacctcgccgccagccatgggcaagatcaagatcggaatcaacggtttcggaaggatcggcaggctcgtggccagggtcgccctgcagagcgaggatgtcgagctcgtcgccgtcaacgaccccttcatcaccacggattacatgagctacatgttcaagtacgacaccgtgcacgtgcaatggaaggacagcgacatcacgctcaacgactccaagacgcttctcttcggcgagaagcggtcaccgtct

SEQ ID NO: 305609 - DNA, 324 bp, Zea mays
gttaaatacatgcgttctcaagtaggacctgcttctcgtctttacacttctttcaaggagttgagctcaaaattggcttctattaaagatgttgttgttgttggtgttttcggttctgaatctgattcattggccaaagaattccacaaaacggctgatcgtttacgggaaaatgtcaactttgctcatatctacactaaagatgcttctgactctgttgaagaattagctaaacaagttggaaaatctttttcaggagaatccagtgtagttcttgtacgcccaccgcaattaagtaataaattgaagatacgttgtacttac

SEQ ID NO: 305610 - DNA, 411 bp, Zea mays
  unsure (1)..(411): unsure at all n locations
gcttacgaggaggcgtttattaagaagacgcgtgggcaccgccatgccggctctagtgggcgcgccgtccggcgacgccaccgtgctcgtgtacgacaccttcaacgccgccaggttcctgttggacactgccgtgttctgctgacagcgccggcattattgccgtcgccccggcgtccgcgaaccagcagcagcatgcgccgacggagcgggaggcgccgactagggccaggaagctggcggacgagggcgcggaactgcaagtccagggaggaggccgagacccagcggatgacgcacatcgccgtcgagcgcaaccgtcgccgtcagatgaacgagtacctcgccgcgctccgctccaccatgccggaggcctacgtncagaggggggaccaagcttgcatcgtggga

SEQ ID NO: 305611 - DNA, 364 bp, Zea mays
atgaacatcacctcttctatggagtcgaaatagtggagttgtacttgcagcagcaagtgtgcattggatcatggctcctattggggacatgaagaaaattgttggcccaattttgtttactctacggtcatctcctgatgcagcatatgtgatgcttggcaacatagtagtttttgtcaagacaatgccatcattgtttgccccgttttatgaggacttctttgtaaacacttcagatccgtaccagacgagggctttgaagcttgaaatactgaccactattgccacagagtcatctattccggccatttttgaagaatttcaggattacattaaagatccagataggaaatttgtagcagat

SEQ ID NO: 305612 - DNA, 360 bp, Zea mays
caaaccgcgcggtttgcatccacaatgacaggaggcactggatcgtgttccggagcatcgacaagctcaccgtcaacggcggtggcgccatcgatggcaacggcgagaaatggtggcctcactcgtgcaagatcaacaaggctctcccttgcaaggaggctccgacggctctgtcattccactactgcgtcgacctgaaagtggaggatctgaaaatcgtgaacagccaacagatacacatgtcagtcgaggattctgcaaatgcgctgcttgcgcggttgttcatcacagcgccttgcaccagccctaacactgacggcatccacatcactcgcagcaaaaatgtacgcgtcacagact

SEQ ID NO: 305613 - DNA, 201 bp, Zea mays
gagagagggtttttagtggcaatcgcgaacagcgagggttctgctatcgggaacgaccttggcaccacttacgtctgcctcaggttgcggcaacactaccgggtggagatcattgccaactactaggggaacctgaccactccgttctatgtcgggtgtacttacaccgaacggctcatcggcgacgctgccaagaactag

SEQ ID NO: 305614 - DNA, 448 bp, Zea mays
cttctctctcggagttttatttaacatagggcagttgattcaatacctccctgctagtcgacagattttgatgttctcagcgacattccctgtgactgttaaggagttcaaggacaaatatcttcctaaaccttatgtgattaaccttatggatgaacttacactgaagggaattacgcagttctatgcttttgttgaagaacgacagaaagttcactgtctcaacaccctcttttccaaggttttgctgatgaacacctctattatttcatgatttattttcctagtgtatgaggctacattgttttatttttctttgtattattgcctgttagggctttgtactttggtccatttcggacctttctctcttttaatataatgacgcgcagttctcctgcgtgttcgagagaaaaaattatttcatgatttattttactaggaattt

SEQ ID NO: 305615 - DNA, 248 bp, Zea mays
tctaggtgcaagcagagactacaatgtggacatggtgccaaagtttatgatggcaaatgggacattggttcgaaccctcatttcacaccgacgtgacaaagtacttgtattcaaagctgtgatgggagctatgttcagcaaaggagatttacaggtcctgcactgatatggagttgagccctgtggctatcagagcgcaaagacttattagcaatcatgactgacagcctagtgctctggcacaggac

SEQ ID NO: 305616 - DNA, 180 bp, Zea mays
caagatcaaccgtcaggtgaccttttacaagcgccgatcggggctgcttaagatggcgcacgagatcttcatgctctgcgaacgccgacgtggctcatattttttcacaaggagcttggtttcaccgttatgtggcaatttgacgcagcgtactttgaaagttattaaattgactagatg

SEQ ID NO: 305617 - DNA, 284 bp, Zea mays
  unsure (1)..(284): unsure at all n locations
tccattgtccaagagaaagagagcttgttgcaagagtataatgctttgaagcaaaagctggatgaagagtatcatcagcttgcagaaagaaaaagggagttccagcaagaacttgatgctcttggaagacttagtatgaagataaaagggtacttggattccaagaaaaacgaaaagcttaaggaatngcanggaaggcatgttctttgccattctcagttacagagttgcatggcaaaacagcaaagaatatcagctgagttaaacaagagcaaagaactact

SEQ ID NO: 305618 - DNA, 403 bp, Zea mays
tttgctcttctaactgagtgcggggtttataaaataaggggtgggggtactacacacaccatggattttgagaagaccctggtcttttggcaacaggacaagcggaaccgcttcgtttgtgttgagtggcacatcgggaggggcgtgcctagcaatattgtcaagcgcatgatcctgcacaacagtgagaacaagcctgtcacagacagccgcgacactcatgatatactcgtggaacaaggcctacagatgctcaagatattcaaggatcatgtgcagaagactaacatcctctactactttgtcttatactagagccgacagaagttgatgcaggataagaggtcgaaacagcaacatctgcaaagcaggtgtgggacactaggacccccgaatctgtcac

SEQ ID NO: 305619 - DNA, 408 bp, Zea mays
tggtcatgtgagccgtgactggggccggctgtatttactttggggcggggtcactgtcaagaaccattcaggtcataaacccctactacaggggccacgagggctcatcttcgccactgcccctactcccaccttctgcatgtcctgctcggtgctgttccattccctagcgatgttctccggctaaagacgcttggagtttgtggtgtggtgacacttaatgaatcatacgagaggcttgttcccacatccctatacgaggataaaagaagtaggcgcaatgaggagtcatgttcattcacaagctctaacagagaaagttggggcagatgttcatctttaggtgcagccagtgatgaattattctcaggcaataataatgataagcagatatgagcccttgggcct

SEQ ID NO: 305620 - DNA, 410 bp, Zea mays
cagaaaatctgagcggtatggagggttttttggcggagacggggcggtccgccaacaaggaggcggaggaggagccctcggagaaggcggctccggcggagaaggcccccgcggtgaagacgcccaaggcggagaagcggctacctgcgggcaagtccgtcggcaaggagggcggcgacaagaagggtaggaagaaggcgaagaagagcgtggagacctacaagatctacatcttcaaggtcctgaagcaggtgcaccccgacatcggcatctcctccaaggccatgtccatcatgaactccttcatcaacgacatcttcgagaagctcgccgcggaggccgtcaagctcgcccggtacaacaggaagcccaccatcacctcccgcgagatccagacctccgtccgcctc

SEQ ID NO: 305621 - DNA, 413 bp, Zea mays
gccccgccggctgtcgctggggggtgtcatggtaattctagggggggttcctaccgtgcgcctccgactggtgcccgttcttcgagggccagccgtgcccggcgaaccaggacgccctggttgccgctgccggcgtgcgccttctccaagccgttcgtggacaccttgttccaggcgtcgctgggcagcgacactctgcgcctgggcaaggacgccatcgccggctacgcgttcgggtgcgtgggcgcggtggccgggccgacgaccaacctgccgaagcaggggctccttggcctcggacggggccccatgtctctgctgttccagaccgggagcaggtacaaccggcgtcttctcctactgcctgcccagctacaggtcctactacttcttcggttccctccggctgggcg

SEQ ID NO: 305622 - DNA, 151 bp, Zea mays
tgtgtttatcagcggcagatttatattgagcgggtatgtaatggtattgcaactatattgggtgtaaaaccataataaatgtggaaaaaatgcaaggaaaaaaggcttctactgtttacacttaacaaaaaaaaaaaaaaatatattataa

SEQ ID NO: 305623 - DNA, 427 bp, Zea mays
  unsure (1)..(427): unsure at all n locations
cgcccacgcgtccggggacgcgtttcgtttcgcgtccgtgacaagtagacagatgctcgtgctaggaagattcagcggttccttagccagcctttccatgttgctgaagttttcacgggtgcacctggaaagtacgttgagctgaaggagagtgttaaaagtttccagggcgttttggatggcaagtatgatgaccttccagaacagtcattctacatggttggaggaatagaggaggtcatcgccaaggcagagaagattgccaaggaatctgcatcataaggggtctacaggcaacgcagaattaacttttggaggtcaacgtgatgtgctttttatcctgtgttatcaagaacttacgtgcaggagacccttgcctgcagaaggatnngttttctcttcgttccctcaccccacaccccaaaat

SEQ ID NO: 305624 - DNA, 457 bp, Zea mays
cctcgcggcgactcttgccagggcagggtttctttaaagccgcatgggctgtaaggggagttgatcgagaagcgttggtggacatgggtcagatccagtactccgagaagtacttcgacgacacctacgagtacaggcacgtcgtcctcccgcccgaggtcgccaagctcctccccaagaaccgcctcctgtccgagaacgagtggcgcgcgatcggagtgcagcagagccgcgggtgggtgcactacgcgatccaccgcccggagccgcacatcatgctgttccgccgcccgatcaactaccagcagcagcaggaggcggctgccgcgcagatgctggccaagtgagcccccggtggccagggcggcgaccaggaacgtttaaaaccctaaccccctttccatctctaaaaagggcgtcgctgttctgttgatcaattcctctatgctgttagttg

SEQ ID NO: 305625 - DNA, 429 bp, Zea mays
ggctgtagcctcaagaggggccggtttaggtagttggtgcggatctgtctgctgcatcagctcctgcggtagctgctcctgcggatgaggctgaggacgatgatgaccttgatctttttggtgatgaaactgaggaggacaagaaggcagctgatgagcgtgccgccgctgccaaggcctcttctaaaaagaaagaaagtggtaaatcctccgtccttatggatgtcaaaccatgggacgatgagactgatatgaagaagctggaggaggctgttcgcagcgtccagatggagggtctgacttggggagcatcaaaagcttgtgcctgttgtatacggcatcaagaagatgactatcatgttgacaattgtcgaccatcttgcgtccattgacacttttattgatggccaccttacgcaagagcccatc

SEQ ID NO: 305626 - DNA, 351 bp, Zea mays
cccaactgcgaatacaattcggtggtgattctgttcggacacacgggggaacactcctctaaagtcgagtgggccaaaacaaccgatgagattgtgaagaagggactgaaggagagtagaggaggattagggctatggactccgtatcctgcagatctcagctccgtggaagtccctgctgtaaaaaggacttcaccggcaggctaggctgggattttttggtcttctattcgctcatggctgtaaaaagtagaacactactgatttcccccccttttcttttcttgcttaatcagacgagatcatgtaattcctgtagattctgtggtaactgaaccccgggggtaccgt

SEQ ID NO: 305627 - DNA, 422 bp, Zea mays
  unsure (1)..(422): unsure at all n locations
tggtctctggacctgtggcggggtttatgaatgggtggtgccgttatattccaacnggaccgcgtagggcatgattaccttcatcggggaaaattattcgtattgtgggcgatttagcttcaatccaagtttatgaggaaacagctggactgatggttaatgaccctgttttgagaacgagaaagcctctatcagttgaattgggacctggaattcttggaaatacttttgatggtatccagcgccctctaaaaaccattgccattaagttaggagatgtgtatattcctcgcggtgtttcagttcctgtccttgacaaaagatgcatttatgggaatttcagccaaagaaactaggtgttggagatgtcatcacaggtggagatctattcgctactgtctttgagaacacattgttgctag

SEQ ID NO: 305628 - DNA, 317 bp, Zea mays
ctgggccgcccgctggagcgcctggcgttgttttggctgctgtccgggaaggtgcgcgaggacgaggcgcggtaccggctgcgtttcgaggtgccgggcctcggcaagggcgacgtgcgcgtggccgtggaggacggggtgctggtcatcgtgggcgagaagcgtgagcacggggtggagggcgactgcggcgagtggtggtcgaccagcgggtaccacgccagcctgctgctcccggacgacgcgcgcgccgtggggatcaccgtctaggtgaaggacggcgtgctgtacgttaccgtgccgcgcaccggggagcg

SEQ ID NO: 305629 - DNA, 118 bp, Zea mays
acaattctcagcactggtggggttaatttcagagcgctttccatgtattacccagtattggggctcgcgaaaataaaatatggcaacggtttatgaactcactaaaaaataaggatat

SEQ ID NO: 305630 - DNA, 166 bp, Zea mays
cttgccggactctccaagaaccctgtcacggacacccagtggaggtacttggtcctcggccaagcttgcttccacctcgggctcattgaggacgctatggtgctgctccagaccgggcgccgcctagcttctgcggttttctcgccgtgagagcgtgagctggtcg

SEQ ID NO: 305631 - DNA, 531 bp, Zea mays
  unsure (1)..(531): unsure at all n locations
tgggatcaattggcaactttgctgggggaattattgtccaaaatcttccactgggtcaatactgcagatgagcggtttggtgatatggttttgctgatcaaggaatgggcaaaagcacaaaacattaacgatccaaagagcgggaccctcaactcttattcgctttgcctacttgtcctctatcattttcaggtgttgtttcttatacctaagtatctctctatgtgttcctacttatttatggtttcactaatgctacgtttggacgtcgatattggagaggatggaattgaattgggttgaataccaaatcatacatggtattgaaatgagatgtaattccaattctattgtttggatgtcactgaattggagtttggaattgtgcggtctaattccacgcaataccgtggggcgaggctttgtattgggagaggggggttttagtcatagtccaattccagggaantgggcctctaattccaaattcaattccacgtgcaacccaacaacataatttaggaaagctgt

SEQ ID NO: 305632 - DNA, 504 bp, Zea mays
gaggagcagaagccgcgtctgggggggctgcttgagacgcgcaagcccaaggaactgcacatgtacgaggtgccgtacaggggccctccgatcctgtggaagagacggcctgcatttgactcttggcggcggcagcagcagcagcacaagggacagtgagacatatagcgagtgtatgcagcatgtgcctccgtatgtacgctagctgttggtgggaggacgacgtgtgcaaattgttgagaactacgttaccctggatcaccagattcgtttcattcctcccgtcagccgtagaggcgcgagaagttgtagaagacccgtctcccttcccagaagcacgacaaaggaacacacgagacacatgatatagggttgggggcttggggctctggcctctttctcctctctgtcatatgaaggcgtgtacaagttccttatatagagatgtgggacccctcaagggcaaagtcggtatttggccacataaccctaactagggttact

SEQ ID NO: 305633 - DNA, 413 bp, Zea mays
cgccctattccaatggcgcggggtttttttaagaagcccgccgtcttttcccctgcggaggaggagccggcggggataatgcccggcggggaagaagcccaaggctgagaagcggttcccgcgggcaagtccgcaagcacagaaggcggcgagaagaacgggatgaagaaggcaaagaagtcggtggagacgtacaagatctacatgttcaaggagctgaagcaggtgcacccggacattggcatctggtccaaggccatgtgcatcatgaactcctccatgaacgacatctttgagaagctggcggccgatgcggacaagctggcgcggtacatcaagaagcctaccattacgttccgcgagatccataccttcattggcctcgtcctccccggtgagctcgccaagcaccc

SEQ ID NO: 305634 - DNA, 425 bp, Zea mays
cgactgggtgttgccacacctgaagcgcattaacgagctccctgctagcgaggagaaagcggatgtgttccagaggaaggtgtacgccgtcagaacgctcctgttcctggacggcgaggactcgtcgatgctcagaccgctggcgatcgagctcagctcgccgcacccggagaaggagcagcttgcgccggtcagcacggtgtacactccaccggacagcggggacgacggtatcactgccgggaggttcttaacctgggaactggcaaatgtttacgcctctgccaacgacgcagccgataacaaccttgtcactcactggtatgttcgtacactcgttcgtacgtagagacaagacgaggtcaatgtgtgtctcttcgtgtgtaggctcaacacgcacccatccatggagccaatcgtgatcc

SEQ ID NO: 305635 - DNA, 494 bp, Zea mays
ttttggtttatgttcttccagtgcggatggtgtttttattctgaccaatgctttgaaataggtgttgaaacaagatcttctggaccaaagacagatgtcctcagagcaaagataacttctgatgagcagatgtgctgtgacttttgcaaagtgccagtgtttgattatcaccgatactgcccaagatgttcatatgatttatgccttgattgctgtcatgacatacgtcattctcgggccaatgttgcacgaggagaatatactgaaggttatgttgaagataaaggtagagattcttttaatagaagagcaaggttggaaccatctgctgagagtgtcaatgacaagtcattatcttggccaatagatataaataatattgacattaaatctttattccctacatggagagtcaacaatgatggcaggatcacttgtggacctcactaggctggtggttgtggctcctcaaagttggtatcatggggatattc

SEQ ID NO: 305636 - DNA, 268 bp, Zea mays
cgaacctgggttcaccctagaggccggaggtggccgtgaacccaacttcgcagacgctccgaggatactggtgatcgacctgctcgagctcctgtggggtgccgtgtgcccggccgtgatccacaactgcgggtgcacgccaatcttcctgtgcatcaaggttggctactggagcgcgaccaaccactactgcggcgactggggccagggggccccctcccgctccagcggcgggggcatcctcggcagcggctgaggctgcggaggc

SEQ ID NO: 305637 - DNA, 433 bp, Zea mays
  unsure (1)..(433): unsure at all n locations
ttttattgtagccaacatgtnnntatgaatcggagatattttttagtcccttcataatttttttaagcggtaagcatttgaaaattctgaatcttggagatggacaaggtagaactagtggtgttactgctgttcttcagagcactgatgatgattctgttgatccacatctggagcggataaaaaatcaggccggtaatgaggaaagtgatgaagaggtattgcttcccttagttaacgactcaatataagtttactttctgtcgattgcatgtacatttttgtgtaacccctcttcaaagtaggatgaagattttgtggcagacaaggatgatagtggatctccaaccgatgattctgatgcagaaggctctgatgctagtatgagtggaggagaaaaggagaaaccttccaagaggaagctagtagctca

SEQ ID NO: 305638 - DNA, 508 bp, Zea mays
  unsure (1)..(508): unsure at all n locations
ggttctggtccggattttttttgttgtcccacgcgtcanctttatgccccgccggcgcggaaggtggagccgggcgtttttgccgagatggacgtggacgtggacgagctgggcccgggcctgggcggcgggcgcgcggcgcggtcgccgtgcgggctcggggagaagaagcggcgcctggcgctggagcaggtgcgcgcgctggagcgctgcttcgagacggacaacaagctggacccggaccgcaaggcccgcatcgcgcgcgacctcgcgctgcagccgcgccaggtcgccgtctggttccagaaccgtcgcgcccgctggaagaccaagacgctcgagcgcgacttcgcggcgctgcgcgcgcgccacgacgccctccgtgccgactgcgacgcgctccgacgcgacaaggacgccctcgccgccgagataagggagctgaggcagaagctgctgcccaagctcggagccacggtgaagctggaggcgacgacnggcaatgaca

SEQ ID NO: 305639 - DNA, 325 bp, Zea mays
  unsure (1)..(325): unsure at all n locations
cgcccacgcgnccggcaaggagcgggagggttgtaacaagaccgccaacgaggcccacccccgcggcggccgaggaggcggcggtggcggatacggtggcgggcgccgtgacggaggcggctacggcggaggcggcggaggctacggcggtggtcgtggaggctacggcggcggagggggatacggtggagcaaaccgcggcggcggctacggcaacaacgacgggaactggaggaactgagcggtggggtccgctgaggcctagacatctagtgcgcggctgctaccgcgttcaccctagactagagggggtgtatcttcgact

SEQ ID NO: 305640 - DNA, 399 bp, Zea mays
atccttcggcctcgcctctcgccggcatttcataaaaccctctctccttccatctcagatccctctaccgtcccagctcgatcctgcccgatggccaccggatcgtacgccgcttacgtccgacgctgtactgaattctgtgtgaaggcgcatgccttgaagggccaatcatgtgttcaccggaggctaattgtgggggatggatttgcgacaattaccaaaggtgaaagtattacagagtcctgtgagtatgctgaagaagcagaggaagaggatcaagatgatgtactggacagagacagcaatgaccctgatggtgatatcgctcatccacaagagcatgccaagagccctgaacttgcaagagattttctgctggatgctgctgctgttatcttc

SEQ ID NO: 305641 - DNA, 424 bp, Zea mays
  unsure (1)..(424): unsure at all n locations
tccggatttttcttgttgtccacgcgncttccttttcgtccgctcgannnccctttntccggcgggctatatctgagatctccagcgtggttaggggaaggatcgagatcaagaggatcgagatcaacacgagccggcaggtcaccttctgcaagcgccgcaatgggctcctcaagaaggcgtacgagctctccgtcctctgcgacgccgaggtggcgctcgtcgtcttctccagccgcggacgcctctacgagtacgccaacaacagtgtgaaggctacgatcgagaggtacaagaaggcacacgccgttggctcttcctctggccccccactcttagagcacaatgcccagcaattctaccagcaagattccgcagaactgcgcaaccagatccaaatgctgcaaaacactaacaggcactt

SEQ ID NO: 305642 - DNA, 359 bp, Zea mays
  unsure (1)..(359): unsure at all n locations
atccatntcgcgggcnccgancggccaccagcggggggccgtcttcaaaaccctccgcccctgttcccccagaccccacccnnnnngaggagcggcgcggcggcagcggcggcaaagccaaaggcaagatgttcgggcgcgcgccgaaaaagagcgacaacaccaagaactacgagatcctcggggggcccaaggcggcgtcccaagacgacctcatgaaggcctacccgaagggagctatcaagaaccaccccgacaagggcggtgaccccgagaagatcaaggagctcgcacaagcctatgaggttttgagtgatccagagaaacgtgagatttatgatcagtatggtgaagatgcc

SEQ ID NO: 305643 - DNA, 399 bp, Zea mays
gccgatcccgggcgactggaacggcgcgggcgcccacaccaactacagcaccgagtccatgaggaaggagggcgggtacgaggtgatcaaggcggccatcgagaagctgaagctgcggcacaaggagcacatcgcggcctacggcgagggcaacgagcgccggctcaccggcaggcacgagaccgccgacatcaacaccttcagctgggtacgcttctaattgtgcaactgctgtaccgtggaggatcggcgaaacccgtgtgcctgccaactgttgttgctttgtgccgttgcagggagtcgccaaccgtggcgtcggtgcgcgtgggccgcgagacggagcagaacggcaagggctacttcgaggaccgccggccggcgtccaacatggacccctac

SEQ ID NO: 305644 - DNA, 476 bp, Zea mays
  unsure (1)..(476): unsure at all n locations
ttctggtccggattttttttgttgttccacgcgtcttatttgtgtctgctcactcagncctgcgcaagagcgtgtttttggagaaaaaaacgcgggttgcgataatggagggaggtgccggtgcgagcgagaaagggaaggtgctggtcacgggggcgtcgggcttcgtcggctcctggctcgtcatgaagctcctccaggccggctacaccgtccgggcgaccgtgcgcgatcccgcgaacgttgggaagacgaagccattgatggaccttcccggagcaacggagcgcctgtccatatggaaagccgacctggcggaggaaggcagcttccacgacgccatcaggggctgcaccggcgtcttccacgtcgccacgcccatggacttcctgtccaaagaccctgagaatgaggtaatcaagccgacngtggaagggatgataagcatcatgcgggcatgcaaggaggccggcacc

SEQ ID NO: 305645 - DNA, 274 bp, Zea mays
  unsure (1)..(274): unsure at all n locations
cggggncgaagagganccngaagggggggaaggaccagcagaaggacccgcccaccccctgcagcgcaggaccagatggagaggacacgtaccaaaggcaagcgaccatcatggggccttcggacagcccatacgcaggaggggcattcttggtgaacatacactgcccaccggatgacccaggcaagccaccaaaggtgacgcgccgcaccaagggaagccacccgaacaacaacagcaacggcagcatttgccttgacatgacaaaagaaca

SEQ ID NO: 305646 - DNA, 142 bp, Zea mays
  unsure (1)..(142): unsure at all n locations
cccgggtggacccacgcgcccgtttctntttgggcccaagcgcacgctagcaagggggggggaggttgaacgacctagcgacgccgagcaactaaaggcacaagccgacatagggcggctcagccggtgctaccgcacgccc

SEQ ID NO: 305647 - DNA, 366 bp, Zea mays
  unsure (1)..(366): unsure at all n locations
gtttctttttctcctccgnctcgncgtcggccatggcacccgttggtggcgccaaccacttcccggcgccgcgtagcctggtattcgccttctacctcaccgggcatggcttcggccacgccacccgcgccatcgaggtggtgcggcacctgatcgcggacgggcacgaggtgcacgtggcgacggccgtgccggagttcgtcttcaccgccgaggtgcggtccccgcgcctccgcatccgcagggttatcctcgactgcggcgccgtccaggcagatgccctcaccgtcgaccctctcgccacgctggataagtaccgtgaggcggcagtgttaccccgcgagttcatcctcagggccgaggctg

SEQ ID NO: 305648 - DNA, 445 bp, Zea mays
taacattgcgtccgcccacgcggccgcccacgcgggcgcccattcgtccggtacggctattgatttcgtctaccttatacgcgtgtgtcttcaattccgcactgcttatgttgctccatcttcacgcgtgtttgggactggtgagcttgtgattgatccgatgctaattgcaaagcgatacattaaaagttactttgcaatggactttgttgcattgctaccacttccacagattgttgtatggagataccttcatattccaaaaggcccaaatgtactgactacgaaaactgcactggtttggggtggtttgatccaatacattccaaggttgcttccaatattccctgtgatcacagatttgaaaaggacagctggggcttttattgaaactgcttgggctggggctgcttattatcttctatggtttatgctggctgggcat

SEQ ID NO: 305649 - DNA, 326 bp, Zea mays
  unsure (1)..(326): unsure at all n locations
gtttaaatgcgtgggcggacaccagcttcgaccgggggcgcttttaaaggatagcgccggttcataccacaccannacgcaggagcggcccggcggcggcgccggcaaagccaaaggcaagaacgtccgggcgcgcgccgaagaagagcgacaacaccaagcactacgagatcctcggggcgcccaagtcggcggcccaggacaacctaaaaaaggcctaccgcagggcagctgtcaggacccaccccgacaggggcggggacctcgagacgaacaaggagctcgcacaagcctatgaggtgctgagtgatccagagaaacgtgag

SEQ ID NO: 305650 - DNA, 404 bp, Zea mays
  unsure (1)..(404): unsure at all n locations
accggaatttccttttcgatcccacgcgaatgatttaagaaggaggcgctgccgnggnacacgcggggcttgttcaacaacccgggcggtcgggtggtgcacatcgtggtgcagctcaccctcgggtggccgctgtacctggcgaccaacgcgtcggggcggccgtacccgcgcttcgcctgccacttcgacccctacggccccatctacaacgaccgggagcgcgcccagatcttcgtctcggacgccggcgtcgtggccgtggcgttcgggctgtacaagctggcggcggcgttcggggtctggtggggtggtgacgcgtgtacgccgtgccgctgctgatcgtgaacgcgtggctggtgcttatcacctacctgcaggacacccacccgttgctcccccac

SEQ ID NO: 305651 - DNA, 483 bp, Zea mays
  unsure (1)..(483): unsure at all n locations
ggccggaccggaatacccgtgacgtcccacgcgnccgcttgaatataaagggaggagaggagggagaaagggaagaggaggtcgaaanctgctccccctttccaaatcctggctcaataatctctccatcaggggatcctaaagctgatcactgatcaggtcggaggactcggcgggcgcagccatgaacgagaaggcgtccgtctccaaggagctcaacgccaagcacaagaagatattggaaggtcttcttcggcttcctgagaatagagaatgtgcagactgcaagtcaaagggtcctcgatgggcaagtgttaatcttgggatctttatatgtatgacatgttctggaattcatagaagcctgggggtgcacatatctaaggtaagatctgctaccctggatacatggctgccagagcaggttgcatttatccaatcaatgggaaacgaaaaagcaaatagccattgtgaagcagagct

SEQ ID NO: 305652 - DNA, 415 bp, Zea mays
  unsure (1)..(415): unsure at all n locations
cgcggacacacacacaacgggagcggttcacatttacangcgggggcaccaccgcaccaagaagcagancgnngngaaaaccccgacaggcaagacnagcacccncgaggaggagncggcggacaccacngacaacgcnaaggccaagagccaggacaaggagggcacccccccagaccagcagcggcgcaacanagcnggcaaacagccagaggacgggcgcacgcnngcngacgacaacanccagaaggagagcacccnccaccnngngcaccgccgcaggggaggcangcagancnangngaaaacccngaccggcaagacaaacacccncgagggggaggccncggacaccaangacaacgncaaggccaagagccaggacaaggagggcanaccaccagaccagcagcgg

SEQ ID NO: 305653 - DNA, 417 bp, Zea mays
  unsure (1)..(417): unsure at all n locations
agggccccgaangggggcaggttttatttaaactcaggggcggaaaacaacgagcccggatgctgatgctgggaatcatagacggaagagcggcgcgccctgtggcaggacatgaacgatgtggcagccgataagagacaccaaagcacactctatttcgaactctggagacattacacaaggaagactactacacccaaattttgcgggggaagatgctcgcggcccaagagagccatggcatgacttgcattccaagaacgacggcccagaagcatacgatgacctgaaaaactttgaggagcgctggtacaaggcatcaaagcacactgccgatgagaaaccggcaaaatggtcgaggccacatgatgatcctatactgaggaacaacaagatgcctgatattatttctattga

SEQ ID NO: 305654 - DNA, 303 bp, Zea mays
  unsure (1)..(303): unsure at all n locations
atcgaatcgcgcccggacaacngcaccggccggcagggctccaggacacaacgccgcgggcggaggcaccggcacaggccaaggaaacacaccaccacgagcgccagacagnggagaacggcaagaaacccaagcngggcnacacngngnacccaacnccccaggngcaaccacngnngnggagccnaacaacagcgngcncnccacncacncacnccnggagcacacngangacnccaaccngcncgacaacgaggccancaaagacaacngcaggcgcccccncgacaaagagaggcccaa

SEQ ID NO: 305655 - DNA, 380 bp, Zea mays
  unsure (1)..(380): unsure at all n locations
atagcctcgcgcccgcggacgcgngggcgaggggaggggtgggcaaggcggcggggacgcacacgacccacccaaggagctcaaagagatgaacgcggcaccaggcctagatgaagggcatgcctcaccaggggaggagtaccgagcgatccacgcagagcgaagcccaaggcggcccactataaaagcaacaggcgcaccagggcacggcgcgaagacgcacgacggcagcgcaaaggagaacccgacgaagagcgcggaggccaccaggagacacaggacagcacagcctgatctagtgaaatccggagagaaggctgaaggagatgccgcatcggagaaacctgcgcaccagaaggcaggcacacctacaccaacgg

SEQ ID NO: 305656 - DNA, 466 bp, Zea mays
  unsure (1)..(466): unsure at all n locations
ggaccggaccggcaggcccggcccagacccaccggcttcgataccgatgccgcggcggctgctgaaccgcngggacacgaagccgaggaggcaggcgcaccgcgcccaaagcagcacaccagcaagcagacggaagaaaaagagcagcgagagccgagaagagaagcgcgccgccgcacgagcacagcccgccgccggacacaccgcatggccatgaggcacagggcgcgggcctcccccacctccccgcacaccccggcctccagcgcaagaacaaacaagatacttggtatctctgtatctctcatcctcatcaatctggcttcaattatggagcgtgctgatgagaacctccttccagcagtttacaaggaagccagtgcagccttcaatgctgngcctgcagatctgggatacctcacctttggaatgaactttctgaagtcaatagcatctcccttggcag

SEQ ID NO: 305657 - DNA, 390 bp, Zea mays
  unsure (1)..(390): unsure at all n locations
gggccggaaaccccgggacgacccacgcgcccgagatgattgccccgaagaccgcccaacaaccangggcgggaggcaagcaaaagaggagggcggccaccacccaaggggcggaaccagcggaagccgccgaggacgggaaggagaaaacgagccctgagatcctatcgcccaaggagaagcatgtagacaccaacggcgcaggagatgctatcgaaggaggcatccacacacagcagggtctaggcaagggcaacgaagaccgcgcgagggcaggttgctatgccgcaaacgttatcatccagcgcccgggcggtactcacccggagaagcctgacttcaactagtgcaaaactgaggcacgtcatgagagggactgttacaggcaca

SEQ ID NO: 305658 - DNA, 353 bp, Zea mays
  unsure (1)..(353): unsure at all n locations
ttggttaatcaccgcgacncaaagcnncnncgggggggtaccgacagagatgcgggagcagccccaaaccgncgacaccaggagggagagcaacacgacccacaccggccaagccaggaaccaggtcggaaacacgtgcagggagcgccactgcctcgagcatggcacacaggccgagggacagatgcccggcgacaagaccaccgggggcggtgatgaagccttcaacacctacctcagtgagactggtgctgggaagcacgaccctcgagcagacaatgaagacctagaaccaacagtcatcgatgaggtgaggactggcacctaccgccagctctaccaccccgagcagc

SEQ ID NO: 305659 - DNA, 440 bp, Zea mays
  unsure (1)..(440): unsure at all n locations
atccccgggcttcccacgcgaccgcttaattacgccgagctcgcaagganaccgacgggcacgctgagatccggggtgctgaaatcttgaaaactgaactgaagatggcatcagcagagctttcccgtgaggaaaatgtgtacatggcgaagctcgctgagcaggcggagaggtacgaggagatggttgagttcatggagaaggtagccaagactgttgactcggaggagctcactgtggaggagcgaaacctcttgtctgttgcatacaagaacgtcattggagcccgccgcgcctcatggcgcatcatctcctccatcgagcagaaggaggagggccgaggcaatgaggaccgagtaacactcatcaaggattatcgtggcaagattgagactgagctgaccaagatctgtgatggcatcctcaagctgcttgagacc

SEQ ID NO: 305660 - DNA, 262 bp, Zea mays
aatgaatcgcgaccggcacgccgcccgccggggggggggcttcaaggcggcccgccgcggcacaacagccgggcgggctgagccaaaggcacgggccctaggggcgcgaacgccctaacgagggtcggggcgggcggcgagcagaggcgccggatgctagcttggattctgactaagaggcgttcagacagaatccggcacacggtagctacgcgccactggctaaacaaccaagcgcgatgaccaatagagtgaatcaacg

SEQ ID NO: 305661 - DNA, 331 bp, Zea mays
ctcactatcgcggggggggttttttacctcggcgagcggatctccacaagacacctggcgatgctggctaggacggcccgcgacaacagtctcggaggcggtaaccatggcgtacggggaccgatttaccaccttcgaggactcacataaggagagcgagtactgatatgtccgcaaggtctctggacctgtggcttgggctgactaaatgggtggtgctgccatgaatgaacttgtccgcgtagggcatgataaccttatccgggaaatcatacgtcattggggcgattcagcttcaatccaagtttatgaggaaacagctggactgatg

SEQ ID NO: 305662 - DNA, 468 bp, Zea mays
ccttctcctcctggcgggttttgatctctcatgggggggggttgcattccatcccgaccccgtttgccactggtcacaccctctccatcgcttcctgccaccgaccacaccctctcgatcgccattcgccaccggccaaatggaggccatccggaagcaggcctcaaagttccgggagcaggtggctcggcagcagcaggcggtgatgaagcagttcgggggcgggtacggcgcagacggcgtgttcgcgaacgaggccgaggcgcaacagcactccaagctcgagaagctctacatctccacgcgcgccgccaagcactttcaaagggatatagttcggggcgtcgagggctacatcgtcacggggtcgaagcaagtcgaaatcgggaacaagttatgtgaggatggcaggaataccgcaccagaacacttgagcagtggaagacactggcaaagcggcgtaagttt

SEQ ID NO: 305663 - DNA, 404 bp, Zea mays
tgccccggatccatacgggcgggttttagttgtttgcgcgggtgggttcctccccgacgatagatcgatcgatcgctcggtcatcatggcgcgggaggagcaggcgctgctgtcgacggagatcgtgaaccgcggtgtggagccgtcgggcccggacgccggctcgccggccttctcggtgcgcgtgcgccgccgcctgccggacttcctgcagtcggtgaacctcaagtacgtgcgcctagggtaccactacctcatcagccacggtgtgtacctggccaccatccccgtaatcgtgctggtgtgcggtgccgagctgggcagcctcagtcgcgatgagctgtggcgcaaggtgtggggggaggccacctacgaccttgccacccggctcgccttccttgccg

SEQ ID NO: 305664 - DNA, 373 bp, Zea mays
cgtgggctccgcaggggggcgggcaatgaacgaggaatcggtggttattcgcaactggtcctgcgcaccacactccctcgcaggagcggtggtggcggtggccaggtcgtaccccacatcgtgtagcggcggctgtaccgccggaggcaaaggcaagatgttcgggcgcgcgccgaagaagagcgacaacaccaagtactacgagatccttggggtgcccaagtcggagttccatgacgatctcaagaaggcctaccgcaaggctgctatcaagaaccaccccgacaagggcggtgacccccagatgttcaaggagctcgcacaagcctatgaggttttgagtgatccacagaaacctgagatttatgatcag

SEQ ID NO: 305665 - DNA, 450 bp, Zea mays
ataagttgctcggggttctgatgattagcccgcagggcgtgctgtcgacggcggaggctggttacttccgcccgttgatacagtacctcaaacaaggttcagacatgaacaaggtcctcatggcaacggccatctcgaaaatggtcctatctgaacatatgaaatcttccctcggcgaggatggagctattgaaccgctcgtggacatgtttaaacatggaaaccttgaagccaagcactcagccttaggcgccttgtgtaatctctctagctctctacagaatgcagaactcctgataaattctggcataacaggaccgctgctacagctcctttactgcgtgacgtcagcactcatggtcctcagagagccgggctcggctatactcgcagctatagcacaatctgagcgtattctacttcataaggatgtagcgcctcagatgctct

SEQ ID NO: 305666 - DNA, 440 bp, Zea mays
  unsure (1)..(440): unsure at all n locations
gggccggaagcccgggttgacccacgcgaccgaccatccgaccgaccgaagcagcaggccacccagggcgggccactacccacgcgcagaacccacgcgaacgcacacgcacccacacgacacaggcagaggacgcacagggggnccccgcccccggccgccgcggagccaacccagcacaccggggcgcccgcgaccccagcccccggcgacagggcggcggcgccgcgcggcgacgacacgccggccgccggcgccgcgagcagggccgcgggcaaggggaaggaggagcacagcggggccgcgcaccagccccccgaggagaacaagggggagcccgcccacgagccccagggcccagacaaggcggacgcgcgccacaagcacgacgaagacagcgaggccgaccacaacgagcagaccaacgnggagaacaacgc

SEQ ID NO: 305667 - DNA, 449 bp, Zea mays
  unsure (1)..(449): unsure at all n locations
acagcggcagccagccggcggggcgctgtttttacagaaccccccccggccagcccccagagcagagacacggcgcggcgagccgccgcccgcggacagacaccgctgcaccgagngcgagcaagcaaggcaaggcaaccagccagccgcggcgacgaccgaacgacaacaagcacgagcgccgaggccggcggccgggcgggccaccgcaagccgcgagcgacggaggagcagctgggcccggaggcggcgacgcacctgctgcagcacacgctgcggagcctctgcaccggcgacgccccgcagtgggtctacgccgtcttctggcgcatcctgccccggaactacccgccccccaaaagggatctccctggcgccgcggacgacaggacccgagggaacaggaagaactggatcccggcatgggaggacnggttctgcaacttcgc

SEQ ID NO: 305668 - DNA, 311 bp, Zea mays
  unsure (1)..(311): unsure at all n locations
gccggcgaaaccgaggcggcgatcttgtggacaccgcagcgcacagagcagccccgacgcccggcccgagccgcgcgcacccccccggcgcgccaggcaaggcaggaacggcacccgagggcacncagnncgangccaagcaccacgaaccnaagaagcaggagcngccgagcaccggngagacngaggagnccngcacnncanangaagaagncnccgagagacgggaggacacgggcccccaagagaagccccggagaggcacccacgcncangggcccgagaagccacccgcaacccagcagagagga

SEQ ID NO: 305669 - DNA, 460 bp, Zea mays
  unsure (1)..(460): unsure at all n locations
cccagctcccgctccgctgggccaccagctttgaccgccgcctccctttcgctccgctactgctcctccccaccccactcccccgcaggagcggcggcggcggcggcgaggtcgtaccccacatcggcgagcggcggcggcaccgccggaggcaaaggcaagatgttcgggcgcgcgccgaagaagagcgacaacaccaagtactacgagatcctcggggtgcccaagtcggcgtcccaggacgatctcaagaaggcctaccgcaaggctgctatcaagaaccaccccgacaagggcggtgaccccgagaagttcaaggagctcgcacaagcctatgaggttttgagtgacccagagaaacgtgagattcatgatcagcatggtgaagatgcccttacggaaggaatgggcggtggaggatcccatgtngatccatttgacatctgctcatcattttttg

SEQ ID NO: 305670 - DNA, 377 bp, Zea mays
ccgggttgacctacgcgaccgcggctccgaggccggaggggaaacaaagacacaaggccaacatgtggaaaaggtatcgagccgctccgcccccagggaccgtgatcctgctccaacacctaaggaccccagggcgctatcaagaaagaatcggagaacagcaagggatcaaccgacacactcccagaccatgggctcgctcatgtacctagcaagtgcaacaaggccagacatctcttatgctgtgagtaagctaagtcggaccgcgccgaaaccagcagaggaccactggcgtgctccagaaagagcgaagcggcattcgaaaggcactatgacatacgggatacatcataccggaaacccaaaagcgccggaag

SEQ ID NO: 305671 - DNA, 349 bp, Zea mays
  unsure (1)..(349): unsure at all n locations
cagacaccaaccaccggcaggcacggaaggaacccccccggcgcgcaccaccccaaacgccggcgacaccccagagcgccccgccgcgggggccggccgagaccacacaaacaanggagaaggaagcggcagggacccaaagcaccaaaggagccaagggcaccaaacagcccacccaagagggagagggccccaccacggacaccggaagcgaggcagggcccaaaacaggcccacacgggggccaagagcaagcacacgacgacaccaccaagggaggcacggcaacaggaccacacaacaaaccggcgagcaaggagcaacggggcaccagaagaggagaaccgcc

SEQ ID NO: 305672 - DNA, 540 bp, Zea mays
cccacgcttccgcccacgcgtccggtgagcgacattgggttgtccaactccgagtatggtgtctttggatctgttttgacaattggagcaatgattggtgctgtgactagcggcagcctggcagacattcttggacgcaaaatgaccatgcgatttgcagcagttgtaggcatttttggctggcttactgtatattttgccaaggatgctatgatgctctatgctggaagagttttgctggggtattgtactggagttctttcctatgtggtgcctgtgtatatatctgaaatagcaccaaagggtatccgaggaggccttgcaacctcaaaccagttattcatctgttcagggtgttcggctgcttacattattggagcacttgtttcatggcgctgtttggttgtagtaggattgataccttgtgctgtcctacttgttgggcttttcttcattccagagtctccaaggtggctggccaacatagggaaaagaagaagatttcatgcttcattacaggagtttaggggggaagatttg

SEQ ID NO: 305673 - DNA, 530 bp, Zea mays
  unsure (1)..(530): unsure at all n locations
gcgaggccanacancagagaggcagttttagggnctaccccaccgcctccgcagccccaacctcgnccagcagcgggnagagaaaccgccggacacggaaagacccgngcngaccccaccnaacnnncacggccgannacacaacnnagcccccngacaagagggngcctaannnacgagaagccnggaaacaaancaaagctgccatggcaattcaatgactgaagtgttgttgatgaggctgttttcagtgcaccgctatccatggccatgctgtggtttcaagaccagagttggcggatagttacgtacacaggcggcaaatgtgtctcttagccgctgtttaagtgcaccgctgtaagtttgggtgtccatgtccatgctgtggtttcaagatcagagtccatggcggatagttatgtacacaagcgacatacgtggttttagcttaggtcatgaccagttcacgtggacatatagcttattgttatatacaatctatttttactatgcataggagtgtttaactt

SEQ ID NO: 305674 - DNA, 496 bp, Zea mays
  unsure (1)..(496): unsure at all n locations
cagacatagctgctaagcccggacggaaccccgacatcaagcacaattaatgtaganggcatggtcatatccaagtaccctcagtgcattactgaagctccatgcggcagaaaattctgacatgagcagaataaattgatgtatatgtaccttttggaatggctggagttatattggctgcagcactctaatatttttatctatcattggtaccttacagcctatggaaatttatgttgatgatgaggctaaactgacccttcatggtctagttcagcactatatcaaattaagtgaggcagagaagaaccgaaagttgaacgatcttttagatgcactcgacttcaaccaagttgtgatatttgctaaaagtgttagtagagctgcagaactcaacatattgctctgcgagtgcaatttcccctcaatctgtatacattctggaatgacacaagaagagaggttgacacggtacatgaacttcaggaaggacaca

SEQ ID NO: 305675 - DNA, 307 bp, Zea mays
  unsure (1)..(307): unsure at all n locations
aacggtttgttggaaaccagccgccgccgccgcacaccagacaggcctcgagaagacgccagcccccggccgaccgaaacgaaggccgacagcgccgaccaccacaccgccgacggacncaagacccacgaggcacaccacgccggcaaaacccaagaggccggggaccccaaaacgaaggangacaacaagggcaacgccgcggggccgacgaagccgggcgcagagacacccaaagccgcccgaaggaacgagaccggcaccgcggcgggagccacaagaaaccccggcaaggcaggaggaggaa

SEQ ID NO: 305676 - DNA, 489 bp, Zea mays
  unsure (1)..(489): unsure at all n locations
cggtccggaanncctgggttgtccctcgcgaccgcttgagtgatccgcgacacggaccgcaccancatcgagacgcttgctttggggcccggcgcctttgccgcgatggtgccgtgggagtccggccgcgacatgaaggagcgcatgcgccggtactcccgcacggcgcacgcctttgcgctggtccgcgaccgcggcgtcgggttcgtggacggcgaaggacgcgtgcgcttcaccccgagccgcgaggacgtcgacgagctccgcaacggcctacgccgcgtgctgcgcatcttggtggcggcgggggccgcggaggtcgggacccaccgcagtgacggtctccggctgcggtgcaagggccttcgcgacgaggacctcgaggggttcccggaccaggtgaccatcgagaaggggcccatgcactcgagggttgacaagtgggctctccactgctcagcgcaccagatgggcagctgtcgtatgggg

SEQ ID NO: 305677 - DNA, 257 bp, Zea mays
  unsure (1)..(257): unsure at all n locations
ggagacaagccggacaccggcgggggcatcattaacccngaggaaaccccgcggggcgaggcaggcgctgagaaagacgaggagaccaccggcgccaacacagacaaggacaaggcngccgcacaacacaagggnggcgccaagaaggangccaacccngccccaagcaaagacgcacccangcangcngccggngccaacgaggacaagnacaccacggangccaacaaccggaccaaggcnagccgcaccacaaa

SEQ ID NO: 305678 - DNA, 372 bp, Zea mays
  unsure (1)..(372): unsure at all n locations
acccacgcgaccgcctacgtgaccaaacaaaacagancngcagaaagaaaacagcgtcatatcgaggaagccggccgggcatgcccagcaaaccgcaccaagccaaaaaaggacagggacgaggcanncaaaaccgcganacaacacaacaaccnacncccaacccgaggaanacaaangaaaacncccacngaacnccaccgngggcacaaaccngncgacgcncacnnaagaancnnnggnncggcnngcnggccaaancnncgcccaaacaacacncacaangaagcnnncngcncaaccaaangagagancacgggccacagcccccagcacaaagggcccaagagacaagaaccaaaaacaggaaga

SEQ ID NO: 305679 - DNA, 395 bp, Zea mays
  unsure (1)..(395): unsure at all n locations
agagagttggaccggaacaacagcgaaaacgagcccaaagaagggcatgcaagaagagaaccaccccaagacccaacaaggaaagaagcaganaaacgaggccaacagcgcagcaaaaaacccacgcanggacacacagcacgagcgccangaagacgacaccaccggaagcgagaaaagaagcgaggngcaggcagggaggagaccacacgagaaggaagggcacccngcnaccccaaagggaaaacaagancaaacacgcaagcggaaggcgggagaaagggcccgaacaaccaggccacaaggngaacaaggcccacngcaaccccacacggcaggagagaaagccgcaccaacgacggcacacacggaggcccacaggaagaagggccacc

SEQ ID NO: 305680 - DNA, 415 bp, Zea mays
  unsure (1)..(415): unsure at all n locations
aacattgttccccacccccacgcacacgcaacgccgggcgaagctccgcaccccaaacnaaccgacaccccaccgagaggggccgcaagaaccacgacgggggcaacaggaaangcaanggaaccacagaccaggccgagaagaaagccaaaacccngaangaaggacaggancccccaccagaagccgnggaggncgaagacagcccaccnaaagnncgcccaccgggggacaagagccagcngcgccaagagnnccangnngcngcacagaacagcngggcgaagaagggaggcgcccacactggngaagacagngcngagaagcncgacaaccnaggagaaccccgggccacnncaggacacnccgaaaggagagcnccgccgggagaaacaaacgaacacgcgggagacaa

SEQ ID NO: 305681 - DNA, 524 bp, Zea mays
cccatcggccgcccacgcgaccggctatgagcagagaacgggctttaggaataacacgatagccatggacgtgtacatctaccaggcgctcctcctctcggtccttgctgtggcactgctgcagctggtgaagatggccctcaagccgaggccacggctgccgccagggccttggaagctgcccgtcatcggcagcatgcaccacctcgtgaacgtgcttccacaccgggcgctgcgggatctggcggacgtccacggcccgctcatgatgctgcagctcggccagacgccgctcgtcgtcgcctcttccaaggagacggcgcgcgccgtgctcaagacgcacgacaccaacttcgccacacgccccaagctccttgtcggcgagatcgtcggctatgagtgggtcgacatcctctttgccctctccggcgactactggcgcaagctccgccagctctgcgccgtcgagatcctgagccccaagcgcgtgctttcgtttcgcacattccggaggaagaggtgat

SEQ ID NO: 305682 - DNA, 297 bp, Zea mays
  unsure (1)..(297): unsure at all n locations
agaacatgtttgaacaaacacnaaanggaaaaaagcanacaggcagttcctgcaaannaaacacaacanccgacgcggagcanancnaacaggctgagaactgcaagcaggcctagaacgccgccngcgcgaacctccaatnacacaaanaggcccctccctgcgtgtatgcttgttaccgtcgtgtcgaaccttgtactacgaggctccatcgaacatcgatggcttgcttctttatcagaacatgtttgaataaacgctatttggttaaaaaaaaaaaaaaaaaaaaataaatag

SEQ ID NO: 305683 - DNA, 207 bp, Zea mays
  unsure (1)..(207): unsure at all n locations
accagatttttacgagcccaaacccagagggaccacacgagagggctgtactcgaggagcccaccccaggacacccgcgcaagcngnnaacagaggggccgccccagccaaacgccccaccggacaagggcnnccgcccggaacggcccggcgaggccgggcccnggagccaaaaggaggggcggngccccgctnccgacccacgga

SEQ ID NO: 305684 - DNA, 267 bp, Zea mays
  unsure (1)..(267): unsure at all n locations
cccagcaacaccgccgcgnacgacgaccaggtttttgaaaccacggccacgcgaggcgcacccccagagcgcgacaacaggacaggaggcgagaccggcacgagcaccaaccccnccaaggccaggggaaacgccacncgcccngccanggagaagaccaagnnggangacacaaaccaccacnacagngccccngaacangggccaagcaccaagcgcacagacgcnacncacaaggccgacacngaggacaaggaggcaaaggcg

SEQ ID NO: 305685 - DNA, 478 bp, Zea mays
ccgcggttacgtgggcggacgcgcgggcggctacgactccaacttttttttcgcgcgcctgcccgttcacctcagctggcgcgccatgttcctggtcggcgccgtgccgcccgtcttcctcggcgtcgccgtcctcgccatgccggagtcgccgcgctggctcgtcatgcggggccgcatcgacgacgcgcgccgcgtgctgcagaagacctccgactcccccgccgaggccgaggagcgtctgctcgacatcaagaaggtggtcggcatccccgagggcgtgaccgacgccgacgacgtggccgccatcgtccgtgccagcagcaaggcatcgtcgtcgtcgtcgtcgtcgcgccacgacggggtgtggaaggagctgctcatcaacccttcccgccccgtgcgccgtatgctcgtggcggggctcggcctcatgttcatccagcaggccacgggcgtggactgcgtggtgatgtac

SEQ ID NO: 305686 - DNA, 492 bp, Zea mays
  unsure (1)..(492): unsure at all n locations
cccacgtaaacgccgcggagaggaaggcccacgccaacagggagatcttagaacaaacacagcctcaaaaccaggccnnggcagaaacaccacnaaaacagcacacccagcccgcgaccaccnaaaagcgcccgcaagagacccgaggaacccaaaccnnnaggacgcgggaggaagcgacgcacacgcacgagaggaagacanccgcaagggcaagagggacggancaccngacnnnagacacgcancngacggcnatcgcccaccacaccnngncgacaataagagngggggaacaacagggaaggcaacctcccaccagagggagcngcacgcagcttacaatgaagagaatattcacctattctctaaggatggagggctgggacctgaccccaaaaaatctgttaggattggagcaactgaagggcgcacatcaacaatgctagcatctggacatgatgtcgcccaacccgcacctcagacatacgt

SEQ ID NO: 305687 - DNA, 429 bp, Zea mays
  unsure (1)..(429): unsure at all n locations
cgatangaagagaaccaaccagaagcgcaagaccccaaagccgtggacacccaanccaccccgnccccgccgcggggggcgcccgagaacacacaaacaacggcgaaggcngccgcagagccnggaagcagcgaaggagacaagggcaccacccccaccacccaagagggagacggccccaccacggccaccggaagagacaccggccacaagccaggcccccacgggacccaagagcaagcactaggcgacaccaccaaaggcagcacgccaaccggaccacactacaancccgcgagcaaggaacaaggagcaccagaagaagagaaccgccacgccggcgacccnggaaacgcgacagccggagcagacggcgaagcaaacaccaagggaaccgacagccagaacccaccgaccgggccaaaccca

SEQ ID NO: 305688 - DNA, 290 bp, Zea mays
  unsure (1)..(290): unsure at all n locations
gccggcgacgagcacccagcagncccagagaaacggccgaaggcgaggacaaccagccaccaggcagcgacaaaggcacaggaanggccaaggcagagaaggccggcgacgaagcaccaagggcggnanaccctagcaangacggccgaccacgccacaccggcgccacggcagggaagggacagaaggacgcaaacgccggcgacgaggcacagcccaagagagggcaacacacgcccaagaacccgaaagagcacggnaccgagagcaaccgggaagacacggagaaa

SEQ ID NO: 305689 - DNA, 548 bp, Zea mays
  unsure (1)..(548): unsure at all n locations
ccgcccacgcggccgcccgaacgccggcgagctcttttcagccaagaaggccgncgccctagcggcccgccncggccagagagagcagcggagcanaacgcaccccgacanacaaccgaaggcagacaagacccccggaacagacgcggagcaaggaacacaggcaccgggangaccggccccgaagaaggaaacgccaacacacccccncccaaacacagccgaagaggacccaaaagaaccgagagaagacggcgcccaagaaaacatagaacacattaccaccctcattaatgaaaccatcgtaaatgatggttcatacaacatgtcgttatctaaggaagaagggctttctgcaattgatggtggtaaatctgagggaggtccatctgggcgacattggatattagacccaatagatggcactaaaggtttcattaggggagatcagattgcagttgcacttggactactagatgaaggcaaagttgtactgggtgtgttgggatgtccaaatctttcattaaaattaacaacaagaacaatag

SEQ ID NO: 305690 - DNA, 248 bp, Zea mays
gagtacccagacaacccacgcaaacgaggggagaagggctttttaacagaagcggctctgaaatacaacattgaagggcatgacactattatactgactggtgacaagtacgggagtggaagctattgagattgagttgaaaagggactaatgctacagggagtgactgttgtgatagcaaagagcttcaacaggattcaccggacgaatattactggcatgggaaacatccctgtatgctacaaagc

SEQ ID NO: 305691 - DNA, 231 bp, Zea mays
taccttttctatgctctgcctcctccgatccggaagcgtttgagtcacactcggcgaggctcgatggagcccaactaatcggtgtcgagcgcccgcgagactggggagctggagaacaatatacccagggcggactacgacccggacgcgatggacgcgatctaccgctgcgacgacacgtatgacgcgcggacgcaacaagagaagcctcgggccaacgacccgcaccac

SEQ ID NO: 305692 - DNA, 478 bp, Zea mays
tttccgttcgccttctcctccaccactgccccggcgctgaccaaccactcgtgcgccacaggtctcccgtcgtggaatagggcaaaggccaggcatctcgcttctgtcctctgtcgaggggatcggacccgatcggagaaagaatgggctcggaggcggactgcgacaggatcaggggcccgtggagccccgaggaggacgacgcgctgcggcggctcgtggagcggcacggcgcgcgcaactggacggcgatcgggcgcgagatcccggggcggtcgggcaagtcgtgccgcctgcggtggtgcaaccagctgtcgccgcaggtggagcgccggtccttcacggcggaggaggacgcggtcatctgtcgcgcccacgcccgcctcgggaaccgctgggccgtcatcgtgcgccttcttctcggccgtaccgacaacgccgtcaagaaccactggaacttgttcgtcaagcgcaagct

SEQ ID NO: 305693 - DNA, 528 bp, Zea mays
  unsure (1)..(528): unsure at all n locations
cggatattcttgggtcttaccttcgcgtccgttcattcgtccgcagtgatgctgagactggcgggtcggatgaggacatcctctggcaggatgaaatatgtaaatctcggttaatgagtataaaacgggaggaagaacagtatatgagagagagagatcggtatgagttggaaaaggggaggcttatacgagagatgaagcgtctcatagatgaagatggctcacgctttaacaacttccaaattcttcaccatcgntatgctctcttaaatcttcttggaaagggagggtttagtgaggtttacagggcttttgatttggtggagtacaaatatgtggcatgcaagcttcatggattgaatgctcaatggagtgaggagaaaaaacagagctacatacggcatgcgattcgtgaatataacattcacaaaactttggttcatccaaacattgtcaggctatgggatatatttgagattgatcacaatacattctgcactgttcctaaatattgcagtggcaaggatc

SEQ ID NO: 305694 - DNA, 430 bp, Zea mays
  unsure (1)..(430): unsure at all n locations
cggtccttaatcccttttaccttacgtctttttctccgaactccctgcgattcctctcccggcggggtctcttttacccctaggggaggctacnatacaggaatctcaaagagggccgtctcatcctagttaaggaaaccatggagcacaaggaggctgggtgccaggcccccgagggacccatcctctgcatcaataactgtggcttcttcggcagcgcggcgaccatgaacatgtgctccaagtgccacaaggagatgataactaagcaggatcaggccaagctggctgcctcctctatcgacagcatcgtgaacggcagcgacgccctcatggagccggttgttgctggcagcaacacggtagtagcttgtgcccaagttgagttgcaaacaatgaacgtgcagcagcccgttgatgttgccggacc

SEQ ID NO: 305695 - DNA, 423 bp, Zea mays
taccgtcggtatccaggacggaaacgcgtgcggggagctgtactgcctcgagcgtggcattcaggctgatggccagatgcccggtgacaagaccattgggggaggtgatgatgctttcaacaccttcttcagtgagactggcgctgggaagcacgtcccccgtgctgtttttgttgaccttgagcccactgtcatcgatgaggtgaggactggcacctaccgccagctcttccatcctgagcagctcatcagtggcaaggaggatgcagccaacaacttctctcgtggtcactacaccattggcaaggagattgttgacctgtgccttgaccgcatcaggaagcttgcagataattgcactggtctccagggcttcctcgtctttaacgctgttggtggaggaacgggctctgggcttggttc

SEQ ID NO: 305696 - DNA, 387 bp, Zea mays
  unsure (1)..(387): unsure at all n locations
agctgaccgacaacaacacggacgttgaattcgaagcggacgtagttcgctggaaccagatggcaaacgcgccgggatcctggccctcggcctgtagcgctcctgtgcgctgccgccggcccggccgcggcaaactgcggctgccagcaaacttctgtgancaagttcggtactgcggacgaccgacgcctactgcggcgacgggtgccagtcgggcccgtgccgctcgggcggcggcggcggcggcggcggcggcggaggcggcggaagcagtggcggtgcgaacgtggctaatgtggtcaccgacgcgttcttcaacggcatcaagaaccaagccgggagcgggtgcgagggcaagaactctacaccggagcgcgttcctgagcg

SEQ ID NO: 305697 - DNA, 299 bp, Zea mays
  unsure (1)..(299): unsure at all n locations
aaaaatcggccagggatgcggggcggtgagcagtccaggccaacctgtactgcctgctggggcaccgcccgcgcgaagaggggggcaggccccaggtgccggctacttggatcgggactcggtcgtggcaacgggacaacaacgacaatcgagggctggcgcggaccaactacccggcctactgcatagacttcgacgacggccccaccggccgcttcagcaatggactcaccaccgtggacgctatatctaggcatatgggctttgacgattacatncccgcgtacgctggcgcgagc

SEQ ID NO: 305698 - DNA, 273 bp, Zea mays
ccgccatggccgcctccgcccagggatccataagatcattgcggggatcttctgcacctacttcctgatgttcgcggggtgcggcgcggtgactatcaacgcgagcaagaacgggcagaacacgtttccgggcctggtacaaagctcgggcgtctcgtgcaggggaacaggatcaccaagatcgaggagatctacctccaccctttacccggcgggggcccctgaccatcgcgaccctggtgcctgtgcttaaggactaggtgaagaagatca

SEQ ID NO: 305699 - DNA, 182 bp, Zea mays
ttgtcccgtacgaaccgtcagctcttccaccctgagctgtttataagtggcaaggaggatgccaataacaacaacccccgtggccactacacattcggcagggactacgatgatctgtgccttgaccgtatccgtatggtccctcacaactacaccgggctccaaggcttgctggtcttcaa

SEQ ID NO: 305700 - DNA, 515 bp, Zea mays
ctgccacgcgtccgcccacgcgtccgtagggagatcaaaaggtgctgagcttattttttctgcagttgaccaggaaggacatgacctgggtgccactttattggtttacacaacgaggcctgacacgatttttggtgcaacatatcttgttgtggcacctgagcatgttttactgtcatctctaacatctgaggaacaacgagcacatgtagaggaatacagagaactttcagcaagaaagagtgaactagaaaggactgaacttcagaaggaaaaaactggggttttcagtggttcttatgctaagaacccagcaaccggggaaatcattccaatatgggtggcagattatgttctaggaagctatggcactggggctatcatggcagtgcctgcacatgattctcgcgaccatgaatttgctgtgaaatatgaacttccaatcattaaggttgcaagtccaccgaatggtaattgtgatccagtggaggcatatgaagatgatggcatcatga

SEQ ID NO: 305701 - DNA, 352 bp, Zea mays
  unsure (1)..(352): unsure at all n locations
tttccacgcggacgaggacccgagggcggggaggcacgtgacaaaaaggccgccccaaccgccccgcggcaggaccgccaagcaacggcgacagacccccggaacaacaacagcaggagggagcgcaggacggaccacaggggacaggcaggaacccaaggaagaaacgcgggccgggagcagcacngccccaagcagggaacgcacgcagaaggccagaagcccggagacaagaccacngggggaggcgaagacgcngccaacaccgnctgcagtgagacgggcgccgggaagcacgccccccgggcggcccaggatgacccagagcccaccgacatcgatgaggcgagga

SEQ ID NO: 305702 - DNA, 472 bp, Zea mays
tctatgcgtccggcaaccggtccaacactttcacgctcagcttcagcaatggctgcctccaccatggcgatctcctccacggcgatggccggcacccccatcaaggtgggttccttcggcgagggccgcatcaccatgcgcaagaccgtgggcaagcccaaggtggcggcgtccggcagcccctggtacggccccgaccgcgtcaagtacctcggccccttctccggcgagcccccgagctacctcaccggcgagttccccggcgactacggctgggacaccgtcgggctgtccgccgaccccgagacattcgccaagaaccgcgagctggaggtgatccactcccgctgggccatgctcggcgcgctcggctgcgtcttccccgagctgctctcccgaacggcgtcaagttcggcgaggccgtctggttcaaggccggctcccagatcttcagcgagggcgggctggacta

SEQ ID NO: 305703 - DNA, 447 bp, Zea mays
gaccggccgaataccgtttcgacccacgcgcctctcgaaccggagcaaccgccgctatggagcctgtgatctcatcaccggcacggaggccgcagacaacaactttgcccgtgggactacaccattgcacagggatggtagcctggccttgatcgactaggaagctggccgcaactgcactggtctccagggcatcctcgtattaaacgctgctaggaaaagaacgggctcatgactaggatcgctcatgctatagcgcctgcatgaagactacggcaagaactccaaacgagggatcactgcaaagcccaccccacaaggatcacttctgccgttaggccatacaacagggtactggccacccactccctggtagagcacactgatgtggctatacggaaggacaatgaggacagctacgacatgtgacggctaacccttgacatt

SEQ ID NO: 305704 - DNA, 354 bp, Zea mays
tgccttccacgcggacgggacaccaacagcggggggggctggttacccgaagacgaccgcgccaccgagccccgggagcgccactacagcgggaggccgcgcgggcccacgcagccgcagcgcacgggcatcggcctcggaggcgccagctgctccatggaggcagaaggcgcgctggacatcgtgcgggcgcgcgccagcgcgcggcacggcctgcacggggaggacgacatcgtgcccatacacatgctctgggagataccgcaggaccgcagcatcgggtgcgcggaggtgatcaccctcgcggggcagctggagttcatatacgaccaggcgcccgacgccatgaggagc

SEQ ID NO: 305705 - DNA, 464 bp, Zea mays
tcccacgcgtccgcccacgcgtccgcccacgcgtccgatccaattgtcacttgctctccctccaacaagctaattaaggccggtcatccctcttctagctcgtttcattatccatggcggaggagaagcaccaccaccaccacctgttccaccacaagaaggacgaggagcagctcgccgccggcgggtacggcgagtccgccgagtacacggaggccacggtgacggaggtggtgtccacgggcgagaacgagtacgacgagtacaagaaggaggagaaggagcacaagcacaagcagcacctcggcgaggccggcgccatcgccgccggcgccttcgcactctacgagaagcacgaggcgaagaatgacccggagcacgcgcaccgccacaagatcgaagaggaggtcgcggcggccgcggccgtcggctccggcggcttcgccttccacgagcaccacgag

SEQ ID NO: 305706 - DNA, 179 bp, Zea mays
tcttgtatccagaacagcttgcagctactgagagtgtgtgagagagagaggatgatggatgacctcggcagggctgctatgctgctggccctggtggccgcgagcctggccatggagatccaggacgacacccgctacgctacaccatgacgtccaccccggacagcccgaactggaag

SEQ ID NO: 305707 - DNA, 359 bp, Zea mays
ttcttctcgtgcgtccactgccacgtgtgtgcactagcaaccagctaggtccgccgagggacggccgccataatgccggaggagaagcaccaccatttcgtcaaccaccacatgatggactgaggtagcagccctctcggctatggtcgcgagtactcccagaccgaggcggtcaccaccacccgcgagggcgagtccgataggtacaagacggaataccaggcgcacaggcacatgcaatacctgtccgagggcaccagcatcgccggctgcacgttcgaactctacgcgaagtacgactcgaggactgaccctgagcactggcacaggctcaggatcaccgagtaggtacctgccac

SEQ ID NO: 305708 - DNA, 198 bp, Zea mays
aaccgggtgcggacccacccaggcgttggtgtgggggacaaagagacctctatgaaggggtggttcaggctgggtcagcattgttgagaaccttaggacatataatcagcctgcgtttgactacattgctatggatggagagcatcgtggaggagctagggccgggatcgatagcaagataaatacagaccgcattga

SEQ ID NO: 305709 - DNA, 339 bp, Zea mays
ttgtttggtcgcctatcgttacaagcgcttagggggggtccctgtggatgccgtgctccagaaggacgagccaatcgacatgacgctacccaccactggctagggtcatgaaaagctacatcactgcgctggggagagaccccaatgaccaccaagacgacacaggagcctcctgaaggttggctgcatcgagccatcggacttctgctagggtgccgaacaatgttgctcaagctgatcagaacggataccatcacctgactgagatgaacaagaaggtttacaaaaatgacaaagccggacaggaacccaacacgcctgaactgagacagacaggac

SEQ ID NO: 305710 - DNA, 381 bp, Zea mays
  unsure (1)..(381): unsure at all n locations
tnctcgtttgggggaccatggaaacaagctcctgggggaggtccctgtggatgctgtgctccagaaggaccagatgaacgacatcatcgtagctaccactggcaagggttatgaaggcgtgcacactcgctggggagtgacccgacttaccaccaagacccacaggggcctacgcaaggttgcctgtatcggagcatggcatgctgctagggtgtcgcacactgctgctcgtgcagatcagaacggataccatcaccgcactgagatgagcaagaaggttcacaagactggcaaggccggacaggaaacccatgacgcctaaactgaggatgacaggacccgacaggacatgactgccatgggtggtttgccccactacgg

SEQ ID NO: 305711 - DNA, 303 bp, Zea mays
gcgtttatgcgtccgatgccccagcccggttccttggggggcgttttgatctcgggggaggcccgggcgcaggtccgccatcagccatcgaattccatggcggtcaacttcgggaacatgatccgcaacgccaagctggttcttctcgcacatgacagcactggcaaatctagcttggttcattgggtgcccaacggacagtgtgccgaatgccaggaatcaatactgggagcagctttcttttcccagaccttaccggtaaacgatgagactggtaagtctgaaatgtgcaatactgctggg

SEQ ID NO: 305712 - DNA, 332 bp, Zea mays
gcgttcttttcctcaaaccctaggttgtccatcctggtgccagatctatggctctcgcgctctgtctgggacatgaaactgtagctactgtcagcctgccttcatgtactcgatgatgcatccacccatgagtctgctaaggagggtacggacactgcgcaggggccggctccggtggtgagcaatatcaacgcgagcacgggggtgggcgacaccttgcggaccacgctgtggcctcgggggatggacaggctgatgcactacgacaagggcggagtcaccatatccaacgacggtgccaccatgatgcgcctcctccacatcatgcaccc

SEQ ID NO: 305713 - DNA, 372 bp, Zea mays
gttgtttacaccaactacctctttatgggcgattacgtcggaaatgctatgattccacttaacttgacaagaccgtggctactactctgtggagactgtgtcgttgttagtggctctaaaagtacgttatagagacagaatcacaatattgagaggaaatcatgagagcagacaaataactcaagtgtatggcttccatgatgaatgcttgcggaaatatggaaatgcaaatgtgcggaagtactttacagacttgtttgattatttgcctctcacagctgttatagaaaaccagatcttttgcctacatggtggtctctctgcatcactggatacattggataatatccgcgcgcttgatcgcatacaaga

SEQ ID NO: 305714 - DNA, 410 bp, Zea mays
gtgcttacgcgtacgcactgtctccggttccgctcccgactccttggtctggtcctcatccatccaaccaggcgagccaacaagcaagcaaaagacaacggcgcgaggagctggagagacaccggcgacgcgaagcaaccgcccgatcggagccgcggctgagcaggagggagccggagatggtgggtctcgtcggcggcagcacggcgcgggcggagcacgtagtcgccaacgccggaggggaggcagagaacgtgcgcacgatgcaccgccacgcgccgaccgagcaccagagcaccttcaccctcgtgaagcacatgaaggcgcccgtgcacctcgtgtgggagctggtgcggaggatcgacccagccgagagggacaagccgttccgtaggaactgcgtcgtgcgc

SEQ ID NO: 305715 - DNA, 587 bp, Zea mays
ttattccctaatattatgtcttatttttagactacgcagacaattagggtagctatgctagatgagatcctggattatgtgaagtttctaaggctttagcctttaggtcaaggttcagctcattgtgctgacatatttgggttattaaccaccaattgggttacttgtttgatcactgataggtccctgattgtgaaaatgttaggttctaagcatgagcaagctgggttatgatggtgatgtggcactgctgggtgctgatatatcactttcagttaagttacacatgtgatttgtgactactaactatttccctctgatcggtcttgaccagattgaagctctgtatcagtatgcccaattacagtttgagtgtggtaactactcaggggctgctgattacctttaccagtatggtgctttgtgcacaaacagggagcgaaatgtgagtgccctcttgagaaagctagcagcagaaatcctaatgcagaactgggacctagctttggaggaacttaaccgcttgaagggaaataagtgattcaaaggttctaacttcaatgttttgttctgggttctttgctctt

SEQ ID NO: 305716 - DNA, 523 bp, Zea mays
gttgttacgcgtgcgcccacgcgtccgcccatgtatggttctgcctcaaacaaatattataggtgatcatgacaagctgctggacatgccagaattagcaagggaatcctccgatgtgacagatgagatggaatcatactctttacagcttcaagaaccagatgataaatctccattggaggtaaagaaaatgagtcacaatgctctagctgcccttgtgaagtatttgcagaagaaaagaagtggcataattgagagagcgactgctgaagtaacagaggaggtggtctctggagctgttcaccacagcttaaaattatctgagccatataagtcaaagaagctgagcaagaaacgagctcagacacatacaagctctattgctagagaaatggcaactgtactggatacttgtctgcttcaagctcttattcttactgggcagtcatcaggggcaatagagttgttgaaaggactcaattattgtgacctgaagatatgccaagagtctttgaaggaaaag

SEQ ID NO: 305717 - DNA, 461 bp, Zea mays
  unsure (1)..(461): unsure at all n locations
tcttccatctcgaacggaccgcgagacgccaccggggctgagctatttacccgagcgcgacgnggcgagcgacgaggcggactccgacgttcctgcgatggctatcgtcggacgcagcctcctctaaggcgccgcggcagcgcgtagcggcgctgtgggggaacggtgactacgggcggctggggctgggctcgctggagtcgcggtggagccccacggtttgccccttcttcctcgaccgcgccggcgacccgaccgcctacctcgactgcggcggcgcacataccctctttctcacccagaatgggcgagtgttcgctacagggctgaacgactttgggcagctggggataggaacctctgatacacatatgctggagcctgttgaaatttctggatttcacgaaagagttgtagaagtttcagctggcaaccatcattcttgtgcagtcaccgcggat

SEQ ID NO: 305718 - DNA, 251 bp, Zea mays
tgccgcaagcaacagagctcaagagtcagggcgccacggcgacagagacggagacctacgccgtacaggctgagagcaaccagctgcactcactcatcatcaacaccgactattccaacaaggagatcgaccaccgggagctcaacaacaactctcccgatgcggaggacaaaatcagagccgagagcctcactgacaagagcaagcacgacgcgcagccggagctgaaccaccacattgaaccagacaag

SEQ ID NO: 305719 - DNA, 558 bp, Zea mays
  unsure (1)..(558): unsure at all n locations
tgcttacgcgtgggctggggaggactaacaactggtatcttttaatctctatcgcgctgcacgcaagcaactcaggatcaaaacccaaatccatcctttcctgccgatgccaaaatccggagaggccgcatccttatccagccagtcgtcccatacgagcgttgtcgatggcaccaacaccggacggcagagaagagataagaagcaacctttccacgctctggaaccgacctccccgccttcttcctctgctccgcctgcgccagcgcgccggcattgacctccggcatcgccaacccctgtcgccccaatccgcaggcaaggagggggagaagagtgggcggcggaggagcacaggcggcgtccccttgagttacttggggcttggggctgtttgattcagctatttttctgaccagatttcttgaaaatctggctgtagggagaatctgactgtggagagaatctgagtatcattacgantacgtgtggnggaagacaaagttgtcataggactcaagatctagaagtgacngattcctctattacacgactcac

SEQ ID NO: 305720 - DNA, 512 bp, Zea mays
  unsure (1)..(512): unsure at all n locations
ttactttgctcggctgccgngaatctctctcacctccccgaagcaagcgagcggggcagcgcgccaggaaggatcggaggagacgccatcaatcagcacttgcacgcgcgcggtcggccgcaggtggaggaagaagatgggcctgtgctcgtgctgctgccggtgcctggagctgctgtgctcggtcctcctcccgcccctcggcgtctgcctccgccacggctgctgctccatggagttctggatcagtgtgctgctcaccatcctcggctacctccccggcgtcctctacgccgtgtacgtcatctgctccgtcgacccccaccgccaccgcgacaacgacgactacgtctacgtagcatgacaagatggaccggtccccgtggtgctctggatggctcgggcaaggcatangagctgccgctgcccctactgaaaagatgcaccgctttctttcacatgaatgtcaagtccacctagtggatctacctgtcccttcatatggcagtttc

SEQ ID NO: 305721 - DNA, 526 bp, Zea mays
  unsure (1)..(526): unsure at all n locations
tctctcacgcgtccggttgaaggatgcccgcatactgaacagggagcttcatcagactttatatggttttatcatttttgaggtagactgggctgatgtgcgtggcatcaattatttgaatgaacttcagacggatacatcaatggttgtggagtctaaaataatgaagagatgggagtttgatagtgtcaaacaagcttcaacattgatcacttcttggttctctggaaatccttttgaatgtcagctcctacaggattatttgaccaacatctcttctaacggagatatattttatgatgctcaaaatgatttcttaacacctgaatgggatagtgagaatttaccaagtgacagtgatgattctagccatgttcaaatcatcagagagtcatcaggtttcacagactcatcttacactacacctccttgctctggaccttacangagaagaaaaataacanaatcagatgatggaagtagttcgactgaagaatatacacagaaattgggcctcgccaaaaca

SEQ ID NO: 305722 - DNA, 415 bp, Zea mays
tgctaagcgcgcgcacagagatctagctgagctactagctatagcagcagctgctgcaggtctcctgacatggcgaagcaggacatcgaagcaccagacggacgcggcggcgtcgggccccgacgcggcgtgcggcggcgtgggcatcctcggcatcgcgtgggccttcggcggcatgatcttcatcctcgtctactgcaccgccggcatctcaggtgggcacatcaacccggccgtgaccttcggcctgttcctggcgaggaaggtgtccctcgtccgcgccctgctctacatcatcgcgcagtgcctgggcgccatctgcggcgtcggcctcgtcaagggctttcagagcgcctactacgtgcgctacggcggcggcgccaacgagctcagcgacggctactccaagggcacc

SEQ ID NO: 305723 - DNA, 317 bp, Zea mays
ggcgcggaagaactgggtcgacccacgacgcctcttcttgcgtggggacacagccggcgacaacaccgtgccgtgcacagcaaccgcggcgcgagaagaagagacggccgggaagggcgacggaccggcgatcggcatagagcccggcacgacgcacgctagcgtgggcgtgaggcaccacgaccggatggagagcatggccaacgaccaggggaaccggaccacgccgcacgacgaggccagcaccgacggcgagcgccaaatccgagatgcgggcaagaaccaggtcgacaaggaccccaacaacaccgggcctg

SEQ ID NO: 305724 - DNA, 323 bp, Zea mays
accttggtcgcgaccggaagaaaggcacagcaccgggcgggggcatgggcaccagccccgggagccccgcgacgaagcacagcgacgcgcagcaagacgctgacaggcgcggcgccaccgccgccaggggcagccacgcccgccacaccgacgccgacgacgcgagacggctccccagcagctcaggcgctggagggcgaccgaggaagagctgcgacaccgccagcaaggacgccaccctgccggcgaggcgctgcaacgacgcggtggacaagagccccgccgacagccaggacagcgaggcgacgccggccggcgacggc

SEQ ID NO: 305725 - DNA, 405 bp, Zea mays
tctgcacgcgcacacgcagagaaagcggaggtggggtctctggaaaaacagggcgcagaccgccaggctccaccgaaggatcgcagagcaccaaaaaaagccggccccaaagaggtgcagaaacacacaaagcgcaagacaacggggcccgacactggaccggaagatcgaggcactctcccgaacacaatgaaaagaggactggaggcaatgcgacctcggatagagagccactcgaaatcatggagcacaagcacacccaacggaggaaatgctgcggccatcggagaaaaactgagggaacggacagcgacaaggagagctagaaagcgaaagcacacgcaagcagccgccgagaagcatccggagaacacccggacgcaagataccacaaagctcaaaaag

SEQ ID NO: 305726 - DNA, 470 bp, Zea mays
ttccacgcgcccgcggacgcgcgggagacaggggccggaagcaaagccaagccaagggcgcccaacccccagcagacgcgccggaaggcccaccaggagcaccatggatcaaggggccaagagcccccaagaaccccacagcggtccccgccgcagacaaggagcagaaaacgcctgcccaggccgctctacgcaggggaagccaaatgggccacagtgtacccccgaaaagcgccaacgagtccaggactaaggagaacaccgacagatatggctgggccactccagaagaactgacggccaagaccccagaaaccaaacaggccaggccgctgacagctgcagcaggagctcaccctcaggccggccacaacacaatggaggactcccgggatggtgaaagacaaaagcacaccaaattgctcacgaaaaaagagccaggcgaggaaacaaccacacaaaaggggaga

SEQ ID NO: 305727 - DNA, 462 bp, Zea mays
ggaccggccgaattctgggcgacccacgcgtttttatacacagcggcgactagcgctagctagggtcgtctgcagcaagaagggcacagcgcacgcacggacgggaaggaggaggacgtccgcctgggcgccaacaagatcacggagcgccagcccatcggcacggcggcgcagggcacggacgacaaggactacaaggagcccccgccggcgccgctcttcgagcccggggagcacaaggcctggaccttcataccgcgccggcatcgccgagtgcgaggccacctgcctccacctctacatctccatcctcaccgtcatgggcgtctgcaagtccacctccaagagcgccaccgtcggcatccagggcatcgcctggaccatcggcggcatgagctagccctcgactactgcaccgccggcatcaccggcgggcacatcaacccggcggggaccctcggg

SEQ ID NO: 305728 - DNA, 387 bp, Zea mays
ttccacttcgtccgggcctagcaccgggccgggggcggggcaccagccccgtcatccctgcgaccacgctcttcggcggtgttgtggcgggcttcccacgccacgggcccccgccggcagggccagacacgcccgccacaccgacgccggcgacgggactcgtcgcccgagcagctttggcgctggtggtcgaccgtggcactgctgcgactgcggtatcagggacgcctggctgccgggccggcgctgcagcgacgtgggggacaagtgctccgcccactgccaggactgcggggcgttcttcggccggcgacggcttcgtctggggtgacttgatggtaagcctgaccgagcccccggtctgcacaccgaggccgcgggactgct

SEQ ID NO: 305729 - DNA, 354 bp, Zea mays
ttttcttcggacccgtgggcggacgcgtggggggttgcgcaaattgaaagctcggcgctgccctgcgcccctgcctggagctcgaaggactatgtccctatacgtagttgtacagctcctcgcatattgaggcctggtgcatattggagatccggcccaacttggatcgagtcctactgtctttggacattgattggagtgctccattcattgagacagcatgcctaagataaagacaagccgcgtcaagtatcctgaaggatgggagcttattgaaccaacaatccaggagttggatgccaaaatgagagaagctgaaaatgatccacatgatggaaagagaaagtgtgaagc

SEQ ID NO: 305730 - DNA, 372 bp, Zea mays
ttactttctggttgcacaacagctcaacttagtgcgggttctgaccatgtgccgcaaactcctattcaaggtgatggctcttttgagtggttttgctggggtgtatacagaagctatcattaaaaaacggccatcaagaaacatcaacgtgcagaacttttggctatacatatttggggtgatcttcaatctagttgcaatttgtgttcaggattatgatgcagtcatgaataaaggctttttccatgggtattcattcattacagatgtgatgattctgaaccacgcactgagtggaattgctgcttcaatgctgatgaaagatgctgataacatagtcaaagtctattcaactcccagtgccatgcttct

SEQ ID NO: 305731 - DNA, 469 bp, Zea mays
tttgtcctcccacgcgtccggccccgcagggcgctccggtcgtcctggcacagcccggagttgccgctcaggtcgaggttcccgccgagccggcgcaggaacgcgcggtcgaacggcacggccccgccgagcgcgttgttgctgaggttcaggtggtacatcctgcccagccggctgagcgccgtggggatgggtcccgtcaggttgttgtcctgcagcgagagcgtcgtcaggctcgccagctggccgaacgcgtacggtatcgggcccgagtagccggagccggccaggcggagctcctgcaggcgggcgaggctgccgagctcagaaggcagcgggacgcccatggggttgctgtccatgatgaggtactggaggctccgcacaccggagatgcccggaggaaaactgccggtgaggccgttgttgctgagcgccagggtggtgagcgacgtgaggttggcgaccg

SEQ ID NO: 305732 - DNA, 406 bp, Zea mays
ttctctctcaaagcatcgagggcagccacagcacacgatcctcggcccagcactagcacgagctatccaaggcagacgtagatggtgacagagcaggggctgcacgtcgccgccatggcggcggcagctgctggcggagcgggaaacagacgcggcgcctcggaagcccgtggacgtgccggtgcagaagaactagcggccgacgtgggcgcaagaccacatgcagtacatcaacggtgggcgggaggtgcaggagcacctggacaagaccatcggcacgggcttccagactcggggctgctacctcttggggcactggagcatgcacatgaagctcgtgcgtggcaactgcactcgcaccgacacctgcttctacctgtcgtctaagaactgggaacacgacaag

SEQ ID NO: 305733 - DNA, 292 bp, Zea mays
tccacgcgtccgttggggcctgtttggagaggggggatattaactaaacttaacccgcaagaccccaaagccgaagacttgctatacatgccttacgagccgagggggaagtcatgagaacacataaacaatggagaaggctagtgatgtgcttggtagcagcgatggtgtcaagggcaccagcttcttaacccaagagggagatgggcctaccactgtgaccggaagtgtttctggactcaagcctggtctacatgggatccatgtgcatgcacttgttgacaccaccaat

SEQ ID NO: 305734 - DNA, 516 bp, Zea mays
ggctaatcctttgactggacggatgaggaattagagcaaacttcatagtctgttggatatggcgctgtcaagcctgttctggaatgtctcgttctagaaagacggcacctcttgatttgactaagcaataactaagtactacctccgttctcgaatatttgtcctccgctaattcatttgtgaactaaaacacgacaaataaaaaagaacagagggagtattttacggacaatccaatttatcgtaacacatttctgtaactttactacaggtacgctgatctaaaaaataacaggctcactaattacacatttagttttgaacaaatgctgagcgataaggtaccaaccagactatttttctaggaatgcactctgagaattttgttaacatgatcatcattatgctcatgttcattctctatgcgaacagggaaatactgctgtgtaccttcagtatgcacatgctcgtatttgttccattattcggaaatccaacaagaacgtggaagagctg

SEQ ID NO: 305735 - DNA, 474 bp, Zea mays
  unsure (1)..(474): unsure at all n locations
cccatgcgtccgcccacgcgtccgcccacgcgtccgcggacgcgtgggcagcgacgagaagacgctggcagaagagaaccagaagctgaaagagcttctgcaaaagcttctggcgtccggcaacgatcagatgggggtcatcacggacctaagtgagaaggtcaaggtgctggagcggaggctggcacgcaagaagagaccaaaggtgagggtgcacaagccatccaggcatgcttcctgtgtccactgaaaggataagtctgtaaggctttgaggttctatgttgtatggatccccatgttgcttcctgtgtccagctattgtgcactgtgtaggtatagccatgctgtggcactgtgcttcgtcttggacaacacaaggtgtggcatgttctgtattttatgtctgtataatgcatccaactacatctagtgttctgtgaggcttnntntatacttttatatctccaatttt

SEQ ID NO: 305736 - DNA, 503 bp, Zea mays
ttactcttgggccggaatagacaaagaaacgtgcagaggagcaatccaggaccacagacgccactcgtggggaggggggatgcggaggtgttggtcccggcggacctggagagtcgggtgatggaggcggcgaaggcgtaggaggcgcgccgcgacccgccgctgctgcgggcggtggagctgtcccgcgtcgacgccgaagagggcgcgggcaccgagctggccgggatcctcgtgtacaacctctgcttcgcacacaactcgccctagatctggaagctcctgggccaggccgttgcgtaccgccttctatgtccgctccacgtactcgagctccttacccatagggtgttgccgcaacgacgagcgcagcctgaggcgtatcggctgcatctggagctccttaagtgtcacgccacgtcatcgttgctggcgatggaggctgagcctaaccgcgacaagatagggaagtacattgctgaagctttgcaactatcaaaggt

SEQ ID NO: 305737 - DNA, 426 bp, Zea mays
agctcgtccaaccaaacagcgtggatgcatgatactgggctggggttttctgacaaaatcggtatgggctgggctccatgctagctgagctagtatcaggaggcccccatgcataataattaataggacggaatcttgacccccggcccaaacatatttgaactccatcgtttctgcaggcgacgttggcgccaccggcagcggggaagatgatgaaggcgctggtgctgtgctactccgtcatcgtcttcaccttcttcctctcgtcgatcacgggctactgggccttcggcagcaacgtgcagtccaacgtcctcaagagcctgatgccggacttgggccccgtcctcgccccgacgtggctgctgggcgtcgcggtcctcttcgtgctcctccagctgctcgccatcggccttgtctactccc

SEQ ID NO: 305738 - DNA, 521 bp, Zea mays
cccactcttccggagcagcagagagggaaagcgaatcccctcctctccttctcccactcttcaatgctctccccgtcccctccgccatggacgccgccgccctcgccctctccatcatcctgctcgccgccgccgccgccaccactctcgcccgcggtgccacgcacccggcggaccaggcggcgctggaggaccttcggaaatcgctgacgaacccggacgcgctggggtggcccgacgacggggacgcgtgcgcgtggccgcacgtctcctgcgaccgcaccggccgcgtcgacaacctcgacctcaagaacgccggcctggcggggacgctcccgccgtcgctcccctcgctcgcggcgctgcgcgacctcagcctccaggggaacagcctctctggcccgctcccgtccctccggagcatggcgtccctccagcgcgcctttctcaacgacaacgacttcgacgccattccgccgacttcttcgacggtcttggcgacctgctcgagatctcgctcg

SEQ ID NO: 305739 - DNA, 369 bp, Zea mays
gccgcctcttggacgggctcatgcagagggctgacacacgggatcctttacgccaggccatgcgccaggtcaggcaccgtgagcgtgacctcaagcgttataagaaggccctagagatgaagctccgaaggaagatggaagggccggatgacatgcctaccatcgccattgcgagctacgctgaggaggacaagacagcggacatgacaccgacgcacaaccatggagtcacctatggcagcacgggctacacataggcccaggctgccactgacgccgacgatgggaccaagaacgcgcacgcgagcgacctggcgaccgaacaaccaagcaggaagatatgggggcagacagggccgctaccaggga

SEQ ID NO: 305740 - DNA, 433 bp, Zea mays
  unsure (1)..(433): unsure at all n locations
gaactcngaacgagcgcgtcggggtctactacgaccgcctcgacgtttacgcgtcgtacaagtacctgcagctcacggtggcggcgtcgctgccgcccgcgtaccagggccacggcgacgtcggcgtctggtcgccggcgctggccggtcccaacgtgcccctcgcgccctacctcgccgacgcgctccgccaggactgccaggcggggtacctcgtcctccaggtcaaggtcgacggccgcgtccgctggatggtcggcagctgggtctcgaaccactaccacctcttcgtnacctgcccggccttcctcgtcaccgtcggtggcaacggcgcgcccggtgccgccgggttcaggttccagaccaccacctactgccacgtcgaggtctaggtctagccggccttttgcctgtctgtgcttgtgggtcgtcc

SEQ ID NO: 305741 - DNA, 515 bp, Zea mays
  unsure (1)..(515): unsure at all n locations
gtcctcngtcttccggaagcaagggcaggagtggtactgcacatctggtcttcccagtgatatatctgtggtagttggggaacagtctttccatcttcacaagtttcctctactatcgaaaagtggcctgttggagaagcgaatcagagagaaaatcgataacagggacgatagctgtgcaattgatctatctgatattcctggtggggcgaaggcttttgaactggctgccaaattttgctatggtgtaaagtttgaaatgactgcctccaacgttgtacaccttcgttgtgctgctgattaccttgagatgacggaagagatatccgaggggaatttgatcgcagagacagagagcttccttacccaaacagtcctcaagagctggaaggattcagtcaaggcgcttcaaacttgcgacaacgtccttgatgttgctgaaagattgcagattggaaagaggtgtgtagactctattgcgactagatcatgcagtgaccctgattatttggctt

SEQ ID NO: 305742 - DNA, 495 bp, Zea mays
ttcgcgaacgcccccctccccgcccacgcgagcgcccacgcgaccgggcggggaaggttcggcaggctcgcggccagggtccccctgcagagcgaggatgtcgagctcgtcgccggcaacgaccccttcatcaccacggattacatgacgtacatgttcaagtacgacaccgtgcacggccaatggaagctcagtgacatcgcccttaaggactccaagacgctgctcttcggcgagaagccggtcaccgtctttggcatcaggaaccccgtggagatcccgtggggtgaggctggtgctgagcatgtcgtggagcccaccggtgtctccactgacatggacaaggctgctgcacatctgctggggggtgccaagacggttgttactctctgccccaagcaaagatgcgcccatgtccggcgccggcgtcattgaggcactatatcactgtagctagtaacattggctccactgattgttgcaccacaaaccgac

SEQ ID NO: 305743 - DNA, 507 bp, Zea mays
  unsure (1)..(507): unsure at all n locations
cggacgtgngggcggacgcgtgggcggacgcgtgggctccgctgggccaccagctttgaccgccgcctcccttcccctccgctactgctcctccccaccccactcccccgcaggagcggcggcggcggcggcgaggtcgtaccccacatcggcgagcggcggcggcaccgccggaggcaaaggcaagatgttcgggcgcgcgccgaagaagagcgacaacaccaagtactacgagatcctcggggtgcccaagtcggcgtcccaggacgatctcaagaaggcctaccgcaaggctgctatcaagaaccaccccgacaagggcggtgaccccgagaagttcaaggagctcgcacaagcctatgagggtttgagtgatccagagaaacgtgagatttatgatcagtatggtgaagatgcccttaaggaaggaatgggcggcggaggatcccatgttgatccatctgacatcttctcatcatcttttggaccctcttttggaggaggtgg

SEQ ID NO: 305744 - DNA, 457 bp, Zea mays
ataatcgtgaaaccacagtttcttatgaagagaggatcacaagttggatcaacaactgggaatgaagcctcgagccttcgtggactatgttttcgaataaataccatttactacatccaaactgaacttgaaaacctgcatatgaagacgaaagaatgcttgcagaaagttgagttatttcagcctgataatgctgatgatctgaacataaactttgggctatcccaggcagcttgccaagaaggaattcgacagctgtgtgagactactgcatatatggtgatgttcaatgatctgagccacgttctcctgaatactctctatgttgggagccctgcgtcaaacaggatcctgcctttgttaaaagagcttggtcctatccttaggattatatctgacacagtgcacaatgaagtgcaaaatcgtctcataactgcattgatgaaagcctctcttg

SEQ ID NO: 305745 - DNA, 455 bp, Zea mays
  unsure (1)..(455): unsure at all n locations
gggtggagaccccaaatatgcccttttaaatatggatctgcatgtctccattgaagtctttggaccctcgtgtgaagctcatgctcttatggcccatgcatcggaagaagtcaagaagctgctcagtcccgatatgagggatgatccctgacaggagctattgctagaattgccctactggaacggagtacctgaaccctctcgtggacgtagggtatctgtgagaggacgaggagctgtccctcacacttcacctgttaccagaggacttagtgtnntaccacctaaaggagctatggttcnnnnnaccccagtgagaggctgcatcaccagaggtgccactgtgactcgaggagtgccacccccacctactgtgaggggtgctccaacaccaagagctcggacagctgggattcagagaatacccttgcctcccacacctgcaccaaaaacat

SEQ ID NO: 305746 - DNA, 215 bp, Zea mays
cctgagctctaccaacaccacctagcctgcgagcgacgtagcctccgacgcgccgagcacggaccacgccgagccacagcggaaagcacaaggacgagcccaccaagaacgcgggctacaccggcacccccggcaagggaatccccgctgcagatgagtccacaggcaccacaggcaagcgcctccccagcatcaaagacaagaacgcagaggag

SEQ ID NO: 305747 - DNA, 332 bp, Zea mays
gggaaacattaagattggctttcattgacaataataaaggcagtagaataatctcaactacccgtaaatctgaagtcactagtggtaacaaggtttacaagccaaaaccactttcagatgataactccaaacgattattttatacgaggatatttggtggagaagacaaatgccctgacaatgaagtggatgaggtctctaataaaattcctaggaaatgtggaggaactccactagctttcatcaccttggctcggttattcgtgtggtatgctcctcttgccttctttttgtggttcaattacttttctattttcattttttttcttttt

SEQ ID NO: 305748 - DNA, 270 bp, Zea mays
  unsure (1)..(270): unsure at all n locations
tggcctcgcgtncngctgaccagccagcctcggaggggaccaacacagcgcgcgcttcagcgagaaggccctgctcaccgccatcgaccgcgaggcggggtacgggtactacgacgacccgtgcagcgccttctttnnnntgatgatgacgatccggaccgagctggttgtcggctccccctggagttgggaggtctaggagttccccccgnnaatgcacacaattatccaatgcagagtaaatgatgagaacctctagcgcaaaaggcc

SEQ ID NO: 305749 - DNA, 141 bp, Zea mays
gccagccttcggtccctgcatcaccaaatagaagatggacgtcaccattcagcatccttggttcaagcgtgccctggggcccttctaccccagccgactgttcgaccagttcttcggcgagggcctttttgcgttcgacct

SEQ ID NO: 305750 - DNA, 276 bp, Zea mays
tcgctcgcacccccgccatgccgaccgtaaacgtgaaatggcagaaggaggtctttccaggcatagagattgacactagccagcctccgattgttttgaagagtcagctatacacactaactggtgtgccacctgaacgccaaaaaattatggtgaagggtggattattgaaggatgatgcagcttggtctacttctgggagtgtttgttggtccctaggtcttgatatctgtatcttcttttcagatttttttcagttttttatttttgacatat

SEQ ID NO: 305751 - DNA, 154 bp, Zea mays
tgcctcgcgtccgaggccgccgacgtctggagcgcggttgttatactctacattctcctcagcggcatcccgccgttttggggcaagaccaagcccaagatcttcgactgcatcaggctcatggagctgcggttcccttctgacccttgggaca

SEQ ID NO: 305752 - DNA, 223 bp, Zea mays
ttttgtaagcgtttgatatgattcattgctcacgctgccgaataaattggactcgtgatgatggtatcctgctcctggaggttaatagattacttagagctggaggctaccttagcttgcgaagcactaacctgtttattagcatgaacaggcctcaacaagaggcatgcatagagatggtggacctcactacccgtctttgtagggagcttgtaaagaatga

SEQ ID NO: 305753 - DNA, 305 bp, Zea mays
gtgtgaagaaactactgaagaaccaaattgacttcatcgggaacgaaatgggatacccattggaaaaccgacacctgttgcaaacacctatgtcgttccaagctccatggagaagttggtcatgtatttaaagcagagatataaaagcatacctttgttcatcacagagaacggctatgcccaaatagtcaatattagcactacagcagaagaaataatttatgatattgaaagaacaacttacattcgtgactacctcacttacttgagcttttgaataaggaaaggagcagttgtgagaggtt

SEQ ID NO: 305754 - DNA, 357 bp, Zea mays
ttcacgcgtccgcccacgcgtccggcaagttcaatctcacctccaaccatgggtaaagagaagtcccacatcaacattgtggttattggccatgtcgactctggcaagtcgaccaccacaggacaccttatctacaagcttggaggcattgacaagcgtgtgatcgagaggctcgagatggaggctgctgaaatgaacaagcggtccttcaagtacgcgtgggtgctcgacaagctcaaggctgagcgtgagagaggtatcaccattgatattcgctctgtggaagtttgagaccacccagtactactgcacggccattgatgcccctggacaccgtgacttcatcatgaacatgat

SEQ ID NO: 305755 - DNA, 372 bp, Zea mays
tcgtcgtccacgcgtccgcccacgcgtccgcccacgcgtccgcccacgcgtccgcagggtggcactaacatcatgcatcctttgagtgaggcaatgactttgctgtcaacttctcacgatgcgcttccacaaatctattttgttactgatgggtcagttgatgatgaacggaatatctgccatacattgaaaactcaacttattaaaagtggatctaagtctcctcggatttctacttttgggctaggttcatattgcaaccactatttcttgaggatgttggcatcaattggtaagggtcactatgctgctgcatttgatacaggatcaattgagggtcgaatgcttcaatggttccagaaagcttcaagc

SEQ ID NO: 305756 - DNA, 263 bp, Zea mays
tccacgcgtccgcccacgcgtccgcccacgcgtccggccaaagaattccctcccctagccgccgccgccgccgctcgtctccctgagaggtgccgggaccgaggaactggccgagtactaggtagagaatcggtttttcttgtctcagcccggggtctgctgcgtctggtggtggtgaaggggagatattcgtgagatctgttccggttctggcgtgcgcgctagggaacctggggttataacatagttttgtagattcgaat

SEQ ID NO: 305757 - DNA, 214 bp, Zea mays
gtatgtgctcaagtatgacagggacttgatcctgcacaatgcgctcctagacatgtactgcaagtgcgggagcttggaggatgcggatgccttgttccacaggatgccacagagggatgtgatctcatggagcaccatggtatctggtttggtgcagaatgggaaaagcgtggtggcattgagggtttttgttttgttaacttcttatggtgtt

SEQ ID NO: 305758 - DNA, 405 bp, Zea mays
ctccactcatcttttctcgtttagaacctctaaaatttcccccactcgccagtcgcagcagcacctgtagcagtcatggacgccagcggagccggtagcaaggggaagaagggggcggccgggcgcaaggcaggcggccccaggaagaagtcggtgacgcggtccgtcaaggccgggctgcagttccccgtcggccggatcgggcgctacctcaagaagggctgctacgtgcaacgtgtatagtcatgagtaccatcagatctttcttttgcttatgttagccagcctgacttctattttccacccccttgtatgtctggtggacacgcagatggccaaaccagagtaccaggctatggagaccggtcgagagtccaaggagaccaccccgcgattcgtcaacgt

SEQ ID NO: 305759 - DNA, 204 bp, Zea mays
  unsure (1)..(204): unsure at all n locations
tcgtccacgcgttcgcgcttcctgatactcctgctcgccgtaacctcctccgcgtttgccgacgtcgaggcaaccggggctccggtggtgggggaggtacttcggttattggncacgttgactttggcaagttgaccaccacaggacacctgatctacaagcttggaggcattgacaagcgtgtgatctagaggtttgagaagg

SEQ ID NO: 305760 - DNA, 385 bp, Zea mays
gggtcgagaggcgaaacggactttatgggtcgcacgcagcctggctgaccggtcgcggcggcgggcgtggtgctgatgatggcagcggacgcgacgactctcagaggccgacatgacctgcgggcaggggagctccagcatggcgccctgacatctgctacgcccgcgggacggagtccgggccctccgagtcctgctggagcgatgtgaggaacctaaagagcggcgccagcacacgcgccgacaggcgcgcccgctgcaacagtcgtaagaaccgccacaggggctgtagctggcaaaacgccagcaacgccgccagcatgcgctacaagtgctgcgacagaaaaccctacaccataagaaccttcaccgactgctccagggt

SEQ ID NO: 305761 - DNA, 326 bp, Zea mays
tcaggtccggtcggaggctaccataagtgctcatcggccttaggccccccggcgatccgaatgggggctttgctcgccgtgcgggctcttcttgtgctcgcctttgtcgccgacggtgcaggtgaggtcttgttccgggagaagttctaagattggtgggaaagtacgaggcgtaagtccctgcatcagaaggataagaccatggctggggaatgcgtaccacacctggaaaacatcgattgcagctgccgaggacacaggtattccaacctacgaggattacaggattttatgccatttcaaccgaataccctgagcttagcatc

SEQ ID NO: 305762 - DNA, 184 bp, Zea mays
aacggctgcgataaatgtatggtgttgttcgctcgagagctactcatgtgattttgacgagggagcactcagcgcagaaaagaactggtactttcttcactacttctagaacaaggcgagaggtagttagcacaaggtgtattggtacaggactaaactgaattggatggcacaggagatcttg

SEQ ID NO: 305763 - DNA, 279 bp, Zea mays
agcactacaaatggcaggtgcatgagatccgtccatggacgatacaccatatccaaggcgagagcgctggatcttgctgctggcctgggggggaagatcaacaaggtggaagtcaagtcatgcgctgatgagtgtgagaaatatcatggatgctatggagggaaggaggaagcaaggaagttccaactatacgtgtatgcgataataaactactatgatctctccactcgcttatatcacaagggatgagtgcgaatatcttacatttgactacagatg

SEQ ID NO: 305764 - DNA, 355 bp, Zea mays
ttctcgcgtccgttgatgatggctctcattacatgtggatttttctgttgcgcttgaagtccgatatgtccccccatgctttctcatttctttgcctgggtgtccactcagttcggtagcacctgccaagccattcagtgtgataactggacagactttgacaacttttctcgtgccatcttcctcaatcgtggcgtccatattcagatgtcatgcccctacacttctccctagaacagcaaggctgagcgcatgattcgcactaccaacaacatcatacgcttgctgctcttacaagtctcgattcatgttcggttctaggctaaggctctctacattgccaactacctgctta

SEQ ID NO: 305765 - DNA, 406 bp, Zea mays
gatgtgttactaattgcacatggttctggatcagaatatgttggagattctgttacaaatactgtcaaaactactaaatatccctttgtgttacgtagggataagctaccggagccgaaggaaaaagagaaacatataggattatggtcaataattagagaaaatatagggaaagacctgtcaggtgtttgtctacctgtttatttcaatgaacctctttcttctttacaaaaatgttttgaagatttggagtactcttacttggttgaccatgcactacactggggaaaacagggtgacagcttaatgaggatacttcatgtagcagcatttgcagtatcaggttatgcttcaaccgaaggtcggcaatgcaaacccttcaatcccctactgggggaaacatatg

SEQ ID NO: 305766 - DNA, 435 bp, Zea mays
ccggtggatgtcctttttgtcttcgagcagaagcagaaaatcgtgttggcgaagcaactgaagctgtggccacggcaggtggaggtgtggttccaaaacaggcgagcaaggacgaagctgaagcagacggaggtggactgcgagctgctgaagcgctgctgcgagtcgctgagcgaggagaaccggcggctgcagcgggagctacaggagctccgcgcgctcaagctcgccggcccgcacccacaggcgccgtcgtcgtcgcccgccgccgcgacgcagggcgtgccggtgccggtgccgccgccgttgtacgtgcagatgcagatgcagctcagcagctgccgatgctgccggccgccacgctgagcctctgcccgtcctgcgagcgcctgcgcggcgggcccgccgcgcccaaggccgagcccgacaggcccc

SEQ ID NO: 305767 - DNA, 352 bp, Zea mays
gccgcggcagaaccggggggactaatcgacgccgccgtgttaacacccacgcgggggcggccccataaggggagcagcttctacagggggggcgcactacttcccggcgccaaaacagtagaccagccactgtgccatggacagcagcgccagccaagcgagcctcccgctccagacgcagaccaaggatggcgggaagaaccccgcgcatggaacacccgccagactgggagacgacagcaacaaccccgagtggcaggacaccatcataggaccgcctgacaccctacacgacggaggctgcttcaatgcaagaatgaccctccgccagaaccatcccaacagcccagcc

SEQ ID NO: 305768 - DNA, 303 bp, Zea mays
cttctatggtcgagaagctccccactgatctggagggaatggtgtcctaaggggggaagctttacattataattgatgagatctacaaatacctggctgatgttggggaaggacgcggggcccctgatcacagaatgggaaggtcggcctctgaatatgttgctcgaatgccaaaattagtcccagctgcttaagaggagcttaacaatgacaagattcaggataaccttgcgctggactacctggcaagcatcacaagggcacaaatcaacatctccccgaagttgaacactggtgctcaag

SEQ ID NO: 305769 - DNA, 315 bp, Zea mays
cacgcgtccgagcgatcgcggcgcacacggacccatctagcgggccctgcagctgcactcgccatggccaacccaacagctaccaagcatgcattgacggataacaagaccagacagctgaagccaggcggaggtgaatacggcaagtccttcagccttccggcgctaaatgaggcagggcacgataagctcgaatacttgatacgagctgttgtggaatcagctatccgacattgtgagaactggcaagctacagagagtgatgttgagaaaatcattgattgggagaacacatgtgcaaagctggctgagata

SEQ ID NO: 305770 - DNA, 349 bp, Zea mays
cggttcgcgtgggcgccattggccttctagagccaaccagaagagcttgcagttactgagagtgtgtgcgagagagaggatgggtggcagcggcagggctgctatgctgctggccctggtggtggtggccatgagcctggccgtggagatccaggacgactccgggtacggttacggaggcgagtacacccttatgtctactgcggacacgcttgccgacaagcgcgagatgcctctactccaaggtgccgaaggcgagcaagcttcacattgagctcaagccgaccaaggagcaccggcccaatccggaaacgctgaccgaggagcatatgacgataccggccacgta

SEQ ID NO: 305771 - DNA, 412 bp, Zea mays
gccggacccctggggtgccgcacccgaattccctttcgatctaaggaccctccgtcgcctgctcaggacccacatcattccgagggagttcttggatggcctgttgctcttcggaccaccttcaagggtcttggtgtagcttgtccatctcaccatcaagatttatgtctgatctcgacattcagatcccaactgccttcgatcccttcgctgaggccaatgctggggactctggtgcagcagccgggtcaaaggactacgttcacgtgcgcatccaccagcgtaatggtcgcaagagcctgaccaccccccagggattgaagaaggagttcagctacagccagatcctcaaagatctcaagaaagagttctgctgcaatggtacacaggtccacgacccagaacttggaca

SEQ ID NO: 305772 - DNA, 479 bp, Zea mays
gccacgactcttccctcgctcgctcgttcgtctagtcccaccaaggcaccaaaccaatctagccaccaaggcaccaaccaagagccatggcatccccgttctgcgccgctgccgccgcttgccgcctcgccgtccccgccccgtgccctcccgccgcacgggcgcctaggccccgacgcggcctggtggcggtgcgcgcggaggcggtcggtgggataaacccggccatccggaaggaggaggacaaggtggtcgacaccgatctcaccggcgagctcgccaagccgataccgcgtactgtcggtgttggagatcaggaacattcccactgtgcgatggatcccatgtgaagcacaacaaagcaaccggtgataatgtgggccccctgctcgataagaagtagatgcagtttctttcgacttttgccctagcgtcatgttgagcgctgagctcgacactatctgcatgtcatgatatat

SEQ ID NO: 305773 - DNA, 487 bp, Zea mays
ccatcttctgctggagctgactgtattgaccctgattgtagctgggttgaacaatgggtgcaccgtgctggtccacgcaaacaaatatattttgagcctcaatatgtgaaggctgggattgtgtcgtgtggtgggctctgcccaggtctcaacgatgccattcggcagattgtgcttacacttgaaaaatatgggaggaaaaacattggtgggatacagcatggactccgctgatgttcagctgaacactgatcatgaagggcactggataggcatgtctatcacaaggtcttggtcggtggaggaagcttcttaggagtctctggctgtggtgcaaacatttgagacattgttgccaggattcaggctaggaagctagatatgctatttgtgctagctggaaatggaccacttactggagctaacgctatacatgatgagtgccgcagagaaaactgcaagtatcgattgtatgtgtccccaaaac

SEQ ID NO: 305774 - DNA, 442 bp, Zea mays
cagtcgtccttcctgggctgctcctgcctccgctcgtcgtccttgttaaggcgcatgccgcgactgggcgcgcacggcacggccacagctgactgactcctcctgcgttggctgataatcatggctagagctccgatgctcctcgcgctactgtgcgcgtgcgccgccaatgcggcggggaggaagatggtcggcgcgtacgagctcaaggcgggcgatatctccgtcggcgtcaccaactggggcgccaccatcacctacgctgtgctgccggactccaaaggggatttggctgacgtcgtgcttggctacgacaccattggaggatacgtgagtggtaaaagctacttcggagcgcttgtcggacgagtggccacatgatcgccacgcgcgcttcgtgctcgacggaaggcttaccatcttttcagaacgatgcaacaac

SEQ ID NO: 305775 - DNA, 449 bp, Zea mays
  unsure (1)..(449): unsure at all n locations
ccagtatgggccaagccggactcccgggggcgccgcacccgaatcgccggctggtgcgaaacatggatattgccatgcaggtgtgattttacccactgcgcataaggaggatgccacctctctaatcgtccttaagaatacacaggaggcgtagaaggggcaaggcatgatgactgtccaatctgcttccagtactaggtcgattcgacaaatgatgtttccttcctgccttgcggacataccattcatgtaaagcgcctacaagaaatggaagagcactgccagtgtgcatgctccgtttgctccaagtcggactgcgacatgccgaaagcatgggaaaggctcgacatggagctggcaactctgtctgactccttgtgatcacaaaatggtccgcatattatgcaacgactgncgggcaatatcagatgtgcagttccatttgattg

SEQ ID NO: 305776 - DNA, 390 bp, Zea mays
ctcggctatcccttcggagaggacggttgtcaccaccagggctgatctactgccggccctgctggtggcggacccgagccaggccgtggaaatccaggcggacgccggatgcggctacgggggcagtgacaccctgacgccgacgccagccacaaagaccaacaaaccggccaagccccccaccaaggggaccaactgaaccaagacgcccaaggagcacaggccaacgaaggaacgcgggccccaagcgggagaagccgaccaaggagcacaagcacacgacgcccacgcacaccactggccgcaaacccacaccgtcgacacacacaaaaaccctggacgcccccaaatcaaacgcacgaaatacattcccgtttctacagctgacaa

SEQ ID NO: 305777 - DNA, 395 bp, Zea mays
actttgcgttcgcccacgcgaacttccacgcttgcgggatctacacgtctcgctgcgtcgcagtgcagtacaaaaaaagcagtcggaatggcaagcagcaccatggccatctactccacgatctttgccgacaaggccgagaacgtgccgccgccgtacggcttcggcgaggcccatgtgacgatacacaagagggcggtcaaggccaatcctgcggagtgctccgggagcccagggtacggccgcggccgcgtgctgtacctgggcccactgcacggctagccaccaaactacctgacaggcgatttcccggtccactacagctgggacaccgctgggctttgggcggacccggagactttcgccaacaaccgagagctggcaggagatccact

SEQ ID NO: 305778 - DNA, 407 bp, Zea mays
gggtgatcgaccacggaggctatcaagcggggcaggcccttgtctgagcagggggcgcatgagttccagactgagattgaaaagctggacaagctccctcaccgcaagatggtgtcactgattgggtcctgcgaggaccagaatgagatgatcctggtctatgatcacatggctcacgggactctgcgcgagcacctgtacaagacccacatgccacttcttacctggaggcagacgaaggatatatacattgtggcaatgcgcgaggttcactaccgttacactgatgcaatgcacaccatcatccaccgggatgtgaggacctcagacatccttatgcatgagaaatgggttgcccaggctccaaattttggtctgtccaagactggcccgtccatggaccatac

SEQ ID NO: 305779 - DNA, 409 bp, Zea mays
cccactcgtacggacaagagcgaggggacggcaccgtgcgactgggccccggcggtctgacgctcggggacctgttcctcggcccggggctggacttgctgctggagtacctggccgagaccgacccaaaccgggaggatacgccgccgaccaggagggaggtggaggacatgctggcgactgcgcgggtgcgcgaggacttcacctgccccgtgtgcctggacgaggtcgcgggcggcggcgacacgcgcgagatgccgtgcaagcaccggatccacgaccagtgcatactgccctggctggagatgcacagctcctgccccgtgtgcaggcaccagctgcccacggaggagccggcggaggcaattggcagtgacagaagcgccggtgttgagtccagtggcaacgc

SEQ ID NO: 305780 - DNA, 453 bp, Zea mays
cccacgcgtccgcggacgcgtgggagcaaatgagctgagctcccaagccgttcaatctccagatcatttccctctcgtcctgctccaatccactcgccggccatctccacaggctcgcctcgtctgctgcagctgggttttgctcccggagccgccggatttctacaggggtcgggtcggccgtccgatggggagcggggtgaaggaggacgagaggaacgagaagatcatccggggtctgctcaagctccctggcaaccgccggtgcatcaactgcaacagcctggggccacaatatgtatgcacaagcttctctactttcatctgtactaattgcagcgggatacaccgagagttcagtcatcgtgtaaaatcagtatcaatggctaaatgcacttcccaagaagtttcggcactccaggaagggggcaatgagcgtgctacggaaatcta

SEQ ID NO: 305781 - DNA, 406 bp, Zea mays
ccctcgcgtccgcccacgcgtccgcccacgcgtccgggcggcgccaaaggaggaggaggcgggggacgggctgtggcggtaggagatcatgatgggggagcggtgccagccgctggacttctccggggtcatctactacgacgcccaaggccgccgcctcgcgcaggcgccgccgccgcgctcgccgctgcgcagcccgctgccggcctccgtcaagctcgccgccaacgccgcgtactagctagggatgggactgggaggagtcctccgttttcttccctgctgctagtgctagctagtgacagtgtaaatggttttccttgccgcttgccgtctgcttctcctcctccttgacgttggtactacttacttgctattaataataggtttcccttgtcctttggcc

SEQ ID NO: 305782 - DNA, 467 bp, Zea mays
ggcatttttcgccgcttcagtctcaagagcagatacgcaggtatggagccacgcactgagggagatacttccaggaacttgcgccaaggtcgattgctagagccgccaccggtacctgctgtgaggacttctccagaaggagtgcagaggcacacaggtcaggatgtgattgctagtagaagtcaaagtgcagcagcatctgagacgggctcttctttgccatgtgaagatggaaatgcaacggctgaaactattggcagcagcacccaccctgtgcacattggtgtgcaaaaccaagacattgaacaagagcaagttcatgagactggaaagagatacaagaggttgacatctgatgtatggaattactttaccaagaaaaaagagataatagaggagaatgggaagatgtgtgagcaaatttggggttattgcaacttcccaaattgtaagcggcgatatagagc

SEQ ID NO: 305783 - DNA, 438 bp, Zea mays
gggtttcactgttagtttttagtgtttgcgccaccatggatttgcttactaatgtttgcggatattaagttagatgagaatagtatgtcataaatctgcagggtctctagtttagttggttaggtggtctgagtagcactcatgtcctgagttcgactccccgtgggagcgatttttagtcaggggttaaacaaatccccttctctgcccatgacaaagcagtctaaggttcagccatggtcgtggtcgttctcgcatgggctacggtgccgctgtgtgtgggtggtgtagaggtttcggagtttttctcgacctgtgtgagaagatcttcctcttaattcaatgcttggggggctgtccttaccccctgcagaccgagttttttttattcttcagctcttctttgtctctagattcatggggagggctaccttatca

SEQ ID NO: 305784 - DNA, 480 bp, Zea mays
agcaccagcactgattccttcggatcccatttcgctaatgaaaagcagtgttctttcgacaaaatcaaagtgttgggagcttctgtgaacgccactttggaagagaagttgttgactattttgttgatccatttgtagctggaacaagtgcaggagatccagagtcactatctattcgtcatgcattcccagcattgtggaatttggaaagaaagtatggttcagttattgttggtgccatcttgtctaagctagcagctaaaggtgatccagtaaagacaagacatgattcatcagggaaaagaaggaatagacgagtgtcgttttcatttcatggtggaatgcagttctttgttatttcagtcactaataaatgcacttcacaatgaagttggagatgataatgtgaagcttggtacagaagtgttgtcattggcatgtacatttgatggagttcctgcactaggcaggtggtcaatt

SEQ ID NO: 305785 - DNA, 380 bp, Zea mays
gcgccattggccagctggagccaaccagaagagcttgctgttactgagagtgtgtgtgagagagaggatgggtggccgcggcagggctgctctgctgctggccctggtggtggtggccgtgagcctggacgtggagatccaggccgacgccgggtacgggtacggcggtggctacactccgacgccgacgccggccaccccgaccccgtagcccgagcaagcctcctaccatggggccgatgccggacaagccctccaaggagcacacgctcgccacggagcacggtcccaagccggacaagccgcccaaggagcacaggccgacgccgcccacgtacaccccgagccccagacccacgccgccgacttacactcacacc

SEQ ID NO: 305786 - DNA, 429 bp, Zea mays
  unsure (1)..(429): unsure at all n locations
ggttaccagcacttctccctcctcgggcactccctcttcgtcaagcgcccgcgccgcgccggcaacggcggcgggggcggagagacgtcatcctgctcgtccacgtccgcggcgcttcgccctgccaagcgacaggcgacgggggagggcagcggcgcagatctggagacccgccgcgccgcggtccgcgcctggggcaatcagtcgctggcggaggccgacccggacgtgcactcgctgatggagcaggagttggaccgccaggtgcgaggcatcgagctcatagcgtcggaaaacttcgtctgccgcgcggtgctcgatgcactcggcagccacctcactaacaagtactccgagggggccccgggtgctcgctactacngcgggaatcaggacatcgacgccatcgaacgggtctgccatgagcgc

SEQ ID NO: 305787 - DNA, 359 bp, Zea mays
ccctcgtttccgggggggattaacaaagcatatcatgaggacttttttgacaactcgacacagcaggcagacacactttggctttagctaggccctgactccatggccagcgcttcaggtgctgatgcacttctgaatggtgtggagatattcaagctcagcaaggattccgacctttcttatgtgcttggtcatattgacacgggcaaccagatggattcttcaaaaggggggaagattaaaggcctatgggaagaacttggtattggctcagcatcttttgttgcggttacaagcgatgatctgttctcatggtgttacataagaaagaaacgaaaagctgtcaacaaggaggcccc

SEQ ID NO: 305788 - DNA, 346 bp, Zea mays
tttttgtttatattggaatcgaacctttgatgatggaagcttttgagaagattgagatggatattaagaaaccacttttaaggagtgacaagaagaacatggccacccttatggcagagtttgacaagattaacgcaaagtatgctcatatatacatctttcatctcaataatgtattctcggtagcaaatttattagcttgcagccctcctgaggatctggacagctctggttggctggttgaatacttggtgacaaaaccttttttccccttgaatggctctccgttgacagttattaaactgaaacaataacgtggctttaaatctcctgcaaaagaatgcat

SEQ ID NO: 305789 - DNA, 442 bp, Zea mays
cggacgcgtgggcggacgcgtgggcggacgcgtgggtgcgattgggatggtggcggcgtagacggcggcgtggctggacttcgacggcgtgggggcaggggacaagaggccaagtccaagagcgcaggcggcggtgggtgggtaggtggggccggcggagttggagatgccagcggcgtacaggacagtgaggtagaagcaggagcccgacttgctatcgttggccgcggcgctggtgagatgcgcggtggcggcgacgccggcgctgtaacagagcgcgcaggtcgccggcgaggcgaggtcggggccgcaggaggagttgagggcctgggcggagtcgttcccgacggcggccacgaactccgtagcggtggagacgccggcgcaataggacgaggtgatggcaaactggcttgggtccgggaagcattcccccaccaag

SEQ ID NO: 305790 - DNA, 349 bp, Zea mays
cctacgcgtccgcaggaacactgtgtttttcgatattaacttgagaggtcttgacggcattcaagggccagtttatgtgggaactggttgtgtgtttaacagaacggccttatatggttatgagcctccagtcaagaaaaaaaagccaggcttcttctcttcgctttgtgggggaaggaaaaagacgtcaaaatctaagaagagctcggaaaagaagaagtcacatagacacgcagacaagtcttgaccaagtttttaatctcgaagatatagaggaagggattgaaggttctcagtttgatgatgagaaatcgctgattatgttttaaatgagcttggagaagagatt

SEQ ID NO: 305791 - DNA, 357 bp, Zea mays
tcccacgcgtccgcttgcagttactgagagtgtgtgtgagagagaggatggctggcagctgcagggctgctctgctgctggccctggtggtggtggcaccaagcctgaccgctgagatccaggccgacgccggatacggatacggtggctgctacaccccgacgccaacgccggccacccagaccccgaagaccgagaagccccccaccaaggggaccaagccggacaagcccacaaaggagcaacaagccgaccaaggagcacggccccaagcacggagaagccaaccatggagcacaagccgacgccatccacgaacacatcaagaggcaaactcatggcctcgacgtacacaac

SEQ ID NO: 305792 - DNA, 342 bp, Zea mays
gtttcctacaggcctgtggcacctaatggacatccgaaggattcaaatatggtagctgatgtaacaattgggtttgtaaaagatgcaaaacatcacatcgacgttcaaggatttaatgtataccacatgaaccgtttgataaagcctttctggagagtgtggactgctgctggaagtggaggtcgtggtgtcataggtgttcttgaggcaaacttcattgaacctgctcatgataagcaagaattttgagcggacaacacttctagcaagacttgaagcacgattagttcaaatgcagaaggatacttggtctgggaatgctcatcgaataggatatgttgc

SEQ ID NO: 305793 - DNA, 278 bp, Zea mays
ccctcgcttccggccaaccagaagagcttgcagttactgagagtgtgtgtgagagagaggatgggtggcagcggcagggctgctctgctgctggccctggtgggtggtggccgtgagcctgtccgaggagatccaggccgacgccgggtacggttacggcggcgggtacaccactacgccgacgccggccaccccgaccgcgaagcccgagaagcctcacaccaaggggccgaagccgggcaagccgtccaaggagcacaagccgcccaaggagcact

SEQ ID NO: 305794 - DNA, 228 bp, Zea mays
gctatactttcgaccacgcatgcgatggaataaggattacccttgtccaggtgacctggaaataaaagttgtgagcccagttcgcacgcccgaatgagtcttgttaatacaggggcaagttttcaactggcaccgggatctctacatttacaatgatgatgttaggaagagactgcctcataaagcttgtgacgggagttggagctacgatcacaccagccgtgttgc

SEQ ID NO: 305795 - DNA, 447 bp, Zea mays
gcctgcaggctaccggctccggatattccgcgggtacgacaccaccgcgtccgtttttttcgtgggttcgacgacctcatccagcgggcgtcgcgtcttctgtcccccggcggtggtgccggggccaggatcggcacgggtggtgccgcggtcgaccacgacgaggtcgtcgaggtcgaggccacccgggacacggagctggacgccgcgccagccgagattggtcgcgggagcaagggcggcttgagactggaacccatgtgcgtctcgtcgctgcgttgtgctgcttcggcaggttctgacacagaaaagctgggccttatccaagtggcaagccttatagagtcatcggcaaagaaggggactacagagctcaatctccggagtaggctggtggaccaagttgaatggctccctgtctcgcttgggaagttacaggatgtgact

SEQ ID NO: 305796 - DNA, 369 bp, Zea mays
gaagcgacccgaacgttcgagcagcgcttcggccgcgtgcacgcggtatgcgatgtcgccgatctgcgcgacggtcaacgggtcgtcgctcgcgcgctcgacgccgctgtcgatccacgggcgcgcatgctgctgcacgaacgcgatcgtgtcctgcaacgcggcgcgcgcgatgccgaggtcgatcgcggcggtcgtgatctgcgcgaacgggcctgcgaaggtcgggcggtcgtacgagcgttgcgtatggaagatctcgaacgggctcacgcggacgttctctacgatcaccgtgccgcttgcggtcgtgcgttgcccgaacccgctccagtcgttcaccacggtcagcccccgcgcgccctgccg

SEQ ID NO: 305797 - DNA, 349 bp, Zea mays
catatctccgggtcggactctacggccgtccgaattatattgaagaaaaagaagatcaaggaggtttctcatgagtggtcattggtcaacaagcagaagcccatatggatgaggaagccagaagaaatcacaaaagaagaatatgctgccttctataagagcttgacaaatgactgggaggagcatctggctgtgaagcacttctctgtggagggtcaactggagttcaaggctgttctctttgttcctaagagggccccctttgatctctttgacaccaagaagaagcaaacagcatcaagctctatgtgcgcagggtgttcatcatggacaactgcgaagagctgat

SEQ ID NO: 305798 - DNA, 211 bp, Zea mays
ctctctcgtccggaggtttctcatgagtggtcattggtcaacaagcagaagcccatatggatgaggaagccagaagaaatcacaaaagaagaatatgctgccttctataagagcttgacaaatgactgggaggagcatctggctgtgaagcacttctctgtggagggtcaactggagttcaaggctgttctctttgttcctaagagggccc

SEQ ID NO: 305799 - DNA, 199 bp, Zea mays
gattgtcccaccgcctgtcctaatgtgctgtgagtggagcagacacctcctccaccgggggctcccaataccataaccgctgcccagagccattgtaatttgcgctttatgcgtggatcctatgacaccccgaccgatgtgtactcaatacataggcatcgggctgggacactaggctagcaggcggcacccatggttt

SEQ ID NO: 305800 - DNA, 391 bp, Zea mays
tccacgcgtccgcccacgcgtccgcgtcaaggcgcagctcggcgcccaggtgttcaagaccggccgcgtccagctcggcagcgcggcggccgggacggccaacccaagctggaacgaggacctgctgttcgtcgcagcggagccgttcgacccgttcctgaccgttgtcgtggaagacgtgttctccgggcaggcggtgggccaatcccgcgttcccctgtccacggtgcacaggcgatccgacgaccgggtggagccaccgtcccggtggctgaacctgtgcggcggcgaggcccggccgtacgccggacgggtgcacgtgcgcgtgtgcctggagggcgggtaccacgtgctggacgaggcggcgaacgtggccagcgacgtgcgcgcg

SEQ ID NO: 305801 - DNA, 374 bp, Zea mays
tttattgtccgcattgagccacatgcggtcgggagggaatgatgggctgacggcgacagtggtggtggcgcaaagatggtcggggtcgagcgttacgctgatgctgtcgttgatggggaggatgagcgcctcgtcccgcttcccccagtacttgatcaccgcaatgatggtcggcgtccgccccgttgccatgagcacccactggcccttcgtcgacggcattggatctttcgcttcgcgctgctctatgcccgataattccttgcaaagggaagttagtaggcataatccctactactctataagcacggtgtgtaggcgtgcacaccgtgcgccatcgttctgccagccttccgatgctcccctgccaggat

SEQ ID NO: 305802 - DNA, 445 bp, Zea mays
ctatttttgacgcatgctggcaatatcaaatgccggtggtttttacacatgatcggatcaagtaccttgttgaccagggttgcattaagccactatgtgatctgctcgtttgctcggatcatagaatcgtaacagttagcttggggggtctcgagaacatcctgaaggttggcgaggcagagaaaaaccttggcgcaggtgatgtcaatgtctatgcacagatgattgatgatgctgacggcctggacaagattgagaacctgcagagccatgacaacaccgagatatatgagaaggctgtgaagatgctggaatcctactggctggaggaggaagatgatgccatgcccttaggcgacaatccccagaatggcttcaactttgggaaccagccctctgttccatcaggtggattcaactttggctgaagatgcccatttggaat

SEQ ID NO: 305803 - DNA, 209 bp, Zea mays
ctcatgcgtccggcgccattgaccagctagagccaaccacatgagcttgcatgtactgagagtgcgtcctagagagaggatcgatggaagtcgtggcaaatgatatgctgctctagctgtgctttgtcatctggagcactcgcacacgcaatcctgtgcgaatactcttacagggacgggtggccatatacatcttctgcagctgatga

SEQ ID NO: 305804 - DNA, 467 bp, Zea mays
cccaccatgctagcactcacccacacctgtgcttcctatcgggcggcccagcccctcgccgatggcgatcactcaccacctcaaacactctgcggcttcgcttggcggccactaaggacgacgcggtcgcctccctcgtcggaaggctcgagcacgacgtggcgaacgcccagtaccgcgacgacgttctggaagaagaagacgaagagcagcgggaggaggaagaagaggagcagcagttccttgacgacgacaacgctcggcgccgcggcgcggggaagcatcgggacgagctgcgcagtcggtggcgcgagatccacgggtgcgacgactgggcggggctcctggaccccatggacccgctgctgcggtcggagctgatccggtacggcgagctggcgcaggcctgctacgacgccttcgactacgacccgtcgtcccggtactgcggcagctgcaagtactcg

SEQ ID NO: 305805 - DNA, 428 bp, Zea mays
ttttacgcgtgggcggacgcgtggggccacgcggggggttatttacagatcccggtggacttcctcaccggcttcttcgccggctccatcctggtcaccgtgcccgtctacgaccgcctcgaggagcccgtcgcgcgccgcgtcaggggcaacccgaacggcctcacccaggtgcagaggatcgtcgagggcctcgcgctctccgtcgagctcatggagggcgccgtgcatacggaggtcctccggctcctcgtcgcgcgcgagtactccgagtacgcctccgggggcgtcgcgcccatgtacgtgcactggctcatgccgcagatcttcctcgagggggcggtcgaggcgttcacgtacatctgccagatcaacttctacctgggcgagtgccccaacgagatgaagaccatgagcacggggttgat

SEQ ID NO: 305806 - DNA, 333 bp, Zea mays
gttgtcttatcctccccctccggttcgggttcgggggcgtgaggttatacgggggtcggtttcaagggtgagcggatcgagatggcgggatctgatgttgagaaccgctgcttcatcggcggcctcgcctgggccacggacgaccactcccttcacaacgccttgagcacctacggtgaggtcctcgagtccaagattatcctctatcgggagacgcagaggtcccgcggcttcggcttcgtcaccttctccacggaggaggcgatgcggaacgccatcgagggcatgaacggcaaggagctggacggccgcaacatcaccgtcaacgaggcc

SEQ ID NO: 305807 - DNA, 294 bp, Zea mays
atgcttacgcgtggggctcgctagctagggctggcagcaattgtggggccgactgcctgcagacatggtcttggcggggcacgcaacatggacgacaagaacctaaactttgagacctccccgggggtcgaggtcgtgagcaatacccaccagattgacatcaaggacgatctcctctgcctcatgtaccgatacggattttagaaggactgcgccatacagcatcgcgccgtgctccccatcatcaacggatgcgacatgatagggtatgcccagtgcggtgccgcgaagact

SEQ ID NO: 305808 - DNA, 456 bp, Zea mays
ttgttttacgtccgcccacgcgtccgaacacagcaaacataggttcagtagaaaagtacaaacacacaagtgaactctaggttctagggtagattaatgttggggacttgttctcaaatgctatgaattaagaacaaggcaacacagaaagaagttaatggttaatgcccttcgtcctccgaagcattatttcccttaggatataacgatcttcggacaaaggtcatgaaggacataccttcatcatcacaatttacattgatgaaaggagaagtatatgaaacatgagaaattacatgaataatcatataacattatttatatgtccttattatataattatggatgaataagaacaacattgaattacatttataccttcggcttgacagaaggaaaaagtacaagtgtgacgcatgagcgagtacaagtcagcgtgaacagtacgggcgtact

SEQ ID NO: 305809 - DNA, 352 bp, Zea mays
ctcaaacgccggcgcaaactcttgcccgagcccgacagatctttaatgccccacacatgacggcggagaacctttactccagtgtagaactcttatcgaggacgtccgcgcgtgcgttcgagaggagaggcacttgatgaggaaatgctcgtgagggaccgatcctctaaggagcaaccattggactgtcgcagtgcatatgaacgtcactgacttgagcacgtagtacaaacggatggagagtggcctgctaattagaccacgtgacatcacggtgatgcctctagaagcttattcagacagactgcagctggaaagctcgttctccgtgcaatcttcgttgatctagaac

SEQ ID NO: 305810 - DNA, 332 bp, Zea mays
ccctcttgcaagtgctacttttggttagagtgcttcttacactataaatacatggtaggctagtggtaaacttacacaaagaatggataatcttgtacgataacatatggttctgggcagatcggtggcttctatagagaagacaatgagttgggtggcaaccttgatgggcaaaatcagaaatttattgagacatacttgagaaaccagccttactttaatcattgggaagttgagatggaatgcttggtctcgagatatctggaatttttgtaggaggagcccctccaatttggtagagcatgaaacagcagagactgggcgaaaggatg

SEQ ID NO: 305811 - DNA, 346 bp, Zea mays
cttatttccgcctgtcttgtgcgcctccattttgggctctgcccctcgcaagttcaatctcaccttcaaccatgggtaaagtgaagtcccacatcaacattgtggttatcggccatgtggactctggcatgtcgaccaccacagagacaccttatgtacaagcttggaggcattgacatgcgtgtgatcgagagggttgagaaggaggctgctgaaatgaataaacggtactttaagtacgcgtgtgtgctcgacaagctcaaggctgacctgcagagaggtctcaccattgactttgctctgtgatagtttgagaccgccgagcactactgcacggttattgatg

SEQ ID NO: 305812 - DNA, 369 bp, Zea mays
gtctgttctgagactagacgagtccgcttgtctgagccaacctgtgcgaacggggtacgatctcatcccaaccccgcattgaccggatctcggcagactcggatacggccgaccaccgcgcgccgccacagatcaacgaagatagccgctctggacaccttcctatggacctctgagtctgtgaacgagggacagccggacaaggtctggcaccagatatcagatgccgctctggactctcgcgttggtgaggaccctcccagcatggttgcttgtgagagctgcaccaagaccaacacggccatggtcttgggagagatcaccaccaaggccaaagtcgactacgataggattggcagggggacctgc

SEQ ID NO: 305813 - DNA, 277 bp, Zea mays
tttacttcgtccgtgcgaccctgttttctcgttctgggttaaccgacatgctgatgaaggataaggcggtcacactgtgtttgggggaatggattctagccactacaagggtgatcacactttatgcccaatcactcgtaagggatactggcagttcaacttgggtgacgtgctggttcactgaaagtccactgcgttttgtgctggcggctgttcattcatcgcacattctggaacttacttggttgatggccccacagccataattactgaaacc

SEQ ID NO: 305814 - DNA, 248 bp, Zea mays
tcgcggacgcgtgcggcatagccatgggtcacagcacgcgttcgtttcctgagtgctttgatggtggctacccacatggatctacctttggacttgttgacggcaatcgcactgccaagggaaaggaagactttgaaaagtataacgcatctgccatagatgtgcctgcaccagaagggtcctgcttgtgtgcattaactgcaaaatataaagcgtttctgttgataggggtggttgagagggcagga

SEQ ID NO: 305815 - DNA, 537 bp, Zea mays
cgtacttgtgggtggacagcaggatcattctctcttgggcgactcacgtaactgggaggtaccatttttgcagggtttcttgatggccccaaaccatgcaggtttgcaccctgcacttgtgaacaatagtgtccttgaagacatgtctattgctggtactgcagggactaataacttgaaatcaccacacatgcgcaactttggatgtccaggtgcttcatcttcgattccccttaccactggcagttctaggggaccaaatcgacgctatgcttcacgctctgtacctggggttgggaatttgctcctaggtcctcaaattgacgaagctgaagctcatgctgtttcactaggtgctggttctgaaatcactgcgtccatgcttgctcctggtactgaattgccttgtacagtgaagctcagaatatggcggcacggtaccaatgaaccatgtgttcctttagaacctgaggcatgctgtctgacgatttctcatgccgttctctgcagtgaaatgggtgcccatttttcccatgt

SEQ ID NO: 305816 - DNA, 472 bp, Zea mays
gcgtcgccgttgccgtctccgtcgtccccacgtccgcctcctcgtcgcgtccacgtccgtgtccgcgtccgcccgcccccgccgagaagcggaagcagcgggggcgacgagccctctaatgccaccccgtgggcgagccccgactggctcacgtctctctcgcgcgcggtcggccggagcggcggcgacgactcggggatccccgtcgcgtccgccaagctcgatgatgtgcgggacctcctcggcggcgcgctcttcctgccgctcttcaagtggttccgcgaggaagggcccgtgtaccgccttgccgcggggccacaggactttgtcatcgtcagcgaccccgccgtcgccaggcacgtgttgcgtgggtacggctcacgctacgctaagggactagtcgctgaagtctccgagttcctcttcggctccggcttcgccatcgcagaaggcgacttatggacggtgagac

SEQ ID NO: 305817 - DNA, 331 bp, Zea mays
ggtcctccaggagaagatgacctcgagggtgcttctgaggctacagaatgggggaatgcgggaggactcataacaccagtgagcatattaaacgttgaccagtgaaagacaacagaacggattctggcaagacagactacagggccagtattaggctgctttaccaagacaggatcaagttcaaggcacctttgtacagatctgtagcgccatgtaccaacaaggacataagtgccaaaatgatatttcttagtatagcctgtgataaggagcttgcttctgtctactcacatgagaccacgctatatgggcttgcaggtgaattgaccaa

SEQ ID NO: 305818 - DNA, 384 bp, Zea mays
acgctttggcattcaccctcttttttctgtggccatggggtgggcgtacgtgcagtcgggccccaggacggtgctcctggacacgaagacgggcagcaacctgctgcagtggccggtggtggaggtggagaacctccggatgagcggcaagagctacgactgcgtggtgctggaccgcggatccgtcgtgccccttgacgtttgcaaggcgacacagctggacatcgaggccgcgttcgaggtggacgctgagggcgtgcgcgtggtggaggaggccgacttgacgttcaactgcagcaccagcgcaggcccggtgagcccgggcctgctcggaccgatccggctgctcgtgctggaggacgaggacttgtccaagcgcaccgt

SEQ ID NO: 305819 - DNA, 323 bp, Zea mays
ttgtttttctgctcccgatgttaccaagtcctgcgggggttagggttccttagggttttgtggaggggcgatggcggcggctgatgtggagtaccgttgcttagtcggcaggcttgcctgggccaccagaaacctgtcgctggagaatgccttcgcctgctacggcgagatcctcgactccaaggtcatcaccgaccgggagacggggaggtctcgcggcttcggcttcgttaccttcttctacgagaactccatgctcgacgctatcgagaacatgaactggaaggagctcgacggccgttacattaccggtaaccaagccc

SEQ ID NO: 305820 - DNA, 399 bp, Zea mays
agttgggacgcctggcgggagcggaccggaattgccgggccgggtcagcgcgaccggtcctgcctcgcgtccggccacgcgcgcgcaggccaagggcggatcggagtcctctgagaggtcgaaccacgcctggagacagagaccgactggggggcatgaccgtcgctcgggaggtagatgtttagtgggacgctaaataagtgcaaggtgtgcaccaagactgagtacccgcttgtccaactctacaccgactgaatacagttgcaccgttcttgcttcaagtgccagtactggatgtatactctgtcactgagcattgcctgcctggtcgaaggagtgccccactggaagagccatttctagcagttcttcaaggggaccgagagttacatcaagagg

SEQ ID NO: 305821 - DNA, 236 bp, Zea mays
  unsure (1)..(236): unsure at all n locations
ctcactctgtccggagatttatgatcagtatggtgaagatgcccttaaggaaggaatgggtggtggtgcntcccatcctgatccatacggcatttcctcatacttctccggaccctctcttgtgggagcgccgggaccgtaccccctgatgaagggacacgagctgtgaggctcccgctctcctacttataggccctatccaaggatcgcaccaagagcccaccttcaccttttct

SEQ ID NO: 305822 - DNA, 551 bp, Zea mays
cccgcgggacccggcggaactaccgggtcggcccgacccacgcgttctttcacgcgttcgcccacgcgtacgggaacgcaggatgaagattgcagacctgaaacagatatgcaacagacctgacgtcgtggaggtctgggatgcaactgctgcagatccaaaattgctcgtatatctcaaggcgtaccgaaatacagcacctgtccctaggcactggtctcagaagcgcaagttcttgcaggggaagagaggtattgagaaacagcctttccagcttcctgacttcattgctgcaactggaatagaaaagataagacaggcttatattgagaaagaggatagcaagaagttgaaacagaaacagcgtgagcgtatgcagcccaagatgggtaaaatggatatagattatcaggttttgcatgacgcgttcttaaatatcagacaaaacccaagttgtctagtcatggtgatctgtattatgaaggcaaagaatttgaggttaaactgagggaaatgaagccaggcatgctgtctcgtgagcttaaagatgc

SEQ ID NO: 305823 - DNA, 449 bp, Zea mays
ggacgcccggggggacggcgcccgaatttcctggtcgagccacacgctcccgttctttttaaagaaacctgttggggcacggagtgtgaaattcctccgctaacgctgggggggctcagaccaggacgcccgggctcgatttaaccaggggcacgctccgaacggacatgttgtgctgggtttccggttgcatccacgcccgcctgctgcccatcctcgccgacgcgcacgtcgtagaactgcaggacctcctgctcggtctgaccttggacaacatctgctgcctcgccttctggaaggaccatgagacgctcgcccgtggccttcccgacaacgacttcgcctacgtgttcgaccgcgccacggaggccaccctcaaccgcttcatcttgcccgagtgcgtctggcgctgcaagaagtgtctgggcctcggcatggagacacgctgg

SEQ ID NO: 305824 - DNA, 367 bp, Zea mays
gttgatttagaagatggtgcaggaggctgagaagtacaacgcagaggactaggaggtcaagaagaaagtgtatgccaagaacccgctcgagaattaggcctacaacatgaggaacaccatcaaggatgacaagatcgtctccaagctgccggctgaggacaagaagaagatcgaggatgccgttgacggctccatcaggtggttggacaggaaccagctggctgaggtggaggagtacggagacaagaagaaggaacttgaggggatctgcaagcccatcatcgcgaagatgtaccaccccgagggcgatcacatgggcgcagatgctggcatggatgaggatgcccccactggtgggagcggtgct

SEQ ID NO: 305825 - DNA, 386 bp, Zea mays
gtgcttacctccttctcgccgccgagcgccggcgttgtcgaggatttcttcgtcccggcaggcggctccggtgagttccgcgtcacgttcacgccggccgtcggctcggccgcgttcgtcaacgccgtcgagctgttcccggttccagaggagctgctgtggaacgccagcgtgacgcctgtgggcgcggtggtcctcgacatagccgtgtggccgtgagacgcgctgtatacgatgtaccgcctcaacgtgggcggaccttttgtgagcgaggagagcgacacgctctggcggacgtggctccccgacgaccccttcctcttgagtcccccggtgacctccacgctggagaacacgagcgccccgatcatttacgacacctacac

SEQ ID NO: 305826 - DNA, 367 bp, Zea mays
ctgcaggtactcggtcacggaatttcctcgggattgactccaacgcgtcctggttaatctttaggacattgacattgctacaggtgctggatattaatccaaagacctcgggctactaattgaggatacaacagcggagcaggtgggcataactgggaaagaaacaaactcaagttcctcgacgaccatcatatcagatgctgctagcaaagacgatatccagaccagaatgtcgcagctgaagagagagcttttttagacggactgaacggatgactctcagaagatggcagaaagaattgcaaagcttactggttgagatgatggggttaaggctggcgcaatcaccggtgcagggctagaagac

SEQ ID NO: 305827 - DNA, 328 bp, Zea mays
ttgtatataaggccctgtcactgaagagattggaactggtttcatgaagcatgcatgaggctggatattcatactcctgaagcgactaaggcctggctgcatgggctctgctccaagtaatctgtctgaacgtctaaaacaaagtgttaccgtgggctctaggtgcaaatgaattgatacgtagcagacactggactatctggtatggatacagtgaaagggtaaatcattacaagagactggcagacatcaacaccttagtctatccgatgacattgataccactagcagaatactgagtccttgctgctatcagattactgaccaa

SEQ ID NO: 305828 - DNA, 453 bp, Zea mays
ggcttatgccggacaagccgcccaaggagcacaagccggccaaggagcacgggcccaagccggagaagccgcccaaggagcacaagccgacgccgtccacgttcaccccgagccccaaacccacgccgccgacgtacactctccaccctgacgccggccaagtcgacgccacccacatacacttccgtccctacgccccacaaacccacaccaaaacccactccgacttctgcgacggacaccccgacccccaagcctccgacacctaagccgaccccggcgacgtacactgcaagtacaaaaccttcgacgcccaagacgaccccaccgacggacaccccttcccctaagtgtacgacacctaagtcgaccccgcctacgaacactgcaagccctaagccaccggttaccaagtctaccacgcccaaggcgaccccgaccacgtacacgttt

SEQ ID NO: 305829 - DNA, 429 bp, Zea mays
gtcatccagaacagcttgcagttactgagagtgtgtgtgagagagaggatgggtggcagcggcagttctgctctgctgctggccctggtggtggtggccgtgagcctggccgtggagatccaggccgactcctggtacggataacggcggccggtacaccccgacgccgacgccggccaccccgaccccgaagcccaagaagcccaccaccaagggggcgaagccgtacaagccgcccaaggagcacatgccgcccaaggagcacggccccaagccggagaagccgaccaaggagcacaagccgacgccgaacacgtacaccccgagccccaaacccacgccgccgacgtacactaccacgccgacggcccccaggcgcgccacccacatacactgctgatccttacgcccacaaacccacacgaaaac

SEQ ID NO: 305830 - DNA, 508 bp, Zea mays
ttttataaggaaaaattcagaatttcatctcgaccttgaaaaatgtgcaaaatatcatagcttgtagactgttatttagagctcaattagtacaatgcatgtgctttgcgacggcacacaatcatatttgatacccataaaaaataaatttaatatcaaagtgaacatatgatccatatatcagatattaaacatttaaactgataggaacaaatattacaccttatcttagtcaaaagaccgagaaaggtataggccgctcggtcgctcgtcctcctccagctagcgagttggtactatgtgggagcgttgcgctgcgagtggcggcttcttatcatgttgggcttgggtggtttctcaaggcccatctgtactgtaacggctcattgttaggtgagaagtaaggaagagtaacagacctacgcgcttcgcacgagacgctcgacgcacgaaactggtgctttaatagagtagagataaaagatttcatgcaaggtttgatttactg

SEQ ID NO: 305831 - DNA, 509 bp, Zea mays
agttaaatttttctcgattgagagaaataatgtgtgttatatgtctgattttttgtactaacttgtgattggtagtactatggatgtggatgatatagttgatattgagaatgggtccaatgagaatgaagtgcaagccccaattatggaggatggcaattctcgcagcgatggcctaagttgctgcgtttttttaattgtgttgtttgtaatacaatagaatccaatagagtcctagctgtaggtgtacaggaatatatgtaaccctagtgggccaggcccataacacaggagctcttacacccccccccgcagtcgaaactctagccactgcagatgttgaggctggatcgaaactccgtgaacaccaccgacgggagccccttggtgaagacgtcagcgaactgggaggtggtcgggacgtgatgaacgcgaacagcgccacaggcgacccgtttgcggacgaagtggagatcaatctccacatgcttcgtgcgcttgtttttgga

SEQ ID NO: 305832 - DNA, 330 bp, Zea mays
gtggcgtgtacaccccgacgccgacgccggtcacgcgggccccgaagcccgagaagcccgcgaccaaggggccgaagccggacaagccgcccaaggagcacaagccgcccaaggagcacgggcccaagccggagaagtcgcccaaggagcacaagccgacaccgaccacgtacaccccgagccccaaacccacgccgtcgacgtacactcccacgccgacgccccctaagacgacgacagccacatacacttgcgaccctacgccccacatacccacacgaaaagcgactcccactgctgcggcgacacgcccgacccaaagactgcgac

SEQ ID NO: 305833 - DNA, 395 bp, Zea mays
gtggggtgtacactccgatgcagacactggtcacgggggccctaaagcctaagacgcgcgcgaccacggtcgcctgatcggtcaagcgaccattggggcgcaggccgcggacggagcatggatcgaagtcatgatgatctctataagtgtacacgtgatgatcgattgctactagtctactgctcagaactactaagtcaaatatcttcgtgtgtacacgtacgctagcatgtgcatggtagcatgtacttacgacgttacgcatgtataagtgtgtgacgtgtgagacagagtgagagagagacaggatcgatcgagagacggtcatgtccttttggatgtttggtttattcatatcacaacttttgaggtgtacacccaagccgaccccactg

SEQ ID NO: 305834 - DNA, 472 bp, Zea mays
gtcatattgtcctccttcgggcttcggcacagcaagcaccacccccttcgccaccgccaccatcaccgctaccgctacggcttcccacctcaaaaccctaaccctaaaccccctccgcgcgggagccctcgcccatggagaaccccaggccccaggccccagcactcacccctcccatggccccgatccccgtccccatccacccgccaatcgacccaatccccgtccctccgccccgtatgcccgcccccgccccaaccgacgacgctgtcatggcctccacacccactacctgcactggggaccgaggcgaggtcgggtgcgaagtttccgacgaccaccgcgcctggcgggagcgccacgagcgcgcggtgcatgagctactccagcggtgccgcgcctacgccatggccgtacccaccaacgactccgatgtgcgggcccgactccgccgactcggtgagcccattac

SEQ ID NO: 305835 - DNA, 336 bp, Zea mays
acccgttcgtctctgacgcacgaactcaggggggcgcggacgcccgcgtacgacggaaccggccggtccaagcccatttacgtgggcgcccggggtaaggtatactacgccacctccggccgcgggttatacggccccggcggcgcctacgccgttttcgcggcccgagaggccagccgtgcccttggcaagatgtccaaggacgaggccgacgtatccggggacctatccgggctcaccgacaaggagctcggcgttctcgccgactgggagatcaagatccaggccaagtaccccgtcgacgaccgactggccgccgacgcctgaactcatgag

SEQ ID NO: 305836 - DNA, 471 bp, Zea mays
ttcgtttacgcggacaggaaggcacgctctggtggcacgcgcacagctcctggctccgcgccaccgtccacggggcgctgatcatccgcccgcgcgccggcgtcccgtacccgttcaacgccggcgacacgccagccagggagatcaccatcatactaggggaatggtggaacatgaaccccatcgacgtcgtgcgcaccgtcacccgtaccggcgccgggcccaacatatgcgacgccttaaccgtcaacggccagcccggcgatctctacaagtgctcattcaacggcaccacgacgttctcggtcacgtccggcgagacgaacctgctgcgctttatcaacgccgcgctcaacacggagctcttcgtctccctggccggccacaccatgacagtggtgggcgctcgcgcctactacaccaagacgtacgccacgcccgtcatcttggtcgcgcctggccagaccaccg

SEQ ID NO: 305837 - DNA, 487 bp, Zea mays
  unsure (1)..(487): unsure at all n locations
cttacgcgtccgcccacgcgtccggtaccgtgatactaaagtcaggatgaaggaacccctggagcaatttaaccaaaccaaggacgctagtgattacttatggtacaccacaagctttcgcttggagtcagacgatttgccttttagaaatgacatccggcctgtgcttcaggtcaaaagtagtgcacactcaatgatgggatttgccaatgatgctttcgtaggatgcgcacgcggaagcaagcaggtgaagggtttcatgtttgaaaaacccgttgatctgaaagtaggtgtgaaccatgttgtattgttgtcgtcaactatgggaatgaaggtaaaaattcgtcggaactgtggaatgtgtttggaatgtaagatgactgattatactgtcctagccgatatccaggcgaaaaaaatatggctgtattgacgcaagctacaaacactntattttggaaaggtggacatatataaatatcataaa

SEQ ID NO: 305838 - DNA, 464 bp, Zea mays
  unsure (1)..(464): unsure at all n locations
cccacgcgttcgcccctaacccgcgggactcgtctatctctccgtctctcacatgctctcatcccttccacgccgccgccgccaaacacagactcgtaagccacgccgccggacccgcgctgccagaccgcgtcgacgctccctcgccgctggggttaaggtgacggcccatcttcaccttcggcgaggtggacctccgccacgtctcgctcccgtccttgcccgtctccggcccgtcccccttccgcgcggctgccgtggcggcgccctttgtggagcggcgcggaacatgcagctgttcctggctgactggcccttctacatgaacgggtggaactcctactggctcatggaccaggccgtggagccgaggtcccgggaccgcgtctnccgcatgttccgcaccgacaccgagatgggcctcaccgtgtgccgctcctgggcgttcaacgacggcacctaca

SEQ ID NO: 305839 - DNA, 423 bp, Zea mays
ctttaagagatattccaaagtaactcataatccaatggccatcatctttcagaatgtatcctgttcttggtctagcagctctgttgctgaactgaacatagttctcagagatatatctttgcagctacaaaagggctctttattgcaattgtaggttggttctggtaaatcatctttattgaacacaatcattggagagactcgtgtcatcagtgggttcaattgcctatgtaccacaggtaccatggattttatctggctttttacgagataatattttgcttggtaaagaatttgatccaaggagaggagatatgtcacatattggagagaaaggtgccaacttatctggtggacaaagagctcgtctagcattggcaagggctttgtaccacaattctgatgtatacttggttgatgaca

SEQ ID NO: 305840 - DNA, 363 bp, Zea mays
gttatgcgttcgggcttctgctccccctccggttcgggagggggttcgggaggttcttcggggttcgagctcatggatgagcggatcgagattgctgagtacgatgttgagtaccgctgcttcgtctgcggcctggactggcacacggtcgaccactccttccacaactacttcaagacctacggggaggagattatgctcaagattatgatccatcgggagacgcacttgtgccgcggcttctgcttcaccaccttctccacggaggacgccatccagaacatcatcgagggcatgatcggcaaggagctcgacagccgcaacatgaccgacaacgaggcccagtcccgaggcggccgtgga

SEQ ID NO: 305841 - DNA, 440 bp, Zea mays
cctacgcgtccgcccacgcgtccgcggacgcgtgggtggccgcggcgtccggttcttgttgcgtgtcatttgatcatttccacataaacaccatataaaaaaataactgcatcttgtttcaactttgaaagtgagaaccaaaagcatagggttgctggtgtagccagacaaaactaagtcagaccgcatccaaccattgacaattatggataaagggagaaattttctatgcctagttgcctactattaacccacttctaggacatgtcgaagattgtttaatagggaatatacgtggaatttagacaggtttgagccctcgatgtgagataatactctacatcatgtttgaggtgagtctgttgttgtattgtatgttctaatctgatcattctatgagctgatgctctcaggcggttccctgtccttttttaatattc

SEQ ID NO: 305842 - DNA, 325 bp, Zea mays
gtttccggctatgcgtccgtgcagatcttcctgaagactcttactggcaagacgatcacccttgaggtggagtcctcagacaccattgacaacgtcaaggccaagatccaggacaaggagggcattccaccggaccagcagcggctgatcttcgccggcaagcagctggaggatggtcgcaccttggctgactacaacatccagaaggagagcaccctccacttggtgctccgcctcaggggtggcatgcagatctttgtgaagacattgactggcaagaccatcaccttggaggtggagtcgtctgacacaatcgataatgtca

SEQ ID NO: 305843 - DNA, 533 bp, Zea mays
ctttcgcgttttgcaatcccaggaagccttccatcgacgcccgccccgctctccaaccattggaaggtgaagctgcagggattgcgctaatggatccgccctccagaagcagctaagagatctctcgaagcacccagtggatgggttctctgctgggctggtcgacgacaacaatgtcttcgagtggcaggtcaccatcatcggaccacctgacaccctatatgatggagggtacttcaatgcaataatgagcttcccacaaaattacccaaacagcccgccatcagtcagatttacctctgaaatgtggcatccaaatgtctatcttgatgggtggcgttggatctctattcttcatccacccggtgaagatccaaacggttatgagctcgcaagtgagcgatggacactcgagcacacaattgttggatttatggagcagcatgatgatgaactatgggaagaactgattagacaatgcctcccagagcttgaaatgcaaggaatctattgaacatacgagtggaatcttg

SEQ ID NO: 305844 - DNA, 304 bp, Zea mays
tttggtggaactcgacgattgaatccatcgctagtggggttacagtggtggcgatgccgcagtgggcggaccagccgacgaccgccaactatgtcgagagcacgtgggggattggggtgcgcatgcggaaggtgaccttggtgaggaaggaggtggagaggtgtattaaaggacgcgcgggctgcaaagctattgcatacgctgctaaacactcacagaggaagctctgttttagacgtactggggtgctatcacttccatacattattgcccagatgaccgtattgttggttttgctgatgcc

SEQ ID NO: 305845 - DNA, 389 bp, Zea mays
tttcttttgcgccccacgacaacatccagatctgtgcaatggctgggacaattctctgctcttactgcattgaggaggacgatgaccccatgcactaagacgactgtaccgacactggatcaaaatgtcaacaccaaccgtatctgccatcagaagactcgccacttcgatgtcgatcacaagagcctgttgacgatcgaccacctttaccagtacatgctggacaccatcgtataccctggggagccggagagcatgaaagatcatggcgagatcaccttcaagcacccatagaacctggtgaccaccttccccgacaagggccagatcctaaacatgctcataaagctcatggacgccaagaagaccatagagatcggcgtctacac

SEQ ID NO: 305846 - DNA, 514 bp, Zea mays
ctcttttagggccagttcggtaactccattttcccaaactagtctttagtgtagactacgttactttgtggttttggttggtctagccataaggacatgtacaatggtaattaatgtagaggctcttaaggtgtttaaaaagttatttgcaaaaaaatcgtagagtcatctctctgtgaagagacgcagctcgtaaaccaagtacaaacagacgactcatttatcactgtacgaattcgtcgtctgttatatcgatccgatgacgtacaaccacatttacttctgcatttactaatagactatatttataaacattttattgtataatagagtcttttagttgtcccttgtgtttggaaagctgatttaatgtctccaccgaacataccctaaagtctctacctaatactgctttagagctttctctgtacgacaagggagcttaatttctgtgcgcaattgtctctccgaggatcggtgacgtgctgacggcaaactcctttggacaactaca

SEQ ID NO: 305847 - DNA, 417 bp, Zea mays
ttcttaaactgctcagttttcaatatgagggtcatatcttggggctttctttggccatttattagtgcacaagctggtcattggtacccagagaaccttggtaacagtgattcaagaggcctatatggttataaggtcttcatagccatttcgattatacttggagatggcctatacaacttggctaagatatttattgtcattgctagggaattatgcagcatgcaatcgaaacaacttgagctgcctgttcaagctatggaagatgacgggagtcgtgaacaattagcagatgagaaactacaaacagagatattcctcaaagatagtatatgtcgttggtttgctgcttctggatacattgtcctggcaggaatatccaccgacagtgtgcccgacatattttcccagctcaag

SEQ ID NO: 305848 - DNA, 493 bp, Zea mays
cggcccggactgacttgcttgaccgacgcgtccgtttactcttccgggtcgggacccggcgccgtctccgtgtaggtccgaccgccaagctctacttcccatatgagcccggcaagcgagtccggagcgccgtcaggatgaagaacatgagtaccagtcatgtggccttcaagtgaccaactaccgggccagacagaaccttcatgaggccttcgggcggcatgctttctccacgggaaagcatcataggagcccgtttcaagcttgtggagcatccggagaacaacgagaagccgatggacaagtgcaaggctaagtccaagattgtcagcctgaaagtcaaatggccaagggcgtacatgccttcactgcttgatgagcagaaggaccaggtcgcggttgagcaaatattgcgggtagtattcttggatgctgagcgcccaagcccacaaatggacaaacgtaagcgccagctagctgaagcagaagcagc

SEQ ID NO: 305849 - DNA, 368 bp, Zea mays
ggacagaggaagagggaaaaatcgaaacgcaagcaaccaagaataaagccaaaaaaaaaaggcgaagagagaagagcccacacccaaagtgcagaaagggaaactcgaaagggacccttctgactcacaaagaatgaggggcaaggggatcgacaccgagagagagaccctctcattagaagacgcgatctgacccgcacatgtgcggaaaaagaacacatctccccggcaatcataaaaggaaagcgcgcaactagaacatgaaaccgtgacacagacggtcccagtgagcccaccggacggagtggcagaagggcggcgaccctacgacgaggaagaggctccctacgaaagaaaccaacgaggag

SEQ ID NO: 305850 - DNA, 451 bp, Zea mays
  unsure (1)..(451): unsure at all n locations
cggaccggactacccgggtttgcccacccacgcgttcgtangctccatacacaaccgccgccaatccctggccgtgctttgtaaccgctgagtgtgaagaagagatggccggcaagggcgatggcccggctatcggcatcgatctcggcacgacgtactcttgcgttggcgtgtggcagcacgaccgcgtcgagatcattgccaacgaccagggtaaccgcaccacgccctcgtacgtcgccttcaccgactccgagcgcctcattggagatgcggtcaagaaccaggccgccatgaaccccatcaacaccgtctttgatgccaagcgcttcatcggcaggaggctcaacgatgcgtctgtccagagtgatatcaagctgaggcccttcaaggccatttctgggcctggtgagaagccaatgatctgtgtccagcacaagggtgaggagaa

SEQ ID NO: 305851 - DNA, 461 bp, Zea mays
  unsure (1)..(461): unsure at all n locations
gttgttttcaagattgcatcgctgcaggagttcattcctcatgatttcgatgccagtgaccatgggacctcaagcttccctgtatctgcagtgcataggattggcatccttgacattagaatcttcaacactgacaggcatgctggaaatcttctggtcaagaagcttggtcctggcgccgacaattttggagagcagacagaactcattcctattgaccatggtctctgtcttccagaatgcctagaagacccatacttcgagtggatccactggccgcaggcatctgttcctttctccgaggaggaggaggaagtgggttgaggaaagagagtcctttcttcccaacgaagccggagttgaagatgacgatgatgacttcacccagttccttatcgacggcgaggatgattatccngatgccttggaaccatcagctttctgcaagtttggtagcatga

SEQ ID NO: 305852 - DNA, 484 bp, Zea mays
tgttcggtgctcgatcgacgccctacagcgggggtgcgcgaggaaggacctagggctccttcaccacttcctgggcatgaccgctgagcgccggcctcagggtctcttcctcgaccagcgccagaacgccatcgacatcctggagcgggctgacatgactgactgcaagcactgctccacgcctgccgacactcaggctaggctctccaaggacgacgggcctccggacgccgacgcgacatcctaccgcagcctgaccggagccctccagtacctaaccttctgcaggccagacatgcgtctacctcgcaacagcaggtgtggctgcatatgcacactctgcgggagccacactttaccgctctcaagcggacactgcgctgcctgcgcggctccatcgaccacggtctgctactacgaccatacccgatgctggagctggtggtatacaccggcgctgactgagctggctgtgccgatacgc

SEQ ID NO: 305853 - DNA, 220 bp, Zea mays
gaacccggttcgacccacgacgcgcgcctacgcgtgggcccagggcacagggtcctccaagaagagccatggagagcaacccggagaacgccatcaaggaggagctgcgcgaaccggctaaggccgacacgaacgacaagcctgacaaggaccctagcacgcccctgctcgagacggcgctgctcacctcaggcttcagccttgacgaccccaacaccgt

SEQ ID NO: 305854 - DNA, 464 bp, Zea mays
ctttcgcgtccggtccatgctcttttgctcctccggcagcttcatggtggacgacatgcccatcagggacttccgcaacctggagagcaagggggtggcgttccccaagagccagccgatgcggctctactccagcctgtggaacgcggacgactgggcgacgcagggcgggcgcgtcaagacggactggtcccacgcccccttctccgcctcctaccgcgggttcaaggccgacgcttgcgtcgccgtcgcgggcggccggacccgctgcggcgccaccgtcggcaccgagggcaccggcgcccccgcctccgccgccggcgccggggactggtacaaccaggagctggacctcaccctgcagcagcggatgcgctgggtgcagcgcaagtacatgatctacaactactgcaccgaccccaagcgctaccagcagggcctccccgccgagtgctcaatgcaat

SEQ ID NO: 305855 - DNA, 386 bp, Zea mays
tgttcctagtggccaacaaggctcaagataatccagggggctgctagaggaattatgtatctccatcatgactcaagattaactgtaattcatcgagatctaaaagcaagcaacatcttgctagataaggagatgaacccaaagatatcagatttcggcatggctaggatattctctggtgatcagctccaagcaaatactaaccgagttgtagggacatatggctacatgtctcctgaatatgcaatgaaaggcgcattttcagttaagtctgacacctacagctttggtgctcttatatcggagactgtaagcggattaaagataaagctcaccatatcttatcatggatttttctaaccttataacatttgcatggaacatgt

SEQ ID NO: 305856 - DNA, 336 bp, Zea mays
ggaccggccggaacccttgacgacccacgcgcacgccgaagcgccaaggaccccatccgagcccacagggggcttattaacacccagcacgaccagacacagaccaccgacgagaacgcagccgaccagaaggagcacggcaggaagccggacatcccagagcagaaccctgacgagaagaccatcaaccacctcaacccagccggccgccacgacaagggaggacctcacagcgacgcaggccccactggccgaaggaccatcagagacacccacggaggcaggagagcccatggaggcggcgctgcccccgagaaggacccaaccaagggcgac

SEQ ID NO: 305857 - DNA, 415 bp, Zea mays
ggcgcagaacccggtgggagccacacgcgcgcctcacgcgcgcccacacgcgcgcccacgacgcgcgggcacgctgcgcgggcacgcggccggccggcgcaaacgcgaggacgagcccgacagagctctaagcacccagaccgggcaccgaacgagcttcacgccagccagggtcgctcccgaaggcggcgcgcgcgagcgcgtgagaggagaggaggaagatgagggagcgcatctccgtgcacatagggcaagccggcatccaagacggcaacgcgcgctgggaactttactgcctcgagcacggcatacagactgatggccaagcgcctggagataagaccgggggacatcacgaggatgccctcagcaccaccagcagccagactggcgctgggaagcacgtgccccgcgc

SEQ ID NO: 305858 - DNA, 428 bp, Zea mays
caggcccggcccagtttcccgttgtggacacacgcgcgcttttctgttccgcggacgcgtccgcggatcgcgtgggaggcttctcgcatagagacatgacatctcaaggcaaagcgagaagacgctgctatgctgcaacagcggtttgcattgggatcaacacacgcatgctgcatccctggattggtccaacatactgctcctattgcagggaccttgaggcggggagacagcacgtgaccgactccgcctggggaagcgacgtgttgggaccccgcggcacacgagcgcacgccggcgagatacccggttcccgtagcggatgagcatacgccggagttgtccaggaagctctcggcgtatgcccccgtggctaggccggccggaacccggccgatatgctggttggaggacaagtcgagggaggt

SEQ ID NO: 305859 - DNA, 444 bp, Zea mays
tgttagaagaggggaggcgcgacaaaaagggcgccgcgcccccgcatggcccccgacgcctgcatctctccctcgctgtgcttcaaccgaactcacccgaatcgaggaaggctgaacagctagcccgggagcacgatgcagttcgccaacccgatgctggtagagccgatccagatggtgtgcatcctggagccatccaagaccagcttcctcccggggatgaccaagatggtttggacgcgaggccccaagtcgcgctccgacgacaccatgtactcctggctcaaggccggcatgtgcgtcgcgcggttcgatttctcgtggggagacgccgcctaccaccaggagacgctcgagaacctcaagctcgccatcaagatcaccaagaagctgtgcgctgatatgcctgacacggcaggaccggagctgcaggagggcaacaag

SEQ ID NO: 305860 - DNA, 295 bp, Zea mays
ttttctgttgttctaaacctatatctgtttatgatcatgtatggtctgaaattatgtcttccatgttcctttaaacctctcttcaacgcctgcattactttagggtcattggggagctactgttttcagttggatgaacaaatatcttctcttaaatcagtattccagaattcgcgaaagggcctctagtgaattggttaggcggtctgggtagcactcctcaggtcataggttcgacttcccgtgggagcgaatttcaggctgtggttaaaaaaaatcccctcgtctgtcccac

SEQ ID NO: 305861 - DNA, 440 bp, Zea mays
ggaccggtccggatttccttgtttccacgcgtctgtctcacaccggggattatggtatgcagtccggagaccaatgggtaagcttgctccgctcattggcgagtagagaaggtgccctgccagaggtgaagatcacagccataggtctccccaagcctaagtactacccaactgagaacattgaggaaatacggtgccaactcggcagatctgcccatgagtttggtctgcccttgctcaagttccacgctatcaagacaaactgggaggacacttgcatcgaggacctgaacctagaagccgatgaagcgcttgacgcgaatgatctctttagtttcagcacctcgatggacgagggcatatccttggatgacctaagccccatggatataagccttagtgacatcagcaagatgagaccacatgttttcatccagagc

SEQ ID NO: 305862 - DNA, 235 bp, Zea mays
ttgggatgtcccacttttccgtgttcgccaagcgcccctgagcccgggggcgggtgggatctggatactttatttttcggttttcaacactgacaggctcggctggaatgtgctcgtgaggaagcttaacggcggcacaggccgctttggttgccagacagagctgttcccaattgatcatggcctgtgcttgcccgagaacttggaggacccttacttagagaggatccattgg

SEQ ID NO: 305863 - DNA, 416 bp, Zea mays
tttaccttgcacgttaagctaccctgggcgtgctcggatgggacctgggtcctggattggctggttgccaacactgacggggtcgcctgggatatgctatggagggagcataacggaggcacaggccggttttgttgccagacagagctgaccccaattgatcacggcatgggcctggcggagaacttggaggaccctaactttgagtggatccattggggtgagggttctatcccgttctatgaggaagagctggagtacatcacaaatctcgatccaaggaaagatgtgcagatgctgcgccgggaacttccgatgatacgtgaggcctgcctacatgtactggccctgtgcacaatcattcttaaggaggctgcagctttcggactctgcttggccgagataggcgagatgat

SEQ ID NO: 305864 - DNA, 355 bp, Zea mays
  unsure (1)..(355): unsure at all n locations
aaagttgngacccgggccggtgccgggcccgtattcccgggtcgtggcacgccccacgtgtccgttgacgcgtgggcggacgcgtgggggctaccctactacgtaccctcctctgtgtgtgctgccatccgtccccgttagacgatcgaggagagaataacgcagagctctctgctcccggcctgtcttctgccgtgccggccgtttaatttactagtgtgttcgtcctatctgtctagcagcagcaggtgtattgagcgggtatgtaatggtcttgcaactatattgggtgtaaaaccataataaatgtgggcaaatgtgccatataaatatatatatacaaaaataaataaac

SEQ ID NO: 305865 - DNA, 397 bp, Zea mays
ttaccacttctggccgcccccaattagctggaggtgcatagcattgagcaagcgctcgaggctttgtggtacgacatatcaagtttgctgagaactaccgtatttattctcgaaaccattttgtgaaagggatggaggttgcacttttgttggtgatcttcctagcgtatgggtttaacaatggtggagcagctggctatatcttactctctataagcagatggattatggcattgtcttggctcattgatccctatttatttaacccatctggatgcgcacaggaaaggattgttgaggattccagagactgaagaagatgcctggagcctcacgaggggaaaccattctctgctaccaagtggaaggagattacaggaagcgacatatttgctgc

SEQ ID NO: 305866 - DNA, 483 bp, Zea mays
tttacgctatcgcccacgcgtccgcccacgggtccggcaccccgttgtacggcgtggcggtgtacaacgtgacgacgggcgagtggctgcagaagcacggcaacgctcccccgtggcgccctggtctccgcagtgggaggggagctacgactcccacatccatagcatggagttgtcacccgcccgcggcccagccccgtggagcgcgcaccacaacggatcctccgaggccctgtttcgttacgacgacggcggtgccgaccgcgggagcactcaacagccgctgctgcggaagcgcaccgagaacacgacctcgcagatcgctatcgtcggtgccaacgtctgccccatcgagagcttggactacgaagtcgtggagaatgacctttttaagcaggactggcgatcaagacagaagaagcagatttttcagtacatcgtactcaagtggagcttggtgctccttattggcctattaactga

SEQ ID NO: 305867 - DNA, 310 bp, Zea mays
ttggctttacgcgttcggtcgatccatccaggcgtggtgctcctggaggaaggcactgctgacgctggacacgaagaaggtcagccgccaggagcagacagcatgctggcgcaacggaacgtgggggcggagctgctccggagggggcgggtgtctgataagactaaccgggagaagctggacgcgttcgcggcggaactggtgaaggagcaacagcggcgggcgcgcaccccgggcctgcccaccgtggtgatcaagcaggcgcgccccactgtcacggccacgccgtggatgtgctgcgacaccaccg

SEQ ID NO: 305868 - DNA, 205 bp, Zea mays
ccaggcatgaccgccggggggctttttttaggatactgctgctgatcatcccactcccgggcacgagcggctctgaaggtcgttggggtgagggtgcaccgcacatcggagagtggcgggcgcaccttcggagggaaaggcatgatgtaagggcgcgcgtcgaattagagcgacaacaccaagttctataagatcctcggggtgc

SEQ ID NO: 305869 - DNA, 255 bp, Zea mays
tgcccgccgttcccctcgggggttgttctttctacaagccaggtcgataagttgatctcatgaatccaggaagaacagtggcattcagcgtttcctgtccagcgggaaacagtggcagcttccctccctgcctccttccaggatttcttgggttcccagtcgttttcgtaaattttcactcgttcaaggccatttgtcgcagtcctggatctttcgatgtcttgggaatttgtggagggagcctttcttagaccg

SEQ ID NO: 305870 - DNA, 362 bp, Zea mays
ccgggtggcttctcctccccgggggggtctgttttaggggtcgtgaggttttccgcggttgggttttgagggtgagcggctccgagatggtggattcagatgttgagtaccattgtttactgggtgggcttgcctgggctcacggacgaccactccctgcgcaacgtattcagcacctgcggcgaggtcctggagtccaagattactactctatcgggagacgcagaggtccctcggcttaggtttccaaccttttccacggaggaggcgatgctatacgacatcgagggcatgaacggcaaggagctggacgggcgtcacatcaccgttaacgaggccgagtcccgtggtggccgtggagg

SEQ ID NO: 305871 - DNA, 445 bp, Zea mays
  unsure (1)..(445): unsure at all n locations
tccccctccggttcgggttcgggggcgtgaggttctccggggggcggtttcagtgggtgaggcggatcnnngagatggtcggccgttcggaatgttggagtacccgctgctttcttcggcggtctcgcctgggccacggacgaccactccctccacaacgccttcagcacctacggcgaggtcctcgagtccaagattatcctcgatcgggagacgcagaggtcccgcggcttcggcttcgtcaccttctccacggaggaggcgatgcggaacgccatcgagggcatgaacggcaaggagctggacggccgcaacatcaccgtcaacgaggcccagtcccgcggcggtcgtggaggcggcggcggcggctacggtggtggccgtggaggcggcggctactgcggtggcgggcgccgtgatggcggcggcggctactgcggtggcg

SEQ ID NO: 305872 - DNA, 427 bp, Zea mays
cacgcgtccgagcagggcagcgggtacacacaacttcagcacgggcagtgactgcgaggtcatcatccccctgtacgagaagtacggcgagaacttcgtggacatgctggacggggtgttcgcgttcgtgctctacgacacccgcgacaggacctacgtggcggcgcgcgacgccatcggcgtcaacccgctctacatcggctggggcagtgacggttccgtctggatcgcgtccgagatgaaggcgctgaacgaggattgcgtgcgcttcgagaaggcggtcatcaagaggctcatgactgacgtcccgttcggggtcctcctctccggcggcctcgactcctcgctcggtggctccgtcaccaagcgccacctcgtcgagaccgaggccgtcgagaagttcggcaccgagctccactcctttgtc

SEQ ID NO: 305873 - DNA, 385 bp, Zea mays
ggcaaaagcgaagcagagggaggggttttctctgagggtcgggtagataccgactaccccgcactcgttgtggtttcttcttgggaaggagagagcgattctggtggcattggcaaagagcgagggtccggccaccgggatcgagactagaaccacctactggacgcgggggatgtgagcaagactacacgcgcggtgattatgggcaacagacacaggtgaacgcgaccacggcgtcctatggatgattaaccgacaccgagcgggtcatcggggacgctgccaagaaccagatgggcatgaaccccaccaacaccgtatgttatgccaaggcggtgatcggcaggaggttctttgaaccggcagtgcacagtgacatgaagct

SEQ ID NO: 305874 - DNA, 244 bp, Zea mays
cgtccgcccacgcgtccgcctttgggtgcacttcttttttgcttggggcatcagaccggagaggaggagctagctagctagcagcagctctcatggtgtgcgcgtgtgagtagagggtagctgcagctggggctagctggaaaggtcgggagccatggggaggggccgggtggagctgaagcggatcgagaacaagatcaaccgacaggtcaccttcgccaagcgccgcagcggcctgctcaag

SEQ ID NO: 305875 - DNA, 362 bp, Zea mays
actgttggggggtttttttccatgcttgttgtgcagatcatgggccaggtgaaacagtttttcggccgtggatgatcagctttcatgattcctgaacaagatgaacgagacggccgaggcttaccctggtaccaccattaagaacgctgtcgttaccgtcccggcctactttaacgacttccagcgccaggtcaccaaggacgccggcgttatcttcggcctaaacgttatgcgcatcatcaacgagcccaccgtcgaggatatcgcatacgggctcgacaagaagtcgtgcagcgacggccagaagaacgtcctcattttcgaccttggcggcggttcctttgacgtttcgctccttacca

SEQ ID NO: 305876 - DNA, 246 bp, Zea mays
gccgtgcaccttattctggggcggttctttaacgcccgggcgggtttttccctgcagatgggagcagggcaagagcaagcttcatagcgcggaaggggccagtctggtcatgccgttcggcggcgggccgcggctgtgcccgggctacgagctcgcccgggtggtggtttccgtcttcctccaccaccttgtcacgcgctttagctgggaggaagcccaggaggacaggaattgctttttccccac

SEQ ID NO: 305877 - DNA, 328 bp, Zea mays
atatctccaaaccctagggggggatttttttggcgatccctggcgtttttttcgacatgaccgtcggcggcgccccggcgggccggatcgtgatggagctgcacgccaacgaggtgcccaagaccgtggtgaacttccgcgcgctgtgcacgggctagaagggcgtgggcaagtccgggaagccgttccactacaagggcttcaccttccaccgagtgatccccgagttcatgtgccagggcggcgacttcacccgcggcaacggcaccggcggcgagtccatctacggagagaggttccccgacgagaagttcgtgcgcaagcacac

SEQ ID NO: 305878 - DNA, 373 bp, Zea mays
agactttgcgcatacctggagggcactgtggtaaccaaagcggcgccaaatggtgagaggcatgacgctacgaacacagagtggacgctacaggttgtgacactggttcttgaaaccttcaggttgtgcgagagaatttctactacaacatggcccaccagagccgatgtgtgccacttgctgtggtcatagacctaaatcctgcgacaaaaatcagtgtccctgctggaccgtatgggcaaatgttgctccctgactactacacgtttggacattctggcgctgagaacatctgggcccagggccatatcactggaagcgctgagcacactgactgatgatcacctgctgaacggaaggaagctaagaactg

SEQ ID NO: 305879 - DNA, 343 bp, Zea mays
tggcgcccactccactttctagtcttaccgcccagtcccgctgattggaccagacgacggaccccttaccttcttccacggtaagagtaccacggtggcgcggtgcccatgcttcatactgcccgtgcctgacgtctggctcccactgtagtagtaggcaccgctacaactacagctagccacacgccatgggtgggctcgaggagatcaagaacgagtccagagctctggacaacatccccctcgacgcagtgttccagcagttgaaatgcacccatgaggggctgagctccagctaggggcagcaacgtctcgagatctccggtccgacatgctccaggag

SEQ ID NO: 305880 - DNA, 359 bp, Zea mays
ggtcctccggggcccggtgcggacccacatctctcggtgccagtcattggacggccgctggctgttcgcaccacctccagggctctaggcgtacctcgaccctctcaccaatcaaggattcatgtctgagctcgacagtgagaccccagctgagttggaccccttccatgaggccaatgatggggactctggtgcaccagcagggtaaaaggactacctccgacgggcgatccacacacgtaatgggcgcaagagcctgaccacgcgccagagatagaagatggacggcatctacagcaagatcctgcaagatctctagaaacagttctgctgctatggatcagggtgccaggacccag

SEQ ID NO: 305881 - DNA, 228 bp, Zea mays
gtccttcccgtacgaggcccacgaccaggtgatggcagcgtcactacacaagtccgtgctggccagaataccggcactgccaagcccgattcgatacgcgacctggacaccaagctggatcaggcaggcatgcatgcgcaccgccgtgcgggtcatagcgcaccagtgcggacaccaggccttgtcggactacacggtcctggacgactcggtaagcctggggacgaa

SEQ ID NO: 305882 - DNA, 311 bp, Zea mays
ctcattcccttgggcgggcccggtccacgtgatggcaccggtagtcaaggatccatgcaagcaccgcccgcctagagggagcaactccagcttctggaccaccaactccggagccccggtatggaacaacagcttgggcatcaccgacgtgacatcagaggaccaatcctgctggcggaatatcatataatactagatgcttgctgaactcgacagaaaacgtatcgctgaacgtgttgatcatgcacggatagccagtgccaaaggcattttcagggacactcattataacactgaccttacatgagctg

SEQ ID NO: 305883 - DNA, 321 bp, Zea mays
gcgctactggccagctagagccaaccagaagagcttgcagttactgagagtgtgtgtgagagagaggatgggtggcagcggcagggctgctctgctgctggccctggtggtggtggccgtgagcctggccgtggagatccaggccgacgccgggtacagttacagcggtgggtacaccccgacgccgactcctggcaccccaaccccgtatcccgagaagccccccaccatggggccgaacccggacatgccgaccaaggagcacatgctcgccaaggagcacgggtccaagccggtgaagccgtccaaggagcacaagcc

SEQ ID NO: 305884 - DNA, 359 bp, Zea mays
ctggtacgcctgctggtgccgccgcggcagaaccgggtgggacccacgcgtccgtcttcttcttccgatcgccgttcagcatgcactctgtcctctctagctagagcgaagtctaagcctgacagcgcacgcattggggggctctagatgacgatgggcatggacgacgtgatcgtgagcggctctggcggcggcgagttcgttgccaaggactacacggacccttcctagacgacgtgatcgacacggtggagctgaggtcctggtcgctgtaccgagccgtgatcgccgagttcatcgccaggctgctgttcctgtacatcacggtggccaccgtgatcgggtacacgcaccagacg

SEQ ID NO: 305885 - DNA, 423 bp, Zea mays
  unsure (1)..(423): unsure at all n locations
ccatctcttcttactcgctgggagtgttttagctgctcgccgccgttctggctccgaccaggtcgncgatgaggcgatgcagatcactggacgaggagccgccctccgctaccgccgcgtgggccttcactgcgagatcccgcgccctgcccctcgccgcctcccccggcccgcctggctccaagaacctcgccaccgcccgagccacggcctccgccggcacgagctccctctcctcgtacctcgtgctccgcgccccgctccagacccgctccccgatcccgagcacgtccgtcaccagcctctcctcgatgaactggtcgaacaccagcggccacgtcagcatcggcacgccggccgccgccgccttcagcagcgagctcgacccgcagtgcgtcaggaacgcgcccaccgctggatggt

SEQ ID NO: 305886 - DNA, 272 bp, Zea mays
agcagcgtcttccgaaggagtgcgcagggaggagatgatggcggacggctgactgtagacagtggtcggcagggggcagccacgaacggggcccccgccagtcgtggtgacatgtggaaaaccgggcgctcgcagctcctctcttttttcttgtttctttctttcgatctgcgagccgtccaggtccagtactctcctttccgtgaaggaactcttgcagccggcccctctggttttctcgaatctttgttccccggcccttcttctggtcc

SEQ ID NO: 305887 - DNA, 319 bp, Zea mays
gaggtatactgcgtttgtacgactagctattcctaacgagcagctattcaccaggggagtctttgtaaaggctacgtagtgtatccctaaccattcaccttggtagtgaagatcaggtctgtacaacccaggctggaaagggatcacgacttgtgggtacagtgtacaatctctgcagagtgttaaaaactggtatatcagccgagctcacggttaagagcagccttgggatcctctttgattagaagaactttggatactcttatgatgatggttaataatgatattgaaaaatctaatctttagtatttcctcattt

SEQ ID NO: 305888 - DNA, 408 bp, Zea mays
  unsure (1)..(408): unsure at all n locations
ctggcaagaccatcaccttggggggggagatgtttgacacaatcgcttatgtcaaagccaagatccaggacaaggagggcattccaccggaccagcagcgcctgatctttgntggcaagcagctggaggatggccgtaccctcgccgactacaacatccagaaggagagcaccctccacctggtgctccgcttgcgaggtggtatgcagatctttgtgaagaccttgactggcaagaccataaccctggaggttgagagctccgacaccatcgacaacgtgaaggcgaagaaccaggacaaagagggcatctccccagaccagcagcgtctgatcttcgccggcagcagctggaggatggccgcaccctaacagactacaacatccagaaggagagcactctccacct

SEQ ID NO: 305889 - DNA, 488 bp, Zea mays
tggtagtgcacacacacacaaccagatctcccccaaatccacctgtcggcacctccgcttcaagatgcagatctttgtgaaaaccctgactggcaagactatcaccctagaggtggagtcctctgacaccattgacaacgttaaggccaagatccaggacaaggagggcatccccccagaccagcagaggctcatctttgctggcaaacagtttgaggacgggcgcacgcttgctgactacaacatccagaaggagagcaccctgcaccttgtgctcctgctcaggggaggcatgcagatctttgtgaaaaccctgaccggcaagactatcaccctcgaggtggagttctctgacaccattgacaactgtaaggtcaaaatccaggacatggagggcatccctccagaccagcagcggttcatcattgctgagcagcagattgaggacgggcgcacgcttgtcgactacaacatccagaaggagagca

SEQ ID NO: 305890 - DNA, 305 bp, Zea mays
gttgttgggagggagcctcaccgagcaggaccggtggccagggttcaagggtgataaggtcgctcacgaaaagcaggtgcttgaggttcatgttgagaagggtatgcaccacaaccagaagatcaccttccctggtgaagctgatgaacagcctgatactgtcactggtgacattgtatgcctcctccagcagaaggatcactcgaccttaaaaagaaagggtgaagatctcttgtatgagcacaccttgcctctctccgaagcactacgggacttccaatgctgtcttacacatctgtacaaca

SEQ ID NO: 305891 - DNA, 306 bp, Zea mays
tcttctagagccaaccagaagagcttgcagttactgagagtgtgtgtgagagagaggatgggtggcagcggcagggctgctctgctgctggccctggtggtggtggccgtgagcctggccgtggagatccaggccgacgccgggtacggttacggcggctggtacaccccgacgccgacgccggccaccccgaccccgaagcccgtgaagccccccaccaaggggccgtagccggacaagccgcccaaggagcacaagccgtccaaggagcacggtcccatgccgtagaagccgtccaaggagcac

SEQ ID NO: 305892 - DNA, 398 bp, Zea mays
tctttacgcgtgggcacgcagttccgcaccgtcaaggctccgacgggtaagcgcgtggccggcgacgaggagcagccgcagaccgtcgccgaggccgcgcgcaagctccccgaggacgcggcgtccaggagagggctgttgctggacttcttcgtcatccttcccgtgatgcaggtggtggtgtgggttgcggcgcccgcgatgatccgcgcggggctgacgacgccggtgatgacggtgctgctggtgtcgttcctgctggagtacctgcccaagatctaccacgcggcgcgcctgctccggcggatgcagaggcagtctggctacatcttcgggaccatttggtggtgcatcgcgcttaaccctatggtctacttcgcgccccccatgcttgtggg

SEQ ID NO: 305893 - DNA, 391 bp, Zea mays
ttcttctaccgctccattccagaggccatatactggccagccttcatcatagcaactcttgcggcagtagttgcaagtcaagcaaccatatctgctacctactcgataattaagcaagcccttgcactgggctgtttcccccgtgtcaatgttgtgcatacctcgaagaaatttctggggcagatttacatccctgacatcaattgggtacttatgattctttgcattgctgtaactgctggattcaagaatcaaagccagataggaaatgcatatggcactgcagtggtgattgttatgctagttacaacatttctcatggtcccagtgatgctgctggtatggaaaagccactggatacttggtgtcatcttgctcgggctctccttga

SEQ ID NO: 305894 - DNA, 403 bp, Zea mays
ttattttcagcaacggcggaaggatccggtgcatgcaggtaacaaatgcatcctagctagtagttctttgcattgcagcaactgcagctagcgagttagtaggaaggaactgatgatccatgcatgcatggactgtgtgttgcccatcccaattcccaaccccaaccaaaccaaacacgcgtgcaggtgtggccggcctacggcaacaagaagttcgagacgctgtcgtacctgccgccgctgtcgacggacgacctgctgaagcaggtggactacctgctgcgcaacggctggataccctgcctcgagttcagcaaggtcggattcgtgtaccgggagaactccacctacccgtgctactacgacggccgctactggaccatgtggaagctgcccatgttcg

SEQ ID NO: 305895 - DNA, 410 bp, Zea mays
gtctttgacgcgtgggcgcgtatcttcgtccgccgcaacccttcgcgtatcgtctctctgtcacacggtcacacccctgacctctctcccctccccctccccctccccctcccagaaaagacccctcgaaaaacggcggcgctgcgacatggccgaggttgaggctccagctgctgcggtcgaggctccagctgctgcggtcgcgccgacgacccctgaggtggcggcgcccgaggccggagccgctacggaggcgaagggtccgcacaagcttcaccggcagtggaccttctggtacgacatccagaccaagaccaagcccggggctgcgtggggcacctccctcaaaaaggcctacacctttgacaccggtgaggaggtctggagcatgtatgatcaggattttttcg

SEQ ID NO: 305896 - DNA, 331 bp, Zea mays
ttgtttaagtatagtctctttgctaagcgaagcgaagcttctagctagcctcggcggctctagaagacgatgggcatggacgacgtgatcgagagcggcgctggcggcggccagttcgctgccaaggactacacggaccctcccccggcgccgctgatcgacgcggcggagctggggtcctggtcgctgtaccgcgccgagatcgccgagttcatcgccacgctggtgttcctgtacatcacggtggccaccgtgagcggggacaagcaccagacggacgcgttggcgttgggcgccgacccggcctgcggaggcgtgggcgtgctgggca

SEQ ID NO: 305897 - DNA, 214 bp, Zea mays
ttgctttctatcgtcatggaatatgcctcagggggggagctatttgagaggatctgttagaacgcgcgatatagagaagatgaggttcgctacttgttcctgtagcttattctaggagcaagctactgccactcaatgcaagaatgcccccgcgattggaagttggagaacacacttatcgatgggagagacgcatcctacttgaagatttgcg

SEQ ID NO: 305898 - DNA, 287 bp, Zea mays
tcgtttgctcgagccaaccagaagagcttgcagttactgatagtgtgtgtgagagagaggatgggtggcagcggcagggctgctctgctgctggccctggtggaggtggccgtgagcctggccgtggagatccaggccgacgccgggtactgtcacggaggcgggtacaccccgtctcctacgccggccaccccgaccccgaagcccgagaagccccccaccaaggggccgtagcccgacacgccgcccaaggagcacatgccgcccaaggagcacggtcccaagcc

SEQ ID NO: 305899 - DNA, 405 bp, Zea mays
ttcacgcgtccgcggacgcgtggggggcaaggctccatggagcacaagccggccaaggagcacgggcccaagccggagaagccgcccaaggagcacaagccgacgccgcccacgtacaccccgagccccaaacccacgcgccgacgtacactcccaccccgacgccccccaagccgacgccacccacatacactctcgcccctacgccccacaaacccacaccaaaacccactcccactcctccgacgtacaccccgacctccaagcctgcgacacctaagccgagcccgtcgacgtacacttcaagccctaaaccttcgacgcccaagccgttcccaccgacgtacacccctttcccccaagccttcgacacctaagccgaccccgtttacgtacacttcaagc

SEQ ID NO: 305900 - DNA, 472 bp, Zea mays
tgttataggcgtcttcgtactcgcctaccgggggggctcaaacctttcccggtggttccaattcccgccgccgctccatcccgtaacgcgacaccatgagggagtgcatttcgatccacatcggccaggccggtatccaggtcggaaacgcgtgctgggagctgtactgccttgagcatggcattcaggctgacggtcagatgcccggtgacaagaccattgggggaggtgatgatgctttcaacaccttcttcagtgagactggtgctgggaagcacgtgccccgtgctgtttttgctgaccttgaacccactgtcattgatgaggtgaggactggcacctaccgcccgctttttcaccctgagcagctcatcagtgggaaggaggatgcaaccaacaactttgcccgtgggcactacacccttggcaaggagaattgtgacctatgccttgtacgcataaggaagcttgg

SEQ ID NO: 305901 - DNA, 477 bp, Zea mays
actgaaaatggctaatcaaaatatattcgcgggggcttttctcaccacaggggggaacacggaatgtgttttagctcctaaccatacgctggggaatgctaccattttgccacaacactgcttttcagctccagtaattaagcccagtgctacaaatgtcgcgaactcgagggcgataggcacggcattatctccaccacctggtgtgatggttccagttcataatgcagtaccatctgacttatcagttaaggatgagagggaattgaagcgcgaaaagaggaagcagtcaaatagggagtccgctagacgatcaaggctgagaaaacaggctgagacagaggagttggctacacaagtggagtctcttgcagcagagaacacgtcccttagatctgaaatcggccggctaacagagagctcagagaagctcagactagagaacctagctctaatggtgaagctgaaggacaccgc

SEQ ID NO: 305902 - DNA, 457 bp, Zea mays
tcgtccacgcgtccgaaggacccgagcctagggttccttccacagccgccgctacgctttggctgcatcactcgctcctcttcggagcctccctttcgcaggcggcgtaggaagagatggcagagcgtttgacccgtatcgccatcgtcagcgaggacaagtgcaagcccaagaagtgccgccaggagtgcaagaagagctgccccgtcgtcaagactgggaagctttgcattgaagtaacttcggcatcaaaactagctttcatttctgaggagctgtgcatcggttgtggtatctgtgtaaagaaatgtccatttgatgccattgaaatcatcaaccttccaaaagacttggaaaaggataccactcaccgatatgggcctaataccttcaagttgcacaggtacatacactcatctcattttagtgctggttgtgtttgtatattttttatgca

SEQ ID NO: 305903 - DNA, 430 bp, Zea mays
  unsure (1)..(430): unsure at all n locations
attcttgcgtccggagttgctcggagcgcagagacacactatcacagatctcgggggaattcaaccttcggcacctccgcttcaagatgcagatctttgtgaaaaccctgactggcaagactatcaccctcgaggtggagtcgtctgacaccattgacaacgttaaggccaagatccaggacaaggagggcatccccccagaccagcagcggctcatctttgctggcaaacagcttgaggacgggcgcacgcttgctgactacaacatccagaaggagagcaccctccaccttgtgctccgtctcaggggaggcatgcagatctttgtgaaaaccctgaccggcaagactatcacccttgaggtggagtcctctgacaccatngacaacgtcaaggccaagatccaggacaaggagggcattccttcaga

SEQ ID NO: 305904 - DNA, 396 bp, Zea mays
actgttcacgcgtccggggctgttcggagcggggcacttacaaccagttggggggcaaatcacacccgtgcgcacctccgttttaagatgcagatctttgggaaaaccctgactggcaagactattacactcaaggcggagtggtctgacaccattgacaacgtgaagggcaagatccaggacctggagggcattcccccagaccagcagagggtcatttctgatggcacacagcttgcggacgggcgcacgcttgctgactacaacatccagaaggagagcaccctccaccttgtgctccggctcaggggaggcatgcagatctttgtgaaaaccctgaccggtaagactatcacccttgaggtggagtactttgacaccattgacaacgtcaag

SEQ ID NO: 305905 - DNA, 473 bp, Zea mays
ttcttgcgcactctagcaatggcttgtgtggggggtctttttagtgacgccgggctactaaaggcacaagccgacatatggcgggtcagcctctcctacctgacgcccctgtcactgatgtgcgccttggagcttggcatacctaccgcgatctaccgccatggcggggctgcctcactcgctgagctggtcacggcgctggctctcccctccactaagctgccgttcctacgccggctgctggggctcctcgacgcgtcgggcgtgtacaccgtctacaagcatagcttggaggaggagcggtaccgtatcaggcccgtgtcctaccttctggtggaccgtatccctcacgagggccacatgaaccacacccgtcctggtgctcacctgcaccctcacgcgcttcatcgtggctgggatagggctggcagagtggttcaagagggaacttggtcacgttaccccctccagga

SEQ ID NO: 305906 - DNA, 301 bp, Zea mays
atcgtttaagggtgatgagcgtggtggataggggggtgttaatgtacactcgggccggttctccaagctacgtgccgacagagtactaccagagcttcagatgcactaccaagggcgatgtgtatagctatggcgttgtattgctcgagctgctcactgggaaaccgtctacagattcaaccgactacggtgaggacaacaatgtcgttggatgggtcaaacaacactcaaagtcgaagctggcagatctggttgaccctgtactactggtggaggatccgggcttggagctcgagctact

SEQ ID NO: 305907 - DNA, 355 bp, Zea mays
atcgtaccctctgctaggaacgcacacaccggggggtctttaatctctgatgggggttcaaaacgtagatccaagatgcagatctactgagagactctagctgggaagactatcagcctcaaaggggagtcctgggacaccataaacaacttttaggtcaacatccaggacatggtaggcatgaccacggaccagaagcgggtcatctaatctggcaagcaactcgaggaccgtcgcacacttgccgactacaacatgcataaagagagcactcctaaacttgttctacgactcaggggaggcatgcaaatacttgtcaagacccttactggaaagactatcaccttcgaggtgg

SEQ ID NO: 305908 - DNA, 283 bp, Zea mays
ctcggcgacaagaccattgggggaggttatgatgctttcaacaccttcttcagtgagactggcgctgggaagtacgatccccgtgcttggtttagttgaccttgatcccactgtcatcgatgaggtgaggactggcacctattgtcagctctttcattctgagtagatcatcaatggcaaggaggatgcaatcaacaacttcattcgtggttactacaccattgtcaaggagaatgctgacctgtgccttgaccgaatcaggaagcttgtagataatttgcac

SEQ ID NO: 305909 - DNA, 209 bp, Zea mays
tcgacccacgcgttctttttgctacaccacccccccttaccaaggagcagctttgtttatggttcctcagggtttcagagaggggcgatggctaaagctgatgtggagtaccgtagctacatctgcgggcttgcctgagccaccagcaacgagtcgttggagaatgccttcacctcctacggcgagatcctcgactccaaggtattcac

SEQ ID NO: 305910 - DNA, 313 bp, Zea mays
ctcactctttcgcggacgcgtgggctctcctccccctccggttcgggttcgggttcgtgaggctctccggggttcggtttcgtgggtgagcgtgatcgagatggtagctgtagatgttgagtacctgctgctttgacggaggcctcgtctgggccacggacgaccactcccttcacaacgcctttcagcacctactgcgaaggtctcgagttcaaaaatatcctcgatctggagacgcataggtcccgcggcttcggctttcgtcaccttttcaacggaggaggcgattcggaacgccaatgagggcatgaac

SEQ ID NO: 305911 - DNA, 315 bp, Zea mays
tcggtgtccacacacacaaccagatctccgccaaagccgccctttggtacctccgcttcaagatgcagatgtatgtgaaaaccctgactggcaagactatcacccgtcgagctggagccggctagcaccatcgacatctgtaaggccaagatccatgacaaggatggaattcccccagaccagcagacggttaatttatgatggttaagcagtttgaggaccggcgcacgctaggtgactgcaacatccagaaggagagcaccctccaccttgcgatgcgactcaggggaggcatgcaaatctttcgtgaaaacc

SEQ ID NO: 305912 - DNA, 266 bp, Zea mays
ggcccgtgccggtacggacttgccttccctacccacccttttcgtttctccgccggaaccccggtgctgcacggaagtgacgaccggatccaggcgtgtatggctgcactgggcgtgccgcttaccaagcacccgagggttcaccagggcgacgtgtacgacgaccttcttagcctgctcgcgtcccacccggtggcaccgatcgagacgcttcaccacctggacgtattgaatacgctgctatccgacgtgaggtcgcgcccctc

SEQ ID NO: 305913 - DNA, 355 bp, Zea mays
tgttcgttcacgcgtccgcccacgcgtccgcccacgcgtccgcccacgcgtacggttgccggtcttctccgtccgaagccttagtcccttccatcttctgcttgagtcgccggcgagccctacaccgtgaattggatctcgccgacaaggtgagagggaaaagatggggcttacgttcaccaagctcgttagccggctgttcgtcaagaaggagatgcggatcctgatggtgggactcgacgccgccagaaagaccaccattctctacaagctgaagataggtaagatcggtaccaccatcctcaccatcggattcaaagttgaaactgtggagtacaagaacattatgctcact

SEQ ID NO: 305914 - DNA, 349 bp, Zea mays
ttatttctcgcgcacagatcgagcgcgcgccaggcaggtttttcggccggccgcctagagtgcaatcaagcaagacaagatggtgaagctcgccttctgaagcgtcggcgacttcttcatcgtcacctccatcaaggcctacgtggccgagttcatcgtcaccctccttttcgtattctccggcgtcggttccgtcatcgtctactggcaactgacgaatggcggctcgctggacccggtgggcctggtggcgatcgctatcgcgcacgcgctggttctgttcgagggcgtgtccatcgcgtcgaacatttcgggcggccacctgaaccccgccgtgaccttttggctg

SEQ ID NO: 305915 - DNA, 357 bp, Zea mays
ccctcgtgttcgcccacgcgtccgcccacgcgtccggcgccattggccagctagagccaaccagaagagcttgcagttactgagagtgtgtgtgagagagaggatgggtggcagcggcagggctgatctgctgctggccctggtggtggtggccgagagcctggccgtggagatccaggcctacgccgggtacggttactgcgggggggacaccccgacgccgacgccggtcaccgcgaccccgatgcccgagaagccctccaacatgggggcggaggcggtcaagccgcccaaggagcacaagcgagtcaaggaggacgggcccaagtcggagaagcctgtcacggagcacatgtc

SEQ ID NO: 305916 - DNA, 489 bp, Zea mays
cggaccggcccggactgacttgccgggtcgttgcgcccgcgttgatacttccaaccccttcgggaccttcaccgtggtgaaccttttcaatgaccctagcatcaaggagatggcggagcagatcgccaaggacccggcgttcacggagatggcggagcagctgcagaagacggtggtgtccccgcggcagcagcagcagcagcagcaggcgcggcagcagcagcagcagctggacccgcagaagtacgtggcgacgatgcagcagctgatgcagaacccgcagttcgtggccatggcggagcggctaggcagcgcgctgatgcaggaccccgccatgtccgccatgctggggggcctcaccaacccggcgcacaaggagcagcttgaggcccgcgtcgcgcgcatgaaggaagaccccacgctgaagcccatcctcgacgagatcgagtccggcggccccgccgccatgatgaagtactggaacgaccc

SEQ ID NO: 305917 - DNA, 460 bp, Zea mays
cattgactagaagccccgcggtcacgagtaaagaacagcaggaggccaccgctgctataaaaccctccagcgccaccggcgggtcgacaaactccggtgagaagaactaggagggtggtgctctacgacccctagctgcgcaggccgcaggatcaggaggcgggccccctcgcacagtgaccgagaaggcgctggcgaatgaggggaccgtggattaccccagcttcaagctcgccatcgtgggcggtggtggaactggcaaaactacattcgtgaagaggcatctcactggagagttcgagaagaaatatgaaccaaccatcggtagggaagttgataccgaggattacaccactaactcgggggagatcaggatgtactgctgggataccacacggcaagagaagcttggcggcctcaggggcggatactatatgcatggccagtgagcgatcatcat

SEQ ID NO: 305918 - DNA, 321 bp, Zea mays
cagtgcttttaagccccgcggtcgcgagtaaggaacagcagggggccaccgctgctatagaaaccctgcagggccaccggcgggtcgacaagactccggtgagaagtctagggtggtggtgctctacgaccactatctgggcaggtcgcaggatcaggaggcgggcccccttccacaagaccgagaaggcgctggcgaatgaggggacctgggattaccccagcttcaagcttgccatcgtcggctgaggtggcactgagaaaactacattcgtgaagaggcatctcactggagagtctgagaagaaatgtcaaccaacca

SEQ ID NO: 305919 - DNA, 312 bp, Zea mays
  unsure (1)..(312): unsure at all n locations
natgngtacgcgtgggcggacgccgncctcgcaagcggacctttcgtgcccagcgcggagggatgctttggatggctcgaccgtagcggatacgctggcgcatgagttgtgttggacccgagactgcttggaggacccccgctggcgtgcggccgactacgcaaggactactgcaacgtgaagaactgtcatgccatgcactgtggcgagagcagcgactgcaggatggtacccaacccacaggaagcccaccttcgagacacgttgccttcgttaagcttaccccccggggaagaagggcgccaacccaga

SEQ ID NO: 305920 - DNA, 368 bp, Zea mays
gtgtgattgttaatgagatgctcatgaggataaagcagcagggccttgacgttactctcgaaaccctcattgccaccaggcggtcgcctgacgctgctgggactactggcgggcagtggttggcgaaggtcattggtgctgatcacacagacatgattggccctcccttcagaaaaccgaaagggatcctgcgcatgaggagacctgggattgccgcatgttcatacctggcgacatacactgaggatgcactcagagaactactgaaaggaatgcgggcctagcctgagagtatgataggcaactacagccatcgctacctaggaaatactatgctagcgcacaaaccgctagctagtgagagatcc

SEQ ID NO: 305921 - DNA, 406 bp, Zea mays
tcgttttagttgaaacctaacaagaagtcaccagagagagagagagagagagagaaaggggagggggaaaagctttcgagagcgctaaaagggaaaatgcctaatcacggttcgagcacgtggatagtttctttccaagcacttctatccaaacacaactccattgggatatttcatttcttcaagtcccttttgattgtctccttccatgtcaagtttggccgtcctctacctctcttcacattattgtcccatcttatgatgcctctgggggtcttcggtggacatgcccaaacaatctcaatcggtgttgaataagcttttcttctactcctagccgatcgcatatgtcatcgtttctcacttggtccaatcttgtgtgtccacatatccaacgcaacatacg

SEQ ID NO: 305922 - DNA, 331 bp, Zea mays
ttgaatactcgtccgctggcttctactccccctgggaccaagtactactcgggttagggttccttagggcactgcggaggggcgatggcggcggctgatgtggagtaccgctgcttcgtcggcgggcttgcctgggccaccagcaacgagtcgctggagaatgccttcgccttctacggcgagatcctcgactccaaggtcatcatcgaccgggagacggggaggtttcgcggcttcggattcgttaccttctccttcgagaactccatgctcgacgctatcgagaacatgaacgggaaggagctcgacggccgtaacatcaccgttaacc

SEQ ID NO: 305923 - DNA, 349 bp, Zea mays
ttgatacgcgttcggttggcttctcctcccgcgggggttctggatcgggttcgtgaggttctacggggttcggcttcgcgggtgagcggatcgagatggcggcgtcagatgttgagtaccgctgcttcgtcggcggcctcgcctgggccacggacgaccactccctccacaacgccttcagcacctacggcgaggtcctcgagtccaagattatcctcgatcgggagacgcagaggtcccgcggcttcggcttcgtcaccttctccacggaggaggcgatgcggaacgccattcagggcatgaacggcaaggagctggacggccgcaacattaccgtcaacgaggccca

SEQ ID NO: 305924 - DNA, 381 bp, Zea mays
tcggtttttgctctgaccctgtcgtagccatggggtcctcgctcccgcccaaggaagccaacctcttcaaagtcatcgtcaaatcctacgagactaagcaatataagaaagggcttaaggctgcagattccatattaaaaaagtttccagagcatggtgaaacactatcaatgaaaggtttgacgctaaactgcatggaccgaaaatctgaagcgtacgagcttgttcgacgaggcctgaagaatgatctgaagagtcatgtctgtcggcatgtttatggtttgctttatcggtcagatagagaatacagagaagctataaaatgctacagaaatgcattgaggatttgatccagataacatagaaaattttttgtgactt

SEQ ID NO: 305925 - DNA, 391 bp, Zea mays
aagctggtgcccctgcaggtcccggaccgccttttcggggcagacccacgctcgctttgggccaccccatttcgggcgggccgctcggcgaggtcggcgacccgctgtaccctggcggcagattcgaccccctaggcctggccggcgaccccgtggccttggccgagctcaaggtgaaggagctcaagaacgggcgcctcgccatgttttccatgttcggcttgttcgttcaggccatcgtcaccggcaagggcccgctcgagaacctagctgaccacatcgctgacccaatcaacagcaacaggtggtcctacaccaccaactgctgaccctgcaactaaactgaacggctatgctatgcgactagatcgtgttcgagatcggagagggt

SEQ ID NO: 305926 - DNA, 457 bp, Zea mays
ctcacgttttcgacgagagccagctctgccagcagcacgagtacatggcgtgcaccaccctcctcgctgtcttgctgctcgtggctgcgtccgcagcgccggcgcggtcttgctcacctcgcgacctgcaggcgctgttgagcgtgaagcacgcgctagggaacccgtcaacgctgtcgacgtggaccccagcgttgcccgactgctgctcgtgggaccaccttcggtgtaacgacgccggacgcgtgaacaacgtgttcatcgacggtgcagacgacctgcgcgggcaaatccccgctgccgtgggcgggctgacagagctcatgtcgctgaccctgttccggctggcggggctgacgggccccatcccggcctgcctggccgagctgtccaaactgcaggttctgaccgtgtcccacaccaacgtgttcggcgccatcccggagtccctggcgcg

SEQ ID NO: 305927 - DNA, 217 bp, Zea mays
cacgcctatgcgttcgcatacacaagcacatgcgcactttagcaatggcttgtgagggtgaccgccctagggactccaagctactaaaggcacaggcgggcacaaggttggtgatgagctgctacctcaggcgcctgtgactgaggtgcgcacccgtgctacgcatccatacggcgatctacacacacggctgggctgactaaggcgctgagctggt

SEQ ID NO: 305928 - DNA, 252 bp, Zea mays
ctcgcttctgcgtccgctgcgccattggccagctagagccttccagaagagctcgcagttactgcgagcgcgtgcgagagagaggatgggtggcagcggcagggctgctctgctgctggccctggtggcggtggccgcgagcctggccgtggagatccaggccgactccgtgttcggccacagcggcgggtacaccccgacgcccactccggtcatccctaccctgtagcccgagaagccccccacccaggg

SEQ ID NO: 305929 - DNA, 475 bp, Zea mays
tctttttagtcattttagtcaatggatatctattgtttcatttcgaggtacctgccatatttttacattggccccatttggtggtgatgccagtcctgcagccacagaattctcacagtgatgggccccctcttgccccatgtcattcaaggccatggtggtgaaagccatcctttcttatggaccaacagcttcaccaagttccctcaactgtgacacattcggttgtcagtaggataaagaataacacttctggttggctaaataatgtcagcaatgtggctgcttctgcaagtggaaaactattttgaccatctggcgctgtaactgctgctctccataatttcatctaccagggttctttgcccgttccatctaaggctaatgctttagagcatctactggagtattcgccatcttggtcatgtatttcaacatgaacttttaccttcttcaggtcctgagttcttttgtt

SEQ ID NO: 305930 - DNA, 449 bp, Zea mays
acacaattacagtgggggaaggtgcgccggcaggagccgccgcggaagaattggcgggacgaaccacgcgttttttcacacttctggccattacagcaaaccagagaaagcagaagcaaaccaaaggcgggcagcaccatggaccgctgtctcatagagaacaggcggaagggaacagaagcgcgccggaggctatttgaggcaaggcgcgcgtgacgaagcacaagacggaggagaagggaaagtcggaggtgagctccgagagtccgggggacagtcccgatagcgtgctctacctgggcccggtgacgggggcgccccccagctacatgacgggcgagataccgggcgactacggttgggacaccgcggggctgttggcggacccggagacgtagctaagaacccgggagctggaggatattcactcccgatggggcaagctggga

SEQ ID NO: 305931 - DNA, 390 bp, Zea mays
ttctttagaaaggttcccccgcgcgccccaccgctcgtccggacacctgcccggttcgctgcgcccgcgcctgcgcgtccgtgtccccggcgcgcgaggcccccgcgtatacgtcgcccccctcgacgtcgacgacatgggcaactgctgcccggggtcgtcgtcgaccgtggagcccgcgccgacgcagccgccggacccctacggatcgtcgcgccccgtggcttcgcctgcctcggtgtcgccgaccgaggcgcccgcgcccgacaggcccccggtccccataggccccgtgctgggccggaccatggaggacgtgagggccacctacgccgtgggcaaggagcttgggcgcgggcagaacggagttacgttgatgtgcacgcacaa

SEQ ID NO: 305932 - DNA, 566 bp, Zea mays
  unsure (1)..(566): unsure at all n locations
ttagttgcggaagaacagtgcaaatcatcaaacatacagaagaatgaaccttctgtgatagatccatggtctccttctactaggaatactttactggagaaaattaatggtggcttgaggaagttttctggctattataagagtaacaaggtgtactgtggaaaggtgcctttgacttcttcgttgaatgttttaagaaacaagggcatcaagttaggtggtagaaagtatcaaatcaaaggatctactggcactggtgcttttgctaaagtatacaaagccactgttgacagtaatgcggaagaaatggttgctttgaagattcagaatccctcatttactttggaattttacatgtattgccaacttgatctgcgtatatctgatgtcgagagaccaagctttggctacgcacatgaaatgcatatcttctctgatgtcagtgtgttagtttgtgattacctgccgtatggaactctcctggatgtcataaattctcacttagtagtcggtcgatacatggatgaagntctatgcatgtattataccatagagatgcttgacat

SEQ ID NO: 305933 - DNA, 400 bp, Zea mays
ttcttttgtgagccttgcaagctgatctttggtgaggggctcacaaaggagcagaagaatgcttattcagatgagtatgactacagggataagcttgtgcagaagaaccagtggaaggatgtgatcacgaggctaaaggagatgaagaagagggggaaaactgatctggatgattatgggtatgctgatatcactgatgaggacgatcaggatcctactgcagagaacgagtaagatcctttacctgacatggtgctgcctccttcatttgattgggacaatcctacataccgggaccgttatatagagacaacttggactgtcctagtaagacctgctttagatgcgcatggatgggatcatgactgtgcgtatgatggagtgagcgttgaagagacac

SEQ ID NO: 305934 - DNA, 435 bp, Zea mays
gcgtcctcgcagacgcccacgcgtgcgggtgggtctggtcctctgcctcccgactgactgctgcgctgcctggccgcgcggatccttctgcctgatcctgctttggcttggcggctcatggcgatggggagggccgacgttaggcagctggtgcaccgggcgctcggatcaagggccgcgcgcacttgtacaggcggtgagcagatagtgggggtgtattacaaggccggcgagaactgcctcaagaaccccatctatggactgctgcgtaccgggtgcactctggacacgtgggtggctcgaggcggagggccctcagcgcattgtcaccgatgacaaggaaggaccgaactgcgaactggagaagcacattgaagacatgcatgttctgattgaccacctcattccacccaggttatgtcactggagagagga

SEQ ID NO: 305935 - DNA, 361 bp, Zea mays
tcgtccacgcgtccggccggaccgtcacgtgtacttcaggggccgatcttacgctgacatccctgaccgagggtctcacagcgtggacctgccccggtacgcggtcgacggcgctgggtggcgtgcacagagatagcacccgggctgatatgaatgcgggaggagcagatgggggaagcttgggggagccatggcggtagcggtgggagccacaagagcgggagccccaggggcggaggaggcggaggcagccgcagggagcatgacaggaacctgcccataggcaacatgaggcgcatcatgaagaaggccatgccgtataacggcacgatcgcctaggacgctaaggagaccgtgctag

SEQ ID NO: 305936 - DNA, 481 bp, Zea mays
tctaagagtctgcatcaacggctgagccgcaaacgtgctaccaacagagtggcaaacggtggagacgaaatggccgcgcttgacgacctacagcgtgacgagatcttcagcgacgggtctttccccgcctgggcagcttacgccgggtacgccgcgctgaccgtcgtctcagcggtcatcatcccgcacatgttccggcaggtcaagtggtactacgtgatcgtggcctacgtcctcgcccctctcctcggcttcgccaactcctacggcacggggctcaccgacatcaacatggcctacaactacggcaagatcgcgctcttcatcttcgcggcctgggccggcagggacaacggcgtcatcgcgggcctcgccggcggcaccctggtgaagcagctggtgatggcgttcgcggacctgatgcacgactttcagacgggccacctgaccatgacgtcgcccaggtccctgctcgtggcgc

SEQ ID NO: 305937 - DNA, 478 bp, Zea mays
  unsure (1)..(478): unsure at all n locations
ttttgcattcacagttgcacgccggccgccgccaaccccgcccccacgtcgcgcgcgctgtctccctctcgcctctctcgtggagacgactgggcgacagccgacagccgctgtcgcccaacgcaagctgcccaggacttcttcgggctcttcgccggcgacgagcacaggcaggtttaggtcgagcaggggccgatgggggaagaggcggagagcaactgcaagcgcaaggcgccggactcgagcgtggaagagcagccgagcctcgcgccggcgccggcgcagtcgcaggcggacccggcgggcaagcgccccaacatcttccgctcttgcgtccacgaggtagccgccccgaatgggtacgagtcggctaaggacgaggcggtgcacgggacgcttgccagcccggccctcaatggggagatggccaagcagtacccgttcaagcttgaccccttncagagcgtattcatcgctt

SEQ ID NO: 305938 - DNA, 524 bp, Zea mays
  unsure (1)..(524): unsure at all n locations
tgttgcagttgcagcggcctcctcctctgcttcctccctcctcctcctcaccatggtgctggctgcgcacgatccccctccccttgtgttcgacgctgcccgcctgagcggcctctccgacatcccgcagcagttcatctggccggcggacgagagccccaccccggactccgccgaggagctggccgtgccgctcatcgacctctccggggacgccgccgaggtggtccggcaggtccggcgcgcctgcgacctgcacggcttcttccaggtggtggggcacggcatcgacgcggcgctgacggcggaggcccaccgctgcatggacgccttcttcacgctgccgctcccggacaagcagcgcgcgcagcgccgncagggggacagctgcggctacgccagcagcttcacgggccggttcgcgtccaagctgccctggaaggagacgctgtcgttccgctacaccgacgacgacgacggcgacaagtccaaggacgtcgtggcgttctactttgtggacaagc

SEQ ID NO: 305939 - DNA, 276 bp, Zea mays
tgtgctgctctgctgctggccctggtggccgtgagcttgaccgtggagatccaggcctacaccaggtacgggtacacccggacgccgacgccagacaccccgaccccgaaactggagaagccccccgccaaggggcccaggccgggggagccccccaaggagcgcaagccggccaaggggcacgggcccaagccggataagcctgccaaggagcacaggccgacgccgaagacgtacacgcctagcttgaaactcacagccgggggacgtacactc

SEQ ID NO: 305940 - DNA, 286 bp, Zea mays
tcttctcacgcgtgcgtccacgcgtccgtccacgcgtccgctctactcaggctttgaactttgcatttaaggactacttcaagaggttgatcaacttcaagaaggatagggatggctttcgtaggcggtccgttccctcccggacctgacgttgtcctgctgctgcgcctgcggatgcgatcaattcactagtaccgctcgctgaacttggcccacaagggcaacgccttcattcttcacgccggcggggagggcctttacccgggcttccacgccaacaccaccg

SEQ ID NO: 305941 - DNA, 311 bp, Zea mays
gctgtctaggtcgtaagtctttggaggaaatggggctgtatctgaactttctgcggagaacaagggacacattgattgtcgaagtggacgatcttagagatcaacatataatgctcaatgacgatatgtcaagtgctcaggtgagatggcacaatgctcgggaagagaaagtgaaagcttctagcatattggaaagattccaaaaatctgaagaggaatcggtgcttctagctgaggaaaaagaacaactgattgtagaaaagaagctcttagaagagtctcttgatccatcgtccaaagagaaagagagc

SEQ ID NO: 305942 - DNA, 202 bp, Zea mays
ttctgtacatgaaacctgagaacttcctattcaaagtcaaaaaaggaggactcgccccttaaggctacagatcttggtctttcagacttcataaaaccagggaggcaattccgtgacattgttggaagtgcctactacgtagcaccagaagtactcaaacgcaggtcagggcccgaatccgatgtttggaggataggggttc

SEQ ID NO: 305943 - DNA, 439 bp, Zea mays
tggacgcgtgggcggacgcgtgggcttcagtgggaattccagcgacatgcgtggaagaactacggttgctcatggtcggaggccaaagtctaaaagtggccccctggggccttcaggaagacttggtggacagtattcatttgtttcttcagtgtcattgcttgattgtgagagagttgggtctatttcatcaaatttctattttttattacgacatctattgctatgaactttgattaaggaagttttcaatctggactttcgggagtgtatggcgtgctataaataaacagaatggtgaagttgttgctgttaagaaaatgaagaaaaagtattattcttttgaggaatgtatgggtttgcgtgaagtaaagttttgcggcgcatgaatcatcctaacattgtgaagctcaaagaggttatccgagaaaatgatata

SEQ ID NO: 305944 - DNA, 180 bp, Zea mays
tttcgctgaggtggcttacgccgtgtgcaaggaggcgtgttttggccccaagtgggtgaacaccagtgatgggttcggggggtcttgcttccaaaacgacatacttaacctggtgtacatgtgcgagtgcaatggcctgcccgaggtggccaactactggaagcaggcgatcaagatcaa

SEQ ID NO: 305945 - DNA, 349 bp, Zea mays
gcctgcaggctaccggcccaagtaatctcccgtcttaccacaccacgtcttttctacgccttccggggttcggcatctcgcggtgagcagatcgaaaaggaggagtgggatcaagaccaccggtgcttcttccgcggcctcacctggaacaccgacgaccactccctacacaacaccttcaggacctacaggcaggtgcttgagctcaagatcatgctcgatcgggagacgcagaggtcccgcagctccgggttcatgaccttcttcacggaggaggcgatgcagaacgccatccagggcatgaacgggcaggagctggacgggcgcaacatcaccgtcaacgaggccc

SEQ ID NO: 305946 - DNA, 273 bp, Zea mays
tctcgcttacgtgaggagccccatatccgcggcggccttcttgggtttcaggtgggccactagctcggaggtggcacggggtctggcatgggaaccctgctcattgctaagattagacaggagtacccggatcgaacgatgatgacgttctacgtattgccatcccccaaggagtcggacacggtggtagaacactatagcgccacgctctctgtccaccagctcgtggagaacgccgaccagtgcatggtgctggacaatgaggcactatac

SEQ ID NO: 305947 - DNA, 458 bp, Zea mays
  unsure (1)..(458): unsure at all n locations
gttcaggacgtcagtttttcggccctcctccagcgcggtctccacggcgtgcgcgagccccaccggcggcctcgccgtcagcagctgcaggagcacgatgcccagcgcgtagacgtcggacttcatggacaggacaccggtcctctggtactccgggtcgatgtagcagaacgtgccgacgggggcggtgtccttgaccatcgtcgacggcacgtcctgaccgccgccgcccgtgcctgggactgggagcagggtcgacaggcctacgtcgcctatcttgctcaccaggttcccgtccagcagtatgttcgcgggcttcaggtcgcggtggatgatgggctctggctttgagctgtggaggaacatcagagccgncgacacctcccaggccaccctgaaccggtcgaaccaggccagcggcgacgagttctgcttccttcgttgcagcatgtcgtcta

SEQ ID NO: 305948 - DNA, 494 bp, Zea mays
cgatcaatatagaacacatgcccataatgatgaaggacgaaacaagcttcagcatactaaccacggtcatccggaaactgatgccaaaactttgtcacggtcatcccacgccaaatttcggacaacacaagcctaagcttgtgaaaggggaaacaaacaatgtaaaaacagaaaacaccaggatagtcttacagtcaacatctaatctaataatttataaccaatgtaaataaagcctaagctttgccgtacgttgcctcacagcaagtagaactgcgagtacagaagctccctgatcttgtaatagtcctcgcagagggggccctcgatgacgatctgctgggaccctgtgctgccctttaggatagaatcaccaactttgcgcaccatgatgtattcgccacaccgtaaagcacctccggcaaattcaacctgccagcctttgttttccaaaaattgtttaaaatcagacaactttagatcacccacaagaa

SEQ ID NO: 305949 - DNA, 463 bp, Zea mays
ggaataactgttttccattcactcatatattcaggtctagacaattaagtagattccatacttctaaatctcattttgctgcctccttcatgtcaaaatagatcatccaagataaaaaaatgtaagaaaattagaactcactaaaatagccaattctaaccagaagagggtagcaatgctccttgtcataattaggccaggttctatcctcaccagccaccaattttttgtgcagattccagacagtaggaccataattctttatcaactcacaactgagaccattctctttaataattcccaggaatttgtctagagaatcacctcttttggggctcaggaagatggcctgtgaggttgccgaatgcttcagcaaggatttgactgttcgggcaaggcccttatggaattgcttgaaaaatgtgcagtcacttgcaacaatgatgtcaaaagtattcaacat

SEQ ID NO: 305950 - DNA, 264 bp, Zea mays
gggcagaaaaaacgggtccttttatgtccaatcaaagaaacccacaacaagcatggggggccaggccatgcctagctttttacgtacacacggggggggcatgtgcatccctgatgaaaagcatcaaaaaaacaatagtttacgtcggtcaccccacgctgaaggaggggggggccttttcgacgcccttcctggggcccttgaaccaccgtttgtcgccggcctgccccttgcaaatgtaaagcttgccctcggaaacggggg

SEQ ID NO: 305951 - DNA, 340 bp, Zea mays
gaaaacaatacaaaaaaaaggtttcagtaccccaaccatctcacagcctagggtcttgacaacacgtccatacgtattcctcgatgcaatatcgggcaatacaaacaatccctcacacaaaagggtgctaggcagctcataagatacaaggagcaggcctgaacacatcagcaatgctgcctactaaactttcatccagcatagccacttgttcctctcttttttttcctccttccttcaggcttcatcagtactcggacggtgagatgacgtcgtcgatcttaaggatcatcttcaccacctgagtggccagcaggatctgctgctgtttgccaatcag

SEQ ID NO: 305952 - DNA, 449 bp, Zea mays
agacaacaacgaatgaacttgatattgtgaggccaaacaggcagagctccaaaagatggtaagtacattttgtcctaacattggggggaaatggagacgacccaaacctccccaagaccagcgcaaaacagatacttttactggcttgtggtggggcaaaaagatcaacaaatgttcctcatgtaaaagaatcacaatcggccaaagccgcgacactgtaaactttctgctcctcacaccatcctagttacttgtcttgtggcttataacaccacatcctcgatcaagttccttctctggaacgcctcatgctctcgtcgatcagcttgaatgtcttctttacaagtttctgatccagggctgttgttctgtagatcttgaacactcggtcgacacggtcaggcttgctgctttggaagtagagctcctcaaacttcttttttacaaac

SEQ ID NO: 305953 - DNA, 414 bp, Zea mays
gtgccttcgcgtccgcccacgcgtccgcccacgcgtgcgcccacgcgtccgctcgtcgcagcccccaaggccccaactacccccagtctcggaagagaactatccagaagcgcaagactccaaagccgtcgccttcctatccatcccttcctcgccgcgggggtcgcctgagatcacataaacaatggtgaaggctgttgctgtgcttggtagcagcgatggtgtcaagggcaccatcttcttcacccaagagggagatggccctaccactgtcaccggaagtgactctggcctcaagcctggcctccatgggttccatgtgcatgcacttggtgacaccaccaaaggcttgatgtcaactggaccacactacaatcctgcgagcaaggaacatggagcaccagatgatgagaa

SEQ ID NO: 305954 - DNA, 443 bp, Zea mays
ggaggaggtggacaattcacttatattatattctaacatatacatcaaaacatgatctaatatgtcacaaaattacaagctatgtgagttctatttcgctaccatagtagtattgattaatgaacccctccagctaggtgagatgaaaagaatagcacacctctcatactcatcttcgtcaagaggcgattgccaggtattcttcttggatcagtcgcatataagtacacaagaattccaattatcaagctgacaagtgcgaccatcataaatgcaacacgccatcctgggaatccccaatagtcctttccagccatgattgttgccaaaatactaccacctataccacctacagtgccaatgaggcttaacaaaccgaaccctgaccacgcgtaccatctttatagctatcatcaatgaacgactgaagcgctggttttaca

SEQ ID NO: 305955 - DNA, 487 bp, Zea mays
ttgcctatgcgtccgcccacgcgtccgggagataagctggatccagtccaccgtgtacttcgccttctactcgagctccaagccactggagctgctcctggacaggagcggcgagacgcccagatacgtcaaggccaagtccgactacgtgcaagaacccatcccacggcacgtgtgggagagaacatggtcatggctggagaagcccgaggccgggctgctcatcctggacccctacggcggccggatgggcagcatctctccgtcagcgacgccgttcccgcaccggaaggggaacctgtacaacctccagtactactcgtattggttcgagaatggcactgcggcattggagaagcggatgagctgggtcagggggctgtacgaggagatggagccgtatgtgtccaagaacccaagaactggatatgtcaactacagggacctggatcttgggacgaacgagttggaggacaatgtgactagc

SEQ ID NO: 305956 - DNA, 176 bp, Zea mays
gcgtcagtcgaacgccggagctcgacaaggacgaccgacgactcacgcggagatccggcgtactgcaaattttgaaaactgaactgtaagatggcatcagcagagctttcccgtgaggaaaatgtgtacatggcgaagctcgctgagcaggcggagaggtacgaggagatggttga

SEQ ID NO: 305957 - DNA, 432 bp, Zea mays
ttttgttggttgatacatttggtttcggtcggatcattcaagattggctggagcttcggcacaactcgacgactaacccctatcagataggccccgcacctcagcttctatagagacatgagagaatcagctacaggaaacagctcttaatcatgtgaaaacagctggccttcttggagatggttttggcgccacaccagagatgagcaaacgaaacttgatctgggttgtcagcaaaattcagcttcttgttgagcaatacccctcatggggagatactgttcaagtggacacatgggtagctgctgctgggaaaaatggcatgcgtcgagattggcatgttcgtgacgaaaactctggacgcacaatcttgagagctacaagtgtttgggtgatgatgaataagaacactagaaggctttcgaaaatgcc

SEQ ID NO: 305958 - DNA, 464 bp, Zea mays
tctttttctctatgtaggaaggtagaaaagcagtcagctcacttttattctgtggacataacagataaagaagccaaaatgggcttagtttgtagagctcattcaacttctaaaagtaaatttaagttgctgtattttgagcttgaggacaatggtggattaagccttgctttacaggtatgcatgtgtgtatccagcttatcgtttttgttagtgcaaatttaaaaagaaaaagacaaagctctattggtttttggcttatcaactgccattctgccaagcatatgacaccaaacatgtgaaacaaatattttcgtaccaagttcagatcttgttgatttggcaaccttgatggaacagccacgtggctgcagcgcattgactgtgataactgtagtacgtgagtctgaataatgatgttggttatccctgtagatgggtttggcatctgatcattctaaaat

SEQ ID NO: 305959 - DNA, 508 bp, Zea mays
gctggacctttgtttacccaaatcatgcgctgcaattatgcaatcaaagctctccggttctctactgcgctgtcaattttgaaagatgagttcctgcgctccagagattatcctcaatgccctcccacttctcatctgttccagcgtttccgagaattgggatatgcatgtataaagtatgttcactagcatatttgcctgatcatgattttcgtctctactgtggctaaattgcaatcattcacaacttttatctagtatagcgtaatggttaagacttctgagtagcacctttaggtcctaggttcgatccccttgggggcgaattttgggcttggctaaaaaattccctcgctgtgccccgcccgctcccaggttacgtcctacgcgccaccctccggctgagccgttgcagagtgggcggcgatggcctgctagtgatggggggtcaggggtcggggattttttcgaccgggaccatatttcggtctcttcttatataataccg

SEQ ID NO: 305960 - DNA, 528 bp, Zea mays
ccctctcgttctcggacgcgtgggttacaagatagaagatgagcttgatgagaatttgttgcggctttttgctagtggttctaaagctgtcctgaacccaatggctactatgtttggtggaattgtcagtcaagaagctgtgaaggcatgttctgggaaatttcatccactgtaccggttcttctactttgattcatccgaatctctgccaactcaccaattggaccctaaagacctgaagccattgaatagtcgctatgatgctcagatttctgtttttggctctaagcttcagaaaaaactgcgggatgccaatgtctttgttgtgggatctggtgctcttggatgtgaatttttaaagaacctagctttaatgggagtgtcttgcagccgtaaagggaaaattactataacagatgatgatgtcatcgagaaaagtaacttgagtcgccaatttctgttccgtgattggaatattggacatcctaaatctacagtagctgccacagctgctagtgctatcaattc

SEQ ID NO: 305961 - DNA, 511 bp, Zea mays
ccctcgcgtccgatatgaacctaattggctgttaaatatgcatagcagtttgtataataatcgatttcctcaacatattgtagtttcatggttcttgttctcactacttcctccattgtatttatagcccattgctgaagatgggatgcaggaggcctctatcaagtaggtcaattacctcattaacagggacacctcttgttgccccaccacttattgatatgattagcaatgacccaattttttggtaatatatgaacatgattggttgttaaatatgcagagcagtttgtataataatcaactgcctcagcatattgtaatttcttggttcttgttctcactacttcattgtatttatagctcattgctgaagcatgggatgcaggaggcctctatcaagtaggtcaatttcctcactagaatgtttggttagagtggaatgtaaaggtctggacactctatgaattcgatgatctcgagagcatcattgataggacactaaagcgcg

SEQ ID NO: 305962 - DNA, 522 bp, Zea mays
cttatttttttagcgggcattgctggagtgatctcatctaagatggtaatatgatagacatcagtatcggtgctttatatattaagtatctttttgttctttgtgtgaatgttatagcttatgttcctgaaaagttactgcattcccctctctttcagctaatggagattgttagtgcatttggcccattggctgcataccgctttctttttaacaatgagctcggtggaccctgtgcatttcttgagtacgccgaccgctccgttacttctaaggcatgtgctggcctcaatgggatgatgcttggtggacgtgtactgactgctgtgcatgtgtttcctaatcctcatgtggaggctgctaatgaggcttccccattttatggtattcctgacaatgctaaattgcttctgaaagaaccaacaaaggtcctgcagctaaatatgtgtttgaacgagaagagtatatgctactttcaaaatctgagctggaagaaacattggaagatgtacgtgttgaatg

SEQ ID NO: 305963 - DNA, 416 bp, Zea mays
cccgggaccaattccaattcactttcgcgtcacgcgtttactttttgggaaaatagattggctggatggacggtgttgactcaaaggatgttatggctgggtttaataagcactgacggggatggagatccatttactgaatgacgagtagacctgcctaattgtaggagccctaatgaggatgtgcgcagagatccaccaacaacagcggcgggagctcgggtttgaagagatctttttgagtccggactgcccactgtggtactgctacggtggcgtcagtatgaaatggatctagaggctctactacatcaacaccagagggtgccacgacacttatattaatctccatagctactgtgggctggctgccatttgcctgtttacaggaaagttcattgtacctacactggcca

SEQ ID NO: 305964 - DNA, 458 bp, Zea mays
  unsure (1)..(458): unsure at all n locations
atcggcgcggcggcggcggcggcaaagccaaaggcaagatgttcgggcgcgcgccgaagaagagcgacaacaccaagtactacgagatcctcggggtgcccaagtcggcgtcccaggacgacctcaagaaggcctaccgcaaggcagctatcaagaaccaccccgacaagggcggtgaccccgagaagttcaaggagctcgcacaagcctatgaggttttgagtgatccagagaaacgtgagatttatgatcagtatggtgaagatgcccttaaggaaggaatgnggtggtggcgggtcccatgctgatccatttgacattttctcatcattctttggaccctcttttggaggaggatggtggaagcagcaggggaagatggcaaaggaggggagaagatgtagtccactcacttaaagtttctctggaagatctttacaatggaatctcaaagaagc

SEQ ID NO: 305965 - DNA, 511 bp, Zea mays
  unsure (1)..(511): unsure at all n locations
tttacgcgtgggcgcggcatggatcccgccggcgcctctccggcgccggctcccgccgtggaagagcccgtaagcgccacctccattttcgacacccttggcgcggaggtgctggcggtcatgtccccggtctccatctgcatggcccttgtcgtgctcctcatctccctactctcgccgccgtcctccgggtccgcgtcgagctcaccccctccagtcacagctgccactctcgtctacctcgagtcccctaacgactccccgggccagaagctcctcggggcgctcctcgacgccgccgtcttcgtcgccctcgttgccgccgtcacctttgtcctcgttgcgctctactacttccgctgcacgggttttctcaagaactacatgcggttctccgcctacttcgtcatcttctccatgggaggcgccatcgtggtcgccgtgctccggcgcctcgcggtcctgctcgacgcgcccaccgngctcctgctcctctcaacggcgccgctgt

SEQ ID NO: 305966 - DNA, 498 bp, Zea mays
ttcacgcgtccgtctgcattcaaattcactaagtggtaatctcaaggaacagaaggggatggtgttaccttttcaacccctttctatgtgcttcaagaatatcaactactatgttgatgtaccagtggaattaaaaaagcaaggtgtagcagaagaccgcctgcagctgcttgttgatgtcactggagcttttaggccagggatactaacagctcttgttggagtcagtggagctggcaaaaccaccctcatggatgttttagctggcaggaagactggaggtctcatagaaggaagcatcactatattcgggtatcctaagaaccaagagactttcactaggatatccggatattgtgaacagaatgatgttcactcaccttgcttgactgtgatcgagtctttgttatactcagcatgccttcgggtgccttctcatgttgatgcagacactcatagggtaagccttgattggttatacatcacacgcgctttttg

SEQ ID NO: 305967 - DNA, 391 bp, Zea mays
cccattcgtccgtccacgcgtccgcataagtttttagactaatgctatcgttaggaagcatcatgcacagattaagtaattaagtgatgttttttttgtttcaggaattcgagatgaaaataacaacacttataaccctaaaattgtgcgcattggagtgaaggcccttcattctgttaaagcagtttctatggattatcttattcaacaaaaactttctggtgtagatcgcacattagatggtgggagacgaggtgctggtgaatatgatcggattagagcttcaatactggacgaagcagccattgtattttctactctgagtttcagtggatcatcaatttttagcaggatgacccgtgcttttgatgttgttataattgatgaagct

SEQ ID NO: 305968 - DNA, 564 bp, Zea mays
  unsure (1)..(564): unsure at all n locations
ctcacgcgttcggataaattggctttggttaatgtcgaagggactggaatggctggtgtcccaggtacagcaaatgccatatttggtgctgtgaaggatgttggagcaaatgttatcatgatatcacaggctagcagtgaacactctgtatgctttgctgttccagaaaaggaagttgcattggtttctgcagccttgcatgctaggtttcgtgaagcattggcagcagggaggttatctaaggctgctgtcctcaaggaaaatatgaacattgatttgcgtgtcatgggaatagctggttctaggacaatgcttttaagtgatataggagtagatttgacccagtggaaagagaagctacaaactgaagcagaacctgccaatcttgataagtttgttcatcatttgtctgagaatcacttttttcctaacagagttttggtagattgcacagcagatcaaagtgttgcatctcactattatgatnggctcaagaaaggaatccatgtcatcacttccaacaagaaagcaaattcagggccacttgacaggtatcttaaactt

SEQ ID NO: 305969 - DNA, 423 bp, Zea mays
gataaagaatttcgctacgttgctcagagaagctaaaaccactgccttacaggagcaaacaaagtagcaactactgttgacaagactgtcaggtggggcgagattcctacgataccgtctggattgttaaagatgggcctttcttatgcaatttccccctgatctgcttgatctttgcatcaaccctcgcagtgaaaccaatctttgtcttctgcctggccttcgaccgctccctcttccacatcgtctggtcttcaacatctttctttaggtacttgatctcttgaatcacatggtgatcaagtggattgcacgatctctggtaggatatgtgtatcaggagggggatgttgcaggcagcagtcaccagaagcgtcgctgcccagtatatgggagctggcccaaggacttctaataggatct

SEQ ID NO: 305970 - DNA, 491 bp, Zea mays
aatggtttcatttcgccgcccgtcgggaagggagcttcgagggggcccgccgcggtgcgtcggccgggcgggctgagccaatggcacgggccctaggggcgcgaacgccctaacgtgggtcatggcgggcggcgagcagaggccccggatgctagcttggattctgactcagaggcgtccagtcataatccggcacacggtagcttcgcgccactgggttgttaaccaagcgcgatgaccaattgtgagaatcaacggttcctctcacactatgttgaattactatcgcagggcggtcatcagcagggttaaactaacgtggatcacgacggtgtaaccccagctcacgtctcctattggtgggtgaacaacccaacacttggcgaactctgcttgacactgattggaagagccggcatggaaggatcaaaaagcaacggtgctatgaacgcttggatggcacaagccaaatatttcttgtggtaactttt

SEQ ID NO: 305971 - DNA, 525 bp, Zea mays
gtttccactgtccagaacttccatatcacctgcatggaaggtgtcatcaaatttttgagaagtccatgaattatgaccacttcactaaatgtgtcagagctcttatggccttctatagatgcaggcatgctgcatgcagctattcttgaaaactgtttgctgatgcattggtaaagaaagcatacgataactggatgtatgtcattgaatatgatggcaaaggtcttttgaaccctaaaccaaagaaaaagtctgcatccactggtcaagtggagacacatgctcctgcgggtggcccgacttcatatcaacaatacctctcttcgatgagcatgccagggccatcaccatcagggtctgcaaatgatgccatgggtctggaactgggccagttgcagcaagtaacttctcaaggccagacaattcagccagcaaacgtgggatatggtgattggcccaggaaccgtgacagtcagtatcctgatgacttcactgaggacattcgcgttaagagccaccagttgc

SEQ ID NO: 305972 - DNA, 479 bp, Zea mays
tttccggttggatcttcaccgggttcggctccatcggccgccgccgcgcgctgcgccggacatggctacccgcggatcgccagggtctacttcggttggaggaagctactggtctggcattccggttcgtgattggaaaaagcaattcaaagaacaagatggccgctcttaatagagaagttgaagaatatgatgattttgcgcttttagatctcgaagaggagtatagcaggctcccgtacaaaacgttagctttctttaaggctgcctatgcattgtttgattctgatttctatgttaaagcggatgatgacatttacttgcgaccagatagactttccttgcttctggttaaagagcggtcacatccacaaacatacattggatgcatgaagaaggggcctgtttatactgatcctaagttgaaatggtatgagcaccaatccttttactcggatagaatacttttttatgcatat

SEQ ID NO: 305973 - DNA, 420 bp, Zea mays
tcgcccttgcgtccgcgacatgagcaagagacccagagggaagcggctgtctggcatctctgagaccgtggcgccagggaaagggaagcacgcgcggccaaaggcaggcacaaagaaaaaggccgaggctgcatcggtggcggccgccgctgctgctgccggccataacaccgactacatagacgttcgggcccgccgaggccaggccaccataagccacagcctcttcgagcgcttgaggagggagaggatcagctagcggatgccgcacctgcaggagcttttgcccgggttcagaaaggtcacggtcaaggcctgcatgcttgacgagatcatcaactacatgcagtccctgcagaagcaagccgagttcctgtccatgaagatcgacgctttcaacccggtggtgagcttccacat

SEQ ID NO: 305974 - DNA, 538 bp, Zea mays
ttattattcgcattttatcctaggagtagttctggtctagtttaggtttagcctcccaatcctcaaattcttcgtctcttttcggctctacgtcattttggaggagttttggtcggccgccccggccttgaacaccacctaggatctctcctccccgccggggtccctcccgggggcgatatccaggccccgcgggcaatttccgccctctgtgtgtacgcgcggaccgtccggcccccagggcgcggaccgtccgaccgccaggcagagaagccttagccgcgcaccaggccgtggaccgtccggccacaggccgcggacagtccgcccctgcgcagagagcaccaccgcacctcgcaccaggccgtggaccgtccggcccctgcgcgcggaccgttcgcccttgtgcagagagcactcgcgccggtttttcttgagtgtttggcgctccaaaaaggcgtcaacatactttttggcgactccggtggggacaacacatatagacctatcaaatcggccctcaatgggccgttcaaaa

SEQ ID NO: 305975 - DNA, 316 bp, Zea mays
catttctagtcttagttgccaggcttcaacataagaaccttgtgaggctcataggcgtttgcttggaagaagacgagaaactacttgtgtatgaatacatgccaaacaggagcctcgacaccattctttttgattctcagaaaagcaaagagctggattggtggaagagactcgagattgtgagcggagttgcacggggcctgcaatatctccacgaggagtctcagctgaagatagtccatcgagaccttaaaccaagcaacgtgctccttgactctgcttacaccccgaaaaatataaattttgggctagcaaa

SEQ ID NO: 305976 - DNA, 308 bp, Zea mays
gagccttcgaacccctgttctacccacctcacgagctccggagcctgttgctctagctcccgttgcccattgtgacccggcatggacgaggacgacgcggacggcgaggcatgctccggcggcttccccgtgagtagctcgagcaacaggacgccgaacgagtacacgtcggacttctggctcggcggctgtgcaccccccggcgcgcgtgcctcaggggcgcgatacgcactgcaggatctgtcccttagagcggcaggtctggcatacgggagcccgctgcccatgatgccgtcggagcctgccac

SEQ ID NO: 305977 - DNA, 242 bp, Zea mays
tcgccgcagctggcgatgaggaagagctgagccccacgtcggccgcgccgtgcctctggctgtccgtgagccggatgtggctcaggaacccgacgcccaaggagaggccctccttctccgccagcttctgcacggtctcagggttgatcagggaggttccggacccgcagtccttcacgttgaacgcgaccgctgccccgcggtcgtacttgatcttcggaccgtatatgtagacgaggggg

SEQ ID NO: 305978 - DNA, 384 bp, Zea mays
ttcttccggtgtcatcacacatgtcaggaggtggagcatgtcgtgatcccacctcatgtgccgccggaggtggagcatgaactaccagagccagagaaggctcaaagagacatatttgccttctttcgaggcaaaatggaggtgcaccccaagaatattagtggccgcttctacagcaagaaggtgaggactgagcttctacaacattatggtcgcaaccgcaagttctaccttaagagaaagcggttcgacaactaccgatcagagatggctcggtcattgttctgtctatgtccgctgggatgggcgccttggagtcctcggctcgtggagtcagtcctcctaggctgcatttctgttataattgctgataacatacgtatg

SEQ ID NO: 305979 - DNA, 349 bp, Zea mays
ttcgtccgccttcgcgtccgggctgctctgctgctggccctggtggccgtgagcctggccgtggagatccaggccgacgccgggtacgggtacaccccgacgccgacgccggccaccccgaccccgaagccggagaagccccccaccaaggggcccaagccggagaagccgtcaaaggagcacaagccgaccaaggagcacggtcccaagccggagaagccgtccaaggagcacaagcctacgccgtccacgtacaccccgagccccaaacccacgccgtcgacaatacactaccaccacgacgccccccaagccgacgccacccacatacacttccggacctacgtgc

SEQ ID NO: 305980 - DNA, 358 bp, Zea mays
ggcaaccgagcaggaagttgaggaggatcccgtcctcccagtctagagcagccgcttgcaaagcgcatcggcggcacggccgtggattccgcgaatctgccaccgcttgctgctgcttctgagactgacaccgccatcgcagctgatggggatacccagcgacggcgacgacgtggtgcaaatccggcacgccgacgccgccggcgagcccaccgtcgtcaccgtgagctgccccgacaagacaggactgggctgcgacctgtgccgggccgtcctcctcttcggcctcagcgtcgtcaagggagacatgagcaccgacggccgctggtgctacatcgtgttctggctgttgccgcgc

SEQ ID NO: 305981 - DNA, 142 bp, Zea mays
cttctcttcttatttggctttctgtaaaaacagccgcccccccacggctagaagcaaattatttcagcccaatttggaaaatattaaaaatctccaccctacatcggtcctgggggcacctattaacactggcctaaaaggc

SEQ ID NO: 305982 - DNA, 321 bp, Zea mays
aatgagaaaacctagcacatcgttagccaataggtcaaaagtcaaaaccaatctgatggtccggtcagtttcgaatatgacagtcatgccagggcaacaacagacttttagccccgcacaacacaacagcaaacgaatcgaagcctatttccgagagcgacggatcatgtcgcgctcagtgataacgcgatcgcgggtgatatctttcagcgacgcgcagccgctcagcgccatggtgatctcgagctcatccctcagcatccgcagcgcattccttacccctgccctgccgtccacggggagggcgaacagtacgggcct

SEQ ID NO: 305983 - DNA, 520 bp, Zea mays
cgcttagtgaaggatgtacagtggaaacttccttgttaaccttcttgggaagtggaaggagtctgaatactctggccattctattcctgttggtggtcttgcttactatgtaactgccccatcaaggtgaaaagctagttccttcattggggactggggaggccttctcgccatgatcatttttgttgtttttgttattcaataattaggtattcttttgactaacaatagcacattggaaaccacgcagtttggctgatgtccttgcaaatccattccatgcactgttttatgtggtcttcatgctgtcagcctgtgctctgttctcaaagacatggattgaagtttccggttcatcagcaaaggatgttgctaagcagctcaaggaacaacaaatggtgatgccaggccatcgtgagtcgaacttgcagaaggaacttaaccgatacatccccactgctgctgcatttggtggtgtatgcattggcgcattgaccgtcctggctgatttcatgggtgc

SEQ ID NO: 305984 - DNA, 535 bp, Zea mays
tcgcccttgcgtccgcgctgtccaggatcttggagaagtaccagaccaactccgggaagattctgtggggtgagaagcacaagaacctgagtgcagagatcgacagagtcaagaaggagaacgacaacatgcagattcagctcaggccagtgtttctgattcagatctgctcccgatctctagctgcgcgcgcacttcactagctcgctgttcgtgtgtgttcttgttgtgattgtgctagcgtgtccgtgacctgtgacggtgcaggcatctgaaaggcgaggacctgaactccctgcagcccagggagctgatcgctattgaagagggcctgcagaatgggcagaccaacatgcgcgagaagcagatggactactggaggatgcacatgacgaatgggaagatgctggaggacgaacacaagatactgacttttaggatgcaccaacaggctgttgatctgagcggcggcatgagggagctggagaccggataccatcaggtccagcacgacagggatattattttccagatg

SEQ ID NO: 305985 - DNA, 466 bp, Zea mays
tcgcggtcgcgtgggcggacgcgtgggcggacgcgtgggcgcgcgctagcctagctgctcctgcctggttcgccgaagcccgtagcccgtagcacaacaacaacaaaaaaaatctccgcggcgcggggggaggtggtatgatcaccttggggagcagcggcgggccgcctgccgagaaatgcccggaggagccttcctcctaaacggcagcggcagcggaatggcggactacagcggcgggctaaccgaccgcgtggtagtgacctgcctcatggaggcctccggcggcctcatatcaggctacgacattggcatctgaggaggtgtggaggagatggaggatttcctgaacaagtgcttcccgggattggtgaagaggactgttcgcgccaacaaggacgtgtactgaatttacaacaaccagtctctgacggacttgacattgtcgatgtacgcgttcggcatg

SEQ ID NO: 305986 - DNA, 394 bp, Zea mays
ccctcgcgtccggcctcccctgcccccgcttgctatcgcgcgccagatcccgatctcgccgcgatccatggcgtcgtcgccgcagcagccgccgccgttcgccacgcaaaaccctactgcgcagggtccaggccaggggcctccagtctcggggacgggggcactccccggggcgttctccaatctccagatctcccgcggcgcggccccgccgcccggtgccccgcgggggctcacgcctcagcaggcaccgcccgccttcgccgcgctttcgggtcctccaccggctgcagcccggcccttcttccctggcagcccgcccgcaccgccgttcgtgcgggcgccgacggcggcagcttccgtctcgccgcccttcggcggacaaccgggggta

SEQ ID NO: 305987 - DNA, 536 bp, Zea mays
cgcctgcctgtttacaagcctcccccctcccctccccgtgcctccctcgggcctcgcttctcgcgctcttcctctcttgcctccgcctgcctccaggctccaacaacccgggagggcgccctccgcccccgcctccgggagcgatgatgatcgcgcgacgcctgctccgatccaataatgcccccgcccaggcaaccagtttattgaagcatgtaactggcaccgcaagtttgcaaggcaatgcggatagcttgttggatggtacagacagacattttggctcagcaccgtctgtccagcctgaagaaaatgggttcaagggccacggcatgctggcgccttttacagctggctggcagagcaatgatttgcaccctctgatcattgagagatctgagggttcctatgtctatgacattaatgggaacaagtatctggacactcttgcaggattatggtgcacagttttaggtatgtgcacgcgacttttgtgtttgtttctggggcttaagcaatgatcttgcaccctgtacttc

SEQ ID NO: 305988 - DNA, 455 bp, Zea mays
acgccctcgcgttttttaagcgcttcgtgatcacattctttgaggcacctgtttttgtggaccctcatgggcgtggttagcgtgccctctccagggcccaaattgactctgttttggatcttgcacggcgcacaattgtttttgagcctctccaacaaggatttcgacttatatgtcctttctgagtcaagcttggttatctatcctccgaagattgacatcaagacctggggcactaccaagcttctgcttaccattccaagaattcttgagcttgctgaagagctgtctatgccacttgctgttgtaaagaactcccgtgggacgttcaattttttctggcgcacaagccagtcccccacaggagcttttttgaggaagtttgctgcacttaaccgttactttggcggcctgaaatctggtggtaatgcctatgtgattggagatccaccaag

SEQ ID NO: 305989 - DNA, 586 bp, Zea mays
cggtttgatgccattaatgctgtgtctttggccatcgaagatgatgctgacaatactgttgatgttcatgtgtttatacgtggcaacaatgtcaaatcacataggagaaatctggatggtattgctggctgtaatataaatgtcttccctgaagaaaaggacgttttgaacaatcttattagtgcaatatgttcaattgatcctgatatcctagtcggatgggagattcagttaggatctttaggatttcttgccgaaagagctgcttatctgggtataggcttactgaaaagaatttcaagaacaccacatgagttgaatcatccacctaagatcccagttgataactctagtcaggtgctttctgaaacatcttctgcggatgatattattgatgatgtcagtgagaatgattggagccatactcatgcgagcggtatacatgttggtggaagaattgtgcttaatttatggcgtctcatgcgtgcagaagttaagcttaataattactcccttgaagctgtagctgatgaagtactgaggcgaaagataccactgataccaagcaggatattgaaccgatggt

SEQ ID NO: 305990 - DNA, 288 bp, Zea mays
gccggagggcggcgcgttagtcgagccggcggcgggcgcctcggcgacggacccgcccttggccggcttcctggcggcgggcggcgcggacgccgggggcttgacgccgaacaggtcgttggccagcagcacctggtcgacggagtagacggcgaggggctgctgcgcgcgcagggcctggccgacgcgggtggcgacgaggcccgtggacacgttggcctggccgctgctgtcggcggtgatgttgagcgtgtagggcccgtcggagcccgacgcctgcgtacgcac

SEQ ID NO: 305991 - DNA, 371 bp, Zea mays
cggtttcgtgttcggacgcgtgggcggacgcgtgggcggacgcgtgggcggacgcgtgggcgagcacggaatggtggtcgcagccgcagagtcgcattgcacggtggagtggaggtgttctgcgcgccgtacccccgggttattaggttccgatcccatccccgtaccgtttttgctggcctctgtcgcggggtcgcatcgcatgccttcatgccttggctggcagcatttactatttatccgaggtgtgggtgggggcgttggcggtaaccggcaacactcgtctaccttacactttctctttgtgcgtgctctactctcctattctttctgaccccggtatctacaactgttggagtatgtcctggttg

SEQ ID NO: 305992 - DNA, 327 bp, Zea mays
aatgcaaacatcaaacttattcatgatttgtcataggtggtgggtagtacgcacacacaacacaaccggtccattattaaaccaacactgacacgactcatgacacgaacagcagatactttgacaacctccatatggagagagggcaccagacgacgcaggcacatcggcagcttaaacgacccatgacttactgaccaccacggagacggagcacaaggtggagggtgctctccttttggatgttgtagtctgctagggtgcggccatcctccagctgtttgccggcgaagatcagacgctgctggtccggggggatgccctcct

SEQ ID NO: 305993 - DNA, 338 bp, Zea mays
gaaatactacagtatactttagtcatgacaataccgcagtttacaataccgcagttttaaaaactgaggtccagacttaagtttagaatagcttaaaactactatagtatttgcaatacttcagttttaaaaactgagattttagctagcttgccaaacaccattctgtatataatactgcagtatttgagaatactgcagtattctttcaaaactgtagaaaaactttgttcccaaacaccccctaagttcccgctgccgatctgccaccccggatgagccttataatttatattataattgatagcaggagtgatggtcgggtggctgccttgatg

SEQ ID NO: 305994 - DNA, 448 bp, Zea mays
cgtccggatccctcccaccacatccatccccttcccttcccttccctcgtgccccgccggctctccagcgcgccgtctttgcccagatccaggagatatgcctcgctatgatgatcgctatggaggcacgcgcttgtatgttggcagattggccccccgtactcgttctcgtgatttagaatatctcttcggcaaatatggaaggtaagaacagtactgtgctcaagaggttgccaagagtatccagtagtagtgaatcttacaatgctttacttcgtccaaaaaatgtgataatttgttataatggtaaacgtaagttttgtgctatgagcctatagcttctcccctatcgtgggcagtcgtgtcagggtacttgatttctgtgaaacattcaggctgtcattatgtctggtctgtagaaagtgctagtgtgaatgttctgcttttt

SEQ ID NO: 305995 - DNA, 424 bp, Zea mays
tcgtccgcccacgcgtccgacgaggaggagctccagaaggagaacatcaagaacgccgcctcctccaccggcaacatcacgttgagcgtcaccaagagcaacccggagaccggcgaggtcatcggcgtcttcgagagcgtgcagccgtccgacaccgacctcggggccaaggcgcccaaggatgtcaagatccagggggtctggtacgctcagctcgagtgattcgagtgtctaactgctaggtgtccgaccgccgtcatggatcttgggaaggtgtatgtataccatggaaaactttggagagcagaggaggaatcgtgtatgtaatgtacttgttaatgcaaattcgggctgtcgcttttttttcaaggggatgattggaatgcgggcatgtgattttcgtctggactggtggaaaactcat

SEQ ID NO: 305996 - DNA, 302 bp, Zea mays
ctgcgacgaggtagagcgtgcttaataaatttccccatcaaggaatactctgttgagatctatgaatggtctggaacaagctggaagccatatgttgctgatgatgtgcaactccagtttttcatgatgagtccttatgttctgaaaactatgtcgaatgacaacaagggtttatactcaacatccttcaaagttcctgatgtctacggagttttcaaaacaaaaggactcatccagaagactatgtatactgacaacgacgggttcatactaaacatccttgcaaccttccggggtttacg

SEQ ID NO: 305997 - DNA, 437 bp, Zea mays
ttcttgcgtccgcggacgcgtgggctgctggggcgtgctggcatccttttctctctctttctcttcctctttctcctggcctctcttcaattcggctcctagtagcctgccgccatcacatctcgccttccatataacgagcgatcatcgtcaaggatcggtcggcgcgcgcgcgaggccaacggccggctggggttttagcttgctagctcctggcgccaggctatcccggcatggcgaagcagtcgtgctgccacaagaagaagcttaggagagggctctggtcccccgaggaggacgagaagctcatgaaccacattgccaagtacggccacggctgctggagctccgtacccaagcttgcaggcctcgacaggtgtggcaagagctgcaggctgaggtggataaactacctgaggccagacctcaagaggggc

SEQ ID NO: 305998 - DNA, 458 bp, Zea mays
ggccaaagaatatcttgtttctacagcttcaaatatacagcatagacaatcatgaaagcagaaaagattccagattccaaaaaaaaaataaatcaaatcctgacactctacattcctccatgaacaggtgttttgttgcatacaattgtgccatcagttaatagcaattagcaaacaaatgcacttggatttttctttctttcaaccttacaagaactatgctcaaacattctgtgtgactcctacagcgacgctgccatgcctgctttcatcttggcgggttacatcgttgagctcgccttctgcccatatagcatacgcctcctcaccatgtacagcatcatccccgataagcagctgtgcatcaggaattcggaggggcaggactaggccaataagaacacagattatggaagtgataacaatgttccagccaatgacgaagagtgcgccagcga

SEQ ID NO: 305999 - DNA, 442 bp, Zea mays
ttcacgcgtccggttagggtttctagtgcgcggcgcggggctcgttcgttcgcgctgatgatctgattgggaacacatctacatctgttgatatgatgagctgagcacgcaggtggaagggcccggcggcggcagcagcgggggagaaaggaggacggatgaaggtgaggaggaagatgagggaaccgaggttctgcttccagacaaggagcgacgtggatgtgctggacgacggctacaagtggagaaagtacggccagaaggttgtcaagaacagcctccatccaaggagctactaccggtgcacccacagcaactgccgcgtgaagaagcgagtggagaggctatcggaggactgccgcatggtgatgaccacctatgagggttgccacacgcactccccctgcagcgacgacgccgacgccggcggcggcgaacacac

SEQ ID NO: 306000 - DNA, 267 bp, Zea mays
accgaaaagaaaaatcccgtatcacttaagggttgccaggagccgcaataacattgaaccgcccggctttcacggggcccaaaaaaataacccccacaaaggccccaaccacccacaaataaagtttaaggggacacaccggaccaagtgacgataactctggggagaaactgggccagccaggaactggcgcacactcaagactggcaacaaaccgtttagaccacctcctcaatcttggggccagggcccccgttgccggaaggg

SEQ ID NO: 306001 - DNA, 410 bp, Zea mays
tctttcacgcgtccgcgctcccctacctctccagggtcctcctgtctccgtcgtctcgtctccgctcctcacctcgccagccatgggcaagatcaagatcggaatcaacggtttcggaaggatcggcaggctcgtggccagggtcgccctgcagagcgaggatgtcgagctcgtcgccgtcaacgaccccttcatcaccacggattacatgacgtacatgttcaagtacgacaccgtgcacggtcaatggaagcacagcgacatcggcctcaaggactccaagacgcttctcttcggcgagaagccggtcaccgtctttggcatcaggaaccccaggagatcccgggggtgaggctggtgctgatatgttgtggagttcaccggtgtttttactgacaagggcaaggctg

SEQ ID NO: 306002 - DNA, 546 bp, Zea mays
cctgctgccgcccctccgttattgccgggacccacgcctcctctttttctaatcagagaccctggtgtctctttctggtttaaccgacatgctggcgaaggagatggtggtgaaatatgatcaggtggaatggattctattcactacaggggcgatcacacctatgtcccagtcactcagaagggatactggcagtttaatatgggtgatgccctggttgatggaaagtccactgggttttgtgctggtggttgtgcagcaatagcagattctggaacttccttgcttgctggccccacagccattattactgaaatcaacgaaaagatcggtgctgctggtgtagtcagccaggagtgcaagactgttgtttctcaatacggacaacagatcctagatcttttgctagctgagacgcaaccagcgaagatctgttctcaggttggcctgtgcacttttgatggcactcacggtgttagcactggaattcgtattgtagtggatgaccaaagctgggaaatcaaatggcggtctcaagagtgatcc

SEQ ID NO: 306003 - DNA, 295 bp, Zea mays
attgggagcttggccaggaaagaaaaaggggaatgtacccatttttattcatccattctaataaaaagtacccaaactgttttttaatgtatggagcaagcgtttgagtggatatctttaagagccaaatccttttattgcccacccaaaaaaaaaaatcgtcactggcatatacaaaatggaattgaaaagctccaatttccataatggtatcggggaaatacccagggaagaatcattcttttaatcatgcacatctatcaatttgcgaattcaataaaaaacggactgatcc

SEQ ID NO: 306004 - DNA, 351 bp, Zea mays
tttgcctttctccaatggattctaacagcgcagaggtaggcatctttatcagatttccatttctatattagtttagtttagtaaagccccttttttaaatcctttcacgctttccctttgccgaaggccggcctctttagttcctacgttttcggaaaagaaggtgagacgctagctagcaacgggaaaaaacgagtagttaaagatgtgaatgtaagactactcgaaagtacttccatttttattatattatatagtttctaatagagagtacagttgtatctatgtgcgaaacgacgaaagaaagatggaaggcccaaagagctctacagtagtgccccggaatggggt

SEQ ID NO: 306005 - DNA, 433 bp, Zea mays
ttttcacgcgtccgcccacgcgtccgggagctctcattgccatggcaatggtaatgatccaaacgaatgaatcctttgattctcgtgttggagcatttaggcgtcagttggagaagatcattcttgacaaacatgaggacaccatgagcaagatgggtgccatactagcttctggtgtccttgatgctggtggtaggaatgttacaatcaagctcctttcaagaaacaagcatgacaaactcactgctgtgattggtcttgccgttttcagtcagttctggtactggtatcctctcttatattttatcagcctggccttctcaccaacagccttcattgggctcaactctgatttgaaagtgccaaagtttgagttcctgtcacatgctaaaccgtctctctttgagtatcccaaaccgacaactcagcagac

SEQ ID NO: 306006 - DNA, 540 bp, Zea mays
tttcacgcgtccgcttatctgcaaaatcttgacttgtcacgcaactccatccaaggaccaattccagcatcatgggctgacctacctgtttttaatctgtctctccagggaaatcgtatatttggaaccctgccgaaggagcttggacgcatgcccaagttgaaatctatacagctagaaggcaatcagcttgcaggttctattccaccagagctgggtaacatcatcagtctgcagagatttttcatttctgcgaataacatcacaggagagttgccctcaaccttttctaggctgacaaacatgacagattttcgtgttgatggaaacagtatctcagggaaaatacctagtttcataaagaactggcagagcgtcaacagaatcgatatgcagggtaccttgatgagtgggcctattcctccagaaatttccttgttgaagaacttgacagaactgagggtgactgatttgagtggaccaagaatgaaatttcctcccttacaaaatgcactacacctttacgaagtggttttaaga

SEQ ID NO: 306007 - DNA, 337 bp, Zea mays
ttcacacgtccgaccacgcgtccggtttggcggggcaagttgcatggccccacgcgctagggccgctgtctacaaggttctttacaggcttttcggtggttacgtggatgttgctgttgcaactatcgatcaggttgttcaggatggtgttgacattttcaacctttctgttggacccaattgtccaccaacagctacaaggactacttttttgaatccttttgacgcttgcactttttttctgatgggaaagctggggtatatgttgcccaagctgtaagaaatggtggaccattttcaaaacactggtgtattttagctccatgtattacccaca

SEQ ID NO: 306008 - DNA, 449 bp, Zea mays
gcaatgacagaaaaccatgggcgccctgttgctcttcgccgtctgcctgctggcgccgatcgtgctggcctgcgccgtccgtggcaggaagcggcgggccgccgcgccggcgccggcgccggcgtgcggcaagaaggcgctgccgctaccgccggggtcgatggggtggccgtacgtgggcgagacgctgcagctctactcgttcaagaaccccaacgtgttcttcgcccggaagcagaaccggtacgggccgatcttcaggacccacatcctgggctgcccctgcgtgatggtgtccagccccgaggcggcgcgcttcgtgctcgtcacgcaggctcacctattcaagcccaccttcccggcgagcaaggagcgcatgctgggcccgcaggccatcttcttccagcagggcgactaccacgcccgcctgcgtcgtcttgtctcccggg

SEQ ID NO: 306009 - DNA, 418 bp, Zea mays
gacaccaatcacgtagtatatatattacaatatacacgtcatgatagccttacagtctaacaacgaccaacattgtacactggggtacacctacataaaagcacatcttgtttttgcgcactcaccaccgacgcaacctgttttattcctcacaatgctatacgtactatatatatacacacacggactcaattgtctttctttgcacgaaggccacgatggtactcaccgagagcccagatggggaacaagttgcggtagcttgggtaattgaagtagaggctgcagttgaagcatcctacatgctcttgctgaggaaactctcctgtctccagttgcatgtagatcaattcctttgcagcacgatgtaatggcgttggatctcgttcaaactgtccagcataaattaaagcgagca

SEQ ID NO: 306010 - DNA, 408 bp, Zea mays
caagaagaaaacatatttgggcatttgtaactaaactgcggaataacatcgttgactatgtaatcatttactaacatgtaaaccctctctgttgggtgcacagcatcgtaaaatacataggatgagatatttttgcaggtaggagtgaatgcattgcacaacagagcaacctctctgagcccagtcccacaacatcctcgtgttgtctctgtaaatccatatttggccgggttctccaggatttccatgagagctctgtatgcatccacgtacacaattctgcttccatggagtgagccttgcaactttgcaagaagtctttgaagtttagagttgtagacatgagcatcccagttttgctcatccacacatgccctgtcagggtctccgctcaacgtgatttggata

SEQ ID NO: 306011 - DNA, 509 bp, Zea mays
gctgttccctgatctgtcaaaggattatctggacctcatccagaaccggaccaaggaaaggagctataccttcgatcatgtgtacgcgcctgggtgctccaattcggacgtgtataagaatatatcctctacaattgctggtgtagtccaaggccttaacgcgacagtctttgcttatggttctactggaagtggcaaaacttacactatggttggaacccatagcgatcctggtctgatggttcttagcttccgtacaatttttgagctgataaaaaaggacgacagtaaggatacgtttgaagtttcatgttcatatctggaagtgtacaatgaggttatctatgatttgcttgagagatcctctggacacctggagcttcgagaagatcctgagcatggcataatagttgctggattgagacgcattaaggttcattccgcagataggattcttgagctgttgaacataggcaacagtaggcgcaagacagagaggtcagaagcaa

SEQ ID NO: 306012 - DNA, 459 bp, Zea mays
atcaatatattataacattatataaatgtatactaaaaatattatatgtataaacggaggcccaattgtttatgttggccctagaccactgaaatctcagcttcaacccacagcattagctggttgcgacagcgaaacgagggaatagcgagcgcccaacgaatcccagacctgcccccagaccacatggcatggcactgcacgatctgtgggcgaggcggcaccagccaggaagccacggccttggagaggccggatcctgctcgggcggtcaaccgatcacgacgggcgggatgaacaccagagaagcaaccatgaattccatgccgtccaagtcaaaacattccagcacaacttcgctctgcatgatccacatcacttttgcgtcacaggaaatagtcaggtgtcctacgagttacatctggctctccccttcttggggctggctcaaactggatg

SEQ ID NO: 306013 - DNA, 550 bp, Zea mays
tcgcacttaccattgcgagagatcatcagaggaccgcgtccaatcgaagcggagaggaggagaagggtgtgctgatggcgacggcggtggcggccacggccgcggcggcgggtggcagcaatgtcgagttcatccgcgcgcgcagcgacaagcgggagtaccgccgtgtggtgctcgcaaacgcgctcgagatcctactaatcagcgaccccgacactgacaaggcggcggcgtgcatggaggtcgaggtgggctcgttcagcgacccggagggactcgagggcctcgcgcacttcctcgagcacatgctattttatgccagcgagaaatatcctggagaacacgagtatacgaaatatatcacagagcacggtggctcttacaatgcatatacaagctcagagacaacaaacttctttttcgatgtcaatgtggacaattttgaaagagccttagattagattgctcagttcttcactaagccactgatgtcacaggatgctgttcttagagagataaaagctgttgattctgaacacaagaaaaattg

SEQ ID NO: 306014 - DNA, 323 bp, Zea mays
ttcacgcgacttaggatgcgcggggtataaaccacgaccgggtggtacggcgcacgggacttctacaccacataagtcctccggaagccagccaggtcacagctctactacatgcttggcaagaaccgatcgaagatgagctacggtgtgggtttaagaaacaagtaccccaagcgccctcatacagaggcgcggctgtacgctacaacggagagaagaatggtggcaaaggacgttacaagcggagggacacaacgaatgcagacgctaacactactttgcggagcaatggtggctggccccaacaggtgcgagggctacaa

SEQ ID NO: 306015 - DNA, 399 bp, Zea mays
aaacataacgaacaaattaaacgtaatgaatatattcgttcgtttccaggcacacatttttgcgcagttcaaagattacacacgactagctaggatacaatctaaggatacaagaatagttcgacgacacgtctcaacaatatggtgcgctgtgcggaggttaggttcagttattcgtcggggctgacttgttgtacgagcatcctttcctgttgcacaccgaacgaaacgggtagttcaggttattgcactctggacaggtccagcttccttcaggggcttccttattgtccttcctagatgagctcgtgttagctccaggagttggcctcggagctccacatttcttcatgttgcaagtgtttctgaaggaaaagttaatgttgtcgcatttgggac

SEQ ID NO: 306016 - DNA, 416 bp, Zea mays
  unsure (1)..(416): unsure at all n locations
cgccgtttccggattgccttatgcgtttacccattcgtccttttgtnaactgaaaggagttggcgcgccgacgtcgcatccttagatcagaggcgagcaaaaaccacaccactctactgacacccggtgagcagtgtaacattttgcttcaagcatgggaaaccgagaagactcacagcaccagtggggtgattggctatgggaaatctggcaagtgggccaccactgggcacccgatctacaagctcggaggtgactgacaagcgagtgaatgagaggcatcagaataggctgccgtgatgaacaatgtttaatttaagtatgcgtcggtgcttgacaagaataaggctgagtgtgagacacgtatcgcaattgaaatatgcctgtggaagtaccagatcaccaaggcgtctgac

SEQ ID NO: 306017 - DNA, 488 bp, Zea mays
tttcacgctttcgccttttcgtccgcccacgcgtccgctcacgcgtccggccacgctttcggctgaggaccctgacagcaaggttgtttgcgagacctgcaccaagatcaacatggtcatggtctttggtgagatcaccaccaaggccaatgtcgactactagaagattgtcagggagacatgccgcaacattggtttcgtgtcgaacgatgtcgggcttgacgctgaccactgcaaggtgcttgtgaacattgagcagcagtcccctgatattgctcagggtgtgcacggccacttcaccaagcgcccctaggagattggagctggtgaccaggggcacatgtttgggtatgcgactgacgagacccctgagctgatgcccctcagccatgtccttgccaccaagcttggtgcttgtctcacggaggttcgaaagaatggaacctgctcttggctcatgcccgatgggaagacccaggtgacagtgg

SEQ ID NO: 306018 - DNA, 484 bp, Zea mays
ttcactcgtccgctccgctgggccaccagctttgaccgccgcctcccttcccctccgctactgctcctccccaccccactcccccgcaggagcggcggcggcggcggcggcggcgaggtcggaccccacatcggcgagcggccggcgaaccgccagaggcaaaggcacgatgttcgggcgcgcgccgaagaagagcgacaccaccaagttctacgagatcctcggggtgcccaagtcggcgtcccaggacgatctcaggaaggcctaccgcagggctgctatcaagaaccaccccgacaagggcggtgaccccgagaagttcaaggagctcgcacaagcctatgaggttttgagtgatccaaagaaacgtgagatttatgatcagcctggggaggatgcccttaaggaaggaatgggcggtggaggaacccatgttgatccctttgacatattctcatgatttttagggccctttttggaggag

SEQ ID NO: 306019 - DNA, 453 bp, Zea mays
ttactaccgggcgcccgggatcgacttcgccaccgtgcactcgtacccggaccagtggctgggcggcctggacgcgcaggcgcagctgcggttcctgggcgcctggctcgacgcccacatcgccgacgcgcgggcggtgctgcgcaagccgctgctggtggccgagttcggcgagtcgcgccacgacccgggctacagcggcggccaacgcgacgcggtgttcggcacggtgtacgccagggtctacgactcggcgcgcgccggaggccccgcggagggcgcgctcttatggcagctcctggcggaggggatggactcctacggggacggctacgaggtcgtgcttccggaggcgccgtgcaccgacggagtcatcgccacccatagtcggatgctgcagggactagtcagggcgtttcgtgcgcgcgcgcaaggaccaccatgggaaggcgg

SEQ ID NO: 306020 - DNA, 487 bp, Zea mays
gctttgctttcgcccacgcgtccgcccacgcgttcgcccacgcgtccgtccacgcgtgcgcgagcttctgcttcgtctgctgccacctcgcgtcgggcgggcgcgagggcgacgaggcgcaccgcaacgccaacgccacggagatccttttccggacgacattaccgcgggggcacgcgctcaacttgccggtgccgcagaacattctagaccacgaccgggggatcctgctcggggacctcaactacaggatctccctgccggaggccaagacgaggctgctggtggagcgccaggactggaagacgctgctggagaacgaccagctgcgcgccgaggtgtgccgcggaggcgcgttccaaggctggagcgaggggcccatcggcttctccccgacgtacaagtaccacccgaactccgacgcctactacgggtgcgccaccgtcgcccgcggccggaacaagcggcgcgcgccggcgtggtgcga

SEQ ID NO: 306021 - DNA, 413 bp, Zea mays
cttttggtttcaaaagagaaaggatcaaagaatataaagataaaaaaaaaaaaacaacaaacaaaaacgcgggctggagagctcactgaaccacatcatatcacgaaagagccaccccatggccggtgcaatttctgagctttaaaacaaggatagggcgctgcatgatgcgaacaaggctctacaaaaggtactttcacagaggcataaggcggtcgctagccgtcaccattttcagcagcaggcgcagtgggaccagcggacacaggtacagttccagacaacctcatcgtttgctttattcatgatgaggcaggatctacagggactgccacctccacagaacatttgttttccgccgcggagcatccgttagagaggccaaaaggtggctgccccggcgcaacagcatc

SEQ ID NO: 306022 - DNA, 452 bp, Zea mays
ccgtgtaattcctcagatccgccccctcctccgactccgcctccgcctgctgtaccctcacgccgcgcttccacagccctcccacctgcgaatccagatccgccggcaccaactactgctgatcacgtgctaggctgcttcgcgcgacaacctccgcgaggagcactaagagccgtggcggcggcatggggcgggacggcggtggcggtgtcgccgggggaatgtctgaatgggcgctgcggaaggcgctcctctcctacttgtacgtcgcggggtggatcttcctctccttgtacggcatggtttacaacaagtacatgctggaccccaagatgtacaactggccctagcccatctcgctcaccatggtgcacatgggtgtctgctcattcctcgccgacgcgctcgtgcgcgtgctccgcgtcgacgacctgcgcacctctaccttcatg

SEQ ID NO: 306023 - DNA, 455 bp, Zea mays
tttgctttgtcaagctcatggaaggaaaggagaagaacattgctgtgattgttggcacacgtcacagatgacatgaggatccaagaggttgcagccattaacgtaactgccctgaggtttatctggacggcaagggccatacattgttaatgctggtggtgagtgactcacatttgaccagctggatctgcgtgctacaatcgacgagaacacatacctttttaggggaccaaatattgcccgccaggcggtgagtctcttaatgaaggatactggtgtgccgactagtcacacctaaccatatgtgcttttcaagggattgaagtatgggaaggctcactccaggaggaacagtcgtttgaataacggttaagaaaggtgagggtcttgagcatagttatcacttgctaccgggttgctgcacattggggtgccttggcttgtattcttcaaga

SEQ ID NO: 306024 - DNA, 349 bp, Zea mays
tctgtgttgcacaattacctgaccagcgtgtatgaagaaggtgacgcaaggtcagctctgattgccatggtacagtcacttcagcgtgctaaaaacggcgtggatatcgtcttcggcagcaaggtatacgataatttcccttttgctcaactgtaaagtgttttgcatatgctatctgttttggttaacggagcactctgttgcagattcgaacacattttgcaagaccaaactggaggaaggtattctgtgatttggccagcgcacacaagaactctcgcataggtaagccacttgtcagtgaacatcgagtgacacgattttcagattcagtacaatcttttcggac

SEQ ID NO: 306025 - DNA, 419 bp, Zea mays
ttcactcgtccgcccacgcgtacgtccacgcgtacgctgtgataagattaatgggcccaataagtcagataaggagaatccgctatggaaggcaaagtgcaaatattgtaacaagctttatagttgaaggcaaagtgctatagatgaactgtcccaagtatcaaaagcatattgaagaaaagctagatcaaacactgttgaactttgctccttcaaaggcaggtgaatctggttgtggtctccctactatctcatctgctagagaatgtaatcatgaacaagtctaaaaattaaatgctaagatgattatagctcatgagtacccgattagaatggttgagcacacatggtttaatattgtcatgaagtatatgaacctggtggatgaatgtattgggtgaaagaccatgaggagctga

SEQ ID NO: 306026 - DNA, 323 bp, Zea mays
acgtttaattattaacgcagccattattatcaaccaacccaacaacaatagagcttgtttccattgcaaccaacaaagcgaaatgctagctgcagctagacgccgttgccctgctcctgcttggggtgcagaagcttgctgatgtcggcggccatgagctccgcgtcctcgcagctgccgtagatgcccctccgcaccatcccggggcagtacagcccgtgggcccccttccagggctccgggtagctccgcgccggcatcccgtcgtcaccgaccaggccgtactggctcttgagccaccgcctgacagtgctccggtagcc

SEQ ID NO: 306027 - DNA, 481 bp, Zea mays
ccttactctaccttgtctcttcacgtgcacacgacgcctcccccaatggctgcggtggcggaggaggaggtgatcgtcgtcggcgcggggcagtcggggctagcggtggcggcgtgcctgtccctgcgcggcgtgcgggcgctggtcctggagcgcgacgactgcgtggggtcgctgtggcggaagcgcgcctacgaccgcctccacctccacctcaccaagaagtactgcgcgctgccgcacgcgccgcacccggccgaggcccccgcgtacctgcaccgcgacgacttcgcgcggtacctggacgggtacgccgcgcggttcgtcgtccgcccgcgcctccgccgcgaggtccggtcggcgcggtacgaccccgcgagcgcgcggtgggaggtggaggcccgggacctcggcacgggccaggccgagcagtacgcggtgaggttcctggaggtcgcgtccggtgagaacgccgagaagt

SEQ ID NO: 306028 - DNA, 458 bp, Zea mays
gagtgagagttgggtgcagtgcagcagtgcagagagcagagacggagcggagcgaccgagagagagagagaggggaagtttaataatatatcccatcactcacacgccacggcatcattcgccgcctccttcctcctcccgctcgtcgccgttcctcctccgagcaccagcagcgcgccccctccgctctcccttagctcaccagccgcctcttcgtcggagcagcaacagcagctgtgcatgggagtgggagcacggctctgagaggaaaaagggaagaagaaaggtgaccaaagggaaacaaagggaaccaaaggactaggaggatgaagttcatgaagctgggctccaagcccgacgccttccagtccgacggcgccgacgtccgatatgtggtctctgaccttgcaacaaatgttgtggtgcatgttggtgaagtaaaattttacttgcacaag

SEQ ID NO: 306029 - DNA, 137 bp, Zea mays
aggaactagaagcaattgcaggagtttcttccctgtaaggctgggttgcacgatcactgacacttggtaatctttgcacactcccctttccttttcttgcgttggggccaatttcttcaatcatgtacttccatcca

SEQ ID NO: 306030 - DNA, 423 bp, Zea mays
ttcctctcgtccggtattgtgtatgttgtactgtgttggtatcaattccatgccaggacattcaaactttttgctctaaaaaaaaacaacacatccaccggatgaggaaggatttcacctttgaggccaatcctcacaccgctgaaggttgctagacatccctcccccgtccgccgcctacgccaccgagcctgggcacatcgtggcctccaccgattccgtctggcatgaacgaggcaggtcgattctcgatgacctcgtcgatgaggccccagtcgcgcgcctcttcagggtccatgaagaggtccctctccatgcactgctcaatcttatcgatgggctggcgcgtgtgcttctggtagatcttgatgaggcggtcgcgcattttgaggatctccttggcctggatggcgatgtcggtgg

SEQ ID NO: 306031 - DNA, 134 bp, Zea mays
gatatataaatagagaagttttacatatagacattcccaatatgtaaatgagagaagcttttatacaaatggaaaaaatgtacaaatcgagaagctttatctaggaagcataactacacagtaagaactgaaca

SEQ ID NO: 306032 - DNA, 324 bp, Zea mays
ggacaaaagaataacagaatactagataagaaaggctataggcaaacatgattaatatcaacagaaacttacaggcatctcaggaagcaatttatatgcaagagccaagacccgagaaccttgccgggtgtatttcttatatgtctccacatatgcagcaggtaaatcaactaatttctcttggatggtctctggtgcacccttaatgaaagcgtaaaatttctgctgaatacggacgataacagacattctcttcaagtgagaagcaaaatggtatctgtgcacaatttgaacaggttgaccaccaggctttttggacatggc

SEQ ID NO: 306033 - DNA, 383 bp, Zea mays
tttttttttttttttttttttttttttttttttttttttttttttttttgccctagacaagatgaaagaattggtttgtctccaaagaataaacagtctgtgtatgcggctggctagcacagtagtagtacactttaacaacaacactacagagccatgctttttacactacaaagacacccaccttctcctttatccttctccagggaactaaaaccaaaatggcgttgtttgcgttttaaacaaactgggtaggggcagattatctggacaggggcatctggatgctgattcttttcccttcccaccatgaaacaaaggcccacccaaccctttcccttttctctaaaacacaaaaccaacatatatgtttatatggctac

SEQ ID NO: 306034 - DNA, 289 bp, Zea mays
tccaccctcgcgttcgggcacccaaaaaccctagccgccgccggcgccaagcccctgcccgccgccacctccacgtccgtctccttcccggccacccaccagcccgcgtgcctgctctcctcgcccgcgcccgggtctctgcgccgccgggacgtcgccgacatggtctccgcgccgccggccgacggcaccgccatgccgacgctcgacttcgacacctccgtcttcaacaaggagaaggtctccctcgccggccacgacgagtacatcgtgcgcggcggaaggaacc

SEQ ID NO: 306035 - DNA, 297 bp, Zea mays
ccgcccttttttttttttttttttttttttttttgacttaagcttccagcattatcactgatagggccataggcatcaatagcaaggtctgtggcaatggtactcaacattccaagagcagccacaacaacaccatacatggcagcaaggctgaagctaaagaagatactacacgcaatagcaaaaattgggataatgactgatttgtcacccaaagcaagcccaaaaatgacattagtggcagctccagttctgcaggaatcaacaacatcttatacagggctggaggcattgctt

SEQ ID NO: 306036 - DNA, 410 bp, Zea mays
gtttgtctgtccatgcatgctgggtgtgacactcatatgtctttgatgctacgcacccttcgctatgtccgtggcaccttggactatgggatggatatctatgggagtgccagccatgatctgtgggcatactatgaggctgactgggctgaatagcctgacacccgacgatcttcatcgggggatggtgtttatctgggtgccaatcttgttggttggtcagttgaacggcaacatacagtgtgcgggtccagtgccgaggcagaatatctaggtgcggccaatgctgtggctgcaactggtagcataccgcaacagctgactgcgcttggacatactccttgttgtgctgttgtggaattgtgtgattatgtctgtacactgtatctggcatgcaacccagtgcaaca

SEQ ID NO: 306037 - DNA, 557 bp, Zea mays
cttttaccggggcggaaaacaagaagccgacgctcaccagttccaactcttcgctgccaagagaagctctggatgggaggatcggtgatgacaaggtagcggcggttaagtcaaaaaaggtgaagccaggtgttactaggtccacaccttcgtcaccaaccagcgtctattctctgcctgcgtcgttcgacaggttctcgaatgacctgaagcagaggaacagagtgaaaggagcggagaataaagcttcgtcttcctctaggctttcattgttggaaaaggccgcttctgttttgaaggccactagtgccgccgggagagtgtcctctgctggcattccgatcggtagctctgtgctgagcattggatcgtcagggccaaaggccctgagaagaagctgggaaggaaacacggatgttaaagggaaaggaaaaccagaatcgaggacagccaaacctgacaggaagtctgatagcaagattccaatgactcctagacggaaatcaccagtggatgagaggtggcgccacataaagatgacaacagtcagaaagctg

SEQ ID NO: 306038 - DNA, 440 bp, Zea mays
ccctttcgtccgcgatccaattgtcactagctcgcccttcaacgtgcgaattaaggccggtcattcgtctcatagctcgtggcattagccatggaggaggagaagcacctccaccaccaccagatgcaccacaagcaggatcaggagcacatcgacggcggggggtacggggagaccgtcgactacacggcggccatggtgaccgaggtcgagatcacggtcgataactactactaggagtacaaggaggacgagcacgagcacaagcacaggcaggacctcggcaaggccggcgccatcggcgtccgctacttgaaactctacgagaagtacgacgcgaagaacgacccggagcacgcgctccggcacaagatcgaggaggaggtcgcggtggtagtcgacggctgctcctgcggctagcacttccacgagcaccacga

SEQ ID NO: 306039 - DNA, 489 bp, Zea mays
gattttcctctatttatccatgcattatgctatataatatgttgttagttccttttaataggccatatatcttttatttatcactatttaggagtattggctgttgttgttgtgaaacttacttttctgatgtgccgatgtgcatatgtttggagcaacatgttttttagttaaaagcaaaactatactggacagtaaagccatcaatacaaagcaacaaatattacgaggggctgtcctatgctcatataattctactttttttttaaaaaaaaggaactaacactcttttcaaacgagtaaaaaataaattcaaagtatgcagttagttactctgtctcggtagcaaagtgttgaacagtcaaattcctgcttgaattgctctcttgcttggtctgaaaggcatacattctgttgatgaagatggtaacgatttttgtttggtttcagtggacgacgagtacatcatcattgggtccgccaacatca

SEQ ID NO: 306040 - DNA, 423 bp, Zea mays
ctactatcaccactgccccggatccataccagctgcagcagctgcgcgcgcgagctagcttcggtcggtcgatagatcgatcgatcgctcggccatcatggcgcgggaggagcaggcgctgctgtcgacggagatcgtgaaccgcggcgtggagccgtcgggcccggacgccggctcgccggccttctcggtgctgctgtccaaccggcgccgcgactttcaccgcgccaagtaccagctggagcacgtggtgcgcacgcacaagggcgcggacgaccgcgccttccgctccgtgtaccaggaggaggacgagcagcggatcaagggcctgtccatcagccgcgacctgctggaggtgggcggtcacgcgctcaagaccaacatcaccacgctggggcccctggtgctgtccttctccgagca

SEQ ID NO: 306041 - DNA, 462 bp, Zea mays
cttgagctcacctactgcgggagcaggcatcaagatggcgtgtggttcgtctaccgggacggggtgccgctggcggactggctctagggctttctcctagattactgctcattaggatgtatatattaatcatcctattttaatatatattaatcatcctattttaattaggttctaatccaattagtagtaagtattttcttttttatttaatagtctctgactatcattaaataaagggtagagcaattcttttttctagagattctagagaaagtgagacaaagtgaagcgaaagagttttctttgtataagaattaggtctatatcatatctaaatagaagggaaatcaaaaagaagggaagtggggattacattggatgaatccttaaggaagacatatcacaaaagaaataaaggctaaagtaagcgctccttgcctttggtttgagcaaaacaga

SEQ ID NO: 306042 - DNA, 482 bp, Zea mays
ttttgcgtggggtttaattaacttaccagcttggtccatttgttgtgctagagtgagatatttgatttttatcttttatgttacagggccgtgatggttttgttatgggggaaggggctggtgtcctcgtattggaagaacttgagcacgccaaggttttaaacatgcaatttcagttgcccctctttatagatctttcagctgcttgtgtccagttcaatggcttatgattatgtttaaacattactgcctgctgatatctgtgcaccttctccaggaaagaggtgcaacaatatatgctgaatttcttggtggaagcttcacatgtgatgcttaccacatgactgagccacatcctgaaggaagagggattactctctgcatagaaaaggcactagctgatgcaggggtagcaagggaagaaatcaactacgtgaatgcccatgcaacttctacacaagcaggtgacctgcaggagtatg

SEQ ID NO: 306043 - DNA, 451 bp, Zea mays
  unsure (1)..(451): unsure at all n locations
cttccggccaatctaggctccaaatggacccccaccaacgctggtgggatctaaaaaaaaaaaagtcattacggacaataactcgcgtagccgaccaagtacgccctctgcttcctcgcgcatcaagagagccacacaattcaggtgctgggcggattcttcttaccaggagcaggagatcttcggcgcccctcccgccccgccgctggacaaatctgcaagatcgcccccttactctgtgctgggcatttgcacaagcacctgatctgcaggtgtcgctgggctggggttcctggagactggatacctaacttacctgaagctcacgggctaccaggcagtctgccccatcactggcgcacgctgtggcgacgtnctagacagcgactacttcgtcgtctttgggatacctcttcccatagttgggctggaggcatatggcttagatacc

SEQ ID NO: 306044 - DNA, 436 bp, Zea mays
aatcatcattttattttttatagttgggtagtactaacatgagtaatatagtcatcctacaccaccttttctagtacgaagaacactttggcctgctatgctactcagcgtaacgtacagtgacattaaagtgtctgtctaccagcagctgttgctggcccgttgctgtgacttgatacacttgtccggcacaaggatgtcgaagccactgagcgtccactccgcctcctcggccctgtcgctgacgtatatctccgtgccgacgtcgagcgacgtccaccgcctcctggccggcggcgtgccggggtcctggtagaagtagagcgcctgggacatggcgccgacgtcgaggtcccacgccctggggtcgccgacccacccctgtcccctggccgtcgggtagccgaactctccccacacggggtgcggcagcagc

SEQ ID NO: 306045 - DNA, 498 bp, Zea mays
catttatgcaacagacctgacgtcgtggaggtctgggatgcatctgctgcagatccaaaattgcttgtatatctcaaggcgtaccgaaatacagtacctgtccctaggcactggtctcagaagcgcaagttcttgcagggatggctataacaactggggcggctgggcttgctggtgcagtacttgagggaagagaggtattgagaaacagcctttccagcttcctgacttcattgctgcaactggaatagaaaagataagacaggcttatattgagaaagaggatagcaagaagttgaaacagaaacagcgtgagcgtatgcagcccaagatgggcaaaatggatatagattatcaggttttgcatgacgcgttcttcaaatatcagacaaaacccaagctgtctagtcatggtgatctgtattatgaaagcaaagaatttgaggttaaactgagggaaatgaagccaggcatgctgtctcgtgagcttaaagatgc

SEQ ID NO: 306046 - DNA, 504 bp, Zea mays
  unsure (1)..(504): unsure at all n locations
cttgtttccacccgcggccaccaccgccctgcggcccccgccgtttgccagccttcaccgcgccgcgagtcgcgccgttcctgcaccggctggtcctggagcacgggaggacgagcatgtactggttcggccccagccccaaggtgaccatcgtcgactcggacctggccgaggacgtgttgtccaacaagttcggccacttcgagaagctcaaggtcctggcgctgtccaagatgctgggctccggcgtggccagccacgagggcgagaagtgggtcaagcaccggaggatcctcaaccctgcgttccatcttgagaagctcaaggtactactaactactacatataattaattgcatataattaattggtccttggaattatctggcaatgtgcagcgcatgtgccngcgttttctacgtgctgcgaggagctggtgagcaagtgggcggcggagtcccttggctccgacagctcgtgcgagctggacgtctggccggagct

SEQ ID NO: 306047 - DNA, 339 bp, Zea mays
attttcagtttcacacagaccccgggggccggggacacagagctatgtcgggctgcacgccagccagccagaggtccacccaggcgctgggcagcagggcctacaccacccgacggcgctgccccccgcgctcgggtctactggtgcggtgttccctccgtgagctacgaacccgcatagactgcgtcaggaacacgcagaagatcacggaggccatgaagctggtggccgccgccaaggtccggcgcgcgcaggaggccgtcgtctcctctcgacctttctcggaggcgctgggggaggtgctctacaacatgaaccaggagatccagacggaggaca

SEQ ID NO: 306048 - DNA, 378 bp, Zea mays
ggacccgaggtaccggtccgattcggtcgccaacgccggctttgggtggtactgaaggttgaaaagaggatgatggtggacggcagggtgcttgtgtggctggggcggactggcgtggatcagcgacgcgcacgggtcacctggcgccgacaccggggactccgaccccgatgccggagaagccccccaccaaggggcccaagccggagaagccgccaatggaacacaagccgaccaaggagcacgggcccaagccggacaaggcgaccaaggaggacaaggcgacgatggccacgtacaccctgagccaaaaaaccacgccaggcgcgaacactcccacccctaagtccctgaggctgacaggattgacatacactc

SEQ ID NO: 306049 - DNA, 521 bp, Zea mays
ccgtttgtcaaatcctcgccgtgtccgtgtagcaattccttgcgttggcgaatcatagcagtctcctctctccggcggcaaatcgtcgaactgccacgcctggccccgccgccagcctcctcgtctgaagaagaacggaagacgtcgggctccggtggttctgaacggcaggtagccagtcgcgcttctcacgccggagactcgattggcgttgtatttgcctttccgtttgttgagttctcgaagcaaaacgatcggatgagattcttcaaggggagcaaggtggaggtattgcaggaggcagaggtgccatttggttcttggaggcctggtgagatcatctccggcaatggacacacctacctggtgagatatgatgaaagtcccgttgactctagcgtggctgttgaaaggatgccaaggaggttgattagacctagccctcctacggatgatcctgtacgctggagtttgggtagtattcttgaggcctttgacagctactcgtggaaggttgctga

SEQ ID NO: 306050 - DNA, 312 bp, Zea mays
atatctatgtccatattgaagacgatgatagtgaatttagacacatttattaaacacattcattaaatattatgtgaataaaccactatcccaaaaggaatacttaatcgcgacacagggaggatctttgtaataaaatggaaaaaagcatgcataagttggtcagacgtcttcctattggtaggagccctgctgaaaagcttcaagacttgacggcgatgttgctggaaagccaatcaagccccttatacaacctttcaccagatgtagcacaagggctctggatgcaccagtgccgctgtcgaagagaat

SEQ ID NO: 306051 - DNA, 469 bp, Zea mays
ccttgcgtccgcccacgcgtccgcccacgcgtccgcccttttttccgcccacgcgtccggctggtgaaggagaaggtggtgaaattgtgtttggtggaatggattctagtcactacaagggtgatcacacctatgtcccagtcactcagaagggatactggcagtttaatatgggtgatgtcctggttgatggaaagtccactgggttttgtgctggtggttgtgcagcaatagcagattctggaacttccttgcttgctggccccacagccattattactgaaatcaacgaaaagatcggtgctgctggtgtagtcagccaggagtgcaagactgttgtttctcaatacggacaacagatcctagatcttctgctagctgagacgcaaccagcgaagatctgttctcaggttggcctgtgcacttttgatggcactcacggtgttagcactggaattcctagcgtagt

SEQ ID NO: 306052 - DNA, 219 bp, Zea mays
gtagcacaagggaatgctttgattcatcactggttggatcatgtattacaaaccaccaagtcccaacggtcgctttactaattaacgagatcttcattaacaaaggaccgatcttgtcatactttatcttccactaattaaaaaactggaccacgcacgacgggttgatccatgcccaggatcataaagatcgtggtttattaatccaagaacaccttc

SEQ ID NO: 306053 - DNA, 492 bp, Zea mays
tgctacgtttagggatgctcaagcctttgatcttgggcatttatatctctggacttttactgtcctcatcctctctagttacaaatactgcctggtcattttgaataacttctctcacttcctttgaacttttctgattcggttgaagtttgacaccttttccaccctcacccacttcttcgcttgggtctccacccaattctgtcgctcggtttgtacccatcaatgtgataatagtcgagagttcgacaacacctcctctcgctccttactctctcatggcgttcaattgcgcctctcgtgcccttacacctctccctagaaaggtcgggacgaacacatcattcacgccaccaccaacatgatatgttaccttctctttcaagtgtctctccctatcagttactgggcagaggccctaaacaccgctacccatttcctcaatcgcctttcctcgaagcagtgagccactccactccccactttacccta

SEQ ID NO: 306054 - DNA, 462 bp, Zea mays
acttctcgcttacggatgtatccgtctccccctgcccacttattttatggtgtgagcgtcagccgtcagcccgtcagcactcaccaagatccagcatacacttatcccatccactagctaagcgcgccatggcaaagttcgctcttggtcaccaccgcgaggcctccgacgccggctgcgtccgtgccgtcctcgccgagttcatcctcaccttcctcttcgtcttcgccggcgttggctccgccatggcaacaggtagataccgtatatagtataatatataacacatgcgccgtggcaatcatgcatgcacgcacgcagggaagctggccggcggcggcggggacacggtggtgggcctgacggcggtggcgctggcgcacacgctggtggtggccgtcatggtgtcagcggagctgcacgtctcccgcggccacattaacccggccgtgacgctgggcc

SEQ ID NO: 306055 - DNA, 385 bp, Zea mays
ccttctcgttcgctcactcactaacacactcactgttcatttatgtgcggcaacgcgagggactaagttagtgccttcgtaggtattggtgacagcaatggccaccaccgtcgtgaagagcctcttcaagggctccttggtgggttcggggatgcgttcgaccacgcgcaccaccaccgcgttggccacggccggggccacccggggcgccatccgcgggcccatctgctcgtccatctcctcgtcctacaacctgacgtacgacctgacgagcttcctgaagaagcccatcaaggagtgcatgatgacccgggagatcaccacgggcttcatgacggacatgatcacccacgtcgacaccgacgtggcgatcgtcggcgccctg

SEQ ID NO: 306056 - DNA, 500 bp, Zea mays
cactcacacacaagagggaggcaaagccaaggggggggatttttaaccagctagctcgggcttcagcaggcagccatcatgtcggaggagaagcaccaccacttgttcaaccaccacaagaaggacgaggagcagcccgccggagagtacgggtactacgagaccgaggtggacaccgtcaccgccgagggcgagtacgagaggtacaagaaggaggagaaggagcacatgcacaagcagcacctcggcgaggccggcgccatcgccagcggcgccttcgcactctacgagaagcacgaggcgaagaaggaccccgagcacgcgcacaggcacaagatcaccgaggagggcgctgccgaggcggccgtcggcgccggctgctacgtattccacgagccccacgagaagaagaaggaccacaaggacgccgaggaggccagcggcgagaagaagcaccaccacctcttcgggtgacccgagtacctggctccgcgcgaccg

SEQ ID NO: 306057 - DNA, 191 bp, Zea mays
cgacgccaccacgcgcgcttttctctccgaccgtgacgagccgccgaagaggaagcgggcttttttcgccggatctaagcgaactcgccgccgccgctccagcccgtggcgcctacctcgccggcgtcggtgtcgcggtcctcctcgctggctccttcctcccagtagccgagtcgtcctgcgtgcgagat

SEQ ID NO: 306058 - DNA, 339 bp, Zea mays
gtttctcttgggcgggcacgtgagcagggatatatagcatttttgtatgagcaggagttggatacggccaggaacagttctaaagctgaaaagagctatgagctacctgaatgacaagggattacgatgggagccatgcgatcaacagccgctggggtcgtatatctggcgaaagagattggtctggctgttggccaactccatggggcatcatacgctacaaccgtgaagagagacgtgtatgtatggaaggacctaccatggcaacactgagctcaagagcgtgcgggatataatccttgaggtgatgtaccgtatgagcaatattatcacatactt

SEQ ID NO: 306059 - DNA, 451 bp, Zea mays
tcgtctctgaaagttcggagccgtcggcccgggcgactctttcttcggctaccgatcctaaggccaatagttctcaagtggcaatggcggcccaggctaaccaacccactgtccttcataagctcggaggacagacacacctgcgctcgatcatctgtgaaggagcacggccccgtcacataggcccatctgtctcatcgtatgaaaggagattggtcacgcggaactacatgaccgatagcctttggagcccttcaatgtctgttagcggaggcatgaatggcccagagatgcagaccccgctatgtgctaatgctcctgctgagaaagggggcaggaacttcatgattgaggacacgacgggcggaggagcatctgctgtagtaaagactgctgctgctcccatggagcgtgggaagctgttttttcagaaccaccatgagatgattca

SEQ ID NO: 306060 - DNA, 206 bp, Zea mays
ccgcgtcgcgcagcgggtgatgggagacggagagtttatgaagacagtagggatgtgcactctccgcaccacatctggtgaggcctgcattccaactcgggaacgcgcgctgggaactttactgcctcgagcaccgcatccagcctgatggccaagtgcctggcgataatgaccgccgaacatcacgacgatgccttcatgacctt

SEQ ID NO: 306061 - DNA, 289 bp, Zea mays
gttcttttcctccctccccgccgcggcggcactcgtgctcttggccctgctcgccggagcccattgccgcaaggcccagggcgacggcgaggacgccggcgcggagaacgttaacaccagcgaggcgcgcgtggactgtggcccctggcagaaggcccgagccacctgataccgccagcccaacggcgccggaccggacgacaacggtggagcgcgcgtgctaaaggacaccaaccggtgcccctgcatgtacatgggctcctgccgtaaccaagcattgttcaaggac

SEQ ID NO: 306062 - DNA, 212 bp, Zea mays
gtccgggagaagaccagcttgcaccggaactttaaggggcgcttcgtcatcagctggccccacagggacacctggctcaccggccgcaagatcatcatagtcacctacggccgctggggagcccacgaggggggcacctttatccagaaggacctcaccaaggtggaccgcactgaagcctacgtcgcacaggaggctcgacggagcatgct

SEQ ID NO: 306063 - DNA, 244 bp, Zea mays
ggggcacattataatgttatgggcagaaaataaaaaagggggcgattaaaaagcgtttacagttggggataacgttgctacattcaaatagcgtgtttcttgcctagggggccaaacttattacggtagagcaagcttaccattgccgctttacacatttttgctggcttagttacataaacagcacggatggatttcttgcaggggttatggtcctacaatatatggaattacgatttttacc

SEQ ID NO: 306064 - DNA, 412 bp, Zea mays
gtccggccacgcgtccgcagatcgaggcatttagctagctagcccggagcacgcctagacacgccagcaggaatggcgggtcagctggccagagcgtttatggccttgctgtcctactgtgccttctaggccgagattggccagaagatcaacgtcatcttcagcttcggcgactccatgttcgacaccgacaacctgtgcgtgaacggtccgcccgccggactgacgctgacccagccggcctacggagagaccttgtttggccgcgccacctgccgttgctccgacggtacgctcgtggtcgactacctggccgagaagatcgggctgccgatgatgaagacgccgaagcaaggcggctcacacttgaagcagggcgccaacatggcgatcattggcgcgaccaccatgg

SEQ ID NO: 306065 - DNA, 232 bp, Zea mays
ctagacgctgtactggttctgggacgccgggcttgtgtgccactgctatcctgagatctgccctgagtggctcctatcgagtgatgtctctgaccgctcttatctatctgacgacgcgtggaatacaacttacgtcggaagactttattccgcctctttgctactgggtgatgaagttgggcggtgaggagctgccatgtatgaacatgtccgcgtcgggcatgataacctc

SEQ ID NO: 306066 - DNA, 361 bp, Zea mays
acatagcccccgccgcgcacagacccggcgaaggagccgttactaggacgaccgagcgcaccgaccacgaccacaggaaaacacacagtcggacgccgccgtcaacctgcccggggacaaagcgaccaccgtaggcgaccaatacaaggagagcgagcacagctacgcccgcaagcccggcgcacccgccgggaagactcagaaaatgaagcgcgcccccagcaacaaacaagtgcgggtcgagcacgacaaccacagcgagaaaaccatccacctcgagagcgagccacgcacaaacgcaaagaacacggaaaacgctcggaccgacagcaaaagacccagctaggagaacgagaaagcc

SEQ ID NO: 306067 - DNA, 365 bp, Zea mays
  unsure (1)..(365): unsure at all n locations
ttgattacgcgtgncaggcctctcatgcaggacggccatagatgatgcctgcatctgacatggtcaggttctttgccttcggacgtgtcttctcagggaaggttgctactggtatgaaggttcggatcatgggtcccaactatgtccccgggcagaagaaggatctgtatgtcaagagtgtccagcgtactgttatctggatgggaaagaagcaagagtcagttgaggatgttccgtgtggtaacactgttgctatggttggtctggatcagttcatcacgaagaatgctacactcactaatgagaaggagactgacgcttgcccaatcagagcaatgaaagtctccgtctctcctgtgtgcgtg

SEQ ID NO: 306068 - DNA, 313 bp, Zea mays
  unsure (1)..(313): unsure at all n locations
ggtgggggcgccgccgggctcgcgcagctccggggccacgtacgacgccgcgccaccgcctcggagcgcgcatgccgcgctgccgagcttcttggagtgcccgccgccggcggccttgtgcgcgccggcgaccaggcgggcgagcccgaacccggacacgtgcgcgcggagctcgtcgtccagcaggatcttggacgacttgatgcagccgtgcacgtaccgccgcgggctgcactcgtgcagatacgccagnccgcgcgccgcgccctgcacgatggacagacgcacggaccacggcaatggcgttggcgac

SEQ ID NO: 306069 - DNA, 389 bp, Zea mays
  unsure (1)..(389): unsure at all n locations
gacataaaccaacagcagccgcgcaggcaaaaggaaggaacaacaaggaaggcacgacagcacgtccacgaacacggaggaggaacatntgatatccctattctggagagcccaaagggagttgacgagggcaaagcaacaaagggggaaacggtcctgggaggagaagactaagataaaacaccaccggaacccagggagagtgagcgcaagaaaactgagggcagagacctgacgaaagacagatcggccctgcaaaggcacgaagaagccgccgagaaagcaaaggccgaacgttccacaacttctcaaacagaaagcaaagtggcattcataacaactgaagccacaagggcaaaaacatggaacatcacactgacaaggtcaaa

SEQ ID NO: 306070 - DNA, 524 bp, Zea mays
ccctaagggccaccagctttgaccgccgcctcccttcccctccgctactgctcctccccaccccactcccccgcaggagcggcggcggcggcggcgaggtcgtaccccacatcggcgagcggcggcggcaccgccggaggcaaaggcaagatgttcgggcgcgcgccgaagaagagcgacaacaccaagtactacgagatcctcggggtgcccaagtcggcgtcccaggacgatctcaagaaggcctaccgcaaggctgctatcaagaaccaccccgacaagggcggtgaccccgagaagttcaaggagctcgcacaagcctatgaggttttgagtgatccagagaaacgtgagatttatgatcagtatggtgaagatgcccttaaggaaggaatgggcggtggaggatcccatgttgatccatttgacatcttctcatcattttttggaccctttttggggaggtggtggaagccgcaggggaagaaggcaaaggaggggagaagatgtagttcacccactta

SEQ ID NO: 306071 - DNA, 206 bp, Zea mays
cggcggaagaagttctcggccgacgcgatctcctcaatggtgctcaccacgatttaggagagcgacgcggcctacctgagcaccaccatgaagaacgccgtgattaccttgcaagcctacttcaatgactggtagagacaggccaacaaggactccagagtgattggaccgactgaacgtgacgcgcatgatgaacgagcccacgg

SEQ ID NO: 306072 - DNA, 452 bp, Zea mays
  unsure (1)..(452): unsure at all n locations
tttctcatcgcgtccgatcgacctcagctccaacgcgttcgacggccacctccctgactccatcgcccagctcgcctcgctggtctacctgtccgcgtccgggaaccggctctccggcgacgtccccgcctggctcggcaagctggcagcggtgcagcacgtggatttatccgacaacgcgctcaccggaggcttgccggactcgctcggcgacctcaaggcgctcaggtacctgagcctatccaggaaccagctctcgggcgccgtcccggcctccatgtccgggtgcaccaagctcgccgagctgcacctgaggggcaacaacctcagcggcagcatcccggacgctctgtncgacgtcgggctcgagacgcttcgacgtgtcgtcgaacgcgctctcgggcgtcctcccctcgggctccaccaggctggccgagacgctgcagtggctc

SEQ ID NO: 306073 - DNA, 256 bp, Zea mays
gcgcgcacacacaggacgacggctgcttggggagcgcctgcggcaccttcataccccaagtattggggcccctagcatgcccgtccaagaagaccaccgacgccaggttccggcgacacacggcgacatgcacggccagtagcggctgtggccggaggccggggcggccaaaaagatggccctcttaggctgccccggcgggacgtgatgctcaaaggcctgaacagtgtaaccaccaggctaacctggtacccgg

SEQ ID NO: 306074 - DNA, 217 bp, Zea mays
cgtttggtcattaccccgaggacgcgggggctgccgacaagagtgtccttctgattacgacagtccgcaatgatttgacgctgcaaccgagagcgcaatctggggatcaaactgagcacccttcatacttcaaattcgcgggacgagtgggtggcacagctttattcgatggtgagcctttagatgcccacttcactagaactttctacaaacacat

SEQ ID NO: 306075 - DNA, 566 bp, Zea mays
ttttgtctccaccttgccggcccggagcaaggaatttagcttgttcattcggaaggaatactgcaaagtgatctcgctgctgaacgtgagttttcatgttccagtttataagttctttttggcatgtttgaattgaccctaaggagcttgccaatggttaaggtagctgtcccccacttatgttactgattattacatcttacctatgttaggcttatgcattgattgccaaaggggtcagattactctgcactaatactgttggaaaaaattctaaaatggttgtgcttacaactcaaggaagcagttcgatgaaagacactatcattactgtatttggtccaaacacttttaaatgtcttgagcccttcagtgttaccacctcggatggctgccacatagagggctttctttcaaaacctggacctggtactggtcgcagttcaggagatagacaatttttctatgtgaatggcagacctattgatatgccaaaggtcacaaaacttgtcaacgagctatccgaaagctaaatgccaaacaatatcctgtgtaattctagattt

SEQ ID NO: 306076 - DNA, 533 bp, Zea mays
gaccgggccggaattcctttttcttcccacgcgtttgttctctcgcccgcggaaggatactggctgggctgcttgtggtggaatgagattcacgatgagggagagagtgtctggaagtttgagtgccttgatggagagtccctggctaggatgaataagaaggactcatggctgctctggtggactctatatctggctgcggctgcatggattatacttgggatattctcgctcatcagacttcaagctgattaccttctcgctgatggagtttgcttgagcctcagcattgcacatattattgggttcaccaaatgcaataaagatgcgaagaagaacatccaggattggacaaggagtgcacttctatcaggtagtgtcagatcgcatctgcagtcagcatttggtgtctgaacaataacctacgaccttgttatacgtgtagtgctgtataatttacagataacatgattggttactagagcgcgtctgttttttttttgttggctatgtgcatcttgctaggcagagtc

SEQ ID NO: 306077 - DNA, 295 bp, Zea mays
tgcaggaccggaccggaattccttgttctgttcccacgcgtcggtcttcgccagcgagtacccgatgaccaggaagcatttgtacgagatcgcgcgcgggctggagctcgccgggacgcgcttcctctgggccctcaagaggcctagctgtcgccaccccgacgaggacctcctgccgccaagtttagaggagcgcacgcgcgggccgggctacgacgtcacgggctgggttactcagaccagcatactggggcatggcgccgccgccgcgttcatgaagcactgcggctggggc

SEQ ID NO: 306078 - DNA, 287 bp, Zea mays
  unsure (1)..(287): unsure at all n locations
accggccggattcctgtttttcttcgcgnccgctcctgccttcatcgnnccgcgnccgcctcagcccgccttatggagaggtaagttcaggagacatcttcgagaagctgaaatggctcctaaagctgctcctgccaagaagggtgatgccaagacccaggccttgaaggttgccaaggctgtgaagtctggggcagccaagaagaagaccaagaagatccgcacgtctgtgacatttcaccgccccacgaccctgaagaaggctagggaccccaagtacccacgaa

SEQ ID NO: 306079 - DNA, 473 bp, Zea mays
  unsure (1)..(473): unsure at all n locations
ccctgcgtccgctcgtcgacgcgttccattgcttcctgtctctgccgctaagcgacgccagtggcggctcccgtgtcttccggcgccccaacccgccgttcctgttgaacaagccagcggatgtgcgcagaaatgtaatcggtgccgtggatttcgctgttccaagcggtgggagcaagctcggggaggagctctgggagtcgaaggcggcgggcaacttcttcggntgcagcaacgccaccaaacagttcgccgatgccgaggctgtgaccaagtcggaccgttacttgatgatcgcgacgagcggcggactgaatcagcagcgaacagggatcatagatgctgttgttgcagcccgcatactgaatgcaacacttgtcattccaaagctggacgaagaatccttctggaaagatgcgagtgactttgcggagatatttgatgtcgattcattatatcctcgctttcgatga

SEQ ID NO: 306080 - DNA, 470 bp, Zea mays
  unsure (1)..(470): unsure at all n locations
cattgttcggccaccagctttgaccgcctcccctcccctccgctcctgttcctccataccccacccccccgcaggagcggcgcggcggcggcggcaaaggcggctaaggcaagatgttcgggcgcgcgccgaagaagagcgacaacaccaagtactacgagatcctcggggtgcccaagtcggcgtcccaggacgacctcaagaaggcctaccgcaaggccgctatcaagaaccaccccgacaagggcggtgaccccgagaagttcaaggagctcgcacaagcctatgaggttttgagtgatccagagaaacgtgagatttatgatcagtatggtgaagatgcccttaaggaaggaatgggtggtggtgggtcccatgctgatccattcgacattttctcatcattctttggaccctctttggaggaggtgggtggagcagcangggaagaggcaaggaggggagaagat

SEQ ID NO: 306081 - DNA, 429 bp, Zea mays
ttcttacgcgtggggccgcgtactggggcgaccccgaggcgttccggccggagcggttcgagggtggcggcggcgccgtcgacttcagaggcgccgacatggagttcatcccgttcggcgccggcaggcggatgtgccccggcatgtcgctggggctcgtcaacatggagctggcgctcgcgggcctcctctaccacttcgactggacgctcccggacggcgacgggaaggtgctcgacatgagcgaggcgttcgggatcaccgtgaagaggaagtccaagctcgtgctgcgcgccacgccgcgtgttccattctcgtattgatgttgacccatccatttgcttttctgtattactattattatattttatggattcgccacagcaacaatggagatgagatgagatggagtagagtacggacagggat

SEQ ID NO: 306082 - DNA, 400 bp, Zea mays
gggcgcaggcattaacgtctctggtcgttcctacgcgacgtttatgctcaccgcgatcaccgcacatgcgttccacgcgattcattctttacaggtcgcttctgccgcgctctcataactcgcgcgcgtcccaccagggaaacctagagccatggtcacaggtcatgatgcctctccagcagatgtcgttgcggacaatgaaaacatgttgcgtgtccagaaagttacagaacaatttgacctaggtggtcctggaagtggaaaaagcacacaacgtgccaacatcgtggagcactttggatacacccatgttagcgctggagatcttctgcgtgctgagattaaatctggcactgagaacagggccatgattgagaacatgataaaggaaggaaagatt

SEQ ID NO: 306083 - DNA, 426 bp, Zea mays
tcgtcacgcgtccgcccacgcgtccgcggacgcgtgggttttttttttttttttttttttttttttttttttttttttttttttttttttttttttttttttttttttttttttttaaaaaaaaaaaagggcctttttttttataaccccaaaatttttgaaagggctttttacaagcatttattgaccaaccccctggtggtggtgaaattttcccttcttttggggattcaaacaaattttttcaaaaaatttttaaaaaaaaaaaaaaaaacttttaaaagggcccaaggcccggtttttttttaaaaagaaaaaattcaagggcaaggaaaggaaacccacaagccaccggatccattaattttgactaacaagggggtttatttgattaccaggtaaaaactcgctaaaaaaatctttttt

SEQ ID NO: 306084 - DNA, 469 bp, Zea mays
ttatgaagctgaagctactacactgaaggggctacttgaagcttcttgtcagaagaatgcttctctccaggatcaagtctgccacctagatgaggccctcaaggaatgcgtcaggcaactgcggctggcaagggaagaacaagaggacaaaatccgtgaaatagtttccaaaactctggtgccacagtctgaaaaccctgagctccaaaagcatatcggagagctaagaaagcgactggaagtgaccagattagaagcgtcatcttccatgttattacaacatgatctacaagaaaggcttcaggcaattgagagagagaacttgggccttaaggccaagggtcaggcaattgagagagagaatttagatctcaaggccaaacttcttgtgcagtccaatgatctgaagatagtaatgttggaaagagatctgagcaaccaagcagcggagacagcaagtaaacaacac

SEQ ID NO: 306085 - DNA, 390 bp, Zea mays
gttgtatatccaatgaagatatcaatgatctggttatcatagtatttccactccttcacatgaactcaatgctccgataaaagagagatgtccccattattttattttacaggcggatggatagttgtttcacattatttcttttgcttaataccaacgcttacttttttcacacggatctgctatgcacggatgttgtagaacagagggagcaaaaaattttttatcaagattctcatgtaatgatcttttcgtttcagttgttgggagatatgctgctggatagatcaaatgctgcagtcatgatgcgctatgttagctccaaagacaaccttatgattttgatgaatcttttaagggattcgagtaaaaatattcaaattgaagcat

SEQ ID NO: 306086 - DNA, 311 bp, Zea mays
gcgttgcaacggactcggaatcagggatttctatttccaagagggcaacaatctattacacaaaaacaaaaggacggaacgtttttccccctcagcttagtttttcgagttcagtcagtctagagaagaacggccatatcgccaactattgtgcgatctccgggtgaactgctgcggcgcgaagctcagaccaaacatctccctcagcgccttcccaggctccaggagcacgatcagtctggccacgagggacgcgctctccctaacatgctccagatccttggtcttcgtccaaaggcgccgagcgacct

SEQ ID NO: 306087 - DNA, 402 bp, Zea mays
acgcgtccgcccacgcgtccggacttcaccctaaagaacaataagaagtcaatgggtttggtttctgaccgcacttctctacaggcatcccacccgtcctcttcctccagcagctcaaggtacgcacaggaaaccacatcttgaaccacggaattagccgtgataggtttcttcttccgctcggtactcatctaccctaatcttcccctcgcagtggattccactaggttcttaacctcttcccaattcttaaactgaaacctgcgatgtctaatccaactcggcacctaaccagcttgtcagcatcgtaagtttgcctcaacattccccctagaaatagaataagaatgtaaatctactttcatttagggatgatacttttttttttttctagactagaat

SEQ ID NO: 306088 - DNA, 412 bp, Zea mays
gcgtttaattctgccccgccgtcgtacacccctttcggggggcctccgacgcccaagccgaccgcgccgacgtacactccaagccccaagcctcccacacacccgacgcccaagccgaccccaccgacgtacaccccttccccaaagcctccgacacctaagccgaccccgccgacgtacacgccttgcgccaagcctgcgacacccaagccgaccccaccgacgtacactgcaaggcccaagccaccggctaccaagcctgccacgcccaagccgaccccaccgacgtacactcccacaccggaggcgccggtcaccaagccgtccacctacacttcgacgccgtcggtgtctcacacccccagcgcgccgacaccttactacttgaaaccgatggcttccataccacact

SEQ ID NO: 306089 - DNA, 452 bp, Zea mays
tttctgattatcagattgcagtggacatatttggtgtgagcgctaagtactcagatatagcgtctgtaggatctttggcgaagtatactggtggtcaggtgtaccactatgcatcattccagacacctacacatggtgacaaacttaaacttgagcttagaagggaccttacaccagagactgcatgggaatctgttatgcgtatcagatgtggaaaaggagtacggatcacaacctatcatggtcatttcatgctacggtccacagacctgttagcccttccagctgttgactctgataaagcttttgcaatgcaactgtcgctagaggagacattaatgaccacccagactgtatacttccaagtagcgttgctgtatactttcctctcaatctgactttgcactaatattatgattacatgcattcttgcacatattccttgatttagt

SEQ ID NO: 306090 - DNA, 304 bp, Zea mays
tgcttctacttgggccaatgctggataacacgacacgtgttgagaataccgccgccgtattggccctgattcttggaataagggacagaacggtggcgactatcaaagatgcgaatgcattggctacgtcagatcttgccactactatcgtcacacaatttacttcaattgctgaacttatggtaagccattatgccctgcgagacagcatgcctgtagagatcgcagaccaactcttcgcgataacactgcctgggcctaaccttgatgtgtgtccacaaacagaagctgagatacctcttgc

SEQ ID NO: 306091 - DNA, 334 bp, Zea mays
tggtgtcctgtgccaataccacgggcccttggggcgcgatcgccataacgtgggtcggttcgggcggtgagcataggcggcggctgctagctaggattctgaattagaggcgatcaggcatcatacggcacacggtaacttcgcgccactggcttttcaaccaagcgcgatgaccaattgtgtgaataaacggttgctctcgtactaggctgaagtactaacggggggcggtcatcaggcgggcaaaacttacctgtatcacgacggttgaaccccaggtagcttgctctagaggtgggcgaacactacaacacttgggaagtgctgcttgact

SEQ ID NO: 306092 - DNA, 502 bp, Zea mays
tccacgcgtccgcccacgcgtccggacttgaagaacttcaagtactggacatcaaatttctacatggttgtgctaaacctactattgttgtcctctaccaggataataaagatgtgaggcatgttaagacttatgaagttgcactgaaggacaaagattttgttgagggtccttggtcccagaataatgtagataatggtgctggtttattaataccagtaccagctccacttggcggtgtgataataattggcgaggaacaaatagtttactgcaatgccaattccacatttaaagcgataccaataaaacaatccatcatcagagcttatggacgggttgacccagatggttctcgatatttactcggtgataatactggaattttgcatttacttgtccttacccatgaacgagaaagggttactggtttgaaaattgaatacctgagagagactccgattgcatcatctatttcgcatcttgataatggtgttgttta

SEQ ID NO: 306093 - DNA, 448 bp, Zea mays
ctgattcgtgggcggacgcgtgggccctctcctacctccacctccacgacaacaagcaaatccccatccagttccaaaccctaactcaaatgctcgctttgactgcctcagcctaatccgcttcgtgccatccttatcgccacgcctgcgcgcacactcgtggaccccgcctacttgcggtcctcgcgatggcgggctccgacgacccccgtgcagcgcccgccagatcggtcgccgtcgtcggcgccggggtcagcgggctcgcggcggcgtacaggctcagacagagcggcgtgaacgtaacggtgttcgaagcggccgacagggcgggaggaaagatacggaccaattccgagggcgggtttgtctgggatgaatgagctcacaccatgacagaaggtgaatgggaggccagtagactgattgatgatcttggtctacaagacaa

SEQ ID NO: 306094 - DNA, 354 bp, Zea mays
gtacttcgtactctgccggctcctggtgctcgcaagggagctcgtgcatggagacctgatataacatgccatgacccgcaagatatatgtcaagacggtagcagacattgagttcttgccaaacctaatgtttgtcaaacccctcatggataggaaaggcggatgcggatcagaggtcacgggggaaccaaatttgccgatgtataccatacctatcctactggagggtaacttaaggttctgattgaagatcgctagcaccattcagagagtccagagcttgttagcacagggggtaacttgaactcaatagtggtgccagatacctagacgatgactgcaggactatttcaa

SEQ ID NO: 306095 - DNA, 412 bp, Zea mays
gtagatgctcaatgattcacatgctgcacttcagtgatatcctaaaaactgcactagtgtcatttactaatacacaagctttactgattgtaatatatggatagtttattttgattacatggtgaagtttcggtgttaatgcccttgactaggagggaacgcatgtcgatagctttgaactgactgttttcttttaacaaattgcatgctcacattccctgaatattttaaaatttacataaaattgaacaagatcagatgcgagttattccactttcgttgcagcattttttagagaaaacagcgtatccactattggaaggatcagctaggtttttgttggattggttaattgaaggacacaggggatatttggagaccaatccttctacatctccagaacattatttta

SEQ ID NO: 306096 - DNA, 340 bp, Zea mays
  unsure (1)..(340): unsure at all n locations
gtactcgtgggctgaaatcaaaatcttcagagctatgtttacctatggaaggatggacttcatattgcacctgcttcacacatgaacgcccgccaagaactgcttaaagtgcaactccatgtacccgggctcaagttacgccacctacgtgagaattctatgcatctactcgtcaagggctgactgcagactcgggtctcacagatcgttcgctacctcaagaagggccggtacacgcactgcgtaggcactggcgcccctgtattcttgggcgactaactggagtacctcgtttcctaaagtantatagttggacggaacgcggcgaaagacaacaaga

SEQ ID NO: 306097 - DNA, 470 bp, Zea mays
ttctctcgtccgcggcagcgacgaagttgccatacaagacgtccctggcggagcgaagaccttcgagatctgcgcgaagttctgctacggcatggtggtgaccctgaacgcgtacaacgtcgtcgccgcgaggtgcgcggcggagtaccttgggatgaccgaggacgtcgagaagagcaacctggtgttcaagatcgaggtgttcctgagctccggcatcttcaggagctggaaggactcgatcatcgcgctgcagaccaccgacgcgttgctgccgtggtcggaggagctcaagctggtcggcagatgcgtggactctgtcgctgccaaggctaccgtcagcgcgtcgaacgttgtgtggtcgtacacctacaacaggaagtctgcgtcctcggacgagatcgtcgaggctcgcaggagctcccaggcggttcccaagactggtgggtgaggatctgtgtgagctcgat

SEQ ID NO: 306098 - DNA, 378 bp, Zea mays
tttctacgcgtccgatcttttttcgtttagaacctgtaaaatttaccccactcgccagtcgcagcagcacctgtagcagtcatggacgccagcggcgcctgttgcaaggggaagaagggggcggtcgggcgcaaggcaggccggcccaagaagaagtatgtgaccccgttccttaaaggccggcttgaatttccccgttggcagaaccggcccttccttaaggaagggccggtcctctcagggcttggccacttgcgcccccgtatacctggccgccgacctggagtacctggcctacgaggttctggagtttgcaaggaacgcggccatagacaacatgatgacgctcatcatcccgcgccacgtgctcctggcgat

SEQ ID NO: 306099 - DNA, 253 bp, Zea mays
attgcttacgcgtccgcccacgcgaacgatacctcaagaaagccgggcacaaccctgataagatagcctcagcacccattccaggactcgagggcgacaacacgaatgagaggcccaccaacctagactggaacaaaggcccaacccagcatgaggctcttgaccagatcaccgagcccaagaggccctcagacaagcccccgggcccgcccccccaggaagcgcacaagaaaggaggcaacggaaccgaacc

SEQ ID NO: 306100 - DNA, 255 bp, Zea mays
tcctcttcttccgcccacgcgttcgtccacgcgtccgcgaccctttccagctgcctggcgtcgtcatggacaactgatacaccgtaccgtcgtctctgtttgcgtttctgtcaagtgtgcatggaataatactgtaactgtgtttcctgccgggcaatgcactgtgatatgatgcccaacgaataaatgtcgcttttatttttaaaattaaaaaaatattatatctatatctatatttctaattatctttttttc

SEQ ID NO: 306101 - DNA, 344 bp, Zea mays
tttattaccccaagatcgcgcaccccacggccaaccaggccatccaggaggccgcccagggctgcaagcacgtgcacatcaacgactacagcaccacgcagggcctccaggggccagcgctgaaccaggccctcgcgctccgccccggcgggccgccgacgcaccgccacacgggcactgggccgccgaccccgccagggcgcgacgacccccgagacgaaggggaccgcctcgccgacctggcgcgctccgagcgcggccacttcaccttccgcggcgtggccgccaaccgcctagacgaggggcggccccggacgctgcaagccccgcagggcgaggcccgg

SEQ ID NO: 306102 - DNA, 308 bp, Zea mays
gaaagctgccacccccgcaggcaccggcccgaaacaccaggttagacccacccgcctgattatgcgaccgaccacgcgcccgcgagcacacccaaaccaaacacaaagacacagcggagaaaccccaggcgaagacaggccgcggcaagggccgcaagggaacggacaagggcggagccaagcgccaccgcaaggagccgcgcgacaacaaacagggcaccaccaagcacggcgaacacccaagcaggcgaggaggggcggagacaagcgcaaacccgggccaacaacgaggagacccgcggggcgcc

SEQ ID NO: 306103 - DNA, 231 bp, Zea mays
ctctgttttcaccagctttgaccgccgtctcccttccccttcgcttctgctcctccccaccccactcccccgtaggagcggcggtggtggcggcgaggtcgtaccccacatcggtgagcggcggcggcaccgtcggaggcaaaggcatgatgttcgggcgcgcgccgtagaagagcgacatcaccaagttctacgagatccttggggtgcccaagtcggcgtccaggacga

SEQ ID NO: 306104 - DNA, 353 bp, Zea mays
aaccggatcgaaactccaagaccgacccacgcgacgcgttgtttcccagcatagaccgcagcaaacctaaccctccgatactgcacctacccaccccactcccccgcaggagcggaggcggcaggcggagaggacgaaccccacaccgcagagcggcggcggcaccgccggaggcaaaggcaagatgacagggcgcgcgccgaagaagagcgacaacaccaagcactacgagacccacggggcgcccaagacggcggtccaggacgaacccaagaaggccaaccgcaaggctgatatcaagaaccaccccgacaagggcggagaccccgagaagcacaaggagctcgcacaag

SEQ ID NO: 306105 - DNA, 166 bp, Zea mays
ttttattcagaacacgcgccacgactgccacccccccccttccttgtgatctccgaatacccaacttagattccaagggccgcgccgagtaatccccggctctccccacccaccataaatctagcatccgcgcctcaaaacccacgcgaaacgccccgccgaaagc

SEQ ID NO: 306106 - DNA, 244 bp, Zea mays
ttctcggaatagtgccctctctggatgatcctgtcgaaaagttccccaccagcgcagagctccatgacgagctgcacggcgacggcgtcctcgtaggcgccgacgatggagacgacgttggcatgacccgcgaggcggtgcatgatctggatctcgcggcgcacatcctcgacatcctcctccgtgagcagcttccgtttggcaatggatttgcaggcgaactcccggccggtggccttctcga

SEQ ID NO: 306107 - DNA, 402 bp, Zea mays
tttatttattggggtgggttttttttactcagcgggagggtaatagccgaaaaaaagcattacatttcgcacacatccctgttgaagaaccaaagggaacaaaacatgatgataaacctttttgggaaggtagatctatatcctggcggttaagaataaaactcgacatcccaaaaggctccacgtaggacattcagagaacttatgtcttggtagaaaactgggcaggaaagaaccgcctcctctgccccacgatgatgctgagcttgataccaatgggactgggcaggcttacctacggtttgttgccctggccaatggcgaacacattgcccatgccggtggttaactggtggcccatggagtccttaaagtggatggtattaaaaacccccttgacct

SEQ ID NO: 306108 - DNA, 319 bp, Zea mays
gggcaaaactggctacagcaattctccgtaccaatacaactttgaactggtgacacttcactcatacatgaaaaagcccgtttgggcgactcctaaaggaacggaaaccattggggcacttatattagttgtattcaccaataaccttcacaagagcactttccatccttaaacttatgcaaacaatttgaatccttgattaggatctgccggtcgtatttttctgaaactagcttggaaaaaatgtgacaatggtttcacatccttaaggcctttattatttcgatgcttttaaaaggaggggaatttgaaattgcaa

SEQ ID NO: 306109 - DNA, 217 bp, Zea mays
tccacgcgttcgtccactcgtcctcccacgcgggcggtttaacaagcagaaggccatattgatgaggaagccagaagaaatcacaaaagatgaatatgctgccttctataagagcttgacaaatgactgggaggagcatctggctgttaaacacttctttgtggagggtcaaccggagttcaaggctgagacttttgcccctaagaagggccccttt

SEQ ID NO: 306110 - DNA, 208 bp, Zea mays
taactttcacatataccttgagtgcttcagagattgaatacatgaaggtaaaatttgcaaaactattgcttggtgatgatacttcaggaggagctaggggcgtttgggtggctttgctcttgtctaatggcataatcaattcttctgcaacttgcttttgtagactctcgtagccgtaaccactgtgcgatgttataaagtacaggtg

SEQ ID NO: 306111 - DNA, 232 bp, Zea mays
tccatgcgttcgtccacgcgtccgcccactcgggcgggtcaacatgcagtaggcgatctggatgtggaagccagaagaaatcacataagatgattatgctgccttctataagagcttgacaaatgactgggaggagcatctggctgtgaagcacttcttctgtggcgggtcacctggagttcaaggctgtactcactgttccttaaaaggtcccctttgatctctttgacac

SEQ ID NO: 306112 - DNA, 289 bp, Zea mays
tccacgcgttcgttcactcgttcacccactcagtcggctcaacaagcacaaggcgatctggatgaggaagccagaagaaatcacataagatgaatatgctgccttctataagagcttgacaaatgactggcaggagcatctggctgtaaagcacttctctgtggagggacaactggagttcaaggctgagctcattgctcctaagaagggcccctttgatctctttgacacctagaagatagcatacaacatcaagctctatgtgcgcagggtgttcatcatgggcaac

SEQ ID NO: 306113 - DNA, 137 bp, Zea mays
tccacgcgttcgtccactcgttctcgagagcattctgttttaacaagggggaggccatattcatgaggaagccagaagaaatcacaaaagatgaacatgctgccttctataagagctagacaaatgactgggaggag

SEQ ID NO: 306114 - DNA, 383 bp, Zea mays
tttcttgcagcgcccgtcgcctccctttcccggtcgggtcctctttcaagcgcggatctgaacgctgcgctccgtgtcgccgctcgaatccgccatgaagggggccaaatccaagggcgccgtcaaggccgatgccaagctggcggtgaagagcaagggggcggagaagcccgccaagggcaggaaagggaaggccggcatggaccccaacatgcctaagagggctcccagcgctttcttcgtgttcatggaggaatttcgcaaggagttcaaggagaagaaccctaagaacaagtctgtcgctgcggtggggaaagctgctggcgacaggtggaaatcccctgagcgaggctgacaaggctccctattgagccaaggtttac

SEQ ID NO: 306115 - DNA, 487 bp, Zea mays
  unsure (1)..(487): unsure at all n locations
tggacgcgtgggctcggcttcatcaagggctacaaccgcacctttaatctcgcttgtattgaccacagaggcacaacagagcatccggcgaggacctgcacgcttgaaaccgacggcgaggcgacgacgaggccatatgccatggtacaagcctacaaggagaaagtttatccaaaaaacaagttgaactgctgcagcatgagccagaagttggttatgaactaccatataaggttcccttccagagtctcccatgctatatcgtgaattttcccaagcaaagcacctgccaggcgccaatatgccaccgggatgttgtcatgttggtcagtttggtgtatggtttaatttctacnggtggtcgtatatcagaggtaaacaatattagatgtttatttatttggttggaggtatcagttttctatgaatgtacaactgtttgctttgtgctttatttagacttctaatttatatcgatatttatgac

SEQ ID NO: 306116 - DNA, 486 bp, Zea mays
attctttgtatacgatgaggtttctgctcctagtagcagatccgcgcatatgactagatgtttgaggaaaagaaaagggcaagacgctatatatatatgcagcacgcagtcgcacatatattcagttttccaatctgcctcttgctttatgataattcaacttgcgctgattatattcttggctacctagaaatgtctaattaaactttgtttgctagctagattttgttgcttcctttcgcatctgatctttttatctcttctgagtgctccgcaaagccttccagtgttgaagaagctgctggaagaacgaagagatgagctttctcttgaaggaaaaagagatgatcattgctggtttgttgttgtttcgtgtttttttagcttcttgtcccccatttatatttcgcgcctaatgaacgagctcgtagatcttgtgttcttgtggctggttttggtggatctcgatctccgttacgtttacat

SEQ ID NO: 306117 - DNA, 417 bp, Zea mays
ttctacgcgtccgggaaggaggtggagtactacgaggagttccagcggcggctgcgcgcgcgcgtgggccggtcccgcgccgccgtcatcgtccgcggcgcgctccacgtggtgagcatcggcaccaacgacttcctggagaactacttcctgctggccacggggcggttcgcgcagttcacggtgcccgagttcgaggacttcctggtggccggcgcgcgcgcgttcctggcgcggatccaccgtctcggcgcgcgcagggtcaccttcgcggggctggccgacatcggctgcctgccgctggagcgcaccaccaacgcgttccgcggcggcggctgcgtcgaggagtataacgacgtggccaggagctacaacgccaagctggaggccatggtgcgtggcctcagggacgagttc

SEQ ID NO: 306118 - DNA, 486 bp, Zea mays
ttcacgcgttcgaacggccgttatgcgcaccatggcgattggtgatgtgcgaccacaggaacacttggagcaagatcagccttcttcctcaaccatagtgcatcccccaacccaagatgacgaacaggtacctcaagtggaggcgggcgatcaagggggagcacaagatgatcatgtgatgaaggaaaaagcgcaaccggcacctccaacccaagttcgagcaatgattcaaagggatcatcccgtcgaccaaattctgggtgacatcagcacgggagtaactactcgttctcgattagttaatttttgtgagcattactctattgtctcctctattgagcctttcagggtagaggaggccttgctagatccggactgggtgttggccatgcaagaggagctcaacaactttaagagaaatgaagtttggacgctggtgcctcgtccgaagcaaaatgttgtgggaaccaagtgggtgtttcgcac

SEQ ID NO: 306119 - DNA, 519 bp, Zea mays
tccacgcgtccgctagggttttcgaggcgtcgcagataagagatccctcccgcacctccgagccgccactcccaagacacagagcgtcagagcccgatcccgatccagcgaggcggcgaccctccctcctccccttgcttcgctcgtccagccctgaccacccgcatccccgtcagtcatggcagcggcagcaggcggaggcgcggtgcgtgcgctgtcccagaaggagcaggacatacagatgatgctcgccgccgacgtccaccttggcaccaagaactgcgatttccagatggagcgctatgcctttaagcgccgcaccgacggcatctacatcatcaaccttggcaagacatgggagaaactgcagcttgcagcgagggttatcgttgccatcgagaacccgcaggacatcatcgttcagtccgcccgccctatgccagcgtgctgtcctcagttcgctagacactgcgctatgcatcgtggagcacaccctgtaccttactaccagtcagactc

SEQ ID NO: 306120 - DNA, 210 bp, Zea mays
tcgcttccatcatcacttgctgaactgctctagtatttgcatttgtaattgaagtctgtcgctttaagcactcttggttctaaagatctctgtgcttttggggggtgtttttgcattgccccagattccaataaaaaaaaaaaaaaaaaaaaaaaaaaaaaaaaaaaagaaaaaataaaataaaaaaaaaaaaaacaaaaaaaaaaatag

SEQ ID NO: 306121 - DNA, 418 bp, Zea mays
ttgtgttagcagaagacaaggagtttgcattggtttgagtgaggtcatgggcagtgcaggaaaacaccagctattaagttttatggatgaacttattcctaccattcgtactgctctatgtgacagcacccaagaggtccgtgaatctgctgggttagcgtttagtactctgtacaagagtgctggactgcaagccattgatgagattgtccccacattgctacgagctttggaagatgatgatacatctgcaacagctcttgacggtctaaagcagattttaagtgtcagaacagcagctgttttgccccatatattgcccaaattagtccagcctcccctctcttcattcaatgcacatgcattaggtgctctagcagaggttgctgggccaggtttggattcacatatcggaact

SEQ ID NO: 306122 - DNA, 441 bp, Zea mays
  unsure (1)..(441): unsure at all n locations
tccacgcgtccgggtccctatccgctgctgcgaacagcagaagctgcggcacggaggtgcgctcttcccggcggtggagttgcagctgcagggggaagaagcgagctagagctgcagggatgataagcgccaagtccaacgccgccgtgtacccgtgcccggagtatgcggaggtcgaccccaccggccggtacggacggttcagcgacgttcttggcaagggcgcgtccaagattgtgtacaaggcgttcgacgtggaaccaggtgaagctgcacgacttcctgcagagccccgaggacctggagcggctctactgcgagatccacctcctcaagacgctcaagcaccgcaacatcactgaagatgttcacctncggcaccctncgccagtacaggcagaaacaccgnagggtgaacatgtgggcggtgaaacactggtg

SEQ ID NO: 306123 - DNA, 372 bp, Zea mays
ttcctcgcgtccgaaaaaaaaaaaaaaaaaaaaaaaaataaaaaaaaaaaaaaaaaaaaaaaaaaaaaaaaaaaaaaaaaaaaaaaaaaaaaaaaaaaaaaaaaaaaaaaaaaaaaaagggggggccgttttataggttccaagtttccttccccttgcttgcaacaaattagttttttttttgtgtcccctaatttaatttccctggccgggtttttccaccgtttttactggtaaacccctggctttccccaacttattggctttgaatcacatccccttttccccagttggcttttttccaaaaaggcccaaccctttcgcctttcccaacatttgcccaccctgattggcaattgggacccccccttt

SEQ ID NO: 306124 - DNA, 306 bp, Zea mays
gggcacaaaacaaacggattcttaggcatatttgccccaaactacttaaaaggccccaagttttttatgtcttcggggaacaaaacaaaaggaccatcgcaacacgggcccttaatttttacaggggggggacaaacaaacacataggatctagtggggggatgtacatgtcctacctcgttggggggggtgaagaatttgttggacactgggatagccggggatcccatgatagcatcgatcaggccgtcggcccatttggagagcgagcaggggcccacccaaacggggctggaaccgaaaatg

SEQ ID NO: 306125 - DNA, 238 bp, Zea mays
tcgttcacgcgtccggtcttcgtactcggctacctccttggctcatacttttaccccttttcgcaattcgttgctccagccgtcggtccacccgttcgaggacaccatgtgggagcgcatttcgatccacatcgtccaggccggtatccaggtcggaaacgcgtgctgggagctgcactgccttgagcatggcattcaggctgacggtgacatgcccagtgacaagagcattggggga

SEQ ID NO: 306126 - DNA, 271 bp, Zea mays
ttttcgcatccggccaagaacgagtggaggaccggaggatggtggcgatgatggtcaacagcgacgccaggacctgcctgatgattccgtgcactataacggctgcgtgctacctgatgggtctctcctacatcggcggcctcatcacgggccggcccaacgagcaggccgtgaccgtccacaggaggaaggtggacgccgccgaggcgttcaagatcggcgctatacagggccgcttcttcaagcgtaaccccaatgagggcctcgccat

SEQ ID NO: 306127 - DNA, 431 bp, Zea mays
aagatattaatattttgtaccaccaagaggatgtgtgaccaacttgcaaggaaggtatcatagacgaggatggagagattggtgaggatgatccgcgtgcaaatgcagctgtgcagaatggtaataactgacggagagtggcctgcatcttcttgttcatcctgtacaggtgacaattggaagtgttgattcacttgttgctaatagttctattactcagcatgtagagatcataacaccctcagaaaaacaacggcgcctggagcagatattacgatcccaggattcaggttcaaagtgaaagggagaaggttctgaatcagtttcgatctgggcggtctcccattttagtggcaactgatgttgctgcgcgaggtttggacatcaaagatatcagggtagtgatcaactatgacttcccactggtgttg

SEQ ID NO: 306128 - DNA, 447 bp, Zea mays
tcggacgcgtgggcggacgcgtgggcggacgcgtgggcggacgcgtgggctacctagtttccttgcatggacttttcctgcagaacacgtacaacacgctccacggcggcgcggtggcggccgtagccgaggccgtcgggatggcgtgcgcgcgggcagccgccggggatcgagagatgttcctcggcgagcttagcatcgcgtacctcgctgcagcgcgatgcgatgtgatcttctaattaaattctctgcacctcgcttttccagcatccatttgttggtcgaatcccacattgctatgtactcttggggcaactttgtgcagcaattcaacacgtcaggataatttgggggatgggggagtctagctactgcttttgcactggttattattattatgtagttacaccacagttctatgatgttttagaagtaaatagctgattg

SEQ ID NO: 306129 - DNA, 406 bp, Zea mays
ggtgaactcccttacacatggggtttacaaactcatgtgtggactccttacctacactcctagtagtatgagaatgatgctaaagtatccaacggtacaaaacaacaagaagatggatatttctcctttagaaaaaatgagcggggagtggcagtgaactcccttacacatggatcaggacctctatgacaagtacattgacatcaaaggaataccagagctatcagtcatcaacagcagcgttaagggaattgagcttggatcggttgtgtccatctctacaggctacaaccattgaggtgttgtcagatggaaatctggtcttcagaaaaattgccaatcacctaagcaaagtggcttcgccatttgttcggaacacagcaaccataggtggcaacataatcat

SEQ ID NO: 306130 - DNA, 440 bp, Zea mays
ttcgccactggccagcttgagccaaccagaagagcttgcaggctctgtgagcgtgtgagagagagaggatgaggggccgcatactcaaatcttatatggtggtatccctacatggcttgagcctaactctgtagattcaggccatctaaattatcatcttcaggtccttactccttagcttttattctgaatcaggtaaacaaaattctgaataaggtatgtatcatttgcaacatagacatacactgcacacatactgcctaaagtccttagttcctattcttatagatataacatagtgctctacacaggatgttgacatataccttcctcaaataattcgatctttgggattccactagctgctctggagctccctagaaacagttaacaagacctgctcttgttgctagaattttgggcttttgagatactgaaat

SEQ ID NO: 306131 - DNA, 320 bp, Zea mays
cccagatcggcaataaatcatattaagaatatggtaccaccaggtccatccagggacaaaggttgcagcgtacatctcataacctgaaacgaaatggctttattcttttaactctcaaaagtaccctcgccgaaacactcctgcagcaggaccaagatgctggtgtcattctgcttctccatcgccatgaccagtgccttctttaccacctcatggttgaagaagggcatcccaagatcacggatgcatctgcaggcttctcctaggtcaccaccagtgttgtattcctccaatagcttagtgatcttggccttagtatc

SEQ ID NO: 306132 - DNA, 433 bp, Zea mays
tcctcgcgtacgcttgttttcttcaattggagtgacaagcagcataacaagagtttttcagagtacgtctggtcaggatctgattggccattagatggctgggctggctgtcagtctacacctactccaacttctatctctcctggtgttgatcttggtcggaaaaaagggtcacaacttggttcagttggagcaactacaggtttgagttctttagcaaagccaggaagagatctaactggtggtggagcatttggaattccaggctatgctggtattggggcctctgggtttgggtggggcgaacctgaagaatttgaggatttcattgatcctccagcaacacttgagaacatacattcaagagcattatcccgccatccctcattaccattgtttcttggtggctcaagcaatacacatgtgtattctg

SEQ ID NO: 306133 - DNA, 459 bp, Zea mays
ttccacgcgtccgcccacgcgtccgggttaatgtactggatgtattggagacaataaagtcttcaagcactactccgaagaaaattgccgaaactcccgaagtgcaaatcgaagcctttggtgtcgaagctttaaagcaccaagctgagactgaagctgggccttcagagcccgccaaggtgaaatccttggaaaccaaagaaacagaagcagcagaacaaattttggctgaagaaactggcactgccgcccccgaagcattttccgaagctttcaattatatttttacgacatgcttcggggaaagagttgactgaaaaagaaaagcaagaggctcagttctatggccaaaaactaaaatatccaaagggggcgttgatattcaacggcagcggagaagaagacttcttgtattgtctccctgacagcaaggagatttctgtctgtctggagatgagc

SEQ ID NO: 306134 - DNA, 468 bp, Zea mays
tcttctcgcgtccggcagaagctgtcagtgattttgcaaaatcaaaatccctttctcaacaaaggcaatatcttcccatatttaccgtccgggatgatctgctacaggttgtgcgtgaaaatcaagtggttgtggttgttggtgaaactggttctgggaagactactcaactgactcagtatctgcatgaggatggatatactaccacaggagttgttggttgtacccaaccaaggcgtgtggctgccatgagtgttgctaagcgagtcagcgaggaaatggagactgatctgggagataaagtcggatatgccatacggtttgaggatgtcactggtccaaacactataataaagtatatgacagatggagtgcttcttcgtgaaaccttggaagaagctgacctcgacaatatcgaggttgtgtcatggatgaagcacatgaaagatcactcaacactgatgtttt

SEQ ID NO: 306135 - DNA, 548 bp, Zea mays
tcgtcttcttgcaaggaccctaagctctagcgccaaattcatatcacatttgttctagaatgagatcatgaatggtccctggggttggcctggttcacgctccattctcagtgcgttttccgacatcgttcttcaagcaagcatgcgagctggctcctattttcactgagcttgtggattgtgtgagcttagatggggagtccttgcaagctgctttgtctagaacaaagcaggttcatgaatttaccgcaaggctgctagatattcatgataagatgatgttgataaataataaagaggatatacgcttaatattgcaccggtcggactatatgttggattctgaaatcaattcactgcttcaaattgaaaactctaggagctatattttgccaccaacgctgcaactttctgttgttccatcaggattaccaatgctagaatctgtatggattctatcagctgttcgcctactgatgcttatgtgccaatttagtgagactggagtcatacactccatacaaatctatacaaaatcaaagtggttg

SEQ ID NO: 306136 - DNA, 330 bp, Zea mays
cccacgcgtccgcggacgcgtgggctcctggggcgtgctggcctgctgaggggcgcgtgtgagctcattgatacgatgccgatgaagcctgacctgtgcgtgtggggagcgctgctcaactcctgcaggattcacggggatgcagcactggccgaagctgccatggccaaagttctgcaggctgagacggcaaccaccggcaaccgcacgctgatcacaaacctgtacgccgcgtgtgggatgtgggacgactccaagagggtgaggatgacgatgaaggaggcagggttgaggaagaatccggggcagagctggattgaagtgaggaac

SEQ ID NO: 306137 - DNA, 416 bp, Zea mays
  unsure (1)..(416): unsure at all n locations
tttttcgcgtgggcaacgacagtctatcggggggaggtcttttcggaagcattggtaacaantgggggtatcctcttcatcttctgttggagtcattgtgggctcagtggctggtacagatgactggactaggccttgatgttgcattgggattctattggtacaagaggaaacagaagcctttccgaagggtgcagagtacacatgccatggctatccatgcgtgacacttaggttcagatgacatggttcaaatcacagttgtagggggaaatgctaacgatggtgctcgagcaagcgagacatatagccaagcgagcattggttcacgcgacatacatgttgttgaaagaggaaatatggtcattataatacaagttctacgcaatgtgaccaacaacttcagtgaggagaac

SEQ ID NO: 306138 - DNA, 520 bp, Zea mays
ttttgatttcttctagttcttctaagcgaaaaagaggtggacctggtggtttaaataaagtttgcgcaatttcacctgaacttcagaccattgttggtgagactgccatgtcaagaactcagattgtgaagcagctctgggcatatatcaggcagaacaatcttcaagatcctgatgacaaaaggaagattatttgcaatgacgaacttcgtgtggtttttgaaactgacaacaccgacatgtttaaaatgaataaattattggctaagcacataaccccacttgacccaagtacagacttctatttcttttgatcaacatatgctactttatgtttgcattactaaagttcagtcctggaatttgctcaagtgcttcctaatgacattgcagaaggtcaacttcatgaagtaaaaagaatgaaggctcccaccatgtctcctcaacctggacgttccattgatcaaccctccatagttatttctgacgcactagcaaagttcattggaacagatggaac

SEQ ID NO: 306139 - DNA, 328 bp, Zea mays
catgttttacatgacgtacatgttcaagtacgaggccgtgcacggccaatgggggcacagcgacatcgccctcaaggactccaagacgcttctcttctgcgagaagccggtcaccgtctttggcatcaggaaccccgaggagatcccgtggggggaggctggtgctgagtatgtcacggagtccaccggcgttttaactgacaaggacaagggtcctgcacacctgaagggcggcgccatgaacgttggtatctttgccccaagcgaagatgcccacatgtctggtgatggtgtcaatgaagacaagtacaactccgatggtaacatt

SEQ ID NO: 306140 - DNA, 466 bp, Zea mays
ttgtcacgcgtccgcccacgcgtccgcggacgcgtgggcgtgatgatgtagttgcctacaagcacggggagagatctgctggtgccttgaaggcaaatggcttttccaatgtgctcttcaaggcatacaatagtcttgggcactacactgttccagaggagatggatgaagtttgcaaatggatcacagcaaatttggggcttggcactaagtcatcttgattggaatttgatgcgagaaagactcgcagggacggtgtccaaataataccggtatcttttccaggaggtatatggtttaatagcaaatttgggcttgggtatacggccatgttctagcttttcttaacgcagacgtgtctgcgaatgatgtatgcttataatatctatattttggtctacgtcgatttggttgtggcacggattatgtttggttcaaatattctgctctgcgaattggaattgtg

SEQ ID NO: 306141 - DNA, 362 bp, Zea mays
tcgtatgtagagagaaggaaaaatatccccaaacggtatctcccgatctcgatggggaaccctcgcgtcttcttcgacatgaccgtcggcggcgccccggcgggccggatcgtgatggagctgtacgccaacgaggtgcccaagaccgcggagaacttccgcgcgctgtgcacgggcgagaagggcgtgggcaagtccgggaagccgctccactacaagggctccaccttccaccgcgtcatccccgagttcatgtgccagggcggtgacttcacccgcggtaacggcaccggtggcgagtccatttactgcgagaaggttcccgacgagaagttcgggcgcaagcacaccggccccggtgt

SEQ ID NO: 306142 - DNA, 382 bp, Zea mays
acccccgctggtgccgccgctgcgtaactgccgggaccaaccacgcctgttttggcgaatcccacacaccctctcactcacgaactcggggctacacatcctggggcgatgacactacatgactacctcgccgggtcagagcggtggcaagacacagactgtaggctattacagtagcatggagcgtgtagagaatggcgtacctgatggaacaatgagctatagcatggatgatactcttgacatctacacacagggatcgactggtgccattattggtcttaacaacactgtacatgagggtcgcatataccatctgaaggtggactaggacaaggactatacgaagaagacactatctgctagatatcactcaggaatg

SEQ ID NO: 306143 - DNA, 169 bp, Zea mays
aaaaatcgtttggtggaaaccactaaaagccgttaaaagttcttcgatatatgttttcacagtttcatctgaaagccactaaaagcaggtccagaggtgcttttagttttgcactgcgaaaaagtcagcttttagaaaaagctgctttctggatccagtactttggttt

SEQ ID NO: 306144 - DNA, 335 bp, Zea mays
ccaccaaaatcagaacttttgaagaaggtaattcacaaacgtgttgctaaatgcgtagctttgtacgtaacagacgcacgaaggttccctagaacgagtagaacctgagcactgttatttacacctctcgttttagggggtgtttggttagagggactaaagattagtctctagtttttagtcccatttagtcccttttttgccaaacactaggactaaaatatggactaaaatgatttagtctttagtccttcacataggtgctaaaagagactaaaagcccacatgagtgtattccaagagcatttgagtctatttagtccctagaaccaaac

SEQ ID NO: 306145 - DNA, 358 bp, Zea mays
accggtccgaattccttgttctctccacgcgtccgcctactcctccgcggacgcatgggcgcctatctgccctttttaaaactttccggggtttccccacttctcccatttctcaccaccgccgccgctccccccgttcaacaacaccatgagggagtgcatctcgatccacatcggccaggctggtatccaggtccgaaacgcctgctgggagctgtactgcctcgagcatggcattcaggctgatggccagatgcccggtgacaagaccattgggggaggtgatgatgctatcaacaccttcttcagtgagactggctctcggaagcaccttccccgtgctggttttgttgacctt

SEQ ID NO: 306146 - DNA, 285 bp, Zea mays
gtcatacgtgcggccaattcgctcgagttcagagcgggcgcgctccaagcaagtctggcggacggtcgcgaagagtgcaatcaagcaagacacgatggtgaagctcgccttcggaagcgtcggctacttcttcagcgccaccttcatcaaggcctacgtggcctagttcatcgccacccttctcttcgtcttcgccggcgtccgttccgccatcgtctacgggcaactgacgaatggcggcgcgctggacccggcgggcctggtggcgatcgcgatcgcgcacgc

SEQ ID NO: 306147 - DNA, 235 bp, Zea mays
gccaatccgaacagcttgcagttactgagactgggtgggaaatataggatgatgggaggccttccacatcaatatgaatttggaaacaaagatgcgccagaaccgacccatccacaactggatcctcatgcgcactgacaataccataaagtacaacgccgatcgcaagcactccagtcgaaccaagctcggattctgagcgttaggattggtatggtgataagtaaaaaggata

SEQ ID NO: 306148 - DNA, 317 bp, Zea mays
  unsure (1)..(317): unsure at all n locations
gggnatgcgcgccgccgacaccgactacgacacggggggaactatgccttgggacagggccttccggatcaagatgaagctggagaagaagatgctccagaaccgaccaatcgactactggatccgcatgcgcactgacaataccataaggtacgacgcgcgagcgtaagcactgccgccgaaccaagctcggattctgagcgtaaggattggacggctgctaagtaaaaaggatagggtctaagagctatcttccttctggacagcaatgtgccagtttttctgcaagctagcaagtggaggtatgacgcttttat

SEQ ID NO: 306149 - DNA, 124 bp, Zea mays
atgccaactatatttatgtgttacttaataaatgtatggttagtctaaaacgaattagattttgggaacaagggagtatatataacagagaaaaatatcctcccctcaaaagcaccccgctgag

SEQ ID NO: 306150 - DNA, 275 bp, Zea mays
agaacaacatttgtatgttataaatacaactatattaacaggggcatatgtaaaataaattacatagggcatgataatcatgaaagatatggggcacacaaacactgttttcaagtcatccgactaatcgcgattagtcgggcaggtcgcctggtagtggccgatcagccggatgactcgactagagtatcaggtcgtccgactagatggtaaatcgaccaggatttgtccaggcggctagggttttctagtgggctactgggcttctatttttt

SEQ ID NO: 306151 - DNA, 317 bp, Zea mays
aggtaatataactttagccggccgcaatagaatcaatctagactaacaaatccaacatgttcttatgatatctcaaacacaactgtatctgaaaaacaaaaaactaaatggcgataccttttccttttgcttgacaccatcagcacctcaagtcttgagcttgcacaagaacttctgcttctcctctgtggtctggaagcgcccatgttcaaacttggactaggtgtccatgaacttgatcttcatgtcctcctggggcaaccgagacgtctgcttaagcagagactggcgggcagtcaccacccttttcttggggc

SEQ ID NO: 306152 - DNA, 349 bp, Zea mays
ggagccgcaatcaggcagtgagcacgaaccttgatcatggacagaaccactgttacaaaattgtacaacacatgagtgataccaaggatgaagagaaaccggtgcagttgctcaaggccctcgtacgaaacaaaaggttcatggccctacaagtgacagattaggttccaacccaagcgatgagtgaacagtctactccactcccagttccattgaccttaataggctgggagcaggacatttgggttaacaatacctcgccacagacgtgcagccgctggccaccgaacatgttcttgtcgagcgccgtctggttggcgtccgtgttgcgcagcaggtcctggtagtc

SEQ ID NO: 306153 - DNA, 472 bp, Zea mays
gcgtatagacacttccagtgccatcatagactcaacgtcgacatggtttcagaggcagagcaactacagtagcacttccataagagaactacctgcacctgatacgaacaagcaagaatgaaattcctaaattatcaataaaacgaagttcagggtacatcaatgtggatacgagtcacagcttcgcagagagcacttcttttgagaatgccctacaagatgacatcgtccacactgaacgatccgtttcggccgcttcatgctctcgatctttagaatcttcatcttgggtcgaccaggaggcctccggatattgggtgggctgagcatcatcacatcggccttgctggccacaccttgtaacccgggagaagaattgctccagtggctcctgtctggaattggatgtattggctgcgaatatgtttctcggtacttcattacactgaagcagtcatgagcatagaagcgc

SEQ ID NO: 306154 - DNA, 304 bp, Zea mays
aacacatccatgtccacatatatttagatcaaaccatgcatgtatatggcgcaccaccagcagctagcttaattattaatataagaagaagaagaagtcctttgatttggatcaccggccgggcgggcgggcggcgtgatgtgtgattagtcgaaggtgcttttgccggtgaacttgacgtcgatggggttgacgttcttgccgatgctgcggaagttctggccgacgcccttcctgccggggttgaccttctccgggtagacgccgtccttgggggggaggtactgcacctcgccgttgggga

SEQ ID NO: 306155 - DNA, 458 bp, Zea mays
acatcacagcaagttctaacaagctatattggcacattacaagaacaaatctttcaggaagatgtcaagtttttagaaacatctgcagcatatccacttatatcaggcacataacctttttctatcatgcctgagtttattatttcataagtgatcctatttggaactagacctttctctaacatctcattcagtaccacattagcctcgtccatcttccccatcttgcagaagtacttgagaaacacattgtatgtgaccacatttgcccgcttcttacgtttctccatcctaagcctgatttcatgggcaccctgagcgtcccccttctcacagaacccatttataatggtattgtacgccacatgttttggctccaaaccaacctccaccatcttatccaagagctttactgctttccggacctcacccttgcaacacagcgcaccaatgagcac

SEQ ID NO: 306156 - DNA, 307 bp, Zea mays
aagggccaacattcaattttttaatagggaatatacatgacagggaaaacctggatcctttcaatacaaaaacagatcttaggatatgggaagttcttgaaaactgccatatgaagggacaggtagaatcaatagggggacttgacattcatgtgaaagaaagcggggcatttttttcagtagggcaggggcagtttctatgccttgcccgagccatccagagcaccacggggaccgggccattttggcatgctacgtaaacctagtcgtcgttttcgcgggggcggggggggtccacggagcaaat

SEQ ID NO: 306157 - DNA, 432 bp, Zea mays
ggtcggtctatgctttactcaagggccccttcattggatctgctgcaatgcaacaatatgctgacgtcactcagccctgccgaaaatgcaacccacaccacatgcctgttgccagtagtgcttaagataaacatgtgccttttccccccttggaagacaaaagcatatatccctacttttttggcgtaaatttcaactctggttacagattgatttcgtaccgaaaatgatcttcattttagatctcaccatcccagagttcgtcgattgttttgtaaatactctgggggtgcacaaacgcgtcatttctgatttgcttaacctgttcaatttcagaaaacttggcgcacagctcatcaggaatggaccaaccaaacaggtcaatgttctccttcaacctcgactcattggcgcttttgggaagcacgctct

SEQ ID NO: 306158 - DNA, 297 bp, Zea mays
tcttcggaagagctattgaaggagattgaggggggctgttcttttagggtcggggtgcctatctcatcagatctaatgaacaccggtaattacatcacagagatagctagtgactacagggtgatgaacatccccgacagggtgaggctcatggatgagctgatggctatctgcatagagatggctaaacgggactgctggggcatatggaactacaccaaccctgggggtgcaagtcacaacctgattctagggatgtacaggatatacatcaatcctgtttgctagtggaccaac

SEQ ID NO: 306159 - DNA, 174 bp, Zea mays
tgactgctgacgcgtgggttgcagtataatgacagcagtgtctttacaaaggagctcacaaaatcgtttgggtgggatatgcatgattcatttatgcaacatgatgcacaagaattgcacagagtcctttccgtgaagctggaagataagatgaaggtatgacatcttgaactg

SEQ ID NO: 306160 - DNA, 328 bp, Zea mays
tctttcaaagcatccagcgcagccacaccgggccagccttggtccagcactagggggagctatccaatagagacgaagatggggtcggcgcggtgggtgcaggttgcctccatggcggcggcagcttctggctgggtgggcaactgtcgtcgggcctcggcagcccgtggacgtgctcgcgcagaatgactacgtgccgacgcgggcgcaagaccgcatacactacatcgactgctggcgggaggtgcaggtagacctggacaagaccagcggggcgggggaacagacacggagctcctacctctgtgggcactttagcatgcacatg

SEQ ID NO: 306161 - DNA, 219 bp, Zea mays
tcgtccacgcgtactgagaagggggtgttctggagcgagctggacacacagagggggctgttgaccttgccatgctggctggattacctcctgcaggtggcctttgtgagattgtagatgacggatatgggtccatgggtcgcttgccaaagtagcgtaggtttattgcaaggagaaacatagacatattaggtaccggtgcctggacacggcttatga

SEQ ID NO: 306162 - DNA, 253 bp, Zea mays
gcctcccacgcgtccgtggacgcgtgggccatgcagctgtcttttatgttttcgtgggcctagcaaaactaaacaataagacggggatgctccgggagtcaaaacactactgtgaaacctccctaaaaagctactaacaggctctcacagggacttttgtggaagaaatcgccactggtctaactgacgtttgaaccatatgtgagacgatgaatgagcacgagcatgcgctcaagctacttcagaaggcctt

SEQ ID NO: 306163 - DNA, 328 bp, Zea mays
tgtttgggcgcgtggagcccgtggacaaggacctatacgtgcggtacgagcccgcgggggagcacctggccgtctacgcctggtgctcgttgaacggcctgccagggttcccgcacgttggggaaatcgtagtgcccaccgccgtgcactgggccgacaagtacaacaggggtgcctgagacaggtgcgagcacggttacgcggtggccaagtacctgcctgacatccacaccgaacgcattgtcaaggtgttttcctgtgcgccagaggcctagccgctggcagaaggccagtactgtgtgtatgtgtgctcgcgcgctcgagctcg

SEQ ID NO: 306164 - DNA, 465 bp, Zea mays
tcccacgcgtgcgcggacgcgtgggcggccgcttggtgccagacggtcggctcgtagcacaccttcaaaaaccacactgggtggtggctttagccaaatgcctggtgcttataaattttgtccttgatattcttcctgaattcctcagcatttggttacatacaaggttgcatttggtttgctttttcggaagttgtaaccaaaaaaccttaatttttgtttgcttgtgcagaaactgtgaagctaattcctcagcatttggttacatacaaggtttttggaggacccgaaggccctcactatgcccattatgacttagttggggggagaaaggctgtccatgaagtatacccatgtataaaaaagttcctgtttaacatgacgaagtgtcttcatgagtctttggcattcattgcctgaattacaatgttcaagaccacgtttaattccatggaaaatttccag

SEQ ID NO: 306165 - DNA, 350 bp, Zea mays
ttgttcgcgtgggcgtgtcttgaaggtcttgagaacatactccacgcaggtgaggcgggtactaatggctaggaatcagggacgaacccatacgccgagtttattctagagtgcggaggtctggagaaactggaggatctgcaggacgtggacagcgacaggatctacgagctagccatgaagctgctacagaactactgcgaggaggaagtaagcgagagtgatgatccgaacatcccaggttcgaatgactcgtcagatactgtggaagcaacgcccgaagatgctgctgctgatgtgcagtcaccaccaataccgccgactgcgaacgccgtagatgaacccaactg

SEQ ID NO: 306166 - DNA, 338 bp, Zea mays
  unsure (1)..(338): unsure at all n locations
tctccacgcgtccgtctagatcgcgagcggccgccctttttttttttttttttttttnnngaaaaaggaccactcacaataaacagcgatggaaaaggtaaaatgcaagtgacaacagtttaaagggctttccaacccaaccagaccgggctccagcgccccacgccacagacgaggtgggacaccgaggccttgccaggcagtatcccttacggggagccctcaaattttacggacgacagtcataacacggctacaagcgttgcacccaagaaaccaggttccagatcacatttgcatagtgttattctacagcggcaaacactattctctagttt

SEQ ID NO: 306167 - DNA, 361 bp, Zea mays
ttcttgttcttggtgtttgtttagacacatttgtttgttttaagaacttctgctaaaagtttctatgatctatataatatgaagcactcttagactgactggctgagctctcatgtgtatgttcactgctggctgctgttaaaggatgaggacgttgatggactttgatgaacctagaactcttgcaccaactagtgtttttgttggatgcacaacatacatggtgatccaaggtgaacctagagtggtcatccgaggaaagaaggtacagtgggaacacatcttctaatagaagaactgctttgatgcctctttcatgtgcttacgttaatgttacccaagaccaaactcaattcatatt

SEQ ID NO: 306168 - DNA, 420 bp, Zea mays
tctcctcgcgtccgcttggatccaggcttggcgacgttctggaagatcctcttggccgcaaccttggcctcgtactcgctgtgtatctctgtcgccagctcgtcctcgcccgttgcatgcttgagctgctcgtccatggttgtcagcgcctcgtaccggacgatcttcatcagcctcttcatgctccacgcggagatgttcttctggctgagcttgtgaagctggtcaatcgagatgccgtcatccaaatggcgctcggttttctgcctatgcagctgcttgctggctgctgctgctcctcctactcctcgcttggacgcgaccgtcgtgaggcgcccactcttgggcagtggccgggacttgccggcatcgctgtcgcttcgagctccgtggggatggatgcttccgcgctctggagcc

SEQ ID NO: 306169 - DNA, 283 bp, Zea mays
gtctataggcagaggaagtgatgatggtagatggttaatatgggagaaaagaacaggaaggcttattcaaaagcttgcaggggatggagcctgtgtgaactgcatacagtctcaggccttcaattgtgctgtcgcaacaagcggaattgatcacacattaaagctttggacacccgatgcaaatgctacatctatggttgctggaccagaactcgatgtatcaagtgccatagaaaattaccagtggacgttatgtccgaagcgtaaaaagtactgtcttttg

SEQ ID NO: 306170 - DNA, 216 bp, Zea mays
tttttcgcgtgggcggacgcgtgggcgatggcggcggcggctggccggcggcgagaacagcagatcgggcgctagcgcgggcgagggccagttctacctgcggaactacgtgtggcacaagggcaagttcgggcacgagttcctcaagatctagttaaggctctacagaaagttacggtccgcctacgggtccaactacaagaacgacaccatgat

SEQ ID NO: 306171 - DNA, 458 bp, Zea mays
tcccacgcgtccgcccacgcgtccgcccgcagcagccaaaacctacctagccgccgccgcaggcggccccccatcgccgccaagatgcagatctttgtgaagactctgacggggaagaccatcactttggaggtggagtcctccgacaccattgacaatgtgaaggccaagatccaggacaaggagggcatccccccggaccagcagcggctcatcttcgccggcaagcagctcgaggacggtcgcaccctcgccgactacaacattcagaaggagtccaccctccacctggtgctccgcctccgcggtggcgccaagaagcgtaagaagaagacgtacaccaagcccaagaagatcaagcacaagcacaagaaggtgaagctctccgtgctgcagttctataaggtggacgacgccactggcaaggtgacccgcctccgcaaggagtgccccaacac

SEQ ID NO: 306172 - DNA, 318 bp, Zea mays
agctggtgcgcctgctggtagccgctgcggacttactggggggccacgcgtcctctttgcatgcgctccatgcaaaccccttcagaggcgctatcggctctgactgcgagaaatacgccatagatgttcaggacgtcatcgagtacggaactacagggagagcaggtgggttcatcacggaagccatacaaggggttgttggaatcgtgtcactggcaccagcatactggcccgtggcatacagtatggtaaggaaagccggagggctctgattagctgacgaagttcaggcagaagtcgcgcgaactgggagccact

SEQ ID NO: 306173 - DNA, 439 bp, Zea mays
  unsure (1)..(439): unsure at all n locations
ccaggatatggagggcatcccaccggaccagcagcgtttgatcttcgctggcaagcagctggaggatggccgcacccttgcggattacaacatccagaaggagagcaccctccacctggtgctccgtctcaggggtggtatgcagatctttgtgaagacactcactggcaagacaatcacccttgaggtggagtcttcggataccattgacaatgtcaaggccaagatccaggacaaggagggcatcctacccgaccagcagcgcctcattttcgacggcaagcagctggaggatggccgcaccctggcggattacaacatccagaaggagagcactctncacctggtgctctcgctcaggggtggcatgcagatttttgtgaagacattgactggcatgaccatcacctttggaggtggagagctcttgacaccattt

SEQ ID NO: 306174 - DNA, 458 bp, Zea mays
tctcacgcgtccggttgcacctcgccaattcaaggccagacttggacggtttgctccccaattcagtggctttaaccaacatgattcacaggagcttcttgctttcctattggatggactccatgaagacttgaaccgtgttaaatgtaaaccatattctgaagctaaggattcagatggccgtccggatgaagaggttgcagatgagtattggggcaaccatttagctcgaaatgactctatcatagttgatatctgccagggtcagtacaagtcaacattagtttgccccatctgcaagaaagtttctgtaacatttgacccgtttatgtatttgtctttgcccctgccttcaacaacaatgagaacaatgaccataacagttttcagtactgatgggaccagtgggccatctccttacactattagtgtaccaaaatcgggagatacgaggaccc

SEQ ID NO: 306175 - DNA, 167 bp, Zea mays
tttggcttctacttccccacttaccaagacctcctcgggcgagggtgactcagggttccgtggaggggcgatggcggcggctcgagtggagtaccgctgcttcgtcggcgggcttgactgggccaccagcaacaagttgctggagaatgccttcgccttctacagcg

SEQ ID NO: 306176 - DNA, 322 bp, Zea mays
cttttcggtttgggtacgatgcgcaaccgccgcttcattaagcgcaaggtcccgctggtcgtgtacggcacaaaagggttcaaggtcgataaagccttacgtaacctgccctgcgtggacgtagtaactttgagcgcctcaacactgctagacgtcgaactcggtggccacctttaacgctttgtgatataaaccgacagcgctttcaagaagcttgaggaggtgtatgaaatcttccacgcgccgtcacagaagaagaaggagtttgatgtgacgaggcctaagatgggcactgatgacctgtgcacgattatcaactctg

SEQ ID NO: 306177 - DNA, 489 bp, Zea mays
ccttcgcgttcgggcaattggaatttctcaccgtggctgtgacacaaccgcgatccgcgccgctacatgggcaatatgctggcgccccaatccgagcgaggttacgagtcacttgaagaccaagttggtacctgggaatctcgagtctaaggtgctcaagaagaaaccaaggctcataaatctcttattaaatccatgatgactcgattgtatgggtctaatgctagaaaaggcttcactggcttgcaaaagctagagagtctttctcaatgactccatgatttgaaccgaaccaagatgattatagcaagaagcctttccttaggtattatgttatctcgttagtctagtgttattcacttgttctcaaatgctataaatcaagaacaaggcaacacaattgttaatggttaaaggcctttgtcctttgaagcatttattcatctcggatataatgatcttcagacgaaggacatgaaggtcacacct

SEQ ID NO: 306178 - DNA, 525 bp, Zea mays
catttacttcaattacctatgctctttcacatcgttaaaataggttagcgagtgccaaagttgcattaactgcagccatgttttgttctctttacttatgttttggaaccgcgactcccaggtatgggtaatgagactttgtaaaatggcaggagtatccatatttttcacttgcccctccggaaatgctgactcacatatttattattaggatgctgatggtttgcacaaagcactggaagcatccattctaagaaatgagggttcatggtctggttcatctcattcctcagccgctgaaagaacactgcccttccaagttaaaggtggtgagtgggaaatcgacaaacgacttctgaagatgggagggatggttgcttctggttcttgtggggacttgtatcacgggacttaccttggtgaggatgtagctgttaaagttataagagctgagcatttgaataagaatgtttggaacgagtttacgcatgaagtatatatactaagagaagtcaacataaaaat

SEQ ID NO: 306179 - DNA, 508 bp, Zea mays
tcgcgttcgcgtggggctcagcatccgacgacgggacttgcacgatggatgctgctcttatgcctctgctcgtcgtctccctcgtcctctgcctgctggcggctgccccagcggcgtccgcggcgcgggccttcttcgtcttcggcgactccctcgtcgacaacggcaacaacaactacctgctgaccacggcgcgcgccgacgcgcccccctacggcatcgacttccccacgcaccaagccacgggccgcttctccaacgggctcaacatccccgacatcatcagtaatattaatataacgccactgatcatcccttcagagaaactcagtcggcgacccatgctttgccttcccttcaggcgagcacctcggggccgaacctgcgctgccgtacctgagccccgagctccgaggggagaagctgctcgtcggcgccaacttcgcgttggccggcgtcgggatcctcaacgacacaggaatacaatttgtgaacatcatcaggatcg

SEQ ID NO: 306180 - DNA, 426 bp, Zea mays
ggtttcatttgtctgcgagcaggcgaacgcaagtggggagaggcgaaactttcgacgggggtcgcactcaatctgccgtagcgggcgccgtcgtggtcacggagctgttgcttgcataagcggacactacctcggaggccgccatcacctgcgggcaggtgagctccgacatcgtcccctgtctgtcctactcccgcagtacggggtacggcccctccgcgtactgctgttgcggcgtcaggaacctcaagagcgctcacaggaccgtcgctgacaggcgcgccgtctgcaactgcctcaagaacgcctccaggggcgtcaggggtcttaacgccggcaacgccgtcagcatcctctttaaatgtggcgtctgcattccctacaccatcatcaccttcaccgactgcttcagggtgaactaaaacc

SEQ ID NO: 306181 - DNA, 479 bp, Zea mays
tcgcgtgttcgtactcgcctacctccgcgggtgaaacctttcccccttctcccaattccttccgccggccgccgctccacccgtacgacgacaccatgagggagtgcatttcgatccacatcggccaggccggtatccaggtcggaaacgcgtgctgggagctgtactgccttgagcatggcattcaggctgacggtcagatgcccggtgacaagaccattgggggaggtgatgatgctttcaacaccttcttcagtgagactggtgctgggaagcacgtgccccgtgctgtttttgttgaccttgaacccactgtcatcgatgaggtgagaactggcacctaccgacaggtattccaccctgagcagctcatcagagggaaggaggatgcagccaacaactttgcccgtggacactacaccattggcaaggagattgttgacctgtgccttgatcgatcatgaagcttggcgacaact

SEQ ID NO: 306182 - DNA, 478 bp, Zea mays
tcgcgttcgcgtgggctccgctgggccaccagctttgaccgccgcctcccttcccctccggtactgctcctccccaccccactcccccgcaggagcggcgggggcggcggcgaggtcgtaccccacatcggcgagcggcggcggcaccgccggaggcaaaggcaagatgttcgggcgcgcgccgaagaagagcgacaacaccaagtactacgagatcctcggggggcccaagacggcgtgccaggacgatctcaagaaggcctaccgcaaggctgctatcaagaaccaccccgacaagggcggtgaccccgagaagttcaaggagctcgcacaagcctatgaggttctgagtgatccagagaaacgtgagatttatgatcaagatggtgaagatgcccttaaggaaggaatgggccggggaggatcccatgttgatccaattgacaacttctcatcattttttggaccctcttttgga

SEQ ID NO: 306183 - DNA, 373 bp, Zea mays
tcctcgcgtccgcgccgcctctccgacttctccaccttcgacttcaccctctccatccacgacccgcaccaccaccaccggaccatggcggacaagcagctggcgttccgcgccggcgccagcttctttctgcgccttcgccggatgaacttggccgagggggcctaccggcttggcgggttcattgggttcatgggctgcgggttcttcagcggccatcttcgcctacatcctaagcgccgtgctcagcgtctactacgcgccggacccgcggtacatgaagcgcgagatcgcaaaatactgctacctgctcatgggcatgtcctccgcggcgctgttgttcaacacggtgcagcacgtgttctgggacacg

SEQ ID NO: 306184 - DNA, 257 bp, Zea mays
tagcgttctcaccgatgctcgattgcatgactagcggttctagtattggcgacacataagacggccatcatgaggtcctctgcggtagttgacagtactggtctgacctaagatgaagggaacggaatatatcgataactacgtgagacatgaagagacccttccaagagaattgaaaagacacactaaatgccttagaagaacaaattttggaaagcatggcatggtagaaaggatcatcattgtattactcactg

SEQ ID NO: 306185 - DNA, 386 bp, Zea mays
tcctttgcgtccgcccacgcgtccgcccacgcgtccgagcgggtgttcgacgcgcagggggacgactcgaacagatacaaggacatgatcgtgtcgctgctgaccggcacgggcatgttcaacatcagcgacttcgtgccggcgctggcgcgtctggacctgcagggcgtgcaggcgaagctgcggcgcgttcaccgccagttcgacggcctcatcaccaagctgctggccgagcacgccgtgacggccgtggaccgcgcgcgccagggctcgccggacttcgtcgaccggctccgcgccacgatggacgccggcgccgccgccgacgacgagagcggcgagaccatcaccgaggtcaacatcaagggcctcatcttcgacatgtt

SEQ ID NO: 306186 - DNA, 249 bp, Zea mays
cccgcacggaccggcccggacggcccgggcggacccacgcacgttcctcgcgcccgggcacggacagaggcagccgacggtcacacagacggcgacgagcacgcaccagaagagcggaaacaggcgacggcgaggacagccagccactaggcagcgacaacggaacaggacaggacaaagctggagaggcaggcgatgacgcaccaagggcggtgggcccgacgcacgagggccgaactagccacacag

SEQ ID NO: 306187 - DNA, 456 bp, Zea mays
aggtgcagcaaaaaagttaaattcccagattatgccacaatatcagtactttcgtacattgaccttagtcatttccagtcttaaaaagtcaaaacaattttcttgtatattcagcacagatcaccaataatccctgcaagaacaactcccgttcttgaagtgatggaacctattagagtccctgacaatgatctctctttgcacaatctttgatattaacttaatagtggtatgacagtccccacaaatgcgcagattcttgaaaaccttgataggagaacccttcggagtggcaatgattccaaatgcaacagcaagccgctcgctgtgataaccaatgtcctgctgcttctgctcgtcttctacatcatggagaacaaatccggtgtctgccacatacccttcttcccttcattttcacatacagcttcttcagaagcgcatatatttcttcag

SEQ ID NO: 306188 - DNA, 415 bp, Zea mays
ttgttgttgttttgcgtggtcagtttctcatcgcatcagtggtagaaaacattcacctgtgggactaaaaaaatgtttggtaaaattaactagaagacagcagagacaatagtagcactagcataccaacaacagattgcataatagcataagtggtaagacccacagaacagacccgatgttctctctctttcctccataagaataaacccagcttagtcgacctcctccatcttgctctcgccagcgtcatcctccagagggggcatgtccggtgtcagcctccggagcctcctcgtcctcgtcgatgctcaggcccagcttgagcatgcggtggatgcggctgccaaaggtgtttgggatcgtcgaggctaaagccagaagtgagcagcgccgtctcaacagcatatgacag

SEQ ID NO: 306189 - DNA, 431 bp, Zea mays
gccgcccggctgctttcgtgtgctcgccgcgggcgcccgcggcctcgggacggcggcggaggtggccgcgaccgccaggtgggagcccatgggggcgcgggagtactacgactaccgccgggccatgtacggcgacatcacgcacaaggccatcctcgtcgacgccgccggcacgctgctcgccccaaccgagcccatggcgcaggtgtacagaacgataggccagaagtatggggttgattactccgaggatgagattctgatgcggtatcgctgggcgtatgcgcagccttggggtagatcacgtctgaggtatgtcaatgatggaaggcccttctggcaatacatagtgagttcatctactggctgctcaaatctagagtactttgaggagctgtatcagtattacacaactgaaaaggcttggcatc

SEQ ID NO: 306190 - DNA, 285 bp, Zea mays
actgcccacgcgtccgcccacgcgtccgcccacgcgtccggtgactccgtgtcgccgcccgtgggaattgttattaggcgccgtggggatctctgctctaggttagagtaagcagtccggatctggatctggcgcgggtccaaatttctaacctctggtgagacatctccgtttttgtggtgcggggtgcaaaatttgccggtcatgatgccactcggatggatcacggggaaaccatgcctaggtggattattggttcggctttttttaccgttagcctaccac

SEQ ID NO: 306191 - DNA, 240 bp, Zea mays
tccaggacatgttcagtcccattagaagtgcaatgagcataccgagagtgataagataaacagcagtcttccacacaagtactttccatctcttctctgcaactcttgttcttctggcactcgattttacggacgcacaagcttgtcttgagaaggtgtcatattcactgctgatctttttctgcgggatgtttatcactgttgatggcttcaacaaaacgggcataccgaacacactat

SEQ ID NO: 306192 - DNA, 345 bp, Zea mays
tcgtccacgcgtccgcccacgcgtccgcggacgcgtgggggtcgcaataaatgtatggtcgtgtttgctcgagagctactcaggtgattttgtcgtgggagcaccaaaagcagaaaagaactgtttttttcttctctctctctggaaaaaaaagtgaaactactggtgtttcaagtgcataaacctggatactaacagtgcctgtatcaagttattaaagccacaagggaatgctctctgaaggtcttctcttacaatacaggggggggcccttttcagggacccaggtttccctcccctggctggcaaagttataatttttttattggggcccctaaattaaat

SEQ ID NO: 306193 - DNA, 376 bp, Zea mays
atcaactcaaacacaatataatacagcggtcgtgtctaatatatgtgtcttaccatattcattgcaccaatcaaagcattcaataaattaaagtgatcaatcagctagtcttctctctcgaacatagagctaagatactgtgtctttgtcaagatacatgtcttgagtttttttacattcacccccttagacacactctaagacacaacttaagacacccattgtacatgcccttacaaggcagcagcaggctgcacccagccccatgaacaatcatcatagtatgatgatgacctagcgtcgtactagctgcgtcccatctgcccgctttgattgatcatgcgacgaccccgatgactggccttcactccgtcgc

SEQ ID NO: 306194 - DNA, 346 bp, Zea mays
aatagaggtgggttggcttctcctccccctccggttcggtttcgggttcgtgaggttcttcggggttcgggttcgtgggtgagcggatcgagatggcggcgtcggatgttgagtaccgatgcttcgtcggcggcactcgcctgggccacggacgaccactcccttcacaacgcctttagcacctacggcgaggtcctagagtccaagatcatccttgatcgggagacgcagaggtcccgtggattctgctttgtcaccttattcacggaggaggcgatgcagaccgctaactagggcattaacggtaaggagctgtacggccccaacatcaccggtaactaggccc

SEQ ID NO: 306195 - DNA, 364 bp, Zea mays
atgaactcacatctacgcctccatactggaggcagcagcgcgccgccgccgccgtctcggagctcgagctcctagtcccccggggccagggcgccgcagcgagggaccagacggggtccgggccgaggtcgagggaaagtgggtcacccaaggtcctgttgatgtggacattggtgccaatccatccgccgagggtggtgaggaccaaagcgttgatgacacagctgcgaaggtggttgattttgttgacacattccgtatacaggagcaaccctcttttgacaagacattatccgcgacttacatccaataatccatcaagaattccactgctgagttggagtcacagaaagcggatgaattt

SEQ ID NO: 306196 - DNA, 477 bp, Zea mays
tccacgcgtccgcccacgcgtccgggatttggttccctacacggctggtcggctgccatcgccatgtgcctcgccgccgcgtgcgcgtccgccaccctagcccgccgcctctcgccctccaccgcgctcccgcgccgcttcctcctcggcgcccccacgaggccttccccgccaccgcctctgctgcggcgctgcctcccgttccacttctaccatatggcgcaatattggactcaaccatcactggacaggaacaaagctatggttgagtacctaaaggcagtatggtgctggtagaactgataaagtgaaggaagtaatggaaacgattgatagagcactatttgaccagaggggaccccttacattgacagtcctatgctaattggtttcaacgcgacgatatctgctcctcacatgcatgcgacctgcttagagctattgaaggatcatttgcaacccggaatgcatgctctg

SEQ ID NO: 306197 - DNA, 392 bp, Zea mays
cggaatttttgggtttacccacgcgtcataatacttctcttcggaacagctctcgagggtgcatttttaaggtaatagctgtctatttccttgctgatctgggcggaaacacttccccgactgctgatgatgctaagagcattctggaatcagatggtgctgaagctgatgaagaaaaactagagtccctgctcacagaactcaaagacaaggacataacagaagcgattgcagttggaagggaaaggttatcctctgtgccttcaggtggcggtgcaattgacatgggagctccagcagcttgtagctggcggaggccactacctgctgaagaggcaaacaatgaagaaaatgttgaagagaatgaacagtctgttgaagatatggctttc

SEQ ID NO: 306198 - DNA, 479 bp, Zea mays
ttttagaaacaactcctgatgacagccaagtgagtgaagtataatcagacctaaaagaaaccctttcactaaattatgaggaggctcgagcattgttaggtagactggaacatcagagagggaactttgatgcagcattgcaagttcttcaggggattgatataagaagcctgagaccacgaatgaccactgctattgctgaaagtgtcaagcctagaatgcccccacgctcttcaagacgaaaatcttcacaagtgaacggaatgcttatgcatatgtccatgcattctgtaagcttgcttctagaggccatactgcttaaagcaaaatctctggacacccttggtagagcagcagatgctgcagaagaatgcagaaccatcatagacattatagagtctgcatggccatatggtgttccggatggaacttctgaagagtgtaaggctatagacatattccattcggctctagaatat

SEQ ID NO: 306199 - DNA, 194 bp, Zea mays
tctcctacgcgtccggccaacctgggcgtgcgggacgggttcattcagccgatgacgcgctactccagcctgtggaacgccgacgactgggcgacccgcggcgggcgcgagaagacggaccggaacaacgcgccctgagatgcctcctaccgcggtacccacgtcgacggctgctaggcctccgtggaggcgcg

SEQ ID NO: 306200 - DNA, 276 bp, Zea mays
tcccacgcgtccgcggacgcgtgggtggcgggggtaaaaggcaaaaacaatccggcgacttggagaaaccctagaatcaagcgcggaaccgccctcatccaccatgctgcgtgcggcggcggctgcagccgccatcttcccggcgcgggtcgccgccgcgccggctggggcggcggcggaggagctcaggtctccgctgctcaggggcattgggacgctgagggacggccgcggatcggtgctgctgggtaggagggatgcgttaggactacatca

SEQ ID NO: 306201 - DNA, 374 bp, Zea mays
ttgctccgacgttcgtgacggagcggcccatggttgtggcggtgacggcggccggactgtaccggctgtcgtctcacgcggcggcgggcacgctggtgttcctgccgtaccttcttgctgtggcgctgctctactccgtgtgcgtctacttccttgtggggctctgctcgtcagccggcgccttcgcgtcgttcgtgctggtggtgtgggcggtggtgctgaccgcgaactcgttcgtgctgttcgtgagctcgttcgcgccggactacatcgcgggcatgtacctcgtatccgtgtcgctggccgggttcttcctcttcttcggctacttactgtcgcgggggagcatgccgtcgtactgggtggtcatgcac

SEQ ID NO: 306202 - DNA, 338 bp, Zea mays
tgggactcccctttcgcgtccgcttctcttgttgttgctgtgctctcctgttaccgggacccggaggaaggcaggaaggaaggaaggaaggaaggcggggatggcggaggagacggtgcgggagctgcgcgcgagcttcgcggcggggcagacgcgcccggccgagtggcgggcggcgcagctcaaggggctcatccggatgatcgacgagaaggaagccgagatcagcgccgcgctccacgaggacctcgccaagccgcatatggagtccttcctccacgaggtgagttattactgtactacttgctagttgtacttttcgatttctcgggttttaa

SEQ ID NO: 306203 - DNA, 495 bp, Zea mays
ttccattcgtccgcttttgcccttgtttattgctgcgtataccttttaggtgcttggaaaaatttggtctgtggcatttaaatatcacttccgtatgccaccttactacacacttgttctccggtcacttgcctctttggaaggttagcttgttcagttgaagttgagataccaaactaattcaatacatatgcatagaggcttatttcttttcaaagatgcatatcttgatgccaactatttttgagggatatattattttgtttcctttcttactgataggactagccgtggcagcagatgggactttcaaaacatttcaagcagcatacccatatgttgttcggaagcttctgtccgaaaattcacttgaaacaagaagacttttgaatcaggcaatttttaacaaaaggaaagagtttccatggccgaagattgacccgtttcttaaattggcttcagcagggcccaacttaagtttaacatgaagttttg

SEQ ID NO: 306204 - DNA, 198 bp, Zea mays
tgcctgcggcggcagcgacctcgcaggcgggcatcagttgctttcaggtggcgttggccatcgcgccctgaatatactacgcgcgcggtcagggctcggggcccttcgctggctgaggcagtggcgtcaagagcctaaacaacgccgtccggaccaccgtcggccgcccagccgactggaactgactaaagaacgccg

SEQ ID NO: 306205 - DNA, 360 bp, Zea mays
tcggacgcgtgggcggacgcgtgggcggacgcgtgggctgactcgtgggcggacgcgtgggccgcaaaggaatcaggcggagtggcgcgatgggagagcaggtcgtgacggagcagatccagcggaagctggaggaggtcaacgctaccgtccaacagcaccttgcgggtgtccaggaccacatcaacttcaccatgcagcaagcatacttcaagtgcgcatatggttgctttgatcggcgccatactcaggaagcgatcagcaactgtgtggagaattgtagtgtgcctgtccttgctggcaacaatatttttgagagtgagatggccaagtttcaagggatggtgaacccgtcattga

SEQ ID NO: 306206 - DNA, 479 bp, Zea mays
tcctactcgtccgcccacgcgtccgcccacgcgtgcgctgcagtctgttattgacaaggaacgtagaggggattacctaggaaaaactgttcaggttgtgccgcacatcacagatgaaatacaagagtggattgaacgtgtggcaatgaatccagttgatggcacagaagagccagctgatgtttgtgtcatagaacttggtggcactataggggacattgaatcaatgcctttcattgaagcattaggtcaattttcataccgtgtagggcctggaaacttctgcttggtgcatgtcagtcttgtaccagttttaaatgtggttggtgagcagaaaacaaagcccacccaacatagtgttcgcggacttagaggacttggactcatgcctgatattttggcatgccgtagtacacagccacttgaagaacatgtgaaagtgaagctcgcacaattttgtcatgttccgatatcaaata

SEQ ID NO: 306207 - DNA, 466 bp, Zea mays
  unsure (1)..(466): unsure at all n locations
atagcttgtaagttagataggactgagttatcaacactaagattattagtttctcagaattcattttcttcagctcaatatcttgtgaccttctataagccactccagattctaactgagacttcaaacaagggcggatctacacccgggccacccggtccagggcccggggcttgatccatataactgagccttagacccgtgctctggcgtgggatagacgaggagatttttttaaccacggcctggaattcgctcccacggggagtcgaactcagtaactgagtgctactcataccacctaaccaactcaggtagagaccctttcgtacttcaaacaatagtagatactntatatatggtgtgtcatcttgttcatttgctagctatcttctattttggtgacaatttagctatcctttattttctcactttctagatgatgatatggattcggtatcttcat

SEQ ID NO: 306208 - DNA, 375 bp, Zea mays
gtgggtgctcaacctcagctacaaccggatctcacggatcgggcacggcctgtccagctgcacggcgatcagggagctgtacctggccgggaacaagatcggcgacgtggaggggctgcaccgcctgctcaagctggccgtcctggacgtgagcttcaacaagatcggcacggccaagtccctgggccagctcgtggccaactacggctcgctgcgggcgatcaacctgctgggcaacccggtgcaggccaacgccggcgacgacacgctgcgcagggccgtgtcgggcctgctcccgcggatcgagtacctcaacaagcaggccgtcaagccgcagcgcgcgcgggaggtggccaaggacagcgtcgcgcatgc

SEQ ID NO: 306209 - DNA, 431 bp, Zea mays
  unsure (1)..(431): unsure at all n locations
tgnctgcttcttcgtactcgcctacctccgcggctcaaacctttcccccttctcccaattccttccgccggccgccgctccacccgtacgacgacaccatgagggagtgcatttcgatccacatcggccaggccggtatccaggtcggaaacgcgtgctgggagctgtactgccttgagcatggcattcaggctgacggtcagatgcccggtgacaagaccattgggggaggtgatgatgctttcaacaccttcttcagtgagactggtgctgggaagcacgtgccccgtgctgtttttgttgaccttgaacccactgtcatcgatgaggtgagaactggcacctaccgccaggtctttcaccctgagcagctcatcagtgggaaggaggatgcagccaacaacctttgccgtggtcactacaccattggc

SEQ ID NO: 306210 - DNA, 323 bp, Zea mays
tggacgcccgcggtaccggccggaacgaattggtcgctcacgcacgctgtatgtacgcgcgcgcttggtgattacctggttggtaaggtgtcatgcatgtgtgggaggaacattcgtccgggaggaccaaaggattcttggctgtgcagtgcatgctgttgtaggaacacctgttcacatgattgatatgcatagcaaacagagcattcgttctgataacagcatgaggagggttgtagatgaagctgatcaaatgctttatcgtggtttcaaggatcaaatttgcgacatttggcaggtccgcccagccaagattcaggttg

SEQ ID NO: 306211 - DNA, 504 bp, Zea mays
ctgctggtgccgctgcggcattactggggggacccacccgtcctcttcgcgtccgggctacattcatgggggtgctcatgctagttgacgaaactgccaggcgacagatgagggacaggaatcaggtcatacctacgggccaatagagacatggaggtggtgacacagacgatgagctggacacggcgctctatatactcatcactaagctgccgttcctccgacgcctggttaggatcctagccgcgtcgggcgtgttcaccgttgacaagcagagctcggaggaggagcggaaccgaatcagccccgtgttctacctcctggtggacggcatcccttacgaggaccacatgaaccacaccgctctggtgctcacctgcacctcgacgcgctacatcgaggcggggatagggctggcggagtggttcaagagggacgtggttacgttaccgtttgaggagctgcacggggcgactttgtttcacgagagcatggggagccttg

SEQ ID NO: 306212 - DNA, 355 bp, Zea mays
gcgtaccaccgcccgcgggcctcgtgctcgtggctctgctcgcgctggtcctggcgctggcgctggcgccggcgccggcgcgcggggacaagccggcgaggggcggggcgttcagctccatcgccgtcggggcggagacggagccgtcctccgccgtcttcccgctctacggcgacgtctacccgcacgggttgtactacgtggctatgaacatcgggaacccacccaagccatactttctggacgtggacttccgcagcgacctcacctggctggagtgcgacgcgccctgaggagctgcaacgaggtgccgaacccgttgtaccgaccaacaaagagcaagctggtgccatgc

SEQ ID NO: 306213 - DNA, 472 bp, Zea mays
gggcgcctgtaggggccccggcggaatatccggggggacccacgcgccctctcacgcgtccgcccacgcgttctgtccacgcgggcgaggccactactggcggatcttctgatacagcgcgaccagaacaccacctagcagctggtgtcaccgggcggaaacaaccaaccacaccggagcgcaccactggccggcaaccgggccatcgttgagagtgacccgcagaactggggccaggtggcggccgagctggcccggagccacctggacgaggtgaagcgcatgggggcccaggcccggaacaccgtggtcaagatcgagggctccaccctcgacgcgggccaggaggccgacgacgtctacgagaaggacgcgtccggcgatcaggtcaagctcgacaaggaggcccgccgccgcgtaaggtcagcagacagtggatcctcaactgcatcgtccacggcggcgacatcta

SEQ ID NO: 306214 - DNA, 462 bp, Zea mays
tgtcctcccacgcgtacggcacttggtgttgttaaccaacttgtggcagtccttcgtctaggaggaaggaattcacgttatagtgccgcgaaggcattagagagtttattttgtgctgaccatgtgaggaacagtgagtcaactaggcaggctatccaaccgcttgtggagattctgagtactggcatggagagggagcagcatgcagctatatcagcccttgttaggcttctttctgacaatccttcaagagcacttgcggttgcggatgttgagatgaatgctgtggatgttatgtgccggattctttcttctgattgttcagtggagttgaaaggaaatgctgcggaactatgctgtgttctatttaccaacacaaggatccgttccacaatggcagcagctcgttgtgtggaacccctggttggtttactggttagtgaagctaaccctgcccagctt

SEQ ID NO: 306215 - DNA, 516 bp, Zea mays
tttcacgcgtccgtgaagtcggaggaaaaaggagtccctcccaacctcgcatcgctgttcccccaaacccaaatccaaagcaagcacttcgtcggcgggcggcggccgagggcgaccatggggcagggcactccgggagggatgggcaagcagggcggcgctggcgaccgcaagccctcaagctcgagcgggtcaaggactacctcctcatggaggaggagttcgtcgccgcgcaggaacgccttcgtccccaggaagacaaggccgaggaggaccgatccaaggtcgacgacctccgcggcacccccatgagcgtcggatccctcgaggagattatcgacgagagccacgccatcgtctcctcctctgtcggacccgagtactatgtcagcatcctctcctttgtcgacaaggaccagctcgagccgggatgctccatcctcatgcacaataaggttctttctgtagtttgtatattgaaggatgaagttgatcctatggtatctgtgatgaaag

SEQ ID NO: 306216 - DNA, 487 bp, Zea mays
tctgccacggccgtcggctgccgcagttcggttccgagggaattttaccgagggcgctagcttattcgcactacaagtcgagggttgaagaggcagatgtgtgtgaagaccctcaccggcaagactatcaccctcgaggtggagtcttctgacaccattgacaatgtcaaggctaagatccaggacaaggagggcatccctcctgaccagcagcggtttatctttgtcggcaagcagcttgaggacggacgcacacttgctgactacaacatccagaaggagtcaacccttcacttggtgctgcgccttaggggaggcatgcagatctttgtcaagaccttgactggaagacaatcacccttgaggtggagtcctcagcaccattgacaatgtcaaggcaaagaaccaggacatggaggggatcctacctggccagcaacgttttaattttgtcgtcaggcaaattgaggatgggaggacccttgct

SEQ ID NO: 306217 - DNA, 352 bp, Zea mays
ccgggccgccccacgcaccctgtcgtcgcgaccgaccacgcgaccgcccacgcgtccgggacaacaagcagaagcccatatggatgaggaagccagaagaaatcacaaaagaagaatatgctgccttctataagagcttgacaaacgactgggaggagcatctggctgagaagcacttctctgtggagggacaacaggagtacaaggctgaactctttgaacccaagagggccccctttgatctctttgacaccaagaagaagcaaaacaacatcaagctctaagcgcgcagggtggacatcaaggacaacagccaagagctgatccctgagtggatgagcaaagaaaaggg

SEQ ID NO: 306218 - DNA, 365 bp, Zea mays
tcttccacgcgtccgctggcttactgcggtgccctctagtatccagagattataccagcggatggccatggagccttcctagacgatgcggcggtgtgagactataattggaggggcctggggggagccgggccttgggcgccgcctgcccgtcatggacccggtcaccgaggccaccatgggcgacatccctgccggtacggccgaggacgtggagatcgtagtcgccgcggtgcgggacgcgatctaccgcgactgtgggaggcactggtcgcgcgcatgtggggccgtgcgcgccaactttcttcgggcgatcgcctgcaagattaaagacaggaaatctgagatggctttgctggagacac

SEQ ID NO: 306219 - DNA, 364 bp, Zea mays
cacgccttcttaacccccaagctaacagggagatgatgacccaaattatgtgcgagaccttcaatgttcctgccatgtatgtcgccatgcaggctgtgctttccctgtactccagtgggcggacaatcggtatggcgttgaactatggtgatggtgtgagccacaccgctctaatctactaaggttatgcccttcctcatgcaatggtgcatgtcgagcttgctgggcttgatctgactgacagtctgatgaagatcctcaccgagagaggtaactccttcatcgccagctccgctgggcaaattatgcggtacattaaggaaaagcttgcttacggggttgttgactattatcaggagctgga

SEQ ID NO: 306220 - DNA, 379 bp, Zea mays
ctacgcgtgggttgtaagcgacaggaacgagagggacttcaggttgcctagcccttctgataactgtccatggaacttattcgaagctagccgcagcgcagtcaggtttctacaggagtatatgctctccggaatcgagccactgaagttattcagcatgagatctatggctcttagactgggcatgttgctgaaatcaacccgggagagttcgccactgaaaccggtgctcctaaggtctagagttatgagatccgtgcaggtgctcagggctggtggcagctccccatacatgctgttatagtccagatgaagttcttgcaatctcttgagctgacctatggtatcaggtatcttgcccgcgaaactgttgtctcct

SEQ ID NO: 306221 - DNA, 523 bp, Zea mays
ttgctaaggctgtcgtgacatttattcgtcgtttgataaatatgttgaagttgaacgtctagagggtgataacaagtatcacgcagagaatcatggtctacaggatgcaaaaaagggcgttcttttccttgatttcccccctgttttgcaactccagctgaagcgctttgagtatgattatatgagagatagcatggttaagattaatgatcgctatgagttccctctgcaacttgatctggatagagatggtggcaaatacattgctccaaatgcagatcgaagtacacgaaacctttacactcttcacagtgttcttgttcatagtggtggggtacatggtggtcactactatgcattcatacggccaactttatctgagcaatggtataaatttgatgatgaacgtgtaacaaaagaagatgctaagaaggctcttgaagaacaatatgggggtgatgaagagttaccccaaataaaccctggtttcacaacgcttcatttaaattcacgaagtattcaa

SEQ ID NO: 306222 - DNA, 525 bp, Zea mays
  unsure (1)..(525): unsure at all n locations
tttgccttctgggtggctggttcttccttcccgcttccctcgtcaaccaaatcaaccgactcgccaggtctcctccggatcgccacgcgccgcgcaccacccgcccgcctccccgaatctctcgagcccgcgcgcaggcctcgatcgcggcggaccccgatgccccgcctcccggccaatccggcggcggcgactgaggagacatgagccggccgggactcgccggacctgccagtcatggacgccaccgcgcgcccggccatcgtcatcgacaacggcacagggtatagcaaacttggattttctgggaactcagagccgtctttcaccctccctactgtcgtagcagcaaatgaatcttttctagaccagacagagctgttgagtagtgcaaactggatagcgcagtataatgcatgcatcatggctgatcttgactattttattggagacgaggctctatcgcggtttagatctagtgggctgacactntaagaagccaatccgcatggtcagtttatgact

SEQ ID NO: 306223 - DNA, 345 bp, Zea mays
actggcgacgcgtccgctcaagtatgcacactcgagtgccactccgacgactttgccggactcggactacgaaacttcgacagtccgaccacaaggtgttgtgcgggatccacagaaggatgagtgaagaggataagactgatgcttctgctgagcagccgacgagggaccgtaatcttaatgaaaggatcctctcttctctgtccaggaggtccgttgctgatcatgcatggcaggatctggctatcggccctgaagctcttgctgtttgaatgtggttgcagtgatcacagagggaatcccagctcaatattagctcgacaagagaactggactgattaaggt

SEQ ID NO: 306224 - DNA, 534 bp, Zea mays
tcgttacaatgcagaaattgctgcaactagcgaagttattgatcttcttgtcagttttgttcctggtacaaactatcagttgtctgaagcatgtatcggtgctctcataaagttgggcaaggatcgtccaaactgcaagcttgacatggttaaagctggtatcattgagcatgcacttgatatgattcttgatgttcctgtatctgttagttcatccattgctgaattgcttcgcattttgacaaacaacagtggcattgctaaaagttctgctgctgcaaaaatggtggagccacttttcttgcttttacgtcgccctgatgttactatgtgggatcagcacagtgccttgcaagcactcgtaaatattttggagaaacctcagagtctagcagcattgaagttgactcccagtcaaataattgagcctttaatatcatttcttgagtctccctctcaagcaattcagcaacttggcactgaggtgctctcacatcttctagaacaggaaccatttcaacaggatatcactac

SEQ ID NO: 306225 - DNA, 300 bp, Zea mays
ggcaaggaggacacagatgcttacattacatagagggtttcaaaaaaagttcacatggcagtactaagtttcctgacaacttactagtgactaaccaggtccagctgcatggaagtattattgctggattgtatggcatctcgcacttgcaaaacactggtatacgatctggtacaaagctgccagtagctgatttatactcgaagcggcagaagaaatcctcagcattgacagaatcaagctttgtatagctacggaagctggggacattgcatttcccctcaatggggtcagcacttt

SEQ ID NO: 306226 - DNA, 237 bp, Zea mays
  unsure (1)..(237): unsure at all n locations
atcactcgtccgcccacgcgtgcgcccacgcgtgcgcccacgcgtccggccacgcgtgcgctgactatttggggaagggtgtctccaaggctgtgaacaatgtgaattctgatattggacctgctctgattggcaaggaccctacagcacagactgagattgataacttcatggttcaacaacttgatgggaccaataatgagtggggatggtgcaagcaacagctnggtgctaatg

SEQ ID NO: 306227 - DNA, 394 bp, Zea mays
  unsure (1)..(394): unsure at all n locations
gtcttttatcgcgtacgcccacgcgtacgggttggtgcttatgtccatgtgttgtatatgtgctctcctttgagacccttcagtttcttgtgttcacattttgttgataccagcctgatcgggttatggagttctgcaacaacaatgatcttcagttaattgtacgagcacatgagtgtgtgatggatggctatgaacgctttgcccaaggtcatctgatcactcttttctccgcaacaaattattgtggtgcgatcttggttttgggtagagatcttgtggttgtgcgcaaactaatacatactttgcgccctgcaattacatcacctgaagcgtcgccggatcatattgaggacacatggatgcangagctaaatgcttacagaccacccac

SEQ ID NO: 306228 - DNA, 250 bp, Zea mays
taagaactccagagagtattgccagacccgacgttgagatggtcccaggcgggctgatcgatctcgccgtcttcaggcctaagcgggcacgcgacgacgcggacaacatcctgctcagcggagctcaaactcgatccagcccgtcaccaaccgagcggcctccgcgctcgagtccacggacttcgccgcgcttgggcgcacccacgacgcgctccggtctgcacgctgcggtgcgaggtactgaaagagc

SEQ ID NO: 306229 - DNA, 245 bp, Zea mays
tctttcttcactgttcgcccacaatttgaacctattgatcatatctaacgagcactgttcaagatgacatatttgaaaagcacctgcttgaacccaacagattggctatctgtgcaatacttcagaatacggaaatcacgccatgcatcacaaaagttatctaatatatctctggatgatggcttggtctatgtccacagggagcaagttacccctgctaaagtgtattcctatggacctgcgat

SEQ ID NO: 306230 - DNA, 370 bp, Zea mays
ttcatatcttcggtggggtacgtgaccggcgggcagttctacggcgccaaggcgagcctgaacgtgtggccggcgcaggtggcgtcgccggcggagttcagcctctcgcagatctgggtcatctccggcgccttcggcaacgacctcaacaccatcgaggccggctggcaggtcagccctcagctgtacggcgacaacagccccaggttcttcacctactggacagtaagagcagctccctcgatcatccctggtcaccattttttccggccatcaatcaagtaaaaaaatggaaacgcaacgcaggacgacgcgtaccaggagacgggctgctacaacctccactgctcgggcttcgtgcagaccagca

SEQ ID NO: 306231 - DNA, 364 bp, Zea mays
tgtctatatggagtttctgaaaaatttactcaagcttcagataatcagaagttggaagcaaaatctcgccttcttgacctggtcaataaaggtgtagaggcatcgctagtgcagcttcttgagacaggcttgttgcatgctgatcctcatcctggtaacttgcgttatactcctgaaggccgtgttgggtttctagattttggtttgctgtgcatgatggagaggaaacatcagcgtgctatgcttgcaagcatagtgcacatagtaaatggtgattgggcttccgtcgtttatgatttgactgaaatggatgtaggtccaccaaaaaccaatctacgtcgggtgacaatggatttagaggatg

SEQ ID NO: 306232 - DNA, 459 bp, Zea mays
  unsure (1)..(459): unsure at all n locations
tccggaatatcccggggtcggatcccacgcgtctctgtttctatgcccatcagggacttccgcaacctggagagcaagggggtggcgttccccaagagccagccgatgcggctctactccagcctgtggaacgcggacgactgggcgacgcagggcgggcgcgtcaagacggactggtcccacgcccccttctccgcctcctaccgcgggttcaaggccgacgcttgcgtcgccgtcgcgggcggccggacccgctgcggcgccaccgtcggcaccgagggcaccggcgcccccgcctccgccgccggcgccggggactggtacaaccaggagctggacctcaccctgcagcagcggatgcgctgggtgcagcgcaagtacatgatctacaactactgcaccgaccccaagcgctaccagcnagggcctcccgccgagtgctccatgcagtagcgcccg

SEQ ID NO: 306233 - DNA, 439 bp, Zea mays
cacgccgtctcgatgatcttttcaagggtgtttggtgaagaacaaaccagaactctcaccaaaaacgttgtgggatggataggagaaatatcagttaagtcagacatattcagtttgggtgttcttattcttgaaatagtgacaggactgaagagggacctcaatattcaagacatttcttctgagttactaattgacaatgtatctaaaaattggacagaaatgtcgcatatagaatcaaagtatccatccttggaagaacaacacctactacaagtaaaaagatgcattgaacttggtttgaactgtgtggagtctgatccaaagaaaaagcctactgcatgatcaataattggtaaactcacagaaatcagtcatgaagctagcatacacaaatttatgggagagaaactgcaacttgatactgaatttccaaggg

SEQ ID NO: 306234 - DNA, 383 bp, Zea mays
cttggagaggaagagtggccagaaaagagcttcgaaaacttaaaatggctgctaaagaaactggtgctctccaagctgctaagaataaattagagaaacaagttgaggagctcacgtggcggctgcaactagagaaacgcatgaggactgacatggtggtagccaagacacaagaaaatcggaagttgcaacaacaactgcaggaactgcaattacagtccaaggagaccaaagatctgttgaaaagggaacgggaaattgcaaaagatgcgctggagaatagcttattagtacctgagggccatgttgatacaactcttatttgatcaactcactgctgagaatgagaatcttaaggctttaaatgggtctcttgagaccca

SEQ ID NO: 306235 - DNA, 329 bp, Zea mays
  unsure (1)..(329): unsure at all n locations
accatgagggagtgcatctcgatccacatcggccaagccggtatccaggtcggaaacgcgtgctgggagctctactgcctcgagcatggcattcaggccgatggtcagatgcccggtgacaagaccattgggggtggtgatgatgctttcaacaccttcttcagtgagactggtgctgggaagcacgtccctcgtgctgtttttgttgaccttgaaccaactgtcatcgatgaggtgaggactggcacctaccgccagctcttccaccctgagcagcttatcagtggcatggaggatgcagncaacatcttcgcccgtggtcactacac

SEQ ID NO: 306236 - DNA, 429 bp, Zea mays
atggccacggctcacagggccaggacgcgctcaacggctgtgccagttctaccaaagacgctatggaacaatggtgtgaccgccacggatctgttgctgaagtaagatcaaatttacacatgaagcatgaaggtgcagcaaagagagaaagggcaattgcctatgctctgtctcaccagcctcggggttcaagacagaaggggacaccaagctctcctgctaactgcgttagaagccatgatcctaatgggtgcaatcaggacttcagttacttagacggatggatggcaacgaagccatgggagaccagatctacggagcgaaaccatagcgactcgcagctcgcgaagcactgcgaggagccgaacttgcccgccttcaagctttccgatgccagctcagttaagatcagaagaaacaatgtcacaa

SEQ ID NO: 306237 - DNA, 456 bp, Zea mays
ataagaatcgttttggtagaaaccatccaaaatcaacataaacacagaatcggttgaatcatcgcgatggtagaaatccatcgctttctagatcctgaactatttggaccacttcatcttcctccgcacgtaattcccacgatacacagattcttctcacagccagattctctctacagctagattctcagaaaagctagccagaaaaaagctgatcatgaaacaactttgctggctgttacagtgtaggagaaagcttaaggtacaacctgaataatgcacgcagtaacacggtctctatgaagcgatgctgcgttggctctcacaaccagggcaattgtgcaggctctcatggatgtaaatatcacaatcaaggcagaagtgttggttgcattttgggcagcgcacatggaggttagattggccgtctgggttataaaggctctgctggcagct

SEQ ID NO: 306238 - DNA, 431 bp, Zea mays
gatgtgccctaccagggagcttgcaaaccaattggctgctgaggccaggaagcttctcaagtatcatcgctcactgggtgtgcaggttgtaataggtggcacacggttacctcaagagcaacggagcatgcaagctaacccatgtcagattcttgttgctactcctggaaggctaaaggatcatcttgagaacacgcctggattctccacccgaattagaggtgtcaaggttcttgttctagatgaggctgaccgcctgttggatatgggattcagaagagacattgagaaaataattactttcatccctaaagataggcaaacacttgctgtttctgctactggttcagaagagatccaccaaatttctcacctcgcaatgagaaaggattatgatttcattaacgcttcaagagggtgatgaggagaca

SEQ ID NO: 306239 - DNA, 338 bp, Zea mays
ttgggccgccttggccgccgccatgcggatgatgatagacgtcgatgatgatgaggacgacgacgaggaggagatggaggatgatggggagggtggattcaatcggatccctcttagcatcgtatttggttctgcgggggcacattttggttgtctctgcccttgctgttgaccatacaggatccagtgtgctctctggttgctatgattttacagtgcgtatgtacgatcttcagggtatgaattccaagtttcattcttttctgacatttggtacccatttgtgggccatcctgttcgttgccttagttggtgttccaccgtttggtccatctctt

SEQ ID NO: 306240 - DNA, 378 bp, Zea mays
ggcatggtctcgtcattggagagcacgttccacacatgcaggaagaaattcccccgtacatcgttatcgttagtcatcagacacgtaccaccatacgcttttgcttaaacaaaaaggcaagtgtgtgtgtttgcgaagagaattaaaggcaagtcggcacaaaagcgaccccaacaatggcgaggatgacgaacttgtcattgttgtcagtcctcctctgcgtcacctcctgtgtcaagatgacgccacggtcctcgatatagtagtcgtcgaacgcgcgcgacataccgagtactgatgactcttggttgggctgtaaaacaagtgcaccctgggctcatcagcaaggtagtacccctggccgttgcaccaccagat

SEQ ID NO: 306241 - DNA, 404 bp, Zea mays
ggcgaggcgatcggctctgcttgcgaagcaggtgattagtgtgacctcggcgcggagcctcgggttcgtgtcgcagctctggatcgacaccgcctcggaggcactcgtgttggggtcgctcatcgacgacaagaagaaacttgatgactgccagttcgacctctagaaacagtcctacgtggccgcatgtgccgctatgtacgacaagctccggcgcagccgccgtttggacgcggtgcagagcggttgctccgcgctgtccatcgtcaagcagggggacctcatggtcgtcgccaacgtcggtgactctcgggttgttctgggcatcgcattcgacgacgccatcacgtcgttcagctcatcgtccacctgaagcccaacctgccacaagagtagcgcatctg

SEQ ID NO: 306242 - DNA, 390 bp, Zea mays
  unsure (1)..(390): unsure at all n locations
atcccggacctggagcaaagctcaacaaacttgatcttcccaaggggcttggtgagcaggtctgcaagctgatccttggtgttgatgtagcgcgccttgatgctcccttctgccaagcagtctcggatgaagtggtatctcagccggatgtgcttgctccgttcatggaacacgaggttcttggccaatgccagagcggactggctgtccaccctgagttccaccgctccagtgtctctcccgaggagatcaccgagcagtcgagccagccagagagcctgagtcgaagcagtggacgccactatgtactcngcctcgcagctggacatggccaccacctgctgcttgaccgactgccagctaatgaggcactcgccgaggaagaagagg

SEQ ID NO: 306243 - DNA, 501 bp, Zea mays
caccggttcgctgccggcagcgctccccaacctcaccgacctcgtccacgtccacctcggcggcaatttcttctccggcagcatcccgaggtcctacggccagtggagccgcatccggtacctggccctctccgggaacgagctcaccggcgagataccggaggagctcggcaacctgacgacattgagggagctgtacctcggctactacaacaacttcaccggcggtataccacccgagctcgggaggctgcgggcgctcgtccggctcgacatggctaactgcggcatctccgaggagatcccgccggaactggcgaacttgacgtcgctcgacactctgtttcttcagatcaacgctctgtctgggaggctcccgacggagataggcgcaatggggtcgctcaaatcgctcgacctgtcgaacaacttgttcgtcggggagatccccgcgagcttcgcgttgctcaagaacctgaccctgctgaacctcttccggaa

SEQ ID NO: 306244 - DNA, 406 bp, Zea mays
gttccagaagaagacgaagacgaaggagagcggcggcggcggcggcgagcagcaggcgcaaacgccgggcctgaagctgctggtggaggaggcgaagcgcgagcacggcgtcaggtacgtgtacgtgtggcacgccatggcggggtactggggcggcgtgaagccggcggcggaggggatggagcactacgagagcgcgctggcgtacccggtgcagtcgccgggtgtgatgggcaaccagccggacatcgtcatggactcgctgtccgtgctgggcctggggctggtgcacccgcgcagggcgctgagcttctacgacgagctgcactcgtacctcgcctcctgcggcgtcgacggcgtcaaggtggacgtgcagaacatcatctagacgctcggggcccggcac

SEQ ID NO: 306245 - DNA, 488 bp, Zea mays
cccacgcgtccggttctagatcgcgagcgcctaacccggcggctccggcgacggtgagtcgccggcgtccatgacaccggccgcggcgtggtgcgcgcagcaccgcctccggttcctcctaccgtccctcttcctcgcgcccgtcctcttcttcctcctgtcgccgccgtcctctccgcccttcgtcagcctccccgcctccggagagctgcctcctttaagctcgcggctcatatgggcgcagcggtggttggtggagtggcgcccgtgcgggtggtggcggacggcgccattgcaagctccgtccaggaggaacgggtacatccgaatagattgctacggcggtctcaaccagctgcgacgtgatttatgtgacggaattggggttgcacgacttctgaacgcaacaatggttctacccaagtttgagggtgccgcctattggaatgaatctagtggctttgcagatgtttttgatgttgattact

SEQ ID NO: 306246 - DNA, 362 bp, Zea mays
atagaccatgcatatatatatgagagcagcaagaatacaaatggaacccctggcttaattttgttttgtttgtttggcgatttaatgaatcgctttcaaaaatcactatatacttgtctcctcctaagtcacattcatacttgatgagctggataaagtccattatactccagctgctcgtcctaatctttcccttagaatcttcacccccatgtatctgcccatcattaggaccgtggcctgtggattcgttcctggtgaactgaacaaggttgatccatctatcacacggaggccggagatgccaatcacccggtagtgtcgatccaccaccttgccaacatggcatcccccatggtagt

SEQ ID NO: 306247 - DNA, 408 bp, Zea mays
gccattggttcgattgggcgaaagggcaatggcgggccgcactgggaggccattacgggtgatactcactcacagaagtactctcgaagcgatcacgcacgagatcagcagcagagctgtgctgaaggtccaggtgaacctaagttcgattggaaagtctcaaggaagagagctggagccgcatatccaggtgaaagcatgccaggaggacaggaaggtaatcaacatcaaggaacatggccgtggtactgaccagcaggcgctgacaaaccaggagaagaagactctgctggagcgacacaccacggaggaaaccgacacaagctgataacagaacacggggcctaatgaaaggccccacagacggacgggagggcaggacatgaaaaacctcaggcccatacagac

SEQ ID NO: 306248 - DNA, 422 bp, Zea mays
ttgatgcgtgggctctctttccccggcacctgtcacgggaggtggatggacaagagcggcggcgaggcggcggcggcggcagcagcagcagacgacgtcgagcggcgggggggcgactacgagcaagacgagcacgagcggagaggtctgttcccgccctgtcccggtgcatccatgtactcttgtccccacgtttcgccggtccgttgaacccctctccggtcccttgctcgtcgtcccactcccagggacggtgtggacggcgacggcgcacattgtgacggcggtgatcggctccggcgtgctggcgctggcctggagcgtggcgcagctgggctgggtcgcggggcccctcgcgctcgccggcttcgcgtgcgtcacctactacacctccacgctgctcgccggcgcctacccgggcg

SEQ ID NO: 306249 - DNA, 337 bp, Zea mays
acttaaaacgcgtgccacgataatattgttcaccaacaaaaggttctaacgcggatacaccgcgacgacgacgataaatcgagcagcgactgggccagctgatggccgcgtcgatggcgtcctcgatcttcttcttgtcgtcggcagccagcttggacgcgatcttctcgtccttgatcgtgttgcgcatgttgtaggcgtagttctccagcgagttcttggactccaccttcttcttgtgctcctcgtcctcggacttgtacttctccgcgtcctgcaccatcttctcgatctcctccttggacagacggcccttgtcgttggtgatggtaatctt

SEQ ID NO: 306250 - DNA, 394 bp, Zea mays
ggcttcatttttcttgccggcgaggccctccgctccgccccagggggtggtgtacgatacacctagccgagcggctcgggacgagacaccgcgcgagccggcctaggttgacaccaagaaccactctggccgtcggaggcatggcgtacggggaccgcgttaccacctgagaggactcagagaaggagagcgagtacggctatgcccgcaaggtctctggacctgtggtggtagctgatggaatgggtggagctgacatgtatgaacatggccgcgatgggcatgatgacctaatcggggaaataatgcgcatggagggcgatacagctacaatgcaagaacatgaggaaacagctggactgatgggtaatgaccctgttgggagaaccagaaa

SEQ ID NO: 306251 - DNA, 350 bp, Zea mays
  unsure (1)..(350): unsure at all n locations
acgttcgttatcccccggcccacagccaagccgcggccaaggccttcccgtgctccgcacccgcggagtgagaagaaaagagggccggcaaggccgatggcccggttatgggcatggatctcggcacgacgtactcttgcgtcggcggggggagcacaaccgcgtcgagatcattgccaaacgaccagggtaaccgcaccacgccctcgtacgtagtcttcaccgactcccagcgcctcatcggagatgcggccaagaaccaggtcgccatgaaccccatcaacaccgtntttgatgccaagcgtctcatcggcaggaggttcaatgatgcgtctgtccagagggatatc

SEQ ID NO: 306252 - DNA, 497 bp, Zea mays
tcagtttctgcaccttgagaatctgctgctctggggccttctctcgcggctctacaacgacctcaaccgcaagtacaagtttgtgatgcatctggttgacgtctacggcccattcgccttcttcaaaggatggtaaattaattactactacgtactcgcctcctgtagtcctgtgacctgtgcatattctcttaggagtgacacatttctttaatttaatctgcttgtgttatggcgatcaagcttcgatgacataaacctggagcggctaaggctggcaatggcgatgaagacccctgaggatcaaatgttcaatttcgaccctaagaccatcgactgggacgattacttcaccagaatccacatccctggtattctcaagtatgtgtgcaagtgaagccttctttcttcagtctatttgcagcatgcacatgcttctttttcgcctcttactatcgaaagttaatggctcatattctttatgaaagaaattatac

SEQ ID NO: 306253 - DNA, 256 bp, Zea mays
tgcccccacgccggccccgtcgcgtgggttgtaactgacctcctgtgggacatcggtacgatgaccatgacacaaggacggcaaacagatgaagaagaatggagcgagctcttcaccaaagcagggttcagcgaattcaagatcctgacggaatctggggctcgtgctgcctcccaaggctagcctggggattgctcctggactatacacagatgtttacatacatatatgtatgtgcgagggtgccttgccgggc

SEQ ID NO: 306254 - DNA, 461 bp, Zea mays
acacaagaacatactgcagccttaagatcatagatttactcgtttcaggtgcatacagcatcagagtctaggaaaacgaacaaagggtcccacaattcaagcctaagggctcaacattgacaaatttattacgagaaagacaatacgacaatctgcttgttcacattgactccagatgcaaaagaccacatgcagcagaatgtatcactccaggatagggtctatttaagcatcagcaaacctgcattccacaagagtaaacgatcaaatttgttaaaattgaccaagcacaatttgtgcaatcaatggttaccccagttcggagagcttgaggtgggcctctttgtagtcatcaaagaaagccttctcatccgcagcatatttctcgacaagagggcggaagacagggtcactcagcagggctttgtcacttgggagctgaagaaggccctccttatcac

SEQ ID NO: 306255 - DNA, 500 bp, Zea mays
tttcccggtcggaccaatgcgtccgttatattttggcagccggaactatcatggtccgctgggggtcaaagtactctgatccaattttggcaacaggatggcacatgattattggtgggcttcctttgctagtgatatctgttcttaatcatgatcctgctctgagtggccatattcaagatcttacatggagcgacatattagcacttggttatacatctatatttggcagtgctgtcagctacggtgtatacttttacaatgctactaggggtagcttaaccacacttagttctctcactttcttgacccccatgtttgcatccgttttcgggtacctgtacctgggtgagaccttctcaacagtacagattggtggtgcgcttctcacactggttgccatctacatggttaactacaaaagcattataggtgagaaataagaggctatcacctacttgtgcgacgtttatcacataagggtgggtgggtgctgcatg

SEQ ID NO: 306256 - DNA, 298 bp, Zea mays
accgcccatgcgtttgcccacgcgtccgcccacgcgtccgcggacgcgtgggccgatgcgcacctcttctctctcgccgccccgagacccccacgcttccctctccgcccccgaactgtggcgcctccccccgccgtcgcagtgatgccactcgcggaagaacccgacgacgctcatgaggaaagggagactcagcagctgctaattacgacgaagggagggcccgggcttgagggactggtggtggggagctactgccacgatgtgctaatccggggcgggcgcatagtgggggaga

SEQ ID NO: 306257 - DNA, 369 bp, Zea mays
cctcttttattctcactaacaccagctagcaactctatctcttctgcaataatggccgctcgctcctcctcctcccagccagagatggtcgcggcggcggcggtcctggcagcggcgctgctgctgctggcggcgggggccgggaccgcgtcagcggcggtgagctgcggcgaggtgacatcgtccgtggcgccgtgcctcgggtacgcgatgggcagcgcggcgtcgccctccgcggcgtgctgcagcggggtgcgctcgctcaacagacgcgcgatgtcgacggcggaccggcaggccacctgcaactgcctcaagagcatgacgggccggctgggcggcggcgtcagcatgggcaacgccgccaac

SEQ ID NO: 306258 - DNA, 407 bp, Zea mays
tttgtgatctcgagaatagcgacgctgagcgcagacgtacgatccccgatccatggctccttttctggcacttgagagacgagtgtgtggcagacggtggctgtgcgtggtggagaagcagggcacgtgcatgaccatccaatgccgccgggtgggtgggtggaatggaaagatgcccaccattgcctcctgggatactgactactcccatgcggaatgtggatatcgccttcccagcgaacaacaaggggaggaacagcatcggatgcctgctctggcttttggccagcatggtgctgcatatgaggggcactatactacctgggcacaagtgggaggtcatggtggatttgttattgtacagggacccagaggaagcaaaggagcatgcggaggaagctgctgtt

SEQ ID NO: 306259 - DNA, 312 bp, Zea mays
  unsure (1)..(312): unsure at all n locations
ttctttttttttttttattaggncaacgtttactgttttttaaggggacaatcagctctgactgggggagatcttcatggtgaagacgaacatacaataagacacaagggcgatactagagcaggacacatcccatccacagatctagacacgaacatgctacagcacacagcgcaaatgaagaccctactttctaagccttcttgggggacttggcgcccttcttgggggacttgggctccttgctgccggcgctggacgccttttacgccgtcttcttgggcaggaacacggagtggatgttggggagga

SEQ ID NO: 306260 - DNA, 444 bp, Zea mays
cccactcgatcgcccacgcgtccggatctaatggttttgctagctggtacagaaatagcatattaaccagcttcaaacaagtgcagacttcttttttgttcattagtaatttcaatcttgcttatccatccaaaaagggtaccatttgcaaggttaaattggttgcggttatcctgttattttattaccctttttgcacttcacctccaaatttcaatatacttattatgtattattccttttttttttgcagagttcaagtttcttaagagattgatacttattcatgggcgttattcatacaatcgaacagcatttatttcacagtacttcttctacaagtcacttcttatgtgctttattcagattctgtttgcctttttgtcggggctatctgggactagcttattcaactcaattagcttgatggcttataacgttttc

SEQ ID NO: 306261 - DNA, 437 bp, Zea mays
ccctttcgttcgctcccctcccccgcgttccacttcgcggagatctagcccttgggtttcgccagcggcgaggcctaagtcatcggcggcgagccaaactccacgagcggaggaagaggaggggaagctgagacgaggaggcagctatggggcagcagtcgctgatctatgcgttcgtggcccgtggcacggtcgtactggccgagtacacggagttcaccggcaacttcacaaccatcgcctcccagtgcctcatgaagctccccgcaagcaacaacaagttcacctacaactgcgacggccacaccttcaactacctcgtggaagacggattcacatactgtgttgttgctgttgaatcagtggggcaacaaattcccattgctttcatggatagggttaaggaggatttcacaaaaaggtatggtggcgggaaa

SEQ ID NO: 306262 - DNA, 211 bp, Zea mays
ttttttttttttttttttttttttttttttttttttttttttttttttttttttttttttgcaaaccaaaaaagggtgattttaacaatcttggccaatagggggctcccaacaatttacttcctagtacaaaatggaaaccccccgcagcagtttccaatggaggggaaccctagagttttttctcaaaataacccaaccattaaccccc

SEQ ID NO: 306263 - DNA, 435 bp, Zea mays
gcttttctttacggcaagccatatgagataagattgctacaaattcctggtgcaatatttgctgctgcttgtgggcttgtagtggatgcaataatgttcacactgattgccttgtacaagttccccgttatgctattcaaaggatggaagcggttgattgaagatcttattggcagagaaggaccttttcttgagacagcttgcatgccatttgctggtcttgcaattcttctctggccatttgcagttataggagcttttatagcctctgttatttgcagtgttccttttggtgtatatgctgctgtggtggtttatcaggaatcctcacttttcttgggactgtcttatgcaatatcatcagtatccatctttgatgaatatacaaatgacgtacttgacatggcaccaggatcttgcttttctaggtttaaa

SEQ ID NO: 306264 - DNA, 398 bp, Zea mays
gcccggccttactggccggacccacccacgcgtgctttctttcgtgcgacggccggactcgtaagataaacagaaactagagaagaaatttgggcagtcttctgagaacgaacatgaacacttccagcgaacggagggaccctgaagagcgcaagtccagcttctcttgtgaaggaagctatacatgttatcagcccgcggctacaaagacaagaccgactggggaaaagagattggctggatttacggatcgatcacagaggatatcttgactggatttaagatgcactgccatggctggcggtctatttactgcatcccgaagcgggctgcattcaaaggttctgcgcctctgaacctttccgaccgtcttcaccaagtccttcgctgggcccttg

SEQ ID NO: 306265 - DNA, 508 bp, Zea mays
cttgttttgttcaagatggggaagaggagctcgataggaagcaaggatgcccttccagcggaggtggaggccccggcgccggcgccggcgccaccggagtcaacgacggagaagcagcgcaagaacagctgggagcaagaggggagggagagggacatcaggcaggggatcgatctagccacgacactagagcgtatcgagaagaacttcgtcatcacggatcccaggctccccgacaaccccatcatcttcgcgtcggatagcttcttggagctgacggagtacacgcgggaagagatcctcgggaggaattgcagatttcttcaagggccagagaccgacatgtccacagttgataagatccgggaagctatccgggaacagaaagaaatcactgtccagctaatcaactacaccaagagcgggaagaaagtttggaacttgttccacctacagccaatgcgagaccagaaagagagctttaatacttcattgagttcaattgatg

SEQ ID NO: 306266 - DNA, 256 bp, Zea mays
ccctttctttcaaatcaacattagctcggaacgcacacacgggccggactacgatctccgacccctgatcccatcgtggatccaagaagtagatcataggcaagactattactggaaagacaatcaccctcgaggaggagtcctccgacaccattgacaacgtataggccaagatccaggacaaggaaggcatcgccccggaccagccgtggtttatcatcgctggcaagcatcttgtggacgggcgcacacttgt

SEQ ID NO: 306267 - DNA, 415 bp, Zea mays
accatcctttcgagggcttttgtgaagcgaagcggtctgacgaggctttggacatccttctccacacaacgcctgaattgggctgtgtgcccgatgttttctcgtacagcatacttctgaagagcctctgcgaccaaggaaagagtggccaggcagatgatttgctacggatgatggctgaagggggagctgtctgctcgcccaacgtggttgcctacaatacagtaatcgacggcttttttaaggagggtgacgtaaataaagcatgtgatctattcaaagaaatggttcagcggggcattccacctgatttagtgacttataactctgtggtccatgccctgtgtaaggcaagagcaatggacaaggcagaggcttctcttcgacaaatggtcaataaacgtgttctgccaat

SEQ ID NO: 306268 - DNA, 219 bp, Zea mays
ttctttaatttcttaagtaatttttcctttttttttttttaaccaaggggggggtttcatagtacaagggaaattcatacgtcaacagcgacggaatgggccacgagggtgggtacgctagcagtagaaagatggcaacaacacgaaagggaacaccgaactcatcgaggtccgcttgccctagggaccacaaggctttacacgataacagccctcccc

SEQ ID NO: 306269 - DNA, 607 bp, Zea mays
ccggaatccctttttcgtcccacgcgtccgaaatagcgtccgcccacgcgtccgcccacgcggggggggattgtttggcctgcaaagcaaggaacaagccacggagcccgttgtggtcctctcaagaagaagaccatgggcagcgccttgaagcgaagcttctggctgctgagcagaaaaggctaagcctcttggcgaaggcacagaaccgactcgccaagttggatgaactcagacaagctgctaagaatgatgtggaaatgaggtttgagaaggaaagggaagaactcgagaccagagttgagtctcgtgtccgacaggcagaggagaaccgcatgcgccttctgcatgccgatatgcagaagcgggccgcactgaaggagaggacagcgaggtccctggtgcacaaggcaaaatcagagagcaaatacatggagcaggtgcgctctgcaatttccctgaagcgcgctgctgctgagaagaaaccactgaggttgctggaagctgaaaagaccaagctcaagctaggcgtttacgcatcaaaaagctgccatgactgtatgcagcccgagagaatacggaggagaaacctgaagaacagttgcca

SEQ ID NO: 306270 - DNA, 547 bp, Zea mays
  unsure (1)..(547): unsure at all n locations
cccacgtgaccgcccacgcgtccgcccacgcgtccgcccacgcgttcggtcgggaaagaaaacctgggctcagatgtcatgtgctcggcctgtcagatggctgtcgtgtggatagagaaccagctccgcgaaaacaagaccaaggagctcatactgcagtacgctaaccagctgtgtgagcgtctgccgagccccaacggagagtcaacagtcagctgccaggagatctccaagatgcccagccttgcgttcaccatcgcaaacaagaccttcaccctaacaccccagcagtacattgtgaagctggagcaaggaggccaaaccgtctgcatcagtgggttcatggcgtatgacgtgccaccgccgcgtggtcctctctggattcttggggacgtcttcatgggagcttaccacacggtgttcgacttcggcaacgacaggattggcttcgcggaatctgcatgagtgtggagagcactctcatctttataaagacgataccctatgtattanggatgtgtagttactggctatncactacatgcca

SEQ ID NO: 306271 - DNA, 443 bp, Zea mays
agtagggactccagaaatattgatacttggagcaagtggtgtggaaatttctgctggctttcattggtacttgaaacactattgtgcagcacatatatcttgggataaaaccggtggtgcacaactatcaaccattccgcgtcctgggtcactacctcgtgttcctgatggtggtgtactgattcaaagacccattgactggagctactaccagaatgcagttacatccagctattcttttgcttggtgggattgggaccgttgggagaaggaaattgactggatggctcttcaaggaataaatttgcctcttgctttcactgggcaagagtctatatggcagaggatttttgagaggtacaacattagcaaatcagatctggatgatttctttggtgggccagcctttcttgcatggcctcgaatggctaatatgcatggat

SEQ ID NO: 306272 - DNA, 422 bp, Zea mays
cggactcagggcggacgcgtgggctgggaacttatgaaactgctacggtggatgtgatcggtgacgggttccgtgcgagggatataacatttgagaacagcgctggtgctggagctcatcaggctgtagcgttccgttctgacagcgatcggtcagtgctggagaatgtggagttccgtggacatcaggatacgctgtatgctcacacaatgcggcagttctaccgcaggtgccatattgtagggacagtggattttatatttgggaatgcagcagcagtgtttgaggaatgtgtgattaagactgtaccacgggccgagggagctcagaagcgcgcacgaaacgtggtggcggctagtgggaggattgatccggggcagacgacagggtttgtatttgtgaattgcactgtggatgggaac

SEQ ID NO: 306273 - DNA, 433 bp, Zea mays
cctgattgtgccgtcatcgacgcggcagaggcgagcgggctcagcctcacggcggcgccgtactgggagggcgtcagcgtcgcggggctcgtgagcacagggtcccacggcagctcgtggtggggccgcggcggtgccgtgcacgaccacgttgtggggctcaggctcgtcgttaccgccggggaggctgacggctgggccagggtcctgacgctgcgcagaggcgacgagctcttcccggctgcgcttgtctcgctcgggctgcttggggtcgtctccaagatcacgctgtcactggaaccgaggttcaagcgcagcatcaccttcgactacaggaacgattccaccttccaggacgacttcgccgctcacgcggcgagccacgagttcgccgacatcacctggtacccgtcccagcacacggccgtgtacc

SEQ ID NO: 306274 - DNA, 407 bp, Zea mays
cccactcgtccgcccacgcgtccgcccacgcgtccggaaccagtatcggaggcttcgattttcggcgggcgcaataaatttcccgcatggctcggagggccgcgtcctcgctcgtctcccgctgcctctgcgccgcgcaggacagtgcctgcagatgggatgcacaggctgttgccaggtgtccttcagaggttcagcactgcagcagcagtagaggagcccatcacgccgtcagtccatgtgaactacacaaagctcctcattaatgggaactttgttgattccgcatccggcaagaccttcccaactctggaccctcgtacaggggaggtgattgctcatgtggctgaaggtgacgcagaggacattaaccgtgcagtagctgcggctcgcaaggcttttgatga

SEQ ID NO: 306275 - DNA, 415 bp, Zea mays
atatgaattccggagccactcggagcacgcgcggggatatgtcttatagaattttcctgctatgattcccctatggatgggtcccatagcagttacgtgtggcaatactggtgcaggcacggcatccccactgagcgacccgctgcgctacgacctgcgcctcacgcaatggcagctggtttgcctaagggtgttctgaacagcgttcatggcaccaatgatgttgccaataatatttgtgacgatgaggatattaagggctgatctttcgatggttccaaaacagctggtatgcatatttattctagagcatctgctgcaggcaagcgtgttcagtgcaatatgggagcaaagaatcatgcaattattcttcccgatgctgatagagatgctacattgaatgcccttattgctg

SEQ ID NO: 306276 - DNA, 260 bp, Zea mays
gtttacgcttatgtttgatgtgggcatcgtgacgagcttcggcggccggctggacgagcggcgcaaggcggagctgaggaagaattactccgtcgtggagaaggggtacaactccttccccaacagcctgccggggacgctccattacaaggcgatgcatgcgcggcggcggctgcacggcgtgctgtgcgacatcatgcgggagcgtcgtggccaggcccaggcggcgggcacacggcctgcttggctgcctgatgcgg

SEQ ID NO: 306277 - DNA, 309 bp, Zea mays
gagttcttccggcccccgaccgagtgatgggggcggcggggggcggccggtgcgtccgcctcggggcggcgccggtcctcgtcctgctgttgatcgccgttgccacattgccgcggctggcgcgcgcggtcaccgacgccggcgacgttttatgctataaatggactttatgttgcacttggatcaccaaagctgccaggatggtctgctagtgctggagatccctgtggtgagagctggcagggtgtcacatgtaccggctcaagtataacctcaatagttctcaatgctgcaaatctgggaggacag

SEQ ID NO: 306278 - DNA, 404 bp, Zea mays
cgagctgacgacaatggcgagggaggaacgtttgccctctactctctgatttgcaggcacgccaatgtgagcctcctcccgaaccggcagatcgccgatgaggagctttccacctacaagctggaatgccctcctgaaatcaccgacaagtcccgcatcaaggtgtggcttgagcggcacaggaagctgcgcgtcgctctgctggtcatggttatgatcgggacatgcatggttatcggggacggtgttctcacgccagctatatccgtgttctcggcagtttcaggcctggagttctcgctgtccaaggatcaccgtgaatatgctgtcattccaataacctgtgtcatattagcattcctatttgccctccagcactatggtacgcaccgggctggatttct

SEQ ID NO: 306279 - DNA, 395 bp, Zea mays
tgctccaatggctgttctggggggggtttgatttttacccggtctcagttattgacctagagggctatgagaagcgccttgagatcacattctctgaggcacctgtctttgtggaccctcatgggcgtggattgcgtgccctcttcagggcccagattgactttgatttggatattgctcggtgcacaattgtgtctgtgctctccaacaaggatttcgactcatatgtcctttctgagtcaagcttgcttatctatctcttgaagattgtcatcaagacctgtggcattaccaagctcctgcttaccatttccaagaatacttgagcttgctgaagagctgtatatccacttgttgctgtgaagtacttccgtgggacgtttatttttcttggg

SEQ ID NO: 306280 - DNA, 556 bp, Zea mays
ttttggtaactgccggccccccgcctcctccaaatcccggaccggtgcctccgtccgggcttccctccgttcccggccggggcgccgtcgacgccaccgctgttgcctcgctccttcccatttttcgctggcatagctattgtaagcaagcgaggagaagaaaaaagaagaaccagagacacccaggtttcgtgatcgtgctaaggagcggcgtgaagatcaaaaccctgattatgaacctacagaacttggttcgtttcatgcagtggcacctcctgggagtgatctgaggttggcggatgcccacaagatttcaattgagaaaagcaaatatcttggagaagcgccaacagagagaaaccctaggaaaacatgtcatgcactttcttgctggttatatttccatgttttcaggacagggtccttttcagacagggataacacgcgcaggcagttcctaacctcactgggcattacctatcaaactggagcatgggcaaggccacaaggcaacacttggccaatggctaccaaactgacttgatcatggaaatgc

SEQ ID NO: 306281 - DNA, 448 bp, Zea mays
ctttccaacgactccggagggctggtttcgtttgcgtgtggcggcggtttgtcaacggcaaacggaagcagaagggggccgttcgaggtgcccaaggtggaggtcaggttcaccaagctttttcatcgacggtatgttcgtcgacgccgtctccggcaagacgttcgagacccgggaccctcgcaccggcgaggtgatcgccagcatcgcggagggaggcaaggccgacgtcgacctcgccgtcaaggccgcccgggaggccttcgacaacgggccctggcccaggatgacgggatacgagcgtggtcggattcctccacaggttcgcggacctgatcgacgagcacgtggaggagctggcggcgctggacacggtggacgcctgcaagctgttcgccgtgggcaaggcgcgggacattccgggcgcccggcacctgctgcgctacta

SEQ ID NO: 306282 - DNA, 294 bp, Zea mays
ccggggactccaccaatggggtaaaatgatttataataacaaggttatattttttttctgattttacaacaaaatcataggggaagaagagggataaaatttcatatcttgaaaggccttgcgaagaccaagttgtggcacgtcgggttgcaggggtattcgcaatctattttcttcaccttttttttggcaaagaaccaggctccaactggttctgcaatgctcttattggtgactctgggggaagttggagagggccaagtcaacgagttcagggactgacaatgaacaaag

SEQ ID NO: 306283 - DNA, 441 bp, Zea mays
  unsure (1)..(441): unsure at all n locations
gcgcggagctggctaatccactgggagggtggaggctggtgtcgtaatctcaaatcatgtgcctcacgtcagagatcaatgttgggatcatcccggtacatggaaggccaggttgagtttacagggatcttgagcgatgacaaatctcagaatcccgatttttacaattggaataaagtgaagataagatattgcgacggggcatcattctctggggatgtaaaagatgaattgcagaatggtacacgattcttcttcagaggccagcgtatctgggaagcagttatgaacgaacttgtagttaaggggctcaggaatgctaaacagctntcaggctttcctaacaggatgctctgctggtggactagccccttacattcactgggattcttttcgtgcgctactaccaaaggattctagggttaagtgtcttgcggatgg

SEQ ID NO: 306284 - DNA, 447 bp, Zea mays
  unsure (1)..(447): unsure at all n locations
ttagtgagctcaggatcaagtactttgacaccataccagtgacatcggctgtctgtgtgctgcgctccggtttcctctttgctgcttctgagtttggcaaccatgcactttaccagttccgtgatattggtagagaagccgatgttgagtcatcttctgcaacactgatggagacagaggagggattccagccagttttctttcagccaagggcactgaagaacctcatgcgcatagatgagattgagagcctcatgccagtcatggacatgcgtgtcgcgaatttattcgatgaggaaacaccccagttgttcactgcctgtggccgtggtccacgctccacgttgcgcatcctgaggcctggccttgccatcagtgagatggcccgatcaatgctgcctgctgagcctatngctgtgtggactggcaagaagaacatcaatgaca

SEQ ID NO: 306285 - DNA, 494 bp, Zea mays
aatcagttaagggatcaataacattcactagcactttggactaaccacttttatttgaatcacaggtacaacagctcaaatctaccacaacaaaatggatattttaatgttttcctagtgtctccctaatgcattgttctcaaatggaactaatacgatccttttaacaaagcttactaaaaagagtagcataagaatggctttacacagaagagaatgacaacaaagcttgcatgaacaaaatggagcatgcagctcagattagagacatcaaattgtcatcacccgtaagttacacagatgaatgcaccagtcctagtagggttccaaggattcgacaactctcattgcttgtatttgcaaggtcgtctgcctttgctctgcatccaaggtggagccgaaccggcttgctgcccatataagtgatgcgcactgctcaccaaacagatttttcatttgttcatgtatgggagagttttccttcacaaaaacat

SEQ ID NO: 306286 - DNA, 306 bp, Zea mays
ccgatcggaatccctttctgggacgctatgatttaatgcagcaccctgttcgatcaccctgctgtgggaagactttcggatggtgaatcaggtgtacagactggcgcacgtactctcaatgaaggaggtccatagccaataccatatgcaagtgcccctgtaggagccatctttggatgctctgcaggattcataattgatgccaccataacaggaacccattcaggtatgatatcaggtatgccagctgtcgaggccactgtcaagtgccctgttgtaggacctgacttggagctgctctggaag

SEQ ID NO: 306287 - DNA, 435 bp, Zea mays
acgtcaaggatggtcatcgctggttggtggttatctccaactcctgtgtcgtccacgctactagctgcaaccgcgagcaagctaccgatgaaaggcagtggtatgcacctgcttggtgaatctctcaggactgcatttctatgtggcacacattgtttcctagctccaaacgggcggaaggctgaggtggagtcggcgctcttgcttgtcaaccttgggttggcaaggaaggcaaacaggcatcctggttgctggatccagttccatcctatcacgcagctcttcggcaagatcaggggaggtttggtgcctacgactgcagcagtgaatggagtgatgaggactggaaacccctcggtatactttgaccacttgtgggctagcgctgttctcgtgtttggtttcaagtccgagccgcccgccgtacagcttaag

SEQ ID NO: 306288 - DNA, 343 bp, Zea mays
gtctgtcaaggatgccatttctcagattgttggggatgccaaggagaagaataggaagttcactgagactgtggaacttcagatgggtctgaagaattatgatccacagaaggacaagcgtttcagtggctctgttaagttgccccatattcctcgtgccaagatgaaggtgtgcatgcttggtgatgcccaccatgttgaggaggccgagaagatggcacttgactacatggatgctgcggctctcaagaaaatgaactaggacaagacgcttgttatgaggcttgccaagaagtaccatgctttcttgggattagaggccatcattcagcagattccccgt

SEQ ID NO: 306289 - DNA, 466 bp, Zea mays
  unsure (1)..(466): unsure at all n locations
cctacctgtccgccaacccgaccgggacccctgggaaggggttgcatcaaaaccataaagggggggtcctcctgggaggcctaacctaaaaagaagaagaagaagaagaaaaacaagaacccaacccgaagaaggaagaagcaaaaagcgccgcgcggcgctggtgctggccgccgccgtgtgcgcgctgccggcgccggctgccgcggtcgtaactgacggtcttctcccgaacggcaacttggaggatggcccgcccaagtcggcgctggtgaacggcacgggggtgtcgggcgcccacgccatcccgcggtgggagacgtccggcttcgtggagtacattgagtcggngcacaagcagggggacatgctgctggtggtgccgcagggcgcgcacgcggtgcggctgggcaacgaggcgtcgatccgcagcgcctggccgtggcgcgcggngcctactacgcca

SEQ ID NO: 306290 - DNA, 432 bp, Zea mays
ccgcatcgctgtagcctcccatgtcgttcaccagaatcgagccccctggcggcggcggcagccacgcggcccatgacccgcgcgcccgtgagcagcagagccccggccgccgcggcgcttctccagccggcggaatggcagacgtggagggggcgcgaggaggaggagcctcagcgtccacgacggtacagctccaggaggcaccggtcgggcgcggcggagtgggcggcggtagtgctgttcacggtgctggcggtcgtggtgctgctgggcgccgtggccgttcttgtggtggtgctgctgctgcagccccgcgcgccgtacttggcggtgcgggcggcgagcctgaacacgctggtgtacgggcagacgggggcgctggacgacgtgcagctcacggtccgggtggaggcccgcatcggcaacgcgcac

SEQ ID NO: 306291 - DNA, 227 bp, Zea mays
aaaagggaaagcatctccgggaggaagcaacaacggaaaccgccataatttttttcaataacccgggggcaatgcgggggaattaacaacttttacaacatggggggggggaaaccacacaatttttgggaaccggcccccataacccggtggcgggggccactctggggagatcacgggataggggcagcacactggcctgaggctggggaataagaaaacttttt

SEQ ID NO: 306292 - DNA, 554 bp, Zea mays
cgttccttcgggatgcgctgaagacagcctgaggcggctgggccagtctaacagcgccccctcctggctggcactccgttcgtttgacatctcctcccgtcctttcctttctgaggctcgcgaaccccgacaatggccgcaaccgcggtgtcggtcgacgagaagctcgacaagcttcgcgccgaggtcgccaaactcagccagatcagcgagaacgagaaggccgggttcatcagcctcgtgtcacgctacctcagtggggaggcggagcagatcgagtggagcaagatccagaccccgaccgatgaggtagtggtgccgtacgataccctcacgtcgcctcctgaagatctcgaggagacgaagaagctgctggacatgctcgttgtgctcaagctcaacggagggctcgggacgaccatgggctgcaccggacccaagtctgtcattgaagtccgcaatgggttcacattccttgaccttattgtgattcatatcgagtccctgaacaagaagtatggatgtaatgtccctttacttctgatgaactcttt

SEQ ID NO: 306293 - DNA, 365 bp, Zea mays
  unsure (1)..(365): unsure at all n locations
tcgagttccaccaccannagagcgcgcgcccggggcgggtggcgaggaacacgagatgcaggacccccccacgagccagcaggccgcgggagagggccggacggcgaccaacgtcgagaacaaccccgcccaagccggaggaggaggacaagaacccgcacaagcggaaggaccgcacggaggcgcacggccccgccagcagcgacaacaccaggggcgccggaggacccaccggggacctgacccgagaaagagacaacccgaagcagaacacggcgcgggcggaaaccacgaagcacctgacaggcacaaacaggccagaacagaagacagaccatgccctggaaaccaccaaacccaaaggg

SEQ ID NO: 306294 - DNA, 522 bp, Zea mays
tcggtttaattctttgttacgtttttgttgatggcgtggagtgccaaaaatggagcttctccctgttgaagtcgttggcaacattctttcccatcttggtgttgcgcgtgatgttatgattgcctctgcggtatgccgcaagtggcgagatgcatgcaggaggcatctccgtttgctgtccttcaactccaatgactttccacgggacatgactacacgtcagttggagattgtcatcacacagactatatttcagactatggggctgcaacgcctttcgattcacattgataacacccatgagttctctgcagcaccagtgattgcatggctcatgtataccagggagaccctccgaagcctgtcttacaatgtcaggacaatacccaatgtaagcattcttgaaaagtgtggtaggcaaaagctcgaagtgctagatttggaattggaccataacaccatcacaggtgtcgaaccaagctatcagagggtcacttgtctgaaatccctttcctgaggcat

SEQ ID NO: 306295 - DNA, 454 bp, Zea mays
  unsure (1)..(454): unsure at all n locations
ttgttttcgcgtgggccagtttttctcctctcgcccgcgttccccgtcccgactcccgacccaacccatatcagaggttccgtccgttggtggcgctggcgttcccgtgagtcggcccgcgcgcgaaggcggccgtgaccgaccgtccggagcttcatgcgccaggggcggcggctccaccccgtcgtttgatgggcaacgcatgcggcggcgcccttagatccaagtaccagcacagcttcaagcacgccgcgtcgtcgcagcgccgcgcctcctccgagtacagcgccagcgccgtggccgacgactcgcccaggaagcccacgcagtcgcccgccaccacggacgcccacgcgccgtcaccgccgtccgtcaccgtcgtagccgtcatgaggcgcggcggggccngcgcgctcgcggacctggggtccgtgctcggncaccccacccccaa

SEQ ID NO: 306296 - DNA, 448 bp, Zea mays
gggggctcggtacaccgccggggcggggtacattgaacgaggacatggttgcgcgcaatggctttggatgaggcaaaccctgcgggactacggttacaaattaaccaaagtttcgtttgctatgtgatgatgagagtgcaataaaaatggccgacagtccctttgagcacagccgcactaaacacatagccattcggtatcattttcttagggatcaccaacaaaagggagatattgagatttcttacattaacactaaagatcaattagtcgatatctttaccaagccttttgatgaacaatcttttaccagacttaggcatgagctcaatattcttgattctagaaatttcttttgctagcttgcacacatagctcattagaatacctttgatcatatctcttttatatgctatgaataatgtgttttcatgtctattttcaaacc

SEQ ID NO: 306297 - DNA, 448 bp, Zea mays
gttcgtttccggcgaatctgtacacgaattaatgcacatatcacagcaggcaacgggacagggctgaggattacgatgaggcaaaccaatgtctagagaaatgtgaaagagatcaagcgcgtggcctggctgatagcatgactggcaaaaacagggccgctgctattgtggcaacctttttgaggaagtctctagggcggagacttgcacaggctatagactgggtgaaagaccgaaaaccacaggatgaactgacagatgcgcttcagaaggagctgctggagcatgagctgcagatttctggacccaggactcaaaccgaggcacccactgaattaggagctggtcttgcataaggagatacagaaccagaaggtgacatgcaaacgccagcgatcaagcaaacgatcatgccatgcataaacgagcgagataacccaaacgatcg

SEQ ID NO: 306298 - DNA, 512 bp, Zea mays
cttacgatctggcgaacgcagaccgtacaacaggtaacggtttattatatcacctccagaagttgagtcctacagtctggctactagacaataaccataactaaagctaaaagacacctggattgcatctgatgtttactgaggtactattttcaggctgttaccgccccaatgtcaacattgaacgcgattgctgtagaagcttacaagaagtatatcctagtttcactcattgtgaatggacaggtcccatcatttcctaagtatacatccatatcagcccaaaggagtatgaaaaaccatgctcagatttattttgagctttctacaagctatagcaacggtcgctacactgatttagagacatttgtcgaatcaaattcagcagcatttcaatctgacaacaacctagggttggtgaagcaggtgctctcatcgatgtacaaacggaacatccaaaggctgacccagacttacttaactctttcacttgaagatattgctaggtctgt

SEQ ID NO: 306299 - DNA, 492 bp, Zea mays
cgtcgtttgggcggacgcgtgggcacaccctctagctattccacggctggtcggctcgccgtcgtcaagaggcgtcaggtgctgaggctatcgttggtctcttagacggggacgagcacccactagtgattcctgaacagtttgttttagatggcaaatgaagagacgttgttcaagatgggaaatgcagatacagatactgctgcactgcacaatgaatgggatgatgctctctgctccatatgcatggaccatccacacaacgttggccttctgttgtgcagctcccaggacaaaggatgccgatcctatatatgtgatacaagctataggcattcaaattgcttagacaggttcaagaaaatgaaagtgaatgatggggacagtccttcacagacaagctcatccatgcctaggggtacaagaaaccaaaatgttgtccacggatctcgttctggtcttactagagagagccgcagactacacatagac

SEQ ID NO: 306300 - DNA, 510 bp, Zea mays
  unsure (1)..(510): unsure at all n locations
ggcccgggaacggaccgggccggcccacgcgaccggttcccttgctcattctcagccgccgccgatccctgcccgtgctccgtaaccgctgagtgagaagaagagatggccggcacgggcgatggcccggctatcggcgtcgatcccagcacgacgcactcatgggcagcagtcgctgcctaccgttcgggaccgtggcaacgaccactggcacggtaccacgccctcacacgcagccttcaccgactccgagcgcatcagcggagatgcggccaagaaccaggcagccatgaaccccatcaacaccgcctttgatgccaagcgtctcatcggcaggaggttcagtgatgcgtctgtccagagtgatatcaagttgtggcccttcaaggtcatttctgggcctggtgagacgccaatgattgttgtccagcacaagggtgaggagaagcagttngcagctgaagagatctcctctatggctcttatcaagatgcgtgagattgctgaagc

SEQ ID NO: 306301 - DNA, 412 bp, Zea mays
gtcggttactcctccctggcgagcgcagactcgggagcggtactaggcacgctcgcggtcgaagcgcagcaccagaagacaggcggccagggacgcgagcgcaagcggagccggggggaaggcgacgaagggcgcggccgggcgcaaggccggcgggccgaggaagaagtcagtgacgaggtccgtcaaggccgggctgcaggatcccgacggccgcatcgggcggaacctgaagaagggccggtacgcgcagcgcggcggcacgggcgcccccgtctacctggccggcgtgctcgagtacctggccgccgaggtgctggagctggccggcaacgctgccaaggacaacaagaagacccgcatcatcccgcgccacgtgctccttgccatccgcaacgacgaggagctcggc

SEQ ID NO: 306302 - DNA, 419 bp, Zea mays
ttcgatagcagaggatcacacgcactcgcctcctgtggctgcgtgggttgtggtcgagacatacatgcacgctagcctcgcctcctacgccgcggcagctatgccggcgctggacctccgccccgagatagcgcacgcgcaccagcccgtcatgtcgccctcgcgccacggctgggacggcaatggcgccgcagcagtgtccagccctatgcccaagaggctggacggcaaggtggccattgtgacgggcggcgcgcgcgggatcggcgaggccatcgtgaggctgttcgtcaagcacggggcgcgggtggtgatcgcggacatcgacgaggccgcgggggacgcgctggcgtcggcgctgggcgcgcgggccagcttcgtgcgctgcgacgtgtccgtggaggaggacgtccggcgcg

SEQ ID NO: 306303 - DNA, 552 bp, Zea mays
tcctcgggatcgatcccatcgcgtctctattgagtgttcctgtgccacaagtgcaaacctaaggatggtgttccacctgccacacggaggataatcatgtcagatgctgcctggggtctgtcgcttgggaaattcctagagctaagtttctcaaaccatgcttctgccaaccgagttgcaagctgtggacattcactccagagggactgccttcgtttttatgggtatggaaacatggtggcattcttcagatattctcctgttgacattctctcagttaaccttcctccaccagtactggacttcaattgttgtagtacacaagagtggctaaaaagggtggcagttgagatatttggcaaaatggaatccttgcatgtggaggtgtctgaatttcttcactgtactgaaaagaacattgtaactgaggatgaacctgtgagggaatgtgttcaaaggcagattatcgagatgaaggattggcttaaaatgcaaagaaatgaatatgagatgttgctcttaccagtcatgagggaaagcaatcaccccatg

SEQ ID NO: 306304 - DNA, 468 bp, Zea mays
tttatggagtctaactggtacaccagtcccgaggaggcggacgacagcgccgctaccttcgcctctgatgtctatagactgggtgtgctcttgttcgagctgttctgcacattcgaaacgatggaggacaagatgcgggcaatggcgaccgcgaatctgaggcaccgggtgttgccgccacagttgctgctcaaatggcccaaggaagcatctttctgccagttgctaatgcaccctgtgccagaaaccagaccgaagatgagttatatgaagagccatatagcatctagagattttgagggtatagtgcaagtttgggatgttactaggagtcaagtttttgttgagatgagggagcatgagtgacgtgtgtggtcggtggacttctcaattgtggacccaacaaaattggtcagtgggagtgatgatggatctgtgaagctatgggatatgaatcaggctgggagt

SEQ ID NO: 306305 - DNA, 507 bp, Zea mays
  unsure (1)..(507): unsure at all n locations
tctatttgtcttatacaggagggacaatctaaaagtattgtgcaagatatagagcatgcactcatcatatctaagtgatcggagtgatattgattagcttattagatggatattggcccagtttatctttcatttttttctatagctgttagaattttactttgctcagttcatactataaataatatgagactcttgttttgtggtccaagtgtttagcgcttagggtgccttggaagtacgctagcttgttgtcatgaagaagtcattcaagttccttccagtgagttattagttcttatgtatatttctgtaacatgtaattttacaatctttatgcacattggaggtgtatttacgacataattaagcatcataaacaaatatattttagagtagaaagaaggacaatgcactccattatgttttaaacattgacttttatgtttacctcattgcaaccttttcaggcacttnctatatttcttgacataatgtttcatcatg

SEQ ID NO: 306306 - DNA, 422 bp, Zea mays
tttagaacattgtatatgcccccatgacaccgagtccaagcagcaggctcgagcatgagctggagaagcccccacatccgcatgggctggatgcccatttcatgaggaggcttgtgagccggagctgggaggaatccaggctgctatggcgccttgccttcccggcgctcctgacggaggtgtttcagttctccatcggtttcgtcaccaccgccttcgttgggcacctcggagaggtggagctcgcggctgtcagcgtcgtggagaacatcttggattcctctgcctatggggtcctgtttggcatgggcagcgcgctggacacgctgagcgggcaggccgtcggcgccgggcagctggacaggctgggcacctacacgcagcagtcgtggatcatctgcggcgccaccgggctggcgctg

SEQ ID NO: 306307 - DNA, 532 bp, Zea mays
  unsure (1)..(532): unsure at all n locations
tttgagatttaatgttcgactatggaagatattctgtgattgcttcaactgcttgcctatggcagcacttattgatgacaaaatattatgcatgcatggtggcctctcacctgaattgactagcttggatcaaataaaagatattgagaggcctaccgaaattccagactatggtcttctgtgcgatctcctttggtctgatcccagtcatgatacagaaggttggggggagagtgaacaangtgtttcttgcacttttggcgcagataagcttgttgaatttttggagaagaatgatcttgaccttgtgtgcagagctcatcaggtggtagaagatggctacgagttctttgcagagagaagactagtgaccatcttttcagctccaaactactgtggcgaatttgataatgcaggtgctctattgagcatagatgaaagcttgatgtgttcttttcagatcttgaaaccaaatgaaacaggtgcaccacattcaaggaaacctcttccaagcaaggcaccaaaaagagag

SEQ ID NO: 306308 - DNA, 467 bp, Zea mays
  unsure (1)..(467): unsure at all n locations
tttcgcgttttcccacgcgtccgacggagtttacccacaccccagccaggctgcagtggttcatcacggccacgggaatcgtttacttcgccttcgcctacttcgtgccgacgatttctgccatgaggaactggctcgccacgtcggcggcgctgacgttagcttacgacgtcgctctgctggctatcttgatcagagatgggaaatcgaacaagcagaaggactatgacgtccatgccggatcccaagccgagaaggtgttcatcgcgttgggcgccgtcgctgccatcctcgtctgcaacacgtccgggctgctcccggagatacagtcgacggtgcgggagccggcggttcgcggcatgaggcgggcgctgctgctgcagtacaccgccggcgccgcggggtactacggcatcagcgtggcggngtactgggcgtacgggtcagcggtgtcggagtacctcccc

SEQ ID NO: 306309 - DNA, 407 bp, Zea mays
tgtccacgcgtccgcgccgttcatgatcaatcagtacctgtgggtcgagtgcgagtcggacccgaggccggacacgctgggcttatgtctgttccagccaaacacggggcgcgtggacggcgggtccaagatcaggtacaccaacatgttggacgcgcagctggacgccgtgaagtaggcgctggtgcgcgccggatacggggacgtggtctttgtggtgggagagacggtgcggccggccacggtcgacaccatggagcccggggccacggccgacaacggcagggcgtacgtgtacaacctggtggcgcatctgcggtccggcgccggcacgccgctgatgcctgggatggcggtggagactttcctgtgcgcgctgcacgacgtggacctcaagcccggggcca

SEQ ID NO: 306310 - DNA, 263 bp, Zea mays
ttcccacgttctcgccgccgcaggggaccggcgccgccgttccgcctttacccatggaccccgtcacgcccaccgccttcgacaccaactgctacaccgacctgcacgccaggcgcgcacgaacaaccttcgaccaggcgctgttcgccaaccaggccaccgtcgcgcaggtgctcgcctacaccaacagacccgtcacctttcagaccgactttgtcgccaccatgatcaagatgggtgccatacaggtgctcaccggcaca

SEQ ID NO: 306311 - DNA, 372 bp, Zea mays
aaataattcggcacatgaaacgatgcacatgggggaggttttttttacgatacggggtcacgggcaacttcctcagaaaccaccaaacagagagtagtaaaacacgggacccgcgtggggggcgagatcaagaaaactactaacctaaccacagacggagtacaacagaacggcgggcacagccctgtttattggaaacaaattggcatcgacgacgccctcctcggaaacgaaaaaggcaaaaaaaaggtgctcacttggcgctgggtcttgaggccgcagtcggggttcacccagaggatgttggtgtccagcaccggcagcatcttgtcgatgcggtcggcgatctcctcagccgacgggatcctgggg

SEQ ID NO: 306312 - DNA, 305 bp, Zea mays
ggggacgattttaaaagccagacttgaacagtgtttaaaacactagtgatttacatggcttccccctggttgaccatgttcttggcattttttatttaaagttgtacattttttgcaagatatgaaatgacgtgaaaatcgacctgacatttgacatcaatatgagtgtcctcgtaatcaacccttgtgggtttcccacacattaacttatgaccaatggttccagaaacacaatatcctggaagggtaaccagattcttttttgatggtgcccattttttaaacgccttaagggaaaatccccc

SEQ ID NO: 306313 - DNA, 248 bp, Zea mays
  unsure (1)..(248): unsure at all n locations
catcatcctcgccatctatagctcgncgtgctacggatcatcagaatgcttgccatcctagccataagagtcggccttgacctcgtctgccttcacatcggcttcctcatcctataggtcatcatcctcatcactctgaccctaggaggcatcctatgcttccttttttttctcggcctcatcaaaagcagccttttgtgcctgctcgggctcgccccacttctcctctgcaaaagtcttggccaagg

SEQ ID NO: 306314 - DNA, 401 bp, Zea mays
  unsure (1)..(401): unsure at all n locations
tcaccgagctcctcctcgctgctgctccgccagttggactgggaggcgacggcggtgatggcgccgccgcggtggaagtccggcgacgggcgccgccggctcctgctgctcctgtgctgctgnctactagacttcccctgccacgctcaagtactcaccaacaacaatatctcccaccggtccgatcaaggcggcatccactcgtttgtgggcacgtacgggatcaactacggccgcatcgtcgacaacctgccgccgccggaggtggtggtgcggctgctgaagctggcccggatccgcaacgtgaagatctacgacgccgagcacaaggtgctggacgcgttccgtggcaccgggctgaacctcgtggtggccatccccaacgagttcctcaaggacat

SEQ ID NO: 306315 - DNA, 451 bp, Zea mays
tccacgcgtccgggccgccctttttttttttttttttttttggaacaaaactggtgggaatagacgggggctacaaaatgtcccactcccacgggatccaaaacatgcactactagagtcagtgggaggtaaatatttcttactgatcaaaccataccctctgaagcaagcttgatgcgttggtgatgctcagtcactttgtagtcaactacctctgaaaataactgggggtccaatatacagtcaggccgcccataaacagcagcttgcacactagccaccagcttcgcaatctccctgccagagaaaccgtacgatcttccttgcagcttccctgagcaaatcatcgcttatgccattgacctgaatcttccgctgctgcttcttgaataatgcactccaagaagatcctttgccctcttccttgagtatatattggttcaagtatagc

SEQ ID NO: 306316 - DNA, 335 bp, Zea mays
ttcacacgtcctcggacgcgtgggcggacgcgtggggacaagtccgttaaggaccttgtcatgctgctgttcgagacggcgctgctcacttctggctttagcctcgacgatccaaacacctttggcagacccatccaccgcatgctgaagctgggcctgagcatcgacgaggacgaggaggctccggaggctgacaccgacatgccccctctggaggatgacgctggcgagagcaagatggaggaggtcgactaacctggtgctattctgatgccgaaagagatagaacatcgggtctgttctgtgggtcttaccacttatgctatgatgcaatc

SEQ ID NO: 306317 - DNA, 443 bp, Zea mays
tctcacgcgtcctcggacgcgtgggcggacgcgtgggcatgtgatctcacagagagagactgcgagtaggcagatcaggaagatactgactgagagggctagatgcttcaacattgctctcgatgacgtctccatcacaagcctgagctttgggaaggagtttactcatgccattgaagcgaagcaggttgctgcacaggaagctgagcgtgctaagttcattgtcgagaaagctgaacaagataagagaagcgcaattatcaaggctcacggagaggctaagagtgctgagctgattggtcaagccatagcgaacaaccctgccttccttgccctgaggcaaattgaagctgcaagggagatctcccacaccatttcggcctcatccaacaaggtgttcctggactccaacgacctgctgctcaacctgcagcagctgaatg

SEQ ID NO: 306318 - DNA, 477 bp, Zea mays
tttctgccgaggacctcgctctccaccaagaggcggtcagcgctgcccgacggcaccgtcgcctctagggcatcgaacaccgtcgagtagtagcccatcgccgcggtcacccgctatggcaggtcatcggagcagtcgtcgctgccggtgctgttggcttccttctcaacgatggtcaccacggcggggttcatggatttaacccacttcaggaatgtaccttgacttcgtccgggagaagcagaaactggcactacaagctgtgcgttggccgttggctcgtcctccccgcctccccggcgacgtcgcgggggcagcaaccgtactaccacggcgcatatgcggagtccgggtccgaccgcttccactatgcgtaccagcgcgctggtagctccacagcatcggcgctgaggctgcgcatgaggggcgcgatgtccaaccgtaacatcacgctgtcagtcagcgcgcacaccaacc

SEQ ID NO: 306319 - DNA, 329 bp, Zea mays
ccctttcacacttgggaacgagcgcggatgcttatcaccgggcattttccgggcaactgccggggccatctggttcacagccagctacccggacgtggtcttcctctgatgccgcagggacaccatcaagactgaggcacatgtcaaggaggacgggaggatacacgtcagcgtgcgccgctgcaacggctcgcgctacgacatacactagtgacgctacatgggcttctccaggaccacgccacgccccagcgacctgaccaacgccgtgatacactgagtgcagctgaggcgcatcccgaccccgcggtgctccagcttcaaccaca

SEQ ID NO: 306320 - DNA, 460 bp, Zea mays
tttgagattggcgtattcgcactcgcctacctacgcggctcaaacctttccgccttgtgccaattccttgcgtcggccgccggtccacccgtacgacgacaccatgagggagtgcatgtcgatccacatcggccaggccggtatccaggtcggaaacgcgtgctgggagctgtactgccttgagcatggcattcaggctgacagtcagatgcccggtgacaagaccatcgggggaggtgacgagagctgtcaacacctacttcagcgagactggtgctgggaagcacgtgcccagtgctgtttgttgtgaccttgaacccactgacatcgatgaggtgagaactggcacctaccgtcagctgttccaccctgcgcaggtgatcagtgggacagaggatgcatgcaacaactttgcccgctgtcagtacaccattgggcaggagattgatgagctgtgcct

SEQ ID NO: 306321 - DNA, 411 bp, Zea mays
ggcataaatagggatttgttattccaaaatcaaggtttcaactgaacaggatcctagtattcaaaacaaaaaggtgtgacaaaatcctgtgtaactccctatgatcctctatggtatacaatttctgtcctaattgacagagctcaactataatgaacgttgaactattccggtcccaacaaaatcacatcaaacttttatgatcccaaaaaaactcacgtataacctttgcttctaaatttccttaattcagaaacaactgtccacgcattcaggcattccatgatgctgaccgccgcatggtcggcttcacaggccggtcctcctccatggagatcatcatcagtgtcgatgggtcctccagcatcatgcgggccacgaggttaccagcaatggaccaggtttggaact

SEQ ID NO: 306322 - DNA, 406 bp, Zea mays
acatataatattgaatataattagggccatgggagagtacacagttatgataaacacaaacatatcagatatgaaaacaagacaacacatagaattactaccggtgcagcccatagtttttaaagcggtaaggcggtccaagacgttggagcaccttctgaacgcctaggtgaggtaggcgggcaaagcgcttaggcgttagaccatcgcccatcgcccggacgcctaggcgacgccttaagaacagaggtgcagccattgctaactaaactgagacacatgttcgtaggatacatcatacatgtcacgatagtattttctgccttaaaacagcttcaaacaatacaaagcgcgagaaaataaaatgaacaaacgaattgagagcatcaacggagtcatggaaaca

SEQ ID NO: 306323 - DNA, 329 bp, Zea mays
attcccggttcgactccacgcgaccgacactgcgtgcgttttatcagtccacgcaggcgtatgcgaggaagagggggagggataccactgtcaagcccagggctctccgggggctcaggaccggttgtgagagggcgaagaggactttgaataacactgcccagaccacgaaagcaatagactcgctgtgcgagggcatgagcttctactccaccatgacccgtgccaggttagaggagctcaacatggacctagaaaggaagtgcacggagcctgttgagaaagtgctgaaggatgccaagattgacaagaccaccgtccatgacgtt

SEQ ID NO: 306324 - DNA, 298 bp, Zea mays
  unsure (1)..(298): unsure at all n locations
ctcatgtgctttcctggccgccggctgctgcgcggctgttaacgcctgatacactcgtcggttatgaacgccgaccgccgcctactccgcggctctgccctcccgccggtgccgccggctacccaggaactaggatgcgggtgaagaagcggtcgaagcaccgcaaagcggtcaagttctacgccacatgcttcggcttccgcgagccctataaagtcctcatcgacggcaccttcgtncaccacctgcttacccagcgcctgctcccggccgacgaggctctccgagacctcctctc

SEQ ID NO: 306325 - DNA, 438 bp, Zea mays
tttccgccgttaactcccggaaccgacggcagaaacagaagatcggaagctttgctggaggtttctgatagcatgctcagcaccgaccatttccagcagaaggaagcctgcagaaggagcgcctctcctttgatcagcgttttgtacttgaacagctgggacccgatgtctgcaggcggggctggtgttggatcacccggtcaagtagttggtgatagcttcagattcaacctataggaggtagagtgcgcgacgcactacttctccgacgtgaacttgctcgggaagagtggcttcgccgtcgtgacgtacaaagggatccttcgggatggatcggtagtcgctgtcaaaagccttagcaagaccagctgcaagcaagaggaggcggatttcctgcgtggtctgaagatgctcacccttctacaacaacgacaatct

SEQ ID NO: 306326 - DNA, 521 bp, Zea mays
ttaccggggttggccctggtagaggtaacaacaacaacggagttgcacagacctatccggatgacaagaaaggctcttcatcagggagtgaggggtccatctggccgaagtttgaaatcaccctgtcaaacagggaaaatgtataggatttcctggtgttcaaaggatccaagctgcctcaaagacccaagaaaagagctaaggtcatccagagaaccgtcaattttgtatgcccaggaacgtggctatgtgacttgactcttgaaagatatgaagtccgggagaagaaggtttccaagaagcgccccatgggattgaaagctatgcacgacatggacagtgactcggaataaataaaagaagatcactgaacatgagaagctgaatattataaagaaggccaggacagatcctgcagatggaggccgacaagaaaacgtcctgatggaatgaatggcctgattcaccaattcgccacttctcgtgatggctactggagatcagtttgttccaaaggactt

SEQ ID NO: 306327 - DNA, 384 bp, Zea mays
tttgttcgcgtgttcgtgggcggacgcgtgggcgggcgccagttcggacgcgtgggcgctcgccttcctcctccccactccactccattccaacgcaacggcctcgtcccgctctataggccgtcgcccgcgccacatcggcaccgttttggaccggagcgggcacccattctcttttgtacatcgcattgcttcggctcccaacgcaatcgatccatccggccctaggtgtgctttagctatgcagcttagcagcgtgcttcccctagagggaaaagcgtgtttgagccccaatgaggagaggcagtggtggttttgggagtgagtggatgaagatctactgctgcagcatcaggcggcacaaggcacctgatgaggatgtgt

SEQ ID NO: 306328 - DNA, 441 bp, Zea mays
ggtttgagaaacttcccggctcgaggagatcgtgacattgagaggacgatgggagggcgcgcgcttctcctcctgctcctggtctcggcgttggtctttcagatccacgcctccgacccggcaatctaagccagcctgttgcgatttcgctatctattttccctcggaactttgtgggtgagatttgagatggtcactccgggtttcggtgttgttgtttgcagctgctgtacgagccggtcgatgaggactatgaggggagatgggtcgtctacaagaaggatgaataccaaggtgtgtggaggcatgccaagagtgatggccatgaggactatggcctccttgctagtgagaaggcaaggaaatacgccttaatcaaggagcttgatgagccagttaccttgaaggatgggacagtggccctgcaggtcgaagtgagac

SEQ ID NO: 306329 - DNA, 449 bp, Zea mays
cccatctgttgcgtttcgaccatcaccaacggaagtcggcagagtgagccaaggccctgtgtgtgtgtgtgtctgccacattacctacccagatcgaaatggcgcggtgcccagctgctcatgccgctctctgctcccttgctctgctcctcctgcttccagctgcgcgggcggcgacgttcaccatgaccaacaactgcggctacacggtgtggccggggctgctgtcgggcgccggcacggcgccgctgcccacgacggggttcgcgctggcgcacggcgcgtcggcggcggtggacgcgcccgcgggctggtcgggccgcgtgtgggcgcgcacgctctgcgccgcggacgccgccaccggcaggttctcctgcgccacgggcgactgcggctcgggagccgttcagtgcaacggcggcggcgccgccccgcccgcacgctggcga

SEQ ID NO: 306330 - DNA, 285 bp, Zea mays
caagcaagcgagctcttgagatttcagctcgcttcttcttcagaggtagagcacaccgactcctcgaccgaagctttccctacaattagctgtcagaactgcttgccggagatccaaacaaacctttgttgtggggttctccggagttactatgcgctggagggaggtatcgatctcgctggccatggattggctgagaagcaacagcggtagtatctcgatgccaaaactatgagctttatgaagaacgccattcacctgcgccggtcctgtttcctccactcc

SEQ ID NO: 306331 - DNA, 489 bp, Zea mays
tttgttgttcggttgggcgggagttttccggcggtgtctggtggagccggcggcgatgtggtggccctccaacctcgtgcaggtctccctcttcagggcacttcatgagaaggagcgaaggagaaaaggtagcatgacacgcaaccagttcttcacggtggcattcatctgcagtttcgcctactacatcttcccgggctacctgttccagatgctcacctccctctcctggatctgctgggtgtttcccagctctgtgattgcccagcagctcggctcaggcctccatgggcttggcatcggtgcagttggactcgactggtcgtccatctcctcctacctcggaagcccccttgctagcccctggtttgccaccgccaacatcgcggctgccttcttcattgtcgtgtacataatcacaccgatcaactactggttcaatgtttacaaggcacgcaactttcccatctactcagatggcctctacac

SEQ ID NO: 306332 - DNA, 178 bp, Zea mays
aagcacgacctcagctccatcctgatcgtgctctccggcgccgccgccgcttggcatggacctcgtcgacgcactccccgcccgcgtgccacacgccgtcttcggacagggatactggatgaccgaggccgggcccgtgctgtccatgtgcccggcgaacaccaaggagcccgcgccc

SEQ ID NO: 306333 - DNA, 545 bp, Zea mays
actttttgaaagctcgccgccggagcggcccggaattcacttcccggacccacccacgcgttcttgcgagaggggggtccaaatatcaggttctagggggctcgtgtaaaacctttcccccttctcccaataccttccgccggccgccgctccacccgtacgacgacaccatgagggagtgcatttcgatccacatcggccaggccggtatccaggtcggaaacgcgtgctgggagctgtactgccttgagcatggcattcaggctgacggtcagatgcccggtgacaagaccattgggggaggtgatgatgctttcaacaccttcttcagtgagactggtgctgggaagcacgtgccccgtgctgtttttgttgaccttgaacccactgtcatcgatgaggtgagaactggcacctaccgccagctcttccaccctgagcagctcatcagtgggaaggaggatgcagccaacaacttttgccgtggtcactacaccattggcaaggagattgttgacctgtgccctgatcgcataagaagcttg

SEQ ID NO: 306334 - DNA, 342 bp, Zea mays
tcctccggccacccctccgctggggggaggtttcgcaagcgtaggagagaaacggtcccatggctcgcacgcaatctgccatcacctgcgggcaggggagcttcgacatcgcgccctggctctcctacgcccggggtgcggagtgctggccctgctggtgctgctgcagcggggtcaggaacctcaagagcgccgccagcaccgccgccgacaggcgcgccggctgcaactgcctcaagaacgccgccaggggcgtcagaggcctcaacgcacgaaacgccgccagaatcccctacaagtgcggggacaggatcctctacaccatcggcacctccaccgact

SEQ ID NO: 306335 - DNA, 385 bp, Zea mays
atatgctgctgcagggtggaagtaagtcgattgtaatttatatgattatttgcagtaatttgtgtccacgccttctggttgcttatttagtcactcatttttgacacagacggtatcccacacctcaagtggtatggtgttgagggggagtacaatgttatggtgatcgatcttcttggcccaagcttggaagatttgtttaattcctgcaacaggaaattttctatgaaaacggtgcttatgcttgctgatcaactggtgagtttattcattccatattcaaccttacgctgccctgcaacagttaggaggcaagtcaactttctggaatttgataacagctattggttgggagttacatgttcagaagtttcatgagcattct

SEQ ID NO: 306336 - DNA, 400 bp, Zea mays
ggaaccgcaccaaaactcccgggaccaaccacgcgttcatagcgcggaggcgcgccgaccaccagcggggggctaagcagagctcgcgggcgggcaacaacaatgaaagccgcaaccggcacatcaacagactctcgcgcacttgcgacgcaccaggcggcgcgccttcccaggaaggaagccgcgcgcaactcggcagcccgggctaaacaaggtcgccgccaccttctatggcagaagcgacgcaccacgaacgacaggaggggcacgtgggcacagcaaccagaacgagacggagtacggcacggacaccgaggccctgagcacggcgctccacaacgacggcgcctcgtgacagcagtgctaccggaatctgcaggacaaccaggcggacccgcgg

SEQ ID NO: 306337 - DNA, 279 bp, Zea mays
acataattcatcatggaattgtatgttgccgttgcaacgcacgggcactcaactagtcaacaaataatcataccctgctcaaataggaactattgcagctagcgaacagggcaaataaacattaccgcaataggacaacagcagatattatcaatacattggactagagctcaatcgcttttagaaaagagtgtactaatcaggtctgaaaacatggcataacgctctgaacttgagacgactaaccaaaaaaagtgtactcatcaggacacacatttc

SEQ ID NO: 306338 - DNA, 380 bp, Zea mays
cgtaccctttccttacctcccggacccacccacccttttgtgttcgcccagccacggctcccgcagcagaggggttgttccaaagcacaatgggtatctcccgagactcgatgcacaagcgccgcgccaccggtggcaagcataaggcctgcaggaagaagcgaaagcacgagctcggtcgccagccagccaacaccaagttgtcaagcaataagacagttaggagggtccgcgttcgtggaggcaatgcgaaatggagggctctcccccttgatactcggcactactcatggggaagcgacactgctacccgcaagacccgtatcctccacgtggcccacaacgcgtcaaacactgacctcgtgaggacacacaccctt

SEQ ID NO: 306339 - DNA, 383 bp, Zea mays
  unsure (1)..(383): unsure at all n locations
ttttctcacgcgtccgcccacgcgtccgctacgaggggtcgcacgcaagtgtcaagagacgaaacggtcgacatggctcgcacgcaatctgccatcacctgcgggcaggtgagctccgccatcgcgccctgcctctcctacgcccgcggcacggggtccggcccctccgcgtcctgctgtagcggcgtcaggaacctcaagagcgccgccagcaccgccgccgacaggcgcgccgnctgcaactgcctcaagaacgccgncaggggcgtcagcggcctcaacgccggcaacgccgccagcatccnctccaagtgcggcgtcagcatcccctacaccatcagcacctncaccgactggctcagggtgaactaaaacctagacca

SEQ ID NO: 306340 - DNA, 199 bp, Zea mays
gccccctccaactcaacatataaaaatgtttttggcgatacatagcccgaattaccagtattgtttatagaacaaaaaaaagggggctggttgatttttcatcgggggggccaacttacacgaaatttaacagcaaaggggcttattaacattcaaattttaagataacccttttcccacataggaaggatgttttttg

SEQ ID NO: 306341 - DNA, 562 bp, Zea mays
tcctctcgtccgcccacgcgtccggcgacgctggacaccgcgccgccgccctacgccgtggcgactactggacgtcgccggcgccctacgccaggtcttcgccattccattctctggagacaagcacccaacagataccgatcaggcattcaagaagtaaattcttcttctattgtgctgaatatatctgattctacatggctatggtgccaagtgattcatcacatcatggagctgtggacaatagccctaatggattcacccagggtcggcgtgaggaagctaggaaacttgggccatcatggtatttcagtagaaaggaaatagaagaacattctccatccaggagggatgacattgatttgaagaaagagtgtagccttcgaaagtcgtattgcagttttctacaagatttgggcatgaagcttaaagtgccccaagtgacgattgctacagctacggtattctgtcaccgtttttccttcgtcaatcccatgcaaagaatgatagacgaataattgccacagttcgtatgttcttggctgggaaagttgaagataca

SEQ ID NO: 306342 - DNA, 394 bp, Zea mays
ttctcgcgtccggcgcctggcagctccgttccatgggcccccacgaatgtccgacgaggccaggcgcgggcccgcgggcgccgcgcaggcgatgctccgggcctcctccgaggaccgcaagccggtgggcgctgggtccccggcggcggttgcgcacaagatccagctcaagagcgccgatatgaaggaggagatgcggcaggacgccttcgaaattgcccgcatcgcgttcgataagcacagcatggagaaggacatcgctgagtacataaagaaggagttcgacaagaaccacggcccaacctggcactgcatcgtcggccgcaacttcggttcatacgtgacgcacgagacaaactactttgtatatttctacatcgactctaaagctggc

SEQ ID NO: 306343 - DNA, 502 bp, Zea mays
tggtactcgtgggtcgcccacgcgtccggtgaaggtttcttgaggctgagaacatggtgctgaagtcagtttctacttcttttattgcaattgaaatatgttaatagatctggttagtctatgactctatgtccttatttttctgcatggctaatgtattttctgtgattgattaataattgtcgaactaatgttattagaaagagttatggatcgtgaagttattctaagtacatacatctccttgcaggacggaactttgccgcttcagcggccagaagatttatgctgggaaaggcattagatttatccgcgctgattctcatgtcttgctttttgccaactcgaaatgcaagcgctactttcacaaccgcctgaagcctgcaaagcttacctggacagcaatgtacaggaagcagcacatgaaggatatccatgctgaagcggtaaagaagaggcgccgcgccaccaagaagccatactccaggtcaattgtgggtgc

SEQ ID NO: 306344 - DNA, 293 bp, Zea mays
cccaaaaaggacgaacaacgaggggaacttttgaagaaacgatggccatccacatcgagcaaggttttatgctacttgcgctgaactggaagattgactttccaccattcatggtcctgatcatagccatcctaaatgacggcaccattatgactactcttgaaggacagagttaaaccatctccacaacccgacagttggaagattactgatattcttgcaactggagaagttcttggtggtaatttggccatgacgactgacatcttctactaagctagatacaagactga

SEQ ID NO: 306345 - DNA, 344 bp, Zea mays
ggcgggcaccagctttggggggggcttttttatgcgattctgttgtttcttaccctacgccctcgaaggagcggtgtggcggcggcggcggcaaagccaaaggcaagatgtttgggcgcgcgccgttgaagagcgacaacaccaagttctacgagatcctcggggtgcccaagtcggcgtcccaggacgacctcaagaaggcctaccgcatggcagctatcaagaaccaccccgacaagggcggtgaccccgagaagttcaaggagctcgcacaagcctatgaggttttgagtgatccacagaaacgtgagatttatgaccagtatggagaagatgcccttaag

SEQ ID NO: 306346 - DNA, 342 bp, Zea mays
tgggcgacgaggcatgccctggacaggggtttttcagttaatttttcgcatggtgcacttgtgacagcagatcgaatcgagactgtcagtaagggctattcatgggaggtcacaactgctgaatgtggacagggtctgaatgagctcattaagcttcagaaagagtgtgttaaacggaattgtaaatggtattgacattaatgattggcaccctgccacagacaaatgaatcccctgacattattctgcagatgacctctctggaaagggcataatgaaaggtgcattgcataacgagctgggtttacctataaggcctgatggtcctgtgagcgcatttat

SEQ ID NO: 306347 - DNA, 413 bp, Zea mays
tatgacatctgcaggcgctccctggggggttttttggccaactcctcctttttgaacccgctaggggcacaagtgagcaccatgtctgcctgattctatgaggctatgtggtgccctcaatggaccagggaaccattgccaaaccaacacggatacttacccgaggatccacttgatgcatgattgaagcatacctgggagctaacatgatgttggcggacacgaacagctgtctgaggcggatatcaccagcagcgcgttcgagccgggacctatgagggtgaagggctacccacggcaccgcaagaacatgggttgctgcctgatgtaccgcggcgacgtggtgcccaaggacgtgaacgccgcggtggccaccattctataagaagtgcaccatttcagcttgtggactg

SEQ ID NO: 306348 - DNA, 215 bp, Zea mays
agcaatggcttctgaggttgtccggcggagttatttcgagctactgagggctcaagccgccatatgggggtttagactatgctacctcacgcccctgtgactgaggtgcgccgtggagcttggcatccctacggcgatctaccgccatggcggggctgcctcagccgctgcgctggtcacggcgctggctctcccctccactaagctgccgttcc

SEQ ID NO: 306349 - DNA, 502 bp, Zea mays
ggtccaacactttcacgctcagcttgggcaatttttggctccaccatggcgatctcctccacggcgatggccggcacccccatcaaggtgggttccttcggcgagggccgcatcaccatgcgcaagaccgtgggcaagcccaaggtggcggcgtccggcagcccctggtacggccccgaccgcgtcaagtacctcggccccttctccggcgagcccccgagctacctcaccggcgagttccccggcgactacggctgggacaccgccgggctgtccgccgaccccgagacattcgccaagaaccgcgagctggaggtgatccactcccgctgggccatgctcggcgcgctcggctgcgtcttccccgagctgctctcccgcaacggcgtcaagttcggcgaggccgtctggttcaaggccggcttccagatcttcagcgagggcgggctggactacctcggcaaccccagcctgatccacgcgcagagcatcctcgccatct

SEQ ID NO: 306350 - DNA, 388 bp, Zea mays
gccacgggcgctacctcaagacggcggcctacgggcactttgggagggacgaccccgacttcacctgggaggtggtgaagcccctcaaggcggataagccgtcttctgcatgaggcgcctgctctgttctggaagaagcttttggtctggatcggtctggtctggtgtgcctgcgctctatcatgcttttttatggctcctacttgtgattcttgatctgccccttgcttatcatttgtactgtactgtcactgtcctaatcagtggtacgcgtgcggggccgtatagtgtctgcttatacacctactagaggattatttatggctttgctgcttatgtaatgcttttaaaaccatgaaagaagcttcaggctcctacagctgctttg

SEQ ID NO: 306351 - DNA, 209 bp, Zea mays
ctgatcaacgtgaataactcgtacatgctgtttgtcctgtcgcctccaagccgaatcccaagtccaaggttgtctcgatgaaggccaagaccggcgctaagaagcccaaggccgctgtcaggaccaaagctaagacccccggcaaggcgaagtccgccacaaagtccaagcccgtcgcgaagccgaaagccgtagtgaagccgaagaca

SEQ ID NO: 306352 - DNA, 378 bp, Zea mays
gcccgacagatctacaattccggagtgcggttcatttgatcgatcttgacgccagtctcggactcttacgaaggcgtcgcgcgcggctgctgagaggaggaggatgaagatgagggagtgcatctccgaccacatcgggcacgccggcatccaagacgggaacgcgtgctgggaactttactgtctcgagcacggcatccagcctgatggccaagtgcctggagataacaccgcgggacatcacgatgattccttcaacaccttcttcagccagactggtgctgggaagcacattccccgtgcaatctttggtgatctagaacccactgagatcgatgaggcgcgcactggatcgtaccgccagctctatcaccctga

SEQ ID NO: 306353 - DNA, 227 bp, Zea mays
gaggagcatcaatttgaatcgaaggccgactcttgggcgtacaagacctaccctcagaaggctggcacccgcacgaagaacagctttatcgttatcaaaaaccgtacctgcaaggttgtggaggcatctacctccaagactggtaagcatgggcccgccaaatgccacttagtcagcatagacattttcaatgggaaaaagctttcagataatggtcctttattaca

SEQ ID NO: 306354 - DNA, 425 bp, Zea mays
gctgttgttctcaagctgaacccgtacctcggtactgcacgaaagatggcagccctagcagaggcagcgcgtgtcaaggccaggaagcagaagcttgactccaagaggaccaagctcagcccagaggagacttctaaggtcaaggctgctggaaaggcgtggtacaagaccatgatctcagacagcgactacacagagtttgagaacttcaccaagtggcttggtgtcacacagtgattgtctggtggtagtttgtcatgtcagaaattatgattttgtttgctattgccaactgtcgcttgtcattggtatcttcaggcatgatatctggttttggcttttgtagtttttttgaccgatgatctctatcttccagacacatattacacctattatgagaacgaagtatatgcaattttcagtac

SEQ ID NO: 306355 - DNA, 408 bp, Zea mays
ccctttcgtccgctgaactgaaagagatcgagatggaagatattgaggaggcagcacctgatattgacagtggtgatgcaggaaattctctggctgtggctgactatgtagatgaaatttacagattttacaggaaaactgagggtgcaagctgcgtccctacaaattatatgtcaagccaaactgatataaatgagaagatgcgtggcattctaattgactggctcatagaggtacactacaaactagagctgttggaggagacccttttcctaaccgtgaacatcatagacagattcttggcacgtgaaaatgtggtgcggaagaagcttcagttagctggtgtaactgctatgttgctcgcgtgcaagtatgaagaagtgagcgtacctgtggtcgaggatctga

SEQ ID NO: 306356 - DNA, 413 bp, Zea mays
atttttattaccgaaacctcccgcggtctcgcccccacccctcacaccaccgcaccaccggccaccccctgccccgatgcagcccgacggcggcggcgcgattcgcgtgctgaacgtggcggagaagccgtcggtggcgaaggcagtggctgagatcctgtcgcgccgctcggcgcagtcgcgtgcgggccggtcccagtacaaccgcattttcgagttcaactacgccatcaatggccgcgcctgccacatgctcgtcacctacgtcacgggccacctcatggaactcgaattcgatgaccgcttccgccgctggcactcctgcgaccccgccgaacttttccacgccccagtccgcaagtccgtgccccagagtgggagccccgctgaacagtggacgcgcgtttctcaac

SEQ ID NO: 306357 - DNA, 362 bp, Zea mays
cccacgcgttcgcccacgcgtccgcccacgcgtccgcccacgcgtccgctccgttgcctttcctttccccacttccccggctcctgcctcccgccgccgacaccaccaaaaaccctagcagctccaccccgccgccgccgccgccgccatggatgaccctcggatgttcccatcaggatccgacgaccgctccgacgccgaacgccggctgtacaacccgtaccaggacctcaacatgccctacagctaccggacgctctacgacctccccacttcgccggagttcctcttccaggaggaggccctggcgcaacgacgctcgtggggtgagaacctcactttctatacgggcgtcgggtacc

SEQ ID NO: 306358 - DNA, 283 bp, Zea mays
  unsure (1)..(283): unsure at all n locations
gcgagggggcggnagcagggccggggccagttatagccacttttgtttcatttcaccgccgcccgcgcgtgaaaggcccagcggccagcgctcatccatggcagccacaggctataataaaacctccgaatgcgcgtggcgtgccccggcctactcgtcgccggcagagccgcctactgtcggccggagaaggagcgccaaggtgagctactcccactggcgactgcagagtgaccctacaggatcagaagcagcgcctgcaccggccggcgatggcgatccc

SEQ ID NO: 306359 - DNA, 264 bp, Zea mays
ggcccggtccggtctggcctggtcgttccatgccacgggtttgtttatacgcattggctatgggatcaatcacgaaaacacagtttaacaggatcaatatggtacctccccctggcgaattcgcagccaagctgtgcggaacttctggaacatggtctcgcctagctgcgtactttgtctgcaatacaatattcagtgccatcaggacaatcatcggcaagtaacattattacgacatgatgaaaccatgcctaggacgcctat

SEQ ID NO: 306360 - DNA, 513 bp, Zea mays
tttcgttccacgcgttctcctacgcgtccgagtaattgaaagtaaaaaacaatgcttttttttgatgaaactattagaggttttaattgaaagtaaaaaaatactcaagaaaagattggaagcccaaaacagtggagatgcacaacaaaaatagtttgtaggctgttcatttctccctcgggtgggctgtcggaggctgacatccagaagatggtgcaagaagctgagctgcatgcccagaaggaccaggagcggaaagccctcattgacatcaggaacaatgccgacaccaccatctacagcatcgagaagagtcttggagagtacagggacaagatcccggcagaggttgcatctgagatcgaggctgccatcgctgacctccgccaggagatggcctcggatgacatcgagaagatcaaggccaagcttgaggctgccaacaaggctgtctcgaagattggacagcacatgtcttgtggtggctctggcggctcgcagtcaggatctgga

SEQ ID NO: 306361 - DNA, 222 bp, Zea mays
  unsure (1)..(222): unsure at all n locations
gccgcccttttttttttttntttgattacaaagcatcacggaacggaacaacatttcaacacacacagcagtgctgccgtacaatccccatatgaccacattctgataggtgatacaaggtgcacagcaatggaagaaagatgcaattgttgctgataaatgaactactgaaaggcttccagaatatgtctttctgcccaaaagaaaggcgggggggggggg

SEQ ID NO: 306362 - DNA, 343 bp, Zea mays
ccggtccggtacggcattcccgttccattccacgcgtttggctatcgctccccccagcaaaagcgcaaggcgcaggcaatccttgaaggagcttcttggccactgcgggggaacaagcccatgccgcatcgggcgatggccgcggtatggacaagtaactggacccgccgggctctctgcggtggcgagtagcactacgaccgaccctagatcattgcggacgaccagagtaaccggaccacccccttaccggcatccttcaccgactgcgagcgcccaattggagagcggccaagaaccagttcgacatgaaccccatgaacaccgcgtttgatgccaagcg

SEQ ID NO: 306363 - DNA, 404 bp, Zea mays
ggtagattatgagcggctctaggctggcagcccagacgcggtttacctcagagctgcaccggatggagcgcctccgagcggacaggatacttgctgtggctgggcctgtacccactggatggcgtgactcacaggagccggggacctcggacgatatcttgtaggacaagatgtacggggctgatctcgtggccatagtcgcctccatcagcaatatattgcaggggggggacaatgtacaccatagcaggtgctgttctagatataaagaaggaatagcaagtgcaaaatgagcccactgagcagggactgattgagccaatgtcactcatcagctccaccatcgatactacattctccgggccattatcagactcgattggacgacgccctatgcttattct

SEQ ID NO: 306364 - DNA, 370 bp, Zea mays
ccagctaaagggtcaataccggcggtttggcaaaactgtctggaagatcgaacgcggccttgtccttgggcggccatatgtgtatctccaaatgacgagctgagcacgagtgccatgcaaggggagcttgctagagttcaccagcattcggcctgaagagctcagcggatgccaagcagaagctgtgcaacttcactcgggtgacatggggagcacagagataccttcaataagaatggatccatgatatttctggatttgtcatttaatcaactcgactcggagatcccaaaggagcttgggaacatgtactaccttatgatcatgaatcttgcgcacaactcactgtctggctgtatcccaccaaaac

SEQ ID NO: 306365 - DNA, 372 bp, Zea mays
ggtacgtttgggcgcacacaccggccggccgccgagcggggatccctgagcccctcgtttttttaagatgcagatcttcgtcaagactctcactggaaagactatcaccctcgagggggaggcctctgacaccattgacaacgtcaaggccaagatccaggacaaggaaggcattcccccggaccagcaagcgctcatgttcgctcggaccacagttgaggactggccctcacttgccgactacaacatccagaaggagagcaccctgcaccttgtgtccagctcaggggagagatgtacatcatgcggatggcgctgcacggcaacgaggtggccatccgggaggagctcgccagccgcttccgcgtcttc

SEQ ID NO: 306366 - DNA, 504 bp, Zea mays
ttgcctacgcgtccgcccacgcgtccggaagagattgtggaagacttgggccccttctaaatgcaagtttttcctttggttggcaataagaaacaaatgttggacagctgacagattacagttgaggggattgccacacccagatgtttgcccaatgtgtgatcaagcccaagagacaattcagcacctccttactgcgtgcatttttgcccggcaattttggcatacaattcttgctgctattggcttggggcatctcactccgactgctgatgaggagaaaggtgagccttagagttatcaagaccaggaaaaaaaggaaaaaaggaactctctgatcatcctgggggcttggtgcctatggctccagagaaacagagcagtgtttcatgggggagtcttcttctttgcccaggatttttaggtgtttctcagatgagtgtgcttgcctggttttagcaggagctcaggagatcggtagtatgggcttagttgctgccctgg

SEQ ID NO: 306367 - DNA, 536 bp, Zea mays
  unsure (1)..(536): unsure at all n locations
tctcgtgtttgtcgtgggcccgatctcgttctctgggccttactgtaaaccgaacatcctgttccagctagatggaactattttggcccaaaccagcgcaagagcatggggctctgctggtctgttgcagtggctggagttcacgaagctaaccggaatcgcggtccaaggcagcggtgtgataaacggcaggggccaggactggtggacgtatgcagacccaaacgatgccgacgacgagtctgtggagatgctgctgccacggactaagcccacggcgctgaggttctatggcagctccaatgtcacggtagctgggatcacgatcgtgaacagctcccagtgccacctcaagttcgacagctgcgagggcgtcatggtccacgacctgagcgtctcgtcccccgaggacagtcccaacaccgacgggatacacctgcagaacttcaggggagtcgacatccaccacgcgacactggcctgcggcgatgactgcatctccatacagacngngtgcagcgacgtgaacatacaca

SEQ ID NO: 306368 - DNA, 346 bp, Zea mays
cgtacgcgtgtttgcaaaactaacagcctctgtctggctgacttcgtcggctggcgtggcgtgtccagcaggcacgagatcgtgggcgtggtgaccggcgtcggcggcggcgtcacgcggttcaaggccggcgacacggtcggcgtgggctacttcgtggggtcctgccgctcctgcgacagctgcggcaagggggacgacaactactgcgcggggatcgtgctcacctccaacggcgtcgaccacgcgcacggcggcgcgcccaccagggggggattctccgacgtcctggtcgcgagcgagcactacgtggtccgcgttcccgacggcctggcgctggaccgca

SEQ ID NO: 306369 - DNA, 412 bp, Zea mays
  unsure (1)..(412): unsure at all n locations
tcgcttggttccaacgcgcaaggcacgggcccaggcnggccccgtttgcaggcgtgttttggcgagtacgcacgagatcgtgggcgtggtgaccggcgtcggcggcggcgtcacgcggttcaaggccggcgacacggacggcgtgggctacttcgtggggtcctgccgctcctgcgacagctgcggcaagggggacgacaactactgcgcggggatcgtgctcacctccaacggcgtcgaccacgcgcacggcggcgcgcccaccagggggggattctccgacgtcctggtcgcgagcgagcactacgtggtccgcgtccccgacggactggcgctggaccgcaccgcgccgctgctctgcgccggcgttaccgtgtacagccccatgatgcgccacggcctcaacgagccc

SEQ ID NO: 306370 - DNA, 259 bp, Zea mays
aaatcttacagaagcaaacgggtccggaattcacggttacaagcagttcagcctgacggcgacgactgctggtccaaggaagcaaacgatgcgagcggcgccggcgcagcggcggcctgagacagtctacgatgcatgcacgtgcacgagagaaactaaacggcggcgagcggggagagagcgctggatgctagctgcgctgcgctgcgcacccctgggtcggtcggcttcggcttttagtagtcggtggaggggagct

SEQ ID NO: 306371 - DNA, 113 bp, Zea mays
aaaaaaacgaccggggcctaaatggtttattactatcatggcggccctgtttattaaatcagtaccagtagtggctgggcttgcaacagtggcaagaccctccagggggggtt

SEQ ID NO: 306372 - DNA, 277 bp, Zea mays
cccttgtttcggacgcggccgcagctccgagcatgggatgttttcctactgaccgcgcggcgtgtcagatgatctcgccggcgatgtgtcgttcggcgccgcggctcggccgcgcaggtccggcgcctcctgtcgtccgtcgcgcccccggcgcacgccggcgctgccccgcctgggccctgcattgcgcacaagcgcggcaacgacatccttcacgatccgtggtacaacaaggatacggggttccccatgaccgagcgcgaccgcctcggccctc

SEQ ID NO: 306373 - DNA, 241 bp, Zea mays
gtcgtcgtagccatagcccgtaggtcaaagcttgacgacctccgggacgtcgacggggtagcggtggatgcagtcgtcccagggcccgttggtgggggtcttgatgctgcggaggcacttccagacggcgctgttgcacttgaacccgctgccgaagccgatctgccagacgcggtcgccgtggcgcatgcggcccttggcctcgatgtaggcgagctcgtaccagagggagctgctggac

SEQ ID NO: 306374 - DNA, 388 bp, Zea mays
tttcacgcgtccgcccacgcgtccgcccacgcgttctcgtacgcgtgggggtccacaaagcaccgatgcaggatggaagtaaacttgcagtaaagcggggcaaccagaagtcccaccaagggctgagggagttccgtacagagattgaattgctgtcagggctgcgacaccgccatctcgtgtcgctcattggctactgtgatgaacacaacgagatgatctcggtgtttgaatacatggagaaaggaactttgaagagccatctttatggctgtgatatgccgcctctcaactggaagaaaagactggaaatttgctgtcgagcagcaagagggctcccactccctcacacccgcttgcccaagcaatcatacaccgtgacgtcaag

SEQ ID NO: 306375 - DNA, 520 bp, Zea mays
tcctttcgtccgcagctaaaaaaatcaatatgcttgaggattcacttaacagactagaagaatgcacagcagagaaagactctttgttggcagtagaaagaaaacaaaacaaaacgaccaaagaagaactggccaatgcccagaaaacaatcgatgaattagtacatgagtcacagcagtcccaggaaataagaaatcaattggaagataccatcaagaggtttaaagcagaatcgactgccagagacacaatattattatcagagaaacaggcacatgagacgaccaagaaagttctaactgaaattcagtcgagaaatgaagagttaatcaagaaaattcaggattgtgataaaaatattcttgagcttcagctaactgtggagaggcttcaggaaaacacatctactacagaggctttactggtgagagaacgagaacaaaacaatgcaaccttgaaggcacaaggtgaaattaagaaataaatttgcagttactgaacaagcttgaggaccttgag

SEQ ID NO: 306376 - DNA, 254 bp, Zea mays
ttcattcttccgaccgctggtaggagtatctggtagactttgaacaacggttgcatggtgagcgcctgcgccacctccatccccctcgtctcggcgccctctgcatgcccgttcaagaagaccaccgtcgccaggctccggcgccgcacggtgacgtgcagggccagcagcggcggtggcggtggccggggcggcgaaaatgatggcctccttcggcatgccccggcgggacgcgatgctcaacggcctgtcca

SEQ ID NO: 306377 - DNA, 310 bp, Zea mays
  unsure (1)..(310): unsure at all n locations
tgtttttacccacgcttcgtcctcgcgtccganagaaannngctgaggggggttcttttgaagaaccagttgtcacatttgaaggaattgcgatccttacaccaagaggacgttatagtgttgaacttcatctgtcatttctgcgactccaaggacaagctaacgattttaaaatccaatacagcaggattggtcgcctttttcttttgccgaagtcaaacaatcctcatacatttgttgttatcactcttgatcccccaattccgaaaggaccaaacattgatcctcacattggtattcagtttgagac

SEQ ID NO: 306378 - DNA, 297 bp, Zea mays
  unsure (1)..(297): unsure at all n locations
tttctgcgtacggaagaagagcccgngactgaggatcctggtgagcagcagatagaagtagcttgagcaggagctcattgaaggcaagttgtgcccttgacccactttttacccaataatgctctctaatgtcacttatttatgcataggctaattttgatgggacccaataggccaccctagattgtttatcccaaaccctagttggcccctgaatcactcggatagctttgctatcgctttacatgggcctgggataatcacttataataccaacgtccacattcttccgccatc

SEQ ID NO: 306379 - DNA, 334 bp, Zea mays
ttgaccgcaagtacgcgacggggcagcgcactagaccgcgccacgcactccggctactggaaggccaccggcaaggaccgcgccgtcgtcgccggcggcgaggtggcggtggggatgcgcaagacgctggtcttctaccggggccgcgcgcccagggggaagaagacggagtgggtcatgcacgagttccgcctccacccccatgccgcgccgtgcctgctagcagcagctgcgccaaacaaggaggactgggtgctatgcagggtgttctacaagagcagaacaaccagtccaagggcagaatctgaagacccccgggacggcaccccatcag

SEQ ID NO: 306380 - DNA, 552 bp, Zea mays
gctttttgttagagcaggccttggttctcgggtgaatgtccagaatgtgctgatccacatgtactcaagttgtcaggatgttgttgcagcacggagattgtttgataatggtgagagtctggaccacttctcctggaactcgatgatttctggctatctaaagaatggccgtgtcgaagatgcaaaagcgttatttgatgtgatgcctgacaaggacaacgtttcctggagtgcaatgatagctggttgtgtgcacaataaccagtcatctgaggcacttaatgtttttgacagcatgagagcccatgaaatcaaaccagatgatgttacgctcgtgagtgtcatctctgcatgtagtaatttgtctgctctggagcaaggaaagttagtgcatgagtacattaggaaataccaatataacatcactatcgtacttgggactagcctcattgacatgtacatgaagtgtggatgcatggaggctgcactagaagtctttgacatgttggaagaaaaggaacaacctgctggaatgctggcattgtgggactg

SEQ ID NO: 306381 - DNA, 440 bp, Zea mays
ttttctttcttacggcagattgtgaccctcctacgccagcatgccctggctttggggggatcaaccgctgcacagctgcatctgggaagctatctttgcctacctttgggctggcaccgtacaaattccgtgcctccatttggatacctgacggaacccaagaacaggaccgcgtcacctcactgatgcaggaggctgacagctggctccgcagaatacgagtagaccatccggacttccggttcttcgtctcccgttccagtacgatgtggagatgactcgcggctgtaaatggtttttcttttttagtatgattaccgcctcgccgtacaaactgaacccccttctggtgcaccaagtgccctctcgtcacgggggttgtatgaattataagcctgcatttttaacatttttctttttcttccgtgcctccaataagt

SEQ ID NO: 306382 - DNA, 246 bp, Zea mays
atgcggccgcacagcgcgaatgcattttcgcctgtgcgcgtcacccgaacaactgtgtgttctccgacgctccggatcgtgcgttcacggtgagtaagtcagaaccgctagcgctgttgcctgaccctgatgagaacgtgtccgtacaagtggcggaatcatggccctggcgggccatcgtggttctgagggggaggtcatgaccatagttgaaccgattgtccctctgggatcgctgggcggaca

SEQ ID NO: 306383 - DNA, 227 bp, Zea mays
cttacgcaaaaacttggtgagggattggaaagatgacgtggtttttaccaaagcataaggccggcacatatgggccgtctagtgaatatcgataagcccactactgcgttaatcgagcctgtccctgtgagcgattttgtagctcagctttcttaacagtacacccctaacgatggagccatcggccgagttctgatcactgtgaagattaaaaaatgccctaaaag

SEQ ID NO: 306384 - DNA, 410 bp, Zea mays
acccacgcgtcctctatgtccgccgcctgccttcccctccgctactggtgctcccttaccccactctctcgcaggagctgcggctgcggcggtgaggtcctaccccacatcggcgagcggcggcggtacctccggaggctaatgcaagatgttcgggcgcgcgccgaagaagagcgacaacaccaagcactacgagatccttggggtgcccaagctggtgtcccaggacgatctcaagaaggcctaccgcaaggttgctataaagaaccaccccgacaagggcggcgacctcgagatgtttaaggagcctgcacaagcctatgaggttttgagcgatccatagaaacctgagatttatgatcagtatggtgaagatgccctttatgaaggacagggcggtggaggaaccc

SEQ ID NO: 306385 - DNA, 329 bp, Zea mays
agccgctgccggggacttttttcccgcgccgcccgagcgcccctccatggggctgcacaccttcctcttcctgctcgcctacctcgccctcggcgtgaccttctacgccgccgcgcccgccagtgtcagctcctccgcgggacccacgcaccccgtcgtcgacgcgctctacttctgcatcgtcacgctctgtaccatcggatacggtgacatcacgcccgccacccccgccgccaagctcttctccatctccttcgtcctcatcggcttcggcttcgttgacatcctcctctccgggatggactcctatgtgctcgacctacaggagc

SEQ ID NO: 306386 - DNA, 324 bp, Zea mays
tggcgcgtcgtggccgtcgtttatttcgaacccgacgcctccggccccttgccgctgcccgggcgcagccacccctccagcagccgcgcgatgttgtcggcgctagacgcgtacgttgcgcaccccggagccgtcggcagaggctccaccttggccagcggcgtcgccgaaggctccagcgagagcgcgtcgcgcagagcctgccgtgccgagtggatgtcagtctgcagccgccgctcccactgccccttgggaacggccgggcgcttcccttccgcgcccccttcggcgccctgcatgttcttcagcttcttcttaagatgc

SEQ ID NO: 306387 - DNA, 364 bp, Zea mays
tcgccttttttttgttcgatcggtgctttgacctctgagcctgagcaagcggtcgagctcaccaaccgccacgctcaagacaggtcgagtagctagctagctgccggagcggaaaaggaggcggcgcaaacggccatggggaggccgccgtgctgcgacaagatgggggtgaagaaaggcccgtggacccccgaggaggacctcatgctcgtctcctatgtccaggagcacggccccgggaactggcgcgccgtgccgaccaacacccgggctgatgcggtgcagcaagagctgccgcttgcggaggacaaactacctccggccgggaatcaagcgcggtaactctaccgagcaggaggagaag

SEQ ID NO: 306388 - DNA, 320 bp, Zea mays
ggaatcccctgttcgttccacgcgcccgcgttcgtttgcgcgacaccagcggaaacatactcaggcgcggatttcttcactgttaactcttattctgcacatgaagtccacaagagcgaaaagtacaatgtgtgggctagcactcccaccgggaacaagaaaactcgacgctgcctatcaagaggctaaagaaaaaacaagcgaaactcctgtttcacttgttctcgccgtgaatgcaagcggccagattgacggccttgctgaaatggcgggtcgagctgattttgaacaaacagcccagcctaggcaacaggacaaat

SEQ ID NO: 306389 - DNA, 438 bp, Zea mays
acgcgcccggcttaataagcaagaaccacacctcctcccttcgacggagatctatgagccttgctgcggcggcaagcgcgggtgcggctccagctgcttctgcggcagtcggatgcaaccggctgttagtatgaaaccctgacccgggagacctgccgccaccagcagcgacaagaccacggaccttgccgacccaaccaccaaggccagcgccggcggcttcaaggcggccaccgagggcggcggctgccactgcaacacctgcaagtgcggcaccagctgcggctgctcctgctgcacctgcaactgaactggcccggaccggcgatggcgcacgagagtttagaggaggaggacaacgactaggcgcataaatataatagcggcgttcagtcaatactgaacctgtctctgccacccgcattacccatggaccct

SEQ ID NO: 306390 - DNA, 368 bp, Zea mays
gcttacaagcaagaaccacacctcctcccttcgcctgtgatcatgtcgtcttgctgcggcggcaagtgcgggtgcggctccagctgctcctgcggcagcggatgcaacggctgcggtatgtaccctgacgtggagaccgccgccaccagcagcgtcaagaccacggtcctcgccgcgccgaccaccaaggccagcgccggcggcttcgaggcggccaccgagggcggcggctgcgactgcaacacctgcaagtgcggcaccagctgcggctgctcctgctgcagctgcaactgagctggcccggcccggcgatggcgcacgagagtcgagaggaggaggaccaccaccaggcgtataaatataatagc

SEQ ID NO: 306391 - DNA, 342 bp, Zea mays
cggttgctttggcggacgcgtgggcggacgcgtggggggctgtagcgatggacctgttcatggctggcgccgcgctgctcgccggggctgccggcgccggcgcgcagcagggcgtgtggaggatcatcacccggcccatgtcacagatgacactgagccaccgtggctagagattgtgccagggcgcctcactaacctacgacgccttgattgaggccgacagcaagttccccggcttcggcaccaccggcgacgagcagacacgcaggcgggagctcgccgccttctttggccagacgcccaacgaaagcaccagtggatgggcgactgctccggatggac

SEQ ID NO: 306392 - DNA, 198 bp, Zea mays
  unsure (1)..(198): unsure at all n locations
ccctctctatcgcccacgcgtccgcccacgcgtccgcccacgcgtccgcgcagtatcaatattggacggttnacaanatcaccaatctaaactctattttacattatttaaaccacacagtaaactggtaggggatagtaacttatagtcaaagactttttttttaattactctgctatgatacaaggtaattattat

SEQ ID NO: 306393 - DNA, 580 bp, Zea mays
acgtggcgcatgagattgctggagagcttcaggccaatcctgacctgatcatcggaaactacagtgacggaaaccttgttgcgtgtttgctcgcccacaagatgggtgttactcactgtaccattgcccatgcgcttgagaaaactaagtaccctaactgcgacctctactggaagaagtttgaggatcactaccacttctcgtgccagttcaccactgacttgattgcaatgaaccatgccgacttcatcatcaccagtaccttccaagagatcgccggaaacaaggacaccgtcggccagtacgagtcacacatggcgttcacaatgcctggcctgtaccgcgttgtccacggcattgatgtgttcgaccccaagttcaacatcgtgtctcctggcgcggacctgtccatctacttcccgtacaccgagtcgcacaagaggctgacctcccttcaccccgagattgaggagctcctgtacagccaaaccgagaacacggagcacatgtgagaaaccgtctgtgccttgctcaagctaagcggtattggttgtggtatctgactgatttggatctgatc

SEQ ID NO: 306394 - DNA, 419 bp, Zea mays
ctctcgcttgtgtgcaccgccagcgcaaggcctatctgctactgtgcttgctgacgcccggggggtgtgagcgaactggaaactgatgtcacccctgctgccacgggcgaccgccgggcccagaccgagatggacactcggagggcggcgctgctcgcgctgctggtcgccagcgggggcgtccgaggctgcgccggcgctggggccaagggcgccaacagggtgggcgatctgatccgcgcgctgatccccacggggttcgcgaacgggacggcgacctgggcggaccaggtcgagggcgccgtgtacaccaacggacgcagccactgcatgtgggattcattctggcacgtaccaggaaatattgcagggaatcaaaaaggagacgacgcagtggaccaataccatcgttacaagga

SEQ ID NO: 306395 - DNA, 422 bp, Zea mays
tttcttttctccccgacctccgggtgctgacgctcaccgggctcggcctctggggcccgctgccggggaaggtgtcgcggctggcgtcgctggagatcgtcaacgtcagcggcaactacctctacgggcagctcccggaggggctatcccggctgggcggcctccagacgttcatcgccgacgacaacatgctctccggcgagctgcccgggtggctcgggaggctggcgtcgctggccgtgctcagcctccggaacaactcgctgcagggcgcggtgccggagtccgtccgggacatggggtcgctgcggtcgctggcgctcgcgtgcaacaacctctccggccaggtgccggacctgagcgcgctgacgaacctgcaggcggtggacctttccaacaacttgcttggcccggcgttcccg

SEQ ID NO: 306396 - DNA, 290 bp, Zea mays
  unsure (1)..(290): unsure at all n locations
ccctcggtcccaacccgccgaccaggacnccaagaggaagaacaagaaggaaagcaccggcagccccagggcaccccggaggccgaggaccgcaagagagagggcgaagaggacacccgaccccaccgcccagaccacgagggacaccgacccgccgacagagggccacgacagctactccaccagaacccgcgccaggaccgaggagcccaacacggaccagcacaggaagcgcaaggagccagctgacaagagcccgagggaagccaagacggacaagagcaccgccc

SEQ ID NO: 306397 - DNA, 323 bp, Zea mays
gggaaagacccacacgacggggaggggtatattagaattcattgcctgaattacccccggagcaacaacaggtgccccagcatcaacgggcagaacaacttggaagaacgcctggaatgaaggccggcgcctgctccggccttagcgagaaagactacttcgagactgccctctccttccgaagccggatcaacccactcggtcgcctcaaagccaaaggtattgagccggactccgggcttcacggcctcaaggcgatcaccaaggtctttaagagcggcatcaacgcgacgccggagatccagtgcagcaagggccccttc

SEQ ID NO: 306398 - DNA, 352 bp, Zea mays
  unsure (1)..(352): unsure at all n locations
ccggtattccttggttgtcccacgctttcgttcacacccccggaagacatcgaggctctgaccgggaggtttcaagatggttttactgtatttgccgaagcaaaggctggaaagggctctgcaacattgtccattgcaatatnnncgggctgtctttgcagatgcatgcttgaagggtctgaatggagttccggacattgtagagtgctcttttgtgcaatcaactgagacagagatgccgttctttgcctccaaggttcggctcggcaagaatggagtggaggaagtgcttggtctgggtgagctcaacgacttccagaagaaagggctggaaagcctcaaagtccagctc

SEQ ID NO: 306399 - DNA, 352 bp, Zea mays
caaaccaaacttatataatttggggaataaactcatgatgcatcgcatcatctaaaatgaattaattcttcaaaccaaacaccccctaaatgcttgcaagggtgctcctttgtgtcgcggacgaggtccttctcgccgacggccaccatcatcggcgggagcggcacggactccaggggcggcgcctgcggacccatggggcacgagaacgggtgctccttggtggcgccaacaggcagcgccatggcctggcacttgtccagcatgtccagcgtgaagaacaccgactttcccacctccagctccgaccggctccttgttgcgcgcacgaatcccggttggatcagaacgc

SEQ ID NO: 306400 - DNA, 377 bp, Zea mays
tcgtgcactctagcaatggctcctgaggttggccggcctagttacgccgagcttttaaaggcacaacgccgacatatggcggctcagacctttctaccttacgcccctggaaatggaggtgcgcccgggaggcttggcatccctacagggatctaccgccatggcggggctgcctcagccgctgagctggtcacggcgctgactctcccctccactaagctgccgttcctccgccgactgctgcggcttctcgccgcgccgggcgtgttcaccgtcgacaagcagagctcggaggaggagcggtaccgcatcagtcccgggtgctacctcctggtggacggcatccctcacgaggaccacatgaaccacaccgctct

SEQ ID NO: 306401 - DNA, 344 bp, Zea mays
  unsure (1)..(344): unsure at all n locations
ttttcttgacacccgggcggccacgcaaatgcagggcggcatgctaaaangaagggccaccagcttgccccaggagcggaaagtgatgaggagacagcggcaaacaaaggtacacctcgccctcaactggaagagaggcaggaccttgccagcggtctcaagcgggccgacgaggacgttcccaatgcaccccatgagacaacagaagaattcacgaatactctcctcaacaagtacagcatcgattacaggatacatggagacgagccatgccatctacctgaaggcactgaagccaaagcgctagcgaaaaaagacgagcgttacaagcaaaacaagtgaac

SEQ ID NO: 306402 - DNA, 253 bp, Zea mays
aacggtaagtaggccccacggcggcggcaacgccaaggaggggcccaatagaaacggcacccggcaacgcgccagccccacagcgtaggaggagacggcgcccacaagaaacggaccaagcaggccacgcggccaaggggcagaaacacgcccacaacatagcagagaaagggaaccccacctccgggacaacaggacaacccccaaggaggacgagaccgcgcagagagccaaggcagaaggaaaccccccc

SEQ ID NO: 306403 - DNA, 372 bp, Zea mays
  unsure (1)..(372): unsure at all n locations
cgcggcggcaaacactttcattccaaactcccaattccttccgtcggccgccgatccacccgtacgacgacaccatgagggagtgcactattgaaccacatcggccaggccggtatccaggacggaaacgcctgctgggagcagtactgccttgagcatggcattcaggctgacggacagatgcccggagacaagaccactgggggaggtgatgatgctttcaacacctntcacagtgagactggtgctgggaagcacgtgccccgagctgtttttggtgaccctgaacccactgacatcgatgaggtgagaactggcacctaccgccagctcttccaccctgagcagctcatcagggggaaggaggatgca

SEQ ID NO: 306404 - DNA, 444 bp, Zea mays
  unsure (1)..(444): unsure at all n locations
ggccggcactcggcagcgcgccggcttcatttgaggagattgcgcttacttgactcggncttgctggccttgcggtcatggggcagaaccttgccctcaacattgcagagaaagggttccccatctctgtgtacaacaggacaaccttcaaggtggacgagaccgtgcagcgtgccaaggcagaaggaaaccttcccgtctacggcttccatgaccccgcgtcctttgtgaagtccattcagaagccacgggtggtgatcatgctcgtcaaggccggcgcgccagttgaccagaccatcgcgacgctcgcagctcacttggagcagggcgactgcatcatcgatggggggaacgagtggtacgagaacaccgagaggagggagaaggccatggaggagcgcggccctctgtatcttggcatgggtgtctctggaggagaggagg

SEQ ID NO: 306405 - DNA, 453 bp, Zea mays
ggactaatgtgcaaccaatattataatatggcacaaagtatttctaaagaatcagtattgaagcacacgttgacaacgtcatccgtggtgcccatgacaccggagtgacacaacacgtcgtagaggcgcgtgccgcaccgcatggacatggagatggcgtcggggctagttgaagcccaccttttggcacaccatgttatgctccttgtgtcggttggccacgcataccagcgtcacggggagttccaaggtctcgaactccgtcactagctgctccatggtcaacttggcgaggcgtctcacgagccccgccacctccacggtccaggtggaccagtccgccctaggaaccgacccatggttgcgcacatacactacaggaaaacatagaagttgcctaacagctagttgtgagaaaaatctctacagaaaagataaaaggaaaatgttata

SEQ ID NO: 306406 - DNA, 208 bp, Zea mays
aggaccggaccaaaagcaggggtccattgcccaagaaaaatacattccttaacagcgacggaatgggccccgaggggggggccccttgcagtaaaaagatggccacaacccgaaagggaaccccgaacttattgggggccgtttgccctagggaccacaagggtttacacgaaaacagccctcccctaaaatgttatggggctggacc

SEQ ID NO: 306407 - DNA, 499 bp, Zea mays
ctcgcccgcctgtcgggcccggcctgtctgggtcgacccacgcatgcgttttttttgaccgccgcctacctttccctccgctactgctcctgcccaccccactcccacgaaggagcgggggtggaggaggacgaggttgcaccccacattggcgagcggcggcggcacccgcggaggcaaaggcaagatgttcaggcgcgcgcctaagaagagcgacaacaccaagtactacgagatcctcggggtgcccaattcggcgtcccaggacgatctcaagaaggtctaccgcaaggctgctatcaagaaccaccccgacaagggccgtgaccacgagaagttcaaggagctcgcacaagcctatgaggctttgagtgatccagagaaacgtgagatctatgatcaggatggtgacgatgcccttaatgaaggaatgggcggtggaggatcccatgttgatccatgtgacatcttctcatcattttttggaccctctcttgga

SEQ ID NO: 306408 - DNA, 533 bp, Zea mays
  unsure (1)..(533): unsure at all n locations
ttgtttacgcgtccggttcgccgaatgcctggcatttgacgcgaccgcaaagaacctggttacctacctcacggctgagcttggtgagaccaacatcgatgccgcgacgaacgtgtccacctggattggaagctgctacctcacgccgctcatcggcgccttcttggccgacacgtactggggaagatacaagacgatgatagtcttcctcttgctctacatcgttgggatgcttactctgacagcgtcggcgtggctccccttggccatggaggacgactcacctgacaacagcggacttcggcgtgccacagcgtacctggggctctacctcgtttccctaggcacaggaggcatcaagccctgcacggcggtcctcggggccgaccagttcgacggcggcgacgcggcggagcgggtcaccaaggcctccttctttaactggtactacttctgcaccaacatcggctccctgctgtcggggaccgtgctcgtctgggtgcaggataatatnggatggtgagtcgggttta

SEQ ID NO: 306409 - DNA, 435 bp, Zea mays
ctgcagggaccggtccgccccacccgggccgacccacgcgaccgatgggttgcaacagatgatagaggccctgacggagaagacaccacgaggatcccacggcattgcaacacaagagggaatgagacctacagagaagacgaagacgactacagtcaagacgaactaaacctacgcggacacagcagccaagaaacgtactatgatgatgctcaggaactcacttaagatatcgaatcatcccatggagaaaagcacactgaggaacaaaacgagctcgccgaaacagcggcaaagatggcgaagggcagatccatgcacgaaacattctgaccagaaaagggctggcagcaaagccggagaaggataggaaccaagactgacggcggaaccgaggagggacggctgaggccaaccatgccagccggacggaca

SEQ ID NO: 306410 - DNA, 491 bp, Zea mays
gttcgtttgaatgaggcacgaggggcccgggctgtcaattaggcatgatgctgcgggctccatggcaggagctatcttcatgtccaacagcgtcacaagggaccaatgcttccaagcaagcattttcggtctacccttggagtatcgatcctttgtcagccacatcagaaaagggatgcccttgtttctctttgactatacactgcgtaagctttacggagtctttgaggctgcctctgatggagggtttaatattaacagtgacgcacttagatcagttcggcgctcatatccttcgcaggttcgcatcaatattatttggaagtgcaagccactaagtgaggatgagttttttcctgctatagaagacaactactatcggccaaggaagttctactttgacctttcctatgagcaggttgttcggctttatgaactgtttggcaacaagagagtaggacgccctattcatgactatcaaaaaaatgagt

SEQ ID NO: 306411 - DNA, 374 bp, Zea mays
cacgagcctccgttgtgatagctccacctggtgttcttcgggtcgcatccagtgactatctgccattcctgattttccatcgcagggtaacagatcttgagcggcatctcaccgatgagttcttgccagcgctcctccacaagatccagtatcgcttcagcctgctctccggtagccaacgacgacagaatcgcgatgaagttgcctaggcagaaccagcggaaatccatcctcgcgggactaacgttgccaatgaagtacccaccacggctaggcatgaagtcaaatatccagtcaggtatcgattcgggcatcacgttgaacttgttcagagctgtctgtgagtactcttcggtcttgtagcggtatatgtc

SEQ ID NO: 306412 - DNA, 515 bp, Zea mays
ttgtcgtgtgggcggacgcgtgggcggacgcgtgggtttccatccctggaggagatggtgtcttctagcaaattatcacactgccagagtgactgacagacagcatttatcactttttaatgtctgcaggttgctcgacatcagtttacatgtcgtgtgggcgtgtggcaaattttgccatgtcttaaacatatcaagtctgtgtactgccagtgcttatgtgcctgatttcaatatgaaagtatcagttgattagcagttcatgttttcagttataaaacttcttactgaaaatatcttatgttgatatgattttctacgtgatattttctacttcaggaatacagttgatgctaatcctaagtggtgttgcacttatcttcttgatccttctgattcattggttatagatgtggtgcaggcttttatcaggcaacagataaaagagtacggcgatgttaccaacatctatacctgtgacacattcaatgagaatacttcaccaacagatgaac

SEQ ID NO: 306413 - DNA, 416 bp, Zea mays
ttctccgtactcgcctatcttcgcgacggagagcattttcacaaggccctggcttcttctagcacacaccaccgccgccggtccccccgttcaacaacaccatgagggagtgcatgtcgatccacatcggccaggctggtatccaggacggaaacgcgtgctgggagctgtactgcctcgagcatggtaaacaggctgatggccagatgcccggtgacaagaccattgggggaggggatgatgctatcaacaccttcttcagtgagactggcgctgggaagcacgtactccgtgcatgttttgatgaccttgagcccactgtcatcgacgaggtgaggacaggcacctaccgccagatgtggcattctgagcagcttatcagaggcaaggaggatgcagccaactaacttcgttcg

SEQ ID NO: 306414 - DNA, 281 bp, Zea mays
tgacgccaacgaccacttctctgccgctggctgtctatgatgtacgtcgacctgctttaccacctttcgaggacttagagaatgagagcgagtacggctatgttcgtaaggtctctggacctgtggttgttgttgaaggaaggggtggtgcatgccatttatgaacttgtacttgtagggcatgataacctcatctgtgaaattatacgttttgagggcgagtcagctgcaggtcaagtttatgttgaaacatgtggactgagggttaatgaccctgattt

SEQ ID NO: 306415 - DNA, 480 bp, Zea mays
tgataggactaccactaccaccacgggcctggtcgacctccttgccatcctccacggagacaacctcctgcaaagctttgctcccagtcccagccgacacgaactcccgcgcagtccccggacgatgaccgagaggagacttcccaatcgggctcggcttatcaccggaccacttagtcaggggcggcctcgctctcgtcaccggcggcggtaagccactggtgagcgtcccattggacaccgccgtgctcgtctgcgagtttccggtggcggcctgcgcgctcggcggcggcccgtccgacacgcacgcgttgcggagaatggactggacgagggatgtgtgcagcctgacgttctccttccccaatgcagcagcgcaggccttctggaactcgtccctgccgagctggcagcccaggaacttggtgaggctgcggaagtagagctcggcgcgctggggccccagccgtctcacgatct

SEQ ID NO: 306416 - DNA, 464 bp, Zea mays
tcagtcgcttggcggcccaagagacgaggttggcgcccaggaacacggcgtaaccgaaggtggactggcgcgtgtcgggacagccagcccagtcagcatcggtgtagaccacaagctccgacgtcggggatggtcggagtaggaggccgtagtcgagggagccgcggaggtagcgcagaatccgcttgagcgcggtgagatggggctcccgcagagtgtgcatatgcaggcacacctgctggacgacgtaagcgatgtcgagcctggagaaggcgaggtactggagcgcgtcggtcaggctccggtaggacgtcgcgtcggcgaccggaggcccgtcgtcctcagagagcttcgcctgagtgttgacatgcgtggagcaaggcttgcagtcagacatgccagcccgctccagtatgtcgatggcgtactggcgctggtagaggaagagaccctgaggccggcgc

SEQ ID NO: 306417 - DNA, 327 bp, Zea mays
ctggattttatcatgtaccacaactgaaaagaaaaagagaggaagcgacgagagttcatctacgctgagacaaggccaaggtatcctgccaacagagttaggaagcatgatatcatgtatgcgcccgccacgatataaggttcctttatccctagaagtctgaggtagtaatgcgaggggcggattttcaggggatgtctgcttgttccgcggaaagagtttttagccatgtgaaaaggaacctgcaatattgcaaacagtagctcaacaaagaagagactgcatgctattaacattggaagaaacattccactgcatgatgcaatt

SEQ ID NO: 306418 - DNA, 382 bp, Zea mays
gtgatagctggcctctccctccgccggctatcgcacgggcaattagccgacgatgcagccttagatccatccaacccggcacagctctatatgacaccagcgagcgagagaccaataggtgcatgagcgatggctaggagctcggtcaagctggaggaccacatcggaaggaggcaagcgtgaggctgaccccatcagggagaagtagccccaatagaatggcggtgatagatgagaaggtctagaggagtgacaatccagacatcgacaagaaaaagtaccttgtccccgacggccgcacagagggacagatagcgcacgtggggcggaagcacgtcaagctcagcgccgagaaggcgatgatgatatacgtgaagaacac

SEQ ID NO: 306419 - DNA, 406 bp, Zea mays
tggtagttgcaaactctcgcccgagcccgacagaggtgcaatttttcattccgtccaccgatcgtccttcacgccagtttaggtctgttccgaaggcgttgtgcgctgttgtttgagaggagaggaggaagatgatgggattgcatattctgctacattgggcaggccggtatccaagtcggtaacgtgtgttgggaactttactgcctttgagcactgtatacagcctgatggctcatgtgcctggagataagaccgctggacatcatgatgatgcctttagcatctttttcagtcagactggtgctgggaagcacgttgcccgtgcaatctttgttgatctagaacccattgtgatcgatgaagtgcgcactggcacgtaccgtcagatctattcctctgagta

SEQ ID NO: 306420 - DNA, 206 bp, Zea mays
gtaattacaaccacgagaagactaccaccggcaggacgaacacacaagaggaggagaccacacacaccaatgacaacgacaaggacaagaaccaggacaaggagggcaaaacaccggaccagcagcggctgaacacagccgcaagcagcaggaggaaggaagcacccaggctgacaacaacacccaaaaggagagcaccctacaca

SEQ ID NO: 306421 - DNA, 358 bp, Zea mays
aaccggatcgtcctacgcgaccggtaataacagccggcagcagacaagaacgacaagggggcccgacgagccacatggcgcagcaactcccccaccgagcaaaaggaggagggaacaggcaaagaggaccgcgcaacactcaaaaaggacaaccgaggcaagagcgaaactgagcacaccaagaacagagacggcagccacaagcaggacgaaccacaccacgtgaccgggaacaccgatcaccaagaacaaagacaccgaacacaagatgaagggggacaacgacagaagaccacgacaagagcaacaatggagccgaaagaaaggacactacaaagaacacaacggcggcacacaa

SEQ ID NO: 306422 - DNA, 451 bp, Zea mays
gtgggtccgctggggcactattttttgaccgttgtctccctttccctccgctactgctcctccccaccccactcccccgcaggagcggcggcggcggcggcgaggtcgtaccccacatcggcgagcggcggcggcaccgccggaggcaaaggcaagatgttcgggcgcgcgccgaagaagagcgacaacaccaagtactacgagatcctcggggtgcccaagtcggcgtcccaggacgatctcaagaaggcctaccgcaaggctgctatcaagaaccaccccgacaagggcggtgaccccgagaagttcaaggagctcgcacaagcctatgaggttttgagtgatccagagaaacgtgagatttatgatcagtatggtgaagatgcccttaaggaaagaatgggcggtggaggatcccatgttgatccatttggcattttcttatcatttt

SEQ ID NO: 306423 - DNA, 300 bp, Zea mays
tcgttcgcgtggggctttttagcagattttctgggttttctccaggcagcttcaatcgtcgggatggggctcgttttgcatagtggcgctggaaacaagaatgtcttcaaagcacttattgctgcagaatacagtgggatcaaggttgagttgaccaaggatttcgcgatgggtgtctccaacaagacctctgcgtttcttaagatcaaccctcttgggaaggttcctgttctggagacttctgctactcctgtttttgagagttatgctttcgcacgctatgcttcatcgcttgaagga

SEQ ID NO: 306424 - DNA, 293 bp, Zea mays
cgcctacctggggggtttttccatgatttttcttctatttcctcccgccggccggcgctccacccgtacgacgacaccatgagggagtggctattttgatccacatcggtcaggtcggtatccaggttggtaacgcgtgctgggagctgtacttgccttgtgcatggcattcaggctgacggccagaagcccggtgacaagaccattgggggaggtgatgatgctttcaacaccttttttcagtgagactggtgctgggaagcacgtgccctgtgccgtttttggtgaccttg

SEQ ID NO: 306425 - DNA, 496 bp, Zea mays
ccgccccccatctgcactttttctcgccgttctcctgaattcttcgcccgaaagcctccgaccgcagaaccttagcgttgccgtccacctccatggaatcgaagcctcacgcgccggcgtctgggctggcaacgccgcggttcaggctgggtaaacagtcgtcgctggcgcccgagcgcggcggcgagggcggtggtgcggggtcggcagatgggtcggccgaggcgaacggcgtcatgagcttccagctcatgtacctggcccacgagggcagcgcggaggggatccgcgagctcctcgacggcggcgtcgaccccaatttccgcgactccgacggccgcacggcgctgcacatcgccgtctgcgagggccacgccgaggtcgtcgagctgctgcttcagagcggcgcggaggccctcgtggaggaccagtggggcagcacgccttttgctgatgcaatgcattaacagaatcatgatgtgatcaagatctttga

SEQ ID NO: 306426 - DNA, 278 bp, Zea mays
tggcagttcaacgtggttgttgacctggtttttcgttttttcactgggttctgtgccggaggctgtgcattcatcgcagattctggaacttccttgtctgttggccccacagccataattactgaaattaatgaaaagatcggtgctgctggtgtagtcagccaagagagcaagactgttgtttctcaatatggacagtatattctagatcttttgttagctgagacacaaccagcgaagatctggtcttaggtttgttttgtgcacttttgatggca

SEQ ID NO: 306427 - DNA, 299 bp, Zea mays
atcaggcgggccgggagtgttttgctcggtgacttctctgcggcgggaggcgtcggcggagcgggccgtgttgggaggcggcgagcggtcctcggtcgcggcggggcaggcctgccgggcgaagaagggcgaggacttcgcgctgtttaagcccgcctgtgagcgacgccccggcgtgccgtccaccttcttctccgccttcgcccttgtcgacgggcataacgggagcgccccagtggtgttcgccgaggagcaccttcttgccaacgtgctcggatgtgtcccggccgatctgagca

SEQ ID NO: 306428 - DNA, 452 bp, Zea mays
ttggccagctagagccaattagaagagcttgtagttactgagagtgtgtgtgagagagaggatgggtggcagcggcagggctgctctgcttgctggccctggtggtggtggccgtgagcctggccgtggagatccaggccgacgccgggtacggttacggcggcgggtacaccccgacgccgacgccggccaccctgaccccgaagcccgagaagccccccaccaaggggccgaagccggacaagccgtccaaggagcacaagccgcccaaggagcacgggcccaagtcggagaagccgtccaaggagcacaagccgacgccgtccaccgtacactctgagccccaaacccacgccgtcgacgtacactcccacctcgacgcccttcatgccgacgctatccacatacactcccgtccctacgccccacaaactcacaccaatatggtggtg

SEQ ID NO: 306429 - DNA, 377 bp, Zea mays
  unsure (1)..(377): unsure at all n locations
catccatttaacaaaaacaataaatacgtacaggtgattaagagtagccgatcctatatcaaaagaaggcaaatcccaccaccaactgtcctggcctctcaatcgaatagatgtcactaagttacaacatatggatgggccaaggtgatgaggaaaaactgatagggtcctcgacacaggtcaagaatctgaggcattggtagacacacacttccttcatctctcaaagagcataaccatctcgcaatgcggcgtgtgagggaacagatcgacagccattgccctcttggggataaaaggctcagagttgggnatccacttcgtcctctgccgagcaagccccgcgctgttcatagaccgccaccctcggttgccct

SEQ ID NO: 306430 - DNA, 488 bp, Zea mays
ccccaaatccacccgtcgtgttcctccgcttcaagatgcatatctttgtgaaaaccctgactggcaagactatcaccctcgaggtggagtcgtctgacaccattgacaacgttaaggccaagatccaggacaaggagggcatccccccagaccagcagcggctcatctttgctggcaaacagcttgaggacgggcgcacgcttgctgactacaacatccagaaggagagcaccctccaccttgtgctccgtctcaggggaggcatgcagatctttgtgaaaaccctgaccggcaagactatcacccttgaggtggagtcctctgacaccattgacaacgtcaaggccaagatccaggacaaggagggcattccttcagaccaagagcgggtcatctttgctgggaagcagcttgaggacgggcgcacgcttgccgactacaacattcaagaggagagcacccttcacttgtgctgccctcaggggagg

SEQ ID NO: 306431 - DNA, 274 bp, Zea mays
aacattattacatagcagaattgtcttacaaaaataaatgaaaataataaagcgatctaatattattccttggcgccattaagctgactaggagacgccacctagacttccttgtactcctcgtagtagtcctcctcctgggctacctgctcttcaccttcaacgagttcctgctcaggattttccacctgctgagtaccaggatcctcggttgcttgcttgtttactcgcaacaatacaaacaaacatagtataggagaaaacatcacaccaa

SEQ ID NO: 306432 - DNA, 376 bp, Zea mays
tgccaagagtgatgggcaggagtgatattggcctttttgtctgttttttcgcacggaaatacgccataatcaaggagcttgatgagccagttaccttgaaggatgggacagcggtcctgcagctcgaagcgagacttcaaaatggccttgaaatgctgaggtgcctatcactaagttcatccgccctcacgaatttggacgggatgcccaggagttcgataatgagactccatacaccattatcgtttggttcagataagtgtggtacaaccaacaaggttcatttcatccttttgcacatcgatttctaatactggaaagtatgcagagcattatcgttaatcccaccatctgatccttatgacacgctctctca

SEQ ID NO: 306433 - DNA, 318 bp, Zea mays
atggctccttgaggtgttctcagttcagatgctaatgcactatagatactaagattgcatgatgctgttgagcactcggtgagactcgaggagttcttcactccatatgatgaagtctttgagagtattgatgatctgggcctccaagagattcttctgagaggcatttatgcttattggcttgagaagccatttgctattcagcagcgaggaactgctcccttctgctagggtcttgatgtgatttcaactgcacaatccggttcatgaaagacatgcaaccttatgttctgggaccttgcacatctggactattgt

SEQ ID NO: 306434 - DNA, 395 bp, Zea mays
ttatatcacaataggataacatcccttggtagcagacaaaacatgggcgcgtctagggcctcaaacagaacgattaccggcgtatatgtattctgacttgcgaaacagctgctgcgactagggctctaaacgaggagccgtccccagccagcgccaacttaacttgttgctgaagcctgcgacatttgcctcttcacagcttctttgtatgtcttgtgctggtacgtcaatgttgtctccagcagatccttgagaggtgtctttgggttccaacctacataatccagtaggcatctagctgcttgttgattatagtcatgtcaggaattctcttatcactgtcatcgtatccttcaccgtagaactgactcgaactcacgtcgatcataggctca

SEQ ID NO: 306435 - DNA, 458 bp, Zea mays
tggagggaggccccggcccattttttgagaaactttttgtgcgtttttgagggaggaagggcagacgcagacgggcgaacaagatgagggagaccattagcatccacatcggccaggccgggatccaggtcggtaacgcctgctgggagctctactgtctcgagcacggcattgagctcgatggcaccatgcccagtgattcctcggttggcgtcgcacatgatgccttcaacacgttcttcagtgagactggttccggcaagcatgtgcccagggccattttcgtcgaccttgagcccactgtcatcgacgaggttcgcactggctcgtaccgtcagctcttccacccagagcagcttatctcggggaaggaggacgcagctaacaactttgcccgtggccactacactgttgggaaggagattgtcgatctatgtctggaccgtgtgcgcaagctt

SEQ ID NO: 306436 - DNA, 504 bp, Zea mays
cccgcctcgtccccgacgtcacctctagcgccaagcttcaaccactttacgacgctctccatcggatccgagtcggagtcggagctaccaagcatgctttcaagcgtatattgacgagcctgattaagcctggcggtggtgaatacggcaagttcttcagccttcccgcactaaatgatccaaggatcgataagcttccctactctatacgtgttctcctggaatcagctatccgccattgtgataacttccaagttacagagagtgatgtcgagaaaatcattgattgggagaacacatctcccaagctggctgagatacctttcaagccagcgagatgcattctaatggacaacactggagtcccagctgttgtagaccttgcagctatgcgtgatatgatgccaaagttgggttgtgatccctacaagatcaatccattgattcccgtggatgctgtatttgaccatgcagtgcgagtggatgttgcagggacctatgatg

SEQ ID NO: 306437 - DNA, 566 bp, Zea mays
ggaaagggttcaggtattctttacccatcttttgcactacttcaccgccgaaggcaggcccaaccttcaggaattcatcgaggagattgaacatgattgaagcgcttgcgcagaccatgaacgatcctttgtttttgcttgatctcgccaagaaccatcctaagagtgcctgtagatgtgacaaatcagtattagtccgttgatcggtggaagaccactaggcagtgttgagttgaatgttcgagcaatacaaattactgatttgttgttgctgactattggactctcctaagttctactaattgataattacacccattgtttcaacaatgagtattggggactttttgggaatttggttcctgagtatgcaagtatttggcaagctcacaagaaaatcccgtgcattatcctttcggagtcatgctttttgagcttattactgggtggctaccatttgcacaacccaattgtctcatgcttgctttctgcccctatcgtcttaccattagcctgttggataattctcatcccaattgcacaatattggtatttcttttctaccc

SEQ ID NO: 306438 - DNA, 409 bp, Zea mays
aatggaccgtgcaggaggcggtttttctcgcggtttttgcgtcctccatcgccgcgtagttggacgggaggttcctgtcagggctgaaggactaacgggtcgcacccgctggggtgcttgaggatgaggggatgcctgcgggtctgttggagactgttaatgcctacacgaatgtgctggtggacagggtcaggcaagcgctttacttcttacagatttgcaggtattgctcatggtatgaatctgctgctagccaagagcgtggagaagggatggaaccttaacctcttatagcttgccaggatctggaagggcggttgcattatacgtgcgaggttccttgataggatcaagagcgcgtacgacaggaatcctgagctcgccaatttgattgctgacagatagtttg

SEQ ID NO: 306439 - DNA, 271 bp, Zea mays
  unsure (1)..(271): unsure at all n locations
tttctgcacgcggggggggcattgtttcggaagtttttgctgttgttccgagacatggaatggtggatgagacggaggcagctgcctgcttggctgaggcagagggtgcgcaaatatgagccgcgaacgctgggccgtcctcacgggtgaccaggagattgagatgatcaaggatctgtctgtaggactgaggcgggacataaagcgcttcctctgtctcgcgctgcttnaacatgttccgctggtccatggcatggtcgatctgatcctg

SEQ ID NO: 306440 - DNA, 343 bp, Zea mays
aaggatgccatctcccagatggccggggatgcgcaacgagaactaatatgagagctctactgagacttgtggaacattcacatttgacctgcagaattatgatcgcacagaaggacaagcgtatcagtggctttgataagaagccactatgaccttcccaagatgaaggtgtgcatgcttgctgatgctccacatgttgaggacggcgtgaagatgggacttgactacatggatgttgagtttcttaagacaatgaacaagaacacgaagctcgctatgagtgttgcctagatggaccatgctattttggcatcagatgccactatatagcatatttaccttt

SEQ ID NO: 306441 - DNA, 297 bp, Zea mays
ggcggcgttcgctgggggcattttcaccctcattttcgttttcttccgccagggctccggcatggccttcagcatgctgaccggcggtgggccgacgactccggtgggactgatcgtggtggcggtggcgcacgcgttcgcgctgttcgtggcggtgtcggtgggcgcgaacatcttcggcgggcacgtgaacccggccgtgaccttcggcgccttcgtgggcgtgaacattaccctgtttcgagggctcttgttctgggtggggtatctgttggggtccaccgtggcgtgctttct

SEQ ID NO: 306442 - DNA, 348 bp, Zea mays
tgggtttgtaagcaaatacatggttgatgtactcaatgctacaggtgctctacttactaccatgccatttgtgcatcaagggcaggctatcgaatggagcttcactgcttggaaaaaaatggcagacagacaacatagaagatttcttactgtgcccaacatcggagccctaaccctgataatgttttgataatttaaactcctgctgggactttcttatcaaaaaagcttgttcatagcaaaggcaaggtagcttgattgaggttgatcaggaaagatattcccttggatttgccatcataagttaaaattttagagaacttattagcggcgagatgtctggtttat

SEQ ID NO: 306443 - DNA, 466 bp, Zea mays
cgcaggaatcgggcgccacaccacccacatttctccaccccaccctggccgcgcgttgctcaggcgcagcgagcgaggcggggccacaggccacagcgcgagcggggcggggcggggcggggcggggcggggcgggagggagggccagggatctctactctcgtccgtgcgggggcgtgggcgtcgcatgcggcggcgcgccggggcaaatgcgggtaacctcacggtcggaggagcgctgacgcggcggcggcagccagggagcgatgcaggcgccggagcagcagcagcagcaccagcagcggcagaggaagggttcatcagagatggacttcttcagtgaatacggtgatgctaacagatacaaaatccaagaggtcattggcaaaggaagttatggcgttgtttgctcagctgttgaccaacatactggcgacaagtggcaataagaaaatacacaatatct

SEQ ID NO: 306444 - DNA, 401 bp, Zea mays
ctcggacatgacgtccgacacgttgcgcctgctcggcggccggtcggccgccgccgcgggcgcctcggccgcgggggacgagatcacgccgctcacccagaggaccgagatgttgtagggcgcctcgtggacgggcccgacgtagaacacggcggcggcggcgctccccgcgtcgtcctcgggcgcgaaggccacgcgcccgccccggcgctccgtgaccctcaccatgcccgcgctccccggcgcgtcgcccgaggcctggaacagcgtggacacgtccgcggagccgccggggaggcggtgcagcttcgcgtcgtcgcagtagtcgacgaggacgtggagggagagcacgtgccgcagcgtctcccgcggcaggccgcgcgccttcagcggcgccatgt

SEQ ID NO: 306445 - DNA, 433 bp, Zea mays
ttctgcaggcgctctgcactggaagggcgtatttttgtacatcaaccggatgggcctggtaaaacgaatcccttccgcttccgcatgctagctcaacttgggttatagaactttagcgtgacggtcgtgacggtgtttcgcaggtgatgctgaagatgaagagccggcatgtggcggggacgatcacgaagaagaagaaaagcgtggtgatcgacgtgtgcagggacgtgccggcgtgggccgggcggaacctgctggaggacggttagcacctgtggtacttctgcctgtggaccgcggagcaccgggtgatctgagttcgagtgcggtagtcagcgggagcacgagatgtggatcaagggcgtggcgcggctgctgagatttgtcggtgagcggaggcgtctggtggtgtgacctggccctggttctggac

SEQ ID NO: 306446 - DNA, 334 bp, Zea mays
tgcaaaatccaacagcattcatggaggtggcggtgtttaggcatccccgtgttggtgaatatgcgtttggattcataacatctaccatgggtgttgacacagacaaaggcgatgacaaattgtgtagtgtttatgggccaaccaatcatttatatatcggggacatctttatggtaaactccaccgacgttataaggcccaatttgtccattggtgaaggcattgaaacaattgacataggaggaatgactatgccacaggtgatcacgtaactggaacaaacaccttggtagagccacgtccgtatagacagagtgaggactgtttgaggcat

SEQ ID NO: 306447 - DNA, 413 bp, Zea mays
ctacctggggggctttaccgagctttccttttttccccttccgacggtcgtcgctccacccgttctacgacaccatgagggagtgcatttcgatccacatcggtcaggccggtattcaggtcggaaacgcgtgctgggagctgtactgccttgagcatggcattcaggctgacggtcagatgcccggtgacaagaccattgggggaggtgatgatgctttcaacaccttcttcagtgagactggtgctgggaagcacgtgccccgtgctgtttttgttgaccttgaacccactgtcattgatgaggtgagaactggcacctaccgacagcttttccaccctgagcagctcatcattgggaaggaggatgcagccaacaaacttgccccggggcactacaccattggcaaggag

SEQ ID NO: 306448 - DNA, 212 bp, Zea mays
ttactttaacgaccgacggggtttcgagctcaccttcgccggcaccacttagatggaggcctgcgtaatggagggagccaccttgcactgcggagcggacttcggactctacaccgtcgtcaacgccgtctccttagactgactcgcaatggagaagacgcctgacatttacctcgcctttgatggcgccgaggccttcaccagggaacaag

SEQ ID NO: 306449 - DNA, 424 bp, Zea mays
tcacgtcgcaactgtggagggtggttttatagggtgaaataccttggttttccgcacaaacaaagacttcgccatgattcgaactcaaggtctatgactgcggtaccatgttagagtggacacactaattagttcaaccgaaaagcttaagttgttagagtggacaccatggtttttaaagtgggaaggcgatccaaggtgttggaccaccgtctggacgcctaggcgaggtaggcgggcaaggcgcctaggcgttagaccaccggctggacgcctaggtgacgccttaagaacagtggtggacacactaactagttcaaccgaaaagcttaagctgttagagtagacacactaactagttcatgtggcatctttacaaaaccatctttaagtctttcgagacaccttgatttcttcaggatca

SEQ ID NO: 306450 - DNA, 161 bp, Zea mays
ggaaaaaatgagcttgaacaaatccttccggggccataatgcaagataacatcacaataaaaagaaacccgggatttgatggggcgttcccatgactacaccgcctaaacgggccactacaagacattaccacctggatgacactggtgcgtgctcaaagg

SEQ ID NO: 306451 - DNA, 436 bp, Zea mays
gtgcgcccacgcgtgcgcccacgcgggcgagatttctggatggcttcgtagtctatacgaggttaccgacgaagaatacttcgacggtctcccattaactagccacggactacgttgatgacaagcctatgggcgggagccacttcactgccaagggagatgctgagttaaaagcttagatctctattccccccaaggctccacatgaccgctatgagagttactacaacaggaacaccgtgaaccttaagacgtgagttacggagagacttcatctctgaccaatttgacgaccttcttaccaaggtcctgacctttttgaagggtattggtgactaggacacgctgcccctggacgtgtgacgagaaatgcgttaacaacatcccattttctatgaccatcaagaagaaggtcatccgctacgcccctctacat

SEQ ID NO: 306452 - DNA, 376 bp, Zea mays
atctgcagctagcttacttgggggttattttaaggcccgctgctctctattcccggatccgccgagctgcgatatcgtagatgacacttcatactgccgcatttacagtgaccggcgcattgaccgcttggtcggcaccgataccgtgccggcgggctttgatcccaccaccggcgtcacctccaaagatgtcgttgtagacagggacgccggagtctacgttcgcctgtaccttccggacacggctacggggtccgatgattccaagaagctcccggagctagtctacttccacggtggtggatttgtcacccactcggtagtgtattcgccctatcagtgcttgctgaacaccctggtcgcgaaggcctgcctg

SEQ ID NO: 306453 - DNA, 465 bp, Zea mays
cgcgtgggcggacgcgtgggtgcagtgcaatgctttctttgccaaggcatacaataggcatgttttctaaaatagtagatcgatgagtatattcactctgataatagttgctttgtgagatatcttttttccatatgcttcagtggacatctgcttatggctcaggatgggtggttcgcacatccctagctggtgcaacactaggttcctttaccgggggatctttggcagataaatttgggcggacaagaacattcatcctggatgcagccccactggctgtaggtgcattcttgagcgcaacagctcaagatatccgcaccatgattattggtcggctgcttgctggaattggtattgggatctcatctgcacttgtacccctttacatatctgagatatcaccaactgaaattcgtggaacacttggttccgtttatcaactttttatctgcattggaattc

SEQ ID NO: 306454 - DNA, 334 bp, Zea mays
ggctgccacgggggcatttttcagtctatccctcctctatttccaggggctaagcctatatttacaccgcacctctagctaggcagaggcatgtgacttcaccagatcttttggctgatgcactggctcactatgtgatgatcttgttattagcgagtgccacatatttcatcaaaggtgcagcaaacatgtcttatatttcgcgacgatattaccgtgctccatagttcatgtgtggggcgagcgggttcacactaccgattaatagaggaagaggaccttcaggttttgctgggcttttattaggggagactgtctttcctgttgaaggtgc

SEQ ID NO: 306455 - DNA, 283 bp, Zea mays
tttcgccgccgccgttggtcatcggagcatcctttgagaagacgcctgctccttgccgaccggtacaatggccgtcttctccagcctccacactggcgacagtctcatgtccctttaggatcacctagccggcaaaacctatgtgtttggggactccattactaaggctcacattaaggtgttcgacgaggtgccaactaagccggaggatgcttgctgtaatgctccccgatagagccagaccaagtatgcggctggagcctcactattccctggggaggtt

SEQ ID NO: 306456 - DNA, 230 bp, Zea mays
ctgtggacgggatcacgtgcaaagatggcattgttctgggcgtgtagcaggttgtgacctcaaagatgatgctgaaggcgtgaaattggaggacctcattcagtgcaccggcattcgggcttgggtgctgctggttctggagcaaattgcagacaaattgtttcacgggccaaatcagaagctgccagttatgaaaaggactatggagaacccattcctagtgaagtgat

SEQ ID NO: 306457 - DNA, 373 bp, Zea mays
tgctctttacatgatcatccagaccgccgtttttattgagacccttaccgtgcttggtgccgtggtccgctggtgctcctgcaacatcttctccacgcaggaccactccgccgtcgccatcgtgcgcgattcggccgccgtgtacccctggaagggggagaccctctaggagtactggtggggtaccgagcgctgtctccactggggcgaggcggtcggtccttacctcattgtctatcgactgcggtgacgccacgctgttcatcccacgagggtgtcaaggccctggaggattacttagaagaccggccagatccctgacccggagtccaccgacaacttttagtttcaagatcttgcttcactattattc

SEQ ID NO: 306458 - DNA, 426 bp, Zea mays
catccgtggagctcccggagcgccaggctaccagagtccgacccagacgtagctcccggtcacagcagagcccacgccttgagcctttgacgcgctccgtgtgagaggagcgtccgggcgccggccggtggccagagaggaaacggatcctaggaggctcagatgagtcgaggagatggacccgcaaagatgtccgggatcctcgccatggacatatacttaccgccctcctgcgtgcagcaggaggcacttgaggccaatgatggggcgagcaaagggtagtacaccattgggcttgggcaagattgcaatggccttttgcagccgaggaggaggaatgccaattctcaatgagcttgacggttgccaattctcctgctgaaaaaatacatcattgatcctaagctaatcggtcgcttggaggtt

SEQ ID NO: 306459 - DNA, 285 bp, Zea mays
gggggtgggttggcttctcctccccgggccggtttgggcttgggttcgtgaggttctccggggatcgggttcgagggcgagcggatccagatggttgcgtcggatgttgagtactgatgcttcaccggcggactctcctgggtcaactgtcgaccacttccttccacaacgcctttagctcctaccaaagagcgacttgagtccaagatcatcctcgatcgggagacgcataggtccagaggcttcggttttgcaccttcttctcggaggaggtgatgcggaaac

SEQ ID NO: 306460 - DNA, 417 bp, Zea mays
cgtgggcggacgcgtgggtttattttcgaaaaaggaattgtgtaattgtgatgttgatttcacaatgccaagtgtctatggcgtctccatgcaagttcacactacactggcaccgcggttgacagttagaactttgattgcctgtccaataggaaaaactctgccacgagtcgccgacacttcatcccggaagagctaacgaggtgacttcccaccgtgcccatgggtgacagccagtacttcttcttcctcaccaccttcagtccgtcggggaagctcgtgcagattgagcacgcgctcacggctgtcggatcctggcagacctcgctcgggatcaaagctgtcaatggtgtagtcattgtcactgagaagaagctgccttctattttagtggatgaaacattcgtgcaaatgatt

SEQ ID NO: 306461 - DNA, 311 bp, Zea mays
aaggagtagcagcagtagggggcgccttgtagcggctccccatctcgagctcgccaccatggtgagcgctaacaccttttctgacctccccgctgccttcgcgcgcgcacgctttattagtagatctgggtcgtcgcgtttccgtctttgtttagccggccgtagagcctacgctctaggtgcctcaagctcctttccagtacttatagctccggtagggtttcctttttgcgcatagaggaggcagcttgatgcacggctggctaccttagctattcgccaggctacttgacagtattttcggtgcactt

SEQ ID NO: 306462 - DNA, 304 bp, Zea mays
gcgtccgtccaaaatcccccaaaaccgggctagtttgagggccgatccgcggctccccgccgcctgatccgagcagtctactccgtccagccggtgatccaagcgggatggggtacttgagctccgggatcggccaccccaccgatggatcctccgtcagcggtggcggtcttagccagaatggtagatttagctatggctatgcaagctcccctggtaaaagggcattcatggaagacttctatgagacaaaaattgattgtgttgaaggtcagatagttggtctttgtggagtttctgatgg

SEQ ID NO: 306463 - DNA, 342 bp, Zea mays
cctccgctcctcgcgccgccggcacgtattcttttgtccaggtaaggagaggaagagggccaaatggtgaaatacatcaacgtgatccccaacggacactttaagaagcactggcacaactatgtcaacgacatggttcaaccagcccggccgaaagcagtggcgccttataaatggacaaaagaaggctgcgaagatattcccccgaccgactgctggttctctacgccccatcgttcaatgccagactttaaagcacaacatgaagccaagggctgcgagaggctttacccttgacgagctaaatgctggtggcattccaaagaagcttggtccaaccat

SEQ ID NO: 306464 - DNA, 348 bp, Zea mays
tttgtttgctcgtcccacctgatcaggtcgagcacctagtaccgacctgctccatcatcagcgtagagggccggaaggtgcctgactctcttggtggctgcttgcagcggccatggcgacgtcctctcattgggggcccttgctgctgttgagcctgggcgcgctggtgtcctgctccttcgcggcggtcagcttggtccaggagctggacatcacgtgcggcgactgtccgggcatgcgacttgacaacgggcggctgctgactctgtcacatgaccggacgtccggctccaggttccagtcccggcacgagtacctgttctgaacgatcgacatgcagctatagct

SEQ ID NO: 306465 - DNA, 272 bp, Zea mays
gtgagtgagagaggatgatgggtggcagcggcagggctgctctgctgctggccctggtggccgtgagcctggccgtggagatccaggccgacaccgggtactggtacaccccgacgccgacaccggacacccagaccccgaagccggagaagccccccaccaaggggcccaagccggagaagacgtcaaaggagcacaagccgtccaaggagcacgggcccaagtcggagaagccgcccaaggagcacaagccgacgactgccacgtacacc

SEQ ID NO: 306466 - DNA, 225 bp, Zea mays
caaggaccgggctgttcccctaaactgggctaccgcaccgcataaagccactgtttatggcactgactaaataccctacgccaaacccacgtctcattgaggaaactaaccaacgtgcgtacaagggggcaaacgaaaaaccggcaactgcggcaccagctgcgggtgctcctgctgcagctgcaactgagccggtcaggcgatggcgcacgagagctcagagga

SEQ ID NO: 306467 - DNA, 344 bp, Zea mays
ttcgtttgcagcgcgactgtggctccagctgctcctgcggcagctcatgcaactgcatgtccactcacgtggagaccgccatcgccagcagcatcaacaccacggtgctggccacgctgaccaccagggccagcgccggcgggttgtaggcggccaccgacggcggaggctgcgactgcaacacctgcaactgaggcaccagctgcggctggtcctgctgcagctgcaactgagccggtcaggcgatggcgcactagagtcgacaggacgactacgagtcgcataaatatagatagcggcgggtaaataagatcctgtcaactgcaccccccattatcgatcca

SEQ ID NO: 306468 - DNA, 383 bp, Zea mays
ttttacgcgtccgcccacgcgtacgcccacgcgtgcggcgagccatcgacacgatcgcgagcgcaagcacgtacgttgccggaagctcaagttagaagaagcaccagtgcctgatcgatggcggcccaggctctcctctcctgccggaagatgctgggccgccccgtgtagtcagccgtatgtaggtggtcggcgaggaaggcgcccttcgtcgtgagggacagattcagccctccagccaagcaaggtgccgacaggcagctgtggttcgcgtgcaagcagtccctctcctacctggatggcacgctgccgaggaactatgggttggacccagtgggcctatcggacccggagggaactgggggcttcatcgagcccaagtg

SEQ ID NO: 306469 - DNA, 463 bp, Zea mays
tcgtttacgcgtggggcggtgataactggcctcactggtgctggggatctcgacaccgcgagtgagttgctagatgagatgcccgtgaaggacgccgtggcttgcaacgctgtgttgcataggtacgtacgctgtggccgagtggatgaggcctttgctctgctcaagagaattggttcgcagtgcgattcggatgggatcttaccatggaatgaccccttcgtgcttaccacagtggttggcgcctgtgctgatcggacgcagtatgagattgggaggcaagctcacacccggttggtggttgccaacaccgggattgattcgatattgggctgcgcgttgattgacatgtattgcaagtgtggggatttggactccgctcaccaagttcttgacaggttagaacatgtcgatgagatttcgcttgccgcattggtctatggctacccatcttgcggacagt

SEQ ID NO: 306470 - DNA, 348 bp, Zea mays
tttagttttccgcacgggctgtgctgttgccctgaagcaggctggtgcccgggtcatggagaccgagatcgacccgatctgtgcgctccaggatctgatggagggggttcaggtgcttctcttgaaggacgaggtcaatggagctgacatgtgaaagaccaccactggcaacaaggatattataatggttgagcacatgaggaagatgaagaacaacgtcatggtctgcaacagtggccattttgacgatgaagtacagatggctgaacttgagacctaccctggcgtaaagcggattaccatcaagaatgacactgaccgataggagattcccgagaccgacactga

SEQ ID NO: 306471 - DNA, 368 bp, Zea mays
gaccggaccggaacggcagggccgtcccttcccacccttttttttacccacggaggcaccacccggagcggggagatagctatggctagcgtagccagccagcgacttaccagcagttagctagccatgctgacgtccttcgtgacgccgacggcgagcgccgcggcctcggtgacgccatcgccgaggccgataccaggcagatacgggccaccgatgctgggcccgctacgggaccggctcgactacttctggctccagagccaggaagagatctttcggaagcgcgcggcggcacaccgaaggaaccgggtccaaaccaacattccggccaccttacaattcttagtgggcgtggacccacacga

SEQ ID NO: 306472 - DNA, 239 bp, Zea mays
tttacatgtacgaaggcgcagtcggtttgtggtgatgaatgagtgtcagcgcgtatacgatgcaacaacagacctgaacctggtgacaagaaagctgaggactgggatgagagagctaacatcgcaggtccagatgcatcgaacccagatgatagagatgagcatgcccacatgggaattgaggatgaggaagccactcagcctgatgagaagtaggatgatgaaccccaggagattga

SEQ ID NO: 306473 - DNA, 303 bp, Zea mays
gtaagtccttctcagacccgagaagctcagctgcggccatggatgccaccggcactggatctggagggaaggctaagaacggagcggacgttcgcaaggtcggcgggcccaggaagaagtcgttgacgaggttcgcgaaggccctgctccatttccccgtcggccatatcatgcgctacctcaagatggaccgctacgcgcagttgcgtgggcagcagagcccccgtctacctcgatgccgatctggagtacctgaccggtgacgtcctgaagctttgcggctacgctttcaatgacaacaag

SEQ ID NO: 306474 - DNA, 393 bp, Zea mays
tttcgatcatacactaatgggcatatttgagggtggtcctttggagtgccgggtgatggagaaagttggctgtatggactactctgttacagcatgggaacctgtcagagctgatatttaccagaggcaagttcattataagtttgacaagaaatcagcacggcacggaggagaagcaatgagcacccagcaaaagtcccctttgtctaataagaatggctggcttgttgaagaagtgatgacacttgaaggtatccctgttggcgaatgtttcaatctccatatccgataccaactggagagcaatgcatccaagcacaagacatgcacaatccaggtatttattggcatagtatggctaaagagctgcaagaaccgaaagaagatcacgca

SEQ ID NO: 306475 - DNA, 158 bp, Zea mays
tttacttgtacgcacgcgcgttcgggttgacttgaccaataagtatcaccgcggaaaagctgctactgctgacctgaacattttgaccagggagttcgggtcaaagcttaaagagctcatgccgcactgcgtggaccaccctgaggaggttagcaaga

SEQ ID NO: 306476 - DNA, 276 bp, Zea mays
ccgccgaccttggaacggcgtttccgtgttcgtttcaccagggacggccaagactttctgggcaaaggctggggccaccgaatgtggcacaacattctttaatgatccctctgcaccactggccctttaatggcgtggcgagagtgagcgcatgctccgttgcttattcgatcttgcccgggcctatcctccaagtccacttttcattgatgaaagcgagtccttatgcacagagctcggtgccttcggcgaacatgagtggtcaagaagggtgaa

SEQ ID NO: 306477 - DNA, 376 bp, Zea mays
cgtccggtagtgctgggcctatacctggccacttactcctgcgacgggtcatagtgcggggccatctgcctgagcctcctacggctgagcagcacttggcaatgcggagggcctgcgctaggcatctgaatgaccgggcgctagggtgaagggccacgcacacttctaccggctgaaagaagatcgtcgtggggttctacaaggcccgggagtatgccgactagaaccccaacttatttggatgtgtggagggtgcactcagcatccgtggctggattgcgccacatggccatcattgcattgtcacctatgacaaggaaggccccaactgtgaactgcaagatgacagatgagacatggccgttctgattaccac

SEQ ID NO: 306478 - DNA, 369 bp, Zea mays
gcgtggggcaggggggcgtccataccgggtcccttttgccgccggtggtgctcaaggccaggccaagagcttggaggtggtaaaggctgcccaggctaaccaacccactgtgcttgataaggtaggttggcagatccgcctgagcagcagatcatcaaaaggactgccgtgccccaaacatctgaccttgtttatcacctcaagaaaggagatgtgcacgggaactcatgacgatagccttgggggccgtggagtggctgcgagcgggggcataaatggtccagtgatgccaacttccattggagccaatgctccaaccgcgaaaggtggtaaaggctaaatgataggagtcatgatgggcggcgggat

SEQ ID NO: 306479 - DNA, 482 bp, Zea mays
cgtgggcggacgcgtgggcgctgaggtttctgagctggagagcatatttgagtcatccagtaatgaacatgcaaatgccagggaccaagctctggagtttctaaatgagctgggttggcttcttcatagagcgaacagaatgtctaaagaggatgaaactgacacatctctagctccctttaacatgtggagattcagaaatctcggtgtatttgccatggagcgggagtggtgtgccgtgatcaaaatgctgttagatttcttatttattggccttgttgatgtgggatctcggtctgcagaagagatggtgctttcagaaaatctgttgcatgctgctgtacggaggaagtctgttaacatggttagatttctgctgagatacaaaccaaataaaaactcgaagggaactgcacaggcattcttatttagacctgatgctttgggccctcaaagattacccccctccatatagcaactgc

SEQ ID NO: 306480 - DNA, 493 bp, Zea mays
atagagtagttagagaactgatacaatctttgcttgttcgaattggaaaggggcatccacaggctttgatgtatcctctcttggttgcctgcaaatcaataagtatattgagacaacgtgcagcgcaggaggtcgttgataagatccgccagcacagtggaggtcttgttgaccaggcacaacttgtgtcgaaggaactgatacgggtagcaattttgtggcatgaaatgtggcatgaggcacttgaggaagctagcaggatgtattttggtgagcacaatatcgaaggaatgcttgctgtacttgagccattgcatgcaatgcttgagaggggggatgagacaattaaagaaaatgcctttcattcaggcttatgggcatgaattactggaagctcatgaatgctgtttgaaatatcgggctacaggagaggatgctgagcttactaaagcctgagatttgtattaccatgttttcagaagaatctacaaac

SEQ ID NO: 306481 - DNA, 384 bp, Zea mays
agcgcggatccaaactccattacaaggcaccttgtgaggctgcctccatcatgcgcacccctccctagcatctgtgcactggtgtcatactgagaacactcctcgtggcctgcgggcactcatctctagtctgggcacaactttctatccatcaacagaggagaaagctctaccagatctggcgcccgatgacgaacaaggctttctgaacggatgctttcaaccataaaaatgatgctggcgagacgggcccccagctgcatcgcgagagggctaactgccatccttcggttggcccagggatggattatacccagccacggaagattaacggtttgaggcatgaaaaggcttacccgatggcagattcaagactgtggtggt

SEQ ID NO: 306482 - DNA, 455 bp, Zea mays
cgtccgcaagcctggtatggtggtgacgtttggtctcagcggcctgaccactgaggtcaagtcggttgagatgcaccacgaggctctccaggaggctcttcctggtgacatcgtcggcttcaacgtgaagaacgttgcggcgaaggatctgaagcgtgggtacttggcctccaactgcaaggatgaccctgccaaggaggctggcagcttcaccttgcaggtgatcatgatgaaccaccctggccagatcggcaacggttacgcgcccagcgctggactgccacacctaccacattgacgtcaagtttgctgagctggtgaccaacatcggcagaccatcttgcaaggagctgaagaaggagcccaagttctttaagaacggtgatgctggtatggttgagatgaattccaccgagcccatgggtgacgagaccttctatgagtcccctgctctt

SEQ ID NO: 306483 - DNA, 369 bp, Zea mays
ctcctgcccaaacaagcaacgcaccgactgcccgttctcgtcgagaggcagcccaatcccgaaaccgccgtcctatttcaatggcgcccaaggccgagaagaagcccgtcgccaagaagcctgctgaggaggagccggtggcggagaaggctcacggcggggaagaagcccaaggctgagaagcggctccccgcgggcaagttctgaggcaaggagggtggcgagaagatggggaagaagatggcaaagatgtcagtggagacgtacaagatctacattttcaatgtgctgtagcagtgtgcaccccgtcattggcatttcgtacaaggccatgtccatcatgaactccttcattaacgacatgtcctt

SEQ ID NO: 306484 - DNA, 406 bp, Zea mays
ttttataacggtccggccactggtttcgccgacgtgggctgccacccgcaaggatgggaggataagattatgtagggatggctttctgagggcaatcaacattatcggaacacacagccatcggacaaggtgctccacctgctgaatgtgccgtgggactgcactctagaggagctgaccgagctgaggaccccatggggcaagggcgttaacaccaagcgctgactctgcccccaccgcaatcaggcattgattgaattctgtgaccaaaatcaagctatagccatgatatcatattacgcatcggctacagaacctgcacaagtaagagggaaaaatgagtaccttcacaactcaaatagacaatatattgtcaacatcacagcaactgtggaaggttcaagca

SEQ ID NO: 306485 - DNA, 351 bp, Zea mays
tctcccacgcgtgcgcttgtcaataatgcggaggatgttgtcctcaaagaaggacctgcaacaattgctgttttcattggtgaacctgtgatgggctctggtggtgttatacttcctccaaagacctattttgtgaagattcaggcatgttatgaagaagtatgacatcttgttatattgctggatgaggtgattactgcatttgttagactagggacaatgcttggatgtgatatgtgtaatattaaaccagatctcggttccataggcaaggctatatctattgcatatatgccaattggagcaattcttgctagtccagaaataacggattggatctattgtcagagc

SEQ ID NO: 306486 - DNA, 463 bp, Zea mays
tggacttggtcagctgcacggtgtcagagctacagccgttgagggcagaggcggaggacatcccgctggacatcgtttatgaggatgaccatgttcttgttgtcaacaagccggctcatatggttgttcacccggcgccaggaaatgccaaaggcacattagtcaatgctatacttcatcactgcaagatctccacatttacctgtttagcacgcagctcagctggtgatgaatgcccggattttacggatgaagacactgatgtatttcatgtggatcagtttgctgctgaagatgtaagttcagaagtccggaatgctcttgtgcgccctggtattgtgcacaggctggataaggggacaagtgggcttcttgttgctgctaaggatgagcattctcatgctcgattagcagaacagttcaagctgcatacaattccgagggtatacatcagtcttacttg

SEQ ID NO: 306487 - DNA, 192 bp, Zea mays
tattagggctagtttgggagtccaaaaaaacagaggtgattataggggctaaaatccactttttatttaaaattgaataaagaggggattttagcccctccaacccctccggttttgtggctttcaaactagcccttaatgggttgactctttccaaccgtaatcaatcatgtaaaacagagggatcggatg

SEQ ID NO: 306488 - DNA, 469 bp, Zea mays
aacacacactaccaatttgtttttactagcgggtaaaataacgtacaaaaaacttttcagctgatgggataaagtggacacgggtactgatgtagcaatgcaggaggggacatggatggctcaaaagaagtcaacatcatccggggcatccaggtcccgatactccactatggcccttgggtctcctcgaaccatcctgttccgaggtttcccaggataaccgccttggcctcgaaaagcatcatagttcccacggccggcaccatatggagcatgggggtatggaggccctcctgttgggactgcagggcggacagcaccagctatgacaaagacccagggtgaactaaaaactgacctcaacctcagcctaagctttgtagccgcctacagacaccaaacccctgcactgcctttccacactcacctccatagcccaagatgggaggccggggctgaccatatggca

SEQ ID NO: 306489 - DNA, 122 bp, Zea mays
aaggtcaaatatcaaacttcataaggattcaagccatactgctgcagaagagttttgggtgcaacacataagggcacacacagggtccattataaccaacgaagccacacaccacgattcat

SEQ ID NO: 306490 - DNA, 350 bp, Zea mays
ggccgccctttttttttttttttttttttttttttttttttttagatggtggtgttttttttttttttttttttggggaccaaagcccaatcgtttttaaaaaacaggggacaaattggggccgaaaatttggccttacgctttgaacttgggacgactaaccaaaaaagggtgctcttcaggacccacattttggggccagacaatccttgagaatgctttaagctgccgcgcttttgcccttttttctttggagcttcttcatggaaaattcaagctttttacccttaagggtgtacccattacctgggccacactgtccaagacgggaaaaaatgcttgccaaaaac

SEQ ID NO: 306491 - DNA, 389 bp, Zea mays
gaataaacattgccaatagttgtattataattgtactttcggcttgccaaaaggtgtaagagcgagaatgacgtgggagtgattacaatccagcctgaacaatacggtactactgttcatatatttataggcacgggacacagcccaaacaaaattacattcatgcccttgatatttactcgtaattgtaatataaattatcacggaataagtggtctttttcaccctttaagttggtattgtccttggtctttgttaccatatcaagccgaacctctctggcaatagcttcagcgcttactcctatcaccttcgggttgctcttttacgccgcgtacactttcgctattagagaaggtctttatccaggagccactcccgtttagtgt

SEQ ID NO: 306492 - DNA, 389 bp, Zea mays
acaggagaagggtgtttgtgcctgtgcagtaaacatttcttctttgtctctatcatcaggaagcaatgtcgaggcggctaagtgatgctacgacggaacaatccagtaacgatgattcatctgttgacgagaagcccaagcagcctcgtaagaagatagacgcccctacctcagtgaaggcaaagaccgcagctccgaaaattacacttcacgaccctaaatggactgacggcagcattcctttggacgcacttcctgataaactctcaaaaataggaaaggtaagcgactgcagttttattttattggcgctcagcctccattcagtgatgctgacttgacctgggtctctaatgtaatttgtaccgagcttcaggaagcttttgagc

SEQ ID NO: 306493 - DNA, 364 bp, Zea mays
ggacaaaggaaagaaggcttgcattatataaagtacaaactcctagacaggggcataaagtttcaatggagagtcttgtggatagctgagctatatcaaagaatacaatccctgacctctctcttctgccctccatcactaggaaggatgtgtcatcttattaattgggcactgttgtgtctctcttctgtccggtgatggaatagcttcgctattgatcgtctctcacaatccttaaacatattgagacggaatggtctgtcaggatttgtccttctcagttttaagtatgtatatgcaaagctgagctggtcacgaggtgtgaatcgatcaacttcattgtaccacaggcaggaaaataagt

SEQ ID NO: 306494 - DNA, 373 bp, Zea mays
  unsure (1)..(373): unsure at all n locations
gcagnaagtccaatgttaaccacaacaaaggaagttcaaggagcacatcaagctacattctctctgcaaatgtttggccggcaatcaacatccactattacactcggcagaaaaatacagtgtatgtcatcgaccgtgtatggcaacttcaatcataagctggtgctccttgttgtgatggttgtgtggcgtctcagcgaaaataacccaactgtcaaggaactttccatccatgccttttatggcctcaccagcttcttgtacagtcgcatatttgacaaagccaaatcctctggagtatccagatatcctatcagtgattactcttgcttcaataacctgaccaaatttagaaaatgcttccttaagtccc

SEQ ID NO: 306495 - DNA, 340 bp, Zea mays
  unsure (1)..(340): unsure at all n locations
gnatgacctgcagtctgactttatgtggctgcaatctggcaaaaattgttctagtgcaggacaccgttatgctaggtaatctgccctcacattctctactctaggtctaggtgcatctgctgaaaacaacaggcattattagattagctactctccttttggttctccacctttctccctgttttcagcagcggcggctgcggcatctgcggcgtcactcaaacccatcttctgcagtgcatctgcaaagccgtcaacatctgtgggagttatcttatacggtgtgtggcttggaccagggaaagcctgagcctccacttcttgcttgtactctgatagc

SEQ ID NO: 306496 - DNA, 242 bp, Zea mays
gctacacaaaagaagaaagagcaacgccacacacgcacgcacacatacggatcgatcaatacaaccaaaaatcaacaacgaagaacgatcgacggcacgcgatctggacatacacgtgtacaggttttatttttttttccacgtatttcctcccctccctcctcttctccttggcgttctttacttgacgttgatgggcagcggcttgccgtcccactccttgaggcactcgagcatggggt

SEQ ID NO: 306497 - DNA, 435 bp, Zea mays
ttgcccttttttggttatttttttttttttttttaataaaataggggacgatcctatatttaaactttatagtgtaaaaattagatcccattgtcacccataagtgaaaccaatctggaaacagaacaacatcagtacctggctaccagtagtcaccacatgagcaagctccatcctggaaatggtggaaccgaacagggtccctgatgacgatcaccctgccttcgctcttggagacaagcttcgcgaacgcgtggcagtcgccacagatcctcaggttcttcatgatcctgataggcttcccatccaccgcatgcatcgtcccaaacactatcgccatcttctcgctgtgatacttcagcaggtcttctttctgctcggtcgggaggtcctgcagcacaaattctgtctggggaacataaccaagagacttga

SEQ ID NO: 306498 - DNA, 336 bp, Zea mays
ttctttttttttttttttttttaacacaaacagtgctttgattcttagaattacacaatataaaggtatagtcagcagtgtgctaacgagactcccaacaaatccacgcaaaataaacttggaaaagcatcggatcaatgaattcagctactggttaaacgctgtatcaaccaaggtcagtacgacgggaacacaaagagctatacaaatgcctgccctgaactacatttttagaccaactgtaaaaccatccacagctactcaacaggatactaatgcacgctacattcgaaattaggagttaaataagaagcctagtatcaataagtgcgctgg

SEQ ID NO: 306499 - DNA, 116 bp, Zea mays
acttcttatgccaaggggtctgtgctaaattaagacttgaacatctctatcctttgccgttatatttacaaatggcagacctcaagaatttcccatctgctgttcaaaaagaaaat

SEQ ID NO: 306500 - DNA, 397 bp, Zea mays
acattccttaaaagatacatatgacataatttgaatagtatgacataagattcaatcatatacttgagtaatacttattgcactatccagactccagagtcacataatttctcacatacacacaagtaacacacagatattgtcacacaccacagacaacaacctaaacatcactcttcactcaagaattgtagccatcttgatcatcatagtacttgaaccacatcatgatccctccatatttccctgagtcattgatcaatggaagcacctaagacttgatgtcatcagcgagtataaaaccactcccagctgcaacggggcctggaacttccgttgccacaactcaagagagcagccaagtcagttattttccatcattatttgattgcataag

SEQ ID NO: 306501 - DNA, 481 bp, Zea mays
aagcctccacgccttggttaaggacctttgtgctggttcccttgaacgccatgaacccatcgagatcatgatgatgtccggtgtgagccgcagcactagttatctggagggctgagaaatgcagttcatcaggggatgctgtttttgttggatgcactggcggatgtttcgtctccatgaattttaagcctcccaagttatcccatgaagaccctgcattgctcctcacttggccataaagtggttgactaaagaaaagatttgtccgctgccttgtatcataaaacattgtcgatgaattgaatgaaattgtgtctgcctgaggtttcctcctccgtgcattatgatgcatcagacgcctacgacagcttcgtttgttctgatcaaactccgctaaaccatgaaaacggctacactgttgacaaaaccgacgctctagaccagcaacaaccaccttggtagctttagaatggactacaca

SEQ ID NO: 306502 - DNA, 225 bp, Zea mays
tggtttgttccccgcagccagatggtggattttccggaggctcacatggattggacgatggccacatatgccctgtagcacacgacggtggcccacttggccttgtccatagtggtgatgtaatcaccatggatgcaagtcagagggtcatctacgttgaccatacccaccagcatcttcgagcaagactgaggaaatggaccccaccgtcatacaagtccacct

SEQ ID NO: 306503 - DNA, 347 bp, Zea mays
caagtcctatgatgggggggttatttagacggtgtgtttgtttttttaacgcacccgagaactatgatggagcaggagctcgtctggccaaggggaacacagatgccgtttttgacgcttcatctgagaccgtagttctgtaccctgaaaatggagggaacttgcactgctttacggcgctgaccccttgtgccgtgctggatgtgatgggccctccctacaaccgtgctcaaggaagggattgcgcgtattacagcgaatcgccctactcgtgtgctggagatgcacaatattcttggctcaaagaggttcacatcacatttgacatggaaggcattaagatggag

SEQ ID NO: 306504 - DNA, 149 bp, Zea mays
tccagccgccgccctttttttttttagctttcatttaatagggagtttcaattcatctaggattcaaacttttcactagctgctcatgcatatcatgagtttcaacacgatgcttataataggtttatttccacacggcacagggggga

SEQ ID NO: 306505 - DNA, 268 bp, Zea mays
ggaggctcctgcacggggtcatttatttcggcgactttttcctttttcccaccggctccaggggcacctgacacagccggccgaaggacgggcccgcgcttcaggtcagggtgctcaggcttctactggcccggagtttcctgaccggcagtgaccggcacactgtggcctaagaggtcacccgcgctgcgatgctgatgcgcatcaacaccctccccgaggggtactacagcatatcgttaggagatcctcgaagccaacacagaag

SEQ ID NO: 306506 - DNA, 462 bp, Zea mays
ttcgttttttttttttttttttttttttttttttttttttttttttttttttcggaacagagaacagaatccgaaagagttttttaccaaaaatgttttaagttccaattgcgttgcatgcccttgtttattcaccattttacaccaaggtccgagccccagccccgacccaagcaaaaactgggcataaataagcataaaccgtaacccaccccccaccacaacaggaaaaaaaatggcccaggggtaaaagtcatcccttggctacacagccttttttgttttttcgactcaacagaagagggaaacctagacagcataaaagtaagcctctaaaagagtcaaagggctccagctttttgtctcatggatttagaacatgacccagttacgaccaggcaactgtgggcggcccggtgttgacatttgaaacgtgcctttaatttgcgcgggactggccgg

SEQ ID NO: 306507 - DNA, 334 bp, Zea mays
aagccgacatatggaggctcagcctctcctacctcacgcccttgtcactgaagtgcgccgtggagcttggcatccctacggcgatctaccgccatggcggggctgcctcagccgctgagctggtcacggcgctgcctttcccctacactaagctgccgttccttccgccgcctgatgcggctcctcaccgcgaggggcgtattcaccgtcgacaagcagagctcggaagaggagcggtactccctcagcccccagacctaacctctggtggacagcatccctcacgaggaccacatgaaccacacccgtctggcgctcacctgcaccttggcgc

SEQ ID NO: 306508 - DNA, 304 bp, Zea mays
acgagggcggccagcggcggcttaataaagaaatgtgtgcgttattcaccgccgaagtggacggtttgaagcctgggagtactcgttgatgcggagacttgacgatgagcatcatggggacttagaccagtccacctgcgacggaggtggatctaagatagggggtatgagcgagcccaggcatgacatccagctactgttggatgggccaatcgcttgggacgatgcttacagctgttggcacaggtacacggagcatggtggtaaggacctccttgtacgcttcatggttctctatgacatt

SEQ ID NO: 306509 - DNA, 208 bp, Zea mays
ttttcggccccttcggggcgggttcttttgggaggggtccttcttattcccacggggtgggtgagcgcatcgagatggacgtatctgcaggcgtgtacctgtgtgtctgacgatgcctggcctggggcacggacgaccactccctccacaacgccttgatgacctacggagagggactggagtgccagaacatactacatcggcagac

SEQ ID NO: 306510 - DNA, 182 bp, Zea mays
cggaaaaaccactttacctgtgtccttaatgcagcctgggcctatcgatgtaaccatccaatgctggatcaaaagggataaatccactgaaacctactactgggatgtgggccttatcacagctgtgctcgacgaaagtggcacgatgctcctatgagcgaaactgacctgccgcccaacct

SEQ ID NO: 306511 - DNA, 274 bp, Zea mays
caaattgctgtccatgggacttgataattaaagccggtcagtttttttcttgctcgtttcataatcgatggcggtggagaagcaccaccacgaacacgtgcttcaagacaagatggacgatgcggacatcgacggccgtgaagacggcgagcacatccagggcactgatgccactatgacggatgtggtgtccacgggccataacgactactaccagaacaagaaggatgagatagatcacatgcacaagcagaacctgggcgagggcggcccc

SEQ ID NO: 306512 - DNA, 386 bp, Zea mays
cagagacatcagagaggggggtcataggggagtctgagctgtttttgcggaggaggaggaggagaatcagcagcgcatccggaggagggagagcgaacatgcgccgagtggcgctggtgctcgtgaccaacgtgtgcgctctggcggggccggctgccgcggacagtcactgacggacttataccgaacgggaacttggaggatggcccgcccaagtatgcgctagggaacggtactgtggtggaagccgcccacgccataccgcggagggagacgttcggcttcggggagtacatccagtcggggcacacgcagggggacatgctgatggtggtgccacacggcgcgcacgcagtgcggctgggcaacaaggcgttgatccggca

SEQ ID NO: 306513 - DNA, 479 bp, Zea mays
gccagtaacaggcgttagttactcctataatatattccttctgttatgttcctgagcccacatgtcggggctcagcatccttgtatgtgcctcccttgagctataaaagggaagacacacgacgttacaaggcaggttcactcagaccctcagactcacaagttcatacaagctctcaagttcacaaactcaatacaacacacagtggagtagggtattacgctccggcggcccgaaccactctaaatccttgtgtcctcgtgtgctcttccaccattaatgactgtaattgcagggacacgaagagttgtagcgcttttgccaacaagatccgctatatgcttgtagagtggaacctctttatcagcagcaccagctttgcaagctgcaattgacactccaagcatagtatttgctccaaactcagccttgtggcgcgccctgtcaagtgcatgatggcctggtcgatctgcgtctgc

SEQ ID NO: 306514 - DNA, 302 bp, Zea mays
gtcaggaccggtcgggggcttccataagagcccatatccttttttccccccggcgacccgaaagggggtatcgctctccttgcgggcacttctcagcgctctgccttctgtctgacgacggtgcaggggaggtcttgtaacaggagaagatctaagatgggtgggaaagtaggcgggtcacgtcccagcggaatatggatgagaccatgtctgtgtgatggaacctcacctggagaacacggaatgcagatgccgtgagcacaggaatccaaaccttcgaggagttcaggttttttgccatt

SEQ ID NO: 306515 - DNA, 212 bp, Zea mays
cccgttgggaagggggggttttataagggcggtgttgcgttttttccaggcgggctgagccaatggaccggcaccttggggtgcgaacgccctaacgtgggttaggggctggcggcgagcagaggcgccggttgctagcttggattctgtcttagaggcgtttagtcataattccggcacacggtagctttgcgccactggcttttcaacca

SEQ ID NO: 306516 - DNA, 272 bp, Zea mays
  unsure (1)..(272): unsure at all n locations
aaccgaaattatagcggggtttagtaaaagcgttttgtcggtttatgcccccgactacggngagcctcgcgagctgtcggaggagcataagaagcgcacgctctaccagcccgagctgcccccctgccttcagggcaccactgtcagggtggagtatggtgatgctgcaattgaaggtgccccgaaggtgctcatgtgatcaagcatgcgttcccttatacctatgcgcagactatggcttattttatcaggaagacagctgtttgccctga

SEQ ID NO: 306517 - DNA, 346 bp, Zea mays
ttccccagcaagggaaggggaaggattagacatcaacaggatcgagaacaacacaagccggcgggggaccttctgcaggcgccgcattgggctcctgaagaaggcgcatgagctcttcgacctctgcgacactgacgtggtcctcatggcgttcactagccggggccgcctctaccagtgtgccaacaacagcgtcaaggttactatcgagaggtacaagaaggcacacaccgtcggatattcctctgggccactcgtcctagagcacaatgcccagaacctgtaccatgaggaatcagcagaactggtcatccagatccagatgctgcaaaccactaacaggcac

SEQ ID NO: 306518 - DNA, 168 bp, Zea mays
ccaaggggggagcgctggagcttgctcctggcctgagagggaagatcaacctggtggaagtcaagtccgtcgtccgatgagccttagaaacctcatggctactattgagggaaggaggaagccaggaacgccaactattctgatatggttaataaatactatgatctt

SEQ ID NO: 306519 - DNA, 242 bp, Zea mays
ggtggcccctgaggggttcctttaagccactgccaactgttttcccccgacattgaaaaacttggcacctggtttaagatggctaaatctgtactgatagcctaggctgactgaggtgagcacaacagtgtatgcagcaagtatggagtttctgggtacgcgacagacgaccggtttcccacaggtcccctgcagccagaggagaatgagggtcaaccgcctgatgaagcccttgcagaata

SEQ ID NO: 306520 - DNA, 385 bp, Zea mays
ttcttttatcaaaaggagagcacgcgtcgcgttacctgtgcctgtcagtgtgtgcgaccttggccgcggtgaacccgtggagctcggcggcgtccgcgggcagcggcagccggcgcttcctccacgccgaggcgagcacccggccgaccgccgtcagcgggctgccctgcgggcggcggtacctgtaccggggcgtgccggccacgagcacggcgacggcgagcgccatggcgactgctgagacgccgtagccccagccccgccccacgttgtcctgcacgtacaccagcacggtgaccgcgaacagcgaccccaggctgacgcagaagtagaagcggttgaagaagaacaccatggcgcgctcctaccgcggatcgcgcccgtc

SEQ ID NO: 306521 - DNA, 493 bp, Zea mays
tcggacgcgtgggcggacgcgtgggcggacgcgtgggcggacgcgtgggcgcagaggcgcacagacaggcgccttcgtactcggctatctccgcgactcaaagcttcttccatttcctaccgccgacgatgcagctccaccccattccgtggacaccatgagggagtgcatgtggatccacattggccaagccggtatgcaggtcggaaacgcgcgctgggagctctactgcctcgagcatggcattcaggccgatggtcagatgcccggtgacaagaccattgggggtggtgatgatgctctcaacaccttctacagagagactggtgctgggaagcacgctccttgtgctggtgctggtgaccttgaaccaactgtcatcgatgaggtgaggactggcacctaccgacagctcttccaccctgagcagcttatcaggggcatggaggatgcaggcacaacttgtgccgtggtgactacaccatcggcaagg

SEQ ID NO: 306522 - DNA, 567 bp, Zea mays
  unsure (1)..(567): unsure at all n locations
tggttttgcagatctctgtcagtatcccctctgtttggatgaccatcaagctcaatgtgatgaaatcccagagtgttgctgatgtcaaggcgatgatcgaacagatggggggaattcctctggatgaacaaatcctgatgcatggatgccaaaagcttgaggacaacaagttgttgagtcagtgtggcttgagcaatggccacaccctgcatgttttggtccgccccaccgacaggctgcatatctccgtggatgttgatggtgaagaaactctgaatctggatgtcaaaagctggtatactgttgctgatgtcaagttgatgatcgacaccttggagggtttacctgcatgaacacagatactcatgcacactcaacctgttggcgctaacacagtactcaaagacattgaaacactgcagaatcaaggcatcaagaacaacgacattgtcgctctgtatcataaagtcaacttcttcgtcaagacatatgaggngaggaatctagtgttatcaatgaggacttgtgacactgcagaggaaatcatgaaggtgattgaagaaaagc

SEQ ID NO: 306523 - DNA, 294 bp, Zea mays
tcctgtcactccgaggtgcttcgacgtacacacggttgggcgcaaacgcttcgacacctaagccgaccccgccgacgtacactccaagccccaagccaccggctagcaagccttacacgcccaagccgacccgaggggcgtacacccatgtacgcaagcctgcgacacctaagccgaccccgggtacgtacactccaagccccaagacaccggtgtccaagccgtcgacgtccaagccgaccccaccggctaccaagcctcgcacgcccaagccgaacctgccaacgtacacct

SEQ ID NO: 306524 - DNA, 539 bp, Zea mays
tggtcttcacttcgtccccgtggaacactccacgccgctctagcactctctgcgctctcccatcctcctcgctagccgtactcttcaccgccgaagcttctggttcctcatcgccgccgctacgcgtgagatcgacccgccgccgtcggtctttttccctgactggtaatctagtgttcattctcttaattcaaatggtttcctcccacggagcaagatgaggaaatattcaaactgctcttagccgtgtagcacgacaagtttgttgcagagctggtctacgacaggtggacagctgggatttcttggcactttgtcaagtccacgagtagaagtgtggcggaagattgtcttcgttcaagatgatgcagaggccactgctccgtccggaggagtactccttgaaggagacctcacctcaccttggtggtgcagctgctggtgacatgctcaccaccacctatgacctggttgagcagatgcagtacctctatgtaagagttgtaaaagcacaggaaccttcaaacatggacatcact

SEQ ID NO: 306525 - DNA, 308 bp, Zea mays
  unsure (1)..(308): unsure at all n locations
gtccaatcctatcgcaccaaggagtctgtctcgtgctcctcgtagtcttcctacccacccttccacggngcgagctaatgtgggtggagaggaaggatttgccatgcgaaacagtaggttttacttcttagttgaagtcccatgggaaggcgccaccacgatgtgagatttgttcgagatggtcagcaaaagatactttagacggaggtgtattggctcgaggaagtttataagagggaatctgtggaacattatgatggtaggaagtttgagaattctgaaccttggtgaatcgtttgggatacgta

SEQ ID NO: 306526 - DNA, 285 bp, Zea mays
cagtcgctctagagctcgaggcgcccgcgggtggtaggaattaggcacgaggccagcctgggggccctgtatcaccaaatagaagatggacgtcaccattcagcatactagggtcaagcgtgccctgtgcgcgaactaccccagccgactgttcgaccagttctactgcgagggcctttttgagtacgacccgacgcccttcctgtctttcaccataagccactactaccgacggtacatattccgaactgtgctggacgatgccatctctgaggaccgatctga

SEQ ID NO: 306527 - DNA, 312 bp, Zea mays
tccatgcgtacgcccacgcgtacgcccacgcgttcgggcacgcgtacggtgatgaggtagcaataatcatggcaatggaaacaattcatctttcgatgaagagaatgaagaccttttagcggatttcattgatgaagatagtcagttgcctagtaggacaccaaaagcgaaaatggtaaaaggcaattctatacattggaaagatggagacatttcatcacagacaggctcatcactttctctattaaggatgatggacaaatacgccaggctgatgcaaaagctggaaattgtcaatgttgagctttttaa

SEQ ID NO: 306528 - DNA, 512 bp, Zea mays
  unsure (1)..(512): unsure at all n locations
ctcctanttccgcgactcaaagctttccccaattcccccccttctcccatttctcaccaccgccgccgctccccccgttcaacaacaccatgagggagtgcatctcgatccacatcggccaggctggtatccaggtcggaaacgcgtgctgggagctgtactgcctcgagcatggcattcaggctgatggccagatgcccggtgacaagaccattgggggaggtgatgatgctttcaacaccttcttcagtgagactggcgctgggaagcacgtcccccgtgctgtttttgttgaccttgagcccactgtcatcgatgaggtgaggactggcacctaccgccagctcttccatcctgagcagctcatcagtggcaaggaggatgcagccaacaacttcgctcgtggtcactacaccattggcaaggagattgttgacctgtgccttgaccgcatcaggaagcttgcagataattgcactggtcttcagggctttctcgtcttcaacgctgtt

SEQ ID NO: 306529 - DNA, 483 bp, Zea mays
cttacgcgtccgcccacgcgtccgcataaaaccagtgcaagcagaagcagcgcaatggcgagcagcaccatggccctctcctccacagccttcgccggcaaggcagtgaacgtgccgtcgtctctcttcggcgaggcccgcgtgacgatgcgcaagacggcggcgaaggcaaagccggcggcgagctccggcagcccgtggtacggccccgaccgcgtgctctacctgggcccgctgtccggcgcgcccccgagctacctgacggggcgagttcccgggcgactacggctgggacaccgcggggctgtcggcggacccggagacgttcgccaagaaccgggagctggagggtcatccactcccgctgggccatgctgggcgcgttgggctgcgtgttcccggagctgcttcgccgcacggcgtcaagttcggcgagcccgtgtggttcaggcccggtcgcaaatcttcacgagggtgggctgg

SEQ ID NO: 306530 - DNA, 386 bp, Zea mays
tctgacgcgtgggccaacgcgtgcgcaccactgggcgaggcaagctcctcaatgactgaggtcctaagccgaagacgaagaagaagcacgagggtaccacaaaagcgaaggctgacagcactgtgctataaggccaggccacctatgacaagatggtctctacggagcccaaggacaagcagaacaccccatgcggcctcaacacgcgtcataggattaatggaacattgaaacggagggcaatcaaggacctcatggcacggtgagcaataacgacgaacaagatatattacagtcagcaagtatacaccacaggaaccaacacaagagggctaaggtgcatcttggcggtcacaccctagaacggtaaacgttgcaatgataac

SEQ ID NO: 306531 - DNA, 449 bp, Zea mays
aaatctggaaaataatttagtgagtgagtgagagagaaagaaagcacttgcaagctcactcagatggagagaaggaacgctacaagagtttcaaatttgaagcatgaaaaattctacctactctacataaataagagcagaaaacaacagcgcagcgcataattgattaaggaaattaggcttctcttttcttggaccataccatgacaagagcaaatcccattaaggacatcaacacaaccgatatggctggaggcacacccactagtggatctgggaagaacttatttgctaaagcaagagcaagaaggctgctttgcattcctgtctcaaaagatattgtcctttgtagtgcctttacgtcgtctgacttgcgaaaccaagtaccagcaagatgataaccagctacaaaagatgaggtgtggaatgcaaaaaggagcagcactatg

SEQ ID NO: 306532 - DNA, 154 bp, Zea mays
ctcacgcgtccgcggacgcgtgggcggacgcgtgggttctttgatgaagccctctatgacacctgctacaggactgttaatctgaccaccggtagatcgggtgatctagagcacccgagctttgcggccatgagcggagtcacctgttggctaa

SEQ ID NO: 306533 - DNA, 302 bp, Zea mays
gggggagaaatgggaattagccaactgagggaacagaatgcagataggatacaatgtccaatcagccatccacactttaatccaaccaatttgcaaatcgtcctggcccaaaatccatgcaattcctgactcaatttatgactaatgttgccagggccttgccacttacatcctttgcaattataagaaggggggctcttaactgggttggctgctccaacagaggaataatttcttttatcgatgatattttctgatcagggacaagaatccgagcatttttgaactcaacaatagatttt

SEQ ID NO: 306534 - DNA, 390 bp, Zea mays
ccgctccgtaattccctggtccccccacgcctgttaatcatactgccaacgaactgcttgcgaagctggtgaagcatggcaggagtgttcttgagtcaacggcaaaagaacgaagctggaatgggttttgattcgcatgaaggacatgtttttaacattgtctagacgggatgctcgactctctgcccatcgtgtgtacaggaacggaggacataaaagctataactaaaaccgctcgctcagctcttgtgaagttgctacctacactggctgtaattatgttggaggaggatgttgataacattgagaacactatgtcccttgctattgttgacactacaagacatgggactacagataggagtatccaattgtcctatccactagcct

SEQ ID NO: 306535 - DNA, 265 bp, Zea mays
tccctggttatacccatctgcaaagggcgggcgtgttctgttgacacagttggggttatcacaaggacacagagctgcgcccaagccgcaggtctggcgccggcatcatcgagtgtcttttgaataagcgtgtagatcagcccgtgaatgtggaaacgaggatgagatgatgttcttgtaacgctgctgagattaagcatggacgaatgcactcatataatcatatggggcaaaagagacaaaggatttcaaacgagggcttgat

SEQ ID NO: 306536 - DNA, 278 bp, Zea mays
gtcgttgacgcgtgggcggacacgtgggcgggggcgtgtgccgggcacacccggggagctcagcttagctccactccagctccaatcacagtcgtgaccagagcgcgagagctagctagagggccgtgataatgccgatcaataggatcgccctggggagccaccaggaggtgtaccacccgggcgccctcaaggcggcgttcgctgagctcatctccaccctcatcttcgtcttcgccggccagggcttcggcatggccttcagcaagctgaccggc

SEQ ID NO: 306537 - DNA, 319 bp, Zea mays
  unsure (1)..(319): unsure at all n locations
tcgtacatacgtgcaaatnctaacactatatgggggatatatcttaaagcaaaagtcgtggggatctcgcccatcaacagatagttgagcgtgacatattgcgggcaatgacctaagatagtgaagaacaagccagacttaaacgtccgagagaagatattgagcttgattgacacatgccaagcggcttttggaggtccgccccgaaaatatcgacaataacaggcggtttaggccctactcaagggcgacggcgttgacctccccccctccggggaaaaggcactcccggtgattaccccaccttaaactctaccat

SEQ ID NO: 306538 - DNA, 375 bp, Zea mays
tccctgacgatccaattgtcacttgctctctgtggggcatgttaattaaggccgggcattcctcttctagctcgtctcattatccatggcggaggagaagcaccaccaccaccacctgttccaccacaagaaggacgaggagcatctcgccgccggcgggtacggcgagtccgccgagtacacggaggccacggtgacggaggtggtgtccacgggcgagaacgagtacgacgagtacaagaaggaggagaaggagcacaagcacaagcagcacctcggcgaggccggcgccatcgccggcggcgcctttgcactctacgagaagcacgaggcgaagaaggacccggagcacgcgcaccgacacaagatcgagga

SEQ ID NO: 306539 - DNA, 420 bp, Zea mays
tctttgacgcgttcggccacgggtgccaccacggggcctgtatcaggaaaaaccgagacagctcaaatagcaatgcaatatatggctgccctcggggcagctaccggaacggcgtctgaggaggttgagaccaatgctattctggaagcattgaggaatgcaaaaacatcactaaaccataactcaggcctatttggcaagctgattgaaatacacttctgagatatctggtgaaatgtgaggtgctaaaacaacacaccttgctgcttgagaggaagagggtggttcaaagggcacaagaagagagatcttaccacattctctatgaactgagctgtggagctacatcccattccaacaaaaaaaatggtttggaaaagcgccaatgactacaattacttgtagcagagggataagatg

SEQ ID NO: 306540 - DNA, 339 bp, Zea mays
tcgtatggaacagctctgtccactatgtatgggaggtgtgtaaaccttgaagatcgcatggtcgccttcagaaggatgcctgatagggatgttatttcatggaactcaattatttctgttttttcacaacatgggcgtggaagtgatgcacttgacatgtttgaggagatgaagctagagggaacggcaccagatcatataacattcattaatttgctatctgctagtagccacatgggcttagttgacagaggctggttttattttagggcaatgaccaaagactataatttaattcctacacttgatcactatgcttgcatggttgatattcttagc

SEQ ID NO: 306541 - DNA, 422 bp, Zea mays
tcgtgatctagccgggtcgtcgagggctgtgctggggtttctccagcattttgtgggtttgagtttgctgtctgatgggtttgtcggtgccggtgttgtagagattgtggcggcgacgtccatcgcgaggccacaggcggacgtcacttactgcatccatgcgcttgcccgacgactcgccaaaaccaggaactggatcgttgccctaaagacacttgtagtgatccataggcttcttcgtgaaggtgaccctgcattccgcgaagagtttctaacatttacacagagagtgcggattttgcagctgtcaaacttcaaggatgattccagcccagttgcttgagattatgcttcatgggttcgcacatacggtttatttttggaagaaaaactagaatgcttcaggcttttgaagtatgaca

SEQ ID NO: 306542 - DNA, 348 bp, Zea mays
  unsure (1)..(348): unsure at all n locations
acgcgtccggtccttcaagggcannccnggaccngangacaaggcttttttagaagnncacggcgggggcgcggagcagcagacggcagctgaagaaatctcctcgatggtcctcgtcaaaatgcgggagattgctgaagcctatcttggcaccacagtcaaggatgctgttgtcactgttcctgcctgctctaccgacttgcagagacaggccacatggaatgcaggagtgcttgcaaatcttaatgttatacgcatcatccctgagcccactgctgctgccttggcttatggtcttaataggaaggctgcccagattatgggtgaatctgacgttcttgtgtttga

SEQ ID NO: 306543 - DNA, 173 bp, Zea mays
tttcatagtcacggccagctagccgctccccgggggggtccattggaagtagtctgccttcactccaacaccagctgcaagggtcgcgagctagccatggggagggggccggaggagctgaagcataccgagaccatgatcaaccgccaggccaccttcgacaagcctcatag

SEQ ID NO: 306544 - DNA, 456 bp, Zea mays
ttgtggattcattgtcagtcaccgagaaattgagggtaacctagaaaaaatcggggccatcatgagaatggaagcgccacgatcacagaaaaaggtacataggcttactggatgcatggcagccctgagcaggttgatatcaaggctaggggagaaatgcatgccattctataaattgctcaaaaaggtggacaagtttcagtggaccacagaggcacatgaagctctagaggcactgaaaaagttcctgactacaccagtactcaagccaccacgccgaatcagccagcagaagatctgttgttatacatcttctgcacaactcacgtggtgagcaccgcgttagtagtcgagcgggtggaggaaggacatacatacccggtgcagcatctggtctacttcatcagcgaagttctcgggcccttaaaaaatgaagtatccccaagtccagaaact

SEQ ID NO: 306545 - DNA, 454 bp, Zea mays
aatcaccctccaatccttcaggagtgacggggggggctgtctaactcttggcaggcttggcatccctcagagcattggatacgccaatctagccaagctggaccctcagtacggtctttacacgagcgacgtgccaccgctgatctacgctgtgatggggacatcgagggagatcgccatcgggccagtcgccgccgactcgctgatgctggcctggatgatccaaaaggtcgactacccggccgccgacccggcgacctacaggtcgctcgtcttcacggggactttcctcgccgggggcttccaagtgtacttcagcctcttgaggctgaggtttcttgtggatttcctgtcgcacgctgccatactggggatcatgggcggggcggtcatcgagaacgggatgcagcagctcaaggggcttgctgggctagaccattttaccaacagcacc

SEQ ID NO: 306546 - DNA, 426 bp, Zea mays
ccccggcaggaccggaccggaaaaccttggacttcccacgcgcccattcttacccgccccacgggcgggccggaacgggagggtttaccacgagagggggcggtccccgaagggaggcatgacgcggaaccaggtcacactgggggcatcgaggtgcacctccccctactacgtctgcccatgctacctgtcccagatgcttacctccctgtcggggctcagatgggcgagaccgccctccaggtgggcacaccagctggggtcggggctgagcggtctgggcgacgacgccgaggggctcgaatgggccaccattttcttccacctcggaagccagctcgccagcccctgactcgcaacccgcaacggggacgccgagtaaggcctaatcacgcacggcatcacacccggcgcgtactactggct

SEQ ID NO: 306547 - DNA, 496 bp, Zea mays
tcttctttgaccgccgcctcccttcccctggggtgctgttcttacccaccggagggcccacaagagcggcggcggcggcggcaaggtcgtaccccacatcggcgagcggcggcggcaccgccggaggcaaaggcaagatgttcgggcgcgcgccgaagaagagcgacaacaccaagtactacgagatcctcggggtgcccaagtcggcgtcccaggacgatctcaagaaggcctaccgcaaggctgctatcaagaaccaccccgacaagggcggtgaccccgagaagttcaaggagctcgcacaagcctatgaggttttgagtgatccagagaaacgtgagatttatgatcagtatggtgaagatgcccttaaggaaggaatgggcggtggaggatcccatgttgatccatttgacatcttctcatcattttttggaccctcttttggaggaggtggtggaagcagcatgggaagaaggcaaaggaggggagaaga

SEQ ID NO: 306548 - DNA, 460 bp, Zea mays
aactacgctgcgatggctctcggcttcattgggtggattatgtctgaacagggggggagaatccagcccctactgtcggaatcatacaatccacatgtccgttacggtgcacctctagctgtcgggatctcctgcgccggaacaggattaagtgaagccatctccttactggagcctctgacatcagacgtcgtcgactatgtacggcagggcgcgctcatcgccatggcaatggtgatgatccagaccaacgagtcctacgatccacgcgttggagcattcaggcgccagctggaaaagataatcctcgacaagcacgaggatgccatgagcaagatgggcgccatactggcttcaggcatcctcgacgccggtggcaggaatgtcaccatcaagctcaagtcgaggtcaaagcacgacaggctcaccgcttgtgtcgggctagccgtcttcacccagt

SEQ ID NO: 306549 - DNA, 470 bp, Zea mays
tcgttccatcctgcctcggcagccgtgcgcaccccacccacaccacacactctccgtctccgactacgaccatggtccatccatggcgatcaactcaaggctgacaaatccattcatccattattatattattatatactgatgatgactcgtgcaactgcaggcggtgtccgacgaggcgcgcgccatgtacaacggcgggcgggcgggcctcaccttctggtccccgaacgtgaacatcttccgggacccgcggtggggccgcggccaggagacgcccggcgaggaccccgccgtctcggcgcgctacgccgccgcctacgtgcgcggcctccagcagccctacgccgtcccgaacggcggccaccgcaaccgcctcaagctcgccgcctgctgcaagcacttcacggcgtacgacctggacatgtggggcggcacggacccgttccacttcacgccgtggtggcggc

SEQ ID NO: 306550 - DNA, 450 bp, Zea mays
tcgtccacgcggacgctcactgaactatacagagggcttggttgctggcatcgaatgggtaggaccgcaacatagcactaactgggaggagagagccgatataggtgtgccatggaagcaggccaaatcttgctcgcatgtccccagaacatattagctagagaaccaaacatacactgaggcctgtgatcctgagtcatcacggaggaacagtgtcagagaaggaaccaagcaggctttttactctttttccccattttttaggaactgatactctcaactgtggtgctatctgatttgcagtccataaattcactataaaccgcgtcaatcaaagtggagcactctttgatgcaacatacttgaaatggatgaacggacaacatctaagagcatctccgcatgatgaactcatcaaagctcttgaagatcggcggacggacacaggca

SEQ ID NO: 306551 - DNA, 474 bp, Zea mays
tcggtctgtacatgtcactgggatcaccacttctacctggatggactggaaatggtggagacccgtgcggtgagagctggcagggtgttgtgtgtaccggctcttccataactggaataaccatgaatgctgcaaacttgggaggacagttgggaagtttaggaaacttcactgccatcaccagcttagagcttaacaacaataatattggtggaaccataccggaggacctacctgttacattgcagagtcttttcctctctgctaatcaacttactggaagcatcccaagttcactgtcaaaactcgaaaacttaacagccatgtcagtcaacggcaaccatctaaatggagacctaccagacacttttgattcactcaatagacttgtaaatttggatatttcttcgaacaacttgagtggtgtgttaccatcttcaatgaaaaacctggcatctttgacttcattgcaca

SEQ ID NO: 306552 - DNA, 435 bp, Zea mays
ttcttgatggtgacattgtaattacaaatggcggaactaaaaagacctttaagtttgatagagtcttcacgccaaaggatgatcaagatattgtgtatgccgatgcgtctccactagtcacatctgtcttagatggctacaatgtatgcatctttgcttacggacagacgggaacaggaaagacttttaccatggaagggactgagagtataggggtgttaactacagaactctggaagaactgttcaatattgcagaggagaggaaagaaagcgtcacatatgacttatctgttagcgttcttgaggtttacaatgaacaaatcagagaccttcttgccacgtctccatctaaaaagctggagatcaagccaaacagtgaaggacaaaatcatgtccctgggttagtggaggccaaaattgaagacataaatga

SEQ ID NO: 306553 - DNA, 426 bp, Zea mays
tcgttcgcgagcggccggccttttttttttttttttttgtaaagaagaaagaatacactgtacttaccatacgtattaaacaggagccccttctgcgagtttggtcaccgaattcgaagcaaagaaaaagcatgcaggagagagaagtgtataaaaagaaccaaagcaacgtttcttgtgatgactgactgattaaaaagcaatgaattggctctacgcccaatcactagtactggctggcgcgagaggagagcgcggcgtcccacggcgtcatgtccatggggtagctcccgagcaccctgaggaaggaggtgaactcctggatctccgcgagcgcgttctgcgcgcggacgtcggccatggacgcctgggaagtcgatgtagaacatgtactcgaagtgcttggcggtgccgacgttggcgtcc

SEQ ID NO: 306554 - DNA, 352 bp, Zea mays
catccaatgcctgagtgcagggaacatttcatacaccatataacccccatttgattgtacaaagcacgagcagacttgtggattctatctaagatacatatatcaggatccttaaacaatggcagattgagcagcagcaaggtgctagcatctccaggcggacacggagagcagctccccgcgttgccaatgcaggacgagcgagccggcgcgcttctcgacgcggaagccccgcacgggcaccttcttgagcaacgcctccgcctgcgcctccgccaagctgcttgcctgcaccggcacgaagccggccgacacgagcattgcccgccagggcggcgtcttgtcgcccgcc

SEQ ID NO: 306555 - DNA, 338 bp, Zea mays
ggcggggtggctgcggagcttcgtcgacagcctgccggacctggcgctgttccacgccaactccaacgacttcggcggcgccgtgcccgcgctgggcggcctgcagtacttctacgagctggacctgagcaacaacaagctcgcgcccgccgcgttcccggcggacgtgctgggcctcaccaacgccaccttcgtcgacatccgcttcaacagcttctacggcgagctccccgccggcgtcttctgcaagctcccgcgggtgcaggccatcttcgtcaacaacaaccgcttctccggcgccctccccgacaacatcgggcagtcgccggtgaactacc

SEQ ID NO: 306556 - DNA, 357 bp, Zea mays
ttgatgaaaatgtggacatccttataggttgaggacttatggccactgcaataaagctaacgccttaatggatgaaaattgcaaagagaacggtctgctatttccatgtcagttaatccattttatatcaactagactcattaagggcttgtttgttttactgttgatccatgtggattgagtgttattgagtcggtttaaacctatagcaaatcaaaattcatcacaatccattccaatatactccaatccacatggaattgaaataaccgaacaaggtctaggagtagaccttgttcgtttagacatgattccatatggattggagtggattgagtgggtttaggatgtattttg

SEQ ID NO: 306557 - DNA, 201 bp, Zea mays
aaatgcggagacctgtttgagtacagtgtagtcgatgaattcaatgattgtgctgtttcacgcaagaaatgtgttccaaaaaaatccgacgtcggcgagttccccgtccccgatccatcttcgctggttaagagcttcaacatggcagattttaatggcaaatggtacatttcaagtggcttaaacccgacgtttgacaca

SEQ ID NO: 306558 - DNA, 383 bp, Zea mays
gccacagggggcacagtgtatataagccaagccagcaacacctcagcagcagcggcagcaactgggtggcaatggcgagcaagtagcagcaaccaagatcccagacaccccagtccactggactgggtgacaacaactggagctggatgcacatccatgtcatccaaagggagaaaaaaaaaagggataaagcaaagaagaagaagaaaaaaatatgtactctatactagccagaggcaccaccagctgaaaagctacgagctgggcgcctttctactaatctctctctctctctctaagctgccactatcccaatttacttacacttagtgtcaaatgaaataatgaaaaaaaaaaaggcaaagcaaagcaactaccaactg

SEQ ID NO: 306559 - DNA, 220 bp, Zea mays
gagagctagtattggatgacggaacggaagtaggtgtggggaacccacttggccggtatgacctggttggccaccagcgtgttgccggactcgttggtgatgcgcatggagaagggcgcggcgaggctgtggccggagtccagccaccagatggacccccacgactcgcgcataggcgtccaccacccggagttggcctccatgaggtccacctgcacca

SEQ ID NO: 306560 - DNA, 119 bp, Zea mays
atatgggatatggaaaccaacggtttgaaaccatcaaaattgacctccctgcatctttcacaagctgcggataggtcaacactccatttggaagccgccttgttaatttcattaccttc

SEQ ID NO: 306561 - DNA, 365 bp, Zea mays
ctcgctgaattcttaaaaaacttccaatactcactagcttaatgtacacacattccattttacatgtatttgggccagtcctgtgaagcttttcttttatgtgttgtagtctttaatgatggttttccttcctaatctagaaccctatcagaaaaccatgggctctgatggaataatgttctcttcattgctgttgttttaatcaggcaaggatcttgatgcagtccttaaagctacaccaattcttccagaaaaagaaggaaggatcataattgttcaaatatttcagggcctggtttatctaaacaagaggggccaaaagatcattcactatgatctaaagccgggcaatgttctctttgatg

SEQ ID NO: 306562 - DNA, 381 bp, Zea mays
gtgcaaccattcttatcacccagtcgtcccttccaatacccggtgcggtgatgatgatggctcggggaagaggtggtgcgatcggcggcggcggcgtcatcgcgttggtgctcctggtcggcctcttcgtggcgacgagtgccccgccggtcgccgaggcggcggcgtcgtacatggtcggcgactacggcgggtggaagttcaacgtcgacaggtgggccaaggggaggaccttccgcgccggcgacgtgctcgtgttcagctacaaccgtgcggtgcacgacgtggcggtggtgaacgcggcggcgtaccggagctgcgcggtgcccaacaagggcgcgagggtgctgcggagcgggcgcgacaaggtgaggctcggca

SEQ ID NO: 306563 - DNA, 295 bp, Zea mays
tcgccgggagatcaattttggaggccattttcttactaagacaacttatggagagatttagagaacaaaagaaggacctgcatatggtctttatagacttggagaaggcttatgacaaagtacctaggagtgtaatgtggcgggtctttggaaaacacaatgttagcacatagtacattaatcttattaaagatatgtacagtaatgttgtgacaagtgttcgaacaagtgatggggacaccgttgacttttcaattaacataggactacatcaagggtcggttttgagccctta

SEQ ID NO: 306564 - DNA, 393 bp, Zea mays
gatgatatactaactcattcttaaaccgaacaccccataaattgctcctcttttgctatatatgatcaagagcatgtcaactacataggtaccatgactgtttttcctacaatataagctgtttcctcaaaaatccaaatagaaataaacacactgcaggttagtagaggcgcttccggcaatcaggagcaccacagtggcaggccagcttcacaatttttccatcaggcccaacaacactgtccaatcgataaccgtagtcataggatagctcctgaagaggaagtatggtgtcagcagcgaaaagcatcactttcgccagtttaacatcattgtgtgagctcaagacgcactggacgaaaaggttaggttggcagctgtgatttataaatc

SEQ ID NO: 306565 - DNA, 390 bp, Zea mays
agttcatgacatactttatttcataacataagaaccctcagtccaccaagcttgcgtatagctctctcagcgacacacctcttgtacctctggaacttgagttgggtgataccctggtgcttgggcttgccatagacaatacacttgggcaaaggcctcttcctacaatccatcatatttttgtcaccccaccatcagcttgaagaacttggacatgatatcaatcgaggcattcccactccggtttatatctgcctgtcgaaaatacgacctagatatgtgatgatgccccatttgcctttgcaccgttaccagactaaaaaatattgtttacatcagatgagaaaaagacccacacaggaagcctatgccacaagcccacaacaacgc

SEQ ID NO: 306566 - DNA, 416 bp, Zea mays
cgctttagctcgacaaggacgaccgacgacgcacgcggagatccggcgtactgcaaattttgaaaactgaactgtaagatggcatcagcagagctttcccgtgaggaaaatgtgtgcatggcgaagatagatgaggaaacgttgaggaacataccgatgttcagggcacggccattcaacaaaaaaattgctgaagccccttcgttccctccacttccaaggaaacccccacagatttctgaattcagtgaatttcatcttaaaacaatggagagagcaagtcgatatgcggacacctgttcggaagtatcttgtgcagatactattcggagtcgaaataagccactgaaatcgacacaacgaaagccaccgcaacttcatacagcaaatagagctaggccaccaagtgtgaaaag

SEQ ID NO: 306567 - DNA, 286 bp, Zea mays
cctccagcgaagcggaacgcgaacaaccggatctgcatcgccgaggccggtgccatccccttgctactgagcctcctgtcttcgtctgacctgcagacgcaggagcacgccgtgacggcgcttctgaacctctccatacacgaggacaacaaggcgagcatcatactgtccggcgctgtcccgggcatagttcatgtcctcaagaacggaagcatggaggcacgggagaacgctgcggccaccactcttcagcctatcggaggtggacgaatacacggtcacgatt

SEQ ID NO: 306568 - DNA, 291 bp, Zea mays
gatgcaaatattaggcgatagatataaaagcatattacaccgtatcggaggaacgatgtcagcagggaactacacccgtgagctctgaactgtcaagctgaaatggttatagcaccgccacaaatgaatcagagttttcgttaggaaacccagctctcatcctggatccaatgtttgtaccctacgttttctgctactttaatgccttcaaatgtcaagttgatctatgttgatcatgctagcagctttctggatcagttccttcctatattcaacccgggtgcccataag

SEQ ID NO: 306569 - DNA, 442 bp, Zea mays
  unsure (1)..(442): unsure at all n locations
agggcacgccgttctatctcgccgctcgccggctcccgcagcggtttccgccgcctcggtctccgcggcatgaagcagcgcctcctcgtcgtggccaaccgcctgcctgtgtccgccaaccgcanannanaggaccactggtcgcttgagatcagcgccggcggcctcgtgagcgccctacttggcgtgaaggacgtcgacgcgaaatggattggctgggcgggtgtcaacgtaccagatgagattggccagcgagccctcaccaaagctcttgcggagaagaggtgcataccggtgttcctggacgaggagattgtgcaccagtactacaatgggtactgcaacaacatcctgtggccgctgttccactatctaggactgccacaggaggacaggctggcaacaacgaggaactttgagtcgcagttcgacgcgtataagc

SEQ ID NO: 306570 - DNA, 345 bp, Zea mays
aaagaaaccacatagttcacccttgagtacatcagcggtgtttttttcatgcccttgaaaaacagtgcatgttatcctatgatgatcccgaaggaagctaccatacaacaagatactacacattaaaactgtacatataccccagaaattttatatggacactgcttcaccttttatctgatatttaatcaaggtcatgtctcaagcccatattgcaagtgatgacatagagagcgcaccgaggaacaatgcgatgtatgccatcacttgctgtcgcagggtccctggcatctttccacccaagaaatctacagcaatgagatccactagtgacatgtatatgag

SEQ ID NO: 306571 - DNA, 474 bp, Zea mays
tcttttttttttttttttttttatagtaaagttcatgttttttgcaaaatgcagtccacgttcaacaaaatgtagttcaatgcagaagcatgtacagctgatctagttctagctgtaacgtatttcagtttaaagcagtttaaagcatgaacaaaatgcagttatccaatgatctagttctgaaataggtaactggctgttggccaatggaatggagatttccaatgttacagtagagtatctcatcaaaaggaagcgattctggatttctctgcagtccttgttgtaatttcagctaagccatctcgtttctcaaccaaatcagtgcagactcagcatcatcatcgtaggcactcaagaaaatttgcctattgtcaaggtctttgaaggcattgtaggcttttgctttttcctcctttgtaacttccattgtaccaagaatggatatgcacttcttgattgagaagtctgcag

SEQ ID NO: 306572 - DNA, 469 bp, Zea mays
caaaccttttcgctcgcagctgccaccacctcgtcgtctcgcctccccctcggcctccgcacgcgcgcgcgggatctcgccctcgcccgcctcgccgctcgcgcgcgcgcaccgaggaagggcgcacccacccgcaggcttcctggcgggccgatacggcggcgatggcgagccgggtcaaggaggacgagaggcacgagaagatccttcgcggcctgctcaagctgcccgccaacaagcgctgcatcaactgtaacaatttgggaccacaatatgcctgcacaaatttctggaccttcgtttgtaccaattgcagtggagcacatcgggagttcacgcatcgagtaaaatcggtttccatggccaaatttactgcacaagaagttactgcccttcaagaaggggggaatgagcgtgctagagaagtatttttcaaggagtgggatcctcaacgaaatggataccctga

SEQ ID NO: 306573 - DNA, 330 bp, Zea mays
cttcgtcactcgtctcaaggagaacagatgggatcccaagcggcttatcggctcgggtggcatgccgtcatcacattccgccacggttacagcactagcagtagcaattggattccaggatggctttagctgctccctctttgcaacagcaactatatttgcaagcgtggtaggctatcagttctccattccaacccatgttccttctgaagagcacaagaggttttacttcttcaatcttgattgaaaaaaaaactggtcatttatattgttgtcgcttggatgcaattttcagccttgttggacgttattctgttgcgtgtgggcata

SEQ ID NO: 306574 - DNA, 452 bp, Zea mays
ctcgaatgtttcgttcgcggactgcggatgctacctgatgggacgacagcgctacagcgttccagtgagagtccggcatttgacggtcgtcttctgtaaggatgcgagccaagacatgttccaggtgatctcctgtggcgagtccctgcacacgttgatagctctgggtggttccaaggatgtggatctgaagatccctgacgacatcgataagaggtacacaaggctacgagctttagatctgagtaactttggtgtgactgctctgcctagatcgatagggaagctgaagcatctccggtgcctccagcttcaaggcaccaggatcagatgcttacccgagtcgatctgtgagctgtacaatcttcagacgctggggctcaggaactgctatgagctggaagagttgccacacgatctgaagagcctttgcaagctaaggcacatcgatc

SEQ ID NO: 306575 - DNA, 364 bp, Zea mays
  unsure (1)..(364): unsure at all n locations
aaagacttgccttgggggcttatatatatgaagaacaacagtaaccacttggggtttttttttggtttgtaataatacacatgcatgcatggtcttcatgcatgggaaaaccttatataacgatagaataatgcatggtgacaaccttcatcatgggaaaacctcgatgatagaatggaaacctaacgtgggcgtgatcttgtagtcactgaacccagctctcgaaaatatttctctccattcgtgctcctcccgctcggacccatcgtaccgcatcatgtacatatcaaacagcacctgcgtctccttcacaagcttgtccnggtgatccatagccgaccaccacgtttataatgatcacttt

SEQ ID NO: 306576 - DNA, 242 bp, Zea mays
gaagtgatcgacaagtcgccgccagctgcggccaccggtactgatcgtatcatcaatagcacggcggcgacggcggtgcagttcgtcgccggtgacatgtttgagtctattccacctgcagacgctgttcttttgaggcatgttttggactgctgggatgacgaacactgtgtgaagatactgggacagtgcaagcgagcaattcccggcagagaagctggaggcaaagtgatcattataaa

SEQ ID NO: 306577 - DNA, 369 bp, Zea mays
gataatgaaatcgattggactgattcacactttcctaaaggggcatctcttatgtacattccatcacaacattattaagagtaacatggctatatattaagacatccataccttacatttccctttatttttcagtttggatgtcggatgattctttgcagaacaacggtccttgcacgacggatatcccggctacaccggtctgcttgctctcctagatcttcgacactcttcatgaagttctccagcttcttcttgatctcctccaccccaaatttcaccgcctcctcatcccgctctgcaaacttatcgcagtctaccattgaggctgatctccagctcaacccggttgatgaggactctgatact

SEQ ID NO: 306578 - DNA, 294 bp, Zea mays
ccctcgcgtacgcgcacgcgtgcgctcatttcgggggatatgtttaactagcgcaagctaacgtccaaccatggttgaagagaagtcccagatcaacattgtggatattggccaccttgactctggcaagtcgaccaccacaggacacctgatctacaagcttggaggcattgacaagcgtgtgatcgacaggtttgagaaggaggctgctgaaatgaacaagcggtccttcaagtacgcgtgggcgctctacaagctcaaggctgagcgtgagagaaggtatcaccattgata

SEQ ID NO: 306579 - DNA, 181 bp, Zea mays
cccactcgtccgcggacgcgtgggctcacgctcaggggcttatgattgccaaggaggctgcacacaaccactgcgcccggggccactacaccattggtaaggggattggtggcccgtgccttgatcgcatcatgaagcttgccgacaactacactggaatacagggcttccccgtcttcaa

SEQ ID NO: 306580 - DNA, 492 bp, Zea mays
gaggttcatcgttctgctctggccgccgcgcgccggcgcagatacgtttcatggtaccctcttgcatcgcactcccacatggcggctgcggctcaagctaggtcgtccttcctcgtcctgctcgtcgccacgtggtcgctgtcgccgcggcttgccggggcctccacgtccacggaagcagcagctgccggccgtggcgttacgctacgcctcgacgcgagccaggtggtcgtggacaatggcgcggtgcaggtggcgctgtcggcgccggagggccggatcaccggcgtcagctacagcggcgacggcgagaccaccaacctgctggggtacgacgccggcgagggagactcccgagggtattgggattcggtatggaactatcccggctctggtctcccaggacagtacaatacgttggatagcacagagttcaacgtagtgtcctcaagtgaagatcaagtggagctttctttaggagcacatacaacc

SEQ ID NO: 306581 - DNA, 426 bp, Zea mays
ccctctcgtccgcccacgcgtccgcccacgcgtgcgcccacgcgtccgcccacgcgtccgcccacgcgtccggaaggagttcatggaagctcttgctgccggcgctgatgtgtccatgattggccagttcggcgtcggtttctactctgcctacctcgtcgccgatagagttgtcgtgaccaccaagcacaacgatgacgagcagtacgtgtgggagtcccaagcgggcgggtcgttcactgttactcgtgacacgtcaggggagcagcttggcaggggcactaagatcacactgttccttaaggacgatcagctggagtaccttgaggagcgtcgcctcaaggatctggtcaagaagcactctgaggtcatcagctaccccatctccctgtggactgaacagacaacagataaggaaatttctga

SEQ ID NO: 306582 - DNA, 500 bp, Zea mays
  unsure (1)..(500): unsure at all n locations
tttntttttttttttttttttgcgttaagcaactgtgagcacagcattcgaaactattcctgtcattcgtaaacttgcatatgtatattattctgattacatgaatacatgatacataacgtatacagtagagattagagaacagaatgtggacgcaaacaaatccatttcagttcaaggctcctgcatcgacttggaagtgcagaaacgcacggcgtctgcgaccgtgaggaagatatgaccatttccgatgtgctcggtgagtttggacgactggagcttttcaatcacggcagagccagggtttgataagagaagctgaatgcctcgcttttggagattcttgtacaggtcttcaagggcatggataccactcgtatcgatatctataacaggtgacatctctactaccaagaaactgattctaggcagcccctctgcgctgactctatcttcttcgtccgtcaaccacctaaggattctcgcatgcggatactgct

SEQ ID NO: 306583 - DNA, 258 bp, Zea mays
ccctcgcgtccggctgccaactccgcaagggacgggagcacagctactgaccgaggtgtcccaactacattcggcgaacggcgatacacccacactacgacaccatgagggagcgcataacgatccacataggacaggccaggatccaggccggaaacgcgtgctgggagctgcactggcttgagcatgagattcaggctgaacagcagatacccggtgacacgagaattgggtgaggaatcttgaccagctcccaag

SEQ ID NO: 306584 - DNA, 456 bp, Zea mays
cccacgcgtccgctgtctcgtctcctcgtcgtggccacctcttcctctgctcccccttccaggggtcgttcttggagccccagttcctcgagctgcgtccgccggtggtcgcgtaggtggcggatgcccgcaatggggaggagcagccgcgcctgctcccttcttggttcaactcacctgctcctcctgctgctgctctcggtcggctccgccgtcgcccagaatggctctacctggaagaccctgagcggcaaggctccagcagtcgttgctaagggcgggttctccggactatttcccgattccagtgactatgcttatcagtttgttggtatatctagttcccctgacaccaccgtgtggtgtgatgttcggctgacgaaggatggtgctggtatctgcctaccgagcataaacatggataactgcacaataatagccagtgttttcccacaa

SEQ ID NO: 306585 - DNA, 469 bp, Zea mays
cggacgcgtgggcggacgcgtgggctgaaccatctgaccgtcactgctactgctagatcgaacagctttgttcagtagatgtgcatttagtcgtcgtccacttcatgaaaaggcagtggaaccgtcttcaccgcacggaacttgccagcgttgttcagatgctcattctccagcctatagaagttccaatgccctcgccggatcacctcgagggccgctaggaagaaggaagtgaccctagaatccaagctcccaaaatttggatggatgatggtctgcagccaagcgagcctcagcacaaggttcagtcccattgacaggtagtatatggatttcctcctgaggatgaggtcgttcctgagccaggggttcttggagttgggctggagcaggccccagtccttgacgaagtcccagtacagctggtacaccgtcgcgccgctggacacggcgacgaggagcgacagcg

SEQ ID NO: 306586 - DNA, 534 bp, Zea mays
cccacgcgtccgcattaatcagttttattatcagtttatttctgctaactgccatattacgatttacactgcattcatattttctctgcttgaagtacatgtaagttatacggaacaccctgtcacattttttttttctaatttatgtctttgtgcagtaaatgggttatgatgaacaaactcactaggaagcttgcaagaattccagatgaagtgcggactgaaatagagccatacttttttgagcattctgctattgttgacgaagacaaccgcaagcttccaaaactgccagagggacaaagcacgtctgtagctaaatatgtgaggacaggcctgactcctcgttgggctgatcttgatataaatcagcatgtcaataatgttaaatacattgcgtggattcttgagagtgcacccatctctattcttgagaatcatgagctggcgagcattgtgctggattacaaaagggagtgtggccgggatagtgtgctgcaatcacacacctctgtgcacacggattgcaacagt

SEQ ID NO: 306587 - DNA, 287 bp, Zea mays
cctacgcgtccggaacgaagaaagaaagctcgagacttgtttcctcagcgaatcagcactataacaaacccttcagctggaaggccccagccattattttggccttcgaattcttggagagcattgcttactctggcatagcactcaacctggtctggtaccttgtgggcacgttgcacctgaatatgcaatgactggccatcttctggtaaagagtgacgtttacagctacggcgtagctctccttgagctccttacagggacgacaccggtggctttgttcaggc

SEQ ID NO: 306588 - DNA, 638 bp, Zea mays
  unsure (1)..(638): unsure at all n locations
gaatttgtctggatactgctgaaggtacgacaaagcgctaagcagggagcagaagaacaagagcggcgggaagatgtacgtgcaggacaagatcgaggagtacagcgacgaaatcttcagactgctagatggcggtgcgcacatctacttctgtggtttgaaggggatgatgccggggatccaggacacgctcaagaaggtggctgagcaaagaggcgagagctgggaccagaagctgtcacagctgaaaaagaacaagcagtggcacgtcgaggtttactaggctataagatggcaaggattgtgattgtttagctactgagctgagaaactggacgtatgattgaacgactgggctgcttgcnncttcctctnctttttttttctttctttttttttttctcttcttttctttctcttcntcttttctttttctttcttctctctctcttttttttttcttttttcttttcttttttcctttttttcttcttttttttttctttctttttctttcttcctttttttctttttttctntttttcttttttttctttctccttctcttcttttctcctcttcttctttcttttctctttcttttttcttcctttctttctttctcttttcttctttct

SEQ ID NO: 306589 - DNA, 404 bp, Zea mays
ttgtttactagatcttccgacgactactggctattgctcgttccggcgtgccaccctgaggtaggctatagcctccgacaacctctagggagcgtctgtgtcacaactgacatggagagagagagatagagagacgatcgtccatggtgcgtgccaccgtgaccgtggaccatgggagaagggaccagtgtgccagtggcacctgcaccgtgctaggcatcgagacagccagaccgcgtcactgcgtgtaccatgcctgctaccggaactactactcactgttcacctgaagcgaccacctcagcgacctctaggagaaggtccagaggatgtgcgaccagggactgatccagaagcacaacatgcacctgacgggggagttcctgtctgagaacccgtgcatg

SEQ ID NO: 306590 - DNA, 298 bp, Zea mays
ctcgtaccttcgagaaatgttccacattgatgctgcagattacatgatgtccatatgtggtgatgacagtctgaaagagctttcttcacctgggaaaagtggcagtattttctatctttcacaggatgaacgttctgtcataaaaaccttgcgaataactgcgtcgaacatactgttgttgagaccttgttcctactctccgcttgtgatttggccctgaactacaagttgtactaggcggctgatccacatccgaatacactccttgattgagctgctagttggtggccgggtaaca

SEQ ID NO: 306591 - DNA, 217 bp, Zea mays
tttcctctcgtgcgtccacgcgtccgaagacgggtgggattcaattgcatctagatttctcgccagcatacccgtaaagaagcccctcgatcattaagacttgctacagccaagttacgaaaggatacaaggcctgaagacctccaagaaaactggatgtctccgccaaggctgtatacaaggtgaagcttgtcggccctgaaggtgaaaagcacga

SEQ ID NO: 306592 - DNA, 193 bp, Zea mays
ccctcgcgttcggcgaaccacgcatccttccctttcccttccggggctcgagccatggcttgactgctgcgttttgcttaaaattgcctccccgcagcggtgactctgctggactacggcgcggggaacgtacgcagcgtgcgcaacgcaattcgctacctcggcttcgacatccgcgacgtgcagagcccgg

SEQ ID NO: 306593 - DNA, 448 bp, Zea mays
gctgtaggttacgcctggcctcgttcacctcacgcacatgattgacttgcagtcggtttaccacctgctgaccggctattctttttgaactgccatgagctcatcaagaatgctgtctacatatttctttacttgtaatttcttcatccttgtttgatgagtcaactggcaccattggcttatttctttatcattttaattgtttagaacgtggaggagaaccggtgggctcttatcatatatctgttttgctgccctggcgcccttcagtacatcagcggtgtgatcctctttcttgatgttcctctatcagaagaccaaggatggcaagccttttgtcgatgtcctcaaggagggagtccttcctttcttgcattaaggttgacaagggcaccattgaggttgctggccccgacaaggagaccaccacccagggccacgatgttcc

SEQ ID NO: 306594 - DNA, 346 bp, Zea mays
ccctcgcgttcgctccaatgccagcacgggacagcccttcatctctactctggagcttcgacagtttaacggttcgctctactacaccactgacgagacacgcttctttcttggactgtctgcgaggataaattttggcgcaggaagcaatgattcagtgagatatcctgatgatccatttgatagaatctgggaatctgattctgtgaggagagcaaattaccttgttgatgttgctccagggactgaaagaatatcaactacaaaacccatatttgccggtaccaacgatgaaccacctgaaacggttatgcaaacaggataagctgcccaggatgggccattg

SEQ ID NO: 306595 - DNA, 370 bp, Zea mays
ctagatcctgagtcatatggacaactttattttcctccgcacgtaattctaatgatacttaaattttctacacaggcagattctctccacagctagattttcagaaaagctgatgagaaaaaaacaagctttggccgccgcggcgcgcgctgcagcctggtgggcgcaagccgggaagtagcactagcagtaggcctgcggtgaccacgccgcaggtcgcaaccgacagttcctggttcatggcgctgcttgcttgatgttctctctcaaaaataaaaaataaacaatggcacccaggtgtgaatctgcagataggaccagtttacagccatccgtcccgtctctaggattgcgccctgaaaaaaagaaa

SEQ ID NO: 306596 - DNA, 386 bp, Zea mays
ggtctccggcctgttccagctcgggagcgcccacgagtgggtcgtcaccaagaaatcaggccgttcttccgagggcgatctcgtcgtcgagaagcagcctagacagcaaagggcagggtccgcatccaaccttggttcccttgcaaaggagccttcctccagtctcagaaaggactcccaaaggaagaaacacactaggatatacaggaaggagctggcgctctccttccttctcttaacagcagctgctcggagcctgatatcggtgcaaggaatacacttctacttccttctgttccaaggggtatcgtttttggtcgttgggctcgatctgatcggcgagcaagttgagtgacgggaatacagggagagtaatggcggtattt

SEQ ID NO: 306597 - DNA, 447 bp, Zea mays
cccacgcgttcgttttttggtcagtcccaaaccctaacagcccaccaccctccgcgacgaggaggcagagtggggcttaaaccctaccgcccccgaagcccagcggcggccatgaagacgctgtgccccaagcccggaaagggcggcaagatccacccttcgcccgccgaggaccccaccgcggcggcattccgcctcctcccggccgccatcctcgtcctcgtcgccgggctgtgccccgaggaccagcgggtgctggcccacctcgtcacgcgctcgttcctgctgggctgggacaccatcacggcgccgccgccggagcaggcgcgcgggggcccgcgtcgcaggcgcggccacccgcccaccgtcgggtgcctgtgcttccagtgctacggcagcttctggtcgcggtgggactgctccccgcaggacgaccgtatacacgcc

SEQ ID NO: 306598 - DNA, 307 bp, Zea mays
cccacgtgttcgcccacgcgtccgcccacgcgtccgcttgtcagccatggccaccgccgccgcgtctagcctcctcaagtcctccttcgcgggctcccggctcccgggccccacccggaccacaccggcatagctccggatcaatgacagcccgtgcgcagcttgttagtgaagtcatcctaccgcctgggacgatatcaggaaccaattcgtgggaggcttggcaaccggaaccaatgctccactttcttgagtcatgggataataagaagttgctgccgcctgcatggcttacatcattactaga

SEQ ID NO: 306599 - DNA, 336 bp, Zea mays
gtggacatgcgccgggtggagaggacggtgcaccacctcctccgccgcggcatgagcatgacggagccctcctgcccctaccacgcgtccatctacggcgccttccaggagcgcgccaccttcgtctcccacgcccgcaccgccaggcgcgccgcgctccacggcgacgcctgtctcgccaagctctgcggggtcatcgccggcgacgagaagcgccacgaggtcgcctacaccagggtcgtggccaggagcttcgaggccgaccccgacggagtggtgcgggcgctcgcggtcgttatgcgagccatggacaccatgcccggcgagcgaatgacg

SEQ ID NO: 306600 - DNA, 497 bp, Zea mays
acgcttatccgctcctaatccgcgtcttccaggggtggcagcccctgcatgatccaaaatttgggttagaagtcatgaaaaaatggaaggacctgctgcagggggaccaaccatatgacttctcagatagtgccgcatcaatgacaccatatgtgcagcttgttagtgaagtcatcctaccggctgtgaggatatcaggaaccaattcgtgggaggctagggaaccggaaccaatgctccactttcttgagttatgggatattagaagttgctgccgcctgttttgcttcaatcattactagagcatgtgatcatgccaaagctctcagctgccgtggattcttgggatcctcgcagggaaagcataccgatccatgtctgggtgcatccatggctgccaatgctaagggaaaggatagagaccttgtgccattctattcgatacaagttgagcactgtccttcatgtatggcaagcacatgatgcttcagcatatg

SEQ ID NO: 306601 - DNA, 546 bp, Zea mays
  unsure (1)..(546): unsure at all n locations
gcggccgctcgccccacgcgtccgaaattgcttcatcagctgacagtattgcttcagtacggctaggtcaatgtgaagcgttcaaggtgcaaaaagttacagaattcccatcagctaaacagacaaataggagatcaagcaagacactgatgttctttgaaggctgcccttggcgtttgggttgcacggttctactgagagggtcatgtcgggaggagctcaagaggattaagcgtgctgtacaacttgcagtctttgctgcttatcacctttctcttgaaacatcattctttgcagatgaaggtgcaacacttcctaaattgccctcgagacatgtggtagnttgatccagatacaaggaattgtacaaatagcaattcagctgcattgaccaatgttggtatgcctatgngacgtaaatcagaacatgacaaactctcacagactgctatggtcaacattatgtttgaaaatacccctgtgtcacctagttcattgccatcgaatggagaaggccacatgtttgtgggtgcatgtcagcataaa

SEQ ID NO: 306602 - DNA, 381 bp, Zea mays
gtttgatatagtcctgatttccctcagtttttctcaggagcaactccactagtggggagtttgccctacgcacagtgctatggaggacatcagtttggtgtatgggctggtcagttgggggatggaagagcgatagctcttggagaggttgtcaactctcgaggtgagagatgggagttgcagctcaaaggttgtggaaagactccatacagcagatttgctgatggtcttgctgtcctacgcagcagcatccgtgaattcttatgcagcgaagccatgcacggcctaggcattcctacaactcgtgctctttgtctagttgaaactggaaaatcagttgtccgagatatgttctatgatggcaatgcaaaggaagaacct

SEQ ID NO: 306603 - DNA, 356 bp, Zea mays
aattagtattgcacaatgatagatccacatgacataaaccatcaacaagcaccacaacaaaatcattcacaaaacctacacatgttattatgttttgcacatatttgcaaacactttacaaaatcattcacaaaagtaccaacgcttcaagtgattcgcaaagagccttcacaaaagcactccaacttcttgtatcctcttgttttaagacacaagcttgtaggggttgcgatgtctacacttacttgatgctaacaagacacttcgcccataaaaagatcaattctcttttttaattgcctgtctctgcgagtcattgaagtaagcagggaccgagacaacagcattcttgatcg

SEQ ID NO: 306604 - DNA, 302 bp, Zea mays
cccgggtgctggcgcacctgcaccaggcgttccggccggcgctggtccactacaacgtgaagccgagcaacatcttgctggcggacgcggagtgcaacccggcggtgggcgacttcgggctggcgcggctgctgcatggcagtggcagtggcaggcaggtggcgatggcgggcagccggttccggcagggcggcggcggcgggatggggtacgtggccccggagctggcgtgccagagcctgcgggcgaacgacaagtgcgacgtgtacggggtgggcgtgctgatcctggagctggtgacg

SEQ ID NO: 306605 - DNA, 221 bp, Zea mays
attgaatcctagttcatgtagttttcttatcattcttgagtgctagtcccttggtgcttgttttagcccatagagtgacttctcgagcctacaaatatatttcaaaggtcttgttggatcattgcgactaggaggtcgtctcatatacacctcttcttcaagcacccaatgcaaagaatgcattctgaatgcctatgaaggccatgctccatatttgagag

SEQ ID NO: 306606 - DNA, 200 bp, Zea mays
gcagtaatctggtgtgaactttagatcaaacttcagaaatccatatagattaagatgaatatatatatacatccaatcaagacctcataaaataggtcaggacagtcccaggcgcgttgctggtggcctgcgcgacggccaccaccctcctctttaccctgacggcgttatcgctgcccttgccaccgagggactgctgg

SEQ ID NO: 306607 - DNA, 405 bp, Zea mays
cccacttgtccgcccacgcgtccgcccacgcgtccgattgactcccaagatccaggactgtttgccgcaaaggattgatcaagagagcttcttaatagccatgtatgttgcaagagaagcaaggactcccttcttcagagttggttataacagcctgggcggctttgcaactatcaaccaccttcacttccaggcatactacctgaaagtacagtatccagttgaaaaggcaatcacggagaagctcaagaccctagggaatagcgtgagcatttttcacctggttggattacccagtcaatggctttgtgttcgaaggtggtgcgagcttggaagatttgtcagatgtggtctccaaagtctgcatcttcctgcaagagaacaacagacctttaaatgtcctca

SEQ ID NO: 306608 - DNA, 294 bp, Zea mays
ccctcgctcccgcggacgcgtgggcgggagggagatggacgggctcccgctcgatgggtgcgactacacgtgcatcctcggccagtgctgcaagctgccggtggggttcgtacagcttcccgtgggcagaggagggccttttatcctaagggctcgcaggttgtaaacgcgaatagggcccaccgtgggatgcactacggccagcaccaaccgcagccgctttgtcatggcctagtgggactacatcatcctttggccctgctcaaggcctggacgacgcggagcacgagccgt

SEQ ID NO: 306609 - DNA, 212 bp, Zea mays
gtctgagcttaacgggaaaggaacactaaaacattttaagattgatgatgtcagtgttactcatttggatattggggacaatactgatcatttggaggcagtagacgtgagcaacttcacaatagtctggccaaaattctatagcatgatatccagggcatctaatttgcgtatgctacgattttgggctgttgtgtttgatgacctggttg

SEQ ID NO: 306610 - DNA, 222 bp, Zea mays
tgctcccttttatgaacgtgctggtaaggtaaaatgtctgggaagtccagacaggaatggctctcccacaattgttggtgcttcctcatcttctcgagcccttatatgtccccgagctcacgcagcatatgtgggatgccaagaacatgatgtgtgcctgtttaccctcgccatgggcgtttcctcaccgtctcggtcatgttccgcgggaagatgagcacc

SEQ ID NO: 306611 - DNA, 230 bp, Zea mays
gtccttcttgtgagtctgagctgaagaggaggaggaggaggaggagaagcatcaccgcaaccagaggcgggcgagcaacaatccactcttctgacgcgctactagcagtgtaacattttccttcagccatgggtaaggagaagactcacatcaacattgtggtcattggccatgtcgactctgtcaagtcgaccaccactggccacctgatctacaagcttggaggtatt

SEQ ID NO: 306612 - DNA, 260 bp, Zea mays
cggtactccgatgctgtcgaacgccggcgcggtggcggagatctccaggctcgcgtcatcgttcctgccattcggtcccggcgacgatgcacccgtacgacgacaccatgagggagtgcatttcgatccatattggccaggccggtttccaggtcggaaacgcgtgctgggagctgtactgccttgagcatggcattcaggctgacggtcagatgcccggtgacaagaccattggggagggtgatgatgctttcaacacc

SEQ ID NO: 306613 - DNA, 446 bp, Zea mays
gctcgcctgcctgcaccgctccggacttacttgccggatcgacgcacccgttcttttttccctcttaccaagtgctacgcgagttcggggtccttaggattttgtggaggggcgatggcggcggctgatgtggagtaccgttgcttcgaccggagggcttgtcctgagcctccagaaacgagacgctagagaatgcctaaagtgctacggggggaccctggagttcactgtcatcaggtgctcaagtacgccgcggaggagttcaaggtcccgccccagaccagcgccatcataaccaacgatggaactgtcatgaacccccaaacaagtggaggctacgcggttgtgaaacatggctcggagatgcgtatcatccctcgcgatagagttggcgctgtagtcatgttttgcggttagaggatatataccggccaatggcttatgag

SEQ ID NO: 306614 - DNA, 482 bp, Zea mays
cggtcgcgtgggcggcagttctcttacagtgagctcgccgccgccaccaagaacttctctgacgaccggagactcggcagcggaggctttggatccgtgtaccgcgggatcttgacaaccgacggcaggaaccgctgcgtggccgtcaagcgggtgtccaagaccgcgcggcaaggctggaaggagttcgtctccgaggtggtgatcatcagccggctgcggcaccgcaacctggtgcagctaatcggctggtgccagggcagcggcaacaagctcctcctcgtctacgagctgatgcccaacggcagcctcgacgaccacctccacaggccggacagcgtgctgatgtggccggtcaggtacggcatcgcgctcggcgtcggcgccgcgctgctgtacctgcacgacgacgccgagcgcgcgtggtgcacgagacgtgaagcccacaacgtgatgctgacgcgtcggtcaacgcaagctcg

SEQ ID NO: 306615 - DNA, 223 bp, Zea mays
ccctctcttccgcttcattcccagccgaagtccactgttggaacacctgcttatattgcacctgaagttttgttgaaaaaagaatatgatggcaagattgctgacgcacgctcatgtagtgttaccctctatgtaatggttgttggcgcatatccttccggagactcataagaatctaagatgtcttccaggacgatgcacagaaccagggctgcttaggggc

SEQ ID NO: 306616 - DNA, 521 bp, Zea mays
  unsure (1)..(521): unsure at all n locations
ccctttttccgaacacgttgaggcagaagttgaaaatcttagtctgcaggagcaagcactagatgagcgtataagtgacatgcgtgaaaaactaagggggttaactgaagatgaaaataataaaaggtggctctatgtgactgaagacgacatcaagggattacccagctttcagaatgaaacactaattgctattaaagcacctcatggtactacacttgaagtacctgatccagatgaggcgggtgattatctccaaaggagatatagaattgtattaagaagtacgatgggaccaatagatgtttacttagttagtcaatttgatgagaaatttgaggaactnggttggtgttgcgacacccgtcaagcatttcagtgtgcccagacatcaacccgcggaagatttcaatacttatgctggacaaagtagcacaccaatggacgtggcacatgatgtacagcatggccagaagattcctcaggatcctagtgccttgcatgactttggagggatgaca

SEQ ID NO: 306617 - DNA, 284 bp, Zea mays
cccattcttccgcccacgcgtccggtgaaggatatgggatcttgtaatgccatgatcactggttattcacagcacggaatgggaaaacaagccatagagatctttgatgacatacttaaaagaggtgcaaagccagactacataagctatgttgcagttctgtcaggctgcagccactctggactcgtgcaggaggggaaattttattttgatatgatgaagagggcccataacatatctccatggtttggagcatttttcatgcatggtcgacctttttgccc

SEQ ID NO: 306618 - DNA, 278 bp, Zea mays
tcttcgcgtccgttcgctaacacggcgggggggggccatttcaggaaggtggactgcgaaaagctcgccgcctccgccatcagcgactaccagagggaagccttggtaacgtggaagcagcacgcgcggggcgcgtacgagcagctggacaaggaaagaaaccggcccattgtgaacgacgaggctgcaacggaactagggcttgtcccgagcgtgcctctgcacggtgcccaccaggactggatccggtacgccgagcggaagctgagcttcctggg

SEQ ID NO: 306619 - DNA, 502 bp, Zea mays
cggccggaattcttgggtcacttattcacccccttcctacgacgatggagctgctccacagggggggtatttataccttgttggttatgtccactactgccctatgtggatctgaggctcaaaagcagaaatacttaccatctcttacccagttcaaaactattggttgctgggcattgacagagccagattatggaagtgatgcaagctccctaaggactgcagcaaccaaggtacctggtggttggcattcagacggacaaaaacgctggataggtaacagcacttttgcagatgtcctcatcattttggctaggaatgcagatacaaaccaactaaatgggtaatcattcctttcttcctggccttaatatacttcttgtactgaatccattggtccttaatgtctcaatgactcaatacgaaggtaaatctatttttgtccattgcaaggttaccctgattgctgcaatgaaagtgctgcgctatttagattactgaa

SEQ ID NO: 306620 - DNA, 199 bp, Zea mays
gttgacggggaaacgaaattttagattggtctaaagattatttggatttctttactatatttaggccaattggtatattacacatcgttttttttatagaaaaactacctcctcgagctcgggggctgaattttttcataaaaggactcctactgacttcggctttagggatgaataaattggttttggcgaaatccct

SEQ ID NO: 306621 - DNA, 297 bp, Zea mays
gatatgttttccatgcatcatgactcctcacatgggcgggattcttttggagctaaactgaaggacatagccggggtcgcggacacttccctggaagtaaggtacattactcgtcacatctgtgaccttgtcgcagagcgtgcaacacgcctggccgccgcaggcgtgtacagcatcctgatgaagataggccgggacaaagtaccaagcggtggcggtaaaatgccgaggaccgtagttgccttggacagtgggctctacgaacactacacgaagttcagcagctgcgtaaaagcg

SEQ ID NO: 306622 - DNA, 478 bp, Zea mays
cggacgcgtgggcggtgtcgctgctcctccgcgctgtgcgccgaagggagctcgcgtcccctctcggatccctgggtgccaacttacagtcaacatgtgctgccaacatatgctcaaaatggtgaaattttgcaagaccttttagtgcaaaagctgctggaaatgaggttattgggattgatttggggacaactaactcttgtgttgctgttatggaaggaaagaacccaaaagttattgagaatgctgaaggtgcgagaacaacaccatctgttgtcgcatttactcagaagggtgaaagacttgttggtactccagccaagcgccaggcagtaaccaatccccagaatactttctttggaacaaagaggatgattgggcgacgctttgatgatccacagacacagaaagagatgaagatggtgccatacaaaatcgtgaaggctccaaatggtgatgcttgggttgaaacaacaga

SEQ ID NO: 306623 - DNA, 308 bp, Zea mays
cggtcgcgtggggctcgatcggtctctctggtacaacgtagggagaaagatcgagggggagaggacgacgacgatggccggcgcgaccgtgaccgtggaggaggtgaggaaggcccagcgcgccaccggccccgccaccgtgctggcgatcggcacggtgctgcgcgtggccaaggacctcgcggagaacaaccgcggcgcgcgggtgctggtggtgtgctccgagatcacggccgtcacgttccgcggcccctccgagtcgcacctcgactcgctcgtgggccaggcgctgttcggcgacggcgcgg

SEQ ID NO: 306624 - DNA, 428 bp, Zea mays
gttaggtggtatgagatgcactcctcaagtcatgggtttgacttcccgtgggagcgaatatcaggccggagttaaaaaaaatccctggtctgtcccacaacaaaacatagatctaaagcctggccctagtcgtggtcgttctcacatgggttacggcgctgctgtgtatgggtggggcagggctttggtgccactgtgtataggtgggacatgggtaccactgtcttcttaattcaatggttgagggctgccttacccctccagtaggtcaagttttttatgtagatctgactggcccttattagcaatgttcacaacttggttattctttttagcatctcaagtgagatgtaaattgtgctgcaatttttaggtcaagggttcttttgggtgattagtgacgagcagttgtgtgcggtctgctggca

SEQ ID NO: 306625 - DNA, 438 bp, Zea mays
ccctctcgtttgctttagcatggcagaaacttgaagaagaaaactccgagttctttagggcttactatatacggatgaagttgaaaaggcagatcatcttgttcaatcatttattgcaacaccagtacaatttgatgaaatatccagcacctccgaatattccattggctccaatacaaaatggaattcatcatatgccaggcacttgtcatgctatctgggaatgcatttggctggcactgttgatagacaagcatttactgtccagccattgctttaactatgttgctttaatttgtattcattacagattcatactattatccctgtttagcagaataatacttttacctctaacattctgtaagctgtgttgttagtgtagagttcaacgcattaatactttcatccctgcttagcaaaatgatacttttttta

SEQ ID NO: 306626 - DNA, 401 bp, Zea mays
gcttattcgctgcggcgtggtgttggtggtggctggccgtggtcctcctgcttggccatttaccgagctgtgcgcgcgcggggctggttgagaccaaaccggtcctggccatcaacttttacaagaacagctgccccagagtggacttcatcgtacgcggcgtcacctgggcgcaggtcgccgtcaaccctgccctcccggatcgcctcctccgccttcactttcatgactgtttcgtcaagggctgcgacgcgtcgatcctgctggacaccgctcacagcgagaagactgctgcgcccgaacctgtcggtgggcgggtacgaggtgatcgacgcgatcaaagggcatctggagagggccagccccggccctggtgtcatgcgccgacataagtggcgctt

SEQ ID NO: 306627 - DNA, 472 bp, Zea mays
cggtcgcgtgggcttttgtgtggtgggactggaaaagatgggagaaagaaattgactggatggcgcttcaaggaattaacttgcctttagcatttactggacaggaatctatctggcagaaggtttttaaggtagtgtgacagacacatctacatctctgaaatgttctatcaaagtttcaccttatattttataaaatatacttccattagtttttacagtttatagcactatagtacttcaaattaaaagaaaggcagacccagcgctagaggctcccacatgagtggggtctggggaagggataaaccgagggaagcatttcccctgcaaatgccgagagtccgcttcgaacgcgcgacatggtgactcagtgagatagttcttgccactgcattagacctatagtactttaaattattgagaaaagtttgattgatggtgggctatatgtttaagctgagcagaatct

SEQ ID NO: 306628 - DNA, 264 bp, Zea mays
tctcccttttttattgtatttttcttttttttttttttttttggtgttttaggcaaaggcacaaaggttacagaagcaaacgggtccggaattcacggttacaagcagttcagcctgacggggacgactgctggtccaaggaagcaaacgatgcgagcggcgccggcgcagcggcggcctgagacagtctaccatgcatgcacgtgcacgagagaaactaaacgggggcgagcggggagagagccctggatgctagctgcgctg

SEQ ID NO: 306629 - DNA, 467 bp, Zea mays
cgttttgttgccgagggagcacgtgcaggtggccaccaagctcgggattggtcagggcgccgttggcatgaccgagtgctgtacgccggtttccgtatgcgcttgccgctaggcaagcctgcgccgccttgacgccggctacattgacctctactaccagcaccgcgttggcaccaccgtccccatcgaggatacgataggtgagctcaagaagtcggtggaggaggggaaggtcacagtcatcggtttgtcagaggccagcccagacacaatctcgtcgtgcgcacgccgtgcatcccatcaccgccctgcacatggatgtggtcgctctgctccctggacatagtgcccgagatcgagccacttttcagaagactggggattgttattgtggcttacagtacaaatggcccgggattttttttgggaagagggagtggtacaataagtgactttttgactttagt

SEQ ID NO: 306630 - DNA, 212 bp, Zea mays
aaaggggacccatcggtttgaaaccatcaaaatggacccccttccatatttcaaaaggggggggtaggtcaacactccatttggaagggggtttgaaaatttaattaccttcacgaggaaaaacgggccctttgttacgagcttggacacaggcttttaaaggcacaccattaggtggtggaccaggggcatttccccaaggggggcctaaa

SEQ ID NO: 306631 - DNA, 446 bp, Zea mays
  unsure (1)..(446): unsure at all n locations
ccatttcaaaagagccgcccggcacaacaagctgccacctggggcccccaccacatccacctccggcgaggcgatgaagcccatcgcccactcactccacgccgccgtcgaccgccgctggctgctccctctggccgttggctccgcgctctcgctcctactcctcgtcgccctcaccaccttcccctcgccctccgcgccctcctcctcctcagcgctcttcgtggagcacaagcgtcgccccctccccgccgtcccccgccgcctcgctgccccgcatcgccttcctcatctccggatccgcgggggacgcctccgcgctccgccgcgttctcctcgcgctctaccacccgaggaaccgctacatcctgcacctcgatgccgaggcgcccgactccgaccgcagcaaccttgccgncgaccttgccttccaccccgccatcggc

SEQ ID NO: 306632 - DNA, 99 bp, Zea mays
atcgcatctgtgtacgacaaattgcgattcccgggtctcccttcgcgaaaaccatctcaagcaaatcaagggtgaccgtgaagaatggccactcattgt

SEQ ID NO: 306633 - DNA, 362 bp, Zea mays
cccatgtattgcttcagcctgagtggtggtctcctcagccaccttggaaagccatacgtgcaggaattagcaagaaggaaggaagcatgtgaaagcttgttgcagcagcagtagcgctaatcgtgctgtgcgcgtgcacgacgccagcgcgcggcggcgacgactacacggcgttcgtgtacgccgggtgctcgcaggggcggtacgaccccgggtcgcagtacgccggggacgtggacaccgcgctgtcgtccctcgtgaacagcgcacgcttttgggcctacgcaaactacacctcgccggggcagctggtgggcgtgtaccagtgccggtccgacctccccgcggcggtgtgcggcggc

SEQ ID NO: 306634 - DNA, 496 bp, Zea mays
gtcacttgctctccctccaacaagctaattaaggccggtcatccctcttctagctcgtttcattatccatggcggaggagaagcaccaccaccaccacctgttccaccacaagaaggacgaggagcagctcgccgccggcgggtacggcgagtccgccgagtacacggaggccacggtgacggaggtggtgtccacgggcgagaacgagtacgacgagtacaagaaggaggagaaggagcacaagcacaagcaagcacctcgcgaggccggcgccatcgccgccggcgccttcgcactctacgagaagcacgaggcgaagaaggacccggagcacgcgcaccgccacaagatcgaagaggaggtcgcggcggcggcggccgtcggctcccgcggcttcgccttccacgagcaccacgagaagaagaaggaccacaaggaggccgaggaggcccggcgccagaagagcaccacttcttcgctgattgatcctccgta

SEQ ID NO: 306635 - DNA, 561 bp, Zea mays
  unsure (1)..(561): unsure at all n locations
tcctcctccctctactaaaaaaaaaatggaggcatgagctccgcctcctcctcgtctctcgccgatctccccaaaccctagccccgacctgaccgccggcgggcccgccggccggagaaggagtcgctcccacccacccaacttctgcggcggaaggggagcgggcggcggacgagatgccgtcgcacggggatctggaccggcagatcgcgcagctgcgcgactgcaagtacctgcccgaggcggaggtcaaggcgctctgcgagcaggccaaggccatccttatggaggagtggaacgtgcagcccgtgcgctgtcctgtcaccgtctgtggcgacatccacggccagttctatgacctcatcgagctcttccgcatcggcggcgacgctcccgacaccaactaccttttcatgggcgactacgtcgatcgtggctactattcagtcgaaacagtttctctgttagtggctctgaaagtccggtacagagatagaattacaatacttagaggacatcatgagagcagacanatcactcagtatatggcttctatgatga

SEQ ID NO: 306636 - DNA, 541 bp, Zea mays
gggtagggcgcccttgctcccccagcagaggaacgcgacgctgcgctccggctgcgcgtccagccacgcgaggcattcgtgctgagggccgccgtcgccttcctgtctgcccgtcccagtcccaaccaacggcccgatggggtagactggaggcagtgcctgtccgggaacgcacaggggatccctcagcgcctggagggcccgctgctccagcgactcgaacgtgttgaccagtacgccgtgggtgcccgcgttgcgctccaagatctccatcgaggtcctgcacagctcgtcctccggactctccagagtcgacgtggcgagatgggacgccggcatgggcggcaccccgaggaactgaagcggcttgtccccaagttccttcaggcccgtcagcctaccggcaagcagcgccggcagctgggtgatgatcgccagagtccccgcgcctgaggcgaagaacttgaatacggggacgcccagcctcgtcgccacatcgatggcgtgggtgcaaaacaggtcgatgacagggagtgcaggc

SEQ ID NO: 306637 - DNA, 311 bp, Zea mays
cctaaaaccaaacaaccctttattcaccgggggggggggttttaaaaacagcacttatttgcacccgggatacaaatcaagtcccacattgttggcaacacagcagtaaccatggggggccatccaacacaacttagatttttccggggggcccaggcctaacggggcaaaagggagttttagttccaaaacaaaaactgtttaccttaggaatttaaaatttgcatggccagcacacaacgcaaacagccaccttggcccaaaagggggaaggcctctttgatgccacccaggttcatgtggggcgaaag

SEQ ID NO: 306638 - DNA, 552 bp, Zea mays
  unsure (1)..(552): unsure at all n locations
cccacgcgttcgcccacgcgtccgcccacgcgtccgcccacgcgtccgcaactaaagccattatttccatgaaaatttcgtggccgaaggcattcttagcagcttcgatcatcttaaagaaattcaaatcatgattccactgaatacccacataattctagcagtttgagctaaaaaggcagtcaaacaataagtggtaggttgactcttcacaattaagatcacagaggatgcacttgaaatcactgtcaacagtcagagaacctttccttctgagaaggttcttcgaattaattctatctctgaagacaagccatacaaagattttgattttcttacagactttggattgccagatccaattgaaaggaagggggcggttgaatggatttgaagcttaacttgtaaaatttggaggaactgaaattgccattacctaaagggtatatgccagctgtcttttaccttccttagagatngaatttggccatattctacaggaagcctgatatttttagtggcttgaaagagagaggagtatgaaaatatctt

SEQ ID NO: 306639 - DNA, 358 bp, Zea mays
ctcgtcgtctgccttgggcgcctacatttcggtctctgacccttgcaagttcaatgttacctccaaccatgggtgaagagaagtcccacatgaacattgcggatattggccatgtcgactctggcaggttgaccaccacaggacaccggatctacaggcttggtggccttgacatgcgagcgagcgacaggtattgagaagggggctgctggctggaacaggccactcttcaagtgctctgtgggtgctcgacgcgctccaggctgggcgtgagagagggatcaccattgatagtggtctggagaagtttgcgaccaccaagtactactgcacggacattgttgcccctggacaccca

SEQ ID NO: 306640 - DNA, 380 bp, Zea mays
tcgtgttgtgctcgatgacgacgagacgcctggcgctgacgcctacgccgccatggtcgccagccgactcagggagcgcgacctgacgcgcgcggaggcgctcttcggcgcggcgcccgcggctgcccgggggctgtatctggataccgccatgctcgacgggtacgccaaggccggccgcgtcgatcgcgcgcgcgagctgttcgacgcgatgccggtgaagaacgtcgtcacttggacctctatggtttccgggtacttccgcgccggccgcgttcaggaggcgcgggagctgtttgacgtcatgcctgaacggaatgactattcgtggacgacggtggtgcaggggtacgcgcgcaatgggatgctcagggaggcga

SEQ ID NO: 306641 - DNA, 490 bp, Zea mays
cggtcgcgttggcggacgcgtgggctgagagcagtgtacttttagcatcaattgagaacatgcaatatgctgtgacagtggatgttctgcacactgtgttttctgcttttggagctgttcaaaaaattgcaatgtttgagaagaatggtggaatgcaggctctaatccaatatccaggtatgtgctcaccaatgcacccaacaggatatgctcttgaccttggtgcactgtgatacatcgacaatttattgcattggcatgtcaccgtaacttgcctacacagttgagcacactttatgtcttgctcccactgtttgaaagtattgaagtctgtagttcttcttttaagacttggttcagaatgtaccatgtttatgctctatgttcttgatttatatcctccagctctcaccctcttcctcccatcctgcctccctctcaccatgtatgagtgaacctgccacactggtattctctcccttttgcatca

SEQ ID NO: 306642 - DNA, 363 bp, Zea mays
gtcattaaacataaacaaacctgtgacagctcatcaccaaatataccaaaccactgtagtatctttccaaatgacaggttttttaaaaaaaaatcaaatgctaaaactaattttgcgactaagtagtttttttttcatttcttcaaaagattacatcttttgtggggaggaagttgaccacattctaaatgcaaggcggaaagaaagccagacgtcagctaaccatagagcccttcttcgtgccatatgtcgaccaaaaaatcaaccatctaagatagtgggattcgctggggaaaacgctcacttgtcgacaggagatcatcatatgttgcggaccaacttatcactggctcttgaggggcc

SEQ ID NO: 306643 - DNA, 252 bp, Zea mays
aaaaagaaaattactgttttattaaaggtttgacagaaaccgtgataacattgacccgaccgcatatcacgaggtccaaaaaattttcccccacaaaagtaccaaccagccacttataaagtttaagcggacacaccggcccaactgacgataactattagaagcaactgggccagccagcaattgtaacacactcaagactgacaactaaccgtttaaataacctactcaatcttggggccagggcccccg

SEQ ID NO: 306644 - DNA, 266 bp, Zea mays
aaaaagaaaaattcctttttattaaaggttggccagaaaccgtgaaaacattgaaccgaccgcctatcagggggaccaaaaaaatttccaccacaaaagtcccaaccaaccacaaataaagtttaagcggacacaccgcaccaattgacgataactactggcagaaactgggccagccagcaatggcagcatattcaagactgacaacaaaccgtttagacaacctcctaaatcttggggccagggccgccgatgctggaaggggc

SEQ ID NO: 306645 - DNA, 345 bp, Zea mays
gtgcttatagtcggcagagcgctatgaggccgcggcgaaataaaccttgcccccgattaccaattacttccgacggccgacgatccacccgtacgacgacaccatagagggagtgcatgatcgatccacatataccatgccggtatccacgtcggaaacgcgtgctgggagctgcactgacttgagcatggcattcaagctgacggacagatgcccggtgacaagaccattgggggaggtgatgatgctttcaacacctgcttcagtgagactggagctgggaagcacgtgccccgagctggttttgttgaccttgtacccactgtcatggatgaggtgagaact

SEQ ID NO: 306646 - DNA, 435 bp, Zea mays
agcctggtgtatatcaatggaacaccaatgcatggcagatttgcatatgatgaagatagtaaaattattttacaggaagggtatccaatatatgagtgcaattcatcatgtatttgtgactcgtcctgccagaataaagtattgcagaaagggctgcttgttaagctggaactctttagaagtgagaataagggttgggctattagggctgctgaacctattctacagggtacctttgtctgcgagtatattggtgaagttgtgaaggctgacaaggctatgaaaaatgcagaaagtgtgtcatcaaagggtgggtgcaggtacttgtttagcattgcttcccagattgatagggaaagagttcggactgtaggggctattgaatactttattgatgccacaaggtctggaaatgtttcccgttatattagtcac

SEQ ID NO: 306647 - DNA, 328 bp, Zea mays
ctccgctcggccaccagctttgaccgcctgccctcccctgcgctcctgatcctccataccccacccccccgcaggagcggcgcggaggcggcggcaaaggcggctaaagcaagatgttcgcgcgcgcgccgaagaagagcgacaacaccaagtactacgagatcctgggggtgcccaagtcggcgtaccaggacgacctcaagaaggcctaccgcaaggccgctatcaagaaccaccccgacaagggcggtgacccggagaagtgcaaggagctcgcacaagcctatgaggggctgagggacccagagaaacgggagatgcatgatca

SEQ ID NO: 306648 - DNA, 386 bp, Zea mays
cccactcgttcgcaaagccaagtgtgtgtactagcaaccagctagctcgggcggcagcaggcagccatcatgtcggaggagaagcaccaccacttcttcaaccaccacatgaaggacgaggagcagcccgccggcgagtacgggtactccgagaccgaggtggtcaccgccaccggcgagggcgagtacgagaggtacaagaaggaggagaaggagcacaagcacaagcagcacctcagcgaggccggcgccatcgccgccggcgccttggcactcgtacgttcaaatacatcacatatataacttgctcgtcgccgtcgacgacgtacctagctacctgccaccgatgcctgttaattgtgcttgctcttcgggctgacctacat

SEQ ID NO: 306649 - DNA, 225 bp, Zea mays
gcgtcttctgctcgcctacctccggggctcaaacctttcccccttctcccaaatacttccggcggccgacggtccacccgtacgacgacaccatgagggagtgcatttggatccacatgggccaggcccgtatccaggacggaaacgcgtgctgggagctggactgccttgagcatggcatataggctgacggtcacatgcccggggacaagaccattgggggag

SEQ ID NO: 306650 - DNA, 320 bp, Zea mays
gccactcgtacgcacacgcgttcgagcacgcgtgcgccctatggtctcttcctcttccagagggacggcagaggcaagctctgcccttgatgcgagctcgaatggtgcgaccgagaccggcatttgcttcgcgagacgcgatgtgaacgctgcagctatgtgacaccgattgaatccgtcatgaagggggccaaatgcaagggcgccgtcaaggccgatgccaagctggcggagacgagcacgggggcggagaagcccagcaaggacaagaaaggtaagggcggtatggatcccaacaagcctcagaggactgcgagcgc

SEQ ID NO: 306651 - DNA, 202 bp, Zea mays
tagcttacctctgtttaccgctcgtgacccctatgaccatcacggcgtacgcggtggccgagaccatggctgctggtaagaacacgaggatcaccaggggaaagaacggtggcaagaaaaagaccgtggtccctttctctaagaaggattggtatgacatcaaggcaccgacggtgttcagtgtgcgcaacatctgtaagac

SEQ ID NO: 306652 - DNA, 351 bp, Zea mays
gtttttgattttggaacaccgcatgcttgctcacattgggaatacagtaaccatgccctatgaaggtcgaatattccgactattggactgggctgatattgttaatgcgcctattgacactggacctgtaatcgtagatagcttgcagttgaagggtttgactataggaagagggctacttatgctcgctgagactagctctgcccccaatcttgctcactgagataacactgcttctgctgtaaagatcgctgagcaacattctgacaatgggatgggatttatatcaattaatcccacatcttgggcagcaacaccatggagcccggtgcttatccatgccacacctgt

SEQ ID NO: 306653 - DNA, 383 bp, Zea mays
ttcaactcgttcgtccacgctgatcaggacgcgcacgtagaagcgacctgatggagcatgattgtagagtagagagaggtgcctgtctctcttggaggctggctgcatcattcaaggtaacgttgcttagtaaggtgcccttgatgctgatgtgcctgggcgcactggagtactgctccttcacaggagagagttcggaccagaagctggacataacgtggagcaaccgtgagtgcaaggtgcttgacaactctctgatgctgacactgagtatgtaccggacatacggatcctgtgtccaatccgggctcgagtacctgtgcggcaagatcgacatgcagatgtaactggcgcctgggaaatgcgccgctgccatatccaac

SEQ ID NO: 306654 - DNA, 350 bp, Zea mays
cggtggcgaatgcgaggcaagccatgccgattgatgagcccatctcagatggtctgacagcgtcaatggtggatgaggtgtactttgtactgcacagttgctgccgccgggctacttctactgaaagcataaactgcgctattgctgtgcttgctagcgcaaccagccttctgagcaatgaggcatcaggaggcactacactggaggatgcctgagccaaatttgggtgcaaagctcttccttgctggcgctggggtgcagaagactggtcatgagactgcaactgcactgaacaacaatgacaatagctccgagtaagctgtgaatcaccgccatgagattgatgagct

SEQ ID NO: 306655 - DNA, 473 bp, Zea mays
gcgtccactcgtccgcccacgcgtccgctcctgcgttggctgataatcatggctagagctccgctgctcctcgcgctgctgtgcgcgtgcgccgccgccgccggctccgccaatgcggcggggaggaagatggtcggcgtgtacgagctcaaggcgggcgatttctccgtcggcgtgaccaactggggcgccaccatcacctccgttgtgctgccggactccaaaggggattttgctgacgtcgtgcttggctacgacaccattggaggatacgtgagtggtaaaagctacttcggagcgcttgtcggacgagtggccaacaggatcgccaacgcgcgcttcgtgctcgacggaaaggcttaccatcttttcaagaacgatggcaacaacacgctgcatggtggccatagggggttcagtcaggttggatggacggttaaagagttccttcgtggcggtgacatcgcctacat

SEQ ID NO: 306656 - DNA, 552 bp, Zea mays
  unsure (1)..(552): unsure at all n locations
cctgtcccctcacctccctccccctatctctccaccgccgcagctagctgcgacgtcatgcactcgccggcgccaccgccaccgcatactatctacaattagccagccgtaggcttacctatcctgtgtcaagcaagcctctcgcaagcaacaaggaaggaagctagctagttttatagctgctgtcggcggcggcggctgaagcgacgtgcctgagctaggatttaggttgagatcaggagagggagaaggcggcggcgatggggcgcgggaaggtgcagctgaagcggatcttgaaactttgaatctcaaagagcttcagcaactagagcagcagctggagagttcactgaaacatatcagaacanggaagagccagcttatggtcgagtcaatttcagcgctccaacggaaggagaagtcactgcaggaggagaacaaggttctgcagaaggagctcgcggagaagcagaaagaccagcggcagcaagtgcaacgggaccaaactcaacagcagaccagttcgtctttcacggccttcatgttaaggga

SEQ ID NO: 306657 - DNA, 559 bp, Zea mays
gctttcacggcttcctcggcctccccgtcgagttcgaggatgagatgccctgccgcgtgcccagcgccagcgccagcgtttttggtgtctcggctgaattgatgcaatgcacatacgatggcaagggaaattcagtccccacgatattgctgctcttgcaggagaggctgtatgcccacggggggctgaagtctgaggggatctttcgcattaatccagagaatgaccaagaggagcacgtgagggaccagctgaacaaaggaattgtacctgatgacattgatgttcactgcttgagcttgtgacactgttgcgccccactcaggcggcactcctcaattgggctgtcgagctgatgtctgatgttgtcgaagaggaggagctcaacaagatgaatgctaggaacgtagccatggtgtttgcccccaacatgacacagatgtcagatccactgacagcactcatgcatgccgtccaagtcatgaactttctcagacactgatcttgaagacgcttcggagcgcgatgatgcaaccaccaccgagagtacacaccatac

SEQ ID NO: 306658 - DNA, 356 bp, Zea mays
cgctcttgtcggcgaacgggatctgatccactacctccggatccgctccactgtcctgcacttcgactgccgaatggagccgctccgatccagatcaagtactcatggaaaggcgcgaacaggcgccacagtgggacccagctgctgctggctgctgagcacgatgctcaacagattgtgaatgcctgtagagatgccacgcaagtgaggctcaggcgatcaaaagatgaggctgagcgggaaattgaccaataccctgcccagatggaggatgcctttcggaggaaggacgcagatagccttggtgactccggtgcacacgtaaagcgggaggaggacgagacaggggtgaatat

SEQ ID NO: 306659 - DNA, 369 bp, Zea mays
gtgatctgtgcgaattttagtattggacctgctctgattgtgctggaccctacatgacagactagaatagataacttcatgggtcaacaactcgattgtaccaataatgattggcgatggtgcctgcagaagcttggtgctaatgcacaactggctgtggaattatgtcgacgaacagctggagctagcatcacgatgattcctttataccagcacattggcaagctagatgggaacagccagctagaagtagcctgtccctgcattcaatgaacatcaacgtgtgatgccatgctggaaacaagcttgctatgcaggagtctatgatccttactactggagctgcctgatttaatgaggctattaata

SEQ ID NO: 306660 - DNA, 504 bp, Zea mays
catttttatcctctcacctccctcgcactccattggatttgggggagctcggggggcgcgggccactgatgatccccggaacgagcaccgatccgtggcgaggaaactccaccgggtagccggcccgggagcgcggggcacggcgatggcgggcgccggggcagcggccaatggcggcaggaacaagtacgcggttctcgatcggagcgaggagcgacagacggacgctaggacggagcggcggaggaggccgttggcgcccgagagcgagaggtggagaagtgagcggttcgtgtacgcctgcgcggacttggccttcgtcaacgccgacctgctcggctacgatgttggcgtaatgagtggcgcgatcatctacatgcagaaagacctccacataaccgagtttcagcaagaaatcctagtaagctgcctgagcgtgggctcactcttgggaagcctatcaggtgggcgaacatctgacgcaattggcagacaatggacaat

SEQ ID NO: 306661 - DNA, 493 bp, Zea mays
cccatgcgtccggacgaccgcgacagtcgtgccagcggcacgcgcgcggggagcgcggccgagagcagcgagaacgaggcggagagccagtccacgtccgcggacaggaaggacgggggcaagtcccgccattgtcgcagcctgtccatagacagcttcatgggcaagctcagcttcgccgcaggggaggagtctccgaagctgccgctgccgtctcctggtggcagcctcaccaggagcgggagtggctcactggaaggtggtgctgtcgcgctgttcaatatggagtttaccaacggagagtttaccgactccgagaagaagaaaattatggcgaatgagcgacttgctgagatagctctgacggatcctaagagggtcaagaggattctggcgaatcggcagtcagcagccaggtcaaaggagcgcaagatgaggtacattcaggagcttgagcataaggtgcaagtgctgcagacagaggctacgacac

SEQ ID NO: 306662 - DNA, 289 bp, Zea mays
cccatgtttacgcgcacacacaggcgtctaaatactcgccttaatccgatcctcaaagcctgcccaaataccatggcttaccaccttcatcgctaccaccgtagatgaacacgatgaacagaagcatgaaggagcacatcgacaaccacattgtccaggctggtatccagctctgaaacccgtactgggtgccgcactgccttgagcgtggcatccaggctgacggacacacgaccgttgacaaaaccattgatggaggtaatacagctttcaacaagattgtcactga

SEQ ID NO: 306663 - DNA, 571 bp, Zea mays
aagataacatttcactgtccatggaaatacagtacctacggccacagaatggttgaaagtggacacagattttctcaactccattcaattcgccaaagaaaatcctcttgagcttgaccttccagcgatcaagctcggtgagcacgaagacgtaaccgaggaagccgtgtctactactttgagaagggcaatcagccgtctttctactctccaggcacatgatggacactggcctggggattatggtggccctatgttccttatgccaggcttgatcataacattgtatgtgactggagcactaaacactgtcttgtcatcagaacaccagaaggagatccgtcggtatctttataatcatcagaatgaagatggtggctggggcttgcacattgagggtccaagcaccatgtttggctcagcactgacctacgttactttgagattgcttggagagggaccagatagtggagatggagcaatggagaaaggccgaaactggatcttagaccatggcggagcaacatatataacaacccggtaccaccagaagtatggctactgccatatc

SEQ ID NO: 306664 - DNA, 479 bp, Zea mays
ggcatctgggtggcgagcctcttcatcataagctacatgtgcttgtggaacatataccgaaggaagcacaccaagacgggcttcgacagtaccaatgacatgccggcgctcgagatcccgaacatgtgcaaggagaaagcgctggacaaggtgcgtgagcacgctagcacgcagaccttgcatgtgcacgagagctaacacgcgctggccgggcaggagaagccctgcaagaaggattccaagagaatgctgaggcccctgatcaggagcaagccgagcgacgctaataatttcaggcagtgcagatctgcggagtaccagggcgagagggctgcaagctcgtactctggcgacgagggcatctcgaccaacgccaggaggcagaataccactgtcttcgcgtctccgctggttggactacgcaagttttcgcatgtcggatggggccattggcttactctcagggatttgagcatgcg

SEQ ID NO: 306665 - DNA, 519 bp, Zea mays
  unsure (1)..(519): unsure at all n locations
agcatcgtcaacgccaacccaacccaaccctaacccgatctcaccgaggacacacagacaccagaccaccggagcggaccaagtacgagcatgggcggcgccgcggaggaggcgttgcggcgggagtacgtggtcggcgaggagatcgggcgcggccggttcgggacggtccgccgctgctacgccgccgccacgggggagccgttcgcgctcaagacgacgcccaaggcggcgctgcgggcggacccgctggacctggcgctggcggagcaggagcccaaggtgcaccacctggcgtctgccgccagccgccacgtggtcgcgctgcacgccgccttcgtggacgccgacgccgtgcacctggtgctggacctgtgcgcgggcggggacctgttcgcgctcgtctccgcgcggggcgcgctcccggagcccgaggcggcggagctgatggcgcagctcgccgacgcgctcgccggctgccaccgncgcggggtcgcgcaccgcgacgtcaagcccgac

SEQ ID NO: 306666 - DNA, 249 bp, Zea mays
gtggatttgaagaatcatcctggtaactggaatctcaagtgacaggcggctggacagtcgaggagcacaaggtaagaggtaagagaaatgggctgaggaggcatccagtttcgtgtatgcgtaaagtggatttgccctcgtcgttagtttgtgtatattaaaggcatccagtttaggaactaagatgtttgttgtagtatatattgcaacttctactttttatgaaaaaataaaaagatgatttcaagg

SEQ ID NO: 306667 - DNA, 548 bp, Zea mays
ctttttctttgtatttagcttttatagagccagaaatggcttcattcagcttctttgaccgcaacggaatggaattcgattgcgttgtcgctataaacagggacataattgcagatggtgctgtcactggagggacctgtttcatccatgttcctagtgatgacctgcagcatgcgctagatgatctcaggggcttttatgatcagcaggacaaaaaaaagtttgcgtggcacttctcgcacttctgggtgcgatcaacaaacctctctcaggtatgctttattctagggaaacactcaagagcacaggtctgaatgaagagcagatgaggcaggttcgcgtcggagacaatttgccatcgccagctaaacaagatacttgccgacttggatcaagataacatcactgacaagtcaagctgtttggatttggatatggctgaatttgtgttgcaagagtggatggtgtctgctgaagtcaagtgctgataggttgccaggctaaaggtatcagagttgtttgaacctgccgagagatccatgaagcaa

SEQ ID NO: 306668 - DNA, 499 bp, Zea mays
actgggagggctgctgcgccggctggtgccagccgcggcgtaaccggcgggaccacacgaggccgccgacctgctcgccctctagccaccgccgcgacggcagctaaccacgaatgggcagcggacggggggctccttgctcggatggcaggacagtgatgagacaggccgaggcggcccggccgtcgatcgccgtgcgcgccgcggcggaccccaacaggccgatctggttccccggcagcacccctccgccgtggctcgacggcagccttcccggcgacttcggctttgatccctggggcctcggatctgacccggagagcctgcggtggaacgtgcaggcggagctggtgcactgccggtgggcgatgctcggcgcggcgggcatcttcatcccggagtttctgaccaagatcggcgtcctcaacacacccttctggtacaccgccggcgagcagcagtacttcaccgacaccaccaccctcttcataatcgagct

SEQ ID NO: 306669 - DNA, 342 bp, Zea mays
catgaactactacccggtcgccaagtaccatttcgacctcagctgcacggcttttggcgccatggccaagcccggacgcaacgacgagctccgccacgccggcatcattgacatccagttcaagagagtgccctgcatctacccagggacgaaggtgaccttcgcacgtcgaggagggctccaacgccgtctacttggcggtgctggtcgagttcgaggacggcgacagcgacttggtgcgaggtggacctcatggaggccaacttcggctactggaccccattccctgagtctgctggacccatctggaggctggaccccaactataggctgcaggcgccc

SEQ ID NO: 306670 - DNA, 276 bp, Zea mays
ccctttcgtccgcgcagcagataggccgtctacgcactcggctaccttcggggatcacacctttccgcatacgtgcaattcgttgcgacggccgtcgttacacccgtgcggcgacaccatgagggagtgcatagcgacgcacatgggagaggcggttatgcatgccggcaacgcgtgctgggagctgcactgccttgagcatgggattcaggctgacggccagatgcccggagccaagaccatctggggaggcgaagaagctatgagcagcacgtt

SEQ ID NO: 306671 - DNA, 475 bp, Zea mays
tcttctccttgcgagggggcggaggggaggtggtagtggtagggtatacacgagtgctccacccatggataagaggacgtaggcagacaacagccatgctatcccaacacaacaaaaacaagctccatctcctgatccccctaaaccaaaccactgcttcgtctgacatcaaactctactaacccctgttataccattatccgtgtagctactagcttcattcccccctttgtacccatcaaatggctggcatgtctctgcaacacccctgggcgtttgctttcggtctactaggtaacgtcatctccttcatgaccttcctggccccgataccgacgttctaccgcatctacaagagcaagtcgacggaaggcttccagtcggttccctacgtggttgccctgttcagcgccatgctgtggatcttttacgcactgatcaagtccaacgagaaccttcttatcaccatcaacgc

SEQ ID NO: 306672 - DNA, 436 bp, Zea mays
  unsure (1)..(436): unsure at all n locations
gaccatcatcaccatggggaggactccgtgctgcgacagcaagggcatcaagaaggggccatgggcgccggaggaggacaagctgctcgtcgactacgtccaggccaacggacccggcaactggcgcattctccccaagctcgcggggctgaaccggtgcggcaagagctgccggctgcggtggaccaactacctgcgcccggacatcaagcgcgggcccttcacccccgaggagcacaattccatccttcagctccacgccgtagtcggcaacaagtggtccatgatcgcggcacagatgccgggccggacggacaacgagatcaagaactactggaacacgcacatgaagaagcctnctgccccgccgcccgccacacggtccagtgggagaccgccaggctcgaggccgaggcgcgcctctccctgctctcgt

SEQ ID NO: 306673 - DNA, 426 bp, Zea mays
cccactcgtccgcagaggtacaggttcttctgctgcgggtgtggcgccaatgcggcggccgacggccgggaacgcgacgaggacgggggcttcggggtgtccgacggcaaggccgagaagggggtcgaggccggcccgcgggggctgtcgtgggcgcaggttgaggcgatgacgggcgggttcacctcggccgtggtcggcgagggcgggttcagcaccgtgtacctggcgcgcctctccggcgcgctcgccgccgtcaaggtccaccgcagcagcgagcgcctccaccgcgtgttccgccaggagctcgacgcgctccagcgcgtccggcacccgcacatcgtccgcctcctagccttctgcgaccagcaagacgaaagcgtgcctggtgctcgagttcgcggcgaacgggaacctgcacgagcg

SEQ ID NO: 306674 - DNA, 498 bp, Zea mays
  unsure (1)..(498): unsure at all n locations
ggcccatcgaacccacttgccactcacttccacctgaactttgccctgccttctctcgacgactcccctgtccccgccgccgccgccgccgcaaatccccttccgcgtctgtctggcctctggggcttctaggttagcgcgtgcgaccaccatggccgaggaggtccaggctccactttccgccaccatggcgaaggaggcccagtcgccgccgtccgcaaccatagcggaggcgacggcgccgccgcagctcttattatttaactcctttacgaagagggaggagccattccagccccgggtagaggggaagggngngaatgtacgtctgtggcgtcactccctacgactttagccacatcggccacgcgcgtgcctacgtcgccttcgacgtcctctacaggtaccttatattcttggggatgaagttgaatatgtccgtaatttcacgatattgatgacaggattataaagcgtgccaatgaacgcggtgaaaca

SEQ ID NO: 306675 - DNA, 395 bp, Zea mays
cgctcactcaggcgcagagacaggcgtctatgtacgcgactatatgcgtgactcaaagcttcccctaattccatttcttatcacatttgtcactaccgccgttgatcaacacgatgaggaacagcatgagggagcgcatctggctgcacattgtccaggctggtatccagggctgagagccgtgctgggtgctgcactgccttgaggatggcggtcaggctgacggcgacatgaccggtgacgggagcaatgagggaggcgacgacgctttcagcgcgactgtcagtgagactgacgctgggaaggacgttctcggtgctgttgaggccgacgttgtgcccaatgtgaggactgaggcgtagactgagacctaccgtcaggtgcagcatactgag

SEQ ID NO: 306676 - DNA, 475 bp, Zea mays
ccattacataaaaccagtgcaagcagaagcagcgcaatgacgagcagcaccatggccctcttctccacagagcttgctcggcaaggcagtgaacgtgccgccatctgtcttcacaaaggcccgcgtgacgatgcgcaagacggctgctaaggcaaagccggcggcgagctccggcagcgccgaatacggccccgaccgcgtgctgtaccatatcgcctgagaatgatgcgccacgctgctgcctacatggcactgccttaacttatctgcggatgcacacacaagctcatgaagaacaatccgtttcatatcgccgagaaccaggggcctgttggccatggctgatactgctacaaatatctgggcgcatatagcttatgagccttgaagcttcattgaaagttatggcccttatcctttatatgccgttgcctgacatttttctatgcagttcatggtgtaattaatagctgct

SEQ ID NO: 306677 - DNA, 314 bp, Zea mays
cggactcgtgttctccaaggctctacgaatagctgcattggatgtgaagtagccgaatggctcctcaccctgcccccaaaaacgtcctccctccaatctctttctctgccccctgtgacctccctttaacgatctcttgtttttactttactccttcttttcattcctcctctccaatatattacactggtattttacaattgccagtcaacttcatgcccagcgtctggagataactcaagttacacctggatcaagagagcttggtaagatactggagggcgggactgtaacaggatccatcactgagatat

SEQ ID NO: 306678 - DNA, 439 bp, Zea mays
gtaggtgcttaggatgagcgtccattgttcctactcctgacttaccaggaactgatgaattcacttaattgtggtgcttatgcaactaactagaatgagagtctacagcgtgagaacttctttatccctcacacaaagatgtctaccaccaagaacacaggttgtactacctgttagagaggaccagttcagatctgctatctaccaatcacactgatcatcatgacctccttaaatgacctgaaggcgtaatttgtgccgatgatgccgtagctctatgctaccttgaaggcttaaaacaatgttttacatgtacaaccttttatgatgcagcatttgcaatcgattattccaggtatcactgctctgcttgctacgcagttagtatcacctttattatcagctttggctaaaaactttttaatgtggaccttgttcg

SEQ ID NO: 306679 - DNA, 240 bp, Zea mays
gctgctctatgacgccgggctcctaaggcgggatcctaaggggcgtgcaccctggcgtgttacccagacggcgctcccgaactatgacagcgctgactaccccagctgaaagatcgtcatcgtctgaggcggtggaactgatcaaacgacatttgtgaaaaggcatctcactggagagccggagaagaaatatgtaccaaccattgacgtggaaggtcatccgttggatccgaccactca

SEQ ID NO: 306680 - DNA, 435 bp, Zea mays
  unsure (1)..(435): unsure at all n locations
gcgtgccgttccggacctgccttcccgacccacccctcccgtacacaccttgcacgtactaccagacatgatgcgttggcttgttccatatacatagcccatctgagccgcgctcgtcggtggcgcctccggtgtctactaccagctggctcctgtgacgccacgcatcatactgccagcagaccagttccgtactatccaagccgaccaccggcgtctngccagcgtcgctacttctacatctcgtgctcctgtccgcgctaactcgaccaccgacgctagcagcgtcttgtacgcagcgcagagctccttaccaccctaacctgttttcgcgcatgcactgactgaatcagtactggagcaacatcaggtgctccctgctacaacagtcatagcagctggaagaacgcctggaagaaggccggcgcctgctcc

SEQ ID NO: 306681 - DNA, 639 bp, Zea mays
tcggtaccacgcatgctgcagacgcgttacgtatcggatccagaattcgtgatgtttatatttttttgcttccgcaggagaaatggtggttataaatttttaaagagatagccaatttagctatctctttttactaaacttaaaatttcatgaggcgtttgaaaaatataatcagccacctcgaatcctttccttgttttcgctccccacagggctaaaccaaattttgctcccgcttgttttgcgcattgtaagtcatatactgaatcacctatgtatatcgcttcttgtgcatctatattcaatctttttagacatgtcacaagtggctctggatgtggtttatgttttattgtatcttctacacaaatagagtgttcaaaatatgaatgtaatccaaatggcttgaaatcattgataaactcttggcgtgtttttgaagtaacaatacctgttcgaatcttatatgaagatactattttaatcacttccgcaattcctttaaatactgggatttcattcttaaaatctgccatattacgtatccatttttcatgaactggtttcatattttccacaccaatttcttgaacgcagcctacccagaatacctaatgcaaaatgtagcttttctaatga

SEQ ID NO: 306682 - DNA, 621 bp, Zea mays
gggaagctcggaccacgcatgctgcagacgcgttacgtatcggatccagaattcgggatattccgggtttttttcttctaatatacgaagagcacgggcacgatggctaatagcatttttctcatctgaacttaggtccgccatcgcttttttatattcttccacataaaaaatcggatcatatgcaaaggcgtatgccccgcggcgtggctctaaaataaatccttcacatgtgccgtgtacaatgacagggtctgtatcaccttcagggaaagcaacggctaatgcacaatacaaacgagctttacgcttttcaaacggtacttgattgaattcttggaacactttatcaatattcgctggatcatcttctggctctccagcaaaacgagctgaatacacgcctgggtcgccgactaacgcatctacaataagacctgaatcatccccaattgcaattgcattcaactgtctacttaaactattccgctttaagatcgcatttttttcaaatgtttcaccagttctttggacttcttcaatatgaggacaatcggtgatgatttcacttctaaatcaaagcgctcaaataactgagcagattcacgtgctttgcccata

SEQ ID NO: 306683 - DNA, 697 bp, Zea mays
  unsure (1)..(697): unsure at all n locations
taagctcggtaccacgcatgctgcagacgcgttacgtatcggatccagaattcgttatctataactcttacatcaccataatgttcatagccccataccttattcaacaaatcacttcttgataatacttttcctcgattttgcagtaaagtataaataatttcaaattcttttgttgtcaattcaatttgattaccatgaacataagctgcatatgctgtagagtttaacatcaattcatggaattgtagtatagttgcagcttctgcttccttcgttgctgcccttcttaatacagcctctacacgcttaataaatacagtgtaatggaacggtttcgtaatatagtcatcaatacctaactcaaatcctttaatttcactttcttcattatgtaagcctgttaacataatgattggtacatcagattgtcctcgcataattttacaaatactatagccatctatatctggtaacattacatcgaggaggacaagatcgtatgaatttttttggaaaagaagaataccctttgttcncgcaccaactacatcaacggtaaagntttgtgccattagaaattacgaacagttcttgatattgggtgtcttaataccagatatgctcatagaacacctctaaatacgttttactgaatatcgaatcatattttcggggactaatgttatcaatatag

SEQ ID NO: 306684 - DNA, 505 bp, Zea mays
agctcggtaccacgcatgctgcagacgcgttacgtatcggatccagaattcgtgatttataggattcatcgtttgaatgcggaaaacgagtactttatcattctcgtcttttgctgggtagacgagaacgctcacgatatttatttgtaaatcactaaaaatagcaacgactgttccaagaataccaggttcgttttttacttgaatttcaatttgcgaacttggttgatgtgctcctgttaattctactaatgtgtgcagtactgtagattcagaaatgattccaactaacttgccggcctttgtaacaggaagacagccaattttattttcaaaaaataaagtagcaatttcctcaacgaaatcgagaggatggcaagtcataacaggatgtttcataataagttcgagcggttgctgtagcatatcgattgaaacttgttcatcttagatagacggacttgcatttattacatcccgatcagaaataaatgctacgacgtga

SEQ ID NO: 306685 - DNA, 490 bp, Zea mays
taagctcggtaccacgcatgctgcagacgcgttacgtatcggatccagaattcgtgatcgtttacccttggtagctgccaaattgtgaacgttaaaccagggcgagtgggcggattaacagaatcggttcaaatccataattattgcatggagcacaacatacccgtttggtgcggcggtatggtggagatggggatttcaagagcacaaaatgttgcgcttgcctcattgccgaactttacgattgcaggcgatatatctgcttctagcagacattgggagcaggatattatttcgccggaagtgacgcttaagggcggaaaagttatggtgccgcaaagtgttgaagctgagtatgaagtagaccgcggatggttggcggagatcacgaaacatcgaattgttttgaagcgtatactcgagtctttaaagtagcggacgaattacggtgataattgtcggtaaggccatatatcacaataatcgctga

SEQ ID NO: 306686 - DNA, 596 bp, Zea mays
tcactatagggtaagctcggtaccacgcatgctgcagacgcgttacgtatcggatccagaattcgttattgtcttttgtttttttgtcacatctggaaattcagttatttgttcattaatcgctgacatcatcatcgacattgcgaaaagctgctgacttactgaatcatgcaactcccttgctaaacgatgcctttcttgagaaatcgcttcttgtctcatctcttcattccaatgagctcgttcattcgttactttttgaaagagtccagcttgctcctctaatcgacgagccagaacgattacttttcgttccacttcatgaaattcatcatctgcagtaaacgaaacatcgctcggaaaattccctcgctctacttcaaatagaaacgtatttaatccttgtatacgctgctctatatagtaaccgattgcatatcctacaattcccccgataagtaaacttgtagtcataataaacaagccaattggaacagaagcgatggattccttccataataaatcatacacttgttgctcgcttttccatacatatacaattgtacatatgagtgcgatactaacagaggacaaca

SEQ ID NO: 306687 - DNA, 549 bp, Zea mays
aaagctcggtaccacgcatgctgcagacgcgttacgtatcggatccagaattcgtgatctgttgctaagtcttgaataagaggaatcatcgttgcgacaaatgggatgttgtcgattgtcgcagatgcgatgccagatacccataaaataagtatagctgcgaatccgatgtcaccgtttgttacgtcgattacttctcttgcaagtgaagagataagtccgatatcaattaacccgccaacgagaacaaataatccggcgaagaagaaaatggttacccattcaacatgggcaaatacatcttcaatatcatgttctttcacgccgattaacataagaagtgtagcgcctgtcatcgcgataacagcagcgtctacatgaataatcgaatgaagtacgaagcctaaaatagttagtcctaaaatcgaaatagatatctgaattcgtcgacacgcttctcgagcctaggctagctctagacacacgtgtgggggcccgagctcgcggccgctgtatttatagtgtcacctaaatggccgcacaatcact

SEQ ID NO: 306688 - DNA, 615 bp, Zea mays
agctcggtaccacgcatgctgcagacgcgttacgtatcggatccagaattcgtgattctttttttttttgataaattttttttattatctccacataaaaaggcaatcacaacatcgtgtgattgccttttatttaaaaacgaaagtccgcttccgcttttctttatgtccagctctgcctcctagccccttctgtctaagaaccttccccacgagaagataaaatgcatcttctgtgggaaagaaccttagccttcgggactaaacagtcggctccgcttttctttattgtccagttccagcggctagaatactcggtggcttcgcgccttcctccgaggcaaagtacacctctctgtcaggagctccatccccctcctattctaaacgagccgcttccgcttttcttcattacattttttctggtgcagatactcctacgattgctaatgcattttgaagtgtagtgcgtactgctttcattaactcataacgagctttacttaattctaagttatcttgggttaatactttttctgcattgtagaagctgtgtaatgttgctgctaattcaaatgcatagtttgtatacgggttgtagacgtttttgtgctg

SEQ ID NO: 306689 - DNA, 552 bp, Zea mays
atgctgcagacgcgatacgtatccggatccagaattcgttatatttaagccaacaagctactttatgatggtgatcatttacatttagatttggcgcttctttttcacatatttccatacaatgctcacaacgcccactaaagtaacaaaactcacctaaaccaactaaattcggaacttgccctggaatagaatatagtttatctattcgttttcccattactggttttgatttcaataatcctttcgtataaggatgttttggattttggaatatctctagtactggggcttcttcaataactttcccgccatacataacgacaacataatcagccatttccgctacgacacctaagtcatgtgtaattaataaaatcgacgttttaaattcttctttcacttgtcttagtagatccaatatttgagcctgaatggtaacatcaggagctgttggttggttcatctggcaataataacttaggaatacaactaagcgcaacagcaattataatacgttgtaacatccaccggtcagttcatgcggataag

SEQ ID NO: 306690 - DNA, 595 bp, Zea mays
gcacgctacttaggtaagctcggtaccacgcatgctgcagacgcgttacgtatcggatccagaattcgttatcgttctttcatacgcagattccgctaaactaattgctgaaataactgaaacaccgtccgcacccgcctctataactgccgctgtattttcaattgtaatcccaccaataccaacgattggcactgtaattccttgttctctaaaataagctaatcctttcgttccttgaaccgctttcgtatcttttttcgtactcgttgggaaaataggaccaacacctaaataatccgctccattttcgattgcaaaacgtgcttcttcaattgtatgagcagatacgccgataattttatctcccattttttcacgaacagatgtaattccttcatcatcttgtccaacatgaacaccatctgcatctaattcaatggctaattctaatcatcatttacaatgaaaggaacactatattccttacatagcgtctgcattcttttgcaaagcgcactctatcttctccgataaaggaacctttccccttctcggaaactgaaaagtgtcattccacattctaacgcttttt

SEQ ID NO: 306691 - DNA, 272 bp, Zea mays
gctaggaccacgcacgctgcagacgcgttacgtatcggatccagaattcgagataatttccttctacatgatattgggggcttattcttgagaacactgtctatatgccttgtgacatggcagagaataagagggaccctacatgctcatggagctttcacatagatctgaattcgtcgacaagcttcttgagcctaggctagctctagaccacacgtgtgggggcccgagctcgcggccgctgtattctatagtgacacctaaatggccgc

SEQ ID NO: 306692 - DNA, 535 bp, Zea mays
  unsure (1)..(535): unsure at all n locations
aagttaggaccacgcacgcggcagacgcggaacgtatcggatccagaatccgagaggtttatgtttaacgcagagaagccaaatacaaggggaggggaggaattagaagaaactgtcnctttacaaagaaacaagggtagtacaaacgggagaagcagtgccggaagaagaaaaattcgaagaactttactaaaaccataaacgaccatatttaaaacgtgcatgaagtcaagtaatttataacactctatactcactagggggggactaaacatgacacgcaccacaaataaataagccaccgctggacctgaatgagcataagaccaaatgaaatgacgagaacgctcaagagatgggagctcaactgggagcagatgcaacagctcgcgctaacggatcttttgggggtgaaatcactaaacggatagggtacactagctggggcacaactatggcgctaccaaaaaaattctcataagaaagcttaaaaagaagcggggatttcccaaactggttttagggagatgcaatt

SEQ ID NO: 306693 - DNA, 689 bp, Zea mays
taagctcggtaccacgcatgctgcagacgcgttacgtatcggatccagaattcgtgttgttttaacaggatgtttcataataagttcgagcggttgctgtagcatatcgattgaaacttgttcatctagaatagacggacttgcatctcttacatcccgatcagaaataatgcctacgacgtgattattttgatcgacaattggaatgtgccgaatgcctttcgtgcgtatcgttcggattgctgtttcgattgtatcgtttggatgcaatgtaactacattttgattcataatttcttctacaatcattccagttgccccctttattaatacataaaacgattgtgaaaacgtagacgatcaaaagcttgaatagaatccgtatcaacgcgtttaccgatgcggaccattaaacagttggcaggatgtgaacaaatttcaggatcgtctgtagccatccattgtaacccgccagcattcatcatcttctccattacttttcggtattcccacacattcaatcctgtttgtttcaaatcccagtgccaataatattcagtcgtcaatataatgtaatcttccataaatcgtccatcatagaaacctctgtaagttctttccgacagaactcccgcagaaggctgggctacttaattgccccagctaattaagtttccatttttcttttg

SEQ ID NO: 306694 - DNA, 593 bp, Zea mays
agctcggtaccacgcatgctgcagacgcgttacgtatcggatccagaattcgtgatacttgatgtgcattgtattcgaattgagtttttcggtgatgaaatcgatcgtattcgtgaagtaaatgcgttaacaggtgaagtattagcagaacgtgatcatgtagcaatcttcccagcatctcacttcgttacacgtgaagagaaaatgaaggtcgctattgaaaatatcgaaaaagaattagaagaacgtttaaaggagttaaatgataacggtaagttgttagaagcgcagcgtatagagcaacgtacacgttatgatttagaaatgatgcgcgagatgggcttttgttcaggtattgaaaactactcccgtcatttaacacttcgtccagcgggggcaacgccgtatacgttattagactattttccgaaagatttcttaatcgttatggatgagtcgcacgtatcagtaccacaagtaagagcgatgtataacggtgaccatgcacgtaaacaagtgcttgtggatcatggattccgtctggcatcagctttagataatagaccgctcatgtttgatgagtttgaggagaa

SEQ ID NO: 306695 - DNA, 594 bp, Zea mays
agctcggaccacgcatgctgcagacgcgttacgtatcggatccagaattcgtgataattcctattgagcaatacaaaccacatgatcgtattcgcgtattcattacgaaagtagaaaaaacgacaaaaggaccacatatttacgtatcacgtacacatgctggtcttttaaaacgtttattcgaaatggaagttcctgaaatctatgatggaactgtagaaattcgttctgtagcacgtgaagctggcgatcgctctaagatctctgtatatgcagagaacactgatgttgatccagttggttcttgtgtaggaccaaaagggcaacgtgtacaacgcattgtagacgaattaaaaggtgaaaaaattgacatcgtccgctggtcaaatgatccagttgaatatgttgcaaatgcattaagcccatcacaagttgttaaagtacttgtagatgaagaagaaaaagcgacaacagtagttgttccagaccaccagttatcattagctatcggtaagcgtggacaaaatgcacgtcttgcagctaaattaacaggctggaaaattgatattagagtgagtctgatgcgaaacactt

SEQ ID NO: 306696 - DNA, 474 bp, Zea mays
taagctcggtaccacgcatgctgcagacgcgttacgtatcggatccagaattcgttattttctacgtaagcttttttattcattgcgccgttaatagcaaggcgtgcatgttgattttttaatgtttcatttttctgatttagtcgtaagaattgaatgccgacttcagcgcgttctttgaagtttggatcgctcttatatttatcaacaaactctgcagttaaagcaacacgatcaatttgtcctgaatcatataagttcacttctgtagacttatctttaacgacattgaagttgatttcttctagttttacagttttagcatcccaatagttaaggtttttcttcaattggaagctttgttcatgtttccagctctctaatgtgaaagcaccgttgtaaattaaatgagttgtttctaaaccatatttatcgccttgagactgtaagtactcttcataaattggtaagaat

SEQ ID NO: 306697 - DNA, 747 bp, Zea mays
ctatagggtaagctcggtaccacgcatgctgcagacgcgttacgtatcggatccagaattcgttatatttaaggttatctcgaccagactttttaaacatccatatcaataaaggtttaaaaaggaggattaagagaaccgagcaggtctaggcgcatttgccaggaggacacggagtgtagctttcctacatgagtaccgcactggcgatgcaacgacgacatgcgaaggttatctcgaccggactttttaaacatccatatcaataaaggtttaaaaaggaggattaagagaaccgagcaggtctaggcgcatttgccaggaggacacggagtgtagcttttctacatgagtaccgcactggcgatgcaacgacgacatgcgaaggttatcttaaccggactttgtaaacatcctctattagtgtttgaaatgacgtacgccagtgaacaccatagcaatcccataagtatctgccactttaatagaatcttcatcacggattgatccgcccggttgaatgattgctgtaattcctgcttttgctgcttcttctaatgtatctggcattgggaagaaagcatcagatgcaagcgcgctaccttgtgctttttcaccagcttgtgtaattgcgatttttgcagaacctacactgttcatctgtcccgcaccgcaccaattgtcatgtcatctttcgctaaaacaatgcgtttgattcacatgtttacacttttcagctagtttaaa

SEQ ID NO: 306698 - DNA, 612 bp, Zea mays
gcacgccctactatagggtaagctcggtgccacgcatgctgcagacgcgttacgtatcggatccagaattcgtgtatatttaagtgtattcactatataaaaaactagaaacatatccttctcccatccagactatactgtcggccctagagtttcactagatccaccgttttcgagttgaaaacgggtcacggacttagaagttttcacttcatcaccgccggttgggaatttcacccgaccccgaaggatgctgtttgctcaaattatagcacaaaaaaaataaaaggctagtaaaaaatattcgaatgtgaagaattgtgtgaaaatatatgcaggctggaatggaaataaaagtattagaaatgttgtaaagagaagggatataacggagttgctaaaaagaaaaaacatgcacaaaaaaatgtgcatgtcacatgtaaaattattctgcctttggtgctctaacaacagactcgaatttacctttatgcgaagcgttccaataaggcatattttttgataaaccacaacggcataaagaaaatgcccggtttgctgggaatgcattcccttgtgagtcgactaattccacgtcccctgtaacgcgaa

SEQ ID NO: 306699 - DNA, 600 bp, Zea mays
  unsure (1)..(600): unsure at all n locations
aaagctcggtaccacgcatgctgcagacgcgttacgtatcggatccagaattcgtgatcttgaaaaccttgcaaaccaaggtttttacataagcggaatatcgtagcttcggaactattcgtaacttcagctaattctgtaatagatttatgtacaacatcttgtggatgtttcaaaatatgttcggcaatacttcgcaatttcggtgataaaccatttaacgaagcctgaatctttccaatcccacttcttgtaccaggcatagcatatcctccccttccatcgtagctttatcctgtaaaaaccgattagttgaactaatcatcagtggggatggtcctccactgattagagtttcactttattgtacctaattatcgaaagaagaaaaacctatattagggattactataatttttaattgctcctatgtattctgtcatacgatataacagaattattcatgcttatgaataattctctccatgtttcactgcgtataatgcggtttgcgtacgatcatccacttncaatttagctaaaacgtttgaaacgtgtgttttcacagtttgttctgtaatatgaagtttgctgcaatct

SEQ ID NO: 306700 - DNA, 411 bp, Zea mays
gcgttacgatcggatccgaattcggattattttatttagtgaaacgtggtgccgacgcagtggctcctccgctggaattaacagatgaggacggcccattgaaaaaagcagttattggtacgcatggtgatacaattcatacacttgtagagcgtaaaaattataaaggggcatttatgccaggattccaaaaggtagaatataatattccatttgacgagtctggtttaattgctgttgatcatgtacttggtaatgatgtaaaaatggaagagcgggtcagttattacgagaatgttatgggctttaaacaaatgattcattttgatgatgacgatattagtacagagtattcgtcgtttatgtcaaaagttatgactaatggaagtgctattaagttttccattaacg

SEQ ID NO: 306701 - DNA, 607 bp, Zea mays
agctaggaccacgcatgctgcagacgcgttacgtatcggatccagaattcgtgatctttctgtttctgtcggtgaattcaaaggacaacctggctatattgttagtaacaacatttgtgtaacagacgaaggtcgccctgtatttgaaaaccgttttaaaaaccgcgcaggccttatcgaaaacgaaccacgattccaagcgatccgtgttctacgcccattaagtaacgatacatatgacatcttaacgatgtgggaaacagagcaaaactttaaagactggacagaatcacgttcattcgaaaacgctcataaaaaacgttccacgcaagtagaaggaaaacctcaggctcaagcgcattcacatgcagaacagcaaaagagtattttctctcgcccttcttttgtgactacttttgatgtgttagtttaattgttttgagtttggagttcggaaaccacggtatgagaaattatatcggcgatttttcgaatatataggggcaactcgaattatatcagcgtttttctgaatatataaccgcaactcgaaatatatcaggggttttttgaatatatcgacttatcgacaatcatgacacaaaaa

SEQ ID NO: 306702 - DNA, 714 bp, Zea mays
gcacagctcactatagggtaagctcggtaccacgcatgctgcagacgcgttacgtatcggatccagaattcgtgtttatttagcagcaatttagtagacagtaaggaatacaacggtttagttgataaagtaaatgactttcatagtgaggcatttgatgtgacgaaggttcctttaagtattattcatttttatgaaaatacagtagagtatgaattgcaatcgaatattaaatgggctcgttggttccgtccgttcgcactttgctatgagaaaatgagtaagcgtgtagaacaaatacatttaggaatgggcggcaattgggaaacgatgcatggctctatcattagtgtcatagatgagaaagatggaagagagaatgtaagggcttggctaagaaaaaatgaagcaggtaaatctatttttgtagctctttattcaaagcatacaaataagagtgagacatatatgaatatcgccttacctttaccttattcgaatatgactggtattttgaaactatataatgatagtcatgatttaattattactagtaagttaagagaaaatggtcagggagatgaggggatttatttacatactcgggtctagacaatccgtttaccgttagcagagacttttatataaaagagcgcacggatcacatactagaagctatcatagatgtggatatttggagtaagttttagaaat

SEQ ID NO: 306703 - DNA, 551 bp, Zea mays
ggaagctcggaccacgcatgctgcagacgcgttacgtatcggatccagaattcgtgatatatttgttagaatgccagctactttttctttcgctagttcgtaactttctacaagtttcgtctttttcgctgtaatttccatacgcatttctacatatttcgcattctcttcatctagacgctcgtttttagacgtttgctgttgcgattgttcttcaatcatagataattcattacgatgactagcttgttgatttaaaagctcaatatagtcaccttttaaattctcaatctgttcctctaaattgtcagcaaaagtagcaagcagttgctcattatcatgcaatttttgctccaactcttttacttcattcacaaattgcattaaagattctgtacttgactgaatcttaccatcgtaacttttagctttctcagttaattcaacaattaactgctcaggttgcgcacaatgcggttcgagcattttgctttctttcttattaacaactacgctggcctttttaggttttctagctctttactagaaag

SEQ ID NO: 306704 - DNA, 598 bp, Zea mays
aaagctcggtaccacgcatgctgcagacgcgttacgtatcggatccagaattcgtgatttgcgggttatgcaacatttgatgaaattcaccaatggtttacgggagaccgtacaccaatgtggcaagattcattgcttgatacgtgcggcgggttaacggggattataataagtaattggttttggaatagaaaaaagcgctaatctcatttcgagattagcgctttttttgcgggtagtaaaactctacgtgattggcctaattaaagtttcactttatacaccgagtaattcttttagttcgtctgttgatagttcagtcatccaactatcgcttgtgatgactgcattgtttagagattgttttctttctagcatttcatcaattttttcttctaatgttcctgttgtaatggagtttgtgaacatgaacaaatcgtttttgaccaatgcgatatgcgcggtctgttgcttgattttccacagctggattccacaacgatcgtagtgaatgacatgggttgcagcagttaagtttaatcctgtttcgccagcttttaaggataagatgaaaatgtcatacgttccgttttggaac

SEQ ID NO: 306705 - DNA, 656 bp, Zea mays
aaagctcggtaccacgcatgctgcagacgcgttacgtatcggatccagaattcgtgatagttaacattaaatgcgagcgaaaaacaaatgctagataatgcacgaaaaatgatgatcagcgaagtcgcgctcgtacaaaatgttactgaacatcaagcaacagaatttcttcaagatacaattaatcactaaatttaaaatagctggccgctatttttttttgtaaaaaaaggacgaagagttttatctcttcgtccttttatattacccacgcccagcttgaaacgatggatataacgtcattccaccatctgcaaatagcgtaattcccgttacgtaactcgcctctgatgaagcaagccaagttgctactgctgcgatttcttcaggttttccaatatagcccataggtatcatactttctacgtcagcacgttttttaggatcagcaaacttttctgcattgattggcgtattaattgcacctggtcctatattatttactcgaataccttttggcgcatattctagcgctaacgtttctgtcatcagtttaatgccacccttacttgctgcatagtgcacagatagtggccactgaattttctcagaacactagacatataatgacagaccctttatatcatgttctacaa

SEQ ID NO: 306706 - DNA, 656 bp, Zea mays
aaagctcggtaccacgcatgctgcagacgcgttacgtatcggatccagaattcgtgatcatttgtatcacgatttgcaatcaatatattttccttttcataataacgtagtgtatgtgtgctcaatcctaataattttgctacctcactaattgtatacatactaaactccctccacatgcttatccttatatattttatgaacgtatcaaatttataaaaaacatttgacttagagtatactctaacaaatacaatctaaccataaataaatttgaatttagggggattttatatgaaatacactgttattactggtgcaagttccggaattggttatgaagcagctttagcatttgcatctcgcgggaaaaatttagtacttgtagctcgaagacaagaagaattagatggattaaaattgaaaattaacgaaatgcatccagagttagatgttgtcattcgacgaactgatttatctgttactgaagatgtttataaactttatgaaagcctacaagcttttcaaattgaaacgtggattaataacgcaagttttggtaatttcgcctcaattgccgaacaaaatttaaataaaatcgagacgatgttgcatgtcaatatagaggcactaacaatactctcttttttttttcg

SEQ ID NO: 306707 - DNA, 469 bp, Zea mays
actactatgggaagctcggaccacgcatgctgcagacgcgttacgtatcggatccagaattcgtgatatggaagttgtttcacatttagacaataaagacttggagaaacaattagtttctaaagataatacgactattttaacgcaaatatcgatagataaaaaacatggtgaaatatcaaaagtttcaaataatcttcatgaaaaagtgcaaacgaaaggggtaaaaacgtatttaacaggaagtgacttaatagcgggtgattttcttaaatcctctcaagagggagtgaaaaagacagaagttatttcaatcattttcattcttgtagtattaatcctcgtattccgttcaccagttgttccaattgtttctcttcttacagttggtatatcgtatttagtttcaatggggattattgcccaacttgtagatcaatttaatttttcattcttaaacttacacaag

SEQ ID NO: 306708 - DNA, 576 bp, Zea mays
gaagctcggaccacgcatgctgcagacgcgttacgtatcggatccagaattcgtgatggcttaatctgcgcaacagcaatggctggccttgtaggtgctggcgggctaggggatttagcataccgcttcggacatttacgctacgagcctgaagtaatgtatgcaaccgtctttattttaattatcctcgttcaaggattacaatctttagggaatggtgttgcacgaagattgaagaaagattaaaaaagaaggcatctcaccctggtgagatgccttcttttttatcttttaaatccaccttctgaatgaataacttgcccagtaatccactcggcctcttcacttactaaaaatttaatgagtctagctgcatcccttggctgaccaattctgccaaaaggaaacatcggctttaacccttgttttatctcttcagtcatccatcctgtatcggctggtcctggattaattgcattcactgttattgctaaatgagctacctctgctgacaacgtactagtaagagcatcaatagctcccttcggtgtcgcataagctagtttttctgccata

SEQ ID NO: 306709 - DNA, 538 bp, Zea mays
  unsure (1)..(538): unsure at all n locations
tcactatagggtaagctcggtcccacgcatgctgcagacgcgttacgtatcggatccagaattcgtgatagttagtaaatttttcggattttgtatatccacttcatttttcccattcgcgcggtaaatagcgtaataagtagaatcattatctctattgtcaatgataccgattgcaataccttcatctcttggaatggcaccttttaaagtcggttgttttggtggatcatgatcaagccaaggcataggcggaattaatgcaggatatttatatatgtcttttgagagtctatctttagctccaagtggattgttattaatatcttttaagctaaaatgcatactaccttttatttcaggatatangccggtttaatgcaatttgtcttggatattcttctgggatcagaccaagcagggacggagttattattaattttataggccgcttgaccgatgtataggtgaatcggcttgttatttgtttctttaacccaccatctactaatatggcatatgcagctggggtgaaacc

SEQ ID NO: 306710 - DNA, 619 bp, Zea mays
aaagctcggtaccacgcatgctgcagacgcgttacgtatcggatccagaattcgtgatcgaatgccattaatgaaaattcttgtccatctaaaaactcttcaataacgaccttcttacttgccgcgccgaatttcacatcttgcagcatttctttcacagcttgtaatgcctcttcaagcgtcatcgctaccgttacacctttaccagcagctaggccgtcagctttaataacgattggtgcaccaactttttgaatgtactgtactgcttcttcataatctgtaaaagtttcgtacgccgcagttggaatatcatactttttcataagctcttttgtaaaagctttactaccttcaataacagcagccgctttattcggaccaaatacgcgaagtccctcttctttaaaacgatcaacaattccattcataagcggaatttctggtccaacgaaagttaactcaacattattctcttttgcaaataaaactaatgcatcaaaatcattttcatcaatatcaactggtgttgcaacatctctcataccttcattacctggtgctacatataccttttctactgtttcagattgtgcaaacttccaagctaaagcatgct

SEQ ID NO: 306711 - DNA, 348 bp, Zea mays
acagataaaatcattcaaatattacccgtgagcatacacatggccagattttaaccgattatatacaaaaactgcatcatcgctgacgaacagcatacgccgcgcggcgcgcgcgcgcatcggcgtcacaactccctgcccaagatcatctccgcggctgtgcccatagcctcgggaccggcgcggcggaggagcgccaccgcgagctcatcctcgccccagtgccggaggccgctgctcaggcgcttgagcaccctcaggtccacctcctgcacccagcacggggtgcattcaaccaccagtcctaggaacccagagacgtaggctcgccacagggagaggtcgcag

SEQ ID NO: 306712 - DNA, 414 bp, Zea mays
  unsure (1)..(414): unsure at all n locations
caaaggccagacaagctaaagaagaccaagtacgggatgaggcatggccaggtatctctttccgctgcaatgacgcaggtgaaggtggcggcatctctgggggcgacactcgtctggctatccggcggcacggctctcgtccagtccctgatccaggagatgctgccgtcttggttcctgtccgcgcagaacctggatcagggcggggctagcggaggcgtggtgtacaagctaggcgggcacgcgttggcctacttcgcggtgtactcngggatgttggcctggggcatcgaccagacgcccgtgtcccggcgccgcgagagggtcatgcggtcgcacctggggttcctggcgagcgcgctggcggnaagatcttcctcggctgcgacctctccctgtggcgagcctacgtct

SEQ ID NO: 306713 - DNA, 562 bp, Zea mays
gtctttctctgcaattgttggtggagatgaagtagagaaggggaagccatccccgaatatatttttggaagctgcaaagagaatgaactgtgctccttcaaattgcttagtaatagaggattccttgccaggtgttacaggtggaaaagctgcagaaatgcatgtcatagctgtaccttcaatacccaaaaagactgctgagttcagttctgctgatgaggtgatcaattccctccttgatgtgaggcctgaaaagtgggggttgccaccatttaatgattggattgaaggtaccttaccaatagaaccatggtttattggtgggcctgtgatcaaaggatttggccgtggttctaaagtactaggaataccaacagcaaatttacccgcggagaatttttccgacgtagtgtcagaacatacatcaggggtatactttggctgggcaggactttcaacgcgtggtatatataagatggttatgagcattggctggaacccatatttcgacaataccgagaagacagtagaaccttggctgcttcataatttcggcgaggac

SEQ ID NO: 306714 - DNA, 773 bp, Zea mays
  unsure (1)..(773): unsure at all n locations
caagaaaccaccgccgagcccaaccgcacaagcgcgcgaggcaggagagagagagaggcggggagcaaaacaatggaggggaaagaggaggacgtgcgcctgggcgccaacaagttctcggagcgccagcccatcgggactggcggngcatggcgcctctgacgacacggactacaaggagcccctgccggcgccgctgttggatcccgcggagctcaagtcctggtccttctaccgcgcgggcatcgccgagttcgtcgccacctttctcttgctctacatcaccatcctcaccgncatgggcgtgtccaagtccacctccatgtgcgccaccgtcggtattcagttcattgcctggtccttgggaggaatgatctttgcgctcgtttactgcaccgccggcatctccggaggacacattaactcagctgtgacttttgggctgttcttagcccggaagctttccctgactagggccctttttttcattttattgcatgtctgtttgtcttttgtgacctgtgtggtgaaggctttcatgatgtacttttattggctctgtgttgtctttttatttttatttttcttcttcgtttttttttttgtcttgattttttcccttatttttttgttttcttttttggcccatactaatttttttttcttctttttttttttgtctttattttttttccctttccttttttttcttcttttttttgttctacatttttacttttttctttacatttttttattttattttttcttat

SEQ ID NO: 306715 - DNA, 422 bp, Zea mays
ggagttcgagcccaccggtctcgacatgctgcggcgcaccctcaagatcccggtctggcccatcggccctctcgtgcgcgccgccaacctaccagtctcgccggaggccgaggccgccgtcgcgagcttcctggactgccacccgccgtcgtcggtgctgtacatttcattcggctctcagaactccatacgagcagagcacatggcggagctggcattggcgttagagtcaaccggccggccgttcgtctgggctgtcaggccgccggacggacacgacgtcaagggcgagttccgggccgaccagtggctgccggacgggttcgaggagagggcgcgcacgagcaacagagggctgctgtacgcggggtgggcccgcagtgaaggatcctggcgcacgcgttgacgggcgctttcctgag

SEQ ID NO: 306716 - DNA, 189 bp, Zea mays
ccctcgcttccggggcaatctggaggcggccacgcacgacgtggtgataggggttcttgacaccggcgtatggccagagtcgccgagcttcgcgggcggcaacctgccgccaccgcccgctcgctggaagggggtgtgcgaggctggcgtggattttccgccgagcttgtgcgggaggaagctggtggg

SEQ ID NO: 306717 - DNA, 415 bp, Zea mays
ccttcttgaacaagtccttttgacaagacagcagtaatgcagtatagtgcatctcttgtacaacagcatggtacaaatagtacgtcgatactcaactaaaaaaaaaaagaacagatcacattgtaacaacggcgagcaagcacccaccaccgcaaaccatatagccacgcgacgagcatcgaaccgtatcgctattcacaggctagcttgttcccaaagctgctaaggctgatggcaaaagcttggaacgcagagagcggttgccggtaatccattgtgaaaatatcatcgtcgaccttaccaaactgcagcagaaccgtttcctcgtccacgttgctagtagggtcactggggccggcagcagtcacaagctggaaattcttgaccgatgcaactgttacccgcccatggaagt

SEQ ID NO: 306718 - DNA, 183 bp, Zea mays
ggcggcgccaccaacgtcacctgggacggcatcgtcccgccggagtgcgctccttcggaccgcatcgtccgtctctccccggcgcttcgctgggaggaggcgcgcgagccgctgcacgccggcgtcgacgtgggcaacgttctcggcgtcgggcccggcatgcccttcgcgcacgccgtgctc

SEQ ID NO: 306719 - DNA, 488 bp, Zea mays
cgcgaacctgctgttcctggaagcgccggtgggcgtggggttctcgtacgcgaaccggacgtcggacctgcggcggctgggcgaccgcgtcacggcgcaggactcgtacgccttcctcctcggctggctggacaggttccccgagttcaagggccgcgacttgtacatcgccggagagagctacgccgggcactacgtcccacagctcgcggagctcatctacgaagggaacaaaggggcgagcagggacagagccatcagcatcaaaggtttcatgatcgggaacgcggtgctgaacgacgcgacggaccagctgggcatggtggagtacgcgtggagccacgccatcatctcggacgagctctactcggcggtgcggcgggactgcgactccttcaaggaggaggccgacggcgggcggcccggcaagggctgctccccggcgcttcgcgcgttcctgggcgcctacgacgacatcgacatctaca

SEQ ID NO: 306720 - DNA, 366 bp, Zea mays
acgactccgcgccgcgtgcggacccggagggtcttcggggctcgggttcgcgggggagcggactcgagatggcgagggtccgatgttgagaaccggtggttgcccggcggcctagcctgcgccacggacgaccactccctccacaacgccttcagcacctacggcgaggcactggagtccaagatcattctcgatcgggagacgcagaggtcccgcgggtgcggcttagccaccttcttcacggaggaggcgatgcggaacgccatcgagggcatgaacgggaaggagctggacggtccgaacatgaccgaaaacgaggtccagtccctctgcgggcgtggaggcggcggcggtgggtacggtggt

SEQ ID NO: 306721 - DNA, 124 bp, Zea mays
acggggataagcccttaagcctgtcgaacaattaaagggggaagcgagtattacaaacccacgagccaatacttgagactactaattaaactccttttgcaggttttaattcgcccatacatgc

SEQ ID NO: 306722 - DNA, 244 bp, Zea mays
tttatatttttttttttttttttttttttttttgtttttttttttttttattcggacgggacaaattaatatcatatcaaacaatttgtagatgggccttatttacacatgcaaacggacacacgattggtgagggcctaatgacggaaaacagggaaaaatttagggatttacagggggtttataaacacctgacgtaaataaactgaattttttaaggtgatcaggcacaggatccattggg

SEQ ID NO: 306723 - DNA, 491 bp, Zea mays
cccacgcgttcgctgaaggcacgagttgaggttttacagcactcacaaaggaatcttcttggtgaagatctggccctacttagcccaagtgaacttgaccagcttgagaatcaagtagacaagaccttgaagcaaataagatcaagaaaggtaaagtaagagaaggtattcagccattcaggatgaatgaggtcaatggtattttgtgcacaacagaactatagcgaacaataattcatgccatggcactttcctagtttatatctcgaccaataatccatgatattgcaattgtaaatgcattgattatttattcaataaattactagattaatctcacttgaaaagacagggtgccgtggttacgttgatttgtgctactttcgttttagttgaaatttggaaacgtagaaattaaaaaaatcgaggtgtatacaatttatgaggcatttaactggtatttaaaacttagattgtgctgcaatttacca

SEQ ID NO: 306724 - DNA, 512 bp, Zea mays
  unsure (1)..(512): unsure at all n locations
cccacgcgtccgcccacgcgtccgcccacgcgtccgctccgctcggccaccagctttgaccgcctcccctcccctccgctcctgttcctccataccccacccccccgcaggagcggcgcggcggcggcggcggcaaagccaaaggcaagatgttcgggcgcgcgccgaagaagagcgacaacaccaagtactacgagatcctcggggtgcccaagtcggcgtcccaggacgacctcaagaaggcctaccgcaaggcagctatcaagaaccaccccgacaagggcggtgaccccgagaagttcaaggagctcgcacaagcctatgaggttttgagtgatccagagaaacgtgagatttatgatcagtatggtgaagatgcccttaaggaaggaatgggtggtggtgggtcccatgctgatccatttgacattntctcatcattctttggaccctcttttggaggaagtggtggaagcagcangggaagaaagcaaggaggggagaagatgtag

SEQ ID NO: 306725 - DNA, 429 bp, Zea mays
gagaggaggggcagacccagctacatatgtgtgttttaaccatattacagtgtctctcaaccacaatcaaaaaggagaaacttttacacaggttcccgccaaaaaatggaaaacagaaacgcacagaagaatgtccgttgatatgtattgcagatccggagccaccaccactgatccgcaggcctgaaggggacaggaccaacgacattcccgcttgattcttgccatacctttcagacagtagcaacaaagcatctcatgggcgaggatggaggacgcctcgggccggtcagacttcgagcgggacggcgggcaactcgaactcggacgcgatctcctcgatctgcttccggacgctcatgtcgattaagctggagccgtcgcggccgtactgcacggtgaagccggcgatgagctccgggtcgagct

SEQ ID NO: 306726 - DNA, 535 bp, Zea mays
  unsure (1)..(535): unsure at all n locations
gctaaacttgtcagtggaatgcacaagcctgctcagcaaacagttgtcccttcttcatcagttcaagacttactagcatcactacctgtgaagaagatgtaatgatctacctctaacaagatgcctctgtcctttatggttcttgctttcctgggaaaagtttttgagactttgtgtcactattagatcacagacattgtgctttagttggaactctgcatgtgaaactgaatggtgagaataaccatattgttcaggaaacagcttggtggtaagcttggaagttccttgcaggatgatcttggggttgagaccattggtgatctcctaagttttacagaggaaaaattacaagagcagtatggagtaaatactggaacttggttatggaagactgccaggggcattagcggggaagaagttgaggaccgtcttctcccaaagagtacgggtgtgngaagacatttcctggcccagagcactgaagtacagtgcttctgtcaaggctggctggatcactatgtgaagaattagt

SEQ ID NO: 306727 - DNA, 501 bp, Zea mays
  unsure (1)..(501): unsure at all n locations
cccacgcgtccgggcagccatgcgaagccgccccctcctcctgctacgagtggtggtccgaggcgctgcacggcgtgtcggacacggggcccggggtgcggttcggcggcgccttcccgggcgccaccgcgttcccgcaggtcatcggcaccgccgcgtcgctcaacgccacgctctgggagctcgtcggacgggcggtgtccgacgaggcgcgcgccatgtacaacggcgggcgggcgggcctcaccttctggtccccgaacgtgaacatcttccgggacccgcggtggggccgcggccaggagacgcccggcgaggaccccgccgtctcggcgcgctacgccgccgcctacgtgcgcggcctccagcagccctacgccgtcccgaacggcggccacctgaaccgcctcaagctcgccgnctgctgcaagcacttcacggcgtacgacctggacaagtggngcggcacggaccggttccacttcacgccgtggtggcggc

SEQ ID NO: 306728 - DNA, 408 bp, Zea mays
tccacgcgtccgcccacgcgtccgcccacgcgtccgcccacgcgtccggctcgatcgatctcactctcagctggtcgctcactcttgcagctccacccttcactcagtcttaggctcttagctctaggctctagctagccgcgccactccttcgtgtagccatcagccttctcatcgccaccaatggccactgccgaggtccagaccccgaccgtcgtggcggccgaggaagcgcccgtggtggagaccccgccgccggccgtcgtgcccgaggagtctgcccccgccgaggccgaggccgaggccgaggctgaggctgctgctcctgctgatcccgaggagcttcccgcggccgagcagcaggcagccgccgagcccgaggccgctgctcctgctggtgccgaggag

SEQ ID NO: 306729 - DNA, 464 bp, Zea mays
gcggatatcttagaagcaacctatcctgctgttgcgaagagacttcatggggactggatacaggatccagcgatacctgttgttactgggttccttgggaagggctggaaatctggtgctgtaactactttaggccgaggtggtagtgacttgactgctacaaccattggtatggaaagatgttgatggtgtacttacttgtgatccaaatatctacccacatgcaaagactgttccatacttaacatttgaagaggccacagaacttgcttattttggtgctcaggttttgcatccacaatcgatgagacctgctagagaaggtgatattccagttagggttaagaattcatacaaccctaaagctccaggcacccttattaccagacaaagagacatggataaggttgtactaactagcatagtgctcaagtcaaatgtcactatgttggacattgtgagca

SEQ ID NO: 306730 - DNA, 493 bp, Zea mays
cagagatttattgaccaatgaagagatcaaaattcaaggtgatgaggtaacaatcttgaggcctaaatcgcccgtacccgagccagtctgcatggaggttgaccgtgagaggaaccgtgtccgtgccgctgatgctatcgaggctgcaagggatgctgctgagagaggtgatctttccgatgccgtgtcaattcttgaggattgccggaggatactttcagaatctttttcaagccggagtggggaccggctctgcaatgcccttgatgcagagctgagggaaatgcaagagaggatggctaaccggcaacgctatgaggcttcggggcgggcatatctgctgtctggccttagctcacattcatggcagagagccactgcacgaggcgactccactgacagtgatacactttgttactcctaccaaacaccatccatgggtcacatgctacagcgctcacagaaccagggcccatcacaggtccaacaacct

SEQ ID NO: 306731 - DNA, 377 bp, Zea mays
cccacgcgttcgcccacgcgtccgccggacgagctgagccggcacgtcgtctcctccaagaaagcgcaggcgaattggtacaagaagctgctggtggcatggaagaaagcccggccgcctccgaagacgcccgaggaagccgcggccttcgttgtgcagacgctcaagaaccatcagaaagcagatgtggagggcctgttgtctttctacggcctgccgcatccgaacgcggcggcagcagcagcaggcgcgcccgccgctcgcccgccgcccaagaaggcccagcagggcgccaagttcgagctgcacacgctccccattgaccccaagtctgtggccgacggcgacacggtgaacgtgtacgtcgacgcggcgga

SEQ ID NO: 306732 - DNA, 504 bp, Zea mays
gaagatgctagtctcctgtttgatccttgaagtatagcaaaatgcacaatcttgttggttgacaattgacattgacttgtcgcatttcactataaatgttactcattgacttgtcgcatttcactataaatgttactccctccgtcccaaaatatgtagccctcttttttcatccacattcattcgaatgataataaatatagacatacatacaaactacattcataggttaattaatgtatgtttatttagtctaaaacgaattatattttggtacggagggagtattatgttgcaatatttatagaggttttttggatttgaaatgttatatatcaaagccttcattctagctttagattaacacctttaccatagttaaattgcagtgcaaggatgcaatctttctgcagattacgtgacagcagcataataatttaaaggcaaatgtgttattatgttaggttggaattttctctaaagatggcaatggtgcaacaatac

SEQ ID NO: 306733 - DNA, 267 bp, Zea mays
taaattgggagtatgccccagtataccaagacagaaccttggacaaaaagagatgtggttttcctaccgcatctgtatggaggacattggccaacaactacacttttttagcgagagtccgctgttttgtgccatgctccacaactttctcttcgacatgcagtcctttccttcgtctgacagaattcataagctttttagccaagtttggcccaatgcttgaaccatccccgaattcttcgagctgatcctgcgtatttgggacaa

SEQ ID NO: 306734 - DNA, 292 bp, Zea mays
gtgaggttttccgcggttcgggttcgtgggtgagcggatcgagatggatgggtcctatgttgggtaccgctacttcatggcggactctctgtgcatggcgaccactgcctgcacaacgccttgagcaccaaccgagaggtcctcgagtccaagatcatcctatatcgggagacgcagaggtcccgtagctgtggcttaaacaccttctcaaccgaagtggcgatgcgtaacgccatcgagggcatgaacggcagggagctggacggacgcaacatcaccgacaacgaggccc

SEQ ID NO: 306735 - DNA, 339 bp, Zea mays
gcgatgctttcagcgcttcgggctcatgagtgagcgcaacaatattgattcttcctatggtagactaccgctaattcgttggcggtgtctcctgggccactgacaatcactacctgcacaacgcctgcggcacatacagcgaggtcctcgagaacaataccattctatatcgggagactcattggtaccggagcttcgggttagtcaccttctcaacagcagagtcgattatgaacgccatagagggcatgaactgcaaggagctggacggccgtaacatgagcgtcaacgaggcccattcccgtcgaggccgtggaggtagctacggacgttacggtg

SEQ ID NO: 306736 - DNA, 317 bp, Zea mays
gtgaggttttccgaggttcgagttcgtgagtgagcgaatcaagatggatgattcttatgttgagtaccgctacttggttgccggtctaccctgggccacggacgatcactgcctgcagaacgccttaagcacatacggagaggtcctcgagtccaacatcatcctacatcgggagacacataggtaacaaggattacgtttacacaccttttacaggcaggaggcgatgctacacgccatccagggcatgaacggtaaggagctggacggactgaacatgcaaggtaacgagggccagtaccgttgacaccgtggag

SEQ ID NO: 306737 - DNA, 243 bp, Zea mays
gttattctttcatatcagggctggcatgattatgagaaatcttgaccttaagaaaggtggcaacggacgctacctcaagaccgctgcctacggccactttggaagggacgaccttgacttcacctgagacgcagacaatgcggtcaaggcggagaaaactattgtctaaggcgggattcttttgagaaagaagctattggtggtctgctgtgcttaatcatgctcttatatggctgctacatg

SEQ ID NO: 306738 - DNA, 472 bp, Zea mays
ttcattcgtccgaccacgcgttcgcccacgcgtccggtctgcagaccccaactacccccagcctcagaaggaacctttcagaagcgcaagactctaaaggtcgacaccttcccattcttactcggcgaggcggtcgcctgagatcacataaacactggtgaacgctgttgctgcgcttgcgagcagcgatggtgtcaaggacaccatctttttcacccaatagggagatggacctaccggtgtcaccggaagtgtctctggcatcaagcctggcctccatgggttccatgtacatgcactggctgacaccaccagtggatgcatgtcaactggaccacactacaatgctctgagcaacgagcatgtggcaccagaagatgagcaccgccatactggtgaccttggaaacgtgacagctggagcagctggagttgctaagatcagtgtcaccgacagccagatcacactgact

SEQ ID NO: 306739 - DNA, 388 bp, Zea mays
ttctcgcgcccgagcaacagagcttcaagcggcaccggcgaagcagctaagtggggatggagatcattcggctctgctttaaagcacgagaggatgccgatgcacacggcctcacccgacgcgagcgctacaccatagaccttcctaccaataccgcagagctcatgccaggccaggacgagaccgacacaacccaccacggaagatgcttgacttgcactctcaagctgggacacacaggtatagtgcagagaatcgggccgagccggaccgcccacgacgaagccgacagggcgtcgagccaaacggctaccgacgaagacagtccaaacaattaaagggccatgccctgcaagcccgcagtgtaaaaacagtggacagacatgga

SEQ ID NO: 306740 - DNA, 376 bp, Zea mays
aaccgtcgtagggacactagaatggccgcggcgccgacatccctcgcgtcctgccacctgtggccaatcgcggcggggtccactcccggcgcacgacatcagggtaggcatgggatgctcccgccggcgagccgggcgcatggttgccatggctggatccggcaagctcttcgtcggaggcaactggaggagccacggaacagaggacttcattagcaaacttggatactaatcgaatgctgctaccgttgaaactgatcgagatgttgtggaggcacctacgtttatctatcttgctcaggatcagaattcactaactggacgcgttgaggattatgctcataacgtgtggagcgctgaaggaggagcctacacc

SEQ ID NO: 306741 - DNA, 402 bp, Zea mays
gattcttctattcatcaacgatcaaattcctcccctctccgatccaattcgtcgtcgtctcgttcgtcattattttacgtcgtccgtccgcaaataatgtgctctctgctataattgtcgtgtgtagtagtaagtagctgttactatttttccatgtactgtcagtcgcacaatcatcatatataattaatatctctatataaaaaaaaaaataaataacgaaagaaaaaaaaaaagctaatataccaaagaaaaatactaaaagatgaaaccaattaagaaagcaacaagaaattaatgagaacaaataccgggggggggcgctttttaaggatccaaatttttcgaccggggctttgaccgattatatttttttttggtggggccaaaattaaattacct

SEQ ID NO: 306742 - DNA, 525 bp, Zea mays
ccccagtccatatggattgagggggattgagggggtttcaatccctaacaaatcaaaatcccctccaatccgtatcaatcccctccaatccatatggattgaaaataaccgaacaagcccttattaacctcactccatatcggttgagatgtattagggtttaaggtcatgtttggtttgatcgactaaagattagtcccttcattttaatcttatttagtttctaaattgtcaaacggtagtactaaaataggaggctaaaatggactaaaccatattaattccacatttgcccctcatttagtttaattgtactaatagcaggagaatgttaaaggtcattttagtgtttttatgagtcatttagtatatttttactaatttttagtccataagactaaacatgttaggtactaaactttattctcctaacctaaattttaggtctctagactaaagaaaccaaacatgacctacattagtttaaaatacaccttaatacatctcacacgaattgagctcata

SEQ ID NO: 306743 - DNA, 426 bp, Zea mays
aggtatgtgcccgtgcgttgcaacggcacacaaaatattcaaattaaacacatgtgaaactattttggtacttttctcacaaagacagaaatacctaaagttgtgtaatctgagatgacaagtaacatgacccgtaagaaaagttgaacagaaatatgccccctcctggcaagccaagcacatacttcctttccttcaacacaagtagagtccatcccatctagatttagtcgagcctgatgacaccgtacaattccatcggtgctgcagtggcgttctgcgcagcgagcacgaacatgaagagtgagatcgacctgaatgcgtcttatgatcatagaacttcgaaccacctgcatcctctggtcattgtagatgtaatgcaaggtcaaaacgaacaccataaacatgcatttctgttacccagta

SEQ ID NO: 306744 - DNA, 421 bp, Zea mays
gcgtcttcgtactcgcctacctccgcggctcaaacctttcccccttctaccaattacttgcgccggcacgccgatgcacccgtacgacgacaccatgagggagtgcatttcgatccacatcggacaggccggtatccaggtcggaaacgcgtgctgggagctgtactggcttgagcatggcattcaggctgacggacagatgcacggtgacaagaccattgggggaggtgatgatgctttcaacaccttcttcagtgagactggtgctgggaagcacgtgccccgtgctgtttttgttgaccttgaacccactgtcatcgatgaggtgagaactggcacctaccggcagctctttcaccctgagcagctcatcagtgggaaggaggatgcaggccaacaactttgcccgtggtcactacac

SEQ ID NO: 306745 - DNA, 441 bp, Zea mays
ggctttactgtggtggccttttactcagcacaatcttgtccctcaagattctgttacagtaatcgattcacgttatggtgagaatttttctgtgtacaagattaaagacaaaatgctcatccctcaatttgatgcatgcgcaagttggtggactcaagggcctgattctaacttgcagattgaacttgcaagagatatgggctatgctgccgcaagatatggtcatgtgatgtttccagagaatgttcatgagcctgctcttcattctgcggaagttttacttggaggagttggtaaaggatgggcttctcgagtctattattcagacaatggatccactgcaattgaaattgctctgaagatggcatttcgtaaatttttttttgatcatggaaattatggccagcagtgaaaatagtacaagaaatgaaagaaacattc

SEQ ID NO: 306746 - DNA, 441 bp, Zea mays
gtgactccccaaacacagacggagtcgatccagactccagctccaacgtgtgcatcgaggactcgtacatatccaccggcgacgacctggtggccatcaagagcgggtgggacgagtacgggatcgcgtacgggcggccgagcgccggcgtcacggtccggcgcgtgaggggctcgtcccccttcagcggcatcgccatcggcagcgaggcctccggcggggtgcgcgacgtcctggtggaggactgcgccatcttcgacagcggctacggcatccacatcaagaccaacgtcggccggggcggctacatccgcaacgtcaccgtcgacggcgtgcgcctgaccggcgtgcgcagcggcgtccgcatcgccggcgacgtcggcgaccaccccgacgcgcacttcagccagctcgccgtgccacggtcgacgccgtgcgcat

SEQ ID NO: 306747 - DNA, 455 bp, Zea mays
  unsure (1)..(455): unsure at all n locations
gtcgtatctggcgctcgcggctggaccaccgggtctccgagcacgacgacgcgggcgcgcccggatacaagctcgaggagatctgcgagctcctgcgtgcctccgacgccagcatcgtcaaggaggtcgccgactgcgacctcaagcgcctagacaacaagagctcccttgctaagcaaaaggctttacggttgatcaaatacgcaattggaaaatctggtactgatttcaagagggagatgcaatggcactcagcggctatacgccaactagttgattacaaaggccaccctgaccccttaagaggggatgcccttaatatggctgttcgggaaaactgtcaatgaggcttattgctgcaattttctccacagaggaccgtaaacctgctggtcgcagccttcccntataccattggcccctccacgctttggaattactaattaccaagcccc

SEQ ID NO: 306748 - DNA, 430 bp, Zea mays
gtcatgattatttatattcggaatttaaactggaatttgtctaattattcaacagtaactacggtacaacacctccattgttctgctgctgtagtgctgtttaagattagtgataagggaacaggtcatcctacttcaagaacacttgaaacaatctgctatgccgtgacaagaacaatggaggcaatcactttcttattctacggattctatctgggtacattctcacaagaatcagagacaaactagcttctcacaagaatcagagggcagcagcgcatcaggaggggtttttggccttgattctgagcttccgcgcaacggccgcagctcttgggtgggcagtcttcctgccgctgctgtcgccgctgctctgctccatctccacccagttgatcacccgcagcatcaacgactgcgggcaacagca

SEQ ID NO: 306749 - DNA, 499 bp, Zea mays
cccacgcgtccggtttgcaattgcatttggtaccgcaattggctgcatcggcctcctcgtcctcgctgccgggtttctgttctggtggaggcatcgtagaaaccggcaggtcctttttgatgtcgatgatcaacacatggagaacgttagcctcgggaacgtgaagaggttccagttcagggagcttcagtctgcgacaggcaacttcagcagcaagaacatactgggaaaaggtggctttggatacgtctacagagggcagttccctgacggaactcttgtggccgtgaagcgactcaaggacggcaacgccgcgggcggcgaggcccggtttcaaaccgaggtcgagatgatcagcctggcactgcacagaaaccttctcaggctctatgggttctgcatgaccgccacagaaaggttgctggtctatccatacatgtctaatggaaagcttcgcgtcgcgcctcaaagggaagccaacttgactgggtgacgagga

SEQ ID NO: 306750 - DNA, 335 bp, Zea mays
ctccgacgggcattaccaacttttagaaacaaacaaaatggatgctaatggtacacataatacaacgaagcgaaagctcctctgctcgacagagtcatcatgtcgccgtcgccgtgccggcgagctcaggcaagccccacgagcttctcgctgatctcccagagcttcttggccttctccggatcgctggcctcctgcgacagctggttctcgaacgacgccgagtccttgtacgccttggcgccgtcgaagctctcggagccgtcgatcatggcagagccgttctggccgggcagccccgccgggaggccgtggaggtcgcccagcccggcctt

SEQ ID NO: 306751 - DNA, 436 bp, Zea mays
cccgttcacccctgtctcgtcgtggcgacgattggggaccctagcctcctacgcccaataccctaaacccttcccttgcagcacctgccactgccagtgcattagatttacagcaacggattggtttggccaacacgttgagttcaggttcaatgtctgaaccagcacaacctagtggaggggaaggtgatgtcaacacgctccgaatacttgtagcaaccgactgccatctaggctacatggagaaagatgagatacgtaggtttgattcctttcaagcatttgaggagatttgcgcattggcagataaaaataaggtggattttatacttctcggatggtgatctattccatgagaacaagcgcgtcacgctcaaccctggtaaaaacgattgagattctacggcgctactgcctaaatgatcaacctgtgaag

SEQ ID NO: 306752 - DNA, 441 bp, Zea mays
cccactcgttcgcccacgcgtccgcccacgcgtccggggagctttatgagttctgcctggaccagagctatgcagaccgtaacctgatcgcaaagtggaaaaagccaggatacgagcgcctttgctgccttcggtgcatacagacacgtgaccacaactttgcaacgacttgtgtctgccgagtccccaagcatctgagggaggagcaagtgatagaatgtgtccattgcggctgcaggggttgtgccagcggtgactaatcttgtcatcatgttgttgggctcacgactcatcatcaccatcctaaccacattagatgtctcgtgagcatggatcggctatggtgattagcatgaatgtgttgtggtaactagttggaagactaaatttcctgacgtttggatgtttgcaactgctatgtactataaagactcctcgtgc

SEQ ID NO: 306753 - DNA, 376 bp, Zea mays
agcgcatttgagcacatttgctccagcactactgctagctatggaatggcgacgaaggtggcgaccgctcgcaaggtgcaggttgccaccatgaaggtggcgccgatggccgagagggccacggtgcaggtgcctgtgaagcgcatggacctgtcgctccagaagaaccacttcccgccgtgcgtgcagaaccacatccactacttcctcgggggccggctggtgcacctgtaccttgacgtgctgaagctcaccggcttccctacccaggacatctagatgtcgcgcctcttcacgatgcacatgctgctggccagccgcaactacgaggacaccgtgacggtcttgtacctggtgaccatcaactacgggcacg

SEQ ID NO: 306754 - DNA, 304 bp, Zea mays
tgcgcatctgcggccatggacgccaccggcactggagctggagggatggcgaagaagggagcggccggtcgcaaggccggcgggccgaggaagaagtcggtgacgaggtccgtgaaggccgggctccagttccccgtcggccgcatcgggcgctacctcaagaagggccgctactcgcagtgcgtcggcagcggtgcccccgtctacctcgcggtcgtcctggagtacctcgacgctgaggtcctgtagctcgccggcaacgctgccatggacaacaagaagactcgcatcgtcccgcgccacg

SEQ ID NO: 306755 - DNA, 337 bp, Zea mays
ctgctgtttgagcccgcacaggggtgctccctgttggtgaagggcgtgactacaccgcgggggcctaccgagaacctggagagggggacgatactcctcgttacgatggtccatctcctatacacgtacaacaaggctcatgaccttaagatggcctggctagtgatcgtggctaccgatgccatgatgcacatggcaccggacatatagatgatacgacgtgtggatcgcccgcacaagtgcctggatgacgagatgactgcctacgcaatattaacctggctgattgtcgttaagccctaataggatctttgccagaatgtgaacccttgcgcac

SEQ ID NO: 306756 - DNA, 318 bp, Zea mays
gcgtctttccagtcaccgccgcgggcgcgctcaagtggtacaagctcgctgccaaggccatctccaggctgcagtcgctgcccagcgggaacctgtcgttgctgtgcgatgtgcttgtccgtgtggtgagcgaactcacgggctatgaccgggtcatggcctacaagttctatgaggatgagcatggcgaggtcatttccgaatgcaggaggtccgatctggagccgtatcttggactgcactacccagccaccgacatcccgcaggcgtccaggttcctgtttatgaagaacaaagtgcggatgatatgtgattgct

SEQ ID NO: 306757 - DNA, 267 bp, Zea mays
gcatagccgttgtgcttagttgccggggacgaagttggtggcgtaggcccatgcaacttcattgtctttcggatcggagagggtgtacgtacgtggattgattgatgctgcgagatgcatgtgtgtcttttgtttacgttgcattgcataggcaagtcgagatgatgagttggcgttgtacactaagatgaaccatgtttgtgcaatagtggtggtttttgtttcctgctggttaattgttgatatccattaatttgtttttcttct

SEQ ID NO: 306758 - DNA, 446 bp, Zea mays
  unsure (1)..(446): unsure at all n locations
ctgaattttggtataacaccaacattcactcttccttgggtacatctccattcgaagttttgtatgggtatctacctcgccactttggtattcaggattccacggtggctccttttgatgaanctgaattcttggctgaaagacagagagttggttactaagttggctcggcaacacttattgcacgctcaagcttggatgaaatatcaagtcgataagaatcggactgaacgagtatttcaagtgggtgataaagtgcatttgaagctctagccgtatgttcaggcatctctcgcaactcgatccaatcagaaattggcgttcaaattttttggaccttacacagtgctacaacgcattggtgatgtcgcatacaaattacagttacctgacagttccaacatgcatctagtctttcatgtatctcaattgaagactgtgttgag

SEQ ID NO: 306759 - DNA, 432 bp, Zea mays
cccacgcgtcctcaagtttattagtgcaactgacactataaaaaggatgaagactaacattgttggaatggaggcaaatatggagcagctccttacaaagataacatcagtgcaatcaagaagcgacacagtgaatacatctctttttgacaaaagggaaaacattgagaaattacatcgcacacgcaatctgctccggaaagttcaattcatatatgaccttccaactcgtcttaacaaatgcatcaagacagaagcatatgcagatgctgtcaggttttttactggagcaaaacctatttttgaggcctatggagatacatcctttcgagactgtaaaaaggcttctgaggaggcaatggatgtagttatacaacaccttcagacaaagttatactcagattctgaacctattgaagcaagagcagaagc

SEQ ID NO: 306760 - DNA, 355 bp, Zea mays
atccatactggaaagcgataggatacagcgtggacgagccacgggaggatcgggctcggacggcgacaccgtcgccgtcccggcccctcgacgtcggcgtcgtggagaccaggctgctggacgacaacaagctgctcagatcgctcgtggggaggggcctcacggtgaagccggcgtcgtcggacgcgaaccaccacacagtgcaatgcgacgccgtcatcgtggggtccggctgcggcggtggcgtggccgcggccgtgctcgcgtccgcggggtacaaggtggtggtcgtcgagaaaggcgactacttcaccgccgaggactacagctcgatcgagggcccgtccatggagcg

SEQ ID NO: 306761 - DNA, 281 bp, Zea mays
ttcctttttttttttttttttttttttcaaatatcaaacttaatatggattgggggcgtactgctgaagaagagctttgggttcaacacaaaggacacaacaggtccgtttaaccaacgccgccacatccacgcttcatgacccacataccacagctgttaattagacgaagacatccatatagaggtgcaccagggggcaccaggcacctcagatgcccagggacagcagcagtttaaatgaaccatggcttactgaccaccgcggaggccgcacaccag

SEQ ID NO: 306762 - DNA, 413 bp, Zea mays
tggcgcgccacttcctgcagcgggcgctgctcctgttcccactcgtcttcctcctcctcctccttgccccgcccctcgccggcgcgtggggaaaggagggccacatcatggtctgcaagatcgccgaggtcgcgcccgattccgccctatgaaagttgggtcgaattgtagacagcagagctgggcgagcgctccttcctggaattctgatggatgcctctttgcgcggcgtgcagaagtacctgtcggagaaggcggcggcggcggtgcaggcgctgctgccggagtcggcgggcggtgagctgtcgacggtgtgcccgtgggcggaccaggtgcgctggcactaccactgggccagcccgctccactacgccaacaccccccaagtctgcaacttcaagtattctcgggac

SEQ ID NO: 306763 - DNA, 391 bp, Zea mays
gcggccgccctttttttttttttttttttttgctaatagccaacaatttattcggttacacgcaaacgcatcagtaagcaagcagctagtcctgtttgtttcattgggcgttacattcatataacagaatcacagacatgtttttcgacacattgactcacagactagatcatatatgtgactgaaacacagctgtcactcttagcttgcatagagtatgacgctgtcaccgcatatttatttatttcctttgcctcaagatccatcttcagggtagccatgttggcatgaagttattcatatgctgaggagcgaaccccatctgaaggggaggttctgctgcagcttccaggggatgaaagaacaaaccattgccaacatgtgatggggc

SEQ ID NO: 306764 - DNA, 385 bp, Zea mays
cggacgcttctcttccacgcgtccgtggacgcgtggggcgaaaggttatagagttggtcctgtgtatgatgatgtgttggcaatggcttggttttttctggagcttattgtaaaatcaatgggattggaacaaagtcgtctcttctaccacaatcttccactaggtgaagatgtcccaccactgcaattgaaagaaggtgtcttcaggtgcatcatgcagctctttgattgccttctaactgaggttcatgagcgttgtaaaaagggtttaagcttggcaaaacgcttgaacagcacacttgctttcttttgctatgatcttttatcaattattgagcctcgccaagtttttgagctggtttcgttgtacatggacaagtttgca

SEQ ID NO: 306765 - DNA, 414 bp, Zea mays
ctggaatctaatatttacttccaatgaggatcgaacacatgctcctgcaagagataacacagcaaacaaatcttatgctatgcctgcccctaatctggatcattcattctccactatacagttaagagagccaccagtcgtcctgaagccttcagaacaccagtctgagcaggaggcacttgaaatagcaattacaaagttgctattgaagtcatattacaatattgtcaggaaaaatgtggaggacttcataccaaaagcaattatgcatttcctggtatgagagattcttatccaattgtcctttatgtgcgcattccatctctgtatgcaatccttgtgctacttttaatggcatggtaggcttagatgtcagtgctaaactactaatgaacattggatttaccattcttt

SEQ ID NO: 306766 - DNA, 303 bp, Zea mays
ttgcgcagcacgcgctttttttccaccatctggcgccgtccgtcctcgtacaggcggtgctgggccgccttcgggagctcgtaggcgtcggagaccgcgcctagcaccttggcggcgcgcagctgcgagtccttggagacccggatcgtgttgagctcgatgaacttggccatactcttggcgacgtatcggttcttaaccagcgcacactcgatccgtgtgccggcgtgatccgtgctcttggacacggggaagagcatgacgccgtggtcggcccgtctggtgatggccgtgtactgcggg

SEQ ID NO: 306767 - DNA, 399 bp, Zea mays
cccacgcgtccgtccacgcgtccgtccgttgttaccgcagtaaggattctacaaatagtatggctctttttatccttgattgatgcggggatttattaggaactaggcaagaaagtcagatcttttatataatcttgctcattccgatttttgccctacatcctgattcgatatatagtgaaatatattttggacttagttctgggagtgaggggatttttataaaaacgtgtatgagcccagtgaggagaggccatgaaggttctaggagtgaagggattaggatcgggaactgctgctgcatcaggcgcaacaaggcaatgaggaggatgtgtttcagggcaatgggtgttgtaggagcattgatataagtgacgccctcactgaagttggtctgac

SEQ ID NO: 306768 - DNA, 254 bp, Zea mays
gcttcttgtccgtccatgcgctacgacctgatccgggccgatgatgctctcgagctgggatggatgaacaacatggtggactttgtcttcccggacctgttgcaggtggatgatttagtgaacgacaagatcgagttgcagaaagaagaaggagcctaggagaaggaggagaacgaccttgcggctcacaagaacatgcatgcgcaggtgcttcctgatcgttttggcggcaccgtcaatgctctgcatgggtg

SEQ ID NO: 306769 - DNA, 324 bp, Zea mays
gctatgtgtactgctaggagcaggatcattgaaagctccatgaatggtgtcgaattgtgcattgtgaacactgatgttgaggctatgccgatgtgacccatcgaaccagataatctggtacagattggctaagagttgacacgtgttctcggtgctgctgagaacccagacatcggcttgaacagcattcaaagacatccaggagttggtagaacacgactactgatggtgccaatatggtttttgtgacggctggaatggtaggcgggacaggcactggtggaacacctattattggagggattgcatagtccatggtgcata

SEQ ID NO: 306770 - DNA, 487 bp, Zea mays
cccacgcgtccgcaaggatgaaatagagacacaagtacgtgacatgctgtcgcagggagtcatccaaaagagccacagtctgtttgcatcgccagtattgctggtcaagaagaaagatcaaacgtggcgcttctgtattgattaccgctatctcaacgctataacagtgaagagctcgtatcctgttccaatctttgatcagctgatggatgaactgtcctctgcacaatggtttagcaagcttgatctgaaagcgggttaccatcaaatctgtctagtaccaggagaagaaccaaagacggccttccaaacacatttgggtcatttcgagtttcgagtaatggcttttggcttgactggagctcccaacacttttctgggtgccatgaatgatacactggcaccagtattgcgtcgtcgtgccctcgtgttcttcgatgacatacttatttacagtcctacatttgagtcccacttgcaacattta

SEQ ID NO: 306771 - DNA, 358 bp, Zea mays
gccacacgtaggaccacgcgtccggtcgatcgacagtggcactagctagtcgctctactagagggcggctatagaggtgtctgcactgcgccgctgctaagggaggatcggaagcgacgatgcggtcggatgctactgcctatctggcagggggcgctgcctgtgtggagctggcggaccccgtgcagggaggcaactactaccaggacactgagatgagctgtggcaatgtacgaggtacggcagaggactgtaaacgcgggctggacctgactctggaccgtacgttcagcttctggtgtcagatcaagaacgagaacatggtcggcaagaacgacatgcagattaagctggtgcc

SEQ ID NO: 306772 - DNA, 320 bp, Zea mays
gttttgggcgcactaacatggcgactctcttagcctggcatgcagggtaagcgctacgagctaggcaaaccattcaattggggccggacgaacgagctattcatggtcaccatcgtacctacatgaacgcgcggattgcgaagcggtttaaagagggttaagagaaagaacaacttgcagaagatcttgcaatagattgcaatgctgagtttgaaaggatcataaaggcattggttttgactgaaacgggacccagcttgatgctaactcttacgtactcatttgatagaaatgtaacaattaactctgcgactgagaag

SEQ ID NO: 306773 - DNA, 358 bp, Zea mays
aaagcgtaaataacgattatattaacatagtacacttcgaacagacataatgtcttaacctttattcatcaaagtacagcgaaacatggacatccatccacaggaagatgactgggggtatcattagactagcatccatggagttcaacatcatatcttcatctgcaagcttctgatcaaaatttaagcaagggtgagctcacttatggtcggggctcagcaagtgggggaaaactaatgcaagtttaccaaggtgaggccaaggttgagcagtaagcattttagctggtcaatattttattaacaacacctgtcttactagtaagtgtgaatcccaagtattcccattaaacaaagg

SEQ ID NO: 306774 - DNA, 226 bp, Zea mays
cccacgcgtctgttctcagcaagctctgcctctccgggacgctcgacccggccgccgtgcgcggcaaaatagttgtgtgcgaccgcggcgtcaacgcgcgcgtggagaagggcgccgtcgtgaaggcggccggcggcgccggcatgatactggcgaacacggcagccagcggagaggagctcgtggcggacagccacctgctccccgcggtggcggtggggcgcgc

SEQ ID NO: 306775 - DNA, 101 bp, Zea mays
  unsure (1)..(101): unsure at all n locations
ctatcaacgnaaacagccataattattctcaatgacccggtggcaatgcaggggaattaacaactcttacaacatcaggtgttgttaaccacacactactt

SEQ ID NO: 306776 - DNA, 380 bp, Zea mays
cccacgcgttctcccacgcgtccggcgcctacgctgacgagcttgtccagaccgcgaaaaccatcgcgtcgccgggaaggggcatcctcgccatggacgagtcgaacgcgacctgcgggaagaggctcgactccatcggcctcgagaacaccgaggccaaccgccaggcctacaggaccctcctcgtcagcgctccaggcctgggacagtacatctctggtgccatcctcttcgaggagaccctctaccagtcgaccgtcgacggcaagaagatcgtcgacgtgcttagtgagcagggaatcgtgcctggtatcaaggtcgacaagggtcttgtgccactcgctggctccaacaacgagtcatggtgccaaggtctcgat

SEQ ID NO: 306777 - DNA, 444 bp, Zea mays
cggacgcgtgttataggtttgaggtacgaggaattttgaagaatgcagatatacttaactctccgaatgtcatctgttcgttgagttttgatagggatgaagaatattttgctgctgctggagtttcaaagaaaataaaaatatttgaatttgatgcactcttaaatgatcgtgttgatattcattacccactgatagagatgcctagcaagtccaagcttagctgtgtctgttggaacaactatataaagaactacctggcttcaacagactatgatggcactgttcagctatgggatgccagctctggtcaaggattcacacagtttacagagcaccggaaaaggacttggtctgtgagtttttcagatgtcgaccctactaagttggcaagtggtagtgatgattgttgcgtgaaagtatggagtattaatcagaaaaatt

SEQ ID NO: 306778 - DNA, 435 bp, Zea mays
cccgtctctttccgctagctttccctttcccttgcgctcctccttcactcctcaccctccccgcaggccgcggctcggcaagcaagcaacaacccccgccactcccctccctcaccaccatggcgtcgggcggctgcgctctcgcgccgaggccaggacttggcgccgcccgtggccgtggctctccgtcttctccctctccccgcgacgacaacccctcctcctccctgggcggcggcggcggctctagctagctagctagatggcgtcggcgatggtggtgttcgggggcggcaaggaccggccgtcgcctggcggcggtggggcgccgcaggtggacgcgggcaagtacgtgcgctacacccccgagcaggtcgaggcgctcgagcgagtctacggcgagtgccccaagcccagcagttttaagaacattta

SEQ ID NO: 306779 - DNA, 361 bp, Zea mays
gtaagttgtttctgaccgaccatgaattcttgtgcgctggaatgatgaccattgttgttgttgtgtgagtgtcctcgaacatgatgtatgtagaggagtagcacatccgggggtgcaacgaccaggtgttctacctcgctgatgagccctgtgtgcactgcatttggctgtccatccaagagtgatcggtactcaccatatcgtgcgcgttcgacgactattatattaaggattgtggcgtcatctcgacaccggtggtgtgcagaggtggaccgacaacaatgaccactctgcatcgtgggggtaccttttgtgccggcctgcctttaattctcttagaaacacacacttgcattttttt

SEQ ID NO: 306780 - DNA, 295 bp, Zea mays
cccacgcgtttttggacgcgtgggctgctccattctcagccggcgccaattccttcccgtgctccgcaaccgctgagtgagaagaagagatggccggcaagggcgatggcccggctatcggcattgatcttcgcacgacgaactcttgcgttggcgtgtgggagcacgaccgcgttgagatcattgccaacgaccagggtaaccgcaccacgccctcgtacgtcgcctttaccgactccgagcgcctcatcggagatgcggccaagaaccaggtcgccatgaaccccatcaacac

SEQ ID NO: 306781 - DNA, 388 bp, Zea mays
agttactcctataatatattccttctgttatgttcctgagcccacatgtcggggctcagcatccttgtatgtgcctcccttgagctataaaagggaagacacacgacgttacaaggcaggttcactcagaccctcagactcacaagttcatacaagctctcaagttcacaaactcaatacaacacacagtggagtagggtattacgctccggcggcccgaaccactctaaatccttgtgtcctcgtgtgctcttccaccattaatgactgtaattgcagggacacgaagagttgtagcgcttttgccaacaagatccgctatatgcttgtagagtggaaccttgtggcgcgccctgtcaagtgcatgatggcctggtcgatctgcgtc

SEQ ID NO: 306782 - DNA, 423 bp, Zea mays
atttggtgacctgatcacctcaatcttgtagggctcaccgaggcagaccttaggaggtgggcggacctgactgggagggagctcaatttcatcatcccacaggaagccagtgatttcgggacatggaggaccattccaaaggcagagcttgagcttgagaagccacaccctgtcatgaagagcaacggcacccaaaacccagagaaaacaggcttgaatctgtcgtgaccgtccaaagaaaacaggcttgaatctgtcgtcaccgtccaatcattcaggcgaagatggtatggatctctctccagttagcagcaagcgtaggaaggaattgtccccacaggccatggatgaggaagtattcttcccactgaattcttgccctcagaagacacaacaagatgtggagatgcactcaccaacgca

SEQ ID NO: 306783 - DNA, 345 bp, Zea mays
gtaaagcaggatagcaacatagagtcccacatcaatcaaagaatgtggtcacaacaaagaggccattggagcttcttcacatggacctctttggacctgtggcttacatcagcattggtggtagtaagtatggtttagtcattgtttatgattttttctcgcttcacctgaattttctttttgagtgacaaaggtgaaacccaagagaccttgaagaaattcatgagaagagctcaaaatgagtttgagctcaaaatcaagaaagtgagaagtgataataggacagaattcaagaacacatgtgtcgaggaattcttaggggaagaaggaatcaaacatgagttc

SEQ ID NO: 306784 - DNA, 448 bp, Zea mays
cccacgcgtccggccgtcgttgacaccagctagtagcagccagcactagtcgctactagctagatagccatatcaccagcatgtggaggctgacggtggccgagggcggcggcccgtggctgcgctcgacgaacggcttcgtggggcgggcggtgtgggagttcgaccctgacctcggtacgccggaggagcgcgacgaggtagagagggtacgccaggagttctccgaccaccgcttccagaggagagagtcggccgacctcctcatgcgcatgcagtgcgcaaagcagaacagatctcaacgtcgtgatctgccacgcatcaagcttggggaggatgagcacgtcactgaagaaattgtactgagctccttgaggtcggctctggaccagttctcttcactgcaagccagcgatgggcactggcctggtgatttcagcgggattat

SEQ ID NO: 306785 - DNA, 290 bp, Zea mays
tctttttttttttttttttttttttttttttttttttttttttttgtggggagcacagaacacttgcaacataatagcattatagcatatacaccgaaattggacaaatagggttggcaaccaaagaaggttgttttgaacaatcatggccaatggggggctacgaacaatttactacatagtccaaaagggaaacacacagcagcagtttccaatgggggggaaccatagagtatatactcaaaataacccaaccattaaccaccagagaactacttattagccagcta

SEQ ID NO: 306786 - DNA, 303 bp, Zea mays
acacattcatcacccatgttttatttccgacaatcaaatcccaacgaggatagcaccggccgaactgaaacgtaggaggcataagggggccatcccatccaaggggggcaacaccgttctacaactaaaaaacccaaaccaactgcaaatccaccgacccagagggggcagtagacccataaaaataaaaacgccagaccaacataacacactgggtcccttaatttatggggccccccttttttttaggccccttgctaaagcagaacctgatggaagggccacaccccgggccccttgccc

SEQ ID NO: 306787 - DNA, 477 bp, Zea mays
ccagctttgaccgtctcccctcccctccgctcctgttcctccataccccacccccccgcaggagcggcgcggcggcggcggcggcaaagccaaaggcaagatgttcgggcgcgcgccgaagaagagcgacaacaccaagtactacgagatcctcggggtgcccaagtcggcgtcccaggacgacctcaagaaggcctaccgcaaggcagctatcaagaaccaccccgacaagggcggtgaccccgagaagttcaaggagctcgcacaagcctatgaggttttgagtgatccagagaaacgtgagatttatgatcagtatggtgaagatgcccttaaggaaggaatggggtggtggtgggtcccatgctgatccatttgacattttctcatcattctttggaccctcttttggaggaggtggtggaagcagcaagggaagaaggcaaaggaggggagaagatgtagtccactcactta

SEQ ID NO: 306788 - DNA, 493 bp, Zea mays
cccacgcgtttgggcgatagctccatgtcctcgagccggtttgatgaactaccagatgaatttgatccgactgggagatttccaggatcatttgatgatggtgatcctcaaaccaccaacttatatgttggcaatctatctcccaaggtcgatgagaattttcttttgaggacatttggtcggtttggacctattgctagtgtcaagattatgtggcctagaacagaagaggaacgcagaaggcaaagaaattgtggttttgttgccttcatgaatagaacagatggacaagcagcaaaggatgaaatgcaaggtgttattgtgtatgactatgaactcaagattgggtggggtaaatctgttgctcttccgtcacaggctttgcctgctcctcctccaggacacatggcaatcagaaataaggagggtggtacagctacagtcatactttctggtcctggtggccctgctgttgcatctattaaaccacaaa

SEQ ID NO: 306789 - DNA, 348 bp, Zea mays
ttccttttttttttttttttttttttttttttttttcaacggaacccgcagcaacaaagccaaaatcctttcttcactgcattaataaaacaggaaagcagctgcaactatcattcttattctggggaaacagatggttacaccaaccaacacacgcttttggagtcagttcacatccttgcaacacagccgtacagaaacgaaaagtgagatgaccggagctacttgactatcccccgcttagccccacccaccgggttcttcagcagcattgccaccgccattgggccaacccctccgggaaccggagtcaggtacccagcaaccttgctcgccgctgcgaaatcc

SEQ ID NO: 306790 - DNA, 237 bp, Zea mays
ttcttttttttttttttttttttttttttttttttttttggatatggtatccatcgttttgaaaccattaaattggagcaccgtccatatttcacaagctgcgggtagaacagcaatccatttgcaagcggcttggataatttaataaccttgacgagcaagatcgggcccttcgttaccagcttgggcacaggcttttaaagccacacgattagctgctgcaccaggtgcatttcc

SEQ ID NO: 306791 - DNA, 339 bp, Zea mays
gtcgcatccgttccactggatcctctgcgccaccgcaaccgtgtgaccgcccgtgccgccggcgatcccgatccgccgacccgtcccagccccgctcgcagccatgtcgccgtcggagccgacgcgggaggagagcgtgtacatggccaagcttgcggagcaggcggagcggtacgaggagatggtcgagttcatggagcgcgtcgcgcgctacgcgggggcggatatatgctggatggtactccagagaagattgaaaaaatgttctttgatccattggattttaggattactggctgcacattggaagatctgaaaggaggcgatccatcgtttaat

SEQ ID NO: 306792 - DNA, 376 bp, Zea mays
  unsure (1)..(376): unsure at all n locations
cccacgcgttttctttttcgaagacgacatgacgagagatgatgatgcggtgggaggtgaggtccaggcaccgataccccttgtggtcaggggagtagccgaggaagaggcagcgagtggagcgaggagaaagcttgtgaggggcggtagcggaagtgttggggtagcaggcacaaccgaacacgcgcaggtggtcgtaggaaggggttgtgccgtacagggcaaagtgtggtgtagggtggctcaccgccttcgagggaagacggttgaggagatgcgtggcagtatgaagggcctctgcccagtaggtggcagggagagacgcctgaaaaagaaggcagcggatcatgttnggtggtggtgcgaatcatgcgct

SEQ ID NO: 306793 - DNA, 206 bp, Zea mays
cggattcgtgttcggacgcgtgggcggacgcgtgggcggacgcgtgggcggacgcgtgggtccacggacaagcgcctcgaaggcaaagcttccactagccacaggccaacgaaatcgcaaagcgaagctacggccaccgaccgacgttccaagaagcgaaacgaaacgaaaatgatgatgatgatgggagagagagcgcacgcgcc

SEQ ID NO: 306794 - DNA, 344 bp, Zea mays
ggctatactttacttgtttttgatgatcaggttatgatattgaattgatgatctcttcaggtatttgagaagcttgggccaagcctatatgactttctgcgaaagaatagctaccgttcatttcctattgaccttgtccgagaattttgccagacaaatattagagtctgttgcatttatgcatgacttgcgacttattcacacggatctgaagccagaaaacattctccttgtttcatcagagtctatcagggtgcctgattataagggtgttactggattcctaaacttttacacacttctgtattggatttactgattaagggttctttttaggacatata

SEQ ID NO: 306795 - DNA, 303 bp, Zea mays
gatcacatcactagtgatctcgaccgactgatgcttcgtgaacgctatcatggtggtgagcaagtccaagtcggcaatggtgcaggtttgcagatcttaaacactggtcattctacaattaattctgttgatcgcccacttgcactacgtaatgtcttgcatgtcccagatatctccaagcatcttctttctgtccataaatttacacaagataacgacgtgttttttgaatttcatccaacctatttttccattaaggaccgtcagacgaagagaaggctcctggaaggacaatctaagaac

SEQ ID NO: 306796 - DNA, 392 bp, Zea mays
aaacaccctagctaatagttcagctattagctacttttagcaaatcaactaatagttagctaactatttgctagctagctaattctagtattctactagtaactttttagcccagctgggcatcattactctgccatccaaagcaaacagttcggcatcattggaaaatgcagcaaagttgctgaagattaaggccatatttgaatgcactaaagctaatagttagctgttaaaattagttgaagacattcaaacagtctaactagatatttgttagctagctaatttcactagcaattttttagtcaactaacaattagctctagtgcatgcaagcacctcctgatcaatatttagatttcccgttcaattgcacacattatattacacat

SEQ ID NO: 306797 - DNA, 343 bp, Zea mays
ccagaaccctttagcagagcagtgacaggcgaaccaagacacgcagggacagggagacatggggcgagggcgagcgccgtgctgcgccaaggtggggctcaacaggggctcctggacgccgcaggaggacatgccgcctcatcgcctacatccagaagcacggccacaccaactggcgcgcgctgcccaagcaagcaggtttgctgcgctgtgggaagagctgcaggctgcgctggatcaactacctgcggccggacctcaagcgcggcaacttcaccgacgaggaggaggaggccatcataaggctgcacgggttgctcgggaataaatggtctaagatcgc

SEQ ID NO: 306798 - DNA, 300 bp, Zea mays
tatgatcaactgtagtgtgcacaacacggatcagagcttgtttcaccaacttgaaggtgtacctcttggattacattcaaataaagtaaccacactgtttaattatgcaagattactggaagaactccatgattgtgtcagagcaagcatcttttaccgttttataattttcaagtaccctgactacatagatgcctatctgaggttagcggctattgcaaaacaaagaaacaatgttcaactgagcattgaactgataggtgatgctttaaagatagacgagaagaacccaaatgcact

SEQ ID NO: 306799 - DNA, 367 bp, Zea mays
gcgaaagagcttcggcgcaaaggaaagggagccatgctcgcgtcgccggcgctcgccggcgcccactccttcgcggcgtccgtgtatggaagcctcctcgtcccctcgcctcccgtccccgcgccggcacgtcgcgcggcgctgtccgtcgtcgccaaggtcaaggtggccacgccccaggacgaccgcatcgcccgccacgtccgcctccgcaagaaggaaatagcacaaaagatcggtgaggtgattgccaagtcttgcttggagaaagggatcaccaaggttgtcttcgaccgaggtggtttcctctaccatggccgcataaaggctctcgctgattctgccagagagcacgggcttgaattct

SEQ ID NO: 306800 - DNA, 519 bp, Zea mays
gtcgatccaattgtcacttgctctccctccaacaagctaattaaggccggtcatccctcttctagctcgtttcattatccatggcggaggagaagcaccaccaccaccacctgttccaccacaagaaggacgaggagcagctcgccgccggcgggtacggcgagtccgccgagtacacggaggccacggtgacggaggtggtgtccacgggcgagaacgagtacgacgagtacaagaaggaggagaaggagcacaagcacaagcagcacctcggcgaggccggcgccatcgccgccggcgccttcgcactctacgagaagcacgaggcgaagaaggacccggagcacgcgcaccgccacaagatcgaggaggaaggtcgcggcggcggcggccgtcggctccggcggcttcgccttccacgagcaccacgagaagaagaaggaccacatggaggccgaggaggccggcggcgagaagaagcaccacttcttcggctgattgatcctcccgtatcgtcgt

SEQ ID NO: 306801 - DNA, 430 bp, Zea mays
gaaaaaccagtttttgcttggaatcagacacgctacccggccacagactgtgatgccctcttctgttctttcgagtgacagcatgcacatcggactccttgcagcagcagctcatgctgctgcaacaaacagccgcttcacaattttctataatcctagggcaagtccaacagaatttgttatacccctttcgaaatacatcaaggctgtttttcacacgcggatatcagttgggatgcgattcaggatgttatttgagactgaggaatcaagtgtccgcaggtacatggggacaataacagaagtgagtgatgctgacccagtgcgttggcctagttcctattggagatcagtgaaggttgggttgggatgacatcaaccgcaggagaaaggccacctagagtttctctgtgggaaattgagccactga

SEQ ID NO: 306802 - DNA, 523 bp, Zea mays
tcgcggacgcgtgtttccggagcaagcatcaaggaaatgagccttgctgtgagaagaggatgtcgcttgtccgcgagaagtttgctgaagcgaagcgtctagccacggacgagaagcttcttcattcgaaggagttccaagatgcactacagtttttaagctcaaatagggacctattcttggagttccttgatgagccaaatcctctgttatcaagcaaccgttatgagttccaacctgtcgcgccaccttctcaagcgaagcagataaccatactgaagccatcagaactagcaaagagaaaaggcagcattcttgtggggagacaactgttttcagatggagatgaaaggggacttaacagatacaggcgccatcagagtttagatgtttgcccggcaaattcaaatttgtccgagccaacaaaaattgtgttactgaagccaggacgactgtcaaaacctcatgattccaggattgcaaggtcttcattatcatcagcagaaaacagtgaagatgaaag

SEQ ID NO: 306803 - DNA, 411 bp, Zea mays
cccacgcgttttatgattgtggagctggtagatagatacgatacaagttgtgtgcccgtggctgacaaagttgggttcattcagaacactaaaacggacaaatcatgcacaagaactctaactatccctaagcatatgaagagcccaattcaaatatattaccagatcggtgacttctatcaaaaccatcgacggtatgtgaaaagtcgcagtgataaacaattgcgatataaagatgctgcacacttgacaaaagattgtgagcctgaagtttatagtgctggcggtgccccaatcgttccatgtggcctcgttgcttggagtttgttcaatgatacatatacaatttcggtcaacaagaaagctattgtagtgaataaaaaggatatagcctggcagagtgacaagaag

SEQ ID NO: 306804 - DNA, 211 bp, Zea mays
ctcaagtgtatgagtttggttcaaaaactcctagaagggcaggtgctattgacaataccgatttaatagatgatgtgccacttgaagtctccaacatggagattgagatacatgataacttggttgagggtcgggattacatactgcttcctcagcaagtttgggaaaagttgcatggttggtatggtggaggaccaacattaccaacaaa

SEQ ID NO: 306805 - DNA, 271 bp, Zea mays
gggggaaaaaccctttaaaattttttttttttaaacttttttttcccttacattcttggccaaatttagggaatcaaccctggtgacaattgggggcttaacctttaaggaccctaacaagggctttttcataaggaactttgaatatccgttgttggaacagttttttcaaaaagaaaccaatttagggggggcacccaaattgcccaatttttgggccccacccataaaattttttagagataactgggaacccaggttggggcaaatt

SEQ ID NO: 306806 - DNA, 178 bp, Zea mays
gctgcaggtgtcttaaggtgataactggatacacatccattttcaggtagcaggggtacatgtatgtgatagcgcaataataataattataatccctccactaggcttggcttggattggtacaaaggcggacacgggcacgggctatacatatatatatggagtatgcccatgcgtg

SEQ ID NO: 306807 - DNA, 272 bp, Zea mays
cgagttcgtggtcgtcggcaccgacaacacggcgaccgaggcgcaatggatcatggccaacctcgtggcgcatccggagatccaagcaaggctccgggccgagatccaccaggtcaccggcggcgcgggcgtccaggagcaggacctgccgcggatgccgtaccttcgcgcagtggtcctggaggggctccgccgccacccgccgggccactttgcgatcccgcacgccgcgaccggcatccaagacgacgacggcggtggcgaccacgcga

SEQ ID NO: 306808 - DNA, 442 bp, Zea mays
cggacgcgtggtcggtgaggagatgtctgggaggcagcagatttgttgaaacaaatgaaagaggatggaatccctcctaacatccatacatttacttcctacataaatgcatgctgcaaagcgggagacatgcagagagcggaaaatgtgattcaagaaatggcagatgttggattgaaaccaaatgtcaagacgtttaccacgttgattaaaggttgggctagagtgtcactgccagatagagcgttgaaatgctttgaggagatgaaatcagctgggcttaagcctgatgaagctgctatcattgcttggtgacctcacttctctcaagggcaactgtgatggagggaagcacctacaccggaatcttcagtgtctgtagggaaatgtttgagaatgatttgacagttgacctgcgcactgctgttcactggtcaaaatg

SEQ ID NO: 306809 - DNA, 496 bp, Zea mays
gtttgatcatagaataacatcaaatgacacttagtgcctcatactctttcaaatcgatatctctcttgatatgcactaagttaaaaggagaactcatgattcatttatgcaatttgtgatccacttgatatatgttaaccatgtcttagaaaaaggatcactagttgtaagaactctctcttgtgcaaaatattttcacacactgtcattaagcataggtcttaagcaaacaagaccaaggacataagcacaatggagagagcgtatacaagtaaaggtacaaaaagggtataactaattcctatcatttacatatgtacctaaatcttcctcttatatacactctttgcatatcttgtataaaaggaagagaaagcatgtcctttgcatttatccctgcttcatacctagtttaacctcttaaaatttcactcatgcattattgcatctttgttaaaactagatgaagtggttttattgtcaaagagcttaaagc

SEQ ID NO: 306810 - DNA, 228 bp, Zea mays
gtgaggtaggatgtcttcgacttacgtgcttgagcccctgacgaatgggaaggtgctggcacatacttaccgccgccgccgttacactccgtactacgacaccatgagggagtgcatttggatccacatcggccacagccgtatccaggtcggaaacgcgtgctgggagctgtactgccttgagcatggcattcaggctgacggtcagatgcccggtgacaagaccat

SEQ ID NO: 306811 - DNA, 429 bp, Zea mays
gacgaattagttatgaaatttgttgagtacagcaccaatgataaaacgagaaaattacaaatggaacttattagactgactggggtggagcaaaagttgagaggtgaaattcgatcttgaatcttgagtaaatctctcagacaagagaacattgcactcttaaatcgtttacaaggtgctggaaatggagcaagcttctcctcgattcgacttgatcaggagcttcaagctagggtggacaacctgcaaatgcaaggcttgtcactacttgataagattagccaactttgtaccaaattgctggatctgatgaaacataagagacatgaaaatgaatatttgtgtggcaatgatgtgtcaacattcagtgattacatatttgagtaccagagcatcaaaggaggaattgaaggtctgaagctaagtttg

SEQ ID NO: 306812 - DNA, 391 bp, Zea mays
gcataacatcttatgtatggtgtcgttggttggtgtcgtggcttatgtcattgccttctgcttcggcatgggtgccattccatggatcattatgtctgagatccttccggttagcatcaagagtgtggcaggaagctttgcgaccctagccaactggttgacatcctttgggataacaatgacagcaaatttgctcttgagctggagtgctgcaggcacatttgcctcctacatggtcgtgagtgcgttcactctaatgttcgtcatcctctgggtgccagagacgaagggaagaacccttgaggagatacagtggtccttccagtagtgagctgcagcagcattcatcagtaaatgcagtcatcagcaaggtctggtctgagctgctgta

SEQ ID NO: 306813 - DNA, 423 bp, Zea mays
aaaatgcttcattggataaaaatttcgacctgcggggggtaagacagcccccgagcattgcattaagagaagactttcttacacaagtcggaaaaaaccctgaacccctgtcccacccatacataatggcaccgtagcccatgtgagaagactgcatggtttttaaagtggtaaggcgagacaaggtgttggaccaccgcctgaacgcctaggcgaggtaggcgggcaaggtgcctaggcgttggaccaccgcctggacgcctaggcgacgccttaagaacagtggaagactgtgattgtcgccggaccttacacctgtgctttagcatgggaaaaaacgagggaattttttgtaaccctattctgatatttgctcccacgccagtcgaactcaggacctgtggaatgctacctagtccacct

SEQ ID NO: 306814 - DNA, 374 bp, Zea mays
cccacgcgttcgttcacgcgtccgcccacgcgtccgctcgagttcagatcgagcgcgcgccaagcaagtcttccggccggccgcgaagagcgcaatcaagcaagacaagatggtgaagctcgccttcggaagcgtcggcgactccttcagcgccacctccatcaaggcctacgtggccgagttcatcgccaccctcctcttcgtcttcgccggcgtcggttccgccatcgcctacgggcaactgacgaatggcggcgcgctggacccggcgggcctggtggcgatcgcgatcgcgcacgcgctggcgctgttcgtgggcgtgtccgtcgcggcgaacatctcgggcggccacctgaaccggccgtgacgttcgg

SEQ ID NO: 306815 - DNA, 377 bp, Zea mays
  unsure (1)..(377): unsure at all n locations
ttaactantttttttttttttttttttcagcaggttgtgtctttgccggagccgtttgaattggtcgtgtgcaaactgcattcaacattagctgcaaccagttacagaatctttcagcaaatctctgcttcatttggctgctgttctgtctcagtttacatcacaaatttgggatgcagatcctcaacttattttcgcctttcggtcgtctaaaaagctacctggacccgactcctcgcctaccaaaaaattaatattggggatcaccttcgtcccatggggcatggccatagcatctcatcagtatccatagccagagttgtccatcgggtttgcgacaggtgcagcctccggctccttgatatcgacgaccacaa

SEQ ID NO: 306816 - DNA, 391 bp, Zea mays
  unsure (1)..(391): unsure at all n locations
ttntncctantttttgtttatttttttttaacctttttgtttttagaaatatgccggggattcccccaataagggtgctagttttcgacaaagcaaaatcctaaacccaaacagacagcattgtcttaaaatacagatcatcatcctggctgccctttttaaagtacacaaaggaggcaaatcaaatcctccagatcggatagttcaaaggtaaccatctccagacgggtgctcactcccctatcctcctcttttttaagttgtccttcccatttatgatggcatgtaggtcggaggtgtcaatttgctcaggcagttcctttatgtctacctcaaacctttcttgcacctggttaagaacatcagaatccgaagcagaggaaacaaaggt

SEQ ID NO: 306817 - DNA, 418 bp, Zea mays
attttgtaagtagaaattgatgatgaactttatgattcgttgcatgttaaaattagagaagctacagaaaatcatttgtcagcctattcatcagagggtttacggaccttagtcattggttcaaaaaatctgacagatgcagaatttagtgaatggcaggaaatgtacgaagaagctagtacctccatgcatgagagatcagcaaagctccgtcaagcagcaggtctggtagaatgcaatctaacccttcttggtgcaactggaattgaagataaattgcaggatggtgttcctgaggccattgactctctgagacaggctggaatcaaggtgtgggttctcacaggagataagcaagaaactgctatatctattggtttgtcatgtcgattgttgactcaaaccatgcatttgatca

SEQ ID NO: 306818 - DNA, 332 bp, Zea mays
cgccatgtgcagcctgcggcggcgccggctgcgggccgcagtgctcctcgtcctcctccgcgggcggccaggaggatgctctggtggagagcatgggacgcctttcgaccgcctccgccgccgccgcgtgcggtaagtgcgacagcagtggcgcggccgtcgcggtggccggcggcgtcagcatgtgcgccggctgcttccgggctcacctcttcggcaagttcaagctctccgtcacgagcaacgccatggtgcgccccacagacgccgacctcctcgccttctccggcggtcccgcctccagggtggctctgcagttcatacacgagatg

SEQ ID NO: 306819 - DNA, 442 bp, Zea mays
gctgctgtgccctcagaccgtctcctgcgccgacatcctcgccgtcgccgcccgcgactcggttgcacaactgggaggaccatcgtgggcggttccgctgggcaggagggacgcgaccacggcgagcgcgtccctggccaacagtgacctccctgggcctaccagcagcctcaacggcctgctcaacgctttctccaacaagggtttgagcagcaccgacatggttgccctctcaggtgcccacaccgtcggccgggcgcagtgcaagaactgccgggcccggatctacaacgacaccgacatcgacgcctccttcgcggcgtcgctgcgggccagctgtcccgcgcaggccggcgccggcgacggcgcgctcgagccgctcgacggctccacgccggacgccttcgacaacgcctacttcggcaacctgctctcccagcgc

SEQ ID NO: 306820 - DNA, 99 bp, Zea mays
gtcgaggtcgcctcccagaccgcctcccctatcccgccttcggtgtcaaaggccaggccaacagttatgaggtggcaatggttgaccaggctaaccaac

SEQ ID NO: 306821 - DNA, 280 bp, Zea mays
cccactcgtccgcaacatcaagaaagttttgatggacttacttaaagatgtgggagctgccattgacacaacagatgatgagatgcgtctcatcaacaaactcaaaggacatctcacaaaaaagaggtattttgtagtaattgatgatttatgggatgtctcagcatggagctttattacatgtgctttccatcagaataaccgtgggagtcgaataatcataacaacgcgcaaaattgatgtggctaaggcatgttgcttgtcctctggtgatcatatt

SEQ ID NO: 306822 - DNA, 251 bp, Zea mays
tacagaaaatcagtcaggtacagttttaaacacaacgatacatgtgttctctggaacaaactggtagaagatgagttgacaggttacatcagtcatcatcctcctcatggtcggccagatgccaccggccatccttgcctttcaccatacctttgttctgcaccacccaccacgacggtgggacagcgaactcatttctcagggcatcttcatgcttgttcaccaaagcaacgtcccgatcgaccaacagc

SEQ ID NO: 306823 - DNA, 212 bp, Zea mays
aaattagcaagagagagagggcacacactgcaaagatgagtctcataagagggatgggcaacgttgccaagagatggaaagaactcaatggcttgaattactggaagggcctagttgatccgctcgacctcgacctccgtaggaacatcatcaactacggtgagctctcccaggcaacctacaccgggctgaacagggagagaagatcaagg

SEQ ID NO: 306824 - DNA, 261 bp, Zea mays
agtttttcaggtcgagcacctagtagcgacctgctggatcatcagtgtagagtgtcggtaggtgtctgtctctcttggtggctggttgcaacggtcatggcgacgtcgtctcgtcgggtgcccttgctgctgctgtgcctgggcgtgctggtgtcctgctccttcgcggcgggcagcttggaccaggagctggacatcacgtggggcgacgggcggggcaaggtccttgacaacgggcggctgctgacgctgtcgctggac

SEQ ID NO: 306825 - DNA, 272 bp, Zea mays
cttatagacagctacaccattaccctggggtactaggatgtcaatcgcactgggagctgctaaagggcttgcttgcctccacaatgctcaaaggcctgtcatctacagagatttcaagacatcaaatattctactggactctgttgagtgttaaccacttcctcatgcttccttctcctttttcagttccattgctatcatccaatggtaatacatatatgtttgacatatttatcttcttgtttccgttgccacaggattatactgctaag

SEQ ID NO: 306826 - DNA, 241 bp, Zea mays
  unsure (1)..(241): unsure at all n locations
cacactcagatctcccccaaaaccacccgncggcgccggcgttttaagatgcagaccccggtgacaaccctgacgggcaagactatcaccctcgaggtggagacgtaagacaccaatgacaacgccaaggacaagatccaggacaaggagggcatcccaccagaccagcagcggccaaacctagctggaaaacagcaagaggacaggcgcacgcacgctgaccacaacatccagaacgaga

SEQ ID NO: 306827 - DNA, 223 bp, Zea mays
  unsure (1)..(223): unsure at all n locations
nttgacctccgacactncacccgccgccgccgggcgccttttgagggccgccaccgccaatccccccccgacctccgccacctctgctgagagcgagaagagaaggccggcaagggtgaagggccggcaaaaggcatcgagctcggcacgacctacactagcgacggcgagcggcagcacgaccgagacgagaacaccgacaacgaacagggaaaccgcacca

SEQ ID NO: 306828 - DNA, 422 bp, Zea mays
gcccctaactcgcctacctccgcggctcaaaccggtgcgcccttctcccaattccttccgccggccgccgctccacccgtacgacgacaccatgagggagtgcatttcgatccacatcggccaggccggtatccaggtcggaaacgcgtgctgggagctgtactgccttgagcatggcattcaggctgacggtcagatgcccggtgacaagaccattgggggaggtgatgatgctttcaacaccttcttcagtgagactggtgctgggaagcacgtgccccgtgctgtttttgttgaccttgaacccactgtcatcgatgaggtgagaactggcacctaccgccaggtcttccaccctgagcagctcatcagtgggaaggagggtgcagccaacaaccttgcccgtgggcactacaccattg

SEQ ID NO: 306829 - DNA, 342 bp, Zea mays
cccacgcgtccgtggtctcgtgggctgggttaaaaacaaatatgctgctcagtacctcagtgtgtgaggaagagatggacagcaagggcgatggccccgatatcggcatcaatctcggaaacgaacaactcatgatgctgggtgtggtagttaaagcgcacagaggacattgacacatcctagggaacggaacgacacacggaaccatcttcagacggatgctcactccctcatcggagatgcggccaagaaccaggtcgccatgaaccccatcaacaccgtctttgatgccaagcgtctcatcggcaggaggttcagtgatgcgtctgtccagagtgatat

SEQ ID NO: 306830 - DNA, 133 bp, Zea mays
gcgcagaggcgttgagccaggcgtgttccgactggcctatctccgcgactgaaagatgcttccatttactaccgccgtgggtgcagctccacccaatgccgtcgacaccatgagggagtgcatttggatccac

SEQ ID NO: 306831 - DNA, 253 bp, Zea mays
gccttaataccatgcgcaagaccgtggtcaagcccaagggtgctgtttaaaacagccccgggtgcagcccaaaccgcgtaaagcaccttggccccttctccggcgagcccccgagctacctcaccggctagttccccggcgactacggctgggacaccgccgggctgtccgacgaccccgagacattcgccaagaaccaagagctgtaggagatccactcccgctgggccatgctcggggtgctcggctgtgt

SEQ ID NO: 306832 - DNA, 493 bp, Zea mays
ttcattcgtccgcccacgcgtccgtggttaaaccacggggtggagaatttgcctgacgaactatgcaatttaagaaagctacgacatctaggagcgtacgtgaatgatttcgcgattgaaaagcctatttgccaaattctgaatataggtaagttaacgtcgctacaacacatttatgtcttttctgtacagaagaagcaaggctatgagttgcgacagttgaaggacttgaatgagcttggtggcagtttaaaagtgaaaaatcttgagaatgtcattggaaaggatgaagccgtagagtcgaagctatatctgaaaagtcgccttaaagagttagcatttgagtggagttccgagaatggcatggatgcaatggatattctagaaggtctgagaccaccaccccaactgagtaagctcacaatcgaaggttacagatctgatacatatcctgggtggttactagagcgatcctattttgagaatttggaaa

SEQ ID NO: 306833 - DNA, 531 bp, Zea mays
gggttttctgctcctgatcaaccttgacggcaacagcacgaaccgcatccacgtcacgagccaaggcgcacaggcacagagtgcgcggagggagagagcggggggacgcctggtcgcttccctttccctgcgcttggcggagcagccgagctgctcgcaacaagagaggagtaccacctcgctcccaaggacggcgatctgcagagccagcaggtgctgctgaacggccatgttctggcaactgacgccgacggggacatcccagagctggagcccgtgcgggtggatggaacgcagccggtaaccgtggtccgtgggcccttactcgatcgtgttcgctcacatcctcggcttctacgctcctgcctgtagctagaattttaccacccaagctttccttcctggtggtatcataggttcggataaatccgggcgaacggtgaagcttgttcgtctgttcgtgcgtgaagtaagctgcaggctgaaagggtgcgatttgcattgtttggaaacaagtgttcggatatgtgt

SEQ ID NO: 306834 - DNA, 530 bp, Zea mays
  unsure (1)..(530): unsure at all n locations
ctcacgcgtccgcccacgcgtccgcccacgcgtccgaaaacaaccgaattgttgctggaagctggtgagcaagagcttttacgcacctgggaagacccaatggacgagcagtgcaaacaggacagcaaggactcgattcggagaacaatcgtggagcatgataaggtcttcaggcagcaggtgcatgagctgcatcgtttgtaccatgtacaaaaaacattgatggctgaatgcgatagccataggtatcaaccgagagcagaaggaactcatgaagtggtgcagggatcaaggtcgaacctcaagtgcagtccttctacctcagggacaaaccaatctgctctccttggtaatgcacaatacccagctccgcagcaagtacaagaagatttgagtctccatgaatgcaagccggtgaactgcctcagcctcttcggagaagaaaactcagcagccaaagaaaggtttcacggngagaaccataaatcagttgaagatgaaagctggagcgccgctgtagagagtgatct

SEQ ID NO: 306835 - DNA, 393 bp, Zea mays
cactatttagcacatttgtattagtagttagcttttcgctattaatgcaggatcttacttatctctctcacaaagtttcttggttcttgtgtctaaatttggcggtaaatttacagtccgcttctcttctcttctttttcatccatctcagcatttagctagcttctaacctcttaattatacttactcttagagcaagcttaataacgcaacctatagtgagctttataagagcaagtttaacaatagtgcctatggtgggcttaaaacctctatagccatcaataaaacattcatataatggtgttaactataaggttgactcttagattactattttgtctttttgtctttcatctttttatcttggagcttgagtagcacctgactttt

SEQ ID NO: 306836 - DNA, 469 bp, Zea mays
caaccggttgggcaacctgtgcaatcatccaactcagttcaccaatcagctacccaacaaacagtttcatctcaatctgttgaaccgttggcagttgtggcaccctcacccactgctggctccaatactggcaaggcacgcatgagatggactcctgagcttcacgagcgctttgtggatgctgtcaatatacttggtggcagtgaaagtgcgtactgcttgcagacatatgtctcccatgattgattcgttttgacattttccttaaattgttgcagaagcaactcctaagggtgtcctgaagctaatgaaggcagacaatttgaccatttatcatgtaaaaagtcatcttcagaaatacagaacagctagatacagaccagagttatctgaaggctcttctgaaaagaaagtggcatcaaaagaagatataccatctattgacttgaaagggagttttgatctcact

SEQ ID NO: 306837 - DNA, 319 bp, Zea mays
aatatttccaccttgcaggggagggcattttaatgtggtatcactggaacatgatgcatcatatagcttactacagcttcgggctctgagtggggatgcaagagaagggatctatgagagcaacagatggactacgagttagctgtacggacgagaccatgcggcgagtttgtgagcaagtacaaggataactacacatttaccggtcgaagggcagatcgatacaggagtgtactagaagtccgatggggaaagctattgcacgatgacagtctcttattcctggatggtatgctgcatctgatagccgcgctataca

SEQ ID NO: 306838 - DNA, 156 bp, Zea mays
  unsure (1)..(156): unsure at all n locations
ctgtttcgtgggcggacgcgtgggcggacgcgtggggggactcttgggtgggtccccaaaacatggacatagggtgtgtctagtctgcccttcgttgcagccgggcaattttccttacatatattgcctttaatcaagtnaaaaaaacccaatgcg

SEQ ID NO: 306839 - DNA, 402 bp, Zea mays
agctgttgcaggaaaccgccacggcaggtacctgcatgcttgacttgaccaacgcgttcttcatctgtatgccagagaaattcatacgtacgccccgtgacaagaccgcctacaggggcaggatactgatgttctaccaaaacgtgaaccggttcgaatcgttctagaccaaattgggtgcacgaataaccaacaaggacctagcttagcagcacatcttttttaacatagcgcgtgaaatggttgatcgcaatacctacttgcatgggattacgctgtacagtctccgcgccgggctgatcagctaggcagatttatactgcactgccactgtgtatcctcacatagaggtccatatccgtggcttagctaacgaacattatgagaatgatgctgcccaat

SEQ ID NO: 306840 - DNA, 311 bp, Zea mays
ggtgtttttttgctccctctccggtaagggatcggattggggaggttttaaggggttcggggtcttgggagagcgaatctagaaagcggcttgagatgttgagaaaccgatggtaatgagaggttctgcctgggccacggacgacgactccatgaacaacgcattcaggacctatggagaggtcctcgagtccaagagcattcttgatcgggagactcaaaggtcctgaggcattggatcagcaaccttaatcacggaggaggaaacgcggaacgccatctagggcttgaacggcaaggagctggacgggc

SEQ ID NO: 306841 - DNA, 403 bp, Zea mays
ataaaaaaagaattgctttccaatggtatgttaaaggtggttcgctacaaaatgatcaacttgatgtaatccacaaaaaggtaaatagctgacagtgctttctatctccaacatattcacagtagctactgcctaccatcaaccttaatcacagaatgactatttctgcaacttgagcagcgacatgcaacttgtcttagtcattgctacaatatcttggggtgaccgaggacactgaaggtttcctgctacttgatgtagtgctacatttctgattcgaaaccaatgttccaaaacccttccggcgtcagaggcggcgcgtacctgtaccgatgccttgacacaccatcgtggtgctcacatcgttagcttgtagagcctgcaccatcgccatctgcacgac

SEQ ID NO: 306842 - DNA, 586 bp, Zea mays
  unsure (1)..(586): unsure at all n locations
cccacgcgtccgaaaagccttttcaaaatttggagtagggcactgaggcgagcgcgggtggcggccggcagcgaggaaggctactgttaggatcatctcgctacaaaatcgggttcccgagatggaggggaaggcggtagccgtcggttgcggtggcgcccgcgtcgatccggcggatgatctcaagtacatctccgggctgagcaccattctcgtggccaccatccaggaagtgaaggaccaggtctcccagatggagttcatcttctgcagccagctcttcccgcacatccaggccaagtcgaagcttgtccaggcgcatctcgccgacacgatgaaggccagtgaggttgagtggaggaagacggaggctggcctggtgaagcagctggaggaggtcagccgtggtaagatgctcgcggaggagagattgctgcaactgggcacctctcttgaggagatgaagaggaagcttgtggattcngagcaattggctgcgaggcatgagtgcgagaagaaacagctatctgggaggttggaggatgaaacgaggaaaggtgagtttacgtcagcttcaagggagatt

SEQ ID NO: 306843 - DNA, 542 bp, Zea mays
cggttgaatacctagatttcacttttttactgggccgagttgaggtatggcgcgggccatacttggccataacgggccctccgcccctgctcatcagaacggtgcagaatcattatcagaaacatttggagaaccatacccaacaaaataagcaccagcatttcatcctttgtctcggcattccaataataataatgtggaaacgtaatccctttgggggtaaagcacatagtggactggatgggcgcactattgttgttagaagtctgaagatctcagtacgaaatgtcattgcacaaggaggcttctcttgtgtatatctggcatgtgacacagtacatccatcaaagatgtatgcattgaagcacattatttgcaatgactcagaatcacttgatcttgtcatgaaggagatccaggttatgaacctccttaaagggcatcctaatgtggtcacacttgttgcccatgatgttgttgacatgggccgtacaaaggaggcacttcttgtaatggagttatgtgagaagtccttgtgagtg

SEQ ID NO: 306844 - DNA, 318 bp, Zea mays
acccgtctactttctcgcttagaacacggctacctctggggggtttaatttaaaccttggtgtgaataccatccgccgcggcgacaaaccacccgtacgatgacaccatgagggagtgtatttcgatgcacatcggccaggccggtctacagggcgtaaacgcgcgctgggagctgtagtgccttgagcaagggattcaggctgacggacagatgcccagggacaagacccttgggggaggcgatgatggtttcaacacctttccttaatgagactggtgctgggaagtacgtgccccctgctgttttttgccgacct

SEQ ID NO: 306845 - DNA, 425 bp, Zea mays
gacgcctccttccgtgcccgtccgtcctctataagggcgccgccgaggagagagaacgatgacttcagctctccggcggaaggcggcgcatatggcttccgcggcgacacagtgcttcagctactcctcgttgccggccacgtgggctctgcggcagcggggcggcggtgccagcgtgctccggctctcttcccggcggaccttctcggtctccgcggcggccgggttcgacaaccagaaccgcgagtatgtgatcgtcgggggagggaacgctgcgggttacgccgtcaggacgctcgtcgagcatggcatggctgacggccgcctttgcatcgtctccaaggagccagttccaccatacgagcggccagccttgaccaaaggctatctttttcctacggacaagaaaccggctcgcctacctg

SEQ ID NO: 306846 - DNA, 412 bp, Zea mays
gcctgcacgtgccgggcctgaattgctggaccgacccacgcgtgcgctcacgcgtccgctgctatggggaacatcccgaccaatgtcttctgcgacactgactctcccatgcgatatgacaatattggcataccatccaacaacaaggggaggaacagcattggatgcctgtactggcttttggccagtatggaagtgcagatgaggggcactaacctgcctgtgcacaagtgggaagccatggttgatctgtgattctacatgagacccataggaagcgaaggagcacgtggaggaagcttctgaagcccctgaggtggctgcaccaactgattaccatggagctgatcagcggagtgactaccaagggacctcttatgaaggtggaccacctgttgctcctactggtgct

SEQ ID NO: 306847 - DNA, 420 bp, Zea mays
cttacgcgtgggccagaaggcactgtatagtgaccaaatatctttaggaatgcgattccggatgatgtttgagaccgaggaattagggatgagaaggtacatgggtacaataactgggataactgatctagatcctgtaagatggaaaaactcccagtggcgcaacttacaggttggttgggatgaatctgccgcaggggaaaggagaaacagagtttcaatgtgggagattgaaccaattgctgctcctttcttcatatgcccccagcctttctttggcgtaaagcgccctaggcaaatagatgacgagtcatcagagatggaaaaccttttcaagagggcaatgccttggcttggtgaggagatatgcataaaggacgctcagacccataacaccacaatgcctggtttgagcttggt

SEQ ID NO: 306848 - DNA, 424 bp, Zea mays
attatttccttgattgtattctgcttttattgcttattggttcttgtagaattgttcatgttttacttgactgcatcttacccagtgcggattcagcttagcaccaaaaccattcttttcgaacttggatgctatcataacatttgcaatcctgggaaccttcattgcctccattgttacaggtcttttagtctaccttggtggattactatacattgtctacaggctcccactggtggagtgtatgatgtctggtgctcttgtatcagcaactgatcctgtgacagttttgtctatatttcaggagcttggcactgatacaaatctatatgcactggtttttggagaatccgttttaaatgacgctgtagcgatatccttgtacaggtctatggcatctatgaggacgcaccattctggaaaa

SEQ ID NO: 306849 - DNA, 423 bp, Zea mays
  unsure (1)..(423): unsure at all n locations
cggactcgtgggaaaatttttgatgctttatgcaagctttctgcagattccgatgctaatgttcaaagtgccgctcaccttcttgataagcttgtcaaggatatcgtaactgagagtgatcagttcagcatagaagaattcataccgctcttgagagagcgcatgaatgtgttgaacccttatgtaagacaatttttggttgggtggataacagcgttagatagtgttcctgatattgacatgcttggttttcttcctgattttcttgacggtttgttcaatatgctgagtgattccagtcatgagataaggcagcaagctgatgcagcactttctgagtttcttcaggagataaagaactcaccaaatgtagattatgngtcgtatggctgaaatactcgttcggagggcaggctctactga

SEQ ID NO: 306850 - DNA, 256 bp, Zea mays
gaagaagtgattatcccactgggcgcccggatttccgccgcgagagtgatgcgctcaaggatccgcatccgcgacaatggcttcgctggtgccgggcgtcctggtgaagctcctgcagcacatgaacacgggcgtgaaagtcggcggcgagcaccggtcctcgctcctccaggtggtcagcatcgtgccggccctcgccgggagcgaccttttgaccaaccgagggttctacctcaaggtgttggactcgtcctac

SEQ ID NO: 306851 - DNA, 473 bp, Zea mays
cccacgcgtccgtttactcgtccgcccacgcgtccgcccacgcgttcggcaggagctcaaggcggaggccatgtccatcgcgcgccagttctcgcaggacctcaccaagcgcttcggccgcacccaaagccgcgcggaagggcaggggcagcagcagcagccgtcgtcaggcatcgagtcggccctcgctgcccgcgccgcgcggcggcagcgcgcgcagctcgaccgcacgcgctccggcgcgcacaaggcgctccgcggcctccgcttcatcagcagcaacaaggccaacaacgcctggatggaggtgcaggccaacttcgaccgcctcgctttcgagggtttactctcccgctccgacttcgcggaatgcattgggatgacggaatcgaaagagttcgcgctcgagctgtttgacacattgagccgccgccgtcaggtgcaggttgacaaaatcaacaggcccatggcat

SEQ ID NO: 306852 - DNA, 372 bp, Zea mays
cccacccggattttgatcttgaccgggcaccactccactccagggggggattgaattaaaataggcggtgggttcaactaggccgcgaagggatggcgtcgggctcagaagcgcacgggggcaacccgccggagcaaggcacacaagagagcgagcggcgggagaaggcggatgacccacgccacggcgaacgagggccaccctagcaaggcgggggaccaggggtcacatgccgagcttgactcttgccttgctgaggaccccgacagcaagggtgcttgtgagacctgcaccaagaccaacaggggcatggtctttggtgagatcacccaccaggccaatgtggactaccagaagattggcaaggagacc

SEQ ID NO: 306853 - DNA, 379 bp, Zea mays
cccattcgtttgcccacgcgtccgcccacgcgtccgcgagggatccaccgatacatccatggggcatgacgacgggggagggggcagaggcggcggccgtgccgcgggtgggctccatcctgtcggcgctgctgcagcgcgtggtggaacgcaacgacgccgcggcggaggcgccgccgccggctgctgctgctggccccccgggactgtcggcgttccaggggcttaccaagccggccatctccatcggcggatacctggagcgcatcttacgcttcgacggctgtagcccagactgttacgtggtcgcctacatttacctcgaccgattcctgcgccgtcgacccgcgctcgccgtcgactgctataacgttcaccg

SEQ ID NO: 306854 - DNA, 364 bp, Zea mays
ggggggaccggatttgcctgcccggcccaccccacccgtcctttccttgtgtgcgcacacgaacgggcacctgggggcgggtttgaattaaatgcaggggtcgaagatcgccgcggaggacgggtgctacaaagcacaccggccgcaagtccacgggaggcacggacgccccaatgctgctcgccaccaaggcggcgaggaagtcggcgccgacgaccggcggcgcgaagaagacccacaggtacaggccccgaaccgtggcgctgagagagaaccgatcgaccagaagagcatggagcggttcgaccgcaacatgcccttctagcccctggtgcgggggaacgcgctggacttcaagaaaggc

SEQ ID NO: 306855 - DNA, 525 bp, Zea mays
tccactcgtccggcaatttaatgtggacgggagtggggtgaaatgtattgggatagaggttgacttgctattaatttaaaccgacccaatatcactcaatccatatggattaacagtgcgaacaaaccctaatggcctgttcgtttatgccggatttcactaaaaatcgttccagctgatcaaaccttatgcggctgattggttggactgctgcccgtggcctgcctcaggcgagcatgccccgtgggaaacagaagtttctagcgtacccgcgcatgcagctttaagagatatttttttgctagcgttgcatctgccagtacaacttgatctcgttttatgcacttaaccaaacaaaggctagtgttgggtcaacgcacgcgctcaaacgggacggacatgtgcagcataccaatcagaaggtatataaattagacaaacaatccagctagaaattatttcgggtgctcaatccactggaaccgaacatgccccaagatggtttaagactagaaaaagacttta

SEQ ID NO: 306856 - DNA, 537 bp, Zea mays
  unsure (1)..(537): unsure at all n locations
cgtgcttgctttttcaggggcatgacacctcattgggggggggtctttattgacaacgctatggctttccttgccgctgtcatctacgcagtgatgttcaagggcacgaccgcgaagcccgagttgaccggccaccatgcgcacagggtgaagcaccactctggacagatcgaggccggacctatcatggagcacgtgctggaagggagcgaagacacaaagctggccaacaagctctgctggctctacccggtgatgaagcctaagcacgacagatacgcgctgcacacctccccgcagaggctgggcccgcagagcgaagcggtccgctttgccaccaagtgcatcgagcgcgagatcaacttcgctgacgacaacccgctcatcgatgtgtcccgtggcaaggcgctccacggcngcaacttccagggaactcccatcggcgtgtccatggacaacacccgtctcgcgctcgccgccatcggcaagctcatgttcgcgcagttctcggagctggtgaacgactactacaacaac

SEQ ID NO: 306857 - DNA, 339 bp, Zea mays
ttccattcttccggtacccaccaccactctcaggctcactttaaatgaggtggaggctgcttcagcttgttccaacattgtctcttcaaacaaaggatctcatttgtccgctattatatgatgctcatcacaaaatatttcatccgcggagcagatcaaattaaccctcatccttggtttcgaggaattcaatgccacaatgtgtatcagatggatgcagcatttaaactcctatttaatgatgaactggatacacaaaattttatgaagttttcagatttaaactctgctccagcaagagcaaattctggggcttcaaggaagatcatgcttaattct

SEQ ID NO: 306858 - DNA, 308 bp, Zea mays
gttggcttcttctgcccctgcgaatcggtttcgtaggggaggggtacttcggagttagggttggtgggataacggatcaagatgacagggctaggatgtctgagtaccactgcttcaaaggctgactcgcctggtccactgacaagcactccctacacaacgccttcaagacctacagtgagggtctcgagttcaagatcatcctagatcggtagactcataggtactcaggtttaggcttaacaccttatacacggaggaggctatgcagaacgccatcgagggcatgaacggcaaggagctggacg

SEQ ID NO: 306859 - DNA, 485 bp, Zea mays
atttttgatattacgaagcagatttgtgagggggggcttgcaagggctgaaagggacaagaaccatggggttattcttattcctgagggccttgtggagagtattcctgaactatatgctctgcttcaggaaatccatggcctccatggcaaaggtgtttctgttgagaatatctcttctcagctttcaccttgggcatctgcactctttgagtttttgcccccttttatcaggaagcagctactactacatcctgaatctgatgattcagctcaactttcccagattgagactgaaaagctgctagcccagttagttgagactgagatgaacagacgtttgaaggagggcacttacaaaggaaagaagtttaatgcaatctgtcacttctttggctaccaagctaggggagcactgccttcaaagtttgattgcgattatgcctacgcaagtccctcaccagctcatttaataaagcatattga

SEQ ID NO: 306860 - DNA, 425 bp, Zea mays
  unsure (1)..(425): unsure at all n locations
ccgttctcaaaccaacctaggcaattcgccgcagccgcggaccctagcgagtcccggccggccgcagccgccgcacagatggcacccaaggcggagaagaagccggcggccaagaagcccgggggggaggagcccgcgacagagaaggggagaagggtactgcggtgaagagcccaaggccgagaagcgcctnccggcgggcaagtccaaggagggcggcgagggcaagaaagggaaaaagaaggcgaaaaaggcccgggagacctacaagatctacatcttcaaggtgctgaagcaggtgcaccccgacatcggcatctcgtccaaggccatgtccatcatgaactccttcatcaacgacatcttcgagaagctcgcggccgagtcccgcaagctggcgcgctacaacaagaagcccaccatca

SEQ ID NO: 306861 - DNA, 293 bp, Zea mays
acgcctccgtcatctgcgaaatcacaaacattgtacactattagaggaattataacactctatggcgctcgagatcccactagtcacaatgcctgtcctaacaagcccgcctcacgcaccatcaagcccggcttacatccgaatccgaagcctgccgccgccaagccgaaggcggccaccgctggtgcctcccacccgccttacttcgagatgatcaaggaggctatcacggcgctcaatgagaggaccggctccagctcgcaagcgatcgccaagtatgtgggggacaagca

SEQ ID NO: 306862 - DNA, 535 bp, Zea mays
ggaagacctgggcgccattaaaatgcaaattctgcagttggttggctgtcaagaatcgatgttggacagcggacaagctcgctaaacgtgggctggctcaccctgctgcttgtcctttgtgtgatcagctgaggagactatccaacactgtttagtctcctgtgtcttttctagagaagtgtggtttctgttatttgccaaattgaggttgtctactctgtcgcctcaggccatgtttggtttctttagtccaaggactaaagtttagttaggggactaaagtttagtccctaacatgtttggttttaggggctaaaaatagtaagaatatactaaatgactcataagaagactaaaatggcattctgctattagtacaatgaactaaatgaggggtaaatgtgaaattaatatggtttagtccattttagcacatatgtgaaggactaaagactaaattattttagtccatattttagtcctagtgtttgcaaaaaaaagactaaatgggactaaaaactagagactaatctta

SEQ ID NO: 306863 - DNA, 476 bp, Zea mays
  unsure (1)..(476): unsure at all n locations
cgactggctacactacggaggatgttcttatgcaggaacctaaagcaggaattttgaagccagctttcaccattttgcttgatagagacaaaaagtctatacttctattaattaggggaactcatagcatcagagatacattaacagctgccactggtgctgtggttccatttcaccataccattgtacaggaaggtggtgttagcgacttagtactaggatatgctcattttgggatggttgccgctgctaggtggattgcaaagctctcagggccttgtctggcacaagcattgcagatgtacccagacttcaaaataaagggttgttggacattcactgggaggtggtacagctgctctgttgacatacgttctgagggaacagaaagagtttgcctctactacttgtcctgcatttgctncagggttctatgctatgctctttttctcttttaggaccttaatttctcaatc

SEQ ID NO: 306864 - DNA, 435 bp, Zea mays
gcgtttttgtactcgcctacctccgcggctcaaagggtgcccctttataccaattcctgggggtcggccaccgctccacccgtacgacgacaccatgagggagtgcatttcgatccacatcggccaggccggtatccaggtcggaaacgcgtgctgggagctgtactgccttgagcatggcattcaggctgacggtcagatgcccggtgacaagaccattgggggaggtgatgatgctttcaacaccttcttcagtgagactggtgctgggaagcacgtgccccgtgctgtttttgttgaccttgaacccactgtcatcgatgaggtgagaactggcacctaccgccagctcttccaccctgagcagctcatcagtgggaaggaggatgcagccaacaactttgcccgtggtcactacaccattggcaaggagat

SEQ ID NO: 306865 - DNA, 276 bp, Zea mays
ttttgagcttgcatccggggttggattaccacggggcgtacagggccatgggggggtgcatgatatactgcagcgactagccgaggaaccagaacttgaagctgatcatgaagctggtgatgacggtcgggatcgtgctacgcgcgcagctacccgggcggcctacacgggactgcatattgtactgcctggtgcgcgacggggcgagcgagctcaagagttggaacatgaacaagagcctgggcaaggggggtgggttcaactgccagggagact

SEQ ID NO: 306866 - DNA, 384 bp, Zea mays
tttttacatgcacatgcgcactctaccaatggctggggaggttgggcgccctagcggcgccgagctactaaaggcacaagccgacatatggcggctcagcctttcctacctcacgctcgctggactgagcgtgcgccgaggagcttggcatccctaccgcgatctaccgccatggcggggctgcctaagccgctgagctcggcacagcgctgactctcccctccactaagctgccgctcctccgccgcctgatgtggatcctcgccgcttctggcagcatgcaccgtcaacaagcacagctcgcaggacagaaccgaccacatcacccaccccccctacctgctggaggacggcatccgcttacgaggaccacatgaaccacac

SEQ ID NO: 306867 - DNA, 335 bp, Zea mays
gcgcccatgctttcgctgataaggtcactggccttgtcaggggggtttttttcaaacatctgagcgaagaatttaggagaaggtactacagtaactggtgcaagagcaatacgaaggcttgcacaaccttttactagttaatatttaaaatgattgcaggcaagagtgtaatacaggtgctatttagaaaggttgaacaaactatgcttctgttatccacgtcattgctcattcccactttacgaagaggaaggatttgatgcagaagaaggctcacctgatggagtttcaggttattggtggtacttttgcatgcaaggtggactatggctaca

SEQ ID NO: 306868 - DNA, 482 bp, Zea mays
  unsure (1)..(482): unsure at all n locations
ggcggtgaaggacctgctgccgtcctacgccggcaacaacctgagcagcctctgctcctgggcggacgacgtcaagttcaggtacccctggtcgtcgccgctccactacatcgacacccccgacggcctctgcacctaccgctacgacagggactgcaaggacgaggacggcgtcgagggccggtgcgtcgcgggcgccatcaacaactacacctcccagctcctcgcctaccggagatcttcacccactgagtataacctaacgcaagcgctcctcttcctctcgcacttcatcggagacatacaccagccacttcacgtggggttcacctccgacaaaggagggaacaccattgacgtccactggtacacaaggaagactgttctacaccatgtacgtacgtctggtactggacaccgtcagtcaggatcctgaaacctgaaggaacctgaatgctgctgngacgtgttctgttttctgc

SEQ ID NO: 306869 - DNA, 394 bp, Zea mays
aacaaaagggagattgccaactgcaccttccaacccaacattgcagacagcacgatagttgataggattacatgctttcaaaaaccagatgcaaaatttgttttcgggggccttctaatgtaccaagtatatacataatgtcctcgtctcaaacagtataaatgatgtcctcatctcaaactgtaattatgtaccccctttgctacaaacttgttagggatacacaattttatgctgaccttctccaccatcttatgctgcacatattctttcgttggcccttcttgagagaatgcaacaattagctcagaaagcgcccccgcctcaaggaaagtttgcagctcatcttcatatatgtagaccatattacggttcctgcatccaaagaaaagga

SEQ ID NO: 306870 - DNA, 479 bp, Zea mays
ttaatttctgctgagactgtggaggaggctgaggtggtgttttttgaccaccggcgtgggtatataccgggacgtgagctctgatcaccaccaggacttggcaaacgaagcaaatacagacttctccatccatgcaaatgcagaagatgggtctccatttaaaggaggaggttccttggccccacctttcccatctccatgtactttgcggactacgcttctacgatatgctgatctactcaatccaccgaacaaggctgctatgattgctttagcttctcatgcatctgatccagctgaagctgaacgacttagggtcttggtctcttctgctggaaaggatgaatattctcaatggataactgctagtcagaggagtcttcttgaagatatggctgcatttccttcagctaagccaccactgggagtgtctttcgcagcaatagcttctcgtctgcaaccacgatactactcaattt

SEQ ID NO: 306871 - DNA, 237 bp, Zea mays
ggggggcccccaaaaaaaaaacaatataagggggggggaaaaaatttgccgaggaaaaaaaaaagagggcaaccctttctgaccaaagtttttgataaaggggaaaaaccatttagcgggcaaaggggaaaaaagctttagtgacttgaaattcacatgacaaagaccatactttacggtgtaaccagagatccattcgaagttatccatcaaagaccacacaaaataacctctcac

SEQ ID NO: 306872 - DNA, 143 bp, Zea mays
caggcagagcccggctatcccatatgttagcctttttactagaattgcagtacaaagcggcgattaaaaaccatcaacacacctacacaagtacgcgagactatcggtctagacaacagtaagcttaggagactactacagcg

SEQ ID NO: 306873 - DNA, 319 bp, Zea mays
gctaataatacgccggcacccgcgcacacggaccgggggggcctataagaaccactgcgcagttcataacccccacacggcgcagccgtgcaacttgtgcaagctcagccaagcctactggaccaagggcgggtgccacacgaacggcccctactgacgctgaagcaccagagggcaccccgacaccgacccggcgctgtgcctcactctgccgcgagtgacccgcgacaactccatggcgcccatggataacaaatcaaccatgaccacacagacgccgagatgagaggagcagagcacgcagagcgccgggcttttg

SEQ ID NO: 306874 - DNA, 304 bp, Zea mays
gccatttgtacgtccacgcgtacgtgcatctaaacgggggccttttcaactacgctagctttttttaaacacctacaagcatcactctcaccacgaacacatgagatatcactcgaacgagggctagcgcattgagcaccggcggagactgagaggctgcctgaaaaaccgaggccacggtgacggaggaggagtccacgggctacaacgagtttggtgagtacaagaaggaggagaaggagcacaagcacaagcaggacattatcagtattaacgacatcggcgtcggcgccttcccactcta

SEQ ID NO: 306875 - DNA, 474 bp, Zea mays
tttattcgtgcgcccacgcgttcggaggcatccgcgattgctcgatcgccagggcgaacagcagattcagaacataaaatatgaactagctgatgcgttcgctaatcctcaaggtctacttgtggaggcctttcattctgtaggatattccggagcactgtcaaaacctttgatggctttagaatctgctgtaaaccggttgtatgttggcagctgggaagaatttatagctgaacattacactgctcccatgatggttgttgcagcatcaagagttgatcatgatgcgctgatttgagctgtagaaacacttctgtctgaccttccgagcgtgaaacgttctgatagagtcagaatctgtgaacgtgggatgagactatcgctgcccgatcagagtgtccaaacacacacatcgcactagctatagaggcgccaggtgggtggaattaagagaaaaatgctagggttgagaca

SEQ ID NO: 306876 - DNA, 437 bp, Zea mays
gcaaccaatcaagaagaatgagtattgcgacggaatgatttacacccgttcaaatatcttgtatcatgtctcgatacaagatctctgttcagcgcatatcaatcacaaaattcaaaaaattggactcacgttttgtataagttacaggtcaaaatgtaagagaaatgaaattagaggatgtagtctactcaatagtcgcaaacaaggctgcaaattgttatccaaggaggcgttccacatggtgtgccacggattttgcgagaccgtcagcttctacctgcgtagatgcctctgcgtacacccgtaccacatcttctgtaccggatggacgcacaaagcatcgcccgtgggtgtagttggcggtctccttatctatcaattcttgcaaactagaaggttggctaacttttgtctctgcatctgttgtaacaatcaca

SEQ ID NO: 306877 - DNA, 197 bp, Zea mays
tcgttgacgcgtgggcttctcccgccgccgggcagggccttttgtactccggcagcgtgaattttttgccgtcctccgtcacctctgctgagagcgagatgagatggccggcaagggcgatgggccggcaatcggcatcgatctcggcacgacctactattgcgtcggtgtgtggcagcacgaccgtgtcgagatca

SEQ ID NO: 306878 - DNA, 389 bp, Zea mays
tttctggtgaagaggataagaggaagcgagtgggactgtgagtgagttgcaaggaggggggttgccatggccgcggcgaccaagttcgacgacgtggtgcagcccagctgggccaacgaccacgtggtgtacgacggcgacctcctcaagctccgcctcgactccagctccggcggagggttcgcgtcaaggaccaagttcctgtacggcaaggccagcgccgacctcaagctcgtgccgggggactccgccggcgtcgtcacggctttctatctgtcggtcgccggggacaagcacaacgagttcgacttcgagttcctgggcaacgtgaccggcgagccgtacctggtgcagaccaacccgtacatcgacggcgtgggcaaccggga

SEQ ID NO: 306879 - DNA, 411 bp, Zea mays
ttcgcccttttttttcatttttctttttttttttttttttttttttgtttttttttttttttggaacaaaggccggaaaactttacaaggcattgatcgagggccgagccgaggggggcatatatataaacgacaagggaacgaggcaaaaaacaaagatgggtctatactaaaagaactgctgggagggcgaaaacgtttgaccgaacccccagttggggggcgcgacctcggggaaggttttggtctggccgtcgctgctggtgacctggaacgacaggctttggccattgaggtacccgttggactgccagttgaccccccagttccgggacatggccatccacccggggcgcgaccccttgatggaccccgactggatggacccgcaacccccgacattggagatga

SEQ ID NO: 306880 - DNA, 298 bp, Zea mays
  unsure (1)..(298): unsure at all n locations
ctcccagggaggaaacnncccactgaactttttataaaaattaggcttttccaaccggacggcaccagcaccatgactgactagcatccaaaaggctaaccggagctgatttacatgacatcgcaagagataaacgctgcggaatagctgctgctgatttgcacataactggagttgatccgaattcaacggtagttgcggtagatggggctgtacatgcaactctcttcatatttcaccaggtcctttggccgagggcgcctacttgccaaaccaagttcatatgcctttgctgcaa

SEQ ID NO: 306881 - DNA, 379 bp, Zea mays
ttcacgcctccgtttttttttgctgcagctgaaacttattaccgcacagatccagaatttttgaaagctgatagcactcaaactcgagatgctggctcaactgcctcaacagctattattgtaggtgaccgtttgcttgttgcaaatgttggagattctagagctgttatttctaaaggaggacagggtaagtttaccgtcgtaacatggcatatctcagtgtctattcctatacttacacatgtatcagaaacttctgtttgctgcgcattattctggacgagtatttccccataacgaatggatgaacctgtgtgcattaggtagagatccagattctctcagaaaacattctgggttcagcttctttttagaaacg

SEQ ID NO: 306882 - DNA, 519 bp, Zea mays
ttttcgcgtccgcccacgcgtccgcggacgcgtgggccgtaaggttctcggcttctcgcatgcgcggcgaccggcttcaaccccaactcttcttcttcttcctcgcaaacttcgaacgggacgagaaggaagcggacgcgagaggagactaaccgacctcggatccatcgacgcgtgaagatgtcttcgcccgccgagtactacaaatcacttccacctataagcaaggcatatgggacattgtgtttctttaccaccgtgctagttcagctccagattttgcacccattatttctttacttagattaccccttggtgttcaagaagtttgaggttagcttctatttctgttttcccttacgccacgtttggattattggaattgaattccattctaataatagtaatttaggcatatatcaattaagctaattcagttttatgcaaaatatatcggtatattattattagcaagatgtcggagatatttatgtgctatatttctactgtagatgagtg

SEQ ID NO: 306883 - DNA, 463 bp, Zea mays
  unsure (1)..(463): unsure at all n locations
ttangtatcctccgttcactctgggtcagatggggggggtttttttgtcacactggttgttgcgctcggtgctcaagtccttctcgtacgtggtccacgacctggtgatcgccgcggcgctcctctactttgcgctggccatcataccggcgctcccaagcccgctccgctacgccgcctggccgctgtactggatcgcgcaggggtgcgtgtgcaccggcgtgtgggtcatcgcgcacgagtgcggccaccacgccttctcggactactcgctcctggacgacgtggtcggcctggtgctgcactcgtcgctcatggtgccctacttctcgtggaagtacagccaccggcgccaccactccaacacggggtccctggagcgcgaccaggtgttcgtgcccaatatgaaggaggcgctgccgtggtacaccccgtccgtgtacaacaacccggtcgtcgggtg

SEQ ID NO: 306884 - DNA, 461 bp, Zea mays
ttttcctccttttttgaggataagaagtttgttgtcctgtgtttatgttaatatattataaagttcgatacatacatgtgttttctgattcatgtgttgcttctgtggataagaaacaacctataaccaaggccacattcagaaggtgggttttttttcatcttctgttttctatattttacccatgaaattcattctgatttccacgagaattcctatgttccgatgggccctgaaggaaaatagagtaatatatagaatcccctacattgcagtcgatccgttcctcgcagttgacgtgtgattactcgaaagcaagtctctgtgtcccgacaagtgatgcataactgcctcccttagcaaccagttctcggtgtgtccccagttcagttattctgccctctgaacaaacagcaattcgatgtgcattctgtacggtactcaacctgtgagcaatgacc

SEQ ID NO: 306885 - DNA, 268 bp, Zea mays
attcccgttcctacccagcgtttttttgaagacgacccagatcatgtccgggaccgttttaaatacaattacggtcttctccatccaggccgagctctctctgtatgccagcggccgtaccacacgtatcgagctccactcgggagaaggtgagagccacaccgtccccatttacaagggatacgccctcccccacgccatccttcgccttgacctgggcggtcgcgacctcaccgactacctgatgaagaccccgactgagcgcggc

SEQ ID NO: 306886 - DNA, 432 bp, Zea mays
tttactcgtgggtctacagcagaatcgctgggggggcattttggtgcttttgagcacttgaatgacttttcagggtattcctatacagcatcagcttttgaaggattgcctcctttggaaaggacaaacgcattacaaaggatggttctgttttcaagagtggaaccttcccataagaagatgcttgttgaagccttgcaagcacataatgaagtggttgctatgactggagatggtgtcaatgatgcacctgctctaaagaaagcggatataggaatagcaatgggatcaggaactgcagttgctaagagtgcttcaaacatggttttggcggatgacaactttgccaccattgttgcaactggtgcggagggaagggccatatataataacaccaagcaggttatccgatacatgatctcaataaatatt

SEQ ID NO: 306887 - DNA, 291 bp, Zea mays
tccttcttttttttttttctccctttaacttgcaaataacggggggcattttcaaaaaggaggctttacaaaccccccaaaaatcacaacagaaaatgacgcccaaactaacactgttagataacatcacatgttgcagatatgggtgagattttcctttttcctatcggctaatgatcagtaggcaggcaacaacaaacataactctatactcaaattagtgacagatcaggtgctgctagatacgcccttgatacacaagctccaacccacgaaccaagtcgacaaggg

SEQ ID NO: 306888 - DNA, 420 bp, Zea mays
tccttttttttttctctttttcttttttttttttttttttttgggggattttaattggaggggagtttaataaaatttacaccctaatccaccttaatacacgtaaatagattgaggtgaatgagtttaccacacaggagctcctcgagggcctacagaatttaccatctgtcaagggatttacattacatccatgtctgaaaacaaggcgctaacaacaagaagcatgagctaggggatgagctcaaccccaaaatcccaaagcctcttggccaactccatgtccttggcgttcgcgcttggctcgtacaggttacagtcgcaaaagtacttcccggacacccccttaacatgcgggtggagtgccaaatagcatgtagttgccgcaccctgctcagcatttttcaacaccaatttacc

SEQ ID NO: 306889 - DNA, 276 bp, Zea mays
ggttctttctcttcctcacgcgcctcgacgtgcggggggagtctacatttcccgaggacgtttcctccgacgaggaaggcaacgcctacgtgaccgacgccaagggaagcaagatctggaaggtcgggccggacggcgcgctgctcggcgtcatcaagaacgccacgttcgtgcagcggccgggcctgcgccacaacctcgtcggcctcaatggcattgtctaccaccctaacgggtacctgctcgtggttcacaccttcggcggtgacttcttta

SEQ ID NO: 306890 - DNA, 258 bp, Zea mays
catattcttaacttcaggggaactttcttattgaatattgtttcattactaaatttgatctttccaggttcgtcttgtaactgagaaagatacaagtaaacctagaggatatgcattcattgagtatgtgcacacacgagacatgaaaaatgcctacaagcaagcagatgggagaaaagtggacaacaggagggtattagttgatgttgagcgaggcagaactgttccaaattggcgtcctaggagattgggtggtgg

SEQ ID NO: 306891 - DNA, 140 bp, Zea mays
tcgcagagcctttcgttgtcatttcccctatcctacctcccttttgccgggggccgtctgaggcaatttcggccgtgattcgaccccgattcgtccgcatattaccggtattccctccgccaagcgcggatctgaacgct

SEQ ID NO: 306892 - DNA, 304 bp, Zea mays
ctcgattcgaccccgattcgtcctcacgcgaccggtattccctccgccaagctgcggattctgaacgcttgtgcttcccgagtttgccattaagaatcctccataaaggcgtccaaatccaagggcgctgccaaggccgttgccaatctggctgtaaatagcatgggggcggggatgcccgccatgggcagtaaagggaaggccggcaaggaccccaacaagcctaagagggctcccagcgctttattcgagttgatggaggaatttcgaaaggagttcaaggagaagaaccctaataacaagt

SEQ ID NO: 306893 - DNA, 311 bp, Zea mays
atccgatccggatcttgcaacccaggggcagcgatcgcctactatatgagcgcgctcaccctcggcgaggacgatctcaatgggaagaaggtgttcgtgctcgccgacgtgaacgtgccgctcgacgatgcccagaagatcaccgacgacaccctcatccgcgccttcgtccccaccatcaagctcctgctcgagaagggcgccaaggtcatcctcgtcagacacctgggtcctcgaaaaggtgtaaccccaaagtacagattgacgcctcttgttccacgcttgtctgagctccttggagtttcagtcgt

SEQ ID NO: 306894 - DNA, 198 bp, Zea mays
tccttttttttttttttttttttttttttttttttttttacaggagacattttttacttaatggaacattacccaaactgacattatgacaatgttagccgatgatgacgacaatggaaacagtaatctaggtacaagcaggcgcctttgctggctggcaagtgtgaccacacacaaacacaccagcccacgcgtccg

SEQ ID NO: 306895 - DNA, 428 bp, Zea mays
gctaaccgcatgggacattttaagcttgcatgacataaacgcgaatgccataaatccgactcatcagaaaaatgaacagaattcacgagtttattacacacatcatgcagagataagcggaacaaccctccgcagtcatatcctttaccaacaaaaataccatgtttagacacaacacatttattagactcaagaacaactttgtatccatctcgacatagcatagacgcgctaacgagattcttcttgatagagggcacatgctgcacgctcttcaatggcaccgtctttcccgaagtaaacttcagaatgaccgtaccaacaccaagaacatgagcacgcgacccatttcccattaacaaggcgccagacctcccgaccagatgttccatctccagtttcagtggttacaacattagctgatttct

SEQ ID NO: 306896 - DNA, 423 bp, Zea mays
tcttctctccttcctccttgggttcccagcccgtgcgcccgcctgtcgcagtcgcgccgcagccgccggccatggtctgcctcaccgacctcgtcaacctcagcctctcgaacaccacagagaagatcatcgcggagtacatatggatcggtggatctggcatggatctcaggagcaaagccaggaccctccactgcccggtgaccgatcccagcgtggtgccgaccctccccggcctggtgaccgatcccagcaagctgcccaagtggaactacgacggctacagcaccggccaggcccccggcgaggacagcgaggtcatgctgtacccgcaggctatcttgaaggacccattcaggagggacaacatcatccttgtcatgtgcgattgctacaccccagctggcgagccaattcccacca

SEQ ID NO: 306897 - DNA, 393 bp, Zea mays
gaaccatggggaacttttttattacattcagggttacaagatattacacatattacatttcaaaagtttttacaatagcacttagtcttccctaagtacaacttccgcagcttcgttcaggagttgattaacaacttgatccatgatagcttcagccatctttttaatttcgtcgtcatctttcggctgagggcctggaggcgctttagtaggatctgagggaggacaggatacggctacattgctattacaaatggcgaacgaagtttaaaatcaaaaattacaacacaataaaaaccattagttaatacctatttgtccttcgggctctgcgcttttctcagcagcctttgctacttctctagcatcatggatccctttttcgcttttttt

SEQ ID NO: 306898 - DNA, 378 bp, Zea mays
tcgtcctttttttttttttttagtccgacgcagcacccttttaagggggagttttttaaacttacatcatcactagccccaggggttgccacaaccaagcgcttgcaaattgcaaacacgggcaatggtgatgcagcccacaaagagctttgcaaacagtaaattacacacaggacataaaacaaaggaacagcgagcaccttgaagaccacgggccccatcaagacatcaacaatctgaaactcgttatctctggagactgtactgccttcacttcacttcatctccccgggatcagggtcagggggcacggccacgggcctccgctcagcagatgggcaggggctcaccgttccactccttgaggcactcgagcac

SEQ ID NO: 306899 - DNA, 437 bp, Zea mays
caggagcacagacatggggtgttagcaatgtgggcaagttcacggaggcagtatacgaaagttacataatctccagctcacgccaattctacaatactctagatccagaactattccagacagcaaggatgtcggcatcatctttgagatactatggtattggactccagaacggaaattataccgtcgcacttcaatttgcagattttgactttgaagattcacagacttggcagagtgttgggagaaggatttttgatatctatctccagggtgagcgtaaggagaagaactttgacataatgaaggcagcagggggaaaatcttacactgctgttgagaagcagtatattgttcctgtcactagaaacttccttgagattcatcttttctgggccggcaagggcacttgttgcattccctttcgaggctactat

SEQ ID NO: 306900 - DNA, 312 bp, Zea mays
cggacgcttgggcggacgcgtgggtaccgacatcctgcagagcactatttttacacaacagcatgtggtacgtgttctagctaacgagagagacatgatgaaatgctgtagcattgaatatagtcatccaaagcactcatcccaggcttttgtctatggagggatccttctggctggatttattgtgtatacactggttattgtcttctcttgacctgttcgctaattttatgtccagatgaagaaagtcctgcatgctatatggtaagctaggttagcctagggtcgtcaatcttcatgagggaatgacct

SEQ ID NO: 306901 - DNA, 437 bp, Zea mays
cggtctcgtgggaaagaatcctattaacaactcaaataatctgggtaaacaaacaggactaccgagattatataatccagattatataatccagattatataatcctgcaaaaataatccagattatataatccatgggggtaaacaaacaggccctaatctacatgtaattagaataaccgaacaagatctaaggacatgttttagttatttctacaccacatgtattagatagaattaaaaaatagtagggattttaatttgttatagattttaacttgttataaatttaaactcactcaaccccttaaatccacatagattaagataaaaaacgaacatgccataagtgattgcacaagtatatacttgatgtaacgtatgtactttgtttttctggaacgtaacatatgcacaacagccacaacagaaaacca

SEQ ID NO: 306902 - DNA, 495 bp, Zea mays
  unsure (1)..(495): unsure at all n locations
cgcgctccattcccaaccccaacccagcggtcccagtgggcggggccctatatcaacactctggaggtgccagtgccggccatggcgcgcgccccgagctcgtggacgccgtccctcgccatggtgctcctcgtcgtggccgccgcggccgtggacgcgtagtcagaggcggccagggtgcccgccgccgtcggcaactggacgggggaggagctgctcagcgcctcggccaggcggtgcggccggcgctcccggcgccgcgcgttcgagaacggcctcggccggacgccgcagatggggtggaataggtcgaaccactacggctgctggatcaactagaacctcagcaagcacacagctgatgcgctggtcaacaccggtctggcgaagctgggctacgagtatgtcaacatagatgattgctgggcggagtctgacagggactaccaggcaagcttgngtgcaaacagacaaaccttcccctctggcatcaag

SEQ ID NO: 306903 - DNA, 468 bp, Zea mays
  unsure (1)..(468): unsure at all n locations
gcgattgcgctctccatcctgccgccgccgcctaccaggtctgccattcctgtctattcccatcgttgaaaccgctcgccctctccacgtgacatccaaacgcgaccgccccctccccacccccaccagccgcccgcctcctctgcgtcgcatccgccgcgagctcggggcgggacagcctccacggcggcggggtcacgctgaacagggagccgctgcagggccggcgcctgcacgccatctccgtgtatgtgagcgggatgctgaccgtgcgcgagacgctgctgttcgccgctgagttctgcctgccctgcgcgctttcctcagagcggaagcgcgcgcgcgtcgaccagctcggcctcttctacgctgccgacaccatcaacggctggcggcagcggcgttcctatcgcagccatgcgccgtcgacgtcgtctacgggggggngtgggcaggacggctggcact

SEQ ID NO: 306904 - DNA, 479 bp, Zea mays
gcatattttatcaagagcaggcctgaggctgatcagaaagggctgaaggctacattaattaaagagctatatggtgaaatggaccgactgaacgtagaggtctacgctgctcgagagaccgttggggagctcattgacaaagacaggtatgagcaagaggaaaatgagcgataggcgattgctgatcacatagaacaaatgaatgctgatttggaagaaaaccataagctaattagatgactctgcaacaaactaattattctgagctgaaacattgtgctgatatgtgcaaaaagcttgaagtcacagagaaatgtctagaccacacaagcaacctactctatacgacaaaagaagatcttagacaggcacattataatctaaatgacaaagattgtatgattctagagcagtagaaagcagaaagtgctttaacacaccaaacgtatgtgctgagatcagatctggaacaatatact

SEQ ID NO: 306905 - DNA, 479 bp, Zea mays
tgttttaactttggaagttggcttaccctaacagacaacttcctcctctgaagtcagatctctggaaggagatgggctggcagaactccgatccatccacagattttaggttcagttctgcagtgatgacgtttcttgataaattgtcatgcattatgttgacatgatttgagccggatgatttgtattttaaagtatcctatgcttgcagagcagctgggttcatgtccttggagaatctaatatattttgccagaaattacccagtatgttctattcatcctggattcctgggtgactcaattgtgtttaatgctgtgcagttgattttacatgcaggattcctttcacaggctactgcataaagcagatggtaagagagctgaatgggagtatccttttgcagtaggcggcgtaaacatatcctatatgttagttcaaatgctggatttacagtcaggaaaaatgagaacaaaagc

SEQ ID NO: 306906 - DNA, 442 bp, Zea mays
  unsure (1)..(442): unsure at all n locations
tttttnttttttttttttttttttttttttttttttgggtttaatggcaaacaaattagaatccaaagctcaggtctactataacacatccagcggacggtacactgataaacgcctggtgcatctcttctgaaacaaaaaaaaagtctacgacatgatctacttgacccagtttatcgcctgcgcatgcccctgccaccacgtcctcgcattgcacctcgaccgcgaccagccatcgcaccggcagcagcctcaccttgggcgctctccgactttgggtttttcactgtctcgtcgacgctaagaataaggcaggaagcttcggttgcagcatttatagcattgatctttacaacagcaggttcccaaacaaagtttgcaaaggaatcagtaattccgccagtgtttatgtctacaccataattagcaccttcaccagatg

SEQ ID NO: 306907 - DNA, 442 bp, Zea mays
ttgcccttttttttttttttttttttttttttagaagaaaatgggctaatttaccaatgactaggagaatttattacaatttttggagaaaaatagcagtagagatctagaaatcgaagttcccatgtttcccttgtagactcgatgtattcctctctgaacgtttggtgcgttgcttaccatcactgtcagctctagcacctgctttggtacttccaatgcctagtttcggcaagcctcgattcaatccatccagcaagacgcatgctttgcataatttctgactagaaatgtagccacatcgttcacacgttccttgctctggcatccttgttgttgaggagattctgaaattttcaccggattttatgatgtctagtatagctttaggcctgcaacattcatcggctcattctttctaaatctttaataaattcacgag

SEQ ID NO: 306908 - DNA, 506 bp, Zea mays
cagtttttaccgcctcccctcccctccgctcctgttcctccataccccacccccccgcaggagcggcgcggcggcggcggcggcaaagccaaaggcaagatgttcgggcgcgcgccgaagaagagcgacaacaccaagtactacgagatcctcggggtgcccaagtcggcgtcccaggacgacctcaagaaggcctaccgcaaggcagctatcaagaaccaccccgacaagggcggtgaccccgagaagttcaaggagctcgcacaagcctatgaggttttgagtgatccagagaaacgtgagatttatgatcagtatggtgaagatgcccttaaggaaggaatgggtggtggtgggtcccatgctgatccatttgacattttctcatcattctttggaccctcttttggaggaggtggtggaagcagcaggggaagaaggcaaaggaggggagaagatgtagtccactcacttaaagtttctctggaagatcttttacatggaat

SEQ ID NO: 306909 - DNA, 486 bp, Zea mays
ggcagttcaagcgagagcgcggctcctacccgcaggagagcccccccacggcgttggccttgagaagcctcgccgactacaccgtcggggccatccccaccctattctatgtccccgacttcatctcccactccgagcaatcacagctcctccaccatatttaccaggcaccggcgcccaagtggaaaaccctcaagaaccggaggctacaaaactgggaggcagtggtgcatgagaaggggctcctgccgcaggccttgccttcatggctaacaaggataaccgacagaatctgccagtggactggtttatttccttctgcaatcaatcacgtgctgataaatgagtatcatcctaaccaagggatcatgggtttgcaatcgacagacctttattgtttgttccttttgttacatattaagcatcacccttaccaacattgacttttgtgcctttccgccacaccaagatggtcctgctacttac

SEQ ID NO: 306910 - DNA, 241 bp, Zea mays
attgttttcaccacgacgcccgctgccaagggagcttaaaggttgcccgaccaggggcgcagaccggacggtctgagccaatggcacgtgacccttggggcgcgaacgccctaacgtgggtcgcttgcggtctgcgaacataggcgccgcctgctagcttggattgtcacttataggctctcagtcataatgctgctcacagtaactttgcgccactggctttataaccaagcgcgatgac

SEQ ID NO: 306911 - DNA, 321 bp, Zea mays
tttattattttttttttttttttttttttttgggggttttttttttttttattacgtaaaacgcgggccacgataatattggtcaccaacaaaagggtctaacggggatacaccgggacgacgaccataaatcgagcagggactgggccagccagccactggaggagacacacgagactgacacaaaccggttagtccacctcctcgatcttggggccagggccaccgttttcaggcggggggtcctcgtccatgccgccggagccttccatgtgggcacccgggccctggtacattttggcgatgatgggggttgcaaag

SEQ ID NO: 306912 - DNA, 440 bp, Zea mays
ggctttcattacgaatgctcttaaagatgaaaatgatgctggcaagaaggaaattcagctgcagcttgagctgatgaagaaatatgctatgagactccgtgtcattgctcatacccagattaggaagatgaagggtttgaagcagaagaaggctcacctgatggagattcaggtcaatggtggtaccattgctgacaaggtggactatggatacgcaatctttgagaaagaggtccctgtcgatgctgtcttccagaaggatgagatgattgacatcattggtgtgaccaaggggaaaggttctgagggtgagaggactcgttggggtgttaccccgcttccctcgaagacccacaggggtctccggaaaggtgcttgtatcggtgcatggcatcccgctagggtcttctatgcggatgctcgggcttgtcagaatgggt

SEQ ID NO: 306913 - DNA, 434 bp, Zea mays
cgaaccgcaaaccctaacctttcgattgccgccgcccgccgctcgctgctgcccgccgctcgccgcggccaatgatggcgaggggccgccgcggcccgggtggacgggggaggttcggcggcggcccgctgggcgacgagcggccagtccgtcacggcgtccgcgtcgaggagaacccgtacttcccattaccgcgtcgggcgtcgggctggggagtggcaccgccgtcgcggcacctgtgggtgggtggcctggcgcccagcgtcacggcgtccgacctgtcggagctgttcctccggtgcggcgacgtcgagggtgttgcccgcgaacccggccggaacttcgcgttcgtgagctatctgcgggagggggacgctgtggccgcggtgcgggagcttcagggggctcgcctggctggtgcgcctggtaggatc

SEQ ID NO: 306914 - DNA, 244 bp, Zea mays
cccgttaccttttaaactgcctgtttttccgacactccactctggaggggaccatcatttaatctaaaaagtgaggagaaggttctacacgaactggtgcaagagcaagaagaaggctttcacaaagtatgctctcaaatatgaaaatgatgctggcaagaaggaaattcagctgcagcttgagaagatgaagaaatatgcttctgttatccgagtcattgctcatacccagattaggaagatg

SEQ ID NO: 306915 - DNA, 492 bp, Zea mays
  unsure (1)..(492): unsure at all n locations
ggcgattttgcgccatgtcgatgctggacaccttcttcagcaagggcggcggcggcggcttccgcggcgccaagtgcaagacgctgctgaagctgtcgatcccgcggataaagctgctgcggaaccggcgggagctgcagctgcgccagatgcgccgggacatcgccaagctcctagaggccggccaggaggccactgcccggatcagggtggagcacatcatccgggaggagaacatgatggccgcgcaggagatcctcgagctcttctgcgagctatcggcggatcgcctgcccatcatcgagggccaaaagttcgcccctctgaccgaattcgattttacaactcgtgagtgcggtcgctatttgattgttaatatgcctcnggatgttgcaatcgaaactagctgtagatttactgcccgtcttgatatggcaaactgtgcttgacccgcagctcgcttgggatttccagtggcttggtggcatttac

SEQ ID NO: 306916 - DNA, 241 bp, Zea mays
gtaataaccgacacactttaacacttgattctggagtgactcgttcaccgcctcttctggctgaagccgaccttcttagctgtatggataaagcaggaattggcactgatgcaaccatgcatgatcacataaaaaagttgcttgaccgttgttatgcaaccaaagatgaaaacacacgtttctccccgacaaatcttggtgaggcattggtgatgggttatgatgaaatggggtatgagtt

SEQ ID NO: 306917 - DNA, 223 bp, Zea mays
tggacgtccgcctccttctggatccagccaagccagggatcgccatgtcggactcggaggagcaccacttcgaatcgaaggccgacgccggagcggacacgacctacccgaagcaggctggcaccgtccgtaagaacggctttatggacatcaagaaccgcccctgcaagggtgaggaggattctacctaaaggactgctaagtatggtcatgccaaatgcca

SEQ ID NO: 306918 - DNA, 195 bp, Zea mays
gactccgaggagcaccacttcgaatcgaaggccgacgccggagcggacaagacctaacccgaagcaggctggcaccgaccgtaagaacggctatatggacatcaagaaccgcccctggaagggtgcggaggattttaccgtattgactggcaagcatggccatgccaaatgccacctttgaggcctagaccatat

SEQ ID NO: 306919 - DNA, 519 bp, Zea mays
aaggttttaagaccagcgggctattaaccttacctagcaggtgatcttggcccatgccagccacatccaaatgtcaatcttggtggtgctggctgaacacctgactctgctggcggattagaaagcccagaccggatctatgatggtgggctaccatattacttgactgaggctgaagtgcggtagtcgctcaagtgcttcgcacctctgcgtgaattccatcgtgcgaaggacagagatactgctgactgaagaggatatgccttgtgtgtataccaggatcttaccgtcagccacattgactgtggtgcccttaacgggatgaagacgggagtcaagactcttactggccggagggcgaaccaaggagctgattaggctaggccagagcaagatagcatgctgctgcaggcacagttgcacgcgcatatgctgaaactctgatacccagtgagatgagccctgcccacacaagctgtctgcctgacacaggcatagacagccaatgaactgatagac

SEQ ID NO: 306920 - DNA, 150 bp, Zea mays
accggtccgttttcccggtctgttcccacgcgtacgtttcgtatccgcccacgcgtccgtgttcttacacgtagggacttcttgcagcttctcatgaaatcacaccctggtgaagttgttaaacctgaccaattcaaggcgattaatgat

SEQ ID NO: 306921 - DNA, 231 bp, Zea mays
atctgccttcgcctcgaaactcgtacctaagtctcccattgggcccctcattggtcgccaagagttcttcttgtttaggcaaaggcaaaagcaggagcaaaaaggtttcgttggcgatggcgagctcgtggacgcttcctgaccacccgaagctccccaaggggaagccggtggctgtcgtcgtgctggacggctggtgtcaggtcatccccgtccagtactactgcatcc

SEQ ID NO: 306922 - DNA, 357 bp, Zea mays
tcgtttactttttcggactctctacctgtacctactggagtagggagcacgccgaacgagcccttggcgtcgccgtcaaaatggcgatcgttcctaagaccaagaagacctactgcaagaacaaggagtgcaagaagcacactgtgcacacggttactcactacaataagggttaggctagaccgattgcccagggaaagcgccgttatgaccgcaagcagtcctgatacggcggccagaccaagcctgtcttgcacaagaaggccatgaccaccacgagaactgtaacgaagctgcagtgccagagctgcaagcactactcacagaacgcatttataggtgcaagtcatttgagat

SEQ ID NO: 306923 - DNA, 292 bp, Zea mays
gtttgcttaatttcatgtcctgcctaccttttcctaccggtatccaggcctcccccagcccggctcgggcgtcgcccatacatgaaccatccgtcctaggagcaatactacgtccagccggcgccaggcccggcggtggcggacgatgccacctgcctcgcgccggactaacggttacacccgaccgatgaggagctggtatcctactacctgaagcgcaaggtcctaagacggccgctcaaggctgatgccatcgccgatgtggaccttgacacgctcgagccctgggacc

SEQ ID NO: 306924 - DNA, 502 bp, Zea mays
atccggccacgttttcctgtcgtgcatggggaacctgacgcaactgatcttcctcgacttcaggcagaacgagctgtccggcgtgatcgcgccggagctcggtgagtgccagcaactcaaaatccttgatttggccgacaatgctctgaccgggtcgattcccgagacgtttgggaagctccgttcgctggagcagttcatgctgtacaacaactcgctctccggcgccatcccggacggcatgttcgagtgccggaacatcacgagggtcaacatcgcgcacaaccggctcagcggcagcctcctgccgctctgcggcacggcgaggctgttgtcgttcgacgccaccaacaactccttcgacggcgcgatcccagcgcagttcggccggtcgtcggggctccagcgcgtgcgcctggggagcaacatgctctccggaccgatcccgccgtcgcttggcggcatcaccgcgctgacgctgctggacgtgtcaagcaacgcg

SEQ ID NO: 306925 - DNA, 482 bp, Zea mays
tccacgcgttcggccaatccccctcttcgccgttggcggagcttaccgaggaaagaagggcagggccatggcgggagccttcgctttccgcctcgtgcctcgcctcgccgcagagccggcggcgagggggaagggtggcggaggaggagccaaccgcgacgccggcagcagggcgctggtgtcaaagaaaccaaacaagcagcagcatttgtggatcaggaaggagacagctgggtcagggaagaaggctctccgacttattgatgctgtttcgaagttaccaaatgaaagagaagctatttatggtgcattggacaagtggagtgctttcgaacctgaatttcctattatagcagcagcaaaagctttggggatgttgaaaaggcgacgacaatggttaagaataatccaagtaaccaagtggttgatgagcaaaggacaggtgctgacatggacaacatatgatacacttctgctcgcac

SEQ ID NO: 306926 - DNA, 204 bp, Zea mays
gtgcctttttttttctacattcttgtgaagattcggcaacggcggggtctattcaatccgtgaaggcgctcctaatctttgacagccggggcatccctacagtcgaggtcaacgagttttgctaaaacagaacctttgcaagggcagcctgttcccagtgggacatcaactggtgtatatgaaacctctggaggttgaaggatg

SEQ ID NO: 306927 - DNA, 230 bp, Zea mays
cccacgcgtctcgttgattgtgagcagccatcctggagaaaccagggacatacgtggatacaagattgctagtcatccgaatatatacgtgttggacactcctggtgtgctttcgccgagatttgcagatgatggttctggccccaggctagccttgacaggtattagttactttactttaaagtttatggtcttactttaactacatgcttttgctggagccatcatgg

SEQ ID NO: 306928 - DNA, 182 bp, Zea mays
atgtcgctcggaggaccgctgcgttggctctcggctgggttctttacaacgagcctgaacagacacccacaatcgcgtccgtactgacggaatcatacaatccacatgtccggtacggtgcatctctagctgtcacgatctcctgctccggaacaggattaagtgcagccatctgcttactg

SEQ ID NO: 306929 - DNA, 322 bp, Zea mays
tttttcctcctttttttttttttttttttttttttgtttttttttttttttttggaacacaaaagggagcatgtttgagtccaaagcaagccagcaatgacaacatttttttagacaaacacaccatgggcagcataccgcactggagttttacagtatttagcaaatttcccccacacaaacaacttgggaactggagcaacaccaaaaccgtattgacggcaaggcgcggggcggaaggcctagccgccgaagccgtaaagggtacggccctggggcttaagcgcgtaaaccacgtccatgggggggacggtcttacggg

SEQ ID NO: 306930 - DNA, 373 bp, Zea mays
gccgaccggacggcgggcggccagcgaccggggcgctttggttcgtcagtccggtgcccctccccgaccagatcggttcaagacgccgtgcgagccgacccaggccgacgcggacgacccgtgtgaccgccggcggccatggcgcacgggcaccgagccaccaccttggaggactccgagaaggagagcgagcacggctatgtgcgagaggtctctggacctgtggttgaggctgacagaatgggtggtgctgacatgtatgaactggtccgggtgggacatgacaacgtgatgggggaaattataccgcttgagggcgagtgacatacgatgcacggttaggaggtaacaggtgcactgatggttagggacc

SEQ ID NO: 306931 - DNA, 164 bp, Zea mays
cccacgcgtccgttcacgcgtgcggacgactgccagcatggggcgcatttatagctaattgcgctcatcactcacctccgaccaagatcagcaaggacggcatggctctcgaagcagcgtacgaatacctgcacgtcgccgtagtccagagcacgcccacacaa

SEQ ID NO: 306932 - DNA, 199 bp, Zea mays
cccacgctttcgctcacgcgtccggttcagacaagcttgtcgtatcaacttcctgctcgctcatgcacaccgctgtggatcttgtgaacgagactaagcttgacagcgagattaagccttggctcgcttttgctgcccagaaggtttgtttttggtatatattcttttatcttttaatttatttattaacatttttttt

SEQ ID NO: 306933 - DNA, 121 bp, Zea mays
ggtgttctctcaccagattgatcaacagaaacactacaatccctacatagaaaagtcaggtgttctcaactgctgctgacaatcagacccaagtgggtatccgtgtgttgcaaggtgagcg

SEQ ID NO: 306934 - DNA, 237 bp, Zea mays
ttctttctttggagacaaaaggccaccaaattactggtggtttgtaaagggaactgaagggtggacaggtgtggtcatggttgttcttatgactatagctttcgtattggcccagccatggattcggagtaataagctcaaggattctaatcccctcatgaaaatgactgattctgttcacttttggtttactcacctaccttgtgaatttgttcaaaattaagtattctgtgcatt

SEQ ID NO: 306935 - DNA, 416 bp, Zea mays
ttcacgtgtccgctcgccttcaccacgcgccgcccgatccgccaccgcccgccgcagccagcaagccaaggccagatggcggcctcactcgtgtcctcgtttactgtgcccctcgtatccgccgtcctcggtgccgccatcgccctcgtcttcctcgccggctacctccgccgcaagcgcgccgccatcgcccacatccctcccaccgaaaccgccgccgccccggaccagcctaagcatgtccgcccctccaaccaggcccagtacaagaagggccatctccgcccgcatcaccacgcggtcgacaaggacgcggccaagaagcaccaccatcttgatgtcaacaccttgagggggcatactgactccgtcactgcacttgcctttttcaatgacgcctgcaacctatttaccgt

SEQ ID NO: 306936 - DNA, 420 bp, Zea mays
gttcatggcgggagggaacacggcggcgacgctgtggtgcagccactgcggcatgggcatcgcggcgccggcgcccgggtccggctctatcgtccggtgcgcgttctgccgcggggtgacgcgcgtcgagcaccagcgcggcggcgtgggcgagagagccatgacgacgaggacgctcgcggctgcagcctcgctgccgcggcagcttccggtctccgcggggcccgtcgagatcccggccagctaccccagggtgagcggcggcaacaagaagcgggcgctcctggtcggggtcagctacacgggcaccgcgcacgagctcaaggggacggtcaacgacgtcaaggagatgaggaggctcctctgcgacaggttcgggttcccgggcgcctgcatcctggagctcaccgagaaggagag

SEQ ID NO: 306937 - DNA, 457 bp, Zea mays
ttttaaagcaagtggagaaagatgttcgtacagctaaagatgatctcaaatcgaaggcgtcacttattaactcactgaatgagaaagttcaaacattatacactgaaaagggtgaagtggaagaaaaactaagtgctctagtgagtcagtatacatacctgaaatctgcttctgaagagagggcttctcacgattctgaactattagttcagaaagatgatatgctcaatcagcttgaagaaaaactttctgctgcattaagtgactctagcaaagacagaactcgaattgccgagttgaacaatgaattggtcaccaccagaacaatactagataatgaagttgttgccaataaaaaattgtcagaccttgttcagttcactgaagaggcactaacaggtttcagaaatgaggtgtttaaactctctgaagagcttgacgcagtaaagagatcaaa

SEQ ID NO: 306938 - DNA, 344 bp, Zea mays
atatatattgtaacgatacagagaagattagcatggcccctgcgcaaggatgacacgcacaaatcgagaaatggtccaaatttttgaattgctctttctatagcaagtttatgagttcagtttatattccattgaatatttgttgcagtgaagagaaatgagagaaagccttcggttgtagccttcagtttatattccattgaatatttgttgcatccgactcatctctgtttcgattccatccggtttggctcattttttaatcgagtgtgttgtagttttgtaccctaatgtcgtgggagtgctaccgatgtactgatagcatcactttaatttcattagtt

SEQ ID NO: 306939 - DNA, 520 bp, Zea mays
tcgcctgctccattctcagccgccgccaatcccttcccgtgctccgcaaccgctgagtgagaagaagagatggccggcaagggcgatggcccggctatcggcatcgatctcggcacgacgtactcttgcgtcggcgtgtggcagcacgaccgcgtcgagatcattgccaacgaccagggtaaccgcaccacgccctcgtacgtcgccttcaccgactccgagcgcctcatcggagatgcggccaagaaccaggtcgccatgaaccccatcaacaccgtctttgatgccaagcgtctcatcggcaggaggttcagtgatgcgtctgtccagagtgatatcaagttgtggcccttcaagctcatttctgggcctggtgagaagccaatgattgttgtccagcacaagggtgaggagaagcagtttgcagctgaagaacaagaaggatatcactggcaaccccagggctctcctgaggctgaggaccgcttgtgagagggcgaagaggactctgtcttccact

SEQ ID NO: 306940 - DNA, 378 bp, Zea mays
gcgtgactttctcaaagactgaactagacaggctactggtatcggttccggcacaggctgatgactacgagaaaaactactagcacatgaaaccgaacaggataccaggcaggatacatggattgctacatggacatctgcaagcacaggggcaagatctgcctaaaggcatcagtgagagcgctgtatgccccgcgggaaggggcccagcagtgagacgactatatgtacagggcaatgagaacaacggagcggtcattaatgctagctttgctgctcgctaggatgttgacgaaagggcagcagaaggggcactaggggggtcagtagcttgaggagctgctttaacatctgctactacattagagcctgcgtacc

SEQ ID NO: 306941 - DNA, 487 bp, Zea mays
ctctcatgggcaatcagaatgaaggttgcactcggagcagcaaagggtctggctttccttcatgaagaagcagaaagaccagtcatttatcgcgattttaaaacatctaatatactgctggatgcggtaagttaatgaataggattatgcagtgtgtgcttcatgatctatatactgctacatcatatgttatattgcttgtacaggagtataacgcaaagctctctgattttgggcttgcgaaagacggacctgtaggtgataaaactcatgtttctactcgagtaatgggaacctatggatatgcagcaccagaatatgtcatgactggtaagtatcttgtcatatttgccatgactgtgtccatcgaactctggtggtgagcaagtctggccactgccagtgctaccagtgagcaacgaaccattcactagattcagctttatctgcttgttgcgtatccaaacgatgttaaagatgctgggat

SEQ ID NO: 306942 - DNA, 358 bp, Zea mays
ggatcaaaaggcaacaggcaattgaacaattcatgttatattgttacggggtctttacatgccactacatactgtgtacccgacaatacacgttgtcgcccatgcatatacacaatgaatccgacaaaatgacagcggatattgcttcatgtaactaatctcagtatcaaccaacaatttgcccccaattcgtcagaggtatctatcgcatcgatcacggcccgatggtgcccgtgtcgaagtagagcagtcgtcccggaggaggatccggagacgccgcccttcatgagcgcgaaccgcatgtccttcgacggtttacaatgccgctttcgctggttgatgaaccaattgttgatct

SEQ ID NO: 306943 - DNA, 414 bp, Zea mays
ttgagctggtgcccaggtggatgttgcagctgggcactgcatcttcgagctggtgcccaggcggatgtaccagatgtacactcccctgaaggacctgatgtacacgcctacacaagtgccagacaatcttgttacacaaaacacacacacacaactatagcaaaaaaaaacaagactctgctgcagagcaagttccattctatgtaccacacgcagatgcggacgtactactacctgttcatgccgatgtacaactacgtttacaagaccatggacacgtcgtttaaccaggtggacgagacctctgtcagggtagcgctggagaccattggcctcgtgcacctgacgcacatgaccgagctggagtcggtctaccagctgcggatcgggtttgcctccgtggcgatgagaccg

SEQ ID NO: 306944 - DNA, 316 bp, Zea mays
  unsure (1)..(316): unsure at all n locations
tttttntttatttttttttcttttttttttttttttgggttttttttttttaatttttttttttttccttttttttttttttttaaaaaaaaaaaagcgacatttattcgttgggcattatatcacagggcattgcccggcgggaaacacagttaccggattattccatgcacacttgacagaaacccaaacagagaccacgggccggggtatcagttgtccatggggaccccaggcagctggaaagggtcgtcgacccggatgggctgctgcttgagcatccacttcttgaagggggggaagaggatctccttgg

SEQ ID NO: 306945 - DNA, 529 bp, Zea mays
  unsure (1)..(529): unsure at all n locations
tcgatcttgggcaagcctcagaccagttcttctttctccagtttccgcagtgcagccatattaacatgaccaaacctctcatgccaccgccaggctacttcatcttcgcgcccacgcactgctaggcacacagactgttgtatcttcaaatgaaggaggtacaacctgttttcagctcgcactattcttgccagtaatcttccatcaggttccctaatatgcatcaccccatcatcaacatgaatgttgtactttgcttcatcaagttgcccaatcctgatgaatttttgttgtcaggcgaggaataaaataaggcccaacaaacgaccgggtctcgccattcttgcacataaacttgatggttcctcgtccctcaatctgagcccngnagttgtcaccgaacctgacagtacccaacactctggatcgggatcggtgaaaacagcctggatccggacatagatttgtgctccagtgccaggatccaggtccctctctaattttctctctcatgtgaagacacttctct

SEQ ID NO: 306946 - DNA, 455 bp, Zea mays
cctcacgcgtccgcccacgcgtccgcccacgcgtccgcttgagatggagaggacgcctcaagtagaccatttgcattccaagggaactcattttaagttatccttcgatgatgactcaccgatttctccagataaaacaaagttctctgtgatttgctattttgcaaagcattttgctgcgctgagaaagaaatgctgtcccaaagatattgattacatacgttctctaagtcgctgcaagagatggaacgcgcagggtggaaaaagcaatgtttactttgcaaagacactggatgaaaggttcataatcaaacaagtcacgagaacagagctggagtctttgttagagtttgctcctcagtactttaaggtatttaatggaatccttggcttctggtagcccaacctgcctggccaaatagtaagggttatatcaggtggcgtcaagagcttga

SEQ ID NO: 306947 - DNA, 501 bp, Zea mays
cccctgccggacccggtccgaattcccggtcatcccacccgttctttgttgtgagcctactcgaggagaccctgtagcagaagaccaaagatggcaagcctctttgcgacgtcctcaaggagggaggcgtcctccctggcatcaaggtcgacacgggcaccattgaggttgttggcaccgacaaggagaccaccacccagggccacgatgacctctgaagcgctgcgctaagtactacgaggccggtgcccgctatgccaagaggtgtgctgctctgaagattgtccccaacgagccggaacaggtcgccattgacctgaatgctcacggactggctcgctacgccattatttgccatgagaacggtctggtgccaatcgatgagcctgagatcctctgtgatggacctcatgacattgatcgctgctcttacttgactgacacagtccttgctgcctgctacaggcttgaacgcgtaccatgtgctgctggagggtaccc

SEQ ID NO: 306948 - DNA, 300 bp, Zea mays
accgaaaagaagaagaccgtatcacttaaggtttgccagtagccgcgataacattgaaccgaccgactatcacgaggtccaaaaaaataaccaccacaaaagtaccaaccaaccacaaataaagtttaagcggacacaccgcaccaactgacgataactttcggcagcaactgggccagccagcaactgcagcacactcaagactgacaacaaaccgcttagtccacctcctcgatcttggggccagggccgccgctgccggcaggggcgtcctcgtccatgccgccagcgccgcccatg

SEQ ID NO: 306949 - DNA, 419 bp, Zea mays
caccccttacgcttcgcctgacgcgtcgcctgacccgtgggtgacagaatctcatggcttctgtattctcctgcctggttatggatatcatgtacgtggcgagatgttaaacttcgcgcgtttgacaatgcgaagcaccgtacctatgttgatcttaaggtttgatctgacaaaagcttggctttgacttaaacgctatcgtagaaaaagaatatattctcttttggcaaaaccccccaaaaatggaaacacacaccaagctactgtcctttcctgatttatttattgaccctctcgatttccttctcttttttttttttgccaacaccttttaattgcctgtgaaaagggagtcctttccatgggtgtgcgcacattatacctatgctttatgccaatttctaccgaggttaagttac

SEQ ID NO: 306950 - DNA, 296 bp, Zea mays
gtctcgcttccctcttatgttggtcccggggagatgttgcacaaacaacgggccctacttcatccttaagcacaataatcctaggacttgcaaggatgttgagcatgaccgaaaattcgcgccttctagccacaacgacacgctatctcatgtctacacaggtatatagaaatcagacaatcgggacagaattttgatcgaggagccagaacggaagacggctaacaccctttctggtgttgagatcttagccagcagttgtgccatgcaagaccatttcggaacctgatgacaag

SEQ ID NO: 306951 - DNA, 322 bp, Zea mays
ggcaaaaaccaaaacagcactcaaggccaaccatagaagaaaaaaaaaggggcaatactggcatgggccaaaaaacctttggaaacatcactcaattgcaaactgaaaatagtttgttatggctttcaaggtaggagaaaatgccttcggttagggataatgcaacaagctgactgggcggggggtttgcgttttgctgatgggccacattggggagaacatccatggcctaagaaacctttgacttgggggcatcaggggactcaagcgggggggggacctcagtctgatccatttccaaaagcattccagggacctttgc

SEQ ID NO: 306952 - DNA, 525 bp, Zea mays
catcagaaaagagttgtgttttattggtcgaaggtagcttcaatacagtagaactggtacagaaatatgacaactgacaaagatattaaaaagaccagaagcaacctttgtcattaactcaattaattcaaccaacatagatattgaaaagaccagaagcaacctttgtcattaactcaattaatttaaccaacatggtcgttgcagagatagagtatcaacataatttgtgcaatgccaccaacatatgtgtaagtaccataagtagggatacccaaatcacaaccgtaaaatgcctaaacgcttgagtagaaaaggatcataaacaaacacgctcacaaccttacccaagcaagcagaacctgagtcacagcccgcagaaactgtaattagagggtaaaaaatccaagtacagaaagggtctaaacaacaataaacttagggcccgtttgtttcgttggaattgaattccattataataattataatttagacaaaactaattaagttcatgtatttaaatat

SEQ ID NO: 306953 - DNA, 478 bp, Zea mays
atctcctcgcattttccttgcaaccgattgcctatccccctcccaacccaagaccgatggcgcccaaggccgagaagaagcccgcggcgaagaagccggcggaggaggagcccgcggcggagaagacgaccgccgggaagaagcccaaggcggagaagcgggtccccgcgggcaagtccgccggcaaggagggcggcgagggcaagcgtggcaagaagaagggcaagaagagcgtggagacgtacaagatctacatcttcaaggtgctgaagcaggtgcacccggacatcggcatctcgtgcaaggccatgtccatcatgaactccttcatcaacgacatcttcgagaagctggccggcgaggccgccaagctcgcgcgctacaacaagaagcccaccatgacgtgccgcgagatccagacctgcgtgcgcctcgtgctgcccggcgagctcgcaagcacgccgtctgtggggcacca

SEQ ID NO: 306954 - DNA, 460 bp, Zea mays
tcgctcgatacaacgatctattagatcgcgtccttagacaccgcgatgcaatcatatcccaccttaactgggtatgtatatttctgggttttcacagttttggcttgtacattcataatgataccatgagtgctttaggccgtccccaagatatgttttcggataccgccatacaattacaacccatctttgctcaatggatacaaaatatccatgctggcgcgcctggcgtaacagctcctggtgcaacaacaagtaccagcttaacgtggggaggcggcgagttagtagctataggcggcaaagtagctttgttacctattccattaggaaccgcagattttttagtccatcacattcacgcatttaccatccatgtgactgtattaatacttttgaaaggtgttttatttgctcgcagttcccgtctgatacctgataaagcaaatcttggctttcg

SEQ ID NO: 306955 - DNA, 663 bp, Zea mays
  unsure (1)..(663): unsure at all n locations
cccacgcgtccgacctgccaatgctttggtggttttctatcagtgggaacaacattcaaggccgaattccactgggatttgcagcatgccagcgcctgcaagttctttacttaggcggacttcctcaccttactggacctatcccagctattcttggcaacctcacccgtattactgatatagacgtctctttctgcgacctgactgggcacattccaccagaaataggcctgttgcaagacctaaagaatctacgtctaggaaacaaccggctaacaggtccagttccagcttctctaggaaatttgtctgcattgtctttgctgagtgtggaatcaaatctattgtctggttctgtacctagaacaattggaaacatcccaggtctgacccagtttagattctcatggaacaatttcaacggagatctcgactttctgtcctccctttccaactgcaggcaactcgagctccttgacatatataataattccttcaccgggccactcccagaccaggtggggaacctgtcacatatctaattgaattagagcanatgcnaacagctatccgtgagctccgtcgtcattgtcaacttagcagccttgtagatctatttcacgacaccctactacagagcatacagaatcatacacgttacaa

SEQ ID NO: 306956 - DNA, 502 bp, Zea mays
tcgtttagatcgcgagcgggccgccctttgtttttgtcttctactttctgtgttacacactcaccaacctcgagctttgaggcgacaggaaacgttcaaacattttttttgatcaggactccaagagcaaagactgaaattgcgggtgatatttacaccatctaccactgttgacaaaacgaaaccgttaccaatagtctatgcaactgcaggcgccgtgccggaaccggtggagccggttccggtccctgatgacgatctcccggccgaaaatttccgagatcagcgcgctgtacgcggggcattccttgttcatccagaggttggtcacgatcctcaccggtgccccctccggagtgctgagcaggcccaatgccatggccagcttctggctgtgcgcggtgaccacacgccgattttgctctttgcccacgtccagtgccaccttcaacgtgtcaggtttgtagccatcgaaccgcaggtgccactccatctggtggag

SEQ ID NO: 306957 - DNA, 600 bp, Zea mays
  unsure (1)..(600): unsure at all n locations
ttttgatcggtctcttcgccaggtcttcgcctccaggccttagtcgggcccttcgccggcgacgagcaccgccaggtgacaccgcataacatcaatttattttgggaaaaaagttgcagtgatgaatcataaatggttcacagggatgatccgctgttgctatgtgtgttcataggtacacccggttgcgctctacttttcatagaatatgatcagttgcaacagggaacaggcgttgagggccagggaaattgctctaaagaagatagaaagcaaagatttttttggtgcccagaagactgtgcttaaagctcaaaagctttttccagagctggagaatgtgtctcagctgttaaccatctgcagtgtgcactgtgcagcagagttaagggtgaatggagagatggactttattggagtccttcaagtggaggaggtgctgatgaagccttgataaaaagcagtaccgcagttcgcagtttacttaccctgatanaatgattggtgggtgctgagcagcttcagatgattgctgaagctattctgtctatgtgatcctgcaagcgaatgatatgcctgacagagcatgttttagaatgg

SEQ ID NO: 306958 - DNA, 510 bp, Zea mays
cggacgcgtgggcggacgcgtgggcagaaatgactactatggaggagattccacctcactcaaccttaatcagctctggaagaggtttagaggggaagacaagcccccagcacatctaggtgcaagcagagactacaatgtggacatggtgccaaagtttatgatggcaaatgggacattggttcgaaccctcattcacaccgacgtgacaaagtacttgtcattcaaagctgttgatgggagctatgttttcagcaaagggaagatttacaaggtccctgccactgatatggaggctctgaagtcccctttgatgggcctattcgagaagcgcagagcaaggaacttcttcatttatgtccaagattacaatgaagctgatccaaggacacatcaaggattggaccttactagggtgacaactagagaactatagcgggtgtgctcctacagatccattgtgaacattgctgcctcgcagattatcatgatagcattttattcctatgc

SEQ ID NO: 306959 - DNA, 552 bp, Zea mays
  unsure (1)..(552): unsure at all n locations
ctgacgcgtgggcggacgcgtgggttgtacttgaatcttgtgttgctgaatttgttggtaacctggaacaagatatttcaatttgttatatatgtaaaaacctaagagttaatagaaagtaaataaggcgttctatctgaagagcctagcattataaactatacagaattttttatcattcttagtaatggaaaaaaatttaattttgaagtattaccacgtgttatctcatcaaatgtcctgctttgctaacttttaaatgttttgcaggagatcttttgaacctaacgcaacacatttcatagcttgtttttttttgtaaattgatcttttgaacgtaatcacggtacgaaaaaataatgcaattgtttgattttaaatataattcttgctgtatatatacagcacggaccgatttaaattgcacgaaagctcttttatccaaattattgtacaggcatccactaagggcatgtacagtgggtgtcttaagntgtgtcttacagtgtgtctagggggtgaatgtaaacaatctcaagacatgtatcttga

SEQ ID NO: 306960 - DNA, 602 bp, Zea mays
cttggtttagccacctgcaacctggttttttggagatgtgattctgacctctaaaagtcttcaagctactctttctctcacaaaatgaaaatcaatctcaacatgctttatacgactatgaaatattggatttgctgtaatataagttgctccaacattgtcacaccaaatccttgcagcaggaggacaagaaaccttcaccttttgtaaaagggacttcacccgcattaatattccagtggcgttggctatagttttatattctgcatcagtatttgaccttgaaactgggctgcttgcgagcacaccaagacaccaaattcttaccaagatatactgtaaaacctactgtagtgcgcctatcatcaatatcaccagctcaatttgcattagaaaaggcacttacaagcatagaaggagactataattttgaccatattcaagagtaaacttgacatatttgacaattttagaccatgcacatgagtaaacttgacatgcatagaaggagttattactaagcattctcaatgataggcttgttcgcatagctctcatccatgtggattgagcgagattgatgagtttgatcccaacaagtc

SEQ ID NO: 306961 - DNA, 453 bp, Zea mays
cagtctgacttggcaaggccggcatgtcaaaccttgctacagctgcccagagggggcttaccaaggatcactgaggcctggtttttgcataggagcggcccaataagaacgtacgtaggactgatgcacagatttatgccataaacgaggcagctgaacaggatttcgataaggaaaagcttaatgagaggatagccaagcttgctgggggtgttgctgtcattcaggctggagcacaaacagaaactgaactaaaagagataaaggtgcgaggtgaggatgccctaaatgcaactaaggctgccgctgggaaggatttgatgttggggcagggtgcactcttttgcggcttgcagctaaaggcgacgccatcaaagatacgctggagaactacgagcaaaaccgttgtagctgaaatagcaaggaggggcctgagctaccaacttaaattga

SEQ ID NO: 306962 - DNA, 534 bp, Zea mays
catgggggcgatgatccacgacgtgatggaggacctcctcggcgacggcatcttcaacgtggacggcgccaggtggcggcaccagcggaaggtggcgagccacgagttctccacgcgggtgctgcgcgactacagcagcggcgtgttccgcgacacggccgcggagctcgctgggatcgttgcggtggcggcgcggggcgccgggcccggggagaggccgctggacgtcgcggaccttctgatgcggtcgacgctggactccatgttcaaggtcgggttcggggtcgacctgggctcgctgtccggctgcggcgacgacgagggcgcggcggcgttcgcagggcgttcgacgacaccagcgagcaggtcctgtaccgcttcttcgacccgtcctggaaggtcaagaggctcctcggtgtctcgtcggaggcggccatgaagggggcgatccgcacatcgatcatttcgtgtcgggcgtcatcgcaggaagatcagcagatggcagggaccaagattcgccaagaagaggacatc

SEQ ID NO: 306963 - DNA, 396 bp, Zea mays
tttgttttacactggcagactgttgttgagagccggggattgcttcttattctttggctacccgcagccaggctcgcaaggctcactgatgacggtcttgctcacaggaagggagactagagcgtacgcactcttcacgatctgctctatgccagatactagcgacatgaactgcctgtagctaagattatccatacaccgatctcgagcagctatgtgatgcatgttggctacttccaaacttatatctggtttggtttggattgcgatgaactaatggctctttgaatttatattatgatgttgacgatatttggtgacatagaaacatttgcccaaaaaaaaaataaatctctatcaaaaccaggccaaatgaaaagggaagaccaaccccag

SEQ ID NO: 306964 - DNA, 599 bp, Zea mays
  unsure (1)..(599): unsure at all n locations
actcagcccaatggttaagctattgagtaaaggaagacaatccatccccctaccatttccaggctttcttctaagttagttcatgcaagatgctcaatgtggtattgagctgagcctaggggttgtttgaatgcactagagctaataggtagttggctaaaaatttgctagtaggactagctagctaactattagttaatttgctaaaaatagctaatacttgaattattagctatcctgtttgaatgtttttagctaattttagcagctaactattagctttagtgtgcattcaaacactctctaggttgtttgttgaagacatttaagaagcaaataaccgcattgtctaaacactgaatttgttttcctgctgcaagcctgcaaacaagccatgagtggtagatttaaagctctagtacaatgttgaggttagtaaattttccattgctcctggataaattacattacactacagacccgtaatcngttcgtggntcggtactgaatatattgctattgatgaggccatatctcaaatattattaggataaaacttatcgtgtaggcgctatacagtgcactaatttctggagcag

SEQ ID NO: 306965 - DNA, 532 bp, Zea mays
cttctcttctctttggaagcaggaagcaagccgatcgctcgctgagcgccgccgccgatggccgtcgcggtgccgatgaagctctggagggtggagacccgcggcaaggccgccgccgcggggcccgacgaccccctgcgcgtcctggtgacggtgaccgtcctcgggagcgccggcccgttgcgcttcatcgtcctcgagggcgacacggtcgccgcgctcatccgcggcgcgcttcgctgctacgcccgcgagggccgcatgccgctgctcggcaccgaccctgccggcttcgtcctctccaccgccaacggcggatccggcggtatggaacggcatctgttcgtcggaattgggatctgcctcttcatctcggcttacgcatctgtttactcatctgtttgccatgcccgtgcagcactcggagaagacgagaggatcagcttcaacgggtgccggaacttcctgctttggcagaaggctgcggctcatggtgccgccgccaaccacgccgggtccgatgctctgacgg

SEQ ID NO: 306966 - DNA, 440 bp, Zea mays
ctttcgcttccgaacaaaaaccgactagcccaggcaagcagataccctctgtctccgcttccgctcccgactcctttgtctcgtcctcatccatccaaccaggcgagccaacaagcaagcaaaagtaaacggggcgaggagctggagagacgccggcgacgcgaagcaaccgcccgatcggagccgcggctgagcaggagggagccggagatggtgggtctcgtcggcggcagcacggcgcgggcggagcacgtcgacgccaacgccggaggggaggcagagtacgtgcgccgcatgcaccgccacgcgccgaccgagcaccagtgcacctccaccctctgtaagcacatcaaggcgcccgttcacctcgtgtgggagctggtgcggtggatcgaccagccgcagcggtacaagccgttcgccaggaactgcgctttgcg

SEQ ID NO: 306967 - DNA, 539 bp, Zea mays
ctccattttcgtcactcaccagtctgctcccctaatcccactccgccgccgccagcttgcccatggcggcgacaacccacgccgcctccatgtcgttcctcctctctcacccccagtcgcgctctgccaccccaagccgtcaccttccgctccgtccggcagcccgccgtgttcagtgcgccaccgacgccgccgccctttccccggcggtcaccaccaagcaccggcgcgcggcggatgagaacatccgcgaggaggcggcgcggcacccggccccgaagcagggcctgtcggcgtggtacgagcccttcccgccggccccgaacggcgaccccaacgagcgctactccctggacgagatcgtgtaccggtccagctcggggggcctcctcgacgtgcggcacgacatggtggcgctgtcccgcttctcgggcgcctactggcgcgacctcttcgactcccgcatcgggcgcaccacctggccgtacgggtccggcgcgtggtccaagatggagttcgtgctccccgagatcgagccc

SEQ ID NO: 306968 - DNA, 503 bp, Zea mays
cccacgcttccgaaatagactgattggcaaaattcctgaagtgattggcctcatgcaggctcttgctgtcctagaccttagtgagaatgaactggtggggcctattcctcctatacttggcaacctgtcctacacaggcaaactctatttacatggcaacaaactcactggacatataccaccagaactggggaacatgagtaaacttagctacctgcagctgaatgacaatgaattagtgggcacaatcccagctgagcttggcaaactcacagagttatttgaattgaatcttgccaacaacaatcttgagggccatatccctgcaaacatcagctcttgcagtgcactgaacaaattcaatgtgtatggcaatagactgaatggctctatccctgctggtttccagaagctggagagtttgacatacctatacctttcttcatacaagtttcaaggccagatttcctctgagcttggtcacatagtcaacttggacacac

SEQ ID NO: 306969 - DNA, 437 bp, Zea mays
attatagcccgcgctgttcattgaatcattctgttgggtttgtggtgtcatgcatgcatggctctgtctgtggtatgaatgcatgcacgacacgcgaatgcagtacttggtgatggctcccgtggcggtccacggcgcgcggcgggtggtcgcgcggggctggggcgacatcgacctggccttcgcgctcatcctgccgtcgctgctgctgcggatggtgcacaaccagatctggatcagcgccgcgcgctaccagacggcgcgcagcaagcaccgcatcgtcgaccgcggcatcgagttcgaccaggtcgaccgggagcgcggctgggacgaccagatcatcctcaacggcctgctcttctacgttggctacctggcgatccccagcgcgaggcgcatgccggcgtggaggtcggacggcgccgtggcgatggcgc

SEQ ID NO: 306970 - DNA, 469 bp, Zea mays
cctgaccggcccggccttacttggtcgacctactcgtccggctttcttgtccgtcctcttggtcacgggttgggcggcgcgaggttctccgggggtcggcttcgtgcgtgagcggatcgagatggcggcgtcggatgttgagtaccgctgcttcgtcggcggcctcgcctgggccacggacgaccactccctccacaacgccttcagcacctacggcgaggtcctcgagtccaagatcatcctcgatcgggagacgcagaggtcccgcggcttcggcttcgtcaccttctccacggaggaggcgatgcggaacgccatcgagggcatgaacggcaaggagctggacggccgcaacatcaccgtcaacgaggcccagtcccgcggcggtcgtggaggcggcggcggtgggtacggtggtggccgtggaggcggcggctactgcggtggcgggcgccgtgatggcggtggc

SEQ ID NO: 306971 - DNA, 461 bp, Zea mays
gcgttggtttcggagaccggagatacccggtctaccctgctgccggatacccctcccagccagacgcaggtttcctcagcgaatgagcactataacaaacccttcagctggaaggccccagccattattttggccttcgaattcttggagagcattgcttactctggtatagcgcgcaacctggacatgcacctcggaaccgtcctccatggaaccaccgcctacaatgcagcgaacgtcgatgcgtggaacggcgccacgtttcttacgccggtccttggagcctttcttgctgatacatactgggggaagtacaagaccgcagctatctccataatattctacggtcgtggcctgctcataattaccacctgtgccgtcataccgtccctacggtctgcctcgtgtgaaggcggttcatgcccacctgcaacagggtttcagtattttgtgctctttgg

SEQ ID NO: 306972 - DNA, 559 bp, Zea mays
  unsure (1)..(559): unsure at all n locations
ttctttcgtccgcccacgcgtccgggttctcgttttcttcattgttaggtctgtttaattaaatcgtacgagacgttatgttaattgtatcacaacatctgtcgtctatgagcaggcaggacagaagtgatccactttcttcatgcattcttgtaccgaaacagggtaacctcgtgctaactgggccatcaatggccacctcggcagaaagtccaattgccttcaccttctacctccatgatggcagcccgcaagccggagaagccgctgaggacgacgaggacatcgggaggataatctgcgactgcatcggcgacgacttctccaactacaacagggccatagtcgagactgtccaaatgggctatggcctcgctgaagtgatctatgccgtgctgaacaacggcgtccaaggccgggtcgctgtcaaacttgctcgcctgccggtgtccaaagccggagaagaagacgccaccgccattctcgggaggatcgttgctcgcagcaagctgttcgacgtcngctgcgtgctcttctacaaagagggtgaccatggagt

SEQ ID NO: 306973 - DNA, 535 bp, Zea mays
ttcaccctttgcgtccgcccacgtgaccggtttacctgttttgtaagtcaatcaataagtttgactagcaactaatggtgcctatacatgtatttatggagcttcttctggtcatatgtgtagtggatctctcctcctgttgttcccttcaatcatgtccaaggtcaagaaccattcaggtcataaacccctacgacaggggccacgagggctcatcttcgccactgcccctactcccaccttctgcatgtcctgctcggtgctgttccattccctagcgatgttctccggctaaagacgcttggagtttgtggtgtggtgacacttaatgaatcatacgagaggcttgttcccacatccctatacgaggctgccatttgcattcaattttggtcaacattatgaactgaccagagattgatagtgatagtgctggatcacgattgcaggataaaagaagtaggcgcaatgaggagtcatgttcattcacaagctctaacagagaaaagttgggcagatgttcatctttaggtgc

SEQ ID NO: 306974 - DNA, 473 bp, Zea mays
  unsure (1)..(473): unsure at all n locations
atcctatgtcacttgctctccctccaacaagctaattaaggccggtcatccctcttctagctcgtttcattatccatggcggaggagaagcaccaccaccaccacctgttccaccacaagaaggacgaggagcagctcgccgccggcgggtacggcgagtccgccgagtacacggaggccacggtgacggaggtggtgtccacgggcgagaacgagtacgacgagtacaagaaggaggagaaggagcacaagcacaagcagcacctcggcgaggccggcgccatcgccgccggcgccttcgcactctacgagaagcacgaggcgaagaaggacccggagcacgcgcaccgccacaagatcgagaangaaggtcgcggcggcggcggccgtcggctccggcggcttcgccttccacgagcaccacgagaagaaagaggaccacaaggaggccgaggaggcccgcggcgagaaga

SEQ ID NO: 306975 - DNA, 371 bp, Zea mays
attttcaaccacggtgtcgtgtggtcgtcttatgcaagaaaggccagggccactgcgcgcttcaccagagagagcaaggctacaaccaagaggtgtgctggaattatacatctccaaaagctagctagaagaccttggtgggtggtgagcttggaggaggagctcatggctgcttcttcctgcatagcttgcaataatggcagtaccgatgagaaggaggagaagcggaagtgtgatctcgtcgggtacgaagcactgcctgagtggctcaaggacaacgagttcatccatggctactaccggtgcgagtggccgatgaaggagaccgttctcagcatcttcttcatccacaacgagacccttaatgtttg

SEQ ID NO: 306976 - DNA, 448 bp, Zea mays
catctactccatcgtgtatccttggacatctatccccctcttggcttactgtacattgcctgccatctgtttattgacggggaaatttatcactccagagctgaacaatgttgccagcctgtggttcatgtcactttttatctgcattttgctacaagcatcctagaaatgagatggagtggtgttgggattgatgattggtggaggaatgagcagttctgggtcattggaggtgtgtcctcgcacctcttcgctgtgtttcagggacttctcaaggtcatagctggttgttgatacaagcttcactgtgacatcaaagggtggagatgatgacgaattctcagagctgtacacatttaaatggactaccttattgatacctcctaccactttgctcctattgaacttcattggtgtggacgctggtgtttcccatgcaccaataatg

SEQ ID NO: 306977 - DNA, 314 bp, Zea mays
tttgcttgcccacccaagcttccctttcgttcctcctcgccccagcgacgcggcctcccgtagaccgagcaaggcaacccaccactgagaggcacgcagaggagcaggaagccggagaccaagatgtcgtcggtgttcagcggcgatgagacggcccccttcttcggtttcctcggcgccgccgacgacctcgtcttctcatgcatgggcgcagcgtacgggaccgacaagagcgtactctgcgtgactgatatagggagacagcggactgagcgttgctgataaaccagcgatgccattcaacgtgagtgtgc

SEQ ID NO: 306978 - DNA, 468 bp, Zea mays
gttgtgtgcggtggttcgtcgatctcctgctaggtgctaagcttagctcgctcgctggcaacaacaatgaaagccgcaactggctcatcatcagtctctcgcgctcttgcgttgctcttggcggcgtgccttctctggaaggaagccgcgtgcttctcggcgtccgggctaaacaaggcgttcgccaccttctatggcggtagcgacgcttcaggaacgatgggtaagaccgtaagaagctaagaccgatgggaccgatcgagcttgacgctaacaacactccaagactacctttgctgaacgcgtgcgtgcgtgcgtgcgtcctgcaagtggggcttgggggtacggcaacctgtactcgaccgggtacggcacggacacggcggcgctgagcacggcgctcttcaacgacggcgcctcgtgcgggcagtgctaccggatcttctgcgactaccaggcggccccgcg

SEQ ID NO: 306979 - DNA, 510 bp, Zea mays
gtgcgttctcccgggcgtccccgacggccacatactgaaggggttcgccgtggcggcgctgggcgagtccgtgtacgtcatcggcggccggctctgccggagggagcgtggcgccgcggccggcgagtgccaggacaccgacgtcgccgtgcgggcggacgtgctgcggtacgacgcgcgccggggcgagtggcaccactgcgcgccgctcctggtcccgcggttcgacttcgcgtgcgcgccgtgccggggccggatctgcgtggccggcgggcagtgctcgctgtccggcgcccggggcacggcggcggccgaggtgtacgacgcggagaaggggcagtggtcggcgctccccgacatgagcacgctgcgctacaggtgcgtcggcgtcacgtggcagggcagcttccacgtcgtggggggcttcgcggagaccacgctgacggccgccagcagcgacgccaggcgtcgcaccaccgtgctgcagtcgtcggcgctggagcggagctc

SEQ ID NO: 306980 - DNA, 431 bp, Zea mays
cctgcttccgtccctggtcggaccacgagagccccggactgcgttcacctctgccttttgttcacccctcttgtctcgtgcgtgcgacaacaactgggcgaccgccgccgccgccctacgccaggtgcgcaggtcttcgtcggatccttcgccggcgaggcgacgagcacccaccaggtgatgcccccggcttaattgaatgggctctcttctcaccaggactggcatcctgccatggctccaggccaagatcgttgatcccgtgctgcaggtcatcagaaggggagcagaacccaagcaactggccttctctgctgccctcggtgtcacgattgggatctttccgatatgtgggaccactgttattcttggtgctgttggtggagcaatgtgggaaagtcgttgcaatgcctgtactcttatgggtctaa

SEQ ID NO: 306981 - DNA, 395 bp, Zea mays
ttgggtgagactttttagctttagggatctcaacaagttgttcggaacgggggggatggagcacagcgttggctgttcttttctccattcctcttaataacatcaggtgtcaatgtcatgcacgatctccttcctctccatgaccatttcatccagtgacctcatatgatcctgctgccgaggatgtcagtgtagtaggttgtgcgaatccaatcggaccagagattgttattcctcttaggtcagctgttgttgtgtaatgcgactagtacgggtggtgtaattgcaaatcgatttattattattatatattacaaatataaattactagtagagaggcgaaacgaaaagtccaaggggggtattccggaaggatatatgatactgacatacta

SEQ ID NO: 306982 - DNA, 377 bp, Zea mays
ttgagaggaacacccagcagcaccagggcggtgaggcccagcaggacgccaccagcacgaccacggcgtcgtcgtccaggacgacgtgaagaccgggaccccgccgcatgcaccggaggaggagaagaaaggcctgctggacaagatcaaggagaagctccccggtggccacaacaagaagcctgaagccgctgccgctgccgcaccggctccgcccgtccacgcgccggcgccggcgtcgcaagcggggaacgtgagcagcccggatggcaaggagaagaagggcttgctgggcaagatcatggacaagatacccggctaccacaagagctcagctgaggaaagcagaccacaagggcggacgccgtcggcgagca

SEQ ID NO: 306983 - DNA, 271 bp, Zea mays
tttacgtttcgcggacgcgtgggcggacgcgtgggggggctgctgcagtacgtgtactggaccaacggacgacagaccccaaggcggagcgtcgacaacaagaaaagagctgggaagaaattaaaggcactcgtgggcaggctaatcctcgccgagactttcatacgctacgacacatttaccgccgaggtcggtaaggagctgcttggcacaagagttatctgcaccggtgttacgaaagctacctccggtccggagggcgagtaaaccg

SEQ ID NO: 306984 - DNA, 365 bp, Zea mays
acgttgacgtgtgggcggacgcgtgggcgcgaagggaaggtgttcgtgtacaggttacagagaggcagagagcaaagatgtgtggtggtgcgatcctcgccgagctcatcccgaccacgccggcgcgccgcggtggcgcggcgtggcccgccggcaagtgcaagcggtggaaggcgaacgacttcgaggccgcgttccgggagatcgacgaggactcccaggaggaggaggaggacacggggtgtttgaaacagaaaacccttctttgggccggcccgacttgtgccggcgccttcgcactctaggagaagcacgaggcgaagaaggacctcgagcacgcggacagctataagatcacggaggag

SEQ ID NO: 306985 - DNA, 425 bp, Zea mays
  unsure (1)..(425): unsure at all n locations
gcgcggacaaggcgacgcccaagtccgtgatgagggcgatggccgtgtcggggctcacgctgtaccacctcaagagccacctccagaggtaccggctggcggtgagccaaggcaccgcgtccccggtgggcgagggcgacaacggaggtggcgccaacgagcggtcgtcctcctcggagagccagctggacgagtacgacgacggttccgtggccgacctgcatggtgattcttccgggagcatggcggcgcgggtgcagagagaggcgaaaaggaagcggcatgagcagatgcagatcnngaggtgcagcggcacctccagctgaggatcgaggcgcaggtggaggtacatgcaggtccgtgctgcgccgggcgcaagaggccctcgccgaccacatactgggcttcgccgccccgtgcgcgga

SEQ ID NO: 306986 - DNA, 380 bp, Zea mays
  unsure (1)..(380): unsure at all n locations
ttttaactagcttcttctagctcgggctagggtcgtctgctgcaggaagggaacagcgcaggcatggaggggaaggaggaggacatccgcctgggcgccaacaagttctcggagcgccagcccatcggcacggcggctcagggcacggacgacaaggactacaaggagcccccgccggcgccgctcttcgagcccggggagctcaagtcctggtccttctaccgcgccggcatcgctcgagttcgacgccaccttgctgttcctctacatctgcatcctcaccgtcatggggcgtctccaagtccacctccaagtgcgccaccgtcggcatccagggcatcgnctggtccttcgcggcatgatcttcgccctcggctact

SEQ ID NO: 306987 - DNA, 428 bp, Zea mays
tcagagacaggcgtcttcgtactcgcctatgtccgcgtctcaaagctttgcccaattcccccccttctcccatttctcaccaccgccgccgctccccccgttcaacaacaccatgagggagtgcatctcgatccacatcggccaggctggtatccaggtcggaaacgcgtgctgggagctgtactgcctcgagcatggcattcaggctgatggccagatgcccggtgacaagaccattgggggaggggatgatgctttcaacaccttcttcagtgagactggcgctgggaagcacgtcccccgtgctgtttttgttgaccttgagcccactgtcatcgatgaggtgaggactggcacctaccgccagctctttctcctgagcagtcatcagtgcaaggaggatgcagccacaacttgctcgtggcact

SEQ ID NO: 306988 - DNA, 470 bp, Zea mays
  unsure (1)..(470): unsure at all n locations
tcggacgcgtgggtagcaaccggtccaacacgttcacgctcagcttcagcggtggctgcctccaccatggcgatctcctccacggcgatggccggcacccccatcaaggtgggttccttcggcgagggccgcatcaccatgcgcaagaccgtgggcaagcccaaggtggcggcgtccggcagcccctggtacggccccgaccgcgacaagtacctcggccccttctccggcgagcccccgagctacctcaccggcgagttccccggcgactacggctgggacaccgccgggctgtccgccgaccccgagacattcgccaagaaccgcgagctggangtgatccactcccgctgggccatgcttcggcgcgctccgctgcgtcttccccgagctgctctcccgcacggcgttacgttcgggaggccgtctggttcaggcccgctccagatcttagcgagggcggctgacta

SEQ ID NO: 306989 - DNA, 444 bp, Zea mays
ttcacgcgtccgggcaaccttcaattgcggggttccaccacctcacaggtggttaacagcgggtacctgttcgacatccggccggacctggtgaagggcgactctgtcgtgctgccactggaattcgcttccgccgtagagggtcgcgtgttgctgacgacgtggtggccacaggatgcggcgctccagcatgaggcggtggggtgtttctcactcactccaactggaacttctcccaagagagcctctgcgcgggggtgcccatgccgagcgttcgtgctccagcaggtgttgttcagtgctcgtcaacagggccacccgtgttcacgctcatcaacagggccaccggcctcgccatcaagcactcgctcgggcagttcatacatgctggtcccttacaccccgagtacctggatggaccctgcatcaaggttatacacatgc

SEQ ID NO: 306990 - DNA, 302 bp, Zea mays
ttgacacaacgaagatcccatccgaccaccgtgcgtccagtccagacttcatgctgggaagcacgtctctcgtgcattttttcaatatctaaaacccaccgtgatcgatgaggcgcgcactggcacatacctccagcttttccatcctgagccgctcatccccgcaaaccaggatgcccatcacattttcgtccttgacctctacacaaaccatatggtgattgtacttctgcgccctgaccggatcctcatgcttgttcccaactgacccatacctaccacctggctgatcttcaaaaccc

SEQ ID NO: 306991 - DNA, 442 bp, Zea mays
tgctccttcaacatctcgtctctctcatcgggcgacgccatccgctcccggcccggccgagccgcgcgttgtgtatggattccaaaagcaatcatacaggggctatggcgaggccttacaaacctaagaatatcctcattacaggagctgctggttttatcgcctcccatgtcgcaatccgcattaccaagaagtaccccgattacaagattatcgtccttgacaaacttgactactgctctaatctgaagaacctgcttcctagaacattgataccataatgcacttcgcggcccagacacatgtcgacaattcatttgggaattctttcgaatttaccaagaacaatatttatggacacatgtactttttaggcctgcagattagtggccagataagagggtcatccatgtagcactgtgagggctatgggagactgaca

SEQ ID NO: 306992 - DNA, 556 bp, Zea mays
  unsure (1)..(556): unsure at all n locations
ttatttatgtgctacatttttactatagaggagtgattcgaagagtgccgtgtaagttacagagtagaaacaaattatattaatgcataaaatcatttcccatcctgcaccctttgaatttaagataggcttatatatgaactttggaaagtgttggaatgtcaaattccaaactaaataagttactttattgagtgaatttcaattcctctaaaatgaaggatctaaacaccccgtaagggaaattagttcattttcccttgggaaaatgagaatccctcgggaaaatggagttgccaaactagcccttatagggtcgagtccatgtacaccttcatatgaaattacctttttgcctcttcctattaaatagtgattcttcgcattctgggagtcaattgtgttatttcaccagcanatgtatccacacgtctttctttccaagaggcttcttgatctatctccgagcactcttgggcgtatctttgtgaaggtctcttatcgaaccaggcctgcttgaatccttcgctcatgaccttggctcgtcacatgttcg

SEQ ID NO: 306993 - DNA, 332 bp, Zea mays
tgccgtcctgctcgtggatgacgacctccgcgccgacgcggcgtaccagagctactactactccaatgcgcacctcaacccccgcctcccgccgccgctcctgtccaaggaggactggcgctcctcgcaccaccgcctccgctccgcggccttcggcgggatcggggacggcaggaggcagcagcagccggctgcccaagggacggtcggcctgcccgggatcgatcttgcccgccagaggagcttctccaccgtctttcaggaggattcgtatcagcgtgatatggataggccgactgccagccacaataggggtggatcattatgttctt

SEQ ID NO: 306994 - DNA, 554 bp, Zea mays
ttccacgcgtccgatgcatcaaaagcaggggtccatgtaccagagatatttgttgaccatgatgtgtacctaccacctgccccaagccatcatgatgctcacggccagttttgctctggaggtattgtcttggcttctcgagatggaaagattgtgtttgagagtacacttgacgccagactggaagttgttttccgcaagaaattgccagagatccggaagcttctttttggccagactgcagcttaattgactcaatccgcagatgatggtatggctcgcttctacctagtggtttttgccaaattgaatcgtttacggtattcatccccaatgtacaaactaccttatttgttcattactgtcgccgagcaccgactgtttgacttcgttcgctccgaggaataagaataaagcactgtagacttccattgcgaagctgaataatattgaaagcatttgtcggctgacttccgtccgtcctgcctggctgtgagggatattagtaatgccgtacgttttggggaaataaaaaaaaagtttgaagttgcagt

SEQ ID NO: 306995 - DNA, 467 bp, Zea mays
  unsure (1)..(467): unsure at all n locations
ttgcgctcctgccgacgccgcactcgccccggcctcttgccgcctccggggtctcgctcgctcggcgccagttgcctcgcagtttggatcatctcatacctcggcgaagatgaacatggcattgaccctaccgggcggtacactggcaattccgaccttcagttggagcgtgttaatgtctactacaatgaagcctcctgcggacgctttgttccccgcgctgttctcatggatcttgagcctgggacaatggacagggtgccggaccggaccctatgggcagatcttccgccctgacaactttgtgtttgggcaatctggtgctggtaacaattgggctaagggccactacaccnagggtgctgagctcattgactctgtcttgagttggaggaaggaagctganaactgngactgcttcaaggagtccaggatgcactccttggggggggactgggtctggatgg

SEQ ID NO: 306996 - DNA, 483 bp, Zea mays
tcgcagagataggcgtcttcgtactcgccggcctccgtggctcaaacctttcccccttctcccaattccttccgccggccgccgctccacccgtacgacgacaccatgagggagtgcatttcgatccacatcggccaggccggtatccaggtcggaaacgcgtgctgggagctgtactgccttgagcatggcattcaggctgacggtcagatgcccggtgacaagaccattgggggaggtgatgatgctttcaacaccttcttcagtgagactggtgctgggaagcacgtgccccgtgctgtttttgttgaccttgaacccactgtcatcgatgaggtgagaactggcacctaccgccagcttttccaccctgagcagctcatcaggggaaggaggatgcagccaacaacttgccccggggcatacaccattggcaggagattgtgacctggccttgacgcataggaagctgcgacactgact

SEQ ID NO: 306997 - DNA, 322 bp, Zea mays
ctgggggccatcaccaattgttgcaattggagatgcattaaatagatcgacatctgctttatcacaaggtaattgcaacccaggccatgctcagactctattcttccatcgtagccacagccatataagccttaaccctcttgcaaagtgctgtaaatcgaggatgccaagacctcccttattttttggcaaacaagtggtagcccaatttatcaggcagtgacccccactacatgaatccaaattttctccttggatgtatatcattagcacataccagactcttcatcctcatcacatcatttgttccagtcaacttgga

SEQ ID NO: 306998 - DNA, 325 bp, Zea mays
  unsure (1)..(325): unsure at all n locations
ttcacgcgtccgtgcaagcgcatttaatgggcgccagtagcgcgcagaaggtaggcacgcgcgcgacggtgcaccggacaatctacagtacttgtccggtgtgcaccggacagccaggcgggcccagaagtcagaagctccaacggttgaatcccaacggccaggtgacgtggctggcgcaccggacatgttcagtgtgcaccggagccaccaccaaacggtttttgggtgggtggctccggggctcactgggcttgttccggttgcgcaggcctcgttcatnggggggtgctacctgggcttttggtgtctgcttttgtgctat

SEQ ID NO: 306999 - DNA, 410 bp, Zea mays
ttcaatgtctaactagtagtaactgcatggggcaacttggcatcgagactgtgagatggttccaggtttcaggaataaatataatagaagttattgtgataaaaccgtgctcttgttttctttgttcttatggctacagatatgcatagatccgagttttagagggtcacgattctctctggtagataggggctttatatatgtgatagctcatatccgcggtggtggtgaaatgggccggaagtggtacgaggatgggaaactgttgaagaagaaaaacactttcactgatttcattgattgcgctgagcacttgataaaaagcaagtactgctctagggaaaagctttgcattaatggcagagcgcaagtggctattgatgagtgctgcctaatataggcctgcttat

SEQ ID NO: 307000 - DNA, 522 bp, Zea mays
tgtttttgctgttggagataacctcacatctcggtataagatcaatgcaaaaatgggagaaggtcagtttggatggccatgtcttctgaaataattgattaaactcgcgtttggcatgctgtgcaacacatgcagcaggttatgtttgtaacgaatgtgtctggaatacattaggtacctttggtcaggtgttggagtgttgggacaaggaaaggaaagaaatggtggctatcaaaatcattaggggcattaaaaagtacagggatgctgcaatgatcgaaattggcatgctcgagcagcttggtaaatatgatgaaagtagatctagttatgcacgaattgtgtctcatacacactgatttaaagcctgagaacattctccttgtttctccggagtacattaaagtgcctgattacaaagtttcatcccgatccccaaggagggatcctattactagcgggtgcccaagtctagtgctatcaaggtgattgattttggtagcactactatgatcaacagat

SEQ ID NO: 307001 - DNA, 491 bp, Zea mays
tttcaaagcaagggctgctttattaatgttgggaatttctcaactgtaatccatggattttctcggcagggtgatctggaatcagcactatctttactggatgacatgtatctcaccaacaggcatcctgatgttgttacatacactgttgttgttgatgctttaggaaggaaaggtaaaatgaaagaagcaacagcgcttgtagagaaaatgcttaacagaggtttgctccctacacctgtcacatacaggactgtgatacataggtattgtgaaaagggtgcggtggaagatttactcaatctgctggataagatgctaacaaaacaagggtttagtagtgcatataatcaggtcatcgaaaagctatgtgcatttggtaaacttagtgaggcttacaatctgctcagcaaggtactaagaagtgccttaaaaagagatgctcaaacatgccacattttgatggatagtcttctgacagaggactccac

SEQ ID NO: 307002 - DNA, 429 bp, Zea mays
gtggagagcctggggctgagctcgtaccggggggcttatctgagcgaggaggcgctagagcaacaacaagagcctcctccacggcgccaacttcgcgtccggcgccgccggctacctcgacgccaccgccgccctctacggcgccatgtcgctgagccggcaggcggggtacttccgggagtaccagtcgcgggtgggcgcgtcggccggccagcagcgcgcccgggagctgacgtccgggtccatctacgtggtgagcgccggcaccagcgactacgtgcagaactactacgtgaacccgatgctgagcgccgcctacacgcccgaccagttcgccgacgcgctcatgcagcccttcacctccttcgtcgagggcctgtacagcctgggcgcccgccggatcggcgtgacgtcgctgccgccgatggg

SEQ ID NO: 307003 - DNA, 289 bp, Zea mays
tttacgcgcgggtgcagggcaggaatgagcgtggcatctttagcacggacgcgggttttaacaaacgaaacggaccacatggctcggacgcaatctggcggagcaaaaagtcgcggcggcccccgaaactcctgctggcacacgggacgacaaccaaagaggacgatataacctacaggcacgccagcaacgcaacaaggccctgtctttcctacgcccgaggcacgggatccggaccctccgcgttactgtgtagcggggacaagaacctcaagagcgcccgcagcac

SEQ ID NO: 307004 - DNA, 370 bp, Zea mays
ttgtagttgctgggactgcatcactgactgggggggctttttaaatggggtgggggtttcaccacaactgtccgcgggatgagcttcggcggcagcagctccctcccatcacgtgcgaagaggccgttcgagtactggagaactcatgtggtgaggcccaagggcacgcacaaggccaccattgtctggctccatggacttggggacaatggagccagctggtctcaactactggaaactcttccccttcctaatataaaatggatatgccccactgcaccttcaagaccctggtcagtgtttggcgggttcccctccacagcatgggttgatgttgctgatctttcttgaggatgctcctgatgacatt

SEQ ID NO: 307005 - DNA, 314 bp, Zea mays
cccacgcgtccgcttttccagtggtaatacttggcagagaaatcctgagccaagcgcaaaccttctacaagtcctggtaacttattttaggggctagaaactggcgacgacagtttaggacttgtttttttacaccaattcagccctgtattagcaatgattttttatgcagctcttgtttgtttacgaccacttcattgtcttccttttatgcatacatgttaactttttttgccgttgtttattttttttttttgttggtaattttttttttctactttttttttcttatttttcaaaactattttttattc

SEQ ID NO: 307006 - DNA, 309 bp, Zea mays
cgtgtatcgcgtgggcttgagaaggagccaaagttcctgaagaacggtgatgctggtatggtgaagatgatacccaccaagcccatggtggtggagacattctcagcgcatactccacttggtaggcttgctgtccgtgacatgaggcagacggttgctgttggagttatcaagagtgtggagaagaaaggacccaaccggcggccaggttgacctatgctgctgccaagaagaaatgatcgcgatccttgggcctgcttttagcattacctagttttcatcatgacaaggttcgcctgcggcccctgc

SEQ ID NO: 307007 - DNA, 188 bp, Zea mays
cgcagagataggcgtattcgtactcgcctacctccgcgggtcaaacctttcccgcttctagcaactactcgcgccggacggctctccacccgtacgacgacaccatgagggagtgcatttcgatccacatcggccaggccggtatccaggtcggaaacgcgtgctggtagctgaactgatcatgagct

SEQ ID NO: 307008 - DNA, 394 bp, Zea mays
tgctgcgcatgttcgttgacatgctggaggcgggcgtccggcctgacagctacacgttcccgttcgcactcaaggcgtgcgcgcagctcgcggccttgcaagaagggagacagttgcaggcgcacatcgtgaagctcgggttccagcacgacgaacacgtgcagaacagcctgatcagcttctacggcaagtgcgtcgagctggcgatggctcgtctggcgtttgaccggctggaggcggaggagcgaacggcggcttcctggagcgcactcctcgcggcgtacacgaaggccgggctgtgggacgaatgcctcgagtcgttcggcgcgatggtgctcgatgggtggcgtcccgacgagagctccacggtcagcgcgctctcggcgtgcgcgca

SEQ ID NO: 307009 - DNA, 235 bp, Zea mays
aaggggggccgccctttttttttttttttttttttgggggacataccaattacgatatatacgaataccatacatgccaagacacatgcatggggtttagccgtgtacgtatacatatatgcaccgaaattatgccggaaaacaaagggtaaaccaaaaaccaagcgacgggacgatttaaataaatgattgctctttggatccgaacaattttacttatctactacttggccgg

SEQ ID NO: 307010 - DNA, 396 bp, Zea mays
ttcacgcgtgcggccacgcgtacggccacgcgttcgcacacgcgtgcggccacgcgtccgcccacgcgtgcggaacaaagcaacttgtgcacaggtaatcgcaagcatactaagaagagatccaatgagagacatcacaagaccaaagaacgctcgccgatcgatcgagtctctccggattccagagaggcccaactgccgaagccatcgatcgccgccacctcttcgagcagaatagttgagaatggctgacgaggatatccagcctatcgtatgtgacaatggcactggaatggtcaaggccggtttcgctgttgatgatgcgccaggagctgtcttccccagattgggggaagaccacgccacaccggtgtcatggtcggcatgggccaaaag

SEQ ID NO: 307011 - DNA, 248 bp, Zea mays
  unsure (1)..(248): unsure at all n locations
tagaccaacccgtcttttaccccgtgggcaagcacaagcgcactctagcaatggctactgaggttgtccgccctagcgacgccaagctactaaaggcccaagccgacatatggcggntcagcctctcctacctcacgcccctgtcactgaggtgcgccgtggagcttggcatccctacggcgatctaccgccatggcggggctgcctcagccgctgagctggtacgnnngctgtctctcccctccact

SEQ ID NO: 307012 - DNA, 451 bp, Zea mays
ctttcgaccagctgggcaggagagtcgtcactgacagccccgtgtacgacggccgtggcgccgacgcccgcctcgtggctcgcatacagggagtcacggtcctggtcggtaacgcagacgccttgttcaccatggtgttcgaaaccgacaggctaaagggctccacgctcgtcatcaacggaatggtcacggatgggtcagacgaatgggcgatctacggcggaaccggggtgttcgccatggccaccggtgtcatgaagagaagaaaccttgccggcggtagcaacgacgggaactctgacgagcttgccttggaagttttctgcccggtgtttggcgcatcacagcaaccaattagcaagcagcaggagtccatcttcttcgtaccaagatcggactatggggcggaggagggcgacagcatacgagaagacacggttgcagatacgcg

SEQ ID NO: 307013 - DNA, 380 bp, Zea mays
tgggatccaagtggtgaaaatcttaccctcgaggagaaggagcctcatcacgaatcagcaccagttgatgggacatcagcggatgaagagagtgatagcaacatatttccttaccttcttgtaaatattggatcaggtgtcagcatgatagaggtaattggtaagggaaagtttgaaagaattataggatcccatctaggcggcggtactatccttggtcttgctaggcttttgactggttgttcaagttacgaagaattcctggagttgagccagaggggcaataatctgtctgtcgatttgactgtgggggacatatatggggaagaaggttattctaatttgtccttctgcaatccactactgtgcttgctttggaa

SEQ ID NO: 307014 - DNA, 362 bp, Zea mays
aaaccgaaccagaataccgtattacttaaaacgcgtgccacgataatattgttcaccaacaaaaggttctaacgcggatacaccgcgacgacgacgataaatcgagcagcgactgggccagccagccactgcagcagacacacgagactgacacaaaccgcttagtccacctcctcgatcttggggccagggccaccgcttccagccggagcgtcctcgtccatgccgccggagcctcccatgtcggcacccgcgccctggtacatcttggcgatgatggggttgcaaaggctctccagctccttcatcttgtcatcgaactcgtccgcctcggcgagctggttggcgtccagccagctgat

SEQ ID NO: 307015 - DNA, 151 bp, Zea mays
tcccacgcgtccgcccacgcgtccgattgaactgatgattttgcttattgtgtatgaaatatttgggcagtcataccgaggagctattgcgtacattttcatcacattttccatgtggtttatggttgtcacctggctctttgtcccattc

SEQ ID NO: 307016 - DNA, 490 bp, Zea mays
ttcacgcgtccgcccacgcgtccgcccacgcgtccgcgtgagtggcctggtccgtgggcccgttcaagttcaagaacgtggagcgctgcatcacctccttcaaggtcgtgaccaacctccgcagctacggccctttcggccacggggtggacagcacgcaccacagcttgcccgtgctcgacggcagcgtcgtcggcatgttcgcccgcgcaggggattttctcgacgccatcggcttctacgttctcccagatgccctccctgctctaaaaccgacgacggaccctgctgaacaagaagaaaaagaaaaggattctggccatcaacagaatgggaaggcaaaatctaaccaagaagaaaacgaggactccaaaaacgagaaggataaaccttgtgtgtcgttttcacaaaatgatctatttgcgatttattggtctgtggagctttagtatgtcacatatattatgcatcgggagatgctgatatattt

SEQ ID NO: 307017 - DNA, 407 bp, Zea mays
cccacgcgttcgcttctccctcctcggctcggctctgttcccctttccgtcctgcgcaccccgtcttctgctgcccgagtcaaaccccagcacaaaaagcaaccgtccgccgcctcctcgctcctgtgccgaatcagacgtcgaggtgcctaatccggacgatcccccctgcgatccgcgggtgcccgacgcagaggcggcgcctccgggcctcccacgatgtatagcagcttcaaggagcaggcgatcgagtacgtcaagcaggcggtccaggaggacaatgccggcaactacgtcaaggcgttccctctctacatgaacgcgctcgagtactgtaaaacccacctcaagtacgagaagaaccccaagatcaaggaggccatcaccgacaagttcaccgagtacct

SEQ ID NO: 307018 - DNA, 398 bp, Zea mays
cccacgcgttcgtctacgcgtccgtgaactttgacgctctcttgaagagcagcaacaagcagaccgttccactctcaggtggcggatggcttgaggtgaacgaagtcatggtgcggatcattaccatggtaacctttctgctgcagctgcggctttttcagcaggcctggtccgcacggtccgtggatgcaagcaaagccgagtcatgggctgccgagaagaaagtgctctggatatgcctgccactgtacatcattggcggagctattacttgggttgttcacatgaggtcaaaccacagccgaagaatgctaaggcaggttgtacacttgaagccagttgagcagcatgcgttctgggaggaccttgtgtcttattgcggactgatactcgatggg

SEQ ID NO: 307019 - DNA, 140 bp, Zea mays
acgcctaccttgactgttgcagttttccaaccctacttgaggatctggacttgatcgatgagccgtagaggccttgagacaagcccgtgcgtctacctctacaggatgtgtacaagattggtggtattggaactgttcct

SEQ ID NO: 307020 - DNA, 367 bp, Zea mays
gaaataattaacgaccaaagaattatgcaaatacctaagctcaaacaatctgagggatccaatgcagcagcagattctctgaaggacatttttgtctggggtgatgctctgggtcgtatgtcagatcatggacatgtatcagcaagcaatatatcacttccaaggttattgaaatcgtcagagattcttgatgtgcagagcattgcctgtggagagaaacacgcagcaatagttactaagcagggtcaggtattctcttggggtgaggaaaatggagggagactgggacacaagacaagtgacagtgtctctgaccctaaaatcatcgactcactttcctccacgcctgtgaagactattgcatttg

SEQ ID NO: 307021 - DNA, 327 bp, Zea mays
acgcggacgcgtgggataacattctacttgtgtcttctgagtatataaaagttccaagtacaaaggtttaggctggagttttccatgtgatatttggagtgttggctgtattcttgttgaactatgctctggggaagcattgtttcagacacatgataatctggaacacctagcaatgatggagagagttatgggacctctaccagagcatatgatacggaaatcaagttcttgtgctcagaaatatttcaggagggcaacacgtttaaattggcctgaaggtgctgtttcaagagaaagcatcagagctgtgaagaaactggatcg

SEQ ID NO: 307022 - DNA, 364 bp, Zea mays
ccctgctctattcttagccgccgccaatcccttcccgtgctgcgcaaccgctgagtgagaagaagagatggccggcaagggcgatggcccggctatcggcatcgatctcggcacgacgtactcttgcgtccgcgtgtggcagcacgaccgtgtcgagatcattgccaacgaccagggtaaccgcaccacgccctcgtacgtcgccttcaccgactccgagcgcctcatcggagatgcggccaagaaccaggtcgccatgaaccccatcaacaccgtctatgatgccaagcgtctcatcggcaggaggttcagtgatgcgtctgtccagagtgatatcaaggtgtggcccttcaaggtcatttct

SEQ ID NO: 307023 - DNA, 485 bp, Zea mays
ttcaaaccctagcacccccgatccagcagcagcccccctctccgagctccaaaacctctcagagatggcggcgccggcgccggcgttgatgcagctcaaggtgcggatcccggagaacgaggaggtggctcgctgcctccacgagaagcggctgtctatgagggagcagccggccggtttcaaggagcacctggaccgcacgttcgccaaagcctaccgcaatgtctgcgccgccaatgagcccatccggactctcaaggagttctccaaaatcaatggtgtaggaccatggctcatacgctgtatgaaaggcttctttgcagagtccaagcaggattctccagcgaaaggaaagaaaacaagagtaccaaagtgctgtgtgacaaagaagaaaactgctgcttttgcttctcttggcaggggacctccttccaactaaaattgtcagaagctcagttttcttcatcccaaggaacattggagct

SEQ ID NO: 307024 - DNA, 420 bp, Zea mays
tccacgcgtccgcccacgcgtccgcccacgcgtccggctgcagatccgcctgagcaagattggctcgtcggactccggcgctgccgccaccggctcggcagccgccgccggtgccgccgccgctgtggggtcggctgcggcgctgggcggcggcatcccggaatcggacaccgtggcatgccccgaccacctggtgatcgcggacctacccgacgcgaagagcctcggggccgtaacgaccttcgatgacgtcgagacgcgcgccatggggcgtctctatcgtcgccgggtcagtgagccagttgacatgtgcaagaagtgtaagacccaaatcgtactgtacgggcgacttatacgttgtgaacatgccttttggtcaacctgtgcaagaagagaatccagctgcaatttttgtgatga

SEQ ID NO: 307025 - DNA, 530 bp, Zea mays
ttttctgacgacgtgaggagggctcctgagaggaggcccagacaggtagagctgcgccgggactgcccatacctcgacaccgtgaacagacaggttcttgattttgatttcgagaagttctgttcaatctccttgtcaaatttgaatgtgtatgcgtgcttggtctgtggaaaatatttccaaggaagagggttgaaatctcatgcatatacgcacagccttgaagcaggccatcacgtgttcattaatcttcaaactgagaaggcttactgtcttcctgatggatatgagattaatgatccatcgttagaagatattcgacatgttctgaatccaaggttcactaaggagcaggttctaaatcttgacaaaaataagcagggtctagagcacttgatggctccaattatctcctggaatggtgggttttaacacatcaaggagactgattttgtgaaatgtacaatcagtcattatgggagttacaccttgagaaatttctttctaatccctgaaactatcagcatagc

SEQ ID NO: 307026 - DNA, 544 bp, Zea mays
ttaggcataagactttctaccacgaaatgtaatggcagccgttgattttgatcttcgattcacatatgtcttggctggttgggagggttcaacacatgatgctttagtactaagagatgctttagagcgagagaatggccttcgtgtaccacaaggtaaatataggaggttctaaagttgtacttatcaataatatttgttgttttgtggaattgtgaccaacttgtatataatatattaggaaaattctatctagtggacgctggatatggagccaaacctggatttttgcccccttttcgtgctgtccggtatcacttgaatgaatggggaaataatccggtacaaaatgagaaggaagttgttcaaccttaggcactcgtctcttcgtgtcaccgtagagcgtgcatttggttcactgaagagaagatttaaaatacttgatgatgccacaccattctttccattttctactcaagtagatattgttgtagcctgctgcattattcacaactgggtcatacaagatggaggcgatgagctg

SEQ ID NO: 307027 - DNA, 282 bp, Zea mays
ttgtgtcacttctcaaagtggcgaaagtggcagtgacagttcaagcgaagggagtgaaggaaattctcacaatgattcacatcacaaggaaagtggacaggaacacgatggggatgttcctagtgaccggaccgatggtcactgtcgcagtccagaccaaaaccgaaccaaggtatgaggaagctgcccatacgatgaagccggctacgacctgagtcaagtacagaagaggattattgccgacggactattcaacgaagacaagccggtttgctcctggga

SEQ ID NO: 307028 - DNA, 451 bp, Zea mays
ctgacgcgtggtgccgcgcctgcgccagcaggtggaggaggcggggacgacgcggagatgcccgatgccgccgtgccgtggggctcccactcggactagtccgacttcgactccgacgactaagacgtcactgccgtcgtataggtccgcatacaggccctagagaaaaccctacaggagcagccactggactacgagacccacgtgcagtatatccagtgcctgaggaaggcaggcaacattgagaagctttgcgtggcaagggaagagatgaacaagtactttcctctaaccccgaagatgtggcaggagtgggccaaggacgagatctcattgagctcgagtgaggaaatttttggtgacattgaaaagatctacgggcatggtgtgcaggaataccctgtccataagttatggggggattaccttgattatgttggaaagcatgatc

SEQ ID NO: 307029 - DNA, 281 bp, Zea mays
ttgttaggcggttcgactcgcctacctccggggtaaacctttcccccttatacaattccttccgccggccgccgctccacccgtacgacgacaccatgagggagtgcatttcgatccacatcggccaggccggtgatccaggtcggaaacgcgagctgagagcagtactgccttgagcatggcattcatgctgacggtcagatgcgcggtgacaagaccattgttgaagatgaacctaaaggctaaggctaatgaggctgaggagaggaagggccccacgg

SEQ ID NO: 307030 - DNA, 394 bp, Zea mays
tgctgataaaagataaggagtgtctctccttggccatcctcctctctttcagctaagtccctgccccctctctttttcttacattcaggtcctcgcagctcctctcttttttctcgacactttcgatctgcgagccgaccaagctcaggactctaaatctcctcaaggatacaccttgcaagcccccccctgctgtccgcctccacaagctagactgccatgtattcatactgtcccaaatggataacaagccaccgagacttacccttgaggtgtaatcaatggtgccatgatgttagatgggagtttagcaatccaactcctttcataaggagccgtgaatttctgtggcaagaggggcatactgcttttgcgactaaagaaaaagcacatg

SEQ ID NO: 307031 - DNA, 427 bp, Zea mays
tatcggtctcggtgatagcccactagactgaacgaatatcatgaaagacacctaaatggctttgcttagaaactatcgtagattgagggtcactgaacctgccacattgtgcataactgatcttggaacatccattaaaactggttctgaggcaactcaagaagcagcgctagattcactatatcttctcaggcaagcttggtcagcttgcccagctgaagtatttaaagcacaatcagtggctgcatcagaggctattcctctacttcaatacttgatacagtctggcccaccgcgggttcaagaaaaggcagaattgcttcttcagtgcttgcctgggactcttactgttacaataaaacgtggcaacaatctaaagcaatcagttggaaatcctagtgccttctgcaagcttactcttggaaat

SEQ ID NO: 307032 - DNA, 529 bp, Zea mays
tactttattgaaagcacgtacgcctgcacggacccggacggaatggccggaccgacccacgcgttcttagaatatgtacagcaatgactgagatgacaggtataatacaccaaagtgtttcattggacacctttaaggccacgctgttgctctagacacagaactcctacactgcttaaggaacgccacccgcatcgactacgggacggggcacgaaaccaacttcgccggcttcctctactgcctcgcgaggctcggcctcatcaccgagcccgactacccggccgtcgttctgcgcgtcttcacagcttacctcgatctcatgcgcacgctgcaggacacgtaccagctggagcctgcaggctcccatggcgtgtggggacttgatgattaccatttcctgccgttcatatttgggtctgcacagctgattgaccacaagtacatgaagcccaagtcgattcacaacccagatatcttggaaaatttctcaaggagtacatgtatctggcgtgcgttgcatatgtga

SEQ ID NO: 307033 - DNA, 426 bp, Zea mays
ttttgctgaaccaaaattaagaactgggccgcccactacatatgctgaccgtgtgttttcaaacgagatgaacattgcaatcaaagaaactgagaagagctacaatgctttcatgctcagagacgccctgaagtctgggttctatgacctccaattggctagagaggagtacaggctctcttgtggggcagcaggcatgaaccgtgatctggtgcagggattgatggatcgtcagagatcactgatgaccacctgaaccccaactaatgcgaagaagctaggaagatcgatcgcactgaagtagggtacccaaaagaccactacctgccagtgcagggggaacttgctgagatgaccaacagtggggacgaccgcattgtggaatgcactgtcaccattaatgctatgatccaagctctcgaatgt

SEQ ID NO: 307034 - DNA, 329 bp, Zea mays
tcttccacgcgtccgctcgtctcgtctctgcactggattggaggttgcggccgtgaagggtaggtaggtcattcgatcgggacaagggggaagacgcctagaagcagtatttctaccaccccaggagcatcaattaatatgccaaaaccttcaaagggttcaacagtagctgtgttcgtgttaagagccatatgacttgccgctccataaagtgcaaggattgctgtagcgacaaggatcattgttgtctacctgaaccccatcagattcgaaaaagctaggaagattcggatgcactgaatttgtgaacccaaaagaccccaacaagc

SEQ ID NO: 307035 - DNA, 470 bp, Zea mays
acatcaaaatcttttcccggacattcccgaccagggataagtagacacatcatgaagttccattgctccatacatacccatggaggaaagttataaaggatagcaaaaactggccacatactgtaacaggagctcattttgccaaagggattaaaaccgtctgtggcaagcccaagccttatatttctaggatcttctccaaaccaattatgttttctatcaaagtctttccatgcctgaccatcagctggatggctaagctcattttccacttctttcctcttcaacttgtgccattgtgcatcctcagagttttttctgaagcaaacatcctcttcaatctaggaatcaaatgaaaatgccgcaacaccttctgagggctcttatttctttgttcaccatctttccatcttgatgaaccacacactgggcactcattattttttgcataatcctttcgaaacaaaaca

SEQ ID NO: 307036 - DNA, 393 bp, Zea mays
tctttcacctcacacacgctgtccaacctgactaacaaacccgtagctggatttggatcgacagcacctatctgtcaagttcggtagtgtagatggaggagtttctcggagtactgaccaaaacctaacattatttgccgtgtacaacatggagacaacagatatcgtttcacttcatcagaactcttcggaggatatctatgccttgtttgaacaattttatgatcattttcatgcaaatccacaagcttcatcacatggaaaatttatctgctctcattccaatgatattcatgctttggatcaactttgggttataaaaaacaaagcaagtagctcctcacagtttgtgaaaaagatgatgacgtcattaccttacacttgccaatcaca

SEQ ID NO: 307037 - DNA, 377 bp, Zea mays
gcccagtgagctcatgtccgggtcagggcataccctggcttgctctgcaaatctagcaggcacatcagatacattcatacattccctgaccgactggttaggaagggccgcactattagcctacgggacggtgcacgaaaccaacttcgccgccttcctctactgcctcgcgaggctcggcctcatcaccgagcccgactacccggccgtcgttctgcgcgtcttcacagcttacctcgatctcatgcgcacgctgcaggacacgtaccagctggagcctgcaggctcccatggcgtgtggggacttgatgattaccatttcctgccgttcatatttgggtctgcacagctgattgaccacaagtacatgaagccca

SEQ ID NO: 307038 - DNA, 313 bp, Zea mays
tcttcgcgtccgcccacgcgtccgaccacgcgttcgcccacgcgtccgcccacgcgttcggccaaggagctgctcaatgggcagaaggtggtcgtcgtccgctgcgaggagatctgcatgtcgggcggcctcgtccgtcagaagatgaagtacctccgcttgctgcgcaagcggatgaacaccaagccgtcccacgggcccatccacttccgcgcccccgccaagatcctgtggcgcaccatccgcgggatgattccgcacaagaccaagaggggggaggcggctctggcgaggctcaagacgtacgagggcg

SEQ ID NO: 307039 - DNA, 362 bp, Zea mays
cctagggcaacaaaccaatgtgctcggtctgtacaagctactgaggaggctctatacaggccattcgtgagcaaagccgattttgtaaaggcacgacaagaattattttctaaaagatggcagccatggagaaattacgaacttccaatatctcatgcatctaaatacacttgctggtcgagggtatagtgatctcacacagtacccagtatttccatgggttctcgcagattatgagagcgatgttttagatctgaggaatccacagacatttcgcaggcttgataaacccatgggatgccaaacggaggaaagtgaagaggaattctgcaagagatatgatagctgggatgaccctgatg

SEQ ID NO: 307040 - DNA, 340 bp, Zea mays
tcttccacgcgtccgaacaaactgaccacgccctgacaaagcgcccttcacgacacgcacccacccaccagacagacagaggagaggagaaagggcaaaaggctacaccgaccgcgacgaccacgatggcagcctcgctccaagtacaagccgcggccaccttgatgcaaccggccaagatcggcggccgggcgacgggcccatccacttccgcgcccccgccaagatcctgtggcgcaccatccgcgggatgattccgcacaagaccaagaagggggaggcgggttttggaaggttaagaacgtcaagggcgtcccgccgccgtacgacaagaccaagc

SEQ ID NO: 307041 - DNA, 277 bp, Zea mays
tccacgcgtccgtgaagttattcttgtgggtggatccacccgaatccctgcagttcaagaacttgtgaggaagcttactgacatggatcccaatgttacggtcaaccctgatgaggttgtttctcttggggcagctgtgcagggcggggatctggccagagatgtgtaagacgagaaggatatgaaggttctcatggtaggtcttgatgcagatgcatagaccaccatgctttacaaggttatgctcggggagaacgtaaccaccatccccaccatt

SEQ ID NO: 307042 - DNA, 239 bp, Zea mays
ttcttcgacagataaccaagcagaaaaacgaggctgtacgcggccaggattctgagaaggctggcgaatcaagggaccgagaaaagaaactgatggctcaaattacggccattattgacatgagcacggaaatgattaaagcatagactgaatctggtgatgtccatcctctcgttactgaggcaaatattcaacatattgccttgtgttgtactggaattagcgtggagaaagtgtcg

SEQ ID NO: 307043 - DNA, 352 bp, Zea mays
tcgttcaacgtggtctaccgtggcacgctcttcagctccggccgcaccgtcgctattaagcgcttcggccgctccgcctggccggactcacgccagttcctggaggaggcgagggctgttgggcagctgcgtagtggcaggctggccaatctgatcggttgctgctgcgagagcggcgagcgtctcctcgtcgcagagttcatgccgcacgagaccttggcaaagcatctcttccactgggagacaaatccattgagttgggcaatgaggatgagggctgcgcttcatgtggcacaagcgttggactactgcagtagcaaagggagggcactctatcatgacctgcatgcat

SEQ ID NO: 307044 - DNA, 414 bp, Zea mays
ttcttctccgcttcccgctcatcgccaagcccctcgtcgccgacggcaccgccaagtcccacaagatgtcgctcgtctaccaccgcgagggcctcggcaagctccgcccgccgcttgtgctccaggagttcgtcaaccatggcggcgtcatcttcaaggtctacgtcgtcggcggccacgtcacttgcgtcaagcgccgtagcctgcccgacgtgtcccccgaggatgacgcatcggcccagggatccgtctccttctcccaggtctccaacctccccactgagcgcacggcggaggagtactacggcgaaaagagtctcgaggacgccgtcgtgccgcccgccgcattcatcaaccagatcgcgggcggtctccgccgcgcgctgggcctgcaactcttcaacttcgacatga

SEQ ID NO: 307045 - DNA, 453 bp, Zea mays
tcttctccctctagcccgagcgaagaagaaaggagggtgctctgccggcggcggagcggagatgtccgagaggaggcgcggcgccggcgccggcaccggcacccgcaaggatgaggtggtgacccgcgagtacaccatcaacctccacaagcgcctccacggatgcaccttcaagaagaaggcaccgaatgccatcaaggagatcaggaagttcgcccagaagaccatgggtaccaccgatgtccggatcgatgtgaagctcaacaagcacgtctggagcagcggtatccggagtgtgccgaggcgagtccgtgtcaggattgcccgcaagaggaacgacgaggaagacgccaaggaggggcagtactctctggtcacagactgaacctcgaggctaaggtggacaggtgtgaggagatagtcaagtcatattacactaagctcatggagagt

SEQ ID NO: 307046 - DNA, 389 bp, Zea mays
ttcacgcgtccgcccacgcgtccgtctagatcgcgagcggctgcccttttttttttttttttttttttggatattcagatattgcaggagttaacatattattaacagtgtcttaaagaaagcaaaaggttactaaaagttcagacagctcactctgagaaactcagaggttattataagtactcaaaaatgggtcgtttacaccaattacgattcaccgcatcgcaatcatctcaatctactgttccgcaatctttctgatgacatatggtagaatgccaccatggtcgtagtaagcaagctccacctcagtgtcgaatctgagtgtgcaagtgaacgacttcccattatcagttgtcacggtaacatctggcgcttattataatgtg

SEQ ID NO: 307047 - DNA, 325 bp, Zea mays
ttcgatcaccgaccgacgcctatgcgactagcatctcaaccgccctccgggcacgcgagagccggatccccacgatggctactatccagcaccaggcgaataccgcggtggtggcggtgccgagcacgactactgacgaggggcagcgcgcgatggacctctacgagaggctggagaaggtcgtagaggggacctacggcatggtgtacagggcgcgggagaaggcgacgggacgcatcgtgactcttatgaagacccgattgccctaggacgtctagggcgtgccctccaccgtgatgcgggaggtctgcttgcttgcgatgct

SEQ ID NO: 307048 - DNA, 335 bp, Zea mays
gggacccccctcaaatttattttaagggacaatttcctggcaaattgaattaagttcacaaacccctcggggggatttatttttaggcacaaaatcccggggaactgattaaagttaacggccccctcggtataatttggcacaactccggggggggtttattaaagttcacaaaggtttctttgggagcccacaaaaaaaaatttgattctttaacccaaaaaaaataggaactcaaaacccggggtttcctttttccaattttggggtaaatgggaattccttcgaaaaaaaaaaaaacccggggccaaaaatgggctgggagcctgggattt

SEQ ID NO: 307049 - DNA, 272 bp, Zea mays
ggggaaaaaacacaccacaaccgggttgaacaagcaaaaaaaaaaaatagtcacattacagctggctgcaaaaatcgttcatgaattataagcatcaggcaaacttaaaaacatgggagttttaaaacattgttttatatccttgcagagcaactaaaaaaaacttttaacacagcacattcaggggatttatgcgttggcaaaaacctgggcaggggaatcccgcttcctttggttttttatgaggcccaacttgattcccttgcccttgg

SEQ ID NO: 307050 - DNA, 450 bp, Zea mays
tcccacgcgtccgcccacgcgtccgctacaatgatgggaccttctactttgatgaaaagcatgttgatgctactgaatacaagggccctataatcacatctgcttcaggggtgcgggggtgtcaccttcttttgcagctgttgtttctggaaaattgaatatccctgccgagaaaatacttggcctggcaaaattcttccttggtattgggctcccaggtagcgcaaaggattgctttaatcagattgagtctttgtcattcttggagaacaatagggtcttcgttccgttgatactatcactttcttccaaagtattttcattgacttcgaaagatcagctaagggttgaagttccatcagtttttgatctgtgaccttactaaggattggcaggtggatcgcttagtatacggaacaggcttatcacttgcacatgtctactgcatgt

SEQ ID NO: 307051 - DNA, 329 bp, Zea mays
atcacttaagggttgccagtaaccgggataacattgaaccgaccgatttttacgaggtccaaaaaaataacccccacaaaagttccaaccaaccacaagtaaagtttaaggggacacaccggaccaactgacgataacttttggaaggaactgggccagccagcaactgcagcacacttaagactggcaacaaaccgcttagtccaccttcttgattttggggccagggccgccgctgccggcaggggcgtcctttttcatgccgccagggccgcccatgtttttacccgcgccctggtacattttggaaaagatggggttgcaaaggc

SEQ ID NO: 307052 - DNA, 475 bp, Zea mays
cactaaagctggacctctcagttcaattctgatcagcacaaactaataagttgagaatacactcaaagtgttccttaggcaaatggccaaatgcacaatttgagtgaattgaaagcgtgcagattctaaggcagacatgcgtagaaggattggtgataggtatttagcaaagaacctgtggtcgagtgtgattgaatcgataagggcttgtttaagtgatgccttggagtcagggggaagcttgggccagtgggaggtgatcttcttgcggagtagcaccgcggcgagctggcggacgttgggggtcttggccgtacggagatggtggacgagcgcagggaccacctgcgggtcacgggccagccgtcggatctgctcctccgcctgccgacgtgtgtcgttatccggcatcaaaaactggatcagcagcagctccagcgaccgccccattcctcccgcctgatgcatattctgg

SEQ ID NO: 307053 - DNA, 300 bp, Zea mays
  unsure (1)..(300): unsure at all n locations
acacaaatcataaacacatacccagttaatcaatataccacantcatagatccatcacataaacacaaaaccaccacaattatttattcacaaaaccatcacaattataatatcactcacaaccttccaaatttctcttttggagaaaatacaaaacaaaatatctagctgcatccatccaaaaaaacttttgatctttcttgttgtaacatccataggcaccaccccgatctgcttgctattgtcatcatggaataaacaagtgacttactacctttaggacctccctccaagtccccc

SEQ ID NO: 307054 - DNA, 383 bp, Zea mays
atgcaaaaaaaatcgcaaccttttatattgcactggaaaactaaatgtttgttatttgcattgcattgtacttcaaaactaaagtgcatgaaaacgtaagggctagtacacattgcatcctgaaacacccttctattgttggcacacctcaagacatcgatactgaaacctcaccgattggatatttgctggtcaacctcaacaatctcttggtttccacatccatggccaccttatcctgctccatgcgttcgtcaactatcagaggcatgagcttggcctctgcataagtgcgcaagactgagttgtacatctcagtgataacatactctgcatcccggaatatgaccaggagcttctctgcagcttcaatgtcacctgtc

SEQ ID NO: 307055 - DNA, 484 bp, Zea mays
actcatctatattattattagtatatctaatttcaaaatccacactataatagtgttgtctacaatgcaaaataatcttttgtaaagccatatgtacgatcatagataaaagtttgccgatgtttttgtgcagtgattcccctactatataataacctagacatgctatgagaccgcataacatgatattacttttcccacaagtcccaacaaacacacttcaaagcctaaactcccttagctttccgccttcacttgcagtgtatctgaatctgcctcctgaccgtttccagcgtcgtcactggtctccaccggtgcgtcctgagtagctcctttctgggcaagcaccttcttcaatctagtcagctctagatccttagcttctaactcctcttgcaggatggacaccagatcgtttgatctctccacatcatttgttacaccatccatgtgtttgtacaaaacatcaaattgattcctgagc

SEQ ID NO: 307056 - DNA, 328 bp, Zea mays
tcccacgcgtccgcggacgcgtggggtaacaacaggtggaactggaagctgcaaaatcagaaatcgagaagtggcattcagcatttcagagcattccagctgtaccttctggtaccattccagatcctgtttcagtggtgtcttacctcagtaccctgaagtcatcagaggaatcattgaaggagcagctggagaaagcaaagaaaagggaggcagcttttatagtaacatttgcaaaacgagagcaggagattgcagaactgaagtctgcagttagagatttaaaaacacaattaaggccaccatcaatgcagacaaggagattatt

SEQ ID NO: 307057 - DNA, 271 bp, Zea mays
ataattaattacttagtttcaggctttcagtattaagcatcctgtaaaaaaaactcgacctgaggcaggccgagaaaacccttgaacctctgtcacacccatacacagcggcaactcatttgagaacgaccacgaccatggtcgaggccttaaacctatgctttggcgtgggacagacgagatattttttaaacccaaaactgaaatttgttttcacaggggagtcgaactcaggatctggggagtgttactcagaccatcaaaccaactt

SEQ ID NO: 307058 - DNA, 290 bp, Zea mays
accaaaaaccccatgggaaaaatctcccctttgcaaaaaaaattggcacttaaggggtgacgctaatgggattttaatacaacttcgcgggccccgtcttgaaaaggggaaaaaggggaaactaatccgcggcaaatgggaaattatcaacatcggggggggggaacaaaaaaaaccaaatttttcacaaattcaggatatttttgggggtaaactttatcttccatgcaactgggtcattggcacagggccaaggggggggctccgggccttttcgcttgacttgctgg

SEQ ID NO: 307059 - DNA, 375 bp, Zea mays
gccgtcgctcacgctcaccgtcaccggcgagctccgcgtcctcgacggcacggcggccaacggcaccgccgacgcgccgctgctctggtcctccaacaccacctcgcgcgcgggcccgcggggcggctactcggcggtgctccaggacactggcagcctcgaggtgcgcagcgaggatggggtgctctgggacagcttctggcacccgacggacaccatcctgtccgggatgcgcatcaccttgcaggcgccagggaggggccctaaggagcggatgctgttcacgtcctgggccagcgagacggacccttcgccggggcgatacgcgctcggcctcgacccgggcaactccggtcaggcctacatctggaaaga

SEQ ID NO: 307060 - DNA, 377 bp, Zea mays
gctactcataataagtcagagaagaatggttctactagtacagctgtgcctgtgatagcattacatcatcgacatcatgaagggcttgttcgttttggatcctgttaggcttcagtcgacggtgttcatccctcccgtcacaaatcatgaagccacaaactcatgatgaaatttgtttggtgatcggtgccggcttcagcatcaggcatcgatgaagtggatgtcaaaggtgctcggatggatctgccacacattcagggaagcgtattcctccaagcactccttcaattgagcctcgctgtatccctttctggagatcaagttaagagcatgagcatatctcacgtccatgctgctcgtcctcgcggcctcgtctc

SEQ ID NO: 307061 - DNA, 386 bp, Zea mays
tcgttcgaacggacgacggccataaaagaggggcttgtctttaacgctgatgaagcagatcatgcggctgcactggaaagatagaaggagtgtgcaggaatgcctgctaatatttggaagcttgctaaaagggagatgaggcgcgtacgaaagattcagccttaccaaccgggttatagtaccttttcgagcctacttggaactttttgctgacacttccttgacaaaaggccagcgaacaaagggagcttgaccttatagctgctaaagagagccttggccagtctttatttatgggctaaccaaagtttagctataggattattgagttctttggatggtcaataggctaaaaccctgttgccatggggtccagggctgtgttt

SEQ ID NO: 307062 - DNA, 528 bp, Zea mays
tcggcggcacggcgttcggcaggctggccaagcccggcctcaacgacaagctccgccactcgggcatcatcgacatcgagttcaccagggtgccgtgcgagttccctggcctcaagatcgggttccacgtggaggagtactcgagccccgtctacttcgcggtgctggtggagtacgaggacggcgacggcgacgtggtgcaggtggacctgatggagtccaagacggcgcgcgggccgccgacggggcggtgggcgccgatgcgcgagtcctggggctccatctggcgcatggacaccaaccaccgcatgcagccgcccttctccatccgcatccgcaacgagtccggcaagacgctcgtcgccaggaacgtcatcccggccaactggaggcccaacaccttctaccgctccttcgtccaatacagctagctagcttgtttgcgccctcgggcgttcggcaccaccacccacactactaccacaacaccacttgactactgtttgtaccaatactacgcggacggac

SEQ ID NO: 307063 - DNA, 522 bp, Zea mays
gtgcaatgaccgtcgccgggaagttgccgccactcaaattattgccaataagcagattgatcgcacatttgccttcgacaaggtttttggcccatcgtccaagcagaaagatttgtttgaacaatccatctcgccgatagtaaatgaggtccttgaaggttacaattgcactattttcgcttatgggcaaactggtaccgggaagacttacacaatggagggaggtgggactagaaagaccaagaatggtgaactcccaactgatgctggtgttatcccaagggctgtaaggcaaatctttgacattctcgagtctcagtgcgcagagtatagcatgaaagtcacctttcttgagctttacaatgaagaaatcactgatctgttggcacctgaagaaccaaaattccctgttcttgaagacaagacgaaaaaacctattgcccttatgaagatggaagggatttgtttttgtgagaggtcttgaagagaagttgtgtactcagctggcgaaatctacaagat

SEQ ID NO: 307064 - DNA, 475 bp, Zea mays
tccacgcgtccgtattcttcgactttcggtccagtctcaacatctgtacaggatagagttgtgactgtggggggtgttagaaccgtatcagggtttagtctcgtccctctgtaatgggcctaggcccagatacccttattataaatacatctcccaacccagctagggttagggtttttcccaacttccattaagaagtttccatgatactagcttataatagcgccttacttttccaaggttttattagcttgttgctcactgagcttgtctttgtatgtttaatgttgttatatacttatatatgagggcatgaggctgatttctgtgcaattgtaaaggttgtgcaaagcgtgcaattacattagatggctcagatcatgtaattggtcgcttgcaaaacttaacaaattgcacatgatatggcctcttatatattccttggaaaattggtagtgattgtgacaactttttt

SEQ ID NO: 307065 - DNA, 325 bp, Zea mays
ttgtccacgcgtccgatcgccatgcaggcggcggccaaggccagggagcaactacactcctctgaactctccaggaagcgggccctgcaggaggccgacgacgccaaggcgcaggcgcgcgactccaaggcgcagctcgccgagctctcgtcggccgaggagacccgactcctggagctgcgacgtctatcgcaggagcgcgaccgctcgtggcagtcggaactggaggccatgcagaagcagcacgccgcggactcgaccgctctggccgcggcgatgggcgaggtgcaccgcctccgcgttcagcttgccgtcgcggtgcgcg

SEQ ID NO: 307066 - DNA, 432 bp, Zea mays
gtttaccaggcgttctgccactctagtggatcatatggtgatgctgaggcagtacgtgttatcagagatccaagttcaagcctagggaagggtatcgcatatgttttattcaaaacgagggtaaactctggatcttactcttttgcttgctctatctactgcggcatattcgatcagccaactagtctatgaaatgtacatgatcgagtacagtatctctttgtgtgctatgcaatcttgcatatcgtttctggcaagctgtatcaatgccattccctgatgaccccttcttgaaattatatactagtggctaaagggtctctagctgagttggttaggtggtttgagtagcactcactagggcttgcgttagactccccgtgttagcgaatttcaggttgaggtaaaaaaaaggcttcttgactgtcccac

SEQ ID NO: 307067 - DNA, 392 bp, Zea mays
ataaaaataaataatgcttgtgacaaattgaaagagtagctttaccggctcctacttctaaaagaaaaggggaaaacagttcttcagacataaaagacaaaaaaaaaaaagggcggccgctcgcgatctaagaactaggcggacgcgtgggcggacgcgtgggcggacgcgtgggctggatttctgattagcatcgctgaatgatgcatatgatggcaatgctcgctgatgttgtgtgcttactcaatgtggatagatctcatcaataggaatcgacctcacatatgatgcacggccatttccaacagaagggatcgttctcatgacttgttcctatcgaatatggttgaagctgttgaacatcccagtgtgggaagccttggctgcaggct

SEQ ID NO: 307068 - DNA, 231 bp, Zea mays
aacccccaacagttcaggggattgctggatcaaaaaacccggacccacccaaaaagagggagggggaccacttaaaatttccccccgaggtcccctttgggaatttttttacaccatacatacccccccccaagagttttacgagatagcccatcctggagccctgggtccccctacattgtcttatggatagtatgtataaaaaattaaagggaccgtttttccaaaacc

SEQ ID NO: 307069 - DNA, 343 bp, Zea mays
ggccgccctttttttttttttttttttttttttttttttttttttttttttttttttttggttttttttttttttttttttttttttttttttttttttggggggaaccacccggctttttttttctaaacaaaaggggccccccattccccccattctaggaaccaggccagcgctgcccaaaaaccctcaaaccgggaaaaaaaaccgaaagggccccaagtttttgggaacccagggcccataactccaataccccactaacaatgccaattgggggaaaaccaatccaaatgccggccatggttttcccgcccgggcttttttttttttttttttcccc

SEQ ID NO: 307070 - DNA, 352 bp, Zea mays
tgtccagggccatgtccatgtcctcgtcgcgcgccctactccgccgtatcgggggggctgtcctccgtcactgctcgtgccacgctgggagccctgcgcccgtcgtcgtcgtcggccttccttggccactctagccgtctgggccgcactgctaccgcgtcgccgacgaggcggagcctcaaggcggaggccaagggcgagtggctcccgggccttccctcccccgcctacctcgacggcagcctgccgggtgacaatggcttcgacccgttgggcctggcggaggacccggagaacctgaggtggtacgtgcaggcggagctggtgaacgggcggtgggcgatgctgggcg

SEQ ID NO: 307071 - DNA, 335 bp, Zea mays
cggacgcgtgggctgtctctaagcaggtgccatatctgtgaactggagcttccttatgttctccagaacgtcggagagggatcgtcgaggacggatttgcttctaaggaagtcgggctctaagcaggtgccatatctgatcgaccctaacactggattccagtcgggcgaccataagaagatactaccttacttattccagcagtacccagttagtagtatctagcagaaaaagcagacgtccacaactttaactgtgtatggtttatgtgatcttacatatgtatctgcgggtacagtgttaccagacgtggtttgtacgtatactttggctgc

SEQ ID NO: 307072 - DNA, 469 bp, Zea mays
ggaagttctggtgtggtttacaatgtttctatggagcgtgaggaaagacgtctaactgagcttggtcaggagatactagagacatttgtgctatctcatatatttagtggaattgaagttgcgtaccaagaagctgttgcattgaaaaggcaagaggagcttattcgtgaggaggaggaggaggctgggcttcttgaacatcagatgaaggggaagcgtggtggtggtgtaaatgaaaaggacaagcgtgccaagaaaaagcagaccatgcaaaagaagaaccgtaaggctaaagacaaggaaagagatgagaaatgcgaggttaaaattctggaaaggcttcgtgatgaaactgccattgataatagtgatggcttaccatctcaggtggaagtgatagcaaagattgatgccttggaagaaggttcttcagatgggtcagacatgtcaaatagagggaaaaatcagc

SEQ ID NO: 307073 - DNA, 307 bp, Zea mays
gcgatcgcggttcttggcgtcgcggtgaccgtcacgaggtacaaccggagatacatgggcctgaggctgcctccgggcccgcccgggtggcccgtcgtcggcaacctcttccaggtggcgttctccggcaagctcttcatccactacatccgcgagctccgcaaggagtacggccccatcctgacgctgcgcatgggggagcgcacgctcgtgatcatcagcagcgccgagctcgcgcacgaggcgctggtggagaaagggcgggagttcgcgagccggccccgggagaacaccacgcgcaacatct

SEQ ID NO: 307074 - DNA, 292 bp, Zea mays
gtcttcgtccttctttctccgtctcctcctcggcctccccgcaccccatcttcgccgtattcgctatacttgatggccataatggtaacgcagccgcaatatacacaagggacaatttgctcaaccatgtccttagtgctatgccacgggggctgtccagggaggagtggttgcacatgttgccccgagcactggttgcagggtttgttaagacggacaaggagttccagagcaaagggcaaacttctggcaccaccgctacatttgtgataattgatgggtggactatcac

SEQ ID NO: 307075 - DNA, 315 bp, Zea mays
tgcatcgccatctgctgccgtgccggtcctcttcaagccgctggcagcgtgtctcgcctctcccgatcctcgggcgtccacggcggctgtggcagccttctgtgatctatcggcgccccctgctgacgcaacctccttttctgccactcgcgcccgacctatacaacctgctcaccacttcccgatccaactgggctctcatcaaggtgctcaagctgtttgcacgactggctcctctcgagtcccgcctggcagccagaattgtcgacccggtctgccagctcctcacccgatccgcggccatgtcactgacct

SEQ ID NO: 307076 - DNA, 310 bp, Zea mays
gctggttattctttctcgggccgatgtgcagcttatgcttttggcaacatcgatccaactaacatttctcgggtgtttctgcttggcccttctcatcactactacactccaaaatgtgctttaaccagggcttctgtctactgtaccccaatcggggatttgccagtagaccaggaaggtgagtgtttactcaatttggatggttgaatgtttttagcctagttctgtattatgtactctactgtcaagggttttgggattcaaggtagctggacctcggctacagagttcgtagtctcagacaataatg

SEQ ID NO: 307077 - DNA, 190 bp, Zea mays
cccacgcgtccgtgactttgttttttaaaatatcaaatgcagaatttacatttccaccatggacattttttcctgccaagagagaataacaatcccagaaatattacaggatgagtggttcaaaatgggctacaagcgcccagattttgatgaacaatatgacaccacattggatgatgtggatgccgtc

SEQ ID NO: 307078 - DNA, 185 bp, Zea mays
acgcgtccgcggagccttgtgtttcccaaagataatgaattaaagctttcagagaggcttatgcaacttcttgatactcttcaacctgcaaagttccattggcaatgggttgagatgaggcttcttttagatgaacaagctcttatggaaaaagttgcagcaggcaagacagcacttgaatcact

SEQ ID NO: 307079 - DNA, 422 bp, Zea mays
cccacgcgtccgccgccgtcttgtggtagcgcccgttgccgcctttcttgaggtcaaggttgatgatgatcatgccaggcctgaaatcgaagttctccttgacaatcttgaggatctccttgtcggggatcgcgccggtgccgtacgtgtcgacgaacacggagagaggctcgggcacgccgatggcgtaagacacctggacgatggcgctgctagcaaggccgctggcgacgatgctcttggcagcctgccttgcgacatatgctccgctgcggtcaaccttggttgggtccttgccggagaaagcgccaccaccatgggctccccagccaccgtaggtgtcaatgatgatcttgcggaacaaatcaatgggtcattaagaggacatgtactaataagttgggagtaccatttccaaaatg

SEQ ID NO: 307080 - DNA, 447 bp, Zea mays
  unsure (1)..(447): unsure at all n locations
cccacgcgtccgcaccaggttctgggacttcctgcagcagacgacgacggccgtcaagatcgacgacgccgccggcgccggccctgctagacgcagcggcaacaagaagggtaaggccgccgcacccgccaacgacccgtcgtcgtcgtctccggcggcggacactatcatcgggctgctcgactccggcatctggcccgagtcacccagcttcaaacgacgccgctttgggcgcccacccagccggtggaagggagtgtgcatggctgnngatgacttcaactcatccaactgcaacaataagctgatcggcgcgagatactacgacctcagcagcgtaagggggccggcaccgagcggcggcgggtcgcgcgggacgacgtgggccacggcacgcacacgtcgtccacggccgccgggagcgcggtgaccggcgcctcgtactac

SEQ ID NO: 307081 - DNA, 441 bp, Zea mays
ggcacatgctctttgttgatgattatgagaaacttgctgcaattgaagcatatgatgcatctcgtactcgagaagtgcaagacaagaacgtggctcctaatgtttcgtctactgatgctaccactgatccctcaagtgtacgggttcctactgcagcacatatcctaaggcatgctgggaggctgcttaccattctctctcttctacctaattcaaagaacgaaattatttctgatgctgtatggtgcaaatggctcgaggattgtgctagagggcgaactccctgcattgatataaaactaaaaagttactgcagggtaacattattgaatatattatgttctgagagtccaaatacaggaaaagcctctgatgaatatcctgactcagaaagtgagtataaaaaaaactgtccccagtttggagatgcacttttcttgc

SEQ ID NO: 307082 - DNA, 280 bp, Zea mays
cccacgcgtccgctctcgcgtgcgcaaacctcaccccacctatattatcccgtgccccttgtctttcttgctgcacaagcagcgaagcaccaagctagaagcacgcctctccctctctctttatccgccgtacgaagctgcagaccccaatataatcgacacgtgaccgagatgggccgcaagttcttcgtcggtggcgactggaaatgcaatggaaccacagatcaggtggagaagatcgtcaaaaccctgaatgaaggacaggttcccccttcagatg

SEQ ID NO: 307083 - DNA, 403 bp, Zea mays
cacatgccgaaagcaatggcgacgctgaggagatagctgctcgtgaagcctgcccaagcctactagtgccagattattacagttgaagaggccaaagagttctacccactctttgggctaggtgccaatgtggcactcatcttttctggacacacattgaagtatttctcaaatatgaggaagattaggtcctagagtggatggttggccaaattcgttgaaggacatgacgagcatattggttgtaccgggtcttgtcatcactggtgtctattggggagtgaacagatttgttattgatacctcatcaatgtagcggaaaaagaaggtcaaaccaaagctcatcatgggtgagagcttgaaggttctattgtcatctaggtatgtgagggattttgcaaca

SEQ ID NO: 307084 - DNA, 414 bp, Zea mays
ggcacgcgtggtttattttcgtgggatcagggaccacaggggagcccaaagcaattccatggacacatataacacccctaaaggcagctgccgctggatggtgtcacatggatattcgtaaaggagacgttgctgcttggccaacaaatcttgcttggatgatggccccttggcttgtttatgccttcttgctgaatggagcttccatggctctgtataatggctccccaaatagttcaggctttgcgaagtttgtacaggatgctacggtaacaatgcttggactggtacccagcatgcgtcggacttggatgaatacggactgtacagctggactagactggtcctccatccgatgctttagctcctctggtgaggcatccagtgtggatgattatctatggctgatgggaa

SEQ ID NO: 307085 - DNA, 404 bp, Zea mays
ctcaacgccgtcattctcatgtcttcctggtcgccggccgccgccgccgccgccgccgtagcgaaggcggctaagccactgcaccggagcgtgtcctcaactcctgtatccccccacctctctatgtcctcttctcaccgcactccacctctcgcgatggcggccggtggaagcggcgcggtggccccttcctcacttctcgtcgccgaccagggccaccgcgagtccgtgctgcttgctgcacgcgcctccatggggaactgcctcggagagacccgcctcgacctctcggtgtcagggctccgtcttgctgccaagggcaaggtgagggacgtgtacgagagcgggcagcacctggtgctggtgaccaccgacaggcagagcgcgttcgatcgcgtgcttgc

SEQ ID NO: 307086 - DNA, 482 bp, Zea mays
  unsure (1)..(482): unsure at all n locations
atttgattactgttgtgacgannnannnncttgtaaggtggtaataggaatgcaagtgtactttatccccctcccctaaattaattacgtggattgccattttagcaagctttggatgcgcaaagaccctaaactactagaatttgcatccctagtttgtcatagcaatagcattgaggttttataatttcttttggtctttcttggcattgatcttaaacttcatattctgcttgtgacctcatttggcccctcttctgtacaaatattattttcctaatgaaagaaaggccattactcccttgatcattagacatctcaaaagttcaagatgatgaagttggtgatgggacaacttctgttgttgttctagctggagaacttttgaaggaggctgagaagttaattaacatgaaaattcatccgatgactattattgcaggtattacttgctgaatgtgttctgggtaatagtatgcttt

SEQ ID NO: 307087 - DNA, 414 bp, Zea mays
gaattattatatttttaggcccgcattgaacacttgatagaccaagtactatacgccttcatggtttgtcccaaaatataatgaaatagcaccctgtactttaaagttcagctacaaaaaatgatgcttcaatggccagaattatgagtcaagcattggaggaaagaaaacatatagcctggtacaatactgaataaattgcattacctttggttgccttttcagatttcagcaagatttttaagttcaagtttgtccatttgggcggagatgaagtaaacacaagttgctgtagtaccacaccacacattaagtcgtggttgatgcaacatagcatgaatgaatctgatgcctacagatattctgtactgagagctcataagatagcgatatcacatggctatgacatcatta

SEQ ID NO: 307088 - DNA, 367 bp, Zea mays
cgacccgcaccagctctggctgcccaagccggcggcggaactgccggcgcaggcgtccgcggcggcgccgggtaaggcggcgcagcgcgggaaggtctgcgtgctctgcgtggacggcggcgggggcggcctgcgggcgctgctgccaggccgcgcgctggcgcacctggaggccgcgctgcgccgcgcgtcgggggaccccgacgcccgcgtcgccgactacttcgacctcgcggcgggcaccggcgccggcggcgtgttcgccgcgatgctcttctccacgcactcgcgcggcgcgccgctgttccacgccgacgacacgtggcggctcgtcgcggaccacgcgccgcgcatgttccgcaggccc

SEQ ID NO: 307089 - DNA, 438 bp, Zea mays
aaagagcccagtgttggacaaaatgttgaaactggacgtgttgtcgaatggttaagaaaccttgggttatccaagtatgaggaagtttttatcagagaagaagttgactgggaaaccttgcagtggctcactgaagaggacctgttgggtattgggatcagctctcttggaccaagaaagaaaattatccatgctctaggagagttactgaagaaacatgatgatcccagtgaaatggaagctgtgttaaattcaggaaatactaagaagactaaacttccgatgaatggtaataaattaattaccgaatactttcaatgttcctcatttgatcaaagacaaagaagggtatgcaaagcaaacaagccatctaatctgaacgagaagaaaatttctagtgctaaagtacccactagaagaactgctggtaaaggaaag

SEQ ID NO: 307090 - DNA, 337 bp, Zea mays
gtccaaggatgtttctaaacacccacacaccagtccatcgcccgttccgtgagcttccacaggtctatttcacccatccgtcatcctaacaaaggactactctctctcgtcctcgtcccgcctcgcagtcgcagcacgatggtgaccaacgtggtggacctccggtcggacacggtcaccaagccgtccgacgccatgcgcgccgccatggccgcggccgacgtcgacgacgacgtcctgggcgctgaccccaccgcgcgccgcttcgaggcggagatggccgcgctcctgggcaaggaggcgtcgctgttcgtgccctcgggcaccatggccaacc

SEQ ID NO: 307091 - DNA, 351 bp, Zea mays
cccacgcgtttttttctgtccttttgctcggaacgcacacaccgtccggtctccgatctccgatccccgatcccctcgtggatccaagatgcagatcttcgtcaagactctcactggaaagactatcaccctggaggcggagtcctctgacaccactgacaacgtcaaggccaagatccatgacatggaaggcattcccccggaccagcagcggctcatcttcgatggcaagcagctcgaggacgggcgcacacttgccgactacaacatccagaaggagagcaccctccaccttgatgtccgcctcaagggaggcatgcagatcttcgacaagaccctcactggaaagac

SEQ ID NO: 307092 - DNA, 271 bp, Zea mays
cccacgcgttcttctgtaccgcgccacgatcgtcgagttcatcgtggcgctgttcctgtacatcacggtggccaccgtgatcgggtacaagcacctgacggacgcgtctgcgtcgggcgcctacgcggcgtgcgtcagcatggacgtgctgggcatcggctgggccttcggcggcatgatcttcgtcctggtatactgcaccgtcggcatctgggggggccacatcaaccccgccgtgaccttcggcctcttcctggcgcgcaaggtctcc

SEQ ID NO: 307093 - DNA, 229 bp, Zea mays
gtcgtctcgcgcgcttcaccttccccaccccggcgccgacatcgcacgcccgcaggcgcattcgctatgggtgcgtacaagtacgtctcggagctatggcggaggaagcagtccgatgtgatgcgggtggtggatcgcgtgccctgctgacagtgcaggtagtagtcggtcattgtacgtctaactaggaccatttgttctgacaaggggcgccgtctcggatacaagg

SEQ ID NO: 307094 - DNA, 405 bp, Zea mays
ttcattcgtacgccaacccggtctacaaggagagcgctttcttcctgaaagacggtggtaacaaaacccttcgcttaaaaggcattacgacacgaaggcgcactctaagacggcatccaccgaccggatacttattcagctagtttattcctgctacgaccaactatagtgtagctttatacattacaaatgacttcacattgcaaggaatctgaatagccatttcatccatttattttcctaatataacctagggcgcgggtgaagacatgggcggtgtctggcgatttggaccaggactcctctttccggcagcggcggccctggccccaagatcgaggaggtggactaaacggtttgttgtcagttttgaatgtgcttgaagtgctggctggcccagttgct

SEQ ID NO: 307095 - DNA, 360 bp, Zea mays
tttttttttttttttttttttttttttttttttttttttttttttttttttttttttttttttttaaaaagggaattttaaaatagaagatgggatccaattcggtgggtgttataaaaggctaccgtcaccttgagcagggaaaagggtggaaagcaaagccaaacaaaatccaccagaacctgaccattttttgggggaccggggtttccatacaatgcatgccatgcgagaatccaaaaacatgcttggggggactggggatttccagggtccagccacaacagcactaaattccactaacacaagaggccttttttttcattaccggtcagaagtaccccaatcccccgttattgg

SEQ ID NO: 307096 - DNA, 360 bp, Zea mays
ggatcaaacggtagtgatcaatggaaaagtagcgttgatgttaaacactggatactagagagacccacgatctaccctcctgcttagacagacattctgaacattagcttaaatacaacaacccagaatattaaaagcagttgctagatgcaactattagaaaaatctcgccaggaaagcaaaaaacatttcaagccgaaggacccgattaaccagaaaacgtatcatgctttgatgttccaattgggcgctgatcgggggccactcgtaatcccctcatagtattgggatggcagcttgcctttgttccattgtttcacaaacttcaagaaaagatcacgagcagactttgaagacaaa

SEQ ID NO: 307097 - DNA, 383 bp, Zea mays
gcattagaacgacttttattctggcatttctgcacgttgtcattttcaactcgcactaagaatataacagacacagaaaaagaaaaggacttcattttgacatcggtggatcaacaagtgtttggactgtagactgatacaaaaaaaattggaagacaacagactgataatatagaagtggtgtactgctctgtgtggctgtgtgtgaccttgtccttgtgagtggtccaatccaactaaaatctggctgacggtgacggacgccgcgtggcccgcaccttgagatgcatggtggagttgtagtgcaccacctccggccgcgacgtctccagcgacagcacctccgactgcaggtagcagaagccgtcgccggcgtcggtgcc

SEQ ID NO: 307098 - DNA, 491 bp, Zea mays
cctacgtttccgcccacgcgtccgcccacgcgtccgggcacgcgttcgcccacgcgtccgagctgacctgcagaaggctgtagagaaagagtatgagatggctcttcaagacagagttatggaagaaacaaaggagaagaagaatgctgttgaagcttatgtgtatgacatgcttatcaggattttgtgacaagtacagtgattttgttacaccttttggacatggaaggtttgatcgtattactttttttttgtttaaaaatctgattatatatttgttttgtcgttttaaaggatccaaactttttctttttttttttttatatatttattttattaattttttttttatttaattatttttatattatttatttataattgttttttaattggataaatttatatttatctataataattgacttttagtatattttttttttttaatttggtttaatattataatgtttttatcgttttgtctttct

SEQ ID NO: 307099 - DNA, 461 bp, Zea mays
gcgcgatccgctcccgccgcgcgcgccttcggggtgtttgatttcgggggcaggcgggccgcgcccaccccaatgggctcctccggccttgccgccacgctccgcgccgccgccgcgatgctccggctcgatgcggagtgggactggttcatcacgcttagcgccgccgactacccgcttctcacccaggacgacttgattcatgttttctcctctgttccaaggcacctcaactttatagatcacaccagtgacattggatggaaagaatctcagagagtgcaaccggttatagtagatgctggaatatacttggcagggaggaaccagttcttccaagccacagagaaacgtgacactcctgatggtttcaaatttttcacaggcatttgtcttaacttgcactttgtttttaacccggttgatgaaaaatggtttcttaacacatgcactccctttct

SEQ ID NO: 307100 - DNA, 585 bp, Zea mays
cctacgcgtccgcccacgcgtccgcccacgcgtgcgggtgaatttgtgctagctagccaacagacattaccatcgttcaccccgccaggttcctacaccctcacgatgaagttgctgggggacagcaacgaggaactgacctgcatctctttcgggttcagcatcgggtttgttgcgccgaatcccgtcatctgaacccagtatcgaatgtcatggatgtactttacatgaaccttgtagtgcaacattctccagtaagactcggaactcccaggctgggcgcctggaattggttaattcggtcttctcagccttaccaatgttcatcatgtgcacgctcaagattcctaaaaccatcattaaggaaattgatattttcagaaagcactgcctgtggagaggaaatgacatcaactccaagaggccacctttgattgcttggaattcggtcactcaaaggaaagtgaatggtggcctgggtgttcttcgattagaaacacagaacgaggctcttctattaaaatttttgcataattttcaccacagcgacttacctgggccatctgactgaacaatactatttac

SEQ ID NO: 307101 - DNA, 538 bp, Zea mays
  unsure (1)..(538): unsure at all n locations
tcgattgtctcccttccaattcgatgcctttgtagcgctgctgcctcgccgcgtcgtcgcgggtccccgatttccgcttgctgctgcgcttccaacaccatggacggcgggggatccggcaatgcctccggcggcagcggcggcgcatcgacgtgctgctactacgcgctcctcggcatccgcaagaacgcctccgccaccgacatacgcgccgcttaccggaggctcgcgatgaagtggcacccggaccggtgggccagcgaccccggcgcggccggcgaggccaatcagcggttccagcggatccaggaggcatactccggtaaggcctaccacagcctacgtgtttggctttgcctggctttaggagatttgatcgaatattgcttgtttggttggcggtggtgcagttctgtcggacaaggggaagaaggccatgtacgacgccgggctcttcgaccccctcgacgacgacgaccaggatttctccgacttcatgcangagatgctggtgatgattgatagcgtgaaaaacgag

SEQ ID NO: 307102 - DNA, 375 bp, Zea mays
cttacgtttgggttgaaatgatttttgataatgctcatgaacttggaaagaaatttcgtgttgtggtggtcgactctcgtccaaaccatgagggacaaggattgttgcgccgattagttgcaaagggtatcagttgcacatatacacacataaatgctgtatcttacatcatgcatgaggttacaagagtgtttttgggtgcctcttcagtactatcgaatggtactgtctactccagagttgggacagctttggttgcgatggttgcacatgcttttggagttcctgttctagtgtgttgtgaagcgtacaagtttcatgagagggttcaactcgattctatatgctttgatgaacttgctgacccagatgcta

SEQ ID NO: 307103 - DNA, 451 bp, Zea mays
ctgtcgtttgggcaaacacgcctcgcttccccggccggttccgcgaccgcggcgttgactcgctccgccccatctccactgccagaccggcccctcccgccccgtcccgcgcgtcagtgacggtagcgcggcgagcccaataggagagaaaagcgcgccagcggcagtgtcccttccggctccggctgagactgcggcgcgggcggtgcggctggaccagttaggattcggactcggtccgcgctgcggcctgtgtcacctgtgtccgggcggctcgcagtctggttgggctcggatggtcggtgccggacgccgggcgcggaaccctaaccctaggggccggctacattagatgctggggggcggcgccggaggcggtggcgcgggcgcgggcttgggactggacctttcggcggtgatccaagcggcggtcgtcgggctcgtgctcttc

SEQ ID NO: 307104 - DNA, 511 bp, Zea mays
  unsure (1)..(511): unsure at all n locations
tcgcccacgcgtccgcccacgcgtccgcccacgcgtgcgatcaaaccaaccgcctcctcctcttcttcgccgtcgcctgcctcgtcctcgccgctgcctccttcgccttcgccgtttccaccagccgcaaccgtcagtccctgccgcagcctccgcctactgtcgccttccgctgtggccgcgccgaggattcgctccgttccttcctagcggcctcctcgcacggcaacttctctgccggcgacagggagaaggtgctcgctgtcgttggcgtacacacggagcatgggaatttctccgctgcccgacgcgctgcgctccgcgctacctggttcccgctcaaccccgaaggcatcgtaagtttagaacatggaactggattatcatttaggtttgtcgctagacggccaaaggacaaagataaaatggaagatcttcagaaagaggcggatacttatcatgactttttgtttatggatgctgatgaggccacaaagcccncacagacgat

SEQ ID NO: 307105 - DNA, 299 bp, Zea mays
  unsure (1)..(299): unsure at all n locations
tcgcgtacgcgtgggggcccctctnnanccggggcgggtttaattagaaattggtgtgcgtcaaagtaaaaggacagtatgttgagggtcactattatctcaatgatgttctcaagtccaatgtacaatgtttaaaagataaggaaacgtcatgtcatgattaggcctttatccaaggtgatcataaagatctagacggtcatgcagagtcatggttacattggcgagttagagtacttggatgaccacatagctgagaagattgttgttgtgatgctgaatggaagactgaataaatg

SEQ ID NO: 307106 - DNA, 388 bp, Zea mays
catcgacgggcctatgctcgtctaccctatgctcaagagcaagtgggaccccaacacgtcggtggcgctgccggagggcgaggtcttctacctggtggcgctgctgcggttctgccggagcggcgggccggcggtggacgagctggtggcgcagaacggcgccatcctccgcgcctgccgtgccaacggctacgactacaaggcctacttcccgagctaccgcggcgaggccgactgggcgcgccacttcggcgccgccaggtggaggcgcttcgtggaccgcaaggcccggtacgacccgctggcgatcctcgcgccgggccagaagatcttccctcgggtcccggcgtccgtcgccgtgtagagcaaggggggaggaccagccagc

SEQ ID NO: 307107 - DNA, 487 bp, Zea mays
cccacgcgttttttggttacatagcatctctagtatgccactagctatatgtaaaggaggtctgtttgccgtcgctggtgccatagctatgggtgagaatgggctttaaattttacactataagatttaagcggatcggattaggatcggaccctatttctattcatttctgaactaaaatttatttagggtcctaccatttagtgaagaagcatttggatcatgatccattaccacccctagccatagataataggcctttggaagttttgactccatcctatgagggcttgactggttctatgacttccaggcttactcgtagtgcacctggaagttaaaggtattgaacttttttgggtataattggggctatcgttgtcccagaaactgggaagttgggcacacttcttgctttgcgggatctgggagtattcctcttttaccttaaatggccagttcctgtaaaacacacacacacacacat

SEQ ID NO: 307108 - DNA, 496 bp, Zea mays
cccacgcgtccgtttcttatgaagctcgatgtacggcaggaatctggtcgtcacacagaagcacttgattccgtcacatcctacttggatcttggtgtttatagtgagtgggatgaagaaaagaagctggatttcttgactagagagctgaaagggaagcgccctctagtgccccaaaacatagaggttgctgctgatgtgaaagaagttctggacaccttcaaagttgctgcagaactagggagtgactcacttggagcatatgtcatttcaatggcctcaaatgcaagtgatgtccttgccgtggagctgttgcagaaggatgcaagacttgcagttagcggggacctaggaaggccatgccctggtggcacgttaagagttgttcccttgttcgagaccgtgaaagatttgcaggcagccgggtcagcaatcaagaagctactgtccatcgactggtacagggagcatatcatcaagaaccacaacggacacc

SEQ ID NO: 307109 - DNA, 467 bp, Zea mays
cggacgcgtgggctgacgcgtgggtgcccgggaggggtggggaggggagcggcccatttggatttggaagcatcctcggcggcgagcggcggcgtcgcattcactctcatctctctctcacacagattccggctccttttccctctcccccaattcaaaatcaacccccctcgtcgcaaggccacaacaactccactcctccccatccctagctagccactagggtttgccagcctttgcagcgtcgcgctcgcgtctcatgcccttgcccatcgacggtagacgagagcgagcggtctgtgttcgtggagcaggggccggcgccacggagatcaacatcgtggacaagtacgcgaagctggagaaggtcggggagggcacctacggcaaggtgtacaaggcgcaggacaaggcgacggcgcagctggtggcgctgaagaagacccgcctcgagatggacgaggagg

SEQ ID NO: 307110 - DNA, 410 bp, Zea mays
aattaattactgtgttgtgattactactgttgttactactctaccagagacaatgaaagaaaaaagaaggacataaaagaagcaaaaaaaagatctgaaggaaccatctaaacgtgacctacagataatagaggacgctagcaatggtatccatgttgagaactcgactgatgaatacgtgtgaacagcaggtgatctcagtcagatcttgatgaagggactgtcacacagaaaagctgggaccacccgtatgaacttaaaaagttgccgatctcatgtgatattcacctgcgatattgaagcatggaacacgggttcatcaaatgggtttagcggctcacgaactagcataatgacctttgctgacctcgctggtcctgacactgatgaacttggtgcagcaaagcatt

SEQ ID NO: 307111 - DNA, 437 bp, Zea mays
gtgcgccaagcgttttattattaagcaagctagctagccgccctcctcgagtgatccaatgcaaagtggttggtggtggcggtggtggtgtcacgtactgtggggacgggccggccgggtgcctcgattgcgcgcgtagctgcatgtggatcctccttcctctctgttcattattacgcgtattattggtattgcaggggtgcgacgcgtcggtgctgctggactcgtcggcgggcaaccaggcggagaaggacgcggcgcccaacgccagcctgcgcgggttcgaggtcatcgacagcgccaagacgcggctggagcaggcctgcttcggcgtcgtctcctgcgccgacgtgctcgccttcgccgcccgcgacgccctcgcgctggtcgggggcgacgcgtaccaggtgccggcggagcggagggacggcaacgtc

SEQ ID NO: 307112 - DNA, 572 bp, Zea mays
ggtcgactctagaggatcgccaaatctgtttatactttggcccttgtcagcggtaaaacagggttaattttcttcccttagcctaacattgaccataatcagctccatgggtccttcctagctttggtgctaccatttatcgcctcctcctcctccaatgttaaaaattctgcaaaaattactcatcggtgttctcacactttgccccagtatggccctggccggggtgcccaacggcacttggttatcccaaccccaaatccgtttctatgcttcccaaaacgccctagaccaagtgatgaaggatattcaaagtcagggctaccgccttgtatttttggattttcggggagtagcggacgatgtgcaggaacaaattagtcaacaagcccgcaaccataacttaattcccattgcctgggtccaatctccccaataccgtcgccttaccattgaacaaattattaatgaagcccgccacacggacggtctacaggtggatgaccatttttttgccaactactcctcagggattttgagtatttagctaaccagtatcgttagtttatttt

SEQ ID NO: 307113 - DNA, 425 bp, Zea mays
gtcgactctagaggatcgttggcataatttcccaccccaatgctgggaacttcctggctataaattggttgggatgctacctgaccctggggtaaaatatccctttatgtaataacttgctgaccttttaagcgcctactttcacgatggtagggatggagagcaaaggcggtggaaatatctccagtttgtggaaaaactcctgcggctaattctaagacttctgaatgatgcttttggaggtaataggcgcaggcatagctatattgataagctccctttatacaggtttgcttttgcttttcaccgcccaaacaacgggctaaatctttgccataatcatttgcgcgcgatcggtcaatcaatcatataatgctcagtcggtaactgtgcataggttaaaaaatcttcttctccatagttct

SEQ ID NO: 307114 - DNA, 432 bp, Zea mays
caggtcgactctagaggatcattaggctataaattcaacttctgttttttgcctccataatctaccaattaggactaaagcctatcgataccatctacggccaaacccaacggcttaaaaccagtcaaattaagcaactaaagcgcctctatcaacagcgtctccccggcgatcgcctgctaacggtggaattagcccagcgtttgggggccatcagtcaggaaattaaacagccggtttcagtgtatgtgaaccgacgggggcaaattatccgggtgggggtaggtacgccccgacaaacccaaattccgcccttggaattgccccgctatggggaaaaacgactatccggcattcgttgcctcaccacggatttaaagggcgaagcccccagggaatctagtttaattgccatggccctgcaaagattgg

SEQ ID NO: 307115 - DNA, 250 bp, Zea mays
caggtcgactctagaggatctgcctagctttgcagtcgaaaaaccccagtaatgtctctacttttgctgttgttccccggaagcccaacgtctgttaaggctgatttttctgccgtcatttcccacacaaattttttcacccctctatgaccgctaccctctcccgggccgcttgggccagcaatttcagccaaaacgcagtggaatttgaccgcactggattggagctgatccccgggtaccgagctcg

SEQ ID NO: 307116 - DNA, 294 bp, Zea mays
caggtcgactctagaggatcaccttaggggaactggggtctaacctctaccaaattttgggagcttgtttacttttcaaacggtcccagaaggaggaatacgaaggcaataacttttttcatctccccaacgcccctgggttaaccaagggggataaccatctgtcattacttgcaccggccctaactgggccaattgtcgagcccgacgataatgaaaactacgttggaggccgttatccagttgctgggccaatgttgattcctctccggcgatccccgggtaccgagctcg

SEQ ID NO: 307117 - DNA, 346 bp, Zea mays
caggtcgactctagaggatcgccaccaccgatttgcatcaatttgccaaccgccctcttgatagcctttttttaggccaacgccagagagcctggattgccatggccctggcccaagacactgaaattttattgttagacgaacccaccacctatctcgatctagcccatcaaattgaagttttagatttactccattggctgaaccgggaagcaggacgcaccattgtgatggtattgcacgacctcaatttggcctgtcgctatagtcatcgcttgattgccctacgggatggaaaactactggcccaaggacgaccccaggcgatccccgggtaccgagctcg

SEQ ID NO: 307118 - DNA, 578 bp, Zea mays
cccctgctctaacggtaaacatttctcaattccggatattgtcttatttgtcaatggtatccctctagtggtgatggagtgtaaaagcccaacactacaaaatcctctcactgatgccattgaggatttactgaaatattccaaccaacgcaacagtgaacagcccgagggcatagaaaagctattccattacaacttaatgatggtggcaatgtcccaaaaccgggccgtagtgggagcagtgtgtgcgaaacatgatgaatatttagcttggaaagatgtttatcccgccacccccgaatccattgcccagatttttgcagtcgagaaacttatcggtgaccgtcagactttggtggccggactcctcaaacctgacattgtgctggatgtcctgcggaacttcaccatgttcagcacccacaccggcaaacttgaaaaggttctaccccgttacctccagtaccgtgccatcctcaaggcgatcgcccaacagggccggactatccgtttgcccattcatatcactgaaaagttaaacaaaatcaaaaaaacccaatcgggatctttccaacaat

SEQ ID NO: 307119 - DNA, 314 bp, Zea mays
gcgtcgtctattggcctgctagagccaaccagaagagctcgcagacactgagagtgcgtgtgagagagaggatgacgggtggcagggtactcgctgctctcctagtggacctgcaggccgtgtgccatgtcggacatcatcccagagatggcgatctgtgacttcaacttgcagccctgtggctactccatgaacgctgttcatgggcatgctttgtccaccattcatgtgaccccaaaggaccgatttgagctatgcaaggtacaaggtgctgggctccaacccggactctttctcttatggtgacctggtta

SEQ ID NO: 307120 - DNA, 303 bp, Zea mays
ccgaggtcgacttagaggatcgcgttagttcaatggattacttatcctggcccattctaccttgacccatttagtgcatggttttaacggctgtccggccggtgcaaaaggcgatcgcctaggaaagtttgtccggtaatgtagtgtgaccaggacttcgctctctctctagccaaagcttttctacgccgccatggtcagggtttacaatatccacacttggaaaattcacactaataaacttttttccctgtctctctccccaagtttagggaaaaaagagatccccgggtaccgagctcg

SEQ ID NO: 307121 - DNA, 466 bp, Zea mays
caggtcgactctagaggatcaactgttgatgttagttgtcctccttgtccctggtattttgctatccgttttagtgatgggtagttttgctaaagggggttaactaaacataaataaagttaccgggattactttattaccccggtaaatctagactaactgagacaagtcataggctgttggacgatgactgctctgattttcctgggcttgataacttaacaaataccaaacctagaccaaaccgtctttgctcgccatggtcaacattaagtcaatgaccctacaggaatagccccattcgttatcgtaccaagaaactactttaaaaaagttgctgttcagaccaatgccggtcccggcgtcgaaaatactggagcgaggatcggtacggaaatccatggacaccacatcatctgctgtgtagcccaaaatatcttttagtttcccctcggcggcggttttc

SEQ ID NO: 307122 - DNA, 246 bp, Zea mays
aggtcgactctagaggatcgtccacaggttaacttcgtccacatagagaatgccccggttggctttggcttataaacccggttcaaaggctttaactccttctgataatgccttttcgatgtcgatggtgccgcacacccggtcttacgttgcccacagtggcaaatccaccatggtgactttctttttgacaatagatcaagggtcttgggtatctacccggatccccgggaaccgagctcgaaa

SEQ ID NO: 307123 - DNA, 355 bp, Zea mays
tcacggatgcctccattggcatccattagtgcatccctcagcaattgttttcaggtaatctccgattgccagtaggtgtgcaggtaatcccgtaccctttccactgcaatccgactggcctgttctcctccggcgtgcccccccttaccatcagcgacaatgtaaaatcgtccctctggatcaaggtaaaaactatcctgattggactgacaaactagaccgggatgcgtggatccgggaagcctacaactaacaactgacataaacactacggggacaggccttagaacatcgcgttcggtgatagtgggcagagagagagtgcttgtatgctaaaacatacggacctgtcttt

SEQ ID NO: 307124 - DNA, 440 bp, Zea mays
tgcctgcaggtcgactctagaggatcttctcgttatcactaatttcccaaccctggcccgtatagcggtcaaatgttaacgctttccaaaaacctggcgcttgggaacgtacccgcagaactaactgtttggtcatttccccccgtaaattttgattcatacggctgttgaaaccgtagtagaaggtgtcgtccacctggccgggttctgaaccatctccctctccgccggtaccagtgccatttcctcgacggtaaccagggttgttgatatcttggttttgcccctcaaaagtttgttgttgcatttccccaggactagagacgggaaaactttgcagtctataaccgggaaagcgaggcatcagagcaaagagtaacaaaccgaaggccagggtgaccgctaacagagcgaataactttttcggtactaagggggaa

SEQ ID NO: 307125 - DNA, 355 bp, Zea mays
tctcaaaaggagaaatgaaattaaagaaaaacttgatccttctgctagtaaaagagcattgaaccagtttgtctgctagttaaattgagaaaatgtggctgatttccacatgtgtggggatccatgccctcctatctttaggtctcctgtggacgggctggaggatattatggacaatcaagtgatatgttcaatctacaatcttccagaccatcataagcacatagcccagccgccagttggtgttatcatgcccaagaagattgttgaagccggtgatctgaaaccacctccagtgctgtggcatgaagatagtggcaggcggcctcatgattatagcaacaggcaaaaccca

SEQ ID NO: 307126 - DNA, 382 bp, Zea mays
ccccgatagactaggtcacctaaactccggttttaggttattgattgggcaaccactggccatgccactgatcaaactaccggtgcgacaaaagggcgtgccgcaatccatgcaacgggctgcctgagtttccacctgcttatcgggcatggtcacatggaattcgtcccaattgctcatgcgatctccggctcttaactctcggggaatttcgcgggtatattccagaaaaccagtgggtttgcccatgctcgtagttacctcttgtggtgggggcgatcgccgtaaataagggatgtaagcctagtttaatgcagttcccaaccaatggagggtaacttttattgagatttgctggccatgttgctttttgttacaaact

SEQ ID NO: 307127 - DNA, 525 bp, Zea mays
gtcctcgctgaacatgattgcccctggccatgggcccttggctcgctttttccttagtcgtctgtacagtgattatcggcaatggtgtcaacaacaacctagccagaccctcaaagcagcattgatctatgcttacgcctatggcagtacagcaaccatggcccgggcgatcgcccaaggatcagccaaggccggggttgccgcctaaacaatcaactgtgaaatcgcagaaccaaacgaaattgtcgaagcaattcaggcctgtgatggtgttattgtcggttctcctaccctggggagccatgcccccgatcaaatccaatagtctcaagaaggccgaagtatctcccgcaaccaaagcttgcaggcgacgaagacgatggagcccacggctggagcggagaagctattgatttgattgaaaataagctaaaagatggcggataccgctgcggctttgaggcccgccgcatccaattgagggccaatctcgatggtctagatgtttgcacaacctctggcgca

SEQ ID NO: 307128 - DNA, 542 bp, Zea mays
gcttagataggcgtcttcgtactcgcctacctccgcggctcaaacctttcccccttctcccaattccttccgccggccgccgctccacccgtacgacgacaccatgagggagtgcatttcgatccacatcggccaggccggtatccaggtcggaaacgcgtgctgggagctgtactgccttgagcatggcattcaggctgacggtcagatgcccggtgacaagaccattgggggaggtgatgatgctttcaacaccttcttcagtgagactggtgctgggaagcacgtgccccgtgctgtttttgttgaccttgaacccactgtcatcgatgaggtgagaactggcacctaccgccagctcttccaccctgagcagctcatcagtgggaaggaggatgcagccaacatacttgcccgtggtcactacaccattggcaaggagattgttgacctgtgccttgatcgcatcaggaagcttgccgacaactgcactggtctccagggcttcctcgtcttcacgctgttggtggaggaacgggctc

SEQ ID NO: 307129 - DNA, 385 bp, Zea mays
ttttacccgtacaactccaaaaggtgaggcacagaacactgcctgctccgatataggcgctaagggtatctgaaacggatgtgcggactacaatgccactggacacttgagcatgacaaccatggcagacgacatggggcgactctccaaagtagaaattgagaagatggatgaagaagcagagagagacaaacccgctaatgaacaacatgaaacgagggtaccgggctagaatgcactggacaactatgcacacaatatgaggtgcacagagcatgacgagacgaatggtgctaaactcgcagcagatgataaaaagaagagcgaagatgctatcgaacaagccatgcaatggcgagactgcaaccaactgggcaaagccgat

SEQ ID NO: 307130 - DNA, 496 bp, Zea mays
tttcacgcgtccgcccacgcgtccgcccacgcgtccgcccacgcgtccgcggacgcgtgggttcggatatgattttatggtggagtacaagcctggcaaactcaatggcgcagctgatgctctctcacgtcgtgccgagtcaggcatggcgctcaacaccatctctacaccttcttttgagctgtttgacagtttgcgagccgaggctgcaacggacctacaaatccaggatgtgcgccagcagcttgctgctggcactgtttcaccaggttggacagaattggatgggttgctccttttcaaaggaaaagtctatgtgccagatgcctctactctttggccgatactattatccagtgcccatgacacaggacatgaaggtatccaaaagacaattcacaggttgcgggtcgtcattctataatcctcatgcattacagagggttaaggaattcataaggggtgtttcagtctaccaacgcaatataactgaaca

SEQ ID NO: 307131 - DNA, 352 bp, Zea mays
  unsure (1)..(352): unsure at all n locations
tttaattanntttttttttcaaacgggaatgccatgtgttatttatggaatcgttaggacagaccacattaacatggtaagaagaatgattattcaaaacagaaagacggaacaaaccgcctgactcatatgactttccaacaaaagtaccaaacttagacaggaccactttattagactcaaacactaatttgagaccctgtcgacatagcagcgacactgaaatgaggttccggctcatcgatggcacatagagtacgtccttcaacacgagcgtctttcctgaagttaacttcaggtagacctgtccagtacctcgaactgctgccggaacaccatttcccatcaagac

SEQ ID NO: 307132 - DNA, 399 bp, Zea mays
ggtcgactctagaggatctttccaggcgataacgaatttgttgcccgccgctggttttaccacccattttttcctggtcaatggcctgtagtccgggggcgttggcattgccttggctaccgatggtactgctggcgttaatggtgacaacggcttcttccctggcttggctcacttgccaaaaggctggttggcttagttccaacactaccctttccccccaggattgcctaccgtcccgcacggtcagaatttgggcattggtgttgggcatcacgagggtattgccctgggcttgcaacggtccgaagccttgcaagagggaagctacatccaggtaacgattgggagcgacaaaacgggcgtttaaagtttggcgatccccgggtaccgagctcg

SEQ ID NO: 307133 - DNA, 440 bp, Zea mays
ggtcgactctagaggataacacttaatggcccatcggtgatggtgtcaatcatgctactgaagatttttttactggcccgtagctgatgctctgctaagttttgttgggtaacatcggtttgaataccgatgaaattaaccaggaaattttgctggttatagatggcggaaaggtataaatgattccaaaaagatgcgccatccttgcgatagtttttcaaaactacttcacactcctggccgtgggcgatcgccgcgcggagtttttactaattgtttattttgttccccttggcggtcttcattgagtggaaaacgacagttttgcccaatcacttcctcccgattaaaaccggtaatagttacaaaaccttgggtagcatagactaccgcattgcctgagcccagggcatcggaggatcaaaatgccgttggagctg

SEQ ID NO: 307134 - DNA, 500 bp, Zea mays
aggagccgctgcggtggtactgagagaactcaactggcgcgaccctggctgcagttgtttcggtgcccgatcgacagctttggccgcaagggaattggtacagaccaactacgccaaactctcactgtggtgggctggactcagacgggcggggcgcatatcagtcataaactctgattcatcctgttgaacaacctgccaggcggcctccgtacccgctaagccttcaccgattacaaggctgataattgaagcggacatagggaaccttgaaaagtccgaaatagatagagactaacatcttaaagcaggggacagtctaccgaccatggagaaggccccatctcctgaagaatggcatcatgcttgccttgatcaatgtctgaccttggaacccatgcctatcattcctagccccaaagtcctggtagtgaatgatcagcgggaaaatcttgttgctctgtcacgggcccccgatcccctggcagtggaaataatca

SEQ ID NO: 307135 - DNA, 421 bp, Zea mays
ctacgggtggggccgtgcgatttacattaacctgcaggacggggatgctctttcagggagccagcacccttactcaacaggtggcccgcagtttgctcagcgtagtagggcgggaaaatacgggggtgcgcaaaatccgtgaaatgagtggcgccctcaagttggtagcggcgaatggcatttactcaccaatccatgcctatttgaatcgagatcaccttgaagctgaaagccgcgtacctgattacgcggaccactcgtatgttaactgctctgaccaggatctggatgtgggggaagcggccaccctagtggcaatgttgccagctcccaatctttacaaccccgtgcaggactatcaaacctccgtacaatcgcagcataaggttattgagcgcatggccatgttgggcatgattga

SEQ ID NO: 307136 - DNA, 320 bp, Zea mays
ctgggacataaatgttcgatgggggtgttaaggataggttttatcttataatttggactagctatggccgtcaccatgattaaaccaacgggagcagtattgattggagcgagcataaacccattgccatttcccctggggcgaggggtaactcaccttttataatggcgatcgccctttaatcaccaagccatggccagtatcaacgacaactatctcaaactgaaagccggttacctgtttcccgaaattgctcggcgggtaaatgctttcaccactgccaatcctaacgcccaggtgatccccgggtaccgagctcg

SEQ ID NO: 307137 - DNA, 589 bp, Zea mays
aggtcgactctagaggatcgccgcttgaaattccgtggttaacatggcaaaaatttgaggctgctgttccctcagttcccccagggaaagacctagggccctggcccgatgaatggaatcgatgggcatggtggtggcataactaaccaccgcaaaaatggtattaccagaatcttcatctgtggccttcacccaactaccaaaggcaggcatggtgggaaaattcaattcttccggttccagacattgggctaaaaagccagtggtgctggtttcaattacctctgcaatatggtggggatggcgttcatcaaggctaaattgaactggtgacgagggcataaaactagcaaaatcaaagaataattatgagatttaagaattaatttagagttatcgagattttactaaagctgatttaaaattaattagattgagattaaattaaaacttcattaaaacaagttaaagcaataattaactaatcgggccatcaatgctaccggagaaaaattgcttcaataagggtgctcagatttgtaggcatccgctgtgggaccatcccactgcattttgccatcgtaaagaa

SEQ ID NO: 307138 - DNA, 338 bp, Zea mays
ggtcgtctctaggggcgctcgaggcgcggtgagagctcaaatggctacgatcgtctcttgcagcttcttagcacatacagtcttaacgtactttggggtgggcaccgacggctttgctccggcttgaccagttgcctgctcaataagttacgccaagtgctttctagccaccgtaggctctaattgagaatctcttactttttctgccacgtgattggctaatttgcaatagccacacatgtgtgagcgaccaggcacaacaagattattatctggagtaactttgtgaatcaatccgaaaaacgttggaaataattgatctggagaatggcgatatg

SEQ ID NO: 307139 - DNA, 367 bp, Zea mays
gtggactctagaggagcgcgccagagcgtccactacgggcgttggaacaacatgagttggaattgttctttcagccccagattaattggcgtaaaaaaactattgaggccatggaggcgtttatccgttggcaacatccccaaaagggcctactgcccccgggacagtttttgccgtggagcgaccaaacggaatttatggtgcccctcactcggtggattttagaaactgcctgtcaacaaaatgtcctgtggcaacagcaattgcaaactccttttttagtttccgttaatatttctgaaaagcagttttatcatcctttacttaaaaatatggtcatggaggcgatccccgggtaccgagctcg

SEQ ID NO: 307140 - DNA, 396 bp, Zea mays
tcttttttggcttctgctccccctccgggtcgggttcgggttcgtgaggttctccggggttcgggttcgggggtgagcggatcgagatggcgacgccggatgttgagtaccgctgcttcgtcggcggcctcgcctgggccacggacgaccactccctacacaacgccttcagcacctacggcgaggtcctcgagtccaagatcatccttgatcgtgagacgcacaggtcccgcggcttcagcttagtcaccttctccacggaggaggcgatgctgatcgccatcgtgggcatgaacggcatggagctggacggtcgtaacatcaccgtcaacgaggcccagtcccgctgcggccgtggaggcttccgcggtgggaaccgtggtggccgtgaaggcg

SEQ ID NO: 307141 - DNA, 401 bp, Zea mays
aggatcgcggcaatgaacaaaagtggtctgcggggtcggggtgggggcggttatctttccggcttgaaatgggccacagtggccaaaatgcccggccagcaaaaatatgtcatctgcaatgctgacgaaggcgatcccggtgctttcatggaccgcagtgtgttggaaagtgatccccatcgcatcctcgaaggtatggcgatcgccgcctatgcagtgggggctaaccatggttacatttatgtgcgggcggaataccccctagctatccaacgactgcaaaaagcgatccaacaggctaaacgttatggcctgatgggcacccaaatttttgactctcccattgatttcaagattgatatacgagtaggagccggtgcctttgtctgcggtgaagaaac

SEQ ID NO: 307142 - DNA, 321 bp, Zea mays
ttcttatcgatctgcaagtctcgctacgtagcagtgcaataaaaaaagcagccgcaatggcgagcagcaccatggccctctcctccacggccttcgccggcaaggccgtgaacgtgccgtcttcgtccgccttcggcgaggcccgcgtgacgttgcgctagactgcggctaaggccaagcctgcggcggcttccgggagcccgtggtactgcccccaccgcgtgctgtacctgggcccactgtccggcgtgccggcgtgctacctgaccggcgtgttccgggtcgactacggctggaacagcccagggctgacggttgacc

SEQ ID NO: 307143 - DNA, 509 bp, Zea mays
caggtcgactctagaggatcagggttaacaaaaatctgccacaaaacaccagtatgagtgtagaaaaatttttttgactgttaaaagcccagagcactgcattgtctcccccgtcggtgaggggtaggggaaatagggacaaaatgccaatgatggaaccgagcaaaaaccctttccatttagttgctaggggcggcaggcgatcgaaccagtctagtactttgaatagaccccggttgaaggtgtaacccatcaccccaaataaaatccccaaaataatgaacatccagagggaatccaggggaacccgtttaaactcagtcaagctgatgatggcggactgccctcgaatcattctgagaataatagtggccatcacacagccaaatagtaggctatggtacgccaaggtttgactacgaaaacgaggatgcatttctttcccaatcagagctacccctgccaggggcgcattaaaagcggtggccaaaccggccccggctcccact

SEQ ID NO: 307144 - DNA, 413 bp, Zea mays
ttctcgcgttcgtccacgcgtccgcccacgcgtgcgaccacgcgtacgtccacgcgttcgttaagggcctggaactggtagttcttccccaggttctgtcaagagaaaaacaactattcttggtcactagagtactagtttaccgatggctaatgaggaatcaatggagctgaagataacatgggaggaagctcaagagttgcttcgccctactgctaaggccccatacattgttattgctgatggccatgagtctgaggaatatgaggagccaccggtacttggaaggaagacttattttgtagcagataaatcaggttcgaaccatcaatgggcccaatgcgaagattgttccaaatggaggaaacttccaatagatgctctgttgccctgcagatggacccgctctgaca

SEQ ID NO: 307145 - DNA, 559 bp, Zea mays
tgcccgcaggtcgtctctagaggatcgccaggataaccgcggtaaccatggttttgcccaactctaaccaggtattttccggggggctttcttttttcttgctggtttcgcggacaatattttcggtcatagtggggccgggaaaaataggggaatttattttaatctgttccagtttagtcgcagtcttcctcttcttcttcctggtgggactttggcgatcgggctagtaactgttccgcctctggacaatcttcagaaattagcagttcatgaccaaggcgggaaacggaggccaacttacggttaacggagccaatgctttccaggcgcaccatttcttcccaggcacagacctcatcctcttcttcggtctcatagcggaaagtgaccaaatccccctccagtgtcagaattttggcattttctacccacctttgttggtccctcaggtaaagactgacttcgtggccatcggtacaaagttgatagattttccggggtagcatgggcaagctcctagatagcagtgggaggacgggacggggcgaaacaggcc

SEQ ID NO: 307146 - DNA, 371 bp, Zea mays
ttcacgcgtacggtcgactcctctccctctctgccgcgccgatcgactggcccacccatcaatcccacacggtgaagaacacgctacctacgcccggcgactagcaccccaagatctaccgcatgaagctctgggccaccaacgaagtccgcgccaagagcaagttctggtacttcctgaggaagttgacgaaggttaagaagagcaacggccaggccctggccatcaacgagatcttcgagcgtaacccgacgacgatcaagaactacggcatctggctgcgctaccagagcagaaccggctaccacaacatgtacaaggagtaccgcgacacaaccctgaacggcgctgtagaacagatgtacaatgag

SEQ ID NO: 307147 - DNA, 599 bp, Zea mays
  unsure (1)..(599): unsure at all n locations
ttcttcacgcgtccggagagagttctcctgagaagcagacgagctaccagtgccgttgctcgttcctcgaggtacataacgagcagatcaatgatctgttggaaccatctcagcgtgacctacagataagagagaacgctagcaatggtatccatgttgagaacttgactgatgaatacgtgtcaacagcagatgatatcagtcagatcttgatgaagggactgtcaaacagaaaagttggtaccaccagtatgaacttaaaaagttcccgctctcatgtgatattcacctgcgttattgaagcatggagcaagggttcatcaaatgggtttagcagctcaagaactagcagaatcacctttgttgacctcgctggtcctgacactgatgaacttggtgcagcaaagcattccacataggaagaaagacatcttaagaagtctctctcaaggcttgggaactagttaacgttctttcagaaactccagagtcacataaagttgatttaccatatgagcaatcccgttgacacatgtgctngaggatacactaggtggccacaggtattttggtcatttcaaacagtcgatgacttagcc

SEQ ID NO: 307148 - DNA, 360 bp, Zea mays
ccaaaataatcaccgtctgttcccgttctggttccaacacccgcatgttgtgaatgccccggcgagcactagctttccaatctaagtaccgtaaatcgtcccccgcctgataatcccgtagttcccgaaattccgtacctaaaccgagcttccgcatttgtcttaggttgcccgtggtagcttgggccaggcggatggtcaaggattttaggccgattaaatctgggtggaccgtcaccgtttctccctcccctaccgtccattgttgccaagtcagttgccagggacatagttgccgcacattcaccttgccccaaacgtattccccccgctgacggggttgcacttggtaacttaact

SEQ ID NO: 307149 - DNA, 528 bp, Zea mays
cgcaggtcgtctctagaggatcgccatgtgcaccaagaaaaggcttaggctatattgactaggaaaaatttttagataggatctaaccagcagttcttaattcagtaatccatgcgcaatcccctccgttggctccaaaatgacgactttgcctatgttgtccagcggttgatagaagggctgattaccttattgctagcatccctattaagctttgccattgttcagctagcccccggcagttatctcgacaccctccagcaaaatccgaaaatttccccagaaaccctgcaacagctaaaagttcaatttggcttggatcaaccttggtatgtgcaatattggcgctggctcacccaagtggtgacccgtttcaattttggtgaaagctttgtctataaccgttccgttgcttccctactaatagaacggattcccgccaccctactactagccataacatctatcattctcacctgggcgatcgccattcccttgggcattgtgggggccgtacagcaaaacaca

SEQ ID NO: 307150 - DNA, 217 bp, Zea mays
tcctttcgtccggtaggcttctcctccccctggggttttttttcaggtacgctggggttccccaggcttcgggttcgtgggtgagcagatcgagatggcggcataggatgttgagtaccgctgttttttcggcggccttgcctgggccacggacgaccacttcctacacaacgctctttagcatctaccagcgaggtccaacgagttctcaaagatc

SEQ ID NO: 307151 - DNA, 441 bp, Zea mays
  unsure (1)..(441): unsure at all n locations
tccacgcgtccgcccacgcgtccgggcttgcttttctaccccgcaggccgcggcgcgtagtcttctgctctctagctcaccatcaccgtcgtcatcaatcacggtgaccttgccctcgctgctcgactggaaccgtgcctcgctcagatctgccccgttccactccccgctgttggctgttgctctgctctcatcgtcttcggccgggaaaggacgctgctgctgctggtaggctgacagcgaggaggacgagacgagggggccatggctcagatcttgctccacggcacgctccacgccaccatcttcgaggccgagtcgctctccaacccgcaccgcgccactggcggcgcccccaagttcatccgcaagcttgtgganaggatcgaggacacgtggggtgtcggcaagggcgccaccaagatatatgccaccgtcgat

SEQ ID NO: 307152 - DNA, 409 bp, Zea mays
tccacgcgtccggataattcgatcaaactctgcatcacattccattcctgtgctctcaaacttgttaaggtcagacgagccagcatacaggtactttgctgcacaagctttgtcaagtctggtttgtaatggtagcagaggaacacttctggctgtcgctaattctggggcagccattggacttgtatctttgcttggatgcgctgatgtcgatatagccgatcttttggaattatcagaggaattcatgttggtgcctaatcctgatcaaattgcattagagaggctatttagagttgatgacatcaggattggtgcaacttctagaaaatctattcctcttcttgttgatctacttaaacccattcctgaaagacctggtgcttctttttggctttgggtcttctga

SEQ ID NO: 307153 - DNA, 441 bp, Zea mays
tccacgcgtccgatccgctgcagccatgagtaagttgcagtctgagtctgtcaaggatgccatctcccagattgttggggatgccaaggagaagaataggaagttcactgagactgtggaacttcagattggtctgaagaattatgatccacagaaggacaagcgtttcagtggctctgttaagttgccccatatccctcgtcccaagatgaaggtgtgcatgcttggtgatgcccagcatgttgaggaggccgagaagatgggacttgactacatggatgttgaggctctcaagaaaatgaacaagaacaagaagcttgttaagaggcttgccaagaagtaccatgctttcttggcatcagaggccatcatcaagcagattccccgtctccttggtcctggtctcaacaaggcaggcaagttcccgaccctggttactca

SEQ ID NO: 307154 - DNA, 462 bp, Zea mays
tggacgcgtgggcgcagaaccgcgcgcacgggggagccaatggcgatcgtggccattctcgtcgcgcccaccgccagctacgtcgggccgcgccgccggtggcgcgccgcggcagcctcgtcttcggcggcgtccggggtggacctcaaagcgctgcaggccgccatcgataagaaaagcagcgatgatgttaggcaggcgctggaccagctgagagagagcggatgggccaagcggtggggctcgcagccctatgtgtcgcgccggacgacatctctacgggagctcactacccttggaatcaagaatgctgagaatttagcaattccaagtgttagaaatgatgcggcattcttgtttacagttgtgggtaccactggattcttagccgtccttgcaggccagctcctggggattggggcttctttgtcccctacttgattggagcatttatggatcgga

SEQ ID NO: 307155 - DNA, 362 bp, Zea mays
tgttattgcgttcggcagtcaccatctcccaagggggaatcgactgtcctacgagctggcgcacgcacgtgtcaagtgaccaaactgtcgacatggatagcacgcaatctgctcgtagcggtcgacttggtgggcgcggtgctgttgttggcagatgccttgacgacctcgttgggcccggatcacctgcggccactgcgaattccgcgatcgcatccctgcgtctgctacccccgcgttacggggtccggcccctacgcgttctgctggatacgctcttgaacctcaacagcgccgccagcagcgacgccgacaggctcgccttctggaactgtctcaagaacgccgccaggggcgacagc

SEQ ID NO: 307156 - DNA, 418 bp, Zea mays
tcttccacgcgtccgcccacgcgtccgcccacgcgtccgattcaggatatatccttagagaggtatcttcagcccaagcaagcacaagcagtgttctgtgttgtcatttctcgtcagatggaaaattaattgctactggaggtcacgataagaaggttttcctgtggaatgctgacactctgaaacaaaaatcaatgctagaggagcattctctgctcataactgatgtgcgcttcagcccaagcactcctcgcctcgccacatcttcatttgacaaaactgtgagggtttgggatgctgataacggggtcagactcaccatcgtagtggggaaaggagacattgggtcttcgatagccaccatcgtcgatgcagtcacgatgagcagatcctgtgctatgcatgacccccacaggcg

SEQ ID NO: 307157 - DNA, 314 bp, Zea mays
aagtaaggaagttttcattaggttacttgatattacccaaaataacaaagccgggactaagtacatacaaacccacgccaacactagaaggcgccatattattctacaggttcttgcaaatatagaacatccactagagccttaagaaagcatccaacttcatgtgcttagagccatggccgtgcgtgaataccgcaaggacacccaccgtttttatttatgacatcatgacgccaagccacgcaggggacccacacacatacatatatggctggaaatatatatgtatagggcaggtgcgattttacggatag

SEQ ID NO: 307158 - DNA, 368 bp, Zea mays
ctgacgcgtgggacaaaattggcaggtgatgcggcccatggagatagggacgccggttgccaggatggcgtgacgaatgtggcatgcggcgcagcccatggagatggggacgtcggttgccaggacggcgtgacgaaggtgacatgcggcgttgtccatggagatggggacaccgattgccatgatgacgcacctttagttgcgggtctaagcgatgacatcactgatgctatgagagaatcatggtgccagatgttatggtcgctagatcggcgaggtattggagagggaatttgacttttgagaattctgtgcgggagcaatcagcccctaccagctggaggctttggaaagctgggaagaaatcg

SEQ ID NO: 307159 - DNA, 156 bp, Zea mays
  unsure (1)..(156): unsure at all n locations
ttnngttttttttctttttttaaaggagaagggaggacacagttcgcgtccattttagtgtcgcctcgagggggagccccgtatcgtgacaccgcgcaaaaatttggggaacccaagaaagttaagcttgccgtcggactttctgatccagtcttg

SEQ ID NO: 307160 - DNA, 258 bp, Zea mays
gatgaccacgcgtccggaagcgcaagactctgggggccgttgccttgccatgcttcctcgacgcgggggtcgcctgagatcacataaacaatggtgaagggtgcagctgcgctcgcaagcagcgatggtgacaagggcaccatttctttcacccaagagggagacggccctaccatcgtgagcccaaagtggctctggtcttaagcccggccaagaggggtggcatagacacgcaccatggagacacccccaccggat

SEQ ID NO: 307161 - DNA, 399 bp, Zea mays
ctacgcgtccgcggacgcgtgggcgcaggggggaaaaaaaacatatcttgggcggcccagctccaggctgctagtctgccaccaccagtgcactcaagcaagacaagatggtgaagctcgccttggggcgggcggcgggggggtctattgctctctactccaggcactcgtggcctaacccatggacacactcctcttcgtcttcgccggcgtcggttccgccatcgcctacgggcaactgacgaatggcggcgcgctggacccggcgggccttgtggcgatcgtgaacgcacacgctctggctctgttcgtgggccttgtccttcgcagcgaacatcttgggtcgacacctgaacgctggcgtgacgttcgggcttggccgcgggcggccacattacc

SEQ ID NO: 307162 - DNA, 440 bp, Zea mays
taagaccctcaccggcaagactatcaccctgggggtttagacttctgacaccatcgacaacgtcaaggctaagacccaggacaaggagggcatccctcctgaccagcagcggcttatcttcgccggcaagcagcttgaggacggacgcacacttgctgactacaacatccagaaggagtcaaccctccacttggtgctgcgccttaggggaggcatgcagatctttgtcaagaccttgactggcaagacaaacaccctagaggtggagctctcagacacccttgacaaggtcacggcaaacaaccaggacaaggagggcatcccacctgaccagcaacctctcaactttgccgcgcagcagctggaggatgggaaggacccttgctggcctacaacattcagaaggagaggaccctccacttggtgctggtcctatgggt

SEQ ID NO: 307163 - DNA, 309 bp, Zea mays
actggacaatgcccagcaattctaccagcggggcgttttttaacttggagctggacccattcttagagatggataccaaatgcttcttcactggcggccccttcgcaacgctggacatgaagtgctttctccccggcagcttgcagcagatgctggaggcacagcagctccagatgctcgccaccgagctgaacctcggctaccaactggcgccgcctggttctgactctgccgacaataaccctcattatcagttctaaactggatgcattgccgagaagcttttctagcgaactgtgatctattgaa

SEQ ID NO: 307164 - DNA, 210 bp, Zea mays
  unsure (1)..(210): unsure at all n locations
tgntcaggattaactacttattggagatnggtttgtttataaaagatctgcgctcaataacccctaggttttccccacttctaggctacagtatagaactcgttatgaaaccaaagcttgagtctctgctaagaaccatgaagaaaccacttaaagcatgcgttgaatacccaaggcacttcagttatacacttgaggggaacaccttac

SEQ ID NO: 307165 - DNA, 288 bp, Zea mays
aggtaacaggagagatttattctatggagaaagaaagcatcaggacattctgctttgcatcacaaagctccaaacccagcatggttcaaacgaaaccccagacgacacatcaggtaggatgattggcggtaacaagggaaacaaacacacacaatgttcagaagcacagctactgctttctaccatttgctcttcctcaccagagtcccgcaggttgccacccagctcactggcactgctccgacaacggtctcccctcaagcgaccttaatctcgatggtcttgggc

SEQ ID NO: 307166 - DNA, 356 bp, Zea mays
gggaccggcggcttcgggcactggtagcacttggcgaacagcccgaacgtgtcgatctgcctcacgaagttgaccatgctggcccagccgcccagcccgaagccgaccaccagcacccacaccacgatgaacatgttgaggacgaacatccccgtccagctcggcaggaagaagggcggcttctccgcggcgttctgttgcaaaaacaaataattttttttttgcagggaaacacagagcagcagtcgtcagaatgaaatcgatcgccagaagcactgacatgaataaaagataagcatcgcggcgtgccccgccttagcttgttcctagccctatccttttcgaggcattttcac

SEQ ID NO: 307167 - DNA, 187 bp, Zea mays
cccacgcgtcctttttgacacggatgggaatgagttgccacggctagtttatgtttctcgtgaaaagaggccaggcttacagcaccacaagaaggctgcagccatgaatgctttgattaccgtatcacctgtcctgacgaatggagcttatattcttaatgtggattgtgatcactacttcaatagc

SEQ ID NO: 307168 - DNA, 334 bp, Zea mays
cccacgcgtttgtccacgcgtccgcccacgcgtccgcccacgcgtccggccgccgccgccgccgctcgtctccctgagaggtgccgggaccgaggaactggccgagtactaggtagagaatcggtttttcttgtctcagcccggggtctgctgcgtctggtggtggtgaaggggagaaattcgtgagatctgttccggatcaggcgcgactggaataggggttacacatagcttcgtcgatttgaatttgatgtactaatgggagtctaagggtggcaaaaagtctaagcagtagtcggtctatggatgtatgaagctccccttggctacagca

SEQ ID NO: 307169 - DNA, 212 bp, Zea mays
aaggtacctttttttatttagggcaatgctacgttaggtatagaatcaaagcagggtggagaaattggcgccaaacatctgacgttctatatgacaggagggtaccatagaagctaaaagacaagttttataggacaaaaactaaacctactatgttgtatggtgcataatgttggccatggtttttaaagcggtaaggcggtccaaggcgt

SEQ ID NO: 307170 - DNA, 250 bp, Zea mays
caggcacctttttaatcagaagcagaatgtgcagccctttgcataaacgataaggtgttcgctgttgcttcagaagatatggactcccttacttttggggctccacggttccttcgtcatttaatggatccaagttccaagaaaatacctgtgatggaatttgatgttgccaaggtgtgtatttttgtcatgtgctcaataattaccttgatgtgctattgcaccattttttgatgaggtttggaggagc

SEQ ID NO: 307171 - DNA, 186 bp, Zea mays
gtatatgtctctgaaagagttcccgaaagtggtgttgggtgatcctggaaggttttgacagataattacaaatttagtgtgcaactcaattaagttcacagaacggggacatatttttgtacaagttcatctggcagatcattcaaatcttgcaacagaatccaaagttgagccggtggctaatgg

SEQ ID NO: 307172 - DNA, 464 bp, Zea mays
cccacgcgttcttcagcctgccgttggtggagatgaaggcgtcgagctccttgtcctggtacagcatccctgcgtcctccggcacggcgacgtggcgcttcttaaaggcggcggcggcgacctgcgcgagacgcgtgaacgggctgcccccgggcttgaggcggacgtacagcgggtacccgaccacgaacacgacgatggagacgaacatggcgacggcggggatcccgaacccccagccccagcccacgttgtcctggatgtacaccaccaccgtcagcgccagcagcgccgccacccccatcgtgaagaagtagaggttgaagtagcgccgcttgcgctccgccacctccccggccgcctccggggtgacctgctgctccccgggctcgcggtcgaactggtcggtgccgaacgccacgacgcagggccgcagcccgccggagccgacggacgtgcagagg

SEQ ID NO: 307173 - DNA, 454 bp, Zea mays
gcacccgcgggtttcgacaagaagcgtaagctagctatggcaacggggaggaggggaagcccgctgctgcggaggtgcaagcgcgaggggtacacgcacgggctgcgcccgccgcagatggaggcgctccgggccatgtgcggcgcgctcatcccgtccctacccgtggagggcctccacgtccagcctcagcccggccgtggcaaggacgacctcgaccggttcttccgcgcgtccgccgccgacggcgccatccctgacgaggtcgcggagatggtgacccgatgcgtatgggagggagtgctgctcatgaggattgtcctgtgggtcctgagcaccaggattggcacgctggcgctgtgcgggcggctgtgcttctccgccggcaagtcgtcgttcccgtacgcctgcaggttcgcggacatgccggtggagcggagagagcgggtgctgc

SEQ ID NO: 307174 - DNA, 477 bp, Zea mays
cgcagagataggtgtcttcgtactcgcctacctccgcggctcaaacctttcccccttctcccaattccttccgccggccgccgctccacccgtacgacgacaccatgagggagtgcatttcgatccacatcggccaggccggtatccaggtcggaaacgcgtgctgggagctgtactgccttgagcatggcattcaggctgacggtcagatgcccggtgacaagaccattgggggaggtgatgatgctttcaacaccttcttcagtgagactggtgctgggaagcacgtgccccgtgctgtttttgttgaccttgaacccactgtcatcgatgaggtgagaactggcacctaccgccagctcttccaccctgagcagctcatcagtgggaaggaggatgcagccaacaactttgcccgtggtcactacaccattggcaaggagattgttgacctgtgccttgatcgcatcaggaagc

SEQ ID NO: 307175 - DNA, 402 bp, Zea mays
gggcaagataatattcctattcctgctactaacttggttgatgatccacctgttcctccatctggtttcaagtacttgaaatctctacaaattccaaaggacatcaagattccgtctagtattattggctgtgattgtgaaggaggttgtgctagcaacaaaaaatgtttgtgtgctcagcgcaatggttctgatctgccttatgtatcatataagaacattggcaggttggtggagccgaaagcagttgtatttgaatgtggggctaactgcagctgcaaccatgattgtgtaaacagaacatctcaacaaggtttgcagtaccgcttagaggtatttaagacagcttcaaaaggatggggagtcaggacttgggacactatcctccctggggctcccatc

SEQ ID NO: 307176 - DNA, 386 bp, Zea mays
cggaagtttgttatatttttccagaattaccggcaagccactgtggcaattcagtgttcttggagacagaagcttgcaagaaaggagctaaggaaactcaaaatggctgcaaatgaagctggtgcactgcgtgaggcaaagaataagcttgagaaaaagatggatgatcttgctttaagacttacccttgaaaggagactgcgggcttccagtgaagagtcaaaatcagtagaaatattgaagcgtgacaaaataattgaatcattaagtgcagaatgtgctgccgctaagtcagctgctcaaaatgaacatgccaaaaaattgctgctccaaaagcagttggatgattctttgagagagattactatgttgcagagtaaaaagat

SEQ ID NO: 307177 - DNA, 414 bp, Zea mays
cccacgcgttcttccacgcgtccgcccacgcgtccgcccacgcgtccgcgacttcccccaatttctttccacgcctcttcctctctttgccctcgagccccctgcccctgcgcggccttcaaatcatcccgctgtttccccgccctctccttggcgcgcagctccggagcgccgggcgccgggtgggtccagcttcttggatctcgtgcgggactgattggcccgtcagtcccggcaggtggtgctctcgtgccgattccgagtttccaattgcttgcttggtgatggctgtagcttgtcccggtgcgccggctgcgtgaaggttggattgggtctgtcggcgacagaattggatctggcgagctttccgaagcccggagcggcgtgtctgtcgggactgatagccgccggcgc

SEQ ID NO: 307178 - DNA, 375 bp, Zea mays
cggacgcgtgggcggacgcatgggcgcacgcgtgggcgagaatctaaagtgaccggacgctagaccttccttgctgatcggcgacacggtccatccctccctcgctcgctagggttccttttcgtccatggatcagagcttcgggaatctcggggccggagctgggagcagcagcgggggctccaactccaaggcggcggcagccgccgtgtcctcctcgactttcctgcagctgccgctgtcgacggcgtcccccgcgtactacggcgcgccgctcgcgctcctgcaccacgccgtcgtggcccgtctgtcgtcgcagcaacaccagcagcagcagcaccaccaccactacgccaggcacggcgccaagatgtc

SEQ ID NO: 307179 - DNA, 394 bp, Zea mays
gccttctttgcgaccgcccacgctttcggtcgggagcgtatcgggcattgcagctcgaacctcgtgacacagcgcggccgctctcaggggacaccgaaggaacactgcagcctctaccacgggcctcgttgggacgctgcgatcgagcacgttctgggggtttgggtccctgacttgtccacaacactgtggagggaccagcacgtgctatgatggctgaactatgtgaccatgatggggcaagtgcggctaactgcatctcctgtgctcggatggcgctgggaaacatcctaggctactcctctggctccacgaacaattggcacaagtgggttcccttgcttaaaacgagcgcctgctgtgaggcctgtgcgaacctgaaaggggcatttct

SEQ ID NO: 307180 - DNA, 424 bp, Zea mays
tctgtgatagtttaacaccatcttcgaatcatgattccattaccgagggagtggactctagtagcaaaattaatttttcgtatgatgaagaacagaaggtctggatcccacaagataaaaaggataaaattgtcttgattcttgttcagaggcagaaagaactgcaagcacatatgcatgactggacagactgggcccagcagaaagtgatgcaggtcgcacaccgacttgcaaaggagaaggatgaacttcagtcactcaggaaagagaaggaagaggctgaccgcctgcaagaggagaggcaccatttggaagagagtactcggaaaaagcttctgagatggagtctgcaatttctagggcaaatgctcagctggagaaagcagaagcttctgctcgcagacgtgaggtttgagaatgcaca

SEQ ID NO: 307181 - DNA, 476 bp, Zea mays
  unsure (1)..(476): unsure at all n locations
tcccacgcgtccgcgaactcgtaaatcttgtgttcctgtgtggctgctttcgttagatctctcggctatgtctatatgatcgtcttggccagcatctctgggttcttttcgcggccgagaggaaacttactaactgatcgagtgtgccaggcatcaatctgtcgaatcgagactcgtcgctttttcatgtcttcagattttgtccatctgtcaaatcatgtggaaaaattggcatatcttcttgtattctcttctgtcctttttaatgcctccagcggattaatttctagctagttccgttccattgatctgccttcagataatataacttaaattctcgctttcttatgcaagaactaaattacttgcatttcagctgagatctccagcatggngaggggacaggttggagatcacgaggatcgagaacaacacgagccggcaggtcacccttctgcagcgccgcatgggctcct

SEQ ID NO: 307182 - DNA, 434 bp, Zea mays
tcgtccacgcgtccgcccacgcgtccgcccacgcgtccgtgttcctaccggtcgatccgcgtccgtccgtgtactgcaggcgctaccgtcatgctgaccaacccattgccattggttttgtttcttctctctctctctcgctctcgttggttatggttcgtgcgtgcctgcaggcggcggtgaccgtgagccggatgatggcgccgttcaagcacgtgcggggcctggagttcgcggcggacgtcgggtacgtggacttcctgtcccgcgtgaaccgggtggaggaaggaggcccggcgcaacggcagctgggacgcgccgcacccgtggctcaacctcttcgtctccgcgcgcgacatcgtcgacttcgacgcgccgtcataagggcatgctcgccgacggcatcgacgggcccatgctcgtctaccctatgc

SEQ ID NO: 307183 - DNA, 423 bp, Zea mays
cccacgcgtccggtcaccaaccaggattcatgtcacatgtgcgctcgtgcgcgaaacaacacccgctggaagggtacataagggagtttgctcaacttggattaaggtaacttattgatgttatgattttctttatgtgtttattgcctggctgatatatcaatgttttgatctctctgttctcatctggcaactgaagattatagagctgtctgttttcatataatcaatttttgaccatttaatatttgtttctgcaaaccatgcttacccctaacaattgccttggcatttggaaaagaatgtaactcttgctttacagcccctgcttcccaatttgtactttttaagtcagtccactagaacgattttcatggttgagctttacctgagttgcttggccatcccaattggatttgcaga

SEQ ID NO: 307184 - DNA, 471 bp, Zea mays
ttccacgcgtccgcccacgcgtccgctaaggagttatgcatcaattttatatcttatgctcccggataacttccaaatgattttacggggaaaaaagattgaccaccataacattatcaatgatctcatgctaaagaagcaacttacttataatccaacagtgggcgatggacttccaaaggatatgcatgtggcagctaaggtgacaattggttttgttaaggatgcgagacaacatattgatattcaagggtttaatgtttaccacaagaatcgcctaataaagcctttttggagagtatggacttctgctggagttgctggccgtggtatcataggtgtactggaagtaaattttgtagaaccagctcatgacaagcaggactttgaacgcacaaattgccttgcaagactcgaagcacgattaaaccgaatgcagaagaaatattgggctgataatcggcatcgaat

SEQ ID NO: 307185 - DNA, 306 bp, Zea mays
tagataagcgaaacagtcgtgttctgctgctgcttccgcggaggttcgcttggataggcatctccaagcttggtgggacaatcctagctggaccgacgagccaccagaaataaaggtgaatgtaccagaaggatccctttgcaacctcaatctgagatttaaggccggattaccaccagatgcagtatacaatatcataattgatccagagaacaaaagggtgttcaagaatattaaggaagtaatatcaaggaaagtcttgctcgacgaaggatcaagacaagtagtcgaagtggagcaggcagc

SEQ ID NO: 307186 - DNA, 342 bp, Zea mays
tcggacgcgtgggcggacgcgtgggcggacgcgtgggcggacgcgtggggtccgtccgtccgtcgtcaccagcctcctccctcgcgcccaccgccgggatccgtccctcctcgtctgcgcccgcctcggtctagatttctgagaaaatggcgagaagtgcgggaactaggaggcgtgtggctcgccagctcaagtccacacatcccattccttcataccgatggaagtcaaagcccatgaaaaagccgatgaaaaaatccaaccgaaagcaagtgttgccaaccttgcaaaagatggactgggaagatgccaattgctctgtgtgcctggaatacccacata

SEQ ID NO: 307187 - DNA, 471 bp, Zea mays
cagcccgccgtcgtgtacaccgtcttcctccccgtgctggagggctcattccgtgccgttcttcaggggaacgccgacgacgagctggagatctgcctggagagcggcgacccggacgtggaatctttccaaggctcccatctggtcttcgttggcgccggatcggacccgttcgaggtcatcacaagttcagtcaaggctgtcgagaggcacttgcagacgttctctcacagggagaagaaaaagatgccagacattctgaactggtttggctggtgcacgtgggacgcgttctacaccaatgtcaccgcccagggagtgaagcaaggattgcagagcttggagaaaggcggggtttctcctaggttcgtcataatcgacgacggatggcagtccgtcgccatggaccctgcgggactcgcttgactatctgacaactcagccaacttggcgaacaggctgactcacatc

SEQ ID NO: 307188 - DNA, 424 bp, Zea mays
aagctggcacgcctgcaggcaccgctgccgtgaattccggtgatcgacaccacgcgtgttcccatcatgttatcacacccgtgggaagaggattatttacattgcagaggtcgctcgttgctcttaacacacaccttgctttaaacacacacgtggcggagcatgcggcctctgtagcctgcatcgttatgacatgcaacctataccatggtatggaccggatgtcgaccatgaccttcacggctgacttccctcatgtctagaggtatttgcggaccatggtttaccagactaacttcaaaaaggtgattgttgaggtgaaccacggagacgccgcaccttatatttcgaaagaggctgcttcttctaaggagccaaaggcaaaagccgtgctgaacgacgcctcaaaggaggcccccaagcc

SEQ ID NO: 307189 - DNA, 410 bp, Zea mays
ctggcgtcttgcttgtccttgttcttttcccacccggctacccccggcgtcgccgccgctttccccgtggtttcagagctccagtcggctagctaggccgcctggctaatctccctgccttctataagtacagagatcagggaagcggcacttcatccactgactgaccgctcatggcgaaggtccacctgtacgtcgccgaggcctggcgccggcgtcctcgcgctcgccaccccggtcctcggccggtgaccccgacatgctgcaggacgtctgcccggctgactacgcctcctccgtgaagctgaacgggttcgcgtgcaaggcgaacttttcggcggacgacttcttcttcgacgggctgaggaacccgggcacaccaaacaacccggcgatcccctggtgacggc

SEQ ID NO: 307190 - DNA, 339 bp, Zea mays
ttatattttttttttttttttttttttttttggggtttttggattcaactggggggagtgttcaaaacacgaaaatccgtacagattcacacaggggaagcaaggaggttcgacggcacaatggagataagggtggcagcagagggactcaaacgttcagcagctacagctagtacggtttcttcacgggaagaaggaaacaagagctgcattgcattgccttactaatatgcaacgcacggtttccttcttccgagcggggtttactataccattaccgtaggctttactcacttggccattatgaccttgacgaactccttgtagttgatctggcca

SEQ ID NO: 307191 - DNA, 442 bp, Zea mays
  unsure (1)..(442): unsure at all n locations
tttcggacgcgtgggcggacgcgtgggcgggcgtcagggaatgcctggaggaggtcggccacatcacgcgcctcgccgacccgcgggacgcctggctgcccatcaccgagtccaggagcggcaacgcctactacgccgcgttccacaacctcagctccggcatcggcttccaggcgctcgtgctccccacggccttcgcatcgctcggatggacgtgggcgatcatctgcctgaccctggcgttcgggtggcagctctaccacgctgtggctgctcgtcaggctccacgagcctgtcgcgggcgccacccgctacagccgatacatgcacctcgcaccacagttttcggcgagagatgggtcaagatcctggcgctgctccggtngatgtacctgtcgggggnggatctgcacggcgctcatatcgtcggcggcggcagatg

SEQ ID NO: 307192 - DNA, 372 bp, Zea mays
caaatgtctctctactctgggttatcctgtaattatgttaacggtatcggcagcaacaagtgggtgtatatacaagcgtcgtctcatctcttctagtttcttctacctttacacaccccgctaactgtttgtcagacctggtagaccattcctacctcaagagtggaggcatggggtatgctcgcggcgtacgcagggccacggctgttcttcctcaagaactcgtacaacaagtttatcacgacccgctttacgaaacccgacccgctcttcgccttcatgtacgagcgtcccaggatgaaggacatgcccgcctccctggcgtccatgagctcctgcagctcgcgccgcaccttgctgtccacctgggcg

SEQ ID NO: 307193 - DNA, 553 bp, Zea mays
ttttaccacaagcacatggagcagctcggccagctcggcgccatcgccgccggcgcgtacgctctgcacgagaagcacaaggccaagaaggacccggagaacgagcacggccaccgggtcatggaggaggtggccggcccaaccgccgtggtctcccgtcgggttcgttttttacgagccttaggagagacaagctcggcatgaaaaactcctcacaactggttccgttgcaaggttgtctttaactctatgaaccctggtcgtgtgccgcatcgattcttttttggtttccgtagccccaaggatgttggagtgaatagcacgaaggaggactttcgtcggttttttctgcttgggccttcgtttgcttcggtgggggatttggatcatttggaagctaaatttggagaaatttcgcttttctctgtctcctttacccttactcgacatgctatggattcgattattggtagccttgcagatttcgttaatgctctggttggcttgatggaactgttcaatttgatgagagattgaaccccatgatgacagt

SEQ ID NO: 307194 - DNA, 509 bp, Zea mays
tcgcggacgcgtgggccggcaccgcgggacagtctgctctcgtcccgctgcagcccgtccccgacccggaaccctagcgactgccattgcccacgcgccgctcgcccgatgaacggtgggggctctgggctggcgcccaacgccgcgcacaccgcggacgaggtcttccgcgactacaaaggccgacgcgccggcatgatcaaggccctcaccactgatgtggagaggttcttcaaactctgtgaccctggtgagtgcgctcgatctctttggttcctcgccccaggatgtggagtgatagccgaggaggctttcgtggtttttctgcttgggcttcgttgcttcggtgggggattggatcattggaagctaaatttggagaaatttcccttttttctgtctcctctaccctcactcgacatgctatggattcgattattggtagccttgcagattttcgttatgctctggttggcttgatggagctgttcaatttggtgagagattga

SEQ ID NO: 307195 - DNA, 351 bp, Zea mays
atttttaggacgagagagtacattacaaatattagtcgttttagcatttgaatagatttatataatatttaatatatgtgttttatatatgtctagatttattgtcatttatttgaatataaatataaaatttaagggctaaaacaaataatattttaggatgtagggagtatttgttttctccattacattcctgggatttttttcccttttgaacgggaaggtgaacctatttttaattgactgaaaacagaatctgaagacgatcagctcggcacacttgttcgtggggcggcagcccagagcatggagagtttgaaggccatagcggataggcttcaggttaggatt

SEQ ID NO: 307196 - DNA, 267 bp, Zea mays
  unsure (1)..(267): unsure at all n locations
tctcacgcgtccgcccacgcgtccggcgcgacgatggaggcgccgcggtggtgcacgcggaccgggtaccggcggccgtagccgaccatgtagctgagccgcagcgggttgcggcccaggatgtagtcggcctgcgagcgcgccagggccagcaggtcggacggcgcggcgggggcgcccgcggggcagcggaggaggccgccgccgaggtagcgcgagtaggctgtgagagngaaggcggcgctggagacgcttgaagggttgttt

SEQ ID NO: 307197 - DNA, 319 bp, Zea mays
cccacgcgtccgttttctcgtccgcccacgcgtccgccaccatgaccaccgtcggctacggcgacctgcacgcccagaacaacgtcgagatgatcttcaacattttctacatgctcttcaacctcgggctcaccgcctacctcatcggcaacatgaccaacctcgtcgtcgagggcacccgccgcaccatggagtttaggaacagcatcagggcggcgtcgagcttcgtgggccggaaccacctgcctccgcggctgaagcagcagatcctggcctacatgtgcctcaagttcagggcggagagcctgaaccagcagca

SEQ ID NO: 307198 - DNA, 510 bp, Zea mays
atctacctcttgtttcccgcctcaactgccgcctgtcgattagccgctcggagccccaattctatacggctcttcgatctgggatccgctagattcgccggggcggttatgaggaggtgatgggagcgatggcggaggtggtgcaagaggggtgcgtggagaatcggcagcccctggcggcttcgagctcgtccgtgtcggatggcagcagctgtggcggcggagggcgggcggggacgtcgccgccggtgtcaagctccgggaattccatctccgttcttagacgaacaactggaccgataagaagagctaagggtggctggacaccagaagaggatgaaacactgcagaaggcagttgtagctttcaagggcagaaattggaaaaaaatagctgaattctttcaggacaggactgaggttcaatgtttgcatcgttggcagaaggttcttaatccggagcttatcaaaggcccttggactcaagaggaagatgaaaaaatcattgacc

SEQ ID NO: 307199 - DNA, 380 bp, Zea mays
gcgaaaggttgtttgagctggatcagatccggcaggagcttaacgctaccagcaagaagatcggctagctcaaagccagcaagcaagaagaggaagcgaagaagctcatggagagcacagacgaaattaagaaaaggttgacaggcaaagaagttgaggtgtaggaggccaagagcaccctcgacgccaaggtcacgacgattggcaacatcgagcatgagtgcgtgcctgacagcaacgacgaggcacacaataaaattgtacgggcatttggagagaagagagtcgaggataacttgaagaaccacgtggacctttgcagataaaagttacatggatattgtcatcaaaggtggcgtatgggtcggtcatttactctc

SEQ ID NO: 307200 - DNA, 348 bp, Zea mays
cttcaccaaagcttctcttggatggctttggcataggaggcttgcacatgttgggatgagcacactcaagaaggtattaaagaaagacatggttagaggattaaaggatgtggtgtttgaaaaagacaagccatgtaatgcatgtcaagctggaaagcaagttgctaatacacatcctactaatgctttcatgtcaacatcaaggccactggaactacttcatatggatttatttggacctacaaattatgtaagtgccggtggcaacctctactgtctagtgattgttgatgacttctcaagatacacttgggtgttctttcgccatgacaaatctgaagttgcatc

SEQ ID NO: 307201 - DNA, 376 bp, Zea mays
cccacgcgttcgtttctttggcagtgggcactgtcgaagtagagataagtcagctgaggaacacaagaaagccatgaaagacatagttgatggccactttcgggcgttagtttctcaacttcttcaggctgaaaaggtaccattagttgatgggagtggcaaagaaagttggctagatatagttacttctctgtcttgggaagctgcatctcttttgaagccagataccaccagcaaaggcggtcagatggaccctggtggctatgttaaggtgaaatgcttagcttgtggccacccaagtgaaagtttcgttgtaaaaggagttgtttgtaagaagaatgttgctcaccggcgtatgtcatcaaaaaaggaaaag

SEQ ID NO: 307202 - DNA, 432 bp, Zea mays
gcggtgaggagaggaagaagaagaacccagccaaatcctcagtcttcaggctgctcacagctcgtgccgtccactctcccccgaggcagtctcttgcgttcgctgctcgacatggcgctccaggcggcgacgtcctttctcccctcggccctctccgcgcgcaaggaggtgagcggcgcagttctgcgttttccagcgagcaccgtgctgttctttcgattcgcgctcagcttcagtgtccgagctgccaagtggcggctctggtaagttgcggttgcaatgttgatgctgtgtgcaggggtcggtgaaggactcggcgtcgttcttgggtgttcgtctcgcggcggatggcctcaagctggacaccaccgctctgggcctacgcaccgtgagggtgagcaggtcggcggacatccgcgcgcagacggcagc

SEQ ID NO: 307203 - DNA, 440 bp, Zea mays
ccctttttagcccttacaggaatttattttgtacaggcctcaacgagctagcctgagacaagaacactggaaccatggtttcaaaatcatattcaaatctgctagacatgaccccaggagatgggtttgactttcgacgaccttttaagtctcttcctcgtgttgtaacttctcctagcattatatctgaccatgattgggattccataagtgatggtgattcagttggttcagcattttctatcgagaggaaaataattgtcgccaacttccttccgctgaattgtacaagagatgaaaccggggaactgtccttctcattggatcatgattcactactcatgcaacttaaagatgggttttcaaatgagactgatgctgtgtatgtaggcagtttgaaggttcatgtagatcccagggagcaggaccaagttgcacag

SEQ ID NO: 307204 - DNA, 365 bp, Zea mays
cggtcttgtgggcgcggcatcaacaaggcactatcttctccgctcaatcatcaatggccatcccacactacagagcttggtactgacagatgctgatggccaaggcacattgtgcatgggggcaaagcagctggaggagttcagagagaaccagttgtcgacctcggcatgttccaacaggactcaggtcccagcctgcaatatggagcatacttgagcttcatgttgcaggctgggacctgaagctcaagtatgctccatatgttgaactgcctggtggtatggcgttgcatggcgctactgtggaggctatcaaacccttacctgagggaagcaatggaagccaccctaaccgcaaggaagcc

SEQ ID NO: 307205 - DNA, 430 bp, Zea mays
  unsure (1)..(430): unsure at all n locations
tggtcgcgtgggtcacgacctcattacgaacaaggagtcgcgcgaggccagccggagaggcagaggagcagagcaagaagaggatgtgggggagatcagagaggaggaagcggaccttgtgctggaggaggacgaggaggcgggcgtgcaccgcatccacctcctggagttccccggcggcgcggaggcgttcgagctggccgccaagttctgctacggcgtgaagctcgacctcacgccggccacggccgcgccgctgcgctgcgccgccgagcgcctcggcatgtctgacgaccactcggacgacaacctcgtctcccgcgccgaccggttcatttcgcaaaccgtgctgaggaacccagcggatgccatccgcgtcctcaagtctggcgagggcctgctccccntgnccgacgacctcgcctttgtg

SEQ ID NO: 307206 - DNA, 469 bp, Zea mays
  unsure (1)..(469): unsure at all n locations
tctctcccctgcaaacctttcaatccattgttaggggaaacctatgaagctgattaccctgaaaatggaatccgtttcttttctgaaaaggtgtattctttgttaaaaagtcacccctttttcgttgctgttaaatcataagaggtgggcttggtcccctgacaagacaaattaatgggctggcaatattaactgaattatgcagtgtgactagtttctaaatcagtattttaattcaatgaaaactaaatcagtatttcagttgaaaaaaataaatattgctgtttcatgacctcagtagaaactatagctggagttcatgttatgatgctgtatttgttgcgataggttagtcatcatccaatggtcatggcttgtcattgtgaaggaaagggtggaaattttgnggagacagcaatgtaagagcaagttctgggggcaaacaatccagctggacctgttgggtgtg

SEQ ID NO: 307207 - DNA, 365 bp, Zea mays
tcttgccttgtccgtcttctgccgtgccgctttcgatcaggagtgtgttccgcggactgctgacaagagattggtcaggcaggtctctgcagagtgcaggggccttccactggctctgaaggttattggtgcgtcattgcgcgaccagcctcctaagatctggctcagcgccaagaaccggctgtctcgaggagaggctatttccgactcccatgagaccaagcttctagagaggatggcggcaagtgtcgagtgcttgtcggagaaggtcagagactgcttccttgatctgggatgctttccggtggacaagaagatcccctttgattgtttgatcaacatctgatcggaggttcatgatcttt

SEQ ID NO: 307208 - DNA, 311 bp, Zea mays
ttgtacgcgtggggaaccagtgcgagtccctggtgtgcctgctcgcctccgcgttcccggcccagctggtgcgcggcgctggcggcggcgacggggacggggacggcgacgagctccgcaagttccggcgctgggcgttcccgtcgcacaacgcgacggtgtcggtgttctggtcaccgatcctagtgaacggcacggagaggcccaagtcgccggcggcggcgggagggctggaccacaaccggatctacttcgaccagcccgacgagcggtgggtggaggcggtcccgggattggagaacaggcgggcc

SEQ ID NO: 307209 - DNA, 431 bp, Zea mays
tctcccacgcgtccgcccacgcgtccgcttcggctgacaaattagttttataatccgactacatttaatacccggaacggaggttcaaacattcgatggaatatgagctaaattttagtttggggtaaccaaacaccccctatgataacagtgcagcagtcatcgagaggtaggcaggtagctaagctaggcagttaactgtggtggacaggactagtaataatcgaactggatgaacaaaacaaaacaactgagaactgacgacgaccatgcatgcatggccatggccatggggcgcggtgcatgcacgccgcaattgcaatgcagctgggcatggggggcgcggtggagacgctgtgcgggcaggcgtacggcgcgcacaagtacgacatgctgggcatctacttgcagcgctccaccatcctgctgat

SEQ ID NO: 307210 - DNA, 248 bp, Zea mays
ggtgataacaaagacggaaacccacctatctacaggaccgagaacggaatcggggatattgaaaccaaagagactccaatacccacgggcggctgcgcgaaatgactacataatggttagattacattcggcgccacagcgcttgtcttaacgaatcaagagacttgagatctaatgtgccaggctacttagcttggtctttggtggtcaacttcgaatggtcagccggctccatcgaacgtgacggc

SEQ ID NO: 307211 - DNA, 741 bp, Zea mays
gtttagagggagcgccctgcccaagcaaagagaaaccgcggcgcgagaagagggaggaagggcagacgggcgagcaggatgagagagatcatcagcatccacatcggccaggccgggatccaggtcggcaacgcctgctgggagctctactgcctcgagcacggcatcgagcccgatggcaccatgcccagtgatacctcggttggcgtcgcacatgatgccttcaacacgttcttcagcgagaccggttctggcaagcatgtgccgagggccatcttcgtcgaccttgaacccactgtcattgatgaggttcgcactggctcgtaccggcaacttttccacccagagcagtttattgttggcaaggaagactcagctaacaactttgcccgtggccactacactgttggtaaggagatttgttattttttgcttgaccgtgtgcgcaagcttgcattcaactggacttgggctttttggatttcttgtttaaatactttttttgttggattttttctaacttgttatttttttttggattgctctttattatatattttctttttaattttttttttttcatttttctttttttttttttttattgtttttattttttttttttattttttatacatttgttattttctttttttttcttattatattttttctttttatattttctttttttttttttatttttcttcttctttttcttacctttattatttttttatt

SEQ ID NO: 307212 - DNA, 393 bp, Zea mays
tcgcttggagatagttgtgatatgcaaggtgataccttttgctagctacattttttgcactgaattagttaatatgtaattgagtgtatttcaatatggcaaacccattggtaggttgattacaaccggcgcacactgattgctccaaatcatacgtgtacccacatgttgaactttgctctaagggaagtacttggtgatcatgttgaccagaagggttcaattgttctaccagagaagctaagatttgatttctctcatggaaaacctgtccagcctgaagatctgaggaaaatcgagttcatagtgaaccagcaaataaaggacgagctgggtgtgtatgcacttgaaataaaactagaggatgcgaagcgcataaatggtcttcgtgct

SEQ ID NO: 307213 - DNA, 427 bp, Zea mays
cggacgcgtgggttgggtttcccttcctcctgatattgtttaggagaagaatatatttatggagggatgacacttccatttgactttgtagtggtcttaggatccttatcttaacactgatgctgggactatgtctccattcgaacatggtgaagtgttcgtactggatgatggtggcgaggtggacttggatcttggtaattacgagagatttttggacattaaacttactcgggacaataatataaccactggaaagatctatcagtctgtaattgacaaggagaggaaaggggaatatttgggaaagactgtccaggttgtgccacacatcacaaatgccatacaggagtggatcgagcgtgttgctaagataccagttgatggcaaggagggacctgctgatgtctgtgtgatagaattgggg

SEQ ID NO: 307214 - DNA, 378 bp, Zea mays
tcgctccactccacctgccggtgcgcgcgtctcaggcctctccagttccccactctcgctctgatgagggacgcggtggtggtgatggcggtgcccggaggcggaggcgggggcggaggatcggcctcgtcggcggcggcggcgccgtgcgcggcctgcaagctgctgcggcgccggtgcgcggcgggctgcgtcttcgcgccctacttcccgcccggggagccgcacaagttcgccaacgtgcacaaggtcttcggggccagcaatgtcagcaagctgctccaggagatcccggcgcagcaccgaggggacgcggtgagcagcctggtgtacgaggccaacgcgcgcgtcagggacccggtgtacggctgcgtgggc

SEQ ID NO: 307215 - DNA, 459 bp, Zea mays
tcgcccacgcgtccggtgcgactccgtgtctgaaggattggtgctcacgtggcgacatccaaagccagccacaagataggcacacagcgctgctccgcaccaagaatgacgccaagtgtcacgccctggattcctctggcacccaccctcctattagtactctgcactggacttgcagcgctggtgacctgacttcccccacatactcatactgacagtggatccatcactgcaacttcatggattataattttgacaccagcgtcctcgacgaggacgtcgccgggagaggaggcagggaagggagctgcccgccagcatgggccagggcgtgcgacgggtgccgcgcagcccccagcgtggtgtactgccatgcggacaccgcgtacctgtgcgcgtcatgcaactcgcgggtgcatgccgccaatcgcgtggcctcgcgccatgagcgcgtgcgcg

SEQ ID NO: 307216 - DNA, 259 bp, Zea mays
cccacgcgtccggttggcagtggagggggtccaactcatctggccatgttatctcaggcaccagacacgatacatggatcacttcgtgtcacagatcacggggaggttattgagcactgctttggagaggagctcttgtgcttcagaactatgcaacgctacactgctgctactatggagcatggcatgcatcctccgattacccctaagccagaatggcatgctctgatggatgaaatggctgttgtagcaactaaag

SEQ ID NO: 307217 - DNA, 422 bp, Zea mays
gaaccgaccgactatcacgaggtccaaaaaaataaccaccacaaaagtaccaaccaaccacaaataaagtttaagcggacacaccgcaccaactgacgataactctcggcagcaactgggccagccagcaactgcagcacactcaagactgacaacaaaccgcttagtccacctcctcgatcttggggccagggccgccgctgccggcaggggcgtcctcgtccatgccgccagcgccgcccatgtcttcacccgcgccctggtacatcttggcgatgatggggttgcagaggctctccagctccttcatcttgtcctcgaactcgtccgcctcggcgagctggttggcgtccagccagctgatggccgcgtcgatggcgtcctcgatcttcttcttgtcatcggccggcagcttggacgca

SEQ ID NO: 307218 - DNA, 440 bp, Zea mays
aatagccgaaaccttagcggccttgcgccggccatggcggcaccgcgcgccaccaagcgccccaagtttgcctccggcgcggcgccgcctcagcgaggggaggacgactacgtgccggggaacatagtagagattgagctcttcaacttcatgacctacgaccgtctcgtctgctgccccggcccgcgcctcaacctcgtcgtcgggcccaacgggtctgggaagagctcgctcgtctgcgccatcgccctcggtctcgccggagaccccagcattctcgggagggcgtccagcgtgggtgcatttgtcaagagaggggaggttgccgggcacgtcaagatatctctccgcggggatacagctgacgacaagatctgcgttactaggaaaattgatacgaagaacaagtccgagtggctcctcaacggtgcaactgtcac

SEQ ID NO: 307219 - DNA, 508 bp, Zea mays
cccacgcgtttgggtcttctaactgatcatatttctgaaaatgttgactacaaggtgattgtattctgtacaacagcaaaagtaacaagccttgttgctgagcttctgtctgagttgaagttgaatgtacgtgagatccactccagaaaacctcaaagctacagaactaggatatcgaaagaatttaaggagtcaaagggtctcattcttgttagctctgatgtatctgccaggggtgttgattatcccaatgtcacactagttgtgcagttgggggtgccaactgacagagagcaatatattcatcgacttggtagaactggtcgcagaggcaatgaggggacaggaatcttactattggcaccatgggaagaatatttccttaggagcatcaatgacttgcctattacagaggcaacacaaccattaattgatctggatactaagaaaaagaggtttctattcttttgataaacccatctgggttttatcttcatcagcagacatg

SEQ ID NO: 307220 - DNA, 371 bp, Zea mays
aattaattatggtggatgaacgaagaagaagaagaacaagaaatggctgcttcttgcactgcatgttaagtcacgtacaggttcgtgaggagcgggagcggggagcgggacctgctcgccttcgccgtgctgccggtgctcctcctccgcctcctctacagccagctctggatcaccgtgtcccgccaccagacggcccggagcaggcacaggatcgtcaacaagagcctcgacttcgagcaggtcgacagggagaggaactgggacgaccagatcctgctgacggcgctgctcttctacgcggtgaacgcggcggtgccggtggcgcagtcggtgccgtggtgggactcgagggggctgctggtggcggt

SEQ ID NO: 307221 - DNA, 456 bp, Zea mays
ctctacaagaaagctaacacaagaaactctggaaaagtgtctgaggagcacttgagtgagaggtgaaccttcgtattcttcgtgtcttgcattgatatgaaatttaaaattgcaatcatatatcaatatatcatactagtattattttctttaagtaagtcttgagctatgcgttatacctatcgattcctcattattttcaaattctgaaaatcaatattatggtatcccatataatatacaccattgcagtgttctcttttgagtgtagagaactagagataatagaattatcttgtttgaaaacatttgcagtgttgggagcttctgtgaacgccactttggaagagaagttgttgactattatgttgatccatttgtagctggaacaagtgcaggagatccagagtcactatctattcgtcatgcattcccagcattgtggaatttggaaag

SEQ ID NO: 307222 - DNA, 352 bp, Zea mays
aaaccatgcatttttattgtttcaccacaattccatcttctcttattcgttctgacagcagcaggagaccccacgagtggcccccacctgacagtggacaccgtcagacaaatgatgggttaaagaaaccaggaaggctacattttcttacacagaaaggagctccatcagatcgaagggatttcattcggacaacatcaacaaagctcccacattaaacgaagaaaccccgtgatggcgccggcccagataagacgctgcttgcatgctggcgcgtggatgctcgctcaggcgtccacgacctcgtcgtccttggacgcaatcacgaactcctcgcgcagtgccggcgaca

SEQ ID NO: 307223 - DNA, 460 bp, Zea mays
cccacgcgtccgtctacgcgtccgcccacgcgtccgcccacgcgtgcggcgaaggccatcttctcagctatagccaacgagggcgtgactcacttctgtggggcaccggtcgtcctgaacaccatcatcaacgcccatgcagccgacacgattctccccctacctcgtgtcgtcaacgtcatgaccgctggcgctgctccgccaccctctgtcctggcggcaatgtcgaagcttgggttccgcatcactcacacctacggcctgtcggagacctatggaccatccacggtgtgcgcctggaagccggaatgggacaggctgccagccgacgagcgcgcccggctccacgcgcgtcagggcgtacgttacgtgggcctggagggcctggacgtggtggacccgaagacgatgacgccggtcccggccgacggcaccacgatgggggaggatcgtgatgcgc

SEQ ID NO: 307224 - DNA, 500 bp, Zea mays
aaaagtaacctggtttgattttgtttgtccaaattagtttcaatttaataccttctcgagttttgcttcctgtttttatcctttgggtttactaaattgcttagactatttgtggatctgtacatattaacttaacacctgcaagcacactgttgctaaatgttgatatatggtggtcgaatgctacttaggccccgtttcaatctcatgggataaagtttagcttcctgctaaactttagttatatgaattgaagtgctaaagtttagcttcaattaccaccattagctctcctgtttagattacaaatggctaaaagtagctaaaaaatagctgctaaagtttatctcgcgagattgaaacagggccttagtacgcattgtagtctaaattcactctataactggtatcagctattacatgttgcaaagtgttgatatatggtggttgaatgctacttagaatgttttgtagtctaaattcactatgcaactggtatc

SEQ ID NO: 307225 - DNA, 277 bp, Zea mays
cctacttgtccgcaaaaatgtcccaattctactttcgggcaggtggatcgcaaaaaatggtgcgtccgcgactagtgctcttcggggactccatcaccgagcagtccttccgccccggtggctggggtgccgcactggctgatacctactcgcgcaaggctgatgtagttgtcagaggctatggtggatacaacacaagatgggctcttttcttagtacatcacatctttccgctggatggtttagcaccccctcttgcaaccactattttctttgg

SEQ ID NO: 307226 - DNA, 462 bp, Zea mays
tcttctgtttgctttgcattcaccccttgccgcacacatcaggaaggcgggcaggcgacgacaatgacgatgatggcgccgcatccgcagccactgccgctgccacagccgccggcgccgttcggggacaccacgctcaccaaggtgttcgtgggcgggctggcgtgggagacccacaaggacgccctccgcgagcacttcgagcgctacggcgacatcctcgaggccgtcatcatctccgacaagctcaccggccgctccaagggctacggcttcgtcagtcccccttttcctctcccgttcccggcccctagctccgcctgtttgttggtggtgttgtttttttttcttcatctggacgagcgaggtcgacccatatgcgaaacgtcgccaacctagcttgcttgcatgcacggcaggtgacgttcaaggaggcggacgcggccaagaaggcgtgcgagg

SEQ ID NO: 307227 - DNA, 471 bp, Zea mays
cggactcgtttgtaggcatagcgctctctctcccgctcgccccctcgagtcccgactcccgtcctcgatcgaaattccccggatcttccagctattagacagttttcctgctgattttcgcggcttcttttcttttgctcccggggagataggatggagaggatactcagatgcttcaatctagggccaacaggatccgaagatgatgatataagtttcacactgaccgtggaaacgtttagcttcgaagagctctctgctgcaactgataatttcagtagcaccctcaggataggctctggggggcaagccacagtctatgaaggccacataccccacattggacaggttgctgtcaagcggttgagaaccaatgattttccctctaagcaaagggcatttctatgggaggtctatgtgctcaaattaactaaccacccctacattgtgaaactactcggttgctgttct

SEQ ID NO: 307228 - DNA, 446 bp, Zea mays
  unsure (1)..(446): unsure at all n locations
gaagnagcaaggagtttgtaatatcaaatagccttagatttccaacaacaaaaacatagtaaacagaaacatttcccctacagctagaggggcacaagttgttaccaataccctatagaacagaatgggagcaatgagtgatgcagtgatttgatcatttgatggggcaagaggaacatggatcatataaaggtggcagtaataattgagtctgtgtaacttacttgaactcacggtcagctcgaataattccgatttcaatgttgttggaggaaatttgcccctcatatccttctttcaaagtcaaaattgcagtgtggatggcatcatcaagttccatatcctctgtgtatctcttttcaagaaatgtctttgcatttgacacattttttcccatggctgatgccttccaggagaagtatgatcctgagggatcaaccctgact

SEQ ID NO: 307229 - DNA, 367 bp, Zea mays
gttaaccaaactattgaagactctcttttatattttccaactcgtgacttttaggatatagtagtgttatttttgcaaaccatgcaattccctgactaatttgcggctcaacatattaaaagtccgttcactgcatcgcttattattgacttgtcaagcaagtgcactactgcagcagagagcgtctcctgtagctcaccatgacttcacctttgggcctcatggagatcatgttctccgtctccgggaagggagaaagcagccggagctcgaagttcctgaggagatggctcagtatcactttgatctgcaggtaggcgtagccctcgcccatgcaggcatgcttcccggcgccgaaggaggtgta

SEQ ID NO: 307230 - DNA, 324 bp, Zea mays
atataaaaggttttatttctttctttttttccacgagaaaaaaaaacccactagtgtagctattcggcaaacaaggccaaacttctattactgtgatcgtacaggcattctatcaaaaagcagcagcgaactagtggggaaacatcctcatcttctttctccaggctctaggcacacgtggttcagtagggctccactggtgctctgaacttcgctccggcgtggactgcggcaacaccgagctcttcctcgatcctaagcgcagctggttgtatttggccaggcgctcagaccggcagggagctcctgtcttgatttggcccg

SEQ ID NO: 307231 - DNA, 407 bp, Zea mays
aggtaaagcaataacttaaccaacgcccggagttttcaagcatcatgcatcacgcatacctagctacaggaaaggttcacaaccatctgaatacataaccaaccatgcgacagagagaagctacaaaagtcacgaagatagctggcagttcattgttttcggatacactaccttaggagagtgaccatctgtgagctgcaactgacgggtgaaaccactgaaccagcaatggagccaggcatctgccacaagcccacaacctacagcatgctgtcagtcctcgccggcagacgcctgaagaagttgagcgggacggacggcatcttgtggcggaacctggggtgcctcagcatgtacaggcccgcgaggaagaccacgacccggaacggtgtgacgtacagcacgat

SEQ ID NO: 307232 - DNA, 363 bp, Zea mays
aaaaaagaagaacctttcctggtgttacctacttaccttcacgcatacaaccaagcacttgttgaaaacaacagcaactgcgtgaagcaaaaaaacgttcaggtgaacacgcagtaccgagggaggaatcgtcgactcaaactttattccaaatttatccttgtccggaaggacggcaccagcaccatgactgactagcatccaaaaggctaaccggagctgatttacatgacatcgcaagagataaacgctgcggaatagctgctgctgatttgcacataactggagttgatccgaattcaacggtagttgcggtagatggggctgtacatgcaactctctgcatatttcaccaggtccttt

SEQ ID NO: 307233 - DNA, 394 bp, Zea mays
atgttagcgttaggttcaattggcattctttgaatgtactcctttatcttgtcaatcttacaagctcgaccgagaaggtctatgacacaagaataatgttcaatctgtggtagtataccatgatccggcatcatttcgaagtattctaaacctctttccaccaatccagcatgaatgcaggcagataggacaatgacaaaagtgacatggtctggactctctctgctgcgcagcatttcctcaaatatctcaatggctttccttccaagaccatgtcttgcataaccataaatcatagaattccatgaaaattcatttctctgagtcatagaattgaaaagcttagaggcataatccaccctaccacacttggagtacatatcaacaagagcac

SEQ ID NO: 307234 - DNA, 434 bp, Zea mays
cttgaagtggttatctttcacctgagtacgccatgagaggtcacatgactgagaaagttgatatttttgcttttggtgtggtcatgttggagattattgctggaaggccgaactatgatggtaagcttgaccaagacatggcttatcttttagaatgggtaagttttctgtgagttttagacctagttcttgtactctttcttttgtgttgttggataaatgcaataacatgcatattcatatagatgctattgggaattttgtaattggaataatggtgtacccatctgggtgatgtttttttttttgcatgcacgtgtgcacacaactatcaggtccattcatttattacaccgaaattcatgccgataaataggtagagagaatgaaggcgtatgtgttgataatcaagaagaggtggatgtatatcattt

SEQ ID NO: 307235 - DNA, 444 bp, Zea mays
cccacgtttctgttccacgcgtccgcccacgcgtccgtggacgcgtgggatgatgtgtatgcaactgctatcagaaactgtgatccagagggtcctcttatgctgtatgtttcaaagatgattcctgcatctgacaagggcaggttctttgccttcggtcgtgtcttctcagggaaggttgctactggtatgaaggttcggatcatgggtcccaactatgtccccgggcagaagaaggatctgtatgtcaagagtgtccagcgtactgttatctggatgggaaagaagcaagagtcggttgaggatgttccgtgtggtaacactgttgctatggttggtctggatcagttcatcacgaagaatgctacactcactaatgagaaggagactgacgcttgcccaatcagagcaatgaagttctccgtctctcctgttgtgcgtgtt

SEQ ID NO: 307236 - DNA, 466 bp, Zea mays
cctccattccttacccccccgcaggagcggcgcggcggtggcggcggcaaagccaaaggcaagatgttcgggcgcgcgccgaagaagagcgacaacaccaagtactacgagatcctcggggtgcccaagtcggcgttccaggacgacctcaagaaggcctaccgcaaggcagctatcaagaaccaccccgacaagggcggtgaccccgagaagttcaaggagctcgcacaagcctatgaggttttgagtgatccagagaaacgtgagatttatgatcagtatggtgaagatgcccttaaggaaggaatgggtggtggtgggtcccatgctgatccatttgacattttctcatcattctttggaccctcttttggaggaggtggtggaagcagcaggggaagaaggcaaaggaggggagaagatgtagtccactcacttaaagtttctctggaagatctttacaatg

SEQ ID NO: 307237 - DNA, 355 bp, Zea mays
aaaccagacggttctccattttcaaaagtccaaattcgatacattattacaagataatgtattgatggtcaaaacacatttattctgccaaaaaggggtcatcaattggggccatacaaccaccaatcatccatatactcgtagcagccggtgcctggatgactacatccttgcagcaggaagcttccctgcactatgaacaccattctctagcattctggaacattcgcagccaagggctggggccactcttctcaacctgccattccttgggataccatggatattgccacatcatgaagcaacgctctggatgcggcattatagccaggtgccttccgtcaggtgagcaaag

SEQ ID NO: 307238 - DNA, 329 bp, Zea mays
agctttcagtttctgagagtgtgtgagagagagaggatgatgggtggcagccgcagggctgctctgctgctggccctggtggccgtgagcctggccgtggagatccaggccgacgccgggtacgggtacaccccgacgccgacgcctgtcaccccgacccccaagccggagaagccccccaccaaggggcccaagccggagaagccggcaaaggagcacaagccgcccaaggagcacgggcccaagccggagaagccgcccaaggagcacaagccgacgccgcccacgtacacgcctttccccaagccttcgacacccaagccgacccc

SEQ ID NO: 307239 - DNA, 213 bp, Zea mays
tgagtctccctcgttcacgtctcgtctaccattactggaaccaaagaaattaaagcctggtgtttgtttctttccgaaggcagccatgatcccggccgttgccgatccgacgacgacgttggacgggggcgcgcgcacgccgttgctcccggagaccgaccctcgggggcgcgctgcccccgccggcgctcggcagaatcggccggcggcggc

SEQ ID NO: 307240 - DNA, 482 bp, Zea mays
agagaaaaattcgaaaccttttttttccttttattattttcatctccactttcctcccctttgctcacacattatccgaacacttgtttcccaaacaatgacaaatcgcacacctttcagcctcgcagctttacttcacgcacggacaggcgaacaagcttcgccgttcgcccggatttatccgaaccacggttaccggctgcgttccatccacccgcacgggctccagctctgggatgtccccgtcggcgtcagttgccagaacatggccgttcagcagcacctgctggctctgcagatcgccgtccttgggagcgaggtggtactcctctcttgttgcgagcagctcggctgctccgccaagcgcagggaaagggaagcgaccaggcgtccccccgctctctccctccgcgcactctgtgcctgtgcgccttggctcgtgacgtggatgcggttcgtgctgttgccgtcaaggttgatca

SEQ ID NO: 307241 - DNA, 376 bp, Zea mays
ttctttttcggaaggatcggcaggctcgtggccgttgattccgatcttaatcttgcccatggcgactggcgagtagaggagctaggaggatgacgggtggacgagattaagatcggaatcaacggcttcggaaggatcggcaggctcgtggccagggtcgccctccagagcgaggatgtcgagctcgtcgccgtcaacgaccccttcatcaccacggactacatgacctacatgttcaagtacgacaccgtccacggccactggaagcacagcgacatcacactcaaggactccaagacccttctcttcggtgacaagccggtcaccgtctttggcatcaggaaccctgaggaaatcccgtggggtgaggctggcg

SEQ ID NO: 307242 - DNA, 325 bp, Zea mays
  unsure (1)..(325): unsure at all n locations
tcntctgagtatcaaggatctgctgagtggagtagcatgcagaatgatgacacagtttcacccttcacatggttcaagactatgtttgatgctccagaaggtaatggccctgttaccattgatcttgggagcatgggaaagggccaggcttgggtgaatgggcatctcattgggcgctattggtcactagttgcgccagagtccgggtgtccattgtcatgcaactactcaggaacatacagtgatagcaagtgccgatcgaactgtggaatcgctacacaaagctggtaccacataccacgcgaatggttgcaagagtcaggca

SEQ ID NO: 307243 - DNA, 187 bp, Zea mays
ctaagcagggagtcgatctatccgctgtagccatgagtaagttgcagtctgagtctgtcaaggatgccatctcccagattgttggggatgccatggagaagattaggaagttcactgagactgcggaacttcagattggtctgcagaattatgatccacagaaggacaagcgtttgagaggctctgt

SEQ ID NO: 307244 - DNA, 489 bp, Zea mays
cagcaaagattaaaatagcctccgcacctaatataatgctggccttccgtcagaagtaacagctagctaagagaagcacaagaaaaatctggtagcttgagttctgactcgaactcagagatggcttatgcaagccccgggactgatgatacgtcgacagatctagatactgacgagaagaatcacatgttggagctagggcagcttgtgtcccttacagcttctgattccggcaacaaagcaaaggacaagctactaggtcaaaagaaccgtgaagctgctaggaaaagccgtctaagaaagaaggcatacgttgagcaacttgagaatagcaggctgaaacttagccagctggagcaggaactccagcgtgctcgccaacagggcatcttcattcctactccgggagacgaccagcagccaaactctactagtgaaaaaggtgctttggcgtttgacaaggactacgctggatgggaagacgagcac

SEQ ID NO: 307245 - DNA, 419 bp, Zea mays
aagaggcgagcttaacatttatgatgcacaataagtataattacattaagcacgataaacttcctcataataaaatatattctctataataaacatactagagatataaatgttgataacagatgcgcagttattttttgagactggaggaataacctgttgtgtgctcgcaatttcctaatgcggcaggtggctgcggtgcgtgcgtggtccttatctccaagtacaacccggccaccgacgaggcgaccgagttctcagcgagctcctgcctgacactgctccgtagcattgaccgctgctcagtgaccacgagcgagggcattggcaacaccaaggatggctaccacgcggtgcagcagcggctcgcaggcttccacgcttcccagtgcggcttctgcacgccgggcatctgcatg

SEQ ID NO: 307246 - DNA, 325 bp, Zea mays
tctttcacgcgtgcggtattagtactcgcctacctccgcggctcaaacctttcccggttctcccaattccttccgacggccggcggtgcacccgtacgacgacaccatgagggagtgcatttcgagccacatgggccaggccggtctccaggtcggaaacgcgtgctgggagctgcactgccttgagcatggcattcaggctgacggccagatgcccggtgacaagaccattgggggaggtgatgatgctttcaacaccttcttcagtgagactggcgctgggaagcacgtgccccgtgctgtttatgttgaccttgaacccact

SEQ ID NO: 307247 - DNA, 429 bp, Zea mays
agcaccacaaccgttccttttttttttcccgacatgtagctattattacatgaacaaacttggtgtgggtgtgcacctccattgcccaagtatttgatcctatttgaactaagatttgggcacgttaatgaaaaggtagaaattactctatggactattgtttgtttacaaacaaaagaacaactgccactaaaatttcagcaagaaggtgcgtatctccatgggtcctagttcaacgactagagccctactgtcaactgggccaccttttactgcggcaggaccagtttcagtgttcccaatgaccctccagctgagcttcttcatgtctgacttcttttggttcgcggagaggctagtctccgtcaattccttgatagttctctttccgaacacctttttcagatcaacctttgccaccttggaata

SEQ ID NO: 307248 - DNA, 376 bp, Zea mays
acggcaggttggatttcgatcgctagctcctccgaaccggaaagccaagcccgatttcggcgatcgtgcttgcttgcttggttccttcaattgctgccggagccagcgagagctagctgctgctgtcgcgtggtagacgtcgtcttgccagcgagagcctagctcgatcggtctctctggtacaacgtagggagaaagatcgagggggagaggacgacgacgatggccggcgcgaccgtgaccgtggaggaggtgaggaaggcccatcgcgaacccaggaagatcaccgagctggtgattggtatcggcacccccgccaactgcgtgtaccaggccgactacccggactactactttcggatcaccaagagcgagc

SEQ ID NO: 307249 - DNA, 293 bp, Zea mays
gatacatgaatattggcattccataagacatataagaatatcaatgaaattcatattacattgatacctttgacttgctcgaaggggaagacccgaaggagctattacagttagcgtgaacaatacgggggtattgttcatctatttataggcacgggacgcagcctaggtaaaattacattcatgtccctgacatttacttataaacataacacaaatcattaagactaagggggcttttctcctttgggtcagcatcgtacttggtcttcggcaccatattaaaccaaagc

SEQ ID NO: 307250 - DNA, 483 bp, Zea mays
cctagggcctttacctttatggagcaaggcaaatttgcaacaaaaggatatgaagactgtggaagtccattgccaatgtttcaaactggatctggaaaatctgtattggtctgtgaaagctcgatgcaaaaggcaagagccgttcttgaggaagaagagcactacaagttggttaagatggacaaaaaaattgcagcctcagcttcaccgctcaagacaagccatgcaagaacagtaaacatatcttcaactggtgtttctagagctgctaccttattgggcttggaggagaataccctttcaacacaattttttggacatgtgagtgataagttaggtacggagataactgttaagcggggaaatccagaacacatgcttgatgttgcatctgcacatgcaatttctagtggcactcataagggttttatttatccaacagaaaaccccacacatatggataaacatcagcagtttggattt

SEQ ID NO: 307251 - DNA, 474 bp, Zea mays
gttttatcttttcctatctcaaaggtactccttgatgacgggaaagccgaacgggtcattctggcacatccttctggcatagatggcgcgcaagaggcaataaccgagtaccgggtgatgggaccaacaattaatgggtgctcatggatcgagctacacccattgactgggcggaagcaccaggtaccctcataatgtttggattttgtttgtgtgaacacaatccaccctctagtatatgcctttcatttgttcttagaaacatggaaaataaattcatgtcatgcttaggaatgggcattttcaactgtaagcatcaacctgttctgtttgctctgggttgcagctccgagtccactgtgctgaagccctaggcactcccattgttggggattacaaatacggttggtttgtgcaccaaacgtggaagcaaaatccccagcctgacttcgaaccgttcactggagagccata

SEQ ID NO: 307252 - DNA, 316 bp, Zea mays
cttaaactaaatgcaagtgcaacacaaacaggaaggcatagtgatcggtagaaaaaccagccttgacatttatcttcagcgcaaggtttgccagtatctgcttgttcatcttaaagacttgctttgcgcagcagcactgggaaactaatccaaggtcgatttcacagatacgcttcagatcaccataaagagaaccgttgttatcagggagtattccaatgagcagcaagtcgagttgttctctgcgctgtggtccgagcaagttcatcgcgtcatggaacctggctttcagagctctctccactttatcaggatg

SEQ ID NO: 307253 - DNA, 462 bp, Zea mays
cactcacatttattctgctgcgccccgacccactgaaagaaagaaagaaagaaagaaagaaagaaagaaagaacaggctcccagtcccaggatgcgccgacaccaagcgaagaggctgtggatcagctgaaaggcttgtctgtacaggacattgtgcaggcgtttccagtgtcgagcaagttccctcaccgcccaggaaatggaagcgttggcaccaggtgtttggtgaaggcaaatcacttctttgctgaattattacctgccaagaaggatcttcatcagtatgatgtttcagttaccccggaagtgacatcgcgaattgtgaaccgttctgtcatggaggagctggtgaggctgcacaagctgtcatattggggaggtcggcttccagcctatgatggtagaaagagcctgtacacggctggacccctgccattcacttcaaagaatttcacatcactc

SEQ ID NO: 307254 - DNA, 353 bp, Zea mays
cctaaattcatgttctttttttttgggaggatttacttaagggcacggtgggataaaaaccataatgtgaaatgggacttagtaagcattcctcggtacaggaggtgaacaaaacctgcgctctaagagcgttgccggcctaaaaattattatgcatcaagcgcaaacttttcccagcgcaaaaaagacctatttcgcctgtttaatgagttcctctcatcagaaggatgacggacaaattttccgttacgattaaaaaaagattcgggaactaagctctcgactggctgatacaattccactctaccaaatatgatctcagggaacacagaaaaaaaaaatcaagccctggc

SEQ ID NO: 307255 - DNA, 396 bp, Zea mays
ggcggagatggcgaagtctttgcttatccaagcgcgagaagcggctgcggacattgcgccgggagatagcggagcccttctacgacaagaaggaggccgccaagctcaccgcgcaggccgccgcgcttgctgctcccccgctccaggtccgcgggcccccgccgtcccaggatgccggcagctcccgcggcgctagctcagcctcggctatggatgtggagatgtccgatgaaggaaacaacaggtctaaaaccttcttgaagccacttggcatcattagcaagaagaaggtacagcttcatttgaagatcaagaaagacaagagaaaagctaggaagaaggggaagttttcttttaaaaagtagacgcgtaaagcttgtagtcttataaatcatg

SEQ ID NO: 307256 - DNA, 273 bp, Zea mays
agcacacagccccatcccaatggtagtctttacaaggcccctgggggaggaagaaaacaagctgaaccatggagaagagaaagtcagctgctaagccacctcctaagaagcggagggacaagcttgacactgtcttttcctgcccattctgcaaccacggcagtagagacgcgtgccgaatcgacatgaagaatctgattggcgaagcatcttgcagaatctgtcaggaaaactacagcacaactgccaatgcactcactgagcctattgata

SEQ ID NO: 307257 - DNA, 153 bp, Zea mays
tcgctctgacggtctttgtcactacaaataagccgcaccgcatttcgggaggccacgcgaccgccacctccccgaagctgccgcgaccgatcgagcgaagcgtcgctccccgcgccgccgccaaaaccctagcttctcctactccatggccac

SEQ ID NO: 307258 - DNA, 367 bp, Zea mays
tgtcacttgctctccctccaacaagctaggaaggcttttcatccctcttctagctcgtttcattatccatggcggaggagaagcaccaccaccaccacctgttccaccacaagaaggacgaggagcagctcgccgccggcgggtacggcgagtccgccgagtacacggaggccacggtgacggaggtggtgtccacggccgagaacgagtacgacgagtacaagaaggaggagaaggagcacaagcacaagcagcacctaaccgaggccggcgccatcgtcgtccgcgccttcgcactcgtacgtagtccgtccgatccgatcctccttgagtagtatatatatatacatacatgaacgagaaagaa

SEQ ID NO: 307259 - DNA, 494 bp, Zea mays
  unsure (1)..(494): unsure at all n locations
tcgcttcagacagcttatcttgcgttgcctactaagatctctctctgtgtctctcttgtgttcttgccttctgcctactacgagtgatggccagcctcactgacctcgtcaacctcgacctgagtgactgcaccgacaggatcatcgccgagtacatctgggttggaggatccggcatagacctcaggagcaaagcaagggtgatgtgtgactgctacacgccacaaggcgagccaatccccagtaacaagaggtacaaagctgccacggttttcagccaccccgatgttgcagctgaggtgccatggtacggtattgagcaggagtacactctccttcagaaggatgtgagctggccccttggctggcctgttggtggataccctggtccccagggaccatactactgtgctgccggtgccgataaggcctttgggcgcgacgtggttgacgcccactacaaagcctgcctntacgccggcatcaacatcagc

SEQ ID NO: 307260 - DNA, 383 bp, Zea mays
atatatactgatctctatacgaacaaaaacttctagagggatgtgagtgtgacactgacagataaattaaaccatgcaaagtaatgcatcaacaagccatttggtcccggaaagttgctatctcctcaaacacaggcagcctcctcgacctgaacggcgtccactcgttcatcactactaggtctggtttacccatgatcccttcatggacgctgaggccaacctggaacggcgatgaaacgcattgcaacgggtttagctcgcggagaagctgctccgcacgggcaaccacctttccatcttctgatccatagattctgcgcaatcggacgtcctcgagcgcttgccgtgcctggtcgtgcctgccctgcttgatcaggcac

SEQ ID NO: 307261 - DNA, 240 bp, Zea mays
agccaggagctcacgtctgccacttggcacttagccggcgacgagcacctaacagaaatggagcgcagaagttgcttggtatccttattgccattggagaagcacgggcgaatgttctctctggaatgtatggcagtgagagccaacttggaactgggaatgctatcctcaatatacttcagcttttctttgctggtatcattgacatctgactagatgaactcctacagaaaggctatg

SEQ ID NO: 307262 - DNA, 411 bp, Zea mays
gagtgagaaccaaggttacacaacagtaataatatgggaaaacagatacaatttcacaatagtttacagcgaggcccaggctcgcgaattcgtacatcaataatacaacagtatttgaaggccacgatgctctccctaaaacctaggtgacaggggtgcttctggcggaagctacaactctgtcatgacggcttgtgaagtttgaagccgaaaacccttggagtgtattgctgtgacggcttctgcggcttcaagtgcgagtaagtcatcaggaaaagatgagggaatgtcgtcccaaagtatgatccatcgatgtctgggtaaagttaagggcatgtaatggcagcttgcaaatatccattatttaccgaggaagagttcaacgacagaaaagcaggactgacggaatgt

SEQ ID NO: 307263 - DNA, 184 bp, Zea mays
atggacctgcagctgatgttgatacactctgtgttggaccttgatatgtgaaccgtgaggaagatctttttattgtactgcatgagatactaacacaaacagaggatgtgaccgaactgcatcctgtacctgatgcacatgaccctgttatgaaatttaagttccatggaatatctattgacct

SEQ ID NO: 307264 - DNA, 337 bp, Zea mays
gccaaactttatcaaaaccctagcgcgcaaacgcaccccaggggagccttttctgcaaggagcccgctccttaccccagacgcttacaggagcatcaacgatgcagcgcctccaatgcgaggactggggccagcacctaaagaagcccaaactcgccggacagtcacgctcctgatccgcgtacacgctgtcatgcatcgattgcggcgagtaaatcagacacgacaccgtacacgggcacacccagagcatctccaaggccgagaagtacggacctaagggacagaccaaaccatccaatggtgcacagggtgaggcagataagccaaagccaaat

SEQ ID NO: 307265 - DNA, 346 bp, Zea mays
cactacgagtaactgtatatatatatatatatatatttcataggggtttcatagcccagccgccgcggcctccggctgggcacgaggcccagttgcccgacaggccgtccagggcgtgcctgagaatacagatttgtcttcgaaaatcatctcacctgttttcttttttgcagattgtactttacttggagctttatgcaagctgtgtggagtacatcacgccgctaagagacagcatgtcatcagtgtttccctcagcacatttagcttttgccagcatcgacctgaatgcacacactgtctttgcgatcacaacggccttggcaatttctcaaacagtctgtct

SEQ ID NO: 307266 - DNA, 102 bp, Zea mays
aacaaccgaccagtacatagtattataaatggcgtaaaacaaccattacaacatgccgaattttattgatcaaacatagaactcaactctgacgagtggtct

SEQ ID NO: 307267 - DNA, 374 bp, Zea mays
gtggggataaccggatagcaaattttttccaactcccaggcaatttttgggacaggatcaaagagcagctacacggcagtacagagccgaataaggggacatgaaagattaggagcgaagagactaaaagaatgaacacaaggatcgcgtgagccttctatttcaacggaagcacacaaggtttggcacgccctagcagctaacccgtctatcttccgtcagcagaggtgaacgactccgcgaatccaggaggccttgtagggatgctcgtctgagtgttatccaaacttgcaacgaatgaagaggttgcgccgtcaaagtggctgctatcttcaaaagcctgccatctcttcagagcctgagggagggtcatg

SEQ ID NO: 307268 - DNA, 430 bp, Zea mays
  unsure (1)..(430): unsure at all n locations
ccggagtcaaccatgcgctccatgctctctctctcctcggcgccgcccccgcccccgggcgcgcaggacgccgcggngctccatgctgctgtggcagccctagcgccgccgcacatgcttccccagggattgtcgccagacctaacggcggctctcctcgccaaggaccggggcaacagcttcgccatcatggagccgtaccgacacgggatgtcgctcgagctcctgaaggcgcgggcctacgcagtctacccccgtgcttcgctgttcaaccatgactgcctgcccaatgcgtgccatttcgattaccccgacaggcctgggccagggaacactgacattgtggtgcgtgcactccatgacatacccgaggggagggaggtctgcatcagctactttgcggctaattggaggtatgctgataggcagc

SEQ ID NO: 307269 - DNA, 448 bp, Zea mays
acaactaccttggctttgctgcagggggtgattactgcacaccacgtgctattgagtctctcaagaaatactcagcaagtacctgcagtgttcgtgtcgatggcggtacgaccaagtttcacaatgagctagaggagttgcctgcgcgttttgttggaaagtttgctgctatcctatttggcatgggttatgttacaaactctgccatcattccatgcctaattggaaagggtggactgataattagtgactctctgaatcataactcaattgtcaatggcgcaagaggatccggtgcaactgttagggtttttccagcataactcccctgctcatttggaagaggtcctgagagagcagatagctggtggtcaaccactacaacacatgtgaccttctatgacatttagattacgtcaccaacaatggggctggacgagaatcaaac

SEQ ID NO: 307270 - DNA, 484 bp, Zea mays
  unsure (1)..(484): unsure at all n locations
cggcctgagctgggagagagaaggggcaacgtcctaatcgaaagggcgatactagatgctgatgcgagaggtgtcaaggtgctcagcctaggactgttgaaccaggcgaaacagctgaacggcggcggcgagctgttcaggcacaggtatcccaagctcagagttcgcctcgtcgacggaagtggcctagcgactgctgtggtgctcaggagcattcctcgtgacgcgaagcaggttctcctccacgcaggcccttctaaggtagcgtgcgccacggctgctgcgttgtgcgagaggggcgtccaggtatctctttttgctgcatttatttgtatgcatgtacagtatctngcttggtggtttattttacggtttcttttcattgaagatggcacactacactacaacgcttgtttaatttggtgtcttgtggaacaggtcgtcatgaacccaaacaaggaatatgatatgctcaagtcacaga

SEQ ID NO: 307271 - DNA, 405 bp, Zea mays
gagtgccccaggcccagctccgcgcgcaggcagaagctgctacgcgagtgccccatcctctcaaacatcgaggccaagcagattaaagtctggttccagaaccggaggtgccgtgacaagcaacgcaatgagtcttcgaggctccagtccgtgaacagaaagttgactgcaatgaacaagcttctcatggaggagaatgagcgattgcagaagcaggtttcccagctggttcacgagaatgcgtacatgaagcagcagctgcagaatccgtcactggcaactgatgcgagctgtgagtcaaatgcgaccactcctgcaaacctaagggatgcgagtaacccatcagggctccttgcaattgcagaggagaccttgacagagttcctcttaaaggctacagggact

SEQ ID NO: 307272 - DNA, 343 bp, Zea mays
cgctcccctacctctcgagcatccttccgtctccgtcgtctcgtctccgctcctcacctcgccagccatgggcaagatcaagatcggaatcaacggtttcggaaggatcggcaggctcgtggccagggtcgccctgcagagcgaggatgtcgagctcgtcgccgtcaacgaccccttcatcaccacggattacatgacgtacatgttcaagtacgacaccgtgcacggccaatggaagcacagcgacatcgccctcaaggactccaagacgcttctcttcggcgagaagccggtcaccgtctttggcatcaggaaccccgaggagatcccgtggggtgaggct

SEQ ID NO: 307273 - DNA, 174 bp, Zea mays
ccgggatccaggttccgggaggtatactactgggactcctatggggatatcaaagggttgctggtgagcaaaatgtacgacacggaaaagactattgggcttaaccttgtatacctgtgggaaagatatggtttcgatccaaatggggcaggatcctactacactaaccgaagc

SEQ ID NO: 307274 - DNA, 361 bp, Zea mays
tcggtttgctgttcttctgaaaagaatctcataggacattgtgggccatttctctcaaaactctgcaggaatcttgcattgctgcaaaagttcccagaccttcaagcttctgcaatgcttgctctttgcaggctaatgatcattgatgcagagttctgcgaagcaaatcttcaaatcctgtttactgttgctgagagtgcgccttctgaaactgtccgatccaattgcactatagcccttggtgatttagcagttcgcttcccaaatctcttagatccttggacagagtatatatatgcccggttacgtgatccttcagtgtctgtgaggaagaatgctgggctggtcctttctcatctta

SEQ ID NO: 307275 - DNA, 313 bp, Zea mays
acgcgcccgtcgtcgtcaagacggtcgcgggcgtcatccttgccctgctcgcttcaacgctctacagcatgacacagatcgccggcagcacgagcgactccgactctggcggcgggcccacccccaccgaccaggtgctcttctcgcgtcacctcctggaggcgtgcctcatggggtactccttatttcttgctctagtgattgaccggctccaccaatacatcagagatttgcgccggtttaaaaaggacttagaggctgtacgtaagcataataaaatgttggaggaggcaaaacatggaaactcggagga

SEQ ID NO: 307276 - DNA, 450 bp, Zea mays
ttgcagggggctggtcaaaacgactgtgagctgacgggctaggacctccgccgctgacacgattatgcttggagcgtgcataggagacctataatggctgtgagatggcaaaggagcctgatggcggtggccaaagcgtagaaggttcacacatagtggaccgggatggcacacaaatacagttgattgtggtgtctggttattctgcagacaatcagggtcattgccatccaaaagtcctgagagctttgatagaacaggcagaaaggcttactgctagatctagagctttctacaatgataagttaccaatctttgcggaatatctgacaagcatgtttggatatgacatgatgttgccgatgaatactgttgatgaaggaggtggaaactgctataaagctggctaggaaatggggttttgagaagaaacatataccaaagaatgag

SEQ ID NO: 307277 - DNA, 413 bp, Zea mays
  unsure (1)..(413): unsure at all n locations
ttcctttttttttttttttttttttgncgcaaaacacatcaataaatgtcgtaaattaaagtaaaacatgtcaatagatgtcataaattggtgaaaaaggcaacacgtgatttgaggtaattatagcataaaatgcaagctaaccatcaaaacaaatgtttcagattttacttctacgtgccaccattggatcggatgccataccaacaccaccaagaactcgttgattttgcagtaaaatttgaaccttcaaaggtagaaacacaattgatttcttttataaaaattattaactattgaaatattgctatgatgctgaacgccttggatttggattgaggattcttggtaataacctcttggtaggaaaaggtgtccacggtgaaaatgtaaactctgcatttgatatcaac

SEQ ID NO: 307278 - DNA, 399 bp, Zea mays
tcgccgacgcgtgcggccacgcgtccggcgacgcgtacggctgacggtaccgcggtcaggatggtcagggcctacgacaaggtcacggcgtgtaacgtttttacagcatggactgatacgcggacgagtggtctgggggtcagagccagaggatagatgcacagacctgctccgacgggagctcctacggaacgagagatcacgtgcggcgtcacacacggtatcgagagctgccatggcacaaacggtgatcggtctgcgggcgggttcttaggagacaagatccacggttgtggctggtaccgcttttacaatggccactgctacgaaggcttctggtacgaaggcataatgcagtgatttggcatgtacacgttgccaaacggcgacaggcgaacg

SEQ ID NO: 307279 - DNA, 243 bp, Zea mays
ttcacgcgttcgcaggttatggcttggatgggacagcatatgcagctgcagaacttatgaaaacactggtaggataggcaagacatctatttggtgctgtagagatgcgatgggttgacacatactttccatttaccaacccatcctttgagctcgaaatatatttgcaggatgattggctagaggttttgggctgaggtgataccgtgccagccatagccaatggaacagtaaaggaagaat

SEQ ID NO: 307280 - DNA, 485 bp, Zea mays
cggactcgtgggcggacgcgtgggcggacgcgtgggcaagaactcgatcagctaaggagaggaatgattggtggtgccagccgggaagaaattttgagtttacgtcagcagttggaggcgggtcaggtcaagatgcagtctcgtctggaggaggaagaggaggcgaaagctgctctaatgagcaggatacaacgtttgaccaagttaatacttgtttccaccaaaaacaatattcctgccttgacagatgggcatcagagtcacaattctctcagtgagcaagataagttaatcacttcacaagatagttctacacttgtccaaactgagggcaccacaaaagaccccctatcatccgctttgccagactccttagatgagatcaatcagttaagatctggcaccggtgaacaatcttcagttaccggttctgcaacagattcaatgcaggtgggattcacggcatcagatcatatggatctact

SEQ ID NO: 307281 - DNA, 448 bp, Zea mays
ggccggcacgcacattcccgacgcggactgtgccgccgcggcacagatggcgttcagcggcaacgccgttgccggggagatgcagatgggcggcagcatgagcccggggcggctgccggcggcgacggcgacggaggcgtcgagcctggaggacgccaacttcaagagcgcccgcatcaccgtggaggagaggcgggagaagatcatcaggtacatcaagaagcggaacaaacgcaacttcagaaagaagatcaagtacgcttgcagaaagaccctggcggacagcaggccccgcgtccgcggcaggttcgccaagaatgacgactacggcgagccgtcgtcaagggtgatgcagaaccacgaggagtacgaccaaatggcggccagcatgaaggcagaagacattctcgatcccgacgccgcgcacttcaacgggatgaattcctac

SEQ ID NO: 307282 - DNA, 314 bp, Zea mays
gtccaggagttgaatttggggtttatgggagcccattagatgtgcgtgtgttcagtgaatatagttgtttttgtccagcggatttttatgtcaaatcatctataggattgttctgtgaagttctgcagtttttgtttttttttgaaagaacctatttgtggcttactgatttccatggagcttcaagtgaagggtggggagcactatgcctgcctttttcataccgctccgcagattaatgctatcccttctcatgtaggggatggaaggcatgtgcccattctcctccttggtaaagacaccattgggatata

SEQ ID NO: 307283 - DNA, 472 bp, Zea mays
tcgctttcagcatccatatcttggttacaactatggacatatacttattccacacggtctacatgattgcttaccatgacagacaaacatgttattatatatgcacgaaattttggcacatgactttgatgatgactcaggtgcctggaaaagtaagcttaagcctgaatcaagggagctgtttcagttttcgcccaatactattcaggacctacttatgcttgaaagggactccccatcgcaatgttcagatcgcaaaaattgaaaccgagaaaatactcattatcatggtggaaactgaactggagaacagaaagccataggtgaaatactctgcacatttcagagggcaagcttatttctttgggtacgaaggaagatgcgtgcttgctactaattttgattctaactattgctatgcattaggctatggtgctgtggcccttctccaagtgtgaagacaggacttatt

SEQ ID NO: 307284 - DNA, 292 bp, Zea mays
tccacgcgtccgcccacgcgtccgcccacgcgtccgggacaaggacgcgctggcgttccgcaagaagctgcggcgcgcggaggtggagcgcgagatcctccgcgcgctcgaccaccccttcctgcccacattgaacgccgacttcgaggcgtctcactacgcctgcctcgtcatggagttctgccccggcgaagacttgcatgatgcccgtcagtgactctcctgatgaaaagccaccatctcctaatcgaggttctatgagaccgttacagcgctagcctatgtagttcct

SEQ ID NO: 307285 - DNA, 451 bp, Zea mays
ttttgacgcgtgggcggacgcgtgggcggacgcgtggtccggcgagcggcagtcgacgcggatgcggatccggtacctggacgcggcgctgcggcaggacgtgtccttcttcgacaccgacgtgcgggcctcggacgtgatctacgccatcaacgcggacgccgtggtggtgcaggacgccatcagcgagaagctgggcaacctcatccactacatggccaccttcgtggccggcttcgtcgtggggttcacggccgcgtggcagctggcgctggtcacgctggccgtggtgccgctatccgccgtcatcggcgggctgagcgccgccgcgctcgccaagcttttgtcccgcagccaggacgcgctttcgggcgccagcgttttcggggagcaggcgctcgcgcaatacggatcggcaagcgttcgttggcgagggcgcgagatgcgggcc

SEQ ID NO: 307286 - DNA, 207 bp, Zea mays
aatcattgaaggaccgctattggtgcctatcaactattctatcgaatggtgctcggaagaacctgagatgctggctcaataataaaggtcttgtctgaagactcacttggagctgatgctctgagccttgcatttggaatcatgtgaatactgagcctggactttatttttaacgatacaatcatagagactgcacttactcttgct

SEQ ID NO: 307287 - DNA, 364 bp, Zea mays
acagcttgcaacaagctagcaggtgtcatttggtttccttgaaaagtcttgaggtttaaagcaaaagcttaaattgggaaacaaagacggcatgtctaaacttgacaacaactagaaacgatcgaattaaagaagcgacggtaaagcagaagtaattatagcaggttctctatgtatctcgggaacaggtagtccacgatgatctcgtatgctttctcggtgggatggaagctgtcccagaagacgtatttccggtcgtcagggcacgtcggcgccgtcagctggttgcacaggagcgacacctccaagtccccggtgccgcagcatcctctcgtggagacctcgaagccgtatttgcaggggt

SEQ ID NO: 307288 - DNA, 386 bp, Zea mays
  unsure (1)..(386): unsure at all n locations
tttntttttttttttttttttttttttttttttttttttttttttttttggaacggcaatccgattttactcagccaaaaaatgtgtaataatcagactacacttggttaagcacagggtgtcaaaatccaatcttgatctacagtttcagatctaaaacaactactgctcatgtttattatccccccactattgcttggagatattgaggtcctacgtccgcagcctaaaaattgtatccttctgacaaccacctggaaatatctgttttgatgttgttggatcgggggtgggcttgacacttagtaatccattccacccatgccacccattgctggagccggtgcctcttccttggggatctctacaattatggattccggggg

SEQ ID NO: 307289 - DNA, 341 bp, Zea mays
  unsure (1)..(341): unsure at all n locations
gnatacaccgaaatacagcggtcagaatataccgatggaaccattggacaggaccgaggatacagcgatgcccccacatttgtgtaaatctaagcactcacacgggggacacacatacatggacgacgtcgtacatacatgctaccatgcacatgcaagcgtacgtgcacacacggagagattttatttagtagtacatagcagtagacaagtagccatcgatcatcacgcgtagattgatagatatcatcatgacgacgatcgatgatccggccggcggcgacggcggaatggttggtcgatcgatcaggcggccgtcgtcgcgcgtggtctaggtttta

SEQ ID NO: 307290 - DNA, 281 bp, Zea mays
aagcaagctattgttgacaagaacccagtggttgctagtgcttctcttgacagtggcatccacctggcccaggcacacccagaaactgtgaaaagatggagcaacgaagttcaggaagctgtgcaatcaaaagctccacttggccagtttcatggccttgctcttcttcaccagattagacagaatgatcgtttagctgtaagcaaactagattcaagtttgacaaggggatctggccgttctcctcttgcacaatgtcttctgattcgttacacaagcca

SEQ ID NO: 307291 - DNA, 247 bp, Zea mays
aaaatgatgcctgacggtgaagctgatgccttgcctcaaggggctttctctacgaggatgccaaaagatatcacatctgcctagctcattaggtgatctgaggctgcttcagactctggatgtggtgaacacctccatagtcactttgccagcaagtatcaccaaactaaaaaagctgcagtacatccgtggcggcacaacttctatcacatcagaggatccattagtgccacatacttctgtatcc

SEQ ID NO: 307292 - DNA, 401 bp, Zea mays
accattcaaacatttgatttggccgagactaaatctggctggaaccaaacactgctttaaagatacaaaacgaggcccaaacggtggctacacgacatcctcgaacaagaccttggagatgtgggcatcaaccgttcgagctgagcaatgagcgacgtaatagaagctcctcgcgacatggagaaacgtctgcctggtcactgcgtcgatactgctgcggctccggagaacgcaccgagccaacgtttgcatctccagatccacacggtggcgatctgctgcgtcctccacacttgccggggaaaggtcgtctccatctccggtgcctgctgcagcaagcttgctgcataccgaggacgtgagctgctcgagctgggagtactcggagaggctgtgtgctt

SEQ ID NO: 307293 - DNA, 251 bp, Zea mays
ctagcttcttttttggagatggaccggatactcagaccaggtggtaaagcatatattcgtgaccggaaagaagctatacaggagatcaaagaaataacgaatgccatggggtggcgtggtactatacgtgacactgccgaaggcgcgtacgccagtaggaaggatatgatgtgcgacaagcctatggcgcgctaggcgatcaggtgataacaagcaggggtgattttagggacttctgcaaccgaaaagag

SEQ ID NO: 307294 - DNA, 279 bp, Zea mays
  unsure (1)..(279): unsure at all n locations
gccactttcctcngttcagancgagcgcgcgccaagcaagggtggcggctggccgcgaagagcgcaagcaagcaagacaaganggngaagctcgcctgcggaagcgncggcgactccggcagcgccaccttcatcaaggcctacgtggccgagatcatcgccaccctcctcttggtcttcgccggtgtcggctccgccatcgcctacgggcaactgacgaatggcggcgcgcttgacccggcgggcctggtggggatcgctatcgcgcacgcgctggcg

SEQ ID NO: 307295 - DNA, 390 bp, Zea mays
agaagcttacccaggggggcaggggcaacgcagcgctggcgatgccgaggagggcaaccaagatgacactctcggtgctgtccaacctcccgctcgctatctccgagatgttcgccattgccgccctgatggctctaggaacggtgattgaccagggagaggcacccagctactacttcgagaagttccccgaggacaacccggtcttcggcttcatcacgtggaggtggatcctcacccccgggttcgaccacatgttctcctggccagtcttcctcggcctgcttgcgctcctcgagacgtccctcatggcttgcacctacacgacccagctccccatggacaaggacgcaagaagatgggcgttcacacattccggagaaagaatac

SEQ ID NO: 307296 - DNA, 195 bp, Zea mays
  unsure (1)..(195): unsure at all n locations
cccacgcgcgcttgctcgcgaaccaagcagaccacaacaagaagaggcgtagtcgacgccggaaggaaaggcgcgcagcaagangncgcggcaggcggacgncgacgagcaccngangcgcgagancgaaggacagcancncagcgccgccgccatcgncggacacgacggcagcgnnngggcgcagcccgagag

SEQ ID NO: 307297 - DNA, 405 bp, Zea mays
gaggaaccagatcactgatgattatcaacttgtttgtgataatcttacaaatattaacatatacgtactaaatataaattttattttgtgttacattcccatcatcacgaaaaataaaatatacatggatacttgtatcccaaatacaattattagaaatagcttaagatacccatcttaacctttttttgcaacaagtcggcggcgaaattctcctaaagcccagatgggaaataagtttcggtagttcgggtaattgaagaaaagtgaggagttgaagttgccaacaatttcttgttggggaaattctccgttctccatctgcatgttaattaattcttttgcagcacggtatagtggcgctgggtcttgttcgacctgctcagcgtagagtaaagctagcat

SEQ ID NO: 307298 - DNA, 393 bp, Zea mays
agagcaccctccacttggtgttgcgtctcaggggcggcatgcagatcttcgtgaagactctgactggcaagactatcacccttgaggtcgagtcttctgataccattgacaatgtcaaggccaagatccaggacaaggagggcatccctccggaccagcagcggctcatttttgccggcaagcagctcgaggacgggcgcacgcttgccgactacaacattcagaaggagagcaccctccacttggtgctgcgtctcaggggtggcatgcagatcttcgtgaagacacttactggcaagacgatcacccttgaggtggagtcctcggacaccatcgacaatgtcaaggccaagatccaggacaaggagggcattccaccggaccagcagcggc

SEQ ID NO: 307299 - DNA, 471 bp, Zea mays
cttctgtgtaagcagctagaatgtattattctgtaaagaagtcttggtattgctaactcttgctttggactaaaaaggctaggttgttgctgttggattcttggcaatttcaaagcattgatatgtatcaattttaagttccggtgtccagataggtttccgtctgtgtattttgaaggcatgttaattgtttgcaaggaaatgataactcctgtgcatatgccactaaaatgaccacaccaagttactgctgaacaagtcatcaacaaattattaaggaaccttagtgagtttgacttgcctaactgtttttgttctctggatacaggcattagattactgccattcacaaggtattatgcaccgagatgtgaagccccacaatgttatgatagatcatgagcttcggaaactccggctgatagactggggccttgctgaattctatcatcctggcaaggaatataatgt

SEQ ID NO: 307300 - DNA, 375 bp, Zea mays
cccacgcgtatgtatgcgcactctagcaatggcttatgaggttgctcgacctagcgacacagagttagtaaaggcacaagccgacatatggcagatttagtctatactacctcaagcatctgtcactgaggtgcgacagagaagatggatgacaagacgcacatttatcactatgacagggatgatgaataccaccagttgtttgaccacttgcacatgaagcctgtgccacccaagccaataccggagccagtgccaaagccaaagccacaacctatgccagagtacaagccccctatgcccacatacgggtctccaactcctatctaccatcctccagccaagaaagaagtggcatttgacaagaagcacttt

SEQ ID NO: 307301 - DNA, 350 bp, Zea mays
ggaggagcctgcaggagcaaggaggagaagaggaggaggaggaggccgccgccatgccggtgggctgcgcgtccatcgtcgggatcggcaggctgacgaaagggcagtactggatccccaccccgtcgcagatcctcattgggcccacccagttctcctgccccgtctgctacaagaccttcaaccgatacaacaacatgcagatgcacatgtggggccacgggtcgcagtaccgcaagggcccggagtcgctgcggggcacgcagccgacggcgatgctgcggctgccgtgctactgctgcgcggcgggctgtcggaacaacatcgaccacccgcgggcgcgcccgctc

SEQ ID NO: 307302 - DNA, 459 bp, Zea mays
cggacgcgtgttcggacgcgtgggcatttccccatctcccagatccaattcgcgagttctccctcctctgccgccatggcgctctctgtggagaagacctcgtctggacgggagtacaaggtcaaggatctctcgcaggcggacttcggccgcctcgagattgagctggccgaggtcgaaatgcccggcctcatggcgtgccgcgccgagttcggcccgtccaagcccttcgccggcgctaggatctcggggtctctccacatgaccatccagaccgccgtcctcatcaagccccagactgaccgctgggtgttccccgagaccaacactggcatcattgtccttgctgagggtcgcctgatgaaccttgggtgtgctactggccatcctagctttgtcatgtcctgctcattcactaaccaggtcattgcccaacttgaactgtggaaggagaagagc

SEQ ID NO: 307303 - DNA, 380 bp, Zea mays
cgcctccctcgagcactaacaaccaagccttgcttgaggctcagctagagctctggcacacgtcctttgctttcatcaagtccatggctctcaagtctgcagtggaccttggcatcgccgacgccatccacagccacggtggcaacgccaccctgccccagatagtttccagggcgcgccgccgtcgattgggcgccgacggtggtaccatggtcgacgaggtaagctgacagctacttagacgtctttggtgcctattcactcgaatcttgccctaaacccctctctgtgtatgtatgaaatgtataatctgtaacggcttaggatcgagttttgaggtgtatgcgtagattcggacccccgtgcatttactacgactt

SEQ ID NO: 307304 - DNA, 191 bp, Zea mays
tatagagcgcgcgccctttttttttttttttttttaacccaaccaggattccgtattacttaaaacgcgtgccacgatcatatcgttaaccatcatacgggtctaacgcgtatacaccgcgaggactcccataaattgagcagggactgggccagccagccactgcattagacacacgagactgacacaaa

SEQ ID NO: 307305 - DNA, 316 bp, Zea mays
aaaaacaagactccaggcccataacattaattaacccggttccaagaataaaaatcccccctttggcccccaaatgcgcttattaactaacagggggagaaaaaataactataatttggcaatgggttttagttttacccaacatgcaaagggaggtccatttgggcttataacaagcagggccaatggggttgggacaatgggcccccgcccagaaataagctcaagaagcatgactccgaaagaaaacccatgggttttttctgggagctggccagatgctgcatactcaggggccaaatccccaaaagtcccc

SEQ ID NO: 307306 - DNA, 106 bp, Zea mays
tggttcctgagaagatagttcatcacattgttatggagctattggggtctgcgccagataaaaaaaacatgccctgcagaggaagatgttgaggccatctgtcatt

SEQ ID NO: 307307 - DNA, 296 bp, Zea mays
atgagatcccttgaagaaatcaatggatatcttctggtcatactcacactctcttctctccaagtactgcattgatttctacaaggaaggagatcccttgaaaccagctgtgatgggcgtcttagtgttcgtttccactccagatccaattggcaacaagtactatcttggccctgctcctttgcagaatatggcaaggccacgaagatgattcgatcatagagcttgcaatcaaggttaggatggttcttaacagatctaaggtgtacctatattatttgtctcgtgaacttttt

SEQ ID NO: 307308 - DNA, 362 bp, Zea mays
tttacttgtccgcccacgcgtacgtacacgcgtccggaaggatccccaccccgaccgacctaccctaatcggcgatggcgacggtggcgatggacatctcgaagcccactccagtggcgtccggcgacgaggccgtggcggcggccaaggggatggagcggtggatggtgcgaggggctgtggcagtactacctgaagcacatccacgacctgcagctccagatccggcagaagacccacaacttcaaccgtcttgaggtccagcgcaatgacctcaacttccgagttagaatgctcatggaagagttgcaggtgcttcaagagcctgtctcatatggtggtgaggaggtgcatggtcatgg

SEQ ID NO: 307309 - DNA, 398 bp, Zea mays
tcggttcacaaggcccccgacgacgacgtggacgccgcactcggcgtcctgaatggccttggcatcattgccttcgccttcaggggccacaatgtggtgctggagatccagggcacgatgccgtcgactctgaaacacccgtctcatgtgcccatgtggaagggcgttaaggtagcatacgccatcattgcgctctgcctgtaccccatcgccatcggtggcttctgggcatacggcaaccagatacctcccaatggcatcctgagcgccctgtacaagttccacagccgcgacgcgtccaggcttgtgctgggggtcaccacgcctgctggtcatcatcaactgcctgaccacgtaccagatctacgccatgccggtgtacgacaacatggaggccg

SEQ ID NO: 307310 - DNA, 509 bp, Zea mays
  unsure (1)..(509): unsure at all n locations
tcgatcaaaaggccctagacatcaatgagagagaacttggacttgaccaccctgatactatgaagagttatggagaccttgctgtgttctactaccgtctgcaacatacagaattggccctaaagtatgtcaagcgtgcgctatatcttctgcatcttacgtgcgggccatctcatccaaatacagctgctacatatatcaatgtagctatgatggaagaaggattgggcaatgtgcatgtagctctaagatacttgcacaaagctttaaaatgcaaccngaaattactagggcctgatcatatacagactgctgccagctaccatgctatagccatagctctctcgttgatggaagcatattccttgagtgtccagcatgagcaaacaaccttgcaaatccttcgtgcaaagcttggaccagatgatctaagaacttaggatgctgctgcttggcttgaatactttgagtcaaaggtaattgagcaaccagaagctgcacggaatgga

SEQ ID NO: 307311 - DNA, 139 bp, Zea mays
ttcttcacgcgtccgtccacgcgtccgctggtcgccattctattcgcagcccaacaccaagttatgttgatccaagcattccagtacctgtgaggattgtggaccacctctaaggttttgaattcttatggagttggaa

SEQ ID NO: 307312 - DNA, 314 bp, Zea mays
ttcttttcccgccgccgccaatcccctcccgttctccgccaccgccaatcccctcccgtcctccgccacctttgctgagagcgagaagagatggcctgcaagggtgatgggccggcaatcggcatcgatctcggcacgacctactcttgcgtcggtgtgtggcagcacgaccgtgtcgagatcatcgtcaacgaccagggtaaccgcaccacacccttgtacgttgcctttaccgactccgagcgccttatcggagatgcggtcaagaaccaaggtcgccatgaaccccatcatcatcttttttttatgcccag

SEQ ID NO: 307313 - DNA, 451 bp, Zea mays
tcgttgacgcgtgggcggacgcgtgggcgtgaatccccttcgccagctagccccaaccacttcgcccacctcaccgggagataaatatcatgttgacccccactttctcctcgaccataaccctctgctcacagcggattggacgcctacccattcaagcgcgactcaccaccattggcgctcttacgacgtgtgccccggatcagtgccgcaccgtactccgacctgtgctctccctccgtcgattcatcgagtggtgtggtgcatggtgcgtgtgtgctgcaggcgaattactgccctggaacgggggaattcctcgtcggaatccatacctccgacgcggaaccacttgcgctgtggtctgccttggtcacctcacgatcgtcgaagaacctgtgactgaggatcctggtgcccagcagattgaagttgctgagcaggagctcattga

SEQ ID NO: 307314 - DNA, 521 bp, Zea mays
  unsure (1)..(521): unsure at all n locations
aaatatatttgtatactattattactttattagcaatatgtgggagatatttatgtgctgcatttttactacagaggagtgagtagaagagtgtcttataagttgcagagtagaaacatattccactgatacacaaaatcattttctatcctccacccccatgaatttgagatagtcttatatctgaactgtggaaagtggcggaatatcaaattccaagccaaatagactactctattaagtaaatttcaattccttcaaaatgaatagatccaaatggcccataaggtaaatataatgaacttgattggcacaaatttgtcatttggttgcactgatttgtgtaacggtttaataccatctttcaagcaggattttagctccttattacagatctgcangctaccaactcgagttatttgcatctgtatgttgattaaaagaattactttacaatcttctacatgatgattagattataattcttttgcaaatctttatgtgttaatacaagaactatc

SEQ ID NO: 307315 - DNA, 576 bp, Zea mays
  unsure (1)..(576): unsure at all n locations
gtcttcacaagcatctgacagccgaaccatgtgggcttccatggcacatttgttaccaaataataaaagggatttgcctgggcttgcactacctacatgacaagaacataattcatctagatctgaaaccggacaatatattgcttgatgatgacatggtgcccaaaatcacggacttcggtttgtcaagactcttgggtaatggaaaaagccacaccattacacaaacaagaataggaacatggggttacatggcacccgagtacttggatngatggagtgatcacaatgaagacagacatctatagcttgggtgtgataatcagacacatggtgaagggacgtaactcggcagacaccactgatgaagaagtactggcaaactggttgattaggctggaaaaggatccatcacagatgatgaggcagcagacgacccgattattatttgaaacagagtacaaagagcaaataaagcgtgcatggatatatcatggggggcacgctgcgtaaccaatgacaggtcacgacgcgcacatctactacactgaggaacagaacaagatcaatcggcgt

SEQ ID NO: 307316 - DNA, 380 bp, Zea mays
tcgttttgattcaatcataccctacactgccatggagtccagcaggatgcgctgctgcatgctgcttgttgtttccttggctctgctgctcccgctgggcatggccgcggactccatcggcagctactgctcaggaagcagctacgctggcagcagcaaggccgtggccaacatcaactccgtcctcgccgacctcgtcgcctcggcctcctccaccgggggctacgccacgtccaccgccggcaagggcaacaacagcatcatctacggccttgcgcaatgccgcggcgacgtcttcgccagcgactgcgcgttctgccttgccgacgccgtcaagcagctccccagcacctgcagctacagttccgacgcgaggatat

SEQ ID NO: 307317 - DNA, 457 bp, Zea mays
ttcatttgttcgatgaacgagtgctatgctacgcatagagtagcagctagccaggcaaggacaccgcatcacatcgacacggcggaccagcagcacggacgacaaggactacaaggaggcttccgtctgcaacggtctgggatagtggtgagcgcaagaaccatggcgcgcactactccagataccccgagtgctgcgccaccttcctcttgtctatacatagccatccttaccgtgaagggcgtctccaagttcacctccaagggctccacctgtatgattcacggcatcgtctggtccttcggcggcatgatcttcgccctcgtctactgcacctgcggcatctccggcgggcacatcaacccgggctgagaccttttgtctgttcctggcgaggaaggtagtactttatcatctcggtgtgttacatcatcatgcagtgcctgggtcccatttt

SEQ ID NO: 307318 - DNA, 367 bp, Zea mays
gcgcaacactcttttttcggcaaagacctaacatttcaaaatcaatggccaagaaccccaaggcgcccgacacccgcagtggccgttctcccaccagaaggccccgaccacgccgcgccaaggcggtgccagaagcctcctccgcagctgatatcgaagacctggctccctcagtgcctggggccgctgcccctggcgctgccgcacccacggccctgcgcgcacagctgctccggtggtatgacgcgcaccgtagggacctgccgtggcgatgcgtaagcggcagcgaggaagagagggcgtacgcggtgtgggtgtccgaggtgatgctgcagcagacgcgggtgcccgtggtcgtcgcttacta

SEQ ID NO: 307319 - DNA, 353 bp, Zea mays
cccacgcgtacttgtacgcgtgggctagaagtgggcatagcagtccagagctattgacttgcattgcaaatgttcttgttacagtgggtgatagaggttggagggagtatgatacccagatcacaatggattctgatgttcacagtgaacagaggatatgcgtgaaacttgctgaagggaccaagtatgctcacaaggtctgtcaagttttgcagcctggggccacaaaccgctatacacatgccatgatgtggaagggtggggctgagtggtgcctggaatttcctgacagaagccagtggttgattttcaagcaaatgcatgatgagtgctatagccataacatcagagct

SEQ ID NO: 307320 - DNA, 257 bp, Zea mays
gctccagaaatactgttaaatcctggttttgaggaccttcgtaagccgaaggcccccaacacaacggcaaagagttctctcaaagcttattgcctacctgtgcaagaataacaccgaacaaatcaatggacatccccgatacagagaccttccctccgccctccaacacacacacacaccagcaccaccacaaatcacactagatgtacacaccaccattttttttacaggacctattgccacgaatgggagaaaat

SEQ ID NO: 307321 - DNA, 463 bp, Zea mays
ggacaaggtaaatacaaagctagtcaatccttaggtttcaattaagtaatgcaggacagtaaattataagtagatagaacataatgggtcagaggacacttgccttcaccaggttgttgctcagggaggtctccaacaacacactcaggaacctcagactgctcgttgtctaaataaagcgagcatgcattcaatacatttggaaagtacaaatgaacaacacaccaaacatgtacaaacataggaatacatctcaaaggcaccatactacataagggataatgagttcaaagtataacataaactatgacataaactaacttcatttggaaatagattattggttctgttgggggcctttgtcttccgaaggtcctcaaaaacatgattaacaatgtttcccaagcttaatatatgtacaggaacattcggactcgggatgaagctgtacacaatatggaga

SEQ ID NO: 307322 - DNA, 404 bp, Zea mays
  unsure (1)..(404): unsure at all n locations
gtttcttgctctaaccgccttacctgccgttgactcgcttgctgcctcggctcatggggcgctacctgtaggatcatggggcgcgggcgcggccacctcctgctgccggcagcagccgcctgcctgtgggcgctgtcgtgcgcgctgctgctgcacgcgtcccctcacggcgctggcgccggcgccggcggcctgctgagggtcgggctcagcaggcgcggcggcgggctcgaccagcgcgcgctggcggcggccaaggccgcgaggcagcaggaggcaagccgtctcggggcctccggcggcggcgacgtccctctcgtcgactacctcaacacccagtactacggnggtcgtcggcatcggcacgccgccgcaaaacttcaccgtcatcttcgacaccggca

SEQ ID NO: 307323 - DNA, 145 bp, Zea mays
cggacgcgttttctggtgctccctgtacctgcctttaacgtgattaatggagggtcacatgctggaaacaagcttgccatgcaggagttcatgatcctcccaactggtgcctcctcgttcaaggaggccatgaagatgggagttg

SEQ ID NO: 307324 - DNA, 271 bp, Zea mays
gccgctcgctttttttgtttagttccaatgcttttagctgctacaccgatgtggtttttgtgcagtgatgtcttcgagtgatgatatgagtacagtctttaaatgtctgtcaaaaggtgctgttgactttttggtcaagcctatacgtaagaatgaacttaagaacctttggcagcatgtatggagacaacggtgtcacagctccagtggtagtggaagtgaaagtggcattcagacccagaagtgtgccaaatcaaaaggtgtcaatgaa

SEQ ID NO: 307325 - DNA, 274 bp, Zea mays
cggacgtcgtgggcgccggcgtgctcgtgatctcaacccaaggcgtgcctccgctccggtcacccgtcgctccacgcaaccatgtcgaggaggaagaccagggagcccaaggaggagaacgtcacccttggacccactgtccgtgaaggagagtatgtctttggtgtcgctcacatctttgcatccttcaatgacaccttcattcatatcactgatttgtctgggagggaaactctggttcggatcaccggtggcatgaaggtgaaggctgacc

SEQ ID NO: 307326 - DNA, 202 bp, Zea mays
aacatgaaaagcatctccgcgatgaggcagcaatgtagacagccattgttattcttaataacccggttgcaatgcaggggatttaacaagtctcacatcattatgtggggggaaaatacaaaacaaaatatctagctgcatccatccaaaagaacttttgatctttcttgttgtagcatccataggcaccaccgcgatctgc

SEQ ID NO: 307327 - DNA, 189 bp, Zea mays
ttccacgcgtccgcaaaggattcagcgcgccgcccgttgggaagggagcttcgaggcggcccgccgcggcgcgtcgtccgggcgggctgagccaatggcacgggcccttggggcgcgaacgcccttacgtgggtcgcgtccgtcggctagctgaggcacctttctgctagcttcggattcttgacttta

SEQ ID NO: 307328 - DNA, 431 bp, Zea mays
tctttccgtgctgtcctcctcgttcccgccggccgccgcggcgttccgccgcgaggtggtcccctacatggcgcctctgctcgggttcctggcccgcacgggcgcgccgttcctggtgaacgcgtacccttacttcgcgtacaaggcggacccggcgcgggtggacctgggctacgcgctgttcgagcccggcgcaggcggcgtggccgacgccgccacggggctgcgctacgacaacatgctccacgcgcaggtggacgccgtgcgcgccgccatctgcgcggccaactacggcagggcgctggagatccgcgtgtcggagaccgggtggccgtcgcagggcgacgacgacgaggccggggccacgccggagaacgccgccaggtacaacggcaacctcatgcgccttgtggcgcagggcagggcacgcc

SEQ ID NO: 307329 - DNA, 125 bp, Zea mays
cgacgcgtgggatcagagccgtacaagggtggggttgattgcttcaagcgggccatcaaggatgacggtatctcttccttgtggaggggtaacactggtaatggtattttgtacttccctactca

SEQ ID NO: 307330 - DNA, 229 bp, Zea mays
tccatgcgtccggcggcatcaactaccagggtggtattgttgtgcctggggggggcctggccaaggtgcagcgtgccgtgtgcatgatctccaactccaccagtgttgtggaggtgttctcccgcatcgaccacaagttcgaccttatgtacgccaagcgtgccttcgtgcactggtacgttggtgagggtatggaggaaggttcgtttttttcatgtccctttggact

SEQ ID NO: 307331 - DNA, 228 bp, Zea mays
tgtgcagccgctggtcggcgcgcagaggggcgtcaagatccacatcgggggagaccacgacatgaaggagcgcctctgcctcgaggccgagcgcctcggtctgtccgtgatgatcatgggcagccggtgattcggtgcctcgcgcagggacgggaaagggaggctcgtgagcgttagtgactactgcgtgcaccactgtgtctgccctgttgtggttgtgcgctaccc

SEQ ID NO: 307332 - DNA, 298 bp, Zea mays
ttccttgcgtccgcccacgcgtccgcagccgggtggtccctgcgacgatgcgctgggtcgctcttcttgtcgctgtctgcttcggcgccaccgccgccaggtccagccacgcccgccacaccgacgccgacgacgcgattcgtctccccagcagctttggcgctggtggtcgaccgtggaattgctgcgactccgctatcaaggacgcctccctgccggcgtggcgctgcaacgacgtggtggacaagtgctccgccgactgccaggactgcgaggcgtcgccggccggcgacggctt

SEQ ID NO: 307333 - DNA, 200 bp, Zea mays
tactttcgagcgaccaaccgcgcacaaaggaagggtttctgagctgagagggcgcaagccatggcgtcgatgaccgtcctgtctcatggcgtcctggccagcacgcatgcctacagcataaccaggacggccggcgtcatcgtcagggcgtgcctcatgggtaacgcccttgcacaagcggtccgtcgcgccgtgaacgg

SEQ ID NO: 307334 - DNA, 437 bp, Zea mays
tttccttccacgcgtccgcccacgcgtccgcccacgcgtccgtctgaaactcccttactgcattgcgatatcaggattcgtctgtgctcttttcgccattggaatcccttatttatctgccctcaggatttggttggggttctccacgcttttcagcctcatgtatattgtgatagcagttgtgctgtcgtcgagagatgggataaccgcacctgcaagggattacagcatccccaaatcatcgcagtcaactcgagtcttcactacgataggttccatagcagaccttgtgtttgcttacaacaccggcatgctgccagaaattcaggcaaccatcaggccttctgtggtgaagaacatggagaaagctctatggttccagttcaccattggcttcttgcctcttatgctgtagttttgtggggtactgggcttat

SEQ ID NO: 307335 - DNA, 358 bp, Zea mays
gttctgaatacaacgattttgatgccataaaacaaaattctccaggttacataatttcatgacaccatggtaaacaatacacaacatcagctataattattcaaggttagtaagtttttggtgcaggcttcactagccctaacccagagccactacccaaatacttgaaatctcttgcctccaggcgttcatcatgtgcagcaaacccagttcctcctttctccaatggaaccagattcctctccctgaatggtttgctgcactccaagcaagctttatccttcactagaaacttgtcggaacatttcttgcagaagacatggccacaggtgctcaccgccacaagggacatggtatt

SEQ ID NO: 307336 - DNA, 368 bp, Zea mays
ataagaggggactttaagggatttcaggcgtacataggataggagtacaaccaacttgagctggggcactgcaaattaatgacagctcaacaattcattttttgttttggcttgagcaaacagattaaaatataaaataaaaaaccagccaagcttggcttacacagggactatacaataccttaccatccatgcgggtttatgactccactcttgagctagctcacccataataaaattaattaagggtttttaaaacggtacttaacagctactaggacacaacacagatggaaattaattacgcagatacattattcgtaggtcgggtcgttcatgtctctggagcgatcgcgaggatagatgga

SEQ ID NO: 307337 - DNA, 510 bp, Zea mays
tgccgtcaggcgtgccatggtccgcgtacggggggggtgctttgaatacacaggcctgacctttaccgtgccggccaacttctcccggttcgctaggaacctaggcgacctccagcaatggcggcgctttgacactatcaagactaggccagcggcgcacgaattccaggctgaggcgatacctcattgatcgtgacggtcagtcgtgccaccgctcgtaccggtgcattgggcgctacggctaccgcgacatgcaccaggacgtggactcgttcgagacggagcttgtggagaccctggccacgttcataacgctggacgccattgaccagctgcaacgaggccagcgaacggaagatgaagctggatctcgggtagcagaaagcttcggctgattgggctttcaagagcaccacgagaagaagacggaccacaaggaggccgaggaggccggcggcgagaagaagcaccacttcttcggctgattgatccttccgtatcgtcgtccct

SEQ ID NO: 307338 - DNA, 384 bp, Zea mays
aaaccatatatattttgaaacgggccgggtaaataacaagcgaattcgtatcattattgaagatatatatttccggcatccctgagacccaattcactccggcggtaagataaatgctcggatcagctgtggagatcagtgctacatcccccaagtgtacgatatcgggctccgcacatcgtgctcaccgctgctccacgtcagccaaccgaacgcagcggggtccatgggtcctctggcgttcgcggacctgaacgtgacggtgtacctgagcttgtctccggcccgcctgaactcgagccttgccggcttgactctaacgctgatgtcgctgggtccggtgaccttgacagtgtacgtgtccccggcgctgctcgacgttgg

SEQ ID NO: 307339 - DNA, 225 bp, Zea mays
aaaaaaaaaaccccccaacaaggttttttttattttgggcgggaactggttctgtacatacaaacggggcacatgcccgtttggccagataggcaatacacaccatccatccatccctggttttttttctaaaaaagctttacaagcggggcctgcctgttgggggaagaaacaccaggcgcctggaagttacaggaaagggccggtccaaggggcccagggggg

SEQ ID NO: 307340 - DNA, 542 bp, Zea mays
gttcttatgaagaaggtggtgaacatgggagagctgcggcgcttagcctgcctcggcgtccccgacggcggtactggtgtccgacccgtcgtctggaagtgtgcagcttcttttggggtatttgccaactgatcgttccttatggacttatgagttagaaaagaagcggagtcaatatagtgcatacagagaagagtttcttctaaatccttcagaaaaactacgaatgattgaggaaacaaagctgtcaagaaagaaagacacaagtattgagaggattggctttctttcgagattcgaagttactaatgaagagcatcctttaagctctggtaaatctagcctgtggaaccaatattttcaggattcagagttactagaacagatagaccgggatgtaaagcgaacacatcctgatatttcattttttttatcaaagtttaaccagggatccttgaggagaaattttaattatattttcaaaattggaccccaatataagaaatgtgcaaggggttgaatgaagttttggcacctttatt

SEQ ID NO: 307341 - DNA, 375 bp, Zea mays
ctctctttctctttcggtatcgcagtcgtcgtcgccgctccccggccgggctcgctcgcgtgcgcgacccacccagccagcacaccagccagtcggcgcagcaaagcatggggaactgccaggcggcggaggtggcgacggtgctgctccagcacccgggcgggcgggtggagcggctctactggtccaccagcgccgccgaggtcatgcgcgccaacccgggccactacgtcgcgctcgtcacgctccgcgtcgccgaggaccggcaggacgccccgggcgggcagtggcgcaccgtgcgccttacgcgcgtcaagctgctcaagcccaaggagacgctgctcctcggtcacgtgtaccgcctcatcaccaccc

SEQ ID NO: 307342 - DNA, 339 bp, Zea mays
gtcgtgtctttgaacgggtgaaccgtgatgaaggtggtgacacagacggtggtggtgaggccagggtggaggaaaggtaagcaggtagcgctgcaaggcatgggggacgagcggccggtgtgcctgcccggcgacgccattctcacggtgtacgagaagaggcaccctgcgctcaagctgtaggacgaccacctggtgcttaaggcggaggatcctcttgtgtccgcgctcaccgagtggccctgtttgttccgtcttctcggtggcaggaaggtgagctgttcgttccaggacgaggtggatcgacccgactgcgataaggtgaccgcccattagggt

SEQ ID NO: 307343 - DNA, 449 bp, Zea mays
atggacacctttccatttttcactcaaattcaggtctttggcgctttacgaatgtcggtaaagatgctccttatgtggaactcaagaatgactattgatggtggccgagaactaggtgtgggaacttcattactagaaggtagcaatttgatagtgctgaaggaagcatctgtcatacattcaaatgctaatctagggattcatggtcaaggagttctaaatttatctggtcaaggagatacaatagaggcacaacgccttattttatcactgttttacaacattttggttggacctggagctgttctaaggggcccacttataaatggaagtcgtgatgagatgtaacttaccaccttcagattttgtgttaaatactccttttttcattgttttctcattggtgaatgattaatgagattttgtggcaacaccagggccccaaaact

SEQ ID NO: 307344 - DNA, 462 bp, Zea mays
cccaagtatttgtacgtaactggtcctccttcggattggagtgaccgcgaggtggccatactgaaggaaggacttgtgagatatgctcgtgaaccgagtatcatgaggtacattaagatagcagctatgcttcctaacaggaccatcagggatgttgcgttgcgatgctggtggtctacaggtaaagagagaaggaagaaacctgatggattctatacaggaaaaaaaatgagagacatgaagccaatccaggacaaaatggttgcatctgtcccaatagctaattttcacatgacacctacaaccaatgtaacccctttttcgatatcaatgcaacatccaaatcaacaaagtcaggttcccaaagaagctcctattgtcgacagtgcaacccagcgtcttctggaggaaaataatcagttgcttaaccagattttttgaaatattaaaacattcaagaca

SEQ ID NO: 307345 - DNA, 492 bp, Zea mays
tgtcgatccaattgtcacttgctctccctccaacaagctaattaaggccggtcatccctcttctagctcgtttcattatccatggcggaggagaagcaccaccaccaccacctgttccaccacaagaaggacgaggagcagctcgccgccggcgggtacggcgagtccgccgagtacacggaggccacggtgacggaggtggtgtccacgggcgagaacgagtacgacgagtacaagaaggaggagaaggagcacaagcacaagcagcacctcggcgaggccggcgccatcgccgccggcgccttcgcactctacgagaagcacgaggcgaagaaggacccggagcacgcgcaccgccacaagatcgagagggaggtcgcggcggcggcggccgtcggctccggcggcttcgccttccacgagcaccacgagaagaagaaggaccacaaggaggccgaggaggccggcggcgagaagaagcaccacttcttc

SEQ ID NO: 307346 - DNA, 400 bp, Zea mays
tcattttttttggtacacgggagacagtaacgggaagccgggcctaacagtggatagagtcgcgcggctacgtaccagcagcgggaacataacaacgtcttacaccgtgggcgaggagcgaccacacaggacttgacaacagacacacatgccaggatagcgggagcagctctcggcagatcacgggataggggcagcacactggcctgatgctgcgtcatcagcaaacttctctagtactggggaccctggtcgccatcctcgcccttattgaactcagcaccgacctactcgtagtccttctcgagcgccgccaggtcctcacgggcctcagagaactaaccttcctccataccctcaccgacgtaccagtgcacgaaggcacgcttggcgtacatga

SEQ ID NO: 307347 - DNA, 287 bp, Zea mays
cggaccgctccggaattactggctggaccgacccacgcgttcttaatgtcatgatgcctgtggaaccactggggagcgtagacaaggggcccatgacattctctgggtgggcgacagcaacgtgctttcttggcgcgcaatacatggaggacatctacacgttctacaagattggtgaggacgagagacggtcatgtgactacatcgacgcccaactcgagatcaactgtaagatgagggctatcctggctgattggataatcgaagtacaccacaagtttgaactg

SEQ ID NO: 307348 - DNA, 396 bp, Zea mays
tcgttaaatctcatccaccagcaccttattcgcgcccaaactcggatgaaaaaacaggcagataaacaccgctctgaacgctccttctcagttggcgattgggtttacatgaagctccaaccctacgtccagtcttcagtgcttccacgtgcccaccaaaaactcagttacaagttctttggcccttatcgagtggccaacacgggtcggttcagtggcctaccgattggaactcccaaattccagcaggattcatcccgtcgttcatgtctcccaactgaagctggcaaaaggtttctcgggctctgctacttcttccttaccggatgaactgccagagttcagcataccactccgtattttgcagactcgtggctttgtaaaggtaaacgcttt

SEQ ID NO: 307349 - DNA, 429 bp, Zea mays
  unsure (1)..(429): unsure at all n locations
tccacgcgtccgcccacgcgtccgcccacgggtccgcccacgcgtccgcccacgcgtccgagataggcgtcttcgtactcgcctacctccgcggctcaaacctttcccccttctcccaattccttccgccggccgccgctccacccgtacgacgacaccatgagggagtgcatttcgatccacatcggccaggccggtatccaggtcggaaacgcgtgctgggagctgtactgccttgagcatggcattcaggctgacggtcagatgcccggtgacaagaccattgggnagggtgattgaatgctttcaacaccttcttcagtgagactggtgctgggaagcacgtgccccgtgctgttttttgttgaccttgaacccactgtcatcgatgaggtgagaactggcacctaccgccagctcttccaccct

SEQ ID NO: 307350 - DNA, 415 bp, Zea mays
  unsure (1)..(415): unsure at all n locations
gtcataccgaggtccttgatgcccagagagggaactggcgaacctgttggagaagtgagggcggtctctggcatgcacgagaggaaggcggagatggcccgttttgctgacgccttcatagcgctacctggcggctacggaactctggaagaggtgcttgaggtcatcacctgggcgcaactaggaatccataggaagccggttgggcttgtgaacgtgggatgggttctacgacccgttgctgtccttcatcgacatggccgtgaacgaagggttcatcaaggaggacgctcggcgcatcgtcgtctcagctcccacggcgaagggagcttgttctcaagcttgaggaagtatgttccggaatacaggcggtttttgttgggnagggatccagatgccggcggcggagctggag

SEQ ID NO: 307351 - DNA, 325 bp, Zea mays
gttctctgatgttgatgccgttgtgtttgacaagactggaactttaacaattggtagacctgtgataactaaagtaataccttctagaggcatgggcgatgcgaatacaaaggatttgggggccaaccagtgggcagaggctgacattctgagttttgctgctggagtggaatcaaatacaaaccacccgcttggaaaagccatcatggaagctgcaggggctgccaactgcgtcattatgaaggcaaatgatggatccttcatggaagaaccaggatctggtgctgtggctaccattggtgagaagcagttttctgttggaaca

SEQ ID NO: 307352 - DNA, 339 bp, Zea mays
tgttggttccttctccacaagaccacaaccatagaatcatctctcatgtgtacaggtagctgtgaatcgcatcatcggagcgaaatggtccacctgttccggccaagcctgcatcgccatcgactacctgctggtggaggaggagtttgctccgattctgatcgagatgctcaagtcgacgctggagaggttcttcaccaagccagagtacatggcgcgcatcctgaacgagaagcagttccagaggctgagcggcttcctggccgaccgcagggtggcgtcttccgtggtccacggcggccacttcaaccccaagacgctgagcatggagcccacgct

SEQ ID NO: 307353 - DNA, 442 bp, Zea mays
ttttatgcactcggctttgctagaatcttgacaggtggcactgcatcctttggtgggtgttgatggacatggaggaaaagtagttgccaaattctgtgcaaaatatctacacatagaagctctccataccgaagcctatgctgctggtgacctgggtgctgctgtccacagagcttacttaagaatggatgaaatgatgcggtgtcaaagaggatggcaggaactccaagcacttggagataagataaatcagttcactggcataacagaaggcttgatttggtcccctaaagcaagtgattcaaatgatagacatgatgattgggctttcgaggaggtacttgtggaactggcatggctccataagtgtatactcatcttcctatgtctaggagagcatgccatctgccttttatttattaatttggcagtcattggattt

SEQ ID NO: 307354 - DNA, 131 bp, Zea mays
aaaccccaaacgccaagcattcttgcgggatagtcccgtcccaaaaggaggggtccattgcacaagaaaaatacctacctcaacagggacggaatgggccacgggggggggtccccttgcggacccgtggg

SEQ ID NO: 307355 - DNA, 373 bp, Zea mays
tctactcgtccgcttaggtggccggacgggggggggattgtaacctcaactcgggatctaaatcgggactcagcagcgcgccagctccataggaggagatggcgctgacaacaatgggtcttggtggacctgcgggcatggggcaaaacctcgccctcaacattgcagataaaggggaccccatctctgagaccaacaggacagcctggaaggtggacgagaccgtgcagtgtgccaaggcggaaggaaaccctaccgtctaccgcttgcatgaccccgcgttctttgtgaagtgcattcagaagccacgggtggtgatcatgctcatcaagggcggtgcgccaattgaccagaccattgcgacgctcgcagc

SEQ ID NO: 307356 - DNA, 484 bp, Zea mays
tgatccttgttcctggaagaatgtataattggggaggaatggagtgaatggctggatgaactcgctgtcaacaattctgttctggtgacactgaacttttacatgacagaactcaaagtggagcctgctgatctggagcttcttgcaaagaactgtaaatcattgatttctttgaagatgggtgactgtgatctttcagatctgattggggttttccaaacctccaaagcattgcaagaattcgcccggggtggcctttttggaagtgggggggaccaccaagaccgaaagggtaattttccaacctaggttttgcttcttagggggtcttaccttcatgggtaaaaacgagatgccagttatctttccgtattccacaatgcttaagaaactggacttgcagttcactttcctcaccactgaagaccactgtcagcttattgctaaatgccccaacctaagtgttctcgaggtgaggaatgtg

SEQ ID NO: 307357 - DNA, 154 bp, Zea mays
tgtgttctgaacgttgatgtgaacgagttccagaccaaccgggtgccctacccgaggatccacttcatgctttcgtcctacgctccagtcatttctgctgagaaggcctaccacgagcagctgtccgtggctgaaaacaccaacagcgccttcg

SEQ ID NO: 307358 - DNA, 353 bp, Zea mays
cttttatgagctagggaggcgtccgttgggctctgcggaggatttagacgcagtgggcgagctgaggggcgcgcgggaggacgtcaggcagctgctcaaggccacctcctgctatcccatgcttggttcgattacggttggcatgatgctggtacatatgacaagaacattaccgagtggcccaagtgtggtggagctaatggtagcttgagattcgaagtctagttgataacctgtgccgatgctagacatatggaggctacctccgtcgaggatgctctcaaggacaagttttcaggtgatacctatgcagatcttgcttcagctcgccagcgccacactccttgtggacg

SEQ ID NO: 307359 - DNA, 328 bp, Zea mays
gctgcgcctcgtgcaggcgccgctgacgtaattggctggacccaccacgcctgattgttttaaacactgacctagacatagacagcgggagcgtgagatggccgacggggaggacgccgccgccgcgcgccgccgggccgtcattacagactaccgcaagaaggctttttactttgctgggagctagagtcgtgcgtcgttaccgtgagagaaagtcttaaaactgcaaagaaggattttaccaagactgaggacgacttaaagtctttgcagagtgtggggcaaataattggagaagtactccgaccttttgataatgaacgcttta

SEQ ID NO: 307360 - DNA, 515 bp, Zea mays
cccattcgtgcgcaaagggtgtccactcactgacggggactcatatatggcctgcagggtgacactcctgcggattccgcgggaaggccttatgttgggggaagtaagaaggttcttgaatgcgccaagcactttgtcggtgatggtggaacgcataacggaatcaacgagaacaacacgatcatcgacacacacgggctgctgagcatccatatgcctccttactacaactctatcatccgaggtgtctccacgggcatggtctcctactccagctggaatggagagaagatgcacgcgaaccatttcctggtcacggattttcttaagaacaagctcaaggttaggggttttgcgatttccgactgggagggcattgatcggatcactacttctacttacgccaactactcttactcaattgaggcttgtgttgaggctggaattgacatgatcatggatcttttcagatccacgaattcattgcctatctgacgacacaagttcataacaag

SEQ ID NO: 307361 - DNA, 367 bp, Zea mays
ggaagcctaaagtaagtgattgagcaagcaaagacagacagacagacatcggtgccatagaataagtaaaacaaagcccaaacttaaaagcacacccatcatcagaattcagaaattaattagctaggcatcactacactaactagctgcatgaggaccgtgcggacgcgaagctggtggcgagctcggcgcagggcgacggctgcaccccgagcgcagcgccgcgcacgtccctgcacttccaggcggcgtcgctccgccacccgaagagcttgacgttggagaggcatatgcgggtgaagggcgaggcccggatcccctccagtgacccgggctgctggacgttgacgccccacacgttgctgat

SEQ ID NO: 307362 - DNA, 226 bp, Zea mays
cctatgtttccggagaatgccgttcaagaggttcgtggagatcgggcgcgtggcccttgtgaactacggcaaagactacggtcgccttgttgtcatcgtcgatgaggtcgaccagaacagggtaacttgtggacgcccctgatatggttaggctccagattaacttaaaacggctctcacttactgacatgaagattgatatcaaacgcgttcccaagaagttaac

SEQ ID NO: 307363 - DNA, 254 bp, Zea mays
cggtgggggtagtattacctatgggggggattattggaaagtcaggggtaattcagtggtcaaggctgtttcaaacgcctacgtacccatcggggcaactcttgttagcccagagatatcagatgtgatccattcccagagcaataagcttggttcatttgctcatggattcacgtactccggccatccggttgcctgtgctgtggccattgaagctctgaaactttatcggtatgtatgccgggccgcgcttt

SEQ ID NO: 307364 - DNA, 509 bp, Zea mays
cggatgtttggggtcgtcgccgacgaccacttcgggaggcaccttaacgcccttgggcccgccgccgtcgagcgcctcgacgacggcaagcaacccgtccgcgacgccgggcgacagctccttatcacgctcatggaggtttcttcaccaacaattatagttgaaagagctggtagttatgcatggactcataagatttggagggtgagggacgagtttgtacgtacggtggcatctgcagttgggctatttgcttctacggagatttccttgcaacgagttttgctttcacctgtcctgcaactaatgaatgattcgaaccaaagtgttcgagatgctgctatctcttgtattgaggttagttgaattcttattcgatactggatagacctgcttcagccgacatttttccttttttcccttacacccatgatgactggtatgaactctatttctatcgaccttgttcaatttccattagttccattccacatttacagctggagaga

SEQ ID NO: 307365 - DNA, 416 bp, Zea mays
caatttattgttcgaaacttagcaaagctcttagggtggagcttgcatcaaacaagggcacaggtccattttaccactactggcaagagttcatgtacttccttgaggagaactggaggcgcatttgggttatgactctctggctctcaatctgcatttgcctctttatatggaagttcatccaataccgtaatcgagctgtatttcacatcatgggttattgtgtgaccactgcaaaaggtgctgcagagactctcaaattcaatatggccttggttctatttcctgtttgccgaaatacaatcacttggattcgatcgaagacaaagatcggagctgttgtgcccttcaatgacaacataaactttcataaagtaatagcaacaggtgttgcaaatggtgttgctttgcatgca

SEQ ID NO: 307366 - DNA, 551 bp, Zea mays
  unsure (1)..(551): unsure at all n locations
gtcgctgaccaacccgccgccgtcctggaccggcaccgacgtctgcggcggcgtctccttcagcggcgtcacctgcaacggcgccgcccgcgtcaccggcatcaacctcgccaagctgcatttatccggcaccctttcctcgtccctcgccaatctcaccgcgctccaatcgctgcagctccaaggcaacgcgctggagggcgacctgccctccctggcccagatgggctccctcgagaccctcgttctcgacggcaacgccttctccaccctgccgccggacttcctcgagggtctcccctcgctgctcaagctcagtatggacgacctccctctcgagccatggagcatccccgacgctatcgcggggtgcgcgatgcttcagaccttctcggcctccaatgcctctgtctctggcccctctncggcggttcttgccaacctgacgtcgctacagacgctgcggctgtcgtacaataaccttaccggggtcctgccggtggggttagaggcgttgggctcgctggagacgctgcagttcaacagcagag

SEQ ID NO: 307367 - DNA, 519 bp, Zea mays
ttatttcaaaaggatgagtgcttacttttgcagtggggtgctgtttctcatgcctcacggagatcatcacctagagtgacaaacgaggaggttcaaaaggctgcagctgttttgaagggatctgaccaccgtcgtgctaccactgttgctgctagattggatgctcagcagaaaaagctcaaccttcctgtcctttccacaaccacaattggttcattccctcagactgtggaactcaggagggtccgtcgtgagtacaaggcaaagaagatctccgaggaggaatacatcagtgccatcaaggaagaaatcagcaaggttgtcaagatccaagaggagcttgacattgatgtgcttgtgcatggagagccagagagaaatgacatggttgagtacttctgtgagcaattatttggttttgcattcactgccaacggatgggtgcaatcttatggaccatgctgtgcgaagtcacccattatttatggtgatgtcagccggtccaccccatgacttgtt

SEQ ID NO: 307368 - DNA, 279 bp, Zea mays
cccacgcttccggcgccgaccttcacctccggcgccggagtactacactctgagctcgggttcaccgcaccgcacagagcacccctaactccccatccgatccgagctctactcttccacctttcaggcatggaacaaacagctcccgagggttctcagaacgacgcttatcactatgattctaaaatgcacgagctgctgatcaccagcgagactgaggagttgtacacatatcataggtcgaaagcctcactggcaagagcaagctcgatgcttcaa

SEQ ID NO: 307369 - DNA, 210 bp, Zea mays
tttacttgtagcttgctgattttggccttgggagatcagtctcgtttgatcacattggcaaccttactaaccgagtgatcactttgtggaatagacttccagagttgctacttggaaacacaaagtatggcccagctccttatataagggaagactggtgaactttggtagaattgaccacagggccggatttctagaccagagatgatt

SEQ ID NO: 307370 - DNA, 399 bp, Zea mays
gggtctccaactcccgatccaccacagtagacttaggccataaacagacagcaggggcattgtctcgagcagttgtagcacacaggtgcaacggaaagcaactagtaatacgtagtcggataggataggataaaggcggcaaccgatctagcgctgccgagcgaggcacgaggctgtgaacgtcaagagcggaggagcatcagatgaaggtccagttgacgaacatgagcgccaggcactgcggcgcgccgtcgtcgcccaccaccttccacgccaccgcctgctcgtacgacgcctgccgccccatgctcgacctgcacacgccgccggggaggtacgccaggccctgcagcatgatcttggggagctgtgcgaccagggccttctgtcccccgtcat

SEQ ID NO: 307371 - DNA, 623 bp, Zea mays
  unsure (1)..(623): unsure at all n locations
ttaggcttccatgcttgatgatgccattgaggacctgaagcatcttcagctccaggtgcaggtgaccaaactgacgccgcactgctcgtttgctactagtactgctattaattacctacagtttgggatatgctggactgcctacatatagctgcgtaggctaaatggttaacaattgacatggccatattcgaatgtcaaatggctaacaggtggtaagacccttgcaaaattcccaaacagcatanagcttgggaagcttggactctgtcaagatccgaagaagaacggcggagcactcatttacatgtttaatatgtgagctgtctttttctattttgattttagcgagcaggcgtttacatgagattaggtgagttggcaccaaaatgaaaaatgatggcgcctttgaaagaaaaaccgtttgcatctgtttgtggtcagcactagagtcagtaataggaggtatatttaagtctaaaaaggtatcataggaggtataagtttctacgagatgctttaaagttctatcccgatgttggagtatgtacacctggaaatgggggttgggattaacacaatgctccgacctatggaaaagagaaatggagaaccaacatttt

SEQ ID NO: 307372 - DNA, 264 bp, Zea mays
aaattaaaagggggcccaccgctttaaaaccaaaaaaatggacccccctccaaatttaaaaagcggggggttgttcaaccctccatttgcaagggggtttgaaaatttaaataccttaaaaaacaaaaacgcccccttttttacgagcttggacacagggttttaaagccccacaattaggtgttgcaccaggggcatttccccaaggggggcctaaagttccccccccaaattggaaaacggaatcatctccaaaaattttgg

SEQ ID NO: 307373 - DNA, 308 bp, Zea mays
gagagcaaggacggagacggcggcgtcacggagaaaccgcaggaggagatcgacggcctccggctgctgaggaagctcgacttctggctctacttcttcagctacatgttcagtggcaccctgggcctggtgttcttgaacaacctgggacagatcgccgagtcgcggcggctcgggcagacttccacgctcgtctcgctgtcgtcttcgtttggattcttcggccgcctgctcccgtccttcttggactactactccgcgaagagcggctactccatctcaaggactggatccatggcgtcgctgat

SEQ ID NO: 307374 - DNA, 155 bp, Zea mays
cactctagcaacgcctttgcgggttttaaactctaatgccgtctagctaccaaaggcacaagccgacatatggcggctcaacctcttcctacctcacccccctgtcacttaagtgcgccgtgtagttcggcatccctacggcgatctaccgccat

SEQ ID NO: 307375 - DNA, 310 bp, Zea mays
ctctccccgttttatcgccggcgccggaagcgcctccctcgatccagatccaggagatatgcctcgcaatgatgatcgctatgggaatacacgcttgtatgttggaagattgtctccccgcacccgttctcgtgacctagaataccttttcagcaaatatgggaggtaagcatcacattatatgcacatagaactattctgaaactcagcgggcgctgcggcgctgctttttgaggtgagggccaagcacggggggcggggcccccgcatctgggacgcctacatagaggttcccgggaccattcctaac

SEQ ID NO: 307376 - DNA, 390 bp, Zea mays
gtccgcttccacagggagtccggggccccacatagctccgaaaagctcggcaatgatgctcttttgctagcggcagcagctcaccacggtctgctgccgctgccgacggcgcgatgctactggctcaacccggagatctacgacgccggcgggctgagccgccgcgcgttcccggacggcttcgtcttcgggacggccgcgtcggcgtaccaggtcgaggggatggccaagcacggcgggcggtgccccagcatctgggacgccttcatagaggttcccgggaccatccctaacaatgccaccgctgacgtgacggtcgacgagtatcatcgttacaaggcagatgtgaacataatgaagaacatgggctatgatgcgtaccgattttcg

SEQ ID NO: 307377 - DNA, 392 bp, Zea mays
cgtcaacacttatgttcaaccaccgccgcctgctccactcgcgcgggcccgacgcgctcgaccgcgtgcccgggttccgtttcgacgccattcccgacggcctcccgccgtccgacgccgacgccacgcaggacatccccgcgctctgctacctccaccatgaccacctgcctcccgcacctactcgcgctcctcgccagggtcgaggtcgacgccgggtccccgccggtcacctgcctggtcgtggacgccgtcatgtcgttcggcttcgacgccgccagagagatcggcgtgcccgtcgccgcgctctggaccgccagcgcctgcgggttcatgggctaccggaactacagaaaccttatcgactggggcctcgtgccattcaagagcgc

SEQ ID NO: 307378 - DNA, 434 bp, Zea mays
  unsure (1)..(434): unsure at all n locations
atgaacaaatgaataaataccatttatattcatgaatagatatcgtactagattaggattctaatgatatccatcacatgaaacacaacatgccatcacaagtcagataacacctggactctgagaacagcctaccaaacaaacggctgcctcaagcattcaaactttcttgactaccccgacaagcaaacatagacggatagaccctagcgaatgtcaggctcgccttccattacattatactaacaaacactagcacgaagttatcttcgtttacttgatctccactgcggctgcgggtgggcgaagcgcgacacctccgaactgctcactggaatacttcttgtatacagacctcagcttgctgtcagcggcggacgagtgtgcgctgaccagcancttcgtgcactcgattagctctgtctctgactctc

SEQ ID NO: 307379 - DNA, 381 bp, Zea mays
cgctcggtctcggcgtccgcctccacgcacgcttcctcccgcaggccatccacccgatccgatccgatccgagcgtccaccatgtgggtgacgtcgatgccgcaggtttgggacgaggagggcgcggccaagggcggcgcggtgaccccggcgccggccgcggccatgctgggctcgctggcggggtggctgtcccggaccgtgcagccgcagccgccggcgccccgggtgtgcggcaccgcggggggcccgcccgtgacggcgcccaggctcaggctccgcgacggccgccacctcgcctactgcgagagcggcgtgccccgggaccaggccaggttcgccgtcgtcttctcccacggattcaccggctcccgcgaggac

SEQ ID NO: 307380 - DNA, 383 bp, Zea mays
gacagaaggatagtcgctgacgagattagtacaaaactataccgatacaatgcgatagcccctgacagaacgtgacaaccctaattgtagctcgaggttttgctcaaccaaatgtagccaccaggaactccttgtaaatgctcatgaacttggccacgaaagcttccagatgaaaaatagcctttgatccaaggcgcatcttgtgctcgtagtgtgcggcccagcgacagatttcatatttcagatcagcatctaacttcctcagtaactctgctagcaacttcttcaaaatactttcgggtgggatacaattgacgagtaattcatagaatttctggcgtacatcaaatagcctatttcagttggttgagggtgtgaaagta

SEQ ID NO: 307381 - DNA, 351 bp, Zea mays
ggaacatgcttcaggtggcgccgccgggcacgcacgcgctgatcgtgtccacggagatcctctcgtcgcagtactacgtcggcatggaccgctccatgctcctgcccaactgcctcttccgcatgggcgccgccgccatgatcatgtccaacaccgcggcccgaggcgcgcggttccggctcgcccgcgtcgtgcgcacggtggcctccgcgcgggacgccgcctaccggtgcgtgttccaggtggaggacgaggagagcaacacggggatccggctctccaaggacctcgtgcccactgccgcccagaccctgaaaagcaacatcgtcgccttcgggcccctggtcctgc

SEQ ID NO: 307382 - DNA, 291 bp, Zea mays
ttatggtgttatggttttgtggcatcttgagagctatggagaagattgtttaattcctgtggatatcacagtcaaccgttttttagtagagttctcttctttttattaggagaaaagctgcaacaattagaagaacagaagggaatagttatccgcttcactatcgggcacagtgctacatccaacagtatactggacaaagctatagattcagaggacgctcagcatcatgactttcttaggctggaccatgttgagggatatcatgaactctcagttaagacaaaaata

SEQ ID NO: 307383 - DNA, 286 bp, Zea mays
acgcgtccgcccacccacccgcccgggggcttcttttaaactcgttaattcctgaggcccccaaccactaccacccttcgtcgccgtcactcttctttttactgacaaaaaaagctgtcccaatctcaagcacatacgggaatagttatccgcttcactatcgggcacagtgctacattcaacagcatactggtcaaagctatagattcagaggacgctcagcattatgactttcttaggctggaccatgttgagggatatcatgaacctctcaactaagacaaaa

SEQ ID NO: 307384 - DNA, 367 bp, Zea mays
tctgttcttgggcgtacgcggacacagccccgatccgaatcgtcgtccttgcgagcctcgccgatcccccactccccttccctcgcttcaagatgcagagtctttgtgaagacctttaccgccaagactattaccctagaggtggagtcttgttgactctattgactgagtcaaggctaacatcttattatttgattgtgataggacagtgcgagtttttttgtaaagtccttctatttgactggttctgcggatttttatgataaaaatgttgaagggtggaatgcatttgtcccacccctttatttgtggagttataattcttgcacaattttttatatgttcacattttttatacaattatttc

SEQ ID NO: 307385 - DNA, 537 bp, Zea mays
tgttcggattcagatcgcggccggtgcgaacccacgaaggcacgaacggtagaacccgaccgagcgcggcagcgcaaacctccgatccctgctgcgagcaagggatggcggcggcatgggcagtgctggcggcggtcctcgtcgcggcgcaggtggcgtctgcggcgccggtcacggcgccagcgttcctctgggcgcctaagaactacggattccgctctgatgatgctaaggaggtagtccattatcaaacaatctcaccaaagaacttagctaaatctgttcttgaggaaggtggctggtcaacctttatgtgttcaagggaggatactgagaagcatgttgatgttgccattgtttttattggctcaaagctacaatcatcagacttttcgaaagataagcaagttgatccagctttagcagatacattgatgctttctttacagaatagagttttttatggcatttccctactttttcacattttacgatgagatattggtggtggcatttgttttaggcttcactgagaac

SEQ ID NO: 307386 - DNA, 431 bp, Zea mays
caaggtaacccatatccaatgggtctctcaaaaatatgttacatccaaaaccttttccagactaaaaaaagggaagtaaatttaatctatgcacatgacagccagtaattacatcgcggaaactaagaggaagtgaaaacatggatacagttccagctcccaacaatagaaatgaaaaccgtgtaatgcgactgccagaaactcctaaaatatatgtggaactttgcttgctagaacacgttcctgcctttcgatataagcatgagggaaccatcctgctttgcccttgcattcaccttctgcccaaccattgcttgagatctttcggacaattacaatgtcaccagctgacaaggtaagctcaaactcactttcagcattaaatgaatcaagggcctctccaaggaagaaatcgacagattggactgact

SEQ ID NO: 307387 - DNA, 346 bp, Zea mays
ttagttcgttcagctttagcctcagtcattatgggaatggctcctgtactgggaaaggatgctaccatggaacagcttcttccaatttttctctctttgctgaaggatgaatttccagatgttcggcttaacataatcagcaagcttgatcaggttaatcaggttattggcattgactttttatcccaaacactgctaccagccattgtagaacttgcagaggataggcactggagagtccggcttgcaataattgagtacatcccattgctggcgagtcagttaggtgttgctgtttttcttctccttttctttttatatttttcttcttctccatcttctattt

SEQ ID NO: 307388 - DNA, 194 bp, Zea mays
ccccccaccttctcctcctgctcctgccctcggtttctgatcagcgaacatgggaacccgcggcgtcgccctgctgctcctcgcggcggtgctgctcctccaggcgctcctcctcgcgtcgtcggagggcctggtgcgggtcgcgctgaagaagctgcccgtcgaccagaacggccgcgtcgccgcgcgcctct

SEQ ID NO: 307389 - DNA, 348 bp, Zea mays
gaagtaaaagcctttggtggttgtttattagcccacgggtattatggccttacacccaatatagttgcaataccattacatacccgcacaatacacctgctgctgctaaacatataggacgaacacactagtaaattaaacggacggaacggcagaagacaggccgggagcagagagctttgcgttatcctctccttgatcgtctaacggggacggttggcaccacacaaagaggagggtccgtagctagggcagcagtggcctcttatataaccattaccatcagcagctcatgtatggcggctggctaggacacaaccctttcattgatccagaccacctaaatgc

SEQ ID NO: 307390 - DNA, 514 bp, Zea mays
tttttaataattttttttcctgaaaattagttacagggggatgagcatataaccacgaatacaaaggtagttacagtgtcatgagcatataaccacgagtacaattagctatattctcagcttacttgaattgttggcgcccctttcctctccggtatagcatgaatgctccaagggcaatctggccctttacaataccctctgaatctagtcttattggttgcctctattccaagctcaaattctttatttatggcgtattgtcttattgcgagtctgaagtggtgcattgttgcatataagctgccaggctccataacaggattgttcatatcatatattgtcctattttcatcaagcactgaatcagtacacgaaatgcctgctcccaattcatcttcacatgtgttggtatttccaaaacgtcaaccacttgaatgatcttcccttctatcatcttgattgtctagaccaagctgaaaatatagaccttgttcactagtaacatcatttc

SEQ ID NO: 307391 - DNA, 323 bp, Zea mays
ttacctaactggactctgggaggtagatcttaatgggaatgtaaatggagcggtggaaacatgtggagagagttttcacctatttgacaagttccttaacttttttaaacttcaaatatttgctcatatttttgatcctaatgcatttggttttgcttattttattaacattttattatcttgtattattgaattagtaagattttacttgaattttattacattttgcataactttgaactatattctttcttctttttattttgttatcttttgccgtcatgtctttttatatttttatttatactatatacttattttta

SEQ ID NO: 307392 - DNA, 259 bp, Zea mays
tctgaggagaatattctctaattggagatatttcgttctacttactttgtaaccaaacaacaacaaaactggaacagaacggcttcgttctacttgactcttcaaccaaacactatcttaagctgtccaagcttttctcaggtgcctgcaggttggtccttcttcaacttctcaatcatgaacttcctcgtgtcagcacccttcacattgaattccatcagaaagatcttcgtacagcaccttcaagctagtatcaaat

SEQ ID NO: 307393 - DNA, 459 bp, Zea mays
cccgcctgcacggaccgggaacttactggctggatcgacccacgcttcttcaccaaacagagctccaactcaaagagggtgctaacgttgacagaaggacctagctcacacctatgtacgtatccagggagcctggtatattggcagaatcacctagttacatactcagctctgtgttccgcctgaagaagcaggagctgcagtagctgccgaatcttctactggtacatggacaactgtttggactgatggacttaccagtcttgatcgttacaaaggacgatgctatcacatcgagcccgttcctggggacccagatcaatatatccgttatgtagcttatccattagacctatttgaagagggttctgttactaacatgtttacttccattgtgggtaacgtatttggtttcaaagccttacgcgctctacgtttggaggatctacgttttccccc

SEQ ID NO: 307394 - DNA, 423 bp, Zea mays
tgtcaaccccaatcccaggtccaggttatcacaatccaccccccttagaagactgacgtcctcgtcggtcaaccccaatccaggaacctccccacttagccacgtctgtgtctagtgtcgtcatatgtcatgccatgtgatcactccggacccacatgcgccatacgccatatacccgaaccctgtagcccacacacgccgtgaaacctcgagggtcggccacccatcccaaattgctccaaggcaagcacgcttaactgggagggttctttcgagataggtctttcgaaaaagaagatgcaccttggttggtatggatactctattaattctattaagccttaggccaggacatcaccatcccagggctaggatatcacagtttaaacggttagtaatggctatagagcacatcatttgtat

SEQ ID NO: 307395 - DNA, 390 bp, Zea mays
ttgttgtcactcgtgcgtccacgcgtgcgtgagagttcaaaaccctagatacctccagccagagggaggagttcaagagagagagagtgtgcgagagagaaagaatggacacttctcagagatggtgtgaccatgatgagtgcaagcactgcttctcttctgaaagaagctatacatgtcattagttgtggttatgaagacaagactgattggggaaaagagattggctggatctatggatcaggtacagaggatattctaactggatttaagatgcattgtcatggttggcggacaatttactggatacctaaacggcctggatctaaagggtctgcacctttgaatttttcagattgtcttcaccaggtgcttcggtgggctcttggg

SEQ ID NO: 307396 - DNA, 541 bp, Zea mays
tatttgagaaagtctaaacttatgccacgagctacaggtccttataaagttcttgcaaaaactaatgataatgcatatacacttgagttgccgccagatattggggttagtcccacctttaacatttcagatttgaagccatatatgggtgatgaagatgagaccgagtcgaggacgactccaattcaagaggaggaggaggatgaggacatcacttctatacatacaatgaatggaccgataacacgatcacgtgcatgacagctcaatctctaggtacgttctaccctagtcaattgtgtttcagagcttacgcttgtggccatggatgtatcgatgattaggaaccttggagagaaccagcaaggacttgtgaaaggcctatgtttgaggaggagcagcaagggcacccacaacaggaaggagatcatgtccgactcggctgcggctccatctcatgtttcaggaccagtctgcactaatatggacgcccaagatgcatccggactccaatgcgacggactgatatggttagaaagat

SEQ ID NO: 307397 - DNA, 491 bp, Zea mays
tcccacgcgtccgcggacgcgcggggggtggcctactttaccctcccgtcctgcgccacctctgctgagagcgagaagagatggccggcaagggtgatgggccggcaatcggcatcgatctcggcacgacctactcttgcgtcggtgtgtggcagcacgaccgtgtcgagatcatcgccaacgaccagggtaaccgcaccacaccctcgtacgtcgccttcaccgactccgagcgcctcatcggagatgcggccaagaaccaggtcgccatgaaccccatcaacaccgtctttgatgccaagcgtctcattggcaggaggtttagtgatgcctctgtccagagtgatattaagctgtggcccttcaaggtcattcctgggcccggggagaagccatgatagttgttagcacaggtggaggagaaacagttggaggcgaagagatctcctcctggttcttacaaaatgcggagatcgctgaaagcttacctt

SEQ ID NO: 307398 - DNA, 246 bp, Zea mays
cctactccaccgacgcttcaactccaccgggacgaagctcatctcatacacccaccggggggcaccacacggccccaaccaaccacaccgcagcgcagcaaaggcgggcaacggcgccaccgaggagagcgacccgctgaacaggggcgcggcggcggcggagctggccgggagccacctggacgaggagcagcgcatggcggcacacgcccaacaccccgatagcaacaccgaagaatataacac

SEQ ID NO: 307399 - DNA, 235 bp, Zea mays
ctactggcaaaatacataccggtgccaggagggtgaggcagtcatcgaacaacgggtgcatgacgagcgcctgccccacctgcatccccctcgtctcgacgccctctgcatgcccgttcaagaagaccaccgactccaggttccggcaccgcacggacacgtgcagggccagcaccggcggtggccgtggcctcaacaccgaaaatgatggcccgctttggctgcccacctggga

SEQ ID NO: 307400 - DNA, 529 bp, Zea mays
  unsure (1)..(529): unsure at all n locations
agcttttgtctgctgcggactccgcctccattttgctctgtttcttgcaagttgctcttgcggtagttcccccaactgccaccatgcagaacgaggagggtaagactgtggacctctatgtccccaggaagtgctcggccacaaacaggatcatcactgccaaggaccatgcctctgtccagatcaacattggccacttggatgcgaatggcctgtatgatggtcacttcacaacgtttgctctctctgggtttgtccgtgctcaggtgatagttcatgatatgtttattgcatttgtctagcccataaagtttaaagcttgagtgtaaagcctacatgaggctttttactgtctgtgtttcctgtgtttcatattgttgccacctgacacatttcattcatatggagagattgttgctccatctgttttgccttttcagcggaattgactctttgcctattggatttatatggcttcacattggttaatacctagcctaggatttaggctgngtttatatatatattt

SEQ ID NO: 307401 - DNA, 604 bp, Zea mays
cggtcttttggggtgtagaggaagtagataacagggagcatatgagattaatccgtgggtgtccaaacccaatatgcctaagaatttccaataaaaaggaccaggagaccgaatcaaaagctttagatatgtcaagtttaaggaggatgtgagcttctttcttcttattcttgtgcagagccttgaccgtttgttggacaaacataaaattatcatgaattctttgacctttcacaaaagcagtctggttggggctgatcaaaatcggtagaacaggggccaacctattggccattatttttgttactaatttagcaaagctatgcaccaagctgatatggcgaaaatctgtaacctgagaagcatcctgtttcttaggtaacaaggtaatgaaggccgaattcaggagacataatttgaagacatgacctcagataaatagcgtctaaagccatcaaaatatcttccttgatgatactctagcaagatttatagaagtggtcagtaaagccatctggcccttgcggcctgttcattggcatgtcttttatagtggccatagcttcggtttcatgaaggagcatctagtgagagagctcaattg

SEQ ID NO: 307402 - DNA, 174 bp, Zea mays
tcccccccaccttctcctcctgctcctgccctggggttcttatacagcgaacatgggaacccgcagcgtcgccctgctgctcctcgcggcggtgctgctcctccaggcgctcctcctcgcgtcgtctgagggctctggtgcgggctgcgctttataagctgttccgtttaccat

SEQ ID NO: 307403 - DNA, 347 bp, Zea mays
tgtttttgacttttcagttgttggtcttttaagatggcattacatgatagaaaggggaatgaggatgtgagagtttttgtgaaggttgatggaaaagagttttggattggaaaactatcagttgacaaataccctcagtgtaaaactagtttggtattcgagaaggagttccggatcgatgggatcgaggaacgggaacgtggtacgttgtatgctactaaaactaggatttaacactactggaactagattgttcccacgtttccggaatggaacgaacgtttccagaacgaggaacgtgaccaagttcccagtcccagttactaaggtttgagttactacacacc

SEQ ID NO: 307404 - DNA, 557 bp, Zea mays
cggtctcttgggcggacgcgtggggcacattctagtgttgctgggcatatgctctatgatctagaagaagtcactagatcttcttcaacagaaccaactattgtactcattgacactacagggtgattactatctgatgtttcttgctgtttcagaacactattgtaattatatttgttgagctgttcatacatagagattttgctacccccctgctttatatgctaagtacacctttacaaaaagaaaatgagattattattttctttgtagaaatcgtatttgaagaagataattaggaagtgtgtggcgactcttttgttgttcgaaaaagatgcttgcttttttccttgagagatgaaccctctggatgcttttcacataatgtttctaacattttcaaatactcttaggtgtgatatggaagaagtaaaagatgaagaggagagcaccatgaatgagggcgaggcagcagtatccattgctcatgccaagttgcttgttgagagtggcgttaatgcttctgatattggaaataatacgccttacgctgcaca

SEQ ID NO: 307405 - DNA, 308 bp, Zea mays
cgagctgtcgaagccacggtggcgcggctgcggcgcgcgccgccgtcgtcgccgggcacctcctcctccccccacggccaccaggaggcgagggggggcgaaggggcggactcggcggcggcgactaccacgaacagcaacagacggccccggctggtttggacgccgcagctgcacaagcggttcgtggacgtggtggcgcacctggggatcaagaaggcggtgcccatgaccattatggagctgatgaacgtggaaggtctgacgcgacagaacgtgttcagccacctgtagaagttctcgtttgt

SEQ ID NO: 307406 - DNA, 517 bp, Zea mays
gtcctgtcaggaggatctacctgccggatgggctgttggaccggtcggaggtgccggagtacctcaccggagaggtccctggagagtatgtcacatgactccaattttggctcccataagggtttccgtttgtttcagaaaatttagacttcagttggtagtttaatgaaatcaagttagtactacaagtcagtttaaacaatagtggcaatttcatagagcatgcagaacaaaagaagttttttcttgaaaaaaaaatagtttgtgccaaaatgcgatttctcaccaaaatggtgcgtcattgctgtttgtagaattcgatctgaaagtacacacgtctgccaacctctcaagctcaaccagcatatgaattttgaaataatctttgttcttgcaacttgcagctatggctacgacccttttggcctgggcaagaagccagaggacttcgccaagtgagtctcatatatcccaaacacataatttcacagcttaaccgttgtgaatatacacaaac

SEQ ID NO: 307407 - DNA, 369 bp, Zea mays
tttattcgtccgcagaagtgcatctacttccagggcaccgtcagcaaggacctcctcacacacaagttggtcatccagctctctaggaagatcaaggacgacatatgaagactggagtactttgaagtttgatgaacaacaaggacatcctcacgcacaagtttgatgaacagtcaacaaaattcttgagccagttcactccaacccaatgggacaaggatcagtggcatcctttcatggggccactgcggtccatccaagtgttgctcatttgtgttgtcttcatgatcgtggagatcaacacattcttccttaagcttgtgtcctgttgccgagttccttaaaaggacaaagtcgttactgtggttc

SEQ ID NO: 307408 - DNA, 494 bp, Zea mays
tggtctcgtggggccaaaggagagatccgccggtgccataatgcaaaaggtgatggcaaagtgttctcttttgacctgcttgatactgatggtggtgagattcgggctacatgtttcaatgctcttgttgatcgcttctatgaagttgtggaagttggtaaggtctatgtggtatctagaggaaacttgaaacccgcaaagaaggactacaaccatctgaataatgagtgggagattttcttggaacctcagtcaactattgaactttgtcttgatgagaacagctctattcctgcccagcggtttagcttctcatcgattgataaaattgaaaattcagagaacaatgcaattgttgatgtcattggtgttggtacatctgtcaaccctagtactacaatacagaggaaaaatggtatggaagctcagaaaggaccatcaccctgaatgatatgtctggtcgaaggtgtgagcttaccatgtggggtgacttt

SEQ ID NO: 307409 - DNA, 670 bp, Zea mays
tcgttctcttcacgctcatagtgctcatcggcaccggctggtctttcctcaagccctacctggccgaccgagagaagaaggtgcttatggcggtcatccccctgcaggtcgtagccaacatcgcgcaggttgtgattgacgaatctggaccctatgctcgggactgggtcacctggaagcagattttcttgctggttgatgtgatctgctgctgtgctgtgctctttccgtttgtgtggtccattcaagaacctttgggaggctttttcgtctggattgtaaggccgttgtgtaccttatgaatgctaccctcttttcgacagtactatgtgttcttcatatgttacttttacttttctcgttttgtggtgtttgcattatagaccattctctttttactgttcctgtttactattttcttttctttgagcttgtgatattttttgttttatgttattttgttttattttttctttcttattttttactttattttttctttttttttctgtttatttttctttacttttaacttatttttttttttttttctatcttatttttcttcttttttctttattttttttattaatgtttcttttttttttttttatttttttatgtcttcttctttttttttatctttttatataacttttttcacatttta

SEQ ID NO: 307410 - DNA, 431 bp, Zea mays
tgctcctggaaggactcgatcatagttctacagagcacaaggtcactggtaccttggtgtgaggatttgaaagtgatcagccactgcatcgactctatcgcgtcgaaggcgtcgattgatccatcagaggttgagtggtcatacacttacaacagaaagaaactcccgtctgagaacggtatcgattcgcattggaatggtgtcaggatgcaacctatggtccctactgactggtgggtagaggacctctgtgagcttgaagtggactcgtacaagcgggtgatcatgagcatcaaggcaaagggaagcacgccagctgttgtcgtcggagaagcattgagggcctacgcgtaccgacggctgcttggctccctggaagacgctgtgagcaatggagttgattgcgcaaagccttgtgcagttcttgacgc

SEQ ID NO: 307411 - DNA, 196 bp, Zea mays
ttcagatgccaaatagctgttcatcaagagtgctatggagcatgtgctgtacaagatcttacaacatggctttgtcgagcatgtgaatccccccaacagaaaagagaatgttgtctatgccctgtcaaagggggcgctctcaagccaacagacattgatggactgtgggttcatgttacatgtgcctggtttcaga

SEQ ID NO: 307412 - DNA, 193 bp, Zea mays
gttcgtttagcgggccgtcgaacgtgacggcgatcctggagaaggggggtcagttgaccatgttcatgccgctgatgaacgagacgcaaaatgacacgctgctgaacagccagctgaacatttcgtactccagcagcggcggcgtgtacacggaggttgagcccaccgacaacgcctagaacaacctcaagcc

SEQ ID NO: 307413 - DNA, 428 bp, Zea mays
aacattgaaccgaccgactatcacgaggtccaaaaaaataaccaccacaaaagtaccaaccaaccacaaataaagtttaagcggacacaccgcaccaactgacgataactctcggcagcaactgggccagccagcaactgcagcacactcaagactgacaacaaaccgcttagtccacctcctcgatcttggggccagggccgccgctgccggcaggggcgtcctcgtccatgccgccagcgccgcccatgtcttcacccgcgccctggtacatcttggcgatgatggggttgcagaggctctccagctccttcatcttgtcctcgaactcgtccgcctcggcgagctggttggcgtccagccagctgatggccgcgtcgatggcgtcctcgatcttctttttgtcatcggccggcagcttggacgca

SEQ ID NO: 307414 - DNA, 192 bp, Zea mays
gtgcctcgcaggccgtgctctacggggttggcctcaccgacgccgacctccgcaagccgcaggtcggcgtctcttcggtgtggtacgaagggaacacctgcaacatgcacctgctccgcctcgccgaggccgtccgcgacggcgtccgtgaggccggcatggtcggcttccgattcaacaccgtcggtgtct

SEQ ID NO: 307415 - DNA, 250 bp, Zea mays
  unsure (1)..(250): unsure at all n locations
ttnntttttttttttttttttttnttttttttaaaaaggacgggggtggtggattttcctctacaccttcaaaactggcaagacgtgcccagccttggtattgggcgctggccgacgccggcgctgtgcttccgggtgcggagggcgctcgggagcagcttctggaacttttcgaggaacgcgctccactccttgcgggtcatgtccgacagctttacgaaactcgcgctgggcgggagcagcttgttgg

SEQ ID NO: 307416 - DNA, 496 bp, Zea mays
  unsure (1)..(496): unsure at all n locations
tngttcccctcctgaacgggagcctgagtgacaacagtggcccaaagaaagcgcgaaggcagcacaggaaatcaggctatgcaggcgcggagagcggcggagagagcagcgaccatggcctaggtggttttgagatccgagggatcagtttgatttacttgcttagtgatgtgtcttctttttttttattctttgtttgttgttttttttattctttatatggagttttttattttttttttttatttaatgtttctatttttattttatttttatatatttattattttattttttatattatatttctagtttttattttttgctcttattttttttttttattttatttttaatttcttttattatttttatttctttttattattttatatttcatattttaattcataaatttttttttcatttatatttcatctttttattttgattttctctatatttattttttatttatttattattttctattttt

SEQ ID NO: 307417 - DNA, 317 bp, Zea mays
  unsure (1)..(317): unsure at all n locations
ggctacaatctcagaatcttgaacaaacaaatcactctatggaacttggggttaacatgagaagctagagaagtatggaagaaaaaaaatacagaaattacaccaggtatgaagacatgatgttccaactgattttcatgtgcggaggcattggcgcgacgaatcttaggaggttgggcttctccttggcccatggggtgccgttttcgtgccatcctccagtgctgctcaggaactttgcaatgtggnggatgaccatctcccggcaatgcaggtgtagtaaagggacttttgagaggacactgcccttctgaatc

SEQ ID NO: 307418 - DNA, 515 bp, Zea mays
ttatagaagggtgaagtcctccaaccaaacctgaaaacggcggcacgcgggtcgactggaaacaatacgagcgaccgcagggcaggaccctctcccaggaaggaaggtggcgccgcgacgcgtgacggcagtgagctgggtgaagcactatttcgccgacgtgccgcaggaggccgtgcaggctcatttcaacaggagaatggttttttctgagtgctatgaccacaaggtttcagctgacagcattcgaactcagaagcatcatctgaaaaagataaaacataatgatgctatggagcctggaatgaggattcaccttcctgtttcagtggctgagagtgacataaagaagcgttatgagaccattccgactgccacactgcatcctaataaagatgagatcgagtacctgaggaggctagtcatctacagggactctgctatattggtgcttaccaagccccccaaagtgcccatgaaaggacatttgccagtacataacagcatggacgtgc

SEQ ID NO: 307419 - DNA, 220 bp, Zea mays
cctacgcgtccggggatttttttgaaaaatattgacgcgggacgaccgttgaaactggtgctttaatatagtataaatattagaagaaatttagatttttgtctctaataaatcattctttgtactctagttccttgttttttttcctagcttcaatcttgggttccattaatcatacttacaacttctttaagaaagatgtatgctatggttggaaatg

SEQ ID NO: 307420 - DNA, 406 bp, Zea mays
  unsure (1)..(406): unsure at all n locations
tttntttctttttttcggaaaaaacatatttttattatggtaaaagacgaaagtattacaaggaattgaaattcaacaaaagacatttaaactcttcataattgtttcttattgacaaaagggaaatagtgaatgtagaaaatgcaaaagaactgctgttgaagtaggatatttgtcaataaatgtgcttcgactctgccacagtgctgttgactgtgcgagcttcggactcctctctgaaatccccctgaagatgattgtgctgactcccttctggctgttgtcctcgctggatcggcgagggccgtggcaggttgctgccagaatgcttgggattggctcgccgaagcaacagaagctgangggtggctgcctacatattctggaatataaggcgagtgatacg

SEQ ID NO: 307421 - DNA, 315 bp, Zea mays
cgttcttgtgggttcaggcgtatgtccgaaggtttctgcgcctgagggcacaagcgccgacagtgcccaatgaaattgtcattgaggccatgattaaggggcttcggccgggaccatcagcgcagtactttgccaggaagccaccacatacgttggagaagctgttccagaagatggacgaatacattcgagctgacaatgactttcgccaaagaagggaggaagctttcaggttcttctgaaatgaccaggggcttttgaggaagattttatccgtggcatgtttgtgtaattcattactctgctcaaactgat

SEQ ID NO: 307422 - DNA, 157 bp, Zea mays
gcatagtacatgccttacctttctcgcgtcgaggtgaaggatatgattgccttctcatgttgtgtatatgatggtggtgatgaggagaaggaaatggatgcagccagagaaataggttggagagggaaatttactaagagaggaccgtgtactaaga

SEQ ID NO: 307423 - DNA, 392 bp, Zea mays
tccctcgcgtccgcccacgcgtccgcccacgcgtccgcccacgcgtccgaagggacgctcgtctcgtctcgtcacgtgccgccgccatggctgctctgggccgtggcctgcccctcctcctcctgctcctcctcctcgccgtatcgggggccgccaacgccgcggcggcgcccggcggcatgtccatcatcacctacaacgaggagcacggcgcgcgggggctggagcggacggagccggaggtgcgggccatgtacgacctctggctcgcggagcacggccgcgcctacaacgcgctgggcgagggcgagggcgagcgcgaccgccgctttctcgtcttctgggacaaccttcgcttcgtcgacgcgcacaacgagcgcgccggcgcccgc

SEQ ID NO: 307424 - DNA, 711 bp, Zea mays
gttttgacgccccatgaagagtcgcatcgcatgactactgttcgtaaagtgtaccagaaggcaattttagttccaactaatcatgtagagcagttgtggaaggattacgagaacttcgaaaattctgttagccgcaccttggcaaaaggcttgttatctgaataccaaccaaagtttaacagtgctaaggctgtttatagagagcgaaaaatgtacattgatgatattgattggaatgtactgtccacctcctctacaggcttgttcaaggtatgtgcatctagtgtattggtatgataatatacttcttgattatttttaaaaattccatgctgttttatttttttaattatctctgtatatattggttcgttattattctattgttttcattgtaatgatatgttatcttttttttatatctccatttaaatatatttttatttaattgtttttttatttcatttatttatattttttaattcttttaatttatatttatttttttatatattttctattatttctttctttcttctattctaatctttttttttttatttttttatattcttttttaataattttatcattcacttattattaatctattcactatccttattttctctcttttctattttattattattattttctatcttcttattttatattattattttcttttattattaatttttattcttt

SEQ ID NO: 307425 - DNA, 280 bp, Zea mays
  unsure (1)..(280): unsure at all n locations
tttttttttttttttttaagtgaacngccattagaccgggatgtccaaaaacttgagtcgtcacaccctagggatcgggtgacgcaattacatacaccaaacccatggttcagatgacggatccaccgtaattcggcacaaaaaaaaggggatacataagcaccattattgatacgtccagaggtaaacattattagcaagctcaagctcgaagttgggggcaggcaaaacagtctctgctcctgcgcaaaagctactagcttacatagcacaggtgagc

SEQ ID NO: 307426 - DNA, 352 bp, Zea mays
tcgtgtggtggttcaaaaacgcaatcatacgagactatttacaaacaatcacaaagacagaagtagcatggacaagagtggaaatattttgccaggaactgctgttgattctaagatatgccacccaacagagtttgatttttacctctgtagtcatgctggaatccagggaacaagtaggcccgctcactaccatgtcctctgggatgagaacaatttcacagctgtctaattgcaaacactgacaaacaacctttgctacactttattctggtgcacacgcttggtttctgttgcccttatttgtttatttctttctctggtaatttttttatatcgcggtttctttttt

SEQ ID NO: 307427 - DNA, 259 bp, Zea mays
tcctacatgatgtagttcacccacttaaagtttgtctggaagatctttacaacggcacctcaaagaagctctctgtttcgcgcaatgtcatctgctccaagcgcaagggcacgggctcgtaggcagccgccttactgctgtgccctgcgaaccccttcccaccgcccaatggcagcagccgggtggcggcgaagcaggtgacgcgggggaacttggaggctagccctgtagaagctgcggcgacccgtgcgggaggccg

SEQ ID NO: 307428 - DNA, 366 bp, Zea mays
ttttctcgtccgcccacgcgtccgcccacgcgtgcgcccacgcgtccgcaatcttgtaggatgggtcaaacaacactcgaagtcgaggctcacggatctgtttgatcctgaactcgtgaaggaagatccagccctggagctcgagctactggagcacctaaaagttgcttgtgcatgcttggacgacagaccgtcgaagcgtccgacaatgctgaaggtcatggcaatgttcaaggagatgcaggccagttcgacagtggactcaaagacttcggcgtgcacagacgatgcatgttttgccgatgtggagatgacgaccctgtaagaagacaaggaggagaaggactaacaaggccaccgacacgc

SEQ ID NO: 307429 - DNA, 511 bp, Zea mays
ttccggcgagatacccagcgggttgagccagtgcagggcgctcactgacctctccctcgacggcaactgtttcaccgggaacgtccccggcgacctgtacacgctgcccaacctgaggaggctgagcttacaggaaaatcagctcactggcaacctcggcagtgaccttggcaacctctctcagatcgtgcagcttgacttgtcctataacaagttcacaggctccatccctgatgtctttggaaacatgaggtggctagagtccgtaaacctagccaccaacaggttggatggaagagttgcctgcttccctgtcaagttgtccactgcttaaggtaatcagcctgaggaacaactctctgtctggcgagattgctatcgacttcagccggctgccgaacctgaatactttcgatattggaaccaactatttgagtggcgctataccttctggcattggtgtgtgcaccgagctcaagacgctgaatcttgcaaggacaagctcgggggg

SEQ ID NO: 307430 - DNA, 467 bp, Zea mays
cttgttgttgttcgtccactggatggacagactgtttctgaattttgggggttgcagatttgatggaggcgttcgccgggctgcccagggacctcaacttcatccagcacacgagccacctgggctggaagataaaagaagcgggcgcggccggtgatcctggacacggcgctgtacgaggacgggagggcggagctgatccgcccggtgaacatctccaccaacctcaggaggctgcccacggcattcaagctcttcacagggtcggcgtggacgatgctgtcgcgggcgttcgcggagtacgtgacgatggggtgggacgacaacctgccgcggacgctgctgctgtaccacgccaacatcgactcctcgcccgagttctacttccagacggtggcctgcaactcgcgccggttccgcaacgccacggtcaaccacgacctgcactttatccgctgggacacccc

SEQ ID NO: 307431 - DNA, 514 bp, Zea mays
cccacgcgtccgcgcagagacaggcgtcttcgtactcgcctatctccgcgactcaaagctttccccaattcccccccttctcccatttctcaccaccgccgccgctccccccgttcaacaacaccatgagggagtgcatctcgatccacatcggccaggctggtatccaggtcggaaacgcgtgctgggagctgtactgcctcgagcatggcattcaggctgatggccagatgcccggtgacaagaccattgggggaggtgatgatgctttcaacaccttcttcagtgagactggcgctgggaagcacgtcccccgtgctgtttttgttgaccttgagcccactgtcatcgatgaggtgaggactggcacctaccgccagctcttccatcctgagcagctcatcagtggcaaggaggatgcagccaacaacttcgctcgtggtcactacaccattggcaaggagattgttgacctgtgccttgaccgcatcaggaagcttgcagataattgcac

SEQ ID NO: 307432 - DNA, 459 bp, Zea mays
cccacgcgttcgcttacgcgtccgcggacgcgtgggcctcgctctgtcctctcctcacactttcctttccgcggcccctctgctcaccgcactccgttgcctgatggcgttgccggcggcggggacgccgcccttcctgacgaaaacttacgccatggtggaggactcggccacggacgatacgatctcgtggaacgacaccggcacggccttcgtggtgtggcgccccgccgagttcgcccgtgaccttcttcccaagcacttcaagcacagcaacttctcctcgttcgtccgccagctcaacacctacggattcaagaaggtagtcggggacagatgggagtttgccaacgacggcttccggagaggcgagaagcaccttctcgccggaatacagaggcggaaggggaccggcgccgtggcggcggtaccggtgccgggcataccggcggggatacc

SEQ ID NO: 307433 - DNA, 529 bp, Zea mays
ggatcaatctcactcactcgcggccattgtcctgcccgtgcgtgctctgccttttcaggcgatcgaccaaccaacttctcgtcactgccatggctctgctctccgacctcatcaacctcgacctctcgggccgcaccgggaagatcatcgccgagtacatctgggttggcggttccgggatggacgtcaggagcaaagccaggacgctgtccggacctgttgatgaccccagcaagcttccgaagtggaacttcgacggctccagcaccggccaagctccgggcgacgacagcgaagtcatcctttgccctcgggccatcttcagggacccgttcaggaaggggcagaacatactggtaaccagagacccacccttcttcagattctctgcactgcgtgcatgaaagttgatcatgggtatggagaggagagagaccattcgtccatttttatttttattttttgagctgtgtgtaggtcatgtgcgactgctacgagccgaacggggagccgatcccgagcaacaagc

SEQ ID NO: 307434 - DNA, 387 bp, Zea mays
agtctccagtttcttgagacctccaccgtccactccaaagacgagcagcgggcaaacccaagcacccgcccaatccggttcgccttccttctcaccccgcccggactctgcggagagatctggcagcggtggctatgccattgggcgacgacgcggcggcggacttcgcgctgccggacgagctcctggcggcgctgccgcgggacccctacgagcagctggatctggcgcgccgcatcaccgcgctggcggtggcggggcgggtgtccgggctggagcgggaggcggggcgcctgcgcgcggaggccgcggggaaggaccgcgagagcgccgagctccgggagcgggtggcgctgctcgacgccgtgcttcaggagaccaacgcca

SEQ ID NO: 307435 - DNA, 468 bp, Zea mays
atatttggtggttggctgatttttgtcacttattacctcgatcagctcacttgactttatggtatctcattatattaggagttatttgtccccaatccccattaagtaattggtgatggaagcattttctgatatttattatatatagccaatattgggtagagttaaggaggggaaaaaaaactcggccggggagggaaagaccgccctcccggtattatattaaaagagaccgaaaacatggtcccgaccgagaaaatccccgaaccctagccccccatcactagcgggccgtcaccgcccactctgcaacggcctagacggagggtggcgtgcaggacgtaacccgggagcgggcggggcacaacgaggggattttttttaaccaagcccgaaattctctctcgagcggatcaaacccaggacctggaggtgctactcggaagccttaaccattacgctaaaggt

SEQ ID NO: 307436 - DNA, 357 bp, Zea mays
agctcattgagagggatgattaaactctggggggatagaatctataacaacatagaaagtatcaacacgataaaaatgctccgtggtaatattatttctcccacctttccttgatcgaccaaatcgtggtacaacatcactcatatttggaattgggatatcatttgcaaggcagaatgttgtggcttcttccaacaatggctcccaaccatcatttctcaaatttatcaaacatgttctcacatcaacaaccaaagacatggcttggacaacgttttgatcctttctttgcaagagaagagaaagctcatttgtgatacggaggatttgtaacatcaacttcatcataaacacaaa

SEQ ID NO: 307437 - DNA, 288 bp, Zea mays
tggaggtcttttgtatagtcgccctcgccatattcccaaggaggaagtgaaggcactctctaaagttgtcgagaagaaggttagggcatctggtgttggggtgccatccagcaaattgtgatgacatttttgactacgtagctcttcgatgtgttctgtacaacatatgtctatattgttgtcccactaatgttgtcagtttggctatgccaccagtccatgcagatgacttgttagggcttgttcgcttatttttaatccatatggattggaggggattgatatgga

SEQ ID NO: 307438 - DNA, 365 bp, Zea mays
ataaaaaaatcatatataatatgtacaatttatattcaatattataaacacttaaacatgatgttctgctggttagatagcttggtctagtgtctcccacacttcttccatcagggtgtgggttacgttgggttgatttggaagaaatgtaaggatttttttgtaaaaagatgacgcaggacgaccgttaaaactgatgctttaagtatagtagagattaggtggaccgaggaaactgatgctttaagtatagtagagattaggtagaccgaggcttgttctacaattccaacatcaatgtgtctcatgtttgcagcaagaaaggatttctatattgttgcatatatactttcaaaagaatttgg

SEQ ID NO: 307439 - DNA, 287 bp, Zea mays
cttcctgctcgctcatgcacaccagagggcgatattcgaaactgagactaaaggggacctactgatcaacccttggtttgttgtgacaggccataatgtggatggggtggatatagcagcaacaggccatagatgtagataaacggttggtggcttgcttagcaacaaaaggctgctgctcaggcctcggggaaatcctcaccccgtgtgaccaatgaagaagtccagaaggctgctgctgctctcaagggctctgaccaccgccgtgggaccaacgttagtgctag

SEQ ID NO: 307440 - DNA, 131 bp, Zea mays
cttcctgctcgctcatgcacaccgctgtggatcttgtgaacgagactaagcttgacagcgagattaagtcttggcttgcttttgctgcccagaaggttgttgaggttgatgctcttgctaaggcattggct

SEQ ID NO: 307441 - DNA, 343 bp, Zea mays
cgcgctttcgcgtccgcggacgcgtggagttggcttgtcctccccctccgagtcgagctcggattcaggaggctctccggagtcacggttccgtggatgagcggatcgagatggccacggcggatgttgagtaccgctgattggtcggggggctagcgtgggccacaaccgaccacttcctcaacaacgcctagaggacctacggcgtgatactcgagtgcatgaccatgctacctcgggagacgcaccggtcccgagggtcttgcttcctcacgttctccacgaaggaggcgatgctgaacgcacatcgatgagcctgaacggcaaggagatggacgggcga

SEQ ID NO: 307442 - DNA, 457 bp, Zea mays
tttacgcgtccgtggacacatggcagtatttcatgcacagatacatgcacatcaacaagttcttgtacaagcacgtccactctaagcaccacactcttgtcgtcccctacgcttttggagctctgtacaaccaccccctggagggactcatcctggacaccatcggtggcgcgctctcgttcctcatctctggcatgaccccaaggactggcatattcttcttctcgttcgcgaccatcaagaccgtcgacgaccactgtggtctgtggcttcctgggaacatcctccatgtattcttcagcaacaacagcgcttaccatgacatccaccatcagctctacggcaacaagtacaacttctctcagcccttctttgtcatgtgggacaagatccttggaacatacatgccttacactctggagacccgcagggaggtggtctcgaggcgcgcccggtt

SEQ ID NO: 307443 - DNA, 424 bp, Zea mays
gtggtaggcggcgatggccaaccacgagctggtcctcggacacgggcaggacgcggagctggcgctggggccgaaccaccacgacttcggccacagcacgaccatcaccaccaccatgacgagctcgacttgtcggagagccacgagctgacgctcgccgagacgcaccacctgggtgttgaccataatctcgaccagctctcgctcgagcaggctcacgagctcgcgctgcagccacacgacttctcccagggtcctctcgcggtcgctcctgtcgtccagtcgcggaccatggtcgtgagccccgagttccagctcgcagtggggcaggagttccccgatgtgatgagctgccgcagggccatccgcagcaccgccatcgcctgccacttcgagatacagacggtcaagtccgacaagaccc

SEQ ID NO: 307444 - DNA, 400 bp, Zea mays
ttgacgcgtgggattccaccgagcacctcacgtgatctccaccccgcggcggcggcgcgagcaccgtctccgcctctccgctctccggcgaatcaaacccctccggcgttgcccctcggttgcctttcccctccgccacaatgcggtttgacctggatggcctgcccgtgcacttcccgtacgcggcgatctacccggagcagcacgcgtacatgggggagctcaagcgcgccctcgacgcgcgcgggcacgcgctgctcgagatgcccacgggcaccggcaagacggcggcgctcatctccctcatcacctcctactccctcgccaacccggcccgcccgctccgtctcatctattgcacccgcaccgtgcacgagatggagaagaccctcgccgagct

SEQ ID NO: 307445 - DNA, 391 bp, Zea mays
  unsure (1)..(391): unsure at all n locations
ttttntttttttttttttttaatccaaaacaaatagggcttttttgagtaagtgctgagcaagaatatgcgtgcgccaaacacgcatatttgccatttcatttttattccgtcattcctatcatcaccatgacgtccgggcagtaacatgacagtgatgacacagactacatcttgccagctagctagctaggtcctcgccgccaattcgagggaggctacaaagtttgatggatgatcagagctccttctgaacgttcttgagatttgtggtgaggtttagcgacgagcccagcttgacaacgctgtagatgcgcttgaagtcggcgaaggtgagggttgcggtagcacggcgggttgtcgtcgctgaggaactcggcggcggggccgat

SEQ ID NO: 307446 - DNA, 319 bp, Zea mays
tttgctaattttctttttttttttttttttttggggttttttggacgcacattgcgttataaccgggccattattaaaccaacactgacacgactcatgacacgaacaggagatactttgacaacctccatatggagagagggcaccagacgacgcaggcacatcgggagcttaaacgacccatgacttactgaccaccacggagacggagcacaagggggagggggctctccttttggatggtggagactgctagggggcgggcatcctccagctggttgccggagaagatcaaacgctggtgggccggggggatgcc

SEQ ID NO: 307447 - DNA, 329 bp, Zea mays
aaaagaagaataccgtatgacttattgtttgccagtagccttgataacattgaaccgaccgactatcacgaggtccaaaaaaataaccaccacaaaagtaccaaccaaccacaaattaagtttaagcggacacaccgaaccaactgacgataactctcgggagcaactgggccagccagcaactgcagcacactcaagactgacaacaaaccggttagtccacctcctcgatcttgggggcgggtgccgccgctgacagcagagggcgtcctcgttcatgccattcttatttatttccagaggctctcctttatttacaaaggatttgg

SEQ ID NO: 307448 - DNA, 472 bp, Zea mays
ttcacgcgtccggcttcgttctgctctccggctctcccgcatccaccccgtctcatccccaatccgaccacctcatccctcgcctccatggccctacccctcgcgtcaccggcgggggcatgagccggtgactgctcacgcggcctcgtctgtctgcgcacgcgcgcggggtcggcgagtgagcattgcggcggtccgcgatcgcccgtgggggagcatggcgtcggcggcggggtcggccggcggggccggcgcggggtctggcgggctgaagacctacttcaagacccccgaggggcggcacaagctgcagtatgagaagacgcactcccccgtcgtcgtgcactacagccacagcggcaagaccgtctcccagatgacagtggcatatttgaaggagaagccagcaggccagggctccacgccttcaacaccaagtgctggtagtgggatgcggtctgcagctgcaaga

SEQ ID NO: 307449 - DNA, 514 bp, Zea mays
ttcacgcgtccgtttattcaactcacatgtgctacttgtgacagtcttaaccataggatgttactgtcccaggtaaaccttgtatcataattaaattatttttactctttatgtatagctagatacatgtgtggtctaatgattgttccattagggggtaataataattttaggatcaaaccatcacatatataactatttttagcaccttaattctccaccaaagactagaatttgctcctagatccttacaacctcaagttttggattaggtcattgtgtaggtttctttgtctttccttggcttagtgaattcaaaacattaagtttatgactatgttgggcaagaataacttcaatgttttgtgagtccggatcttcaaaatgtatacactagcaaattacccgaaccttattcaacgcaaaatcatataacagactttatttcatgcaatttagaagctaagtaaatttccatatattattctagtttcatcatcaatattccttacat

SEQ ID NO: 307450 - DNA, 338 bp, Zea mays
aacagcaacagattactttgattaccccaccgtaatgttcaaccgcttaaaacatttcgtattattacgacacggggatagcagcaacagattactttgattacaccaccgtaatgttcaaccgcttaaaacatcttgtattattacgacacggggatagcaacaacaggggggagaaaatcacaaattttcagaccatagaaacctagatcaagggatagacctagagggggaggacaacgatgggggggggacagaactaccctttgccagcaacaagcttgtcgatgaggtccgcggcgtcttcaactggggcgattgtttgggcgctggactcc

SEQ ID NO: 307451 - DNA, 507 bp, Zea mays
aaagaaaagggattaaaaattagtccctagctcagctacacaaaataatttgctcttttgatgaaaacaaaaaaatcataataataatcttctattgccaagctatgtgctcctatacggtattaaaacctcagcaactcgtccatgatttctgttcatagttggaaggattttctcagtgcaacaaaagcaactaaaaatatcggcgaaacaagaaagatgatgtacgggacgatctgctcgattcccacctccggctcttctaagctcgcgtagtaattcttcttgctgccaaatttggtgaagtacgtctcgtagcctgtgcttttgggcactggaatgctgctcaccttcatgaaatccattgcctgaaagctgaacacgaacatgtttgctttcttgctgatctcactattcgggtgggttttaagtttgctaacatgctcattgcttccttggacctgcaagtgaataagaccgatggccattgcagagcagcccttcatg

SEQ ID NO: 307452 - DNA, 415 bp, Zea mays
gaatgaaacgggagaaaaatcttctgtcttggccgcacccgcacgggttgccaacggaggtggtgaaccgaaccgtgaacaaaaaaaaaaattaaacatgtggctgctgggattcgagcccaggtctctacggccacaacgtagaattcttaccactaaactacagccactttgttggtcaatctaataacgtttacctatgaatcaagtagatatgacatcggttttgtttaattgcaacatttttatgttctctcaacaatctgcgccagatcagtatacatatagattgtggcggctcaaggttgcccttgttgtcaaccgcaagaatcactgcataatcgcccttttattccccaatctatagtcagtcaaaaggctagctagtactcgttgaagtgtattgcgccgagct

SEQ ID NO: 307453 - DNA, 199 bp, Zea mays
ggccccctaattcagggggatttatttaaagaaatgggggttaacacaaaccaacaaaaacatacaattccagttaaaaattaaaacaaccactcaataaattactaccatccgaattatacaccctaaaaatacagccccggtggaaatacatatgataactacaatgaaacaactttctgccttaaccagtgcaaaa

SEQ ID NO: 307454 - DNA, 425 bp, Zea mays
  unsure (1)..(425): unsure at all n locations
acgagcacagcatggcctacgctacgccgacggcttgcgcaggaagtagcggtaggcggcgaccttccgcttccgggaaccggagttgtctatggacagcaccatcctgccggcctcccgagccgtgaaggcgttgtgcagcggcccggcgtcggcgtcggcggttgtggccgggaccgtcctcgccttctccacgcagagggtgtagctgccgtcggccgccggcacgtactcggcgccgtactccaggtcccagcccccgacgacgaggtcccacgttatcgttgcgccggcctggaatgcggattaaggacgctttcatgggttagagaaagagaagccgcgcgcggcggcaccatgcatgaccacacaacacagctcacatccangtagtattaactgggcgcgtaaaaataataaacaat

SEQ ID NO: 307455 - DNA, 509 bp, Zea mays
  unsure (1)..(509): unsure at all n locations
ttgttttcttggagaagacggcaatgcagccagtgtattgggtgcaaattttgctgctggttttgtagcaggcagtcttgctgctggtgctacatgcccgttggatgttgcaaaaacaaggagacagatagaggtttgtgtattatttggtactctgtatacttcacgttccattatttttcacctgttacctgttccttatgcgagcatactctacatatattgccatttcttgtccctctttctattttttttaatttattgccatttctttttcgtgtttctattttttgttccttcctgtttaaatttcagaaggatactgaaaaggcaatgaggatgactacaaggcaaacgttaactgagaatnggaggtctggaggcttgaaagggctgttaccggcgtcggccacgtgtgcacgtgctggtcatcgttggatcgtcgtttctttacgaggtgcaagttgctattataaaggcacacctagaccagttttagtgaaaaggat

SEQ ID NO: 307456 - DNA, 524 bp, Zea mays
tttctgccggagagcatctgcaacggctcacggatgcagttccttttgctcgaccacaatgagttctctggaggcattccagcaggaatcgggggctgtacccggctgctcgagctgcatctcggtagcaacaacctcagtggtgaaattccagctgagataggcaaggtgaaaagcctgcagattgtgctgaaccttagcttcaatcactttactgggccgctgccccacgagcttgggcggcttgataagctggtcatgctggacttgtcaagcaatgagatgtccggtcagatcccaagtgatatgagagggatgctgagcttgattgaggtcaatttctcaaacaaccggatcagtggcgccataccggttttcggaccgttccagaagagtgccgcctccagcttttccggcaacgccaagctgtgcggcaacccactgaatgtggactgtggatcaatttatggctccaattatagaatggaccacagggggatatctacagggtggcttgggcagtg

SEQ ID NO: 307457 - DNA, 342 bp, Zea mays
cggactcgtgtgcggacgcgtgggcggacgcgtgggcggacgcgtgggcggacgcgtggggtagtttctgctagctgagcgagatcgatctcgtttgtactttctccctttgaggaaacaactccccttttctgtgcttcaagttgttctgagatctccagcatggggaggggaaggattgagatcaagaggatcgagaacaacacgagccggcaggtcaccttctgcaagcgccgcaatgggctcctcaagaaggcgtacgagctctccgtcctctgcgacgccgaggtggcgctcgtcgtcttctccagccgcggacgcctctacgagtacgccaacaac

SEQ ID NO: 307458 - DNA, 433 bp, Zea mays
gtgcccggtggggttcgtgcccatcaggcgtgtcacggagtcggacgtgctccgcgccagctccgtcaggcggttcgggagggcgcccgcgggcagggtgcggcgcgactccgtctccggcggccacgagcacgcggtggggtacgtggccggcgacgagtactacggcgcgaaggcgagcatcaacgtgtgggcgccgcaggtgagcacggcgtcggagttcagcctgtcgcagatctgggtcatcgccggctccttcggcaacgacctcaacaccatcgaggccggctggcaggtcagcccggagctgtacggggacaacgcgccgaggttcttcacctactggacgacggacgcttaccagaccaccggatgctacaacctcctctgctccggcttcatccagaccaacagccgcatcgccatgggcgcc

SEQ ID NO: 307459 - DNA, 305 bp, Zea mays
ggaacgatcaatacagccaaaaattaacaacaaagaacgatcgacggtacgcgatctggacatacacgtgtacagggtttatttttttttccacgtatttgctccgatctgttctctactacttggcgttctttacttgacgttgatgggcatgggcttgtcgccccactccttgaggcacttgagcatggggtgcacgagcttgccctggctgatgccgactaacaccttggtgcactcatcgccgggggacttgagcctgtcgccggtcaggaacactgcagccgagctcctcgcgcacgaag

SEQ ID NO: 307460 - DNA, 314 bp, Zea mays
agccccatcgtgttgatgctgtatccgcgtcgacgtcaccggcacccgcccgtccgtgtcgccgctgtagacccagacgcgcagcccggcgcccatgagcttcttgaggatgggcagcacggtagccggcgagtcgttccatttccttatgacctcgctgcagggcgagtacgggtagggcaggcctgtccggttggcgtgcagcgcgcgctgcacgtccccgcggttgaagtacttggtcacgtacgcctccgtgcacgggtcgtatcctgccggcacacgcttcatcagcctatgccactccttatgcttgg

SEQ ID NO: 307461 - DNA, 365 bp, Zea mays
ttggttgcgtgggcggacgcgtgggcggacgcgtgggcggacgcgtgggcaaaggggcggtcaaggagactggagccacaccagacaatgctcagacctacaataccaatttgatacgccatgttgttaatgacagcggcacaccggcgaaaccaggggaagagattgatgtctacatattttcattgttcaatgagaacaggaaacctggcatcgagtcggagaggaactggggactgttttttcctgataagagctctatctacagccttgattggacgggccgaggcaattgggatgttatgactggagcaaacattacaagtgctaatggtacctggtgattgcttaaactaatgcttcag

SEQ ID NO: 307462 - DNA, 256 bp, Zea mays
cccatgctatcgcccacgcgtccgcccacgcgtccgcctgcctttccccttccctccctccctctccccgcgggccgacagaggcaatttcgccctcgattcgaccccgattcgtccgcccgcgaccgggattccctccgccaagcgcggatctgaacgctgcgctccgtgtcgccgatcgaatccgccatgaagggggccaaatccaagggcgccgccaaggccgatgccaagctggcggtgaagagcaaggggg

SEQ ID NO: 307463 - DNA, 233 bp, Zea mays
cctgcggcgccaccagcatctgcaggttgtacccgtccaccaggctcacgtcgtagaagtccatgcccccgctgccgtccatggtgaactcggccagcgtggccggcggggcggccccgccgccgccgcagtcctgcctgcccgagccgcagtcgccggtcacgcaggcgaaccggcccgtggccgcgtcggtggagcaaagcgtgcggccccacagccgggccgaccacccc

SEQ ID NO: 307464 - DNA, 401 bp, Zea mays
ttattggatctggaattgctgggagagggagtaaaggagctggccttgatattgccaatttgctgaagcctgcactctctagaggtgaattgcagtgcattgcgtcgacaactctagatgaacaccgtttgcattttgagaaggataaggctttggctcgcagattccagccagtattggtgaatgagcctagccaggaggacgctgtcaagatattacttggtctgcgtgagaaatatgatacttaccataaatgcaaaaacactttagaagggatcaatgcagcagtttacttgtcagcaagatacatacctgacaggcatcttccttgataaggcgattgatctgattgatgaatcctgccagtcaccttggatggaatcatttaaaaggaaataatg

SEQ ID NO: 307465 - DNA, 261 bp, Zea mays
ttttcaccccctacctccgaggctgcgatccgctcttgtaggctccctcgccaatccgctcctcctccctccctacaactgttgtgcgtgcagcggcgtcggagaagagatggcgtcggaggccaaggacgtgggcattctcgccatggacatttacttcccgcccagctgcgtgctccaggaagagttggaaacacatgaaggtgtgagcaaagggaaggacaccattgggcttgggcaggaaaatatggcattttgcac

SEQ ID NO: 307466 - DNA, 421 bp, Zea mays
ttttatgtttggcattgtccttgccctcgctgcgggtgctctttgctcgccttcgctttcgagtccgaccacaagtacaaaactgaagagccagttaagctttgggtgaataaagttggcccttacaacaatcctcaagaaacttacaactactacagccttccattttgtcaaccgtctgagaaccctacacataaatggggtggtcttggagaggtcctgggtggaaatgagctgattgatagtcagcttgaaataaagttcttaaaaaacgtggagaagggcttcatttgtacacttgagctagatgctaaaaaggtccagcagtttgctgatgccattgaaagctcatattggtttgaattttttatagacgatctgcctctttggggttttgttggggagactgacaagaacagtg

SEQ ID NO: 307467 - DNA, 270 bp, Zea mays
cgtcgtcacgcgccggaccagctcccagctgctccctgcagacctccctcctccatctccagcgtgtgttctgactcacctgcaccaatggctgctctttctgctgctggtgctcccccggcctcagctatcgtcgtttgagggctatgagaagcgcctcgcgatccacatcctttgaggcacctgtttttgcggacccccatggaaccggtccgcgtgccctttccaggtcccagtctgactctgttctggatctcgtacggcgcacga

SEQ ID NO: 307468 - DNA, 234 bp, Zea mays
caggcaaatgcacaaaggggacttttaaaacggttgcggtttacacggctacaagcaagatagcctgacggcgacgactgctggtccaaggaagcaaacgatgcgagcggcgccggcgcagcggcggcctgagacagactacgatgcatgcacgtgcacgagagaaactaaacggcggcgagcggggagagagcgctggatgctagctgcgctgcgctgcgcacccctgggtcg

SEQ ID NO: 307469 - DNA, 244 bp, Zea mays
tcgtccacgcgtccgcccacgcgtccgcccacgcgtacgctcagccgccacctgagggccagcttcctgatgccaccaagggttctgaccacctgaggcaagactttggcaagcagatgggtttgagtgatcaggacattgttgccctctctggtggccacaccttcgtgaaggtgccacacacagtcggcttgatcttgagggtgtttgcactacaatcactttggttttagacaactcttac

SEQ ID NO: 307470 - DNA, 419 bp, Zea mays
atctcctccttttccccgagatatttccacgtctcctccgccaccatggagtccggcctcgttgcaagccaccgcctccgctgaccggccccctccgcctgcgccgggcaccaccacctcatgcgtcagcgtcacgcccacgccccggtggccgctgtgcccctgcggctcagtctcccgggccagctcgccgggtccaccccgatccggctgtccaccgtgctcccgctccgtcactgccttcagcccctccgtgccgtctccgccgtcgtcgtcgtagtcccagcgcccggggacgacgcgtcgcccaagttcctgggcgtggagacgaagacaatcaagaagatcgtgcccctggggctcatgttcttctgcatcctattaaactacaccattctgcgggataccaaggacgtgct

SEQ ID NO: 307471 - DNA, 516 bp, Zea mays
attgcccttttatactgatgcgacccgacccaagattccggctcacgacggtgccaggtgcccttgctctagcgccgactcatccggtggcgagacaggggcctgaatgaagtgaagctcgtggtgggctgggttacgtatgccaatgggcgcgcttcaggtgatgctcctccgcttggtgctgctcgccgcgtccgccgcgacgacggctgtcacggtcacggccgcgccgccgcccagtgaggtggcagtgggcgcactcttcacctacgactccaccattggccgcgccgcgcgcctcgccattgagctcgccgtcgacgacgtcaacgccgaccgcaccgttctcgccgggacccgcctcaacttgctcgcccaggacaccaactgcagcggttttcttggcgccgtcgaagcattgcagctaatggaaagaaatgtggttgctgttattggcccacaatcctccgggataggccatgtcatctcccatgttgttaatgagctacatgtacc

SEQ ID NO: 307472 - DNA, 260 bp, Zea mays
tcgccatgtggtgttaccccatctcattcttcatggaactctttgtattactaattttctcagcagaataactgatttgaatgtttttccttcaaaagtaccggaaggtgcaccatccacggtttctaatgaagtcaagacgggagaaacttgaaagtcgcttcattttggatgtgactgttcttgatggaacactgatgacaccttctaccccgttcactaagatttggcgcatgcataacaatgggtctgttgtgtgg

SEQ ID NO: 307473 - DNA, 382 bp, Zea mays
cggacgctttttgttgtattcaggatatatccttagagaggtatcttcagcccaagcaagcacaagcagtgttctgtgttgtcatttctcgtcagatggaaaattaattgctactggaggtcacgataagaaggttttcctgtggaatgctgacactctgaaacaaaaatcaatgctagaggagcattctctgctcataactgatgtgcgcttcagcccaagcactcctcgcctcgccacatcttcatttgacaaaactgtgagggtttgggatgctgataaccatggttattcaattcgtacgttcactgggcactcagcatctgttatgtcactcgatttccacccgaacaaggatgacctcatttgctcttgcgatggg

SEQ ID NO: 307474 - DNA, 305 bp, Zea mays
cggacgctttttcaggtaatagtggagggcctgccattatgggtgataaagtagccggagttgctttccagaatttgtcaggagcggaaaacattggttatatcataccagtgcctgtaattaagcgtttcatttttggagtagaagagagtggtaaatattctgggttttgtactcttggtgtatcttgccaggctactgaaaatattcagttaagagagtgctttgggatgcggcctgaaatgactggagtttttagttagtagaataaaccctctatctgttgcttacaaggttttgaagaa

SEQ ID NO: 307475 - DNA, 403 bp, Zea mays
cctttcagccagtcagtcgccgcctccgctgaactgcaagtccaaactagctagctcactgggcaccgatttcccctaaaattttcgctgcttccaggaggccgcggcgaccatgggcaactgctgcgccgcgccgtcgacggagggaagcggcaagacccgccccaagaagcagaaggagaacccctacaacgtcgcctacaaccgcggcgcggcggcgccgccgccgcccccggcgcgcccgggcctggtggtgctgcgggacccgacggggcgggacctcgccgcggagtacgagctgggcggcgagctggggcgcgtcgagttcggcgtcacgtacctgtgcacggagcccgccacgggggcgcgctacgcgtgcaagtccatatccaagcgcaagctg

SEQ ID NO: 307476 - DNA, 310 bp, Zea mays
ggcgggaaagggccacttcattctatggccatcacagtttcaggctgcaacaggcatgaaattcttcagggcctccaagtaaattcatgttgaagctctagaaagatatatgatacaactttcctgggcgccaatcccgtattcctgggggtccacaggaagaccaagttcctcattagcttccacaggatcacccccatcatcctgtaagttataagcccgaagcttggggcccaaaccaataccccttccttaatgtccacggggatagactaataccccccttccagccttttaaataatttccatt

SEQ ID NO: 307477 - DNA, 439 bp, Zea mays
gggtacttttggcgaccggcgggccgacggcgtgggggctgtgctacaaccacgagatgagccccgaccagacctactgcgacaagacctacacccagtacccctgcgtcgagggcgccgagtactacggccgaggcgcgattcctgtctactggtaatgctggccgctgaatcaattcgaaagttggagagcagtagagattagcaaccaagccctgaatctctctctggtcgggcacttctttcaggaactacaactacggcgctgccggtgacgggatcaaggcggatctgctccaccacccagagtacctggagcagaacgcgacgctggcattcatggcggcgatgtggcggtggatgacgccgatcaagaagagccagccgtcggcgcacgacgccttcgtgggcaactggaagcccaccaagaacgacacgc

SEQ ID NO: 307478 - DNA, 323 bp, Zea mays
aacggggaacattttttgggttgccttgtccttaacttatagcatttgagaacaagtctccaacacatatgtatttgatacattgccgaccctgagactcaaatgactgccaagttcaagaacccttcctgcatcttattcctaatataaatttcgaacaaggcctcaatagaaaattaaagaaaattcactccgatccgtgaccgaggggtccctgaagattcttcgcatcaaagaggaacctggcgaacgaggtctccgatgtggccgtcatcccgcaaggctgcttgtgcttcattcttgagtgctaccgctcgacccct

SEQ ID NO: 307479 - DNA, 230 bp, Zea mays
gctcgcgcgcctgcaggtcgacactagtggatccaaagaattcggtaccagacgaaaccctcggctgctaatcaaatcaagatcaaacaacaaggaaccctagaaagtgagattgtgtggcaatggctgaagagaacaagcaagaacaatcagttgtaccatcaggatacaatttggatgcaaaatgggatgcttgtcttgatttgggtgttcgccgttttacttacttt

SEQ ID NO: 307480 - DNA, 312 bp, Zea mays
aagctcgagctcgcgcgcctgcaggtcgacactagtggatccaaagaattcggtccagaggctatcggggttgctgatcctgtccgcacttaccatgtgaatctgtcagttttcacctcaatccctgatttttggggcttcagccaattgtttcctattgttccaattcaccgtctggatgaaaagcctacaatgagaggaatactgtctgacctgacgtgtgacagtgatggaaaggttgataagttcattgggggcgaatcaagcttgccgctccatgaaattggaagtggtgatggtgggcggtattat

SEQ ID NO: 307481 - DNA, 164 bp, Zea mays
gaccgtcctaagtacttgggcccattttcggagcaaacaccatcctacttaactggggaatttccaggtgattacggatgggacactgctggactctcagctgaccccgagacatttgctagaaaccgtgagcttgaggtgattcattgccgttgggctatgct

SEQ ID NO: 307482 - DNA, 141 bp, Zea mays
tcgcgcgcctgcaggtcgacactagtggatccaaagaattcggtaacagatttctcttattcagataattagtggtgtacacataacacacaactttgatgcccacattataatgattagcatgtcattatataagtgtgc

SEQ ID NO: 307483 - DNA, 147 bp, Zea mays
gctcgcgcgcctgcaggtcgacactagtggatccaaagaattcggtacggatcacatttgccagaagtatgagaatccgattgaccagggaacttattgttagtagcaataaaacaattgatggacgtggaaaatacgttcacatag

SEQ ID NO: 307484 - DNA, 227 bp, Zea mays
aagctcgagctcgcgcgcctgcaggtcgacactagtggatccaaagaaaaaaatcacatttgatttctcaattcttgtttcagaccaatcaatcatgtcgtgctgtggaggaaactgtggctgtggatctagctgcaagtgcggcaacggctgtggaggttgcaagatgtacccagacatgagctacaccgaaagcagcacaaccactgagactttggtgcttgggg

SEQ ID NO: 307485 - DNA, 232 bp, Zea mays
cgcgcgcctgcaggtcgacactagtggatccaaagcaactttacttcaagtcccttatagatgacattaattctgaattgtctggtgatttcaggaaagcagtcatcctatggacatatgagccttctgaaagagatgcacggctagcaaatgaagccttaaagtcgagaaagaaaaccatcacccagttgcaagtgatagtagagatagcttgtgcatcatcttctgatca

SEQ ID NO: 307486 - DNA, 204 bp, Zea mays
  unsure (1)..(204): unsure at all n locations
aacaaaagctcggagctcgcgcgcctgcaggtcgacactagtggatccaaagaanttggcaccaggaggcttctcgcagaggtctcactctctgaagcaaggttccaagaagtgactgctctcatctttgaagccattagtctcagtgttgaagagaacgaggacggcactgatggttctcctgaggatctagatgtcacacct

SEQ ID NO: 307487 - DNA, 227 bp, Zea mays
  unsure (1)..(227): unsure at all n locations
ctcgcgcgcctgcaggtcgacactagtggatccaaagaannctgcaccagatagcacaaaagaatcctagagagagaaagggaatcctagagagagaagcatgtcggacgaagaacaccattttgagtcaaaggcagatgctggtgcctcaaaaactttcccacagcaagctggaaccatccgtaagaatggttacatcgttatcaaaggccgtccctgcaaggttg

SEQ ID NO: 307488 - DNA, 282 bp, Zea mays
aacaaaagctcgagctcgcgcgcctgcaggtcgacactagtggatccaaagaattctcaccaggtttacccctcctaagcgcttccattcagccagctgcatgaggtcttctagaaagacttatgatccgcctttattaactggaccatccccaacatcgaagtcttggaaaccttatatattacctggagctgctttgggagtatttggtggactgatcctttttcttcattataatgatgaaagaagagcaattccaaaaggtcaaggcgagaaatttga

SEQ ID NO: 307489 - DNA, 235 bp, Zea mays
agctcgcgcgcctgcaggtcgacactagtggatccaaagaattcgtcacgaggagctttataacattgttgaagatattaagaaggtctccaaggcttttgttgttcaccccaagaatgtaaatgctgagaatgctgcaattctacctgttatgctgtcatcaaagctgctgccagagatggaagtcgaagataatgccaaaagggagcaattattacacagcatgcaacaccta

SEQ ID NO: 307490 - DNA, 247 bp, Zea mays
tcgcgcgcctgcaggtcgacactagtggatccaaagaattcgtacgagcttagggctattcccttttcaccttctcaaaattattatttgagtggttcagaatatttgcccaaatgcagtgttcttggtagcagcagaactggctcatcaaaactagtactaacaatttcagcaaaggctaaaaaagatgacgcacaagaagaagaagaagaaccaaaaaacaagaggaaacaatcgttgttttcaa

SEQ ID NO: 307491 - DNA, 204 bp, Zea mays
tcgcgcgcctgcaggtcgacactagtggatccaaagaattcggtaccaggtatgcgtgtacctctttgtttcattgatgaatatatgtgtatttggaaaccttttggtgttgtaaaaggcttctccaaagtcatcaaatgttattgatgtatcatattaataaacaaaaaaaaaaaaaaatctcgagagtacttctagagcggc

SEQ ID NO: 307492 - DNA, 411 bp, Zea mays
aaagctcgagctcgcgcgcctgcaggtcgacactagtggatccaaagaattcttttcgagccgaattacgcaaaatatcttatactacttccgttttataatcttcgcaatgcagtcaccgtcttcacattaaaatgattgataacgttaaaggtatgccgccggcaaccgagaaaggttgccggttaacggcgttgatagattccggtggactagcagaagtagatctgagtgagaaggagcaaaattctactcgacgtaggcgattggatgaacgtttgttgaaatcgacgactgagctaccggaaaatttcgatgtctttccagatgattacaggcatttgtaagaggaaaaaaagtactgttactgatactgatgatcatcgagttcaactagcgttatttagtgaa

SEQ ID NO: 307493 - DNA, 379 bp, Zea mays
tcgcgcgcctgcaggtcgacactagtggatccaaagtaaattctaattcctttcaagaaaaaaaaaaaaaaaggtgaaaaagtaaaaataaaaaataaaaaataaaaaatggacgtcggtggcggagcagttgccggcgacggtgcttcttctacttcctccgccgtgtctcagtggaccttcaccttatcacagcgatatcaacaccttctggataaatcgacacctcacatcctttatcggtggatcttcttcgctacgatcgctttcatctttgctattcgcgtgttcatggttcaaggtttttacatcatcacatatgctttaggaatctacataatccagctccttattgctttcctttcccctcaagtcgatc

SEQ ID NO: 307494 - DNA, 388 bp, Zea mays
tcgcgcgcctgcaggtcgacactagtggatccaaagaatccttttttcgaggaagggagagagggcgccagatcgacagcaacatggctagtttgagtgctattcaacccaaacagccttatttctctctccttccttattccaattctgacttcaatggtgccagattgatctcctcatttcagtataagaggaaaccatgcttgtcaaaaggagcattgcaagttacagcctcgagtgaaaagaaaatcctgataatgggaggcacgcgattattggtgtgttcctatcgagacttcttgtgaaagaaggccaccaggttactctattcacaagaggaaaagctccaatctctcaacaattgccaggtgaatcggaccaggattat

SEQ ID NO: 307495 - DNA, 212 bp, Zea mays
  unsure (1)..(212): unsure at all n locations
aacaaaagctggagctcgcgcgcctgcaggtcgacactagtggatccaaagaanttggcacgagccgacaaaggcatcaaagaaaatgaacatcacaaaggagcaagagtagggattgtgtccaaaccttctgctgagttcgttgctggaatactaggaacctggcttagtggaggttgtgcagttccttttgctctgagctattctgagag

SEQ ID NO: 307496 - DNA, 213 bp, Zea mays
  unsure (1)..(213): unsure at all n locations
ctcgcgcgcctgcaggtcgacactagtggatccaaagaanttggcacgagcagggagattacatagagttgcacaggaagagatttgggcgtcgccctgatcactttgagcgtaaacgtaagaaggatgctcgtgaagttcacaagcgatcccaaattgcccaaaaggctttgggtatcaagggtaagatgtttgctaagatgcgttatgctg

SEQ ID NO: 307497 - DNA, 370 bp, Zea mays
agctcgcgcgcctgcaggtcgacactagtggatccaaagaattcttcacgaggccacatgtatgtatatagagtagatatggttctctgtccgtcactctcctccatttcaacattaatggagtccttgtcaaaatcattagaccattcaattaagtaatcctcagctaaatggcaaaaattgcagcatctcatacatcatcttcattcctcaacaatttcttcgtccccaaattaaatgaaaaaggaaaattcttcttccgccaacaattgattgtgaaatctcagattatagataatgctacaacttacacttgcagaattagcactgatattcctctctatgaaaaccccagggcttgctttgatcg

SEQ ID NO: 307498 - DNA, 349 bp, Zea mays
aaagctcgagctcgcgcgcctgcaggtcgacactagtggatccaaagaattcgttaccagacttgctctctcctacttctttcttagcaactttcccccttcataaatccatttatatgctcacacacacacatatttcacaaaattaattaccaattttgtcatcattgaagtttcacaaaatggagaaagttaaaagtatggagaaaaagaaattgattaatgagttaacacaagggaaggaatttgtaaaccaattgaaaaatcagataattggtccattagcttctcctgaggaatgtgatttactaattgggaaaatattgtctacacttgaaaaatcattatc

SEQ ID NO: 307499 - DNA, 312 bp, Zea mays
aaaagctggagctcgcgcgcctgcaggtcgacactagtggatccaaagaattcttctccagacaattcatttctttttatttattaaaattaaaccatggctgcttctacaatggctctttcctcctctaccttcgccggaaagacggtgaaactcgcaccatcttcttctgaaatcagtggaaatgggagaattacaatgaggaagactgctgccaagcccaagccagcttcctctggtagcccatggtatggtcctgaccgtgttaagtacttgggaccattctccggggaagccccaagctatttgact

SEQ ID NO: 307500 - DNA, 374 bp, Zea mays
cgcgcgcctgcaggtcgacactagtggatccaaagaattctcattaggaaacttcatcctcttcaaatttctctgtgaaaatgtctggtcgtggaaagggaggaaagggattgggaaagggaggagccaagaggcacaggaaggttctaagagacaatatccagggtatcactaagccagctattcgcaggcttgctcgtaggggtggtgtgaagcgtatctctggtctaatctatgaggagacccgtggagtgttgaagatctttttggagaatgtgattcgtgattctgtaacctacactgagcacgccaggaggaagactgttactgctatggatgttgtctatgccctcaagagacagggaaggacactc

SEQ ID NO: 307501 - DNA, 441 bp, Zea mays
aagctcgagctcgcgcgcctgcaggtcgacactagtggatccaaagaaaaaatgatgctattctttgaaatggagtctaccggaaaagtgaagaagggtgccgccggcagaaggggaggaggcccaaagaagaagcctgtttcccggtctgttaaggccggtcttcagttccccgttggaagaatcggaaggtttttgaaaaaaggccgatacgctcaacgtgttggttcgggtgctccagtttacttggcggccgtacttgaatatttggctgctgaagtaaattttcctccatttatgctttgctaatttggttcaattaggatctagggtttcaaatttttgattgaaatgttttgatttataggtgttggagttggctggaaatgctgcccgtgacaacaagaagaacagaatcatcccaaggcacttgcttttggc

SEQ ID NO: 307502 - DNA, 465 bp, Zea mays
  unsure (1)..(465): unsure at all n locations
aagctcgagctcgcgcgcctgcaggtcgacactagtggatccaaagaatttggcttcagaggaaattgagttactatgtaacaatcacagtggacagtaagaatctggtattgaatgattcgggtgcagttttcgggtcactttcttgggttgatggaaagcatgtggttcggagccccatagtggtaacccaaatgagcccattgtaaatagtaaactaatcttgatcctgtttgtttaatcaagatttatgggagataatatggatagatgtgctaatcacattaaacaagtagattctacactttttagagtggtttttaagtttttaaccttagcttattttggctttaggggttagaaaaagcctagaacccaaggtcaaaaatnngggttttggtttaaatttttttaattcaagttttttgtgttttcttttaaaaaaaaaaaaaaaaaactcgagag

SEQ ID NO: 307503 - DNA, 153 bp, Zea mays
cgcgcctgctggtcgacactagtggatccaaagaatttggctccagacttgctctctcctactactttggggggactttcccgcttcataagtccatttatatgctcacacacacacatatttcacaaaattaatttccaattttgtcatcat

SEQ ID NO: 307504 - DNA, 324 bp, Zea mays
agctcgcgcgcctgcaggtcgacactagtggatccaaagaattctcacgaggagaactagtctcgcgttttttttttttttttttttccacaggaaaatcacagcaattaccttttaatggagatgcccagaaatattttgaaaagataacatggaatacaacttaaacttaataggacaatacaagggttacatctattgggccaaagcacttgggttggagacaaggggaggaccttctggaagaatgccaagcaagggtaccggccatatgggtaagccaggggtaccttcaacatagacattaccacttggagaccattc

SEQ ID NO: 307505 - DNA, 287 bp, Zea mays
agctcgcgcgcctgcaggtcgacactagtggatccaaagaattcgtcacgagatgaattgaaaagcgctcctttctctgatgaactgaagagaaaacagtcttctctgatgaacacacttttctcagaagctaagtccaaagaactgatcaagcgatgaagctaagtctctccgtcacaaatgaactgaagataagtatctccgcaggattttttctcatatttcttgctgaagaacacgatgactcacaggtttctcgctgaagaacgcgatctatgttatatttc

SEQ ID NO: 307506 - DNA, 332 bp, Zea mays
gctcgcgcgcctgcaggtcgacactagtggatccaaaggttttgtctttttttttttttggtatgaaagtggcaatatttgattcatagctttggaaaatgtaactcagaactacacaatcataggaattttgaaaaaaaaatccattctatgaagtcacaactactttacagggccatcaaacaatcaaaattcaaaaaatatattatgatattcattttccggggacaaagtttgtggcgaaagcccaagcgttgttgttaacggggtctgcaaggtggtcagcaaggttctccaatggaccctttccggtaacaaatggcctgaacaaa

SEQ ID NO: 307507 - DNA, 305 bp, Zea mays
aaagctggagctcgcgcgcctgcaggtcgacactagtggatccaaagaattcttctcgaggttagtttcacgttctcttcgcaatttccattacagccgctaggtttccgtccacttcttcttctccattaatatctgtatggtgttcttcttttttgaattctagattttttctttgaattcttgttaatctttaattttctttgtttaaatcaagaaattagcttcttctgaagtcagggtggggatttttggatcgtgtcaaagtgtgttagagggtgattatcttttgattcacttgtttt

SEQ ID NO: 307508 - DNA, 351 bp, Zea mays
aaagctggagctcgcgcgcctgcaggtcgacactagtggatccaaagaattcttcttcagatttcgagaagggaaacgccgagggcagtggcgccgggagaaatctgacggcggcgaagccgtggagtccgaatttccggcaggaggaattgaaacgggctgttgacggcgttaaagagagagaaaccgtggaagataatgcgggtttggatcttaacgccgacccggttactgatccgagttcttcagaagccaattaatttaattttttttttttggcttaactattaggggatttcaagataagtgggagtaaaattattataattcgataatatgtttttctttttc

SEQ ID NO: 307509 - DNA, 287 bp, Zea mays
aaagctcgagctcgcgcgcctgcaggtcgacactagtggatccaaagaattcggtacgagagaagagttccgtagagagagaaagagacgaagaagagagagaaagcatgacgacgattcgtagattcagctgcaatgacttgcttcgcttcgcgtcagtgaatttggatcatcttactgaaactttcaacatgtcattttatatgacttacatggcaagatggccggattatttccatgttgcaaaagctcccggcggccacatcatgggatacattatgggaaaa

SEQ ID NO: 307510 - DNA, 343 bp, Zea mays
aagctcgagctcgcgcgcctgcaggtcgacactagtggatccaaagaattcgtcttctggcgtctattgacgctttaaggaaggaagtttagggaatatcaggatggtttgcgcgcgcagttggagtaagcagctgatctgaacttcttcactccgccgtttggtcgaacgtcttcaatgctgtagccgaggggagcttcgtaaaataaggaactactactactagacttctttttaccaccttttgactccattagatcattcacaatataaattttttgatgtttggtcctaatccaacttttcccaaacgaatcacaatcttcccaaatcagaaaattct

SEQ ID NO: 307511 - DNA, 435 bp, Zea mays
tcgcgcgcctgcaggtcgacactagtggatccaaagaaaatttatagtattattaagttgaaaattcgaaacgaaacagaagtacagacacaagagagtgaggattaaggcccacaccacagcacgccaacacaaatagcgtgacaatttattgtagcttcaaaatagaacttagtccaccatcaacagctaaattttgaccacttgtgtaagcagattcatcagacgccaaaaaaagtgctgattgtgctacatgcatcgtgctcaacttaactcctttcaagtgtccattaccgtaaattgcttcttccaatagagccgcatccagtccatacgccttagtcacaaggggcgtcgctattccatagggcgacaccccattcacccttatcccatgtggacccagttcacgtgcggccgcttttataatgccta

SEQ ID NO: 307512 - DNA, 288 bp, Zea mays
aacaaaagctcgagctcgcgcgcctgcaggtcgacactagtggatccaaagccaattttagttgtttgtcctcaagttttcaagatgtcggatgctaaggcccccgtggccactgcttaccctaagaggaagatccagttggtggacttccttctttcgttccgatggatcattgtcatcttttttgtccttccattctcgttcttgtattacttctcgatatatctaggggatgtgaaatccgagaggaaatcttacaagcaacgccagatggaacacgatgagaat

SEQ ID NO: 307513 - DNA, 197 bp, Zea mays
tcgcgcgcctgcaggtcgacactagtggatccaaagattcggatgagacgatagtagcttgctgtggggaagatgatcgccttgccttctgtatttggattctgaactgcatttcatggttactttttatttgaaatagcgtgacctataatgacaatgttccattgaataaacatgacaccgtgtgctttttttac

SEQ ID NO: 307514 - DNA, 258 bp, Zea mays
agctcgcgcgcctgcaggtcgacactagtggatccaaagcaaagtgcagtctttttctagatctactgccccctctctctctctgtgattccttcttcatcaccgcattgaagaaagatgggtttatcattcgggaagcttttcagccggctgtttgccaagaaggagatgcgtattctgatggttggtcttgatgcagctggtaaaaccaccatattgttcaagctcaagctgggagagattgttaccaccattcct

SEQ ID NO: 307515 - DNA, 174 bp, Zea mays
aggtgggttaattaaaaaaaacgggggttgacacaaaaccggagcaaccaaagggaacaacagggtaccaacacctaatccaaagggaaaacggccactaacacggcgacagaagctaacggcaacacactcctaccaaaagataaaataactcggcccaagccaggacgggcc

SEQ ID NO: 307516 - DNA, 159 bp, Zea mays
gctcgcgcgcctgcaggtcgacactagtggatccaaagaaactagtacttcttcaccttttttcaacccttgaaaagtaaagcattatctctcaagtagaagaaaaataatgacttcctttgccatgcaatctataattttgggtagtccacttaagtt

SEQ ID NO: 307517 - DNA, 436 bp, Zea mays
gcggacgcatgtcgacgatcgagagcagactgcgcgcagcaagaaggatcgttcggtcgatccgatcccggtccatgggtgttcaccggctgaagaagcagcactcgtccgcgccgtcgctgggcggcgggtccgggtcgtcgatgccgcccaaggggtgtatggcggtgcgcgtggtggggcccgcgggcggcggccataaggaggaggaggaggaggaggagcggttcgtggtccccgtggggtacctgacgcacccgctcttcgtggcgctgctcaaggcggcggaggaggagtacggcttcgagcagaagggcgccatcaccatcccctgcggcgtcgaccacttccgccgcgtccagggcatcatccaccaccaccgcgtctccggcggcggcggcggcggcggtggaggaggacaccacaacagcaacca

SEQ ID NO: 307518 - DNA, 420 bp, Zea mays
gtcatatagtatacaccgactatagacctacacctcttcagcactatgtatttccttctggaggggacggattataccttgtagtggatgagaagggcaagttcagagaggacagttttcagaaagcattgaacgcccttgtccctgctagcgacagtgccaagaagaaggaaaatgggaagcggcagaaatttaccatggcaggtacatctagtgaggaaagtgacatattcaagatggtgaagatgataattcagcgccaatatgatcctgtaatactttttagctttagcaaaagggaatgcgaatttcttgctatgcagatggctaagatggacttgaatgaggatgatgagaaggcaaacatcgaaacaattttttggagtgctatggatatgctttctgatgatgacaaaaagc

SEQ ID NO: 307519 - DNA, 378 bp, Zea mays
actctcctttctccctccccgcccacactccaccacccgcgccccgccgcccgccccgccgccgcctcctacttcgcctcggccgcctcggatccggaccgagcgccggccatggcgctcgccttcgacgagttcgggcgccccttcatcatcctgcgggagcaggagaagaagacgcgcctgcgggggctcgacgcgcagaaggccaacatcggcgcgggcaaggccgacgcgcggatcctccgcacctcgctcggccccaagggcgcggacaagatgctccagtcccccgacggcgacgtcatcatcacaaatgatggggcgaccatcctggagcagatggatgttgacaaccagatcgcaaagctgatggtggag

SEQ ID NO: 307520 - DNA, 227 bp, Zea mays
tctattcgcccaagaaggcaaagctgttcacggccaagatcctcctcctcctcaacgtgggcgtgttcgggctcatcctcctcctcacgctgctgctctccgccggacagcgccgcgtcgtcgtcctcggctgggtctgcgtcgccttctccgttagcgtcttcgtcgcgccgctcagcatcatccgccaggtggtgaggacaaggagcgtcgagttcatgcccttt

SEQ ID NO: 307521 - DNA, 328 bp, Zea mays
ccgtaaatccgctcccctacctctccagcgtgctcccatctacggcgcgtcaggtacgctcctcacctggccaggcatgggcaagatcaagatgagaagcaacggatgctgaaggatcggcgggctcgtggccagggacggcctgcagagtgaggatgtacagctcggagccgataacgacccttttattaccacgggttacatgacgttcatgttcaagctcgacaccgtgcacggacaatggaagcacagagacatcggcctcaaggactacaagacgcttactcttcagcgagaagccggtcaccgcctttggcatcaggaaccc

SEQ ID NO: 307522 - DNA, 514 bp, Zea mays
attgccacctcccgttttgtgggtgaatttgcatgctggcggtcgttatataacttcattgttggacgaatgccagctagtgttcaccatattcttcggtggcgtttgctcacttgccaagattcagtggccttatatggcgttggaataccttgctaatttgcatgtgattcatgggaaaattcatatgcatccggtacaagtttgtgtcaggtcctatgcagtgatgccatctgctaagggtcttgtggcagagacgcacctccacttcatcggcacctacaggggcgtcgtcagcaccgccttctgtactgagattgttgagtctgcagatgcctatatctttgcaggctccattttcaaggactacagctccgtcggttactcattccttctcaagaaggccaaggccatcattgtccagcctgagcgtgtgggagtgggaaatgggttgtcattcaaatgtttgatgatgaaggagtactggactgaaattgctaagaaggttaaaaag

SEQ ID NO: 307523 - DNA, 266 bp, Zea mays
tccacgcgtccggcagccaattcgctcgagttcatatcgagcgcgcgccaagcaagtcttccggtcggccgcgaagagcgcaatcaagcaagacaagatggtgaagctcgccttcggaagcgtcggcgactccttcagcgccacctccatcaaggcctacgtggccgagttcatcgccaccctcctcttcgtcttcgccggcgtcggtttcgtcatcgcctacgggcaactgacgaatggcggcgcgctggacccggcgggcctgg

SEQ ID NO: 307524 - DNA, 191 bp, Zea mays
tcgtgagagtacgtggaggagcagccatggcttgatcggtggccgccgcggcgagcacattcctgggcacccgcctggcggacccggcgccacagaacgggcgcatcgtggcccggttcgggttcgggttgggcggcaaggcgaagcctgctccgaagaaggtggcgaagacattgacctcctctgaccgg

SEQ ID NO: 307525 - DNA, 288 bp, Zea mays
  unsure (1)..(288): unsure at all n locations
tgagtccaagaagggactatatgacacgcttgttctacttgtggacttcaacagactctacccttagataattcaggaattcaacatatgctagaccactgtcgagcgttcttatgagggcagtgcacctaattttgtcagcatgaaaagttactgcaggactgccctgngcgttgacgagtccatttttagggcggtgccggcncnatcgttccgggatcggcagctttatcggggggcgagggatcacggcagcggcggcggcgaacaccgaccgaccgacccaac

SEQ ID NO: 307526 - DNA, 356 bp, Zea mays
  unsure (1)..(356): unsure at all n locations
nttgntggagggaactatggcctgctcaacacgactacgtttgaaccgaaccctgactactacaagtggactagccatgcataagtttctctctctcttctctcacaaagctgggatactgagtgataagagagggagaaactgtgggcctaatcccgccatgaaaacctagcatctttctgctttagggggattttgcttagggggactaaagattagtctctagtttttagcctcattcactccatcattaagccaaacactatgactaaaatatagactaaaatgacttaggagttagtccatcacatatgtgctaaaagagattaaatcatattagttttactcttacccct

SEQ ID NO: 307527 - DNA, 223 bp, Zea mays
cctgggtttcgctgctctccgaccgcgagctccgaaggtcttagcatcaggcgcggcccccctcgcgtgtgaccgagatggcgctgccgaatcaggggaccgctgattaccccagcttcaagctctgccatcgtcggtgatggtggaactggtaaaactacatttgtgaagaggtatctcactggagagcttgcgaagaaatacgaaccaaccattggtgtgg

SEQ ID NO: 307528 - DNA, 362 bp, Zea mays
  unsure (1)..(362): unsure at all n locations
tgcgtcngtgtgagggaaatggtcctaatcctgcagcagatctgcgatctaactacctaatgaatacgagcattgctgggcttgaaaaggctgatgtcttccttatggttggcactcatccaagggtggaagctgctatggctaacgccaggattcggaagactgttaaagcaacacacgcaaaggttgggtacattgctcctccagctgaccctaactgtgaccatgaggaagttctcacagcaccttggggagatcctggaggctcttggcatcactgacaagaacactggcagatccaagggctaccgatccgttaccttccgggatccggacgcggctatgagagcttgtgttgatcc

SEQ ID NO: 307529 - DNA, 456 bp, Zea mays
ttttcagcacagcttgaggagaatgatggaggatcacaagttaatgttgctggtgatgacgagacacctatgaggattgtcaagaactacaagaggcctgaggagaggattcctgccgagagagacccaactaagtttgttgtctcaccgataactggagagctcattcccatcagcgagatggaggaacacatgcgcatctcactcattgatcccaagtacaaggagcagaaagagaggatgttggctaagatcaaggaaactacccttgcacctgatgatgaaatttcacggaacattgttggtcttgctcgcactcgccctgatatttttgggactactgaggaggaggtgtctaacgccgtcaaggcagaaattgagaagaaaaaagatgagccgccaaagcaggttatttgggatgggcattctggtagcattggtcgcactgctacttat

SEQ ID NO: 307530 - DNA, 526 bp, Zea mays
ctttgcgctctggttgggtcccacaagggcagctgccatctgtatgatacatctgatgacatgctttgctacaaaacacagatcgacctacaaaacaagagaaggaaatctagccagaagaaaataacaggatttcagtttgtcccaggggattcttcaatggtcataatcacatctgcagattcacggatcagagttcttgatggttttgagctagcgcataggtttaaaggtaaaattttattatcaactatttttcacgtacattcacaatttgcactagttcagaacttcagaacatggtgcaatcattgttgactgtgaatactgaagatcaattgtatctgccttgttcttcctcttaagagcagtgctggaacatgtcagattgctcttgtctgctatcatttgttctactgtttacttaacatgttaaaatagcttgtccttgttgatagatctaatggccacattgtttgtttttcttttgatatcactctctgcctgttattaagaaaaggaacta

SEQ ID NO: 307531 - DNA, 417 bp, Zea mays
tgtcacgcgtccggccgctgcctcagccgctgctcggcggcgcctcgcccgctccggcgcgagcggcctcatccttcctccacccccttctccacacgcgccaccgcgtctccactgcacctgccgctgcctcctccttcgtgcctgcatctcactcctcccacgcgaacgacgccatgctcctccgccgtgccgccgacgtggccgaccgttctgcgggactcacctccccgcacccgaacttcgggtgcgtcatcgcacggccccagcttaataccgacagcgctgattcctgggtggtcggcgaagggttcctctatgcgcaggggacgccctgcgccgagctcctcgcctcacaggaggccggtgagcacgcgcgcggcggcacggcatacctcaatctcgagcctggggact

SEQ ID NO: 307532 - DNA, 619 bp, Zea mays
cttcggtgcagtttagcaaaactatgaattaagctgattggactgaaatctttgggagtcattgcctcatctttcttttgggattaacgtgagataagtaggattcagtaaccaaagcttcgtagtattcttttgttgtaacatgatgatggcttccatgaagtccgatttaattgttggccaacatgccttgtagaaacgcctagtgaatccatctggacccagcgccccatcagcaggcaattcttttattgttgcccaaagctcttctgtcatgtccctagtcagctccaaaagattaactctttacctatgaaagatttccaggttcagagaggacgaccgttcggaaggactcccaagcagattattaaaataagagaacatgatatcttgtttctcatcatgcgttgttatccccctgccttcatgaaccaatttagctaccaagctttcccctcttcctaaaaccagctgcctatgaaaggagggattagcatctccatcttttaaataccctatgcgtgagcgaagcctacaatggtttttttaagagatgccagtccttagcagctttttttgctttttttctcaggccttccccacaaaactggcttct

SEQ ID NO: 307533 - DNA, 363 bp, Zea mays
ttctcgcgtccgaaagaagccatttgccgccattgttggtggatccaaggtctcaactaagattggcgtcattgagtccatgctgtggatggaaggtatcctcataccaggtggcggtatgatctactgatcatgcaagggacacggatggggacccggaaagtctcttgtgcctgaggactaactagagctggctacggatctcaaagagacggctaaggcaagggtgggtactcatcctgcgcagacacctgttgtatctcaaaggtgtcaccccaaagcacggtcatagtcctgttgttccacgctcggctgagcttcttgacaactccaccagagtggccaatgacggcagcacataaa

SEQ ID NO: 307534 - DNA, 379 bp, Zea mays
tttttctagcggccaacagcggcatgggcaccagcccagtcatacctgcgacggtgctctatggggataaagatgtgggtgggcaccctcggcgaggcggatctgaaggggaagaaggtgttcgtgcgcgccgacctcaacgttccgctcgacgatgcccagaagatcaccgacgacacccgtatccgcgcctccgtccccaccatcaagttcctcctcgagaagggcgccaaggtcatcctcgccagccacctgggccgtccaaaaggtgtcaccccaaagtacagctggaagcctcttgttccacgcttgtctgagctcctggagagttgaagtcgtgatggccattgatggcatgggtgaggaagtcgagaagttg

SEQ ID NO: 307535 - DNA, 534 bp, Zea mays
ccttcgcgtccgcggacgcgtgggtctcgctccctctgtctctctcttagcgacgactgggcggccggcgctgctggcctgctgccctacgccaggtgcccaagtcttcttcgggctcgtcgtcgtcggcgacgaccaccaccaggtccctgttgcttttaagaaaaacaaaacaatggaggcaacattagcattctcccaggacagcccaccaatttcgataatttgtgcagcaaagtttgtgggtctacccctaaccattgatcctagccttgcttctggcttggcacccaccctacgttctgcttctggagaatcactccatggtgtcaacccaatcctcctgtacattgccagcggtgcaacaattccctgcttttctgggaagaatgatattgagtttgggcatgttgttgaatggcttgaatatgtccccatctttctttcaggctctgaatttgaaaatgcctgcttatttggtgatggattcttggcctcccggaccttctggttggtcatggcctcacaattgct

SEQ ID NO: 307536 - DNA, 439 bp, Zea mays
catatccgatcccctacctctccagcatcctcccgtatccgtcgtgtgggctccggtcctgaccttgccagccatgggcaagatcaagatcggattcaacggtccctgacggaccggcaggctcgtggccagggtcgccctgctgacgccagggacaagagctcggccacgacccagaccacggagggcatccctccagaccaacatacatgtcatctgtgctgagaagcagcttgaggacggtcgcacgcttgccgactactacatgcagaaggagagcacccttcacttggtgctgcgcctcaggggaggcatgcagatcttcgtgaagaccctgacccgcaagactatcaccctcgaggtgggagtctttagacacccattcgacaacgtcaaggccaagatccaggacagggaggccattcccccagaccagcag

SEQ ID NO: 307537 - DNA, 362 bp, Zea mays
tgttcttgctatccaatccatccataaacataactacatccacagagatattaagcctgataatttgcttctagataaaaatggtcacatgaagctgtcagattttgggctgtgcaagccaattgactgttcaaagctctcaacgttgaatgaagatgaacccatgggtgatgacaacatgagggaatcaatggatattgatagttctctgtccaatacagtaaatggtagaagatggagaagtcacctgctaccgcccatgcactggcctatgaccagacgtgacgctggcatttcagtattcaacatacaccggctattaactcgcagaagagattttggctgcagcaaatccaaactgt

SEQ ID NO: 307538 - DNA, 347 bp, Zea mays
tcctcgcgtccgccctagcgccctggtccattgtaagtcggcggcaatcccttcccgtgctccagatccggtgagtgagacgaagagatgggcgtctagggcgacggcccggttatcggtatggatctggggacgaggtactattgcgtcggcgtgggtaatgacgaccgcgtcaagagcatcgccaacgaccagggctaccgatccacggcctcgtacgaggccttcaccgactgcgagcgcctaataggagatgcggtcaagaaccaggtcgccatgaaccccatcaacaccgtttttgatgccaagcgtattatcggctggaggttcagtgatgcgtctgtcca

SEQ ID NO: 307539 - DNA, 280 bp, Zea mays
  unsure (1)..(280): unsure at all n locations
tnggtaatttctctttttttaaacgggaatttgggggtcttatagcattattatgggtcttacaacataacaggggaaacacgaatcaagcagaggcgccatggggttcacagatccacacctaaaccgctaaattaaactgcgagcgatacatgataaactaagaccaccactcagatcaccaccattttattcagatccaaaggaacggacgcagggggagtcgacgatgacggagggagggcggccgaacagaccagatcagagagatctaggagag

SEQ ID NO: 307540 - DNA, 306 bp, Zea mays
  unsure (1)..(306): unsure at all n locations
ctcttnttgtctatcagcacactgttcgaccgagtgtatctttttaanngagagatttttaacccatttctccttgacatgtgaactgggaaaggcagaggtccggagggtttcttgcgtctatgtccatcggcttccgctttggcatgctcaagatgaaagcagcttgctcattggaggccgatgtggaagttatcctgtaaccactctcccatcgccgatgaatgccttcgctagggtacaggaagtccaactctacaacctgagtagaaaaccctgagttccttgacataactacgccccagc

SEQ ID NO: 307541 - DNA, 295 bp, Zea mays
ctaagcttacaagcaaagagcccaatgcgtggaaaataagatctttgacactacctacaggtgcccttgtggaggataccgtttcgttaaacagaaaccaggtatctgctgtggtgtactcatgactacaccggctgaagcgggccactacaagacattaccacctgcatgacactgatgcgtactcaaagggacatgacaaagtacaggttgtgtgcctgataattcgcttcaatccatagatacttattttacggggaccgctcctcacttggccatcataaccttgacgaac

SEQ ID NO: 307542 - DNA, 377 bp, Zea mays
gggggcatccaatatttaatacactacgggaataattcaacagcacggccaagcacggcagtaaaatgcactcgttcccataaaagcatcagagtccacaagtaccattaccagggaaatgtacattactcagcgaaacagcagctgagtttcgatacgacgcgatgccaagcataaaccccaatccaaatccgtccccaacactgcccccaacaaacaaacccaagctaaattattcactgcatgcaatacgccaagtacatgcacgagctcacggattacagaaccaaatgaggcgcaaactttggtgcccaaatgaccaaaacagaacatgacgaacttttagaagccctgctcgatcaggtaatcgccgagcc

SEQ ID NO: 307543 - DNA, 495 bp, Zea mays
gctatccaaataatgaagtaaagtgctacaattcatcatcttaacattcagtatttgttgttgatttggggtgagttattcctcacaacacccccaagctcacattatatttcaccattatacaagaaaccccttacacttgttctatttacaccaacactccccctcaagatgggctaaatatattcaacattcccatcttgttacaagccaactcattatccttaggacctagacctttcgtgagactatctgctaactgattacgagacttgacataattcaacttcaaagccccaccatcaatcttctccttgataaagaacctatcaatctccacatgtttcatgcggtcaaactgaactagattatttgctatgttgattgcagcaacattatcacaatgaagtaacatggtctcattcttctacacctgaagctcctttagaagacctttcaaccacatcatttcacataaggctagatccattgctc

SEQ ID NO: 307544 - DNA, 298 bp, Zea mays
gcacgccgccgacgttggtcccgccctgctggatccaccccgacaggtaggctccggcgaccagccaggcagcgcgccaccgccgctgcgccacgtacgcggacacgccctcggccggcgtcgcctcacgcgacagcgcccgggcgagcaccaccgcgtcctccagcgcggagcacccgccctgcgccatgtcgggcgtcatgggatggaacgcgtcgccggccaccgtgacgggcccgcgagccgcggggcccacgaggacggacaccgggttgcggtacaggagcggcgcccacga

SEQ ID NO: 307545 - DNA, 380 bp, Zea mays
tctcttacatctaccgcagtgcgggcgacgaggaccgggtgactatgatgacgccgccccctctcgagcagcagcagggggacgagatgctggtgccgcaccaggagctccctgtcgctggcccagaacctgccccacagccgatggaagttgttgcgcagacagaacccgccaacacagcggagacccagccacccgaggacccgcagacgtcgcgcttcacctggacaattgaaagcttcagtcgtcttaacactaagaagcactactctgatgcgttcgtcgttggaggatacaaatggcgtgtgctaattttccccaaggggaacaatgtggatcacttatcgctgtatttggatgttgcggattctgggagcctc

SEQ ID NO: 307546 - DNA, 231 bp, Zea mays
gcttcgacgcagagatgtacttacactgcataagctcttaacacatacagttgcacatctttattgctagctaacgcaaggctactttaccctacgttaaggcacacaagtcacttcaggctaattaaggacgcacgacgatcttggtgttcttcgtcatgtcggtggtggcgaggccgccgccctttccggcgagcgggaagtagaaggggtagatcttgtagcgcaccc

SEQ ID NO: 307547 - DNA, 374 bp, Zea mays
cggacgcgtgggttttccctgaggcagcttcaattgccaacggttctaaacaagttgatacttctgatctgctgccagatcatataaagcacagtgacaaccctgcattggttgaagggctgatggtgaatgaagtcaggctttctgcagaggatgacagcaaaggggatggtgacttcgatccgtcaggtccagattctagtgaagaccaaaaagatggattgaactcagaagagtcagatttcacatctgactctgatgatttttgtgctgagattgccaaatcttgtggccaggatgaagtctcggcatctccattatcaaatgtgataaaccatacttatagaatgaaactcagggccagcaacaaccgc

SEQ ID NO: 307548 - DNA, 279 bp, Zea mays
tttattatttttttttttttttttttttttttttggtttttttttgttttttttttgttttttttttgggacccaaaggggcgttataccggaacattccaaaaattaaaggccccctatatattgaaaccatcactttagcaaatcccacaaacagaagttaaaagggccccaactatgcctggggaggattttttatggtgcagcaaaaaagggaacattccccggttgggggggcgattcagcttcctatttcccaggtggggggcgggaaaacca

SEQ ID NO: 307549 - DNA, 472 bp, Zea mays
gtgaatccgtgacaaccggcggcggcgagggaagaatcgaagatcgccgcagccgcaaggaaggaaaccgagaacaactcaatccgctggctatggcgttgctgatggagcccggcgctgagcccctgactgagagcgagcaggccgacctggccggcatcgccgccatcaaggagtcggcggcgcgcgaatacaaggagcaggggaaccagttcgtccggatgggccggaggcactacgccgcggcggtctcctgctacacgaaggccatcgctcagatggagcccctctcctccctcgacgcatcagccgctgctgacgcctccgttctcttcgccaaccgagcacatgtcaacatcctcctcggtaaccaccgacgggccctcgacgacgccgagcaggccatccgcctctctccctccagcgtcaaggcgtactaccgagcagtgaaggcggcgcttgcgctggactt

SEQ ID NO: 307550 - DNA, 487 bp, Zea mays
ctttttgaatagtttccattctaacgttgttttggtcataaaatggcaaggggcacaaataggatagtttcttctactttgttttactacattttctgtgagtaccagttttataaaaaaaacttgacctgcggggggtaagacagcccccgggtattgtattaagaataagaccttctcacacaggtcaagaaaacccccgaacccctgccccacacatacacagcggcatcgaagctcatgtgagaacgaccacgaccagggctgagccttagacctatgctttggcgtggaacagacgagaggatttttttaaccacagcctggaaattcgctcccacggggagtcgaactcaggacctgaggagtgctactcagaccacctaaccaactcagctagaggccctttcgcgagtaccagttttatcatatttctctaattctctttatgtttcaggaatggtggcagctttaacaaacgagagtg

SEQ ID NO: 307551 - DNA, 474 bp, Zea mays
cggacgcgtgggcggaccgggcgcgagttcgacaaccacgcctctcggtcattcttcctcaccagtggcattcagttgcgtctctcgtgcccctacacctccacccagaacggctgggcagcgcatgattcgcaccaccaccaacatgatccgctgccttctcttccaggcaaatctccctgcgagctactgggcagaggccctgcacaccgccacccacctcctcaaccgtcttccctccaaggcggtgagccaccctactccctacttcgcgctgtacggcacagcccccacctacgaccaccttcgcgtgttcggctgtgcctgctaccctaacacttccgctactgcccctcataagctttctcctcgctccacccgctgcctcttccttggctactcctttgaccacaaggggtatcggtgtctggacctcgcctcccaccgcatcatcatctctcgtcacgtcgtctt

SEQ ID NO: 307552 - DNA, 356 bp, Zea mays
gaaagatcagtaacagtttatttggaactagtccgttaaaaaatcacatgtcccgtccgttgatgacagatttggacattaaagatacagtacaacattgattgattatgccacttcacgtctacatgtacggattcaatcaagggcctccatcaatttagggagctgcactgggtagcggtggatacagtcggcccacggcccagcagcgtcggcggcgggctcgatgcactcccacgccacgctgctgcagtcgaagccggcgccgaaggagatcatccacacgcggtctcccttcctcatgctgcccttggcctcgatgtacgccagctcgtacaccaccgaactgctggacg

SEQ ID NO: 307553 - DNA, 279 bp, Zea mays
acataaaacaacttatataggatgttttttttaaatgtactagggttcttgataacataagaaaagatcaacatcaaattttatacatatctattttaaaatattaaatttgttctaacagttcggattaccactttcattcctaatctcaggtagcaaaatagcccagaggacgacggaaaaaagggcccgcaggccacaaacttgttcgaacacttggaactggggccagtctctgtgcgttcatgcaatctacatgtgagaaatctgctcctttta

SEQ ID NO: 307554 - DNA, 237 bp, Zea mays
ggattcaatgagtggatacatgattacaaccatgatatgtgtggagtgatgtcttacacgatatccgacaaaaaattcgttaccgacaatatccgtatccgactagttccgtattcgacacacacctattcgtatttgtatccgagaacatccgtattcatattcgtatccgaagctatccgaattcgaattcgaatacgaataaaaatacgaaaacaaatatgatttcagtgatat

SEQ ID NO: 307555 - DNA, 378 bp, Zea mays
cccacgcgtccgcagcgccgcagggtgcaaatctgcatgggtcttcttcatccatacaaggtgacttctctgctgagcacatgatttttggagttgatggggttgatcctgtcaggcgagagaagctggttgatctgctagacattgatctgcagtggcgcatgcataaagtttcagatgggcagcgccgcagggtgcaaatctgcatgggtcttcttcatccatacaaggtgcttttgctcgatgagatcacggttgatctggacgtggtgaccaggatggacctgcttggtttcttcaaggaagagtgcgagcagagggaagctaccatcgtgtacgccacccatatatttgacggactcgagacgtgggctaccg

SEQ ID NO: 307556 - DNA, 380 bp, Zea mays
cccacgcgtccgcacgccgccgccgggtcctcctagggtttcgccgcgatgtcgctccggccgagcgagcgggagcagatgcggaagggcaactacaagcagacggtggacgcggaggagagccgccgccgccgcgagggccagatgatggacatgcgcaaggccaagcgcgaggaaagtctccagaagaagcgctgcgatgggtttcccgcctccgccggcggtgtgccgtcgatgggccactccaccgcgctccagcagaagtcccccaatcgaagaggtgatcagcacaagagtggtgtcgcgattcattgagtttcttacacgtgaggaccatccccaactccagtttgaggctgcatgggcactcaccaacattg

SEQ ID NO: 307557 - DNA, 372 bp, Zea mays
cttctttaagagctgaaagttccaatctcacccactccagtcatctattgtgacaatgtaagtgccacttatgtttgcgccaaccccgtgttccattctcgtatgaagcgcattgccattgacttccatttcgttcgagatcaagttgctactggtaaattgcgtatttctcatgttcatacttttgaccaacttgccgattcacttactaagcccgtgcctcgccggcacttttaaactcatcggaacaagtcctcaatggccagccaatcttgcgggggcatgattcaattctaagctaaacccattcaactgctgtaaaaaggtctgagccctgcgttgatagaaagagcgctcttttcatgaaactag

SEQ ID NO: 307558 - DNA, 393 bp, Zea mays
caagaatggcgcaagagttttccaggggaacaaattagggctcacaccagtacacagcgctgcagctaagggcaattacaaagctcttcagtcacttctgcttcatgcccaagattgtgttgatatacctaccaagaccaaagaaacgccattattttttgcagtgaagaatggttctgtggattgtgcaaaacttcttttgcgtttcggggctgataccaaagcccggaacctgagaaagcaaagacctattgatgtggcaacatcccaggacatgcgtttcatccttagctctgcgaatgtgttactattttcagggaaccataactcacctcaaagaatcgtgtgatgagaaaggaaatttacaagagcttggtgatgaatttgacgatt

SEQ ID NO: 307559 - DNA, 338 bp, Zea mays
ccgcactctcgcaccagagagcaggtagaccatgtccttgtacttccccgtcgcatgacgtggtcatcgagcagcgacgcggcggaggcggagggcgggaggagaaatttgccattacgcatggcgccgtcgttgtaggtgcggagcagccccgacagggaggagaaatttgccattacggcgtgggcggactcgcccaaccacggcatggccttcgactcctcctgggggctcctcgacgacctggagatactcgtcaagcgcctccgctcaaagcaggtgcggaagggctccatcgacggggagcggcggcgccggcaacagcaacttcgactcct

SEQ ID NO: 307560 - DNA, 366 bp, Zea mays
cccacgcgttcgcccacgcgtccgcccacgcgtccgcccacgcgtccgctactctagagcaggagtaccggagtgacatttttggcgagcgaggtattttgcttggtgctgtccatggcatggtggaggctcttttcaggagatacacagaacaaggaatggacgaggactcagcatataagaatactgtagagagcatcactggaattatatcgaaaactatttcaaagaagggtatgcttgaagtgtataactccttgactgaagaaggaaagaagcagtttattgaggcctatagtgcagcatattacccatgcatggacatattgtatgagtgctatgaaagacgtctcttctggaagtgag

SEQ ID NO: 307561 - DNA, 461 bp, Zea mays
caaaaggctattacgcttgtgtgcattgtgacaaaaatccttgctccaaaagaataaggaacaagatatgctatgtttatcatcgacgtttccttccaaaagatcacatttggaggagaaataaaagttttgatggtcatagtgaacaacgtgagaaaccagaggaatttagcatagatgagttgatgcaacaattggagagggtaaaagatgtaagaccaggaatacatactaaaagcaaaaagagaaagagggaagtagaaggtcaatgttggaagcgaagatcatgtctatgggatttgccatattggtcaagtttgaagttgcgccacaatcttgatgtaatgcacattgaaaaaaatatatgtgagtactttcttggtacatttcttggcattgttggagagacaaaggacaccattaatgctaggcttgatttggaggacatgggcataaggaga

SEQ ID NO: 307562 - DNA, 413 bp, Zea mays
  unsure (1)..(413): unsure at all n locations
gtcgttctcgtgcaagctcacggtcccccacgcccacgagcgcctccgctgcgacgaagagaatcatcaggcagagcgggggtggggcggggcgcagatggatctagagaggtcaccgccagcgtcgtcggcggaggcgcccggggacggcggcgggggcggggccgcggcctgctcaatctgcctggatgcggtgctcgcccgcagcgctggtcgctccgtcgccaagctacaatgcggacacgagttccacctagattgtattgggtctgcattcaatgcaaaaggagcgatgcaatgccctaactgtcggaagattgagaaaggtcgctggctttatgcaagcggacatcgcgcctctgttgatattgtnatgggtggcttgggtgaccagtgacaactatgatatcacc

SEQ ID NO: 307563 - DNA, 325 bp, Zea mays
aaatcaagatagcacaagcagttacttcaaacacttccaccaggccagcatataccaactgttacatcacgattgatagaaaaaagtgtctcaacagcacttggatagtacagtatgaccaatgatgttcagaaacatgcacttgacaactaaaaggaaacaagatataaatagttcccagactccgagtgacaattaaaaccagtaacagtagcaaaaacgaaaagattagagcttgtcctcaaactcagaaagaggagtcatctgttctttcagacccttcctcttgcggatatccagcaccagctgggcagcctgggagcca

SEQ ID NO: 307564 - DNA, 373 bp, Zea mays
accccaccatcgaacgccgcactgcatcaaaaactgcaactcggtgacagttctgcacctcgtttcgaatgaactccgtagacgtatccgactatccgctagggaaacaaagttcgtccccaacctcccaattcctagccttacaggtcacagatcagcatcatacacggcgcctgaatttcctcagaagtccatcccgctcatctgcggcatacggctggctattctggacttggttgccgggagctcggagacagcggcctccgtggttgccatcagcagggaaacacttgcagcgtcttgaagtgcggtgcggatcaccttcacgggatcgatgatgccggccttgatcatgtctacgtactcccctttt

SEQ ID NO: 307565 - DNA, 408 bp, Zea mays
ttacagaagtgctaaaatccagtgagagcaacacagaatagtaataaagttactggagctcaaaagaaaaaatgggagggaaacatatcgggggccagtccttcagtaacatccacgtagttccagccttccaggaaatggctggctcctagcaagcacatccgcttgtctgttcagtgtccgggacttgttccacaactgtcttgaagtaaatgtcttggtcatgctcatgctccaaagcgagcctagcgatgcataggaaagcagtgtcgacgttgtggtcctccttcgcagaggtctcgaagtatggaatatcgcccttggaggcgcaccattccctcgctttcttctctggaacctgcgggaaaggcaaagagactgcagggtatttcgaatatatatatatga

SEQ ID NO: 307566 - DNA, 357 bp, Zea mays
aacagctatcaagaaacacaaggtcgagtcgattaagttaaatatagaaaagaaagaaatagcataaccacagaaaggtgaaaattcacatttaccatccgtttgctgatatatggttttatctccaaggataagtcatgttgctcttcgtgtcatgaaacttgtggtttttctcgaattctttccttgattccttccttgtgcctgattgccagacactaccaaaattaggtagccaactagaatcagatgttattggaacaatttcaccttccttctccatttcaagctcagctcttcttttttctgcccatgcagcaccaaccctctttggattgagtttcctcaaatttcctt

SEQ ID NO: 307567 - DNA, 323 bp, Zea mays
aactaacagtataatgatggcaaaccatgcctcgtacaaaaaattggccggaccggaaaggatacagggagtgtacacgccgaaccgctcgtaacgtgcctgagtattgcactagttgaagtcaggcttctttgggtaggtacagcctgggcgctggatgacaacattggcggcgtagcaaccagccgtcacgcagtcctcgatgctcttgccctggaccagccgagagagaaagcctccgacgaaagcgtcacctgcgccgttggtgtcaacaagcttctccttgggcaataggatcacagggaacgttttcaccttcccgt

SEQ ID NO: 307568 - DNA, 403 bp, Zea mays
  unsure (1)..(403): unsure at all n locations
taaataantttttttttggggaaaacattatggggggcacataaattatttctacaaagttaatttagaatgtttaattacagaaaaatgtgtcgacaactgtacactaaccagctaatcctttttagcgatatcgataagtctctattgtatgtttgcaggaatggcatatcggcacgaattgtcctcataacttaacagatcaatcacaaagttccttcgaagaatctttgcatccccaacaaatttcagtcatctgtcattcccccacatagccagcttgtagaacaaggtagctgatattaaacctatagaataatgtttgggtaactatgttttatacaatgattatcatagaaaaaatttaaactgctggaaggtggtacgaagaaaataccctctt

SEQ ID NO: 307569 - DNA, 401 bp, Zea mays
  unsure (1)..(401): unsure at all n locations
taaataanttttttttttttttttttgaaaaggtggatttgtttaacttccatgggttattattctccagcacacgaacagggaaccgctgcagacctattctgcagcaattcctttcgtgaaatccactttaacacacgtaaattgaaataaattgatgtggatatatacgtgcatatccaaatagagtctcaatcctttcgtgaaaccgggccgcgcctgagcgactcggcgatgcccgtggcgaggcagtaggccacggactggatggtgaccatagggttgacgcccacggcgccgggcaggacgctgccgtcgcacacgtacaggctcccggcctcccagctctcgccgcgcgcgtccacggngccgtcccgggccgtggcgcccatccggcagct

SEQ ID NO: 307570 - DNA, 351 bp, Zea mays
cccactcgtccggcggcagcttccctccctgcctccttccaggatttcttgggttcccaattgttttcgtcaatttccacttgttcaaggccattgttcgcagccctgcatcttccgttgtcttgggaatgtgtggaaggagccttccttaaattgtggcccaagacttcctagtcatcttgcggaatctcataggttctcgaagatggtttcctctgagatgacctctgtcacagtgacgcgtgcacagggctccaagctttttagagggaagatccttctgccagggggatcctcagatgttgtgccttctgaaaatgttgagttcgatttttctgatgtttttgggcc

SEQ ID NO: 307571 - DNA, 290 bp, Zea mays
cccactcgttcgcccacgcgtccgtcttggagtacctgaacgtgccagccagcgagtatgcgctggtgttcacggtgagccgtgggtcggcgttccggctgcttgctgagtgctaccccttcgagaccaaccggaggctgctcaccatgttcgaccatgagagccagtcggtcaattggatggcgcagagtgcgcgggcaaagggtgccaagacgcgcactgcatggttccgctggccaacactgaagctttgctcaacggagttgcggaaggagatcgtgggcaagaag

SEQ ID NO: 307572 - DNA, 335 bp, Zea mays
acagttctcttcgagccatcttccatgatggccaagtgcgacccacgccatggcaagtacatggcctgctgcctcatgtaccgtggtgatgtggtccccaaggatgtgaatgctgctgtggccaccatcaagaccaaacgcaccatccagttcgtggattggtgcccgactggcttcaagtgcggcatcaactaccagcctcctagcgttgtgcctggtggcgacctggccaaggtgcagcgtgccgtgtgcatgatctccaactccaccagtgttgtggaggtgttctcccgtatcgaccacaagttcgacctcatgtacgccaagcgtgcctt

SEQ ID NO: 307573 - DNA, 421 bp, Zea mays
cccacgcgtccgctcctgcctgcagcctcctgctcatcgaccctttcgccccacaagctcgattcctcgctcggccatggctgcacccgcggaggagacgcttgccgccgaggatacggcgtcaccaccgccgccggcgaggtctgcggggttctggttccttggcgaggataagtctgtccacaaggctctcggcgggggtaaaactgctgatgtacttttgtggaaagacaagaagacctctgctgcggtagttggtggtgcaactgtcctatgggttctgttcgaaattagtcctcctgatgttcctgaagtgcagatatctgaagaccttgctgtaaacattgcgctagcattgcgtgctgacatcaacaaggcacttgccctgcttcgggagattgctctgggccataacctgatg

SEQ ID NO: 307574 - DNA, 462 bp, Zea mays
acaccttatcatcaccgccgcgccacgcgcgacaactgcatcccccgtccgcacccctaccccgagcatcgcagcgcctcccgcacgaggtcgttgcgcttgtcgatctgatggcggcccatggcaaaggagcaggtagaaaatggccgatgccgaggatatccagcccctcgtctgcgacaacggaactggcatggtcaaggctgggttcgctggcgacgacgccccgagggccgtcttccccagcatcgtggggcgcccgcgccacattggtgtcatggtcgggatggggcagaaggacgcctacgtcggtgacgaggttctgcaaaccgatcatgacaaaaccaaaggtagctttgaagccgcagactctgtctccacaacctgaagcccaagcacctcatgatcctcaaacaccagagcaacaacaaagcgggactggtgtaggcgtgtagctggtga

SEQ ID NO: 307575 - DNA, 522 bp, Zea mays
ttttgatcgcatctgttgtttgatcattgaataacttcaattatcacttatgcttcttagtgcctcatgtaatctcaaattgatttcaattggtaatttcaatcgatatctatcttgataggcactaagttaaaaggagaattcatgatatatttatgcaatttgtgatctacttgatatataataacatgatttagaaaaggatcactagttgtagaaccctctcttgtgcaaaatattttcatacattgtcttgagtataagtcttaggcgaatttaataagactaaggacaaagcacaatgaagaagagcatcactatgtcaaggtacaaaagggtaaatctatttaatcttatttatacatgtacctaaatcttcctacattacttgcatatcatgtttaaaaggaagagaaagcatgttcatgcattaaccctgcttcatacctagtttaacttctcaaacattcattcttgcatctttgtttaaactggatgaagtgattttattgtcaaagagct

SEQ ID NO: 307576 - DNA, 369 bp, Zea mays
cccacgcgtccgcttgatcctgctggagatcttggagaaaatcaactgttctggggccaaaaggaacttcagatattgacgttacttgtggctttgatcgctgttccatggatgctctatccaaaaccttttatcttgaagaaacttcataaggagagattacaaggtcacacttatcgtttactagggacatatgaaatggatccagattctgaacctgattccgcccgagcacgtcatgatgatttcaatttgcagcgaacgttttgtgcatcaaatgatacattccattgagtttgtacttggtgcagactgaaatactgcatcttatcttcgacttttggctctgagcttggcgcattcagagct

SEQ ID NO: 307577 - DNA, 253 bp, Zea mays
cccacgtgtccgcccacgcgtccgcccacgcgtccgcccacgcgtccgcccacgcgtccgtgatccgcaagctgccgttccagcgcctggtgcgtgagatcgcccaggacttcaagaccgaccttcgcttccagagctccgccgtcgccgcgctgcaggaggcgtccgaggcctacctcgtcggtctcttcgaggacaccaacctctgcgccatttacgccaagcgcgtcaccatcatgcccaaggacatcca

SEQ ID NO: 307578 - DNA, 351 bp, Zea mays
aaagctcaaggggagaaaaagaatagaacgggtcaatcccatgcttgtgctccaacataaggctctgcacacacctacaacatcaaggaatttacacatcacgctctttctaagtgttgaaacccgtattccacacaaaacatgagcagagcaaatggactagcagtccagtgcattacagttgcttgaacaacaacgacaagatgtcgggcattagactggcgaagaactttattttgtggcttgagccatgatgttacttatggagctggcttcctttttagcagcctccactaacgaatcctgtgtgggaataagtcttgcaacatttttcttgctagattcttgaag

SEQ ID NO: 307579 - DNA, 423 bp, Zea mays
gcatgcaagctccatttacgagtgcataaaaagtacatggtcatgactcttatggtccacgtttttcgttcattggagcagaatgacatatactgtgtgggattccaaaatggtgcattacaatcaaaagatgggaaggacattgtgcttatgggagatcttgtgctttcaaacaagttggttgtctatgacttggaaaatcaagtcatcgggtggactgactataactgttcgtcgagcattaaaattaaggacgacaagacaggcacaacctatactgtcgaatcacatgacatatcctccggatggaaattccactggcacaagtccctggttctgttgttggtaacaatggtgtggagctatttatagtacactaactctattgtacaacacgaacacgcacttaccgaaattcatttg

SEQ ID NO: 307580 - DNA, 337 bp, Zea mays
gagctggccgtgataatgattgggagtgtccaaattgccacaacatcaactttggcttccgcacagtctgtaatatgagaaagtgcaacacacctagacctgaaaaccaggttagagacttcttccttatctgctattgtaagtgatctggtattactttcatgtatttaaactatgatcaatgtttctttacttttgttgaactgtagtattatgacttcacaattgtgcttgaagttgactttgctgccacaagattacccgtgtgcttgtagtgtacatggttttattgtatactactgttgtaaactgtttggcaaaaccatgcttatgcaca

SEQ ID NO: 307581 - DNA, 436 bp, Zea mays
ccagttcttgcggaggaaaggaacaccagccagcgccatggtcacgtcgacgcgcgcggagctgagcccgtcgctggtgatcagcctgagcacgggcgtgtcgctcttcctgggccgcttcgtcttcttcaacttccagcgggagaacgtggcgaagcaggtgcccgagcagaacggcaagacgcacttcgacgccggcgacgagcgcgccaaggagttctcgggcctgctcaagtccaacgaccccgtgggcttcaacctcgtcgacgtcctcgcctggggctcgctcggccacatcgtcgcctactacatcctcgccacctcaagcaacggatacgaccccaacttcttctgagcggccggctgcgggcatgttcttgagcctgcctgtattctactccgtgtgtgttgagccatatatctgatgctcaaggat

SEQ ID NO: 307582 - DNA, 359 bp, Zea mays
ctgggccaccatctttgaccgtggcctgccttaccctgcgctactgctcctccccaccccactcccccgcaggagcggcggcggccgcagcgaggtcgcaccccacatcggcgagcggcggcggcaccgccggaggcaaaggcaagatgttcgggcgcgcgccgaagaagagcgacaacaccaagtactacgagatcctcggggtgcccaagtcggcgtcccaggacgatctcaagaaggcctaccgcaaggctgctatcaagaaccaccccgacaagggcggtgaccccgagaagttcaaggagctcgcacaagcctatgaggttttgagtgatccagaaaaacgtgagatttatgat

SEQ ID NO: 307583 - DNA, 516 bp, Zea mays
  unsure (1)..(516): unsure at all n locations
atttgaccatgagaaatttgcatctcgcctatggggagacctgtattttcaccctgattctagaacctttaaaaagaagccgccaaaggaaggagctaacagatcatttgttgagtttatccttgagcctctgtacaaaatttatagtctggttgttggtgagcaaaaggggaatgtggaatcaaagcttgctgaattgggtgtcacactgagcaatgcagcttataagctaaatgttagacctttgctgcggttagcttgccgctcaatttttggcactggtactggttttactgatatgttagtgaaacatatcccctcggtgaaggatgctgctgcaaggaagatagaccacatatacactggaccacaagattcctctattgtagatgccatgaaaaaatgtgatcccaatggaccccttatggttaacgtaacaaaactatatccaaagtctgattgcagtgtctttgatgtcttcngacgagtttatagtggcacaatacagactggaca

SEQ ID NO: 307584 - DNA, 422 bp, Zea mays
  unsure (1)..(422): unsure at all n locations
acaataagcaaacataatctctctgctcgttttcctctgtgtcgtcctgccgcgcgcagggctcggcggtgaagatcgggacgtggggcggcgacggcgggagcccctgcgacatcacggtggcgccgcggcggctggagagcatcaccatccgctggggcaaggtcctcgactggatcgccttctcctaccgggaccagagcggggagctgcacaccgccggcccctggggcggcaacggcaaaggagagggcacggagacgatcacactggaggcttcggagtatgtacggngagtggcctggtccgtgggcccgttcaagttcaagaacgtggagcgctgcatcacctccttcaaggtcgtgaccaacctccgcagctacggccctttcggcccggtgtggacagcacccaccacagct

SEQ ID NO: 307585 - DNA, 420 bp, Zea mays
ggttttctcactgttggacaataactatatatttgtgctagtgctggggacttggatcattctgtccctgtttgatttgccatcttgcaggcctcatgatcgtgtccctttgaaggaaatgaagtcagactggcatgcttgcctggacaacgaagttggtttcaagggctatgcggtgccaaaggaacagcaaggcaaagttgtgaaattcgacttccatggaaggccagctgaaatcaagcatggcagtgttgttcttgcagcaatatgtagctccacaaacacatcaaatcccagcgtcatgattggtgctggccttgtggcaaagaaagcctgcgaattgggccttgaggtgaagccatgggtaaagacaagccttacccctggatctgtggttgctaccgagtacttgaaacatag

SEQ ID NO: 307586 - DNA, 328 bp, Zea mays
ggccccgcgataaaacccaagggtgacacaaataaataccaccattcgggcatacatagttttaaacaaaattctaataaagagaaagactcagggccagcagggttttccttttcatactaaggaacccccacagcagcacattaccacaggggctaggcggttacaaaaattccaaaacatggcataaaggggaaaaaattacaaattggccatgaccacgacttcaacatagaaacccccccgttcttattacccccttttccacggtgtttcgacaaaaccaagccttaccaggtttctcaccacccttttttggtttggtttt

SEQ ID NO: 307587 - DNA, 325 bp, Zea mays
attctccataaccccgcagcaaggcaggggaattaacaactcttacaacatcaggggttgtaaaccacacaatactttagaacagacacacataacacgatagcaggagcaacttttggcaaatcacgggataagggcagcacactggcctgatgctgggtcatcagcaaacttttttagtactcgtcaccctcgtcgccatcctcgcccttattgaactcagcaccgacctcctcgtagtccttttcgagcgccgccaggtcctcacgggcctcaaagaacttacctttctccatacccttaccgacgtaccagtgcacgaagg

SEQ ID NO: 307588 - DNA, 345 bp, Zea mays
atctacaattgtaggcgagtccaaaggattagatagggcgtttacacttcagagatttacggattctgaagtcatcttggaacgagacaccaaacagaaagcttacatcattgagatgagacagagaaatgctcatgcccccactcaccctgcgtggaatcaagagaaccaaaaagccttcttgttgaccactgagaccagacattgatataggaccactcacaattgacagcgatggaaaaggtaaaatgcaagtgacaacagtttaaagggcttcccaacccaaccagaccgggctccagcgccccacgccacagacgaggtgggacaccgaggccttgccag

SEQ ID NO: 307589 - DNA, 252 bp, Zea mays
ccaacaccaaagggttgccaggagccgggataacattgaaccgcccggcttttacgggggccaaaaaaataacccccccaaaagttccaaccaaccccaaataaagtttaagggggcaccccgcaccaactggcgataacttttgggaggaactgggccagccaggaactggggcacacttaagactggcaacaaaccgttttgtccacctcctttattttggggccagggcccccccttccgggagggggg

SEQ ID NO: 307590 - DNA, 403 bp, Zea mays
ataaactccagcagcatacacaaacaattccatggggtttttgcatcgaatctatcaagtagttcatcaacacgtctcaagcgacagtgcaggctgagtacacacatggtggaagtatgatgtagtttactactagtttacaactcctaagctcgccaaatctgagttaagcctttgccggcaacttgttcatcacggggcttatcttatcctcagggatgcccctttgaggatcaatcttgtaggtgtcatagaagtctaatatttccatagagatattcttaacctgggaattgcaagtcacagagttgggtgaagaaaacaatacagaataaatagccgggaaaccaataatagaactgcttactatgttcatgtcaacacggagctcttcaaaccatgc

SEQ ID NO: 307591 - DNA, 401 bp, Zea mays
  unsure (1)..(401): unsure at all n locations
tttnacttttnttttttttttttttttttttttgggttgttttttttttatttttggtgttttaaaaacacccaaccgaaagagggccaccattgcataaaacacccctttgggtccggggaatacatccaaaaccaaaatttttttggccccacgtaaaaacaaacgggggttgtttcaggtttgggaaggcatcacaaaacaggggggagcatatatacacacatggccgggggaaaaaacacaaaaataacccgtttgcctttggacgggtggctgccaaaccatatccctgggccgactttggaaagccaaccctaagttggccataaacaaaaacgggggggtaaactcccatgaaaacatcccccaagacccagagggggccccggggggggggg

SEQ ID NO: 307592 - DNA, 345 bp, Zea mays
ttttttttttttttttttttgaatttctaaaaaaacttttgtttatccaccaacaacaaacagacagcacaatactggtgtctgaatacatggacattgtacttattcaactacaatcatgcccatcgtttattacaatgacagcaataaatgatacatgaaataaacagggtgcccatcaggcaccgatgactaaaacagtggtggcgaaaagatggtgcaacggggggaataattcttacagaagaactcaatctacaatttatgtatcatataaaacatttggcagtccttgcatttactgtatggaagggctgtctgtgtaataaaaaagtgtcacttgcg

SEQ ID NO: 307593 - DNA, 392 bp, Zea mays
gctccctctacgcagccgtgtcggggcgacttgacgacgccggcggtcggcatcagccccgttcggcgcgccgccgcaccacagggcacctacccagcaagcgccgccgccggggagccggagaggtgggccccggggatgacgatggcctcccggcgcggaaacagtccaggagggtgaggcggcggcgggagctcgctgccaaccccgcggaggggttctcggtcgccggcgacggtgcgcggcggctgcgcacgcacctgtggtatgcgaaaaggttctccatggagaggcgggggacattcatcttgcccgtcggcgcccaggggaggggtaagggctaaggagtgttctcaagcgtctgaaaaatgggacaactatccatgatgctg

SEQ ID NO: 307594 - DNA, 334 bp, Zea mays
aatggcaatttgcagcagcaacaagtattattaattgcccatgatcaatcaatcagttggggatgctaatttacatagcgagagagagagagagagagacagaattaatggggcgacaaatcagttggggactactactactgggtgttatcaggggggaagttcccgagagggaccgacagagatggatggaagctctcatttcatctcgagtcttctgaagtcgagcattggggtcctgagcccgaggaagttgctgcacttgcagtccgcgctcttggggagccccaggctgcagctgaagcaaagcccggcctcctcccgtttaaccggc

SEQ ID NO: 307595 - DNA, 392 bp, Zea mays
tgagcgtttcggtgcgcgtgctgacgaacaacgggggggacattatcttcgcgccctacggggagcactggcgccagctgcggaaggtggccatcacggagctcctgagcgcgcgccgggtgctctccttccgcgccatccgcgaggaggaggtcgcggccacgctgcgcgcgtgcgccgccgccgcggcggagtcgccgccgcgccccgtggagatgcgcgcgcggctgtccgcgctcgtggccgacgccacggtgcgcgccgtgatgggcgaccggtgcagggaccgcgacgtgttcctgcgggagctcgaccgctccatcgggctgtcggtggggtttaacccggacgacctgtggccgtcctcccgccttgtcggcctgctgagcggc

SEQ ID NO: 307596 - DNA, 328 bp, Zea mays
aaactcaggttcccggcatgatcgttgggcctttgttgaagaaatcaacaggacgacgccgccgccgccgacgacgacgtaagtctgtgtgtatcatctgaattaaagagcactgctctgctgctaactagtttccttcaagcaaggtcatatgcagtcgatggacaatgcacaaaatccagccaggccatagcatatggattgatcggcagaaacacaagggactacgctacaatgcacaaaatacacaggcaactagtagatctagaagatgccgcggctgcgagcaacctcgaggatatcctcaccaccggtgattgtagaagga

SEQ ID NO: 307597 - DNA, 223 bp, Zea mays
agggcccctcacaataaacagcgatggaaaagggaaaatgcaagggacaaccgtttaaaggggtttccaacccaaccaaaccgggtttcagggccccacgccaaaaaagaggggggacaccgaggccttgccaggcaacattccttacggggggcccccaaattttacgggcgaaagttataacacgggtacaagcgttgcacccaaaaaaccaggttccaaa

SEQ ID NO: 307598 - DNA, 154 bp, Zea mays
aaatgcaaaccacatttattcatgattaagccctatgcgggcccccgatagtttggggtaacgagaacacaactgggccatgaaaccggcttagtcccgacttacgacccaaaccatacaattctttgaaagacagccccctccatgggcaagg

SEQ ID NO: 307599 - DNA, 317 bp, Zea mays
aagccacaaacgaaatggttggggagtggtctatccacaatgcgagggaggggacacgagaaagaaaggaagaaacagcagcaccgacactcgactccaccacagtcatgcacggcggcacgggcatctatctatctatctagtccagcggcgtggaacactgcgctgtttcggggtcccacatggccggcagcaggaagcgtcggccggcgatccccacggcgttgtatctggcgcccgtggcggcgtccacgcgcagctgccccgggtacccctggtaggcgccggccccgaacacgcccgcgcacgccgtgacg

SEQ ID NO: 307600 - DNA, 370 bp, Zea mays
accgaaaagaagaataccgtatcacttaaggtttgccagtagccgcaataacattgaaccgaccgactatcacgaggtccaaaaaaataaccaccacaaaagtaccaaccaaccacaaataaagtttaagcggacacaccgcaccaactgacgataactctcggcagcaactgggccagccagcaactgcagcacactcaagactgacaacaaaccgtttagtccacctcctcgatcttggggccagggccgccgctgccggcaggggcgtcctcgtccatgccgccagcgccgcccatgtcttcacccgcgccctggtacatcttggcgatgatggggttgcaaaggctctccagctccttcatcttgt

SEQ ID NO: 307601 - DNA, 151 bp, Zea mays
caggaaaagggctccaaggcccctacgatttttattaatggagcaccatcccatccaggaaacagagggagctccacgcctgactggacacacaccagcaccaccaacgttacctctcaaccgacgcaacacacactactaacagtccatt

SEQ ID NO: 307602 - DNA, 112 bp, Zea mays
acaaacagccataattattttcaataacccggccgcagtgcgggggaattaacaactcttacggcatcaggtgttgaaaaccacacaatgcttcaaaacagacacccataac

SEQ ID NO: 307603 - DNA, 115 bp, Zea mays
aacaagccaaccccaacactaaagggggatatattattttacagctttttccaaatatagaagaaccacgagagccttaaaaaagcatccaacgctttgggcttaaatccatggc

SEQ ID NO: 307604 - DNA, 445 bp, Zea mays
gacggcatcgaccgcaccgtcctcctcgagctggcgctcgccgcgatggaggagctcatgaaagtggcgcagatggacgagccgctctggctccgcagtcccgacggcagcggcttggaggcgctcaacctcgacgagtaccaccgagcgttcgccagggtgttcgggccgagccccgcgggctacgtcaccgaggctacccgcgaggccggcgtcgccataaccagcagcgtagacctcgtagacagcctcatggacgcggctcggtggtcggagatgttcccgtgcatcgtggcgagggcgagcacgacggacatcatctcgagcggcatgggcggcacgcgcagcgggtcaatccagctgatgcacgcggagctgcaggtgctgacgccgctggtgccgatccgtgaggtggagttccttcggttctgcaagcagcacgccg

SEQ ID NO: 307605 - DNA, 106 bp, Zea mays
attacaatgggaaaaagatgaggggcatgtttaaattgctgcgaccgggatatttatttacaagacgcaccaacaatccccaagccaagagctgccgaggctttgc

SEQ ID NO: 307606 - DNA, 285 bp, Zea mays
aatatcaaactgaaaactagttttgggttcagactctgacaatgcatgggccagctttgcaatcctgctctttagaaacctaatagcattgcccatgctgattgaaagagggctacactcaataagaaatgacacataacttctgatttttgcagaaagatctctgccgagaggtttatttgggggggcaggggaatcttttattggctctctgaatgcaagaagcattgctatgcaacgaccattaccaccagatacttcaccagataaatattggagcccaac

SEQ ID NO: 307607 - DNA, 271 bp, Zea mays
ataaatgtgtaaggtgctgggtaagcgccattggtggctccaacatcgaacgacttgtaaaacagccagaagacgcagggggcaataacacagcccatggcagtgcctatcacttggcttatgaacatggaccttggtgaggccagtgtcaggtacccagtcttgaagtcttgcattagatcagcagctgttcccacaatgctcatcatcacaccacacgcagtcagtgccacaatcacaccactatgtgaagcacctgcccacgcaccga

SEQ ID NO: 307608 - DNA, 280 bp, Zea mays
aaacccaaaaaaaacaaattttttttataaacaaaatgggtccccaaatttttccccatcccttcatcccctttgggggaaacccccctgcccccctaaagctgcctcctttctttttcaaactgaccccccttggggccacctcggaagttcacatgcttacaaacaacaaatttttataacaataccccggcttggcttcttcccaaaataccccaaccacccccccaaaattgcgacctttttaaataacccactcaaaagcaaatcccccccaaaa

SEQ ID NO: 307609 - DNA, 394 bp, Zea mays
gggcaaacagattccatttgcagcgttgtgccctggcacaaaatctgggccaactcaaatccagtccacacagacagcgttccacatccatgttatagcatcaaaacttgagatttgaggtcgattccattaaatatgaatgttcccggcaacggaacaaactgcttggtgaccagcttaatcacttcttgggaagcaactccaccgacaaaagcagccactggatgaatctccgaacccccgaaccggcacatctcggttatcaggtcttcggataaggatgctccattcaaacccatctcacttgccactgaagccgcaacagtcttcagcctgtcgaagattccaggcaatctgctataattggcagccaatcgatcaacagcacgtagta

SEQ ID NO: 307610 - DNA, 323 bp, Zea mays
  unsure (1)..(323): unsure at all n locations
cttttntttttttttttttttttttttttttttttggtgtttttttttttttttttttgggtttttgcacccaaatgtgggttataccgtaacatttcagacatttaagcccccctatatttcgaaaccatcactttagcaaatcccacaaacagaaattaaaagggacccaattttgcctggggagcaatttttatgttgcagaaaaaaaggatacattccccgcttgggagggggattaaactttctatttcccaggttggggacaggaaaaccagagatcacttccatgctttaagggccccacccctcccaaatgcctt

SEQ ID NO: 307611 - DNA, 124 bp, Zea mays
tggtggggtcgtcgtatgcgtatctgtacgagttggggcaggcggacttgaacagctgcgagtaggcggtggggcggcaggtgttggggttggcgtatgcgccgctgcaacagtactcgggcct

SEQ ID NO: 307612 - DNA, 436 bp, Zea mays
  unsure (1)..(436): unsure at all n locations
tttntttttttttttttttttttttttttttttttggttttttttaaacaaaaggggggaaccttaaaattatgtctaacaataatatacctgctttctaccttaaaaatgaacttcaatgcagaatggcagtctacacaaatctgcaaattcttcttcacaatgattggttttgtagctggcatgctaatccaagcaaaagtaacggccattctctcactgtgatagtgcaaaaccctctcgtttttttttctatcttcaaggtaaagtggcaaggaaattatgtttgccacataaccttcctcctttatcctttgggagagtttctcaagttttttatatatctgctcttgctgggagtgagtgtgactaaacctcaaatccaaacacacgtgtttttttgttagcatcgacctagctaaaaccaggcagcttt

SEQ ID NO: 307613 - DNA, 338 bp, Zea mays
caatcaaggacgtagcaaaagcatacttgcaaagggccacaatgcacactgaacaatgtttctttcactttgctcctgtaggtgaagaattactggattttattttatgaattttcaggaaagatagtttgaatgaatttcaggaagcgctccgagtagagactgggttccacgacagatattgacaatgagttatattggatgcacttgtaagcatgctcaatcttcttccttatgctgaactcctgcaagatatcaattattcccaggtacagcaccacatcatacacctgaccattatcttcactggcatcatccttaaccgtctgttttgccct

SEQ ID NO: 307614 - DNA, 122 bp, Zea mays
accacggagcatgggatggatttgcgacgcacacaagacacaaaaattcgagtgtcatcacgcacacatgtcaaagcaggagctcgcaacacaaccccatgagttcacagctccactagagc

SEQ ID NO: 307615 - DNA, 327 bp, Zea mays
  unsure (1)..(327): unsure at all n locations
ttttntttttttttttttacctgagaggaggatttctttgcagaagtatgaactgtgtttacaacccaccggagttacaggccaaaaggagtcgtcacctacataacacctaaagtatcgtacgatccatgaggtttctctctctcttttttttgcagcagcagcagcatgtctttgtctgcacctaggaagagcagcaccctcccttcatgttggcagacgaatccgcaacgttgatggtggttccttgacctggaggtccactgcctgctgcctcttgggctgcaagcgccttcttgcttatgatctgatggatgtccgagagga

SEQ ID NO: 307616 - DNA, 447 bp, Zea mays
gcaaagtataacaaatatttcggcaaaacatttgagcagtgaaggtagtgcttggtgttgacatcaaaattaaatgctctttaactgttacaacgctagcattggcaacagacactgactttatttctggattgatagctttgcgctgcgctaaatatcaataaaagaagtgtggatagggaccttgatgtttaccgcaacatactctcaaagctggttcaagccaaggaacttctcaaggaatacgtggatagggaaaagaagaagagagaagaaagatcagaaaccccaaagccaaatgaagctgtcacaaaatttgatggaaatctttattccataaggcattagatcaaccctttgcagaggagagtttcccagtataacagaattacgtgttgagaaactaccaaatgatctcctttcaccacagacatcttttgctgctcg

SEQ ID NO: 307617 - DNA, 303 bp, Zea mays
attgaatgctctgattggtacaatgaatatcgtaagacacatgttttagacatgaccactgtattatgtcgggttttagttgtatcttgtacttggagtaccgtgcagcagtatcagggttgtacatgcccttatttatgtccattgtaccacgcgcaagtacaggcacagtaaaatcggacgacgcaaacgcgctctgctgctagctggtagctctggactggaggtcggccgggaagcatttgcaggggcgccatgcatgcatattcgtcattctagcttgctcgctcgatcccgctggca

SEQ ID NO: 307618 - DNA, 428 bp, Zea mays
tcgcgatttaccttcctgtcgtcaccaacaaccaagcagggacatcttatcttattattagttcaagaacaactgggcttcggtcttgtttgccatggcgggcggcgtcaccctgagcctgggcacattggccacgcagtacggctgggcgttcgtcgggctctccgtcactgaagtcatggcctctagcctcaaggtcgtcatagggacaacgctcaactatttcctggacggccggatgaacaaggcggagatcctctttcctggcgtcggctgcttcctgattgcggccatccttgggtcacttgtccacgcttccaatgccgccgacaaccaggagaagctggctaataataacgcttccaatgcagctgcagctgcagatgaggagaaggatctcaccaaacacctcctagagctagagatac

SEQ ID NO: 307619 - DNA, 197 bp, Zea mays
  unsure (1)..(197): unsure at all n locations
tttnttttttttttttttttttaaaattattgggggtattatgtaaatgattgcgacgagaactacaaaagaaccacctgcttcatgacaacaaagaatttataaaatctgctgctgaattaatctctcttccttctcaaaaagagctatatctatgaggcctaggtaggacccaatcatactttctttttcaatcc

SEQ ID NO: 307620 - DNA, 414 bp, Zea mays
  unsure (1)..(414): unsure at all n locations
tttnttttttttttttttttttttttttttttttgggtttgctccacaacaatccgggacttgttcaaaaaaaaattcgaaacacacaacccaaattttgaagtacacaaaccacagccttgttttgctacatcgaacgcatagcccgtctttaaacaaaataaggttaggcctacttccaccgacactttttcgagactctggcttaccctcctttcccatgtttcgcatttgttggtgactctattggacctgggactcacttgcccccatgcttcgccttcgagtgagcctgaagtgccgtctcactgatgaatgacttgctgcacgatttgcaagggacaccagattttggcgcaaattttggagacttgaccgatttgtcattgtttacaatggtcttgccttttgctg

SEQ ID NO: 307621 - DNA, 405 bp, Zea mays
cggccgtaacgtagtacagtattattatttgggataataaaaatggacagttgccacaccaccacattttgttgttgaaagatcaataactaactaactatagaggaatggccagaagttgtgatcgtcatctgctgctgctagtgctatcctcccctatctatagaggaatgacctccacatcatcgtgttcactcttctctgctcccttctcctccagcatgctcatctcttgcaccggaggcgggttcacaaccgtcatgggcactgcgttgttctctgcaagccgtcccgtcctctcgcgatgctcctggcagttggcacaccagtgcaagcagcagtggaccatgcatgggtcacacggagagttcttgagatgatatttcctctgaagcccctggcgga

SEQ ID NO: 307622 - DNA, 327 bp, Zea mays
tgtgcacaccggtctcgagttcttcgtctgcagccacttcttgatgcagccggcgtggaagtcgcgcctgcacttgagtattcccagcgcctccttgtctctgtagtcctccaggcaaatggcgcaccttccgtcgtcttggtccatctgcgtgtggtcagaactgcagcagaccacttttttcacgcactcggaaactttttcatcggccaggcctgtgttgacattgcccatagcttctgccagagccaacaggtcctcgtagctcatgttgtcaatgtccagactcatgcccctgcgggggtcagcagctgctgctctcgattc

SEQ ID NO: 307623 - DNA, 308 bp, Zea mays
tttccttttttttttttttttttttcttttttgttttgcatattaccatgcgggtttttgcaggcacaaaagatttgggggattctccttcaatagagcatataacatgcgaaatgtatggacccatgtttatacatacctagattctggtcatggataaactaaaaggggcaagagctctatttgcctctggcttgctgtgagctgtttactgttggcgtttgggacccccactctctttttccccctctactaattcggaacttaaagaccaagcccttgttctcgcccggacgctttggggatgc

SEQ ID NO: 307624 - DNA, 365 bp, Zea mays
gcaatcaaacaagtgtaacttgcattgccgaaaccacggtttagctatccaggcttagggcttgttcggttagctctcaatccatgtggattgagtgggattggatgggtttgaaacccaaacaagtcaaacctcttctcatttttttccaatcccatccaatccatgtgttttgggaataaccgaacaagcccttagacggctatgaaaaaaacacccatagagacaaaatgaccacagtggctagtagttggggaagaaccatccacggcgcgcccacccggccgattctcgccggccgtcgtcaggtttgatggtcaagatctccaggtggcgcccccgctgtctttccatgcccaacaccc

SEQ ID NO: 307625 - DNA, 284 bp, Zea mays
gaataccacggtgttcttgcttttcttttctcaatcccgtttgcgaggaatctccacaacttggagcctctcgcccttacaaaagatgttcacagagaatcacagagcaaaggagggattagcaactcacacacgacacaaagatcacagcgaatacgcacacacaagacccagacttgagctcaaaagactagcacactagaacggagctcaaatcactagaatgtcgaacaagtgcgcgagattgatgtgtgagtgatcaagagtgctcaaggaatgcttgg

SEQ ID NO: 307626 - DNA, 366 bp, Zea mays
cgaagtaatacttttccttttttttattcctttctgcttgttttatttttgcacagacaggggggggcaaccacaatggcccggcccataatttccagccggcccagccgctagagtttctgctgggcttttttttcattcgtacttccatcacaatctagcagttagctaccgactctggtgatcttggccaagcagttgtccaccggcctcgggtgcggcaggtacctcacccggcacctagggttcgtcctcgccagcttgtagccgaggaggaagtggtggaggaagacggaaatctccagcttggcgaggtcgttgccggggcagagcctggcgcccagcccgaacgccaggaacgtgccg

SEQ ID NO: 307627 - DNA, 195 bp, Zea mays
aagtaatactttgcgttttttttattcctttctgcttgttttattatagcacagacaggggggggcaaccacaatggcccggcccataatttccagccggcccaaccgttaaagtttctgctgggcttttttttcattcgtactaccatcacaatttaccagctagctaccgactgtggtgatcttggccaagca

SEQ ID NO: 307628 - DNA, 368 bp, Zea mays
gttttgtttcctcttatcttggactcgaggatagttggctacggggctattgtattacctcagcaagttcttgtcactctattgcaagctatgagtgtgggctttattatggggatagctgacagatgcctgactatggtacgattcctgagatgacagcacatcatatgttctgtcacgtccaatacaggattcacgctttgctctaatttcctctcatcaccctcgcttgaaaggagcaaatgatggggtcgttcgtaattggtcccatcaccaaagtgattagctggattgttacggtatttgtgatgcttatcaacgggtatgtcatactatccttgtacattactgatgtccggggcgcattg

SEQ ID NO: 307629 - DNA, 297 bp, Zea mays
tctgtcaacgccagctgcgccaccatgaaggaggggggggcctaggcgtgcaccgccatgttcgcggcgctggacgagctgtttgacaagtgcctcggcccgcccaaggacctgggcgggctggtggtcaactgcagacgcttgaacccgacgcccttcctggtcgtcatgagcgtgaaccactagaagatgcgcgggaacattctgagctacaacctggggggcctgggctgcagcacgggcgcaatggtcatccagctggcccgggacatggtacaggccagcggatccggcctg

SEQ ID NO: 307630 - DNA, 259 bp, Zea mays
cgccaccgccagtacgacaccaccaccgagcctggactaccgccgccggccttcgccgaattctcaagcggggaacagcgcccaccagatcctgcccctgtgatggagtacgtggagaacccgacagcctaccccgtggctgatgcgcagctgacgaggggcacacttgatatcatccagaaggacgccatctacaatcagcttaagaagggagcgaatgaacttacaaacaccctgaattggggcatatcggagtctg

SEQ ID NO: 307631 - DNA, 340 bp, Zea mays
tggtttggaggaggcgcccctataaaccctgggggtctgttgctgctcccacctctagcctgacaggtgaagccgccgccgctgcagtgtccatagccaccgtaggagactgagatggggggttatgtcaagacccacttgagcaatgcatactacaagcgtttccaggtgaagcttaagagaaggcgcgctggcatgacagactacagggtcaggatatggctgattaaccatgacaaaaacaagtccaatacacccaaattcagatttgttgtgcgatttaccaacctggacattacagctctaatcatttctgtttgtatagcaggtgatatggttc

SEQ ID NO: 307632 - DNA, 211 bp, Zea mays
tcggtggcaacccaatcggaattctctgcgggaggggtagatttagactaccccccactagtttcgggacccccatccgctcgagagagcgactctggcggcaatggcgacaagcgagggaacggcgagcgggatcgacctcagcaccaccaacctcagcgacggggtgtggcagcacgaccgggtggagataatcgccaaccaccagggg

SEQ ID NO: 307633 - DNA, 140 bp, Zea mays
gttgacaaccgcgccgctccaccgactgcgccagggggaactaaaacccagaccacgcgctacgacggccgcctgatcgatcgagcgaccattccgccgacgccgccggccggagcagcgaacgacgccatgatgatatc

SEQ ID NO: 307634 - DNA, 265 bp, Zea mays
agcaaggacacagcggggcagcacgagtcccacatcgtgttcactgttgcagggctctacccggtactccatggcatggatgcgccggatcccaagtccaacactggctcccctggagcacacacgggtgattactacccgaatgcggaaaccgtcaagagactcactgacatgcatcccgaaatcaaggggcctaccgacagggaccgaaagaactaaaagcacaggtgagggctggaggacaagatgaacctcagcatgatga

SEQ ID NO: 307635 - DNA, 492 bp, Zea mays
tcttccactcgtccggacagctattagaggcttacttttttttggcctgcgacaaatttttttacggaggtgatcttctagggtgagctggaagaggttttagaggcaacacagtttgcagagttccaaagatgcatggttgcactcttacgacagattgtccgtagcatgaacagctctcatttccaggtggtctagcgggccttgtttctctggaacaatgaccatatcgaaaacctaatcaagcaaaactacaaggtgctattacctatcatctatccagcacttgagagaaactgcagagatcactggaaccaagctggacgaagcctgacgctgaatgttcgcaagatcttctctgatcacgattctgcatttttcggggagtgcgttcagaggttcatcgactaggagctcaagcaggacgaatcctgtttccaagcgagaagccctttggatgcgcttggaggaaatggtcggcttaaaacctca

SEQ ID NO: 307636 - DNA, 521 bp, Zea mays
ttaggggtggtatgcagatctttgtgaagacactcactgtcaagacaatcacccttgatgtggagtcttcggataccattgacaatgtcaaggccaagatccaggacaaggagggcatcccacccgaccagcagcgcctcatcttcgccggcaagcagctggaggatggccgcaccctggcggattacaacatccagaaggagagcactctccacctggtgctccgcctcaggggtggcatgcagatttttgtgaagacattgactggcaagaccatcaccttggaggtggagagctctgacaccattgacaatgtgaaggccaagatccaggacaaggagggcattcccccagaccagcagcgtctgatctttgcgggcaagcagctggaggatggccgcactctcgcggactacaacatccagaaggagagcacccttcaccttgttctcccgctcagaggtggtatgcagatctttgtaagacccttgactgaaaaccataaccctgaggttgagagc

SEQ ID NO: 307637 - DNA, 392 bp, Zea mays
attcgagctgggcacatagggctcgcctacgtgcgcttttgaaacttttcccacttttttcaattcccgccgccgctccatacagacacgcgacaccatgagggagtgcattacgatccacatgggccaggccggtatccaggtcggaaacgcgtgctgggagctgtactgccttgagcatggcattcaggctgacggtcagatgcccggtgacaagaccattgggggaggtgatgatgctttcaacaccttcttcagtgagactggtgctgggaagcacgtgccccgtgctgtgcttgttgaccttgaacccactgtcatcgaagaggtgaggactggcacctaccgccagctcttccaccctgagcagctcatcagtgggaaggaggatg

SEQ ID NO: 307638 - DNA, 428 bp, Zea mays
tccatggagattctggctaataataacgctgggggtgcagttgcagctttagatgaggagaacgatctttccaaacacctcctagagctagagataccatcccaagaagcagagccggatgcaggaacggcagggatcctggttggtctggaggagaagaggtcgatcaaagtgttgggatcccacacgcttatgggccttggcatcgtggtgttcgcgggcatctgctacgcgctcttcgcgcccgcgttcaacctggccactaacgaccagtggcacacgctccccgccggcgtgccgcacctggcggtgtacacgggctacttttacttctccctcgcatgcctcggccgtagcgccgtcctcaacgtgtggctcctttaccggcccatggtcggcgtgccaagcttcaccctggcggcctacgt

SEQ ID NO: 307639 - DNA, 377 bp, Zea mays
tccggaattcccgagcgcgaccgtcccggccgtctaccccagaggcgcaaacccgcaaagcttgagggggtgccacggcccttttcgacctggagagcaaggtcaacgaggacgtacccgacgacgacttcgagctggccacggagctctacaaccgagacatcgacgccgggcccggcgaccccgtgctctatgccgaccgcgcccaggcgcacatcaagctcggcaactacactgaggctgtggcggatgctaacaaagcaattgagcttgatcctatgatgcataaagcttactaccggaaaggtgctgcatgcattaagcttgaagaataccaaactgcaaaggctgctcttgagttgggttcttcttatgca

SEQ ID NO: 307640 - DNA, 303 bp, Zea mays
tatcgcgcccgttcacgcctgcggccacggaaggggccactgtggacttttaggacccgctgtcccggctttcggatcccggcggagatgacaacgatctggagctgaacgcggagtcccacttcctgagcttcgtgcagcggctcggcaagtcctacaaggacgccgacgagcacgcgtaccggctatgcgttttcaaggccaacctgcgccgcgcgcgccggcaccagctgctggacccgcaggcggagcacggcatcactaagatctccgacctcacgccggaagagatacggcggacct

SEQ ID NO: 307641 - DNA, 313 bp, Zea mays
ccacgcgaccggcgcacggaggggtacttatattcatggatgccggaacaaacggatgttcctacatcacctccgagtatccagccaggcaagccggcccaggctgcacaagcagctcaaactgcagctccatctggaccaaatgctaaccctctagacctctacccccaatctattccgaatgcttccgacaatgctggcacaggaaaccttgatgttaggcgcaataacgtacaagtccaaaacctgcttggtccggtgcaagctcatcctaaggacttgcagccattgcttaaagaatagggtaaacaaa

SEQ ID NO: 307642 - DNA, 287 bp, Zea mays
accttaggaccccccaccgcacgctcgggaccttggaacgtttcccgcggcttccctccctttacgcgctcctcccggcaccgaggcaaggtgaagccatgggccagggatgaccgcaagaagcctcgctcaatcactgccttacgtggctacaagggtggcatgactcacattgtccgcgcgggtgagaagccaagatccaaacaccataagaaggaaactggtgaggctgataccatcactgaaacccatcctcttgaaacagtagggcatcgggcatatgggaa

SEQ ID NO: 307643 - DNA, 381 bp, Zea mays
ttgacgcgtttgaggagaaacacacatggtccctgatttatcagtgtttaaagcttcatttaggctaccttggttggaaccaaaccgtcctgccatgcagaccagagatgatcattttagtagcacgcgacaagatttcagcatcaatgactctatgaagagcaattcctctttgcaaggggatatcattccgaactctgatactggagggttgcctttctccagatcagcagtgaacttggagactggatggaagcctcgtggaattctagtggcacatctccaggagcatcgctcttctgtcaatgacattgccgtatcaaatgataataccttttttgtgactgcttttgatgactcaagtatcaaaatatgggatac

SEQ ID NO: 307644 - DNA, 279 bp, Zea mays
tcgacgcataagacaactactggggcaattgggggacgttaaggccggattcatccgctttcggtaatgcataccaggccatacatgaatcttcaaagcctctgaccaacatgaaaggcgctgcatgttgggatcttgatggggctgccaatgcgaacgaacctggaggggttcacacaagaagggctcacaggaagtttgcttttgaatcctatatttgccaaagaaggttaagtgggttacaagaggagagcttccatagcaaggatcctaacatca

SEQ ID NO: 307645 - DNA, 376 bp, Zea mays
ttcacaccctctgacggatctgagacgaggcgggacgattggggctcttatcaaccggtttctcgcttaccccatctcatcccactgactccacccacccgcccgctgactccgccggatctcgtcggactcggatccgcccgaccaccccgcgccgccgccgcgcagcagcagcagcagatcagagaagatggccggactcgacaccttccatttcacctcggagtccgggaacgagggacaccctgacaagctctgcgaccaggtctcagatgctgatctggacgcttgcctcgctgaggaccctgacagcaaggctgcttgcgagacctgcaccaagaccaacatggtcatgggctttggtgagatcaccacc

SEQ ID NO: 307646 - DNA, 348 bp, Zea mays
ttcgttcttgaaccccggcgcccggtgaggacccacagcttcctgtgcgagtcataggacggccttttccgattgggaccacctacagggctgtaggagtggcacgacccgctcaccaagaaaggatttatgcctgatctccacaggtgaaccccaactgcgatcgaacccctccctgaggccaatgctggggactctggtgcacagcagggccaaaggacaacgaccacgtgcgcatccaccaacgtaatggtcgcaagagcccgaccaccgcccagggattgaagaaggaccgcagctacagcaagatccttaaagatcccaagaaagaggtctgctgcaatggaa

SEQ ID NO: 307647 - DNA, 261 bp, Zea mays
actcaacatctgacgctatcgcctatggtcttgacaagacggctactagtgtcggtgagaagactgtccgcatcatcgatcttggagggggtacctctgatgactccctcctcaccattgaggaaggaatctttctggtcaaggtcacagctggtgacacccatgttggtggcgtggacttatgcaacaggatggtcaaccactgccggcaggacttcaagaggaagaacaagaaggatttcactggcaaccccagggctc

SEQ ID NO: 307648 - DNA, 335 bp, Zea mays
tgcgccattggccagctagagccaaccagaagagcttgcagttactgagagtgtgtgtgagagtgaggatgggtggcagcggcagggctgctctgctgctggccctggtggtggtggccgtgagcctggccgtggagatccaggccgacgccgggtacggttacggcggcgggtacaccccgacgcccacgccggccacccagaccccgaagcctgagatgcccctcaccaaggggccgaatccggacacgccgcccaaggagcacacgccctctcaggagcacgggcccaagccggtgaagccgcccaaggagcacaagccgacgccatccacg

SEQ ID NO: 307649 - DNA, 277 bp, Zea mays
tcttacttcaacgccggccgggaagcaagcggggacggtaattttcaatcgccggtgattccattacgatggaccgctacgaccgcgccatcaccgtttattaccaccacggccacctcttccaggtggagttctctctctaggccccccgcaagggcaacgccggcataggcgtacgatgtacggacaccgtcatcctcggtgtccaaaaaaagtgcacacccaagctccaggactccaggtacgtgcgcaagatcgcgtgcctagacacttacat

SEQ ID NO: 307650 - DNA, 389 bp, Zea mays
tgttgaggggcccctgcctacaacggaacggggggggttttggcaacgggttcgcgaatttttcagcggccagcgcgggcggggacgagccctttcgggcccaggcggccgcctcggcggcggcgcccgagccgcagccggaggagcccacaaagaagctcctgggcatcaacgtgaagacgctcaagaagatcgcgccgtaggggctcatgtcatcctgcatgctggtcaactgcaccatcctgccggacaccaacgacgagctggtggacactgacaaggggggcagacccgagagcatcccgtggctcaagacctgaggcaacctgcccatggccaccggaaacatgcccctgtacaccaagcttaccaacgatctgctacgggat

SEQ ID NO: 307651 - DNA, 204 bp, Zea mays
tctttcacgcgtccgcccacgcgaccggcccgggggttttgttgaagcctcggcaacgtcagttacgggggaaggatccggggcatgcaagagcggacgggctacggcaacaagaagtttgagacgctgtcgtacgctgccccgatgtaaacggacgacctggtagagcaggaggacgacctgctgcgcaacggcatgataccc

SEQ ID NO: 307652 - DNA, 362 bp, Zea mays
tcgtcacgcgtccgcggacgcgtgggggacaagcggcttattgagcacaagccgcccaaggagcacgggcccaagccggagaagccgcccaaggagcacaagccgacgccgcccacgtacaccccgagccccaaacccacgcgccgacgtacactcccaccccgacgccccccaagccgacgccacccacatacacttccgtccctacgccccacaaacccacaccaaaacccactcccacttctccgacgtacaccccgacccccaagcctgcgacacctaaggcgaccccgtcgacgtacactgcaagccccaaaccttcgacgcccaagccgaccccaccgacgtacacccctttcccc

SEQ ID NO: 307653 - DNA, 444 bp, Zea mays
ttcttcacgcgtccggtgttgttcggagcgcacacacacacaatcagatctaccccaaatccactcgtcggcacctccgcttcaagatgcagatctttgtgaaaaccctgactggcaagactatcaccctcgaggtggagtcgtctgacaccattgacaacgttaaggccaagatccaggacaaggagggcatccccccagaccagcagcgggtcatctttgctggcacacagcttgaggacgggcgcacgcttgctgactacaacatccagaaggagagcaccctccaccttgtgctccgtctcaggggaggcatgcagatctttgtgaaaaccctgaccggcaagactattacccttgaggtggagtcctctgacaccattgacaacgtcaaggtcaagatccaggacaaggagggcatcccttcagaccagcagcggttta

SEQ ID NO: 307654 - DNA, 297 bp, Zea mays
ttgtttctcctccccctcttaccaagtactgggggggttatttttacttagggcggtgtggaggggcgatggccgccggtgatgtggagtaccgttgcttcatctgccggcttgcctgggccaccagcaacgagtcgctggagaatgccttggcctcctacggcgagatccttgactccaaggtcatcaccgaccgggagacggggaggtctcgcggctaccgcttctataccttgtactccgagaactccatgctggacactatcgagaacatgaacggcatggagctcgacggac

SEQ ID NO: 307655 - DNA, 439 bp, Zea mays
tcgcccttagctaggaacgcacacaccggggggtggcttatttccgatccccgagccaatcgtcgatccaagatgcagatctgcgtagagactctcactggaaagactatcacgcctcaaggtggagtcctgggacaccagagacaacgtcaaggccaagatccaggacaaggaaggcatgaccccggaccagcagcgggtcatgttagctggcaagcagctcgaggacgggcgcacactggccgactacaacatccagaaagagagcaccctcaaccttgttctacgcctcaggggaggcatgcatatctttgtgaagaccctcactggaaagactatcaccctcgaggcggagtgttctgacaccattcacaacgtcaaggccaagacccaggacatggagggcatcccttccgaccagcagctggtcatttttggt

SEQ ID NO: 307656 - DNA, 424 bp, Zea mays
tccacgcgtccgcaaccaacagccgcaagggagggggtcttctatctgactggccgtgtccatcccggatgccactgctgccgcaagtctgactgctttgctctggtgaaccagaggtcaccacagcgttgctcaagttcacgtatgaatctgttttgaacaaagctcagagactgtcattggactcatcatacccaccggggatcccttcattgacagaggttagcaagataatcgtggcttacgggtcacgaattctattgcttgctaatggcacaaacatttatgggagcgaatacaaaggcgtatggatcttactgactgttctttcagggctttgtggggaattatgtcaattttggcgtatttgagctctatggtgacagagcacttgctgatgcccttgatatatgtctgcagatga

SEQ ID NO: 307657 - DNA, 366 bp, Zea mays
  unsure (1)..(366): unsure at all n locations
ttgngaattgcgcagggttttgaaaatccacgggtacttttcgcctaggcgcgcctagtttctaggccatggcctcccgcctggactaggggggtaggcgggctgctaggcgttgggagcgcctaggcggcgccaaggggcgattccacggcgattccgcgcgcccaggagccaaggcggcggcgtaggcgtgctaggcgcgcgtgggaaaaaaggcgggcgggaaaagtcgtgcgcgcgcagaagaaaagcgcgcagagaagaaaagcgcgcagaagaaattggcgcgcgggaggatagcctggcgcgtgcagagaagaaaaaagcgcgcagaaaaaagcgcctggcgcgcgcagagaagaaaaa

SEQ ID NO: 307658 - DNA, 420 bp, Zea mays
  unsure (1)..(420): unsure at all n locations
cgtcttttcggccctatggatgatttctataaatctacgcgtgtttatcgattgctacttgttttttgctatgtactactaaataaaatctctccgtgtgtacacgtacgcttgcatgtgcatggtagcatgtacgtacgacgtcgtccatgtataagtgtgtgacgtgtgagacagagagagagagagacaggatcgatcgagagacggtcatgtccttttggctgtttggtttattcatatcacaacttttgagtgtatacaagattatttctgtggcnnaaaaaaaaaaaaaaaaaaaaaaaaaataaaaaaaaaaaaaaaaaaaaataaaaaaaaaaataaaaaaaaaataaaaattaaataataaatacaaaaataataaaataaaggggggggcccttttaaaggatccaagtt

SEQ ID NO: 307659 - DNA, 309 bp, Zea mays
gtggtgacgcctatgccaacggctgcggggaagggggggttttggacgtcgatcgttcattttgcacaggcaggcaactacaggagggtttttgaggaagatgttggacaaaaccgttactgggggggcctgaaaggtggcggtaacgctcatagaaccggagatccggggggacctggacagaaagtggacggagactacggcactgaggacagggagcaaccaatggttaacagagcgatgtgcgtgagtgcgtgggacaagaagaaagaagatgagacatgaggaatgacgttgacgggaacacag

SEQ ID NO: 307660 - DNA, 409 bp, Zea mays
ttatagctgtgaagccccgcggtcgcgagtagggaacagcaggaggccaccgctgctatgaaaccctgcggctccaccggcgggtcgccaagactccgtttcgaattctagggtggtgctgctctccgaccccgagctgcgcaggccgcaggatcaggcgcgggccccctcgcaagtgaccgagatggcgctgccgaatcaggggaccgtggattaccccagcttcaagctcgccatcgtcagcgatggtggaactggcaaaactacatttgtgaagaggcatctcactggagagtttgagaagaaatatgacccaaccattggtgtggaagttcatacgttggatttcaccactaactgtggtgagatcaggttgtactgctgggataccagaaaggaagagaagttt

SEQ ID NO: 307661 - DNA, 381 bp, Zea mays
ttttagctgtgaagccccgcggtcgcgaggagggaacagcagggggccaccgctgctatgaaaccctgcggggccaccggcgggtcgccaagctccgttaggaattctagggtggtgctgctctccgaccccgagctgcgcaggccgcaggatcaggagcgggcccccttccatgtgaccgagatggcgctgccgaatgaggggaccgtggattaccccagcttcaagctcgccatcgtcggcggtggtggaactggcaaaactacatttgtgaagaggcatctcactggagagttcgagaagaaatatgaaccaaccattggtgtggaagtttatactgtggatcataccactaactgcgtggagatcaggttgtactgc

SEQ ID NO: 307662 - DNA, 346 bp, Zea mays
tttgcgccgtagagtgagatgctcatgaggagggagcagcagggcctcagcgtcactcttaaacccctcatcgtcaccaggctgtcgccagacgctgctgggactacttgcggtcagtgctttgcgaccgtcatttgtactgggcacacaaacatgatgggcccccccttcagaagaccgaaagggctcctccgcatgaggagatctgggattgaccgctgtccatacctggcgacatacactgtggatgcactcagagaaatactgataggaatgcgcgtctagcctgaccgtatgataggcaactacagccatcccatcctagtgcgatactatgctcgcgcac

SEQ ID NO: 307663 - DNA, 287 bp, Zea mays
ttcgatctggtggaactcgaggcattggacttgtccagtaatacattgagcggatctgttccacattctcttgataagttgtccaaacttacatcattcaatgtttccatgaacttcctgacaggagccataccatcttctggttcacttgtcaatttcaatgagacatcctttgttggcaaccttggtttatgtgggaagcagataaacttggtgtgcaaagatgcacttcaatcaccatcaaatggtctgcagtcaccttcaccagatgacatgatttataaaag

SEQ ID NO: 307664 - DNA, 441 bp, Zea mays
tcgtctcacgcgtccgctgcgccattggccagctagagccaaccagaagagcttgcagttactgagagtgtgtgtgagagagaggatgggtggcagcggcagggctgctctgctgctggccctggtggtggcggccgtgagcctggccgtggagatccaggccgtcgccgggtacggttacagtggcgggtacacctcgactccgacgccggccaccccgaccccgaagcccgagaagccccccaccaaggggccgtagccggacaagccgcccaaggagcacaagccgcccaaggagcacgggcccaagccggagaagccgtccaaggagcacaagccgacgccgtccacgtacacccctgagccccaaacccactgccgtcgacgtacacttccacccccatgccccccatgccgacgccacccacatacacttccgcc

SEQ ID NO: 307665 - DNA, 417 bp, Zea mays
ggctctacttataaataaaaaggttgtgacgagatggaggcctctcaagctggtgtatgaccacgacattaggcttgggcaggttccagagaaatgcagcttccgaacacttcgtgagtttgtagctaagaggttcccatcatccaaggcagtgttgattaaatataaggatgctgatggtgatctagttaccatcacatcaacagaagagctccggttagctgaattattcattgataaagttggccacgaggttgtagaaaatgggagggaggatgacaataagctcccggtgttgaggctgcaccttgttgaagttagcccagaacaggaaccaactttgccattggaagaagagaagttggaggaggatgaggaattgttgatcaatggtgaagatagcactttacatgcttt

SEQ ID NO: 307666 - DNA, 371 bp, Zea mays
ttctatcggcccgcttactggaaatcctatgacgacggggggtattttaaaggttattgggcgttcaacaacattgatgaagtatgtgcacactcagctttcatccgatgaggaaacataaagatccagcagccccccgactgaagaacaccaaattgctgcaacaaggcgcttgaccttatattcaaaggacctgcacttgagtggccacgtagtgaccaacgtaccaactaccgcgtagaagacacgagatgtgctgaaactggatctttctaagaatataataaacgatctaccaaacgagttgtcataatgctcatcactcaaatggctagttatgcctagctaacaagataaaaaggtggcctcac

SEQ ID NO: 307667 - DNA, 493 bp, Zea mays
cccactcttccgcccacgcgtccgccggagcgctgggcggggtctctatgttgtcgccggggtcttttgctccttgccatattgcccccaatctcaccctctactccaggcgaactgtcgcatccgccggcgcggacacccgaggcctcgccctcgccggcaggagggcacggtcggcgccctttgcgctacgccggcctgggcgccggctttgcgggtctctccgtcgcgtggcacctgctcaagcatagcccgagggatacccgcgtgtcagtggacatctacgacaagaacggggtcagcggatgcccgtcgggcgtctcgggtggacttatgcatccctactcgcctaaagtgaagcttctctggaggggtgctgagttctggaacgaaagcatggatctcctctagagcgccgggcaagcaaatggaaccttgcggcaaatacaactggtcaagctgataaccttatctggagaaggcaatgcatgca

SEQ ID NO: 307668 - DNA, 526 bp, Zea mays
  unsure (1)..(526): unsure at all n locations
attcatgtcatatcctccaggccagctggtggataacagctaggcagtgtgcaaaaattcagaaactgacaataaatctgatttgtgatttagtgtggccatgtgcaacccaagttatggtaaaatgtcatgcccatttggtggttccaaaggaaacatttttttattactactactgatcatcttttacacaattagccactggtggcatttctaaggattggacatacaattcataaatgaagttaaataaataactagatgaaactagagatacaggatacgacatgttatcataaataaacataagaagcatggaagagcaggcagttttaagcagtgtatacaatagctaatagaaaatctcagatggaaggcaaagaaaaagacctgtggaacagccattctctcatggttggcagcatagggcataggtacatcagctcccgcgatcctctcaaccggngcatatggaacaaaaatngaacataatatcaaaaagaatgcatattacagccagtgagta

SEQ ID NO: 307669 - DNA, 599 bp, Zea mays
  unsure (1)..(599): unsure at all n locations
ggggcgcccctgggccccgccgcatatctgggggacccacgcgtccgcggacgtgttgggccggcaatcgatcccacttgtcccaggaggccttcttcggccgtcaatcgtgcccctccccagaactcgcactgctctccgtcagttcagttaaaacatgactgctcagacaaagaagagaggtgctacagaaaatggcgatggtgctggtctgggccttgctgccttcattgcaaacaatgaggatgtgggtcccgtagtccggcacgctttcgagtctgggaagcctgaagccctcttgaacagcctccagaacatcgtgaagaagaaagaggttgagatcgaagagatacgtagactccactatgaggaattcatccttgctgttgatgagcttcgtggtgtcctggttgatgctgatgagcttaagggcacattgtctgatgagaacctgcggttgcaagaggttgctagcgctttgctactgaagcttgatgagctttttgagatttattctgtaaacagtaacattggngaagccctagctacgtngaagatttgtctgcangtaaccaaccttgcaagatatgcaacaggga

SEQ ID NO: 307670 - DNA, 505 bp, Zea mays
  unsure (1)..(505): unsure at all n locations
ccctcgcttccgcccacgcgtccgcccacgcgtccgcttgtgtaggtactatctggcatatgttttgcacgcgcagacctcaatgcttgtcaatattgtttcataaatagcactagaaaaaaattaaagtcgatgttggatttattcttgtgatattccagtttgtttgtttatacagagcaaaccctcctccattattgcaagtgcaatacaaaggtcatagcagcttaacaaaataagaaaaacatccactagcctaattgtatatttttctggctatatattcctacgttctttctttgttattctttttttaaatgattttctgtttagacaagggtgatggcagtgatgctgagactggcatgtctgaagaggacatcctcttacaagatgaaatatgtaaatctcggctaatgagtataaaacgggaggaagaacagtatatgagagagagagatncgtatgagttggaaaaggggaggcttatacgagagatgaagcg

SEQ ID NO: 307671 - DNA, 334 bp, Zea mays
cctagcttccgcccacgcgtccggacgggcgcgggctggccgacttcaacatccagatggagagcaccctccacttggtgctgcgcctcaggggaggcatgcagatctttccgaagaccctgaccggcaagactatcaccctcgaggtggagtcttcagacaccatcgacaatgtcaaggccaagatccaggacaaggagggcatcccaccggaccagcagcgttcgatcttcaatggcaagcatctggaggatagccgcacccttgcgtattacaacatacagaacgagagcaccctacacctggtgctccgtctcacgggtggtatgcagat

SEQ ID NO: 307672 - DNA, 454 bp, Zea mays
cctctcgtccgcccacgcgtccgcccacgcgtccgggcttgtgtaaacgagatcggacacatcgttgctgggcaccaacaaggcgaaggcaatacatccgttcaagctgacgaagactggcggacacacgactgagcaccgacgaagcgaaagtcatccccttcatcaacagtaccccgtttaccagccactcacatcatacacttgcactcatcctggagatacgacgaccactatgcgcagcttaatcgaaggtgttctatagattttactctatagatgtaattaaccgaacgagcctctctcacttaaggccctcgtaatcagtgaactacacattctccaagtcagaagcttgtccaagcaatagcgtagaagacaacaaaagacaagttcagacgaactatgtattttgtaaacccgatgattaatgaaatatatggttcatgattgc

SEQ ID NO: 307673 - DNA, 506 bp, Zea mays
ccttcgcgtccgcccacgcgtccgcatgcattcagctatcttatatacggcaacgatacaaaattgaggtctccacaagatatcacctttgcagttgcattatttatagcaaggaaaaatggaagctatgtgagctactacatgtatcacggaggaacaaactttgggaggtttgcttcttcatatgtaacaacaagctactatgatggagctcctcttgatgaatatggtttgatatggcaaccaacatggggtcatctcagagaactgcatgctgcagtaaaacaatcatcagaaccactactatttgggacatactccaatctttctataggtcaagaacaagaggcacatatcttcgaaacagaaactcaatgtgtggctttcctagtcaactttgatcagcatcatatatcagaagtagtatttcgtaatatatcactggaattggccccaaaatcaatcagcattctcttagattgtaagcaggtagtttttgaaacagc

SEQ ID NO: 307674 - DNA, 500 bp, Zea mays
  unsure (1)..(500): unsure at all n locations
ctttgcttgggcggacgcgtgggtgaaccgcctgtgataggaagaacgagctttatcgcccaaggtggctaaccttgatgactttgtgaagccattgttgcactcgtagaagcgagttcacaggaggtgggcgccaatgttggttacttgtttttaattgctatgaatccaaaacaaggaaacacaaatgttaaacgttaaggaccttcgtccttcgaaacattatcttctttcatagataatgaatcttagacgaaggtcataaagaacaggtcttcattcttcatacgaatagtattacaatgtaatattataacaagcattcatttcatattacatgtgagaataatgtcaagatttgtattacatgttgataaagtgacacangctgtgtattacatttataccttcggcttgctcaaaggagagaatgcgagtacagccttccaataaagtgtgaacagtacggngatactgttcatctatttataggcatggga

SEQ ID NO: 307675 - DNA, 490 bp, Zea mays
ttgaattaaagcagtagctagcatctatccatcccgttgcagtccaccctgacccggccccttggccgcagtatataaagcggccggcacctgaagcatctcttgctagctatcaagtggggctgagggagtgtccaccaccgaaccgaacagagagagagggagagagagcgtcggtcgggcactagctagttagggagacagcggagcagagtggccatcgccatgccgaagctgcagaggttcaggggagtgaggcagaggcactggggctcctgggtctccgagatccgccacccactcctgaagacgaggatctggctgggcacgtacgagacggcggaagacgcggcgcgggcgtacgacgaggcggcgcggctgatgagcgggccctcggcgcgcaccaacttccccctgagcctgaagcggcggcggcggcaccctcttcccgacgctgcgcgcgaagctggagaaatgctgcacggcgctg

SEQ ID NO: 307676 - DNA, 478 bp, Zea mays
gctactcgtaaagtggtcagcttgcacttttgccttacaactggactacaacggttgcgggatcacgccctgtaactcatgtatagaaattgcggtctatggttttgggccttactgatgaaacaatgcggatttgtgctgttttggcacattgtaatgggagcgacaatgacagttgagaaggttctgatattggcaatggacccgaatgggatacaccacgacaaatgttcgaacaatttgcggatatattcattaatgctatgtttgatctaattgggcctagaaaatattgtcagtggggaggatccctaattgattctatggtgggtactttccttacacacaattatgctgataatgcatcaagccaagcttttatgaatatgagcgtttctgattcctatgagtgagagactctgtcaagataatgcgactcaattaatagatggtgtcgatagacaaatgaagtcaaaag

SEQ ID NO: 307677 - DNA, 454 bp, Zea mays
  unsure (1)..(454): unsure at all n locations
gcctcttgtacgggcaccaccattctgcaccaacccccggcggggcgcagacatggacgcctccctcctcctctccgtagggctggcgctggtgctgatcccgctctccctctagctgctcaaccggctgcgcgtgggccgtctgccgcccgggccgaggccgtggcccgtgctgggcaacatgcgccagatcaagcccgtccggcgccggtgcttccaggagtgcgcggagcggaacgggcccatgatctgcgtctggatcaggtgcggactcaccggcgacgtgttcacctaggagctggccaaggaggagctcaaggagaacgaccagcagctcgcggaccggtcgaggaaccggttcacccagaggttcagccgcaacgggtaggacctcatctgggccgactacagnccggactacatgaaggtgcgcaagctgtgcaacctgcagctg

SEQ ID NO: 307678 - DNA, 524 bp, Zea mays
tctcgcgtccgcccacgcgtccgattacggatgtgatgctttataaactatgtcgctgttataaaccttttaaggaaatattatgttgttgatgctggatattcgaatagacctggatactgattaccatataaaggtcaaaggtaccacgcttcagagtggagaataggccctgctactagtggcaagcaagagatgatcaaccatttgtactaaagacttcggaatgttgaagagcgtgtatttggtgtatggaacatgaaatggagaattcttctcaacatgacaaaatatgcaatggtaaagcaaaagatgattagttgagctaccatgtgtctccacatctttattcgttaacatcatgcacttgacaaggattttgagagatgtgaccgagaccaaaattatgtggccactataccagtaagaggttaattgacgatcatgttgtgaagatacaagcattttcaatggaaacgactttaccatttcgagaacggttgaaatacttggtagggaggcta

SEQ ID NO: 307679 - DNA, 528 bp, Zea mays
ttttcgcgtccggcgcgccgtacaagctgcggcggcggaactcggagacgctgcgcgcgcagtacatcaacaccaaagagctgagggtctgcgtcggcacctggaacgccggcggcaaggcgccgccgaacgacctcgacatcgccgagtggctcggcactggcggcgacgccgagcccgccgacatctacgtgctcgggttccaggaagtggtgccgctgaacgccagcaacgtgttcggcgcggaggacgggcggccggcgcgggcgtgggagtccgtgatccgcggcgcgctgcggcaggcgcagccgccggcgcccaggtacaggtgctacagccacccttcctcgccgtcgcggttcgagcccccgaccggtgccgccgaagagctcctccccggcggcacggacaccgagaccgacaccgacgaggacgtgcccttgggcgaccccgtcgcggcagccactccgaccccgagaaagctgagcaggctcaaccacttcagcgtcgtcgtgggcgagaacgaga

SEQ ID NO: 307680 - DNA, 442 bp, Zea mays
  unsure (1)..(442): unsure at all n locations
gaggcgtgcttttatcacgatctgagttttctcctctcgggcaaagcaaaaaccttttggagatttatcacgatctgaggatccatggcgaaggactacccagcttctccgaaagctcagcagctgcaggaatccaagaagcagcgcctgacatacatcctcgtcgtaagcgcgctctgcatcgccttctacgtccttggcgcatggcagaacaccacgcttccaaagcccataggcaactcggcgatcacccgggttggctgcgatcccactgccgccacgacacagtcctctggctctgtgccgtcgtttgggccaggctcncgcgaggtgcttgacttcgacgcacaccaccggctcaccatcaacaacacggacggcgatggggaacctgagcagttcccggcgtgccctctcaacttcagtgagtacacgccgtgtg

SEQ ID NO: 307681 - DNA, 504 bp, Zea mays
ttttctcgtccggttgttttggcagtcccaactacccctggtttggagaagctagacaacaagagcaaaactgatgaccaacaagagtccataaatgatcaggagtctttaaaggtggatgagtcatgtaagaaaaatgtcactgaagataaggctgaggaggaggatgtttgtcctatctgccttgaagaatacgatgaagaaaatccccgctctgtaactaagtgtgagcaccatttccatctttgctgcattcttgaatggatggagcgaaaagatacttgcccagtttgtgaccagacaattttggtggatgagatgtccgaatagacttggtaatcctggtggatcatcacttgaagctgtttgttactgaggaagtgcaggcaacaactactacactcttgatattcgtccattctgggtggctctcagagtaatgaattgatggggcaaaaattgaaaggatgaacgacatgaaatgtatttacgccccctccttta

SEQ ID NO: 307682 - DNA, 527 bp, Zea mays
tgtttctgactccccaactgtgctactggccagtctgaaagccgcgggagccggcgtgaacctcacagctgcctcgacggtgtacctgttcgacccctggtggaaccctggggtagaggagcaggccatggacagggtgcaccggatcggacagaagaaagaagtgaaggtgataaggctcatcgtgaagggcagcatcgaggagaggatactggccctgcaggagaggaagaagcggctgatcagcggcgcattcgggaagaagggaggcaagaacgagaaggagatgcgtgtcgaagagctccggatgatgttgggcctaggtaagtaaggaaaaggctggttggtggtgataggaggagtgatgcttgtgttgcttgtgatatagctctggcggtagaagttgtagctagggcgatggagtttcagtgtaggcataaggtagggctggaaagaaacgaaatccaggcacgcgtgcatgtatctatgatgctaaacattagcactagatcagtgctaaatgattg

SEQ ID NO: 307683 - DNA, 493 bp, Zea mays
tgttatgggatgtggtgggattcttatccgtacagctccctgtctgtgtttgctttgcatcccttgtacctgagggtacaagcactttcagatgcaattcctgtggatgttaaggaagaaattcagcaggcgaagaagcaattggataaaaaggatgtcgactacgaggcagcattgtccacaaaattgtcgattgctagaaaaatattcaatttagaaaaggaaaaagtgctaaactccagttctttcaagcagttcttatctgaaaacgaggaatggttgaaaccatatgcggcattttgctttttgcgggactttttcgagacatctgatcacagtcaatggggtcgtttttctcagttttccaaggataagcttgacaaacttatttgtgaaggtactttacaccatgacattatacgttttcattactatgttcagtaccatctatatatacaattatctgaggcagcaacatatgcaagaaagaaaa

SEQ ID NO: 307684 - DNA, 501 bp, Zea mays
cactcgtagagagaaggaaaaatatccccaaaccctagctcccgatctcgatggcgaaccctcgcgtcttcttcgacatgaccgtcggcggcgccccggcgggccggatcgtgatggagctgtacgccaacgaggtgcccaagaccgcggagaacttccgcgcgctgtgcacgggcgagaagggcgtgggcaagtccgggaagccgctccactacaagggctccaccttccaccgcgtcatccccgagttcatgtgccagggcggcgacttcacccgcggcaacggcaccggcggcgagtccatctacggcgagaagttccccgacgagaagttcgtgcgcaagcacaccgcccccggtgtgctctccatggccaacgccgggcccaacaccaacggctcccagttcttcatctgcaccgtcgcgaccccttggctcgacggcaagcacgtcgtcttcggccaggtcgtcgagggcatggacgtcgtcaggccatcgagag

SEQ ID NO: 307685 - DNA, 486 bp, Zea mays
tctacgcgtccgatctgcttacgcttgcggaatcacacatcgagtctgtcatccttgcaaagttcattgattcggtgaaaaggtaaactcttcagatggagttcttgcaccagtgcttcgaatgtttttttttttgaatcatcaagccacgaaaccactgaaatagcagaaaccagggagtgctgatctctttatattatggatacccgacttaggccttgttcgtttacatcggattgcacccggaatcgttctaggtaatcaaagtttatataaattagagaagcaatccggttaggaatcgttccgacccatcaatccgacacaaacgaacaaggccttaagctactcggaactactttttttttgtttgaacccttgttatccttgcttttctgttttactgaacgggcaaaccacaataaataaactggagttcaactatatgtatctaaggcagctcgtcattcagatgcctttcacaca

SEQ ID NO: 307686 - DNA, 412 bp, Zea mays
ttgtcgcacatctcggtggtgaggaacgcgtcgcgcgggcactccagctgctccgcgcgcgtgcgggcctcgccagccatggccggcgccaggaggagcgcgccgcggatccggacgccgggtctcaggccggccctgccgagcccggccgcgacgtggtgggcgatgttgccgcccgccgagtcgcccgccacgaagacgcgcgccaagtcggccgcgtcggcgagccaggggtcgccgccggcggcggcggagcgcagccaggacatggccctggcgccgtcctcctgcgcggccgggagccggtgctcgggcgccaggcggtagtcgaaggagagcaccacggcggggagctcggagcacaggcggaggcaccaaggcgggaagttgggccaccgcccggacccgatgc

SEQ ID NO: 307687 - DNA, 371 bp, Zea mays
gacccacgcggtttatcattggccgacttcggtggctgcagtatctggtttttactggaaactcactttatggcgaatcactgatggattaagtaactgcactggtcttttaatcatctttcttggcaacaaccatcttaccggggaaatcccctcttggcttggtggttttccaaagcttgcggctttggacttgtcaaaaaacaatttgaccggcagcatcccgccatccctgggcaatctcacgaacctgcaggagctgtatcttcagattaaccagcttgagggttccatcccaaaagagcttggaaggctcaggaacgtccatggtttgcgttgtttgcaaccacctttcggtgaggtcccgaagc

SEQ ID NO: 307688 - DNA, 348 bp, Zea mays
tttacgcgtgggcggacgcgtgggcggacgcgtgggcggacgcgtgggcggacgcgtgggcggacgcgtgggtgctgacacaactgccataaagggagcctgcgaatcaactgtttacacactcgatcaatctggaattagagcggatcaggacacccgtgaaaattactctccaggttggaagtattcccactgggaaatgaaaggtgttgcattgagaattgagattggtccaaaagatctggcaaacaaacaggtgcgtgttgtccgccgggacaacggagcaaaggttgacatccctgtgaccaatttggttgaagaggttaaaagtgttactggatgagattc

SEQ ID NO: 307689 - DNA, 518 bp, Zea mays
gtaggttaacgcagagctcaagaaggaggcagagttcttccaggacattgtcatagtgccttttatcgatacctatgacctcgttgtgttgaagaccgttgccattgctgagtatggggtaagctatttcagtttggcaagaaccaagtaatagttacatgcgatctgcggtgcgccaccagatcttcttacaggtccgtcctgttcatatttacagctaatcgtcctcgttaatgcaggtgcgcgtcgtccctgcaaagtacgtaatgaaatgcgacgacgacacattcgtgaggatcgattcggtactggatcaagtgaagaatgttggaaacgataaagcgtttacgtgggagtataaactacttccatcgaccactaagatctggcaagtgggcagtaacgtacgaggtaaattgttgtctcatgtgtaattgtggaagaacctggaaacagtaggatttttgcacccagtatccacttttgctggcaacaaacatttagcacgtctctttctg

SEQ ID NO: 307690 - DNA, 215 bp, Zea mays
tctcattcgtccggtgatcgggctgggtgtgttgggttcctggcacgcggagcaggggatggtggtgaggatgagttctgggtgatgggcggctatgatggatacaccacgttgggaggagtggtgccaaatgacgtgtactgtcgggacgcggtggcgttgggactatggagtggtaagtggagggtgataggagactatggggaacgaagggt

SEQ ID NO: 307691 - DNA, 419 bp, Zea mays
tgttggccatcgccgagatcgtctcggcgatgggggagctctcgcggcgcggggaggatgtggaccttaactcgctcaagtctgccgcgtgccggagatacggtctggcgcgggcgcccaagctagtggagatgatcgccgccgtgcccgaggccgaccgtgccacgctgcttccgcggttgcgcgctaagcccgtgcgcacggcgtcgggtatcgccgtcgtcgccgtcatgtcgaagccgcaccgttgcccacacatcgccaccaccgggaacatctgtgtctactgccccggcggtcccgattccgacttcgagtacagcacgcaatcctacacgggatacgagcccaccagcatgcgtgccattcgggcaaggtataatccatatgtgcaagccaggagcaggatagatcagctc

SEQ ID NO: 307692 - DNA, 440 bp, Zea mays
ctttgttgtttctgtcctcaaggctgtctgctctgcactacgacatgacccgtggcacccgggcaacttcctcatcggatgctccttcctcatattcatcctcactacacggttcatcgggaggaggtacaagaagctgttctggctgtcagcgatctcgcctctgctgtcggtcatcctgtccaccgctgcggtctacgcgacaagggctgacaggcacggcgtcaagatcatccagaaggtgcacgcgggcctaaacccaagctccgtgaagcagatacacctcaacgggccgcacacaacggagtgcgccaagatcgccgtcatctgcgcagtcatcgccctcacggaagctatcgccgttggccgatctttcgcctcccgtagagggtacagactcgacggcaacaaggagatgctggccatggggttctccaacg

SEQ ID NO: 307693 - DNA, 510 bp, Zea mays
  unsure (1)..(510): unsure at all n locations
ctcacgcgtccgcaccagtaaactgcaaagtgcaaaccaaacaccgcccaccaggagacgctcaacatgttcttggggatgggccggccggcgtggagggaggcgcgcgccacgctacagaaaatcctatcagccgacgagcccgtcttgcgtgacaacgaagcgctgaggaacaagtgtctggtaccaatgagtgatatagagatggttctaccaatcacggttggaggttacacggacttcttttgttctgtgcaccatgcaaggaattgtggattcatcttccgagggccgcagactccagtcaatccaaattggttttatcttccaataggatacaatgggcgggcatcatctatagctgtgtctggaaccgatgtcactaggcccaggggacaaggacatccaacaggaaactccgcttcttattttggtccctcgcagaagcttgattttgagcttgagatggctgccattgntggtccagggaatgaattaggcaaacctatt

SEQ ID NO: 307694 - DNA, 420 bp, Zea mays
tttccccgccagtcacaacaccatcctgtacagatgttgagattggaccggaactcggtgaaaatggagggaagcctcttggtgaagatgtcggtgaactgtgaagtggtcgggacgcggagaacgcaagcatcgtcgatagcgacacgctcgcggatgaagtgtaggtcgatctcgacgtgctccgtgcgctgatgctgcaggggattggtggagaggtagaccgtgttgacgttgtcgcaatagacgagagtggagcgcttgagggggctgtgaagctcatgaagaagcttacgaagccaggaagtctaggtcacgccattggccacaccgtgatactcggcctcagcgctggagtgggagacgatggattgccgctttgaggactaggaaataaggatggcgcacaggaacacaaca

SEQ ID NO: 307695 - DNA, 340 bp, Zea mays
tcgtccacgcgtccggcgccattggccagctagagccaaccagaagagcttgcagttactgagagtgagcgtgagagagaggatgggtggcagcagcagggctgctctggtgctggtcctggtggtggtggaccagagcctggccaacgagatccaggccgcctccgtgtacggatacctaggaaggtacacgacgacggctactcatgccaccccgacgatgaatcatgagatgccctccaacaaggggccccagcaggagcagccggctaacgagctcaatccaaccaaggagcaccaacccagcatgcacaagccgcccaaggctcacaagcctacg

SEQ ID NO: 307696 - DNA, 414 bp, Zea mays
  unsure (1)..(414): unsure at all n locations
cgacattctgacagcaaaattgacggattttgggatctcaaggcttctggttggtggcgtcactcgctacactaccactgtgaaaggaagcataggttacatggatcctatatacattcaagagggacgccttactccaagaagtgatgtttatagctttggattagttctatgtgaactaatggctggaaaaggggtaagaaaaggtgcaatcaacctcattctatacgccaacaaaggctgtgcaagtggtaaaagggttcagagagatttgtgatgctgcaatcgcaaaccgagaccaacatgaagatccctaaagagatgcagaaactggcagccgaatgcctatcgctgaccatntctaggcgtcctcagatgactgacgtggtcaaacgcctncggacgctgagaaag

SEQ ID NO: 307697 - DNA, 422 bp, Zea mays
atctctcgtgcgcccacgcgtccgcccacgcgttcgcttctgtcccccggcggtggtgccggggccaggatcggcacgggtggtgccgcggtcgaccacgacgaggtcgtcaaggtcgatgccacccgggacaccgagcttgacgccgagccagccgagattggtcgtgggagcaagggccggttgggaactgaaaccaaagtccgtttgttggttgcttgggcttgcttcggcaggtactgacacagaaaagctgggccttatccaagtggcaagccttatagagtcatcggcaaagaaggggactacagagctcaatctccggggtaagctggtggaccaagttgaatggctccctgtctcgcttgtgaagtacaggatgtgactgagcttgatctatctgagaataggatcatggcact

SEQ ID NO: 307698 - DNA, 462 bp, Zea mays
  unsure (1)..(462): unsure at all n locations
cccactcgtccgagctaatccaacaaaccttgaagttcttcttgctcttggtgttagtcacacaaatgaattggagcagggggaagcattaaggtatctttataggtggcttcagaatcaaccaaaatatggtggccttgtccctctgcagtcaactgattcaccttatggtcctgatgtaagtatacgactgcatgctataagtgtgtatgtttcagtttagtcaattaacttatggagcaattgtgatcatacccttcgccagcgttgcaattgcgattttacccactctggcatcttcagatttcggatgggtatcctatgtacaagattatatgttatttttgctgtagagatgtacttttgctgatttctaatatctttcaatatattaatttctcttaataatntacttctgccatactaaatngtngcatcatcaggttgttagattgtttaatg

SEQ ID NO: 307699 - DNA, 469 bp, Zea mays
gtttttattttagtagttttttgagtctggctttattggactctttcacttataggagtgcacagaggctacatgatctcggccatgaatatagagctcttcctctttggagacaggcagaaccaagatttctatggaatggctacttgttagaacctctaattgagaacaagctgaaccagtacttattgccagtaattcaaggcagttttcaaaatatccaagcagaagttggatcagagatggtaaatgtgaccctgattgcacgtaggtgcacacgaaggataggtactcgaatgtggagacgaggagctgatgcagagggttatgctgcaaacttcgttgaatcggagcagataatgcagtcaaaagggtttacagcatcctatgtacaagtccgaggttctatgccattcttgtgggagcagattgttgatttgacatacaaacctagttttgacattgttag

SEQ ID NO: 307700 - DNA, 419 bp, Zea mays
agagtattggtggcagcggcagggctgctctgctgctggccctggtggtggtggccgtgagcctggccgaggagatccaggccgacgccgggtacggttacggcggcgggtacaccccgacgccgacgccgggcaccccgaccccgaagcccgagaagccccccaccatggggccgaagccggacaagccgcccaaggagcacaagccgcccaaggagcacgggcccaagccggagaagccgtccaaggagcacaagccgacgccgaccacgtacaccccgagccccaaacccacgccgtctacgtacactaccagcccgacgcctcgcaagccgacgccacccacatacactatggcccctacgatcaacaaaccgacaccaaaacccacttgcactcattcgacgtacaccccgacc

SEQ ID NO: 307701 - DNA, 350 bp, Zea mays
ccaatgtgtccgaatgcagtagacatttgattgggggtgagacagagagcgctccaagcaggtcttccggagagccgtgaagagagacatgatgcaggacatgaggttgaaacgcgccttcgacagcgtcagcgactccttcatcaagacctacatgaaggactacatggccacgttcatcttcaccttcctcttcgtcttctccggcatcggctacggcatcgtctacagtgaactgacgaatggccccgcgctggacccggcggacctgagggcgatcgcgatcgcgcacgcgctggccctgttcgtgggcgtgaacatctcgggcaacatcttgagcgggcacctga

SEQ ID NO: 307702 - DNA, 487 bp, Zea mays
ttctgtactgcacttgcaggtggcggcggtggcggtgctgctgatggcgacggggctgcgcgcgcagctgcgggtgggcttctacgacagctcgtgcccagcggcggagatcatcgtgcagcaggaggtgagcagggcggtggcggccaacccgggcctcgccgccggcctgctccgcctccacttccacgactgtttcgttggggtcagtccctcggtcgcaagctcgcagctgctgctcacacttcaaagggctggcaagaacgactgactgaccgcttgtttctgcactacctgcagggctgcgacgcgtccgtgctcatcgactccaccaagggcaacaccgcggagaaggacgccgggcccaacctcagcctgcggggcttcgaggtcgtcgatcgcatcaaggcgcgcgtcgagcaagcctgcttcggcgtcgtcttcttcgcggacatactcgcgttcgcggccagggacagcgtcgcac

SEQ ID NO: 307703 - DNA, 413 bp, Zea mays
aaatttataacattacatcaaacatgaggacaaactacgtaggaatactctacacgctgctacgagatcgtatgttcgagaatcactaaaatcagaattataatgaataagatgtgatcttccaaaaatagcaggtgattaaattgcaaatgggactcccatgttattataacccacgtgagaaatatactaaacagaagtaactgatatattctaggtcacaacttgattataaaccttactttagtcaaatagtaattatgagccaattaatctttgctaaaagttagtccaataaacacaagctaaatagatatctatttataaaagtatgtgagattccacaatgagtactgtttccacatatgcttgaatggatttcattgagtagttcccttccttccttatgggga

SEQ ID NO: 307704 - DNA, 414 bp, Zea mays
  unsure (1)..(414): unsure at all n locations
gagttgngggtttggagcaatctcgagacaataactgaaacggttcctcaaattttactctcgatgaggcggtttatttttcaaggaaatggaattcaaagaatttgcacagaggccagatgcatatgccaagctctgctcaatgattggtccttcaatttatggtcattctgatgtcaagaaagctatcgcatgctcgttatttggggggtctaagaagaggctacctgatggtgtacgtttgagaggggacattcatgtcttgcttctgggtgacccatccacagcaaaatcacagttcctcaaatttgtagagaagactgcccctattgcagtctatacatctggcaaaggttcatctgcagctggtcttacagcatctgtaacttgggatagaagctcgcgcgagtttta

SEQ ID NO: 307705 - DNA, 322 bp, Zea mays
gatttatgtcctgggaggcaaggtcatccaatggagcgggtatagggtctccggaatactggctatgtcaagatcgactggggaccgatatttgaaaccattcgacatttcaaaaccagaagtcaccgttgttactagggcgaaagatgacgactgcctcattcttgcaagtgatgggctgcgggatcgcactgccactgaagaggcatgcatagctgcccgtgggccgatccacatatggcacaagaacatcggcgtcacatcataattgagtgactagggtgatgaatccaatgatcctgctgcacaagctgatgctgat

SEQ ID NO: 307706 - DNA, 210 bp, Zea mays
ttcttgatttgtcagaggcagaccatttgaccctgtggagtacgacatgaaggcggatgtacctggacagtcttacaacgactacattctcgctagattcagcctgtgccttgtgatctgtggagccatgagtgcccacaaggacatggtcatggccgactggtaagcactagttattaaggccacacaggagaacttggacatgggatc

SEQ ID NO: 307707 - DNA, 552 bp, Zea mays
ttgcggttgcgtggggccgccaccaacccgctcctccaccgcgccgtcaccaacccgcgcccaccgtagagatcggcaacaacaggttctacggcgacatccctcgctggatcgggaccttcgttccggcgctgaagatccttaggctcagctcgaacaagttctgcgaccaaatccctccggagccgtcgcagctctcgcagctccagctgctggacttggcccacaacggactgatagggctgatcccgagagagctgggagacctggcttccatgaagcaccccaagaacaactccagcacaggatcgctggatgggtccatctaccaggatcggatcgacatcatctggaaggggcaggagctcacgttccagaggatactcgagctgatgacgggcatcgatctgtcgggcaactccctgtcgcattgcatccctgacgagctcaccaatctccaaggcctccggtttctgaacctgtcgagaaaccgtctgtcgtgtggaatttctagcagcatcgaaagcttgaacattctcgagtcacttgact

SEQ ID NO: 307708 - DNA, 510 bp, Zea mays
tcgccctcgcgtccgcccacgcgtccgcccacgcgtccgcggacgcgtggggatgaagctaaaattaatgctatgataggacgttctaatcagcaattccttgcacgtgttggagctattgagttggatgatcaaggacaagaggaatctggatctgaaaagaatgacatgtataccattttgccatgggtagatggtgttgcacggttagttttaatccttggacttgaagatgtctctgcaatcaaaaaggctgctagagcaatgggtgatgcatcaataaatgaacatatgcgtacctcattcaaggaagctggggctgttaaacctctacttcagctgctcaagcacaaagatgtacatgttagagaagctggtgcttatgcgttggaaaaattatgtgtcagtgccacagtctgccataatatcaaaacagaaggtggactagaattgcttgtaaatatagtcaaggatcgacataccccagtagaactactagagaagataatt

SEQ ID NO: 307709 - DNA, 309 bp, Zea mays
gggtgggtttttccaccccctccggttcgggttcgggttcgcgaggttcttcggggttcggtttcgcgggtgagcggatcgagatggcggcgtccgatgttgagcaccgctgattcttcggcggccttcactgggccacggacgaccactcccttcacaactccttcagcacctaccgcgaggtgctcgagtccaagattatcctccaccgggagacgcataggtcccgcggctaaggatacgcaaccttctccacggaggaggcgatgcgtaacgcctgccagggcatgaacggtaaggagctggacg

SEQ ID NO: 307710 - DNA, 441 bp, Zea mays
catttcttgttgagagaacataatccaaagatgggctggagaccacacgttgtctctgcgtcatcatccgcactagtgcttcagttcctcgtgctgctgctgctgcccctgcctctgctgttcgccgatgcatcgtcaagccaaacgacgacgacgacgacgacgacgacgatctacgtcgtgtacatgggcgagaagaagcaccactatccttccgtcgtcatggcgtcgcaccatgccgcgctgacctccgttcttgggagcaaggatgaagccctccgttcgatagtctacagctacaagcacggattctctggtttcgcggcgaagttcacccagccccaagcggaggagcttacaaaataccctggagtcgtgagcgtgaagccaaacgcgtaccgtcacgtgcacacgactcggagctgggattttcttggctga

SEQ ID NO: 307711 - DNA, 559 bp, Zea mays
catttcgcttggtccgagacctgccgagaggaggctcatccggtcgcatggagaatggtcatgggaagacttgacttgggacggtataggcagacgtcccaaggtgaacgcggtgttgggtagcctctgtcgcttctactaccctggcatggtggagctcaatggcgagaggttcgcggctatgcagtgggctgactggggtctaaaggactatgtcgagccaggggagtcaggggaaagcagtagcggtgggggtagttcagaaaaaaacgaaggacttgtcaggtggctgtgtgggacgagttctgggggaggttccaattgccggatgacatcgaggaggatcaggctcagtggacacgtgtgaagaggcactttcggaagtgcgctgataagataatcaaggatgccatgtacaatgctcgcatcgcggccgtcaactactactacatgaagataaaggggcagaaaatgagcagagcattaggggccaatgagatctacctcacagaggagtagtacctggagagcgttgtggattggctggcgaaggacatga

SEQ ID NO: 307712 - DNA, 514 bp, Zea mays
tttggttatttgcccacgctgatcgcatgttttctgatctttctggtacatgggatagcgttcttgaagacatgagcgatgtaaaagagctagtacccgagatgttttacctccctgaggtatttaccaacataaatggcattgactttgggacaactcaacttggagggaagctagattccgtagaattgcctccctgggctgaaaatcatgcggattttgtccataaacatcggaaggctcttgagagtgagcacgtctctgcttatttgcatgagtggattgatctaatttttggatataaacagaggggcaaagaagcgataatggcaaacaatgtattcttctacataacatatgaggggactgttgacattgacaaaattacaaacccagtggatcggtgagctacacaagatcaaatagcttactttggacaaacaccatcttaactgttgactgtaccttacatgaagagggagccactggcggaggtcttacaactacagacaat

SEQ ID NO: 307713 - DNA, 467 bp, Zea mays
ttggtttccgggccagcactttcacgctcagctgcagcaatggctgcctccaccatggcgatctcctccacggagatggccggcccccccatcaaggtgggctccttcggcgagggccgtatcaccatgcgcaagaccctgggcatgcccaaggtggcggcgtccggcagtccctggtacggacccgaccgcgtcacgtacctgggccccttctccggcgagcccccgagctacctcaccggcgagatccccggcgactacggctgggacaccggcgggctgtccgccgaccccgagaccttcgccaagaaccgcgagctggaggtgatccactcccgctgggccatgctcggcgcgctcggctgcctcttccccgagctgctctgccgcaacggagctcagttcggcgaggccgactggttcagggccggctcccagatctgcagcgagggcgggctggactacct

SEQ ID NO: 307714 - DNA, 429 bp, Zea mays
ttgctctcattgacgagagtaatgctcaagaaagtgttgcagagattgtgctaaagaaaggaactattagggttacattgaaggttgtggtaaaagcagctggtgctgcaacagttgtttggacagtgttgtattctgaagcatataataggtcagaggcactctattagaaggatgcttaacgggggaaaactgctgagcttacgaataacctaaagacatacatatattctatgaaggagaagctggaagaaagcacagatatttggactgtttcatctgatcaggaaagggaatactatgctgagaaacttactgaggtgcatgattgggtatatatggacggttaaaatgctcaagctgatgattacactgagcgtcttgaccagcttatagccattggtgacccaattgttgacacattgagtg

SEQ ID NO: 307715 - DNA, 459 bp, Zea mays
ttattaaaccaagtggtggcaaagaacgatccaaatatgtcaaatcttgtccaagacaattttattcttagctgcattgatgttgcacttcttgtggctgcttttggatgtgttggcataaatcaccaaaaagggggagattgaaagggaaatgtgcccttgggcaatttctattatgtttcggcgattaagggcctgtttgggtagatgactaacttgccacattttgcctaacttttctgcctaatgttagttcttcaattcgaacgactaaccttaggcaaagtggtgggacgtttcaccacgaaccaaacagcccctaagtgcgcaacacacttaatcaagttcttatgtgctaaatgaagagaaaagtgcaaatgaagacatgaagtatgtttttagacttagtacatttgtcttgagtactaacaaatgttgggtcagtgctaagaacatgaa

SEQ ID NO: 307716 - DNA, 408 bp, Zea mays
ttcttcgcgtccgcccacgcgtacgtccacgcgtacggtcaaatctgatggttatgcatctagcatcatgatttcagcattgcacagaggtggtcatcaaccaacaatggatagcagaactgccaaagaattcgagtctgagaatgcatcatatgatctgtgtatgcattaatacatcactgcccacttactgtagaacaaatgacatgtagagcgtaatgtggatgctaaagaaaatgggtgaatcaaacatatcacctgataacattacatttaataccttgataaggtacttttgcaatgcaaaggtttgtcacctagcatacaaaacagttgaagatatgcatgcacagggtcatcaattaaatgaggagctttgcctcatgtaatggtacagataggaaaggc

SEQ ID NO: 307717 - DNA, 342 bp, Zea mays
ttcctcgcgtccggaagagcttgcagttactgagagtgtgtgtgagagagaggatgggtggcagcggcagggctgctctgctgttggccctggtggtggtggccgcgagcctggccgtggagatccaggtcgacgccgggtactgttacggcggcgggttcaccccgtcgccttcgccggccaccccgaccccgaagcccgtgtagccccccaccaaggggccgaagccggtcaagccgtccatggagcacaagtcgcccatggagcacgggccccagccggagaagccgtccaaggagctcaagccgtcgcctgccacgttcaccccgtgccccaaaccca

SEQ ID NO: 307718 - DNA, 260 bp, Zea mays
ccaccggcgacgatcaaacgcgcaggcagcagctcgacgtcttcttctgccacacttgccacgaaaccacctgtggatgggctactgctactggtggtccgattgcctggggatactgccgggtgatggaacataatccgaccgtcccaccttattatggactaggaccgatacagttaacttatgagtacaactacaggctggtcgggcaagagctgtacatgaatctggtgggcaacccggatctggtggctagcgaa

SEQ ID NO: 307719 - DNA, 412 bp, Zea mays
tattttgagggatgctgcgcctgctggagccgccgcgcacagttattgcggggtcccacgagtccttcttccactcctcccacgcctcctggctggtctcattgcgcttgataatagacgacggctagctagcagcagctctgttggtgtgtgtgtgcgtgaggggggtagctgctgctggcgctagctggaaaggtccgcagtcatggggaggggacgtcttgtgctaagctaatcgggaacaatatcacccttctgcacaccttgcaccaagcgccgaaacgtactactcaagaaggcttgcgagctcttcgtgctctgcgacgcccaagcattgctcatcgtctactccaaccgcggtaagctatacgagttttgtcacggaccgatactaacgagaacacttgtgagg

SEQ ID NO: 307720 - DNA, 441 bp, Zea mays
ttcttttaaaaatattcccaaaccctatctcccgagctcgatggcgaaccctcgcgtcttcttcgacatgaccgtctgcggcgccccggcgggccggatcgtgatggagctgcacgccaacgaggtgcccaagaccgaggagaacttgcgcgcgctgtgcacgggcgagaagggcgtgggcaatgtccgggaagccgatccactacaagggctccaccttccaccgcgtgatccccgagttcatgtgccagggcggtgacttcacccgcggcaacggaaccggcggcgagtccatctacggcgagaaggtccccgacgagaagttcgtgcgcaagcacaccgcccccggtgtgctttccatggtcaacgacgggcccaacaccaacggctgccagttattcatatggaccggtgagaccccttggctcgacggcaagcacg

SEQ ID NO: 307721 - DNA, 445 bp, Zea mays
tcttccacgcatgcgtccacacaaccgctccactcgtggctggccctaaaggaaggcatgcaaagctttgtgaataccctgtcccgcaagactatcacccttgaggcggaggaatgagacaccatccacaacgcctaggctctgacccaagacagggactggcagttgcaccagaccagcagatgataatatttgctgggaagcacttaggggacaggcgcacgctcgccgactgcaacataacagaaggagagcaccatacacttgatgctgtgcctgaagggaggcatgcagatcttcgtgaagaccctgaccggaaagactatcacccttgaggcggagtcttcagacaccattgacaatgtcaaggtcaagattcaggacatggtgggcttcccatcggaccaagagcgtttgattctttgctggctagcagctggaggat

SEQ ID NO: 307722 - DNA, 555 bp, Zea mays
tatcagcactgtgggactatttttgctttaacataaatggagtgagaccagtgcaaagccgtggagctctatctattctttgtatggctgcaaagtcgtctcccagcattttgggtaatcacttgcaagatattattgacattgggtttggacgctgggctaaggaagaacctctgcttgctagaactgcatgtcttgctttgcagagattatcagaggaagacaaggacaagctgataagtaataatagtagagtatttgctgcattgcaaggtttggtaacaagcttctcgattcctgagaaaatatggtatggagctgcagataaagctataagcaccatctataccctacaccctgcacctgaactttttgctactgagactgcaaagaagtctctcagttctgtattcagcgttgtaggaacaaatgatgtgtcaaatggagatgaagctcagaatggtgcctctctgtcatcagtatcacccttaaagctgggtagatttctttgtgttattagccatatagcactaaatcatctggtgtacattgaga

SEQ ID NO: 307723 - DNA, 331 bp, Zea mays
cggccgtccttttttttttttttttttagctgttaacaaacaccgggggcattgatgtctagattagttcaatatcgcaagcaaacaaagggaacaacaggggtaccaacacctaatccaaaggtggaacggacactaacacggtgacagaagcgaacggtaacacgatactatagatagataagataactcggccgaagccaggatgggcccacacatcagtccctccagccgccgccgccgccgccgtagccgtcaccaccaccctcgcgccgaccgccgtagccgccaccgccttcgtagccgccgtcaccaccctcgcgccgaccgt

SEQ ID NO: 307724 - DNA, 328 bp, Zea mays
cgtgggcggctacctccttctgacttgtggttcctcgtcgccggggacccaactcttccccccaccccaccataccaaagccaccgcggctgcggctgcggcttccgcatcatcaatggtgctgatcactctcgtccgcgactacatcgaccgcatgctccacgacatcccgggcatgaaggtcctcgtcctcgacccccaaaccgttgggatggtgagcgtggtgtacagccagtcggatctgctgcggaaggaggtctttctcgtcgagaccatggacaacgcctccagcttcagggagttcatggcgcaccctaggccgtctact

SEQ ID NO: 307725 - DNA, 231 bp, Zea mays
gggcaagggactacgtgcacaggcatatgagtgatacaccagggtggagcatgacctgacatggggcggcctcactagagaccagagctattgcgcagctgaagacactgacgctacctcggccaaatctgtttaccactgctgtgacggcgagaacgtggagagcgctactggtactatgaagaaggactacaaactagctaatcttatatgctgggaggaggaagcgga

SEQ ID NO: 307726 - DNA, 358 bp, Zea mays
gtccgcccacgcgtccgcccacgcgtgggtagaggtaagcagatagtaccccttttatactacaaaaatggagagcaacagactagacggactgcgcgggatcgagctcggcgaaactcccgtgtgtgccgacaataatggagacccgggacacggatgcgacgccgctcccctacttgaacacgccgatgccggtcgacgacgccgagtctgccgaggtctccggacccggtaggacgggcagatgggagatgccgccatgaaccaggtcgccatgaaccccatcaacaccgtctttgatgccaagcgtcttattggcaggagggttagtgatgcctttcgtcagagtgatattaag

SEQ ID NO: 307727 - DNA, 465 bp, Zea mays
ggagaccctagagaatgactcccgtggagccctagaggcaagggtcccgatgttcacctcgctacagggggtggaaggatgtatgttaccatggaccgattgagaatgactgggatgtggttaaacgtggctgggatgctcaggtgctcggagaagcaccctacaaattcaaaagtgcacttgaggctgtgaaaacactgagagcacagcccaatgctaatgaccaatacttgccgccatttgtgataggtgatgacagacgtaaagatgatgggcctgtattagatggtgatgcaggttgtcactatcaacttacgggctgatcgcatggttatgcttgctaaagcactagagtatgcagattttaacaattttgaccgtgtacgtgtccccaaaattcgatatgctgggatgcttcagtatgatggcgaggtgaagctttcaaggcggttccttgttttccca

SEQ ID NO: 307728 - DNA, 473 bp, Zea mays
  unsure (1)..(473): unsure at all n locations
cctttcagccgnctgccagctagagtggccnatggataagttacaccctcattcctcgatgacacgagcgacgagagcattcagatgttgatcaaagcagaagtttctaagtggaaccagcagggtgtgaacattatctatcggcatcgggtgttgaggactgggtataaagctgggaacctcaactctgcaatgagctgtgactatgtcaagaattttgaatttgttgccatttttgacgcggacttccaaccaagccctgattttctcaagaaaacaatcccacattttgaggggaaccctgagcttggattagttcaagcccgttggagctttgtgaataaggatgagaacctcttgacccgccttcaaaatatcaacctttgcttccactttgaagtggagcagcaggtcaatggtgtctttctgaacctctttgggttcaatggaactgctggagtctggaggatcca

SEQ ID NO: 307729 - DNA, 351 bp, Zea mays
  unsure (1)..(351): unsure at all n locations
gaaagatgaggcattaagtgttacngtaatggcccctgacccgaatttctccgctggggagctncgncttgataaagatattcgcgagctcaacctgccgtagaccgcgttaatttcttttcccaatggccaggattagcgatatactggtgagatcaccatcgcgccggcacaaggatattacatgacaggctcattcgttctcaccctgccagatcagctcatatcatgcaaaggatatgtacttttgctgtttaaggaattcaattcaatacatggcctttggctgcagctggcttgtctgttggatcacaactttagaagattggcagacggtagcacgaatgaaca

SEQ ID NO: 307730 - DNA, 459 bp, Zea mays
  unsure (1)..(459): unsure at all n locations
gggcatccaaagtgcttgaggggaganttaaacgggagtgcgctttattttcccgcnggcncagataatgaggaaggccgcacaacgtttaggtgggctgtcagagtacagagctatcaacaaggcgatgcataaggctgtgtatgattctttaaccattgatgagtttgaagaagaatggaatactttaattacatatagtgggcttcagagcaatgactggttaagatcactttatgaatgtcgatcttcatgggttcctgtttttattaaagatacattttgggcaggaatgtctactacacaaagaaatgaaacaatcactcctttttttgatggatatgttgatttgaaaactaccttgaaacaatttcttgtcaagtatgagatggctttgcagagtaaatatgagaaggaggcccaagcagattttgagacgttttataagcaacgcccacc

SEQ ID NO: 307731 - DNA, 475 bp, Zea mays
  unsure (1)..(475): unsure at all n locations
ccctccgccgncaccgtctttgctggggctcnatgatgggatcggactcttgtgtccccccgggacggcggtgaaagcgactgcgtcagccatggcggacgaggagcattcggagaggagagaggaggcctccgagcttgcccccttcgacccgaccaagaagaagaaaaagaagaaggttgacatccaagaaccttctgatgaagtggacaagcttgcagagaagacagaaacactggcagtcgcagaacccgctgaacttaacttcactggaatgaagaagaaaaagaagaagccggtggatcttgattcaactcttgatgagcttggagatggggaggacacttaagatgatcaagctgtagaggaacaaggggaaggcattgtgctgggaagtgttcctacatacccttgggagggaactgatcgggaatattaatatgaagagctgctggacagggtgttcaacattcta

SEQ ID NO: 307732 - DNA, 452 bp, Zea mays
  unsure (1)..(452): unsure at all n locations
ccaacccaatggttgtcacggggaanttgatggatatggccttctttttccctcccagggcatattgactaatgaaacatggtctctgagatgtgaaactgtgactgattgagatgaaacattctttgacctgagcctggacatcgaacagaatagttcactcaccagctgtcttaagaacttcagctcaacagagactttgaatgcagaggacaagttcttctgtgacaaatgctgcagtttgcaggaagcacaaaaaaggatgaaatataaaaaaccaccaaacattctagtaattcatctcaagaggttcaagtatattgagcagtttcagcgctacaaaaaactatcatacagagtggttttcctactggagcttaaacttctttaatacagttgataattcggactaggaatacttccttttcgctgtggtagctcatgttggaagc

SEQ ID NO: 307733 - DNA, 426 bp, Zea mays
  unsure (1)..(426): unsure at all n locations
ccgcagacatggcagagtgatcgtgagatttttatagggtttgaatctaattttcctaccaagacaganannaatgggttgcttggcgcctcatccataaacttatctggccactcatgcccttaccttgggtatcttgtctcacgcaagaaggatgtgatttcaattgatgacaattgcctcccagcgaaggacactgctgggtcgactgatgatgttgctgcacagaacatggccaatctgaaaacacctgctacacctttctttttcaacacactctatgatccattcagtaaaggtgctgactttgtccgtggtaacccaatcagccatggttagggggttgagtgcatgctctcgcgtggttagtggctacataatggtgacttacacccgatgacttatgttgtgaagaggaaattaacc

SEQ ID NO: 307734 - DNA, 371 bp, Zea mays
ccagccaccaggcactagggaacagatgtagaagatagcccggttttgatccggcgggaagcggatcccggagaggaggaacggaagctggtgctgggcaagtacgagctgagccgcctgctggggcaggacaccttcgacaaggtttactacgcgagggacctgagcgccggcgccggcacgggccacagctgcagcgtagccatcaaggagatcgacaaggcacggctgcggcgcacggaggggatggtggagcagctgcgccaggagatctccatcatgcggatggtgcggcaccccaacgtggtgggcattcgggaggtggattgccagccgatcccgcgtcttttgacgtcatggagtacgcgcgc

SEQ ID NO: 307735 - DNA, 451 bp, Zea mays
gatatagtgacggggggggacagtagagtctggacatcttattttcccaccggaccaggatcggttaaagcaatcatcttcgagtcttatgcttggttatgcgagtcagtgcctgacttgttaaacgtctctatacagtttactgatgatgcatatatgctggttcgattcatatggaatcataccatccatttattttgtttcaaaaaaaaatattctgggtggccatgggcacagcatgcctgttattaagaaaacgattccaggaactgttcccttttgtcactgaactcatatgaatcgagacttaactggagctgttgcgcaagtgatctgttatctctgctccaaggaacaggacgtgcaacagaactgttccagctgtggggcctgcatgggcaagtacttctgtaaagtatgcaagttcttcgatgatgatgtctcaaagggc

SEQ ID NO: 307736 - DNA, 433 bp, Zea mays
  unsure (1)..(433): unsure at all n locations
cgcaaaagtagagtgagaggggtcangtaatggaataacacgtntttccccccgnnagagcgaaaaaaggcgaccaaagaggatgtcaaggaacttatattcagggagatattggagtatcatcctcaacttctcaaggattacatgaatgggactgagaaaacaaactttctatattctagtgctgttgaccatttcaggaggcaatttgcaaacttggaggaaaatggaggaaagagtggggcacacgccgtttcatcagacaggaagcatgtttcgctcccaaggacaaccacagttcattctaatccaatccctccaaatggaacctcccaggttcctcaaaagattcccacaggtagaccaggaagagtggttggtccagtaataccatttgagaacgcagctgcagttgatccatacagccaacgta

SEQ ID NO: 307737 - DNA, 386 bp, Zea mays
caaatggttgggggagataaatgagggcgcttttctccggccatgtttggagtcttagcacgccattgaggaatttaatgtcctcaacgtcatatacttgcttgaaccttgagggatcagatcatataccctctctctcacgaggaggcaaagttgaagatgctctcaggcgaaacaagtgaccaagttacagtcttccgagctgttggatgatcacctgaggacgattttagagaatgttcgcttgctgtatcttctggagagagaaggttgggatgctaccactaactgggaagatactctatccttgggagagcagcagaggctggggatggctcgtctgttctttcactgtccagtatggatctgacgaggcacaatgcaca

SEQ ID NO: 307738 - DNA, 351 bp, Zea mays
  unsure (1)..(351): unsure at all n locations
cgggggncagnaaaggcacgagcacccgcgcggaaagaacgacatgaagctgcgggtggagccgggcaactccgacggcaccgacaccgactactacctgacggcgcagggcggcgcgcacgacgagagcgactcccagttcctgggcaacgagaccggcgagccctacacgctgcacaccaacgagttcacgcgggggcaggggcagcgggagcagcagcaccgcctaaggaacgaccccaccgccgacttccacacctactgcatcctctggaaccacaagcacgtcaacgtcatggaggacgacatgcccaacaaggacatccgaaaccaggagagcaagggggcggc

SEQ ID NO: 307739 - DNA, 99 bp, Zea mays
gactacgttcacgtgcgcatccagcagcgtaatggtcgcaagagccctgaccaccgtccaagggattgaatgaagggagttccagctacaagcaaagat

SEQ ID NO: 307740 - DNA, 527 bp, Zea mays
  unsure (1)..(527): unsure at all n locations
gtccagcactttcacgcggtgctcataaatggctgactcgtgttttcccacctcccccacggngatggccggcacccccatcaaggtgggctccttcggcgagggccgcatcaccatgcgcaagaccgtgggcaagcccaaggtggcggcgtccggcagcccctggtacggccccgaccgcgtcaagtacctcggccccttctccggcgagcccccgagctacctcaccggcgagttccccggcgactacggctgggacaccgccgggctgtgcgccgaccccgagaccttcgccaagaaccgcgagctggaggtgatccactcccgctgggccatgctcggcgcgctcggctgcgtcttccccgagctgttctcccgcaacggcgtcaagttcggcgaggccgtctggttcaaggccggcttccagatcttcagcgagggcgggctggactacctttgtaacccccagcctgatccacgcgcagagcattcttcgcattttgggctgccaagtcgtgctcatgggt

SEQ ID NO: 307741 - DNA, 482 bp, Zea mays
ggacgcgtgggttttaagggtagccaataagaggacagcccgttttgtcccacagaccacgctggttgatgcatgggtctgctggagccgaggatgaacacagcactaacaactgacacagagcgaccttgcaatcaaaaacacagatgggcaacaacaaacgagacgaacgaagataaaccctctggactagggtaaacatcacggtagcgaacaggataacttggccgcgcgggccccaccgctcagttcctccagttcccgtcggagttgccgtagccgtcgccacggttgccaccgccgtagccgtcaccaccaccaccgtagccaccgccgccaccgtagccgacgccgtcaccgccgtagccgtcgtcgtcattacggcgcccgccaccgtcgtagtcgccgtcttcacggccaccaccgtagccgccgtcgtcgtctcccggtcgccgcgggactgggcctcgttgaccgtgatg

SEQ ID NO: 307742 - DNA, 493 bp, Zea mays
ccacgcgcccgattaaaccccggggaaagggcacaacagcacagggacatatcaagggaagcagccgagagcaccgaagaaaaacgaccaggaccagactggccccaagtcgggaggggcggaccctaaagagctgaagaccagagacagacaagaggctcctcctggatgacaaggaaccacccgcagctgccacggaggagacaagagcggcatagccgggcgaacaggaagcggaaagacaaccccacagggcgcaccgccacggcacgcagagccaactggagggaaaataatgatagaccctacagacagcaccacaagaggcgtacaggacctgcgcacacgagggggcaacaacccgcaagagccgacactgcttcaaggaaccacaagatacaatccagaccctcgggggcaagaccctgaacaacaaatacgggaggggccaggcaaatgccagcctcttgaagccggccaggagaaggagcag

SEQ ID NO: 307743 - DNA, 464 bp, Zea mays
  unsure (1)..(464): unsure at all n locations
gccctcggctcccacgagttcngcatgggaggtgaatgcttgttgtctccgccgacacagngagcgagactgagctgtgcttagtaagccatgtcgctgcgcccgagcgagcgggtcgaggtgcggcggaaccgctacaaggtggcggttgacgcggaggaggggcggcggcggcgcgaggacaatatggtggagatccgcaagagccgccgcgaggagagccttctcaagaggcgccgcgaggggctccaggcccaggtccctgcccctccctcgggggtcgagaagaagcttgaaagcctcccagctatggtcagcggggtttattcggatgacaataaccttcagcttgaggccaccacacagtttcgcaagttgctatctatagagaggagccctcccattgaagaagttatcaaatcaggtgtagtttcaagatttgtgcagatgctcacatgagagga

SEQ ID NO: 307744 - DNA, 542 bp, Zea mays
  unsure (1)..(542): unsure at all n locations
gttgttcgctttggaaaccgtgtgcaaggtaactgagtggcaccctcttgttccgctactcngataaggggacatcagaacggactcctcaacatcaactgaaagatgaggcagaatcagtaatgcaggaattagtgacttctgttcagtttacagctgaactataccatgaaatgcatgccctggatagatttcaacaagattatcagcgtaaacagcatgaagaggatggttctagtgttgcgcaaagaggtgataacatgcacatactaaagcaggaagtgaaaagccaaagcaagcatgttaaaagtttgaggaaaaagtctctgtggtctaagaatttggaagaggtcatgggaaagcttgtggacattgtgcacttcttacatttggagatccataatgtatttgggcgttcagacagtgaagaatcacaggaacctaccaaacgacgtaatagattgggtccagcaggtcttgcactgcattatgcaaatatcatcagtcagattgatactcttgtttttcgttcaagctctgtt

SEQ ID NO: 307745 - DNA, 418 bp, Zea mays
ttgagaaatcccctcctggcaagactatcacccttctggtggagacgtctgacaccattgacaacgttaaggccaagatccaggacaaggagggcatccctccagaccagtagcggattatctttgctggcatacagcttgaggacgggcgcacgcttgctgactacaacatccagaaggagagcaccctccaccttgtgctccgtctcaggggaggcatgcagatctttgtgaaaaccctgaccggcaagactatcaccctcgaggtggagatctctgacaccattgtcaacgtcaaggccaagatccaggacaaggagggcatccttccataccagctgcgcttcatctttgttgggaagcagcctgtggactggtgcacgccttgccgcttacaacatccagagggagagccccc

SEQ ID NO: 307746 - DNA, 459 bp, Zea mays
tctcgataacgttgccgtgtttgactaaaggggtaggaccgtgtatacaccacccccagctttggagatctgaaccatccgatctctgcaaccatgagtggagtcacctgctgcctaaggttccctggtcagctgaactccgacctcaggaagctggcagtgaacctgatccccttcccccgtctccacttcttcatggtcggcttcgcgccgctgacgtcccgtggctcccagcagtaccgggccctcacagtccccgagctcacgcagcagatgtgggatgccaagaacatgatgtgtgccgctgaccctcgccatgggcgttacctcaccgcctctgccatgttccgcgggaagatgagcaccaaggaggtcgacgagcaaatgatcaacgtccagaacaagaactcgtcctacttcgtggagtggatccccaacaacgtcaagtccagcgtgtgc

SEQ ID NO: 307747 - DNA, 443 bp, Zea mays
  unsure (1)..(443): unsure at all n locations
aaacaagggagacaagggacccattatagagctagcccggaagtaccccggncaaagactagaggaggaaggctccccaccactcgctgaatacactgaggcgctcgctaagatctatgagaaactcaaagaagtgggagagaaactcgcaagcgcagctgcatcctcggacagcgaagagccatcatttaatgagagtcccgcaaagaagcctcggctcgcaatacctcaaggtgacaacaagtgtcagacgctggttncgcactaagagcttagttctcttccaacactagttctgattggccccgaagggaagacactgaacaacaatgtcgccgacacaattgacgaccacggtctcgaggcacgggaaggctcccccaccagggctgagaagctggaaaaacccgctgagaaggcaaagaataaagctgcatcacaaa

SEQ ID NO: 307748 - DNA, 497 bp, Zea mays
  unsure (1)..(497): unsure at all n locations
cttccacgcgtccgcggacgcgtgggtganatggagagagagagctgtgtgtgctccccgagaggctgncgagtagggaccaccgcagactcagcgtctcagctactgcgaaggagggataaggtgatggccgggatcggaccgatcaggcaggactgggagccggtcgttgtgcggaagaaggcacccaccgccgccgccaagaaggatgagaaggccgtcaacgccgcgcgccgcgccggtgcggagatcgataccatgaagaagtacaacgctggtacgaacaaggcggtatccagcggtacatcccttaacaccaaacgccttgacgacgacaccgagaacctcgcccatgagcgagttccaagtgatctgaagaagaatctaatgcaagcaaggctcgataagaagctgacacaggcacaacttgctcagatgataaatgagaagccacatgtgattcaagagtttgaatcaaggcaggcaatccccaacca

SEQ ID NO: 307749 - DNA, 419 bp, Zea mays
aaagggctctaatgaattcgcccccggcgaaacaagccaaagggggagagagcacgagcccaaagcaaaaggaccgcaccaccaccaatttctaaaattttagtttttcaaagagaattttcaaattggtaccccacctgtgatataaccccaaagcggtataccccccccaaaattaacatcaaaaccctcgtgaacactaagaggaggaacccaccaagggggagccccaaccagccaaaggaaaaagcacccgaaacagggggagaaaattccaaaccctgaagaagccttgcaaaatgctatccattaaacctcgacaaaccgcaaaagaacactgaaaaggaacaacataaagatttgcaaaaacaaaacaaggggggcaagcgtgaaccaaaaagttaaaaacaaagaaacaa

SEQ ID NO: 307750 - DNA, 508 bp, Zea mays
  unsure (1)..(508): unsure at all n locations
cttctttcacatattggaagggggaaacctaaatggagtatagccggtatatccaccctncgcagaaatnnatnttacacctattgactgaaatgcaccacagttttgtaacatcaaaggactttaatggactccaggtttagttcacaaacttatagtgtgtttggtgtgaggaatgaagtaatccatcttcttctcactcctcacttttttatttggtttgtggaatagaatgggttgatccatcaccaccccattcctcataagctaataattagtatatacatgaggagtgggttgattccaccaaaattgatgaaatgaacttatgatgcatcacctcatgaagcatagagtgacttcacaaaccaaacacaccattaggctattacttgcagttccaatgatactctgaccagtgttagaaggaaaagaagctttaggctattactacatgtatacatgttgatacactcatgcatcatgtagaccatgtatagtgactaga

SEQ ID NO: 307751 - DNA, 520 bp, Zea mays
  unsure (1)..(520): unsure at all n locations
gtgatcacaanctccactgtcacacagtctcacattagtagcaacagcctctgtttccacctcctaccttccttnctgcataggttgctacacgtatatattctgaagaagagatcgagatgaccagcgtgtggaagaccaaggttctgcctggcctcaacaagatctttgacaaggatggcaagaaggctgcagctgcaggcttcttgaagtccttcaacaaggaggagattgacaaggagattgaggacaagaagacagagctggagcccaaggtcgtggaggcctacgaagcatctcctcctgaggtcaaggctctcttcaaggataagaagccagtcaaggtcagcaagaagaactcggctgcagtcaccaagttcctcgatgagctggctaagattgacttccctggagccaaggtggtgagcgaggcggtggccaaattcggcacctcgcccctgctttcggcgatcaccttcatcttggacaaggtcgcaccgtttattccaaggaggagccc

SEQ ID NO: 307752 - DNA, 427 bp, Zea mays
  unsure (1)..(427): unsure at all n locations
cgggccgngggacaaaggccaggggacgttggagggaacagcgccgaaggcgaaacgcgtgcgatgaaggaggttnactctcccccagaagatccaaaatcaaaagaaagtgcaaaacagctgcgccaggaaatatcactcctgagccgactgcagcacccaaacattgtgcgatactatggatctgaaactgttgatgataagctttacatatacctggagtatgtctctggtggatctatacataagcttctccaagagcatggtcagactggtgaacaggccatacgcagttatactaaacaaatacctttgggcccagcattcatgcatgcaaagaatacagnacacagagacaacaaaggtgcaaacataaagggagaccccaaaggccgcgcaaaacacgcggactccgggaaggcaaaac

SEQ ID NO: 307753 - DNA, 542 bp, Zea mays
cacgcgtccgattcaggtgtgaaactgagagcagaatgcccttcttttccaattcaaaggtactttacgtcggcgcttccacgttccatgatagtggcataccctctctgcatggttggtgctcttcttgatagaaggatagtaccatacatgtttccggtcttcttatttgttgtgctctattcaaaacttccacataaggaactccgtttcataattggctcaattcccatgtttaatgtgtctgcttcactaacagctagcagactatataataaccgaaagaaagctgggtggaatttgctttttattctcatgcttggtgcctttcttgtcagtctaggatgttctactgtgactttcatggcatcctacaacaattatcctggtggctatgctttaaaggctctacatgaagcaggtgagggctatatgactgctgtagaatacattaaactgcaagacttgtgttctataatcgaactacaagttaggtgtaggcacgcctattaattaaaaaactggtatgtgcccctgcgttg

SEQ ID NO: 307754 - DNA, 505 bp, Zea mays
  unsure (1)..(505): unsure at all n locations
gagacnggagncggacgggggcgatttttagaaaacaccccggctttccccnccncggagcngaggcgaaggctgggaagggcgggaaaggcacgctcgccgcgaagaccacggcggccaagnccgccgagaaggacaaggggaagaaggccccaatttcacgctcttcccgcgccggcctccagatccctgttggacgtatccaccgccagctgaagcaaaggactcaggcaaatggacgtgttggtgccaccgcagccgtctactccgctgccatcctggagtacttgactgccgaggttctggagctggctgggaatgctagcaaggatctgaaggtgaagcgtatcacccctcgccatttgcagctagccattcgtggagacgaggagctggacaccctcatcaagggcaccatcgcaggcggaggtgtcatcccgcacattcacaagtacctgatcaacaagtccttcaaggagtgaagactaggggatgtgcattttta

SEQ ID NO: 307755 - DNA, 425 bp, Zea mays
acgcgggggcctttgaacagttcagccgcagcccccccggagattagaggtttgctgaatacactaccacaattcagtggaacaggaggaatgttctcgtcatactgcatggcgcctgggatgtccctgtcgccatcacccgattggagaaccacgcttggtgtgctcgcgataccttcattgtttttctttggtttgacaatattttatcttcctgaatctccaagatggctcgttagcaaaggccggatggcagaggcaaaaaaggcgccgcaaaagccacgggggaaagacgacgcctcaggtgaatagtcccttcttctcgaagggttggaggccggaggagacacttccattgaagaagacaccattggacctgccaccgaggcagccgaagaacttgttaccgacggtggaaaggaaca

SEQ ID NO: 307756 - DNA, 485 bp, Zea mays
  unsure (1)..(485): unsure at all n locations
ggcaggaactggnccggaagactttgncgacccacgcgngttcctaaacccgcngaaggggaagcgncacaggggggcatttaagaagaagcccccgaaggccccaacancaaggntccgagggagcaaggcacgcgcggggaagccgacaacatcgctgcacgggaccacgcactgctgccagtcactaaagactttgatcctgagataaaactggcaacagcggggcacgatgcagcaacgggggatcctcaaggcgggtgcagcaatacaccaaaaggagacgcacagcgactaacaaagtagtgaggagtcgcacaaggaaggatagcgacggcccacgaaggaggagacaaccccagggccatagcgaacacagttcgcgcgtgagcaaaaagccccccgggagacaaagtcacaggcaacactccagagacgcaaccattcgaagccacaaggagagcaatacaagcggaacgcaaaga

SEQ ID NO: 307757 - DNA, 385 bp, Zea mays
  unsure (1)..(385): unsure at all n locations
tgccgcgaccgatngagcgaagcgtccctccccgcgccgcctgcaaaacccttacttttcctacttcatggccactgtctcgctcaccccgcaggctgtcttcttcacggagtccggtggcgccctggcctctgctaccatactccgcttttcgccaaactttgtccgccgccgccttcgcggcggcggaggtcagcgcaattcccaacgcttaggttgcgcaaccgcccgccgtcgtcttggccgagcgaaacctgctcggttccgacgccagcctcgccgtccacgcgggtaccctaccctgctagctcgtctctttactgtaagatctaggttctatgcttttctccacttttgatgattcctttgtggctttgctgccttt

SEQ ID NO: 307758 - DNA, 412 bp, Zea mays
  unsure (1)..(412): unsure at all n locations
acgcgnggggcggcggggggcgttttaagggaggacacccttctttccccgagagcgcgnncatacaaaatggcgactgcagctacgaccgacgctgccttaccccacatcctcttcctatactgctaataccctaccaatcccccccccccctctctctcttttcctcgccagctggttcgatccgcacccgccgacgcattgggtgccgaggagggacgcaatggagcagaacgagaaggtggagaagaacggggagggcacgtacggggaggagcacaaggcgccggacaaggccaccaacgagacgatcgcgctcaagaagatccgccccgagcaggaggacgagggcgtcccgtccaccgacaaccgggagatctctctcctaaggagatgaaccacggcaacatcg

SEQ ID NO: 307759 - DNA, 542 bp, Zea mays
gccagatcaacttcgaggtgtgggactaataggagatcgccgtcttttcccgcgagccgcgggacctcccaggtaagtctctgatccggtccgacgatcctgagtggttcttcttggcgcccaaggaccgcaagtaccccaacggtagcaggtcgaacagggccaccgtggccgggtactggaaggctactggcccggacaggaacatcaagtccaagggcgacaagagcaaacagtttaccatcggcaagaagaagacccttgtcttccaccgtggacgcgccccgaagggcgagcgcacagggtggattatgcacgagtaccgcaccaccgagcctcagttcgagtctggcaagcagggtggctatgttctttatcgcctcttctggaaaccagaggagaaaactgagcgctccagcccaaaggaaatggatagaagtggaactcgcctctactattcgttcttcacgtgcaaccagaggcgatgaggagctatacacattaataaaaatttagatctgtctgatgaccgatggctgcca

SEQ ID NO: 307760 - DNA, 463 bp, Zea mays
  unsure (1)..(463): unsure at all n locations
attttagtagcctacggtgtgtcacctgaatggggcctacgctttgttccccgcagcaggcctaatgactggtctctcgcctccacctacngcaggctcgctatcttcgtgttcggtgcatgggctggcctctcacacggtggcgtgctcgttgggctcgcagcttgtggtgtcatgatgagcatcgtgtcgaccgcctcagacctgatgcaagacttcaagaccgggtacctgacgctggcgtcaccgaggtctatgttcatcagccaggtgattggcaccggaatggggtgtgtcatcgggccctgcatcttctggctcttctacaaggcgttcggtgacattggcgagagcggcaccgagtacccgcgccctatgccatcgtgtaccgcaacatggccatcctcggcgtggatggcttcagctcgctcccgaaaaactgcctaccctttgctacattttc

SEQ ID NO: 307761 - DNA, 527 bp, Zea mays
  unsure (1)..(527): unsure at all n locations
cacgcgtccgcccacgggggggccctaaagggcgtaacgctcagtttccacgggaacccgcggngtngncctgctgctcctcgcggcggcgctgctcctccaggcgctcctcctcgcgtcgtcggagggcctggtgcgggtcgcgctgaagaagctgcccgtcgaccagaacggccgcgtcgccgcgcgcctctccgccgaggagaggcagcgcctcctcctccgcggcgccaacgccctgggctcaggcggcgacgacgactccgacgtcatcgcgctcaagaactacatgaacgcgcagtactttggggagatcggcgtctgctcgccgcagcagaagttcaccgtcatcttcgacaccggcagctccaacctctgggtgccgtcctccaagtgctacttctcgatcgcttgctactttcactcgcgctacaagtcagggcagtcaagcacttacaagaagaacggaaaacctgctgccattcgttatggaactggttccattgctggttttttcagtgaggata

SEQ ID NO: 307762 - DNA, 480 bp, Zea mays
ttggtttcgtgggcaactgatagagtgcttaattaggtactgacaaaaatggatggcatgaatgccaagaaaactgtgtttattattggagctacaaacaggcatgatatcattgaccccgctctgctgaggccagggcgtcttgaccagttgatctacattccactgtctcatgagcagtctaggctccagatcttcaaggcctgccttaggaagtcccctgtggcgaaggatgcggactcgaatgctcttgctgagtacacgcaagtgttcagttgagcagatatcacaaaaatttgccagcgtgcgtgcaaatatgcaatcagagagaacattgagaagggataatgacaatgaggatactcaagctcgtgaacactctgatgaggaaatggattctgacgaggaacatgagagggcaaagaaagatgtctcactgaactgagaaatgagcttaaaatattggagactgaacatgca

SEQ ID NO: 307763 - DNA, 487 bp, Zea mays
  unsure (1)..(487): unsure at all n locations
tggggatgaatcactagaggggaaagttctccgcttgaagcaacaatatacattgtgttcagcctcactacaggacatcattgctcgttttgagagtagagctggcgagtctctcaactgggaggacttcccctccaaagttgcagtgcagatgaatgacactcatccaacactatgcattcctgagttaatgagaatactgatggatgttaagggattaagctggagtgaggcatggagtattacagaaagaaccgtggcatacactaaccatacagtgcttcctgaagctctagagaagtggagcttggacataatgcagaaacttttacctcgacatgttgagataatagaaacaattgatgaagaggtattagatgtgcagaaagtgcttatgcaaattttcttcttgctctatgagttgacgtacacttttctctatacttgattgaaacagctgatacacaacatagntctaaagtatgga

SEQ ID NO: 307764 - DNA, 401 bp, Zea mays
tttcttctcttctcttctctccgatgcgagcgagatgagagagagaaacagagctccccgaggtgtgtataaatgccaggtcggcgcgttaattctttctagttctactccccgctccccattcacgcactctcactctacctctctccctccctcgccggcgccgcgcgtgctcccgcgggatgctgcgtgcggcgcggtacctgctggggtcgccgggcgcgagcgggttcgggtccaggtcgacggcggaggaggtgaccccggacctgggcgcgacgacggccatcatcacgggcgccacgtccgggatcggcgccgagacggcgcgcgtgctggcgaagcgcggcgcgcgcgtggtgatcccggcgcggagcgccaaggcggcggaggacgtgcgc

SEQ ID NO: 307765 - DNA, 351 bp, Zea mays
ttttagtcgtcgatcgttccatccaccggcgggtccctcagcctaaagatcgacatgcacttggatctgatggagcgcaacacaagggaaggcagcaccacatactccatgatggcgcagggcagcccgaacgatacgatccacttcgaattgctgttcaacgcgctcggcgagccgtacacgctgcacatgaactggtcgacgcgcggccaggagcatgcccagctgcagcacccgctcatggacgaccgcacggtcaacttgcacacctactgcatccggtggaaccaggagcacgtcatccagatggtggacgacatgcacatgaggaacttccgcaagctgcagagc

SEQ ID NO: 307766 - DNA, 188 bp, Zea mays
ttgttgctctcgctctcagacgactgggccggcgccgcttggtgctgtggcttccgatggtctcttcggcggcgacgagcacccaccagttctgtagaaatggctgatggtgaggacatgcatcctcttgtgtgcgacaatggcaccggaatggacaaggatggctctgctggggacgatgcaccaag

SEQ ID NO: 307767 - DNA, 275 bp, Zea mays
gggtgaaacagtcaaagatttttatgaccgaattggtacaaaaatacattttgcatcagtaagacatccagaatcaaatgggttagtagaaagagcaaatgtaatcataatgaccgggataatgaagctaatcttcaatcagtttagaggaaaatggccaaatgagctgatcaaagggggggggggccataacacaactgtctcaagggcaacagattttacacctttcaaggtcctattaggggacgaagcaataacatcggaagaagcaagaa

SEQ ID NO: 307768 - DNA, 434 bp, Zea mays
tgtcacgcgtccgcgtcaaccccctccttgggtagggttagagttcccccggcacgagcgcgcgcacaactccctccgtagtggcgtacaccaagacaggggagcgcctggtggggcagatcgctaagcgccaggcggtcgtgaaccccgagaacaccttcttctctgtcaagcgcttcatcggccgcaagatgtctgaggtcgacgacgaggccaagcaggtctcgtacggcgttgtcaaagacgagaacggcaacgtcaaactcgactgccccgctattggcaaacagtttgctgccgaggagatctctgcgcaggttttgaggaagttggtggatgatgcatctaagtttcttaatgagaaaattacaaaagcagtggttacagtaccagcatacttcaatgattcacaaaggacagcaactaaagatgct

SEQ ID NO: 307769 - DNA, 316 bp, Zea mays
tattattctcaagtgcattatcctggagaacaatgggaacaagcctgacacaaacaggcgggacactcaggagatacgccttgaacaaggtcttctgatgctcaagatattcatggctcatgctagcaagactttcatgctagacgactctgtcttgtactagagccggcaaaagttgatgcatgattagaagtctaaacagcagcagctactacagcaggcttgggacactaggacccccgtttctgtcaccgatgagcaacgcgtagaacctgctagtgggaagaccaattcgatcgtaccagattgtgtcacg

SEQ ID NO: 307770 - DNA, 411 bp, Zea mays
gcttgctatctgaagcgactagtctaaggcggggggcggcagcgatggggagcgacctggagactgataagacgaagaccccggcggcccttatgcccatcgcggagcctatcgctggagaggacctctgcaagggggccctcaagctcatgcgacgagcctctgagggcacttgcgtcaagcgcggagtcaaagaggtagtgaatagcgttctcctcgggaacaacaggctgtgtgggactgctagacctatttctcctattgatgggagggcacacgctgcaatacgatgtgaggagagtaacgttccttacatatgatgtccatcaagacaggggcttgcgacctgagggaccactaataggccgacttggttcgtgctgactctcaccaaaccaagcaagggggagc

SEQ ID NO: 307771 - DNA, 464 bp, Zea mays
tctctctccccttttctccgtcctctcctagtcgcacacggcttacgccgccgccgggggagaggagaggaggggaggggatcggctccaagggaccaggtgagttggcattcctgtacgcgctggttgcgcgcggctactgtggtcctggcggagcacagcttcgtctgccaccaccttcttgcgctatctcgcgccatgtcctctagcgcctcccctactgcagcgcctacagtctcatctcctacactccggaccggtacttcttccactccaagcgcaccgactgcattaccgttctattcatggccgactacgccatcggaagacggattccctctcttcattcttggaggatattcattgaaggtttgttaagacatatggccggtcttctctaaccgctattgcatatacaatgaacgatgaattctcaaaggtcttgagccagtatatggactact

SEQ ID NO: 307772 - DNA, 239 bp, Zea mays
tcccacgcgtccggccaaccagaagagcttgcagttactgcgagtgcgtgtgcgagagaggatgggtggcaccgacagggctgctctgctggtggccctggccgtactgggccagtgcctaggccgggaaagccagtcccacgacgcggacgatatccgtcgacggcacacccctacacctacgcctggcaaccgtatctgccagcccatgcagcccccccccaagaccccgcatccag

SEQ ID NO: 307773 - DNA, 455 bp, Zea mays
gctttctcttgcacgcggcctctgctgctctttggctgggggatgcgtcgtacacagttattgacaatgaaaatcatgctgaaaacaatggacatgaacgttcgaaaacggcttcagaactacctggctgcactacagactacggactctcagctatatcaaagcgccacatgaaccgacatcgacaccaccgtagccaggccaagaccctcgctcaggcaactgacacaagagacgctctggccaaatgaggagctgccagctcggacgccgaggatagcggcacaaattaataagtctctctcagttggcaagcgacaaactgggagacctatcaggactctcgatatctctggcttctggacaattgaaggaccagttctgaacagtactgcaaagacactgtaaggaacggttgcagcaacatttcaatcgtcatttgtttaagcttgagc

SEQ ID NO: 307774 - DNA, 422 bp, Zea mays
actatggtggtaccatgctttatttgttgccttaaagaaacagcaatatgttacaagccttgaccctctttgtggggtcacaaaaccaaagaaggtaaacaaaatgtccgacaccagcgagcacaagacttaaaagataatttaacacggtatacaatcgggagaccatttaacctgacgatgtgctagcacatgaacttgactacgataactgaaatgtcgtctttgctcttccggttcacggcctgctccgtcaggtgcttggcagctgcctgcgcgtccttgcaatccttgatctcgtcgacagcctcctggttggacatcacctgcacatgcgccattctcacattataatcatcattgaaaatggtaaacacaaacttcatggctagatctatttagaagctactgttgataacaaa

SEQ ID NO: 307775 - DNA, 389 bp, Zea mays
tccacgcgtccggggaactctccgccgccacccagagacccgccgcgccttgcagtggcgacggagggaccagccagccagcgatgacgacccgcatagcgccgggcgtaggtgcgaacctactcgggcagcactcggcggagcgcaaccaggacgccaccacctacgtcggcaacctcgaccctcaggtttctgaggagcttctatgggaattgtttgtccaagcaggccctgttggtaagtggattatatgtatatcatttcttctgtaatgatgaagaaggacatgtctgacacagtggtgagaagcatttctattgagacaaaaggtcctgggtttgatgcagtctctctgcaaaggcaggagtaaggcttgacttggttatttc

SEQ ID NO: 307776 - DNA, 410 bp, Zea mays
ttagtgctcttctccctacacaccacaacaaaatggtgttgtggaaaggaagaatcgaactctagtggacatggtaagaaccatgcttgattagtgcacgactttggatcggatcagggccttagcgggggacacaggttgttacgccatcaaccggatatctcttcaccgaatactgaagaggacgatatatgaacttctaaccggtaaaaagcccaacactggatatgtgagagatactgggagcataggctatattctcgtttaaagaggtcgaaaatctaaatttgatcctaaaactgctgaaggctttttacttggatatgactgaaacacaaaggcatataaggtctatgacaagcgcactggactagttgaagtctcatgtgacgttgagattgatgaaacta

SEQ ID NO: 307777 - DNA, 433 bp, Zea mays
tggtcgcgtggggcagattttgagacgtttcataagcaacgcccaccggtatcaaaattctatatggaagagcagctctcaaaagtatacacacataatatgttcaagaagttccaagatgagattgaagccataatgtactgccatgtatctttaattagtgttgatgggcctgtctctacattcaatgtcaaggagtgcattttctttgaagatggtaaaaggactatgagtaaaatttttgcagtgacatacaaagcggacgaaaagaatattagttgtatatgtggcaggtttccaattcagtggcatactgtgtaggcatagtctctcaatgctcaagtttcaactggttcgtgaaatcccacaacattatattcttgataggtggaagaaggattttcgacagttgcatgtgatgagacgccctcca

SEQ ID NO: 307778 - DNA, 406 bp, Zea mays
ttacggatctatccttccctccaggctgcagctccaaagcctgggcggattcttggacccgccacccggcctggacactgacaactagacatggtaccacccaggttttgctttatactggttcatttgtctacggacaatggactaggggctgcactgtctgtgtgattcaccatgggaagcagaggagcctatacaccggctaaggagcagcagcaagctgctacctgatgagatgcaatagcacctgattatccagattggcctagctatcaggggtataccccaatctcaccacatggattcttcctctgacctgtggaatcaagtgcacaggggcctacgttcatgtggtgagctcaagctatgattgcaccttatggaacaccgccaacgtatgtggtgt

SEQ ID NO: 307779 - DNA, 392 bp, Zea mays
ttttgcctgggactccaacggggagttcctcctgatcgaggccgccttcgcgctcccacggggggtcgacccggaatccgtccccaatcgggtcttcatgttgcggggggagctccacatcctgccgacctacgtcttgcccgagacgccgtgcctggaagccggccttgccgtcgtctacgacgactccatggacacccgcgctgccggcgccatccaggcagccatacagcgccgcatcgctgggctgcccgagagggcgggggagaacctacacacggcacgcgtgatggtgctcgcgcccgtggcaaaggtgctcatggaggagccatgcctgatcgaacgtgccgaacagagtttctacgaccgggacattgacaccatgaaacatg

SEQ ID NO: 307780 - DNA, 429 bp, Zea mays
cgccaccttccctcccaccgccaccattcgggccgccctctctcctagtcccagcaaatcccacttccccaggccccagctccagctcgcctatccccctcaccagcgccgcaggaagatcgcgctgcgcccgccgtctcacgaggaggcatcgatcggcgaggtggcatttaggaggaggaaggggaggctgtaccttgttgacagggtcttagttaggcggggagcggcgagatgagcatgtacgggagggacccctggggcgggccgctggagatatgccacgactcggccacggacgacgaccgcagccggaacctggacatcgaccggggtgcgctgtcgcggacgctcgacgagacgcagcagagctggctgctggcggggcccggggaccagggccgcaagaagatgatgtacgtcgacatc

SEQ ID NO: 307781 - DNA, 345 bp, Zea mays
gtacttggcgggcacatctttagctgcagcaacgataccagggcagaggaccttacaaggcgaatacaaggattgccaggcagataaccggatgcatgaccggcactgactgctgggctgcctctgttcctgtataactacaccactcaccaggtcaatggggtattcgaggctgccagcgcgagcgtggctaatataggaacgactatatgagaggattagaaggggctaggggaatgtagattcctatcacaggtgaggagccggactacgacagtatggcagcacgaggaagaggatgccaggaggccagtcatgcaccactatgagggctcaaagattgac

SEQ ID NO: 307782 - DNA, 383 bp, Zea mays
ttgaacttcagaccattgttggtgagactgctatgtcaagaacccagattgtgagcagctatgggcatatatcaggcagaacaatcttcaagaccctgatgacaaaaggaagatcatttgcaatgacgaacttcgtgtggtttttgaaactgacaccaccgacatgtttaaaatgaataagttgttggctaagcacataaccccacttgacccaaaagatcagcttcatgaagtaaaaagaatgaaggctcccacagtggctcctcaaccacctcccattatcagcccagtgtagttatttctgatgcacttgcaaagttcatcggaacagacggaacatttcctcaagatgatgccctgaaatacctgtgggattacataaa

SEQ ID NO: 307783 - DNA, 262 bp, Zea mays
tcgttcacgcgtccgcccacgcgtccgcccacgcgtccgctgtcctctcctcccttctcatcatttcggcatgctgccatcgcacctgaacgggcactccgccctcgggcgccgtcgcccgcgcctctccgccgccgccggggagtctccggcggcagcgggggtagaggcggcggctccgctggaggagcacgaccgcatgtacttccaggcctactaccatctcggcatccacgagactatgatcaaggaccgcgtaagg

SEQ ID NO: 307784 - DNA, 427 bp, Zea mays
caatacaatctgtttcatcgcatcggttcaaagcttatatgtgtccattttttttagctacctcggctgaagttctgtgattgtcacctcgttatctgaaactgaaaccatggacgtggatgtgtgtttattattgccaatctgcacaccgccggagctccaagctgaggcagtgctgaagacaaaggccggtctggatgggactcgcctatcaccgggcgtggaggtgggactgctgagcataagcaccacggcggaggcgtccgggcggtccgccggattctcctggacgcataggagcccgacctctatgcaggtgacgacctcgctttctgagtagtgctcggcgcccaaagttggatccaccacgtccgttgttgctccagttctccacttgtcccagacatggctgagcacagacacagat

SEQ ID NO: 307785 - DNA, 458 bp, Zea mays
gaacaataacattatcatatatatttctcagtatataattgtaagttaatataaagacaatattgaataacatttggtacctttggcttgacagagaacaaaggtacgagcgtgacgcaaaagcaaatgtcaaatcagcgtgaatagtacgggggtactgttcacctatatgtaggcacaggacacagcctgtgagaaattacattcatgccctttacatttattattaacttatatacaattctattaggactagatagccttttcccctttaagtcggttcctttttccgccatctagccgaagctttcttgcgcatagcttcgggattgactcgaccttcgtcaggatcgaccttcgtcccgatcatgctttccatattatatatgcttttgacccgagtctgaaggtacctgcttacatatcacacttggaaaatattgttaaatcatattttt

SEQ ID NO: 307786 - DNA, 268 bp, Zea mays
aattccaaacctcaaacttattcatgatttggcatagttcgggggaggacccacccacaacaaaaccgggccttttttaaaccaaccctggccccacttatgacccgaaccggagattctttgaccccccccatttggggggggggccccagaccacccaggcccattggggggttaaaccacccatgactttctgccccccccggggaccgggcccaagggggggggggccccccttttggatgttggaacccgctagggggcggcc

SEQ ID NO: 307787 - DNA, 328 bp, Zea mays
tttctatgcgtccgcccacgcgtccgcgcagagataggcgtctttgtactcgcctaccttcgcggctcaaacctttcccccttctcccaattcccgccgccgctccatcccgtaacgcgacaccatgtgggagtgcatttacgagccagatcccggcaggccggtgtacacgtcggaaacgcgtgctgggagctgtactgccttgagcatggcattcaggctgacggacagatgcccggtgacaagaccattgggggaggtgatgatgctttcaacaccttcttcagtgagactggtgctgggaagcacgtgccccgtgctggttttg

SEQ ID NO: 307788 - DNA, 442 bp, Zea mays
ttctgacgcgtgggcgacaatggatcagcagcgccggcgaggagcggcggagaggtggccgaccacaccccgagagccggaggcggcagcgacgacgaggactccggcggtgggtcgcgcaagaagctccgcctgtccaaggaccaggccgccgtcctcgaggagagcttcaaggagcataacacactcaaccccaagcagaaggcggcgctggcgaagcagctgaacctgaagccgcgtcaggtggaggtgtggttccagaaccgcagagccaggtgaacaaagcagcgcccttgaagcagcacacgcatgccatttatactgactcatcctccgtgggccgtggctaatactagtctaatcataatattatcgttcaggacgaagctgaagcagacggaggtggactgcgagttcctgaagcgctgctgcgagacgctga

SEQ ID NO: 307789 - DNA, 453 bp, Zea mays
  unsure (1)..(453): unsure at all n locations
tttgttacgcgtccgcccacgcgtccgcccacgcgtccgcccacgcgtccggtggtacgcgtgcgcgggaccgctcgtggcgctgccgccggcggggagcctcgttgtctacttcccgcagggacacagcgagcaggtagcagcatctatgcgaaaggatgcagatgccaaaattccgagctatccaaatctctcatctaagcttatatgcatactccgtagtgtcactatgcttgctgatcctgacacagatgaggtttacgctcgaatgactctccagcccgttagcaatgtgacgcattgtgacaaggagacgttgctggcaacagagcttgcactgaaacaaaccagaccacagacagagttcttttgtaaaacactgactgcangtgatacaagcactcatggaggtttctctgtgccacggcgtgctgcagagcgaattttccccat

SEQ ID NO: 307790 - DNA, 428 bp, Zea mays
tttttatgacttgtttcattgattcttcaagagatcgagcttcttttgcaccacaaggtcgaggatgtcttgcagctgcggatcaagctgcggctgcggctcaagctgcaagtgcggcaagaagtaccctgacctggaggagacgagcaccgccgcgcagcccaccgtcgttctcggggtggccccggagaagaaggccgcgcccgagttcgtcgaggccgcggcggagtccggcgaggccgcccacggctgcagctgcggtagcggctgcaagtgcgacccctgcaactgctgatcacatcgatcgacgaccatggatatgattattatctatctagcttggggtggtggttgaacaataataagcgaggccgagctggctgccatacataggtattgtgtggtgtgtgtgtgagagagagagaaac

SEQ ID NO: 307791 - DNA, 241 bp, Zea mays
ttctttttatatttttatcggaaggaccggcctcaaaggggtttttaataatccaatgggggttttatcggcagcagacgtacacatacgtacgttgaaatcaatcaattccttctacttcggcggcagagacctgtgttgacgaataagaagaagaacgaaaataaataaagtcacttggcggccggataagactttttttttccttccttcaatttcaggcgccgttcattagcggttt

SEQ ID NO: 307792 - DNA, 362 bp, Zea mays
aaaccgaaccagaataccgtattggggaaaacgcgtgccacgatggtattgttcaccaacaaaaggttctaacgcggatacaccgcgacgacgacgataaatcgagcagcgactgggccagccagccactgcagcagacacacgagactgacacaaaccgcttagtccacctcctcgatcttggggccagggccaccgcttccagccggagcgtcctcgtccatgccgccggagcctcccatgtcggcacccgcgccctggtacatcttggcgatgatggggttgcaaaggctctccagctccttcatcttgtcatcgaactcgtccgcctcggcgagctggttggcgtccagccagctgat

SEQ ID NO: 307793 - DNA, 381 bp, Zea mays
tcgtcgtccaagcgcacgcagcaccgtcgtcgggctgttcctttttcggcggcattggagatggcggcgaatctagaggacgtgccgtgtctggatctgatgcacgaactgctccgtcggatgaagtgcaggtgcgagcccgacaggcacctaatgctgatcggcccacctggctctggaagggctggtcccagggaactgattgaggacgaatattgcctgtgccatttagccactgctgatatgttgaggcctgatgtggcagtcaagacacctttaggtatcaaagctaaagaagttatggataagggagagcttgcttcagataacctggttgtggggattattgatgaagctattaagaaaccgtcatgccagaaa

SEQ ID NO: 307794 - DNA, 442 bp, Zea mays
ttttccacgcgtgcggaaaaggagtttctggctatgatcatggcagtggatcgctggcgtcattacttacaaaggggggagtttgaaattcgaacagatcattgatctcttagctttctggacaatcaggagttacattctgagttgcagtgtaaagccatgtgtaagatgatgggtatgcattttcgggtggtgtataagcagggtaaggaaaataaggtggctgatgcgctgtctggtgtaggatattgtatggctattattgtggtcagtgctgttcagccaatttggatgcaggaagtgttaaactggtatgtcactgatggggaggcacaaaccttgttagttcagctgtcagtgcacagtccagattaacatggtttctcgctatctcaaggggtgatccggaaggagcatcgtatatggatggccacaactctac

SEQ ID NO: 307795 - DNA, 351 bp, Zea mays
tttggttcacccagttggtgatcacctgcagacgttccaccaccgggacaagaagaagctgccgtcgttcctcgactggttcggctggtgcacctgggacgccttctacaccgacgtcaccgtcgacggcgtcaagcacggccttcagagcctgtccaagggcggcgcgccgccgcggttcctcatcatcgacgacggctggcagcagatcgcctccgagaacaagcccgaccccaacgtcgccgtccaggagggcgcgcagtacgtgcattgcacgcatcgcatttctctgatcaatcatggctggctgccagcccgccgtagtttccagacgctcaccaaaactggttg

SEQ ID NO: 307796 - DNA, 295 bp, Zea mays
atacttatatgggggaatttttaaagtaacagggggtacttgccatagcaaaagctcaaatccagactatggaatgtacaacacaagagacgcagctatgaaaatgagattagcagctaccgagaatgcgctcatccgcctagctgctccccatgatttccctcggcctttcttttttcctgttgaaggccggcagagagatcatagtacatggcggaagtaagcaggacgtagcagtgaagaagatcgagccacatagttacaggagaagagtggtactggagggccacaaaaa

SEQ ID NO: 307797 - DNA, 377 bp, Zea mays
ttgtttggcgcgcgtccgccccagcgaacacgcgcgggttgtggtccgactaccccggcgtccactggaccgcccaccgcggtagcgccactgcgttctgtgctagaccgaggcaggggcccgggggcgcgaacatttagggcgggcacgtgaacccggccacgaccttaggcgcctgcgtgggcggaaacagcaccggtggaccgggggctcctgtactgggtggcgcaactgctggggtccaccgaggcggggttcctgctccgatatctcgacgggcgggcaggccactggcaccttcgggctgacggtcgtgttcgtgtgggaggcgctggagctgcagatcgtgatgaccttcaggctggtgtacacggtgt

SEQ ID NO: 307798 - DNA, 407 bp, Zea mays
ttcgtttctatacaccagtacaccattctggacgagtcccattttatgtgacatgttcaaatagagtagcttgtagtgaagtgcgagaatttgagttccgtgattctgagacccattatatggatatctcagataagcatactacaggcataaatgaaatgcatttacgtatccgccttgataagttactttccctggaaccagaagactatgaaaagtatgtcttgagtaatggaaataagtctgagctgatcaacactatcagttcattaatgcttgacaataatttgtctaatctggcattaccatctgatgagaaggaattgtgcactgtacaggatcagaatcttgagaaacaggtgaaagaaaagctatattactggcttatccataagatacatgatgat

SEQ ID NO: 307799 - DNA, 447 bp, Zea mays
tttgtcttgaggaactgggtcagatgttcggcattaagggtcagttggatgaccctgatagatcaggctggcagcttgtatttgtcgacagggagaacgatgtgcttctccttggagacgacccatgggagtcatttgtgaatagtgtatggtacatcaaaatactttcacctgaggatgtgcataagatgggaaagccaggaaacgatccacgctacctatcttaaattgatacccagagctctttcgggctcccgtgacgattctgtggcacactgtagcactgtccatggcggtccggtgtgctgtgctcgcatgttcgcccgtgtcatctatagcatgtacaccgtgcgcgtcttcagaactcccccgttacttgtatccggtgcaggccaccgctctggactgatatcttgtaggttccacttaggaatcagtatcagcgac

SEQ ID NO: 307800 - DNA, 396 bp, Zea mays
tttgtcttgttcatgaatgctgataaccaacatctagtatcacctgaggccatagattttctcgataagctcctgcgctatgatcaccaagataggctcactgcacgtgaagctatggtaagccagacagataagctaccattgcagataatagtgttgcttattagatctgtaacatcacacattatcacaccctgttgcattataattgattaacccaatatactgtcattagctaactcagttatttttccttgcaaccacattctcgctttacgtgtttaagccacacttaatgtgtgttcactcatacttacattccttttttcagccaaatattttgtactttgacattttagcagtttggaaaaaaaaaagattacttattaaatgatg

SEQ ID NO: 307801 - DNA, 492 bp, Zea mays
  unsure (1)..(492): unsure at all n locations
ttgtattgnggtaatccccatgagcagaatcgacgacgccgtctacaggatccttcgtgtctagttcacaatgggtctgttcgagaacccttaccccgactctagcctcgccggcgagctcgggaagcaagaacaccgggaactggcgcgcgaagccgtcaggaaatccctggttctcctgaagaacggcaagtcctcctacgctccgttgctgcccctcccgaagaaggccggcaagatcctgccggggtcggaggggcagggcgtggcggacgtgctgttcggcgactacgggttcacggggaagctgccgcggacgtggttcaagtcggtggaccagctgcccatgaacgtgggcgacgcgcactacgacccgctcttcccgttcggcttcggactcaccaccaagggcacgaagtgagtgagtgtgaggcgctctgatgggatgtggcctgtgagtgagctgtgtattcgtgggcgggcgtgaggctc

SEQ ID NO: 307802 - DNA, 364 bp, Zea mays
tcaccatgtgtccggccacgcgtccgacagctcgctcgttccagctgatcaggcagagcacttggtagggacctgctcgatcatcaacgtagacaggtggtagacagctgtctatgttggtggatgagtgcaacggtcatggggacaagagcatcgccaggcgccctatggtgtgctgtgcctgggcgagctggtgtcctgctccttcgtggggggcagcttggaccaagagctggacatcacgtggggcgacgggcggtgcaagggccttgacaacgggcggctgctgacgctgtcgctggaccggacgtacggctccgggttgcagtcccggcacgagtacctgctaggcaagatcgacatg

SEQ ID NO: 307803 - DNA, 325 bp, Zea mays
tgtcgccattggggcctgtttggagatgggatgctgggaattgaataccagtcactgcgtgggcacattggattggatcactttggccgcactgcagggatcaagatcatgccagtgggagttcatgtgggtaagatggagtcagacttgcacttgcctgatagggagtggagggtttttgagctttaacaagagattcagggcaaaactgtcttgcttggggtggatgatatggatatctttaaggggatcaattggaagcttctcgcatatgagaacatgttcaggacacattccaagtggcacgggagagcagttttagggc

SEQ ID NO: 307804 - DNA, 249 bp, Zea mays
tttttctgttggcagcgggagggctgctctggtgctggccctggtggtggtggccgtgagcctggccgtggagatccaggccgactgcgggtcctgttgcggcggttggtacaccccgacgtctacgtcgggcagccagtctcgatgccaaggagcctccaggaaggggacgctgacggacatgacgtccagggagcacacgtggtccaaggagcacgggaccaagccggagaagccgcccaaggtgca

SEQ ID NO: 307805 - DNA, 438 bp, Zea mays
aggaccgtttcggaattcctgggtctgattcacgcgcccgagtaagcgtgggccaaaacccactcccactcctgcgacgtacattcagacccccaagctctttttacctaagccgaccccggcgacgtacactccaagccccaaacctgcgacgcccaagccgagcccaccgacgtacaccccttcccccaagcctccgacacctaagccgaccccgtctacgtacactccaagccctaagccaccggctaccaagcctcccacgcccaagccgaccccgtcaacgtacaccccttcggcaaagccttcgacacccaagccgaccccgtcgacgtacacccctatttccaagcctgcgacgcccaagccgaccccggcgacgtacactccaagccccaagcctgccacacacccgacgcccaagccgaccccaccgac

SEQ ID NO: 307806 - DNA, 463 bp, Zea mays
  unsure (1)..(463): unsure at all n locations
accataaattttgttattttaatttagttgtttcactactatattgcaaccatcagtatcatgcagacttcgatatatatcatgatttgcatggtctcatcattggagagcacgtgccacacctgtcggtacaagttacgtacattgttagtcatcaggcacgtatcaccatacacgtttgcttaaacaaaaaggcaagtgtgtgtttgcgaagagaattaaaggcagaccggtacaaaagctaccnncacggtggtgagtggtcattgttgtcagtcctcctctgcgtcacctccggcgccgatatgacgccacaatcgttgatatagtagtcgtgnaacacacgcgacatggtgagtaccgatgactcttggctgggctaccaaatgaagtgcaccctgngctcatcagcgaggtagtacatctggtcgttgcaccaccggatgtgctactcctctacata

SEQ ID NO: 307807 - DNA, 440 bp, Zea mays
ggatgctccgcctgcaggcacctttccggtattcctgggtttgcccacgcgttcgtagacgcgtgggcggacgcgtggggttgggagcgcacacacacacaaccagatctggcctttacccacccgcagggacctccggttgaagatgcagatctttgtgaaaaccctgactggcaagactatcaccctcgaggcggagtcgtctgacaccattgacaggcggagggccaggatccacgacagggagggcatcccctcagaccagcctcggctcatcatcggttgcagacagtttgaggactgcttgacgctgagctgctacaacatccagaaggcgagcaccctacaccgagagctgcgactgaggggaggcatgcagacctctgtgctaaccctgaccggtgggactatcaccctggaggtggaggcctctgacacca

SEQ ID NO: 307808 - DNA, 488 bp, Zea mays
tttgtctcgtgggcgaagatagaagagatgcgacgtcggtctctccatgtttgaaaaacttctgatggcgatccaccgtgtattgtgacaagaatttctccttcgcttgacgcatgtagtcttcgtattgctgttgctcatcggccgtcagactttcaacggtcagcttctaggtattgtgtggggagatcggtgtgatctttagaaccggccatttgaggcctaatttttagtagatatagacacctaatcaccaacggattctgcaaaaaagtgtgttggcgccgatttgaacgccaaacactggaacgaaacaccagacggtgctctctacagaggcgcagacggtccgcggcatatgaccgaacggttcacgacctaggcgcaggagtggctccttctctgcgtacgtctggacggtccgtgcctagagctaggacggtccgcgatggcgtagagggtcgtcttcttcgcaacagacctagata

SEQ ID NO: 307809 - DNA, 506 bp, Zea mays
  unsure (1)..(506): unsure at all n locations
aatgntggagttgggatacctcggaggcggcgacgacaggatcgcagtggtcagtagccgggtcggccggtggccgcagattctcaccagcagcgccatccctcgccgtcgcccggcgctccagcccagtctactactcatgcaagaagaatcgttcacaccctgaagaacaagaatcggtgtgtatttgcagggcaggagaggaagccactctgactctgtcactctgagcttcgcgtcacctgagtactgacggacgacatgggagaagttgaggacatgtacacccaagacgggaccgaggacatgaaagggaatcccgccgtgaagaagggcaccggcaactggcgcgcctgcccctacatcctcgcgaacgagtgctgcgagaggctggcctactatggcatgagcaccaacctggtgaactacatgaagacccggcttggccaggtgaactcttgcgccttcacaacgtcaccaactggcaagggacgtgctacatcacg

SEQ ID NO: 307810 - DNA, 364 bp, Zea mays
  unsure (1)..(364): unsure at all n locations
cctgcaggaccgaaccggcgggtcggcccacgcgacctcggattcgtgggcggacgcgggggcggacgcgtgggcggacgcttgggtcgcccccgtctacaccgccgaggtggcgcccacctcggcgcgcggcgatcgcagcttctttcgcgaagctgagatccgcttcggcatcctactcgggtacgtagtcaacttcgacttcgcgcgccatcactggctaccnagctggcgcgccatgttcctggtcggagccgtgcctgccgtcttgctgctcgtcgccgtcctcgccatgccggagtgcgcccgatggcacggcatgccgtgccaagtcgaccacactcaccgcgtgctgcagaagacc

SEQ ID NO: 307811 - DNA, 532 bp, Zea mays
ttttctttccacgcgtccggtttgctctctgattcgatcgatccaactagcctccaagcatggtgttcggccggagcaaatcaacttcgtcgacgacgccatccgcgccctcaaaggcggcggctgcgtgctccgagctgcgcaccgcgtaccacgactgcttcaaccggtggtacgcggagaaattcgctaaggggcagtggcagagggacgactgcgccgaccactggcacaagtaccgcgcctgcctcgaggaacatctggaagacaagcatctgaggcaaatcctactggatgcggaaacttctgcattttatgccatgcctgaggccaaccctgccacaggacaaggaactacaaaatgacaatccacctgattggttacccgcacggccgcaccatctcatctaggatcaccgactggctgaccaggacggcggcagcctgcgcatggacgcgcaaccatgcaatcatgctgatatctgcttcaccatatgccatatcggacttcattcattcaggatatatagaa

SEQ ID NO: 307812 - DNA, 491 bp, Zea mays
ttgatttttgggttttgggtcgtctccacgggctgggtttggggtcggtcggcggcggcggcggagctaggagtggaggcctgagatatactccaagcgggagtctgggcgctctctgcggtcggagaggcgcgggtgagatctacgagggccgctgcgtcgttctcgcagggccggcggaagacatgggtttcctctcggcgaagctgctgccgtcgtgcgagagcgtgtgcgtgtgctgccccgcgctgcgcccgagctcgcgccgccccgtcaagcgctacaagaagctgctcgccgagatattccccaagacgcccgatggtgctccgaatgagaggaaaatagtgaagttgtgcgagtatgctgcgaagaacccattgcgcataccaaagattgccaagtttctagagcagaggagtcacaaggagctgcgctctgcccatgtgaacttcgtcagaatcatcactgaagcttacagcaagctactc

SEQ ID NO: 307813 - DNA, 410 bp, Zea mays
tttaattccagacctgtatcaggtagtggtagtacagctatttacccaatccatacgtactgtaccatggttcattgtggtgcgtttcatcgaccagctcgccggagttgtcgccgtcgaagtcactggtggaccgaccgttgacttcgtccctgggaggaaggattcttcgatttgtccagaggaaggacgcttgccggatgctagaagaggtgcttcgcatctcagacaagtattctaccggatgggtttatcagacagggacattgtggcgctctccggcggccatactctggtacgcaagaacaccttttcttgttcatgcatattacagcatgatctcaatcagatcaacgtggtggtttggttccattttatgccaaatccgcaatacgaattttcaggggaga

SEQ ID NO: 307814 - DNA, 524 bp, Zea mays
ttcgattctttcccttacttctggagagaaaagcctccacggaccacggcttcagaagctgctttcatggagtcgtcgctggtggaggagcggcggcaaaacctgctggtgcgcgcgacggagcctgaggatcttgccaggtacacaggtgatgggtcagttgactttagaggttttcctattttaaagcataacacagggaactggagagcatgttcattgattcttggaactgaagtttgtgaacgtttggcctactatggaatctcaaaaagtttggtcacttacctttcaacaagactacatgaaggaaacgtttctgctgccaggaacttcacaacctggcaaggaacttgttatcttacaccacttattggagcaaccttagcagattcgtactggggaaagtacaggactattgctgttttctccactatttactttcttgtaagacacgaatgtgcatttacctcaagatacctgagttgtgccttttgtattaattttttaggaagttaatgtat

SEQ ID NO: 307815 - DNA, 439 bp, Zea mays
gaggggaacggaggaagttatatttatatgggtactaggggcaaacgcaagttacatgtgcaggcgagacgtgaacgggtgctcctcctaacctccttggtggacagacacgcatcacaggcatatcacaggcaaattacattcttgcacttcagccttcagtgggaagcgatgaagctcacgatggcgtcaatcagctccttcgtccgctctcctgtgctggggtccatgtcaacggcgaacttgttgaggtagaacgcatggctcatgccgcggttgaccaacacctccacctccttaccggcggcgcgcagggcgtcacagtactcgaggtttgtgtcgcggacgaggtccttctcgccgacggccaccatcatcggcgggagcggcacggactccaggggcggcgcctgcggacccatggggcacgagaacgggt

SEQ ID NO: 307816 - DNA, 497 bp, Zea mays
  unsure (1)..(497): unsure at all n locations
ttcttcttttctagagtccagatgcttggaacaaaattgttactgaattcaacaagaagcatgagtatgtcacattcaacaagattcaaattcaggagaaggagagggaattgaaaagggattacaagatgttgaaagaggctagaaagcaaagtggcgtttcctggaatgagaaacgatgcatgattgttgctgatccaccaatatgggaaaacatcataaaatcatttcctagggccaagaaatttcaaaagaagtctttccctctctttgatgctcttggggaactatatgatgggcacattgctcaagggacctagaacataacatctacacaactaccacatgaatggaacacaatttcaaatgaagaagaacaagtgaacaccacatgaatggatgaggaaggcattattcaacaacaaccacaagaagaggattcaagattggaacangatgaagatcctatgattgaaaggactgaacagaggtctact

SEQ ID NO: 307817 - DNA, 333 bp, Zea mays
ggataactcggttgcaattgcaaactgttcgatatgtacaagtgtttgaccctcaatactgcaccacaccaacattcacgtttgtatctatttctctccgataaagggagatacaacaaattgccaaaaaaagaacttattccactgttatctgaagcacggtggtgagcctgggtttcctatacctcctcagcagcagcgacgacgacaccacgctgacagacgagaacgccatgcacgcgccggccaaccaagggggcatctggaccccggtgaagggaaacaacgcgccagcagctacagggatggcgatcacgttgtaggccatggcaa

SEQ ID NO: 307818 - DNA, 309 bp, Zea mays
ttttttttttttttttttttttttttttttttttttttttttttttttttttttttttttttttttttttttttttggacaaagaacacaattattccttggggatggaacaatagtttacatcaggggccaaacggaaaaccagggggggctcacatgcatccggacccctaaggggcaccgggggggcccccctcacttgccggggacaaaattgggggggtaggcccaagccttgttgttgacggggccggcaatggggccaggggggttctcgggggggcccttcccggggacaatggcctggac

SEQ ID NO: 307819 - DNA, 417 bp, Zea mays
attattattattattattattattaagggaaggagcacgtgtaattgtcggttggtgacacgctgacactccaagctaagctagctagctatgcctcctccctctcatcacagtacactcacacgtagccgccgttgactcggatgacctgcccgttgatccagccggcggcgtcggtgcacaggaaccccaccacgggcgccacgtccgccggctcggcgagccttcccatggggcactcgcgcgcggcggtggccacgcgctccttcgacttgcccgcgtagaacatgggcgtggccacggggcccggcgccacggcggtgaccgtgatccccgtcccgcccagctccttggccagcacctttgtcatggcctccacggccgtcttgctggcagtgtacgcgccgtacccgggcc

SEQ ID NO: 307820 - DNA, 394 bp, Zea mays
aaaaaattctaaaatctttttattggatagtttacgtgagtattgttatgagccatcgcaacacacgagcaaccgactagtatataatggtagggcagattgtgcacagaattcctgatcttcacaacgttcctttggctatggatgttcacttgttctgctctatagacttttctgagttttctcgttgacgcaaagtagaaatgtacaagtttctctactccgaacgcattatatggcaaacgcgggccggggcctaccgggcacacaaaaaaatcacaaatcaaaagcatactatcagcgcaaacgcgggccgctgcctaccgtgcacacaaaaaatcacaaatcaaaagcatactatcagcatagaggcatggctcctggggttcttgat

SEQ ID NO: 307821 - DNA, 313 bp, Zea mays
aatggaattaattagcgtgttcggttaacaatccactgtatacaaaaaaatcacgaatcctatatatgcacacatatacatatgtacaactatcgcatcgtcaaagagtgctgcacttggccggagcgaacgacagcgtctcctcccggacgtcgtagaggatgtgcatgttctgctgctggtagttcccgaacgtgctcatcgcgccgtccgtctggttccgcatggccaggcaccacacgccggaccccgagatcatgtagctgtccgcggggagcaccatgtcggcgccgtcgaagtggagcgtcatgct

SEQ ID NO: 307822 - DNA, 339 bp, Zea mays
cgcccactcctccggctcttcttatccaccggcaccagtccaccacctcctgccaccgtgcggacccaaccaaccacaccgtagcgcaggaatggcgggcaacggcgccatcggggagagcgacccgatgaactggggcgcggaggcggcggagctggccgggagccacctggaccaggtgaaccgcatggaggcacaggcccggcagcccgtggacaagaccgagggctccaccctccgtgtgggccaggtggccgccgacaacttcgtcaaggacgcgtacggtgtaagcggcgagctggacgaggaggcccgcccacgggttaagggcagcagcga

SEQ ID NO: 307823 - DNA, 392 bp, Zea mays
tcctttgcgtgaagagagctaggtgggccgtagaaaaggcttcagttcagatctcatttcagatagcacaggaccaatctggtctgcagtgttcaactggaatataagatttcgctgcataggtcaaagactagcagatactgtcatggctcaggatgaagctgtggctacccaaaagactggaaatacaacatctccttctaaggattacccaactccttctccatatcctgattggtcaaccatgcaggcatattatggccctggtgtcttgccaccaacatattttactcctgcaatagctccaggtcatccaccgccatatatgtggggtcctcagcctataatgccaccctctttcgggacaccatatgctgcagtatacccacatg

SEQ ID NO: 307824 - DNA, 380 bp, Zea mays
cgcgcccgaacgaacgccgtcgcctgagcggcggcgtccttcggatcgccgggaggcgtcgagaacggggagctggccgagttctacgtcacgaatggggtctggtagtcttacaccagcggctgctacggctggcggaggctacaggaagaaattggcgagatctagtccgtatcagcgcgtgcgagctacctagtgaagaggttcacacataggtgccacgagaacaatttgctgtactaatggagtctaagggtggcagaaattgtatcccaagcccttccatgatgtatgaagctcccctagggtgcagcatcgacgacgtgcgagctgccccacgtccgaagaagttccaagctgctgcttactccaactgcgcg

SEQ ID NO: 307825 - DNA, 440 bp, Zea mays
ttttctcggacgcgtgggcggacgcgtgggcggacgcgtgggcgcgatccacacacggcaagcaacgcccagggctcgtgctcgccccgcgacccgcgaaagatctgtgctggttcgctcgctcgctcgcgccgagccgccgcgtgggggtgccgatgagctgcacggggcaggccggcggatggctgctcgactacgcgctggtggaggaggagatccagggctccgagttcatctacatggtcgacgacccggccgtctccagcgtgatactggggtttgatgctcccaggaaggaggacggcgtccaggacaaccccggcgccaagaagagatcccggccggagtccagcgcgccacccggcaccaaggcttgccgtgagaagctctcgcgagacaggctcaacgaaaggttcaacgagctctgcgccatcttggaa

SEQ ID NO: 307826 - DNA, 423 bp, Zea mays
ttgccagccccccagcgcagcttatacggggaagtggatgtccttaagagaaactttccgggactcgagcctgatggccgtgcttatgcaagtggcgatgctgaacgaccaggacataagtgacacatttactacgccactgctggccaagagcatcgaagggtcaaccttgataagtgcctgactgatcagcacacgaacaaagctgtaggcttctctaagactaatgctgatgtcaatacaacattgcgcaatgaaatgagcaacctctctcgtatctctgaaaacatccctcagaaggagatcatcgatactgacttcaaaccctgcggctactgcatgaatgcaatgcatcgcgtatgtgctctagacgatccatgtgacgcctgaggatgggtacaactacgccaatcatgacgttat

SEQ ID NO: 307827 - DNA, 406 bp, Zea mays
cagggctgtgagcataaccactgtgggcagccgttcagactgtgggtgggtgcccaggctgccaaactgtactgtgcaacctaccgggggaaggccaggctcaccgaggggtgctccttccgagaaggggcaataaggtcctgcttctgtaacgtgagaagagataaatcaggtgatatgcatcttgaccaggatgtgtactctgagaggatttcgtataaaatatatggctggatacagcgacctgacaatgcttgggtaaacctgcactacgtatgagcggggtgacagctaataatgagctgtttgtctttaggtgatgaagtgtgctttcatatgagctctctttggtggagtgggtaagggattcaccaaagaggttgtgaagaacaagaagtaccttgca

SEQ ID NO: 307828 - DNA, 388 bp, Zea mays
tgcgcacggcggctgcgctgcgagttcgtcgccggtggtgggaacggggcgctctccggagaggacgaccctcgcctcgtcgaccgccaaaaagttcttgatgccgctatgaatgacataaacaactcttttggaaaaggaagtgttacaagattaggcagtgctggtggtgcttttgttgagacattcccaagtggttgtctaacactagattttgctctgggtggcggtcttccaaaaggaagagtagtggaggtatatggtccagaaagcagtggaaagactaccctagctttgcatgcaattgctgaaatacagaagctcggaagaaatgccatgcttgtcgatgcagagcatgctttcgatccagcttattcaaaagctcttg

SEQ ID NO: 307829 - DNA, 503 bp, Zea mays
gggtcgacccacgctgcatggccagccactagcacccgacaggcctagacacatttattttgactggataacttaccttgataatgaagggccacaacgacattgggaacaagtgtatgacatacaaacagaaaaatgctaaggaaagggtcagaagtatcaccaagcaaaatgtatccattgaggtctgcacatagtagtggtagagttcttcgctctgccttagccaataataataaggacagagagcctctgaatgcggctggtgctacccaagcagctgtgaaaaaaagaagtggcaaccagctagatagccctaatagcactgtcaggctacttcgttctgcatcaaaaaataaggacgaggcacatagcgggcctctaaatgacaggatcattgataagccaactgcaaataaaagaaaacatgccattgccaatccctcacaggttggaagtcccagcagcaagtgccagggtgcttcgctctgcaataaaaaata

SEQ ID NO: 307830 - DNA, 339 bp, Zea mays
taccttccgaacgaggacgcgagggcggacgcgggggttttggagagcaggccgaaccttcctacgaagagtgacgagctcttctttgagagggctgagaacaaggaggactacaacaagttacacgaggcttcctccaagaaccttaagctcggtatccacaaggacttgcacaacaggaccaagaccgccgagtctctgagattccactgcaccaagagtggtgatgagcatgccagacttaaggactaccataccattacgaatgaggtacagaatgtcatatactaaactactggatgagagccataatggaactggagaaccccccccttcctt

SEQ ID NO: 307831 - DNA, 492 bp, Zea mays
  unsure (1)..(492): unsure at all n locations
tgttaaaagtcaaaatattctctctttcttatactgtttatatgaataaacatggcatcaaactgataccccagttccacttcaaaaaattcagtcttgtttcatgcatacacatgtatttttttatgctgcatattcataaacttgtacaattccttgaattacttggcagtacttttggtaacgatcttgccccaacaagcaatggtattgaggtgatattcagcataatcaatgtcctcagtggcctgatgctcttcacattgctgatcggaaacatacaggtatttctgcacgcggtcctggcaaggaagcgtaagatgcagctgcggttccgagacatggaatggtggatgagacggaggcagctgccgtctcggctgaggcagagagtgcgcaaatatgagcgcgaacgctgggccgtcgtcacggtagacgaggagatggagatgatcaaggatctgcctgaaggactgaggcnggacatcaagc

SEQ ID NO: 307832 - DNA, 521 bp, Zea mays
tgtgacgccaccgtcacctcgcgccgcccagaggaggacgcctgcttctcccccgacgccgacgacccccgccaccgtcttccgcgccaacgccgccgtcgccatcacctcgcgtcgcgccatacgcccaggtctccgccgacgctgtcacacgccaggagctcgagtcttcgtcggtccctttgccagatcttcatcgtgcccttcaccagcgacgagcacccaacagagaggagaggattcgacgaaatggaggcgttggcgttggcttctctgttctggagacgcagcgacagccaaactccaaaacggaaatgagacagcgcttggagctgcgttaacaggttctcccccccactcctctccgtctccgatcccgtccgcattgcttcgcgccggaccaaggaggaagggtcggcgtcgcaggcattgcagtctgctagccacgaggccatggacccgtgcccgttcgtgcgggtgctggtcggcaacctggcgctgaagatgccggcatcaggggg

SEQ ID NO: 307833 - DNA, 381 bp, Zea mays
gctggtttctggcagacctgcgctcggttccagttgagggcggacgacgcaacaccccgcctgtcatgccctgcctcacgctcgcacccgaggaggcccggagggagggaacctaaaccaagacgctaccggccaccccagaataggggattgctacggaaaggcacgcggcgcatcatcacaagcggcggaccacgacgaccacgcccacgcggccgagcctgcgtccccaatgtcggccaacggcgcgccggctccagaacccgccaccccgggggacgaccaggccggatcggccacacctgtgcaccaccagggggctactaccggctggtccagcccacaccccgcccgtggggccagaccacaccccgcgggcgt

SEQ ID NO: 307834 - DNA, 476 bp, Zea mays
tttttgctcaccaccaccaccaccaggacagtagctgacgacgacctcctcctgcagctcaagatcaactactacccaaggtgcccgcagccggagctggccgtcggcgtggaggcccacacggacgtcagcgccctgtccttcatcctccacaacggcgtgccggttctgcaggtgctccacggcacccgctgggtgacggcgcgccacgagccgggcaccatcatcgtccacgtgggggacgccctggagatcctcagcaacggccgctacaccagcgtcctccacagcggcctcgtcaaccgggaggccgtgcgcatctcctgggtcgtcttatgtgagccgtcaccggactgcgtgctgatgcacccgctgccggagctcgtcacggaaggccaccccgcatggttcacgccgcgcacattcatgcagcaccttgtgagcaccactcagccggtcaacgagaaggaagcaac

SEQ ID NO: 307835 - DNA, 521 bp, Zea mays
tttttgcccgagtcgccgtcctacgcacgctggcgggacttactcctcctcacccttcgtcgctacgctctggacgaccacgtcctctgcgaccccaccggcatggcgccgactgccacgtgggtgcgccttgacagcatcgtactcacctggatcgtggggacgatctccgttgacctccacagcctcctccggaaccttcctcacgctcgggcttttggcttgccatcgagggccagttcatgggcaacgccgaggcccgggctctccgcctcgacgctgcttttcgcaccttcgtccagggggacctcagtgtcagtgcgtactgccgcaagatgaagaccatggcggactctcttggcgatctgggttgccccgtggaggaccgcatcctagtcctcaacgtcctccgcggcctcggcgatcgctacacccacctccggtcgttgatcatgcgccagcgcccctttcctaccttcctccaggttcgcgacgacctcgccctggaggagatcactctg

SEQ ID NO: 307836 - DNA, 478 bp, Zea mays
gggaaagatggtccgcctgcaggtgctggtgcggaattggctgggtcgaacgaggtttgtgtacaacagctactacgggcggaagccgaagcgtctcctgtaccaccaggagcagcttcatcggcagtcgcagcactctcataggaactgtcagtacctgcaacagtgggtgcagcgagaccaggcctcacgccgtcgcgggggcagcgtccggaaacgctgtgtccaacacggcgtctcagctgggcaccctatgctcgagctcccaagactggagggatcatcttagtataccaggtctagatacacgctacaggacagaggatgttactgcaacagaaggcaatgagtatgaagattatttgttgaaacgtgaactgctcatgggaatctacgaacagggatttgaaagaccatatcctattcaagaagaaagcattgctattgctctgactgtaaacgatatgcttgcaagggc

SEQ ID NO: 307837 - DNA, 393 bp, Zea mays
ttgttacacatacgaagacaacatgggttgaagctcagggtggtgattttacaagcggagatggtatagatacattagctccaagcttattatttcgggtggctctttgtctggggtgcactttatacgctcactactggatactatttacaggatatggtggggagagcaatttatagtggaaaggcccgcagattaaaacttcaagctacggcacacccaggctggtgcccagttcatggcctattctggaccacccactaatgggtcacggtttattattacatggacggctctacctcatcttgctaagaaacatgtaatctttgtgaaggaggggaacgcaacaggtatggttaaataaatcgaggcggttgggggggaaaccggaaa

SEQ ID NO: 307838 - DNA, 251 bp, Zea mays
cggagcaccaacggttttcgttggccatgaagagggtggtctgcacactgaacaagagaggaggaggccgtacagtgtgatcctgctagacgaggtcaaaagggcccatgtcgacgcgtgcaacaccctgctccaggtcctccacgacaggccgctgactgaagggcaaggcaagacagagagactttagggacaccctagatcatcaagacatctaaccccagcgcccagcacctaatggctgggatggc

SEQ ID NO: 307839 - DNA, 477 bp, Zea mays
tatcgcccacgcgtccgcccacgcgtccggccaggggtattgcttggccaacctgtgtatccgttgatgacacaatttggcacttctcaccgcttgcatccgatgacgccgctctggaagaaaatgacatgggtaaaatcgatatgggctgacatattgatggctctattgctgtggtggcacatacacatgtgattacaaatgggcctgtcacatgaagggctggagatgtgctagctgctgccaacacagcagctgaagcctcagtgcggattgtgagacctgggtagaaaaatcaggatgtgactgaagcaatccagatagttgctgctgcttatgattgcaaaatcgtggaaggtgttctgagccatcaactgaaacattttgcgattgatggccacaaagttgggctcactgtatgcaatgctgatacaaaggttgatgatgctgaatttgaagaaaatgaatatatgcaat

SEQ ID NO: 307840 - DNA, 344 bp, Zea mays
tgggtcgccagggctcgcttcggacggccgggggaaggatcaatcgctcgggcatgatggcccggcaggagcaggccctagggtcgaccgagaccgtgcaccgcggcgcagggccggccggcccggacgccggctggccggccttataggaggcgagcgccagcgactgccggacttcctgcactgggggaacctcaagtacctgcccctgcggtaccactacctcatcagccacggcctgtacctggccaccatgcccgtgctaccgctggtgcgcggggccgtgccgggcagcctaaaccacgacgagctctggcacaaggagaggcgggaggccacctacg

SEQ ID NO: 307841 - DNA, 304 bp, Zea mays
cccggccgcaccccccccgagaccccgggacgacccacgctggttgcgcaccacacgcgagcgagggacccgggggggaagaagagagagaagacgcccccctaccacacggggcgcacgcaacccaaccgacgcgacagcagccagcaagcccgcaaaaaggagcccgccatggcgacaaagcgcagccccaaggagcagaaagacctgcaaaaagacccccccacaacacgcagcgcaggccctgcaggcgaggacatgcaccagtggcaagcaacaaacacgggacccccaagacaagccc

SEQ ID NO: 307842 - DNA, 364 bp, Zea mays
gaacgcctaccctggcggcggattcggtgactgcgaccaacagttggccgccaagggccatggcccggttctcgggattgatctcggaacgacgtactatggcgctggcacgtgacatcacgaccgcgtggagatcattgccaacgaccagggtaaccgcaccacgccctcgtacgtcgccttcaccgactgcgagcgcctgatcggagatgcggtcaagaaccaggtcgccatgaaccccatcaacaccggctttgatgccaagcgtctcatccgcaggaggttcagtgatgcgtctgaccagagtgatatcaagctgaggcccttcaaggtcatttctgggcctgctgagaagccaatgatt

SEQ ID NO: 307843 - DNA, 454 bp, Zea mays
tttttgactccccagccaacaaatcgaccttgctgggaacgagagggctatagagcctggggagggcagcgcaacacgcgccacggagcagcggcggcggcggcggcggcagagcagtccgccgggagcagaggccgcgcgcgcagcgcaggcagccatgggcgcgccggtgaacggcgccgtcgtcttgttcctcctgctgctggctggaacgggggcggtgaccgaggagacggctccgcaggaacccacattgcccgccgccggctccggctccggctccggcgccggcgccggcgcgccggtcggggtcaactccaactccgtgctggtcgcgctgctcgactcgcactacaccgagcttgcggagctggtggagaaggcgctgctcctgcagacgctggaggacgccgtcgggaagcacaacgtcaccatcttcgcgccgcggaacgag

SEQ ID NO: 307844 - DNA, 349 bp, Zea mays
tttctgcccacccgtccggccattggccagctggagcccaccataaaagctggccgtcactgatagtgtgcgtgacagagaggatgggtggcagtagaagggctgctctgatgctgcccctggtgcaggcggccgtgagcctggactcggagacccaggccgaccccagggacggtcaccgcgcggggtacacccaaacgccgactcctgccaccctgaccccgacgaccgagaagccccccaccacgaggcccaaaccagacaaggcgcccaaggagcacaaggcctccaaggagcactggcccaagcctgacaacccggccacggagaacacgccgacgttgcccac

SEQ ID NO: 307845 - DNA, 463 bp, Zea mays
tttctgcccacgcgtccgaaaacattggcctccttgggctgacaaaagttggaagtcggagggtgatccagatatcaactgggtttatgatattcttctccatatttggtaatttgttgttttttattcggttccctagagagaatttgcaactcttccgctcaaactgtgaggtccgttttttttttgcagggaaatttggggccttctttgcatcgatcccactgccgatctttgcagcaatttactgcatcttgttcggcattgtagctgctgtgggagtctcgttcatgcagtttgccaacatgaactcgatgaggaacatctatatcatcggactctcgttgttccttggcatttcggtccctcaatacttcaacggatacactttttcaactggcgggcacggacctgcccggacaaatgcttgattggtatttgaggaatcttcctttaaatctgt

SEQ ID NO: 307846 - DNA, 404 bp, Zea mays
ttctttccacgcgtccgacgactccaacgccggcagggatcgagagacggggaggtcttttcgctacggcttcgggacctaattctccgagaactccatgctggacgctatggagaacatgaacggcaaggagctcgacggccgtcacatcaccgataaccaggcccagtccagcggcggcagcggtggcaggggtggctacggcggcggtcgcggcagcggctgatatggtggcgggcgccgagacggcggatatggcggcggtggcggctacggcggtcgacgcgagggtggaggcggcggctactgaggcagtggcggctacggccgtagtcgcgagggtggcggtagcggctactgctgcagcggcagcagctggagggactgatgtgtggcccatcctg

SEQ ID NO: 307847 - DNA, 276 bp, Zea mays
ggatgtccaccggtcgtcttcactgacaaggacaaggctgctgcacatcttatagggtggtgccaagaaggttgatatctttgccccaagcaaagacgcacccatgtttgttgtcggtgtcaatgaggacatgcacacttaggatgttaacatcgtacgcaatgcctagctgcaccacaaactgccttgctccctttgattgggccattcctgtcaaacttatatactgttgagggactgatgacaacttgttcatgccattactgccatctcaaa

SEQ ID NO: 307848 - DNA, 254 bp, Zea mays
catcaatcaggccgttccaagtttgctgattagcaaactacgggcattacatgaaaataaatgtcccaacgctgaaatttaaacggaaatgcaacagacattgctcccaattgtgcgttctaccgaggctttccagacattcaagtccccctatatattgaacccatcactctagcaaatcccacaaacagaagttaaaaggtacccagctttgcctgggtagaattttttatgtggcaccaaaaaaggataca

SEQ ID NO: 307849 - DNA, 296 bp, Zea mays
cggtgcctcattgaggtgccctgggggccttttgtcacgcttgaaggtttctattcgaaagctgggccctgccatgatgcagcagatgcagcaccctttgcattgagtgcatggggactggagagagcattcacttgagatggaccgctgctcagggtgcaagggtgagaaggttcttcaagagaagaaggttcttgaggctcatgttgagaaggggatgcaacacaaccagaagatcacctttcctggtgaagcctgtgaagcgccctgtactgtcactggagacattgtattcg

SEQ ID NO: 307850 - DNA, 263 bp, Zea mays
cctctcagtactttggcctgaagggggactttacaccctttacccccattcaggatggggacttcaagaagttcttgaaggttcacgttgaggctgcccagatcgctccttggttgaaggagtactttgacggaaaattgccttctctcaggaagcttgtgtctattcctgaggtaaacaatgtgcctggtaaggtggttgccgttgacaacttccacgattacggtttcaaatctggtaaaaatgtccttatagaatcctat

SEQ ID NO: 307851 - DNA, 375 bp, Zea mays
tgtcgctcctcaaatacggatactgggggccttttttaagttgagcggactgtctggccactgaagttcgatcgaatccgagtagggctgatacagttcgttccggcgggaggcatggcgttcgaaaagcacttcaagtacgttatccttggcggcggcgtctcggcggggtacgcggcgcgggagttcgtcaagcagggagttatgcctggggagcttgcaatcatctccaaggaggctgtggctccttacgagcgttctgtcctaagcaaaggttacctttttcctacgaatgctgcaagacttccaggatttttatgtatgtgtgggaagtggtggcaagaatcttttgcctgagtggtactcagagtaagg

SEQ ID NO: 307852 - DNA, 203 bp, Zea mays
ccaactatggaagactctcactcggctttgtctagacttgacaatgacactgaatcctttggtgtttttgaaggacatggaggaaaagttgttgcctaaatctgtgcaaaatatctacacagagaagttatctataccgaaacctatgctgctggcgacctgggcgctgctgcccacagagcttacttaagaatggatgaaat

SEQ ID NO: 307853 - DNA, 267 bp, Zea mays
gtctggatgcctctggtcttgggggagtttttatgatggaatgcctgtttttccagctgatgactaggtacaacgagcgacgcgaagcatgcatgcagtggaacacaatccttgtgcctgcagccgtacgtattgttcaggaggcaattgaacgtgcacggggttactagtaggctcgggctaacgaggcggaattcgaggtcatttcatcttacgagggaacaaacgttgtggacattcgcaacaggagctgtctgtgccgggggt

SEQ ID NO: 307854 - DNA, 452 bp, Zea mays
gcggacgcgtgggcgaaactgtgccgtatgtgacgtgttttgcttggttttcttcatgccgctgctcatcttacttcggcagtgctactgatgctacttatggaattagctattgaaatctgcattcggaaccatctattagcaacatcaggttaccataccctttatgaatggtaccgaaaagtggaaagcgaacattttcctgatcccacaggacttcgcgctcgtctcgagcattggacctttggactttaccctgcatgtattaagtacctcatgtctgcattcgacatcccagaggttatggcagtaactagaagtacaatctgcaaaaaaggaatagagtcccttcccaggggaggtgccattatttattatgtctgtgttttcctgtacttctgggtcttgtcaacactgtcgtattcgcttgtgtttggagctacctttattta

SEQ ID NO: 307855 - DNA, 262 bp, Zea mays
cctggtgatcgcttagggggcactttttatgtgttagagaggggggaacccaagatgtgccagattatctgtatagcaaatattgatgatcaacaggcaatggagttcatgggaaaattcgaggatgagtttcgggtgaacatgattctagtcattctcccactagttgtcccttttgcaaggccagataggggcgttactgtttaccaggctggattttcatgctggtgtcaagggccaatacgtttggtaacaatgatta

SEQ ID NO: 307856 - DNA, 140 bp, Zea mays
ttattgaggcacgagacaggggactttttgtggtacttgtgggaactttctgttccaagtgattgaaaagagaaagctcacttggtctgtgggatcttttgagactgatagagggatgggttgaaagagacccggtcttt

SEQ ID NO: 307857 - DNA, 432 bp, Zea mays
gccgctcttcttcccctgctggggctgggttccaccattcccctgcagtctccatcacaggagcacgcgacgcgcgccacaggaaggaagggaataatcatggcggcggcgaacggggacgcgtgccgtagcgtcggcggggtgccgtgcccgacgaaccccatggtgacgccgttgctcaccgacctgtaccagttcaccatggcctacgcctactggaaggccggcatgcacctcgaccgcgcagtctttgatctctactttcggaaaaaatccatttggcggggagttcaccatctttggtggcctctaggaatgtataaggctcatagcttactttcaagttcacggaggaggaaatcaaattccttcgatctgtcatgcctgcatgtgaggatgacttctttgagtaccctccgttcgttcgactgt

SEQ ID NO: 307858 - DNA, 328 bp, Zea mays
aatcgcacattatagcagggtctattattcaattgccttctcaaggtgagaagctgcaagtacagagtgcagcataacaaacaaacacttcttcctcgaacggctccctatttcacagggtgcagcacaacttcgcgtcgatcgatgccaggcagatgcagaacgcttggtagccggtcagcgggtatctaaagtccattatgtacttggatttgccaaccctaccaagctgcaacaccgtctgcctcccattttcctccaaagtcatctgaaaattcttgaccgatgtttgcaccttgtaccccatccttcctgccctttctctgaa

SEQ ID NO: 307859 - DNA, 395 bp, Zea mays
ggaccggccggaatctggttgcccacccgtctgccagctagagccaaccagaagagcttgcggttactgttagtgtgtgtgagagagaggatgggtggcagcggcagggctgctctgctgctggccctggtggtggtggccgtgagcctggccgtggagatccaggccgacgccgggtacgggtacggcggcgggtacaccccgacgccgacgccgggcaccccgaccccgaagcccgagaagccccccaccaaggggccgaagccggacaagccgcccaaggagcacaagccgaccaaggagcacgggcccaagccggagaagccgtccaaggagcacaagccgacgccgaccacgtacaccccgagccccaaacacacgcagacgacgtacac

SEQ ID NO: 307860 - DNA, 384 bp, Zea mays
  unsure (1)..(384): unsure at all n locations
cgcctgcgacacgggccagggagagccaaccagaagagccngttgtcaacggagagctgcgcgtgtatcacacgaggacgggagaggcaagcggcatgggcangcgcatgcggccagaccctgagaggagggtggccagtgacgctctggcacgcgagcagagccaggccacacngccgggtgacggatacaggcggacgggtacacgccagacaccgacgccaggccaccccgaccccgaagcccgagaagcacaccaccaaggggccgaagccggacaagccgcccaaggagcacaagccgtgaaaggagcacgggacacagacacagaaaacagccaaggagcacacacagacacggnccacgaacacccaagagacacaa

SEQ ID NO: 307861 - DNA, 383 bp, Zea mays
tctcctccccctgtgaccatgtcctcctcgggttagggttcctcagggttttgtggaggggcgatggcggcggctgatgtggagtaccgttgcttcgtcggcgggcttgcctgggccaccagcaacgagtcgctggagaatgccttcgcctgctacggcgagatcctcgactccaaggtcatcaccgaccgggagacggggaggtctcgcggcttcggcttcgttaccttctcctccgagaactccatgctcgacgctatcgagaacatgaacgggaaagagctcgacggccgtaacatcaccgttaaccaagcccaatcccgtggctgtggccgtggccgcggtggctaccgccgcagtcgcggcggccgccgctattgtgg

SEQ ID NO: 307862 - DNA, 369 bp, Zea mays
  unsure (1)..(369): unsure at all n locations
tgtgcggtcggggaagtcgtgccggctgcggtggngcattcngctgtcgccgcaggtgtagcgccgccccttcacgcccgaggaggacgccgcgatcctggccgcgcacgcccggctgggcaaccggtgggccgccatcgcgcgccttctcccggggcgcaccgacaacgccgttaagaaccacgacagcgcccggagccacttccaggagctctccccctcgtcgtccccgtcgccgcagtctactccacccgccttccctccgcaggcggctccgtctcagtcgtcgtacgcgttcagcggcgagctggttgccgcgatgcaggagatgatccgcgccgaggtgcgcaagtacatgtccggcgcggg

SEQ ID NO: 307863 - DNA, 445 bp, Zea mays
acacccgccatgaaaagggggggctctcccagacacgcgaagggcctttttcgaatggcaggcaacacattcccgtcccaccttctgcgagcacagagagagtgggagagcaggcctccgaaatcaccgaccgcagagatacacttgcacgggtgtgcgggcgatcagatttttggggagcgtcttcgcgactgctcgcgtgatctgcttcgtcttcttcccggcgaccgttcgagggactgcactgcgtacaccttcctgcatcgacttcgtacggctacatcgaacaaacacacgagatgactcgtgtgaatggagccactgatgccttgagcatcggtccctccgctgggcatttttccgctggtggttttgctgctgcgttaaaaccaagtgaaccttttgatgggacattttacaagagatggcgtagtaagatgatact

SEQ ID NO: 307864 - DNA, 434 bp, Zea mays
  unsure (1)..(434): unsure at all n locations
ccggcaggactggaccggaaaacctgggttgacccacgcggcttggacgcgngggcncaccanncgccacgcggcgcagcgccacaacccctggccgcaggtgccggcgaacgaggccgaccaggcgctggcaaccgactgcgccgccttcgcgctcaagggcgtcttccacccgttcctctccggcggcgtcaccgtgcccgacgccaccatctccaccgcccaggcgttcttcaccgagttcatcatctcctacaacctcctatgcggggtcaccgccgtcgccaccgacacccgcgcagtgggtgaactcgccgggatcgcggagggagcggcacgaacgctgaacatcctcgacgccgggccgacgacgggcgggtccatgaacccggtgaggacgctggggccggcccgggcggcggggaactaccggc

SEQ ID NO: 307865 - DNA, 297 bp, Zea mays
tttcttttctagcgcgctgaccacccgattccaagggttctgtgagaccaaagaagcgcgacagctggccaagcccacgcagactgccatcaagtccacgggcgggaacgctaccagcaagtacgttttcaccaaggatacccatgagcatcccctcaccgctgacggcgggaagaagcctcatctgtaccgaccttaaactggcatcacacgtgagacactcaagaattaccagagctctgtgctgctgatcatgaagctgcccttccagaggctcgtcagggtggttgcacagga

SEQ ID NO: 307866 - DNA, 466 bp, Zea mays
tggtgtcgtctgctgtcctctccacgccaagggaccttcctaccccgacccaccctacatgctcacctagagatcttagcgggcaactccggagagcgccgacgagcccactgatccctcctggccgacgccggcaaccgaccgggggaggagaggaggggaggggagcgatggagaccgtcaactactccgggaagctgtgtagacgcggcatctcatgggagactgacgaagaccggctccgcgagtacttaggtcgctttggagaggtcactgacgccgtcatgatgcggtaccgcagcacaggccacgctcgagggttcgggatcgtggactttgctgacaccacggtcgacgagcacgtcaccatccaaaaacacatgatcgactgactagtggtagaggccaacaacgctgcttccagggatgaccacagtatcgtgagcaagagcatcacaagcagcat

SEQ ID NO: 307867 - DNA, 431 bp, Zea mays
ttgtttcgaatcggcgacgttgtcatcgtcgtggcggctcctcaggaaggccaagttcggctaacatgtcatccttggggtcatagactcaggcatctggccggaattcccgagcttagacgacagcgggtacggccctgtgccgaaacggcggaaaggcgtgtgccacactggccaggcgtgcaacgcgagcaactgcaaccggaaggtcatcggcgcgcggtggtacggcgccgacgtcagcgaggaggacctcaaggcctagtacaggtaggcgcgggacgccaacagccacgggacgcacacggactgtacgatcgtcggctcgccggtgcggagcgcgagccacgctggcagcggactagccgctggcatagcgcgcggaggggcaccgcgcgcgcagctggcgatatacaaggtctgccacgacg

SEQ ID NO: 307868 - DNA, 395 bp, Zea mays
tccacgcgtacgccgacagcgtaaaggatgggtgcttcattaagaatagcaagcgcaaggagcgcctaccgcacaccgaccagttacgcttactggaccacgctgcgatcaacgaggatccgtcagcgggggcaagcagcaccatcaagtgacggattgcgacgctaacagacgggtaggaggtgaagacagaggcacggactgctgacgatctgggagaccacgatcatgttctggacagtgtgcgctcagatgaccaccttcttggtgtcgcatgccaccaccatggaccgtcgcgtctggggcttgttacaaatccccacgagctccctcaccagcttgttcgacggattcatcctgctcaccagtgccgtgtactaccgtctcgtggtgcc

SEQ ID NO: 307869 - DNA, 408 bp, Zea mays
tgtagtgtcctcgaacaagatgtatgtagaggagtagcacatccggtggtgcaacgaccaggtgtactacctcgctgatgagcccggggtgcacttcatttggcagtccagccaagagtgatcggtactcaccatatcgcgcgcgttcgacgactattatatcaaggattgtggcgtcatctcgacaccggagaatgagatgaatgaacgtgagttatctgcgctgaaatctgtcattaagtgcattgaagagcacaaacttgagcagcagtaccctgtggatccacttcagaaaagggttttgcagctagagaaagcaaaggcagacaagaggatggctgttgaagcagcaaagccgcagtccaagaggcctcgtgccaatggatcggcctttgcaacccgtgctac

SEQ ID NO: 307870 - DNA, 471 bp, Zea mays
tggtaccctccacttggtgttgcgtctaaggggcgggatgcagatcttcgtgaagactctgactggcaagactatcacccttgaggtcgagtcttctgataccattgacaatgtcaaggccaagatccaggacaaggagggcatccctccggaccagcagcggctcatttttgccggcaagcagctggaggactggcgcacgcttgccgactacaacatttagaaggagagcaccctccacttggtgctgcgtctcatgggtggcatgcagatcttcgtgaagacacttactggcaagacgatcacccttgaggtggagtcctcggacaccatcgacaatgtcaaggccaagatccaggacaaggagggcattccaccggaccagcagcggctcatctttgctggcaagcagctggaggatggccgtacccttgcagattacaacatccagaaggagagcaccctccactt

SEQ ID NO: 307871 - DNA, 169 bp, Zea mays
gcagcaccaagaagcaccatgggggccttatgaaaaacttggggggaatcctcactggagtaacagcatccatcgatccacagtccatgctgtttgatgcatgggtctgctggagcctaggatggacacagcactaacaactgacacagagcgaccttgctatcaaaaa

SEQ ID NO: 307872 - DNA, 319 bp, Zea mays
gttatttatctccccctgcggatcgggtacgggtgcgggaggttctccggggttcggtttcgtgggtgagcggatcgagatagcggcgtcagatgttgagtaccgatgcttcgacggcggactcgcctgggccacggacgaccactccctacacaacgcctatagcacctacggcgaggtactcgagtacaagattatactcgatcgggagacgcagaggtcccgtggcttcggcttcgacaccttctccacggaggaggcgatgcggaacgccatctagggcatgaacggcaaagagctggacggacgtaacatcacc

SEQ ID NO: 307873 - DNA, 394 bp, Zea mays
atcgatgacaccaccgggacatgcagggcctccgagggtttttattggagatcggggctatcggccagacccgacaccgcaacctggatcagctacatggctggagacgtcaacgcggcgaccttctgctcgtgtacgactacatagggaacggaaacctggaccggcacctcttgtgacaccagctcaacagcgtggagcctgacctgatcagtccgctaccacatcctgcgagacgagaactccgctctgctgtacctgcactagggatgggagagcgttgtgctccaccgcgacgtcaaggtcagcaacgtgctcctggacgccgacatgtcggagcggctcggcgacttcggtctctgcaagctacacaagcgcggtaccaaaccaagca

SEQ ID NO: 307874 - DNA, 434 bp, Zea mays
tggtataaatgatgctgcttggggtcatatgggtggttttggctgggacgtccagaatcatttccgggatctgcatcgactccaaggactacaacagcagattctccccgcgcaccaaagaagaggtccaagaatcgatcaatgcagagcatgccattgctcacgcgcgcaagcatctactggaggccatcctgcaccattcaccgacgagaaatctgaacactagataccatcaccatgaaggctgccgagagggatatgagtcatttgttccgcatgaaggcatggagcaactgcaccggtttatatttgtaatggctgtgactcatgtgacttatagctgactgacgatgttactagcaatactcaagatccatcaatggagaaaatgggaggatgaagccttcaagggatagtaatgatcattttctcag

SEQ ID NO: 307875 - DNA, 230 bp, Zea mays
tttgtttcggacgcgtgggcggacgcgtgggcggacgcgtggggcggggttgttgtcgcttgtggccagccgccagcacaaggcgatcgagagtggtgaccaccagtaaactgcaaagtgcaaaccaaacaccgcccacgagaaagcggaggagggagcaatggcggagccgagccagcagcagcagctgcggtcgttcgtggaggtgccggcgggcttccactttccca

SEQ ID NO: 307876 - DNA, 492 bp, Zea mays
  unsure (1)..(492): unsure at all n locations
tttgcttttagtaccttcaaggttggtctgagttttttaattaatatattcattattcgcttgcctctcaatgcagtttgtagtttattcatatgcatcatggtagaaaataacgagacttttttgtatattgctgtgggcatctggcatgatgtttacttcaccttttatttttacttccttttgaaggctggaatcgagacagcaaagctctttctgaataaaggagacacggtcatttatactgctggccgggatcgcctagtccaaaaggcaattgttgctgaaagtggacctatgattgctactcccctcatgttgctggtgaataataggacagcaagcgccagtgaaatagttgcttcagcacttcatgacaattgcaaagctgttcttgttggcgaaaggactnttgggcaggttcgaaccacccataagaggatactgtgacgttattctttcctgtgatcaacagatatattatgccctttt

SEQ ID NO: 307877 - DNA, 402 bp, Zea mays
tttattttctgccgggaatattctagtctcttccaattcacggatgaagtgcttcgccaaagtatactgccaagagagtcaccaagagatattgcatctgcgagctctgcatgcaggctactgactgattcgacaagaagatgaagatctctggagaatggattgccagaacgctcgtggtagtgagaccactctagctcttgagacagatcctgccgcaagatggctggggtggggtcggctggcaagagaactgacaaccctggaagctgttgcctacaggaaattgacaggtggtggtgctgtggaaccatatccatgcaatttcagagcctgtgctagaaggaatcatcgtgttctctatcgtgggcaaggagtcaacatgcacccgatgaatgacac

SEQ ID NO: 307878 - DNA, 483 bp, Zea mays
cccgcctgcacgtaccggtaccggaatgggctgggccgacgcactcttgctgccgagacccacggtgcgccgcaaacgcaggaaagaaacgaagcgagcggatccaccggcgcgtcctcggctcctggcgtgcgtgcttacccaggagaatattcgagcacggaagccgaataacctgcgagcatcccatccgcgctcgcctctactatactcgacccgatctagacgatcgatggccgcgacggcggcagaggagatggataggatggtggaggcggagtgggaggaggtggatagctacagcaaaaaaatgcgagtacaatatgcaaaaacaaaatcagactgtattgcaaaagaagatggcacttatgcacctaaggagaaaaggaagaagcaagaggagaaagctgctgagaaaaaacgacgaacagaagaggcacaacaggctggcctcaatgctgctgctgcccaaagaatggaact

SEQ ID NO: 307879 - DNA, 449 bp, Zea mays
ttctcttcacgcgtccgcaaatacaacagacacgcttcctaaatgtcgtttaccggtcagccactgctttaggaactcgcctgcagtctttttctggtgcgagagagagggttgcaggtgctggagcatttctacgtcctgtttcaaacaaaacccaggttgtgatgaaacaagcacagaatgtcgcacaggctgttgctagaagtcggtctgcattttcctcatggtcatgcatgggtgcacgtcgtcgaggtgtaggtgtagttactgcatgttctaaagatgatatgagagtggaaacccatgtaacatcaacagttgagtcaaagtctgtccttgtagaacattgtggcgccaagaccatagaagaactgcagtatactgcagctagtgtttctgttcatgatgcagcagaggaagaagaggctctcttgagtgaacatgaaacc

SEQ ID NO: 307880 - DNA, 315 bp, Zea mays
catatgtcttaagggtgagcattcctttttttttttggttggtacaggttccctatttccagtcaaatctaacaatttaaccttttcatgtgcaatgcagtattgtgagctaccgcatcagatcatctaatggcgacttataagctgggtgtggaggttgtaagtgctcatgacctgatgcccaaggaagggcaaggttctgcaagcgcttgcgtggagctcacctttgatgggcagcgcttccgaactgttgtcaaggagaaggacctgaacccagtctggaatgagcgcttctacttcaatatatcagatcct

SEQ ID NO: 307881 - DNA, 412 bp, Zea mays
  unsure (1)..(412): unsure at all n locations
tttcacgcgcccggttttagtttgcccagcaccacagaaaatcattgggggaaccatttattgcaacaatcgtggggacaaccttcaggaagctctgaccatttattagagatcgctggtcatgggggagattaatggagacaattgttgctccagcattcacaactacaagtgtagcttgaggctcaaagaagaaagcccaactnttatgaagttttccaatacagatatcgaaatgggccaaataagcgctaagcatgggatgaaggccatatgacctttccgaacagttatgaactagcaagttatgatttaaaggcaaaggccgcacgagaatgggaatctatgatgggtcaaattttgatgggtcccagggcgcagatatataggtcatggaacatttttttcaaaa

SEQ ID NO: 307882 - DNA, 505 bp, Zea mays
cctttgcgttcggtgagacagtatctagacaataagttgagaacttgctctcatgaatcctgcaaatttactggaacctatgaacaactgcgtgaacatgctaggactgcacacgttcttacaaagcctgctcatgtagatctgtccaggaaaagagcttgggatcgccttgagcgtgagcaggaggtcggtgatgttattagtgcaatcaggtcccaggtacctggggcaataatagttggtgactatgttattgagactagagatgacatgtccccagacatagactctggcgacgatgaaagtagtgaatggtggtcagaccaagttgaatcaccagatgctagacttgatcccccaagggtttggccacatgaagccctagggtcacctagcatttggtcagatgaaaggcgtaatttgggaaggataccacagaacaacagagtaccacccaggttttcattaggcagtaggcgacccctgcattcaggttgcagggggg

SEQ ID NO: 307883 - DNA, 437 bp, Zea mays
ttccctctcgtccggggaaactgactttccctcagggcacttcccgaagtgttaaaagaatgcctctttctatagggggaggagctggtgcaaagaatgctattctcatgaatatgccaaatgctgctctttcaatgtggagatattttgttggagatctcgtttctgaagtttctaagatgacttctccctacattaaatgcacagtctctttcttcatagcatttggaaatttggctgatgacaccatcaattttgaggctgttccccacaagctcgtgcagtttggagagattcaggaaaaagatgtattgaaattttcgcacgaggaatttcttacagcttggacaacttaggtgcgttctgcaacaactatgttggctgatgggagtccatatttgaatgctatggcccatgatagttcagtgtctacaata

SEQ ID NO: 307884 - DNA, 367 bp, Zea mays
ggcctaaacattttctcaaatatcagtatttaatctattttaaatatttaatggggcgcctcgccttacgttttaccacttaaaaggcaaaagggggtcagtcgccttacctcatcttaccactttaacaactatggctcaaacgatgggcattgctaaaaggcaccaaatgagactctctttctgaaggggttggctatcactagggtgtatgctacagcaaaggccaaaatattctctcattgatttctactaccatactcgaaacctctatgagccatctcataacctgtatgtgttgaacctacatgaccattgagatctcctatgaaaagcttctcattggtgggtactggtctaaccatgc

SEQ ID NO: 307885 - DNA, 346 bp, Zea mays
gcgctttctgttaatcggagcgagcactctagacaaagaatgagttttctaggaggatctgttggagaaccttagaagatacaaacatatcggaggtacactttagctagaagcaatgcaattgctgatacagggaggatgtatcctgctgaatgtggcgctacacagggagaaacttatgatatgaatgaagaaaatgaggcttttgtagagttccaataaggaagctcactctgacgttcacgggcaccaaaatggtcaacacctgaccagacgcacagaagaagggttattggagatgacaatcatgatggaagcgatcctttgaaggatagtgcatattata

SEQ ID NO: 307886 - DNA, 258 bp, Zea mays
aaaaaaccaaccctttgggggaccattcctcacagggaaacaggggggacaaaaaaactgggggggatgatgctcttttagcccataaaaaaagctcaacgggggcccccccggggagaagcaaaaaaaaaaaacttttactttttccactaaacacaaggaagttgcctaagtttagtcgtccgaattgaagaactaaacttagacataaaagttagccctgttggggggccttaaacaggaaaccaaaccgccccg

SEQ ID NO: 307887 - DNA, 350 bp, Zea mays
ggacgtttacttgcgcggcggaaggcggcacgcggggcggtccatactgagccagggccgggccaccaagtcgaaccactcggggtcgcgctcgaacccgccctgccgcgccgtgcggtacccgctgacggccaggaaccggtcgccggccacggtggccatgccgtcgcactcgtcgcgctcctccgacatgtccggcagcgggtcccaggcgtcggcctccgcgtcgtaggcctcgggcgtcttgagcgcgttcttgtgcttgtactggaccccacggcaaaaagaaacacgccgatgagcccttctcccaggaagtcgtcgaaccattaccaacaagggcaccaatc

SEQ ID NO: 307888 - DNA, 386 bp, Zea mays
ggctagctgtcaacacaacttgtacttgcagagagggggacatctccgccggccatcatacagtcgcccctcaatccagcatatttacacccgaatacatgacggggacgtagtatacctcgttgatgtacacactcccattagttctcactgcggagattaaatttgagcggaatatgcgccgtatgcatattaccggcttattggacgccggcagatacaaattctggactaaacactggaaaaatcttgctctgacagacgaggaaaagatggcagtgattagaaatagaggcattcctgctgaccatcttgccaagcgagctccatgaatttgaaaaacatgttgatcaagaaagccccaaggatcaaattcctgcctgctg

SEQ ID NO: 307889 - DNA, 465 bp, Zea mays
tggttatgttgctaatgatgttgaaacagagcagatagtctttgaagaagaggctggttcctggaagggaagaatgagtgccgtagtacagatgcgaggatcaatccctctcttttggtcacaagaggcatctcgacttagtcctaagcctgatatttttgtgcagagatatgatcccacatatgaagcaacaaaattacattttgatgatctcgcccggcgatatggacatcctatcataatacttaatttgataaagactgttgaaaaaaggccacgtgaaatgatgctcaggcgtgaatattgtagagctgttgaatatcttaatcaaaatgtcccagaggagaagaagttgagattcatccactgggaatttcataaatttgctaaaagcaaatctgcaaatgtactgggtgttttaggaaaagttgccggtgaagcactggacctcactgggttttacta

SEQ ID NO: 307890 - DNA, 404 bp, Zea mays
tgggtatccatcgcgatatcatcagaggcactggagggactgttaccccaatgcaggatgttcatgttacaattgattggtttatttcctctcaggaacgtgttcccaggacctattgtgctttaaaaccacaaaatccttttgtgataaataggtggatggggaaactgactttcccccacggcactttccgaagtgttaaaagaatgcctccttctatacggggaggagcctgtgcaaagaacgctatactcatgaatatgccaaacgctgttctttccatgaggagatacttatgctggagacctcgtctccgacgtacctaagatgacttcttcctacatcaaatgtacagtctctctctccatagcactccgaaaattcgctgcttgaccccattaatt

SEQ ID NO: 307891 - DNA, 390 bp, Zea mays
ttccattcgttcgcccacgcgtccgcccacgcgtccgcccacgcgtccgcccacgcgtccgcaaaaatggaatttcaaagaaggcgatgttgctattctatcgtttccacggcctggttcagctgcacaatcaggccgatctagtaggagagctatgggttcaaatgaggatgctgtatcagaatgtggccggcttgttggtactgttaggcgccacatgcctattgatacacgtgatcctattggagctattatccatttttatcttggtgattcatttgattctaacagtgaggctaatgttctgaataaactccaacctcggagtacctggtatctaactggacttggttctcttgcaacaacacaacgagaatatgttgctttaca

SEQ ID NO: 307892 - DNA, 155 bp, Zea mays
ggtaaaaactattagcgacgggcgcacactacactgtggggaaacataacaataagaaaaaagagagagagaaaagaaactgcctagaaagacggaaacccaaccataccatcatatggcaggatccggcggtatagagctttacaggtaggaaa

SEQ ID NO: 307893 - DNA, 345 bp, Zea mays
ttctgcttttcctccgcggggcggccaactactacccatcgccaaaatctttaccctgatccggtcgaggagcacatactattggaatgccggccacttctagtctggcaagccatgagttccagaaacacctcaaggatcttgcgaagaaccccctggatgggttctccgctgggcttgtagaccatggcaacgttttagagtgggatgtcaccatgatatggccggcctacaccctatatgaaggaagctacttcaatgcaataacgaccttaccccagaactattccaacagctcgacatcactaagaaggacgtttgggatgtggcatgccaatgtttatt

SEQ ID NO: 307894 - DNA, 534 bp, Zea mays
  unsure (1)..(534): unsure at all n locations
ccctctctttcgcccacgcgtccgggcaactatagctagggttctccttctccccctccctcccgcttgctcttggacgacggtgcttcctcttctttaccagctggtcaaagtaaccacgcgtgctgcttcatctctcccttccttcctgccgtgtggttgttggcagccgcagcggcggcgcccgcgggtggaggagcaggagcaggagcggcggcgccatggtcgggaccgggaagagggagcggatagcgatacggaggatcgacaacctggcggcaaggcaggtgaccttctccaagaggcggcggggcctgttcaagaaggccgaggagctctccatcctctgcgacgccgaggtcggccttgtcgtcttctccgccaccggcaaactcttccacttcgccagctccagcatgaagcaggtaatcgatcggtacgactctcattcaagactctccagaagtccgaaccgcagtcgtctcaactgcagtcacatatggatgacngcacttgtgcaaggctaaaggagga

SEQ ID NO: 307895 - DNA, 379 bp, Zea mays
ccggcgcggacttttgctggggccttgcatattttttattgggtgttccgtacaacgagctaacttcactccagtccttgtctagaacagaggggtagtgcgcgcatgttagatacgtggggtggtacatggggggagaccccttgaaacacattgtgacaggcgtcttactgttcgtttacacttgatatgcacttggctgcatgtactacgttgtccatgctgctgtgcaagatatgggaaggcaaaccgctacagacaacgacgatactggctataactgggattacctgacttgaacggagaaggactttgccagcactagccacgaagatgtttaacccattgagctcgctaacgaggtgagtaaggcgctcaa

SEQ ID NO: 307896 - DNA, 445 bp, Zea mays
ccctcgcgtccgcccacgcgtccgcggacgcgtgggtttgaagaaatgaagagagcaagggaagagtggctgaagaaagctacagatgcagagtcaaagataaatgaactgaccaacacagggctagttttcaagaaaagggggtgatatggaagcagaaaatcaactacttcggcagcaggcactgttgcgtactcctgttagaacaatacctgaaaacgcatctccaaaatctaatttgactaatggcagtgcacacattgatgaacaaaagacacctcatggaactcctgctcccaaagattatgggagctttggacagcctagagcatccttttttgaaaggcatcatgagagtgttgatgcacttataaactgggttagtgaaaatattggctttagtgaaggaaagccggttgctgcaataaccatatataagtgtctt

SEQ ID NO: 307897 - DNA, 466 bp, Zea mays
acacacacaaccaggcaatcaagatgggagcttcttaaagaactactcatacttgctgatctgggggagaacccaaaggggcaagactatggccgtcgcagcggagtaactacgcaccattgacaacgtttaggggaagatccaggacaaggagggcttccccccataccactggcggatcatctttgctggcaaacagctggaggacgggcgcacgcttgctgactacaacatccagaaggagagcaccctgcacctcgtgctccgcctaaagggaggcatgcaaatctcagtgaaaaccctgaccggcaagactatcaccctcgaggtggagtactgtgacaccattgacaaggtcaaggccaagacacatgacaaggagggcatccctccagaccagcagcggctcatctaagctgggatgcagctagaggacggtctcacgcttgccgactacaacatccag

SEQ ID NO: 307898 - DNA, 474 bp, Zea mays
ttccttctcgtccggctgcggctgcggctcaagctgcaagtgcggcaagaagtaccctgacctggaggagacgagcaccgccgcgcagcccaccgtcgtcctcggggtggccccggagaagaaggccgcgcccgagttcgtcgaggccgcggcggagtccggcgaggccgcccacggctgcaggtgcggtagcggctgcaagtgctacccctgcaactgctgatcacatcgatcgacgaccatggatatgattattatctatctagcttgtggtggtggttgaacaataataagcgaggccgagctggctgccatacataggtattgtgtggtgtgtgtgtgagagagagagaaacagagttcttcagtttgctatctctctctgcatgtttggcgtcagtctttgtgctcatgtacgtgtgtctacatgcatgttggttgatccgattgcgtctgctgtaaccatatattaat

SEQ ID NO: 307899 - DNA, 476 bp, Zea mays
ccgggccttgatttccgggttgatcacgcgggttcactctcgggatgctgaacgcgattgcgtggggggttctgattcccaccggcgccatcattgcgcgccacctgcgcgtgttcgagtccgcggacccagcatggttttacctccacaatgcctgccagtgctccggctacgtcctcagaggggtccgctggggcccggggctgaagctggggggggagtccgccggcgttacctaccagccccaccgcagcatcggcatcgccatcttctgcctggccaccctccaggtgctggcgctgctgctcaggcccgacaagaagaacaaatacaggctctactggaacatctaccataactccgtcggctacgccgttatcgtcctcagcgccgttaacatcttcaaggggctccacattctcgagccgggcagtggctacaagaccgcctacattgttattctggccacgcttgcc

SEQ ID NO: 307900 - DNA, 500 bp, Zea mays
gccctcttgtccggctagtgtcatccagcggagccagcccaccacgtgctggcaccgggcggagagaaccaaccacaccggagaggagcaatggggggcaacggctccatcgtggagagcgacccgttgaactggggcgcggcggcggcggagctggccgggagccacctggaccaggtgaagcgcatggtggcgcaggcccggcagcccagggtcaagagcgagggctccaccctccgcgtcggccaggtggccgccgtggcctccgccaaggacgcgtgcggcgtcgccgccgagctcgacgaggaggcccgcccccgcgtaaaggccagcagcgagtggatgctcgactgcatcgcccacggcggccacatctacggcgtcaccacctgctgttgcggcaccttccaccgccgcaccaaggacgggcccgggctccatgtcgagctgttatgcatctcaacgccgtagtctctgcaccggagtgactgcacacgctg

SEQ ID NO: 307901 - DNA, 345 bp, Zea mays
ttctttgtgcgcttcgcttataaaacgctagcgtactcaagctccagacgcaatcgaccgcgctagaccgggagtagtctacagcgcgccactgaatcctcagatcacggctagccgctatcacgccactctgatgactaccggcgagcagagtaacattgtccttcagacctgggcaaggagaagactcacatcagcctcgggggcattggacatgctgactctggcacgtcgtccaccactggccaccggagctacaagctccgacggattgaccagcatgggatcgagaggctccaaaaagaagccgctgatattaacacgcggtcattcaactatggctgg

SEQ ID NO: 307902 - DNA, 443 bp, Zea mays
ggatctgcacccacgccgcctttctttgcgctcacgccggggttagagcctgcggcctgacgttgacaagcttctgcgctccccggcgccgggctcgaatagggggtcgccaaaaagacggatggcggttgcagggagctgcatctggtgaggcattttctggctctcttgccacaggaacaaagcgaggataggatgatacggttaatagaaaaagatatctacactgttatttccctatggatttacctggactgaagccagctccgactatatggcattcattcaacagactggagctgaacctcaatactgaatgcaaggctactctggaatcaaaccgcgcaactgtgatggagttgggtattactccaactgagacatctgggataggaaggcaacttcttgtggagcgaagatcattgaacctgacaacagagaag

SEQ ID NO: 307903 - DNA, 411 bp, Zea mays
gcacgggcccggactgactgggtggactcactgcagtgcgcccttgcttatcgaccacgcttacgtggacgcatgggtgaggcttcccaaggacgtttagggtctcgactcctgcaagttcacaacggatcgcggagtggtggacgcgtgccacgccggcagcgtggagcactgcctgaaagggcgggagcaccacgaggcgggcgccctacaggtggaccggatcgacctcgagcgggaggcggggcttaagcacggactcacacctgctggagcgagcaggcgacagatcagcagaccgggacagacagcactcgcggacccgcccagagataacgcgtgaagtattctttgtcgcatgactattgcgacacgtgggttggtgtgctaccgtgtactactactaccagc

SEQ ID NO: 307904 - DNA, 426 bp, Zea mays
tttctttgtgttcacgccgtcgctagcgcctgcggcctgcctcggtgaagcttctgccctccccggcgccgggctcgggtcgtcgtcggccaggaagatggctggcggctccagggtactgcatctggacaggccttttctggctttcttgccagaggtgcacagcgcggataggaagataccgttcagagaaaaagttatctacactgttatttacctatcaatttccctggcctgcagccagctcccactgtatggcattgatctaacaactggagctgatcccttctactggatgcgtggtaaacacaacctgaccacagcggtgtaatgcacgttagcattactccaattgtgacatccgggatggcaatgcaacttcttgttggatcgaagatcattgaagtcgacaacagtgtgagagag

SEQ ID NO: 307905 - DNA, 540 bp, Zea mays
ggccatggagccaaactgtcatttggttgccaagagggtcagagatcttctccctgtaaagttgagtgcaaatttagggaagggtgaatgccaagagatttctactagcgatgtcaagagtgggactactaaaggagttgcaaccgaacacagggttgaagatactgatgcttcccctggaaatgaagagaatggcgagtacccagaatttttcacagcactgagggcttcattcttgcaggcgttttatgtcatggacagggatctgaaggcacatagaaatattgattgtgaattcagtggtacaacagcagtcacagtaatcaagcagggacaaaatcttataattggcaacttgggagattctagagctgtcttgggcacaagaggtgaacataatcagctagttgctcttcagctgacagtggacctcaaacctagtatcccgaatactacccaaaataaagaaaaatgaatcatttacaggtgaagcagaacgaattaggcaacaaagtggcagaagtttttctttttcagatg

SEQ ID NO: 307906 - DNA, 375 bp, Zea mays
ggctggcttttactacgccttttatccaaggtccggctcgggttggggttgctgaggggctaggggaggggctatggcggcggctgatgtggagtaccgctgcttcgcctgcgggctcgcctgggccaccagcaacaaggcgttggagaatgactgcgactcctacggctagatcctcgactccaaggtcatgaccgaccggtagacggggtggtgttgcggctcctgcttctttacctactccttggagaactccatgctggacactatcgagaacatgatcggcaaggagctcagcagccgtaacatcaccgataaccaggcccagtgccgtggcggtggcggctgcggcggtggctactgcggcggtcgctg

SEQ ID NO: 307907 - DNA, 320 bp, Zea mays
gtgggacagcacacggtaccagggggcaaattgcattatatttgaggtcaacaccaaaacatttttacaacattttgagcgtcaggtactacaccgtaggagatgagcaggcatgcaggtgtgcaatccttcagcagatgctccccagcgacactggaaaaggctgctaattacaccagtaaaccaatcaggggggctccgactatctaaatcccggaccacaaataatcattagggcttgttcggttattttcaatccatatggattgaaggggattgatacggattgggagggattttgacttgctagggattgaaac

SEQ ID NO: 307908 - DNA, 462 bp, Zea mays
  unsure (1)..(462): unsure at all n locations
cagttactgagagtgtgtgtgagagagaggatgggtggcagcggcagggctgctctgctgctggccctggtggtggtggccgcgagcctggccgnggagatccaggccgacgccgggtacggttacggcggcgggtacaccccgacgccgacgccggccaccccgaccccgaagcccgagaagccccccaccaaggggccgaagccggacaagccgcccaaggagcacaagccgcccaaggagcacgggcccaagccggagaagccgcccaaggagcacaagccgacgccgcccacgtacaccccgagccccaaacccacgctcgcgacgtacacttccaccccgacgcctcccaagccgacgccacccacatacacttccgcccctacgccccacatacccacaccaaaacccactcccactcctccgacgtacaccccgacccccaagcctgcgacacct

SEQ ID NO: 307909 - DNA, 308 bp, Zea mays
ccggccggaattccggtgtgaccttcagcgcccgcgagtagtccccctgggaccgagggaaccatgggtttggttttttgacccagaagcgctaggctgcccgaagaactagaacgtagagagacgggcattggagaagggactgcgcgcgttggaacggccgaggctgagcacatagctatgcggtcctggacaagaactataatgggtgcttcgaacactgttcacgagggacgaatcaatcaggggaagctgttttgggatacacatgatccagataaaccaccgactgtgcgactccagactgg

SEQ ID NO: 307910 - DNA, 346 bp, Zea mays
ggcataggaggcgcacgccgcactccccgccaccgtgggcatttatgtccagtcgccccctgccgtcacgatagccggggcgatagcgacagctgaccttggatgatttaactcatcgacgaagaggggggagccatcaaaaccctatttagaggggaaggtagagatgtacttctaggatgtcactccctacgacgatagtcacatcggccatacgcgtgaatacttaaccttcgaagggatctacaggcaccttcaaggatgagagtatgaagtagactctgtccaggacgagacggggcttgactgacaagattatcaagcgagccaatgcacgcggtgaaac

SEQ ID NO: 307911 - DNA, 403 bp, Zea mays
gtctcttctcactgcgccccttgctcggaatcggcttgcagcgtccgggtgaatccatgcgcttcactcatgggaggctgcgcgtcctgctgctgattggctggaccggcgccaccgacgcggctgcgcgcacacctgccgtgacagccatggagccgctcatcgccaacaggtgccgcggcggccgcaagctggggagcggcatcctgggggagatctacgtaggtaccaacgtgcagaccaacggggaggtcgcaatgaaactggaaaacggtacgacgaagcatccgcaagtgctggatgagtcaagctcatacagaatacttcagggaggaactgggattccaaatgctaaggggctcggcgcagagggtgaccacaatgtgtcgagcatggacttact

SEQ ID NO: 307912 - DNA, 470 bp, Zea mays
cgtcgcgtgggcggacgcgtgggctccatctccatataagaacgagggcgtcacgctctagcgcagctcgcagcaggaacgaacgatactgatctagtgctcgcggtcatgtggaggctgaaggttagtgaaggtggcgggccgtggctgcggacggagaacggcttcctcggcaggcaggtgtgggagttcgacgccgacgccggcacgccggaggagcgcgccgaggtggagaggcttcgccaggagttcacccgccaccgcttccagaggaaagagtcccaggacctcctactgcgcatgcagattgaaagcctcttcgcaaaacccctcaacaaggagcagatggaggcaattatggagctggcaaatcaaggcaaggggaagaaaggaagcaggtccaggggcagcaaggtgtcgccactcaaagcccccatcatcgaggctgctccagaaatttgagctgagcg

SEQ ID NO: 307913 - DNA, 478 bp, Zea mays
  unsure (1)..(478): unsure at all n locations
gggcccggaattccgggtcggccctcgccgccggcgcttcggagcggactaccacgagaccctcaggcgtgaccagatgatagtcaccgttcgagtagtccttgccctctcttgggactgggcgatccattagctagaggtcaagaacgcctcgctgcatgacactttaaaggggtgtgcatactgaatccagcctaccggctctgacgacgtgagatgtgcgagtctaacttgcaggctgaacagtaccctatccggcctcaggcaggcgcggcggacctggtgcaggtgctggacactcctactcagactgcataggcataggtgcggactattgagacagatccatcctaatctaagagccgactgtgatgtgcaatactgcgtatgctgataccacatatcgctcaggacaattgaggtaaatgtgcaaaacgacaaacacccatcatgntcaattgttgattgacaaacacgc

SEQ ID NO: 307914 - DNA, 551 bp, Zea mays
cccttgcgtccgcccacgcgtccgggccttttgagaaaacagataacattaactatgccatgattcatggcaataatttaatggaaatccggtgtctttttaaggtcttaggccttttgtcatgcattgtttttcaaattcagatgagatatattcagtttttcacatacacatggttatatctatgatatactcactccgtcccaaaatagaattcgttttagctcttggtttttatgtttatattcaagtggatgaagatgaatctagacacatatgtaaaacacatatattaactattgtatgaacctattaattaactaaacgaattttaacttggggcggggagggagtatcaaattagatcagacttaattgcaatatgccaatatagttgcttagcattggtgttttgttatgaattatgcaatgttgaacacgcaccgatggtattaccctgccgtgataaaatgtcctgcacatataaaaaaggagaccagagcataaaaaattgagtcaactgacttcttcaaatattcacattttccatc

SEQ ID NO: 307915 - DNA, 454 bp, Zea mays
  unsure (1)..(454): unsure at all n locations
ctctctcgtccggctctggggcgtacgcggacacagtcccgatccgaatcggcctccttgcgagcctagtcgatcccccactctcctccactcgcttcaagatgcagacctttgcgaagaccatcaccggcaagactgtcaccctcgaggaggagatttctgacaccatggacaatgtcaaggataagatccagaacaaggagggcatgcctcctgaccagcagcgggtcatctaggtcgagaagcaactcgcggacggacgcacactcgttgactacaacatccagaaggagtcaaccctgcacttgatgctgcgcctgaggggaggcatgcagacctttgctaagaccacgactggcatgacagtcacgcttgtagtggcgatctcagacaccattgacaatgtccaggcaaagatccaggacanagatggcatgccacctgaccagtaacg

SEQ ID NO: 307916 - DNA, 155 bp, Zea mays
aggggggggacccattcatcacccatgttttatttcccccaatcaaaacccaacgaggttatcacccacccaactgacacaatggatgcataaaggggtcatccctctctaggagggggggaacaccgttttacaactaaaaaacccaaaccaac

SEQ ID NO: 307917 - DNA, 250 bp, Zea mays
atggaaacagaggcgggtcctttcatgtccaatcaaagaaacccacaacaagcatggggagccaggccatgcctagttttttacgtacacacggggcgggcatgtgcatccctgatgaaaagcattaaagaaacaattgttaccttggtcacccgacgctgaaggaggggggggcctttttgacgccctttctggggcccttgaaccaccgcttggcgccggcctgcgccttacaaatgtaaagcttgcc

SEQ ID NO: 307918 - DNA, 489 bp, Zea mays
cgtctctggcgctgcaagaagtggctgggcctcggcatgtttaccacgctggcgcgcagcgtccgccacgtcgaccgctacctatcgggcgtcatcaaggcgcgcaagctcgagctctccgccgccacgaggaaggacctcctctcggccacgccgcacgacgacctcctctcgcgcttcatgcgcaaggggacctactccgacgagtcgctgcagcacgtggcgctcaacttcatcctcgccggccgcgacacctcctcggtggcgctctcctggttcttctggctggtctccacgcaccccgccgtggagcgcaacatcgtgcgcgagctgtgcgccgtcctggccgggtcccgcggcgtcgaggacccggcactgtggctcgccgagcccttggacttcgaggagctcgaccgcctcgtctacctcaaggcggagctcttcgagacgcttcgcctgtaccccttcgtgcctgaggactccaagcac

SEQ ID NO: 307919 - DNA, 441 bp, Zea mays
ctcttcgggcgcgggggtttgagagcgggcggaggggagcaaccaagagcaacgcaccgcctggggtgcatagcttaatgcacgcaaccacggagaccatgaccccgggtggcacgcgcagcctcacgatggacgacacgaaggcctgggcccaagaccgggagggcatcccgctggactggcagaggctcatcttcgcagggatgcagctggaggatgaccgcaccctggccgactactgcatccagaaggagttcacgctgcacctgctgacccacctccgctgtggcggcaggggtggttacccgatcaccagcgtcccgtaggacctaatcaaccttgccggcaagcacaacacaacgagagcaagatgaactgccgtaagttcccatcgagtctctaattctcctggatctattgatctcctatgaaaatgatatg

SEQ ID NO: 307920 - DNA, 454 bp, Zea mays
gcagtcagagccagccagtctagcttagccaccacactagtgtgatggcgaccaccggcggcggcaaggcggcactggtgctggggcggcttctgcttctgctgtgcgtgctcggccatggagctgcgcagcggtacaacgccatctggagcttcggcgactccatctccgacaccggcaacctctgcgtggggggcgggtgcccttcctggctcaccacggggcagccgccctacggggagaccttcttcggccgccccaccggacgctgctccgacggccgcgtcatcgtcgacttcctgggtatgtggctatgtgcacacacagacacaggacgtacgcaagagggatggaaacgacgaactggctgttggactggactgactcgctggtacactaacactgtaccgtacgtgtgcatggattatgcagccgagcactttgggcttgccct

SEQ ID NO: 307921 - DNA, 309 bp, Zea mays
ggaacaaaaggggcacaggctttaatttcaaacataaaacttattcatgatttggcatagttttggggggtacgcacacaaaaaaaaaccgggccttttttaaaccaacactggcccgacttatgacacgaacaggagatcctttgacaacctccatatggggggggggcaccagacgacgcaggcacattgggggtttaaacgacccatgatttactgcccaccacggagacggagcacaagggggggggggctctccttttggatgttgtagtctgctagggggcggccatcctccagttgtttgcc

SEQ ID NO: 307922 - DNA, 274 bp, Zea mays
acggccttttttttttttttttttttttgaacagccttttatcgggggggatttgcccacatttaggaggggtttacacccaatatagttgcaataccattacatacccgcacaatacacctggtggtgctaaacatataggaccaacacactactaaatctaaacggccgggacggcagaagacaggcctggagcacagagctgtgcgttattctctgctcgatcgtataacggggacggatggcagcacacaaagaggagggtacctggtac

SEQ ID NO: 307923 - DNA, 444 bp, Zea mays
gcgcctactcgtgcgcccacgcgttcgtccacgcgtccggccactcgttcgcccacgcgtgcgagacaggcgtcttcggactggcctatctccgcgacccaaagcgattgccccttctcccattcttctctgatttatcaccaccgccggcgctaccccctttcgacaacaccatgagggagtgcatctcgatccacatcggccaggccggcatccaggtcggaaacgcgtgctgggagctgtactgcctcgagcatggcattcaggctgatggtcagatgcccggtgacaagaccattgggggaggtgatgatgctttcaacaccttattcagtgagactggcgctgggaagcacgtcccccgtgctgtttttgttgaccttgagcccactgtcatcgatgaggtgaggactggcacctatcgccagctctttcattctgagc

SEQ ID NO: 307924 - DNA, 311 bp, Zea mays
ggggcaaaaggcgggtccaaaatcaacataaacacataatcggttgagtcgttgtaatagtaagaatccgtcactttctagatcctgagttctatgaacaactttatcttcctccacgcgtaatcataatgatactcagattctccctacaaccagattctcctcacagccagattttcagaaaagctgctcagaaaaaagttgaaccaaacaggccctagagctatggcttatttgaggggatgtgtcaccatacatcacggaggtacctgccttccatctgcatgctctttacatagctctcggttttg

SEQ ID NO: 307925 - DNA, 511 bp, Zea mays
  unsure (1)..(511): unsure at all n locations
tactctgaacttgttcgtggtcctgtcgccttcatcagttcgttctgcgcgggaaccgccgatgggggacgccgtggaggacgtcgtcatcgccggcgcgggcctcgccggcctcgcgacggcgctcgggttacacaggaaaggggtgaggtgcctggtgctggagtcgtcgccggcgctgcgcgcgtcggggttcgcgttcaccacgtggaccaacgccttccgcgccctggatgccctcggcgtcggggacaagatccgggagcaccatttgctctacgagcgtatgatcgccttctctgcagctactggtgaagcagctgcagaagtgagccttaagattcagagcaaaagcgggccacacgagatccggtgcgtgaagcgggactttctgcttgggacgctggccgacgagcttgccgagggcaccatcaggtactcggcccaggttgtcgccatggaggaagacngcgttggcggcgccaagaccctgcagctgcacctggcagac

SEQ ID NO: 307926 - DNA, 311 bp, Zea mays
tttgcacgccagtggcagagacgacatgttttttcttgccttgcagtgccttaacgaacaccagacgaacgggccggcgacgccggtggacatggtggtggactactacaagttctactacgagttcgctggagccgtcgcgcgtgaccagtctgcagaacaccgtgcctcttcgcgactcttcagcggacttcggtgacgacgtttactttgtcgccgaccagtggtgctacgaggccgtctgtctactaccttgccggtcagtaccttaagaccgacaacaggtctggaaagatcgtttaaccgcgcct

SEQ ID NO: 307927 - DNA, 557 bp, Zea mays
  unsure (1)..(557): unsure at all n locations
gggtttaccatttaaaatcattttagctcaaaattaaagaaaatagaaaaggtagtttaaaataagaaccagggggcaaccacatttttgctagctcacttatttagtatagttcactagaaaaattttattagaccctctattagtgcaaaagaaatgcatttccttttattttatgaaaacaatgaaaacttaggaaaaatcttagaaaaataatcctgaggagaaaccaccccagccttgggataactaatattttgttattatgaatataggaaaaatatgagttctgttgtttgacatttttcaaataacaagttagttataagtacctttttggcattaaactttagaaaatcacaactaaatattcaataggtctttttctgtgatttttaacacagaggcctaatatcacatatgaatcttgacaaaaataaaaattagtgcagagacttcacgtaaaatagagctatagtataaagtggccttntccccttacttttgataattntacacangtagtgtctgaattaattcagcgtcaaactcctaga

SEQ ID NO: 307928 - DNA, 458 bp, Zea mays
gcgcgcgcacagcagctgctgcaggtctcctgtcatggcgaaggacatcgaagcaccggggcccgaggccggcgagttctcgggcaaggactacaccgaccctccgccggcgccgctcgtcgacgcggatgagctcaccaagtggtccctctaccgcgcggccatcgccgagctcatcgccacgctgctcttcctctacatcaccgtggccaccgtcatcgggtacaagcaccagacggacgcggcggcgtcgggccccgacgcggcgtgcggcggcgtgggcatcctgggcatcgcgtgggccttcggcggcatgatcttcatcctcgtctactgcaccgacggcatctcaggtgggcacatcaacccggccgtgacctccggcctgtccctggcgaggaaggtgttcctcgtccgagcgctgatttacatcatcgtgcagtgcctgggcgccatct

SEQ ID NO: 307929 - DNA, 421 bp, Zea mays
cggaacgcacacaccgcccggtgttctttttccgatccccgatcccctcttctatccaagatgcagatcttcgtcaagactctcactggaaagactatcaccctcgaggtggagtcctctgacaccattgacaacgtcaaggccaagatccaggacaaggaaggcattcccccggaccagcagcggctcatcttcgctggcaagcagctcgaggacgggcgcacacttgccgactacaacatccagaaggagagcaccctccaccttgttctccgccttaggggaggcatgcagatcttcgtcaagaccctcactggaaagactatcacccttgaggtggagtcttctgacaccatcgacaacgtcaaggccaagatccaggacatggagggcatcccttcggaccagcagcggcttattt

SEQ ID NO: 307930 - DNA, 490 bp, Zea mays
agaataagcgtcgtttaatttaaatttatgggcaagccaaacttaattccctctcaattccaaataaatcaaaatcctttataattttctctaatctcatccaattcatgtgggacaggaataatcggcctaaactgtttctggggcttcaggaatcaactcatagccatggggcttaatatccgttttcctagattcgacgggaatgcacttgaggataacagagataaccaaactgaccgagccaagaatagcgctgagcaaccatagctcccaactcaatggtacggtgtttgcaaaggttccaagaaactctactatgattacttggaatatgatggctgttgtcagtatactgataaagacccagtttttcagtatccctctgaacacgttgatcttttccatttccctgctatttatctcgttgaaaacctggcaaaacacaaaagagttgaatatgagggtattgatggttctatcagcattt

SEQ ID NO: 307931 - DNA, 432 bp, Zea mays
  unsure (1)..(432): unsure at all n locations
tcctcgcgtccgcgcacccacgcaagcgagtcagccaagccacgcccgacccccgcctccattcccggggcggagacgcgcctgcctgccatgggaatggggccgctcgacaacgccgcgtcggccgcgctggaggccgccgccgccccctcgcgggcgggctcgtacgcggtgctgcagtgcggcgaggactcggagtacgtgcggcagaagtacggcggctacttcgccgtcttccgcgcgctgctggaggaggacggcgagaggtggcgggtgtacagcgccgtccgcggggagctccccgccgacgccgaggcagccgggttcgacgggttcgtcatctccgggagctgcgccgacgcgcacggcgacgagccctggatcctcgcgctcgtcgaccttacccgccgngtncacgccggcggcaagcgc

SEQ ID NO: 307932 - DNA, 546 bp, Zea mays
cccacgcgtccgcccacgcgtccgcccacgcgtccgccggtggcctcctcgtcgccactcgccaccggcgccgcacttcccccgtctccccaactcattccttggcccctcctctccaccgaagcgatagcaaagccgcaggccgcaccaattgttcccttcccccggcggcagcaaacatggcgctggaggtgctgccggaggagtccaaccggtgcgtgcgcgggtgctgccgtagcgccaccatcccgctcgaccttcggtccgcctccttctccctcctcgcccccatcgcgcgaggctcggagagcactgtgtacgaggcattgctgggcggcgagcgcgctgcggccaagaagcctgtgctgtccaccgccgaggatttggacaagttccactaccagcttcagcttctctgcaagctggatcaccctgggttggcaaaactgatcgccgcacatgcacaccctccggcttacttgatggttcttgacttcttcgagcctccaaatcttgcagaaaagatacatgtcgagggatggatcc

SEQ ID NO: 307933 - DNA, 513 bp, Zea mays
gggtcccaacaccacctcgcctgcgatcttcgtagcctccgtcgcgtcgagcatcgatcatgtcggcctactgcggaaagtacaaggatgagctcatcaagaatgctgcctacattggcacccccggcaagggtatccttgctgctgatgagtccactggcaccattggcaagcgcctttccaggctccgactccaagaaggtgacccctgaggtgattgctgagtacaccgtccgtaccctccagaggaccgtccctgctgctgtgcctgctgttgtcttcctctctggtggacagagcgaggaggaggccacccgcaacctcaatgccatgaacaagctcagcaccaagaagccgtggtccctgtctttctccttcggccgtgccctccaggcgagcaccctcaaggcctgggctggcaaggtggagaacctggagaaggctagagctgccttcctcgccaggtgcaaggccaactctgaggctaccctcggcacctacaagggtgatgct

SEQ ID NO: 307934 - DNA, 485 bp, Zea mays
tgtgtctggtgtggtgtggtgtttcagatattcaccaacggcgacaaggtccacgccgtgagagccctggagaggctgggcctggaggactgcttcgaggggatcatctgcttcgagaccctgaacccgccgtgcccgcctcagggagaccgggaggccgagatcttcgacatcgccggccacttcgcccgctccggcgccgccgccgagctgcccaagacccccgtcctgtgcaagcccaacgtcgacgccatggaggaggcgctcaggatcgccaacgtcaacccgcacaaggcggtaagcttccgagctcctctggcacccagcgcaatttccgttcctgctcctgacgttgcatccacgcctgacggacctatatattctatcctatttttctgcttgaccacgtccctgacgaaagcttacctttaccttacctggctgcagattttcttcgacgacagcgtacgcaacatccaggccgg

SEQ ID NO: 307935 - DNA, 405 bp, Zea mays
gccggcgccggcccggttccttggtccttgacctgggaccacagctggggccacgcggccttcctgatctcggcgacggcctccccgtcccagcccctggcggccagcctctcggcctcagcgacggccgcggccaccacgtcctcggggccgccgtccacggcggcgtccacgaggccccggcgcacggcctcggccgcggccacccggtccccgcgcagcaccaggtcgcgccgggccgcggcgtcggggaccttgtcgcggagcacggcggccactaagtcgacgaacttgatgccgacgtcgacctcgctcatgtacaggagcccgcgggaggcgcgcatgagcgcggcgtcgtgcgcgagcgccagcgcgcacccggccgccgtcgcgtggcccgtcacc

SEQ ID NO: 307936 - DNA, 419 bp, Zea mays
ttgtagctaaattccgtggtgattttgaggagagattaaaggctgttctaaaggaggtcactgcttctaatggacagatcatcttgttcattgatgagatccatactgttgttggtgcaggagctgctggtggagcgatggatgctggtaacctgttgaagccaatgctaggccgtggagaactccgctgcattggagcaacaacattggatgagtacaggaagtacattgagaaggatgctgctcttgagcgtaggttccagcaggtttattgtggtgagccagcagttgaggataccatcttcatactgcgcggtttgcgagaacgatatgaactgcatcatggtgttaagatatcagatggggctcttgttgctgctgcagttctatccgatcgatacattacctgacggtttttg

SEQ ID NO: 307937 - DNA, 372 bp, Zea mays
  unsure (1)..(372): unsure at all n locations
tgttatgatcacacatggcaacatggtggccacaactgcagcagtcatgacaatagtcccaaaccttggcatgaatgatgtttatctggcttatcttccattggctcatgtctttgaactagcaggggaggtgatatatatattataattcatatacatgttgttttacaagagttgccgctatctttaatgatatgatgttgtcaatccagactgtcatgttagcttctggcagtgccattggatatggttcagcattgactatgactgatacatcgaacaagattaagaagggaacaaaaggagatgtttctgtactgaatcctactcttatgatttcagntcctgcaattttggatcgtatcagagatg

SEQ ID NO: 307938 - DNA, 504 bp, Zea mays
ccgcccacgcgtccgggaagttgaggaggatgcacggcttggtgatgtcggtgctgcaatccaagaagttatggaatcctatgagggcgacaaaactgtgctacaatatgatgatgtgatgaagcttgattttggaacacatatagatggttacattgttgattgtgcatttactgttgcattcaatcctatgtttgatccattgcttcaagcaacgagagatgccacaaataccggaatcaaggaagctgggatagatgcacggcttggtgatgtcggtgctgcaatccaagaagttatggaatcctatgaggttgaaatcaatgggaaagttttccaagttaaaagtgttcggaacctcaatggacacagcatcgggccatattaaatccatgctgggaaatcagttccaatagtgaaaggtggagagcaaacaaaaatggaaggaggggagttttatgccattgaaacttttggatctacgggaaagggatttgtcaggga

SEQ ID NO: 307939 - DNA, 448 bp, Zea mays
  unsure (1)..(448): unsure at all n locations
tttcacgcgtccgcggacgcgtgggtgcccgcagcctcaccctgcactgcagccagcgacggcgcgagtccttgcgtgcgtctcccgccctcccaccctctcgccttgctttcctcagcgccttcgatctctctctcccctcgccactggtagccatatttggtgccagcgagcaccgagcagcgcgtcggcatggggatgaggaggcggcaggacgctgctgccatcttggggctcctgaagctcttcctcttccgcttggcggcgtcgcagtcgttcatcggggtcaactacgggacgatcgcggacaacctaccgccgccggcgtcgacggccagcctcctcatgtcgacgtccatcgccaagctccgcctgtacgagccacagccggacctggtcgcggcgctcgcgggctccaacatctncatcctgctgggcatacccaacg

SEQ ID NO: 307940 - DNA, 530 bp, Zea mays
cctcctgctcttcgatctcgcgctgcgagggagcggtacgaggtgatcagggacatcggctcgggcaacttcggggtgacaaagctcgtccgggacgtcagtaccaaggagctcttcgccgtcaagttcatcgagagaggacaaaagattgatgagcatgttcagagggagattatgaaccaccggtccctgaagcacccaaacataattagattcaaggaggtaatttctcagacatcttggaaaggaaatgttctggtacgaatttgaagttggatgattggtagctacacacgtaagtgtcttcaaactgttacttttgatgcttttaaagaagaaaaatacagactttttatattctttgcctgttgaacgagatgtttgagccacacttgtgaacattgtgctggtgactgcacgttcttaagaacccattcatttaccacttatacctatctctctttttttaataaaggagttgcctttgtcttggacttatctctatgacattctttccattcatcattgga

SEQ ID NO: 307941 - DNA, 376 bp, Zea mays
tttagttttaaaaatatttttaaaaactatttaaattgaaattatagctccactctggatctggaatctggagccatcccaaacaccatgtccttaatagatgtcgtgagaagacaaatcacaaatacagccaaagtaaatttaatgtgtgcgctatcctgccagctcattttactttgcattcctttcaggtacgcaacacacgaactgtgaatcggacggggcagccaactggctacaggctcgtacctggttcgaactgcctgcctttggctctgcctgaggcgaaatttctgaggagggctgggttcttgaagcacaacctctgggtcactcaatacaagcgtggcgagatgttccctggaggggagttttc

SEQ ID NO: 307942 - DNA, 473 bp, Zea mays
cgcccacgcgtccgcccacgcgtccgcccacgcgtccggcgactagttccgtatgttcgagttcaaggtccggcgttgtgcccgcgcgcgcagccacgactggaccgagtgccccttcgcgcacccgggggagaaggcgcggcggctcgacccgcgcaggtaccactactcgggcgccgactgcccggacttacgaaagggcggttgcaggcgcggcgacacctgcgacttggtgcacggtgtcttcgagtgctggcttcacccggtgcgctaccgcacccagccctgcaaggactgcacggtctgccgccgccgtgtgtgcttcttcgtgcacaccccggaccagctgcggttgctcccggccacgccgcaacagtctagcgccagccccaggggcgccggcgcgctgcccgagtgctacgacggcttcccgatgcgtcgtcaggcgttcgagagctacctcaccaagagca

SEQ ID NO: 307943 - DNA, 460 bp, Zea mays
  unsure (1)..(460): unsure at all n locations
cccttttgtccgcccacgcgtccgcccacgcgtccggccacgcgtccgaaatcgttgcaaggatcctcagtggcacaacttggaccgctactttgataagttgacatcagaacggactcctcaacatcaactgaaagatgaggcagaatcagtaatgcaggaattagtgacttctgttcagtttacagctgaactataccatgaaatgcatgccctggatagatttcaacaagattatcagcgtaaacagcatgaagaggatggttctagtgttgtgcaaagaggcctggcgcagcggtgagagttgtcttgctgagtcgtcaggtcgcgggttcgaagcagcctctctgcatccgtggaggaaggcttgcctcgttttatcccttccctagaccncactcatgtgggagcctgcgacactgggtctgcccttttgggtgattacatgcacatactaaag

SEQ ID NO: 307944 - DNA, 168 bp, Zea mays
acctggaagaggggcccacattaattatggttttacacccaatattgttgcaataccattacatacccgcacaatacacctgttggtgttaaaaatatgggacgaacacactagtaaattaaacggccgggacggaagaaaaaaggccggaagcaaagagccctgggt

SEQ ID NO: 307945 - DNA, 397 bp, Zea mays
ccctgcgtccgcccacgcgtccgcccacgcgtgcggggggagcttgcagctactgagggggtgtgtgagagagaggatgggtggccgcggcagggctgctctgctgctggccctggtggtggtggccgtgagcctggccgtggagatccaggccgcccccggcttcggttacggtggcgggtacaccccgacgccgacgccggtcaccccgaccccgaagcccgagaagccccccaccacggggccgcagccggacatgccgcccaaggagcacaagccgcccaaggagcacgggccccagccggttaagccgctcccaggagcacaagcctgcgccgcccacttacaccctgagccccaaacccacgccgccgacgttcacttccaccccgacgcc

SEQ ID NO: 307946 - DNA, 274 bp, Zea mays
gggggggcaccaaaaagcaccattttttccttaggattaacttaaaacaaattctgacaggagaaacagcatccatggatccacactccatgctggatgaagcatgggtctgctggagccggggatgaacacagtactaacaactgacacagagcgaccttgcaattaaaaacacagatgggcaacaccaaacgggacgaacgaagataaaccctttggactagggtaaacattacggtagcgaacaggttaactttggccgcgcgggccccac

SEQ ID NO: 307947 - DNA, 486 bp, Zea mays
ctctttcgtgcggtggccatagatgaaagcagattggagtatatactccaaaatcaaaacggtctgtcaactgaaagtattcaaggcatatcacatgttgtccgtcgtggctgcattgatggtgaggaaatggggcagccagttataccgcctgcatctcatattggcggtcgactatacatggttgagaattatcatgatgggctagcagtttgccgagtctacggtccaccagatttctttgtgacgtttacgtgcaatccaaattggccagaaatagtagagagcctctttgaacctggccaaaaagcttcagatagatcagatatcattactagagtttttcatttaaaacttgatgatcttttaggtgatattcgatctggagatatctttggtccacagttggcagttctatatactattgagtttcaaaagcgggggctgcctcatgtccacgtcattatttgggtatcaactgatact

SEQ ID NO: 307948 - DNA, 321 bp, Zea mays
gtgttttggccagctagagccaaccagaagagctggcagttactgagagtgtgtgtgagagagaggatgggtggcatcggcagggctgctctgctgctggccctggtggtggtggccgtgagcctggccgtggagatccaggccgacgccgggtacggttacggcggcgggtacaccccgacgccgacgccggccaccccgaccccgaagcccgagaagccccccaccaaggggccgaagccggacaagccgtccaaggcgcacaagagctccaacgagcacgggcccaagccggagaagccgtccaaggagcacaagccg

SEQ ID NO: 307949 - DNA, 527 bp, Zea mays
  unsure (1)..(527): unsure at all n locations
gttgatggatgcgttagaactagagcaactcatcagttacctaataaataaggaaaattctgaaggagtaatattgcttggtcatagtactggatgccaggatattgtgcattatatgcgcacaaactttgcctgttcgaaagcggtttctggggtcatcttgcaggtattttccctgcccatgctcttgctctgaatgcccaggtagaggaataaaagttatttaaattttatgtgtgctaaatctctctctgaatgtaattcttactgatcaactttggaacatgttaagaagacttgattatatttattggtattaactttataatttaatgatatctttgttgtaacttctacaagtactctgaatgttgtgacaagtgtccgaacaagtgatggggacaccgatgactntccaattaacataggactacatcaagggtcggctttgagcccttatcttttcgctctggtgatagatgaggtcacatgggacatacaaggagatataccgtggtgtatgcttt

SEQ ID NO: 307950 - DNA, 262 bp, Zea mays
ggccattatctctccttggagggacaatgagaatgacggggattttttgagtaatcatcggggagttcaccaacgattttcccatgctaccttaagtcatgcttgctctactcatatccaagaccagtgcacatagctcttacaagggagtttatgaccagatagtggtgatgaaaggcttgccatacatggaggctcatgctgaaccattcatgatgcacttggacgctggccatgtggtctatggcccactaataacctt

SEQ ID NO: 307951 - DNA, 388 bp, Zea mays
cctattgtgtccgcgtcgatccaagatgcagatcttgggggagtctctcactggaaagactatcaccctcgaggtggagtcctttgacaccattgacaacgccaaggccaagatccaggacaaggaaggcattcccccggaccagcagcggttcatcttcgctggcaagcagttcgaggacgggcgcacacttgccgactacaacatccagaaggagagcaccctccaccttgatctccgcctcaggggaggcatgcagatcttcgttaagaccctcactggaaagactatcaccctcgaggtggagtcttctgacaccatcgacaacgtcaaggtcaagatccaggacaaggagggcatccctccggaccagtagcagttcattttt

SEQ ID NO: 307952 - DNA, 446 bp, Zea mays
gcctcttttggtggttgtggcacgcctcgcgggcgaggcctcgcagcccaaggtcctaccttctgcgaatggagtctcatccgagagctattggcgggtagctgctacgcgccgttggcagggccgcggtgtccggtgctgcgcggccggtttccgcggtgggggcgccgacgccgacgccgtgatcgccagcgaggactttgtggggttctttcgggaggcgtggccgtacatccggggccaccgtgggagcaccttcgtggtggtcatctccagcgaggtcgtgtgcgggccgcacttctaccgcgttctgcaggacatatcacttcttcatggtctggggactaaatttgttcttgtttcaagaacacatattcaaattgataagctgttgtcagaaagagggaagaaggccaagtatgttggtcagtacagaattactgatg

SEQ ID NO: 307953 - DNA, 378 bp, Zea mays
ttctttgcgggtgcgcgccgagcttgagaaggtgggcgtctgtgaggggcgcctcgtgtagtctgcctcgggggacaccaacttccaggctctcaagacatacggtcgggacctcgtcgagcaggccgggaagctggaccccgtcatcggccgcgacgaggagatccgccgcgtggtgcgcatcctctcgcgccgcaccaagaacaaccccgtcctcatcggcgagcccggcgttggcaagacggccgtcgtggagggcctcgcgcagcgcatcgttcgcggcgacgtgcccagtaacctactcgacgtccgcctcatcgcgctcgacatgggcgcgctcgtcgcgggcgccaagtaccgcggcgagttcgaggagcg

SEQ ID NO: 307954 - DNA, 416 bp, Zea mays
atagaacacatatccatgctttaggatttgagaggcactatttgagagattttccggttgttgcaccgcagaaggggactggctaagaaatgcattcagatggagagagtcaattggtccatggtaagagaggcctggacacttcggggatgttaggcattactggactgatgatgggcttggaaattatgagtacctccagctcgcggaggacctatgtgctgccccaatctgggtattcaacaatggaataagccacaatgatgaagttgatactggagctattgccccttttgtaaaggatgtatcggacagtcgggaatttgcatggcggagtgcagatacaacatggggccttgacagggctgcaatggggcaccctgaaccttccctgggcaaacatgtggcaattggaa

SEQ ID NO: 307955 - DNA, 470 bp, Zea mays
aatcagaatctacaatcttacaatctcagaatctgtgtatccaaacacctagattttaaccaccagcttctctccacagcaggcgaaccaacacccagattctaatcaccagcttctccccacagccagcttttcagaaaagctgttcagaaaaaagtcaaaccaaacaagcgcagcttttcagaaaagctgttaaaaaaagccctatgtactcaggggtacaaataagagagacgtttgcgtggtttccaatttccacatgttacacgctccggtgaggaaactccggctgtacttctgatccaaacagccaccgcatatccagccaataactgattgcaatcaaaaaagaatgcgatgactttaaaagctcaataaaacgctagagcgagcacggacacgcttgccaaataaatccaggggaacaataccagtccacatggactagcggcaacacaaagcaaattaat

SEQ ID NO: 307956 - DNA, 338 bp, Zea mays
actgatcaactccacctgaataaaggaaccagggggagttatatggcgacatcttttgggaatcccgccgggatgaggagcaggcgcatattcagacattcagaggacgaattcttgagacaatccttagccttagatttctcatgtctcagtatggcatcgtggacaagctaaaaatctacagatcataatacttctcttgcaggatacaggcttctcatggatggtactctttgttatggttcttcttttcaagctgtttactgcaacttctaggaagccgacagcctcgccgactcatgttaggtttctcgcagggcgttccttgctaattggga

SEQ ID NO: 307957 - DNA, 511 bp, Zea mays
  unsure (1)..(511): unsure at all n locations
tttttatggtatgactcttcactcatatttactttaccatttgggagaaaatgttaggccttaaaggggagaaaatactaaagggatctcatgttctccgttttttggcgattaatgccaaagggggagaaaatattaagtccaaagcaaaaggaccgcaccaccatttcaaaattttcgaaatatatttttaattggtaaatttcaattggtgtatttttcaattgatatgtgaaagtaaaatttcaaattggaattttcaaaacttcgcatttagtaggaaagaatttcaattggtataatttcactaatatctgtttcaaaaccctcttgaaagctaaggggagaatttcttgaggggaagctttcatatagtcaaaagaaaatcatttgaaacaggaggaggaatttcaaatcctaaaaattcttcttgcaatcatatttatatacctacggctatttgcaaaagttnttgaatagatatccaaaagatttgcaaaaacaaaactag

SEQ ID NO: 307958 - DNA, 266 bp, Zea mays
tcttcgcgactcacgcgaattgggccccaagcgagggggctcggcctacttgtccagcaagtacaagacggatcgcgcgacctacactctatgacaagacgccgccgcagtccggggtcggtggcctgtcgcctgccatgaaggacctggacccgtttgtcaagggcccaaggggcgcgcttattcaactccatggtcacatactaaatcatctcctcatggtaccaccgcggctcatccagttcacacggacactcgacaagaac

SEQ ID NO: 307959 - DNA, 542 bp, Zea mays
tttagcattggccatgcctatgaagatataatgtcacaaaatcaacaattgctacagcagattattgaaagagatgatcataataccaagcttttcatggagggtgttaaatcaaaacagtcacacgatgctttgcatttggaggtgcgctcgttgcaaagaaatttgcagcatgcaagtactttgatggatttgtgcaaccagaaaactatccgcctagaggaccaggttggtggcacattcatactggagctatgctattcttgcgggagatctgaatatttaaaattatgaatttccagctaagaggttggttagagcggttgaggagactgtcagaggatggaatgcagcagtctatttcattgggcaattatcaaaaaaagctgtctggtatgcatggagaagctccaaagctcaggcagtcaatggatgttctacacgcgaaggctgcgagcaatcggctggaaattgctgagctgcttatagaactagagaatgagaagtttggtaaaaagagactagaggatgatcttgatcta

SEQ ID NO: 307960 - DNA, 284 bp, Zea mays
gggaacctaagggaaagttttttttaaagaaaagcccaggaatgcttatttccgaaaaattaaagggtttgttacaaggaaggatgctcaaaaaaagggcctaaaattttggcataaaaaggcccatttttggaaaaggaaacaacccaaaacagacttgggttattccattcaccggtgggcaggggaaccgtttaaaggagaggggtttattaggggagggaccttttggaaagacgggcttttcattagaccagacccccggggcttaaaatggggggggg

SEQ ID NO: 307961 - DNA, 294 bp, Zea mays
gcctcctgaagagcttgcagttactgagagtgtgtgtgagagagaggatgggtggcagcggcagggccgctctgctgctggccctggaggaggaggccgtgagccagaccgcggagacccaggccgactccggaaacggacacagcggtagagacaccccgacgcctacgccggacacccagaccccaaaccccgagaagacaaacaccaaggggccaaaaccgtacaagccgcccaaggagtacaacgccgcccaaggagcactggtccaagccggagaagccctacaaggag

SEQ ID NO: 307962 - DNA, 279 bp, Zea mays
cccttggtctcttgggcggacgcgtgggtgagtatgctgttggtcatttcaaggagtttgcgggcaatacgcttgtttcggccaccaaggagggtctgaagctcgctgagaccgatgctgacaagaagaggaaggaggagccgaaggagaagtttgagggtctgtgcaagaccatcaaggaggttttgggccacaaggttgagatggatgcggtgtctgactcccgttgaggactaaccgcgctgcctcgctactggagagctatggctggacagccaa

SEQ ID NO: 307963 - DNA, 506 bp, Zea mays
tcggtctcgtgggctgcgccattggccagctagagccaaccagtagagcttgccgctcctgccagcgcgcgcgagagagaggatgggtggcagccgcagggctgccctgctgctggccctggtggtggcggccgcgagcctggccgcggagatccaggccgacgccgggtacggctacggcggcgggtacaccccgacgccgacgccggccaccccgaccccgaagcccgagaagccccccaccaaggggccgaagccggacaagccgtccaaggagcacaagccgcccaaggagcacgggcccaagccggagaagccgcctcaaggagcacaagccgacgccgcccacgtacaccccgagccccaaaccccacgccgccgacgtacactcccaccccgacgctccccaagccgaccccatccacatacactacctccccttcgctccacaaactcccccctaaacccacttcactccttccgacttcaccccaccccccagcctc

SEQ ID NO: 307964 - DNA, 510 bp, Zea mays
ccttttctaccgcccacgcgtccgaagaattggcctatatttgccaggagataaagaatcctcttagtggcatccggtttaccaactctctattgcagatgactgatttaaatgatgaccagaggcagctccttgaaactagctctgcttgtgagaaacagatgtccaagattgttaaggatgccagtctcaaaagtattgaggatggctctttggtgcttgagaaaagtgagttttctcttggagacgttatgaatgctgttgtcagccaaacaatgtcattgttgaggcagagggatttacaacttattcgagatatccctgatgaaatcaaggatgcatcagcatatggtgatcaatttagaattcaacaagttttggctgacttcttgctaagcatggcacagtctgctccatccgagaatggctgggtagaaatacaagtcagaccaaatgtaaaacagaattatgacggaacagatacagagcctttcatcttcaggtttgcct

SEQ ID NO: 307965 - DNA, 415 bp, Zea mays
gcctacctgaagagcttgcagttactgagagtgtgtgtgagagagaggatgggtggcagcggcagggctgctctgctgctggccctggtggtggtggccgcgagcctggccgcggagatccaggcccacgccgggtacggttacggcggcgggtacaccccgacgccgacgccggccaccccgaccccgaagcccgagaagccccccaccaaggggccgaagccggacaagccgcccaaggagcacaagccgcccaaggagcacgggcccaagccggagaagccgcccaaggagcacaagccgacgccgcccacgtacaccccgagccccaaacccactccgacagtggacacttccaccctgacgccccccaagccgacgccacccacatacactcccgccccttcatcccaca

SEQ ID NO: 307966 - DNA, 501 bp, Zea mays
ccctttctatcggcatcctcatcctgcggctgtcagtgtcaagcagccaggctcaggggtaaggtttcagcaattcagctccctcgcctccgccgcggcaccggcactacgagtgcttcgctaccagccagccagcacactctacgagtcgccatcttccactccaccgaggcagctccaagccatggccatggagaaggccgcctccttcctctcctccctcttaggcggcggcggcggggagccggcggcgactgtgaaatctatcttcatataccctatcaagtcctgcaggggtcttgccgtgtcacaggcgcccatcacctccactgggttccggcgggatcggcagtgggtggtggtgaacgccaaagggcgagcatatacccagagggtggagccccagcttgctctggttatcagagcaccccgaatggacacacctgagatacctctagtaaccgaacacgccacattcgatgatgtctctgtctgggagtg

SEQ ID NO: 307967 - DNA, 526 bp, Zea mays
tagctgccaattgcttattttgcaggcgcaaaggatgctatgaaaatactcaataattatggtacatgtacaattctaagtatggtatattgtgctctaatatttttaggcatcattgtttctgtgaaatactttgcccatggttaaggttatgagtgcattggttagtgaaaaattagtaggtccttcattttggttggataatcagtctgaattgcaatactcctagcttcaggtagcacaatagccaactaagtcgatagcacaacaaccaactagagtttgtgctttcttttgtaaaaaaaattatttcatggtcaccacaataggatttatgcaagacttgcaagttgcaagtacgagctcgcgtgcaagtgctcagctgcggccattgtcagttataaatattggcggcatatattaggaaacaaatcatccctatttgagttgcgcacacatttcatttattagtgtgaaattgtgagattttgaggttgatgacatgtatgttgttcattttcatgtg

SEQ ID NO: 307968 - DNA, 505 bp, Zea mays
ccctcgctatcgcccacgcgtccgcccacgcgttcgcccacgcgttcgcccacgcgtgcgggtttgggcatgtccaccggagacctccagaggcaccggtgcatagaggcatcataagaagggacaataatgtgaaaagaggtagaagtcgaccaaacttaacatgagaagaggcaatcaaaagggacttgaaggaatgtaatatcccaatagagatgtgtttggatagaagtgtttggaaagaagctatccacgtgctcgaaccgtgattaggtctttttcttttaagtactctcaaaagcttgttctatacccttactctctctttatcttaatggtgacatcttgttgggtttcaactctagcctactctaacttgcttgggactaaaatacttatgtgatgttgatgcacagctggtcatgttttttaggccagaaataggtgtgcatctttaaataattaccaacaaatgcaaacttctttaattctgtagatttacttg

SEQ ID NO: 307969 - DNA, 455 bp, Zea mays
gcttcctctcgtccgcccacgcgtccgcccacgcgtgcggtttatacacacacacacacagacaagtggtttccaaagccaagtgtgtgtacttgctaccagctttgctcgggcggtagcaggcagccattatgtcggaggagaagcaccaccactttttcaaccaccacaagaaggacgaggagcagcccgccggcgagtacgggtactccgagaccgaggtggtcaccgccaccggcgagggcgagtacgagaggtacaagaaggaggagatggagcacaagcacaagcagtacctcggcgaggccggcgccattgtcgtcggcgcctttgcactctacgagaagcacgaggcgaagaaggaccccgagcacgcgcacaggcacaagatcacggaggaggctgttgccgcggtggccgtaggctccggcggcttcgtattccacgagcaccac

SEQ ID NO: 307970 - DNA, 336 bp, Zea mays
gcttcatctccccctccggttcgggttcgggttcgtgaggttctctggggttcggctccgtgggcgagcggatcgagatggcggcgtcggatgttgagtaccgcttgtttttcggtggccttccctgggccacggacgaccacttccttcacaacgcttcagaacctacggcgaggtcctcgaggtccagattttttcttgatcgggagacccctagggcccccggctttgggttttgtcaccttttccacggaggaggtgatgcggaacgccatcctgggcatgaacggtaaggagctggacggcctcaacatcaccgtcaacgaggcccagtcc

SEQ ID NO: 307971 - DNA, 437 bp, Zea mays
cccttcctcgcgtccggacacgcgtgccccgaccgggaggggccatgacaaccgggggaccgcacaacccaccagaacagaacgacgcaggaagcacgaacgagccgaaacacccgaaactcgccagcggggccaaccgacgccacacaatagaacgaggatgccggacgcctaccgctgcaagaacatgagcatgggcagacacaggcgaggggaagacaagccagcaagagcaggacacggataagggctcacagcccgagcacgagctgaccatcggcgatgaaaatggcgcccgcatgagcaccatagacaacaagcccaacaaaccccaaataagggacacggcaggacaagaatcatacagacccaagacgaggtaatactacaaaggagctggtggagccccttgggcaacgaaaacacaaggagggaga

SEQ ID NO: 307972 - DNA, 334 bp, Zea mays
atcgtaagacacgggttttagacatgaccactgggttatattgggttttagttgtattttgtacttagagtaccgtgcagcagtatctgggttgtacatgcccttagcctaaacagtcaactctacacgttttcacataggacgcgtcatcatggactcttgttcgttaaagaatcatcatcgacacagcaaaaagcaaagacgacgatgccggcggagagcaaataaatggcaccgcggcgcggggtgccgtccgacgccaaccaaacgcgggaaccacagccatcccgctgaaccgcacgctatagctactagtagcctactaccagcccac

SEQ ID NO: 307973 - DNA, 396 bp, Zea mays
tccacgcgtccgcccacgcgtccgcccacgcgttcgggttgaataagaaggagatcactggcaacccgagggctctccggaggctgaggacctcttgtgagagggccaagagaactctgacttccactgcccagaccaccattgagattgactcgctgtacgagggcattgacttctactacaccatcacccgtgccaggtttgaggagctcaacatggacctgttcaggaagtgcatggagcctgttgagaagtgcctgagggatgccaagatggacaagagcagcgtccatgatgttgtccttgctggtggctccactaggatccccagggtgcagcagctgctccaggacttcttcaacggcaaggagctgtgcaagaacatcaatcctgatg

SEQ ID NO: 307974 - DNA, 336 bp, Zea mays
tgtacttgtacgcgcacgcccacgcgtacggggacgcgtacgatcacgcgggcgtgctgaaaagcaacgacggctgatcaacgttttcattagacagaacccaaccttgctggagaagtgaacgtctatgatgttcaaagtgcacaaggctgatggatcttgacaacaaacgagacgacttctagacacgtatcagacagcaccatgaacagtacctaccaggtcctttacacataaaagatagcaggggttatgagagggcagactcgtataatcagcagagaatgcctcctacccaggatctgaaaggtcaacagaccgtgcatgttcaagggg

SEQ ID NO: 307975 - DNA, 436 bp, Zea mays
acctttcactcgttcgcccacgcgaacgcccacgcgtgggggtgatttcaaggctggtgcggatcacctacctgcagcacacccacccgtcgctcccccactacgactcgagcgagtgggactggctgcgcggcgcgctggccaccatggaccgcgactacggcatcctaaaccgcgtgttccacaacatcacggacacgcacgtcgtgcaccacctcttctccaccatgccgcactaccacgccatggaggccaccaaggcgatcaggcccatcctgggcgactactaccacttcgacccgacccctgttgccaaggcgacctggcgcgaggccagggagtgcatctacgttgagcccgaggacccgaagggcgtcttctggtacaacaagaaagtatagccgtcgccgctcgcaaagctgagaggacgctacca

SEQ ID NO: 307976 - DNA, 390 bp, Zea mays
tgttctgtgtgccgctgatgccacaaagaaggggtcgctggattatgatgacgacgacgaagatgatcagcaggaggcaaacatgaagaaggacggtggactcttcatgatgaataagaagctggaacgcaggatggatattgtactcctcaaacaggtatgcaacagacctgccgtcgcggaggtctgggatgcaacagctgtagatccaaaatggatcgtatatctcaaggcgtaccgaaatacagcacctgtacctaggtactggtattagaagtgcaagtttttgcaggggaagagaggtaatgagaaacatacttttcagcttcctgacttcattgatgcaactggtatagaaaagataagacaggatcattttgtgaaagagga

SEQ ID NO: 307977 - DNA, 380 bp, Zea mays
tttcctcatgcacaagcgcactctatcaatggcttgggaggttttacgacctagcgtcgtctagctactaaaggcacaagccggcatatggcggctcatcctgtcctaccgtacgcccgtgtaactgaggtgcgccgtggatcttggcatccctacggagatctaccggcatggcggggctgcctcacccgctaagctggtcacggcgctgtttctccgctccactgagctgccgattctccggcgggtgttgtggttccttgcctcgtcacacgtgtacaccggaatcatggagagatcggaagaggagcggcaccgcatcagccccgatgtctaccctctgatggacgcgataccttacgaggaccacattaaccaca

SEQ ID NO: 307978 - DNA, 457 bp, Zea mays
tttcctctcacgcgtccggctctgttggacgaggccatggcgatactctcgatactgtccagtcaccctgagggcaaggccgctatcggggcggccgagcccgtcctcgtgcttgtggagatgatcggaagcgggtcgccgaggaacagagagaatgctgcggctgtgatgctgcatctgtccgtgcagtccgtgcatctagcccgggcgcaggagtgcggcatcatggtcccgctacgggacctggccctgaatggcacggagagggggaggagaaaggcggtgcagctccttgagcgaatgagcagattcctggttcggcaacaagagggtatcagctcccatgagcagatgttggacgagctcgaacgtcaacttgatgccttcggacctggtgttacagaggccgatattcttgacaatcgggacttctttaactcaggttgcatgatgatga

SEQ ID NO: 307979 - DNA, 343 bp, Zea mays
accatccacttcccagaccacgcgcgcccagcgggggggggctaaaaagaaggagcggggcacaccccgccgaagaggagggagaggccgcacaaccagcgagggcaaaggggcgaccagccaggcgccaaagaccgggaggcggcgagcgatgaacaaggcagagacccgaccgcgcggagcacaggcaaaagcgaccaacaacaggagcgcgcgaatgcagactacaaagaaaccaccagcggacgcgaagacgcccgcgcaggacccgcggaccaggaggcagggacaagggacagcaggcggaccggacccaacgggcagaacaaccgacctgacaaca

SEQ ID NO: 307980 - DNA, 436 bp, Zea mays
  unsure (1)..(436): unsure at all n locations
taccacgcgaacgcgccaccaagccgggcagggttgatttgaagcnccgcgagaggacaaacccccaccacaacccgacgggccgccacgacaacggcggaccacacggcgacgccggccccacnggccggaagaacaacaaagacacccacggaggcgggggagcccacagcgggggcgcccacaccggcaaggacccgaccaaggcggaccgcagcggggcccaccacgagaggcaggcagacaagagcaacgacggcggcggccgcgaccgccgagccatcgaacaggactcctacgccatccgcgagcccgagcccccatcggcgctcgtggacacctacgggaccggagcgatccccgacaaggagatcctgaagatcgtgaaggagaactacgcacttaagcccggaatgatcatcatcaacctccacct

SEQ ID NO: 307981 - DNA, 388 bp, Zea mays
  unsure (1)..(388): unsure at all n locations
cacctccactcgtcnccggacgcgggggggccgggggggggtggatttgaacaggggcttcgatggtgcaccaggcgccggcgatgggtattctcgcgctcatcacccgcaaggcgggctccagcgggttccggtcggcttccacggcggagcatgttaccgacggcgccgacgccagccgactcaccgttgctatcacacgaggagctaggggcattggactggagacatcaagagtcctccccctgagaggagcccatgtgggcatcgctgctagaaacacagaggctgcatcagaagcaagaaagaccatcatggagaagaacccaacggcacgtatagatgttctgaagctagacctcagctccctcatcatgtcagggctttt

SEQ ID NO: 307982 - DNA, 491 bp, Zea mays
ttttgtcatgactccagcacgatcacccatcactgggtcaccttaccatgaaggaatgatgtcgccaagttatctgctgagtccaaacatcagggcttcgcctattaatacagatgcttcgttctcgccgtatgttgggcacatggcattctcaccattcccttcaccaggtggttactccccatcgtcagggggatacagcccatcttctccggttttcaccccagagaaaggatatagccctctctctccatcatatagccctgcatcaccaagctatagtcccacctcaccgtcttacactcctggctctcccacctacagtccaacaagcccgaattactccccaaccagcccgacgtactcgcctaccagcccatcgtactcacccacatctgcgagctacagcccaacatcaccaagctacagtcctacatcaccaagctacagccctacatcttctagctatagtcctacatcaccaagctaca

SEQ ID NO: 307983 - DNA, 448 bp, Zea mays
gggccggtcccgaaccccatttcttgcccactcccacgtgtaatttttctcaacagccgaccacgccaggggggggtggattgcaaggaaggtagggtacataacactccaataagggttcctcggcatctgcggccccgcagcgggatctgtcatagaggtagctgagaaagttgctgcaagagagttaagttctgctattgcactagtcagacctccaggccaccatgcagaacatgacgaggctatgggattttgcctcttcaacaatgtggcggctgcagctaattatcttttaaacgagaggcctgatttagggatcaagaagatattgaattgcgattgggatgttcaccatggaaatggcacacacaaaatgcttcacgatgatcctcatgtattgttcttctcagttcacagatttgattatggaagcttctatcctgct

SEQ ID NO: 307984 - DNA, 464 bp, Zea mays
ttgccgtcctcgtgcgctctgtgtcgctccctgtcttgtgaggagtgaggacgactggggcgaccgccgccgccgccgccgccctacgccagatgcccaggtaggggccattcgctagctcttcttcgtgcccttcgccggcgacgagcattcaccaggatcattgatatgatcatgtttctcgtgttttatctttcagttgctgatgcaaggctttcaaaagtttaacagtctcacttgatgcaaaagcaacacaatcactctaaaggtttggatcagtcatttcagagcatgggttcgcggtttccatcccatcagctaagcaatggcttgtatgtctctggccgacctgagcaacctaaagagaaggccccagtcatttgctcctcggctatgccgtacactggcggggacataaagaaatctggagaacttggaaagatgtttgatctccatagaaaatc

SEQ ID NO: 307985 - DNA, 426 bp, Zea mays
  unsure (1)..(426): unsure at all n locations
tatccaaggnaaacgagtactgggggggtttttacatgccgtgcgggtcgccgccgccgactcgaaggccggttccgacgacgtgggtgccgactccgccaacagcaccgccgactgcggtgaggacctcaagaactgggatgcggacttcgtcaaggtcgaccaggccacgctcttcgacctcatcttggctgttgctgacatgatcaagggcaagacaccagaagagattcgcaagaccttcaacatcaagaatgactgcacccctgaggaggaagaggagatccgcacggagaaccagtgggccttcgagtaaggaggtgctggatctattgatgcctaagtttcgtggtgtctactactatgtctactttatgtttgactaatggttgaagtattttgggagtcactttgcttgcgaatgta

SEQ ID NO: 307986 - DNA, 481 bp, Zea mays
acgcgtccgcccacgcgtccggaaaagggggaagttcaacagcatgcctagcaattgaaacagccaacgggggcattgatattcaacgacagccgagaagaagatttcttggattgtctaccagacagcaaggagatgtctatctgccgggaaataggcaaaagctgcgcattcccgacactagaagattggctattggcgctatctaaagatgaactggcggacagcttagcatataatagtttaaaggcatgagattgatttttttgtatttaaaaacaaaaaattgttttattggcttatacttaataccacacttctttttgcagggcctgattcttagcaatgctctcagggctcagaaaaataccaaagacgaaggatgtactatagctataaacaaccttcattctgaagtaattgaactaaggaacgaaggtcttaaaaaagattaaatgctaaattcattggtgaacaaaat

SEQ ID NO: 307987 - DNA, 346 bp, Zea mays
  unsure (1)..(346): unsure at all n locations
cgagcgaacagagcaaggagagggtttttgcngagcggccagacaccctcacagccgacgccacaaagacaggccaacccacgcaggaaccgacgcggcgacagaaggccaggccagccgccacacgccaggcagccgacgactgcgcgggcgagaagttcccggcggggcgagcgtacacgatgtgcgaggacctgccgaagctgggcgcgtagctgcactggacgtacgacgcgttcaagagcttcctgtccgtagcgttcgtggcggctcccgatgtggacgacgggtgggtggcgtggggcctgaacccaacaggctagggcatggccggcgcacaagcgct

SEQ ID NO: 307988 - DNA, 361 bp, Zea mays
tagtgctgtgctccattggtgagttccggtagcgttcataagctggcaggcatggttttccttacaagaacttgaagcacataaaaggggaactctttcctcaaagggagtcgatcagatatattatcgcatgactgatggagaacaatatggctgcaatttttcatgtaaagatatataacctatatggaaaaaacgatactactttaccttgttcctctctagcaggttcttgcagagacttgcaataggcaagcaaggaaaagggagttgcgtcgagcgtgagcgatagggggggggggtaaaaagtggtttaataagctgcccgactcgctagacaccttttagtgttcacatgtgt

SEQ ID NO: 307989 - DNA, 424 bp, Zea mays
gataaaggctctggcagactactacttgggcgcagaggaggctaacagtcggccggacatgaaaaacagcacggagagacatacagagtccaagctgatacggagcacctccaggatatgtcagctacacctgagggaggccaactaactgaagcaatccgtcgccgtccatacacagttgtactcttagatgagagggacaaggcacaaccagatgttctcaacaagaagcttcacatataaaaagaagggccatgaactgatatcaaggggcgcacagctgacttgaagaacacactatggatcatgacatctaatgaggcaagcagagacatagagaaaggatgccgcaagaacagagctgaccttgactatgatgagaaagacaccagctataacaggatcaagagcctgaccgaggagt

SEQ ID NO: 307990 - DNA, 439 bp, Zea mays
  unsure (1)..(439): unsure at all n locations
aagtgggtgactcgancggccgcgcgcgatgtgggcgacttatccgtggaggtcgctgctctgctgcgcggcggcgggatacgacgacgccgacgagccgccgccgtcgtcgcgggggcagaggaagggccggagcaggagggaccgggaccgggagcggctccagctgctgctgctgccgtcgtcctcgtcggcggcgtcgcgggtgtcgctgtcgagcctggggggttcgtcggggacgctgacgcccgaggacctgtccctgacgctgtcgggctccagcctgcacgccttcacctgcgccgagctgagggcgacgcgacccacgtaacaacgcgcgtcatggggaccaacgggtacgcggcgccagagtacatcatgacggggcacctcaccggcgagagcgacgtctacagcttccgggtagtgctgctggagc

SEQ ID NO: 307991 - DNA, 433 bp, Zea mays
  unsure (1)..(433): unsure at all n locations
aagcagaaacccccgggggggcaccgccccggaacccccgggtactacccacgcgtgaatanacgcgcccacacaccaacaacaggaggcggggcattcaaaaacgggcactgcggaaaaaccacagngggaacggcaaacaaccggaggaagaacggaagccgcccacagaacgaganccagngggaagcaanaacagcnaaagagcacacggaaaggnnngccagcancaagggaaagcanccagcagcaancacaggagcagcagaagagccaccagccaaagcaaagcgcaaccaagcaactaatgctcgagcaggcagctacagcggaggaatgaagcgccgcctaagtgttgcgaacgcactgattggtgacccaaaattggtttttctcgaagaacctactactggcatggatccaataacaagga

SEQ ID NO: 307992 - DNA, 369 bp, Zea mays
cctacgcttccgaaggtctgcgtgaagacgctcaagggatccagcttccatatcgaagtggatcctaccgacaaggttgccgacgtgaaaaaggttatagagagtatacaagagcaggcttgctatcctgctgaccaacaagtgcttatacaccaggggaaggtgctcaaggacgacacaacattggaggaaaaccaagtagttgaaaataattttcttgttataatgctcagacaggtaggctacttgtttattattctggttgacacatgggcacatgacaaatcacgggtgtatgacttggtatgataataaaattattactgagatatgaataactgataacattaactgtataactgtcatagt

SEQ ID NO: 307993 - DNA, 349 bp, Zea mays
gtttggtttgaggcctgagccagggcagttgactgacggaaggggaacatgctccctcctcatctcagacagaatggcgctgtgatgattcactttggacatcagatgcctgattacgacttcctggctacacagtcaaccagtgggacgagccatcaagaaacggctgaaatgacctaagggagcctcagcgcgcataataatgaccattcaggcaacctcagaggggtgctccaagagggacaaaaacaagaggaatgaagtgctatccctgggcaatccggaaacagcattcacacataacttcaagcctgaccctactaagtccttcgccatatgataccaatat

SEQ ID NO: 307994 - DNA, 392 bp, Zea mays
gacagccgcaacatgaggccttttctcctgctcttctacaccctggcgctcgtggaggcgtcgctcttcctgttcgagaaggcgtactggacgtggaaggtctccgtctgcaagctgctccaccaggtgagcgccgagtgccaactgggccccgtacgggctcgtctccctcaagcgcttcttctacgacgcctactcgcggtgcatcgccgggagcatcttcgacggcatcaagatggacctcgtcaccttcgccgaggacctcatcctctcggacttcctggacgagcagatcatcggcgtgcgcatcctgcagcagttcgccaacagcgagcgctccgcgagcgacacgctgcgcaaggtcggcaccaccccgaggtccatcgaccggc

SEQ ID NO: 307995 - DNA, 197 bp, Zea mays
acgcgtgggcggacgcgtgggcggacgcgtgggctagatcacgagcgaagccgctttttttgttttttgtttttattgtttgttaatgggaaaatgtgcatacttgataacagtatttttacaatgtacaccattgaagagcgcatagttggagagctcttttatggatttgcataattccatgcaacctttcacac

SEQ ID NO: 307996 - DNA, 399 bp, Zea mays
tcgctttgtctcggcccacggcccacggtccatcagcgctcgtcctcccttcctccctctagcgcctgctgcctctctcgctccatggcgtggatctggatggtcctcgcggcgggagccgtgctcctgtgggcgatctctttggggcgggtcctctcctccgccgcgccgtcctgtgtgcccccgagcccgcagttcatgccccctctcagcggtgacaggaggagccggaacgtgctgctggtcgtcgcccaccccgacgacgagtccatgttcttcgctccaaccattcttttcctcaagtcgaaaggccacagtattcacattctgtgcatgtctcgaggaaatgctgatggtctgggagatactcgtaaggaagaactgtaccacgcctgtgtc

SEQ ID NO: 307997 - DNA, 438 bp, Zea mays
ctttcatttgctatacctaccagctcgctgttcttgctgaagccctgtagctatatagcttcgatctgcgcagcacaggttgtctgtcgactagtgattagtgaagaagatggcggcgcgtgaccaccgagagctgagcggcgacgaggactccgtggtggcggccggagacctccgccgcgggccgtggacggaggaggaggacatgctcctcgtcaactacgtcgtcgcgcacggcgagggccgctggaacgcgctggcacgatgcgcacggctccggcggacggggaagagctgtcgcctgcggtggctcaactacctgcggccggacctgcggcggggcaacatcacggcgcaggagcagctgctcatcctggagctgcactcccgctggggcaaccgctggttctagatcgcgcagaacctcccagggtgcac

SEQ ID NO: 307998 - DNA, 357 bp, Zea mays
ctcttgcttctcgtactgcttaacggcccgacaaccctgggattggttcacacggagggggggttcagtggccggaagagcgccgcacatcaagcggagtccggtgcgcccacggcggaccttgaaagcccggaggaccgaataccgtgcacgcccggtagtactaataaccgaatcagggctccaaggtgaacagactctgaccaatggaacaatgtatgcaagggaagtgggcaaaacggatccgtaactttgagaaaaggattggctctgagggttgggctagggggtaccggaccccaacccgtcggcttgtggcggaatgcttaagctgctcgcgcggtgagagcgggcctc

SEQ ID NO: 307999 - DNA, 303 bp, Zea mays
gttatcttctgctccaagcaaggtagcagagccggacccccgtccagaccttgacgaacggagagcagcagcagggcgtagcgtacccttcggaggcggatcgttactcgtaggcggcagcggacatggctgctgctgcggtgatggtgagctcggcgggctccctgctggcgatgctgcaagagccggcgccggagctcaagctccacgcgctggccagcctgaactccctcgtccacgccttctggcacgagatctccaccagcgtctcctccattgagagtttgtatgaagacgaggagt

SEQ ID NO: 308000 - DNA, 412 bp, Zea mays
gccgacggcggtcgccggctggacttggcagtcggcgacaaggccctcgccgtcgaacgccccgttagctaacaccatccggacgccccccgcgcggcggaccacgtcgcccttggcggcgcgcgagttcacgccgcggtcgcacaccacgatcttgccgcgcaccgtggctgggtccagcgagccgtccaggcacatcgacgccgagtagccgtcggacgcggacgaggcacccccgccggtcgccccagcgtacaccagttcgtacagcttgccggactcgagcgcgggtcccccgtacacgctcacgccgtcgagcacctgtccgtggccgagccgcacgttagccgggaacgcgcggtccatggagccagccccgaccgtggccatccagggcgccacattggtcacc

SEQ ID NO: 308001 - DNA, 266 bp, Zea mays
ggacaatgaacacaatttttccttggggatggaacaatagtttacattaggggacaaactgaaaaccagggggggcttacatgcattcggacacctaaggggcaccgggggggccttctttatttgccggggacaaaattgggggggtaggcccaagcgtttttgttgacggggtcggcaatggggtcaggggggtttttgggggggcccttcccggggaccatggcctggacaaaaaatcccaacatggggaacatggggggggg

SEQ ID NO: 308002 - DNA, 254 bp, Zea mays
gcgggggcctttatctatatttgggggggttcaaaaggatttgtgttacacaggccacaagttttttcatacatgtagtttgggtgcagcccaaaccaacgacactacatttggttatttgggcgaaaggcggaggaatcaaaaaaggggaaaccaaccatgttttaacaggaaatggactctccaggtggttttgccttactgggaaaagcataaataaacgcttaaaatccaaaaatggaacttgggccggg

SEQ ID NO: 308003 - DNA, 434 bp, Zea mays
tccacgcgtccgcccacgcgtccggcggcagaggattgccattggcatggcaagagggctggcctacctgcatcgcggtgcacagccagccattattcacagggatatcaaagcgagcaacatcttgcttgatgatgaatttgaggccaaggtggctgattttggactggccaagtttgcacctgaagggatgacgcatgtgagcacaagggttgccggaacactaggttatgttgccccagagtatgcactctacggccaattgactgagaagagcgatgtgtatagctttggtgttgtgcttcttgagcttctgagtggaaagaaggcattcatttctctcagcgagggacagagttttgtgcttcactgattgggcttggtctttgtgccaagggggaggacagtggaggtgatccaagagggaatggttg

SEQ ID NO: 308004 - DNA, 401 bp, Zea mays
  unsure (1)..(401): unsure at all n locations
gttcttctccataccccaatcactgctactcagcagccaactctntcgcaaccaaatatttcttctggcgttttggggtttgcaaaccgctatcgacattggagttggagcagaatgtgatctgtccaattcttctcttgtcttatttttggcgtgctttgctcttctttccccctatttcctgaggaggggttcccgtcttgatctcttgcgtttagtgtggcttcgaagagttagcagctgccatggcacagaatgtgtgggaggcggacaagatgttggattcctacatttatgattacctgttgaagaggaacctgcagaacacggcgaaggcattccaagccgaaagcaacgtgccttcggctcctgtttcgattgatgcgccaggggggtttctc

SEQ ID NO: 308005 - DNA, 393 bp, Zea mays
tcacgcgtccgctgcgccattggccagctagagccatccagaagagcttgcagttactgagagtgtgtgtgagagagaggatgggtggcagcggcagggctgctctgctgctggccctggtggtggtggccgtgagcctggccgtggagatccaggccgacgccgggtacggttacggcggcgggtacaccccgacgccgacgccggccaccccgaccccgaagcccgagaagccccccaccaaggggccgaagccggacaagccgcccaaggagaagccgcccaaggagcacaagccgacgccgcccacgtacaccccgagccccaaacccacgccgccgacgtacactcccacctcgacgccctccaagccgtcgccacccacatacactt

SEQ ID NO: 308006 - DNA, 327 bp, Zea mays
  unsure (1)..(327): unsure at all n locations
ngtgctccaaggaggagaacgagaagatggtgcaggacgctgagaagtacaagtctgaggatgaggagcacaagaagaaggtggaggccaagaactcgctggagaactactactacaacatgcgcaacacgatcaaggactagaagattgcgtacaagctgccggccgatgacaagaagaagatcgaggacgccatagacgcggtcatcagttggctggacgccaaccagctcgccgaggcggacgagttctaggacaagatgaaggagctggatagcctctgcaaccccatcatcggcaagatgtaccaaggcgcgggtgaagaca

SEQ ID NO: 308007 - DNA, 389 bp, Zea mays
gaccggaactcccttgtcgctccagttaccggcccttcaatccttaccgccggaccccactcggctcggatcgggtactattctcggaggacccgggaccgtcccaccgaccctcggctcgccccttacgacggaagcgtagctccaggctgagtgctgcccatcagtgcggcgactggtacttaggttcggtcccaaccttctgatgatcaaaggctgacggtgaggaaacccagccactcgcgtatgacaatggcacgggaatggccaaggctggctaggctggctatgatgcgcccatagcacagtaccctagtatagccagacgtcctcggcacactgatgtgatggctggaatgggccagaatgacgcctatgtaggtgacgag

SEQ ID NO: 308008 - DNA, 299 bp, Zea mays
ccctttcgttcttccacgcgtccggccacacgcaatagatgaggagtagtcgtctggggcacggctgcctggcgaaggcgacacacaataggagccaagatgcaaagcttcttgaagaccctgacggggaaatcaagcacggaggcgggggagtcctccggcacaatagacaacgtgaaggccaggatacagggcagggagggcatcccggcggaccagcagcggataatataggacggcaagcaggactgggacagtcggacctttggcgactacaacattgagaaggagtgcaccct

SEQ ID NO: 308009 - DNA, 468 bp, Zea mays
cggattcgtgtgcggacgcgtgggcggacgcgtgggcggacgcgtgggcttgccttgccactcatgagtatacttaatatagccagagaatttgggttgcagcataccacaccctcgattgatgataatgatctatgttcagtttgtctagaaaggtcttgttctgttgctgctgaaggttgcagtcatgaattctgcatcaaatgtgctctctacctctgctcaaccagcaacatccgtgtcgagttcacaggcccacctgggtccatcccgtgccctctttgtcggaacggcataatgtctttcaccaagttaccaagcacaccaacagaagggcttaaatcaggttcagcgctcacattctgcaacccatgcatactgaacacccggtccatggactcgccagccactttctccaaagccgaaatcagacggaaccgtgtggcagctgtctcttcggaagctgtc

SEQ ID NO: 308010 - DNA, 431 bp, Zea mays
ctcttttatttattaccggactgtccggtgtagcaccggactgtccggtgtgccagcggggtaacggttaaccagcgccaacggtggtctgcaacggctacagtgaacagtgaaaagtgccgactgcgcgcgcagaagtcagagcaggcgcagatggcgtaccaaacagtgaacaggacctgtctggtgcatcaccggactgtccggtggcccagttgccagaagctccaacggtcagaacccaacggcctgatgacgtggctggcgcaccagactgtccggtgcgccatacgacagaagccctcaccaacggttcttttggtgggtagacatgttaaaggtggagagctgttcaccatgattcagcgaggatggctcaaggaagacgcaccgaggaagtccttccacagctgatctgtgcggtggacttc

SEQ ID NO: 308011 - DNA, 468 bp, Zea mays
tcctttcgtccgcccacgcgtccgcccacgcgtccgcccacgcgtccggttcattttgtgttatatagtattcatttatcttttccttctcccagtatatatatatatatcaatcaaaatggtcctgtgatctcgagcttcagttgatgcagaggtggtgaaaacatcttgtcttctccaaagactgctgactgcaagttgcaaaagtttgtctttagcttgctgtgttgtttcttcctgcggagtacacgagaagtttgtagatagagtttctggtgtgccttttcctgtaccaatgtgtataaatcttacattgctggcctcttattatgcagcaaggattatggatccgaaagagaagccaaatgtatcgagcagtccaccaacaccacggctggactgcataaaatgctgtgatatgctctggttctgttactcaccattccaccagatgcagaattattaccg

SEQ ID NO: 308012 - DNA, 152 bp, Zea mays
ccgccacgttccggtgcaagatgctcaccaccgaagtggacaagcacatgatcaacctccagaacaagaacacactcaacttgcaggaggggacccttaacaacgataagtacagggtgtgcgacattccacccgaaggcctggccatgtcc

SEQ ID NO: 308013 - DNA, 305 bp, Zea mays
atctgggggagattgaaagatgacctggttttattacatatagcatgcatggatcctgagcatggcaaacacacgttcgatcaccaccacacgcccagccacaacaagcttgtcgcgagtggcgagcttagctttcaattcagtacactaattttaattaggatagagctcgatgatggatcgaacgcccagaagcggcataatcctgtagtcctgaaacccagcctcggagaagatcttcttccactcctgctcgtgtcgctccactccattgacgcacatcatcaagaggtcaaacaagatct

SEQ ID NO: 308014 - DNA, 509 bp, Zea mays
cggaatatcctgtggtcgactccactgtcgtccgccgtttttcatacttagcgacacgccaccaccagagcgcgccgagctcgtgctcccagcaaggagcaaaggaccaacaaccgactgacgcggatggccaccccgggccacgccgtcgcggtcgacatcgacgagccagcctcctgcggcaacggcgaggcagcggcggccacgccgctgccccagccgacggtgccgtacgtgctccgcttcaccgacctgtcctacagcgtaaggaagcgcggcagcgggctaggctgcctgccttcgcgctggcccagcaaccgcctggcgtccttggacgcgccggcgtcgtccgccaccgccgccagcgccacccggaacaccaagacgctgctggacggcatctccggggaggcccgggagggggagctgctcgcggtgatgggcgcgagcgggtcgggcaagtcgacgctgctggacgcgctggcggggcgcatcgcgcgggacagcct

SEQ ID NO: 308015 - DNA, 353 bp, Zea mays
  unsure (1)..(353): unsure at all n locations
tcacgtcaccgaccgtaaaatacacccccgacccggacgagaaacccggggggggcaaaaagaaagcgagcggggggtccccaacccccacaagccaggggacgcccgaggacggacccagcgacgccagagacgcaggcaagggcgcggaggccaccgcgccaacagacggagacccggccaagagggccccgcggagcaaagaccccacccaggaaaccggcgccgcgaccaccaaaggagggcggggccacgccgggacacggggaaaggcacaaggagcagaggcccaggacagccacaacacggngcagcaggagccagccggaggcggggcaacaccacaccagagc

SEQ ID NO: 308016 - DNA, 437 bp, Zea mays
  unsure (1)..(437): unsure at all n locations
gcccggacacttcccggctcgacctactcgaccgcccattcatacccacacggcancagcnccaaagangggggggaccaaaataaacgaaacaggggcggaagcaaaagggcccccaccaacaggaaggatccaccaaggagcccgatcaacacggatgaagaatacaaacccgcgggaagatagcgaacaatgcagccgggctcccatccctgtgaggcagacaaaacacaagctacctgctgagccgaccactcctatcaacaagactggtcctgggacagggctggctccttaaagaggcctcctgcaggaaaggggagcatagaaacaaactggggcagaaccgggcactacaatcctctcctctggatgcaggaacccgaatatggactacatatatgaagacgagttgcaaactttccctgaggaggggg

SEQ ID NO: 308017 - DNA, 357 bp, Zea mays
ccgaccataagtaaccaccccccccaccggaacaaaaaggggaggggcaagaaaaacaaggggggggggcaaaacaagcgcaccgagacggcggcaacggacgccgagcaccgctgccccgtcggcggccacgcccggcccacggacgaccactccccccacaacgcccacagcacctacggcgaggcccacgagcccaagaccacccacgaccgggagacccagaggccccgcggatacggcctcgccacctcacccacggaggaggcgaagcggaacgccaacgagggcacgaaccgcaaggagccggacggccgcaacaacaccgacaacgaggcccagacccgcagcggccgc

SEQ ID NO: 308018 - DNA, 464 bp, Zea mays
ttggtctcgtgggctcggacgctcagctcccgctcccactcccggacgacgacgatggccttggcgctgcaatggcccctgcaactgccactccagctccaggcgcggcctcccgccgttaccgcgggtcattaccggcgccgccaccgagtcctcgccgtctggcgctccccgccgctccgagctcgctgttgtgccagcgccgccgctgcggccgacacggggaaggcgcagacagcggcgaggagggcttacccattcgatgagatcgagccgaggtggcagcagcactgggaggagcaccgcacgttccgcaccctggacatcggcgaggggctcgacacctgcaagcccaagtgctacatcctcgacatgttcccctaccccagtggggctgggttgcatgttgggcaccctcttggatacccgggaactgacattctgtcaagattcagcccatgaaa

SEQ ID NO: 308019 - DNA, 405 bp, Zea mays
gggggatgtacttggtcatatggagtaccaagtttctaagactgcctagatagactaatcacatgccactgccagaccaaaagtgattaactccaaggaccagaccaggtacaggaggctcttgcagacaattgatcttagaaacgactttttttttagccactcatatcatataatgagaagtctacaaacgaactttaatgatccacatgaagggtgggaactatatgacacactgtttgtctggaatgaattcctaactggatggattcgagacatcctgaaaactacactctggactgtggcataagtctatggtgcatgaagcacgacaaactcgccatatgtgggaaggatattacactgactctcattgctagacgctcgaggcattatgctggcacc

SEQ ID NO: 308020 - DNA, 427 bp, Zea mays
tggtcgcgtgggtcgccatcacataaaaccagtgcaagcagaagcagcgcaatggcgagcagcaccatggccctgtgctccacagccttcgccggcaaggcagtgaacgtgccgtcgtctcacttcggcgaggcccgcgtgacgatgcgcaagacggcggcgaaggcaaagccggcggcgagctccggcagcccgtggtacggccccgaccgcgtgctctacctgggcccgctgtccggcgcgcccccgagctacctgacgggcgagttcccgggcgactacggctgggataccgcggggctgtcggcggacccggagacgttcgccaagaaccgggagctggaggtcatccactcccgctgggccatgctgggcgcgttgggctgcgtgttcccggagctgctcgcccgcaacggcgtcaagttcg

SEQ ID NO: 308021 - DNA, 460 bp, Zea mays
tttctcgcgtccgcttcaatctcttctcaggcttgttcattccgagaccggtcagttgttgtttcaatcaccatccctgcgatccttttcctacctgtaggattaaatagaggactcatgttttttctctattcctgtttcagagaattcctggatggtggatctggtactactggatttgcccactggcatggacagtgtatgggctcatcgtgacacaatacggagacctggaagacctcatctcagtccctggagaaagtgagcagacgataagctactatgtaacacatcattttggataccacagggattttctgccggtcattgcgccggttctggtactctttgcagtattcttcgcgttcttgtacgcagtctgcatcaagaaactgaacttccagcaacgataagaacaagatatggcagcaaaagctcttgagagttttttggaacattg

SEQ ID NO: 308022 - DNA, 211 bp, Zea mays
tttcttctcctcctcctccatccagcggctacaccctgctgcgcgacccgcggcacaacaagggcctggccttctcggaggcggagcgcgacgcgcactacctgcggggcctgctgccgccggcgctggcgtcgcaagagctgcaggagaagaagctcatgccgaacctgcgccggtaccaggcagccgtggacccgtacatcggcatgat

SEQ ID NO: 308023 - DNA, 390 bp, Zea mays
ggactgtcaagttaataagatttattctactggttcaaaaaattcaaaactcaacctacaataacgtataaagagagtaaatttgtcgcaaatactcaaaaagaagatttggtcccagcactcacatattcaccactgccgacaacaaagtcccgaacacttttttttatgtttgtcacgcttctctcatttggttccaactggggaagcttcattttggtaggccggttgctttcctttatttcaaaagggtccacgggctcagaggatacatagtccccaagtacagaaatgtttccgtgtgactgattagttaagagtgcatagggcttggctgggaacacatagaggtgaacaactgaagcaatgcccatctctatgcaaataatg

SEQ ID NO: 308024 - DNA, 340 bp, Zea mays
gctgcgtacgcgtggggcggaggcagagccgcggcgcctgtgggcggtgtgggcgctactgctgctgctccaccccgccgcgctcgtgctcgccaacaccgaaggtgatgccttgcatagcttacgtaccaacttaaatgatcctaataatgttctacaaagttgggatcccactctggtcaacccctgcacttggtttcatgttacctgcaataatgacaacagtgtcatcagagttgatcttggaaatgctgcactatcaggaactttggttccgcaacttggacagctcttaaacttgcagtacctggagctttacagtaataatatcagcggaatt

SEQ ID NO: 308025 - DNA, 449 bp, Zea mays
tcgcgatctagaactagtctcgggatccccacttcgtctcgctcgagcggtagagccacgctcccaccgcccaggcgtccgccgcggaggcgtcggtggcctatctgagcaggctctcctcgtcgggcttttttgctttagagggagagacttcctggtcggcgcgccgcgagaagagcaccagccatgtcgcaaactaactgggaggcggacaagatgctggatgtatacatatatgattattttatgaagagaaatttgcaggcaactgcaaaggccttccaagcagagggaaaggtctcttcggatccagttgcaattgacgcacctggtggatttcttttcgagtggtggtcggttttttgggatatattcatagcaagaactaatgagaagcattcagatgttgcagccctatatattgaggtaaacattttttgcatttaatt

SEQ ID NO: 308026 - DNA, 434 bp, Zea mays
ctcactcttccgcccacgcgtccgcctcgtgttgcggatgacggtggcgaagaagacctcgcagctcggggaccagtccccggccatcccgcggctcggcgtgccagcgtacaagtggtggtctgaggcgctgcacgggatctccaaccagggccgcggcatccacctcgacggcccgctccgcgccgccactagctatcacaggtcatcctcaccgccgcgtccttcaacccgcacctctggtaccgcatcggccaggcttctacagatgccaagagaattattgacgaagaaagagctaatgctcggttggagataggaagtgctaaagcttctgtacaaaaaattcaatcagcacttaaagagcaggaaaaattttttcacagaactgggaaggcaggtgtcgatgaactaaaggaagaagttcaagaagc

SEQ ID NO: 308027 - DNA, 378 bp, Zea mays
tcgtactactgacagccatgcgctctgcgcgtgggagaatgctaacaagtaaatattcatcgcatgcgcagagccagcttatgctcgagtcaatttcggagctccaacggaaggagaagtcgctgcaggaggagaacaaggttctgcagaaggagctcgcggagaagcagaaagcccagcggaagcaagtgcaatggggccaaacccaacagcagaccagttcgtcttcctcgtgcttcatgataagggaagctgccccaacaacaaatatcagcatttttcctgtggcagcaggcgggaggttggtggaaggtgcagcagcgcagccacaggctcgcgttggactaccaccatggatgcttagccacctgagcagct

SEQ ID NO: 308028 - DNA, 375 bp, Zea mays
catgtcagtatggcacgttgatcgttgacgatgaccaatcagaagactaacgatatgtaatataataaatacaagaaaagaatgtggcttacgcacgccaccttggcacaatcagccaacgtcaacctcagggaaaaaaaaatcgaactgaaataactggttgatcacggcaggctgttggtgtggatcccggcggtgacgttgaagtaggtgaacgtggccgcccatcggcggttgtccttgagcatgtgcacggcgatggtgtccgggcggaagttgtccatgaaccagttgaggtcgtacatcctgggcttgaggtcgttgcggttcctgcccctgccgccgatgttgagccacttgccgacgagcaggtcc

SEQ ID NO: 308029 - DNA, 394 bp, Zea mays
ttctgggtttgtccacgcgtccctcgtaaggaccctacctaacgtcccggaagccatcctttggccaaggggagttacacgctagccggcgagtggccagccgtcgtcaaccgccttagccccaacagtcgcaccgtcgccgccgaggcaaactcgaagccacccccgccgccgcagtcacagccgcgccgagcttgagccgtcgttgctccgctgaatcgcccccatcgtctctcctgaagagagaggacatttattgagacagcatgcctaagataaagacaagttcgtgtcaagtatcctgaaggatgggagcttattgaaccaaccatccgtgagttggatgccaaaatgagagaagctgaaaatgatccacatgatggaaagagaaagt

SEQ ID NO: 308030 - DNA, 323 bp, Zea mays
tcgtgaggcttgtgccaccgcggcggttcgggtggcgggttcttgaggtaacccggggatcggtatcgcgggtgagcggatcgagaagggcgcagagcatgatgagtaccgctgcttcgtctgcggcctcgcctgggccacggacgaccacttaatacacaacggctttagcacctactgcgaggtgctcgagtccaagatcatcctcgatcggtagacgcagaggtgccatgggttctgatacggaaccttgtacacggaagaggcgatgcggaacgccgtcaagggcatgaacggcccggaggtggacggtcgcaacatca

SEQ ID NO: 308031 - DNA, 341 bp, Zea mays
tgatgcttgggcggacgcgtgggcggacgcgtgggcggactcgtgggcggacgcgtgggcggacgcgtgggcggacgcgtgggccccaatcccttcggtccgtccgctcgacgtgatcccaccggcagccatggatccatacaagcaccgcccgtctagtgggagcaactccagcttctgtaccaccaactgcggcgcccccgtctggaacaacaactttgccctcaccgtgggacagcgaggtccaatccttcttgaggattatcatctaatcgaaaagcttgcttagttcgacagagaacgtatccctgaacgtgttgtgcatgcacggtgagccagtg

SEQ ID NO: 308032 - DNA, 436 bp, Zea mays
cttctgcctccggaattttattaatatcgtcacactgtccagagaactgtcatctgagctatcaacaaacactagagcctcgtttctgcagcagccagcactagagccccgatcgatcgatcggtcagtcatttctcataagtcataaccatagggctcgaagagagtcgcgcaggggtcgtcgtcgttctgcagcacggtggcggctcgctccatctcctccctgatgatccagatggtctgcctgtcgacgacgcggccgaggtcatggccggtctcgaacggatcctcgatgcacatcagggggcggtcgcccccgacgcgcgtagtccagcccttctcctgctttctgatcgtcttccccaggcggacggagatgacgtcgcgcttgtagcggtgctgggacgcccagtagtggaagaacccccacaacagc

SEQ ID NO: 308033 - DNA, 409 bp, Zea mays
ctgatggcaaggctattgccattatggtggacacaaagggggctgagagttagaagtcggggatgttccagagccaatcatgctcaaggaagggcaagagttcaacttcacgattaaaagaggggtgagcactgaaaacactggcagcagtgactatgacgactacataaatgagggtgaagctggcgacatactattagtggatggaggaatcgatggaggtgcgctgaggaggctataacaactcgataacaccacaagcagtaacatgtggctgatcagtggaggaactgctattcactggagcgaacctagaatgtacctgggaagagagagctggcataccgtccataactgagatagaaagggagacatgaatggtggatcgcatatcagaaacagaatgagt

SEQ ID NO: 308034 - DNA, 238 bp, Zea mays
aaaaaaccttttttccttggatattggcccacatttattaggggtttacccccaaaatagggggaaaaccattacaaacccgcaaaaaaaaccgggggggggtaaaaatatggggcgaacccccttttaaattaaacgggcgggacgggaaaaaacaggccgggggcaaaaagccccgcgttattttttccccgaacggttaacgggggcgggggggcccacacaaagggggggggcc

SEQ ID NO: 308035 - DNA, 406 bp, Zea mays
cctgggcacatgggcacagactggggcgggcattgcggcagatacggagggggtcatcgttgctggggaacaggttgatgcaactgccaccctggctgactcctacacacagactgacaacaccgtgcaccttgtgctccagggaaggtcaggcatgcagatctttgagagaaccctgaccggtacgactatcaccctggcggtcgaatcctctgacaccattgacaacgaggagggcacgatccaggacaaggagggcattcctacagaccagctgcggctcatgtttgcttggaagcagcttgaggaccgacgcacgcttgacgactacaacatccagaaggagagcaccctccacttggtgctgcgcctcacgggaggcatgcagatcttcgtgaagaccctg

SEQ ID NO: 308036 - DNA, 390 bp, Zea mays
cattttagccgccgccgagcggggggggttttttcagcaatgaggcgcggcttcccaccggctgcgctcgcggacgcgcgacctgttaacacgcgcgttgccaagaagggctacataccagctcaccacctaccgtacaacctacaaaatcggaaaatacctaaagttgaactctaactgggccttacacaatgagatgaccaacaagtgctaccacgatgcgacgggtctcgtatggaacataaccaagcgcgccatacggaacaagatagacatacacgtgaatggtcggatcatcatgaaatgtattcatgtccgcgtgtagcatgttcagccaaactacttgacaggatagtgccacattatgaaggtggataatgacccgctgaa

SEQ ID NO: 308037 - DNA, 391 bp, Zea mays
gtctgtaagtaattcctcacggaactaatactcaggttaaattttcaactgtgaagttaaatgtagtggtcgcagagttgtgatgatagagaactgctatacagaagttaacaagcaccaactctccagataaaatggcattgctgtcatatcacattacacgtcgcataagaatttatggttcctgttctttgctctcagttgaacccactatattttccacatgttgcttttctttcttgcgctttggaagaagcccttccgcggacatcagttcatacaacttgcgcatgattgtctcttcttctacctgcagtttatgcaactcatgggacattgctcgatatgtttccattagtgcttgattttgcttgtctaaatgcttggacac

SEQ ID NO: 308038 - DNA, 386 bp, Zea mays
accaacaggattcatagatattgaattcttattcgcatttcttgaaacaacatgagtaaattccgaagatctacaaccagagggtaccagtttttcacgacaaacatttgacagctttttgaccctatcagttaccggcaccataccaaaaagatcacggcctgaaacaaggggtaatagctcagaggtttcatatgcagatctctcctcggcttcaaagcaatcaggaaggacatccatgtgagtcgacatcagggccatagtatgcagcatggatatgccgtgtacagctcgctttcgagcctttcaaaataaccagagccaggggcaaccctttttttggtaactattgtcgtcaatggtaagcctgtaccatttcagccatt

SEQ ID NO: 308039 - DNA, 461 bp, Zea mays
cctgggctgacgcgtggtcggacgcgggggctgttctagtggtacaggggtactgacagtcgcaggctaatgttagtcgcacgcatcttaatggtggcgatagagatatgaagatcaggcattcgcttgtgtgccccatgaaggatggatggataaatttgccctcttagagagttctttctttcaggatctggacgtgattgaagatcaacggtgggggaaactctctagaagaactgattttcaacaaggatggctctgctattaagaaactgcaaaatggggtcaacaagcttgtagaactcgtcagggttactcttggaccaaaggggcgaaatgtaatcctcgtaagcgcgcttggctcacctaaaattgccaatgatggtgtcactgccggaaaggaggttgaacttgaggaccctgttgaaaattttggtgctcaatctgtcctccaagctgct

SEQ ID NO: 308040 - DNA, 322 bp, Zea mays
ggcgcagagacaggggtgtttcttctaggctatgtgcgggactcaacgcttgttgcatttcctaccgacctcgctgtaacttcacccgattccgtccacaccatgggggagggcgtgtcgagccacattggacaagccaggatgcaggggggaaactcgtgcttggagctttactgactcctgcatggcatgcaagctgatggacagatgcccggcgacaagaccattgggggtggagatgaagccttctacagcttcttcagtgaggactggtgctgggaagcacaccactggagctgctacatgagcacttgtacgcaac

SEQ ID NO: 308041 - DNA, 259 bp, Zea mays
ccacgcctgagagcacgcgtggttttttagaagaatgggggggtcacagcccctgcctacttgaatgactcacagaggcctgccacaaaggatgcttggggtgattgctgaccttaatgggctgcgatcatcaacgagccaacagatgcagctatcggctatggtcttgacaagaacgcttacatagccggctagaagaatgttctcatctttgacctcggaggtgggaccgttggtgactacctacttaccattgacg

SEQ ID NO: 308042 - DNA, 443 bp, Zea mays
gggtcgtgcagacatcgatgacctcctccaggacgtggccctgaacagaaaattcataacaatcccgtctggcggaccaaagcatgaagctgatatcaggggccaccgtaggacatacacaccaagcatgccacggagactgattgatggactaaaaagggtatccgtgagcactccacagatgcttctagatgaaattgaccagactgattctgatgtacgtggcgatcatgaatgatcactactcgaagtacttgaccctgagcagatcaaagcattcaaccatcactatttgaatgtgcccttcgacctggcaaaagtcatatttgctgcaactgccaataggatgcatcctatacccacgcctgtggttgacaggatggaaattaatgagctgtcaggctacacacccccagagaagttaaaaatacccctgaaacatc

SEQ ID NO: 308043 - DNA, 448 bp, Zea mays
cctcgcgtccgaattctcttgggtggttcatcagtttccaacaaggattccttttttgattccagcggtgtagtatgccagtttttccccatatttctccgcgattttttttgggcaggacttcttcgtgaattcacgcggaaacaagctcttcacttgcaggtggacaccgaggaaatcggagtgcaaagctttgatctttatctgccacggatacggagccgagtgcagcatatccatgggagacacggccgctcgattagtacaccatggatacgttgttcacggaatcgaccacgagggccacggcaaatcttcaggctcgaaaggctacctgtcgagcttcggcgacgtcgtcagagactgctcggaccatttcaagagtgtctgtgagaaacaggagaacaggctgaagaagaggttcctctacggcttctccatgggagga

SEQ ID NO: 308044 - DNA, 433 bp, Zea mays
ttgagatgccatctcagattattggcgtacaacatcaaaatacctgttaaaaaacaagctattgtatccggtgccattcatattgcggataagctaaatttgaactgcataattagaggaagtgtatttccggtccatatttatttcaaacatcatgttataaaaagtttttgaaatgtcatgcagaattaccactttatgccattgagaaatgaaattttgtggacataaaaaccaattagtgattaatctttgccatcattgtatattacacaggaagaattccagttagcattatttaagaatcagaggaaagaaaatcttttcgctaatcggatatttgacctttttgatgtcaagaaaaggggtgccattgattttggtgactttgtccgagctctaaatgtgtttcatccaaatatcccaatggatg

SEQ ID NO: 308045 - DNA, 455 bp, Zea mays
tttacgcgtccgcccacgcgtccgcccacgcgtccgcccacgcgtccgcaagaaactactagaattacaaggtcaaagaaaaatattgctcaacctgatgcaactcttacaccaaggcacaacattgattaccacacacagggtacagttgaagctaatggccatgcccatttggatgagaacactaacatgaccaatgaaggtcatgttgctccttttgatgggaagaaccctacaggcaatgaagataatgtggatgtcctagctgataacaacaggacgattggaggtcatgttgatgacactaatcagatgtcgaacggagatttagaattaggtcagaatgatcggtgggaaaggggaatcaatatgggacatggtcttcatagaattaaccgaggtttgcgtggaaagttgcaagttgttattcctgaagggaagataaggcctatggc

SEQ ID NO: 308046 - DNA, 460 bp, Zea mays
tctagaattggtactgggaattgggattgggctctggcacttttgcgacaacttagggtgtgtttgaaactttgaatgcactagagctaatatgtagttggctaaaaaattgctagtataattagctagctaacaaatagctaactaactattagctaatttactaaaaatagctaatagctgaattattagctagactgtttggatgcctttagctaattttagcaactaactattagctccagtgcattcaaacacccccttagtcatttcagtttacattcgtgagcacttcgctgcagaacatgattgtttaggattgtttaggatagaagcaggtgcgatgaacggtgctatatgcctaatcactgaccatttcttaatgaatgcacttgccagaaacaaaacacagatgcacgtacgcaacccatgtgtgaaaaaatatttcaatattgcaaaa

SEQ ID NO: 308047 - DNA, 457 bp, Zea mays
gttctgccccgtacacatgttggtccgtgtttgttatcccaatcaatctcccccctggtgtgtgctttcaaaggcagaatatatttgtgtcgttgataattcccggacacccggggaataaaatgggcatgtacatggagcctttgattgatgaattggtatgtgcctgggaggaaggggtatggacgtatgaccgagctacgaagacaaacttcataatgcatgtttggtaccagtactccatgcatgacttaccggcgtatgggctattctgcgcctggtgtgttcacgacccagctagaagaagagaggagggaacacctgacagatcagcagaggatggcggagatgtttcaatacatgcagagccttggcgccgcacagggtttcgctccgccgcctctattgttccctacaatggaccctgctctattccatactcctggtcaatctgggg

SEQ ID NO: 308048 - DNA, 448 bp, Zea mays
tgttatccttttgctgcatgcacaatttggttcactggtagtggttgcaattgaattgtctacagatttgttccctcttcaaaattatttggcatagtttgctttgctcaagatgattatactgcccctgtttttttctgattggaatgggcttggctaccatgatgactttggccctgtttcgaagcacccagtttttaagaaactggtttatagaaattgaggtggttccaaatgtaccagtttatgactcagtttatagaaattagattcccagtttcttaaaaactaagaaggtggcctctcctagctaaatgttaaaaactggttttttaaaaactggtttgcttcttaacgagtcttagcaaatattatgccaaactttgggtagtgatttgttatacagaacggtgggtggaaatgaaacatatctggcaggttccactca

SEQ ID NO: 308049 - DNA, 439 bp, Zea mays
  unsure (1)..(439): unsure at all n locations
ggtcncttgtacaacctgaaggagaaaatccccgacgaggagtacatctgctgcctggaggaggcagagatggtgcggccaggtgagcacgtgaccatcctcacgtactcccgcatgaggtaccacgtgatgcaggccgccaagacgctggtgaacaaggggtacgaccccgaggtcatcgacatcaggtcgctgaagccgttcgacctgcacacgatcgggaactcgatcaagaagacccaccgcgtgctgatcgtggaggagtgcatgcggacgggcggcatcggcgccagcctgcggtcggccatcatcgaaccgacaaggagctacgtgtactccccgactgtgagatcaagttccaggccaagtaccccgtcgtcgcccgactcgccggcgacgcctgaactcgtcagtctcggtctaaatttactctgtcctg

SEQ ID NO: 308050 - DNA, 365 bp, Zea mays
ttcatttttttttttttttttttttttttttttttttggggtttttttttttatttgccgagcggaaaatgggagcacaagagcttcaaataggggggtttttcccgaatcaggacagttgagtcgagaccaacattcctggggggaactgcacaatgattttacagccgcggggggcccatccggtcgctgtcggtgatgacctgtgcgcgggttatttcccttagcgacgtgcaaccgctgagcgccatggggggctccagcttggcccttaaaatttggagcacctttcgcacgccgggcttgccgtccaccgccagggagaacagcacgggccggccgatgaacactcctgaagctcccaa

SEQ ID NO: 308051 - DNA, 387 bp, Zea mays
  unsure (1)..(387): unsure at all n locations
cctantcgtccgcccacgcgtccgattttatggggttattgatatgcatttttaaaaccttttcaagatgataacatagtgatggaatccaggaaggtgtgttatgaaatgtgtattttctgatgtgcattaaaattgtggaggttgcatgctagcatgctccctttactctacccttgtggaaaatgcttggctatgtatatgatatggtctgtttagggcatgttcgtttcaaccccaatctatatggattgaaggggattgagtgggttacaatccctggtaagtcaaaatcttttcccttcaatccatatggaatggaaataacctaacaaacccttaccgggaactgatacaagaacagcaggatagatcacctaacttgcc

SEQ ID NO: 308052 - DNA, 390 bp, Zea mays
ctctcgcgtccgcccacgcgtccggttgtgatcaacggatgctgtgaggatccactgaagagggtggggacccttacgcagtccctgctgaagcatacttgccggttggggctggaggagatcaagctcaagttgattggcacatcccacaaattagggcacggtcgataacagacttaccgtgataagcagaagctcttaggtcagctgaatgcccaaggtgctgacgggcagcgaaagtcccattcggcaaaatcaccatactgtgaaacacctgcatgttaccttgctgtaccaacattagcagcaaggtgatttgcgggcatgacatgagctttaacgaattgcactacccttcagaactgcattgactatgttgctacctatgtt

SEQ ID NO: 308053 - DNA, 317 bp, Zea mays
ttctggcttctcctccccctcttaccaagtcctcctcgtgttagggttccttcgggttttgcggaggggcgatggcggcggctgatgtggagtaccgttgcttcgtcggcgggcttgcctgggccaccagcaacgagtcgttggagaatgccttcgcctcctacggcgagatcctcgactccaaggtcatcaccgaccgggagacggggaggtcttgcggctttggattcgttaccttcttcttcgagaactccatgctcgacgctatcgagaacatgaacggcatggagctcgacggccgtaacattaccgtttac

SEQ ID NO: 308054 - DNA, 548 bp, Zea mays
gttgcattgtccaacatgccagtggctaaggagactgtctgtggacttaccaagactgtttattatgaggaatctccacttatgtcaacctatcttgtggctatagttgttggcatctttgattacatagagagttcaacatcagagggaactaaagttcgtgtttatactcaagttggcaagactaatcaaggaaagtttgcactagatgttgctgtaaagtcgctggatttatacaaagattattttgccactccttatccattacctaagttggacatgattgctatcccggatttttctgctggggccatggagaactatgggttagttacttaccgagatacagctttgctgtatgatgagctattatcatcagcatccaacaagcaacaggtagcaataactgttgcacatgagttggcgcaccaatggtttggcaatcttgtgactatggaatggtggactcacttgtggctaaatgagggttttgcttctgggtaagctatttagcagtagaatctttatttcctgaatggaatactggg

SEQ ID NO: 308055 - DNA, 284 bp, Zea mays
cctactcgtccgggactctatgacggagagcatgacactttctgctgggatgccggagaacaccccaaagctgcggctaacttttggcgaacagctggccatgcctcttgcattggtgcgtggggtcgctcaatgggtgcagacacaagtctaatgtgtggctcgcacgacccatcgattgcaggattggctcttgattgtccattctgcaacaggtttgactcaatgatggatctagcggacacacacacatatccactgcctaaatcgactgactaacttgc

SEQ ID NO: 308056 - DNA, 549 bp, Zea mays
  unsure (1)..(549): unsure at all n locations
caggtacccgtgtccggatattcctcgggtctgtcccacgccgtccgtgttcanctaagcacactacagcaccgggcgaggcggctaggccccctcaccgtccaccggcgactgggccggccgtcgctgccgccctgcctctccaccgtcgccggcgacgagcaccactaggtgtttttgagtctgttgcgagtgttgtggccatgtccatgttcaataggatcttcgggaagcccaaggagcaggccaactccaatgctttggccactctggacaagttaaatgagacacttgatatgctggagaagaaagaaaaggtgctggagaaaaaagcaaacgctgagcttgagagagccaaggagttctcgaaagcaaagaataaaagagcggctatccaatccttgaagaggaaaaaactttatgagcaacaaattgagcagcttggaaattttcagttgagaatccatgatcagatgatcatgttagaagcaagttaagctacaacagagactgttgatgcattgagaactggagctgcagctatgaaag

SEQ ID NO: 308057 - DNA, 287 bp, Zea mays
cgcgtagaacgccgacaagcacgaaggagagctggagcgatgttacaaggcgcagacccagatgtatgggcagcctgagactgagaaagaacaagggaaggcctcaaaggcgcgtgcaaaggaggaggaaccgaaagctacaagctggcaggcggaactggccaagacaagcgacgagagagctcaacgaaagcatcgcggctgggaaaaaccctgagtggaagctctacatacagacgatcgatcttgaccaaaaggataagttggacaatcacccgcgaaactta

SEQ ID NO: 308058 - DNA, 415 bp, Zea mays
cgtactcccggacggacgcgtggggtggaccggggggtttagtccatgtttgcagacccgccgcgcccagcgcggagggatgctccggatggctcgaccgtagcggctaccctggcgcatgagttgacttggacccgagactgcttggaggacccccgttgtcgtgcggccgactcccggcgcccgtgtaccatcgttcgtgcggacataccgtgcctgctgcagttgagaagtgcttgccttgctgctacccgtaccacgggaagccgagctcgacacaacgttgtcttcgccgagctcaccctccggagagcggctcggcggctcgagagcgcccgcggtgtttgcctcgggccgacgtcggcctatggacggcggcacccatgacacctcgctggcgctttcggtcccggat

SEQ ID NO: 308059 - DNA, 532 bp, Zea mays
gactgattccgcgcgcgagatcgccgccccgggtgggccctagatcccgatggcctcgcgccgccgcaccctgctcaaggtcatcatcctcggcgacagcggggttgggaagacgtctttgatgaaccaatatgtgaacaagaagttcagcaaccagtacaaggctacgattggggcggatttcctcaccaaggaggtgcagttcgaggacaggctcttcactctgcaagtaagattggttaccctagccgtatgggagtagttctgtttctttacgccaacttcagccccgattagtactttcttaattagttcgcgaactcatcagctgggatatttagaaagtataggagagggtgtttgccgctcaacatttgttaggtcatagcgtcgtgcttgtcgcggccgattcagtatcctcaatatgctggttcgtttaggcagcttgcttacacttgaaatgtctagcttcagtactaggtcctgttggcaaaaagtcaggttaatcaattttattgcatcattgattact

SEQ ID NO: 308060 - DNA, 449 bp, Zea mays
  unsure (1)..(449): unsure at all n locations
aataacacgttcttgggaccgccgccgccgccctactttcagtcccagctgctcaggtctccatcggcctcgagccctttgccggcgacgagcactcacaacaccaggctgagcagcagcagcagtggtgtgttctggcttgtgtgggacctagaggaagcttacacaacagggaagagtattgtgttagggtgtaacaatgtcttcttcaatggaatcgtcataccttcctgctacaactgagtcattagcacaagctcaagaggctaaggatgcttcagagtccatttcaatcctttaccgtgtcattcaggacccatctttttctgctgatgcactgagaacaaaagaagttggaattacaaatcttacaaactacctcactaaagaaaacagagctgaggagctgcgtaatcttntgacccagctcaaccattttttgcagttat

SEQ ID NO: 308061 - DNA, 536 bp, Zea mays
gataagccaatccaaagggccattcacaggcagatgtcgtgctgactatatataggaactaccagaaactcactcttcaggaaagcccaggaattgttcctgctggaaggcttcccagatacaaggaagtcatacttctgaatgatctgattgactgtgctcgtccaggagaggagattgtaatttttcttcacctaccatttgcttttcatttcatattactttttgaattagactgacattcagtgttgctgtctccaggaggtcactgggatatacacaaataattttgacctgtctttgaatacaaagaatggtttccctgtttttgccacagcggttgaggcaaactatgtggcaaaaaaacaggatctgttttctgcatacaaattaacggacgaggaccaagcagagattgagaagttgtcaaaggatccaaggattggagaaaggattatcaaatcaattgcaccatccatttatgggcatgaagatatcaagacttgccattgcccttgctatgtttggtggacaag

SEQ ID NO: 308062 - DNA, 311 bp, Zea mays
atggcatgatttgcatggcctcattattggagagcacgtgccacacctgctggtagaagttctgtcgtacattgttaggcatcaggcacgcaccaccatacacgcttggttaaacaaaaaatacaagtgggtgtttgcgaagagaattaaaggcaggccggcacaaaaggtaccccgaccatggccaggggtcaatggtgtcggtccacctctgctcacctccgggggcgagatgaccccacaatccttgatataatagtcgtcgaacgcgcgcgatatggggagtaccgatcactcttggctgggatggc

SEQ ID NO: 308063 - DNA, 344 bp, Zea mays
ctcctggggttcttttctctctctattgaactcctcttcaaccagcgctctagctcttcacgcttgagtttatcctcttcctcaagaagacagttctgtttacccaacgtaataatttctttgcatgcgacatgaactccctgatccaaaagttttaaaggaagggacacaaaaatcctatgcgcattcggctgggccgaacctaacctgaaggcctggtcaacctgaggtttgaatataacagcagcaccctccaaaagaaattctgttgccagatcacggctcttggcatgcttatggggatgggcaccatcaccatcaaaatcatttccatgcctgaccat

SEQ ID NO: 308064 - DNA, 179 bp, Zea mays
ggggaggccagatgcccaaattacaccagacaaattttgaaggctttttggtggctctgtcgatacatattttatggggattttgcttacattctttctggggcatgcctcccaccgatgaaaatttagtatgggttttcttgggctctatgcaaatcgactgaatcagtatggaaaaa

SEQ ID NO: 308065 - DNA, 222 bp, Zea mays
gcagcaccaagaagcaccatgttttccttaggattaacttagaacaaatcctgacaggagtaacagcgtacattgaaccacagtccatgctggatgatgcatgggggtgctggagcctaggatgaacacgggacttacaactgacacagagcgaccttgcaatcaaaaacacatatgggcaacaacaaacgagacgaacgaagatgaaccctctggactagg

SEQ ID NO: 308066 - DNA, 204 bp, Zea mays
ggggaggccaaatgcccaaattacaccaaacaaatcttggagggtttttgttgggtctggcgatacatattttatggggattttgcttacattttttctggggcatgcctcccaccccggaaaaattaaggtgggttttttcgggctctatgcaaaacgactgagtcagcatggaaaaaatagcagacgtttaccccccaaact

SEQ ID NO: 308067 - DNA, 235 bp, Zea mays
ttcctttttttttttttttttttttttttttttttttttttggggggagacgcagctgaccacctagagcttcatacttacttattcagactgatccagcatgtggcaacattggaagttcacatgcttacagacgacaaatttttattacaatagcctggcttggctgcttcacagaataaccaaacgacaaccactaaattgggacgatattaaataaacaactcaaaagcaa

SEQ ID NO: 308068 - DNA, 384 bp, Zea mays
ttctttcgtccgcccacgcgtccgcccacgcgtccgcccacgcgtacgcccacgcgtccgcccacgcgtccgaggatttcttttctgacactttgattctgaccaatctctctggcctgctgcttcctgataatcgaccagttccccagccttgctccttgcactcctccctcctccatctccagcattgtgttctgattcacctgctccaatggctgttctttctgctgctgatgcttccacggtctcagctatcgggtttgagggctatgagaagcgccttgagatcacattctctgaggcacctgtctctgtggaccctcatgggcgtggtttgcgtgccctctccagggcccagattgactttggtcgtggatcttgcac

SEQ ID NO: 308069 - DNA, 260 bp, Zea mays
ttgttttgtgtttccgagcgcattacggaggcggcgattcgcgggctcgagggcgtccggggagacgatggcgacggagaagattgcaattaaggtgaagcgtaaccagagggagtcccgactatccaagctcgaggtacgccagtgtcccaagtgggggcgcgagaagagcacgtactcccagacctactaagccaaggagacatgctacctgctgctagagaaggtgaatgtgtaccccggaggccaacatgaggagt

SEQ ID NO: 308070 - DNA, 344 bp, Zea mays
ttcttcgcgtccggagagtgtgtgtgagagagaggatgggtggcagagtcagggctgctttggtgctggccctggcaggtggtggccagtgagcctggccgtggagagccagggcgcgaccggctactgttacggtcaggggcacacgacgacgccgacggctgtgaacgaggccattgaggccctgaaggaccagaccaaggggcctgagggcgaacatgctggcgcaagaacatacaccacagcattgtacaactagagcaaggccacaagcatggccatgcacacaagcgcacatatcccactgacacaggaggccctaaacttactcggatgtacgagca

SEQ ID NO: 308071 - DNA, 341 bp, Zea mays
acgcctccgggaaggaatgtccgggttgcgaacggagtttccaaaacttagcttgagcaatatatccacatccagctgaaggttggttccgtgttgccatcagatgagaaagcatagagaactgacctggcaagccttcatgagatgcctaccaatgctcctcgctgccatactgtcgcatacaaggaggcgctagcagaatttacaacatatgatggcgtgaaccattcgccccatgagctcttgctttatccggccacttatgcacttattgaaactgacccaacatcagcaggccttgtatgcctaatggacccacccctgtaagaggtttattccgc

SEQ ID NO: 308072 - DNA, 473 bp, Zea mays
  unsure (1)..(473): unsure at all n locations
tttagcagcaaactctttagtttacttaattcattctcatttcagcacagagttttgttgactggaactcccttacagaacaacattggtgaaatgtataacttattgaacttcttacagcctacttcttttccttctctatcatcatttgaggagaagtttaatgaccttacaacagcagaaaaagtagaggagctgaagaaacttgtagctcctcatatgcttcggagattgaaaaaagatgcaatgcaaaatatccccccaaagatagagcgaatggtacctgttgaattgacatcaatccaggctgaatactaccgtgctatgcttacaaagaactatcaagtactgcgcaacattggaaaaggtggtgcgcaccagtctttattgaacatagtaatgcagcttcggaaagtctgcaaccatccctatcttattnctggaactgaacctgaatctggttcacctgagtt

SEQ ID NO: 308073 - DNA, 320 bp, Zea mays
tctcttcacgcgtccgtccacgcgtccggcgccattggccagctagagccaaccagaagagcttgcagttactgagagtgtgtgtgagagagaggatgggtggcagcggcagggctgctctgctgctggccctggcggtggtggacgtgagcctggccgtggagatccaggccgacgccgggtacagctacggcggcgggtacacccggacgccgacgtcggacactacgaccccgaagcccgagaagccccccaccaaggggccgaagccgaacaagccctccaaggagcacaagccgcccaatgagcacgggcccaag

SEQ ID NO: 308074 - DNA, 373 bp, Zea mays
tgtgtactacctgtttgccccatccctggagcatatttgtcgtgcagtggattttatccattgtaatgaagtgcaaggtggtagcacctatgtccactgtaaggctggaaggggacgaagcaccactatagttttgtgttttttgatcaagtacagaaatatgactcctgaagtagctttggatcatgcgaggtctgtgaggcctagagtgcttttagcgcccgcacagtggcaggccgttaaaatgttcagcaagctcaacgctagatgcctttccatacagagctcgaacccaacttgctcagcactatcttatgaggaatccagtgaactgtcaagcacgctgagcagcagatgccttcggattcagagc

SEQ ID NO: 308075 - DNA, 437 bp, Zea mays
tcgcgatttattactaggcaaaatcaagaagatgagccacctcaagataatggcaatgatcaagggggagatgaaaataatcaagaaaaggaggatgaggaagaaccaaggccgccacacccaagagtccaccaagcaatccaacgagatcaccccgtcgacactatcctcggagacattcataagggggtaactactcgatctcgggttgctcatttttgtgaacattactcttttgtttcctctattgagccacacagggtagaggaagcacttcaagactcggattgggtggtggcgatgcaagaggagcttaacaacttcaccagaaatgaggtatggcatttagttccacgtcctaaccaaaatgttgtaggaaccaaatgggtcttccgcaacaagcaagatgagcatggtgtggtgacaaggaacaaagc

SEQ ID NO: 308076 - DNA, 444 bp, Zea mays
ttcaagtttggctaatgaaggtgccctcttggagttgcttgacttggaagcctagaaaatacttcaactcccccatcattgacatctcgaatttatgtgtcatgatcctactaaactcttcacatgtagactcgttagtagacccaaatataatatcatcaacataaatttggcatacaaacaggtcattttcaagagttttagtaaagagtgtaggatcggcttttccgactttgaagccattagcaataaggaaatctctaaggcattcataccatgctcttggggcttgcttgagcccataaagcgccttagagagcctataaacatggttaggatactcactgtcttcaaagccgggaggttgctcaacatagacctctgccttgatcggtccattgaggaaggcacttttcacatccatttgatagagcttaaagccat

SEQ ID NO: 308077 - DNA, 515 bp, Zea mays
  unsure (1)..(515): unsure at all n locations
ccttcgcgtccgtccacgcgtccgtccacgcgtccgcccacgcgtccgcccacgcgtccgcccagattatgttcgagacattcaactgcccagcaatgtatgtggccatccaggctgttctttccctgtacgccagtggtcgaacaacgggtattgcgctcgactctggtgatggtgtgagccacaccgtccctatctacgaagggtacacgcttcctcatgctattcttcgattggaccttgctggtcgtgaccttaccgacaacctgatgaagatccttactgagaggggttactccttcactacgactgccgagcgagaaattgtcagggacatcaaggaaaaacttgcctacgttgcccttgattatgaacaggagctggagactgccaggaccagctctagtgttgagaagagctacgagctgcccgatggccaggttatcacaatcggtgcagaaaggtttaggtgccctgaggttctattncagccattcttcattggcatggaatct

SEQ ID NO: 308078 - DNA, 410 bp, Zea mays
tctgataccaagcctcccacgcccaagccgggcccgccaacgtacaccctttcgtcaaagcctccgacacccaagccgaccccgccgacgtacacccgttctcccaagccttcgacgcccaagccgaccccaccgacgtacactccaagccccaagcctcccacacacccgacgcccaagccgaccccaccgacgtacacccctaccccaaagcctccgacgcccaagtcgaccccaccgacgtacaccccttccccaaagcctgcgacacccaagccgaccccaccgacgtacactcccacaccgaagccgtcggtcaccataggcgccacctacacttcgacgcctgcggtgttttacacccacagcccggcgacaccatactactagaaagcgatgcctaccatacc

SEQ ID NO: 308079 - DNA, 307 bp, Zea mays
ttccacgcgttcgcccacgcgtccatggacgcgggggttaaactgcgatccgcagggccctcttatgctgtctgtttcaaagatcactccagcatctgaccagggcaggtcctttgcctccggtcgtgtcttctcagggaaggttgctactgcattgaaaggtcggatcatgggacccaactatgtgcctggacagtaaatggacctgtgtgcaaagagtgcacagcatactgctatatggatgggaaagaaacaagagatcagatgtggatgcaccttgcggtaacactgttgctatcgatggtct

SEQ ID NO: 308080 - DNA, 158 bp, Zea mays
ccttttctcttttcttttttttttttaagttcaaaggggaaacttcataaggattggggccatactgctgcagaagagttttgggtacaacacaaaggtcacaacagggccatttaaccaacaaagccacaaccacgattcatgacacacaaaccaca

SEQ ID NO: 308081 - DNA, 368 bp, Zea mays
tgttcgcacacaccgaccggtctgcgatctcggaggcctgatcccctggtcgatccaagatgcatatctttgtcaagactctaactggaaagactatcaccctcgaggtggagtcctctgacaccattgacaacttcaaggccaagatccaggacaaggaaggcattcccccggaccagcagcggatcatgttcgctggcaagcagctcgaggacgggcgcacacttgccgactacaacattcagaaggagagcaccctccaccttgttctccgtctcaagggaggcatgcagatcttcgtcaagaccatcactggaaagactatcaccctcggggtggagtcttctgacaccatcgacaacgtaaag

SEQ ID NO: 308082 - DNA, 375 bp, Zea mays
tcgttccgctgggccaccagctttgaccgcgggcggccttcccctacgctactgctgctccccaccccactcccccgcaggagcggcggcggcggcggcggcggcgaggtcgtaccccacatcggcgagcggcggcggcaccgccggaggcaaaggcaagatgttcgggcgcgcgccgaagaagagcgacaacaccaagtgctacgagatcctcggggtgcccaagtcggcgtcccaggacgatctcaagaagggctaccgcaaggctgctatcaagaaccaccccgacaagggcggtgaccccgtgaagtccagggagctcgcacaagcctatgaggttttgagtgatccagagaagcgtgagatatatgatca

SEQ ID NO: 308083 - DNA, 341 bp, Zea mays
tcttatctcactcccaccaccacgcctacatcgtgaccgagccaatcacctccgtgatgcatccatttgctgagctcgtggcgtatgatctattgttctcaatcccattgattgcgtgcaccttgaacggaactgcttcaattattgcatttgagatttacgtgatctacatcgacttcatgaacaacatgggccactgcaactatgaattggtgcccaatgggctcttcaaatggtaccctcctatcaagtatctcatgtacacaccttcgtttcattctcttaaccacactcagttcaggacaaactcctccctgttcatgccattctatgactacata

SEQ ID NO: 308084 - DNA, 312 bp, Zea mays
ggggccggggaatacatgccaaacccgaattttttttgggccacgttaaaacagacgggcgttgtctcagggctcggaaagcctcactaaacatggggtggcatatttacccacatcgccgggcggataaacacacaaattacccgtttgcctttggacgggttggtggcaaaccatattccttgggcgactttgggaagccaacccttatcttgccataatcaaagacggggtggtagactcccatgaaaacctcacccaagatccaaagagggccccgggggggggggaaatccataggtgggaatcccc

SEQ ID NO: 308085 - DNA, 381 bp, Zea mays
tttttccctcacccgcgtggacgcttgtaaccccctactgcaagcgcacccgacctgggcgcgggacgaacacgaaggccgcgggatttccacctctctcacacccgtctccggccacctcgcttccccccttcgcgctcgcccacgcgctcgacccatctgggctggggcacgcgtcacactcactcgtcggcttagggaccccccggtctcggaacggccgacacaatataattttcgtacattctaaatatctatcgtatgtcgccgtctctccaattattcttcaaaatacatccttatgtatggccatgtacgtaaatggaaagcagggtagagttgttatcagccgtgcgcggagggtgttcgatgaaatgtcct

SEQ ID NO: 308086 - DNA, 206 bp, Zea mays
tttttctcttttttttttttttttttttatagggggggacttttttacttggatagtggcccacaattattacggggttacacccaatatagttggaataccattacatacccgcacaatacacctgctgctgctaaacatacaggacgaacacacttgtcaattaaacggccgggacggcagaagacaggccggcagcagagagc

SEQ ID NO: 308087 - DNA, 374 bp, Zea mays
ttgcagctactgagagtgtgtgtgagagagaggatgggtggcagcggcagggctgctctgctgctggccctggtggtggtggccgtgagcctggccgtggagatccaggccgacgccgggtacggctacggcggagggtacaccccgacgccgacgccggccaccccgaccccgaagcccgagaagccccccaccaaggggcccaagccggacaagccgcccaaggagcacaagccgcccaaggagcacgggcccaagccggagaagccgtccaaggagcacaagccgacgccgcacacgtacactgcgagccccaaaccaacgctcgccgacgacactcccagcactgaaccccccaagccgatggcacccac

SEQ ID NO: 308088 - DNA, 246 bp, Zea mays
tgccacgcgtccgggtggcttatcatccgcggacggatcgaatacgggttcctgaggatctccggggttcggctgcgtgggtcagcagatcgagatggcggaatcagatgttgagtaccaacgcttccagggcagtctagactgggccacggacgaccactacctgagacaacgacttcagcacctacggggaggtactcgagtacaagattatactcgatcgggagacgcagaggtcccacggct

SEQ ID NO: 308089 - DNA, 360 bp, Zea mays
actgcccacgcgtccggcaaaagcgaagcaaagggatcggtattctctgcgatttctctagatctcgactaccccccactagttttggttcctcctttcgttcgagagagcgattctggtggcaatggctaacagcgagggtccggcgatcgggatcgacctcggcaccacctactcgtgcgtcggcgtgtggcagcacgaccgggtggagattatcgccaacgaccaggggaaccgcaccacgccgtcctatgtcggcttcaccgacaccgagcggctcatcggcgacgctgccaagaaccaggttgccatgaaccccaaccacaccgtcttcgatgccaagcggttgatcggcaggag

SEQ ID NO: 308090 - DNA, 265 bp, Zea mays
actggtcacacgtgcgcccactcgtacacgcaggggaccggttcacacaacttgagtacgggccgcgactggtaggtcaggataaagctgatcgagaagttccaggagatctatgtggacacgctggacggggtgcacgcgttccggctatcccacacccgtgacaggacctacgtggtgcttcgcgacggcatcggcctagacacgctctacattggctgagcctgtgacggtgccggttgatacgcgctccgtgtgaaagccc

SEQ ID NO: 308091 - DNA, 337 bp, Zea mays
tctaccacgcgtgcggcaaaagcgaagcagaggaatcggtatcctctgagagtcctgtagatcccgactaccccgcactcgctgtggttccttcttgcgatcgagagagcgattctggtggcaatggcaaagagcgaggggccggacatcggcatcgagataagaaccacctactggtgcctgaggatgtgacaacactaccggctgtagattatcgccaaagacacaggggaaccggaccacgccgtgctatggatgataaccgacaccgagcgggtgatcgaggacgctgtcaagaaccagaggcgcatgaaccccaccaacaccgtattgttat

SEQ ID NO: 308092 - DNA, 213 bp, Zea mays
tgctttgcgctcgcggccaccgtgatgtacgacggcaacgtacagggcgtcctgtctgaggttctgtgcgcagctttccgcaagggcaagaacggtaggaccgagtgcagggaccacctgacgcacaggctgaagcacgacccgggggccattgagggcgatgtcatgatggaacacatcctgcatggcggctttttcatgaagcacgacaag

SEQ ID NO: 308093 - DNA, 261 bp, Zea mays
tttccacgcgtccgcccacgcgtccgcctgtgtctccactccgcttttgcttggttccatcgggccggagaggaggagctagctagctagcagcagctctgttggtgtgtgtgtgtgtgtggagggttgctgcagatcgggctagctgaaacggtcgggagccatggggaggggccggttggagctgatgcggatcgagaacaagatcaaccgacaggtcaccttcgccaagcgaccgagccgcctgctcaagaaggcgta

SEQ ID NO: 308094 - DNA, 305 bp, Zea mays
ggagaagcaacagcaaaagacaggcttccatgagccacacaccacaacagtcagctcttggcttttgttctactcgcaactcgcgctcgccacccatttattggaaaacaaaattctaatcacgcgtcggccgcgagcccctcgtcgccggcggcggtctcgagctggtctgctgagacgacgcgggcggggttgcgcactgcgcagttgaggcggacctctccggcgttgcccgtgagcacgtccatctggctcatcttgaccatggacctggcgaactggtcgaagaaggcggcctggttgag

SEQ ID NO: 308095 - DNA, 431 bp, Zea mays
tctcttagagaaggaaaaacatccccaaacccgggagcccgatcaagagggcgaaccctggcgccaaacgcgacaggaccgacagaggcgcccaggcggcccggatcgggatggagctgcacgccaacgaggggcccaagaccgcggagaacttccgcacgctaggcacaggcgagaagggcgtgggcaagtccaggaagccgatccactacaagggacaccacctaacaccgagtgatccccgagtacatgggccagggcggccaccacacccgcagaaacgggaccggaggagagtccatctacggagagaaggtccccgacgagaaactcgagcgcaagcacaccgcccccggagtgctacccatggacaacgaccagaccaacaccaacggatcccaaaagggcaactgcaccaaagggacccctag

SEQ ID NO: 308096 - DNA, 386 bp, Zea mays
ttctttgagtgggagagacctggcgcagcccgggagggttctgaggctaccggtgcggcgccaagtggtgggaggcatggcgctacgcacacaaagtggacgctacaagtcgtgacactggttcttgaaccctgcaggcggtgcgagaggacgtctacctcaacatggcccaccagagccgatgtgtgcgatgtgctgtggtcatagacctaaagcctacgacacagatcagtgtcactgctgtaccctatgcgcaaatggtgctctctgactacaacacttttggacattctggccctgagaacatcggggacaaaggccatattactggagacgctggacacactgactgtgatctacctgctgaacagaacgaagctaagaac

SEQ ID NO: 308097 - DNA, 418 bp, Zea mays
ccttgcatatttgcccacatttattatggttttacacccaatatagttgcaataccattacatacccgcacaatacacctgctgctgctaaacatataggacgaacacactagtaaattaaacggccgggacggcagaagacaggccgggagcagagagctctgcgttattctctcctcgatcgtctaacggggacggatggcagcacacaaagaggagggtacgtagtagggttagcagtggcctcttatcatcatcattaccatcagcagctcatctttgccggctggctaggacacaacccttccattgatccagaccacctgtccaacacaaaagaaaaggagagcctatggttagtgccagactatgcaggagatcagtatgatactgacgatacatttgacacaagcacata

SEQ ID NO: 308098 - DNA, 483 bp, Zea mays
ggaaagcaggccgcctgcgggcaccagaccggaatgtcagggaggacccacgcgtccttattagggcggggcggaggcgcggagcgggggcgggacccagaaacatcatccctccgggcgcggagaggagggggaagcagagcagcgggcgcggaggacatgacgccgaagcggctggtcgaccgagcctgcaccgcaccccccatccgcgtactggttaatcacctgcatgatggagggcgcagaggccagtactggacccagacttccagagggttcgcgtagtgcttcaggaacgacctggccctgctgatcccggcccttgagctcgtgggatacctgacaggccttccgatgacgggcgatgcaaacagctcctggtgctctggcgagagctggaagaactccgaggcggccccgaaagcgcctgccaagacagacttgctgacgccagggttgaccacccaggaatcggaccacaag

SEQ ID NO: 308099 - DNA, 443 bp, Zea mays
aaagcaaggacgccagcaggtaccggggcaaacccgggggggcccacgcggcctctttgaacgcagcaagggggccgaagcacggggaggcactcgtgaggacgcgcggaatcactgcagagggccaaggcgagaaggcggaaaagaaagcaggacctgagacccaaactccagaaggtggcgaagcacaggccccaggtgctgaggaggacgacgacgatgacgtcgacctattcggagaggagaccgaagatgagaagaaggctgctgaagagcgggccgcagctgccaaggcttctggcaagaagaaagaatctgggaagccatcagttctacacgaagcgaagccatgggacgaaagagaccgacatggccaagctcgaggaagccgccaggagtgcccaaaaggaaggggtgctctggggcgcaaacaagcttggccc

SEQ ID NO: 308100 - DNA, 144 bp, Zea mays
cgctgggtttgtgaccaaaacctgcgcgacgccacaagggtgcggctgtacaggagctacatgggccagctgaagaaggccatagaccaaggagcgaaccaggctggctactacgacaggcttctactacacaactacaagagg

SEQ ID NO: 308101 - DNA, 209 bp, Zea mays
gttcgtgagacctgcaccaagaccaagatggccatggtctttggtgatatcaccaccaaggacaactggtctactatatgattgccaggcagacctgccgcaacattcgttctgtgtctaaccatgtcgggtttgacgcgcgccactgcgaggccatagttcacattgatccctgtccgctgatatcgatcaccgtgtcgcatggccac

SEQ ID NO: 308102 - DNA, 132 bp, Zea mays
gagatgcggatcctcatggttggcctcgacgccgtcggtaaaaccaccatcctctacaagctcaagctcggtgagatcgttaccaccatccttaccatcggattacatgttgaaactgctgtgtacaagaac

SEQ ID NO: 308103 - DNA, 433 bp, Zea mays
cccctgcgggcaccggcccaaaattccgggggacgacctcacgcgcgcgcttatttggacggattcctccgctcgagctacaaccgcggagccagcgagggagccggccggggctatggactcctcgccccctagtctacggcggtgatggacgcagccggggcctggcgggactacgtgaacaactacacgctgtggcaggaccgcaccttgcacgccctggccgagctctacgggatggttgcagtcgtagccctaggccaaccgataagaatcgagtgccgggtttctgagtatgggaggacaacgcaaaaagtgttccatttcctaaacgtcattgtcaatggtgtgaggtcaacccagtttggactgcggcgggatgtgcaacttggacaccctgagatacttcaacatgtgcttattgatttgccgg

SEQ ID NO: 308104 - DNA, 445 bp, Zea mays
gcgccgttctttcttctccccgaccgcgaggacccgaagaggcttgaatggtctgcggctagagaaaggctataagagcgagctgggtccctcgaggatgccatcaagaaaccgcgtggaggggagggcgatgagatgagggatgctggccgcggtgatggactactttagctcctgctggggcccgcgatcggatgccgggcaccggggaaagggctccgacgccgctggccggcaggacggtctcctgtggtacaaggacgccgggcagctcgttactggggagttctccatggccgaggtgcaggccaaccagctgctcgaggaccagagccaagtggagtccggatcgcatctccctggctgacacgggcccgcagggcaccttcgtcggagtctttgatggccatggcggcccggagacgtcccggttcatcaatgacca

SEQ ID NO: 308105 - DNA, 508 bp, Zea mays
cggatgtttgggcggacgcgtgggcggacgcgtgggcggacgcgtgggcggcgggtcgctggccgacgtggccgcggcccggagcggcgggcggctcgaggagcgcgccgtcgcggcgtacgcggccgacgtggccgcgggcctcgcgtacgtccacgccgtcggcctcgtgcacggcgacgtgaagccgcggaacgtggtcgtcggcgccgacggccgcgccaagctcgtcgacttcgggtgcgcgaggagggccgcggacgacgacgccgcgctgccgatcggcggcacgccggcgttcatggcgccggaggtggcgcgcgcggaggcgcatggcccgcccgccgacgtctgggcgctgggctgcaccgtcctcgcgatggccaccggccgcgcgccgtgggccgtcgacgtcggcgacgtgcttgccgacgtgcgccttgtcgggtacacggacgccgtccccgaggtgccccagtggctgtccggcgaggccaaggacttcctg

SEQ ID NO: 308106 - DNA, 535 bp, Zea mays
  unsure (1)..(535): unsure at all n locations
gggaaagcccccagggaccggaccggaataaaagggacgacccacgcgaccgcctcttttttgtatatcgccgatctcccccaaaccctagccgcgacctgaccggcggtgggcccgccggacggagaaggagtcgctcccacccatccaacttctgcggcggaaggggagcgggcggcggacgagatgccgtcgcacggggatctggaccggcagatcgcgcagctgcgcgactgcaagtacctgcccgaggcggaggtcaaggcgctctgcgagcaggccaaggccatccttatggaggagtggaacgtgcagaccgtgcgctgtcctgtcaccgactgtggcgacatccacggtcagatctatgacctcatcgagctcttccgcataggcggcgacgctcccgacaccaactacctnttcaagggcgactacgtcgatcgtggggactaatcagttgaaacagtttctctgttaagtggctttgaaagtccgttacagagattgaattacaaatcttagaggaaatcatgag

SEQ ID NO: 308107 - DNA, 543 bp, Zea mays
ctcaaatctgttttgatgcttgctgatcaaatgatcaatcgagttgagttttttcattccaagtcattcttgcatagagatatcaagcctgacaattttctcatgggtctcgggaaaagagcaaaccaggtttatgttatcgattttggacttgcaaagaagtacagagatacatcaacacaccagcacattccatacagagagaacaagaacttgactggaacagcaagatatgcaagtgtaaatacccaccttggaattgaacaaagccggagggatgacatggaatctcttggatatgtactgatgtacttcttgcgaggaagccttccatggcagggcctgaaagctgggaacaaaaaacaaaagtatgaaaagatcagcgaaaggaaaaatgccacgttggagggctttgggcgttgctcactgcgtttcgaagatgcaccggactatcagtacctgaagagattgttcagagacctttttattcgggaggttttcagtttgattatgttttgactggaccatctaagtaccaacagc

SEQ ID NO: 308108 - DNA, 349 bp, Zea mays
tttcgtccggctggttctcctccccctccggttcgggttcgggttcgggagggtctcctgggttcggtttcgcgggtgtgcggatcgagatggcggcgtcggatgttgagtaccgctgcttcgtcggcggcctcgcctgggccacggacgaccactccctccacaacgcctttagcacctactgggaggtcctcgagcccaagattatactcgatcgggagacgcagaggtcccgcagattcggattggggaccttctccacggaggaggcgatgcggaacgccatctagggcatgaacggcaaggagctggacggacgcaacatcaccagcaacgaggcccagtcccg

SEQ ID NO: 308109 - DNA, 359 bp, Zea mays
cgcgccattggccagctagagccaaccagaagatcttgcaggtactgttcgtgtgtgtcccccagaggatgggcggcagcggcagggctgctctgctgctggccctggtggtggcggccgtgagcctggccagggagatccaggccgacgcccggtccggttacggcggcggatacacccggacaccgacaccggccaccccgaccccaaagcccgaaaagccccccaccaaggggccaccaacagacaagcccgccatggagcacatgcacgccaaggagcacaggcccaagccggacaagccgcccaaggagcacaagccgacgccgcccacggacaccctgagccccaaaccaacg

SEQ ID NO: 308110 - DNA, 363 bp, Zea mays
  unsure (1)..(363): unsure at all n locations
gaaccaagcagaccccagcggaggaagctttttcgacgcctgcgcaggttgttcagccagcagcaagatgtcgtggcaggcgtacgtcgatgaccacctgctgtgcgacatcgaaggccagcacctgagcggcgncgtcatcgacggccacgacggcagcgtctgggcacagtccgagaacttccccgagttaaagcctgaggaggctgctgggatgataaaggactttgatgaacctggaactcttgcaccaactgggctccttgttggaggtacgaagtacatggcgatccaaggtgaacctggagctgtcatccgaggaaagaagggcactggaggcattactataaagaaaactggcat

SEQ ID NO: 308111 - DNA, 414 bp, Zea mays
catcctggagtgctcgctcaggtgcgcagtacaagtggctggaggctgacctggagaaggtggacaggtcggcgacgccatggctgatcgcgggctggcacgcgccctggtacaccacctacaaggctcactacagggaagccgagtgcatgagggtggagatggaggagctcctctacgcctacggtgtcgacgtcgtcttcaccggccacgtaagccttcggagtcggctgcttagtactaactagctcgctcttgtctatctgcaagactgacggatgatggtctgagactctaagctgagcaagaacgaacatggtggtggtctgtgaccaggtgcacgcgtacgagcggtcgaaccgggtgttcaactacacgctggacgcgtgcggccccgtgcacatctcggtgggc

SEQ ID NO: 308112 - DNA, 362 bp, Zea mays
aaaccgaacgggaataccgtattacttaaaacgcgtgccacgataatattgttcaccaacaaaaggttctaacgcggatacaccgcgacgacgacgataaatcgagcagcgactgggccagccagccactgcagcagacacacgagactgacacaaaccgcttagtccacctcctcgatcttggggccagggccaccgcttccagccggagcgtcctcgtccatgccgccggagcctcccatgtcggcacccgcgccctggtacatcttggcgatgatggggttgcaaaggctctccagctccttcatcttgtcatcgaactcgtccgcctcggcgagctggttggcgtccagccagctgat

SEQ ID NO: 308113 - DNA, 452 bp, Zea mays
accaagcccatatatttagaattttggatagccactcttcatactctctagtgaaatccaaatcaaacaaagaggtcgatcatacacatacacaagactgcaaccactgaaacctttgcctactactgttgacaaaacccaaatttcgccaaaaatatgctccaaatatagtgccctcctacatccccaagaacatgaacaacaaaggcgagaatcacaccagtttgtccatctcctttagcccctcagaggcggtcgatggcggagaggcattttcccagcaggaagaagccacagctcggaggcagccgatggcgaagagctcgaaccaaccagtcattgtctgacaaactgaagtgggattagtgacaaggtcatcaccgacaatatgcagttgctctccaatttcttcagtcatcttagcatagcaaacccagtcgtcctggacacct

SEQ ID NO: 308114 - DNA, 370 bp, Zea mays
ttcgaccgcccctcctccgggccgaacgggacgacctactgagcgggcaggacccataaacgcccttcttggatgggttagccggcagcacaaaacatgcataacctgtgaggcctgtgaaggacccacacaaggatatggctattaatgcacgcaaaggcctgtagctggttcgggaaatgcgacaaaagcaaagcatgaacaaaccacggcaacgatattgggagcatgctggatctaagcttggcaatatctggggagtcgagaaaacagccgaacaggccgatgcacacactgccgatgctggtgaccaaggcgagatgcactttcaagaagaagccaagttctcacaacattcgaaggataaagc

SEQ ID NO: 308115 - DNA, 383 bp, Zea mays
ccctgtcgaccgccgccagcaccggggggccttcttgaacactgtctcctctttttccccctccagaagatccagatccagcgcgaggacaccacttctgatgcttatgctgatggcaaagaaaatgctcctggaattgtggccctgcaagagtggcggggagctgactatgagataaagaaccatgcgaaccacattttccaacttggtggaggatacaaagcactcattccagatttataccgtggaaaagctgctctggatgttgacgaggcacaacatctgatggagggtctcgactggcagggtgcagacaaggatatccaggcttcagttaaatggctgaagtcaaatggatcacgcaagggtggcgtcactggcca

SEQ ID NO: 308116 - DNA, 417 bp, Zea mays
ccttctttttcgacatgacgcaagaagatggaaggaaaccgggcgaatgtttagcaatgttttttgctatctttgccgcgctttcgttgtacgctagggggcgaacaactggtattgtgatggattccggagatggcgtgagccacacggctccaatctatgaaggatacacacttcctcatgctattctccgtttggatcttgcggggcgtgacctcaccgaccacctaatgaagatgctcacagagagagggtactccctcactacaagcgctgagcgggagattgccagggacataaaggagaagcttgcctaccgagcccttgattatgaacaggagctggagactggcaggagcagctcctctgtcgagaagagctacgagatgcctgatggccaggtcatcaccattggga

SEQ ID NO: 308117 - DNA, 357 bp, Zea mays
tcctgggtcgacctattcgtccgcggtcgctcgtgcaccgaggcgcgcgtgtcggaccacggcgggcccacttctcggggcctttccttcttttcaccagggtgtccggctaccgcgcaccggaggtcaccgacatccgccgcgtctcgcataaggccgacgtctacagcttcggcgtcctcctgctggagctgctcacggggaaggcgcccacgcacgccgtcgtcaacgaggaggggctcgacctggcgcgctgggtgcagtccgtcgtgcgggaggagtggaccgccgaggtgttcgaccaggagctcctcaggtaccaaaacgtcgaggaggagatggtgcagctcctccagc

SEQ ID NO: 308118 - DNA, 480 bp, Zea mays
  unsure (1)..(480): unsure at all n locations
gagcaccnaggggggactttaaagaacatttccgtactttttcccccggagtctgactctcttgggggctggccgcaacgggcacggcgacgccgcctcggccggtgcccttgctgccgccgcgcctgggcgcgctggtgtcctgctccttcgcggcgggcagctcggaccaggagctggacatcacgtggggcgaccggcggggcaaggtcctcgacaacgggcggctgctgacgctgtcgctggaccgcacgtccggctccgggttccagtcccggcacgagtacctgttcggcaagatcgacatgcagctgcggctggtgccgggcaactccgccggcaccgtcaccgcctactacctgtcgtcgcagggcggcgcgcacgacgagatcgactncgagctcctgggcaacgtgtccggcgagccctacacgctgcacaccaacgtgttcacgcggtggcaggggcagcgggagcagc

SEQ ID NO: 308119 - DNA, 360 bp, Zea mays
cccctccgggtcgagatcgggcgcgcgaggagcttcttggaccggtttcccgggtgatcccaccgagacggcggcgacggatgatgagtaccgctgcttcgtcggcggcctcgactgggccacggacaaccactccctccacaacgccttcagcacctacggcgaggtcctcgagtccaagattatcctcgaccgggagacccagaagccccccagtttcggctcgcttaccctctccacccaggaggcgatgcggaacgccaacgagggcatgaacggcaaggagctggacggccggaacatacaccggaacgaggaccagaccccgggcgggaccttaggcctgggcggcggctacca

SEQ ID NO: 308120 - DNA, 471 bp, Zea mays
gttcttataaaagagatgacaactttgagcgagctctactcattgcgtatacttgttccaaagtcgatgtaacctggcaggatgggacaaaggaatgtggagtagccgcaacagcgttgatccctatccacagtccaaatgaacatgaattcttcccggagcagtatgttgtggataaagtcacaaatgatgttggtgttgatgattcttctgaaccaaggcgtgtgggtcttgttagaggtgttaatgctaaggaccgaacagcaactgtgtcatggtttaagcctcctctacatccagaggagccaaaggagatcgcatgtaacgaaattgtgagtgtatatgaactggatgtccatccagattatgattattgctatggagatattgctgtccgcttgccgcctgttaaaccggtaattgagtcaaccaatagcaaggaacaaatggaactggataagacgttagatt

SEQ ID NO: 308121 - DNA, 383 bp, Zea mays
aaggaactcgcgagttcgcgtattttcatttcctttgcattttcatgttacagtgtagggtatgtacacgtattgacgcctaacctctgcttggctggacaacaatcgccacaatcttccacagagttcatcctgcctgttgtgaacaaaaacagcatacaataggcacagatggatagattgtcctaaaagaaacagaagggagagaaaaagaaaaagaaaaccggagtggtcttccctgtcgccgcgcttggaatggcctggatgcattgttggcgttacggtgaccattggtcaggtagagccaagaagtacttggacatggccttcctgaacctcttcttgtactggtcaggagatataatggtcggcagaacatcctt

SEQ ID NO: 308122 - DNA, 389 bp, Zea mays
  unsure (1)..(389): unsure at all n locations
ttnntttttttttttttttttttttttttttttttttggggcctggctcattcttctctcggctggtttcatagcgggagcaaacaaagggaacaacaggggtaccaacacctaatccaaaggtagaacggacactaacacggtgacagaagcgaacggtaacacgattctatagatagataagataactcggccgaagccaggatgggcccacacataagtccctccagccgccgccgccgccgccgtagccgccaccaccacccttgggccgaccgccgtagccgccaccgcctccgtagccgccgccaccaccctcgggccgaccgccgtagccgccaccgccgccataaccgccgtaacggggcccgccaccatagccgccgccg

SEQ ID NO: 308123 - DNA, 333 bp, Zea mays
cgacgcggggggacagaccgagggggggaagttctgaagcggtcttcggctcatgcccgccgggaagacccaggagacagacgagtaccgcaacgagggaggtgccaaggtccccatcacgggacacaccgtactcatttgcacccagcacgacgagacagtgaccaatgatgagatcgctgctgacctgaaggagcatgtcatcaagcccggcatccctgagcaggaccttgacgagaagaccaactgacaccttaacccatacgggcgaatagacaatggtggaccccacggcgaagcatggctcaccggcccgaagaccaccatcgacac

SEQ ID NO: 308124 - DNA, 492 bp, Zea mays
tttcctcgcgtccgtttcttttccgcccacgcgtccgatttacgtatgtgccgttgtcccggatcctttccccattcccaactccattatttggttgatccttgagaagagagaggaagacgagagctagaagcgaaggagaaaagcagttcttcagctaggcaggagggcacaggaaggaggagatggcgtcaaagaggattcagaaggagctcaaggatctgcagaaggaccctgccacctcgtgcagtgcaggtcctgttggtgaagacatgttccactggcaggcaacaataatgggtccatctgatagcccatattctggtggagttttactagtcacaattcattttcctcctgattatcctttgaaaccaccaaaggtacagtaaacgagcatttagggaatgaccattcctttttttttgtgcattttcgcctttcgttgtcagttgatgtgtcaaataaacatatgctgtagctcatttactt

SEQ ID NO: 308125 - DNA, 445 bp, Zea mays
tcctcgcgtccggccagctagagccaaccagaggagcttgctgttactgagagtgtgtgtgagagagaggatgggtggcagcggcagggctgctctgctgctggccctggtggtggtggccgtgagcctggccgtggagatccaggccgacgccgggtacggttacggcggcgggtacaccccgacgccgacgccggccaccccgaccccgaagcccgagaagccccccaccaaggggccgaagccggacaagccgcccaaggagcacaagccgcccaaggagcacgggcccaagccggagaagccgcccaaggagcacaagccgacgccgcccacgtacaccccgagccccaaacccacgccgtcgacgtacactcccaccccgacgccccctaagccgacgccacccacatacactcccgcccctacgcccgacaaacccaca

SEQ ID NO: 308126 - DNA, 419 bp, Zea mays
gggcgaacgcggacacagcgcggaaccttatagacgtccttgcgagtttttccgaccccccactcccctcccctggcttcaagatgcagatcaaagggaatgaccctcaccggcaagactatcaccctcgaggtggagtcttctgacaccattgacaatgtcaaggctaagatccaggacaaggagggcatccctactgaccagcagcggcttatcttcgccggcaagcagcttgaggacggacgcacactggctgactacaacattcagaaggagtcaaccctgcactgggggctcactattacgtgagagctgcagcatcatgacaagacctagactggcaagacaatcacccttgacgtggagtccttagacaccattgacaatgtcaaggcaaagatccaggacaaggagggcat

SEQ ID NO: 308127 - DNA, 461 bp, Zea mays
tcgtaacacgcccaaccgctctaattggggactggggcattgttttacctgcacctcgcggatttatacgagagcatcactggctcctagacctgggaaaccctaccgcgtttgtgattaatgtctcttgaagatgaataatgcctaagatcctaatgcagctaaccggaggaaagatcctgtaccctatcaacctgttgaaagcaatggccatgctaaagtaggaaaggctagtttgcctagcaatatggaaatgatccgaaatttggatatcaaagcaccatcgcacgggatgaaaactgatgggctatcgattctccggaatcctcaaagtaattcgctcctgcagctgagtgatattgctttatctggtggcttgagcatgaacagatcacctacgagagcggtacacatatctgcagctcggtacgttactacttaaagagcttgttccacttttc

SEQ ID NO: 308128 - DNA, 412 bp, Zea mays
tttcttctggacctacgcaggcggaacctattgctgggtgcatgttctatagcgggcctggccgtgcttcttacccacccgggatctggggggatcgcttacgcgggggccgggggaggacccatgagccgcggaggaggagtggtccgaccaggcggtcatctacgtcaacggcgtccggcgcgtgctcccggacggcctcgcccacctgaccctgttggagtaccttaaagatattgggcttcgagggacaaagcttggatgtggtgaatgctgctgtggagcttgcactggcatggcctcttgctgtgaccgaattacaaagaaatcactgcattgtgcaatcaatgcgtgctaggctccactgtattgcgtggaaagaatgcatatgatcacagctgatggaattgga

SEQ ID NO: 308129 - DNA, 177 bp, Zea mays
ttagcatggggaaacgggcaaagagtgcaatggtctgaaaggatagatatgaaaacaaaattaaactcagcatcacatcaattcagtaacaggggtatcaatatgacagatactactggtccatttaagtttcaacctcagacagatctacatgagatacaattcgagtaaccaaca

SEQ ID NO: 308130 - DNA, 447 bp, Zea mays
  unsure (1)..(447): unsure at all n locations
tctacgcctccgcccacgcgtccgcacaaatgggcagnttttttgctgtagctgtagcttttgtgctctcatctctcatccatggaaccacgatggccacagcgagcagcgaagagagcttcttccagaagtgcccagcgtccagctgcagcgaaggagggccagagatccggttccctttccgccttgcgaccagccctctgtcatgcggtgcgcccggcatggagctggtgtgctccaaagcagacaccgtcctggttcacccaaaccttggcttgtgtaaggtaactgccatctggtatggcggcagcactataaccatcgtcccactcgcagtcgcagcagaacacaagtgcccttttcagaagatcatctccaccaatctatcaaccgatgtgtatagaccttatggggatagggcaaccttagtgagctgttcagcagagt

SEQ ID NO: 308131 - DNA, 287 bp, Zea mays
ccggatttcccggttttcccacgcgcccgtgctgtcgcctactcgaatcgtatctcatgtagagcggtctgtggttgaaacttagatggatctgtagtatctgtcatattgatacccctgttactgaatagatgtgaggctcaggtaaagtatgttatgataactagccttagggaccatcgcactctgagcccgattaaccatgctaaggactcgctgatgacatgaatgaaggggatgtattaatgagtaactaatacatataatagctttaaaacaataacaat

SEQ ID NO: 308132 - DNA, 315 bp, Zea mays
ttctatttctaatcctaatgatatatgcgcatggtcagaaggtcacatacttcctgcggcccatctgggaatctcctcccaagcccttcaagacaattcctcactactaccatgagaacgtcaccatggataacctgtgcaagttacatggttggaaagtccgtgacttcccgcgtcgtgtctttgatgctgtactcttcagcaatgagcttgatatcctggagatccgctggaatgagcttagtccctatgtgtccgagtttggtgctttttgattcaacttaacctttactggcataaaaaagccccttcact

SEQ ID NO: 308133 - DNA, 376 bp, Zea mays
  unsure (1)..(376): unsure at all n locations
ggttttccctggttttccacgcgcccgatgacgcgcgggcggacgcgtgggcgggcgcagggggcgcttttgaccccgacggcgccggttacgccgncgncgtcgacgacgccgcgcggcgccggcaacgtgtggcgcagcgtcttccacccggggagcaacctggccaccaagggcatgggcgccaacctcttcgaccggccgcagcccaactcccccaccgtctacgactggctctacagcgacgagaccaggagcaaccaccgctagatcgggcgagatggatggacagtgaagaggccatgtttgctggtccttgtggttatctaaaacgcacgcatgctctattatagctagtgatcactatatatatact

SEQ ID NO: 308134 - DNA, 450 bp, Zea mays
ttatgacgcgtggggtccagactgagtcacgaaaatgtcgcatagatggtgggatactgcaaggtgtctgatccattttcgagaatgctagtctttcagtacccaccaaatgggacactctacgagcatctgcacgatggagatgggtggcagctatcttggcctagacggatgaaattagcactcgccatctcgagggctctcagatacttgcacactgagctgcaacctccatttgcagttgctgcactgacgtctagttcagtctacctaactgaagacttctccccaaagataatcgatttcgagaggtggagatatcttgcgaccaaaccaggatttggctcactaaatggcgggtcagtcaacagcattacagattctcggcataagcgcttcatggacgtccaggccaacacttacgcgttggcgtgatcctgctggaagctg

SEQ ID NO: 308135 - DNA, 416 bp, Zea mays
ctattcgtccggcggaagcgacccagcagcgaagcgacgactagctctgcggcctctgccccaagcgccgacgatgggtgccggtgctactgccagggacgaggagactgctaccggccgccaccatgggaggaagccgcatggcgcggcggcggagtacgcgcaggacgggtccgtggacctgcgcggcaatcccgtgctccgctcccagcgcggcggctggaccgcctgctccttcatcgtcgtgtacgagctgttcgagcggatggcctactacgggatctcgtccaacctcatcatctacctgacggacaggctccaccagggcaccgtcgaggccttcaacaacgtcaccaactggtccggcaccgtcttcctcacgccgctgctcggcgcctatgtcgccgacgcctacc

SEQ ID NO: 308136 - DNA, 453 bp, Zea mays
ctgggggcacctgtccagattccccgggttgtcccacgcgcccgtgacgcctgggtgcagacaccaccgctcgtttgggtcttcttgacaggagaaagggggagagagaggtgaggcgcggtgtccgcccgatctgctctgccccgacgcagctgttacgacctcctcagtctcagtcaggagcaagatgggtgccggcggcaggatgaccgataaggagcgggagaagcaggagcagctcgcccgtgctaccggtggcgccgcgatgcatcggtcgccggtggagaagcctccgttcactctgggtcagatcaagaaggccatcccgccacactgcttcgagcgctcggtgctcaagtccttctcgtacgtggtccacgacctggtgatcgccgcggcgctcctctacttcgcgctggccatcataccggcgctcccaagcccgctccgcta

SEQ ID NO: 308137 - DNA, 559 bp, Zea mays
tttctttttaagctccaactccgacgagaaccggcacacctcgaaatctcgaaggattttctgcggtgaacccgtacctttcctatcgctgatctcgcttgctcgctggggaatcaaaccaaatcaactggtggtgcttctatcttggatataagttctcatccccttccccccatccgtcccttggattttgcagcttcgcgacgtgacccaatgggagaggcctcgccgtcgatcgccaaggacgtcaccgagttgatcgggaacacgccgctggtgtacctcaacaaggtgaccgaggggtgcgttggtcgcgtcgccgccaagctcgagtccatggagccctgctccagcgtcaaggataggattggctacagcatgatcacggacgcagaggagaaagggctgattactccaggcgtgagtgttctgattgaaccaactagcggcaacacatgcattggacttgcccttatggctgctgccaagggctacaaacttacactcacaatgcctgcctccatgagcactgagaggaggatcatattgaaagcttttg

SEQ ID NO: 308138 - DNA, 178 bp, Zea mays
  unsure (1)..(178): unsure at all n locations
cagtacttcaaacactcttgggttccaattccatgattgattactactttgtaacgaatcgagcaaactgacatttaaacctaaaatatcgaaaccctaagtacctggcaacactcaatcatctccgcttnnncctacctgagatttatccaaagcttgacatgatggtctttcttga

SEQ ID NO: 308139 - DNA, 350 bp, Zea mays
ggtccgccggcaggtacctgttccggttattcctgggtttgacccacttctgaacttccacacctccgcccacgcgtccggcgccattggccagttagagccaaccagacgagcttgcagctactgagagtgtgtgtgagagagaggatgggtggcagcggcagggctgatctgctgctggccctggtggtggtggccgcgagcctggccgtggagatccaggccgactccgggttcggttacagaggaggtaacaccccgaacgccgacgccggccaccccgaccccgtagcccgtgaagcccccccaccaaggggccaaatgccggacaagccgcccaaggagcacaa

SEQ ID NO: 308140 - DNA, 293 bp, Zea mays
agacccccaggctctggggcattgatcactgatttcggcgcactgcacatggctcctgccacctggaagaggcagatgatctaggggtcgtaaagaagaaagccgaagaagggaagggacgggaaacacctagagagccatatgaaataacacgacggataaccgccagaacagcagacggaaaagaaattattccgagtaaagaagaggcatatatcttcactattggtaaaaccgaggtacctaaagggcttgagacgggcatcggaacaacggctcacaaggaaaaggca

SEQ ID NO: 308141 - DNA, 303 bp, Zea mays
cccggctatcggcattgatctcggcacgaacgaacttttgcgttggcgagtggtagcacgaccgcgttgagatcattgccaacgaccagggtaaccgcaccacgccctcgtacgtcgcctttaccgacttcgagcgcctcatcggagatgcggtcaagaaccaggtcgccatgaaccccatcaacaccgtctttgatgccaagcgtctcatcggcaggaggttcagtgaagcgtctgttcagagtgatatcaagctgagggccttcaaaggtatttttgggcctggtgagaagccaatgattg

SEQ ID NO: 308142 - DNA, 488 bp, Zea mays
tctactctttccgcggacgcgtgggcaacgatctgttccgttagactatgggccctgtcaagaaggccatggaggacgctggccttgagaagagccagatccacgagatcgttctttggtggaagcaccaggattcccaaggtccagcagcttctgaaggactacttcaatggcaaggagcccaacaagggtgtgaaccctgatgaggctgttgcctttggtgccgcggtgcagggaagcattttgagcggtgagggtggtgacgagacaaaagatatccttctccttgatgtggctcctctcaccctgggtattgagaccgtctgtggagtcatgaccaagttgatcccgtggaacactgttattctgaccaagaagtcgcaggtgttcaccaccttccatgaccaatagaccactgtctccatccaggttttgagggggagcgcatcttgtccaaggactgccgttttttgggaagttgacctaat

SEQ ID NO: 308143 - DNA, 354 bp, Zea mays
cgccaccgccggcggagcccagatgttagctttatggcggccgtcgcgggaacaatgaggtggtgaagaggggagcgtttgccaatatgaggatcgagaataagcttcttactggcgaggctggtacctggacgatccatgtttctaccgaggagatgctttatgtttacgacacggttatgaaatacaagctctgagggtcatgacatggacatcataggtggctcgacgtacggtagtggcagatttcgcgactttgttgtcaagggaccaatgttactgggtgtctagtaagctattgcaaagagctttaagcggattcaccggaacaactttggttggggattgggatca

SEQ ID NO: 308144 - DNA, 320 bp, Zea mays
acgttacgcttccgcccacgcgtccgcccacgcgtacggatgaacttgaacaacttcttaagggaattgctatgacgaaagagctgactcttaggacacgagattatctagtttcatttggtgaatgcatgtctacaagaatatttgctgcacttttaaacaaaattggcgtaaaagctcggcagtatgatgcattgaatcttggctttataactaccgatgatttgacaaatgcggatattctggaagcaacttatcctgctgttgcaaggaggctacatatggaatggattaatgaatctgctatacctatagtcact

SEQ ID NO: 308145 - DNA, 326 bp, Zea mays
cctgcgggccggaatccggaagtcgacccactcgcccgcttgaagtttattgagaacaagctgttgggcgagctctcgggggcacttctggaatagacaacaaatacacaaccgagaggggcgcttactgaagagtgaaaactcctgtgtactcgatatgcttgggcgcatgtttaatggttctggaaaacctacagacaatggtccgccgatattacctgaagcctacttggatatctctggaagttctataaatcccagtgagagaacctatccagaggagatggattcgactgggatatgtaccattgatgtgatgaactaca

SEQ ID NO: 308146 - DNA, 362 bp, Zea mays
tttccgtttgataacaatggttattcaattcgctcgttcactgggctctacaccatctgctatgtcacttgattaccaccccaacaaggatgacctcatttgttcttgctatggggacagcgagatacagttctggagcatcaagcatggcaatgctgtccgaattttcaagggaggctcgacccagctgagattccaaccacgttatggaggactccttgccacggattcagacaatgtactctctatcctggatgtggacaggcaagctcgcccgaggagatatgagagccacactaaaggcgtcgattacgtgtgctgggatcccaccggcgagtacgtggtgtctgtcagccaagaca

SEQ ID NO: 308147 - DNA, 341 bp, Zea mays
acacgtgggcccggcgcggccagcgttagctagtgctgtgcacagtgtgctcatctcatctctatctatccgagcacgcaggaggagagcaggccgcccacgacgtgcagggcgcggcggccatggagggccactactcccccacggcctccgccgccgaggcgggcggcgagcgaaggttccgcggcgtgcggcagcggccgcggggcaagtgggcggcggagatccgcgacccgcacaaggcggtccgcgtctggctcggcacgttcgacaccgcggaggccgcggcgcgcgcctacgaccaggccgcgctccgcttccgcgggagccgcgccaagctc

SEQ ID NO: 308148 - DNA, 371 bp, Zea mays
tttacgcgtccgcccacgcgtccgcccacgcgtgcgcccacgcgtccggcgaggagctggatagaggccggcgacgcgaagcaaccgccgatcggagccgcggctgaggaggaggagcaagctcgagatggtgggtctcgtcggcggcagcacggcgcgggcggagcacgtcgtggccaacgccggaggagagacggagtacgtgcgccgcctgcaccgccacgcgccggccgagcaccagtgtacttccaccctcgtcaagcacatcaaggcgcccgtccacctcgtgtgggagctggtccggagcttcgaccagccgcagcggtacaagccgttcgtcagaaacttgcgtgtgcgcggtgaccagctcg

SEQ ID NO: 308149 - DNA, 349 bp, Zea mays
gctacagccaaatgggcccggggcgtgtgcgccttttccaacaaccaccgctgggtgcgcctacaacacttgctgcttgacaaaacggccaggggatattatggatctatacttacactgatggacattcacctcttggttggtcagatactttggcatacattgagttaccaggtcttgttgtcatttcacagtacatatctactcaagtaatgcaggcaccacagagcaatgatcctaaccaacaaggtgctcatgctgcaacaaagatcttaccattgctaattggttattttgctctctgcgtgccttcaggactaagtctgtactggcttacaaattatatcct

SEQ ID NO: 308150 - DNA, 361 bp, Zea mays
gtatcataatccggaagcctgcacctctgatcagggaattgaaagatgaagacgttcctgtgcatacagaaaaaactgcagggagacaagctgagagaagctcaacagcagctgctgatgctgaagccaacaaagctgctaagcaactcacgggcacaaagatatgtgaccgaggaacaaaaatggaaccaaagaaacacatctggcggttcaaaataggagacaagcgagggtgctactactgccgcaaaaacggatattagcgtgagccttatcagaaaagctgagaagcattcagatgctgattccctttacgtggaggagattgacgacggcgaggacacaccgcgaacagtggaga

SEQ ID NO: 308151 - DNA, 241 bp, Zea mays
  unsure (1)..(241): unsure at all n locations
ggtttgggcgccccggcccgggcccggcggcgggggggacacgtgacgcacagcgacgcgacggcccgccagacgctcgccgggncccacaccatcaaccgcgcgcagctgcagggcgggaacaaccgcccgcagcgcgacgagggggaggccgcgaggaagaaggagcgcgggcggatgccgccgcacgcgcaccgacacaggaccggcggacacgagccgccaggaccccaacgccggc

SEQ ID NO: 308152 - DNA, 260 bp, Zea mays
ccatggcaatggaagtgaaagcggaccctatcttggatgggctatggtaataattgatatgggagggcgccctccccagattttgttgaatatgcaaagaggacacgctgaggggctgaatccattaacgtttacctctgctttactgagaaattcaacatatgtaggaagcatacttgtaaatagctcggactggccgaaagttgggccaaagcttccgtggctagaacacactggaggatgagagtcgctggattctt

SEQ ID NO: 308153 - DNA, 437 bp, Zea mays
ggtcgcgtccggaaacacaaagcccaaaccgggggactgccacaacttgatacgtcggatattactccaggcgctaaagttgatgaaccatgacaccatgggcaccagaacggtgaccttgagatacaaggctgagagactacagatgtaactactgataccacacagccgacgtatgagcacggagatcaacctactgtagcagacacacgaccatatgagcaacaagcacacacataggagactgagcgtcagtgaaaagagcaagctgccacagacttcggtgtacgtgatacacatagtaccagaaatggtgatgatctaaagtgtactgattgcacgtacattatgccagacaacatatcgaccaagttcctacgcatggaccatctgcaggcacagaaccatggagtctaatgtgggctgtgctcacagga

SEQ ID NO: 308154 - DNA, 436 bp, Zea mays
  unsure (1)..(436): unsure at all n locations
cttcttcaaccaccacaagaagggccaggaggattcctcccgggagttccggttctttcagaaccagggggggaccgccacccgccagggccaattccaaaggtgcccaaaagggaggaaagggaccacaggcccaggcagcacctgnggagggccggggccttagccgccggggctttggaactttacaagaagcacaaggcgaagaaggaccccccagcacccgcacaggcacaagatcacggaggagggacgtgtctgcggcggcgccgtcggcgccggtagctacttattgcacgagcaccactagaagaagaccgcccacaaggacgccgaggaggccagcggcgagaagaagcaccaccacctcttcggctgaccgtagtaccggccggcgcgcgaccgaactagctagctccggcgcacacaaccacac

SEQ ID NO: 308155 - DNA, 305 bp, Zea mays
ccgatgcttcctcccactatctagctcggctgcccgggcccgttgctgcaaacgggaggatatgggtgcctccaccacgccgctcgcgtgggccgaagcaagacactgcatctgcagctgatagcgccgctcgcacctggcaggggacatgtcgatcgtctcctacggtgagcggagcaaggaggaggacccgcgagtgaacgccgagtggatggccgcgcacggccagacctacaactgcattcgccaggaggagcccacgttcgaagtgacaagggacaacctgcgatacgttgacgaccaca

SEQ ID NO: 308156 - DNA, 267 bp, Zea mays
gcgggcccctttgcattttccgggttgttttccacgcccgcgctgaatccccctctcccaaggcgccacgcgcgggtgttttttaggagaggaggaagattttgtcctccatctccggacacatcgggcaaggaggcatccaacgcggcgacgcgtgctgagcactttactgcctagagcacagcttccactctgatggacaagggcctgcagacacgaccgctggacattacccagacgcccatagcaccttcttcaaggcgactg

SEQ ID NO: 308157 - DNA, 473 bp, Zea mays
  unsure (1)..(473): unsure at all n locations
tttctcgcgnccgcgcctcgtacaccccttctcccaagcctccgacgcccaggccgttcccgacgacgtacactttaagccccaagccttccacacacccgacgcccaagccgaccccaccgacgtacaccccttccccaaagcctccgacgcccaagccgaccccaccgacgtacaccccttgcccaaagccggcgacacccaagccgaccccaccgacgtacactcccacaccgaagccgccggtcaccaagacgaccacctacactccgacgccggcggtgtgtgacacccccagcgccgcgccaccatactagtagaaagggatggctaccataccacactggtggcaggctcaggagcatttacgtggactggatcaatggaagggctgcgtcctagcccggcggcgaagatgagctggtgatggccatgatgatgataagaggccactggtaccctactacgtaccc

SEQ ID NO: 308158 - DNA, 400 bp, Zea mays
ctttttcttccgcccacacggacattcttagatcatgggcattgtgaaggggatgctcatccttattgttggcccgggcagctaggggatgacatccatgggtctgacgaacaatggtgaggacaccagtgtgattagcccaaccattggatgtaacatcaagaccattaagtgccacgaaaacgtgacgaacatatgggatggtggaggacagacgacaatcaggacttactgggaaaactactgtgagcggactgatggactagcaagggttgctgatagatcaaacataaggaggcttgatgattgacgagctgtactacacaggtctgtgcaagaagagagactagcttgagcttcattgtagcttgttgcaaaaagcatgagatacagggagtta

SEQ ID NO: 308159 - DNA, 394 bp, Zea mays
ccgggacctctcaaaccctagccgcctgctgcttttttcagagctcctgaattttctccatggcgagtgagaccgacacctacccatctcacgctgagagcaaccagctcctttgactcatgcatcaacacgcgactactccaacacggagatcttccttggcgagcttatgttcaacttttgccactcgcgcgactagatcatgtgcaggagtttcactgacaaaagcaagctcggtgagcacactgagctatagatacaccttgtcccatacacggtcacgaacacgctctccatcatcgacagcggcactcgtatgaccactatcgaccttgtcaacaacctctgtaccatcgacagctccggcactaatgaggtcatggaaacccttgct

SEQ ID NO: 308160 - DNA, 423 bp, Zea mays
  unsure (1)..(423): unsure at all n locations
ggtanggcttctcctccccctccggttcgggttcgggtttttgaggatctccggggttcgttttccagggcgagcggatcgagatggcggcgtcggatgttgagtaccgctgattagccggcgggctcgcctgggccacggacgaccactccctccacaacgccttcagcacctacggcgaggtcctcgagtccaagattatcctcgatcgggagacgcagaggtcccgcggctacggcttcgacacacttctccacggaggaagcgatgcggaacgccatcgagggcatgaacggcaaggagctggacggccgcaacatcaccgtcaacgaggcccagtcccgcggcggccgaggaggcagcggcagcggctacagtggtggcacgggaggcggcggctacggcggtggcgggcgccgagat

SEQ ID NO: 308161 - DNA, 351 bp, Zea mays
ttttctgctcacgcgtccgcccacgcgtccgcggacgcgtgggatcgatccaaagctatgctagggttccgccggcccgtccagatccgggctcgtatatggggaaggagggcgtggcggccgggccggcggcagaagggagtaaatggtgggcggagtgtatcaactatgacaacccaggccacgagtgctccgaatactgccttcgtaagagcgccgaggccaggcagtgccttgacgaccagcttcctgactaggggaagcgcccgaccgagcagagcaccgtccacccggactggatcaatgcctacgacccttaccacgagtgctgcgactactgcttcaagcgca

SEQ ID NO: 308162 - DNA, 306 bp, Zea mays
acgtctagttttcgagacacggccttgcgtgcgatcaatcttctagggtttcggagatgttcagtcgcgcgcctaggaagcgcgacaacacccagttctacgagatcctgggggtttccaaggacgcgtgacacgatgacctgaggaaggcctaccgcacggccttcatcaagaaccacccgggcaagggcggcaacctcgtgaagttcaaggagctagctaaggcttatgaggtcctgagcgaccgtgtcaagagagagatctatgaccagcttggccaggatgcaactacggagggaatggcag

SEQ ID NO: 308163 - DNA, 439 bp, Zea mays
ttcgatttgagtggagaaaagcagagcacagagagagagaagggagagggaaaagagagagagaaaaaaagatccccgtccaccgcccacccgctgcgccggcgctgcacgcacggacggacagacggacctcccccccaagcggtgccggattcagtgcggtgggccaggggctgggacggagtgggcgacagatcgagcgctggcgatgccgcacccgacggacccggaggcggggcccgagcagaaggcgccggcggtgccttatttggcggctgcggcgccggctccggtcaagaagaagcggaacctccccgggacgccagatccggacgccgaggtgatcgcgctctcgccggggacgctgctggccacgaaccgcttcgtgtgcgaggtgtgcggcaagggcttccagcgggaccagaacctgcagctgcac

SEQ ID NO: 308164 - DNA, 322 bp, Zea mays
tttccttttggcttctcctccccctccggttcgggttcgggttcgtgaggttctccggggttcggctgcgtgggtgagcggatcgagatggcggcgtccgatgttgagtaccgctgcttcgtccgcgggctctgctgggccactggcgaccactccctccacaacgccttgagcacctacggtgaggtcctggagtccaagactatgcttgatcgggagacgcagaggtaccgcggctttggcttcctcaccttctccacggacgaggcgatgcggaacgccatcgagggcatgaacggcaaggagctggacggtcgcaaca

SEQ ID NO: 308165 - DNA, 406 bp, Zea mays
tttccgttctacgcggtcgccttggtggtggtactggttctgttatgggttcactgatgatctcagagatcagggacgagttccctgtccctatgatggtgacattctcagcgttagcctcacctacagtgtctgatacctagaatgagccattcaatgccaatctgtctgtccaccatgcggatgagaacgcagatgagtgcatcgaactcgattacgaaatcttatatgacatttgtttcatgactattaatatgaccacccctaggtatggtgatctgtaccatacgatctctgcaaccatgagtggagtcacgtgctgtgtaaagttgcatggtcagctgaactacgagctcatgaagctggtagtgaacctgctcctctactcctgtatgcactgattcat

SEQ ID NO: 308166 - DNA, 378 bp, Zea mays
ctactaattaactcccaagtgcggatgcatataaaattaactcccaagtgacttcccaggaaactctgtttttgcctataagtctataacacgttaacccctcactacacgggaacacaagcaatatttcagcctttttattgcgagggcactctaagttacaacattctctatatctagaattgggttctgtggtgggaacgaatagcaggtaacagaataccaccatttggcctccttagggcttggccgtttcaccattaatccatgtagattgggtggtattaagtcggtttaaatccatagcaaataaaaatctatcctaatccattccaatacactccaatccatgtggaattggaataaacgaacaatgcc

SEQ ID NO: 308167 - DNA, 413 bp, Zea mays
cacgtgtgctttgccgagttctcgctggcggagctccgcgcggccactgccgggttcgggccggggaacatcgtctccgagagcggtgagaaggcgcccaacctcgtctacagaggccagctcaggggccccggcggtgccccgccgcgcgcagttgccgtgaagaagttcgccaagctcgcgtggcccgaccccaagcagttcgcggaggaggcgaagggggtcggaggcctgcggcaccggagcatggcgaaccttataggatattgctgcgacggcgacgatcgcctgctcgtcgccgagatcatgcccaacgacaccctcgacaagcaccttttccactgggaaaaccagactattgagtgggctatgcgtctgagagttgcatactacattgtccaagcattgggata

SEQ ID NO: 308168 - DNA, 436 bp, Zea mays
ttcctttcgtccgcccacgcgtccgctctttctctttctcccctgcttccccttccattcccgacggacgacgcaacaacccgcctgccctgccctgcctcacgctcgcacccgcggcggcgcggagggccggaacctaaaccctaaccctagcggcccgcccgcgatggggcagtgctacgggaaggcaggcggcgcgtcgtcgcggcgggcggaccacgacgaccacgcccacgcggtcgcgccgccgtccccgctgccggccaacggcgcgccgccgccgcagcccgccacgcccgggcgccgcaagtccggatcggccacgccggtgcaccaccaggcggcgacgaccgcctggcccagcccgtaccccgccggcggggccagcccgctctccgcgggcgtgtcgccgtcgcctgccaggtccacgccccgc

SEQ ID NO: 308169 - DNA, 311 bp, Zea mays
ctgcaggttcctgtccgttattcctttgtttacccacgctttcttttgcatacagcaagtaccaaccatgcttcctgaatcggcagttgattactcttctctctaacacttggggttagcgataatgtctttgagctaaagcagaaggaagccttaaggcagttgaacagaatggtaactgaaccacaggctgctcgtgaagcagttgaacttatgcccatgggagaagtaaccaatgtagttaaagaattgttgtcatgtggctaccagcctgatcatgagccatatctttccatgctgctacaaacttt

SEQ ID NO: 308170 - DNA, 387 bp, Zea mays
tcctccccctcttaccaagtcctgcggggtttatgggaccttacggtttttttttggggcgatggcggcggttgatgtggagtaccgttgcttcgtcggcgggcttgcctgggccaccagcaacgagtcgctggagaatgccttcgcctcctacggcgagatcctcgactccaaggtcatcaccgaccgggagacggagaggtctcgcggcttcagcttcgttaccttctcctccgagaactccatgctcgacgctatcgagaacatgaacggcaaggagctcgacggacgtaacatcaccgttaaccaggcccagtcccgtggatgcggcggtggcggcggtggctactgtggcagtcgctgcggcggcggctatggtggcgggcg

SEQ ID NO: 308171 - DNA, 541 bp, Zea mays
  unsure (1)..(541): unsure at all n locations
cttattcccttgtttacccacgcttcttcctcgcgtccgcagacggcgacgggcaatttctgtctttggcttatcgatgcatgttccacgtggcggcgggttcttcgggaagcggaaggagcgcgactactactacccctacccctcggtgtcgtcgtcatcagagcaggcggtgctgctccagcggcaaccgccgtcgtacgctaggcccgagcccgacacgcggagcgtcaagccggatcgcccggcgatgaggtttggtgccaagccgccgctccctcagccgggggcccaggtcggctgcaacaagctgctggctgggtacctggcgcacgagttcctgcggtgcggcacgctcctcggcgagcggaagctggagctgccccgtctgaaggagaaggatccctccgncttcacctncacccctgcgccggagccgagcaggcgctacgccgaggtttcgcggctgcttatggcgggcggagcccgcatacccggcgtcgttaacccgtcgcagcttcgacgctggctccggatcaag

SEQ ID NO: 308172 - DNA, 455 bp, Zea mays
ttcttacgcgtccttcatgacaccgcggacgcgtggggaggtccgtttgattgatttcaaatctaccagcttgcttaaaggaacatatgcaaagttgaagccagacggaggtggggtttcagatcttcctaaccatagagcagtccttgaaacagcgctccacaatcatgcaacactatgtgaaaatgatactgctgcgggaaactatggacaggtgcagtacaaggtgaaggatcttgaactgaagtctggctcaagagtatctgtgctagagacaaatgatgaagttgacatcgagggatcagagtcagttttggacaacaaagatgaccaacatgtgcttgtgcctcttgtaataggaaatatagagatctcagtgttgtggatgaaggaaagcacacgtactacaaatcatgaggagacggaaatgtgagtgagaaagaagctgctgggca

SEQ ID NO: 308173 - DNA, 362 bp, Zea mays
atttccctgggtttacccacgcgaccttcttttcctcactgtcagcgtgtgtgacacagaggatgggtggcagatgctagggctgctctgctgctggccctggcggtggtggccgtgagcctggccgtaaagatccacgccgactccggagactgatacggaaggtcgattcacccagactccaacgccggccaccccgacccggaagcccaagaagtccaccaccaaggggccaaagccggacaagccgaccaaggagcacaagccgcccaaggagcacggacctaagccgaagaagccggccaaggagcacaggacgacgccgcccacttacaccccaagccccaaaacgacatcgccga

SEQ ID NO: 308174 - DNA, 453 bp, Zea mays
  unsure (1)..(453): unsure at all n locations
tttcttatgtggtcgctcttgcaagccctgaacgttttgttgttggcttggatatttctgttatggctgttaagaaggctaagcagtggtcatcctctttgcccaatgcagattattttacttttctggctgaagatttcttcaagtggataccaagtgaacaattcgaccttatatttgattacacgttcttttgtgcacttgacccgagcttaagggtggcttgggcagagacagttaatcggcttctaaaaccagatggagagcttcttaccttgatttatctggtgaggatgtaatctttgatctatctctctctctctctctctctctctgngggtgtgtgtgtgtgcgcgcgcgcgcatgaagctcccactcactgtacaatcatacggtgccctcttctttaaactgagggactacaagatgatgtattctgtattccctctgtcc

SEQ ID NO: 308175 - DNA, 484 bp, Zea mays
ttctttactcgtagttacggaccctttggaaaagggcgaggaacaccgttccacatccaaacgcagaacaacggcaggatcgttggcttctttggccgttctggccagtatctctatgcgattggggtctacacgaaccaagatgtgctgcaaatctagctagtccatactagttttatcgatcttatttaatatttatgttttcattcaaacatttgcttattagtccggttcacttccaggctagggtcgcaaggatcgggcgacctttgggtggagatgaaggggttcttcatggcatcacagacctcagtgggcagcatcgcatcagaggtggaggtccatcgggagaatgtggagacagcgacgacgagcccaacggtgatttcgccaaattcggtccgtggggcggtgacggaggacagccgcaggacatcggaacactaccctgccgtctagacaggatcaagatcagcagtgggct

SEQ ID NO: 308176 - DNA, 351 bp, Zea mays
gggcagaagatcacatcccccggcgaagcagatgaagcgcctgacactgccaccggacacaccaaccatggaatccagcagaaggagcaacccaagctcaagagaaagggcgatgaccctctctacgagcacacactgaccttgactgaaacacagcgcggctaccagatcgcaccgacccacctggataacaggcaggtgctgatcaaaacgaaccctggagaagaagagaaagcccgaatctcctcaaggcaaacaacgaagaaggcatgcccaagtaacagaggcccctcacgaagggcaagccgtacaaccacccctacggggagatcccggaccacgagagcccgg

SEQ ID NO: 308177 - DNA, 393 bp, Zea mays
ttcttttcatcggccagctagagccaaccagaagagcttgctgttactgagtgtgtgttttatagagaggacgggtggtagcggccgggctgctctgctgctggccctggtggtggtggccgtgagcctggccggggagatccaggccgacgccggggacggctaccgcggagggtacaccccgacaccgacgccggccaccctgaccgcgaaggccgagaagccccccaccaaggggcctaagccggacaagccgcccacggagcacatgccgtccatggagcacgggcccaagccagagaagccgtccaaggagcacaagcctacatccgtccacgtacaaccctatgtcccaaatccacgccgtcgacattcactctcacgctcgacgtc

SEQ ID NO: 308178 - DNA, 419 bp, Zea mays
tcgttaactgaaggccaaaattgagaccatacaaaaatgccacaagcacctgatgggagaggatctagagtctttgaatcccaaagagctccagcaactagagcagcagctggatagctcactgaagcacatcagatcaaggaagagccaccttatggccgagtctatttctgagctacagaagaaggagaggtcactgcaggaggagaacaaggctctgcagaaggaacttgcggagaggcagaaggccgtcgcgagccggcagcagcagcaacagcagcaggtgcagtgggaccagcagacacatgcccaggcccagacaagctcatcatcgtcctccttcatgatgaggcaggatcagcagggactgccgcctccacacacatctgcttcccgcccgtgacatgggaatagaggtg

SEQ ID NO: 308179 - DNA, 426 bp, Zea mays
ttgtgcagttcctccccgtcgtcttccaccgcagatcgcctaagcaagcaggcgagctcgggaccagatccactgccgctgcaccttcaacaccttccgccgccgtcatcactgccgcagctgcggacggacgctctgtcacgagcattcttcgtactacatggctctcccgcagtatgggatatatacagacgtcagagtctgctacggttgcttcaacaaatcctccagccaaggacacgctgataatccggtgtcagctggtagcatttctggagcagctgactctttttcagggctgagtttgggtaaggaggatgattcgtcgcctatgaagaattcaacggttcagagcacggcagcccttattgagtgcaaatgtgggatgcctttgtgtatatgtgaagcaccaaaaccagaaccttc

SEQ ID NO: 308180 - DNA, 418 bp, Zea mays
tcgtccacgcgtccgcccacgcgtccgcccacgcgtccgttgacgcgtgggatcgggacggtggcgcagggcgccgctgacgacaaggactacaaggagcccccgccggcgccgctgttcgagcccggggagctcaagtcctggtccttctaccgcgcgggcatcgccgagttcgtcgccaccttcctcttcctctacatcaccatcctcaccgtcatgggcgtctccaagtccacctccaagtgcgccaccgtcggtatccagggcatcgcctggtccttcggaggaatgatcttcgcgctcgtctactgcaccgccggcatctccggaggacacatcaacccagctgtgactttcgggctgttcttagccaggaagctgtccctgactagggccctcttttacattatcatgcaat

SEQ ID NO: 308181 - DNA, 361 bp, Zea mays
ttacgcgtcctcatcaccacctctacgagcaggttcagcggcaggctctttggcagaatgagagggctagtaacaccgacaggaactgctactacaaggactacatgatggggaccatcaggtgcaaggtcaggttcaagattgtgtgcaatatggcctgcactctgactgacttgcagcatgctgacatccacgccaacatcaatgacgatgacaatgaagcttaccaggagtattatgttaggtatgcgaatggcactgcaacgaacactggaaccgacaggctgtgagtgatacaatgcatggaagcaagcatctaacagagggtatatgtgggtgtgaagaccgacctgagcgccaa

SEQ ID NO: 308182 - DNA, 436 bp, Zea mays
tttctccacgcgccgactactcgtccggcggcacccagtccccacctggtgcacgcgatcccttcggtggcatttgctgtccccttgagggaggagacggagacagagagggaggcgtggcgactgctgcggagggcggtcgtcagctactgcggcgagcccgtggggacggtggcggcggagaaccccgagtgcatggagatgctcaactacgaccaggtcttcatcagggacttcgtgccctccgtgctcgccttcctcatgcgcggtgagaccgagatcgtccgcaacttcctccttcacaccctccagcttcaggatttttaggcacagattgtggacaggccattcaaagttctctgaaaactgagcatacacaggagacctggtaatggcatccagacacttcacctcgcgagatgttgcctgagaagat

SEQ ID NO: 308183 - DNA, 124 bp, Zea mays
gggaacaacatatcaatggggttgtttaaaaatagctgcgaacaaaaaccttgctcattcttgtatggtctcgaaacataggggcagcaagcatagggaacaacaggggaaccaacacctaatc

SEQ ID NO: 308184 - DNA, 400 bp, Zea mays
gttatctcctccccctcttaccaagtcctggtggggttatggagccttagggggttgttttggggcgatggcggcggctgatgtggagtaccgttgcttcgtcggcggacttgcctgggccaccagcaacgagacggtggagaatgccttcgcctgctacggcgagatcctcgactccaaggtcatcaccgaccgggagacggggaggtctcgaggcttcggcttcgttaccttctcctccgagaactccatgctcgacgctatcgagaacatgaacggcaaggagctcgacggccgtaacatcaccgttaaccaggcccagtcccgtggcggtggctgtggctgccgtggctactgcggcagtcgcggcggcggccgctattgtggcgggcgccgtgac

SEQ ID NO: 308185 - DNA, 408 bp, Zea mays
gctgtaacgcgagatttatgatcagtttgggggggattctcttaaggaaggaatgggttgtggcgggtcccatgctgatccattcgacattctctcatgattctttggaccctgtttcggaggagggggcggaagcagtacgggaagaaggcaaaggaggggagaagatgtaatccactcacttaaagtttctctggaagatctttacaatggaatatcaaagaagctctctctttcacgcaatgtcatatgctccaagagcaagggcaagggctcgaagactggtgcttcaatgaggcgccctgggagccagggcttacgtatgaaagtgaccattcgccagcttgggcctcccatgataccgcagatgcagcagccttgcaaccagtgcaaggtgactgtggagag

SEQ ID NO: 308186 - DNA, 409 bp, Zea mays
accctagagccgcagcccggggcgttttatcaaccccaaaggggaatttatcgggagggaactcgcacgcgaaggctgaactcatggctcgcgtctacgttgggaacctggatccgcgtgtcacggcgcgggagatcgaggacgagttccggatgtttggggttctgaggagtgtatgggttgctaggaaaccaccagggtttgccttcattgactttgatgaccgcagggatgcacaagatgccattcgtgaattggatggtaagaatggttggagggttgagctgtcaactaaagttggtggtggccgtggccgaaaccgtaacggttctgatatgaagtgctattagtggggtgaagctggccactttgcacgtgaatgccgcttacggattggttcaggaggctt

SEQ ID NO: 308187 - DNA, 288 bp, Zea mays
ctggctgaagagaacatgcttgggatttgctttgaggtttgcgatgtctgactttatgctgatgctatccacaggggtggcggccaggttattccaactgccaggaggggcatttatgcttctcatttaacatgcaagtcaaggttgttgtaacccagttacctggaggagatccagtgcccaaaaaatgctgtggttggcataatccgtgtattgatccagaagagaggacatgcattcgaggagatgctaagggttgtatccccccattaacaacatacaaggctt

SEQ ID NO: 308188 - DNA, 370 bp, Zea mays
cgccatcttgtcctgttgccccctaaaacgcccgctccaggacggtggagcctgctgatacggtgcctatgcccacgcatagggctgtgggaggcgggctctgtttctgactcgctggagtggtgggcgtacgcgggcatcttcttcttgctcgagcttttggtcgggaccatgtccgggctcacactggggctcatgtcgctcggcctcgtcgagctggagatccttcaacgcagcggcactgacgccgagaaggcttaagctgctggcattcttccagttgttcaaaagcaacaccagcttattgtcacccttgtggtgtgtaatgctgctgccatggaggcactttctttttttcttggcagaatgt

SEQ ID NO: 308189 - DNA, 341 bp, Zea mays
atgccattttaccattttccccccatgaaggggtagctgtacatctattttacgctggagttccccgacttgctggtaccagagcagtgaaaggctcttgagacagaccttacactaaggccttcatccaagctgacagacaaggagatagatgaatgctaggagacgacttatgcatgatgtgaacatcattgtggtatagatgtgcatgaagcaagcttacgcttcccagtaggcgtacgaggaggactacgagatgccggtcggagcccatagagtgcagtgcgctcaacagcaagcagactaatattcatgtaactgggaggggtggtgcccttaag

SEQ ID NO: 308190 - DNA, 304 bp, Zea mays
cgtcccggggtaaccgatccaatttcgcttgcctagacgccccggatgctgtcgcaaaacgatttgctagacgccacagcagtggcactatgatccgaccaactaacagcctctggccccgtcggctggtgtggcgtggcgcgcaggcacgagatcgtgggcgtggtgaccggcgtctgcggcggcgtcacgcggttcaaggccggcgacacggtcggcgtgggctacttcgaggggtcctgccgctcctgcgacagctgcggcaagggggacgacaactactgcgcggggatcgtgctcacct

SEQ ID NO: 308191 - DNA, 207 bp, Zea mays
taggctcgtctgctgcaagaaggtaacagcgcatgcatggaggggaaggaggaggacgttcgcctgggcgccaacacgttcttggagtgccagaccattggcacggagtagcacggcactgtatcacaaggactacatggagtccccaccggatgccgatcttcgagtccggggagctcaagtcctggcacttttaccgtgccggca

SEQ ID NO: 308192 - DNA, 358 bp, Zea mays
gttcttggaatgttgggcaagaaaaagcatcctacgagtctttaagagcttggctaaaactcccatcgccagaagttgggttggttgtacttggattgcaggaggtggacaatgggtgctggttttcttgcaatgtctgcagccaaagaaacgggtgagaataaatcttaagcagttcattggagacattgagaatgcggcagtgccatgtggattagggcgagccaatcggaataagggtgcagtaggcttgagaatgagaatacatggtagaaacatttgctttgtaaattggcatatttctgcacatatggcagcttgtgcgcagaccgaatgaagactttgaccatgtctttag

SEQ ID NO: 308193 - DNA, 320 bp, Zea mays
tctttttttttttttttttagcaggcagcataaggtagggccgtaccaaaagcaagggtccatagcacaagaaaaatacatgcgtcaacagcgacggaatgggccacgagggtgggtacgctagcagtagcaagatggcaacaacacgaaagggaacaccgaactcatcgaggtccgcttgccctaggaccacaaggctttacacgataacagccctgccctcacatgtcatcggcctgcacctcctcctcgtgctcgaactcctcctcgaccgcagacgcgtcctggtactgctggtactccgacacgaggtcgaacat

SEQ ID NO: 308194 - DNA, 189 bp, Zea mays
gggggcattatagaaacacctcggttcccgcgagggcaccggctggtcagagaaaaccgcaggcaaaaacgattacagcacgcgcacactccactattgaaaaacataacaataagaaaaacgagagagagaaaagaaactccctagaaagacgggtacccaaccataccatgatatggcaggatctgg

SEQ ID NO: 308195 - DNA, 212 bp, Zea mays
gggggaacccccacgaacggaacatttttactacttcccgggggccaagtttttacccctaacaagaaggaaatttttaaccctgacaagaagagcaaaccatgacaccgatgatttatgaatagatcccaatccgaaataaacaggggccccaccacaaaaattggctttctccccccgggtgggggtaaaattttaaaaacccgatgggc

SEQ ID NO: 308196 - DNA, 238 bp, Zea mays
ggaccaccacacaattggggtctctttccttggttacaattgagttgatcacaagaagaatgagaaagaaaagaagcaatccaagcgcaagagctcaaatgaacacaaatgtcgctctctctagtcactatttgatttggagggattccggacttgggagaggatttgatctctttggttgggtctagaattgaatgctatagctcttgtaatgggttgaagggggaaaacttggatg

SEQ ID NO: 308197 - DNA, 163 bp, Zea mays
gctccttccttatggtgcgcatcttggcctagaaggtgttccacacctcgagccgccgcatctcgcgctccatcttcagctgctgctccacgcgcttcagccgccacgccgcctcccgccggtgcgtcgcccacgcgcgccgccccttctccagctcgcggca

SEQ ID NO: 308198 - DNA, 325 bp, Zea mays
acccccattcatgggtattattggttggctaatttacatggaaaagcctttttccaatcacatgggctggtgctctctagttcagttttgggaactccaaaaaacagaaaactttgacttgggaacccccctaggggtttgtacattgggggcgctcatgcttgcagtcttcaagagccggggaaattcatttagggttatcttgccatttttggcaatggcagcctcctccagggggggatcaatagaacccttcattcctggatgcattctaaggtcatcaggggggatgtagccatctttggcaacatcaaatttatcaaat

SEQ ID NO: 308199 - DNA, 360 bp, Zea mays
ggagcagtaacttccaaattatgaatatctttaaggaaaggcgttttgatttaaaatgttttggggaattttccttattttcgcaaaattggactttacggtgttacagccggggtcgtcggtggtgcgctatacagtggcacgctgtaggcaggtgccatgatcaggagagccagcgccggaggtcgagaggcactgggggtctgacccggtgaaagtcgcctagagggggtgaataggcaaatctgaaatctataaagtttaagcacaactacaagccggggttagcgttagaaatataatcgagtccaaaagagatggagaaaacaaatcacaagcaaatgaagagtgagacatggt

SEQ ID NO: 308200 - DNA, 409 bp, Zea mays
gtacctttacctggtacctcttgaggtcctccagcgtgacgaccccaccggcctcccggacatccctgacgagccgcgccccgaccgcgccgccgtagaacacggtgggcccgtgctccgcgacggcccgcagcgtctgggcgagcctggggttgcggcacacgtccccggcccggaggatgtcgccgcccggcgcgtacacggcccgcgtcccgttgttggccaggatgccgtccctggtcgcctccatctgtatccgcaggtacggcgagaccctgaacgccagcgccagccgcgcggccggcaggacgaggcgcttccatgggagcttgccgtggtgcttccacgcctcgtgcaggccgggcgatctccccgggaacggctatgggagagcgcgccccgcgctttc

SEQ ID NO: 308201 - DNA, 352 bp, Zea mays
gcgtgctgacctgtggtactcgtccgggtgcacgtcgtagccgagcgcctgcgggaatcgaaaacaagaacacggcacgtcgttcgttgtacccagtcgtcagaatccggaacacacacggtcggagaagcttattagttagtatttgtcggaaacgtcgtcacgtacgatgagcccggcgagggagctgccgtgcgcgcggaagagctcggcgcgcgtggcggcggcctcgtcggccgacacgccgagcttggcctggaggaactcgtcgatgttgcgcctcagggccgcgccgatgccggggtcgcccgggtcagggtgtcgtcgaggtctgcgccggcgcgcgggccac

SEQ ID NO: 308202 - DNA, 343 bp, Zea mays
ccttgcatatttgcccacgtttattatggttttacacccaatatagttgcaataccattacatacccgcacaatacactttgctgctgctaaacatataggacgaacacactagtaaattaaacggccgggacggcagaagacaggccgggagcagagagctctgcgttattctctcctcgatcgtctaacggggacggatggcagcacacaaagaggagggtacgtagtagggtagcagtggcctgttatcatcatcattaccatcagcagctcatctttgccggctggctaggacacaacccttccattgatccagaccacctaaatgctccagagactga

SEQ ID NO: 308203 - DNA, 171 bp, Zea mays
gaggtgtgtctcttgaggtaggcggcgacggaggccgggacggagacgtcgcgggtggtctgcaccaccacgcagggggagcgcaccatgcccagcacgccgcggaggtcggtgttgaacacggtgcggcacacgtggagggagatgtccggccgcatgttgaacagggtg

SEQ ID NO: 308204 - DNA, 324 bp, Zea mays
acttcaattgaattggatacacaagagaggttgctggcaacctcaccaaaaggcttcaagaaattacggggtccgtttgattaatggagccaagactacataactgttcgacacaggtttttaattttggctacatatcttcaatgcaaaacgacggttaaaagaacaaaagacctataccaacagtaacaaatgattaggtaaatacttgatggaatagacctaccatcgaaaatcagtaaaaagataatcagaacaatcatgctgctaatacatatatacacatttttcggaacaacagactgactactggggcctacatgc

SEQ ID NO: 308205 - DNA, 223 bp, Zea mays
aacaggaactcatgcagaagaagagcagttgccccagttcacagtatgttgaatgcttcaggttcaagaggttttgcaacaaggtcacagcacaagttcacattagaaattcatgacaagccaagggagtttggaaaaggaacacatcccacaaaaggttttgcgtttcgataactaggggcgttattcagccatcaagactggatactgtggttttaaaaag

SEQ ID NO: 308206 - DNA, 273 bp, Zea mays
ttttatattttttttttttttttttttttttttggggtcgttagagatagtagtggggaagtatacattaggttactcgattttacacaaaataacaaagcaggtacaaagaacatacaagccaacgccaacactagatggcgatatattattttacagctttttccaaatatagaagatccacgagagccttaaaaaagcattcaacgtaatgtgttaagatccatggccatccatgaataccgaaagcacacccaccctttttatttatga

SEQ ID NO: 308207 - DNA, 220 bp, Zea mays
caaaagggatgaaaacgatatacgcccatattcatggaatattactggaacatataaagggagctggactttttgctggtgccacaaatggttcgtctagatttcttgagtttgtggaatctaaaggcgattcagttttggaattgttgagcactccaacaaagataagcggggtgcattatgttcagggttcagttacattccatgatgtcattgacaa

SEQ ID NO: 308208 - DNA, 336 bp, Zea mays
aaatacagaggtttacgaccgatttgtaattatcaatcgaatcaataacacttttatctcgtatttatttcctgtacaattaggagtagttctagtctaattctagtttagcctctcaatccccaaattctccgcttcttttcgactttacgtcgattagaggagtctaggtcggtctgtccgagcctagacgtcacctaggatctttcctccccgatggggtccctcctgggagggagatccaggcgccgccggtgatctttcgccgcccctgggccacgcgcggaccatccggcccgagggcgtggaccatctggccgtcaggcaggaaaccct

SEQ ID NO: 308209 - DNA, 292 bp, Zea mays
ggggaaacttttaaaatctcaaaataggatttcgggtgttacaaccattatgcgtccgctcacaaaattttcaaggatttcctcgggcgttattttggggtacctgggattttcacggatcaaatttacaatgttaggatcaagaacgggaaatgaacatagcattaggcacacaatgttgggatccatccatcttggacttccataggtgcggatttggtttaaaagggtcttgatcctattatacgccttagttgggttttcacctttttttatggagaaccttccaaat

SEQ ID NO: 308210 - DNA, 457 bp, Zea mays
tcggaacgcacacaccgcccggactgcgggcttcgatccccgatcccctcgtcgatccaagatgcagatcttcgtcaagactctcactggaaagactatcaccctcgaggtggagtcctctgacaccattgacaacgtcaaggccaagatccaggacaaggaaggcattcccccggaccagcagcggctcatcttcgctggcaagcagctcgaggacgggcgcacacttgccgactacaacatccagaaggagagcacccttcaccttgttctccgcctcaggggaggcatgcagatcttcgtcaagaccctcactggaaagactatcaccctcgaggcggagtcttctgacaccattgacaacgtcaaggccaagatccaggaccaggagggcatccacttcgaccagcagtggattatttttgcttggcagcagctcgaggacgggcgcacgctg

SEQ ID NO: 308211 - DNA, 451 bp, Zea mays
gaacccctcgttgatccaagatgcagagcttggtcaagactctcactggaaagactatcaccctcgaggtggagttctctgacaccattgacaacgtcaaggccaagatccaggacaaggaaggcattcccccggaccagcagcggctcatcttcgctggcaagcagctcgaggacgggcgcacacttgccgactacaacatgcagaaggagagcacccttcaccttgttctccgcctcaggggaggcatgcagatcttcgtcaagaccctcactggaaagactatcaccctcgaggtggagtcttctgacaccatcgacaacgtcaaggccaagatccaagacaaggagggcattcctcccgaccagcagcggctcatttttgcatgcaagcagctcgaggacgggcccacgctggccgactacaacattcatgaggagagcacccctca

SEQ ID NO: 308212 - DNA, 353 bp, Zea mays
ttcttatcgtgcttgctgtgggggggacggtgagagacagatcgagagagagacctcatagagaggctagctagggaggtcgtcgaacgaagatgctgacggctgccagcgggcaggtggtggaggagccgactgatctggcggcggtggccagacggacaccgtcgcccaagacgaaggcgtggcagctggtgacgctcttcctggccgtgtccgatccggccgtatccacgcagttaattgaccacggccaccttgactactgccacaccaaccaggcgctccttcgacccaggtacaatctcggccaaggacaagagtgttctaggctgtcgagggggcgctggacaacc

SEQ ID NO: 308213 - DNA, 344 bp, Zea mays
ttgttggctgctctgctgctggccctggtggtggtggccgtgagcctggtcgtggagatccaggccgacgccgggtacggttacagtggagggtacacacagacgacgacgccggtcactccgaccccagaggcctagaaggcctctaccaaggggccaaagccggacaagccgctcacagagcacaagccgcccaaggagcacgggcccaagccggagaagccgcccaaggagcacaagccgacgccgagcacgggcaccccgagccccaaactcacgcgggcgacgtacacatcgagtcccgcgtctgccatgactggggcaagcagatacacttccggcgc

SEQ ID NO: 308214 - DNA, 326 bp, Zea mays
ttctggttaacctgacccactgtcactcgcacggtcattttcttgactatactgggccctcagagttagccccctgctggaaaggcgctgatgtagtcgctgtccctgcccgcgtcccaaggtacgctagcgtgactcgcgatgacctttgcaacacgaacgcgagcatcgccaagcaacttgttgaggctgacgcggaccatcggccaggggcattcatacatagcaatagcaacccagtgcattcaaccgggccaacctcaggacaggtacatgagcacaagggccgttacaatcaccataagctcattggggataccaccctg

SEQ ID NO: 308215 - DNA, 254 bp, Zea mays
caagacgaagcaccccccggggttcatataggtcgaggctcttatgcagcacatcccggatggcagctccttaatgaagcaggccaagaagtagaaccagcctgacccgctgctgatgcccaagcgggacaggtacttgctgcgcacgtcgccctagtggctgggccaccagatcaaggtgagccgtgccagacccaagtccattgagcgcgaggtcaacttttgtggacgacaactccggtcatcgacgtgca

SEQ ID NO: 308216 - DNA, 384 bp, Zea mays
tttctgcccacgcgtacggggacgcgtaggctgcggcatagtggcacggacgtcctcgtgcccgccctcgacggcggggggaatcctaagggatcgaattgaggtgactcgcgcggcggcgctgagcccgaacctggcgaacgggctggtgctgccggtggctgtcgagggaggcggccccagccgtggcgccgggttggaggcgctggccaagggcggcgtggagacagcgctaatccagcggaggatgggcaactgcaagccctgctgggggccctacccgctgagcatggtgtgcgagttggacctggcgctggaccctgtggaccggatggtgaggaatatcaagatgctgtcgcatggcaatgtcgactggtacatcgg

SEQ ID NO: 308217 - DNA, 184 bp, Zea mays
ggctcaatggcccgtcttcgaccaggtgctgcaggagcaagctactgaggatgatgggacaccgtcgaatgtcatagcgcgccttgccacagaaataaatgatgaaagcgccgatgtgtattgggcatgcaagaagaacaagcctgcatactgcccactattgactgattgatcacctggagac

SEQ ID NO: 308218 - DNA, 374 bp, Zea mays
ttcctcgcgtccgcccacgcgtccgcccacgcgtgggcccgcccgccagcccccccaaggaggacgcagcggtttgccatgagaagacatctttggttgtgccaaacacgaacagcagcctaggaattccagcatgggttcagggaatctggtaacgaagaaggtggtaaggcggcccagctccatcgaccaggacataaagttcgatcaaagctgggtggaggatgtcgcgtgcccaatctgtctggattccccccacaatgcagtgttgctcaggtgcgcctcgtatgagaagggctgtaggcctttcatatgcgacactgaccagactcgcttcaactgtttggagaggttcaaaggcgcttatggacttg

SEQ ID NO: 308219 - DNA, 418 bp, Zea mays
tgttttcgtaagctgcagctagtgtggactggagatccaccactccaccagtccggtccatctgctggacctcgattggtttcttcttacctaggaacatccggggatgtcgactcctgcgaggaagaggctgatgagggatttcaagcggttgatgcaggataacaacataatgctgtggaatgctgtcatattttgaccctgatgatccccggggggagggaggtactttaaagctgacttttcagttttatgtagaatttcccaacaaaccacccactgtgcgatatgtttctatggtgtgtcactctaacacaaagagttgtttctcatccatatttacaagattgcataagaaaaaagtcgatctgattttgccttcgctgtgctgtactttttaggattctaaagcaatgtt

SEQ ID NO: 308220 - DNA, 381 bp, Zea mays
tcgtgtacattttctctgatggaattggcaagatgacgtgcgaccttgcactcgaagttgctcagaagctgcaattgacagataatcccccatctgcttaccagattaggtatgcaggcttcaagggtgttatatctgtctgggaaggaaaaaatgatgggatacgactttccctgaggccgagcatgcacaagtttgagtctaaccatactgtgttagaggtggtctcgtggacaaagtttcagccaggattcttaaatcgtcagattattacattactgtcctccttgaatgtcccggatgctatctttgctcaaatgcaggaagccatgttatctaatctcaacaatattttgtcagactctgatgttgcttttgaca

SEQ ID NO: 308221 - DNA, 530 bp, Zea mays
gcgttattggccagctagagccaaccagaagagcttgcagttactgagagtgtgcgtgagagagaggatgggtggcagcggcagggctgctctgctgctggccctggtggtggtggccgtgagcctggccgtggagatccaggccgacgccgggtacggttacggcggcgggtacaccccgacgccgacgccggccaccccgacccccaagcctgcgacacctaagccgaccccgccgacgtacactccaagccccaaacctccgacgcccaagccgaccccaccgacgtacaccccttgccccaagcctccgacacctaagccgaccccgcctacgtacactccaagccctaagccaccggctaccaagcctcccacgcccaagccgaccccgtcaacgtacaccccttcgccaaagcctgcgacacccaagccgaccccggcgacgtacacccctttttccaagcctcccacgcccaagccgaccccgacgacgtacacttcaagccccaaggcttccacacacccga

SEQ ID NO: 308222 - DNA, 513 bp, Zea mays
  unsure (1)..(513): unsure at all n locations
cctttgcgtccgcccacgcgtccgatctttcttcagttttagatgtgatagatattggtatgaaagataaaaactagaatgctatgtctgtcaaaggagctttcttcagttcaggcagctccatctcagtcgttgtacccattcaacgccgagctggtggcagcgatgcaggagatgatccagccgaggtgtacaagtacatgttagtggacgtcacctgccaaagatacacagtttctactgtttttcagttggagaaaatatttaagacaacattttcatcgtttgttctccatatggggcttgtttcacgccacttgaaggaaggagggaatgatnggtgtttaagttcggacaatacatctacacatctatgaaatgtacaaccacgatgtagagcatagagtttctaaagttgggtaagctgtttggctgttttatagaaatttgtatcaacatcaacatagatttttagtcccaaacaaattggggtaggctagatttgaaccccac

SEQ ID NO: 308223 - DNA, 474 bp, Zea mays
cggtgcgtgggcggacgcgtggggtgagcacggcggtgattggcagcttcgggtacctggacccggagtacttcaagacgcagcagctgacggaccggtcggacgtgtactcgttcggggtggtgctgttcgaggtgctgtgcgcgcggacggtgatcgaccaggcgctggagcgcgagcagatcaacctggcggagtgggccgtggagtggcagaggcgcgggcagctggagcgcatcgcggacccgcggatcctcggggaggtgaacgagaactcgctgcgcaagttcgcggagacggcggagcggtgcctggcggactacgggcaggagcggacgttcatggccgacgtgctgtggaaccttgagtactgcctgcagctgcaggagacgcacgtgcggcgggacgcgttcgaggacagcggcgccatgggcgcgcagttccccgaggaccgtcgtctgccgcgctgggtgc

SEQ ID NO: 308224 - DNA, 401 bp, Zea mays
cgattgtttccgtccggaggagagcaaccccggggggaatttggaggaaatcatcgaggaatccccggatccgcgagaaggactccaggatcatcgggccggtgaacccactggagacggccctgcataacctgctggacgtggacgatggcgacccagaaactggccgcagcacggcgagtaggaggcgtcacgagcacctacgtactggacgcgagcgccatgggagccagcttgggccacgtgaaggagctcgggggcactatcacatacctgggggacatgcctgtgctgatcacacacaacatgaaggtacaagtggaggacgagcggacgctacagatcaacgggaagctgttccggcaggagctctaggacaccaagcacctgggcatggagcg

SEQ ID NO: 308225 - DNA, 530 bp, Zea mays
cccttgcgtccgaaaggaggtgataaacagggcgtggaaagtggctgaaatcatacaggtgtcaagggatgagctggaattcctcctagatcatgagtactatgaatacaagagaaacacccctcctcagtattatcttgaaggatttcattttacaagaaactggccacagtactaccactacagccctgaagagatcgctcctatttggcatgacggtataaagatcttgcttgtgacgtatgggacacttcggatccactattacacacctaagtttcatggctgtgtggttgggacagaggatgcactcataactccatacaccactgaccgaacaggttcaggggatgctattgtggctgctgctattaggaagctgacaacttgtcctgaaatgtatgaagaccaggatacattggagaggcaactgagatttgctgttgccgctggaatcatatcacaatggacactcggtgctgtgcgaggatttcccactgagagtgccacccagaacctgaaggaagaag

SEQ ID NO: 308226 - DNA, 366 bp, Zea mays
cggttgcgtgcgcggacgcgtgggcgcgcccgggggagctttgaatctcactcgcgagactccgccgttgccgcggaacccggggagagcggtatggggctctgggactcgctcctcaactgggtccggagcttgcttcttaagcaagaaatggagctctccctcgttgggttgcagaatgctgggaagacgtcgctggtcaatgccgttgctacaggtggctaccgtgaggacatgattccaacggtaggcgtcaatatgcggaaagtcaccaagggaaatgtcacgattaagctttgggatcttggtgggcaacggagattccccactatgtgggagccctattgcccgggaggttctgctatt

SEQ ID NO: 308227 - DNA, 524 bp, Zea mays
cagtcgtcaccaagggtttccgctataagatgcgggtcgtctacgctcactttcccatcaacgcctccatcacctcaacctcgacttccagctgcaggacggcggtcgcaagctcaaggtcgacgcctggtttggcacccgccgaaccatggccgccatccgcaccgtcatctgccacgtccagaacctcatcgtaggcgtcaccaagggtttccgctataagatgcggttcgtctacgctcactttcccatcttgcgttcagagaaggtcaaggatgagcttgttcttgaaggcaatgatgttgagcttgtctctcgctccgctgctctcataaaccagaaatgccatgtcaagaagaaggatatccggaagttcttggacggtatctatgtgagtgacaagggccccatctttgatgagcaatgagctgccctttgttcctggctagcaaaagccgtgttaggctgtggccagtagactgtatgcgtagtggatgtagttggcaataggagatgggatgagt

SEQ ID NO: 308228 - DNA, 434 bp, Zea mays
gtgttggctggtgaagcagctggtgctcgtgtcggccgacctgatgcacgacttcaagacggggcacctgacgctgacgtcgccgcggtcgatgctggtggggcaggccgtgggcacgctgatggggtgcgtcctggcgccgctcaccttcatgctcttctacagggcgttcgacgtgggcgagccggacgggtactggaaggccccctacgcgctcatctaccgcaacatggccatcctcggcgtggagggcttctcggcgctgcccaggcactgcctgcagctgtgcgcggggttcttcgcgttcgcggtgctggcgaacctggcgcgggacctgctgacgcgccggctcgctcggctcgtgccgctgcccatggccatggccgcgccgttcctcgtgggcgccagcttcgacgtggacatgtgcgtgggga

SEQ ID NO: 308229 - DNA, 485 bp, Zea mays
gctcgttgagaacactcctccattaagtgacggggaattatatatcttcgttgggtgctgcaacgttcaggggtatgcagagtggtgacaacgatgctatttggttgatgcaaggttggctgtttacctatgatcctttctgggaacctccacaaatgaaggcactactgcattctgttcctgttggcaaaatgattgttctcgatctttacgctgaagttaaaccagtgtggataaattctgatcagttatatggtgttccctacatctggaaagttctcttttctctttctgccaactccatgcactattaccctgcttttattttccttcataaaaaaactcgtgtgaccctttttgaagcgcatgctccacaatttcgctgcagattttgaaatgtatggtgttttagatgctttggctgctgggcctattgatgctcgattaagtgataactccacaatggctggagttggaatgtctat

SEQ ID NO: 308230 - DNA, 486 bp, Zea mays
gcctcacgcgcttcgggggatgacgaacgagtgcagtgcgcgcattaggataggagggagtttttgagggagtgaggccacattatgacaagtggtaagaagaacttggctgatccacaggatggatggaccttatacgagacactctccgcgaggaacgagtctctgacacggcggagccctgattgactcacaaatactctgtggactgttgcattggttcatggttgctttaaacaggataaattctcaatatctggccaggatattatgctcacactgatcgctagacggaagaggcattatgctggaaccagatatttaaagaggggggtgaatgagaagggaagagtagcaaatgatgttgagactgaacacattgtctatgaagctgtgcctggacctactgaagttggtgctgatgagagaataggggctcaactacactatgatggtcacaggagacatcaaaactgaatcttaaac

SEQ ID NO: 308231 - DNA, 298 bp, Zea mays
gtgttgatcttgaatgcacttgttcttaggaagggggtcttttttagttgctcattccacattatgagaagtcttcagtagaacttggctgatccacatgatggatggaccttatacgagacaatctttgtgtggaatgagtatctgacacggaggatccgtaattgtgtcagaaatactttgtggactggtgcatacggccatggcttctttaagtaggatctattatcaatatgtggcgaggatattatggtcacactaatctgtagactgcacagggattatactggcaccagat

SEQ ID NO: 308232 - DNA, 396 bp, Zea mays
ccatgcgtccgcccacgcgtacggcgccattggggagctattgccaaccagaagagcttgcagttactgagagtgtgtgtgagagagaggatgggtggctgcggcagggctgctctgctgctggccctggtggtggtggccgtgagcctggccgtggagatccaggccgacgccgggtacggttactgcggcgggtacaccccgacgccgacgcccggcaccccgaccccgaagcccgggaaggcccccaccaaggggcccgagcccgacaaagccgcccaaggagcacaagccgcccaaggagcacgggcccaagccggagaagccgtccaaggagcacaagccgacgccgtccacgtacaccccgagccccaaactcacgccgtcgacgtacac

SEQ ID NO: 308233 - DNA, 433 bp, Zea mays
agctttcaatcacgaagaatgggcgagataggcacggaccaccgcggcctagccgaggccggcgtcggcgtcaaggaggagggcatcgtcctcggcgacgaggaggaggaggaggaggaggagacttcgccggtggagcaggtgcggctgacggtgccgtcgacggacaccccgtccttgccgtggtgaccgttccgaatgtggaacatcgctctgttgtcgcgcgctctcatgagcttcctcaaccagttcttctcgcaccggacggagctcgtgatcgtgacgcagatcacggtgcaggtggcgtcgctgccgctgggccacttgatggcccgcgcgctgtcgcgcgccatgttccgggcgcccgcgctgctgggcggcggggagtggagccctaacccggggcccttcaacatcaaggagcacgtgctca

SEQ ID NO: 308234 - DNA, 330 bp, Zea mays
tcaccctcgggcctgcaaaacgaagaggggactgttgcccgagcccgacttatgtctaattcccgataccgtccagcgatcgagctacacgccagtctcggtctattaggaggcgtagcgcgcggttgatacagaggagaggaggaagatgagggagtgcatctccgtccacatcgggcaagccggcatgcaagtcggcatcgcgtgctgggaactttactgcctggagcacggcatccagactgatggccaagtgcctggagataagaccgcgggacatcacgatgatgccttcagcaccttctttagccagactggtgctgggaagca

SEQ ID NO: 308235 - DNA, 522 bp, Zea mays
tgttaatagtccaggagcacatagccttcagagtgtggccgcttgtagagcaatgggaaatgccaaaggaaactattagcaaatctgacgaaggtgggttggttaggttgaaatacaccttcaaatatgaaggtaagtttatcgagccagatgatgattggctaaagtgcatcgaagctataagcgacgaactacttggaccatattcaaaggcaaaagataacgcgttatctgcgaccttcggaggccggaagaagaagaggctgaatagagttttcgatgctattgggttttgtgtatcctgactatcgctacccgccccgggtcagaaagaaaaagtggagtttgcgggacaaatgttgcttcagctgcttcaagcgagcctgcgccgaagaggaaaagggtgaaggtcctgactcaccgatcgcgctatatttgaaccgccacagtgcccgaatttggcggtgagaccttcttcgtaaactgaagcaagaaacctgcaatcacgcagaaagttggaga

SEQ ID NO: 308236 - DNA, 487 bp, Zea mays
tggaacacgagagcagaacctcgactttgggctgggcagacggcataccgcagagcgcagagagcacgccacccacctcgtcccctcaatttcgcctttctcttcgtcttcctcgcctaccatgcggcgcagaacctccaaagcactgtcaacacggacgagaacctgggctccatctcgctgggcgtgctctacacgtccttcacggcgttctcggcggcgggctccgcggtggtgcggtggatgggatccaggcgcgcgctcgtggccggcacctccggctacctcctctttatcgcagcgaacctcctaccgtcctggtacacaatggtcccagcttcactctaccttggttttactgcatcgatcatttgggttgggcagggtacataccttacatcagctgccctcagtcacgcaagagaaaataatttgcccgagggtccaactttagggagcttcatggggaggtttggggaatgtttgc

SEQ ID NO: 308237 - DNA, 332 bp, Zea mays
actaccacgcgtccggcgccattggccagctagagccaactcagaagagcttgcagttactgagagtgtgtgtgagagagaggatgggtggcagcggcagggctgctctgctgctggccctggtggtggtggccgcgagcctggccgaggagatccaggccgacgccgggtacggttacggcggcgggtacaccccgacgccgacgccggccaccccgaccccgaagcccgagaagcccgccatcaaggggtcgaagccggacaagccctccaaggagcacaagccgtccaaggagcacgggcccaagccggagaagccgcccaaggagcac

SEQ ID NO: 308238 - DNA, 473 bp, Zea mays
cgcatactgccgcgccaaccccaccaccacaagaggggcttttaacaagccgcgggcggctaagccccccctgacccgcgaccagccaggagaaggcgggcgcgcacaccagctgctcggcgaccacgcacgaaggagctgcacaagaactggggcgtggggggccggccgcgcggcacctgcaagggggccccggcggaggagcactgccgcacgtgcgacggtggaacctccctctgcacgacgtgcgacgcccggcccgcgcacgcgcgcctgggccaccagcgcgtgcggatgagcgaggccagcgagctggcccccggcgccgccacgtgcaaggccgacgccgacctgctctgcgccgcctgcaactccgacatccacgacgccaacccgctggcccggcgccacgcgcgggcccccgacgcccccatcggctccgaggccgtcgacgcggccgaggaagccatgcc

SEQ ID NO: 308239 - DNA, 322 bp, Zea mays
atgaagacaggaacatgattcatccagcatttggactagtatatcctcaaagcgtccatgtggctccttcgcccatcgagcttggccgcgaagaagcccttcatgaaatccatgtagtccatggatctgtaccgtgccccgccactgtctctttccacgagctcctgcagagggccgaccgtcgtgttggggcatgtctgatggaacatcgccgccgagatgcgttctttgtccgggtgtacaatggctctgtgctcaatgcttctgtacctcccattgcttagaatctccagtatgtcgccgatgctgacgactaaagcac

SEQ ID NO: 308240 - DNA, 356 bp, Zea mays
gcacagtcacatctgatccgctcgggtttttacgacgaatgggctctatggaagcgccgaccgcgccggagaacggctccgccgccggtggcggagccggcaacggggcgggcgccgcgtcgaacggaggaggtgttgagaggaggctgaggtcctcggctgcgcccgcgtcgtgggcagcccagcttcccctggaggtgggcacacgcgtgatgtgcccgtggcgcgaccagaagctccaccctgtcaaggtcatcaagcgccgaaggggctccgcttccttttccccggttgactacgagtactacttccattacaccgagttcaatagaagacttgacgagtgggtaagcttg

SEQ ID NO: 308241 - DNA, 411 bp, Zea mays
tgggtaggctccggggtgggaagggatttttttatgccgctatcacttggtccaccaagaacacagggtttactagctggctgagaggatctgtgcagctgtgctctgagccaagtaagcacatgatgacaacctgcatgaatgaccaagaggagaaactagtggccgatgttgcaaaagctcaatgctaccattgaggctgatgcgatggagcatgacggcaaagctttgatgaagcgagttatgcggacgtgggttccaggcaccactgcacttattgagatgatgagatttcaccttccttactcggtacaggcataaaagtacagtgcggagaactcgtatgagggaccccttgatgatgtctatgcctctgctatcagagactgtgatccgcaggggcctcttatg

SEQ ID NO: 308242 - DNA, 432 bp, Zea mays
  unsure (1)..(432): unsure at all n locations
ctcacccggcagggaggccggggcttctatggagganaccgcttttttctccccgcagaagaggctcgccgcgggagtcctaaaatgtggcaaggggaaggtgtggcttgaccccaacgaggtctacgagatctcgatggctaactcgcgtcagaacattcgtaagctggtgaaggatggattcataattaagaagccacagaaaatccactcaaggtcccgggcaaggagggcccatgaggccaagcagaaggggaggcactctggttacggttagcgcaggggtaccagggaggctaggttccccaccaagatccttggatgcccaagatgcgtgttcccaggcgactgttgcgcagtattcgtaagcaaagaaaattgcaaacaatgtaccacgatatgtttattaagataaatgaaacatgtttaaaa

SEQ ID NO: 308243 - DNA, 476 bp, Zea mays
  unsure (1)..(476): unsure at all n locations
cgcactcctgttcacggggggccgataccgacttcaccccctcatttctgtcccgaatccctngttctttgagggtttcaggcgtcgtatgtaagagaagatggcgctctcagtatccatggagggcatcgaggcgcgggcgcgggatctcggggtggacctctccgctgtcgatctggactccatcaccctcccggccggcgaggacttcggcatcgtcagtgatgacgaggaggtacttcgtggtgaggatcttccagaacttgaaatgggtttgtccaacattattgtcgtggacaatctgccagttgttcctccagaaaagtctgagaagcttgagaatgtcatacgcaagatctacagccaaattggagcgataaaagaaaatggtctatggatgcctgtaaacccagagacaaagaagacatacggttactgtttcattgagtatagtacccctcaggagctgagctggc

SEQ ID NO: 308244 - DNA, 201 bp, Zea mays
aaaagagagccacactgagctgcgctgagaaagccatgtagcagcgcccgagcgagcgggacgaggtgcggaggaaccgctaacaaggaggcggcagacgcggaggaagggcggaggcggcgcgaggacaaaaaggtggagacccgcaagagccggcgcaaggagagcccaccaagaggcgccgcgaggagcatcaggacc

SEQ ID NO: 308245 - DNA, 527 bp, Zea mays
cccttccgtccgctgcattcctgggggtcagttatactcgctctccctcctcacccgccgccgccgccgacctaagccagggtgctgaggctttcgttggcctcttcgccggcagcgagcacccaccagcagttctgtagaaatggctgatggtgaggacatccagcctcttgtctgcgacaatggcaccggaatggtcaaggctggttttgccggcgatgatgcaccaagggctgtattccctagcatcgttgggcgtcctcgtcacaccggtgtcatggtagggatggggcagaaggatgcatatgttggtgatgaggcacagtccaagagaggtattctcacgctcaagtacccgattgagcacggtattgtaagcaactgggatgacatggagaaaatctggcatcacactctctacaatgagctccgtgttgccccggaggagcaccctgtgttgcttactgaggctcctttgaacccaaaggccaacagggagaagatgacccagattatgttcgagactt

SEQ ID NO: 308246 - DNA, 530 bp, Zea mays
  unsure (1)..(530): unsure at all n locations
tgggcaaatactgtttggaaatttggaggttgttcctagctctgccttttttattttgcctaggnaacacaatagaagttgtatatagatgtggaactctccttaaagtcaaagttacaattaatcctgatgatctatgtatgcacaactatcaaatatggtaatcttcttatgttagttctatgtaagataaatttctgcttggggtttctgacctaaggtcaaagtttttgctatttttttgttggcctcatccagcttgatagattattgattcatttctgatttatctgcagtttttggatctctttggtgatgcaaagtcaatcaataaggcttcaactcggcatacaacttttttttcatgtaagagaagcattctgccatcaaagaaacggaaggctgatgatgctgttctgtcagacagggacaagtttgctaaaactgggtctgttcagtcagccacaggaactgatccaaatgcttncaatcctcctgtttggcctgcgacttctgaaacatctggacat

SEQ ID NO: 308247 - DNA, 358 bp, Zea mays
gccattggccatctagggggaaccataagagcttgccgcttctgttcctccgcgcgagagagaggatgggtggcagcttgcagggctgctctgctgctggccctggtggtggtggccgtgagcctggccgtggagatccaggccgacgccgggtacggttacggcggcgggtacaccccgacgccgacgccggccaccccgaccccgaagcccgagaagccccccaccaaggggccgaagccggacaagccgcccaaggagcacaagtcgtcgccgtccacgtacaccccgagccccatactcatgccgtcgacgtacacttttacttttacgccctctaagccgatgccacccacat

SEQ ID NO: 308248 - DNA, 350 bp, Zea mays
  unsure (1)..(350): unsure at all n locations
ctccttgccaggacaggagtcgggcttcttctcaagtggagcgcggaccgcccatggccaccgccgncgacatccgcgtctccatcggctaccagacccgcttcgggctccgcctcgccgccgcgctctcctccccacccccatcccccgccagcaactccgccttctccccgctctccctccacgtcgcgctcagcctcctcgccgccggcgcgggtggcgccacgcgcgaccagctcgccgccgccctcggaggcgacgctcccgccggggccgacggcctgcacgcgctcgccgagcaggtggtgcagctcgtgctcgccgaccgcttcggcgccggcggcccgcgc

SEQ ID NO: 308249 - DNA, 339 bp, Zea mays
gccccgcctcgcgatccccacgcggggcggtgctgagggccgctactcatttccctaaccctagcgggccgggcgccgcctccggtcccgcccgcccgccgtgatggggcagtgctacgggaaggcgcgcggcgcgtcctcgcgggcggaccacgacgccgacccctcgggggcggggtcggtcgcgccgccatccccgctgcctggcaacggcgcgccgctgcccgccacgcccaggcgccacaagttcggatccaccacgccggtgcaccaccaccaggcggagacgcccggcgccgacttctggcctagcccgtacccggccggtggcgccagccc

SEQ ID NO: 308250 - DNA, 415 bp, Zea mays
ctaccgcggcgagctgatcaggaggatcggcgcgcagctggaacgggcttcggtcccggaccttctgatacctgcggactccggcgacggcgacggcgacgcgatgtacaatgttggcatggtggctgcgatgctggaggagttcttgctgcatcacaaggtaaatggggccgaggcggagaagcgggaagatggcgaggacgacgtggatgttgccgctgacgacccggtcacttcttcgaagctggccgctgtcgcaaagctggtcgatggatacctctccgagatcgccaaggacccgtgccttcctctggagacgttcgtcgccctcgccgaatcgatgccgcccctgtctcgcccggtgcacgacgcgctctaccgcgccatcgacgtttacctcaaggtatgcatcata

SEQ ID NO: 308251 - DNA, 154 bp, Zea mays
  unsure (1)..(154): unsure at all n locations
accnacaacgccgncggcgaggaggagcttaagggcgaggagcccagggacaccctccgctacgnngacgcccacaacgccgccgccgacgcgggcgtccactccttccggcccgggctcaaccggttcgccgacctcaccaacgacgaggacc

SEQ ID NO: 308252 - DNA, 380 bp, Zea mays
taacttcatccgttctgaaaaattttgtgattcctaagttggagaaggttatcgatgaggagaaggaagtctcacactcatcgttgatggatgacgcagagaaggctattctggacccactaaaggtcaaggtgaaattgaagcctgataatgttgatatgctaccctccagtctttcaaagtgggggtaagtttgatctaaagcctggtgcgtctagcaatgacgagtacctgtattatgattcagcaagtattatcatctgtgcaattggttccaaatacagtagctattgctcaaatgttgctcggacatattttattgacgctacccctacacagaataaagcatatgagacccttatgaaagctcatgaagctgc

SEQ ID NO: 308253 - DNA, 257 bp, Zea mays
gccggacggacgggccttggttggctgctgtggtacgccgcgctcggatgtcggtggtgcgggtcgccatatccatcgagaagggcgagaaggcgtgcacggtgcagaagttctcggagaccttgaccgccgtcaaggagttgatgcctggaggtgttaacttgtcagagcgagccttaaaatatgttggtgggcagccagtactgtcggactctgtgaagggttctagtatgtggaatgtttctgggaatgagtac

SEQ ID NO: 308254 - DNA, 400 bp, Zea mays
ccggcgacttcttccgatggaactctgacatcatggcgcacttccgcgccggcagggtcggggcggcgcgccgggtgttcgacgaaatgcgcgagcggaacgtgttcacgtggaactgcatggtctcgggcctggccaggaacgggttgctcgccgacgcgcgcggggtgttcgacgcgatgccgtccaggaactccgtttcgtgggctgcgctgttgacgggctacgcgcggagcgggagggtggccgaggccagggacctgttcgaccggatgcctaaccggaacgtggtcttgtggaacgcgatggtgtccggctatctgcggaacgggatggtcgacagggcgcgggagctgttcgacgcgatgccggcgagggacgacgtgtcgtggctcatgat

SEQ ID NO: 308255 - DNA, 227 bp, Zea mays
ccttgcatatttgcccacatttattatgggtttacacccaatatagttgcaataccattacatacccgcacaatacacctgctgctgctaaacatataggacgaacacactagtaaattaaacggtccgggacggaagaagaacaggccgggagcagagagctctgcgttattctctcctcgatcgtctaacggggacggatggcagcacacaaagaggagggtacg

SEQ ID NO: 308256 - DNA, 288 bp, Zea mays
  unsure (1)..(288): unsure at all n locations
acagtagaagtagaagccttttttccttgcatatttgcccacatttattatggttttacacccaatatagttgcaataccattacatacccgcacaatacacctgctgctgctaaacatatagngacgaacacactagtaaattaaacggccgggacggcagaagacaggccgggagcagagagctctgcgttattctctcctcgatcgtctaacggggacggatggcagcacacaaagaggagggtacgtagtagggtagcagtggcctcttatcatcatcattacc

SEQ ID NO: 308257 - DNA, 484 bp, Zea mays
  unsure (1)..(484): unsure at all n locations
acgcggacactgtccggaggcgaataaagaacttgccagcctttccttccccccactgcgctgccttagcttcaagatgcagatctttgagaagaccctcaccggcaagactatcaccctcgaggtggagtcttctgacaccattgacaatgtcaaggctaagatccaggacaaggagggcatccctcctgaccagcagcggcttatcttcgccggcaagcagcttgaggacggacgcacacttgctgactacaacatccagaaggagtcaaccctccacttggtgctgcgccttaggggaggcatgcagatctttgtcaagaccttgactggcaagacaatcacccttgaggtggagtcctcagacaccattgacaatgtcaaggcaaagatccaggacaaggagggcatcccacctgaccagcaacgtcttattttttgccgcaagcagttggaggatgggaggaccctngctgactacaac

SEQ ID NO: 308258 - DNA, 224 bp, Zea mays
caaacatcagggcttattcatgattggccataggtcgggggagaacgcacacacaacacaaccggtccattattaaaccaacactgacccgacttatggacacgaacagaagatactttgacaccctccatagggggggggggccccagacgacgcaggcacatgggcagtttaaacgacccatgacttactgcccaccacggagacggagcacaggggggggg

SEQ ID NO: 308259 - DNA, 299 bp, Zea mays
  unsure (1)..(299): unsure at all n locations
cccccgccaccagaggnctntggtcatgagtcagcagctgcgtgaggccatggaggacgccgtcgccagcgagggaggcagaggggagtacaccaaggacggctccgtcgacctccacggcaaccccgtcctccgctccaagcgcggcggctggaccgcctgcaccttcatcgtcgagtacgagctcttcgagcgaatggcgtactacggcgtggcggcgaacctggtggtgtacctgacggagcggctgcaccagggcaccgtccaggccgccaacaacgtcaccaactggtcgggca

SEQ ID NO: 308260 - DNA, 506 bp, Zea mays
  unsure (1)..(506): unsure at all n locations
gtccgaagaagtatgctggggganctagaaacaaaccagcctccttatgcgagagtatgaagagcaatgaccatgacatgagaagacctagttcttatcattcatattcccagagcccaccctatgattttcaatatgaagatagacgatatggtaagcaagtgaacacacttgctcgaaggccttcagatagggcgctcttcgatgggaaacttggcaacctactattcagtccaggtcgtttgcgagatcagatgaatgaagaccgttttgccaatgaaagttcaggatcaaggttttctgacttctcagcctcaagcactggcgactttagaaatgatgtgctttctcctagctctcaagagacaggctacagtagtccctcagtccaccattcaagatatgtctctgctgacaatcctcaaacccagaaatgtcctaacgcagcttcacaaatagatttcaatggagttcgacgttcacagcgaacaacttttttggaagtt

SEQ ID NO: 308261 - DNA, 222 bp, Zea mays
cccttgcatattggcccacatttattatggttttacacccaatatagttgcaataccattacatacccgcacaatacacctggtggtggtaaacatatagggacgaacacacttttaaaattaaccggccgggacggaaaaaaacaggccgggagcagagagctctgcgttattctctcctggattcgttaacggggacggatggcagcacacaaagaggag

SEQ ID NO: 308262 - DNA, 422 bp, Zea mays
  unsure (1)..(422): unsure at all n locations
ctccgacgttcacccggacggccaatgacgcgtcaccccccctgtcccccccgacgnacactnnaaggggnaaacctccgacgcccaagccgaccccaccgacgtacaccccttcccccaagccttcgacacctaagccgaccccgcctacgtacactccaagccctaagccaccggctaccaagccttccacgcccaagccgaccccgccaacgtacaccccttcgccaaagcctccgacacccaagccgaccccgccgacgtacaccccttttcccaagccttcgacgcccaagccgaccccgccgacgtacactccaagccccaagccttccacacacccgacgcccaagccgaccccaccgacgtacaccccttccccaaagccttcgacgcccaagccgaccccaccgacgtacacc

SEQ ID NO: 308263 - DNA, 266 bp, Zea mays
ttgcatcaaacagagagataattctaaaagtagcttatggcaaaagaagagctgggatctgacgttgatatggactcgcgtgccactatgactgatgggcattcaggaagcgacctgctgaatatgcgtgtgaccgcagcgcattaccccatccgagaaattttggagacggaaaagaaggagaagactttggctaacacagaaggtaagccggagcctgcattatatggaagcgaggacattcgttcttttagcatagatgactt

SEQ ID NO: 308264 - DNA, 161 bp, Zea mays
ccaaggagcacatgccgtcctttgcgcacgggcccatgccggagaagccgtccaaggagcacaagccgacgccgtccacgttcaccctgagccccaatcccacgccgtcgacgtacactcccaccccgtcgcccctcaagtcgactccacccacatttcac

SEQ ID NO: 308265 - DNA, 321 bp, Zea mays
gctgaccttgtccctgatccggggcatgaacgtgttcgatccttcttccctcgacctgtgggaccccattgagggcttcccctacgggtccggcaacagcagcagtctcttccactcgttcccgtggaccagcttagagaccgtgaacttcgttggcgcgcagctcgactggaaggagactccaaaggcgcacgtgtttcaaggacgacattaccggggctgaagaaggaggaggtcacagtggaggcttaggacggcaacatccttcaaaccagcggtgatcgcaacatggagcaggaggagaagacggacacctggcac

SEQ ID NO: 308266 - DNA, 470 bp, Zea mays
tgaaaatatcattgcatcagaaagggtcgtaaatacaactcaccgctttttccacgaattccttgcagacaagaggtacttggttgttattgatgacatatgggatatatcaacatggaagctgattagatgtgctttggtggaaagtaaccctggaagtagaataatcataactactcgcatttgtgaagttgccaaaaaggttggtggtgtttacaacaagaaaccactctctcttgatgactccaagacattattctatactagagtatttgctggtgaaagcatgagtcttgataacatatctggtgaagtgtgcaacaaaatcctaagaaaatgtggtggtgtgccattgtccatcattacgatagctagtctgcttgttggtaaacagagggaggactggtctaaggtgtatgattatattggttttgggcatgaagataacgaggttattgggaacatgagaa

SEQ ID NO: 308267 - DNA, 357 bp, Zea mays
gaacgaagatgttgatgcgagagcaattacaatccagtgtgaacagtactggggtactgttcacttatttataggcacgggacgcagcccgagtaaaaatacatttatgacttcaatttatatacacaatcgtaacataggtcatcagggattaactagtcttttcctcttcggttcagcgccatgcttgaccttcgtcgtcatcttaaaccgaagttgttgtccttcggtagaagcttcggtattcgtcattatggctctcagatagtatcttcgtctcgatgaccttcgacagagaggatcctcaacatcactttgtcagtgatacctttgtcttaaggaccttcctcggaaaag

SEQ ID NO: 308268 - DNA, 314 bp, Zea mays
  unsure (1)..(314): unsure at all n locations
cacacaacctgttttggggggaanctacctgtgggaacctccgtttcctcccgcagatctgggggaaaaccctgactggcccgactatcaccctggaggtggagtcgtatgacaccattgacaacgttaaggccaagatccaggacatggagggcatccccccagaccagcagcggctcatctttgctggcaaacagcttgaggacgggcgcacgcttgctgacttcaacattcaaaaagagagcacccttcaccttgtgcttcgtctcaggggaggcatgccaatccttgtgaaaaccctgaccggaagacta

SEQ ID NO: 308269 - DNA, 314 bp, Zea mays
tgctgctgctgctctgcttccgctcgctccgctgctcggccaccgagcgcgggaggctctgggccggtggggtctccatcgcggaggcggggagcggcggcgaggaggagtgcgacctgttcgacggggactgtgtctgggctggcggtcgcggcgggtacccgctctacgactcccgggactgcccgttcctcgacgtcggcttccgatgcgccgagaacggccgccccgaggcgtactacaccaagtggcgctggcagccgtcgagctgtcatctttccagatttgatgccaaaagcatgctggagaagcta

SEQ ID NO: 308270 - DNA, 386 bp, Zea mays
ctctgaggctgtaattgaggagatgatttatttaattggtcctgctcttaacacggcacgaaacatggctagataggtgactcaccaggagtcacacgaggactacgttgaggacacagaggctgcaacaaaggttccgcttaagaaggagcttagcatgggggttggtgtgggcgactgtggcgtggactacaggctggattatcagaatgtgcacctgagtgtgcacttgcttgtgaacttcttgaaaaacatttggcaaaatgagagatgcttggacctaaacagcaccctgggaagcgctgtccgaatggtgtaccggttgcaataaagcttacaattaggaggagactttacagcgtacacacttgctatgtcacttgcca

SEQ ID NO: 308271 - DNA, 320 bp, Zea mays
  unsure (1)..(320): unsure at all n locations
cgttgagagagaggatgggtggcggtcggtgggttgntctgctgcttttctttcgtggnggnggccgngagcctggccgtggagatccaggccgacgccgggtacggttactgtggcgggtacaccctgacgccgacgctggccaccccgaccccgaagcccgagaagccttctaccaaggggccgaagccggacaagccgtccaaggagcacaagctgtccaaggagcacgggtccaagccggagaagccgcccaaggagcacaagctcgcgccgctcacgttcaccctgagccccaaatctacgctgtcgtcgtacac

SEQ ID NO: 308272 - DNA, 466 bp, Zea mays
ttttgaccaagcacctccacaacatgtacatttctattgttgctgctggtgctatccctggtcagcttcctggtatcactgctcctattcccggggttggggtgcttccgaacttgtataatttggctgcaggacagttcaacccccttgttattcagccacaagccatgacacaacaggctacccggcatgctcgccgtgtctatgtgggtggacttcctccaacagctaatgagcagaccgttgccatattctttaatggagttatggctgctattggaggaaacacagctggtccaggtgatgctgttcttaatgtctatataaaccatgacaagaaatttgcttttgtggagatgagatctgtggaggaagcaagcaatgcaatggctttagatggcataatgtttgagggagcaccagtcaaggttagaagaccaacggactataatccttcctagcagct

SEQ ID NO: 308273 - DNA, 273 bp, Zea mays
caatcgattatgtgtttatgttgattttgaatggtttttacccaaacgaattttatagaatctgactgaaaagctgagcgtttggcagtccgcagcagcttttgatggccagaagctccaaaaagctgaaacaaacaggggctatgtatcttggcctagccggtgttctgcatgccggcagcgatgcccttcatggtcaggatcagcgtgtcctccaggcccggggcgtactcgctctgctcgttcagctgcaccagctccgccggctgactc

SEQ ID NO: 308274 - DNA, 519 bp, Zea mays
  unsure (1)..(519): unsure at all n locations
caccggcagcggcggccggttaattggaggaagacgctcttttcactccccgctatactactaattccaccaatgacatgatccatggaggtaccagcggcggaggcggaggtagcggcaggtggagaggaggcaggtcaagggggtggccgcccccgcagcctcaccatcgttaccgccgtgtggatgccgttcatcgtgactccgcgcctgtctctctatcggagctacaggcggcctcctccacatccagccgccaccggtaccttactcgttccatctcagcggacaagtcttccgcctcgggaaccgcgggttcaacagataccagggagcctgacgacaaggctaaccgcagcgctgccaactttgagtgcaacgtctgctttgacatggccgctgaacctgtggtcaccaggtgcggncatttcttctgctgggagtgcctttttcagtggcttcatgtccattctcaccaccgtgagtgcccttgtctgcaagggtcaggtagctgatgat

SEQ ID NO: 308275 - DNA, 503 bp, Zea mays
  unsure (1)..(503): unsure at all n locations
tttgctcggaacgcacacaccgccggttttctgatctncgatccccgatcctttcgccgatccaagatgcagatcttcgtcaagactctcactggaaagactatcaccctcgaggtggagtcctctgacaccattgacaacgtcaaggccaagatccaggacaaggaaggcattcccccggaccagcagcggctcatcttcgctggcaagcagctcgaggacgggcgcacacttgccgactacaacatccagaaggagagcaccctccaccttgttctccgcctcaggggaggcatgcagatcttcgtcaagaccctcactggaaagactatcaccctcgaggtggagtcttctgacaccatcgacaacgttaaggccaagatccaggacaaggagggcattccttcggaccagtagcggcttatttttgctggcaagcagtttgaggacgggcgcacgctggccgactacaacattcagaaggagagcaccctccacttggt

SEQ ID NO: 308276 - DNA, 430 bp, Zea mays
  unsure (1)..(430): unsure at all n locations
actcangaattgcaacaagacggtttgtttacagngagcagaccttgctgacttgcaattcctgttttatcttcttgccgcagcccctgctgagctgtgagctgtatgcatggcatggccacccctgtggcgcctcttctccatgatgagcctcaagctgctggtatcttactcccagggacaacccagcattcagatcaaacaaactctgactctagagttggagagcttatactgcctaatggggatacttatcgtggcgcgttatcgggcaacacgccacatggcccaggttgttatatctggtccgatggttgtgtttatgagggtgattggaggagaggcctcatgcatggccgaggcaagacgctgtggccaacaggggccacctacacaggtgactactccggtggctacatttatggtcagg

SEQ ID NO: 308277 - DNA, 458 bp, Zea mays
acatggactggcaagaccatcacctttgattgtggagtggtctgacacaatcgacaatgtcaaagccaagatccaggacaaggagggcattccaccggaccagcagcgcctgatctttgctggcaagcagctggaggatggccgtaccctcgccgactacaacattcagaaggagagcaccctccacctggtgctccgcttgcgaggcggtatgcagatctttgtgaagaccttgactggcaagaccataaccctggaggttgagagctccgacaccatcgacaacgtgaaggcgaagatccaggacaaagagggcatcctctcagaccagcagggtctgatcttcgccggcaagcagctggaggatggccgcaccctagcagactacaacatccagaaggagagcactctccacctggtgctccgcctccgcggtggtcagtaagccatggttcatt

SEQ ID NO: 308278 - DNA, 368 bp, Zea mays
ccggccgaaacccaaaccacggcggtgggggtttttgaaggcacaacgcggctaacccctgcggcggccacccggaaggcgccgcctccggggtacccgggctcccgcacgagctccgccaccgcggccccgtcggtcgaggaagaggacgacctctatggccgcctcaagacgctccagcgccacatggagttcggcgagatccaggaggagtacgctaaagacgaacagaagaaccccaagcgcgaactcctccgtgcgcaggaggaggtcaagcggatccagtccggaccggtcgtcaacggccagataatggagaaggacgacggcaacaacggcatcgcgggttctaccacggggcagcacca

SEQ ID NO: 308279 - DNA, 354 bp, Zea mays
aaacacataatcgggtgggtcgttggaatagaaagaatccgtcactttttagatcctgggttctatgaacaactttattttcctccacgcgtaatcataatgatactcagattctccctacaaccagattttcctcacagccagattttcagaaaagctgctcaaaaaaaagttgaaccaaacaggccctagagctatggcttatttggggggatggggcaccatacatcacggggggacctgccttccatttgcatgctttttacatagctttgggttttggggctatccaaagatctctgctcttggactattggatgaagcattttgtgtacatttttagccattcccttg

SEQ ID NO: 308280 - DNA, 404 bp, Zea mays
  unsure (1)..(404): unsure at all n locations
tncgccgcacctactcagctcgctcgtcccagctgatcagggggggcctttttagcgacctgcgcgctcatcttactcagagtcgctaggtgtctgtctctcttggtggctggatgcaacgctcatggcgacgtcgtctcgtcgggtgcccttgctgatgctgtgcctgggcgagctggtctgctgctccttcgcggcgggcagcttggaccaggagctgcacatcacgtggggcgacgggcggggcaaggtccttgacaacgggcagctgctgacgctgtcgctggaccgcacgttcggctccgggttccagtcccggcacgagtacctgctcggcaagatcaacattcagatgttgacggtgccgggcaactccgccggcaccgtaaccgcctactacctgt

SEQ ID NO: 308281 - DNA, 384 bp, Zea mays
cccactcgatcgctaatgagacgatttggcctggctgtgggtttttatcaagcgtgaagggggatttcttcaaacaaccgtgtaatacactaagggatacgttcccagccgcttgtcttaacgggcgaccaatcctgcctgaaactggatttgatctattgaacaaactgctgacttatgaccctgagaagcgcatctcaacagacaatgctcttaagcacaaatggttctcttaagggcctctgcctacatcaaaggacttcatgccaacattccctgctcttaatgaactagacaagcgttccagaagggatcatgaagagtactgatcctctggaagagcaacgtttgaaagaactggaagggaacatatgcaaccatggg

SEQ ID NO: 308282 - DNA, 379 bp, Zea mays
ccgaacaccgcctgcgacaagctggtattttttaacaggtgcgcggtctttacccggcgcgccgacggggacgcccaacccgatctggaacgaggagttcatgttcgtcgcgtcggagcccttctacgagccgatccttgtcaccgtcgaggaccgcgtagcgcccggtcgagacgagatcctcggccgcattgtcctgcccctcaaagcggcaatgccgcggcacgaccacttcggcaagcctgtggagccgcggtggtacagccttatgcgccccttcgatgatcctgacaagaaggaggtcaagttcgcaagcaagatacagattcggatgtcgcttgatttcgggtatcatgtttttgacgagtccacctactac

SEQ ID NO: 308283 - DNA, 353 bp, Zea mays
agaataattgtttatattctttttggggtttatatgtctttatttacatccttgctcactgaaatgatgaaggtatgtccttcacgaccttcgtctaaaagatcatttatttcctaagggagataatgcttcgaaggacgaaggtcttcgaccattaacattcgtgttgccttgttcttgatttatagctgaaagtcgcctagagggggggtgaatagggcgaaactgaaattctcaaaacaatcacaactataagccgggttagtgttagaaatataatcgagtccgcgagagagggtgcaaaacaaatcgtaagcgaataaaggagtgtgacacgcggatttgttttaccg

SEQ ID NO: 308284 - DNA, 403 bp, Zea mays
ggccatctgaaatgcagatatgccactttcattaccagcaatctgcaacaagggcttacagataagaaaactgagctttgaacagaacaacatatactgaccatgctaatgcagttccaagtaccaaattcagaacaaaatacatgtcacaccttcaaatccatgtcaccagaaccatcttcagctccagtaatatcagagagtataagtgggctaccatctccaccaaattcttgtgtatcaaggaccaggcccatttcaattccagcaacaggaaactttataggaaccccaccatcttgaagtgctaaacaacctccataaacagaagccatgcttacctgtgtttctccccttgtgaacagagcactaccatgagctcttggaagtaagccacattgag

SEQ ID NO: 308285 - DNA, 444 bp, Zea mays
  unsure (1)..(444): unsure at all n locations
gaaatcaattaattttgtaaaaaaattaaagtcagaatatggtagcgaatccactttagggcttgttcggttattcccattatacatggattgaatgagattggaaaaaatttagaagaactttgacttaattgggatttaaacccacctaatcttactcaatctacatggattgagagctaaccgaacaaggccttaataaacatgaatcttctatggatttagataatgggtttaacccactggctataggtccgggtgggttattcagttaaattattagattaggtcgggttaaaaaaataagttatttgcaatgggtttgngatgggttgaggtaggttttcgtcccattagccgcgtcactttggggacagcactccattcacatgtctaccgccagccgatagccgctcttctgtaggcattcggacaatttgcatg

SEQ ID NO: 308286 - DNA, 394 bp, Zea mays
attcttttttgaaaaatcaaagctcccacctacctggagacccttgacgcgtggagagcggtgccaaaccaccatggcgatcctgctcctcttgctcttcgttttgtcctcagcttcagctgatgagtacggggaagagctgctgcagcgcgcgtggggggagcgggagtggatggcgagcgtgcggcggagcatccacgcgcatcctgagctcgcgttccggtagcaccgtaccgcagccctcgtacttgaggagctcgagcacctcggacttcccgcccgcgccgttaccggaacgggcgtcgtcactgatgtaagttccggggcgccccccttagtggcgctccgcgccgacatggactcgctcccgctccaggaattagtggagtgggag

SEQ ID NO: 308287 - DNA, 458 bp, Zea mays
ttctcttcgcctccgactgcctcccagatccgctcgcccggccgccgccgtcttcctggtccgcctctgcggcagtgagattcctcgccgccccgccctggattccgtcgagaggatcgtcgaggacttcgcgatggacctcgccatcaaccccttctcctgcggcacccgccttcgggacatgatacgtgcgatacgcgcgtgcaagacggcagcggaggagcgtgccgtggtgcggctggagtgcgcggcgatacgggccgccatcagcgagggcgaccaggactaccggcatcggaacatggccaagcttatgttcatccacatgctcggttaccccacacacttcgggcagatggagtgcctcaagcttattgctgcggcgggccttcccgagaagcgcatcggctatctaggactcatgcttctgctcgacgagcggcaggaggtccttatgc

SEQ ID NO: 308288 - DNA, 347 bp, Zea mays
tttgacgcgtggggcgccattggccagggggagccttccagaagagcttgcagttactgagagtgtgtgtgagagagaggatgggtggcagcggcagggctgctctgctgctggccctggtggtggaggccgtgagcctggccgtggagatccaggccgacgccgggtacggttacggtgtgtggtacaccccgtcgccgtcgccggccacccctaccccggaagcccgagaagccccccaccatggggcctaatccggacaagcctcccaaggagcacatgcctgccaaggagcacgttcccaagcccgagaatgccttccatggagctcaagccggcgccttcca

SEQ ID NO: 308289 - DNA, 446 bp, Zea mays
cgcccggaattctggttgacccacgcagctggttgaacctttatacccttcacagcgttgtggtccttatgcggaggtgctcatggtggacattattatgctttcatacgacctaccctttctgatcaatggttcaagtttgatgatgagcgtgtgacaaaagaagatgcacagagggcactggaagaacaatatggtggtgaggaggagctacctcagacaaatcctggcttgaacaacactcccttcaagtttactaaatattcaaatgcatacatgcttgtgtacattcgtgaaagcgacaaggacaaaattatctgcaatgtggatgagaaagatatagcagagcatcttctgattagattggaaaaggaccgtgaagagatggaacgtcggaagaaggaaaaagctgaggcacacctctataccataatcaaagttgcaag

SEQ ID NO: 308290 - DNA, 287 bp, Zea mays
tctgaacgctgaagagcgcacaaggggccagactggtttcggagaaaccactggcgaacatgcaccgcctgcttcatggcaccacggggggctgggacgggcggtcacggtgccacatgccatgtctaccagggcggaaacccagtcggtggagttgagcacgggaccggtggcatgaggcacggcacgggaaccaccggagagatgggccagctaggtgagcatggcggcgctggcatgggtggcgggcagcttcagcctgcgagggaggagcacaagaccggcgg

SEQ ID NO: 308291 - DNA, 387 bp, Zea mays
cggaggtccggtcctaattccctaattacccacgctccttttttaacactgagtcttgaagcatgggggctttttaggacaatggggtacaaaccccccttcacagatcactcactttatggtcttgctgaagctggaagcattcacatgaataaggtgctgcagtttactcttgcagatattgatcaggcaatatgtgtctcacatacaagcaaagagaacactgtcttgaggcccgggatatctccatagaaggttttcatggttcctaatgcacttgacactgcaatgtttactacctattccaagcgcttaaactgagatgaaatagttacttgttgtggccagtagattagtattcctaaaaggcgccgaccttcttgttta

SEQ ID NO: 308292 - DNA, 165 bp, Zea mays
actctgaagaaataatagaatccaacagccagatataaaacaacgagggtacagatgcccagtaattttcattcccaacaattaacatgcgaggcctaacccaattctaatagctcactggtactttgacgtcactataggtaggtctccgtgggtcttgagttc

SEQ ID NO: 308293 - DNA, 437 bp, Zea mays
  unsure (1)..(437): unsure at all n locations
cgtanttcttaaggaaccgccactagaaataacacagtcggtggataaccgaatccgcttgtaaaaatatatcgtccccgcaggctttgatcctttttctaccagtgcgtcaagccggaactgttcatcaccaggagtcaggctcagggtttctaagatcctcttcattcggcattgccgtggtttcgctcttctcgacaagcatatcgatcacctattccctcctgcccacagcctactacttcctgcctcgatcttgcattgatcccatcactcctttttggcggctttcactttctctattatcgcgaggacgacactggttttaaattgcaggtaattaacggngagatcagtgatccagagcagagcaaagttctgaagaaggaactgagtgtgcagcccactcacctngtcgctggtctctacgtcgttct

SEQ ID NO: 308294 - DNA, 252 bp, Zea mays
taccacgcgtacaagtggaattgctaggggttgcctaggttctttaaagagaaagacaactacactgggtcaaaagagttaaagattacggatggatcacgaggaatcaatggagtagaagacaacatgggaggaagctcaagaatggatgggccctactcctaagggaccatgcatggatattgctgatggccatgagttcgaggaatattaggagccacctatacttggaaggaagacttattgtgcagc

SEQ ID NO: 308295 - DNA, 423 bp, Zea mays
ttcttcacgcgtgcgcccacgcgtccggctggctggtgctccccgtcttaccaagtgcttctggggttagggttccttagggttttgtggaggggcgacggcggcggctgatgtggagtaccgttgcttcgtcggcgggcttgcctgggccaccagcaacgagtcgctggagaatgccttcgcctactacggcgagatcctcgactccaaggtcatcaccgaccgggagacggggaggtctcgcggcttcggcttcattaccttctcctccgagaactccatgctcgacgctatcgagaacatgaacggcaaggagctcgacggccgtaacatcaccgttaaccaggcccagtcccgtggcggtggcggtggcagcggtggctacagcggcggtcgcagcggcagccgctatggtggcaggcg

SEQ ID NO: 308296 - DNA, 304 bp, Zea mays
actgatctgctccaactgcattcccccttttgcctgccgtacggtgcatgactgctctctagctctagtgggtctgagaccacagttagccgccgccgacgacctaaggcagggtgcagaggctatcgacggcctctacgccggcagggagcacccaccagcagagctgaagaaatggctgatggagaggacatacaggctctggtctgcgacaatggcacccgagtggacaaggctggctcagccggcgatgatgcaccacgggctgccatccctagcatcgaagggcgtcctcatcacaccg

SEQ ID NO: 308297 - DNA, 405 bp, Zea mays
ccgatggactagattcgcctcgccttttaatctggggctgacatataagttttatggggcgactacatccaatacccggaacggaggttcaaacatttgatgggacagaggctaaattttagcggggtgtaaccaaacacccccttatatggtagataacttttatatactacattaaacttatatgtagttggagtgctccatcaatttattgattctaagatgagtgtatggaattatttaacgaaggaggtccaacggtgtaactgatagagttagagatgttcaactttaaaaaaaaaattatgcctaattttggtggatctaatgatagagctttctcaacgtgcgcttagagcatgcaaggctagatgaagcacatgtttgacggcacggaggcaaaac

SEQ ID NO: 308298 - DNA, 383 bp, Zea mays
tacgcgccattggccagctagagccaaccaggggagctttcagatactgcgagtgtgtgtgagagagaggatgggtggcagcggcagggctgctctgctgctggccctggtggtggtggccgtgagcctggccgtggagatccaggccgactccgggtacggctacagcggcgggtacaccccgacaccgacgccggccaccccgaccccgaagcccgagaagccccccaccaaggggccgaagccggacaagccgcccaaggagcacaagccgcccaaggagcacgggcccaagccggagaagccgccccaggagcacaagccgacgccgtcacgtacaccccgagccccaaacccacgccgtcgacgtacacttccacccc

SEQ ID NO: 308299 - DNA, 179 bp, Zea mays
aaacaaggtgggaaccaaaacttatttatttttgagaagttcaacacaggcccgaatttttgggacccctttgtaagaacacttatttcacaaacaacctttaaaggtcagggtcttgacaccttaccaaaccaaaccttgaacactaaccaatttaatccccctcctctattttggga

SEQ ID NO: 308300 - DNA, 437 bp, Zea mays
gctactccacacgcgcggtgctggagacagcatgcggcgtcatgtccgtggtcatcttgaggaacaccaccattccgaccaagagggatcaggtgttctgcacgtacttcgacaaccagccgggggtactgatccaggtgtacgagggcgagcgcgcgaggaccaaggacaacaacctgctctgcaagttcgaactctccggcatccctactgctccccgcggggtgccccagatcacgggtaccttcgacatcgatgccaacggcatcctcaacgtgtctgccgaggacaagaccaccggccagaagaacaagatcacgatcaccaacgacaagggccggcttagcaaggaggagatcgagaagatggtgcaggaggctgagaagtacaaggcagaggacgaggaggtcaagaagaaggtggatgccaagaacgcg

SEQ ID NO: 308301 - DNA, 335 bp, Zea mays
tcggacgcgtgggcggacgcgtgggcggacgcgtgggctgacgcgtgggtatatatttagcacccgtctctataggatgttggtgacagttcttttcggaatgcttctgcgatgtagcgcggttttacatagtaaccctgaaacaaacttcagcccgctctaatggggatttgtttggagactcgtgtctcgctgggtagcccttcataaaaaaaaaaaaaaaaaaaaaaaaaaaaaaaaaaaaaaaaaaaaaaaaaaaaaaggggcggcccttttaggggacccaggttaccttccgcggcattgcaaggcataagttttttattggggccccc

SEQ ID NO: 308302 - DNA, 430 bp, Zea mays
  unsure (1)..(430): unsure at all n locations
tctcccacgcgtccgcccacgcgtccgcccacgcgtccgggactgtatatgttttcctctatgggcggttatatcttgtacttagtggacttgatgaagcgctggctactggaaggaggtttgtgcacaatgcacctctccaggttgcgcttgcatcggagtcttttgtgcagcttgggtttttgatggcgctacccatgatgatggaaatcggtttggagagaggattcagaacagcattgagtgacttcatactgatgcagcttcagttggcctcagttttcttcacgttctcattgggaacaaaaactcattactacggaaggacattactccatggaggagctgaatacagagccctgnacgtgggtttgtggtgttccatgcgaaatttgctgacaactatcgactctantcccgtagccatttt

SEQ ID NO: 308303 - DNA, 422 bp, Zea mays
ctgacgcgtgggcggacgcgtgggcggacgcgggggcggacgcgtgggcggacgcgtgggcttccgcaacctggagagcaagggggtggcgttccccaagagccagccgatgcggctctactccagcctgtggaacgcggacgactgggcgacgcagggcgggcgcgtcaagacggactggtcccacgcccccttctccgcctcctaccgcgggttcaaggccgacgcttgcgtcgccgtcgcgggcggccggacccgctgcggcgccaccgtcggcaccgagggcaccggcgcccccgcctccgccgccggcgccggggactggtacaaccaggagctggacctcaccctgcagcagcggatgcgctgggtgcagcgcaggtacatgatctacaactactgcaccgaccccaagcgctacc

SEQ ID NO: 308304 - DNA, 424 bp, Zea mays
cctgcaggccccggcccagtatccgggggtcgacacacgcgcgcttaggcgcgcggtcgggatctacaagcagagggcaatctttgtgcttactctagtcaggctcgtggttgcgattatctggtcatacactggacagatccttctactctgtggtcaggatccagagattgcaggtggtgcagggagctatatccggtggatgattcctgcgctatttgtgtatggtccactacagtgccatgtccggtttctgcaaacgcagaacatagtcctcccagtgatgctgagctcaggtgccacagcactgaaccatctgctggtgtgctggctgctggtgtacaagattggtatgggcaacaagggtgctgccttggccaatgccatctcatactttaccaatgtatcaatgctggcaatttac

SEQ ID NO: 308305 - DNA, 364 bp, Zea mays
cgctaaactccacgcaagaggagaagcgcaacgggggcttggcaagaacggcgcggagctggacggccgcaacatcaccgtcaacgaggccccatcccgcggcggacgaggggccccgagcgccgccaggccgagctcgtggaggcggaggctacagtggcagcaggcgccccaaaggcgggaacgcccaacgcagccgctccgagggcgaccgcggcggcggtggctacggcggtggtggtggcggctaccgcggtggcaaccgaggcggcggctaccgcaactccgacgggaactggaggaactgagcggtggcggcgcttaacaccatggacgaccgcgaaaagtacttccacggccccca

SEQ ID NO: 308306 - DNA, 419 bp, Zea mays
gtacgcgtccggggaagttagcaatctagtagtgggaatggaatactccagcccactacaatggcgtagcagggggaaagtagtaattgctgggagtgaatcaatagggctgtgggatgtgaattcacttaacccacaacccttgttgtctgttgcttctggcaagaaagtgtactgcctccacgtgaataacactgatgctgaggtgggcggcagagtgcgtcaaagggttagctcatctgaggaggaaggaaatgatggtgttttcagcacacaggaaagtgacaatgtatttgattctcgtgtacctgctggcattgggcttaaaatagcaagacatggcggcacagcaaactcaatcttttcacgtggggactcgggatttattggtagcacagaaggaaagctgcagataaaag

SEQ ID NO: 308307 - DNA, 433 bp, Zea mays
gcgtttgacatacctgtacaggttaacaaattgcaaaggctactccaagaagagattgatttgcacatggcgttgacagatgccattacatataatgcggcgctgatacttaaggcatctatgaagcttcctgacaaggcacacgagctattgattagcatatcctctctggaaaccgctatcacaaagcttgaagaggatctacatcacctgcactaccagttatgtgatgcgaggaatgaaaggctacttgcagaaaataagccagaatgcttgctacctacagcgtcagattgccaaccttctacagcttgcgattgtacaagggaagagcctgaacaaacattaagatattcgagattcaaagattatcaccaagtggaggacggtttgtcaacttgacctgcagatcacatgatgacgaaaaagacgc

SEQ ID NO: 308308 - DNA, 396 bp, Zea mays
gtcgtgccgttacgtcgtccgctccttttcctcaaggaggctcgagtcccgaccacactggggaccccattacctgggctccgccacccgcgcgccctgcgacccacaggccccttgccctccgatgccgaggacaccgacgatccagacgccggcgacggcgccgccgtgtccttcaagaagagccgcaacgaactgaagcgggaggcccgccgcgccgtgaagtggggaatggacctcgccaagttctccccacctcagatcaagcgcatcctcagtgccgcgtcgctggagcgcgaggtgttcgacgcgctaatgctcgtgaagaagtttgggccggatgtgcgggaaggaaggaggagacagttcaattacatcggaagtcttttgcgcgat

SEQ ID NO: 308309 - DNA, 230 bp, Zea mays
ccttgcatatttgcccacatttattatggttttacacccaatatagttgcaataccattacatacccgcacaatacacctgctgctgctaaacatataggacgaacacactagttaattaaacggccgggacggcagaagacaggccgggagcagagagctctgcgttattctctcctcgatcggataacggggacggatggcaaaacacaaagaggagggtacgtagta

SEQ ID NO: 308310 - DNA, 382 bp, Zea mays
cggttaattataactagagcattcaatacattttcattcctcttacggaaacgtttcaaatcaatcaatattcgcaatcctcacaatcagctatagctagtgccgcatggggttaaaaaaaattaagcaaacacaaaatagaggatacggccttttatgttgcacatgcatattggggcacaaaacatttttccctgacgagctcgtgcagatcgtggacgattttgaacacagcatcaggtcgtgctagcttgagggcattctgggacattaccctgaattcgtctgaccttgggccaaaccagtcggcaactatcttcgcaatctgttttggagatttcgagaactttccacatccattttcaacaacgtaggggacatt

SEQ ID NO: 308311 - DNA, 475 bp, Zea mays
ttcttctattgtctcccttccaattcgatgcctttgtagcgctgctgcctcgccgcgtcgtcgcgggtccccgatttccgcttgctgctgcgcttccaacaccatggacggcgggggatccggcaatgcctccggcggcagcggcggcgcatcgacgtgctgctactacgcgctcctcggcatccgcaagaacgcctccgccaccgacatacgcgccgattaccggaggctcgcgatgaagtggcacccggaccggtgggccagcgaccccagcgcggccggcgaggccaatcagcggttccagcggatccaggaggcatactccgttctgtcggacaaggggaagaaggccatgtacgacgccgggctcttcgaccccctcgacgacgacgaccaggtgaatcagcagagcctcggcttcgattggtgtcctctcctctttgtttcttctaccccatggagttcatgctgctta

SEQ ID NO: 308312 - DNA, 420 bp, Zea mays
  unsure (1)..(420): unsure at all n locations
ttttgcccacgcgtccggcaagcagcaacagcctgcagccggcagtcctcgcctccgcctcctccaccctgaccgtcaacagaggaagacgaggatgtcgggatccaaggtgtacaccctcgaggaggtggctaagcacaacaccaaggacgactgctggctcgtcatcggcggcaaggttacatctttttcttcttctctctctatctggctgtggaattcggaaggatccatccctccccttgccttgctgggtgggaactgggatcttcccatcttcccttgatcagaattatcattaagattcgttagatgcctcctggaatcgagatcgagattgagaagcaacggnggaggtaggccgtggnttggtgacctaacaaatcattgaggcgagagggtggctnctactgtgtgtgc

SEQ ID NO: 308313 - DNA, 358 bp, Zea mays
ttctgggcaaacgcgctgaaaaacccacaccgacgcctgtgtagcctgtaggatgctgccaaaaccgacgcggatgcgcgcgctgatggcatgctagcacttgatgattctgtcacacacactacctgtgaatatcctgcggcagagggctgttcaggaaatgtggggaactacatgtgtgagatgggcatggccatggccaaactcgggacgctagagaagtgtgttgcccaagccgacaacctgcgacagcagacgttgcatcaaatgcaacgtatcctaacgatccgacaggcttctcgtgctcttcttgcaatgcacgactatttttcacgattgcgcgctttgagctctctgt

SEQ ID NO: 308314 - DNA, 233 bp, Zea mays
ttttatgatcttctctctcgcgcgccccgacgtgctcccctccgccgacctcggcgtgcgcaagggcgtgcagatgctctacgccctcgaggacgtgcctcgtccgtcgcagatggacaagctgtgcgagcggtggcgcccctatcgctcagttggggcttggtacatgtggcggctcattgaatccaaggtgccccagccggcgccagccatcccttgtggatcacttgctt

SEQ ID NO: 308315 - DNA, 454 bp, Zea mays
tttcggaggcggcgcagctgcacggcgggtgcggcgcctggggcgtcctcttcacggggctcttcgcgaggcgaaagtacgtggaggagatctacggcgccgggaggccctacgggctgttcatgggcggcggcgggaagctcctcgccgcgcagatcatccagatcctggtgatcgccgggtgggtgagctgcactatgggcccgctcttctacgcgctcaagaagctgggcctgctgcgcatctcggccgacgacgagatgtccggcatggacctgacccggcacggcggcttcgcctacgtctaccacgacgaggaccctggcgacaaggccggggttggtgggttcatgctcaagttcgcgcagaaccgtgtcgagccggcagcggcggtggcggctgccaccagcagccaggtgtaaaaaaaaatcaggagcaaattgaaaccgagctg

SEQ ID NO: 308316 - DNA, 468 bp, Zea mays
acaaaatatgggtgctggttaggctttttttgtgtggcatggataccaacatttttatcaacatccaacttgtacaaaaaccaaccatcgcttgtccatagtgatatccatcaaaccaaatacaccttgaacctgtagttacaggatgaaatttcatctttgaataaaccccataatcggttttttagcgctggacctagcaaaagaaaaatcaccatatactaggccctccaatttcttaagggtttatctaaaagattcgcagtataactaggaagacctttcaaatacaccttaaaccctttaacagcatctattggtgatatatatatatatgcttcttgcatgccacatggaatcataatgataatcaccagtccatagcaaatcctcagtaatggagctggtcgctgttgcgttgatttcacatacggtcagcaatgacagaagactgtagacatagcaatg

SEQ ID NO: 308317 - DNA, 484 bp, Zea mays
  unsure (1)..(484): unsure at all n locations
ttcttcccacgcgtccggtgcaaactcccttgcagaacaacttcagtgcagcactgaggaagctgcacagaaaattcaaagctttaggagattttttcctggtgtttcctcatggttacatgaagttgtgttatcctgtcgccaaaaagggttagtctacttggtagcaatttctgtttagtctttctttttatataatattgctcctttgatttttgatgctaacattgaatgagctctgtgaaaaatatgttagtcttaacttttgtggtatttcatatctgaacttttgagatatttcatatttgagcatgtattatcatatctttcaatgttagtatgcgagctgcttctcataataatttaaggtgaatatgcttcatgataatttgattttatttgaatgttaagtttatacagtaaatgataaggattactgtcttttggtcatgttatttatataacanctacttaagatcagagc

SEQ ID NO: 308318 - DNA, 407 bp, Zea mays
ttttgccggtatccaggtcggaaacgcgtgctgggagctgtactgccttgagcatggcattcaggctgacggtcagatgcccggtgacaagaccattgggggaggtgatgatgctttcaacaccttcttcagtgagactggtgctgggaagcacgtgccccgtgctgtttttgttgaccttgaacccactgtcatcgatgaggtgaggactggcacctaccgccagctcttccaccctgagcagctcatcagtgggaaggaggatgcagccaacaactttgcccgtggtcactacaccattggcaaggagattgttgacctatgccttgatcgcatcaggaagcttgccgacaactgcactggtctccagggcttcctcgtcttaacgctgttggggaggaacaggc

SEQ ID NO: 308319 - DNA, 447 bp, Zea mays
ttgttctctctctctgcctgcgttctcctggtgctgctctcgctctcctcccctgctttgacctccccgcctttccccgccgtttcttggatttctaggatccagacaaccgcccttgtgagcctgccttcctgcctactacctgcgtacgtacaggagggtccttgcttgggtgatccgggtgcctggtttctcggttccgcggcttccgctgcttgtggattcgccgagccggagccgccggagatgaccgtcgacgagctgaagctgcaggcgagggccagcggcggccacggcgccaaggaccagttccccgtcggcatgcgcgtgctcgccgtcgacgacgacccgacctgcctcaagatcctcgagaacctcttgctccgctgccagtaccatgtgacaacaacgggacaggcagccacggccctgaagctgctgagggag

SEQ ID NO: 308320 - DNA, 380 bp, Zea mays
ttttgcggggagcttgtgacgctcgcgttctatgtctttactgggtacaagttccggcctgaggtgcataacccatactttgccattgacgatgaggaagaggaggctgcagctgagacgctaaagttgaatgatgaattcgagctatgaggggttaggaattggaatcgactccatggcagttttaatattggtgttgtatgccccccagcacaggacaagtggcataaactggtatctagtccgtatccttttgtttctccttttgagttggctacacttggtcttactgtaattgggtatggacaagaatcctgtgtgtgttcagcaatacagcttggctttgccttagataaaatcaaaattctaaagaacctatt

SEQ ID NO: 308321 - DNA, 128 bp, Zea mays
tggtatctactgccactcttaccaagtactcctggggttagggaaccttaagggtttgtggaggcgcgatggcggcagctgatatgaaataccgactgataagtagagcatttgactgtgtcaccagc

SEQ ID NO: 308322 - DNA, 215 bp, Zea mays
gacgcttttgccacgcgtccgatttattaattaagggagagttctggacaatactactgtccttcaatgagtgacattttggttttgtcttaagtaaaagcattttatgtttgaccaagtttatatagaagattatcaatatttatagcaccaaatagatttactatgaaaatatatttcatgatgaatctaatcgatttatgacttgcgtcatg

SEQ ID NO: 308323 - DNA, 443 bp, Zea mays
aaagacattctgtcattaatcttaggccagattcgaaatacatttttccaagaaaactacaaaacaagttaagtttcatgctctgatgaaacaactattagagcgaagatttcatcgcatcattccctccaccgatgaccacaatcagggctacaacacacaaagaacagggtcattccctcctcccctgttgccggggcctggaagaaaacaacctctgcatgcccacagagattgcagcggacagccttggttctgggaagagttggatcagaagctacatcctgcaagacctgggttcgttccccagcagtgtggtgcacctcgtttcgatagacacaattattgtcagagacctcctgtaggagtgtcaaatgcgggcaacaacctctgagctaagtcagcagctaaatgaagtaactggtcatcataagattggattc

SEQ ID NO: 308324 - DNA, 363 bp, Zea mays
cctcatttcccgccatgcgtctaccctagctcgtggtgtttcttaagggatcgtgggagaggaatctcaaaccggcccgacttatacgagttaaggaagccatggagcacaaggaggctgggtgccaggcccccaacggacccatcctctgcatcaataactgtggctggttcggcagcgcggcgaccatgaacatgtgctccaagtgccacaaggagatgatcacgaagcaggatcaggccaagctggctgcctcctctatcgacagcatcgtgaacggcagcgacgccgtcatggagccggttgttgctggcagcaacacagtagtagctgcagcccaagttgagatgcaaacaatgaacg

SEQ ID NO: 308325 - DNA, 480 bp, Zea mays
tgcctatgcgtccgcccacgcgtccgcccacgcgtccggtcagattccaccaaagcatatatcccttgtcaattctacagttaatttgaatatagaagggagcaaatacacaattgaaactgtaaggactggacatggtagctacaggttgagaatgaatgattcaacagttgaagcgaatgtacaatctttatgtgatggtggcctcttaatgcagttggatggaaacagccatgtaatttatgcagaagaagaagctggtggtacacggcttcagattgatggaaagacatgtttattgcagaatgaccatgatccatcaaagttattagctgagacaccctgcaaacttcttcgtttcttggttgctgatggtgctcatgttgatgcggatgtaccatacgcggaagttgaggttatgaagatgtgcatgcctctcttgtcacctgcttctggtgtcattcattgtatgatgtctga

SEQ ID NO: 308326 - DNA, 393 bp, Zea mays
ttttatcaaggacatggtgttaggcaaaccagcacctctagtcagtactttccgtctgagctactacactattctgaacttaatgagccgtgtggagggccaatttaccgctgagcatgtgattaggcattcattccatgaatttcagtatgagaaggcattgccagaaatagctcaaaagattacacggttggagaatgaagctaccttgcttgattcttctggcgagactgatcttgctgaatatcacaaattggggcttgatatatctgaactggagaagaaaatcatgtctgagatgattagaccagagagggctttgttgtatttggttcctggaaggctggttagagtgagggatggttcaacagactggggatggggtgtggttgt

SEQ ID NO: 308327 - DNA, 393 bp, Zea mays
gggcacaatactataaacaaattaattttgaaaaaagaccttttaagcaaaacacgagagagccgagtacttgagtgcctacatgggcagcgcactcgctgtactcaggtactacgagatataaaattaactgaaggcaggtagaacacatgatccatcctgggtgtgcttcctgcaggaacggagccaacgtgaaggggtacttcgtctggtcgttcctggacgtgtttgagctgctggcgggctactactcgcgatacagcctttaccatgtcgatttttaggacccggagctaccgaggatgccaaaactctttgcgctgggttttcatgcgctgctacgagcatagtacaattcacgttttttccctgcgccgcgttcgcgggggcacc

SEQ ID NO: 308328 - DNA, 284 bp, Zea mays
tttcgtatacgcgcagccagggaccggccaaccggtccgtccaagcactgggttgctgtgcggcagtgagggtactgctcttgcacaaaaagagtgcgcgaactgtgactcatctgtgtacatgcatcagtatggcggtggaactgcatctatgaacatatctgaggactctgcaagggtaattcaccactttaacagatgggatggatatactgaactagggcgataggacaacaaaaacgtggtggatggaagaccacagaggaactcgaggggacttgact

SEQ ID NO: 308329 - DNA, 381 bp, Zea mays
cttgtttccgccgggccattggccagctagggccagcctgattagctgcgtgctgagagtggccgagagagaggatgggggcacccagggctgtctctgtgccctgaggtggggccggagcctggccgtggagatccaggccgacccggtacggatacggcggcgggacaccccgctccgacgccggacaccctgccccaagcccgagaagccccccaccaaggggccgaacccgacaagtcgcccaggagcacaagccgccaggagacgggccctgcccgaaactcgccaggtgacatgccgcgcctccacgtcacaccggtccataccacgccgcgcgacactcccaccctgcgtctgcaattcgcgccaccacatcac

SEQ ID NO: 308330 - DNA, 518 bp, Zea mays
gtcttattattaggtgccccggagaattcctctgaggaacgcagcaagactgccaccgcattcgagtgtaacatatgctttgagatggctagtgagccggtagtcacttcctgtggccatctctttctgctggtcgtgcttgtatcaatggttgaatgtttactccagccacaaggaatgcccagtctgcaaaggcgaggtaactgaggcaaatattactccaatatatggtcgagggaattctgatgcagagaagactgtggaggactggaagtcaccaggtcctacaatcccgccgaggccacatggacatcgccttgaaagcttctggcagcaattccaccatattcgacctatctcaagaaggcttggtgaggcgcatgggatactgtcatcatggaggcgtcttctggatcagcagatcctgggcagcgtgagtaggcttgaagggccatctgaatcagccacgcaagaaataaatgacattcgtcaacatgatcacctaagtggattggcat

SEQ ID NO: 308331 - DNA, 266 bp, Zea mays
cccacgcgtccgcggacgcgtgggcttggacatgtcttggaaggttgtggagaatgcagggggtcacgggcgcaaccccaatggcatcctcagccttatgtgcagggaacacttccttggactggttgagtatgtcggagtgacgggcccagcctacacattcgaccactacgccgtcgcccagatgcagtagaccgggacgacagggaaatcaacaattaggcagagcgggtgaagcaagagatgtaggatttcttcagatgcga

SEQ ID NO: 308332 - DNA, 470 bp, Zea mays
  unsure (1)..(470): unsure at all n locations
tcntcttcggcgataggcctcccaacagcccccaaaatatcggcttcgttggctactggtcgctttgcctgccgcagtgagagatgtctggagacctggaccttcagatctcctgctatctgccttcttgctgctacccccacacgctgcaccctcacagacaccatggatccgagctccgacatcatactcgacactccgttcttccgcatctacagcgaccgccgcatcgaccgcttggtcggcaccgataccgtgccggccggctttgatcccgccaccggcgtcacctccaaagatgtcgctttagacagcaactccggcctctacgttcgcctgtacctcccggacacggctaccgggtctgaccactactccaagaaattccccgtgctagtctacttccacggcggcggctttgtcacccactcggcagcgtctccgccctatcagcccttcctaacaccctt

SEQ ID NO: 308333 - DNA, 523 bp, Zea mays
  unsure (1)..(523): unsure at all n locations
tttccgtccacgcgtccggcccaaggagcacaagccgcccaaggttcacgggcccaagccggagaagccgcccaaggagcacaagccgacgccacccacatacactcccgcccctacgccccacaaacccacaccaaaacccactcccactcctccgacgtacaccccgacccccaagcctccgacacctaagccgaccccgccgacgtacactccaagccccaaacctccgacgcccaagccgaccccaccgacgtacaccccttcccccaagcctccgacacctaagccgaccccgcctacgtacactccaagccctaagccaccggctaccaagcctnccacgcccaagccgaccccgccaacgtacaccccttcgccaaagcctacgacacccaagccgaccccgccgacgtacaccccttctcccagcctncgacgcccaagccgaccccgccgacgtacactgcaagccccaagcctgccacacacccgacgcccaagccgaccccaccgacgtaca

SEQ ID NO: 308334 - DNA, 418 bp, Zea mays
ttcacgcgtccgcccaccggccaagccccagtgggcgtgggggcgccgcatggaagccatggacgtcaagtacaagcccgtcatgttccccaacggcgccggcctcaagaaggcgaagccggcggcggccgtggcgctggccggggagccgctgtaccgcgagtgcctcaagaaccacgccgcgagcctgggcgggcacgccgtcgacggctgcggcgagttcatgccctcgccgggggccaaccccgccgacccgacgtcgctcaagtgcgcggcgtgcgggtgccaccgcaacttccaccgccggacgctggagggttccccttcgccgcccgcgcccgcgccgctggcgctcccgcctccgccgagcgtgatgcacggccagccgcaccgcgcccgggaggagacgcccgaggac

SEQ ID NO: 308335 - DNA, 311 bp, Zea mays
tgtacgcgtgggcggacgcgtgggcgcgactgccgacgtggaggagtactaggaccaggaggaggtgcaggccgatgacatgtgaggggagggctgttatcgtgtgaagccttgtggtcctagggcaagcggacctcgatgagttcggtgttccctttcgtgttgttgccatcttgctactgctagcgtacccaccctcgtggcccattccgtcgctgttgacgcatgtatttttcttgtgctatggaaccttgcttttggtacggtccttatgataaaagaggaagatagactcagagacataaaccttg

SEQ ID NO: 308336 - DNA, 480 bp, Zea mays
tttcctttgacgcgtgggcggacgcgtggggaggagatataaaaatagtatttttgaagcaccctctaaggagcttcatcaatttcatgaaacgggcctctagtttcgatttttttaaaactaaagctcgtggagctggacctgtttgggttgaagaagttcgaacaaaattgaaattcttgaagtgaagctcttccaaacagggcctcagtatataactctatggtactaatcagcaatttaaagagttctaggttggctgaacatcgtagatcctgatcttggggtcagggacaccacgacattacctcgacttggggtatggcttgttcttgatctggcgatagcatctcgcaagccctaaccaatgtttcagaaacataaaagcttgagtatcaattaacataatatattgtcatcttgtcatctacacgcgaaatccattttttctattgatgcacctagataccaagctcacct

SEQ ID NO: 308337 - DNA, 356 bp, Zea mays
cttcgcctccggctttgtatggcccttaggcatcagagcgcggccctggtggtgtgtctgagctgaagaggaggaggaggaggaggagaagcagcagcgcagccggaggagggagagcgaagatgcgccgcgtcgcgctgttgctcgtcgccgccgtgtgcgcgctggcggcgccggctgccgcggtcgtcactgacggtcttctcccgaacggcaacttcgaggatggcccgcccaagtcggcgctggtgaacggcacggtggtgtcgggcgcgaacgccatcccgcgttgggagacgtcgggcttcgtggagtacatcgagtcggggcacaagcagggggacatgctgctggtg

SEQ ID NO: 308338 - DNA, 400 bp, Zea mays
ctttgttgtgggttggcttctcctccccctccggttcgggttctggttcgtgaggttctccggggttcggtttcgtgggtgagcggatcgagatggcggcgtcggatgttgagtaccgctgcttcgatggcggtctcacctgggccacggacgaccactccctgcacaacgccttgagcacctacggcgaggtccttgagtccaagattatcctcgatcgggagacgcagaggtcccgcggcttcggcttcgtcaccttctccacggaggaggcgatgcggaacgccatctagggcatgaacggcaaggagctggacggccgcaacatcaccgtcaacgaggcccagtcccgcggcggccgtagaggcggcggctgcggctactgtggtggccgtggagg

SEQ ID NO: 308339 - DNA, 532 bp, Zea mays
ccctcttgtccggaatttggtaccaccgcgtcacagaacgcacagtggtatgggtcgccaaccgtgacaatccaatcaccacaccttcagccatgctcgccatcaccgacaacttagagctagtgctatcagactcccaaggacacactctttggacggcaacaggaaacacaagtggagatgctggaggagctgcttctgcggtgctactcaactctgggaactttgtccttcggttgccgaacggcacggaggtatggcaaagcttcgatcacccgaccgatacaattcttccaaccatgaggatccttctaagcttcaagacacaaccggcaacacgtttgattgcttggaagggccctgacgacccgtcatctggggatatttcttctggcatggattcaacgaaccttcaactgttcatttggaaaggggcgctgccatactaccgttaccctgttgttaatgatatggcagtcgccggtgctatgtaccagcagagcaatggaaacgccgtcatcatgtatgaaac

SEQ ID NO: 308340 - DNA, 438 bp, Zea mays
gctgtcattggccagctagagccaaccagaagagcttgcagttactgagagtgtgtgtgagagagaggatgggtggcaacggtagggcatgctctactgctcgacctcttggtggtcgcctaatcctaggcattgagattcagagcaacgtcgcgtacggttacggcaggatgacacccaggcggagaacaaccccaccctgaccgcgaagaaggacatgaccacgatctagctgccgaacgggcacaagacattcaaagagaacaaggctggcatggagaacccgctcaagaaccagaaggcactcgaggagcacaccacgaacgagtccacgtacacgcctaacacgaacaagacgcagacgaactacactatgacggcgaacacggtgaccaaaggcaactcacatgcattcgacgacaagcacccgaaacacat

SEQ ID NO: 308341 - DNA, 541 bp, Zea mays
ctctttatgagcataatacaaccggagtcatcagccgccacctctttcagtgacggaaggatggtcttgtgtcgagtcaatggatttttccgtgagtgcatcctctcacggtcgggggaaatggaggaccttgtcattgaactggctgacagatgcaccctaaccacccaacgcagggggcgtcatcttgtcatatctgaaagctgggacagagataggattttattcgggagcatcgacttctcacggctacggtcaatgacagtgtttggaaagtgggaatcattcttcatctccaaaagtatgaagcttgtccgggtgttggatttggaagatgcattaggattaacagatgaaaatgttgatcagatggtgaagctgctgccttgcctcaagttcctttctctacgaggatgcaaaaagatctcccatctgcctagctcattaggtgatctgaggctgcttcagactctggatgtgatgaacaccttcatagtcactctgccagcaagtatcaccaaactaaaaaagctgcagtaca

SEQ ID NO: 308342 - DNA, 500 bp, Zea mays
  unsure (1)..(500): unsure at all n locations
tccttctctctctttctctctcttctctctctctccgccttccactgcctccttccagtttccacgacgccaagcgaaaccgaaaaccatcgacgcgctccgcccagctgcccccctcacctccgccgcccaacccagccgcaaaccctaaccctagatgggcgccgtcacctcgacggtcgcggcgcgcttcgccttcttcccgccgagcccgccgtcgtacggggtggagctgccgccgctgccggcggcggcggcgccggcccctgcctctgccgcccccgagctgccgggcgaggagaagggcggcggctcggtggtggtcgagctcaagggcgtcccgcggagggccaacgtggaggcgcggcggctgcggacgaagcggngcaccgaggtggtcgcgatgcacgtgcgccaggccggggccaagctcacgctgctctactcccacggcaacgccgccgacctcggtcagatgtacgagctcttcgtcgagctca

SEQ ID NO: 308343 - DNA, 487 bp, Zea mays
ttctgaaacgtactctgaacttgttcgtggtcctggcgcctttatcagttcgttctgcgcgggaaccgccgatgggggacgccgtggaggacgtcgtcatcgccggcgcgggcctcgccggcctcgcgacggcgctcgggttacacaggaaaggggtgaggtgcctggtgctggagtcgtcgccggcgctgcgcgcgtcggggttcgcgttcaccacgtggaccaacgccttccgcgccctggatgccctcggcgtcggggacaagatccgggagcaccatttgctctacgagcggtgagccgccagcagccagaaacatcactacgagaacaaatccagcccatttgcttcggcccaagcctgaaactatagagtgcaaagcccacgtgacatgtcttacctttttttttatgattgtgacagtatgatcgccttctctgcagctacttgtgaaacagctgcagaagtgagcctaaagattcagag

SEQ ID NO: 308344 - DNA, 419 bp, Zea mays
tcattcgtccgcccacgcgtccgcccacgcgtccggccgaatccggacaagccgcccaaggagcacaagccgcccaaggagcacgggcccaagccggagaagccgcccaaggagcacaagccgacgccgcccacgtacaccctgagccccaaacccacgccgccgacgtacactcccaccccgacgccccccaagccgacgccacccacatacactcccgcccctacgccccacaaacccacaccaaaacccactcccactcctgcgacgtacaccccgacccccaagcctccgacacctaagccgaccccgccgacgtacacttcaagccccaaacctccgacgcccaagccgaccacaccgacgtacaccccttaccccaagcctccgacacctaagccgaccccgcctacgtacac

SEQ ID NO: 308345 - DNA, 487 bp, Zea mays
tctcggacgcctgggcacgtcgcaactactgggccggctcatcgaacggatcgaagccaagaactgggaagcggcggccggcgactgctggatcctggagcgcgtgtggaagctgctcggcgacttcgtggacctccacctgctgatggacccggacgacttcctgcggctcaagggccagctcgctgtacgagcggctccatggtctgacgcgtccttctgtttccggtccagggcgctcctgcacgtcgctaacaccactagggacctcaagaagcgtgtgccctgggtgctcggtgtcgaggtggaccccaacggcggcccgcgggtgcaggaggcagccatgatgctgtaccacagccgtaggcgcggcgagggcgaggaggcgggcaaggtggagctgctccaggccttccaagcagtggaagtggccgtgagaggattctttttcgcgtaccggcagctcgtggctgccgtgatgggcacg

SEQ ID NO: 308346 - DNA, 536 bp, Zea mays
ttgtctcacgcgtccgcccacgcgtccgcccacgcgtccggtgcacattattctctggaaaattccaatgtcacggtcatcaatgcttgtgatttgttcaagcagccgcttcgtggttcacgccctgaccatattgttgtcatcctcagagggcttccaggtagtggaaagagttatctggcaaaggcattgcgcgatcttgaagttgataatggtgcaaatgcgcctaggatacactccatggatgattatttcatgattgaagttgagaagaaagtggaagacactgaaggccctaaatcttctagtgcatcaaaagggaggaggcagttgactaagaaagtaattgagtattgttatgagccagaaatggaggagacttacaggtcaagcatgttgaaggcattttcaaagacccttgatgaaggaaattttacatttgtgattggtatggagttatttagagcagcttatatcaatcattactggccaattcccatatgtaatattttcttctcatggctgtttcttcaata

SEQ ID NO: 308347 - DNA, 425 bp, Zea mays
tttttatcgtccgggagcgcacacacacacaagcggatcttctccaaattcatccgttggcacctccggttgaagatgcagatctttgtgaaaaccctgactggcaagactatcaccctctaggtggagtctgctgacaccattgacaacgttaaggccaagatccaggacatggagggcatcctcccagaccagcagcggctcatctttgctggcaaacagcttgaggacgggcgcacgcttgctgactacaacatccagaaggagagcaccctgcaccttgtgctccgtctcaggggaggcatgcagatctttgtgaaaaccctgaccggcaagactatcaccctcgaagtggagtgctctgacaccattgacaacgtgaaggccaagatccaggacatggagggcattcctccagaccagca

SEQ ID NO: 308348 - DNA, 416 bp, Zea mays
acgcctgtgccggtccccagtacctgtttgatccgcccacacgtgcggccagaggtccgctgaacccgaacctgtacgagagcgctaaagtgtgcctgagccttgtgaacacctggtgaggcaaggggtgcgagaagtggggcaagtcgagctccagcatgctgcaggttctggtctccatccagggcctcgtgctgaatgacaggccatacttcaatgagccaggatccaagaactcggctgaaacgacaggtggtgagaggtgttccctggcttacaatcagacggccttcgtcagatcatgcaagacgatgctgtattcactccggaagccttcaatgcattttgagacccttgtgttgtggcacttccacgagcatgagcgtgccatcctcgacgcttgcagggcttacatg

SEQ ID NO: 308349 - DNA, 310 bp, Zea mays
gcccctgaactcgccgggccggaggccctcgccgggggggatacccaccgcccaatcgcccacgcccggggggcgatggaggcggccttcgacgcctacttccgcgccgcagatctggaccgcgacggccggatcagcggccaggaggccgtcgccttcttcaagggctccggcctgccccagcccgtcctcgcgcagatttggacgtatgctgataaaaaccgggctggttttcttgggcgtgaagacttcttcaatgcactcaaacttgtcacagtagctcagagcggccgagaattgacacctgata

SEQ ID NO: 308350 - DNA, 297 bp, Zea mays
ctagtagatgtttccaaatagaagcaagtgccggtacgggatggaggattggaggggcactgccaaactaggattcctctctctcaatctgatctggattctggaatcagatttctcttctttcatttttctcgtctatcttctatcagtatgaaataagcaacgtcggttcagttttcgtgtcaaggccggtggagtcgcctatgtttattttattctgtttgtatttactacctggacacacgttctctaaaacaaaaaaaaagagcttgataacacaaggactaagcttgacac

SEQ ID NO: 308351 - DNA, 384 bp, Zea mays
ttgcttttggccagctagagccaaccagaagagcttgcagttactgagagtgtgtgtgagagagaggatgggtggcaccggcagggctgctctgctgctggccctggtggtggtggccgtgagcctggccgtggagatccaggccgacgccgggtacggttacggcggcgggtacaccccgacgccgacgccggccaccccgaccccgaagcccgagaagccccccaccaaggggccgaagccggacaagccgcccaaggagcacaagccgcccaaggagcacgggcccaagccggataagccgtccaaggagcacatgccgacgccgccacgtacacccggagccccaaacccacgccgccgacgtacacttccaccccgacg

SEQ ID NO: 308352 - DNA, 478 bp, Zea mays
tttttagaaccatccagcaagagcttatgagcaggatccggccaattatgcagctattgagactgacctaatatttgcgggtcttgtaggcctaagggacccaccccgggaagaggtctatgatgctattgaagattgcagagctgctggcatccgagttatggtgataacaggggacaacaaagaaaccgctgaggcaatatgccgtgaaatcggcgtgttttcacctgacgaggatatcaccttcaagagccttacagggaaggagttcatggcgctggaggacaagaagacgctgctacgcaggaaaggtggcctcctgttctctagggcggaacctaggcacaaacaagagattgtgaggttgctgaaggaagatgggaaagttgtcgccatgactggagatggagtcaatgatgcccctgctttgagctggctgacatccgtgtaactatgggcattactggaactgaggttg

SEQ ID NO: 308353 - DNA, 440 bp, Zea mays
  unsure (1)..(440): unsure at all n locations
tgtggacgcgtgggcggacgcgtggggtagagagaaggaaaaatatccccaaaccctagctcccgatctcgatggcgaaccctcgcgtcttcttcgacatgaccgtcggcggcgccccggcgggccggatcgtgatggagctgtacgccaacgaggtgcccaagaccgcggagaacttccgcgcgctgtgcacgggcgagaagggcgtgggcaagtccgggaagccgctccactacaagggctccaccttccaccgcgtcatccccgagttcatgtgccagggcggcgacttcacccgcggcaacggcaccggcggcgagtccatctacggcgagaagttccccgacgagaagttcgtgcgcaagcacanccgccccggtgtgctctccatggccaaacgccggcccaacaccaacggctnccagttcttcatctgcacc

SEQ ID NO: 308354 - DNA, 309 bp, Zea mays
ttgtttcacacgtacaagcccatctacaagaagaccgatattcttggtgatcgactgtggctccagctatgcatacaagtctatacaggggactgcaaggggggagactcttgcaatgctactttgaccaagttcccgatctttcagtgcgggatttactggcgacactactcggcacagtagtaggcaatttactatgtcactgacatctccattgcaagctctctgcctcatgcttgccgacaatggcacagatatctacagggatgcatatgacaaagcttgagagttcttattatagtgcctaaa

SEQ ID NO: 308355 - DNA, 335 bp, Zea mays
tccactcgtccggagaaagggggatcgcgcgaggcacgatggagctcctcccggtggggaggtcctgggcaccatgctagtccgaacgctaggagggccgctcgtggactggtagacaggaggacagagctctcatatggaaaaccaaggagatccactaagccagctagcaactgatgatctagaaggaaagctggaactgatcgtgactatatctgttgatgataatctttcacaactgaaaaaggaattgcctggaagctctttgaaaggagagctttctccaggcagaacaacagtcagcatctcatgtgctgggcgccctttccccgacc

SEQ ID NO: 308356 - DNA, 309 bp, Zea mays
atactgtcaacgccggtgctagcttggtagcatactctccaacagtgagcagactgtcgggccacggcgacacaaggcaccgccttgctgcattatgcaaaacggagcgacagagtcttggcacacggtatcccaaggggagcactcgggccgttagggactgatgatttagaaggaaagtttgcactgcttgagacttcatctgttgatgatgatctttcacaactgaaaaaggaattgtctggaagctctttgaaaggagagcttcctccaggcagaacagcagtcagcaactcaggtgctgggcgc

SEQ ID NO: 308357 - DNA, 225 bp, Zea mays
ttctgtctggaaaaaccataaccctggaggttgagagctcggacaccatctacaatgtgaaggcgaagatccaggacaaggagggcatccccccggaccagcagcgtctgatcttcggcggctaacagctggaggatggccgtaccctagcagactacaacattcaaatggagagcaccctgcaccttgtgctccgtgtccgtggtggtcacgcagtcatgggtc

SEQ ID NO: 308358 - DNA, 383 bp, Zea mays
tgctttctcccccaacgctactaccgccgctagctggttcatgtgcggcgagcggagccggagaccggtagaggaaattaagaggcgtcgatcggtcatggggtgcgactacaagtgcgggtgcgcccttccaggccctggttgtaaatactgcaggttcacgtcttggagcgtctgtcatttatagcacatttattttattctttattgagtactgttttgtttttttttttttttcttttttcttcttattttaatataatttttttattttactttttttaatttttctattatttattcttcttaatttattgaaatttatatttttatttttttttttttaatttatattttttcttttttatttttattcttttttt

SEQ ID NO: 308359 - DNA, 242 bp, Zea mays
tcgcataggcgcagagacaggcgtcttcgtactcgcctatctccgcgactcaaagcttgttccatttcctaccgccgccgctgcagctccaccccattccgtcgacaccatgagggagtgcatctcgatccacatcggccaagccggtatccaggtcggaaacgcgtgctgggagctatactggctcgagcatggcattcaggctgatggtcagatgcccggtgacaagaccattggggggg

SEQ ID NO: 308360 - DNA, 328 bp, Zea mays
tcgctactaaaacatgcatatggacgtcgggggcgcaatctcgagctgggcccgcattgttggcacccaaggccgagaagaagcccgcggcgaacaagccgggggaggaggagcccgcggacgagaaggcgcccgccgggaagaagccgaaggcggagaagcgggtccccgctggcaagtgcgctcccaaggagggcggcgagggccagaggggcaagaagaagggcaggaagagcgtggagacctacaagatctacatgcctaaggcgctgaagcaggagcacccggacattggcacctccttcaggccatgacgatcatgaactcc

SEQ ID NO: 308361 - DNA, 298 bp, Zea mays
tggggctcgcaaaatcaaagggatgatgaaccgctgctgaagatggagttagaaaatcctgcacttctttctggcaactggtcacaactttgtataacctgcaaaacattgttctacatgtgatcgctgcgtggagcagtttgaccaccactgcccttgggtatctaattgcataggaaagaagaacaaatgggaattcttcatgttcctcactctagaagttcttgcaatgatcattacctggctcttctgccattattagaaattgttagagatcccaattccttcatcattcctt

SEQ ID NO: 308362 - DNA, 240 bp, Zea mays
tgccgtatcctcatctcggggtccatccactacccgcgcagcacgccggagatgtggccgggcctgctgcagaaggccaaggacggcgggctggacgtggtccagacgtacgtcttctagaactgcgcctagctatagcatagactgatctacaataatgaccgttgcgagttgccgcagtagcaccaggtggacctgggacccgttctctatggacctctggtggtacccctttaccat

SEQ ID NO: 308363 - DNA, 329 bp, Zea mays
atgcgcttataggagagccctgattgttacgggtccaacaaataaaatacaaaagcgcgacagggatgaccaggaaagaacgcaaaagaaaacacgggaaggcaacacaattttacatttaattttggcttttttggttcctttgggcagcctcctggatatttaggtggagggcacgccattttgcttacttggactccaggaacatgttgttttttgggggcaggccaacacagggccttatgatgtttttcaggattgccctttgttttggcagagggttcaccaccggggtgccagggggaaccaggggggccttggggggggag

SEQ ID NO: 308364 - DNA, 308 bp, Zea mays
tgagagaatcatcgagtcggatagagtcctgggctccaggcgctgcgtactgaacgaagaggcgtgtctcttcgatcgacctccaggcttccagctagctagctagcgagcgatggcattgagggagatcgaggcgacgctgccaccggggttcaggttctacccgagcgacgaggagctggtgtgccactacctccacaagaaggtggccaacgagcgcatcgcgcaggggacgctcgtcgaggtggacctgcacgcccgcgagccgtgtgagctcccagaggtggcgaatcttacggtcaccgagt

SEQ ID NO: 308365 - DNA, 461 bp, Zea mays
tgccggccaccttcccggaggggctcaaaagcttggacctttccgggaaccggctgagcgggggaatcccgccgggtctggggagctgcgcgacgctccggcgcctgcgcctgtcctccaactggttggctggaaccatcccgccgcggatcggggagctcgcgcggctccgcgttctggacctgtccgggaaccggctcaccggcggcgtgccgccggagctcctccattgcaggggcctcgtcaggatggatctcagcaggaacttgctccacggccggctgccctcgggcctcgcgcagctcaagaacctgaggtttctctccctctccggcaacaatttcagcggcgagataccttccggtttgggccagctggggtcgctggaatttcttaatctgtccaacaattctctatcaagggaggttcctgctgatcttgtggcactgcgaaatcgcact

SEQ ID NO: 308366 - DNA, 219 bp, Zea mays
tgcggtggcggctcctcctcagcgcgcctctcgctcgccgatggtaaatcagaaggggttggctcttctgaagatgacatggacccgaatggtcgcgagaacgatccgccggagattgacccacgagcggaggacaaggagctcaagtaccagctgctgaagaagtacagtggctacctgagcagcctcaggcaggatgttccccacgaagaagaagaa

SEQ ID NO: 308367 - DNA, 444 bp, Zea mays
ggcaatataacagcggttccaatttctcgtagcatcaggtttacaattttaagcaaatctctttatatcctatgctgcaaatcaaccggcatccttattctactcaaccattctcacaaacaacagcaacagcaagaagaaagaaataaagaatacacatcccacgtgtatcagaacatgacgaaaatccggattgctatatgcaggcacgcataattatgtctagaaacagctcaagtggtaggagcgagcatctggcaatggcagggtgcagtctttgatgcaataccatgtcagtcggagtgtccactccaagatcaggagtagagtgggcggtcggtccaggcgcccgcgacgtggccgttctcgcagacgtaggcgcgcaccacaggctcgccgtcgtcgtggtagccgtagaaactgcggaggcagaaagccgagtag

SEQ ID NO: 308368 - DNA, 297 bp, Zea mays
catggaagtcaacagagggtaagaccacaatataatagtcaagctgacaaaggggacaccaagaatttcatggtacagattataatttgtagcgaacaaggcccaaagaacattctccattttaactggttacctaacaaacaccttctattcaataggcctggtgcaagggtgggcagccattgtcatgggaattctctcaggtagcatcccctggtacactatgatggtactgcacatgaaatggtccttcatgcagaggatcgacgacaccctcggcgtattccacacccatgc

SEQ ID NO: 308369 - DNA, 275 bp, Zea mays
tgttcggcagtcaccactcccaagccagtaccgagtcctacgagcagtcgcacgcatgtgtcaagagacgaaacggtcgacatggctcgcacccaatctgccgtagcggtcgccgtggtggccgcggtgctgctgctggcatcggctggtgcgactctcttgtgtctttctttcttgcggtcctggtgtttttctctcttttgcctttttttttcttttcttctttttcttgttttctctctttttctcttttttcctttttcttttttttcctt

SEQ ID NO: 308370 - DNA, 124 bp, Zea mays
acctgactcccgcactgcgcactggactgatccaggaggtagccagctagctgaatcacattggaacctaccaagatccgtccgtccagtagccacgacacgacggtgacgaccaccaacgctg

SEQ ID NO: 308371 - DNA, 322 bp, Zea mays
cgtccaaatagcagtacgggtcattcatcaaaatatcagaaacaaaaaaggcattatttctgacttattacaagaaagatataaaccgaacaaatatcctaaactagagtatccaagtactcgttcactgttgtataatttacatggggatacagttgagttccttccattgacaagtcaatttcaaaatacgtgtggtcacccttaacaaacgctgaatatataaagattaaatccatcttcaagggaaatggagcatcttttcagggatttcttgagttttgactcccagaggtcagccaattcattcattgagaagaca

SEQ ID NO: 308372 - DNA, 220 bp, Zea mays
gggaacgaaacagaaattaaactagaatggcctaagactttggatatgcaggaacacaaagacagtactaacaacaaactcatttttttttctttggcacacacaaattaagctcacgtctgtgtatgacgctttagagcgggcagggtggtacttcaagcgttgaaccggactggatctggccccatccgatgagacgccaatgcttttcaacacgacg

SEQ ID NO: 308373 - DNA, 238 bp, Zea mays
cgtacgcgtgggcggacgcgtggagcggacgcgtgggcggactcgtgggcggaggcgtggtctgacgcgtgggctgcgcaattgatatagttgtcaacaagggtgctggatcattattgctcacaaagcctatgaggattaggagtattgttcaagcggtattaactgttactgaaaaacctgtaactgtttaggtttggacagctttctttgagggcaggaatcgtgctgtattttt

SEQ ID NO: 308374 - DNA, 260 bp, Zea mays
ctcacccctcggttgcagtcatatatacaaggttatattatccaccataggtgtgtgtgccacattataaatttggttgttcaagctggtataacagttgcaaataagtacttgaataatatccgtgctgctattcgtttcataacaagcacacctcaaatgatttctagatttgctgagtattgtaaagctcaggatatgagaccaagaaaatttggtcttgatatgaagatcagatggcattcaacctaccatatgct

SEQ ID NO: 308375 - DNA, 328 bp, Zea mays
aaatttatcagttgcatacttctcaaaaacgaaagatcctgttcagtagataaacctctgttccctttttaccttttaaagctatattgattgttgtttggcatttgctttactaaccatcatgaattgaacatatagctcatgatgtcagtctcctgaacagaagcgagaaatttaggatcgttattgtggactgttcactccaatgcaggttttgcatccacaatcgatgagacctgctagagaaggcgatattccagctagggttaagaatttatacaaccctaaagttccaggcacccttattaccagacaaagagacatggat

SEQ ID NO: 308376 - DNA, 260 bp, Zea mays
cctccgcgtccgaccacgcgtccgcccacgcgtccgcccacgcgtccgcccacgcgtccggcaatccaagcagttctatcactctatgctagtgggcgtactactggtattgttcttgactctggtgatggtgcgagccacactgtgcccatttaccaaggatatgcccttcctcatgctcttctttgtttggatcttgttggttggtaccttactgtctcctttatgttaaaactgacttgtttgttttttcccttctc

SEQ ID NO: 308377 - DNA, 368 bp, Zea mays
agcattccaaagcagagtagtatatattattacttaaatgtgtttagcattgcacgtcaagttgcgtaatgacagacagaccagattatgctatggacacagattcttgtgatgcatgtttagtatttacaggaggcattgcccaatgtggatccatagcggctcccactcagaacagcccgaaggtgttctcgccgctgtacgtcatgtagaggaagccgtcctcgtccttgttctcctcgtagatggcggacatcagagcagctgcagggacaacaacgttacgggcggggggcaccgtggtaggttttgttttatttttccccaacactggtatgacaacagaaggaactactgtccggtacctg

SEQ ID NO: 308378 - DNA, 453 bp, Zea mays
cctacgcgtccggtcagtacaagcagcatattaggtaaactaacaacatcaacctggcgacatgaataagtaccattgtggctatctcgaaggacatagtaaaaccacctgcacaacctgacagttggaagttatttggtcgtgatgactgtcattttttcttctgggctacgtacaagactgacttcttctcggtatgggccagtggctggttttagccttatctatagttttgtgatattatttagtttgtttattcttctcattgtttacttatcttcttattttgtctctatattcttctttttcttctcctatcttctctttctcttttcttttatcatattttttctttattctttattcatcttttcttctatttctttatcttcctcctttttcttcatttttttctttttatacttcttttttatcttttttatctctctctct

SEQ ID NO: 308379 - DNA, 265 bp, Zea mays
gaaaagacgccaaagaataaacagtctgagattgcagtggggtagcacagagacagtacactatagcaacaacactccggagccatgctatttacgctacaaaggcacacaccgtcttcactatcctacatcagggaacaaaatccaaaatggcattgtttgcgtttaaaacacactgggaaggggcagatcatatgcacaggggcatatgcgtgctggttcatttccctttccacctgaagacaaagggccacccaaccctttc

SEQ ID NO: 308380 - DNA, 163 bp, Zea mays
tttcgtctacgcgtacggctaaacccacgcctgctttggctgaagggcagaaaagacaaatcccacttgacaatcctatcaaactaactggccatattcaaacactttatggaaatctcgcaccggatggttctgtcacaaaactaactggctaagagggact

SEQ ID NO: 308381 - DNA, 390 bp, Zea mays
ttcgtgaggatcaggcattactccaatgttccaagtaataacacgtcgttcaaagttttttctttacgatggtataaaagttgagatatagttttttagtacccagccgtgcatttttgtcttactataggtcacaagggcaattcttgagaacccaaaggacaacacgaaagtacacttaatctatgcaaatgtcacgtatgaggatattcttctgaaggtatatgccttttatgctgacagacttcatagactcttaacctgatatatcagttatatacctgtatgcaaaagggtctggttcaattgatggtgcctatttggtgagacactggtctcgtttcttttcatctgtccagctttcattacgaattaactagtaggtttggt

SEQ ID NO: 308382 - DNA, 261 bp, Zea mays
ataagtgtgtgtgttcgagattcccccaagtactctacttctagtgatgaggactctagtgatgatgaagtagattacactagcttgttcaaaggattagatagagctaaagtggaaaagattaatgagttgattgatgccttgaatgaaaaagatagactgctagagagacaagaggatatttttgtatgaggaacatgacaaatttattagtgctcaaaagtctctcgttttagaaataaagagatatgatttacttat

SEQ ID NO: 308383 - DNA, 186 bp, Zea mays
tgtccattctctggtcacggttcttctgcctctcggtgtatgtgaccatgtacctgaatgactgtcaacgcactgcattctatgagggaattggtctggacaccaaagaattcgacatgcatgtgatcatcgagaccaaccgcacaacggcgaggatcttacctgttgtcctagacgtttagaacc

SEQ ID NO: 308384 - DNA, 159 bp, Zea mays
tcacgtgtccgggcatctttgtatcaaaaagatgcagatgagacagttgatggtattgaaaatacaactgctacccagcttgatgttgctgatattggaagcctttcagatcttgttttttaggttgaggttgtaattagtttgctgcctgttagtttt

SEQ ID NO: 308385 - DNA, 216 bp, Zea mays
tccctctcgtccgcacacatatacccaccaccatagcagaacatagggcccctccatatagaaacatgaaaggaactctttcacacaatgttatggtagcctgcgactttgacctcaatttcacatttgtttcatgtggatgggaggggtcagcctcagatgcaggggtgcttcgatctgctattagcaaaggatttagtgtgccagtaaggaagt

SEQ ID NO: 308386 - DNA, 211 bp, Zea mays
gtggatatgaccacctctctcgctctgggccgtcgtcgccgccctaagccacgtgctgaggctgtcgctggagtcttcaccggccacgagcacccagatctgtagaaatggctgatagagaggacatccagcctcttgtctgcgacaatggcactggaatggccaaggctggattcgctggttatgacgcaccaagggcgaggttccctag

SEQ ID NO: 308387 - DNA, 231 bp, Zea mays
tgctctgatccagaactccataagaaggaaacttgtgaggctctgtaccattaattcgagacaggagatgttgttatggaagggctcctggcatatgtgaagactactcgtggcctccgcacactcaactctgtttgggcccaacatcttagcgaagaagcgaggagacggttctacacgaactggtgcacgagcaagaagatggctttcacaaagtctgtcttcaaatat

SEQ ID NO: 308388 - DNA, 224 bp, Zea mays
tccatgcgtccgggagacactgcaggtctttgccccgttagcaaaactccttgggatgtaccggataaagtctgagctggaatatctatccttcatgtacgttaaccccactggttttgctgaactaaggaaaagagttgaagacttgtacaagtcccatgaacaagaattggaagaggcaaatagaattttaaggccaaagattgccgaggatgagtttttcg

SEQ ID NO: 308389 - DNA, 189 bp, Zea mays
tgtgtcctcccacgcgtccgcgctgttcccccaaacccaaatccaaagcaagcacttcgtgctgctgacggcggccgagggcgaccatggggcagggcactccgggagggatgggcaagcagggcgggactggcaaccgacctcctaagcgcgagcgggtaaaggactaccacctgatggaggaggagg

SEQ ID NO: 308390 - DNA, 330 bp, Zea mays
tgtgaccgcggtcgcgtgggcacccgccggggcacaaccagaagggcgggtgatcttacccggagggttctgctttcaaagatgcagatctttgaggaaaccctgactggccagggtatgaccctcgccgcggactcttatgaccccattgacaacggtaaggacaagatccaggacaaggagggcatactcccagaccagcagcggtttatctttgctggcaaacacgcttgggacgggcgcacgcttggtgtctacaacttccggaaggagagcgcccctcaccttgggctccgtcacacgggaggcatgcagatctctttgaaaacc

SEQ ID NO: 308391 - DNA, 374 bp, Zea mays
ggttgttttttttatttgccaccttcaggaccactggttgtgcatcaggaaggtgaatggggagtggtataacttcaatagtctgtacccagctcctgagcacctgtcaaagttttacctctcagctttcattgacaccctgaaggggtcaggctggagtatctttgcagtcagaggcaattttcccaaggagtgccctatggcaactgaaggctctaacggttttggtcaatggctcacccctgatgacgtccggaggataacagcctcctgtaaccaggttcaagcacctactcagcaggtacaaccccctctacttggtgaccgatcaggagggatgagtgaaatggacatgattgtagcgcaacaagaaa

SEQ ID NO: 308392 - DNA, 463 bp, Zea mays
tgttgtcatttgtactagaacaagctaagaagtccttgttttgttactcatggtggttgccattcttcagattacgtggaaaagatggcattatccctgggtctcaagaaattattcttgcttactacacgaactgcagattggtatttacctctgttcttctcttgactcatcattatgtgcaaatagtagcaatgctcccattttttcagttttccatatgcttgcttctactttgcttaattttgagatgtcgcaggtttgtgcgacgtggcttttcagagtgctcaattggatctatccctgagcagaggagaaaacgtatcaacttgtcccgtggatccaagtattacataaagcagctgtagccaaagcctgctgggattatcgccaacaattttgtcatcaggtgactcagcagcatgcacagagtttggttccacactttcacttaattaagatg

SEQ ID NO: 308393 - DNA, 339 bp, Zea mays
tcctcgcgtccgcccacgcgtccgctgcgccattggccagctagagccaaccagaagagcttgcagttactgagagtgtgtgtgagagagaggatgggtggcagcggcagggctgctctgctgctggccctggtggtggaggccgcgagcctggccgtcgagatccaggccgacgccgggtacggttacggcggcgggtacaccctgacgccgacgccggacaccccgaccccggagaccgagaagccctccaccaaggggccgaagccggacatgccgccaaggagcacaagccgctcaaggtgcacgggcccaagccggagaagcctgccaaggagc

SEQ ID NO: 308394 - DNA, 410 bp, Zea mays
tagttacctccgccacctgcaccctagaatcgtgccgcaccatggcgtcgtatggatcctccgtcttcggcgtactcgagcaggccccggaggaccccatcctcggagtgaccgttgactacaacaaggatcccagccccatgaaggtcaaccttggggttggcgcctaccggaccgaggaagggaagcccctagtgctgaacgtggtcaggcgcgccgagcaaatgttgatcaataatccgtcacgtgtcaaggagtacctaccaatcaccggtctggctgaattcaataagctgagcgctaagcttatctatggcgctgacagggattctttgtttgactggtttacccattttactgatttgtgggtcaactgtgcctaatggcgatgttaggcaactgtgaattct

SEQ ID NO: 308395 - DNA, 344 bp, Zea mays
tccatgcgtccgcccacgcgtccggtgatgcgggggtgttgtcttggcgaatgtcatcgaagcatcggcgcccgagggcggagagttctccgacaaggactacaccgacccttcgccggcgccgctcgtcgacgcggaagagcttaccaagtggtccctctaccgcgcggtcatcgcccagttgatagtcacgctgatcttactttacatcaccgtggccaccgttatcgggtacaagcaccagacggacgcggtggtgtcgggccccgacgcggcgtgcggaggcgtgggcattctcggcatcgcgtggggctttggcggcatgatctttattcttggctact

SEQ ID NO: 308396 - DNA, 258 bp, Zea mays
ttaataattacctcccctagccgccggcgccgctagtgttcctgtgaggtgccgtgaccgaagaactgcgccgagatctaggtagagaatcggttttgcttgtgacagcacggggactgctgcgtctggtggtggtgaaggggagaaattcatgagatctgtatcggatcaggcatgcgagctcgggaatcacgggtttcacacatacgttacggcaatttgaattcgatgtactaatggagtctaagggtggcaaaa

SEQ ID NO: 308397 - DNA, 400 bp, Zea mays
ctgtcatctcctactctcacggcaccggcagctacgggggattcctttcccaccgctccttcggtttgccttcctcgcccgccgtaataaatagacaccccctccacaccctctttccccaacctcgtgttgttcggagcgcacacacacacaaccagatctcccccaaatccacccgtcggcacctacgctttaagatgcagatctttgtgaaaaccctgactggcaagactatcaccctcgaggtggagtcgtctgacaccattgacaacgttaaggccatgatccaggacaaggagggcatccccccagaccagcagcggctcatctttgcttgcaaacagcttgaggacgggcgcacgcttgctgactacaacatccagaatgagagcaccctcca

SEQ ID NO: 308398 - DNA, 231 bp, Zea mays
ttctttgcgtccgtccacgcgtgcggccacatgcacgcttcacttcgaaggactcatggatgaccgccggtctgctcgtacatgaagaacggccctggtagatgcgtgtaacaacaacgatactcgcattgagcctaccatagaacaatgggaacagattagggagctgatgagaccaaaatcgatgctttcggtcttcgacctaggctatcaaggcttggcaaggggtaa

SEQ ID NO: 308399 - DNA, 424 bp, Zea mays
  unsure (1)..(424): unsure at all n locations
ggaccggtccggtattccgtgttgaccaccgttcgccacgcgtncgcggacgcgtgggtcgcctgggatcggttgggtgcctccttcctccacttccagcccttcaccgagccgtcgtcgccactatgaagggacccggcctcttctccgacatcggcaagaaggccaaggatctactcagtaaggactacacttacgaccagaagctgaccatctccaccgccagcgcctctggactgggcctgacttccacagctgtgaagaaaggagggctctattctcttgatgtcagttcagtttacaagtacaagaataccactgttgatgctaaagtggacactgaatcaaatatctctactacattgaccgtgttggacgcctagccatgcacaaagctatgcacttctgtgaagctgcctgacta

SEQ ID NO: 308400 - DNA, 99 bp, Zea mays
gccatggcatccaaggccagcctcttcttggctctcaacctcctgttcttcacggaggccaacgcctgcgggagttgcccgtcccctacacccctagtc

SEQ ID NO: 308401 - DNA, 248 bp, Zea mays
aaaaaagaaaagaaagaggggttttttaacaggatattctgtttcatcacgctgaaatagagggctgtcctttagcatcactcctcattaggatgtatatattaatcatcctattttaatatatattaatcatcctatgccaattagggtcgaatccaatcagtggtaagtcttttcctttttatttaatagctctctgactctcattaaataaagggcagagcaattcctttttctagagatcctag

SEQ ID NO: 308402 - DNA, 256 bp, Zea mays
gaagagaactatccagaagcgcttgtctccaatgccgtcgccttcctatccatacctacctcggcgtgggggtcgcctgagatcacataaacactggtgacaggaggtcctcagctagataccatgcacgctgcaacccgcgccaccttctctacccaagagggagatggccctaccactgtcactggaagtgtcatctggtctcaagccaggcctccatggcgttcctgtgcatgcactgtgatgcaccaccaac

SEQ ID NO: 308403 - DNA, 244 bp, Zea mays
cccctcttaccaagacctactggggggttggtttaaaagggtttcgagtaagggcaacggcagcagctgatgtggagtaccgttgctttgtcggcgggcttgccagggccaccagcaacgagtcgctggagaatgccttcggctcctacagtgagatcctcgactacaagagtcatcaccgaccgggagacagggaggtctcgcggtttaggctacaataccctctcctccgataactccacgc

SEQ ID NO: 308404 - DNA, 257 bp, Zea mays
  unsure (1)..(257): unsure at all n locations
gagcaggaactgccgaagcggagcatgacggagacgagcttgatgccagaaagccaataagaggagcagcactgcgtccagtggccgatctgattttcgctgcgtccaggactncaagaagcaagcaccagccaccagtatatgggggagctcggatagaacttcgaagtataccgcattgatgaactgaccatagaagatgtgagatggaagaacccaatgggaatacttatttctgcaggacctggtgaaccaca

SEQ ID NO: 308405 - DNA, 430 bp, Zea mays
ataaaaaagtaaagaaagagaactatactgactatgtaatatgtatatcaaaaggactgaagcctgcgtctgatgctgatgctaaatctactgttgacatttcaccacacgagaaaaaaagaaggcgtcgaatactacattacatttgaggattaggacaacgccggtgcagagttagctacagttaggatcaaaacaagagaaacggctgctacgacaaatcttgcaccgagtgattccagagctttttcctcacgatcaagactctttcgtcacctattgtgagcgcatctttcttaggcctcatctcaaacgtccagtcgtcccaccttagcgctggtaaaagtttcttgatgtaggtaacgacatcaactttgtctctgatgatggcgtaaccataaggccttaggatgcggtccatctcgatcag

SEQ ID NO: 308406 - DNA, 281 bp, Zea mays
gttgctgcactcgccgctcccctcgtacgagagctacaagacgctgtcgcgtgcgctaggagcttctacgcgccctgctcaagtccgatcatatagacttcacaccttggactacactctcgacttgctcttctgatgctgtcggatgctccgactctacgacgagtccaagcggtggcacatttgcctagagtactacgggcgtacggtgagcatcaagatcctgactgtgggggtgcacatggagcatctcatgacggtgctcgggttgccagagaccg

SEQ ID NO: 308407 - DNA, 314 bp, Zea mays
ttctctcctccgggtagaccgccatgtttggaggcacgtttcttcaaggctgttctcttctaaaccctgctacatagaccttctctttggttctactggcatcgagccttggtagagattatggaagacctgggctcctcctaaatgcatattctccctttggttggccataagggacaaatgttgtgcagtcgacatattacagttgaggggaatgccacacccagatgtttgccctatgtgtagatcaggcccatgagacaattcagcacctgcttactgcgtgcattttagacggaattctggacacaatt

SEQ ID NO: 308408 - DNA, 290 bp, Zea mays
cccaagccgaccccaccgacgtgggggcgttttttaagccttcgtctcctaatcccaccccgcctactgtcactccaagccctaagccaccggctaccaagcctaccacgcccaagtcgaccctgccaacgtacacctcttggcatagccttcgacacccaagccgaccccgtcgacgtacaccccttctcccaagccttcgacgcccaagccgaccccgtcgacgtacacttcaagccccaatgcctccacacacccagacgcccaagccgaccccaccgacgtacacc

SEQ ID NO: 308409 - DNA, 353 bp, Zea mays
ccggattaccgggggggggttttctaaaaccttctccccgttgaggaggccacaaaggccgggtctctttcaacccttccctctctcaaacggtccctcggaccgagtgagctttctcttctcaaatcaaccgggagcaaaacctccccgcatggaccaccacacaattggtgtctcttgccttggttacaagtgagtattgaccacaagaaagaatgaaagagagaaagcaatccaagcgcaagagctcaaatgaacacggcaaatcactctcactagtcacttaggctttgtatggaattggagaggatttgatctctttgggtgtgtctagaattgaatgcctagctctt

SEQ ID NO: 308410 - DNA, 486 bp, Zea mays
  unsure (1)..(486): unsure at all n locations
ggcgcgcgcgatcatctgcgagctggcgccgcagaaggtgtcgacgacggcgtcggggcccgcggcgccgaagaagcgtgacgccgggacgaaggtggtgctgcagccccgcctctgcacgctccggtcgtatggcgccggcagcggcgtggtgacgcggaggattctgggcggggaggaggacggcagcggggccgccgactcgggcggctccgcggcgttgccgttcttcgcctcgctcgctgactacatcgagagctcccgcaagagccaggacttcgagaccatctccggccgcctcgccatggtggcgttcgcggcggcggtggccgtggagacggcgacgggcagctccctgttcaagaagctggacaccatggagatcgaggaggncggcggggtgtgcgtggcgggtggtcgccagcgccgcggcgttcgcatgggcctccagcgcgcgcaataggatcgggcagatgttcacgctgg

SEQ ID NO: 308411 - DNA, 380 bp, Zea mays
ggttctgaattatatgcatcaacttggcggcagcggtacaagaccggatagatggaggctgacagcttcgtgattgacctgctgtacctgtactgtacagcgcctagcctaggcatatctagcagcgccgcggaaccagcatctcaccgctacacgaggtcggtatcatccttcgtggcaatgtcggttgcgccggtgcaagccgcggcggcggtctccttgtgctcctcctcctccatggtgtccgacatgctccgccccctcgtctcggggaggcaggcggcgaagagccccaaacatccgatgcagagcccgaacacgccgaaggaccagaagctccgttcgcggccgagcgcgacgagcacaggtgccaccacgcc

SEQ ID NO: 308412 - DNA, 399 bp, Zea mays
gcgatgggcgctcttttggtgtgcgcctcgtacatcagcgtgtacgtgtacggaagcagccggtagcgcagcccgagcgccttcctcgccgaccgcgccaccagctcccacaggtacagctcgcgccggaccgtgccgatcgccgaatggtcccttgcgaacgggtagaacgcgccaagctggatccagcggctgcagagctcctcggttgtgttgccgccgaagccgcagatgtcagcgccgaccatgggaatgccgaagaggccgaagctgagcatggtgttgatggagtagcggaggtcgtcccacgtggcggcgttgtcgccggtccagtgcgcggtgtaccggccggaccccacgaacgtggaccggctgagcacgaagggccggcggccggtg

SEQ ID NO: 308413 - DNA, 125 bp, Zea mays
ggggggcaattcaaccattccaaaccaactttttgataattaatactagaaaggagagagacatgaaagcattgaaaatacagggtccagaatggcaccacagataatgattagttaggggggca

SEQ ID NO: 308414 - DNA, 553 bp, Zea mays
  unsure (1)..(553): unsure at all n locations
attgcatctaagtttcacatactgattgctaatctttacatgtctgtgctagtacagtagtagtactattttcttaaaaaaacatagtacagtagtactatttgctagagtagaactgtaggactatatggcacacaagtgtcttacagttcttcatctttgcttatgtaaattccagtgaggcgaactggtagctggtgtttcgacgagaaagttctgattcagtcactctacaaggttatggtttctgtatctgaaaacggtccgattattctttacataagggatgtggaccatttcctctggaaatcgcaaaaaattcacttgatgttccagaaaatgttggccaagctatccggtcaagtgttgatacttggttctcgactactcaatcctgacgctgataacagggatgccgatgagaggattagtaccctgtttccttaccatgttgacatcaaagctcccgaggaggagacccatctagactgctggaaaagccagattgaggaagacangagaaaaatccagatgcatgtatacagaaaccaca

SEQ ID NO: 308415 - DNA, 517 bp, Zea mays
  unsure (1)..(517): unsure at all n locations
cccacgcgtccgcccacgcgtccgcccacgcgtccgcggacgcgtgggggactactatgatcgaagatctgctgctctagcaatcatgacccttcatggccgtcacgtatatggacaagcaatcaaggtgaactgggcatatgcaagtacgcagagggaggatacgtcagggcatttccatatttttgttggtgatttaagttctgaagtgaatgatgcaactctttatgcctgtttctcagcatatccttcttgttcgtaagtactttttgtatcatgatggcatctatgacgagcttaacctgcagcctatgctttcacatgctgacttttaattcaaaatttgcaatatgctatctcaattctatccatttcttgtgctattgaatgacagagtttggacactatgagttctcacttagcttctaccattttttggttgtctggagttttttatattttcattngtaccatttatatgcagtgatgctcgagtcatgtgggacaacaaaactgg

SEQ ID NO: 308416 - DNA, 418 bp, Zea mays
cccacgcgtccgcccacgcgtccgcccacgcgtccgcccacgcgtccgaaaaaagaggaagaaaacctcctgcaattcccattccatcgatccagctccggtccaagccaaagctttcttcgccccaaaccttgttcaactccaatgtcggacttcttcttcgggagcccgttccgccgcctcttccacgcgcgccccttccatgccgtcgactggtcctccgccgcggcggcggccatggactgggtggagaccccgtcctcccacgtgctgcgcgtcaacgtgccgggactcggcaaggacgacgtcaaggtccaggtcgacgagggcaaagtgctcaccatcaggggcgccccgcccgcggccaaggagaaggggaaggaggacgaggaggaggtgacggtgtggcacgtggcgg

SEQ ID NO: 308417 - DNA, 443 bp, Zea mays
agcccacgcgtccgctcaccgtggcaccatcgagacgacagcatgtatggcactgctcatcattcccgataagcgtgtggatggaaggcggaaggtagagactgacgacttgcagcataatcatacttgccgctgcagattcaggcagcggcggcaggcgtccgcgagtgcaagggcgtgctcctcaacttcgaggacgcctccgggaaggcgtggaggttccggtactcgtactggaacagcagccagagctacgtgctgaccaaggggtggagccgcttcgtcaaggagaaggggctccacgccggcgacgccgtcgggttctaccgttccgccggcaagcagcagctcttcatcgactgcaagctccggcctaacaagacgacgaccacggcagcagcctttgtcaacgtcaacgcgatgaccaccacggtcgcaccggc

SEQ ID NO: 308418 - DNA, 548 bp, Zea mays
  unsure (1)..(548): unsure at all n locations
taaaaaaaaaaaaaaaaagactattacgacgacgaacgacgtaaaaaattacaatcgctctctactggtgctggactgccgtggggtggagatcggcttggaccaactcatattttaggctctgttggtggtgcaaaaatgagtgacaacctgatggacaaggttagcgcctttggtgagcgcttgaagatcaccgggacagaagtcagcaaaaagatgactgccggaatgagctccatgagtttcaagatgaaggagttgttccaggggcagactccagctgacaagattgttgagggtgccacctcagaggatctggacgggcctgactggaactcaaacttggagatttgcgacatgatcaacacagagaaggttgacagtgtggaactcatccgtgggatcaagaagaggatcatgctgaaggatgcgagggtccagtacctctacttggtcctgcttgagaccattgtcaagaactgtgacanggcttttctcggaagttgcggtcgagcgggttttgatgagatggcaggttgattgatgat

SEQ ID NO: 308419 - DNA, 505 bp, Zea mays
  unsure (1)..(505): unsure at all n locations
cccacgcgtccgcccacgcgtccgcccacgcgtccggtcaaggatacagttgaaatggctgtcaaagaatggggagataaatcattaactgaactggaagcagaagagcggctgtcctattcatgtgagaagggaccaacacgtgatgaagtaatagcgaatttgagaaatgcatttgtgaagatagcagacgaatataaagtttacactgaggaggaaaagcagaaggtcattacagtaggtgggcttcacgtagtaggaacagagcgccatgaatcacgcagaattgacaatcagctccgtggtcgaagtggaagacagggggatcctggaagctctcgcttctttcttagtctcgaggataatattttccggatctttggaggtgacaggatacagggtctgatgcangcattccgagttgaagatcttcctatcgaatcgaaaatgctaacgagggctctagatgaagcgcagcgggcaagtgagaaatactttttgacat

SEQ ID NO: 308420 - DNA, 527 bp, Zea mays
gcaggctcggctccgcctggcaggggccgggaacggactggctggatccacgcgtgcgttcggagtaccttcgcaacggtatgtacatttattgaacacgacaggaccaattggatggatctcttttgtgactatactgacgagtgcgctacagagcatgctgtgatatggggtcttatgaaatgctttgtcaaggcggctggctctgtactacacaaccagtcgattgttaatgctgccattgatggcgatgacatgatatacagagactacctagacgtcagtggtgctggtggcacttccaagggccttgtggtgcctgttatgcgagatgctgctaccatgaactttgctgacagtgacaaagggagtaacaaccttgcacagaaggcatgtgaggcggcgctctctgattgatgacatggcagggggaacattcactatgtacaatggtggtgtctatggaagccatctaagaacacctatcattggcccaggacaggtgagaattctggggatgcattcca

SEQ ID NO: 308421 - DNA, 362 bp, Zea mays
cattcaaacagcaatgcaacagacattgcacccaaatgggcgttataccgtagcattccagacattcaagtccccttatatatcgaaaccatcactttagcaaatcccacaaacagaagttaaagggtccccagctatgcctgggtagcattttttatgttgcagcaaaaaaggatacattccccgttggcgaggtcgattcagtttcctatttcccagctgggcgacggcaaaaccagagatcactcccatgctttaagggcaccacccctcccaattgccttgaatgggtcaggtttaacaacttcaccagggtctgatttgatgagaagctgcctgttgtccaaatgtgtaagaacaaa

SEQ ID NO: 308422 - DNA, 468 bp, Zea mays
  unsure (1)..(468): unsure at all n locations
tggacgcgtgggtgggccaccagctttgaccgccgcctcccttcccctccgctactgctcctccccaccccactcccccgcaggagcggcggcggcggcggcggcggcgaggtcgtaccccacatcggcgagcggcggcggcaccgccggaggcaaaggcaagatgttcgggcgcgcgccgaagaagagcgacaacaccaagtactacgagatcctcggggtgcccaagtcggcgtcccaggacgatctcaagaaggcctaccgcaaggctgctatcaagaaccaccccgacaagggcggtgaccccgagaagttcaaggagctcgcacaagcctatgaggttttgagtgatccagagaaacgtgagatttatgatcagtatggtgaagatgcccttaaggaaggaatgggcggtggaggatcccatgttgatccatttgacatcttctcatcattntttggaccctc

SEQ ID NO: 308423 - DNA, 477 bp, Zea mays
tccacgcgtccgctcaccgtggcaccgccgagaagacgggatgtaaggcaatgctgatcattcgggataagcgtgtggatggaaggtggaaggtagagtctgtcgacttggagcataatcatccttgtactccagatatggtgaggttcttaaaggcgtacagagagatgcctgagccaacaaagaagaaggccaagattaccgatgagatggatgagatggtggagaaatcgctgagcgagattgctgagacaaggaagtttccgacacgacccaagaggggtgctaacggtgggtctgctgttggtagccagaggtttagtaggctcgagagttttatgcagcgtttcggggaggatgacctcaattcacttaagaagttcattgaaaagatgcaacacagaaaaccaaacttcatccacagctgggatcttgatccggaaagtcatgtgaagaatttcttctggactgattcta

SEQ ID NO: 308424 - DNA, 517 bp, Zea mays
  unsure (1)..(517): unsure at all n locations
cggacgcgtgggctttccctgccgggccccggcggcctctcctctcctcgcttgtccccaccaggcgccatggacgctggcgacgacgaaccccccgttctcctcgaccgcgccgcccgcgcctcccgaggcaagaggataaccaagctgctcgaggacgaggtcgagcaggacgaggctttctggaaccaagaagccctcaaggattttcgcgagttcctcctaccatgaggagaacgatgacaactacgtggaagagccggatgctggtgacgaattcgacagtgattttggtgaagatgaatctgaaactgatgatgagccggagaaggaagtacgcgagagattacctatcaagaaacggctaatgtttcctggcaagacgctgaggaagaccaacgtcaagaagaagaaggcgaccccaaaaccagaagatggcacataagccgacaagtctgctgataagccgagttcatccacacangcagatcttcctgatgaactggaggctgagaag

SEQ ID NO: 308425 - DNA, 375 bp, Zea mays
tggttgcgtgggcggacgcgtgggcggacgcgtgggcggacgcgtgggtgatgggacttgcgaagtttatgactctacaaagaacgtgtggtcttgccctggaacttttcctccaagcatcaaacttccacttgctctaaatttgaggtcacaaccagtggcggttggcagcatgatatacttcatgtgcgcagaaccagatggtgttttgtcatatgatgtaagcaccgggatttggaggcaatttgccatcccactgccactgcatctgactgatcacacacttgccgagttccagggaagggttatgctggtgggtctgctgtgcaaaaatgcagcgacctgcatctgcatatgggagttgcagaagatgac

SEQ ID NO: 308426 - DNA, 330 bp, Zea mays
tttgttttttttttttttttttttttttttttttttttttttttttttttttttttttcaaacacgaggcttataatgggtttatttccacccggcccaggggggaagtcaaataaaaataaaagcgacttttattcgtggggcataatataacagggctttgcccggcaggaaacacagttccggttttattccatgcacacttgacaaaaccccccaaacagagacgacggtccggggtataatttgtccatggccaccccggccaattggaaggggtcgtcgtcctggttgagctgttgtttgaccatccactttttgagggggggg

SEQ ID NO: 308427 - DNA, 170 bp, Zea mays
gggggggacccccaggcaaacgggccctccgccagaaggcttggggcgcaacttgggttaaaaaactcgagggttcgggggattttgcaattaacaccaggtatcgcatttggctacgtttttcatcgatgcgggggccgagatatccgttgccgagcccacccgtccgg

SEQ ID NO: 308428 - DNA, 436 bp, Zea mays
actggaaccagtatacaataccacccatatatatcgtacgacataataaaaggtagctcagcatcatcaagtacatggaaaaaaaatactctagtcttcacgatatactgtaataataaaaggtagccctgccttaatagcatcagtcttagcagtagaacatgacccgcttcacgttttccttgagggcaggtaatggcctcacagcaacattcccaacaccggcagccttggtgttgcgcccccctggtggagggccacggcttgccatagatccactgtcactcgtatctggctccatgtagaaccgagctcggaaggctgccaggtgagcatagtatgcaggaggaacaatcgatactgagcgtgtgcacctagcatacctgaaaatggttcatcttcagctttgaaatcaatcaaaagaactaaagcaatg

SEQ ID NO: 308429 - DNA, 368 bp, Zea mays
ccgtttgtcctagtgtgcatcccccgtggcgcttacaggtgcgagcgctctgatgccttctgaccaccacacgcatgggggaccaactcaccgacgaccacatcgcctagttcgaggaggacgccaggctgttggacagggacagtgatggctgcatgacgaccaaggagctggctactgtgatgtcctcactgatgccatccctgcgggggctgctctccggggcatgatcgacgaggccgatgccagtggctacggcaccatcgattttgcagagtttctgaaccttatggctcgcaagatgaaggacactgactctgaagaagagctcaaggaggcctttcgtgtgtttgacaaggatcagaacg

SEQ ID NO: 308430 - DNA, 461 bp, Zea mays
gcgccattggccagctagagccaaccagaagagcttgcagttactgagagtgtgtgtgagagagaggatgggtggcagcggcagggctgctctgctgctggccctggtggtggtggccgtgagcctggccgcggagatccaggccgacgccgggtacggttactgcggcggttacaccccgactccctcgccggccatcccgaccccgaagcccgtgaagccccccaccaaggggccgaagccggacaagccgacccaggagcacaagcccgccaaggagcacgggcccaagccggagaagccgcccaaggagcacaagccgaccgccgccacgtacaccccgagccccaaacctacgccgacgacgtacactcccaccccgacgcccccgaagcccacgccacccacatacactctcgggccctacgccccacaatacccataccaagatccacttccac

SEQ ID NO: 308431 - DNA, 298 bp, Zea mays
gagttttaacctttactgctccaattcatatgaggacgatagcgaccacttgacagcctgggactggctgagaacctgccgagaggtgtgcatgcctatggtcaagagaaggcagatgacacacagcataggcgaatactgccgttacgcacgggtcgagacccgattcatgctgctcaaggtgcatgtgaaaaaccagcaccgttacggtcaggactcccgcacgaacttgatgatgcattggctgaatgccaggcattgtctgtcgctgctacccgtgagctagctcaacaaactg

SEQ ID NO: 308432 - DNA, 575 bp, Zea mays
tccggatcgacccacgcgcccacgcctcctggactgacgcgtgttctgacccgtcggcaatctccttgccgtgcgttgcaaccgctgactgagaagaagagatggccggccagggcgatggcccggctatcggcatcgatctcggcacgacgtactcttgcgtcggcgtgtggcagcacgaccgcgtcgagatcattgccaacgaccagtgtaaccgcaccacgccctcgtacgtctactacaccgactccgagcgcctgatcggagatgcggccaagaaccaggtcgccatgaaccccatcaacaccgtctttgatgccaagcgtctcatcggcaggaggttcagtgatgcgtctgtccagagtgatatcaagctgtggcccttcaaggtcatttctgggcctggtgagaagccaatgattgttgtccagcacaagggtgaggagaagcagtttgcagctgaagagatctcctctatggttcttatcaagatgcgtgagattgctgaagcttaccttggtagcacgatcaagatgctgttgtcacagtccctgcctcttcaatgactcacagag

SEQ ID NO: 308433 - DNA, 313 bp, Zea mays
cccattcgtccgctttaacgtacgccgtgctcaccaccaccgccacgcttaaccggactcgactccgtggttagctcgtggtcaccacccacccgagaccccagcccttggtggcgctgcgctgcgcagtgctttatatacccgggctccagtgctggctggcgttgtatgagcgtgggtggtggcgtcgccggccggggatgagctgcaacgggtgccgcgtgcttcgcaaggggtgtagcgacgcgtgcgtgctgcggccgagcctgcagtggatcgacggcggcgccgaggcccatggccacgccaccgc

SEQ ID NO: 308434 - DNA, 438 bp, Zea mays
gcccatcaaggagatctccggcaccgtcaagctgccggggtccaagtcgctttccaaccggatcctcctactcgccgccctgtccgaggggacaacagtggttgataacctgctgaacagtgaggatgtccactacatgctcggggccttgaggactcttggtctctctgtcgaagcggacaaagctgccaaaagagctgtagttgttggctgtggtggaaagttcccagttgaggatgctaaagaggaagtgcagctcttcttggggaatgctggaactgcaatgcggccattgacagcagctgttactgctgctggtggaaatgcaacttacgtgcttgatggagtaccaagaatgagggagagacccattggcgacctggttgtcggattgaagcagcttggtgcagatgttgattggttccctggcactgactg

SEQ ID NO: 308435 - DNA, 167 bp, Zea mays
atcattcagcgtgaacagtacggtgctactgttcatctatttaaaggcacgggacgcaacccgggtgaaagtatatttatgtcctcaatatttatatatgatcaaaatacaaatcattaaggactaagtagttttttcctctttcgggtcagcatcatcattatact

SEQ ID NO: 308436 - DNA, 452 bp, Zea mays
cccactcgtccgcatcactcggctcgtttcccgaaccttcctcctcgacttatccccatgggcaagtccggcgcaaaaaagaagaagccggccaccgccgccgccgccgccgccgcaaagccgccgcccgcctcggttgagctgaaggcaacgccgtcctcgtcttctttacccgcggcgaacggtgcggcgccccaccaggtggtggacgcgggcgtcctcttgcgccgcgcacacgagctcaaggaggagggcaaccgcctgtttcagtcgcgcgactacgccggggcgctgcgccaatacgagctggcgctccgcctcgccccgcgcggccatcccgaccgtgccgtcttccacagcaatcgcgcggcatgcctactccagctccgccccgtagaccacgaggccgtcgcgcatgagtgctccctcgcgcttcaggccgagccacgctt

SEQ ID NO: 308437 - DNA, 416 bp, Zea mays
gggaaagaattccctcccctagccgccgccgccgctcgtctccctgagaggtgccgggaccgatgaactggccgtgttctaggtagcgaatcggttttgcttgtatcaacacggggtctgctgcgtctggtggtggtgaaggggagacattcttgagatctgtcacggatcatgtgttcgacttcgggaatcagaacgtacgcagagtgctcaacgcatttggatacctcggcttaaacatgcgtgacgtgcagagcccggaggacatcgtcgccgcggaacgggttcgtttttcccggtgtcggcgccttcggctgccgcatggacgtcctcaacaggacgggcatggccgacgcactccgtgagtacatgcaaggtgaccgccccttcctaggcatctgcctcggtctacagct

SEQ ID NO: 308438 - DNA, 441 bp, Zea mays
cccattcttccgcccacgcgtccgcagaggagctccctcagctcgttcctcctgtgtcgcgccccagcccctggttcggctctgctcctccctgtgcccatctcccatggcggctctctctgtccggccaccggcgcctttgttttcctctctcctctacgctgtcgctgtttccttgtgcagcgccggttgtcctcgcgctcggctcccagctcgcccagctttggtggtgttgacaccttttcggaggcgccaattactcaagagaactagcggcggtgctctctgcacaggggcggacggtccgcgcgctggggccggacggtccgcggcctggtgcgaggcggcggtgctttctggtcaggcgcggacggtccgcggcacagggccggacggtccccgacctggtgcaagagcccgagttcctgcctgacggccgga

SEQ ID NO: 308439 - DNA, 459 bp, Zea mays
gcgcctttcagtcagattctgcaactcaacgagccaattgaggtaaaaatttacgagtggaataccggggggctactcacaagaattgagggtctgagagcatttcttccaaaatttgagctcgtggacaggataagttcatttacagacttgaaaaataaagtcggttgcagcattcgtgtgtgcattgcaaggctcgatgaagaaactaacgacctgataattagtgagaagaaagcatgggaaatgacttatcttaaagaaggaaccctcctacaagggactgtttgcaagatttttccgtatggtgcgcgggttaggattgctgggacaaacagaagtggcttacttcacatatcgaatattagtcgaggcaatgttgtgtccgtaagtgacattctgaagatagatgatgaggtgaaagttatcgtgatcaagtcaaatgttccagacaaaatt

SEQ ID NO: 308440 - DNA, 402 bp, Zea mays
  unsure (1)..(402): unsure at all n locations
cccatttttccgcccacgcgaccgcggacacgtgggcgacggagcacgacgcacgcagagccgcagagatccgtcacactgcaagttttgaaaactgaactgtaagatggcatcagcaaagctttcccgtgaggaaaatgtgtacatgtgcaagctcgtcgagcaggcagagaggtaccaggcactggttgagttcatggagaaggtagcgaaaactgttgactcggaggagctcactgtggaggagcgcaaccttctgtctgttgcatacaagaacgtcattggagcccgccgtgcctcatggcgcatcatttcctccatggagcagaacgaggagggtcgaggctatgaggaccctgtaacacttaataaggactaccgtggnatgattgaaactgagct

SEQ ID NO: 308441 - DNA, 456 bp, Zea mays
caaatatatatatatcatctttcaccagctccacatctacaacttggttggaagtatacagaatggtaatacaatgcagagcgaaacgacactgacagaagccggtaatctgccactgtccttgcggacgaacattgcttcatacactgggaaattgatcgctactatcagcgcacatagaatggcctgcacaaacatagctcccagactcaccgttcctttacgcaacagaacatttgccaccccgagcatcatgcacgccaggttaagcagtgcaacggttgtaatgatcgcaaacatcgtgaaggacccaaactccatcatccccttcttgtacctctctagggcctgcggatcggtcaccttcgccgtcaaggtgaaccccgactcggtgacgccaagcattctgcggattgtgtcgatggctgccaagaggtatgaggtgattcttctgaa

SEQ ID NO: 308442 - DNA, 439 bp, Zea mays
  unsure (1)..(439): unsure at all n locations
tagacaccacgcgcgcggnatccttctacatcgatgccaacggcatcctcaacgtctcttccgaggacaagaccaccggccagaggaacaagatcacgatcaccaacgacaagggccggcttagcatggatgaagatcgagaagatggtgcatgaggctgagaagtacaaggcagaggacgaggaggtcaagaagaaggtggatgccaagaacgcgctcgagaattatgcctacaacatgaggaacaccatcaaggatgccccgtctggtgggagcggtgctggtcccaagatcgaggaggtggattaaattggttagtgttcgaggtttggtttggtgaggtgtcaagtgcctgaactttgaaagttgtttgggagataagtgatcttacgaagtggtcgcaatagctgcggcctgtgttgaacttttaaaaataaat

SEQ ID NO: 308443 - DNA, 455 bp, Zea mays
cccattcgtccgcccacgcgtccgagaggagtgcccgctcttgacccgacgtccgcgatgacggtggcggcgctgcaggcgatggacgcgctgtcgcggcgggcgaccatgctgcgggactctctgcggcgaagccaggggaacacggacggcatggtcaccatcctcggctccttcgaccaccgcctctccgcgctcgaggccgcaatgcgccccacccaggtgaggacgcacgcgatccggacagcgcatgagaatatcgaccggaccatcaaggccgccgacggcatcctctcccagttcgatctcgctcgccgggctgaggcaacaatattgaggggtccccatgaggatttggagagctacctggaggcagtggatgtgctgaaaggcatttctcgcttcttttcctcaaacaagaacttcaagagtagcgaaggagttctgattcatgt

SEQ ID NO: 308444 - DNA, 455 bp, Zea mays
atgtttttgtactctcactgcttcggcggcttgtaacgacctattttgggcttctcttcttaatataatgatgatgcacagctctcccgtgccttcgagaaaaaaaactaaaacctcttcttgtatgtccacaaaatcgatctaaaccaatccatcttttctatatacatacaacataagatggttaaacaacttatgagaaacacaagagctagtacaaaatgctagtaaatcggccatgttcaagggtttccttgttgaggatgaggaccatgtgctaggtgtattatggcttgcacagagcaaatggttacctattgagtggagagaatagtaataaaaataaaaggtttatgctatttatcttaaaataacaattaaaggatcatctggttagctaactttcgtaatgaactaatcaattacatcactctgaactaagtactatccagatg

SEQ ID NO: 308445 - DNA, 459 bp, Zea mays
cccactcgtccgattttcatgggatccatttcctttgagccatggaaacgattgtggaagacttgggctcccccaaaatgtaagttctttttgtggttggcaataaggaactagtgttggactgctgatagacttagaaggagggttgcagcacccactggtctatactttgtgaccaagaacaagaaacaatccaacatcttctatgcacttgcagttttgccaggcagttttggcatgatatccttttgccattgagataaggatatcttttgctgagtggtggcgaaaggtgcataaaaaggtgcacaagaccaaaagaaaaggcttcaatagcctcataattttgggggcgtggtgcttatggcttcttcgaaacaaggctatttttgatggagtaaacccttcctttgagctcttgtaaaagtttgtttttagatgagctgagttgctgggata

SEQ ID NO: 308446 - DNA, 521 bp, Zea mays
cggacgcttgggcggacgcgtggggacgggtatgctgacaatggtaacgccacggaggctatggctttgttctggaggatggtccaggagggcatggatgtgacggatgcgtctgtgttggcagcactacaagcgtgcggggagcttggatatctcgatgaggtgaggcgtgtccatgagctacttgtgagagttggcttgagctccaatgtgtcggtgacgaacgcgcttatcaccacatacgccaagtgcaagagggcagacctcgctgcccaggtgttcaacgagctgggcaataaaaagacacggatctcatggaatgccatgatccttggcttcacgcagaacgaatgccctgaggatgcagagaggctcttcgctaggatgcagttggaaaatgtgagaccagattcgttcaccctggtcagcgtgattcctgcagtcgcggacatttctgatccgctgcaagcaagatggatccatggatattctatcaggcaccagctagaccaggatgtcta

SEQ ID NO: 308447 - DNA, 489 bp, Zea mays
gctttggacctgtttacaagggcacactagcaaatggtactatagttgcagttaaaaagctatcttcaaagtcgagccaaggaaatcgcgagtttttaaatgagataggaataatatctgctctaaggcatccgaatcttgtgaggctatttggttgctgtattgatggggatcagcttcttcttatatatgaattcttggaaaataatagtcttggccgtgcgctttttggccgcacagaacatcagttaaaattggattggccaacaaggtacaatatctgccttggaactgcaaaaggcctggtctatctgcatgaagagtctgcactaaaaatcgtccacagagatattaagccatcaaatattcttcttgatggaaagatgcgacctaaaatatcagattttggcttggctaaactgaatgatgactgtggacgtgtgagcactcggatcgctggaactgttggttatatggcccctgaatatg

SEQ ID NO: 308448 - DNA, 212 bp, Zea mays
gggaataagacttattattttattaacaatgccatttttatttattaattacggctggacgaggagtactagtttatttgatgagagacatggcagtccaagtcaaactcgtttgtctgaccatggcggtgatggccggttgcaggttggggagcgcggcctgcagctctccggtgggcagaagcagcgcatcgccatcgcccgcgccatgc

SEQ ID NO: 308449 - DNA, 394 bp, Zea mays
cccacgcgtccgcccacgcgtccgcacaagcacaagcgcactctagcaatggcttctgaggttgtccgccctagcgacgccgagctactaaaggcacaagccgacatatggcggctcagcctctcctacctcacgcccctgtcactgaggtgcgccgtggagcttggcatccctacggcgatctaccgccatggcggggctgcctcagccgctgagctggtcacggcgctgtctctcccctccactaagctgccgttcctccgccgcctgctgcggctcctcgccgcgtcgggcgtgttcaccgtcgacaagcagagctcggaggaggagcggaaccgcatcagccccgtgtcctacctcctggggggacggatccctcacgaggaccacatga

SEQ ID NO: 308450 - DNA, 472 bp, Zea mays
atttttactcacccaatcccactcaatccacatggattgagagctaaccgaacaaggcctaaaaagaaatctgttaggtttagcttttggtttttgccccctaaaagccaaaagctaaaccaaaaagctggatctagaaagcagctttttttaaaagccgattttctcgcagtgtaaaactgaaagcacctctagacctgcttttagcggcttttggatggaactgtaaaaatatatgtggaatattttttagctttttagtggttttcactaaacggttttagctttttagcacttcactgtccacatcagcttttttcacagatcacaacccacaacagcttttttcactgccacagcccaaccaaagagaccctaagtcttgcatgttgcttattctttacgttacagtttaatagcaattatgctgacacttaatctcttttgatagcggttccaaaaatgtcaatat

SEQ ID NO: 308451 - DNA, 492 bp, Zea mays
  unsure (1)..(492): unsure at all n locations
cccacgtgnccggaaacaaacacccaaatcaaacccgcgcgtcgccagccgcagcaccaatggcgtgcgtcgccgcgctcttcgcctccccggcgctcctccccttcccctccaccacctcgtncatggcctcctgctcgtgccgcctccgccccgccgtcgtcgcccgcgcgccgcgccagcagccgcggggccggcgcgcgctccggcgcttcgatgaggtggaaggggtgtcgaagaaacggcgcggcatcggaggcggtggcggcgtcggcgctggcgggtcgcagccgtcgtcctcgcgcagggatagggggctttccgtcgatttcaaggagccgcaagttgctgagtttgatgatcttgaagaggacaaattccttaatgctgtcgtcaaggtctattgcactcatatcgcacccgattatggtcttccttggcagaagcaaaggcaacattcaagtagtgggagtgcttttatgatttgggatg

SEQ ID NO: 308452 - DNA, 489 bp, Zea mays
ttgtgcgtggggaatatcatcccttgggaaacacacttggagaaatcactagagagaaggctgggatactgaagaaaggagttccggcgtatacagttccacagccagaagaggcaatgtctgtactgatgaagcgagctactgagttgggtgtttctcttcaagttgtccaccctttggacccacagaaattagaggatcaacctcttggactccatggtgagcaccaatacatgaatgcaggtcttgcagttgcattggctaatgcctggcttgagaggcaaggccatttgaacagattacatgtcaaacattctggtaccttgccagatcagttcatcaaagggctgtcgagtgcttgtctgcaaggtcgaggacagattattccagattcacaagtgaactcagaaaatgatcgtgattcttcattggttttctatttggatggggcacatagttcagaaagcatggaaatgtgtgcaagatggt

SEQ ID NO: 308453 - DNA, 334 bp, Zea mays
acttatggtaacccggaaaaaaacaaatcttattcataaacaaaatgggatcacagacatttctccatacctccatgctcattgcggtcgacccaactgaccacctagaggtgcatactgacttattcagactgatccagcatggggcaacattggaagttcacatgcttacagacgacaaattttcataacaatagcctggattggctgtttcacagaataaccacaggacaaccactaaatggggacgatataaaataaacacctcaaaagcaaatcgacaccagaagcccgccttactcatcaagcactcccgccttctcctccatggcat

SEQ ID NO: 308454 - DNA, 282 bp, Zea mays
ctgttcttggacgcgccgctcttcatcccggcggcgctgctgcaggtggaggacttctcgccgcagtggtgggacctcatcaccaccactgcctggttccgggaccactggtgccgcgagcgcgcccacatggacgagatgggcgagcagatcgacgcgggcgggctgccctacgacgaacacctcttctacgacgaccagcccgagcagggccccgtcggtggcggccttgaagacagattctgttgctgaaggcgctgaacatcgaccttccccgagggc

SEQ ID NO: 308455 - DNA, 373 bp, Zea mays
caaacaaaatcagcatggcaggactataaacgaacataatagacaaccaatgatgagaccatacttcgagaggcgcagcatcatggtagcaaatctgggataattaaaacacgaatgatgaagtcaactcttattggttgacgggggagaaccatcaaccatcttatcgtggcaaaattctacaacaatgcatgtgatgttgtcggtgctcccacgcctgaaggcgatctccgtaagcttccgggctgcagcctcagggctatcctcgtccttcacaaatgcaacagcatgctcatttggcaccacatcccagagcccatcactggccaaaataagaaactccgtatcaccatctatttctagatcctgaatc

SEQ ID NO: 308456 - DNA, 393 bp, Zea mays
aaattttacgggctacagtggggccactgccaggtgttacacaagatattgcagggtataagtgcattcactctagcagtgacctgaaaaagctgaagctgtactctgcactgcagtatggaatctggggagatgtcctcccatccagcacaacaaaaaaccatgtcgagtctgaccaacgttgattgcaactcagcccagtatttatgtgcttgatacacctggtgttcttgtgccaagcataccagatatggagacagggttaaagcttgctttaacaggagctgttaaagactcggtagttggggaagaacgtatagcaaaatatttattatctctttttaacattaaaaagacacctttacactgggagcgggtggtgcacagaaaaag

SEQ ID NO: 308457 - DNA, 415 bp, Zea mays
gttgtgattaccgatggacagaaactagattctttgtagcacgaggaacatgtaaaacattattgagatgcaatgttttcacaggggtattaataacaacatgaccaatattgttgtgcttgtactagacgtgaggttgaccagaattgcagatcatacgtgatgtgatcagttgcagtcgtgtcgaggtaccaattagtgtcgacatcatagtcatgagtgccacgagtgagcacatcaatagtcttggtgttggagtagcttttttgaaagcagtactagcaatctatggcaacatgccctactttgccacagacttggcagatcttgtcagtgcatcgggcttgattcgatgaggataaagacacaccttgatggctagtccaccaggaggcaccacaccctttggcttgac

SEQ ID NO: 308458 - DNA, 324 bp, Zea mays
gttgtgattaccgatggacagaaactagattctttgtagcacgaggaacatgataaacattactgggatggatctatagcatacatgtggtttatgcctctgatcatgttactttatgcatttatgaaatttgttgcttatttatggtgctcaagttgcgcaagggatccccggacctcacaagtccatgtgtgaatgatgcacatatttaggggagaagtgctataacttgaccctttgagactaaccctcgtgtttgagttacttgatgtagtctcaaagtgcattgaaagggaaaggtgaacttggaccatgcaaagactt

SEQ ID NO: 308459 - DNA, 467 bp, Zea mays
gtcatcttcctcttgatcaggacatcaactaatagatgtaggaggtggatctgattgtcatataagaaacacgacactgagatattatattgcttgccttgacctctaggtctatagggttgtataaccgcctattacaaggctttgtcccccttcttagttgcaagggggcagccaagaaggagactggaactaggctttggccccctaaaagctaaaagccaaaccaaaggactggaactaggaagcaacttttttcaaaagctgactttcttgcagtgtaaaactgaaagcacctctagacctgcttttagcggctttcggatggaactatgaaaatatatatggaaaaacttttagcggcttttagtgggttctaccaaacaattttatgatttttaacagctcatggcttacaacaacttttttacaagttacagcccacaacatctttttttacgggcgga

SEQ ID NO: 308460 - DNA, 475 bp, Zea mays
cccattctgtccggcttctcctccccctccggttcgggttcgggttcgtgaggttctccggggttcggtttcgtgggtgagcggatcgagatggcggcgtcagatgttgagtaccggtgcttcgtcggcggcctcgcctgggccacggacgaccactccctccacaacgccttcagcacctacggcgaggtcctcgagtccaagattatcctcgatcgggagacgcagaggtcccgcggcttcggcttcgtcaccttctccacggaggaggcgatgcggaacgccatcgagggcatgaacggcggcggcaaccgtggcggcggctacggcaacttcgacgggaactggaggaactgagcggtggggcccgcgcggccaagttatcctgttcgctaccgtgatgtttaccctagtccagagggtttatcttcgttcgtctcggttggtggtgcccatctgtgtttttgattgcaag

SEQ ID NO: 308461 - DNA, 431 bp, Zea mays
ccctctctttcgcccacgcgtccgcccacgcgtccgcccacgcgtccgggaaggttttcagtttgattatgtttttgactggaccattctaaagtaccaacaggcacagatgaccactgctccacctcgtgcaattgctccagcagtaggacaaagctctgggatggctcctgtggcaaacaacaatagacattcaggcactgaagagggaaggagaagcgggtggtctgacatggacccaatgcgacgccaggctccaccaccagttataaatgcaggcagcctagccaagcagaagtcgcctgttcggcctgagacatcaacatcgaaagatgctgtgttctccagttcgacttttttgggacgttcaggcggatcgtcaaggcggcctgctgtatctagaagccgagagctaagcactgtagcggagc

SEQ ID NO: 308462 - DNA, 337 bp, Zea mays
tcctttcgtccggggcccagcccggcaagcagacatggtcaaccgtgcgtcgcgccaccaccgccaagccgccgagcagcaaccggtgacgccgaccctgccagagtcgctagcccagatccagccgccgtctgcgacttcgtggacgcagacgcagtagtaccaggaggcgccgtcgcagtcgcagcagaagccgaagccggcggcggacgtgggggcggtggggcgcgtgctggggcggcccatggaggacgtgcgcgcgacctacacttttggacgcgagctcgggcgggtgccagttcggggtcacctaccttgttacgcactttggagaccg

SEQ ID NO: 308463 - DNA, 229 bp, Zea mays
ttcgctattggccagctcgagccaaccagaagagcttgcagttactgagagtgtgtgtgagagcgaggatgggtggccccggcagggctgctctgctgctggccctggtggtggtggccgtgagcctggccgtggcgatccaggccgactccgggttcggctacggcggtggtttcaccccgtctccgtcgccggccaccccgaccccgtagcccgagtagccccccac

SEQ ID NO: 308464 - DNA, 514 bp, Zea mays
gcgcttgctgctcccgtcgctcgtatatattactgcgaagtaaccctagctgccaccagcctcagcctcccctctcggctcccccacacggcactccagcccccagcctgccactcaaacagtacaccaccgccacaagcccgggccgaataagtctacagggcagcagggctaccgctgccgccgcacttcgccggcaaagaacgccctccagatcaacccctgcgatggagtccacggtgaacccgaaggcgtacccgctggctgatgtgcagctaacgatgggtatcctcgatatcatccagcactccactaactacaagcagctcaagaagggagcgaacgaagcgatgaataccttgaatagggggatatcagagtttgttgtgatggcggcggatacagagcctcttgagatcctactccacctccccttggtaggtgaggataagacaaaatcatctcatacaagaggtgatgattgaagactactgaattgcttctgcattctaaa

SEQ ID NO: 308465 - DNA, 453 bp, Zea mays
tggttattgttgatgacttttcaagatacacttgggtgttctttcttcatgataagtctgagattgcatcaatattcaagaagtttgccaagaaggcacaaaatgaatttgactgcaagatcaagaagataagaagtgacaatggtaagaaatttgataacaccaacattcatgagtactgtgatgaaattgggaacaagcatgaagtttctgcaacataccaacctcaacagaatggagttgttgaaagaaagaacatgaccttgatcactcttgcaagaacattgattgatgagtataacacactagagaggttttgggatgaagctgtcaacactgcatgctacacatcaaacaggttatttcctcaacggctacttgagaggactccctatgaactgctaattgggaaaaagccagaccttttcttttttttgggtgtttggatgcaaa

SEQ ID NO: 308466 - DNA, 492 bp, Zea mays
tccactcgtccgcccacgcgtccgcccacgcgtccgcccacgcgtccgcccacgcgtccgattcaaggcactgggaagaacagtctgatgaaaggaacaacaattgcctcatcttatctttcagatctgacaactcttgctgttggatacatgttcatcttctgtcttgtgtttttgtacattggatcactggctttacttcgatatgccaggggagaacgttttaccattggaagactctacggtatagctactatattagaggccatcccttctctatgcagacagttctttgctggaatgaagcaccttatgactatggtcaaagttgcattccttctggtcattgagcttggtgtatttcctcttatgtgtggttggtggcttgatgtttgcactctaaagatgctgggcacaacaattgcgcagagaggtgaattctttacaatgtcacccttggcgagctcatctatccattggctaggttggatt

SEQ ID NO: 308467 - DNA, 348 bp, Zea mays
tgtgagtttgcggccaaccgcaaggccgacggcgagggtggacgtggaggtgaacgactaccagccgtccgaccccgccaacgtacaccccttcgccaaagcctccgacacccaagccgaccccgccgacgtacaccccttctcccaagcctccgacgcccaagccgaccccgccgacgtacactccaagccccaagcctgccacacacccgacgcccaagccgaccccaccgacgtacacccctttcccaaagcctccgacgcccaagccgaccccaccgacgtacactcctttcacaaagccttccgacactccaagccgaccccaccgacgtacactcccacacc

SEQ ID NO: 308468 - DNA, 318 bp, Zea mays
ggccgtaccggtcgttcgttatcgatggacaagagcgtggaggcgaggttggcggcgccgaggatgacggcgcccatgagcgcggcgttgctgccgaacccggccgtctggaacagcacgggcgagaagaaggcgatgacgatgacccccgtgagctgctggaacagcgggaccgccacggccacggccaggtggtgccggtgctcccgccggaggatcctgcggaacgcgccctgctcgtgggcgcgcgcggcctccacggcgcgggccacgtcctccagctccgcgtccacgtccgccttggcgcccctgacgcgc

SEQ ID NO: 308469 - DNA, 345 bp, Zea mays
  unsure (1)..(345): unsure at all n locations
gaaaatgtacagcaagggaagcccctgctgtgctgtggtagatatatattaatataaagaagaagacggacaaagagcattagcagtcgctcccaagacataaaccagaaggaaactaactaaagcacagggaaaaaactatctgctatctataggaattcacaagcgaggagaaaagagttgatttctcttcagaaaagcggttagcttgcagaagagcttcggcgcggaattcttttttctagccaatgaaagatnggtcgtcccctgtcaaagataaaattgtttctttgcttccagatttgccaagctgctatgataaagacctccataaagaatggggaa

SEQ ID NO: 308470 - DNA, 455 bp, Zea mays
gagatcttaagtatgctacaattgcattccataagtaagtttttccagtgccaccatatccagaaacaaaatacaatccaggtcgatcacaaaggacacattcaacaattttattgaaggcatttaactgatcaatattaagctgtgagatgaggctttgagattcattgtgaagaatttcaggatcataagaagtttcctcttcaattaaacgatttaggtcttgttgtgttgtatgtaccttttgaggtaagttgaagtcatgtatattcccaccacttttgttgaagagaacagttaacctctctagcaattcatttctgagatcatcatctgccatttgataggtaggacaattcattgctttttgtatattatattcaatggtcgtcgaccattaacttccaaattttgtcaaaaaatgaacgttcgtcgctaatttgacaatataggag

SEQ ID NO: 308471 - DNA, 461 bp, Zea mays
cccactcgtccgccggtgtattttcttgctgagtattcagatgctttcatttcataatatatattttgaaccgccagctgtaatttctgttctcatgttcctttattgacagtcgaggcagaaggcccaagcagatctgctaaaagcggaaaaggatcagcttgcaaatctaacatacatttacgggataccagagacccaacttaagttcataattgaagcttggtcacagattatagaatgcaggcgagtgctgaaatggacatatgcttatggctactatctggatgataaggtcaagagtgatttttttgagtatctgcaaggtgaggctgagtctggtttggaacgtctgcatcagtgcgctgagaaagacttgcacaattttttgactcctgtgaaatttgagagcactgaaacgacgacccctacagtggctgaatttggtgaattccgggtga

SEQ ID NO: 308472 - DNA, 271 bp, Zea mays
gggggggctaagcccccattacattcttgacgaaaaaatacaaaccgggttttcctggctgggggatcatcaaacagcctcacaaggggggggggaatagtttttttaaaagttcataccccgggaaccttgtttcaaagggatcaaccctgtccaaaaggggggttgacatcccagttttcccttaaaaaagggaaaacgggcgaacaccaccatgcatggccccctgggttataaactgaacagttttttccaaaaaaaagcaggcaaa

SEQ ID NO: 308473 - DNA, 421 bp, Zea mays
ccctctcgtccgcggcaagttcggcttcgactgcttcagccacaagaagggagtcctgatccgcggctttggcggggaggcgaacgccaggtacccgccctacacgacggagaagcagaagatcctgaggggcctcatcaacggcagcttcatcgccctcatccttgccctcctgggcttccccagggagaagcgttagatgctccggcctcttgtcggtttcggtacagcctttttagtccctgttcgtcgtcaggtgcacagtatacaccgtcatattctgtcaaatagatgcaatgcaacgactgcgcgccgtgcttgtgttgcaagcgtggataatgcatatatattgtagcattgacatgatgtgcgttattgcattacgtaagggagttgggataataagtgtgatttgtttgtc

SEQ ID NO: 308474 - DNA, 477 bp, Zea mays
aacgcctcaacctcgggctcctcgtggacgaggagccggtcatggagcgggtcgagtccgggagagcgctccgcgagaaggtgttcgaacggctcagcaaagaaagcgccgtgcccaacgacaccgccgcctccgccaacgtagagggagcggctccggacgtcggctgggtctccgacctcatcaactgagggaaactcctgaaactaccagcatcagccgtgcctcctctgaacggtgcttatccatggtaagtgcgtgagggaagcttagaggcgtcactgcacagcagcaggctaggagaactggagaagaaagttcgtgggaaaaccaaaaaaaagatttttatttttctagatttgtactaagatgatccttgtacatattttcctccatgtgtgaatattcccggatggctgttggaggaggggaggcaggaaaggttgatcttgtctggggtttcagatgatggcatgc

SEQ ID NO: 308475 - DNA, 372 bp, Zea mays
cctctcgtccggctgacgattccaagcagcagcgcacataatctccatcttcttggacgctcgcacagctgaattacgcggaatatttacatgctctgctaggaagtgctggggctgcttgattcggaccatctaatcctcttattgcttatacaatatcagctataggagtggcctactacaaaattggggtccgtgatggacatgccgaagggaataagtactgcccattcatcgtgggcatgggtataagaactgtactagccaacttcttgcagcactactactttggtatattgggagagaaaatgaccgaacgtgtcagaaggacgaagtttcctgcaattctgcgcatagaagttcgttggttta

SEQ ID NO: 308476 - DNA, 384 bp, Zea mays
  unsure (1)..(384): unsure at all n locations
ttntttttntcctttttgatatttcccccccgcgaattcaaggaaaactgttttaattcagagggatttcaaagttccacatttgtcgatgatacaatggaaaacaatggaactgggtaactttgaacgtagatacagttaatggccattaagcaaattcttcttcttatgcctttggcagaaagatttgatcctctcaagaccatcaagaagagaagatgaatcaatggcgaaagtgatgcggatccagttttccattcccaaaacactccctggacacaaaatcacagactcttcttttgccagcttgcagcaaaaatcaatatcgtcatgaatcccctccaaaagatacaaatttaatttcaccatgacaaaacatggaac

SEQ ID NO: 308477 - DNA, 518 bp, Zea mays
ttctcgcgtccggatggatgaaaaaaaagacttgtgagcggaagccattgccctgtgatggctgttttgcatggcatcctctgagacatgctcccatggttgccattgaaaatgctgctgagagggatagaacgatgttcccttctttggcttcaataaccaagacagattcaaatggcaatctagagaagtattgtgataatgaacaagcaaaaaggctaaagacagatacaaaagtcaaatttaaacatcaggataatgagccgtcggcatctgaatcattctgtggtgacttgtctgaaaccagcagaccatatctctgcacaggatttgatatctaccttgtttgggaaccatgcacaatgtgtgcaatggcacttgtacaccatagattcaagcgcgtgttctatgctttccccaatcctgtcaccggagcgctcggtggagtctacatgttgcatggggagagaagtctaaatcatcactacaatgtatttagggtttcagtacctgaggca

SEQ ID NO: 308478 - DNA, 388 bp, Zea mays
agggttgggcctctggggttttttttatctctgttccatatgagggggtacatattctatatatagagacgtgatcgccctcaggggcatattcggtatttgcccacataacccttcattagggtttctcaacacttcttacgcttgtctcaagttggttcgtcctgtcatctgggactgggactgggttggggggtacatgctgtcaagctgaccgatcattacacagacaggtgcgcgcttttacgcgcgcagtggcacaccccgaatgcctcgcaagtttccagctcacgagcagctgcaggttcgccaccgactcttctgaaatagccaaccatatgatcctatcacacgttctctcgatcacaagcaattcccagtgccgcct

SEQ ID NO: 308479 - DNA, 457 bp, Zea mays
ttgacgcgtgggcgcgaagcaccctacctttgctagtcctcctacgtctcctcttcgcttaatcttgcggggaggaggaagatgacggtgacgccacggatcacggtgagcgacgggcggctgacggtgcgcggccgtacggtgctcaccggcgtgccggacaacgtgtcggcggcgcacgcggccggggcggggctcgtcgacggggccttcgtcggcgcccacgccggcgaggccaagagccaccacgtcttcaccttcggcacgctccgggactgccggttcctgtgcctgttccggttcaagctgtggtggatgacgcagcggatgggcgtctccggcgcgacgtccctctggagacccagttcatgctcgtcgaggtccctgccagtgacggcgactgcgacggcgacgacccccccgcgtacgtggtgatgctttcgctgctggaggggca

SEQ ID NO: 308480 - DNA, 258 bp, Zea mays
agtatgaatggctctattattgtgaatagcatatatacatagtgtcaacataagacaattttgaatgataacatagaccattaaaaggcaattggtttcatctgtctcgtcctcatcggaatcatcagtctcgtcctcatcagaatcatccatgggctggctgcctctcatgcccaggctcggacgcgacgaagctgatgctgaacccaaacgagatgcagctcagctcctcgttgtcatccccgacaatcttcatgt

SEQ ID NO: 308481 - DNA, 491 bp, Zea mays
aactttctttcacctgcgccgccgagatccatggcggattcgtcctctccccaaacctacgattcaaggacctaggtgtcgtagatggcttcaacacgacgcccgatgccggtagcagcccggacgaagcgccagtgtccaagcatccggttcctcactgtcgcgccgccacccccataggaggaggcgaggatgtcgcactacaagttcaagcactcgaggcacggttctctcggcttcctccctaggaagcgatcctcccaccaccgcgacaaggggtctcggcctctcgggcgagctcgccgcctcctccctctaccgcgtgcggggcctggtcgcgctgagcctcgcgtccaacggcttcgagggccgggtgcccgtcggcctcgccgcgctcggcggcatccttcaggtgctcgacctcggggagaacatgctctccggcgtgcttcaacccgcgcttgtcgcaaccttacagccttttgaactgg

SEQ ID NO: 308482 - DNA, 425 bp, Zea mays
tgttgtcgctccacaccttctctaatctctttgcgtgtttggctccctacaccaccaggccaccaccactgctacccaaccctcgcttccgcaaaccctagccaagggacacggtggccggcgatggacggcgacggaggaggcgctggtgcgctgcaccaccacacgcgctcacccgaggacgtcttccgagatttccgcgcgcgccgagccggcatcgtcaaggcgctcaccacagatgtggataaaggctatcagcagtgcgatccagagaaagagaccgtgcgcatatttcggcggccaaatgagactcgtgaggtgacttacatcagctgcggaaaagggaaagagagctttcagaaccagcactggggatgcaatttgaccttgatggaacagactggaaaagactggtcgtctctagc

SEQ ID NO: 308483 - DNA, 455 bp, Zea mays
attctgtgctcacttttgaaggctgctctttactgctatgcgttgttgattcctgcactcaagctcctatagcctgtgcactcaagctactgtcttcctgggcaactagtgagctccttgacgcatgtcatctgttacctagagatcttactgttgacattgaaggcaaaagaggctttagggagatggcacaaactagcctgcctcctggttttcgtactcacccaaccgatgccgagctcgataactactacttgaagaggaagatcacgcgaaagacacatatcagggatgctatagcagaggctgatctgtacaagaccgctccatgagatctatgtgacaagtactctgtgagaacgaaagatctggaatggtgctgaacatgtcctcgcgacatgaagtatcctaacggatctaggacaaatggagccacaccaaatggatactggaag

SEQ ID NO: 308484 - DNA, 487 bp, Zea mays
  unsure (1)..(487): unsure at all n locations
cccactcgtccggcatcctcgacctctccggcaacgccttctccggcgccataccggcgtctctgttcaccgcctcctccgcgctgcaggagctctacctctcccgcaacgccctctccggagggataccgccgcagctggcgctcctgggcgccctgacgcggctcgacttgcagcacaacgcgctcacggggaccctgccgagcctgggcgcgatgcgctcgctggtccacctcgacgtgagcggcaacgtgctgtcggggtcgccgctccgcgtgccagggacgctgccgccgtcgctctggtccgtcgcggcccggaacaactccttctcagggccgctcagcgccgcggcgctggctgcgctccccgcactgcgggtgctggacctcactggcaacgcggtgtccgcngcggtcccgggcgccgcgttcgcgcacccggcgctgcagcagctgcgcctgggttccaaccagctcgacgcggt

SEQ ID NO: 308485 - DNA, 379 bp, Zea mays
cccatttctatctccacccacatacactgccggccctacgcgacacaggcccggaccggaacccattcccactcctacgacggacaccccgaccgcgaggcgctccgacacctaagcctgcgcccgcctacgtacaacatcaggccgccaaaccgtgcgctgcttgacgcctgttcctaacgcccgtggacaacttccctcaagcctccgacacctatgccgaccccgcctacgtacactctaagccctaagccaccgcctaccaaggctaccacgcccaaggcgtgtccgtccacgtacactccttagacaaagcctgcggcgacccaaggcgaccccgccgactggcaccccctctccgaagtcttccacgcccaag

SEQ ID NO: 308486 - DNA, 304 bp, Zea mays
accagatttccggcgacgcgtccgccgacgcccagggggtcttcgctgcccaggggattagactattggtacctgacacgtagctacttggtttaaatatagaaggagtaggccacagctataataccggcgttggcgccgggttgtatcataatgccacaaatgaaaagtggaaaatctggtgcctggcatactacatagctaaggaacttccaaaagcttaaacatgattactctgaacagcccaactagtgacaggcgtaaaattttggacactgaatggtagggcatggcgcgctgacaa

SEQ ID NO: 308487 - DNA, 440 bp, Zea mays
ccctcgcttccgccggcagcgccggaagctcggcaccgccgcctcgggcgacgacctcctgtcgcgcttcatgggctccatcgacgacgacaagtacctccgggacatcgtcgtaagcttcatgcttgccggacgtgacaccgtcgcctcggctctgacggccttcttcctgctgctctccgaccacccggacgtggccaccgcgatccgggacgaagtctcccgcgtcaccggagacggagacggccacgccgccacctcggagaagctcaaggacatgcactacgtgcacgcggcgctgcacgagtgcatgcggctgttcccgccggtgcagttcgactccaagttcgccgccggagacgacatgctcccggatggcacgttcgtcgccaggggcacccgggtgacctaccacgcgtacgccatgggccgcatggagt

SEQ ID NO: 308488 - DNA, 504 bp, Zea mays
tgatttattttggtaatcttgaggatcacaagcttgaatatgatggtgaggagcttgaggaccaccagctgatagctgatattagcaggagggatgatgctgtgattcatttattcatccgcaaaccagcaaaggtatggacacaacaagttgatggagatactttggttacagttgtcaatccacaggggaaaggcaacctgcaaaatgaagctggctcaatgaactctgcaaactcagttggagttaggcctgcccctgttgaaccaataggtaaccgtgaagcaaagctaacacgggaggcgttgaagatgataaattcaaccatagctggactggagaaagggcacctgcctgtgatgtcagctgaaggttcaggaggtgtttatttcatgcgagatgcaacaggccagaagaatgttgctgtgtttaagcctattgatgaggaacccatggccaaaaacaacccatggggcgttcctgtgttcacagacggcgagggga

SEQ ID NO: 308489 - DNA, 377 bp, Zea mays
cccactcgtccgcgctgggccaccagctttgaccgccgcctgccttaccctgcgctactgctcctccccaccccactcccccgcaggagcggccgcagcggcggcagcggctaggtcgtaccccacatcggcgagcggcggcggcaccgacggaggcaaaggcaagatgttcgggcgcgcgccgaagaagagcgacaacaccaagtactacgagatcctgggggtgcccaagtcggcgtcccatgacgagctgaagaaggcctaccgcaaggctgctatcaagaaccaccccgacaagggcggagaccccgagaagttcaaggagcacgcacaagtctatgagggtttgagtgacccagagaaacgtgagatttatg

SEQ ID NO: 308490 - DNA, 584 bp, Zea mays
  unsure (1)..(584): unsure at all n locations
gggatcccaaacccttcatcatttacatacgagaggcgcttctttaggccttttgagtatgctctgcagcctccaccttggtacagagatgaacatatagctttggataagcctgagcttcctcctggtgtatcaaagatgactgaatatgatggaccacagtgtttcataattcctggaaatcatgactggtttgatgggcttcatacttttatgagatatatatgtcataaaagctggttaggtggatggtttctgcctcagaagaagagttattttgcattgcatcttcccaagggttggtggatatttggtcttgatttatctctccatggcgatgttgatgtgtaccaattcaagttctttgctgatgtttgtcagaataaggttggagagaatgattctgtgattgtagtaacacatgagccaaactggcttcttgattggtactggaatgagactacaggcaagaatgtatcacatttaattcaggaatacctgaaaggaagatgtaaacttcgcatggcaagggatttacaccattttatgaggcactctgncactcgatcagaaaaaataatttt

SEQ ID NO: 308491 - DNA, 119 bp, Zea mays
gcataagtcagaggggcaccggactgtccgggggggcaccttactgtccggtgccacatgaggacaaagcctccaacggtcgaccagctccaatctcaacggataggatgacgtggctg

SEQ ID NO: 308492 - DNA, 578 bp, Zea mays
  unsure (1)..(578): unsure at all n locations
ctctctcgtccgcccacgcgtccgatttaaggataaatatttcccttccgagcctggctcaagtgacattgcagttaccgatgaccttcttaaactgagggcactttgtgcaaaactgaatacaacagctgacactatcaaaacaaaagctaaaggaaaatcaaaggtagtgtctgacaatagttttgatgtcttgtgcaatattgaggagcaattggatgatataatagctgaaatgttgtctgagcttagcaagggtgatggtgtttcgacatttgagttcatcggaagtggagttgttacggctttgctaacctatctgtcatgtggaacatttgggagggaaaaggtgtctgaggcaaacataccaaatttgcgtcatcaggcagtcagacgatacaaagcatttatatcttttgcacttccaaatgataaagatgggaataaaactcctatggcattcctagtccataaactgcaaagtgccctatctttcgtggaacgtttnccaagtgtgctcagccattctggagggcatcgacttntggaggatcccgcctgacaacangtttaggatc

SEQ ID NO: 308493 - DNA, 362 bp, Zea mays
cagaaatcaatggcagcgatgacgtggcgggggcaccggactgtccggggcgccatcgaacagacaggctcccaacggccacttttggtggttggactcaacatatataattcactgcagctcctattaacgtatatgcaagaatatcagatccccctcatataaatgcgacattaccttctgcaactagatatctgaatttattaattaggcatatcatgactatctcaagaatgtctatcctcagtgtgttattaatatccacctcttcttgggaaggaaatattgactgatatgagtccacactaggcctggtcctataaaaaacaatcacacaaattacaatatcagtttttgttttc

SEQ ID NO: 308494 - DNA, 522 bp, Zea mays
cccatttttccgcggacgcgtgggtcgcttctaaccagtgcagctcatattggtctgtgttgtacaaataaactgtatatcatatatagaagggtaactaactagtattctcatgaattggactctctctgtcttgaaaagaatgcaattctagcataataccaagtcaaaccattctggcttgaccaagtacaattgtcaatatttattataccaaataagtgtcattagattcatcatggaatacattttcatggtatatctatttggtgtcataactattgatactattttctataaactcggctatactttatattgtttgactaaggacaaactttagataatagatatgttagtttaatatggtgcatttttgggagtaggctctgcccttccttgtattttctctttgcttaatgaaaggacacagctctcctgcactgcactgctcgagaaataccccctctaatctcatccctttcaggacggagttagtttctactatctactaacctaggc

SEQ ID NO: 308495 - DNA, 505 bp, Zea mays
aaatgaagtcaggcgcacgaagcaaaaagcgacaggagctggtaggcgatgaccatcttcacttcctcgacctcgagtccttgacccgtgtataaaagccggagccggccggcgtcccctctacccacccggagccccgcctccgcctcccgctcctccactccacccccacccatggccaacctcccagacgccgacgccgcggggttcaagctcttcggcaaggtcatacagctgtccaacgactagctcgccgagggcgatggcgatggcgctggcgccccttcgtcgtcgccgccggtccttccttctacttctactcctcctccgcccccgtcgcagcctttgcccctgcagcaggcggtcggggccgggggcaccggcggcgagctcgtgtcgtgcccgtggtgcggtagccgggagactagggatgaaaccggtcggaaacggtatttattcggtaataagttatttagtcttctgcgaataaatagaatatttaatt

SEQ ID NO: 308496 - DNA, 357 bp, Zea mays
gatcataggggccctaatttttgactgcaactaacttaccattgtaactaccgacacgaaagcacgatctgtgtacattaataggcaaaagagcgagatatgaaagctgaaagccaatgccttggaacttatagtgaattaatctgcactctactaaacaggacaaggaacactgacagctgatcatgtaaaatggattaacacgatcacgtacactcttggcgtgcttgccttagtcacggtaccgccaaattatgacttgattaagagagtgcacacgcaggggacatgtaaagatcttatcaatgtgatgcataggaacatagctatgtcagtactctaccagtgcatataaga

SEQ ID NO: 308497 - DNA, 484 bp, Zea mays
cgtttatatacacaaccagatctaccccaaatacacccgtcggcacttccgcttcaagatgcagatctctgtgaaaaccctgactggcaagactatcaccctcgaggtggagtcgtgtgacaccattgacaacgttcaggccaagatccaggacaaggagggcattcccccagaccagcagcggctcatctttgctggcaaacagcttgaggacgggcgcacgcttgctgactacaacatccagaaggagagcaccctccaccttgtgctccgtctcatgggaggcatgcagatctatgcgaaaaccctgaccgggaagactatcacactcgaggtggagtcctatgacaccattgacaacgtcaaggccaagatccaggacaaggagggcattcctgcagaccagcagcggctcatctttgctgggaagcagcttgaggacaggcgcacgcttgtcgactcaacatccagaaggagagcaccc

SEQ ID NO: 308498 - DNA, 387 bp, Zea mays
cctacgcgtccgcccacgcggtccggcgccattggcgagctagtgccaaccagaagagcttgcagttactgagagtgtgtgtgagagagaggatgggtggcagcggcagggctgctctgctgctggccctggtggtggtggccgtgagcctggccgtggagatccaggccgacgccgggtacggatacggcagcgggtacaccccgacgccgactccggccaccccgaccccgaagcccgagaagccccccaccaaggggccgaagccggacaagccgcccaaggagcacaagccgcccaaggagcacgggcccaagccggagaagccgtccaaggagcacaagccgacggccgacacgtacacaccgtgccccaaacccacgccgt

SEQ ID NO: 308499 - DNA, 483 bp, Zea mays
ttctcgcgtccgccgctactgcggggcggaggtgctcgacttccctgccggcgaggacctccccgccgtcctcaaccactccctcgcctccgccttcgacttcatcctcgtccctctggttgatcccaactaccggccggcgcccggctccgttctgcccgtgtcggcgtcggacctcatccttggcccggcccagtggagcaaccacgtcgtcgggaagatcagcgagtggattgatttggactctgaggacgagcggctccgctttgactccgagctcacgctgaagcaggagattgcgtgggcgtctcacgtctcgctgcaggcatgtgttcttcctgcccccaggagatctttttgtggcaattatgccagagtcgtgaatcaaattttgcaaggcctgaccaatatgcatttgtggctcaggttgcctctggagaagtccgagcctatggatgatgatcttgataaaataaagaataa

SEQ ID NO: 308500 - DNA, 397 bp, Zea mays
gtatgggtggcagcggcagggctgctatgctgctggccctggtggtggtggccgtgagcctggccgtggagatccaggccgacgccgagtacggctatccgttgcggatacaccctgactccaacaaatggcaccctgaccccgaagcccgagaagccccccaccaaggggccgaagccggacaagccgaccaaggagcacaagccgcccaaggagcacgggcccaagccggagaagccgatcaaggagcacaagccgacgccgcccacgtacacccctagccccaaacccacgccagcgacgtacactcccaccccgacgcccccgaagccgacgccacccatatacacttacgcccctacgtccaagaaacccacactaaaacccactcccactt

SEQ ID NO: 308501 - DNA, 331 bp, Zea mays
cggattctcccgtcttgggttctttccccctctgtcttgttcggtctgacccggattcggccacggatttgaggttctgatccacagctctcgattcccgaaggagttggtcaagaactggggatcctgagctgaatatgatatcaaatacggtggactaggctattttcggacccggatagaattggtagggatgccagattggagggtgcatgagaatgatggatatattgccggtgaggttgcccacagttacatcaacggacatgaaagtgggcttgaagctcctggtgcaacaagttacatgggatgcattggaaaggacaagttt

SEQ ID NO: 308502 - DNA, 327 bp, Zea mays
gccattcttacggcgcgcctactccgacgccgaccgggggcggtcttacccgctcggcgtgttctacgacactgcaccggcacccaaggctggtgtggtgggctggccgccggtgaggacgtaccggaagaacacgctcgccgactccgcgggcttcagcatgcccgccaagtgcgtcatggtggccgtcaacggcgcgccctatctggggatggtggacctccaggcgtacgccgggtacgagcagctgatccgcgcgctccatgacatgtacttctcccacttgaccatcaagaaggtcgccgacgacgagaggcagctggtgga

SEQ ID NO: 308503 - DNA, 440 bp, Zea mays
gttgtccgcgcgcatagaagctctccgtagcggctgagaaagctagagctcacaggaattgtctcaccaaagaggcttcagtgccaaaggatgccaacggcattggcatctcagctcacactttcaccttacgtgagctcggcactgccaccaggaacttcaggcctgaatgcttcctgggagaaggaggttttggacgtgttcacactggtcgcctccagagcacagggcacgttggtgctataaagcatgtcaacaagtattggctccaatgaaacagataacttcctagagaaggtctcatgctcagcttactacatcagtaaaacttggatcatctgattggctattgtgctgatagagaccatggacctcttgattatgaatctatgccctctggatcacttgaagatcatttgctcgatatacctcttgataaa

SEQ ID NO: 308504 - DNA, 340 bp, Zea mays
gtcatgcgtgcgaatatgcccaaaccctagctggggatctagatggcgaaccctcgcgtgttattcgacatgaccatcggcggcgccccggcaggccggatcgcgatggagctggacgccaacgtggtgcccaagaccgcggagaacttacgcgcgctgtgcacggacgagaagggctggggcaagtccgggaagccgctccactacaagggctcgaccttccaccgcgtcatcccctagttcatgtgccagggcagcgacttgacccgcggcaacggcaccggcggctagtccatctacggccagaagttccccagcgagaagatagtgcgcaagcaca

SEQ ID NO: 308505 - DNA, 294 bp, Zea mays
cccacgtgctcgggcgctcctcaaaggcgtataatgcgtgcttttgctatgccatagcaagtgagggacagcaacaggcccatggaagacagggctcaacggtcagctgcacaaggcatccggtacacgaggaccagagtggcaacgctccgagctcgaaggagcgaggggagacgacagtcacagagagaccagctatccacagtgcactgcctacgaggggaccatatcatgaggcgaagagataggcgctgcctcaaccatggatatgcatagcagcagataggacaatac

SEQ ID NO: 308506 - DNA, 344 bp, Zea mays
actgaggctctaaatgagctcttggaatctgatgacaagccggggtatcattgccatggatggaaatggacctgtctacgtctcactaagtagcacatacctacgtagcgctccacacactgactggcgacctgccactgaagcttggtacaggaaggcaccgtgatgtgcgtgctgcttgactcgctatggtgaaaccccatatctatgtccgctacactgatgtacttgctacccagcttctgatgaatccacctactagtcaggctaatgtcacaggatagatgcttgcctgttctgcagatcttaacactgtaactcgccaatcctacatgcttgatcac

SEQ ID NO: 308507 - DNA, 425 bp, Zea mays
ctcatgtttaccttgatgactgccatgctggggggggtgtttttttcaaagcgcggaggtttcacgccagccttcaccctgctctgggtctcaatgggcctgcttgccgggtactgcactgcacgtcttcacaagacgttcatggtgctggactggtagaaggtcatcatcaagacattcatttgtatactctaaaaatcacctacatgatatgtctgtgacctgaacacgctgctctggagcgtgaaatcatcggggactgtcccattcaccatcatgtgcgcactgagctctactgtgcgctcggacatatattgccaagtcaccttttaggcagctacctcatgtttatgaagcctgacatacaagtccccatgaggacaaacaagagcctacgcctgatacctgtataaccattgtatatg

SEQ ID NO: 308508 - DNA, 229 bp, Zea mays
ccaaccagaagagcttgcagctactgtgagtgtttctgagagagaggatgggtgacagctgcagcaccattctgctgctggccctggtggtggctcacgacagcgttgccatgattatacagatcgacaccctgttcagcttcggggtgcgggtacatcatttcgcccactacatggatcacgaccccgaaccacgaccagcccccgactacggtgcccacgccggcct

SEQ ID NO: 308509 - DNA, 289 bp, Zea mays
ctttctcgtcctgccgctctcaccaagacctccgcgggctaggatcccttagggctgcgcggaggggcgatcgccaccgcttacgattactacctgaacatcgtctgccgtcctgactgggccaccagcaacgagtagctggagaatgccttcgtctacaacggccagatcctctactccaaggtcatcaccaaccatgagacaggaaggcttcgtgactacagactaaggacctaatactccaagaactccattctcaactgtatgtagaacatgaacaataaggagc

SEQ ID NO: 308510 - DNA, 427 bp, Zea mays
gcttgttgagacaaaaacaaggagcatggaagaggaagtaatcaagctgcagaaatgcttacaggacaaggatgggcaactgtgttcatccacaagtagcacggaacagtaccatcatgagttggatgatcttagaacacatctgtcatttactcaagctacaggagaagcaggtgttgcatcagctaagttagctcggatgtagtgcatgtcattgctgaaagagctgaatgagaaggacaactcactcaaagaccatagacttcgagtgaacaatctaggtgagcagcttgatcttctccagaaggatgtacaagcaagggaggtcacacaaatgcaacttaaagatatagttataaggatcgagaccaacatcatggatgaagttgccaaagcttttgaaattgcgatgttgagaggggaaatc

SEQ ID NO: 308511 - DNA, 400 bp, Zea mays
cccattctttcgtccacgcgtccgcccacgcgtacggggagccctggacagcaacagtgaactctaggcctctccgacaactcgacacttgcctcttctcgctctcgccaccgggccagggaagggaccatacgatcggctgcgctatggctggagctgcagctctcaatgagggtatccttccttacgtgttcgagaaaaatgttgctgatcacccacggcatgatctggagataggaccagaggctcctgaagagctcaatcgggcggtagacattcctagaggcagcaaggctaaggctgagttggacaagacatctggtccgatcaaggcggatcgcgatctctacccctatggtgcttacccacataactatggtgctattccacgcacactctg

SEQ ID NO: 308512 - DNA, 315 bp, Zea mays
ctcttgcgttcgaagacgcatgggggcccgagatgagcagttttaacctcgacctgaagaagggcggcaacaggctcaccaagaccgccacttacgggcatttctgacgcgacgacgccgacttgaactgcaaggtggtgaagcccctcaagtgctacaaggaatcgactgaaggctggcagtgtccactgaggacatgaggactaccttgctctggctctgctgatacctgcaagcatcgctgctgctggatgcgcgcgtttgatcaatgactggctgctgctacaatagagatgaacggaaaagaggatgatg

SEQ ID NO: 308513 - DNA, 489 bp, Zea mays
cccacgcgtccggctcaacctggtcgcagcttctccacgctctctcggggctgctttgtccctgtcttcctgtctgcatagcgtgtgcacaaccgcggcctgctcggtcatgggcttctccttcccattccggcgcgcccgcgtggatggctgacgaagctcattcccacgaactacctgctccgaagcagccggcactagaggctgaccgtcccgtccgccgccggtgcgtccacaatttccttgtcgctctctcgctccctcaggaacaggaggatgcgcttctcgaagctccccccccgcgtagcggctccacggcggcggtggcggatgtcgtcacattccgcgtcatgtacatcatcgactgtgtcatgctaggcgtcgcactttcctgcttctttgtatactacgttttttacctctgagcgtggtctgcgagcacttggtgtggcttaccaggaagtgtcagatggtacaaaagagagtcac

SEQ ID NO: 308514 - DNA, 346 bp, Zea mays
ttctttcgtgcggaaggtgaccaatccgttgccgcgggtccttggtgtctcccgttcgaggttaatcttggactccaggacctccccgttggtgctgaatgcgttattgagggagtggctcattcttaaccaggcgaggccgacgactaatcatgggagcttatcatcctagaccgtcatatgtattggttcaaaaacagaatctagcctactcaaactctactaacccgttcctgatccgggaggggaggagaagctaaacctcacgttctcccactcattcttgcaagggtttatgaaactgttgcgtattttcacataagaggagagaccgggctctacacac

SEQ ID NO: 308515 - DNA, 454 bp, Zea mays
  unsure (1)..(454): unsure at all n locations
cggacgcgtgggcggacgcgtgggcggacgcgtgggcggacgcgtgggcggacgcgtgggtcgggcttgccaagcttatggactacaaggatacccatgtcacaactgctgttcgtggaacaattggacacattgctcccgagtacctatccactggcaagtcctctgaaaagaccgatgtttttggatatgggatcatgcttctggagcttattactggacagagggcatttgatctagctcgtcttgcaaatgatgatgatgttatgcttcttgactgggtgaaaggactgctgaaggagaaaaaggtggagatgttggtggacccagatctacagaatgcctacgaggagatcgaggtggagaaccttatccaggtggcactcctctgcacgcagggctccccgttggagcgtccaaagatgtcngaggtggtgaggatgctggaaggtga

SEQ ID NO: 308516 - DNA, 485 bp, Zea mays
ccctcgcgtccgcgcaaccgccgtctcctcgccggcacgcttcgccgccgccgcctctctcctcctcgtctcaaccgccgcctgcacacgcagaaaaggagggagaataagaggatcagcaaaccccaagccctccactcgtcgccccctgctgcaatcgccccacccgcctccgcccgccgccgcttctcctcaccgttctcttccttcccaggccgttcatagcaagcgaccgcagacgttttgacttttgagcgttgttgatacggtcactctttccccagttcctctcccgcgacatctcagttcttcatcaccaaaagatggtcggcggcggcaacgagttccgtttcttcttgtcctgcgacatcagccacccgcttgccttccgtgttctccacgcagaacatatcttgttgaccgaccaaaaagtcccagagctctttgttgagtgcaagctatacatcgatgggatccaatttggg

SEQ ID NO: 308517 - DNA, 472 bp, Zea mays
gcataactcaggcagagatctgtaaggttacgggcctcacggaggtcacactacgcaaagtgtacaaagaactgttggagaattgggatgatttgctcccccctgactatacacctgccacaccaccagagaaagcttttcccatgaccaacatttactcagggcgctcagcgagtggcaaggatatgtatcaggataagatattcgagagtattaagcaaaaatgccctgagcctgcagagcctgaccacatggtcgtggtgaaagaagagggagacaagaaaacagctgctcttggccgtccgcctacaaaacttgaccatcctgagttaggcaaggtgttccggccaccaaatgcccctttctcaacatctcctaaatctgatcgtgacaaaacggaaactagcttacgtggattcaaccttaatgaggtatcatgtgcaatggactctgatagaacagacatcacagt

SEQ ID NO: 308518 - DNA, 431 bp, Zea mays
atgggatgtttggaataataactctcactctatgcctgttgaaatggtggcttgcattgctatagaagcaatctccagaatctttgtgttgcttttgcccacaacctttccgacaatttattgagtatgttgtgaacttaaagtttgatgaagaaccaaactatgcaaagtacatttctctttttgatggcattgttggtccaaacccagacataaggccaatcaatacagatggtgctcaaaagcttgtatttcaggtaggccagaagagaggtcgccttacgatggaggaagatgatgatcagcagcccaaaaagaagattcggatgggaatgcctgcgacccaatggattagtgtttacaatgcaaggcggcctatgaaacagaggtatcactacaatgttgcagactgtaggttagctcagcacatt

SEQ ID NO: 308519 - DNA, 566 bp, Zea mays
caagtccattcaggttactgtatagtgggagcttctagcttttctgtgatattagtacctttcataagcaaccatgtggcctttatcagtttcttaagtgtgaagcttgatttagatctttaaaggtaacttcatagtaacagtattaccttaatatttgctgtgcatataactttcaactgccattggccttgttcacatctctgctgtgcgtaattactttgaactgtcactggccttgttaacatctatgcttgagcactattaaaaaaattctctcctgtagctattttaatatgcgcctgaataagtgctttcaaatctgcaggtttccaaacacatatcttcttgttggatgctgcaatgatgagttgacacataaattcaaaggaagaactgttatgactgaagatgagcgatatgagtcacttcgtcattgcaagtgggttgatgaagtcattccagatgctccatgggtggtgacagaagagttcttggataagcataaacattgattttgtgctcatgattctctgccgtaagcactcgttctaaaaaaacttgat

SEQ ID NO: 308520 - DNA, 371 bp, Zea mays
agagtcatcaaccatttactctcaggcaacatgtcaaccggagcacttggtagaatcagcaaccagtaagatttacaagaagcagcataatagtttgccagcattacaagaaacatcccgccatctaagggcttgttcggttagctctcaatccatgtggattgagcgggattgggaataaccgaacaagccctaaaggtgggagcaaagatgctggaaggcgcttagatgaactccaaacctttcccggcagagccaatagaggccaccgaactataggtaaccttgcagctagcagcatgactgtctttaatgcagtttgcttgcatttcagactctgttgccatgcttcaaaagtggatacactgaac

SEQ ID NO: 308521 - DNA, 141 bp, Zea mays
gcacgggaagcttgtaagctggttattggctaaacaaaacacgcaacagcccactttattttgcatcaggcttcaacagccaataagctccccttgaaattttcctgcagcacacaagaaaaaggccaatccgggaaaaat

SEQ ID NO: 308522 - DNA, 492 bp, Zea mays
cccacgcgtccgcgaaaccctcgccgccgccgccgccgccgccgacgccgaaatcctcgtcgcggcggcgatcactgctcccctctatgatagcggcgcgtgagggcggcggagcgcggcctgtcgctccccggtccgcgtgcccggggcggctctgagagcccagagctcgtctcggttccctgccaagcgcagccgagcaccgcgccggcgccgcgtggcagttcaggccgtagtctgggcgctgttctgctctggttctactggagtgcggttgggatttttcggttcctactacattcgggggcgctgaaaataaggcgtctctctttcatggggcagccagggatggattctgttccagggaaggagaacaacggcattgcccctaacctcaatggggtcgtgtctccagcgaagcagcagctggaggggaaggaagcgttgcggtatgcaaacatcctccggtcgcgcaataagtttgctgacgcg

SEQ ID NO: 308523 - DNA, 465 bp, Zea mays
cccacgcgtccgcccacgcgtccgacagactgtcccgtcttgaagcagaactatcactcttgaaggataaacaacgtcaattgactgagcagtgggagcatgagaaagcagtaatgactaaaattcaatctatcaaagaagagattgacagggtaaatgtggagatacagcaggcagaacgtgagtacgaccttaatcgtgctgctgaactgaaatatggcagtctgaatgccttgcagcgccagcttcaagcgacagagaaggagcttgatgaatatcagagttctgggaaatccatgctaagggaagaggtgacccaagatgatattgcagaaatagtgagcaggtggacaggaattccagtttctaaactaaagcaatctgatagggagaaattgttgtatctggaggatgagctgcacaagcgagttgtcggtcaagatcctgctgtaaaagcagttgcag

SEQ ID NO: 308524 - DNA, 394 bp, Zea mays
accacgcgtccgaccaagcagctggcatggcagcctggcttctagttatggatctagttatggtcacagtcaagggcacactctgtgggggacgcactgggtgggggctatggtagcggactgctaaatgcactgtcattctggagctgcatcaagagggtcaaccaggagggtcacagcgattgggacctccaggattacagtaggagaggccaatggagaggaccaacgaagtgccagactaaacagggttattcagaggctcagtctgatatggtatatgccatggtacatgagaaggtacatgctgatgctgatactggtcttgctgactgctctgaagactgtctagacaattgcttgaacaatggctattgttatgcatatactgatt

SEQ ID NO: 308525 - DNA, 284 bp, Zea mays
gtaggtcaaaaaaattgcgtgtagagtgttttacatgttacaagagtgtgattaaaagacttgtaaaattataattagcagttgatagcaagggaggaggcccgccgccttaaaaaaaacaggggggaataaaactgtgcagcaaaattgggcaaccactcagggccttggttaagggactgcacagggaacttccttgctttcccgaccgggagagtgggcttatacccagcccatttgaccctttgggacacgtaagttcaaggcccaggtttttggttttc

SEQ ID NO: 308526 - DNA, 407 bp, Zea mays
cggagagagagagagaggttttgacgcaacacactttcactgagaaaggatctctatctaccaaggagcagaataaaacccttctctctggtaagtgaataagagaatggcttcagatcggaaacttcacactttcgaggaggtggcaaagcacgaccagaccaaggattgctggctcatcatttctggcaaggtgtatgatgtcacccctttcatggaggatcatcccggaggtgatgagggttttgttatctgcaacagggaaagatgcaaccaatgattttgaagatgttggacacagtgattctgctagagatatgatggaaaaatactacattggtgagattgattcatcaactgtaccactaaaacgtacctacattccacctcagcaggctcagtacaat

SEQ ID NO: 308527 - DNA, 457 bp, Zea mays
ctcgagccgaatcggttcgagattgacatgatagatgacacatttcaaaccagggctcaaggttatcagcaagcttgatcaagtgaaccaggttattggaattgattcgatatctcagtctctgttgccagccatagtagaactagctgaggatcggcactggagagttcgacttgcaatcatagaatatatacccttattggcaagccagttgggtgttagtttttttgatgataagcttggagctctttgcatgcaatggctaaaggacaaggtatactcaatccgtgatgcggctgctaataacatcaaacgcttggcagaagaatttggaccggattgggcaatgcagcacattattccccaggttttggacatggttactgatccacattatctgtatcgaatgacaatcttacaatcaatttctctactagctcctgttctgggctcagag

SEQ ID NO: 308528 - DNA, 353 bp, Zea mays
caaaatttactttgctatgagcttgtccctaatggaagtttggaggcttggcttcatggtcccttgggaatcaactgtcctttggattgggacaccagaatgaagattgcgctggatgctgcgaggggactttcatacctgcatgaagactcacagccctgtgtaatacacagagacttcaaggcatccaacatactgcttgagaacaactttcaagctaaggttgcagattttggtcttgctaagcaagcacctgaaggaagatctaattatttgtctactcgtgtcatggggacatttgggtacgtagctcctgaatatgccatgactgggcacctacttgtaaaagtgat

SEQ ID NO: 308529 - DNA, 472 bp, Zea mays
aaataaataatcagctaactactaattattgcattcacattaccattccactcaccaacaaaatgcttaaatttatttggaaattctgtgccttatgattcatgaggttaaaaaactttttggttgaaagcttgaaagtgctcacaaaaatgggaaaaaaataaaaaacattttgaatggccaagttttctcagttttcatcgtccttcacaaagatcttcagagaaaaccacggtcctagaaatgttgtcattgtcaaaggcacttagaccagagtaaggacctgaagagaacatcgaagacgttccatcaaattcaaaagtgctagaggactgtcttagggttgggtcgtgcattggatgaggctaacacagaatcatggtatttctgtgacgcgctgcaccattttaaggtgattgtaccacttcacccattgtaggtcgttggtttgctttcggagcaacacaggccg

SEQ ID NO: 308530 - DNA, 405 bp, Zea mays
atcctctaaaggctgtactctcttttatccctcaaaaaccaaaaccctaatggcagagcgcggaggtggcgaccgtggcagcgaccgtggcggtttcggacgcggctttggtgggcgagggcgcggaggtgacaggggccgaggccggcgccgaggtccccgccgcgaggaagaggagaaatgggtcccagtgaccaaactgggccgcctggtgaaggagggaagaatccgaagccttgaacagatctacctccactcgctcccgatcaaggagcaccagatcatcgacacgctcgtgggtcccaccctcaaggacgaggtgatgaagatcacgccggtccagaagcagacccgggccgggcagaggacccggttcaggccttcgtcgtcgtcggagacaacaac

SEQ ID NO: 308531 - DNA, 484 bp, Zea mays
aaacaggtagaaatctatggtactcaactgcagtcaattaaaacttggaaacaatcaaaatgcatacagagacataccgtctatcaaaaccaaaagtaaagcacagaaccaacaaagtatgtaaagtaatgaagttcctaaaacatccataaagcaaaactagcaaatcaagcatccaccctttcctcctccaagattagagtctttcctgttggttttgccagtagatctgtgtactcttggaatggagatttggagaagcgagtctccttccagaattctggtgtcaggaatccataggttttcatcaagcaatcaaaagtagccttaacgaagttgccgagggtcttggtggatcctctggaggaggtgaaaacatcatcaatccccgcgaactgcagcaccttcttgggaaccctagccgccacgatccccgaacctctcggcgcgggaaccatcctaacggtaacggagccgcacttcc

SEQ ID NO: 308532 - DNA, 434 bp, Zea mays
gttcatgagaacccacttgagtgattgggagaacaaagtcattaacatccaagagaaaactaaagagatggcatttctctcttccctgaagcagatttctggtatggaatccagctcaatttctcaacccttcatgaccgagttttttaaactagttttaggaactctatctttgcctattaaccttcctggcacaaattattgccgtggattgcaggcaagaaagagtattatcagcattcttagtcagctgctagaggaaaggaaattatctcaagaagcccacgtagacatgcttggttgcttgatgaatagagaggaaaatcgatacaaactaactgatgaggaaatcattgatctaattattacaattatgtattctggttatgaaactgtttcaactacatcaatgatggccttaaagtatctccatg

SEQ ID NO: 308533 - DNA, 500 bp, Zea mays
  unsure (1)..(500): unsure at all n locations
agaaagaagctaatttcattgatttatctactttgttagaacttagaatatattatcatacaaaaaataaaactcccctactattccaatatttcattactgtacatgcacaaatcctagttagtaaggcgagacccttatgtgcagtccatttggtgccacaactctagggaatttcattagtttacctcctcctacttcttcccacctgtatctagttacaanagtagtgtaagaaagtggaaatttctgctatccccaactccttcccaggacattgtctggtccctcctccaaatataaagaagtggctttgtgactctagactgttacccagccatctcatgggttgaatgctgntggatcatgatacaaaatggatcatatttgatctctctcgtatatacatatatcctccaccctttaggaatcaaatagccgtttagttccatgtcatgagttgtttttcttagaaccccattaactgttgtagctaatct

SEQ ID NO: 308534 - DNA, 325 bp, Zea mays
ggttgttctgatgactctcgagccaaaagggtccgcgtgcttgagctctctcgcagattgaagcaccgtggccctgactggagtgggctccatcaacatggtgactgctttttggcacatcaacggttagccatagttgatcctgcttctggggatcaacctctctttaacgaggacaaatccgtcattgttacggtaaatggagagatttacaaccatgaagagctcaggaaacagctgcctaatcacaacttccgaactggaagtgattgtgatgttattgcacacctgtacgaggaacatggagaagactttgtggacatgc

SEQ ID NO: 308535 - DNA, 479 bp, Zea mays
  unsure (1)..(479): unsure at all n locations
gaactgataaaggaaacacttttattaagacttcaaatcacagcattcaagataatacaatacgcaacactttttagaaagccttataactataaactataaaagctttgcccagatgaaattacactgcaggcaaatttttcattcacctttagcttagttatcttcattgtcgcccaaattattctttgtcacatctttgtattagccctggatggcaacaccaaggggagcagcatccataggtattatcttctcaatttctacacccttgttgttctggttttcataggctgaaatgtgcactccaagtgctgctctaccagagggatcaaggtttgtagaccaagcagcatcccactcaacagctttggctgtgctacatgcaacacttgctcctncaggaacagtgagcctagctgagttctgagggaagaacctctcaagatcattctgtagaatatgcttcttggttttgg

SEQ ID NO: 308536 - DNA, 516 bp, Zea mays
caacaccaacagacactgctgcaacagcagcaacagtttattcatggcgcacactttattcaccataaccctgctattcctgcatattatcctgtatatccttcccagcaacatccccagcatccccaggtttactatgtgaccgcgagacaggcgcaggcttacaacctgcctctgcagcaggctaatatgggcgagtctgcagggaacatcgcttctagccggccacaaactccaccaaatccttctacattggttcaacagcctgctacttacaaccctattagaaatgctcccatgcctaaaactgaaatgaatgcttacagagctgcaactgcaggcaaccctcaactagttcaagttcctacaagccaacatcagcagcaatatgtcacctactcacagattcaccatccttctcagtccatggctcccaattctgctgcccctgcgaattatgcttttgattatgcggatcctgctcatgctcaaatatactactctcaacctatggca

SEQ ID NO: 308537 - DNA, 302 bp, Zea mays
gtcgaatgaaactcttgactccttcaaatcttgatgatctgttttcagctgagagttcttctcctagatatgctgatccagcattggcttcagctgtgttttctccaactcacaaatcagctgtcttcaatcaatgttcagcagcaccagcaaagcttgttggcaccggggaatactaatgttgcttctaaaaatgttgagcatcctttgttgcaggcctcattggtaatgtctccccgaaacatggaacctatttctccaatgggatctaggatttctatgctagcgcaacgtgagaagca

SEQ ID NO: 308538 - DNA, 443 bp, Zea mays
tgtttcccggatgcttagtttacataagggttatgtttcctcttgtcagtatgttccagatgaagatactcatttaattactggttctggtgatcagacatgtgttttatgggatattactacaggccttgaaacctttatgtttggaggagagtttcagtctggacatactgcagatgtacttagtatctccattaatggatccaactcaagaatgtttgtatctggttcttgtgatgcaactgctcgattgtgggatactcgtgtggcaagtcgagcagtgcggacatttcatgggcatgagggagatgttaatgcagtcaaattctttccagacggtaatagatttggaacaggctcagatgatggaacctgcagattatttgacattaggactggacaccaacttcaagtttattatcagcagcacagtgacaatgaca

SEQ ID NO: 308539 - DNA, 421 bp, Zea mays
ctctttctctagtcctgttatttctcagcgcgtaaagcatggctttgttggtggagaaaaccacgagtggtcgcgagtacaaggtcaaggacctttcccaggccgacttcggccgcctcgagatcgagctggccgaggttgagatgcccggcctcatggcctgtcggaccgagttcggcccctcccagcccttcaagggggcccgcatcaccggctccctccacatgaccatccagaccgccgttctcattgagaccctcaccgcccttggcgccgaggtccgctggtgctcctgcaacatcttctccacccaggaccacgccgccgccgctattgcccgcgacagtgccgccgtcttcgcctggaagggtgagaccctccaggagtactggtggtgcaccgagcgcgccctcgactgggg

SEQ ID NO: 308540 - DNA, 466 bp, Zea mays
gaaacacaaattttagtatttaataaagcaaaatgcacacatcccccaaacaaaacaagccttattcaacccaaattggtttcatatcacagaaaccaacaggatgccgccttcctccttactggtcccacccactcgaacaaaagttctacagaaataaaaatggctacaattcttctaccacaaatctgaaaagtctaacaccaaaaatcaaaaaaaggaaaattaaacaatcaaatccgattgataaaaccgatttttgtctttccctcactcacttttcagttgatcatctcaatcacttagtaccttgtagtgagcaggcttgtatggaccctcaacaggcacactgatgtaatcagcctgggacttgctaagctgggtcagcttagctccaagtttgcccaggtgaagtgcagccaccttctcataaggtgcttgggcaaacgtaaaccttctctcgtac

SEQ ID NO: 308541 - DNA, 502 bp, Zea mays
cagtcaccgaaacaactatggatacaatcaagtccttcaagggctacggcaaagttgacgagttggagcagcaagcctatcagaagaagacacgtaagcgcctcataataatcacagtctcttcaatcgttctaattgcggtgatcatcgccgctatcgcaggggttgtcatacacaagcgcaacacctcatcatctccctcatccgactcgcccccgcaaactgagttaaccccggccgcgtcactcaaagcggtttgcgacgtgactcagtaccctaactcgtgcttctccgctatctcctcgttaccggattccaacactactgatccggagctcctcttcaagctctctctccgcgtcgccattgacgaattatccaagctctcgagctttccttcgaagctccgcgctaatgcggaacacgacgcacgtctccagaggcgatcgatgtctgcgggaacgtttttggcgacgcgctggaccggctcaacgactccatc

SEQ ID NO: 308542 - DNA, 470 bp, Zea mays
gtaggtcaaaaaaatgcgtgtagagtgtaatacatgttacaagagtgtgattaaaagacatgtaaaaatatgattagcagttgatatctttctatgaggccggtagtattaaaaatcacaaggtggaatcaaactgcacagcagcattgggcaaccactcagggccttggataaaggactgcacagtgaacttccctgcctccccgtccgtgagagtgggcttatacccagcccatttgaccttctgtgacacgtcagctccaggcccagtattctggtattcagcatagaagatggtacttacgggttccacattggggacccaactcatccaccccacaggctttaagaatgacccaattcagattgcatgatcacaggtggtggagaaatctttccatggcctaccaaggtatgtgggagctgtgagattgttttccaagggagtgaattttgatttctggatatga

SEQ ID NO: 308543 - DNA, 485 bp, Zea mays
gggctcttcagtaactgaaaagcttcaagaggaacttgaagagtacagggacattatcaagtgcagtatctgccaagacagggcaaaagaggtggtaattacaaaatgctaccacttgttctgctactcatgtatccagaaagttgccgggagtaggcatcgcaagtgtccacaatgttctacaagctttggggctaacgatgttaagtccgtttatttataactagaaacttggttctctccgacatgtcaagaagaggccggtgttttcttgaaaatcatctggtgtatggatacctacataggggtttcaattgtatgcttagtgccaactgttgagataaggaacattggcagcaatcaatgagtgcatgtctcccatttggaccaaaaatgattattttttgctggtacttaatcttagtaccacccgttcgcatttttgaaatctgggatgatgtttagcttaacattatagatagaac

SEQ ID NO: 308544 - DNA, 352 bp, Zea mays
cagcactggacactggttgtggggttgcaagctggggagcctacttgctaaagagaaatgtgctggctatgtccttcgctccaaaggacaaccatgaagcacaagttcagtttgctctagaacgaggggtgcctgctgttattggtgtccttggcaccatccaccttccatacccatcaagagccttcgatatggcccagtgttctcgatgtctaataccatggacctcaaatgagggcatgtatctaatggaagttgaccgagtcttaaggcctggtggatactggattttgtctggccccccaattaattggaaaacatactaccaaacatggaagcgatccaaggaaga

SEQ ID NO: 308545 - DNA, 421 bp, Zea mays
  unsure (1)..(421): unsure at all n locations
gacccttaaaatgacactgtccttaataaaaaagaaacgaaacttatcgtccaacattaggttctccagtcaaatccagattcaattctaaagaccccagaaataaactaaacactgtccttcaaatgacactgtataaaatgtctaacagacccttcaccagggtccaatgtgataaagaagctctactctttcttggtgtagtgtcgcacaacaaaggccaagcccaagatcaggagagggaccaggaactgcaaaatcttgatcacaaattctggagtcttgtcaggattgtactgagcttgctgaggtggaatgtaggtacgttttaagtggtaccagntgatgaaatcaatctcacccaatgtaggatttttccatcatatctctagcagaatcactggtgtccaacatcttcaaa

SEQ ID NO: 308546 - DNA, 440 bp, Zea mays
  unsure (1)..(440): unsure at all n locations
aacgatttggctacatacatatcaattaaccagaatgttcttcacaagtatgccaacgaggatgtgtcactaggatcctggtttattggacttgatgtggagcatatagatgatcgaagactttgttgtggcactcctcctgattgtgagtggaaggcccaagcagggaacatttgtgttgcatcatttgattggagctgcagtggaatttgcaggtctgctgagaggattaaagaggtacataggaggtgtggagagggtgagaatgctttgtggagtgcctctttctagggggcaaaaaagtgacagtggagttcttcctaactcaggaagattaatactaaggcaatatgagtcaaccctgcaagattttctatttttctttttctttttctatagctttgngcagtgtagagaaaaatgtcattttacacgagaaa

SEQ ID NO: 308547 - DNA, 369 bp, Zea mays
gtcacttaatattgacatgtcatcaatggcgtttattgaaccacttcctgtaattgactttgttgctcaaattttgggaaaagatgtgctctcaaagccattgtcagatgcagatcgtgtcaagattaagaaggccttaagaggtgtgaaagttgaggttacacatagaggaagttttcgaaggaagtacaggattacaggattgacatcacagcctacaagggagcttaatttccccgtcgatgagaaaatgaacatgaaatcagtagttgattactttcaagaaatgtatggatatacaatcatatattctcatctaccctgccttcaagtaggaagccaaaagaaggtgaactatttgcctatgga

SEQ ID NO: 308548 - DNA, 389 bp, Zea mays
  unsure (1)..(389): unsure at all n locations
ctctttcttcttcttctcttaaaagagcctttgctttttctttaggcctttccgaattaagtacttgtttcattttctctcgaagcaagaaaaatgttcatcgagagtttcaaggttgagagtcctaacgtgaagtacacagagactgagattcagtccgtgtacaactatgaaaccactgaacttgttcacgagaacaagaatggcacttatcagtgnggttgtcaagcccaaaactgtcaaatatgaatttaaaaccaacacccatgtccctaaactaggggtaatgctgggtgggggttgnggaaaacaatggctcaaccctcaccgggtggtgttattgctaaccggcaggngtatttcatgggcaacaaaggacaagattcaac

SEQ ID NO: 308549 - DNA, 373 bp, Zea mays
cctttctctctcttctttttactctctctctgtctctctctacgctttctcgttcgagatccctcaagggatccactaactgaaggagaaatggggttgacattcaccaagcttttcagccggcttttcgccaagaaggaaatgcgaattctgatggtgggtctcgatgcagctggtaagaccaccatcctgtacaagctcaaacttggagagatcgttaccacaattcccaccattgggttcaatgtggagactgtggaatacaagaacattagtttcactgtctgggatgttggtggccaggacaagaattcgtcccttgtggaggcactacttccaaaacacacagggtctcatttttgtggttgacagc

SEQ ID NO: 308550 - DNA, 456 bp, Zea mays
cttctagtcaagcattaacattgcagcaaaatgcagaagctaacaaaaagcagtcgcaatgggctgggcctgggcctgtagcacaaacagtggccagcactcttgcagctgcacctgctgcagatgtgccttcatccacacctgctaattctgccttaccagcaataaaccagaatatggctcttgtcaaatgtaattggacagaacatatatctcctgaaggcttcaagtattactataatagtgtcactggtgaaagtcggtgggagaaacctgaggagttgacattacatgaacagcaaaagcaacagcaaaggccatctgttcagcagtctcaaactcagtcacaaccttcaatactacctgcccagcaagttccacaaatccaacaggttcagcctcaaagtcatctccaggacaagttctccaccagcaacaaatacagcagccttcttt

SEQ ID NO: 308551 - DNA, 483 bp, Zea mays
  unsure (1)..(483): unsure at all n locations
gcttgcaaagagttcaggcttgtgtccaccaagtctctcaatggttgccccttcatatattcctccgcccaatcttcaaataagccattctccacggcaaagggaattcttccagtaattaattcgaacaatagtactccaaagctgtaaacattggcctttatatatgctgaaggagtttccaacagctgtggggcttcagaacccttctttgtggagactatatcagtccagaaactaaggtctgataatttagctgcgtaatcttcagtcaggtatatagaggaagatagtatgtttctgtaggcaatgggtggtgtcagctgatgcaagtgctccagacagtaggctattcccatagctatcctcattctcattccccagtctagttgttctgcttctctaactgcaagacgtacatgaatgttgtcaacacanaacactaattgccaagaaagattttcatttatgtttctacaacac

SEQ ID NO: 308552 - DNA, 456 bp, Zea mays
  unsure (1)..(456): unsure at all n locations
aacgacccctcttctgtgcccacttccaaatcttctcctctcgctatgggttgcggctcctcccttccagataggggctcaaggcagttgggtcgacccaattcagagaatggtggagggcaggacgccaagaatctgagggtcaagcttgctctcttaggtgattctggtgttggtaaaagctgtattgttctacgatttgttcgtggtcagtttgatccaacatctaaggtaactgttggagcttcttttttgtcgcaaacaatagctctgcaagactctacaacagtcaagtttgaaatatgggatactgctggtcaagagaggtatgctgcgttagcaccgctatattaccgtggtgcagcagttgcagttattgtttatgatataacaagcccagaatctttcagcnaagcacagtactgggttaaggagctacaaaaacatggaagccct

SEQ ID NO: 308553 - DNA, 449 bp, Zea mays
ggaaatcataacagacatgactcgtatttgggggtctcacaaagcatagcctaatacgtatcatctatctgacatgacctccaggatattattattacagggtgataaaaagaccatagaaattatctaatcacaatttacataaacccaatccatacattatatagttttgaaggatccaaagctaatgcagatcccttcccttactgaactgctatctggctacatcaactaactgaggggcagagggagtcttttggcaatttcctcaaacaggtcatttatattatctgctggctttgcagatgtctctatgaaaaacataccattcttctctgcatagtcagtgccatcctggacagcaacttcccgcttctaagaagatcagctttattaccgaccagtgccatcactatatcagggcttccatgtttttggagctccttaac

SEQ ID NO: 308554 - DNA, 351 bp, Zea mays
  unsure (1)..(351): unsure at all n locations
ggtgatatcatcactgactgcttccctgaggtttgatggagccttgaatgttgatgtcaatgaattccagaccaaccttgtgccataccccaggattcattttatgctttcatcttatgctcctgtaatttcagccgagaaggctcaccatgagcagctatcagttggtgaaatcaccaacagtgcattcgagccatcatctatgatggccaagtgtgatccccgccatggcaaatacatggcgtgctgtctcatgtacagaggtgaccgtagtgccttaaagatgttaatgcaggctgtntggaattatcaagaccaagcgcactattcaaatttgttgaactggtgccc

SEQ ID NO: 308555 - DNA, 395 bp, Zea mays
aaaactctaaatttcaccaagcaatttcaaataaatgttttcaccacacttcacataaagctccaaaagtaccggaacaaggcaagttccacggaaagtacaacgatacacagagcacgagaagaaaaacaacacagaaagtaacataatagtgcaaacttctaatcataatcctctccttcatcaccatcttcagttgcctctgcaccaacttcctcataatccttctccagggcagcaagatcttcacgggcctcagagaactccccctcttccataccctcaccaacataccaatgaacgaacgccctcttggcatacttgaggtcaaaattttgtggtcgatgcgagaagaagacctcaacccactgggtggaattgagaatcatgcacac

SEQ ID NO: 308556 - DNA, 477 bp, Zea mays
ggaaaaagggaaatatggcatttgcaggaacaactcataagtgcatggcttgtgacaaaacagtttatctggttgataagttgacagcagataaccgagtgtaccataaggcttgcttcagatgccaccactgcaaaggaacactcaagcttagcaactataactcttttgagggggttctttactgcaggccacacttcgaccaactgttcaaaagaactggtagtcttgacaaaagcttcgaagggacaccaaaaattgctaaaccagaaaaaaccggggaagagaaacctgcagcaaccaaagtctcaagtatgtttggtggaactagagataaatgtgccggttgtcaaaaaacagtgtatcccactgaaaaggttactgtgaatggaactccttatcacaagagttgtttcaaatgcactcatggagggtgtgttattagtccctccaactacattgcacacgagggcaaac

SEQ ID NO: 308557 - DNA, 343 bp, Zea mays
  unsure (1)..(343): unsure at all n locations
ggtaaaccctgatgatgttgtgtttgggggatgggatatcagtaactggaacctggcacatgccatggccagggccaaggtgtttgatattgacctgcagaaacagttgaggccttacatggaatctatggttccactccccggaatctatgaccccgatttcattgctgtcaaccaaggagaccgggccaacaacgtgatcaagggcgacaaagaaagaacaagttcaacaaatcatcaaagacattaggggggttaaggaaagcactaaggttgacaaggtnggttgtcctgtggacagccaacacagagaggtacagtaacctagttgtgggactaaacg

SEQ ID NO: 308558 - DNA, 202 bp, Zea mays
gaagcactgttatctatgttcagattcaccttcggtgggtaagaaaaacagaatgaagcattaccagcctgtatatcaaggcggtgaacattgaaaatatctttcatggagtgtgaattatatgctaatatatatgacccatatgcatctttagccataacatttaaaatgataaatgccagtcaccaacttttttcagttg

SEQ ID NO: 308559 - DNA, 418 bp, Zea mays
tgagagcctgcaattgcaagagtgccacagaattacccaaattgggctctttggtgtcttttttaactgtggtgcaaaattgaaggttcttactctgattagctgctatgggatcaaagatctcaatatggatttgccagcaatatctccttctgaatcaatttggtcattaacaatccatgactgccctggatttggcaatgctaaccttgccttacttggaaagctgtgtcctcggcttcagcatgttgaattgagtggacttcagggagtaacagatgcagggtttcttccattgctggagagctctgaggctggtctggttaaagttaatctaaatgggctgtgtaaatctttcagacagagtagttttgtccatggtcaacttacatggatggacttccgaggtgctaagcct

SEQ ID NO: 308560 - DNA, 374 bp, Zea mays
ggacaggggactacaattttttatttattattttttcataaaataaacataacagtacaaagggcatatcttagtatcattacatgatatagaaggttacaatgacaagttcaaaaaaaaaaaatgaagcttaaaaagctagggctttggtagtaaaaaacaacccatcccaacgggaaaagattgtgatgacagaccaggataacttgctgccatgaccaacgcccctgaggacaaaggcttcataactctgaagaactgccaaagtaaaccaagacaacaccacataaactggaacttcaacatgccccttgactaaaacttaagacccaaaaatcacgtaaagaacataagcttaaatacgtgaaaaattg

SEQ ID NO: 308561 - DNA, 403 bp, Zea mays
tgtaaataaagcccaccattttccatttccatgtatctgtgtactttctattcttagaagaaagaagaaaactcacttttgtagagttcgagttcttattctcatggctattaccggcgaaattttccgacagagcataaaggaaatgcttgaggagtctccttccggtgcgccggaacttcaagttctcgccgttgacgacagcctcgttgatcggaaggtgatagagcggttgttgaggatttcttcctgcaaagtgacggttgtggagagtggaacgcgtgctcttcagtatctggggttggacggagggaacagttctttcgggtttgataggttaaggttaatctcataatgacggattattccatgccggggatgactggatatgaattactcaaga

SEQ ID NO: 308562 - DNA, 445 bp, Zea mays
ggagtccactctgtccaaccccgcaaaatcacccctcatcgacaatttcaaaggcctcggtgtcaatcttgttttaggagatctatacgatcaccaaagtttggtgagtgctataaagcaggtcgatgtggtaatttctactgtaggacacctgcagctagctgatcaagataagatcatttctgcaattaaagaagcaggaaatgttaagaagttctatccatctgagtttggaaatgatgtggaccggactcatgcagttgaaccagccaagtctgcatttgcaacaaaggccaaagttcgccgagctattgaggctgaaggaattcccttcacttatgtgtcaagcaacttctttgctggttacttcctgcccaacttgtcacagcctggagccacagctgcccccagagacagagttattatcctaggagatggaaacccc

SEQ ID NO: 308563 - DNA, 512 bp, Zea mays
gcatgtaataaaggtatcatagcatatagcatagcataggtatttcatacattggtcttttgaggagcacatgcagcaattcagtcttactacatgattctctttatttagaaaacaaagttttaccaattaaacaaacttatcagctaggctttgcaccttagacaaactgattaaggtactcatccacagtgatgtatttcacatcaggatatagagctgaagcttccactccaaaagaagactcaatttcaaagttagtatgatccccctttacataagaagagtggttaattgacaggatcacattcacgggtggtgcggactcttcaatttgcttcaggagttgttcttctggaacatagattctttcaagagttttaccaatctttccctcccagagagtaacaagctcattaaacgacaaggtattagctggtggtctaatgtagagatttttgctcaaggttcttggatcatccacagcaatgattgataagttccaatatcct

SEQ ID NO: 308564 - DNA, 487 bp, Zea mays
gtgctggggccgcattgctcacttggaacaggtgatgtgggaggacagccattgttggtttcatttctcgttatcctgatgctgagcttagaactgccaagaatgggcaatttgtgaaggtttctggggttgttacctgtggtaatgttccattggagtcctcctttcaaaaagttcctagatgtgtgtatacttctacaagcttgtttgaatatcgagggtgggattcaaaagcagccaacccgaagcatcgccattttacatggggactaagagcagctgagaggcatgtggtggacttctacatttctgatttccaatctggattgagagcattggttaaaacaggctatggtgcaagggtgactccttatgttgatgattctattgtaattgatgttaaccctgacaataaagatatgtccccagagtttcttcggtggttgcgagagagaaatctttcaagtgatgatcgactgatgcaatt

SEQ ID NO: 308565 - DNA, 293 bp, Zea mays
  unsure (1)..(293): unsure at all n locations
acttgacaggttgcagagggtgctaaaactgctggtgcatcccgggttattggcatagatattgacagcaagaagtttgatgtagcaaaaaactttggagtcactgagtttataaatccaaatgaacatgataaaccaatccagcaggtcataattgatcgcacagatggtggagttgattatagctttgagtgtattggaaatgtctccgtgatgagagctgcgttggaatgctgccacaaggtaaatgctgctgctgttatattgacacanattttggaacattattacac

SEQ ID NO: 308566 - DNA, 434 bp, Zea mays
ctttcttctctccaccattgttgggttgtgtttgcgtgtctctccgtaaattgccttcgactgtgacaacacgcaccgatcgccatgaacatcttcaccaagaaacccaccgccaaagaggctcttcgtgagagtaaacgtgaaatgacaaacgccagtagaggtatagagaaggaaattggagctctacaatcggaagaaaaaaagcttgttgctgagataaagagaactgctaagacgggaaatgaggcagcaactaaaattctagctcgccagttgatcaggcttaggcaacaaattgctaatcttcaaggtagtcgagctcagatgagaggcatagcaactcacactcaggccatgcatgcacattcttctgttgctgttggcttgaaaggtgctactaaggcaatggcagctatgaataagaaaatgga

SEQ ID NO: 308567 - DNA, 428 bp, Zea mays
ctcagaaattttggatatatcattattcatacataataatttcaaggaagtatatacacactaaacttgtgaaatcccaagaaaacatagctcaggaaagaattttagtttaaaacaatgagttccagaatcacataatcccaagcaaaatttacgggtttctaagagccgccaaacgcttctcaagttcttcaatgcccgagctgctatcattttcagcattctttgttgcgactctccctttgggagctgctgataactgtgaggcaacatctacaccaatttcatcgacacctggtttgtcagctcttcagtctcctcttcagcttcatcattatccaaggcatcatctatggcatctgacatcatttcagtagtcatatccatctgcgctgattgtttctggaaagcttgtataattttagctt

SEQ ID NO: 308568 - DNA, 497 bp, Zea mays
catttactgaggttctttctcagatataccgcatagtgagcaagagagcagttgaggccggcaacaatgccagttcttctgctgtcccgtccaaaggacagacaataaatgtgaaagacgattcctcagttttgaagaaaattggatgctgctcaaactagatgcatcatctatggcagttggtttttgtagactgtttcatcttgtaaatgcctacactggaatcgtgatatcatgtagaataaggctagtcttgcatattgttttgaatttacaatttacaagcatcatccatacataggattatgtttccgtgaaacggtcattctaaagacgtgcttgaaacaaataggtctacatcaaagttcatatagcttaagttttatttgaaggattttgatatttgctatgctctaattatggtgcagctagtaacaattcgaacgtctgctttaaattgaagtttcaatgtatggagcttgtgtttagtttcgttg

SEQ ID NO: 308569 - DNA, 490 bp, Zea mays
gtttcagttgttccttcatggcaattaattccagctgaaggaaaagttgaggaatgtccactggaggagcttggtcttgaaaatgaatcagaaaaaccaagcaatgcattactaggacgggcatggtcgccgggttggagaaatgctgacaaggctttaacagaattcgtggagcagcatctactagactactccaagaaaaggctgaaggttggtggagactccacctcactcttgtccccacatcttcattttggagaattgagtgtgaggaaagtttttcaagtgacacgtatgaagcaaatattatggacaaatgaaggcaacagtgctggtgaagagagtgtaaatcttttcctcagggccattggacttagggagtactcacgctatctttgtttcaactttcctttcacccatgagaaagcacttctgggacacttaaagttttttccttggaatcctgatgctgatatctttaagaattgga

SEQ ID NO: 308570 - DNA, 520 bp, Zea mays
atggtgccttgtgaattagaatggctctccttggatcaaacataacaagcgaggttggactccgtttgctcctttgtcctcttggttccaacgttgtaattagaacagcatgctgtactgtgggagttgctttgcctgtgtactctacgttcaaggcaatagaaagtaaagatcaagatgctcagcataagtgtcttctctactgggcagcctatggttcattcagtctcgctgaagtgttcacggacaagcttatttcttggtgtcctatctactatcacctgaagtttgcatttcttgtttggcttcaacttccatctaccagtggtgcaaaacaaatatatgcaaaccacttgcgccccttcttgttgaggcatcaagcacgagttgatcaagtcttgggttttgcatattgtgaagtgataaaactcgtgagttcataccaagcagagatccagtttgtcaggagcatggtagtaaagataactggatcagcggatcaaatgttgagaggcggtgc

SEQ ID NO: 308571 - DNA, 564 bp, Zea mays
atcaaatcatggccaccgccacatcccaaacccttcgattccaatctccgtcactttctctctcctccaaaatccctctctccgcattctccgtctcgctccgcccgcaacgccgcgcctcccgccacctcgtgctggtcgtctccgccggcctcgacgcaaagcccacggtgctcgtcgcggagaagctcggcgacgcggggctgaagctgctcaaggacttcgccaacgtcgactgctcctacaacctcagcaccgaggagctctgcaccaagatctcgctctgcgacgccctcatcgtgcgcagcggcaccaaggtctcgcgcgaggtcttcgagtcctctgccggcaggttgaaggtcgtcggaagagccggcgtcggaatcgataatgtggatctggctgccgccaccgagcacgggtgcttggtcgtcaatgcgcccaccgccaacaccgtcgccgccgctgagcacggaatcgcgctccttgcagccatggccaggaacgtcgctcaggccgatgcgtccgtcaaagccggaaatggcagaggaataatatgtggag

SEQ ID NO: 308572 - DNA, 499 bp, Zea mays
caataaaacaggcacattattccttttattatccccccaaattactgctacacgttggatgataatgcatcaaaaccgggcacatctggcaaccatgcccaatccaaattacaaaacaaaagggaaaaaaaataataggagcaaccatttcatcttacaatttaaggaaaacgaactcttccacagcaggaatgtctccaatcttcttcaaagattccttgcttaggttgttcgtccactccaattgccataacagcttgcttgcgtggagcgatccttcccacactcatgaagctgacattcacgttctcctcacccaaaacgctcccaacctttccgatcatgcctgggttgatctacctgcctacacagtatgatactaccttccaaactcacatcaacatgaaaagacccaacctttggtagatgggggatgccatctttcacccgaccctcaactttaatctccccagatctgatatgcactagcaaatcgaga

SEQ ID NO: 308573 - DNA, 132 bp, Zea mays
gttgcaccaaccaacaaggttagggttggtcattgatttcttctattcctttccctcgatttccgattgttacaatgacaataatttaatggttattatcagtcttgaacactgaagaaaaaactacaatga

SEQ ID NO: 308574 - DNA, 391 bp, Zea mays
aagcctgaattcactgaccatttgactcataaactaaagcaccaccctggtcagattgaagctgctgctattatggaacacattttggaaggaagctcttacgtgaaagctgctaagaagttgcatgagattgatcctttacaaaagcctaaacaggaccgttatgctcttaggacttcaccacaatggcttggtcctctaattgaagtgattagattctctaccaagtcaattgagagggagattaactcagtcaatgacaaccctttgattgatgtgtcaaggaacaaggcacttcatggtggtaacttccaaggaactccatttggagtctccatggatatacacgtttggctcttgcttaaattggtaaattcatgtttgctcaatt

SEQ ID NO: 308575 - DNA, 445 bp, Zea mays
  unsure (1)..(445): unsure at all n locations
gcacgcaaagctacggcaaacaaatggaattctattacattatgaattacaagttccttgcatggcatacatcaaggaaaactgggaagttgttgtatgtggattgatttgccacagccttatatagacaaaccaaatgcttaatatcaacacaaacacgtgtacagaaaagaaaccactcttcaagaaaacagaaaataagaaaaactaacatattgngaagaggtgccccattccactccccaaggcattccaaaagntggatcacatgatctctcccttggcacaaaagcagtgaacacttttgtcacactcttcacccggtgagataaccctttcaccagttagcaatgctgtccccaactcctctctacaaacttgtaaaggggtaagacctgcattcttgatcttgtttggaattgacattggtcattctcaatgcaac

SEQ ID NO: 308576 - DNA, 545 bp, Zea mays
gacgagacccataacaagtatgagagctctgaggttgaggtccaggatcgtggtgtttttgactttctcggtaagaaaaaggatgaagaagacaagcctcatcctcaggaggaggtcatcgccaccgagtttcaaaaagtcactgtctcagaccaaggagagaacaagcacagcctcttagaaaagcttcaccgatctgacagcagctctagctcttcaagtgaggaggaaggagaagatggagagaaaaggaagaagaagaagaaggaaaagaaagggctgaaagagaagatcgaggagaaaatagagggtgatcatcatcatcacaaggatgaggacacaagtgtccctgttgagaaagttgaggttgttgaaacagcacatgctgaggaaaagaaggggttcctcgacaagattaaggagaagctaccagggcacaagaagacagaggaggccacagctactactcctcctccaccaccacctgttgcatcattggagcatggtgaaggtgctcatcatgaaggagaggccaaggagaagaa

SEQ ID NO: 308577 - DNA, 380 bp, Zea mays
cagtacatatttaatttctttttacttcaaagaaggaaacctacacaaacttttttttttgtaaatggaagagataaatacacaataataaagtaaattaagtatgcatcaagaaacaccaaagaaacccacaaggctgtcatatgatgaaatgaaaacaaagcacaccacaatcatgcatctccaaccaacaaaaaagccttgtctcaatcttaaatatcaatgagcaccactctccttttccttttccttttcctcctctgtcttggagtgataaccaggaagcttctcttttatcttttctaatatacctttcttctccttggcctctccttcatgatgagcaccttcaccatgctccaatgatgaacaggtggtgg

SEQ ID NO: 308578 - DNA, 506 bp, Zea mays
tgtgaatcaagaaccgctctgctatggctgctctgcaatacttggaatcgctgcgtaattcgcaccctgagctctccgattggtacaattcgctggcggatctgtaccagaagaagctctggcaccagctcactctcaagctcgagcagtttgtggctctcgccgtcttccaggctggtgatgctttaatacaattatatcacaatttcatcacagactttgagacgaaaatcaaccttctcaagcttgcacattttgctgttatagtttctcggcagtattctgaaaaagaagctgctgttggttatcttggaggggtcattcagaaacttcaagacactagggagcagcgcatagaagaacctattctttacattaagatgcaaatagcaatattcaagcttgagcaaggtgatcaaaaggaatgcaagaaacttctagacgatgggaagagtacactcgacagcatgacagatattgatccatctgtatatgctagctattac

SEQ ID NO: 308579 - DNA, 416 bp, Zea mays
ctctccctcagccttttctcttctcaaatccaccttacgcttatccaaaagctcatgcaaaatctgcacgcggagtgtgaaaaccggcgaaggaaaagccattttcactgcggagtgttctcacgtctttcacttcccatgcatagcagctcacgtgaaaaaacaacgactggtcacgtgccccgtgtgcaacgctaactggaaacaactgcttcaaaacgcagacgaaaacaaaccgcacgcagaactcaaaacgatcgaagtcgttcaagccccacaactacaacgacgacgagcctctcatgtcgcccacttcagtctcgcgtttcaaccccattcccgaatccaacgagaacgaagaagaagaagacgaagaagaacaaaacgatgaacaagtaaagttcaatctctcatca

SEQ ID NO: 308580 - DNA, 428 bp, Zea mays
gcggtaactatagctatgcttatataattcagtcatcaacaaaatacaagctcccaaatgtttcgtgaattcacccatccagtatcctttcttaattcttaaaacatttaaaatctggcatcctcgaagccatgtaaatcgctgactctgttcatagactttctcataatagccactttagccagtctctcagctactctccaagccgacatcggcgtaagcggctcccccttttcctccaagcaattattattactacttctcaacttttggttcctcagctcggcttgtttggcttcgagccagcgcaagcactcatcaccctgttcgcggctcacagaggctcgagccgatgatagcaactgaagcgcgccagaacattcgttgcgagccacacactttctcgactcggctacgggcgttgcact

SEQ ID NO: 308581 - DNA, 380 bp, Zea mays
  unsure (1)..(380): unsure at all n locations
caacaacttgttcctggtatgaggccaggtgcagctcccgtgccaaatttctttgtgccaatggttcagcagggacaacagggacagcgtcctggtggaaggcgtacaggtgcagtccagcagtcccagcagcccgttccaatgatgccacagcagatgctacctagggggcgtgtctatcgttatcctcctggtaggggtatgccagatgtttctatgcccggggttgctggaggtatgttttctgttccatatgatgtgggtggggatgccactggcgtgatgcatcaatctcccagcaaattcctgtntggggctttagcaacagctctggctaatgcttctccagagcagcagaggacgatgctgggtgagaatct

SEQ ID NO: 308582 - DNA, 428 bp, Zea mays
  unsure (1)..(428): unsure at all n locations
gtaccaaatgcaaggcataattaaaatcagtgttgaagtgcccttcaaccaaaagaaggtggtggtccataacaaaccaaaagtgtctaatctaacgaaacaaactcaacctgaaactgtatcagagccagtgccgaaaataacaacccatcgtcactaaataaatccaaaatataaaccttaagaaacaaggttgtcattaagagataatgaagccagctgatccgcagtaccgccagcctgttgctgagcaacatttctagngacgtccattgcctccgccacctttgctttcagggcttctggcgactcgagcaaatgcagaacttcagtctggtccatctcaagaagcatgcctgtcactttggcagcattgtcaggctctaactgttccacaaggggtagagattctcacccacatcgtcctc

SEQ ID NO: 308583 - DNA, 499 bp, Zea mays
ctcccggactgggcatgatttaactgaggcaggccaccaatcaggccctttaactgcttcaggacaactaccctgagttcgttgccaagcagatattcatcaatgtcccctggtggtaccttgccttttctaggatgatcagtcccttcttcacacagaggaccaagagtaaatttggttttgctggcccttccaaatctgctgatacccttttcaaatatataactcccgagctggtcccggttcaaaaccgggggtttaagaaaaaaggttgaccaggaatcaacttttgttaaccctgttacggagtttactattaaacccgttaccaaacattctgttgagttccctgtttctgagaaaagccatcttgtttgggaaatccgagtggtgggttgggatgtcagctatggagctgaatttgtgcccagcgctgaggatggatacactgtcatagtacacaagagcaggaaaattgctcccgctgatgagaccgttc

SEQ ID NO: 308584 - DNA, 490 bp, Zea mays
tcaaaccaaaaattcttaaattctcttcacctctgtgatgaccatggaatacagaaccttagaactcaacatcatatccgcaaaggacatcaagaacgttaacctcttctccaagatggacgtatacgccgtcgttacgctctccggcgaccctctccaccctcagggcgccaccacccacgtccacaaagacgccggcagcaaccccacgtggaactaccccgtgaaattctccgtcaacgaatcgctggccaaggagaatcgtttgtctcttgagatcaagctcgtctccgaccgcaccctcggcgacaccgttatcggcaccgtccatgttcctctcagggaactcatggacaatcccggcgacgacggttccttccgccaagtcagttaccaggtgatgaaacagtcagggaaatcaagggatccttgaatttctcctacaaagtagggaacatgttcccgccccggcccctaagcacccaagacg

SEQ ID NO: 308585 - DNA, 413 bp, Zea mays
gcaaggaaatcacaagctgtatgttatatactttatatcataccagttaaatacagagtcaggcaatgaggtatatgaaacaaatactaataaacaatctcatagaacattattacgcaaccaccgaaaaaaaaaagcaaaatgaaatccagaaattaaaaaaaaaaaaaagaacatggttaattgaaaaactgaaaattaaaaatcaaatccaccagcattatcaaagccagcattgtagcccgcattataatcagcagcatcagataccatatttccaatcaacatgccacccaaggcaccaccaagcaatccagctcccaatcccattccaaatttgttcttctttggtttctgagcctgaggtgggtacccatatccaggctgttgcggatatccataacctgattgat

SEQ ID NO: 308586 - DNA, 358 bp, Zea mays
tccaatccactatcattcactctctcttctcctaccattatttctctttaccttgaacttccacaatacaactctctgcctataaacgctcttgtttaacgtgagaacttgggtgatcttttggagttgtaggagcccttacaccttgcagagtcatctcaacattcccaagggctcctactacgcaataacgccaagctcgatctcaaattaatatatcatttattcctcttaatcaaatattaaataagaaaagatgggagagatgtcaaacttccaattgggtgtgattggtgcactatttctctcggtggcttcttctgtctccattgtcatctgcaacaaagccttgatgagc

SEQ ID NO: 308587 - DNA, 457 bp, Zea mays
ccgttggcaattagatcgtagatctgtgcttggatcgcgtccgcaagctcgccgacaactgcaccggcctacaaggcttcctcgtcttcaacgccgtcggcggtggcaccggttccggtctcggatctctcttactcgagcgtctctccgtcgattacggcaaaaaatccaaattagggttcaccatttacccttccccacaggtttcaaccgcagtcgttgaaccctacaacagcgtcctctccacccactccctcctggaacacaccgacgtggcggtcctcttggacaacgaagccatctacgacatctgcaggagatccctcgacatcgagagaccaacctacaccaacctcaacaggctcatttcccagatcttttcgtccctcaccactttcttgaggttcgatggtgccatcaatgtggatatacctgagttccagaccaaccttgtgcc

SEQ ID NO: 308588 - DNA, 484 bp, Zea mays
gttttctacgtttattcatagtgaggcaatagtagcagcaattcacactggtctttgcttctcgttactcatttctcacctaactttctattcttctcagtctcagatcagaaccttagccatggcagcgttccagaagatcaaggtcgccaaccccatcgtcgagatggacggagatgaaatgactagggttatctggaagtcaatcaaggacaagctcattttgcccttcttggagttggacatcaagtattatgacttaggccttccttaccgtgatgagaccgatgataaagttacaattgaaagtgcggaagcaactctcaagtataatgtggcaattaagtgcgcaactattactccagatgagcttcgtgtgaaggagctttggtctcgagttcaatgttggaagagtccaaatgggacaattaggaacattttgatggaactgtcttagagaaccaattctttgcaaaaacattcc

SEQ ID NO: 308589 - DNA, 467 bp, Zea mays
ggaagggatcaataagaaattacaaaggacaaatcagttcacaaccaatattatggagaagaaacagccaacccttgcattcccaaccaacaaacaaatgaaggaaacggggctaaggaccaatgctttttttccctttcttatttcttctgaatagaagagagtagcagacgcacgcacgctccttgttgctaacgtcttttttccgcttgtcttgaatcaagtctatgcagaaagcctcgcactaagctcggctgccacggcatcgatgaattcctcctgtgttcaaataatgctcccttgacagtttggatccatgaagaataagtgccaaatcctttggtcatcttcccagcctctactactccaatgcaagctgcctctagtttttcagtgaaatcaagagtttagcattgcatccagttttgcctgtggctagccctcggtccagcaaagaggatgctatg

SEQ ID NO: 308590 - DNA, 446 bp, Zea mays
ggaagggatcaatttgaaatttcattggacaaattatgttacaaccaaaataataggatgaagaaacagccgaccggtgcattcccagccaacaaacaaatgaaggaaacggggctaaggaccaaagcttttttgccctgccttaaaacaaccgaatagaagagaggagcagacgcacgcacgctacctagatgctaacggcttttttccgcttggcttgaatcaagactatgcagaaagcctcgcactaagctcggctgacacggcatcgatgaattcctgtgagttcaaaaaacgctcccttgacagcttggacccatgaagaataagtgccaaatcctgggtcatattcccagcctctactactccaatgcaagctgcctctagcttttcagtgaaatccaagagtttagcatagtcatccagatctgccctgcgggctagcc

SEQ ID NO: 308591 - DNA, 442 bp, Zea mays
tcaagatcagtgcctctgggggtgatggtttggctgggggaggtggagggcgagtttctattaacgtttttagtagacatgatgacacccagatttttgttcacgggggaaggagttcaggctgtccagataatgcaggagctgctggaactctttatgaagcagtaccaaaaagtcttattgtcagtaacaacaatctgagtacacaaacagacactcttcttttggagtttccaaatcaaccactgtggacaaatgtttttgtaagaaatcgtgccaaagttgctgtccccttgctctggagtcgcgttcaggtcgaagggcaacttaaccttctttctggtgctattctaacttttggtctcactcgttatccatactcggagtctgaactgatggctgaagagcttttatgagtgactcaacaataaagtgttcggtg

SEQ ID NO: 308592 - DNA, 406 bp, Zea mays
ttcactcgtccgcccacgcgtccgctttccttcccgtcttcctcccacacgtccccatcaccattgctgcgacgagagtgagcgggagagggtaggtggcgaggcggcggagatggggcgggggccggtgcagctgcgccggatcgagaacaagatcaaccgccaggtgaccttctccaagcgccggaacgggctgctgaagaaggcccacgagatctccgtgctctgcgacgcagaggtcgcgctcatcgtcttctccactaaggggaagctctacgagtactctagccattccaggtatacgtattcgatccccttgttcctgccggccggttgctacgatcgcccgctcggggtttgaagcgctgggtgtgcttcgacgcatgatttttggatcatttttcat

SEQ ID NO: 308593 - DNA, 343 bp, Zea mays
gattcggctctccggctccgctcatcatcatttcatatctttcgtcccattcccgaccaaaaaaagaaaagctgtacaatctactagaaatctagaatccagcccgtgcgcgcgtcactgccactcgcgcgtgtcgcaggggtagcacccttcctgcgcgacgtcgaagacctgcaccccggcatcgtagacgcggccggcctcccaccggcgcggcagcacctccgactccgcccacacccacttgccgtcgtagccgccggtcaccaccagccggaactgcagcggccccggcggcgcctgcgccgtgctccacgccggcccgtggtcccgcgtcatgaac

SEQ ID NO: 308594 - DNA, 338 bp, Zea mays
tttgacgcgtgggcggacgcgtgggcggacgcgtgggctcaactgcgcagccgggtcgtgcgggtacggctccttggcggcgtccttcaacggcggcctgctcgccgcagccagccccgagctgtacaggggcggcgtcggctgcggcgcctgcttccaggtaggtgcggtgcagggacagcgagctgtgcagcgccgtcggcgccaaggtggtggtgacggaccatgcgcggacgtcgaaccgcacggtcctggtgctgagcgccgcggcgtacgcggctatggccagcgccggcaacggcaaggccgcgcgcctcagggaccggcgcgtcgtcgac

SEQ ID NO: 308595 - DNA, 417 bp, Zea mays
ttacttcagctcgagttaattacggaacgataaataattccgtgatgcggaagagaagccaagtcgaccccaagcgcgggttaatccgcaagatgaagctgatggaccaacttgaagatggttcaatcaatcaagtactcgatcgagggatactcgtcaagcggacgtcacctaacaacactaacctagtgttacccagcattcgagaacaagtccccaacattggcgcccacctgcagtgaactcacttccactttcctgagacaatggcttcgttcaagaaccaagctggaactgcttcggctccgaagctgattctcccgataacaggcggttcatgctcagagccggctaacaagaaacagaagaaggaggcacagagaagagttcaacatgtttgggtacaaggacccttca

SEQ ID NO: 308596 - DNA, 279 bp, Zea mays
tccactcgtccgcggacctctcagcatggttggatctatgaaggccatggatcatagacatgtaccaggtgaatgaagacaaattctatgcgatggtaagcctttgtgtctgccttgaaggtgtataccatgtgcttgatgagtgcacacaatactgcatctattttcgtacgacgataaatcgattgtggaggccacctatctgcatgcttgaagttcgactcttatgtgcgagcggttccaatccaatcaaaaccatatacaggcgtgagtcgagtg

SEQ ID NO: 308597 - DNA, 411 bp, Zea mays
ttcgttagttgccacaccgctggtaaatattgttgcagtcgttgctgtcgttcacagccacctgttgctcagcttctgccccagctaattagttgaaagggaaatgtgcccttgggccatttctaagtattttggtgattaagtgtccaacacaaacagttatgtgttaaactatgccaaatggtgcataaagtgcacatcaatacaaaggtgtgattctacacttattacattggtttttgtgtactaacatattggtctaagtgctagaatcagagaaaagacaaatggaaaagacttggctcgagcagccaatactctgctcagtctgggtgcactggactgtccggtagtgcaccggacagtgtccggtgcgccaggctggctctggtgaaaaggccgctctcggga

SEQ ID NO: 308598 - DNA, 416 bp, Zea mays
tccacgcgtccgcggacgcgtgggctgatccccatcggcgatggggcggctcgaggcatgcctcccggctctcggcggggagcagttcgacaggtcggatcccgtagagcagaggcaggagtcgagcttcttcaactggtacaccttccacgtctcgacgggtggctttgtggggctggtcttcatcgtgtgggtggagaacagtcaaggctgggacgtaagcttcaccgcctgtgccttggccgtgctcctcgggatgctgatatggattgctggcctaccgacatacaggaaccagctgccaactagtagccccatcacaagaatactgcaggctcttgtagctgcattcaagaaaagaaatgttgcattacccgccaaccccagtgagctaaaagcaaatagtcaaggcgacg

SEQ ID NO: 308599 - DNA, 466 bp, Zea mays
tggtactgccgcgccggccggatcgaggacgcgcgccgcctcatcaacggcatgccgttcccgccggacacgttcacgttcaacccgctcatccgcgcgctctgcgtccgcgggcgcatccctgacgccctggcggtgttcgacgacatgctccaccggggatgctccccgagcgtcgtcacctacagcatcctcctggacgccacctgcaaggcgagcggctacaggcaggccatggcgctcctcgacgagatgcgcgccaagggctgcgagccggacattgtcacgtacaatgtcctcatcaatgccatgtgcaacgagggcgacgttgatgaagctctgaacatattgagcaacctgccgtctcatggatgcaaacctgacgctgtcacgtacacacctgtgttgaagagtctgtgtggctctgaacggtggaaggaggttgaggagctcttggctgagatga

SEQ ID NO: 308600 - DNA, 453 bp, Zea mays
  unsure (1)..(453): unsure at all n locations
ttccggcgggccaccagctttgaccggcgcctcccttcccctccgctactgctcctccccaccccactcccccgcaggagcggcggcggcggcggcggcggcgaggccgtaccccacatcggcgagcggcggcggcaccgccggaggcaaaggcaagatgttcgggcgcgcgccgaagaagagcgacaacactaagtactacgagatcctcggggtgcccaagtcggcgtcccaggacgatctcaagaaggcctaccgcaaggctgctatcaagaaccaccccgacaagggcggtgaccccgagaagttcaaggagctcgcacaagcctatgaggttttgagtgatccagagaaacgtgagatttatgatcagtatggtgaagatgcccttaagaaggaatgggcggtgggggatcccatgtngatccatntgacatcttctcatcatttttt

SEQ ID NO: 308601 - DNA, 309 bp, Zea mays
ggcggacaaccacaaggggttaaagcgacatactctcaaggacaaaaacaaatactacagccactcatcacgggatgatggatggaaacaccccaactttacccaggccaccaacaaagggtttacaacaccacaacctgcctggacagccaaacatattaatgcatgcagatcacacttactgctggttgctacccggatcaatgtcgccctattctgccaccttctccttgtccttctgcaaggccgtcaggtcctcgcgcgcctccgtgaacaccacctcattcatgccctccccggcgtaccagt

SEQ ID NO: 308602 - DNA, 167 bp, Zea mays
tgcgctgctgttgatgccatcaccagttgtgttgccagagaacgcccagagcggcttgtacagggagcgcttcgaggcctacactgacagtgacagcgggctgtgcttggccatgaggcaggttccctgcttgacgttgcagacggggtagccatgggggcaggagc

SEQ ID NO: 308603 - DNA, 197 bp, Zea mays
gaccaacaagaactaaattctacagctcgtgaaggttcctggtctaaccatgtaaaaacaaataagcagcagggaagccgcagaggtgacacaagttcctattatacactcagaaatattaagaggacgaaaaggaggagacatcaggcccacgtcggaggacccgaagggagacatagagacctatttttgatgtg

SEQ ID NO: 308604 - DNA, 249 bp, Zea mays
ttgttctcgaccgatcggcgccacgagtgctgggctttctggctgctgggagcgccatggggaggtcgccgtgctgcgagaaggcgcacaccaacaagggcgcgtggaccaaggaggaggacgagcggctggtggcgtacgtccgggcgcacggggaggggtgctggcggtcgttgcccaaggcggcggggctcgtgccctgcggcatgagctgcaggctgctctggatgatctaccttcgcccggacc

SEQ ID NO: 308605 - DNA, 395 bp, Zea mays
tgtttccttcaaccgcggactcacatctggccgcgccatggcatagcttgtacatgacaactcaccgggagaggccacagcaggagccctggccgatgggccgcgcctgacctaccactggcccgactgtgaccgcctacaggaggggaaaacgcgatgatgcccacagggtgagtcctagcaccactgacaagacagtggtcctacggcaacgttccccagccctcatgccatactgtactatcagcagagggcgactaagggaggccttctgagcgctgaggccaggggggcttcagacactggtcaagggtccaaggacactcctggcatttggacccatgagcaagtcgaagcatggaagccgatcgtagacggggttcaccagaaaggag

SEQ ID NO: 308606 - DNA, 290 bp, Zea mays
gtgatggtctccggggttcggagtcgagggtgagcggaccgtgacggcagcgcacagatgctgagtaccgatgcttactcggcggactcgcctgggccacggacgaccactccctccacaacagaattgagcacctacggtgagagcctcgagtccacgattattctcgatcgggagacccaaaagtaccgcggatgcgggtacgccaccttctccaccgaggaagcgacgctgaacgccatcgagggcactgaaccgcaaggagctggacggccgcaacatcaccgaca

SEQ ID NO: 308607 - DNA, 499 bp, Zea mays
gtttttgggcgtacacggacacagtcccgacccgaatcttgttccttgagagcgtcggcgatcccgcagtccagtaccctagcttgaagatggagacatgagcgaagaccctcaccgggcggactatcacgctaggggtggagagtgctgacaccactgacagtgtccaggctcagacacatgacaaggtgggccataccactgaccagggggaggcctatttgtgcccgactgcatcttgaggacggacgcacacttgctgactacaacactgatgaggagcgaacggtacacctggcggttgacgctaggggaggcgtgcatatgcctgtcaagaccctgactggcaagacaatcacccctgaggcggagtccggagacaccattgacaatgtcaaggaaaagatccaggacatggagggcatcccacctgaccagcaacgtctgatatttgccggaagcagttggaggatgggaggaccctggctgactacaacat

SEQ ID NO: 308608 - DNA, 491 bp, Zea mays
cccttttctctcgcccacgcgtccgcccacgcgtccgcccacgcgtccgctcaaggttgcttccaattattcagactgtgaactagaggcatcaagaggttgttttcatttgcttgtggttcatcgtacctcctgttttgtgcatgttgtaccacaggttggcgaatcctatacttaccaaatggttctaaaatttactagttacctcaccttattcctttctgggacaggtatctagcaggtcacttaagaaggccattggattcaaaactcatgtacgctactgtgatgcattgatggtcctgaagtcatggataatgtcaaaggtaccctttagatcaaggcaacttctaggtccctttgtctagattatatacgtcagagcatcaggcaaattcattgtgcacctgcctgttgcatgttaaataaatcattttttggcatgtgttagttgtctcctaacttgctccattcttaattttggtgctcct

SEQ ID NO: 308609 - DNA, 308 bp, Zea mays
agggaagcgggacacccggggaacaggcccggaaaacccgggtagacccacacgaccgcacattagtagcaagagggacagagcaaggccacagacacacacacaccacaagtaggcgagccaagccacaaagccaacaaggaggagcaagaagggcgcgcacgcaagcaggcaagcaagaagagagcccagcgaccgagagctagcacgcgacggcaaggccaccaaaagaagaagccacacgaaagcacaagagcgaaaggcccaggacccacaccccgaacaggcgaggaaaaacacagaccaaa

SEQ ID NO: 308610 - DNA, 514 bp, Zea mays
atctttataggatccagctaataaaaagatatagttggcacccaaagttattgcagaagtttatactgcaccacgctgacttgttctacataagctaacaagctattatctgcccaacaccaaaagttcaaacaaaagtgtttttttatcataagttacaatgcacctggcttcctaagtttaaaccttcgaagttgcctgatgttgtgtcatgtcatggtaggcctcccgattgatgagttctcaaggaagaagatggatgccactgcccaagagctgacggaggagaagacgcttgcttactcatgcctcgagtaaattctaccacatccagagagcaattgccaccccaatgttttgaataaaaaaagaaactccaactccattcatagattctcactcagaactgctgcacgtcgcagtgcaggcgtgttgctggcttcgcccaactttcttttttgcctgtgatttgcacgaccattatatttattgaaatcttgcaaaatcgctgacg

SEQ ID NO: 308611 - DNA, 495 bp, Zea mays
  unsure (1)..(495): unsure at all n locations
ttctttcgtccgcccacgcgtccgcccacgcgtccgcccacgcgtccgcccacgcgtccgagggcatgggcgtggcaaccatcaatataacaatcaccatcacaataaccagcaccaccagaacaaccagccgcagtacaataaccatggcaacaaccaccttggtgggaaccgtggcagccttcactctgttggaactacaccgcataacctgaaaaccaagcttgagccgcatccgcagctgcctattggggccaacaagcttccaccaggcccccgcatgcctgatggcaccaggggtttcaccaggggcagggggaagccacaggctgtgctacctgggttgtgtgctgttggtgttgagtgaggcatgcagattgctgctcgtatgcttgtattgcatatctttgtggtgggagtatttgtgcgtcacactttgtggacacggcgagctgtcaaaaccagtatattacanattaaaaaaattatattaat

SEQ ID NO: 308612 - DNA, 362 bp, Zea mays
tcctcgcgtccgcccacgcgtccgcaaaatcttgtctcatgggcacgtcctctgtttaacgacagaagaaagctccctaagatggctgacccgaggctggaagggcgataccccatgcgtgggctttaccaagcccttgcagtggcttcgatgtgcattcagtcggaggctgcttcacgcccactgattgcagatgtcgtgactgctctgtcctacttggcatcccagccatatgatcccaacgcagctcttgcttcaaggaagcctggcggcgatcagcgaagcaagcctggcgagaacgtgcgggttagttccaggaatgatgtaactgtaagcttcggccacaaaaaacctgccatggt

SEQ ID NO: 308613 - DNA, 353 bp, Zea mays
gtcacacccaattttgaaaggtaaatcgaatgtgaaccatgtacgtgccaggatcagaaattcacgtacacaatgattacataaatgactcatcatagcacaatgcttcaaataacaataaagaataagtaattatattaaagactagagtcatttacataacataaatcaaagtgcacgtaatagaaatgtagccaacgtgaattaacccaccacaggcagctgactgggggaggtcgctagcataacccaccacataaatcaatgcttccactaatcctggagatccgcctcgacatcttcttctccttctttaccttcactaaacagatgctcagggtcttgtgtcacgt

SEQ ID NO: 308614 - DNA, 542 bp, Zea mays
ggtcgcgtgggaaaattttcaacatacggttacattgtctgatggtaccattccagaaggtactgtgagagtttcagaggctgcaatacaaatctcaaggtgccgcgtttctgagtatctcaatttgcatacatgctatgatttactcccggattcgggcaaggttattgctctggacattaatttacctgtgaagcaatcttttcatattctgcatgaacaggggattcctgtagctcctctctgggactcattcagaggtcaatttgtcggccttctgagcccattggatttcatacttatatttgcgggagctagaaacttatggctcgaacttgacagtatgatcagtttgaaacacacactttatctgcatggatagaggctatgcggttatacttttgaagaaatgaaggtcatatgcttgctcatttagtctctattgctttccacccctttttattcctttagggatatttgctttcatattttttgcttatgttcttttttctgtttctgtttttattattcttttttacatt

SEQ ID NO: 308615 - DNA, 432 bp, Zea mays
ccctcgcgtccgcccacgcgtccgcccacgcgtccggtggtcttatccaagggctatcctgtatgcctgtaaagctttagatttctggacatatgaaaacctatctttttatggacatatttgttcacataataatagcttatgtgtatatttattcacatacatgtatctgatcgattatttcaatattctactctacttttaatccttcagaagcttaaaaagtgcatgtttttgtcataaattctgtaaaggatttgcttttcatgggattatgataaggaagttgtttaaatttgacaaatgctatcaaggcagtggacaagtaattcatcatttttgccttacacttttcatactaaactattttttatatgggtctttcttgcattaaacttgtgcaggtctcttttgctattaaacggtcagggg

SEQ ID NO: 308616 - DNA, 333 bp, Zea mays
tgtataaagtccatattcaagttttacgtgtaggcggtgttatgacacaactggggggtactcgcgcacgctatagaagaggcaaattgacctacgcgtgtatgcgaagtgatacgtataatacagtgtcaccataaattcaaaacagtggcacgagtggttcaacattacagctgggaaaaccatagctgaatccaactgaacgggctagaattagataaccctttctccaggtgacaggatagcaaaaaggaccgcaccgatggcccttccaaacagttgcacatcctgaaatgggaatgggaggcgccttgtaaaagctcattaagtgcg

SEQ ID NO: 308617 - DNA, 507 bp, Zea mays
gctgtttggtccttcatctgaactctgcttcttcttcttccaactgatcatctcctaccttttcttttccaatccctacacctacacacagctttacggtagctgctagtgctagtgcatggccatatatatgcatctataagtagataggttgcaccctccaaggggttcatatcatccaaaggtgcatgcaaggagacaggccacaataatgtcccagaggaaaggcgccatggcggctgcagtgacggccagcaagcatcgcgaggaccaggaggcgatgatggtggagctcaggagaggcccctggacgctcgaggaagacaacctcctcatgaactacattgcttgccacggcgagggccgctggaatctcctggcccgctgctccgggttgaagaggaccggcaagagctgccggctcaggtggctcaactacctgaagcccgacatcaagcgcggcaacctgacgcctgaggagcagctgctcatcctcgagctccactc

SEQ ID NO: 308618 - DNA, 547 bp, Zea mays
tgcacggtccccgcctaccgtccacccggacgccctctcgaggttctacccaaagctcaccttctccgacgacccgttaggatcaggaccccttgccattgaagtctttgccatttccaaggaccaggtcgcctccttaaagcgcctctgtggcggcacaagcaccttctgcgccatcggcgccctcgtgtggcagtgcgcgctcgttgtgcgccggcttccgcccgactccgaagcacgcctcaccttcccagccaacgtccggcgcagggtgaggccacctctcccgagccactacttcggcaacgcgttggtcaggctgggcgccactggcgcagttcgggatgttgcttcggaggctctggcgtccgtggccggccgcatcaaagacgctgtcgatcgggtggacgacgagctcgtgcggtctgcggtcgactactatgagatgaccgagatggacagccggcctgtgaagggcaccttgccagagacggacctacagattattagcttgctgggcatgccaatgtacgacgtggatttcgga

SEQ ID NO: 308619 - DNA, 472 bp, Zea mays
  unsure (1)..(472): unsure at all n locations
cggacgcgtgggcacggcgcgagctgcagccgcccaagcgaggaggtggacttcttcggcgcggcgcagtccggggacacggcccgcctcgccgccgctcttcgctcccgccccaccttgctcgcccgcaccacgctcttcgaccgcctctccgcgctccacatcgccgccgcacacggccacctccaggtggtctccctagcattagatctttgcgtgcaccccgacgtcgttaaccgccacaagcagacggcattgatgctcgcggcgatgcacgggaagaccgactgcgtccggcggcttctcgacgccggcgccaatgtgagcctctaaacggaagttgcaggttatatcggttcctcgagtcgggctactaaatggcgtttccgatttggatggcgcagatcgtgatgttcgattctcgcatcgcggacgtgcctgcactacgcggnctactacgggcacgcggact

SEQ ID NO: 308620 - DNA, 274 bp, Zea mays
  unsure (1)..(274): unsure at all n locations
gtcagcaagtaaggatgttctncgcgcttgcctcacttgaggttgacctctcaagcattgagcctggaaccacggtgaccgtgaagtggcgtggcaagccggtcttcataaggcgccagaccgatgatgatatccaggtggccaacaatgtttacgtttgattatttttttccccccccccccaaagcaggatgccaagcgtgtcaagaaccccgaatggctggccgtcattggggtctgcactcacctgggctgcatcccgctccctaatgca

SEQ ID NO: 308621 - DNA, 439 bp, Zea mays
cccactcgtccgcccacgcgtccgggcacgggcacggggcaccgaagtgttggtatacgcggcagccgggatagcgagcgtatggccacctacttcgtcctcaacaccggcgcgaagatcccgtcggtcgggctcggcacctggcaggccgacaacgggctcgtcggcgacgccgtctatgccgccgtgaaggcaggttacaggcacattgactgtgctcaagcatacaacaacgagaaagaggtcgggtttggtctcagcagatgattgatacatctggacgtgggccgcgatggaggagctgtacgacgccgggaaggcgcgcgccatcggcgtcagcaacttctcgagcaagaagctggaggacctgctggccgtggcgcgcgtgcgccccgccgtcgaccaggtggagtgccaccctgtgtggcggcagggcagg

SEQ ID NO: 308622 - DNA, 373 bp, Zea mays
cggactcgtgggcggacgcgtgggtcgcattcctggtctaccttttggtgattccatggaacacataaggccaatttcaaccaacggtatgatatatctttgcatgcaaagggtagaaacaacatcctcctcatgtggcattttgggatctaaaatctcattaattttgtttgggaatgctaagtctacatacttatgaaggctgaggtcattaccaaacagcgtgtcagttggtcgctttgctgtgagcatttctagcaataataccccaaaaccataaacatcaccaccggttgagattttgcatcccatcccatattctggcaaaacaggagtaaataacattatttattcataaactagtaaaagaaaa

SEQ ID NO: 308623 - DNA, 452 bp, Zea mays
gtctgccactaccccaggaggcaggagcccgacaccaaagtccgcgcatttccttccaccgagccgcaccaagatccggtatccaaggtgacaaacttcggtgcggcggccctgaacttcgatggctgtcctcgtcgcggaattcatcctcagattcacaggtcagtccagcgagtgaacctagctcggggtatctgtatctgccagccatggaatctgcagatttgacaaatattcagggaaggttgcctctgaaaagcaagggagctccaatgatagagtgtggtgctcctctctacagccctaagggaagaactctccatcttttcaaaagaagtaatacgatttggcaacctctgcaaagatcctatatggcataacttggggcgatattttgacaagttagcgacagataatacacctcaggatcattcaaaggggagtatggaagc

SEQ ID NO: 308624 - DNA, 499 bp, Zea mays
ccctgccgccgtcaggtcgctcacgctcctcgcgccgccctacttcccggtgccggagtcggagtcggagtcggcggcgcagtacgtgatgcggcgcgtggctccgcggcgggtgtggccgccgatcgcgttcggggcgtctatggcgtgctggtacgagcacgtgagccgcaccatctgcctcaccatctgccgccaccaccgcgtctgggaccgcctcttcaggatcttcaccaggaacaggtagccctttttcttgccgtgttctctggtctctcccgaaccaaacgcttgccttcctcctttaataactactaccggcacggcgctgcacctgcacctgccactgccaccgtcgtgtcgagcgagtcgtgccaccatggcatggcaacacctgcttgcgtacagtagcactatgctacagtgatccaggacgcgtctgcatatatttctagactaaactagtactctgtactcctaatgcttgctactggatcat

SEQ ID NO: 308625 - DNA, 551 bp, Zea mays
gatcatgaggtgacaagttgtgttgctgaaatattatcagaaaaagtgcatgcttctgaaatggtaggcactgaaggttctgaattagatatatcaactattattgctgacttatttgaccaaaaaggtgggcatcttagtcctgaagcattgaagcattacttatctgctggggagaagctctacaaaatgtccagcaagatttacaaagaaatctgttatttcgaggcatccataaaaaggcctttttttaatgtcaagacacttgatgatgatcagcttgaaaactggcaccagtatcttgactttgttgagaagaatggggattttgactgggtattttttttggctgtaaaactttatgagaggtgtttgatcccttgcgctaattattcggaattttggatccgctattcagagtatgttgacgctaaaggtggccgagaaattgcaaaccatgctctgggtcgagcatcatcatgttttgcgaaggcaggttaaagtattgagggagcaggtaattgctcaagacagctgaagcctcatgcatg

SEQ ID NO: 308626 - DNA, 481 bp, Zea mays
cccacgcgtccgcccacgcgtccgcccacgcgtccgcccacgcgtccggcgaggttttccgtgatgcccaagagaaagctcttccgtacgtggattacatctttggaaatgaaactgaggcgaggacctttgctaaagttcgaggttgggagattgagaatgttgaggagatcgctttgaagatctcccaattaccgaaggcttcaggaacacacaagaggattactgttatcactcaaggttgcgatccggtagttgtggctgatgatggaaaggtgaaaactttccctgtgatcctcttgcctaaggagaagcttgttgacaccaatggtgcaggtgatgcgttcgttggaggcttcctgtcccagttggtacaagagaagagcatcgatgagtgtgtcagagctgcctgttacgccgcccattgtgtcatccaacgttctggctgcacttaccctgagaagcctgacttcactagagc

SEQ ID NO: 308627 - DNA, 306 bp, Zea mays
ggggaacccccaggaaaattgcgccttttatttaataaaggggaagagaaacattccaaaagaggggatgttgcaaagcaaatttcccaaagacccacaaaattccgaaagaaattactttgaagtcctgaaactagacccgacctcgcccaggggagcaactaagcccatactaccgaccttcttagctcctggtaaaacccagcaaacacacttatttgagaaacatttaaaaatcctgggcaatgaaggagactccccatgaaacactgttttgtttttttgaagccataggcaccaagcccc

SEQ ID NO: 308628 - DNA, 440 bp, Zea mays
gctggtcttcttccacggctccgagtacgtcctcgctgccgctttccacggccgccagaacgtcaccgctacttcacttcttattagcaagcagtatgtattggcaatgggttttgcaatgctggaacacctgacagaaattcttattctcccggaagtaaaggagttctggtttgtcagtaatattggccttctaatggttattatcggtgaaattatccgtaaacttgctgtagtgacagctggacgtgccttcacacacgttataagaacttattatgaagatcagcatcaattgatcacgcatggactgtataggtttatgcgccaccctgggtattctggctttcttatatgggcagtaggaacccaggttatgctgtgtaatccattatcaacagttgcattcacattggtcttgtggcgattcttttcaaaac

SEQ ID NO: 308629 - DNA, 392 bp, Zea mays
acattgcaattttcctccgcgacaaacagtaggacaccgcacgcatcacgacatcagggcttcgattccaggctggctccaccactggaaatggcggcactggtgccggagtgggctaccaaggagccctgcctcatggggatcgatgaggctggccgtggccctgtccttggtcctatggtgtatggatgtgtgtactgcgcgtgctcttacaataacactcttgcgactctcaaattcgcagattcaaagacgttgaaggaagaacaaagagaggagctatttgaaagtttaaaggccaatagctctattgggtgggaagtggatgtcatatgcccaaaggatctatctgctaaaatgttaaaaaggtcgaaagttaatctgaatgaaat

SEQ ID NO: 308630 - DNA, 486 bp, Zea mays
cccacgcgtccgcttttatcccccaatccctaaccctagcacccacggggtcctccgcttcgccctcctcctcctccgcgttcggtatgcgggacgcggtggaggacgactccgactcgccgccgtcgcagatgtccgaggacgaccccggcggagggggcggggaccggtgggagccggatctgcggggcggcaacggcggcggcggcggcggcggtaggtgggctcctccggaccaggtgctggagaacgtgctcgagaccgtgctcgagttcctcaccgtcgcgcgggaccgcaacgccgcctcgctcgtttgccgctcctggtaccgcgccgaggcgcagacgcgccgcgagctcttcatcggcaactgctacgccgtctcgccgcgccgcgccgtccagggcttcagcggcctgcgcgccgtcgtgctcaagggcaagccccgcttcgcggacttcagcctcgtgccctacgggtggggcg

SEQ ID NO: 308631 - DNA, 534 bp, Zea mays
tcgcccacgcgtcctgttgtcgcgtgggttcggttccatgaacatggacgaactgctccggagcatctggaccgcggaggagacccaggccatggcctccgcttctggcgctggagcgggtgcggggatgccgccaacgtcgctgcagcggcaagggtcgtcgctcacactgccccgcacgctcagcaccaagacggtcgacgaggtgtggcgcaatctcgtgcgcgacgagccgctgcagggggcggacggcggcgggcaccagcagcaccaccgccagtcgacgctcggggagatgactctggaggagttcttggtcagagctggcgtggtcagggagaaccccgatccggcttcttcagcaccaccacccatgatcccgccgcggtcggtacctgtcgcccctaaaagctccgcctttttcgggaatttaccgggtgccgacgccgacaccgccgcagttgcggcagtgctggggtttgcaccggtcggcatgggggatctggcccaaataccgtccagggcagcaggcat

SEQ ID NO: 308632 - DNA, 370 bp, Zea mays
ctctaggaaccagaaaagaatttcatattgatcttgaacaggatatgtataatgggaccctatacataagagcttttctcccaaatagtcaaatacaccaccacctattgtttctgggatgtagaaataagcatagtcctactactcgcaactaaaagcactgttaacttgaccaattcctttttaaccataaagagaaccggggcagcaaagacactttgtacaatctttgggcccattcctttgaaaaacccgggtagtccttcgtagcgaaccatttttattatcgcatctattgtacctggggaagataaccggtgtaatgtcaacagcaacgaaaattagatatgtgcgactaaaataaatagga

SEQ ID NO: 308633 - DNA, 377 bp, Zea mays
cccacgcgttcgttgtgactactttgtttggctaaaatcaagaaggtgaaccgttcttaacaaattaaagacagcagcaggcaaaggagtactagggcacaagttggcccgacagacttccgggctccggcgacggacggattttcagggcttgttgccgtgtacggggacgacggcggagccggcggcgggggacccgggcatgccgtcgaagctcgtgaaggccggggagccgccgctgaagaggggcatgctgccgatgctgtcgctgccgggcaagaacgacccgccggggatgctgctgctgctgtctttaatttgttaagaacggttcaaattattgatttgtgactactttgtttggctaaaaaacaaca

SEQ ID NO: 308634 - DNA, 510 bp, Zea mays
cccacgcgttctctagagatcccataccgccgccagcccgccgctgtgcctcgccggcgacggcgcagaacaacccagccgatcagccggcctcacatcgaagtctccatacaccagtggcatcgcccccctatttcgcccgttgcattgaactactgcagagtggagatccggctatccatgacccacccagcaggccctggatcgatctgtcattctcttgggaattaacccacgcttgctcggaggaacgctgcagggcacaagaaatgcagagggatgccggctccggcgaccggacgccgggcaccccgagcccgacgcacggtggccggctcaggcaccggaagcgctccaacgaggtccccagcgacgtgaacacgactaagggcgccaacctgctcttaaacgaccagaacaagtacaagtggatgctagctcggacctactcctcactggggatgatggccggagtcgagttcttgatatatatgggccatctctacatct

SEQ ID NO: 308635 - DNA, 539 bp, Zea mays
cccacgcgtccgggcgtctctgttgctgcaattgccaagtggatgaaacagatcggtgtgagagtcatgtcaaggccacaaccaacaaaattgacggggtgacgaagggtttgagggattctgctactgcaaaagtcgagccacacgatgatgctccccctatcgatgtcgatgttctatccttggatgatctgataaaaaattgttgactttggttcaagagccttgataggtgaaggtatttatgggacattgtactatgcaactcttggtaatgtaacaaaaatgacagtaaagaaactttactgaaaatgaacccattgtcgagttcttggtcgaggttggtgttgccattgattattgatcacgggggttactaccaaacaatgatgcttacttctgatgccaagtctcattggtttcaaggatgacacatgaaaactttgttgacatgttgggggaccgtatcaagcgtaatcttcgcatagtatcctacgaattcgcgaccatgggttctctccatgatgttctacatggaa

SEQ ID NO: 308636 - DNA, 435 bp, Zea mays
acatgcgcccacattattagtttaacatctccatatccatgacttgtgaaatatagtcatcaactaatacatgtgctagtcatcgactctgactagggacatcatttagaataaccatacaagtaaagaatctcactaacaattcacataattgctaatcaatacaaggtgtcctaccctcaaagttttgcaacaattaatccatgatcactaaacatctcaactaatgctttctttaatgattccgatgttgtgtccttcacatgcttgatgcccaaaaatctttctattacttcaccctttttattgacaaacctcacaactatagccatttgttctttaactgatatatcacaggattcatcaacaagaacagagaataaacaatcccccatttcttctttaattgcatgtgtgactgcttcttcacaacaa

SEQ ID NO: 308637 - DNA, 594 bp, Zea mays
gcgccattggccagctagagccaaccagaagagcttgcagttactgagagtgtgtgtgagagagaggatgggtggcagcggcagggctgctctgctgctggccctggtggtggtggccgtgagcctggccgtggagatccaggccgacgccgggtacggttacggcggcgggtacaccccgacgccgacgccggccaccccgaccccgaagcccgagaagccccccaccaaggggccgaagccggacaagccgcccaaggagcacaagccgcccaaggagcacgggcccaagccggagaagccgcccaaggagcacaagccgacgccgcccacgtacaccccgagccccaaacccacgccgccgacgtacactcccaccccgacgccccccaagccgacgccacccacatacactcccgcccctacgccccacaaacccacaccaaaacccactcccactcctccgacgtacaccccgacccccaagcctccgacacctaagccgaccccgccgacgtacactccaagccccaaccttccgacgccaagccgaccccaccgacgtacaccccttcccccaagcctgcgacacct

SEQ ID NO: 308638 - DNA, 531 bp, Zea mays
cccacgcgtccgttccacgcgtccgcccacgcgtccgcccacgcgtgggcccacgcgtccgctccatccaaagtgtagagtgtagacagtgacccacataggcgccggctgagggaggtcttcatctgcgcttcaccagcgacgattatccactaggctgcctcctgctgattgctaggtaggggagcatccgatcatgtcgagcgcggcggtgaacgggctgtccggcgccggcggcggcatcatcgcgcagatcatcacctaccctctccaaaccgtgaacacccggcagcagacggagaggtcagcgaagaagaggaaggccaggagcggctccagcgccaccccagcctccaccatgtaccagatgctccagtgactgcagctgattcaaaccgaaggatggagtgggttgtacagcggcctcaagccctctctcatcggcactgccgcgtcgcagggaatctattactacttctaccagatcctcaagaacaaggtggaagatatagcggttgctcgtagcaagaa

SEQ ID NO: 308639 - DNA, 240 bp, Zea mays
tttgtctaatcaacgatcgaacggtaccggccatcattctatatgcaagtcgtgggatgccgctgccagcatatgatgacgttgctatagtggcatataacagttctaatgtgcaccaatcgaaacggctggcgctagttgcctattgcatggaacatggcatacacttggttgggttaaatatacacaggaaagtgatacttcatgaactactgcacactgggcgggcgttcaagaaga

SEQ ID NO: 308640 - DNA, 280 bp, Zea mays
tcctgctatcgtacaccccttggccaaagcctggcggacctaagccgaccccggcgacgtacaccccttctcccaagcctgcgacgcccaagccgaccccgccgacgtacactccaagccccaagcctcccacacacccggcgcccaagccgaccccaccgacgtacaccccttacccaaagccttcgacgcccaagccgaccgcaccgacgtacaccccttccccaaagcctacgacacccaagccgaccccaccgacgtacactcccacaccgaagcc

SEQ ID NO: 308641 - DNA, 362 bp, Zea mays
gcttctggtgagagagagagagagaaagatgtcgtggttgtgtcacttccaccacaaccagccttctcccccggcgtcgggccccaaccaggtgttcaagatcttctgccgcgccaacgagaactactgcctggccgtccgcgacggcgccgtcgtgctggccccggtcaaccccaaggacgaccaccagcactggtacaaggacatgcgcttcagcacccgggtcaaggacgaggaaggcatgccggcgttcgcgctcgtcaacaaggccacggggctcgcaatcaagcactccctcggccagtcccacccgcactccctcggcatgcaagtcaagctcgcgcctttcagcccggaccaag

SEQ ID NO: 308642 - DNA, 113 bp, Zea mays
aaacaactcttattcataaacaaactgggttcacagttatttttccatacgtacatgcttattgtggacgacgctaatgaccacctacagctggatacttacttattcagact

SEQ ID NO: 308643 - DNA, 478 bp, Zea mays
ccgaccggaacgaattctgtcacccacgcggcgtggttttccttgccctagccgccgccgccgctcgtgttcttgagaggtgccgggaccgaggaactggccgagttctaggtagagaatcggttttgcttgtctcagcacggggtctgctgcgtctggtggtggtgaaggggagaaattcgtgagatctgatccggatcaggcgtgctagctctgtaataaggggtttcacacatagctacctggattcgaatctgatgtactaatggagcttaagggaggcaaaaagcctagcagttgtcggtccatgatgtatgaagctacgcttggctacagcattgaggacgttacacctgacggaggcgtgaagaagttccagtctgctgactacttcaactgcgcgaagaagccatcctgatgttcctttcggcttgctcattctagtagtttaggattgctgttctgacactttgactct

SEQ ID NO: 308644 - DNA, 388 bp, Zea mays
acactttcctgcgtccgggcgtaggggatagagagcggtaggtttgagtgtgaacaagagcaacccaccggcggggatgcagatcttcgtgaacgcaattacggggaccatcacgctggatgccaagagcagcgacaccatcgccaacatcaaggccgtggtccaagacagggaaggcatcccgctggactggcagcggctcatcttcgcagggatgcagctggaggatgaccgcaccctggccgactactgcatacagaaggagtccacgctgcacctgctgccccgactccgaggcggcggcaggggtggctacccggtcaccagcgttccgtatgacctcatcaaccttgcccgcaagcacaacacaacgagagcaagatgatct

SEQ ID NO: 308645 - DNA, 386 bp, Zea mays
ttcacgcgtacggacggaccggccgaagtaggagtcgacggcccgcagctggacgcagaagtacgcgatgggctgacgaacgcttgcctgctcgcttgggcgccattgttcccttggatctgttggtggtcgtatggatccatgatccatctaggatcatcgtattgtattgctgtgtatgcatgtcgacggcctaccatggatgtcatccaccatagtgaggtggatggacatgcttcgactatatgcacctgtgcttgacttgcttcaggtcggaagctgattggttaatgttcatcgaaggacgttagatttagtgtggtctagatgttgatcacctggatagaccagacagaatgcgggataattcacatggcaaaataaat

SEQ ID NO: 308646 - DNA, 205 bp, Zea mays
aagcaccagacggacgcgtcggcgtcgggcgccgacgcggcgtgcggcggcgtgggcgtgctgggcatcgcctgggccttcggcggcatgatcttcgtcctcgtctactgcaccgccggcatctcggggggccacatcaaccccgccgtcaccttcggcctcttcctggcgcgcaaggtctccctggtgcgcgcgctgctctaca

SEQ ID NO: 308647 - DNA, 371 bp, Zea mays
tctgtgggtgcagtccgtggtgcgggaggagtggaccgccgaggtgttcgacgtcgagctggtgcgcctgggcgccagcgccgaggaggagatggtggcgctgctgcaggtggccatggcgtgcgtggccacggtaccggacgcgcggctggacgcccccgacgtggtccggatgatcgaggagatcggcggcggccggacggcgacggcgacggcgacggcaacggaggaggagagcgagggcgtaaggggcacgtccgaagaggagccgtcgcggtcgggaggcacgccgccagcctgcccgacgccgtgacgcggctagcagcagggtaaaggtggttggcctgattaaattgcataggttcgtgatg

SEQ ID NO: 308648 - DNA, 294 bp, Zea mays
tgcgtgcatcctgccgtgcggggcgctggacgtggtgcggatcgtgcactccaacggccgcgtggaggagatcagcggggggcccgtgctggccgccgagatcatgaaggcgtaccccaagcacgtcctccggaagccgacgtgcacgtgccccgccgacgccgccggcatcgctctgcagaagcccgtcgtcctgccgcccagtgccgagctgcacaagggcaagatctacttactcatgccggtcatggccgacgccaccccgtcggcgcccgcgcccgagaataagccacc

SEQ ID NO: 308649 - DNA, 416 bp, Zea mays
ttgcctaataccttggaacaagcaaagggggcggacccctaaggcggcagtgctccactccatcaagcgatgcacgacgtcaatggaagactccgccggccaggaggtctgcgccgttcttggcattggggacaacatcaagggcctcttggccacgctgtcgcgcgttgacaccatcatctcctatgattcgtcccctcgctcaacctgcatcctatcataccctatcccgtgccaagtccctgattcacggtggctgtgtggtagtcggtaacgctgcatatgaacctgggcgacatcaagtgcgaggtgttctgcaaccaggtgccccgcacggcagagaacttcttggccctctacgctagcggctactacgacagcactgtgttccaccgcaacatcaaggcttcatggta

SEQ ID NO: 308650 - DNA, 378 bp, Zea mays
ttggacgcgtgggcggacgcgtggggtccggaaggacgaggccacgggccgcctcgtcgcctccggcgtaccgcgggacaacgccatggacgtcctgctcgtcgacaccagcagggggaacaaggtggtggccttctacttccggaacccctgcgcgcgcctcaccctgctctactcgcacggcaacgctgccgacctcggccagctgtacgacctctttgtgcagctcaaggtcaatctcaagatcaacctgatgggatatgactattctggctatggtgcatctactggcaagccaagtgaagagaatacatatgcagacattgaagcagtgtaccaatgcttagaaactgagtatgggatcagtcaggaagacat

SEQ ID NO: 308651 - DNA, 276 bp, Zea mays
gacattactaatatatcttttttatatcatcatgaatgaacatgaacaatattgaattacatttgtacattcggcttgacagaaggcaaaagtccaagcgtgacgcacgagtgaatacaagtcagcgtgaacagtacgagggtactgttcatctatttataggcacagggcgtagcctgtgtaaaattacattcatgtccttcatgtttactattgacttaaggacaatctatcaaggactagatagccttttcctctttaagtcggctccttttt

SEQ ID NO: 308652 - DNA, 499 bp, Zea mays
cccactcttccgcccacgcgtccgcccacgcgtccgggggaaagcaactgggatcacttctgccacaatcatccggaaaggatactggacgggagcaattcagacattggagcgaattcgtaccatatgtacaaaacggacgtcagattgctcaaggaaatgggcatggacgcatataggttctctatctcttggcccagaatactgccgaagggaaccaaagaaggaggtattaacccggatggcatcaagtactacagaaacctcatcaacttgttgctagaaaacggcatagagccatatgtaacaattttccactgggatgtacctcaagcactagaagagaagtacggcggcttcctagataagagtcataagagcattgtagaagattacacatactttgctaaggtgtgctttgataacttcggcgacaaggtgaagaattggttgacctttaatgagccccagacatttacttcctttttctacggaactg

SEQ ID NO: 308653 - DNA, 510 bp, Zea mays
  unsure (1)..(510): unsure at all n locations
ttgtgtcgagccctacaagctccgcctcaaccgcttcggcgacatgaccgccgacgagttccgacgccactacgcgggctccagggtcgcgcaccaccgcatgttccgcggcgacaggcagggctcctcggcgtcggcgtcgttcatgtacgccgacgcgcgcgacgtcccggcctccgtcgactggaggcagaagggcgccgtcaccgacgtcaaggaccagggccagtgcggtatgtgtatatatatatgtatgcatgtacatatatactacatatagagatgcttgtggacaagaatatataatgccaacaccaatgtcgtccacgcaggtagctgctgggcgttctcgacgatcgccgccgtggagggcatcaacgcgatcaagaccaagaacctgacgtcgctgtcggagcagcagctggtggactgcgacaccaaggccaacgccggctgcaacgggggcctcatggactacgcgttccagtacatcgncaagcacggcggggt

SEQ ID NO: 308654 - DNA, 520 bp, Zea mays
gattttgtctcagggacaagaaaagagcgggaagagggagaaaaagaagtcctacaagaaggcgaagggcgaggcacaccttggcaaagagtgggattcagattgctcttcgtccaactccgacgacgaaggactcgccgcctcagccttcaacaagtcgtctctcttccccaacgagcgccacacctgcctcatggcaaaggagaaaaaggtaagcgctcgagatacccctacgtatgcttctttaagtgatgatgaatctagtgatgatgaagtagactacacaagtttattcaaaggtttagatagaactaaagttgataagatcaatgaattgattgatgctttaaatgaaaagaatagattgttagagaagcaagaagatattttatatgaagagcatgacaagtttattagtgtacaaaaatctcttgctttagaaactaaaaggaatgagattttatcttctgaaatttctgcttgccatgagtctatttctagtttgaagagtgttaatgat

SEQ ID NO: 308655 - DNA, 274 bp, Zea mays
  unsure (1)..(274): unsure at all n locations
atcaagtcnttcgtaaggaacaaggaaggtagctagctagttcgtcatcggcggcggcggcgcctgttcttagaggataaggttgtcgtagcggagagggagctagccaggattttggttgagatcaagagggggagcaagcggcggccgcggctatggggcgcggtaaggtgcatctgaagcggatcgagaacaagatcaaccgccaggtgaccttattcaagcgccgctcggggctgctcaagaaggcgcacgagatctccgtgctctgcga

SEQ ID NO: 308656 - DNA, 434 bp, Zea mays
cggatgcttgggttgagaaacgtgagaagccgcatcaatttagtaccaatgagttgatgcagcaattggaaagggtcaaggaagttaaaccagggaaacatccaaacaacaataagaggaagcgagatgcaaatgatggtcaatgttggaagaaacgatcgtgcctgtgggatttgccatattggacagatttgaagctgcgccataaccttgatgtaatgcacattgaaaaaaatatatgtgagtctttgcttggtacatttcttgctctttcaggaaagtcaaaggacagtattaatgcaaggcttgattttgaagacatgtgcataagaaaagattttacacttgaagcatgatggaggttcctatgtggttccttatgccccctgttcaatggataaaaaataaaaggtagcattttatgattttttgag

SEQ ID NO: 308657 - DNA, 390 bp, Zea mays
gagcctccagaagagcttgcagttactgagagtgtgtgtgagagagaggatgggtgtcatcttcagggctgctctgctgctggccctggtggaggtggccgtgagcactcacccatgagacccacttcgacgcccggtccggttacggaggcggagacaccccttcacatgcaccagtcaccccgaccccgtagcccgagaagctccgcaccaaggggccgaagccacacaagccgcccaaggagcacaagccgaccaaggagcacgggcccaagacggagaagccgcccaaggagcacaagccgaccccagccacgtacaccccgagccccaaacccacgcctgcgaagtacctaccacacccacgcctatactgcacatttcgcccac

SEQ ID NO: 308658 - DNA, 481 bp, Zea mays
ttgtatcttcttccaaaaactactattaaaaagctggatgccaaaagaagaagatttctttggcaaggtggtggagaaaaaaaaagtatcacttggtaaattggaacaaagtttgtcacacaaagaaaaatggaggtttgggcattaaaaatcttgaagctttaaacataagccttctttgtaaatggtggtggaagattgaaaatgaatcgagtctttggcaaaagataattgtcaagaaatactttcatggaaaagacttatacaatataaaagtgagaaactctgactcccctgtatggaaagacttgatgaaaatcagagctttctacctgaaaggcagacaaatcacaactaagtgtggagataagtccagattctggctagacagctgggtaaatgagaggcccttatgtacaattggtcctggattatatgagatttgtgatgacaaggttattctagttaaagatgccagaat

SEQ ID NO: 308659 - DNA, 537 bp, Zea mays
ccctcgtttccgcccacgcgtccgcccacgcgtccggcgaatcatagacttcattccgggatgttgctgttggcattgacattgggacttccaaatgcagtgttgctatttggaatggccaccaagttgagctcttaaagaatacccgtaatcagaaagggatgaggtcatatgtcatgttcaaagatgatactctttcagcaggagttactggaggtgcagccaaggaaaatgcacacgaggaaagagacatcttgtcaggaagtgccatattcaacatgaaacgcctgataggaagaatggacactgatgaagtggttcaagctagtaagaccctcccatttcttgtgcagacattgggtatcggtgtgagaccattcattgcggccctggtgaacaacatgtggcgatctacaactccagaggaggtccttgccatctttctacttgaattgaaggccttggtggagatgcaccttaagcatcccgttaggaatgctgtgcttacaataccaagtgcgttcagtccgtttcaac

SEQ ID NO: 308660 - DNA, 393 bp, Zea mays
aacctattctctaattattgaacatgtcggttatgtttaaagaggtttaaaatcatttaccacaccaatttattattcgaagaaaatgcagtaaccatctcccataaaaaatatccttgctgccctctttatttttaactgtctattatcagatattcatgttgatgaattttcaacaaagtaatgcacctcaattttgtcattacactatccattatttctcttaggtcccgtttgtttcctttcattttgaggaattggaatcttactaatggattaggctatttctttagaatgtgacattccaccactttccaaagttatcatataagcctatctcaaattcatggggtgagagatggaaattgattctatagaattacatgctatttt

SEQ ID NO: 308661 - DNA, 460 bp, Zea mays
gtgccaccagctttgaccgccgcctccggtcgccttctttactgctcctgggggccccactaccccgcaggagcggcggcagctgcggcggcggctaggtcgtaccccacatcgtcaagcggcggccgcaccgccggaggcaaaggcaagatgttcgggcgcgcgccgaagaagagcgacaacaccaaagactacgagagcctcggggtgcccaagtccgcgtcccaggacgatctcaagaaggcctaccgtaaggctgctatcaagaaccacccagacaagggcggtgaccccgagaagttcaaggagctcgcacaagcctatgagggtttgagtgatccacagaaacgtgagatttatgatcagcatggtgaagatgcccttaaggaaggaatgggcggtggaggatcccatgttgatccatccgacatcgtttgatcacccttttggaccctacttt

SEQ ID NO: 308662 - DNA, 358 bp, Zea mays
cccacgcgttcgtagtggatgggtggcagcggcagggctgctctgctgctggccctggtggtggtggccgtgagcctggccgtggagatccaggccgacgccgggtacggctacggtggggggtacaccctgacgccgacgccgggcaccccgaccccgaagcccgagaagcctcccaccaaggggccgaagccggacaagccgcccaaggagcacaagccgcccaaggagcacgggcccaagtcggagaagccgcccaaggagcacaagccgacgccgcctacgtacaacccgagccccaaaacccacgccgggcgagtacactttcaccctggcgccccccaagtcgacgccaccc

SEQ ID NO: 308663 - DNA, 458 bp, Zea mays
atgcgtacggggttttcttccgacggcacatgacggccggcggcaccatatcagcaagagccaccttcgttatgcacaagaacaaggagcagttcccagacagaatgatggccacgttctctgtcttgccatcaccaaaggtctcagatactgttgtggagacttacaatgctacactgtctgttcaccaactcgttgagaatgctgatgactgtatggagcttgacaacgaggctctgtatgacatatgctaccgcacactaaagctctgcaccccgagctttggtgacctgaaccatgttatctctgctaccatgagtggcgtgacatgctgtctgaggttcccgggtcagctcaactctgatctgcgcaggcttgccgtgaacctcatcccattccctcgtgtgcacttcttcatggtcggctttgctccgctgacctctcgtgggtcgcagcag

SEQ ID NO: 308664 - DNA, 134 bp, Zea mays
ctggtgcctaccagaagagcttgcagttactgagagtgtgtgtgagagagaggatggctggtagcaaaaggtctcctctgcaggtgctcctactgatggtgctcggccgcctggtggactactatctaaacggc

SEQ ID NO: 308665 - DNA, 487 bp, Zea mays
  unsure (1)..(487): unsure at all n locations
cccacgcgttcgcccacgcgtccgcccacgcgtccgcggacgcgtgggcgccggcgacgagcctccgcggaaaccagtgccaagccagaggtgcttctttcttcgccagactgctgctccgtgcgagaagagccaccacggagtctgcgtgactcgggacggtggagaaaatcagcggcacagcgtgggtctcgcgacctccagcgaacggtgagtagagatccctaagtttcgatccactgtcccagtggatttgggactgcgatggaggagcagttcatctctacgcgtgccgtcatccgtcgcacagcggatcgagcgcctcatgaatgaatgcagcttctgcttctccaaccccgacgaggcctacctggacctctccttctcagaggatggaagaaatggcacatttatgatcggtaatgagagctctcctgcatctctcttggatctacctgctgnggtggagtcatacaaaacatatgat

SEQ ID NO: 308666 - DNA, 282 bp, Zea mays
gcgttggttctttctttctaggctgcttcgcgcgacaacctatgcgaggagcttcaggagcggcggcggtggcatggtgcggcacggcggtggcggtgttcctggctgaatgtctgaatactggctgcagatggttctctctcctacttgtactgggacgcgcggatctcccttgtcctcgacttcatgagatacaacaagctcatggtcgatcccaagatgtacaactggcccttgccgatgtcgctcaccatggtgcacatgggtttatgctcatccctc

SEQ ID NO: 308667 - DNA, 380 bp, Zea mays
cttctcctcccgctcttaccaagttctactggggttagggttccttagggttttgcggtggggcgatggcggccgctgatgtggagtaccgatgcttcttcggcgggcttgcctgggccaccagcaacgagtcgctggagaatgccttcgcctcctaccgcgagatcctggactccaaggtcatcaccgaccgggagacggggaggtctcgcggcttcggcttcgttaccttgtcctacgagaactccatgctcgacgctatcgagaacatgaacggcacggagctcgacggccgtaacatcaccgttaaccaggcccagtcccgtggcggtggcggtggcggcggtggctacggctgcggtcgcggcggctgcggctat

SEQ ID NO: 308668 - DNA, 452 bp, Zea mays
ctcgttgtttccacctccacctcctcggtcacagagagtgtgtgagagagagagagagagagtgtgggggagggtgagagggtacccggtgaccgtcaccaagtgtgtggcagaggaggagcatggcggcgccgccgtcgaggtcctggggcgactacgaccacctgattaagctcctgctcatcggcgacagcggagttggaaagagttgcttgctgctgcgcttctctgatgacacattcacaacaagcttcatcaccaccattggcattgatttcaaggttaggacggttgagcttgatggaaagcgtgtcaagttacaaatttgggacactgctggtcaagaacgtttccgaacaattactactgcctactacagaggagccatgggcattctgcttgtatactatgtcacggacgagttattctttcaacaacattagaaaactgat

SEQ ID NO: 308669 - DNA, 483 bp, Zea mays
  unsure (1)..(483): unsure at all n locations
gtcccgcccgcctgcgcacttctcccacccccgcgccgccttcggcgccggcgagccctcccgacgctcctcgagcgatccgtccctctcgcggcccttctctcagccgcttccagcccaaggggaggagagggagaggatgtggtcgtcgagccaggcgagcacgaggggcgtcgtggagatggggagggtggaggccgggccgtcgcatttccctaagagacccgcgcctcagaactccgccagggtcaatctgtcaaggacacacacagttaaacctacctctgctggcaaccgttcaggaatttctgttaaatgcaacttggggtggtcttctcaaccatcgcctgacttgaggcatcactttagaggatactcatcagcatcagaggcagttcttacttcccaatctgatgtgagaaaactgtttgttgcaatgaaaaaatggtgttctcttgctgaatctngggggcccagagactc

SEQ ID NO: 308670 - DNA, 422 bp, Zea mays
ccctttcgttcgcacacgcgttcgcccacgcgtatggtggaggccgccgcccagaccgcctgctatttcccgcctgcggtgcccaaggctcaggccaacagttttgaggtggtaatggcggaccaggctaaccaacccactgtcctttataagctaggtggccagttccacctgagctccagtttctctgaaggtgtacgggcccgtaacatctgcccttgtttctcaccttatgaaaggagatttgccacgaggaactacatgacccagagcctttggggcccttcaatgtctgttagcggtggcatcaatgttccagtgatgccgactccgctctttgccaatgctccagccgagacaggtggcaaaaacttcatgattgattgcatgatgggcggcgtttcaactgctgtttcaagact

SEQ ID NO: 308671 - DNA, 346 bp, Zea mays
cccacgcttgcgttcacgcgtccggaacaagacaatattattaggagttgcattgatgttgctcttgttgcgattgcttttggatgtgttggcatgaatgaccaaaaagggggagattgtaagggaaatgtgcccttgggcagtacctattatgatttggggagtaccggcctgtgtggtttgacgactagcttgccacattgtgcctaactatgctgcctcaggctagttatactattcgaacgactaaccttaggcaaagtgtggcacgttacaccactaaccagacagaccctaagtgcccgagacacttaattaagtgatgacgggctaaaggaagagaaaa

SEQ ID NO: 308672 - DNA, 352 bp, Zea mays
cacttaactggtgccgctgcgccgactcctccgctccttgggggcgttattatggtcgacctacagggttggataccctcgcatgggccccaagagggagctcaagtttgcacttgagtctttctgggatgggaagagcaccgtcttggatctggagaaggttgcttccttcccttatggcctagatttggaatcagatggctgatgctgggatcaagttcattctcagcaacaccttctcgtactatgaccaggaccttgacaccattgccatgctcggtgctgtcccctaacgctactcatggactgggggcgagactggattgacacctacttttccatggccaggggc

SEQ ID NO: 308673 - DNA, 371 bp, Zea mays
aacgtttatagttattgagtacgtttttaatcacaatgcagggagggatttgatcaagactgggcggcggggcaactactgtgactcaaaaaaggctggtgtcggtgctgtgatggacaagatcatggctccgtaccaatgcacaaagaggaggggggatgtaaccctacaggatcgcaagagggtaaggccgatgagcagaatagaccacacggtctacaggaacctgggagtcaagttcacatggcatgtgctcgagaaccctttccgccactttagactcccccgtgagactaggaagcaagaacacccgtgagtggcacgcgaagtcgaagggaaacacctggcttttcggaagaacgggaagtgcg

SEQ ID NO: 308674 - DNA, 396 bp, Zea mays
cgcccgccgtaccggacacggaatggctgggctcgacgcacgcgtccgcattttcttgtggatggggtgagggggatccaactgggagggcattgctcggactactactctggtgtgcgccagctagtattactgaactgaggctggtgggggagctggaataaacaggaccacggggccatgcacatgcacagaattcatggacgatctgacgacacatgtttaaaagagggtgatgcccatgagctggatcgacgacaccatgtacaggatccttcgtgtcaagctcacaatgggtatgattgagaagccttacctcgactatagccttgacggtgagctcgggatgcaagaacaccgttaactggcgcgcgaagccgtcaagaaatccctggt

SEQ ID NO: 308675 - DNA, 560 bp, Zea mays
cagtattagagtcactaacagtgaaatcaaatatgctagcaaaaattcctgagtgtggatcttatggaatacaccatgcaggctcctcaagttcagcagagcctgaacaagtgcatcaagctgaacctaaagtgagcagaagacaagcagatggacatcctgtggcttatggtatatttaactccgtggatgtggatggcaaacctccggctttggttagttctgacagtagctcgtgtgttcctctgagcagccatgacaaggaacatcaaacctcttccttgtatcggggtgtagtgcagtatactgcagatagagaagatgatgaaaattcttctgggtgcacgcatccaagcaccatagaaaataagggttgcaaaccacaatatctaggtaaccataggataaggaaattgcttgcctcgaaggtaaggaaggcagcacgtaataagatttgtggagggattccatcaaaaaagatctgtggaggttgtcaaaaaagggagcaggctaaacttatgtggaaaagatgtcaccacacaccaaaggtgcaaagatga

SEQ ID NO: 308676 - DNA, 415 bp, Zea mays
gaagaagatttctgaggacgacttcatcaagaacaatggaaaggtaaatgggggcagtgatctcccacgtgagatgttgtctgagctatatcactcaatctgccgaaatgagattaagacaacacctgagcagggtttgggatattttgaaatgtctcctagtcgttggatagatctaatgcggaagtcaaaatctacgtccccatatatcatcggtgactctcagcctttcctggaccatgatatgtttgctgttatgtctggccctactattgctgccattgcagtggtattcgatcattcggagcatgaagaagttcttttgacttgtatagaaggctttttgggtgttgcaaagatatctgcatttcatcatctcgaggatgttcttgacgatcttgttgtttctctatgc

SEQ ID NO: 308677 - DNA, 451 bp, Zea mays
agctcaagcagagaacgttatttgtatcaagaaaattcatgtggggtggggaaaagttcatacttgagacggggaacagccatccagctcttgctgcccttggtggatctgttggcaatcttcagaagatccgagcatttcttcgggtaaggctgcgggatcaaggtgtgctagactctgacgcaaccgatctacgcagacagcctccagtggatacaacctggcagcagatttacttctgcttgagaaccggatactatgatgaagcaagacaagttgcccaatcatctggtactgcatataacttcgctcccctgcttgcagattggatttctactaatggtgctgtatcaccagagactgctctggcagcttctgaggaatgtgataaaatgctcagaatgggtgatcggccagggcgtcctggctacgacaggacgaagttactgct

SEQ ID NO: 308678 - DNA, 504 bp, Zea mays
  unsure (1)..(504): unsure at all n locations
cccacgcgttttgcggtggcgccacggacctcgccggggcgcgggcgcgacctctcccgccgctcgtgctctgcaccgtcgccggggtgcgcttcctggccgatccggagaccgacgaggtcttcgccaagatccgcctcgtgccggccgcgcccggcgaggtggagttcggagagccccgcgagttcggcatcgaccccgaggacgcccgggagaagctgtcctccttcgccaagacgctcacgcagtccgacgccaacaacggcggcggcttctccgtgccgcgctactgcgccgagaccatcttccccaagctcgactaccgggccgacccgccggtgcagacggtgctcgccaaggacgtgcacggggaggtctggaagttccgccacattttccggggcacgccgcgccggcatttgctcaccacgggatggagcgcgttcgtcaaccagaagaagctcgtcgccggngactccatcgtattcctgcgcaccgagcatg

SEQ ID NO: 308679 - DNA, 474 bp, Zea mays
cggtccagttttttcacgctcagctccagcaatggctgcgctggccatggcgatctcctccacggggatggccggcacccccatcaaggggggctccttcggcgagggccgcatcaccatgcgcaagaccgtgggcaagcccaaggtggcggcgtccggcagcccctggtacggccccgaccgcgtcaagtacctcggccccttctccggcgagcccccgagctacctcaccggcgagttccccggcgactacggctgggacaccgccgggctgtccgccgaccccgagaccttcgccaagaaccgcgagctggaggtgatccactcccgctgggccatgctcggcgcgctcggctgcgtcttccccgagctgctctcccgcaacggcgtcaagttcggcgaggccgtctggttcaaggccggctcccagatcttcagcgagggcgggctggactacctcgggaaccccagcct

SEQ ID NO: 308680 - DNA, 537 bp, Zea mays
  unsure (1)..(537): unsure at all n locations
cggacgcgtttttcgttatggagatggattatataaatacttgggacccaagctttgttggaggcgccaaggttgttgaacttgcaaagcatgaagttctacctcccaaaacatcagcttcactatcaggtcgtaaggatggtactattgttggttctgagatacaattagcagccgaaagaagccaaaagtcacgtgctgttttcgcaagagatgcaatcagaagagtaacatctgaacaggcttctgtggaagcagaaacaagtctgactggtggtaatcagataggtaattcacaggttggtgagagttcaagcaaattaccctcaatcattcctctaaaagagccacccattaccttgaagccatcagaaactgagcaggatgcaacagaggtagccgttggaaaactattgatcaaatcctactatgacattgtaagaaaaaacattgaggatgcaatccaaaagctgtaatgcactttctggtgaaccatacaaagcgggatctgcacaacttcctaattcgcanactata

SEQ ID NO: 308681 - DNA, 456 bp, Zea mays
actccgctgggccaccagctttgaccgccgcctcccttccggggcgctactggtcctccccacgggactcccccgcaggagcggcggcggcggcggcggcggcgaggtcgtaccccacatcggcgagcggcggcggcaccgccggaggcaaaggcaagatgttcgggcgcgcgccgaagaagagcgacaacaccaagtactacgagatcctcggggtgcccaagtcggcgtcccaggacgatctcaagaaggcctaccgcaaggctgctatcaagaaccaccccgacaagggcggtgaccccgagaagttcaaggagctcgcacaagcctatgagggtttgagtgatccagagaaacgtgagatttatgatcagtatggtgaagatgcccttaaggaaggaatgggcggtggaggatcccatgttgatccatttgacatcttctcatcattttttg

SEQ ID NO: 308682 - DNA, 477 bp, Zea mays
ctgcgccattggccagttagagccaaccagaagagcttgcaggggactgagagtgtgtgtgagagagaggatgggtggcaacagcagggctgctctgctgctggccctggtggtggtggccgtgagcctggccgtggagatccaggccgacgcctggtacggctacggcggcgggtacaccccgacgccgacgccggccaccccggccccgaagcccgagaagccccccaccaaggggccgaagccggacaagccgcccaaggagcacaagctcgccaaggagcacgggcccaagccggagaagcccgccaaggagcacaagccgacgccgcccacgtacaccccgagccccaaacccacgccggcgacgtacactgccaccccgacgccccccaagccgacggcacccacatacactcccggccctacgccccacaaacccacaccaaaaaccacttccactccttcgacggacac

SEQ ID NO: 308683 - DNA, 310 bp, Zea mays
cccactcgtccgcttctcctccccctcttaccaggtgctcctcgggttagggttccttagggttttgtggaggggcgatggcggcggctgatgtggagtaccgttgcttcctcggcgggcttgcctgggccacccaacgagtcgctggagaatgccttctcctcctacggcgagatcctcgactgcaaggtcatcaccgaccgggagacggggaggccttgtagattcggcttcgttaccttgtggtccgagaactgcatgctcgacgctatcgagaacatgaacggcaaggagctcgactgacgtaaca

SEQ ID NO: 308684 - DNA, 377 bp, Zea mays
cttgcacatgcgcactctcacactggctcgtgaggttgttcgtcctagcgacggcgctatactcaaggcacaagtcgagatacggggggtcatattgtgctacatcacgtccttgctaatgaggtgcgccgtgaagctcggcatgcctactgggatctatccccatggctacgctgcctgagccgctgcgctggccactgagctggctatggcgttgactatgctgtcgactctgctgcggctgctgcggctactggtcgcgttgctcgtgttgaccgtcgactagcacagctagaaggaggagcggtaccaggtgagccccctgatctacctcctggtggacggcatgcctgacgaggtccacatgaacgacaccg

SEQ ID NO: 308685 - DNA, 483 bp, Zea mays
  unsure (1)..(483): unsure at all n locations
cccacgcgtccgctctgtgtgtgtggagatggaccccaagttccccccacccccaccgctaaacaaaacggagcccaccaccgcgacgaccaccaccacctcgaccgcgcagcagcagcagcagcagctggatcctaaggactaccagcagcagcagcagcagccggcgcagcacctgcaaatccaaatcgaccagtcgcagcaggacggaggcggcggagggaaggagcagcagcagctgcaggtggtggcgcagcccggtgagaggaggcagcaggcgctcgcgcccaagcggagctccaacaaggaccgacacaccaaggtcgacggcagggggccggcggatccggatgcccgcgctctgcgcgggcgggatcttccagctcacgcgggaactcggcacaagtccgacgggcagaccgtncagtggctgctgcagcaggccgagccgggcatcgtcgccgncaccggcacgggcaccat

SEQ ID NO: 308686 - DNA, 200 bp, Zea mays
agagcttgcagctactgagagtgtgtgtgagagagaggatggatggcatcagcagggctgctctgttgatggccctggtgatgacggccaccagcatggccgcgtgacatacaggccatagccgacgtcagatacggtccgggatacacccggatcgctataccgtgcactgcgagcattaatcgagcgaggtcagccac

SEQ ID NO: 308687 - DNA, 244 bp, Zea mays
gctaaaatagtatgacactggcatatatatttaaactagtttattgcccgtgcgttgcgacggcttacaacaatatccatataaagtatccaccaaaaaatttaatatttcttattgattgtctccactataatattttttaaaaaatttggctaactgatgttattatttactcaatccaatataacatgaccaataaagtgagcgattagaagagagttcataatgactgactgaactaaca

SEQ ID NO: 308688 - DNA, 111 bp, Zea mays
attgccttgtgtctcaggtgatctcatctctgactgcttccttgaggaacgatggcgcccttaacgcggatgagaacaagtatcataccaaccatctatcctacaccatat

SEQ ID NO: 308689 - DNA, 272 bp, Zea mays
ggggctcaccaaaccaaacccatttaatttttactttactcctgtcttggacttgtacgcttatctacacattgaattcccagcgtctcccccgcagcacggaggggggatcttttacgcgcagcatggcgccatggccggccttgccgcgccagcgccacggagctcatcgatgaccggggccaggtcgcgcgggtgcacctccatccggagcccgtgcttcatgaacagcgtcagcgacatcttctgctcaacgcggtggccccgcgcga

SEQ ID NO: 308690 - DNA, 172 bp, Zea mays
atcgattgataccaaggccgctattgctgaaacttacaacctcacagattcagaatttctgaaagctgatagcactcaaactcgagatgctggctcaactgcctcaacagctattattgtaggtgatcgcctgcttgctgcaaatgttggctgattctagagcttgttattt

SEQ ID NO: 308691 - DNA, 273 bp, Zea mays
ttggttcgcacacacacacaaccagatctccggcaaggtcactcttaggcaccttcgctttaagatgcagacctttgagaaaaccctgactggctagactatcaccctcgaggtggtgtctgctgacaccattgacaacgtttaggccaagatccaggacaaggagggcattcccccagaccagcagcggcttatctttgctggcaaacagctcgaggacgggcgcacgcttgctgactacaacattctgaaggagagctccctttcaccttg

SEQ ID NO: 308692 - DNA, 304 bp, Zea mays
atctccatgcgtccgcccacgcgtccgcccacgcgtccgcccacgcgtccggcctcactctgtcgttcggccggcgaggaagccttggcctgccgaccaaaccatgctcgcgcgccgactcgcggcccccgacggcggtaggctgttctccgcggcgtcctccgcctccgcccgaggcggtcacgcgggtggcgacacactagggaagcgcctgctgaagctcatctacccgaagcggagcgcggtggtggtgctgcagcggagggcggaccaaggccgcaccgtgcagaagtaccagcttaac

SEQ ID NO: 308693 - DNA, 135 bp, Zea mays
ctcgggaatgcacacaccgcccggtctccgatctccgatccccgattctctcgtcgatccaagatgcagatcttcgacaagactctcactggaaagactatcaccctccaggtggagtaccctgtcaccatttca

SEQ ID NO: 308694 - DNA, 475 bp, Zea mays
tgcaaatgtggacaataagtgcttcaacggggattatcggatatgcttgcattgttggattgtacatttctataatgatacttgtcatgctgtggggcaaaaggatacgtggctatgaggatccagttgagcaatatgggatgaatatttggtcggcgtctaggctgcgagagtcttttcaaggtttggttcgaggcgtaacggtcgtagggtcggtgcactggataagcattctactcggatttgcagcgtttcggacagggttctcttgatgtttagctagaccccttgatcttctcaagtcttctagtaatgtgtttctgctagctcttcgagggcttgccacaagaactagcattgctgttgtggaagaaatggttttcagatcatggcttccagaggaaattgcagttgatctttggtactacaatgccttctgattttggacttgggtttacttaattcattgtcacta

SEQ ID NO: 308695 - DNA, 408 bp, Zea mays
cggttatcatggatgacattggttccatcacttatggagataatactacctaccctggcggaaaaactttctgatggctgtaacccacttaagatcctaatatttagtggggaagttctgtctgtatcgctgtggaagagagtctatgaatttctgccagaggctactatcataaatctgtatggaacaacagaggtttccggtgactgtgcattctttgattgcaaaaaattgcctacaattttggagcaagaagaactaaacagtgtaccaattgggtttcctatttcaaattgtgaggtttctcttgtcaccaatgatggactatcaaatgaaggtgaaatctctgtcagtggagcatgcttgtttactggatatttagctgatccccagaccagtaactgccct

SEQ ID NO: 308696 - DNA, 497 bp, Zea mays
cctttgcgttcgcaaatgtgtaaccaactttgtctgtgccaaagcactgaacaagaaagaggacgatcaaaatggctattgagatgccaacaatttgtcctgttgattgattaagaagagatgaggaaggatactgaactcacctgacatagatggagttagtacaccatcaccaatcaccatggatgttgccaggactgtcactagaaaaagcaagaccttaaattttggactgctttccatcttcttcttgatccaatgagccctcttcatgcgatatgtgggagactctaacttgtagtgagataccatcgcatcttcagcctgctgattagctcgcaggacaataaaacaatattttatcaacggaaggagaatcacggtgtagataatgagagacatgactccgagggggtaatctgtgttgctgatcccgtttgtgaaggtgctggagaaaacatagagcgaagaagtcccatggtttcgtagaccacact

SEQ ID NO: 308697 - DNA, 301 bp, Zea mays
tcgctttttgatcgacctgacgctcaagggggagagcctgcgctgcataaggaggatggcggactagagctctattgcaagctcgctcctcctgcatggcaggcgtgtcacacagcaaatgggcatgaacagaagaaggcgctccagtcctccagctggtgtcctacacagtatccattaaacgttagtgtgtgtgctgtgcccatccggaattattttgttccagggattgaccttcatcgtcagcgtgtggcaaggtgctcaaccctatgcaaaacaaccccctccctgaaaaaaaaca

SEQ ID NO: 308698 - DNA, 188 bp, Zea mays
gggagggcccaaccaaccaaaaggtaatgaacacacacaaaagcaacagggtttattacaaaggctgttaaagcaaagggggcaacagaaaatgcaagacaggatgcggccttttttatttgactgggggctccgacgcatccgtgacccaggcagcgaagggggaggataaacctagggggggggcg

SEQ ID NO: 308699 - DNA, 273 bp, Zea mays
ccttcgcgttcggattctttggatgagatgcttttgggaagattccttgttggcatcgggatcggcgtaaacactgttcttgttccaatatacatctctgaggttgctccaacaaaatataggggcactttggggactctgtgtcaaattggaacatgtctaggcataattgctgcactttccttggggataccttctgagagtgatccacattggtggcgaacaatgctttatgctgcatgtgtacctgggattcttattggtgctgggatg

SEQ ID NO: 308700 - DNA, 303 bp, Zea mays
tcgggtttttactcctgcccctccggctcggggtcgggtgcgtgaggttctccggggttcggtttcgtgggtgagcggatcgagatggagtcgtgggatgttgagtacccctgttccgtcggcggcctcgcctgggccaccgacaggcactccctccacaacgcgttgagcacctacggtcaggtcctggcgtccaagattatcctcgttcgggagacccagaggtgccgtggtttgaggttcgtcaccttctccacggaggaggcaaatcggaaccccatcgcgggcttgaacggcaagggg

SEQ ID NO: 308701 - DNA, 338 bp, Zea mays
ttcgttttttatagatgatgtcgatgcatacgaaataccctgggatgatctcgatattggttaacgaactggtttacgatcattgggggaggctaatggcgcagactgtgatggcacacaggttgctgtgaataaagttcttgaccaggatctatcaggggtgctactagagcaatccaaatgtgaagtgagaatcatctccaggctaaagcagaccaaaggtgtacttttttggggatatgtgacacaattgcctaatatctctatataaaccgagtacctgcaaagggggagcctatatcgtgtgttgcataggccaaattggcgaatggatgaag

SEQ ID NO: 308702 - DNA, 303 bp, Zea mays
tgatatttcaacttgcgctgattatattcttggctacctagctagaaatgtctaattaaactttgtttgctagctagattttgttgcttgttttcgcatctgatctttttatctcttatgagtgctcctcaaagcctctcagtgttgatgatgatggtggaagaagagaggtgcctttctcttgtaggctccggtccctagcctgtaccctccttttacatcttcaccagacccccggcatcgcgtctggaggaggatgtttcctctttcttttcgtcaccgttaccctctaggtccggttcc

SEQ ID NO: 308703 - DNA, 539 bp, Zea mays
agagatgtggctagtgtggccaagtgggagaaaaactttcggaccacttgtgatcaacgcctgttagctgagcttgataatgggcggtccattgatggtgatttggtatcttcttcgggtattttagcaggcgaggagattgatgagcaggtccgccaaaagttgaatggaaggagttcaagactcgtgcagaatatgaaagagatagtgcaacggcaagctgatggaattcagcgcagtttaaaggaaaagaaagttcttgcaggcgcagcacccaggaatccactcacttttgagaaagaagatagctatcaaattgcacatgacattgttttgggcttagtagaatgcatcaggcaaaatgggggtgcaaatccagatggagacctttcaatagttgcttctgctgtttctgcaatcgttgtgaatgctgggcatatgatagcaaatcatttggattttgcaggaggaaactatcaaggtgttaattctgtggctacttcggtaaatttgttcggcacactttacttattcacata

SEQ ID NO: 308704 - DNA, 414 bp, Zea mays
ctttttatgatggctacgcatattacaaactggtgtccattcttggccatgcaatgatgcatgcataccttagcctaaaaggttcacgaagccctagtactggggtggaacaaggcatctgccaagtgttatcccccctgtgggtagagtacaaagccatagggatgactaggaacatcttggatttcagctgataagcttcatgataggaatcatcccatggccctacctgttcgatgaaggctgcgaacaccggtttgaagagaacagttggaggattaatgctgctccaactgaggctgtgtgccgtcgaggcataccgaggtggctttagagctggatatccggctgtcgatcgctatggattagtcagcaccctatgacatcctgaggagacagggcatttcccatatt

SEQ ID NO: 308705 - DNA, 420 bp, Zea mays
tttttcgcgtccgcccacgcgtccggcttccttcttctgctctatgtctttgtacaaatatctcgagttatagttgttggtgtcttgtacccgatgttgcgtcactttgggtatgggttggacttgaaagaggccatgattcttgtttggtcagggctgcgaggggctgatgctctgtcactatcattatctgttaagcgtaccagcgattcagttcaaccttaccttaaaccagaagttggaacaatgtttgtgttcttcactggtggcattgtgtttctgacattgatttttaatggctcaaccacacaatttttgctacatatactcggcatggacataattgttgcccacaaagcttcgtttattgaaatatacaaggtacgaaacgctaaagaaagcattagaggctcttggtga

SEQ ID NO: 308706 - DNA, 496 bp, Zea mays
gcctctatcgatctgcaagcctcgctacgtagcagggcaatacaaaaaaagcagccgcaatggcgagcagcaccatgggcctctcctccacggccttcgccggcaaggccgtgaacgtgccgtcgtcgtccgccttcggcgaggcccgcgtgacgatgcgcaagacggcggcgaaggccaagcctgcggcggcgtccgggagcccgtggtacggccccgaccgcgtgctgtacctgggcccactgtccggcgagccaccgagctacctgacgggcgagttcccgggcgactacggctgggacaccgcggggctgtcggcggacccggagacgttcgccaagaaccgggagctggaggtgatccactcccgctgggccatgctgggcgcgctcggctgcgtcttccccgagctgctcgcccgcaacggcgtcaagttcggcgaggccgtgtggttcaaggccggctcccagatcttcagcgagggcgggctggacta

SEQ ID NO: 308707 - DNA, 507 bp, Zea mays
gctctctttggccagctagagccacccataagagcttgcaattactgagagcgtgtgtgagagagaggatgggaggcacacccaggacttctactccgataggcctgttacccttacccgcgtgcacggtctctggaatcacgtgagcaacctggagaggcgcctgacccgtcgttacatcgagatgttctacgccctgaagtaccgtagcctggtaagccgtttgatgcctgcctctgcctctgcctctgcctgccagagaggatcacgtgttcgttcccattccagcagtcttaaacgagtgaatgaactactgacgcatctctttctggaatccaggcaagccaggttccgctgtccttcgattagtacggtgaaagatgaagaagaagaagcccaggccggagaaccatcgtctgcatttcgatctgtttcaccgcaattcgcattgtctgcgggtattggagttatgtgcacttggcttccaagaactttggttccttctcg

SEQ ID NO: 308708 - DNA, 341 bp, Zea mays
gcgagctacagtccaccctggcggggtcgacggcgtgcccgccacatcaactgtcaccgccaatatggctccgtatacaaggcgctccagctctggtggaagaacaaccacttacctgcaggcgcatgtcaaggagctgaagactgagctctccctacttcgcgtagccaaggccaccgtgggagcacccaacatgctctccaagatcaaggaggagcgcacctatatcgcgcgcgtgctcacagagacctcgcaaaagcaaaagtcggtgctcgcgggaggcctacatgaagaagatcctgctcgccgtggacactacccctaagatgacccgggccatt

SEQ ID NO: 308709 - DNA, 442 bp, Zea mays
  unsure (1)..(442): unsure at all n locations
cttatcttatgcttcttcctcgtaagcttctccgaggggggctccccgctcaggacgcgcaggccctggcaggccgtctcctgcgctcctcttcatcctgctttgaccccgacgacgaccaccctacgttcacgcgggttcctaagatgccacctcgggcgccatcaacgccgcacccgaagcccaaggccctggcgggcaagatcaggcccgatgagcctgcgcactccgaccttccctttgacttccggaactcgtactcggagacagacccgacatggaggcccatccggttccacgagcccacccggttctcgcccttcggccccggacgnctcgaccgcccatgggactggacagccgcggaacgcgtcggcgatgatgctagtggcgacgagaggagccgggaagaggttctcggtgaacctctgtcggaagagga

SEQ ID NO: 308710 - DNA, 473 bp, Zea mays
gttaagtgccacatcaacattggggttattggccatggggtcttttttaagttgacctccggaggacaccttatatacaagcttggaggcattgacaagcgtcagaaccctaaggtgagaaggaggctcctgaaaagaaaaagcgtagagctctgtacgcggaggggtgcgaccagggaggacttgaacgtgagagaggggctccatacatattgctatgcgtaggtttgacacgaccaagtactactgcacgcacattgatgcgcctgggcaccgcgacttcatcaagagcgtggacactgttaccctccaggctgactgcgctgcccttatgaatgacggccacactggtggttttgaggctggtgtctacaaagatagcgcaacgccgaactaccctttccttgcggtcacccttggggtgaaccagatgatttgcctgctgcacaagacggttgcaacccctcccaaat

SEQ ID NO: 308711 - DNA, 385 bp, Zea mays
attggtttacctgagcaagagcaagatgagattgaggacttgtttaaacggctctgctggaagaaggtcgtagagaaaggtgatcttgctatatggcagaaatctatcaaccacgtagaatgtgttgacagtaggaaggtttatgatgctccgcagatttgtaagagcaatgatgtggattctgcttggtacaagaaaatggacacttgcatatctcctctcccagatgtgaagagtgaagatgaagttgctggcggagtccttgagacatggcccaaaagaggatttgctgtccccccaagagtaatccgcggggtaactgcaggcctcacccctgagaagttccaagaggataacaaggtgtagccagagagagtggaccact

SEQ ID NO: 308712 - DNA, 495 bp, Zea mays
ttcatcaagcaaaatcttctaaatatcaactggggggagaatagttaagaaggcgggggggtttgcttgaaaaccagattaggaatgctgcttatgtgctataataacctagctatcatatcaattactgcgggagttcgattagatatagggggtgtttgaatgcactagaattaatagttagccgctaaaattagttgagacatccaaacaccctatctaatagttcaactattagctatttttagtaaattagttaatagttacataattatttgttagctagctaatcccactaataatgtttagccagctaactattagttttagtggattcaaacaccccataatagtttacatgacatacaaaggttatagaatgccccttgttgttcatgagctgcgggtaagagccacggcccatgggtaaaagccactcccaggaacgcaattgactttacattcttgattgtgtctagtcgatgtgccaccaca

SEQ ID NO: 308713 - DNA, 431 bp, Zea mays
tttcttgtcctctgatacttatgcctcactcggcgggcgcttttttaaactccggcggggcttattacataccgacctccgacacctgtgctgatagcaagaagagatggctggcaagtggctatgggccaagcatcggcatcgatctcgggacctcctactattggcttcgcgtgtggcatcacgaccgtttcgagatcatggccaaccaccactgtaaccgctcaacacccttgcacatgtccttaactacctccgagcgcttcatcggagatactgtcaataaccatgttgtcatgaaccatatcaacaccgtgtttgatgccaatcgtctcattggaaggaggtttagtgatgcctcttgacacagagatattaagctgtggccccttaaggtaattacagggtctggagagaagccaatgattatg

SEQ ID NO: 308714 - DNA, 360 bp, Zea mays
ccacctcccccaccaaggtctgggctgtgtttatttaaacggagcggcggggtcgtaacaatgcacgaggggcagatgctgtcgcacaacatacactacggacttctggaggccatcgtgcggtgcaaccgctcgggccttctcaccgccgccaactacaacaacctctgccagtgcgagaccctttacgacatcaagatgcacctcacctgcaccgagcacgggtcctacctccagagcgaaccttcacccttgcacacaactgacattgtggagaagtgccctcttaaacttggcgatgagtgcaagcacattctgtgccaggccactgaaccactatctacctttttgcagtatata

SEQ ID NO: 308715 - DNA, 561 bp, Zea mays
ccctcgtgtccgtctcgctagcgggttcggcaggggagaccctaaaaaaaaagacacgggcctccccttcgctagcggaaccgccctcccctcgctagcggaaccgccctcccctcgccggggtaggggtttcgggggtagacgcccgccatggacgcgttccggaaacagctggacgtgctcatgggcgccaaccgcaacggcgacgtccaggaggtgagccgcaactactacgaccgcgacgtctgccgcctcttcctcgccggtctctgcccacacgacctctttcagctcacgaaaatggatctcggtccttgttctaagattcattctcttcaactgcggaaagattatgaagaagcgaaagcaaagggaacagaaaattttgatagagaactcgaggatatgatagaaaggctcattgtggagtgtgacaggaaaattcagagggccctaaaacggcttgcagatgatgatgccaatgctgctattgcgatatcggtctctgaggttactctgacggatgacatactgcagctggcaaaacagaataaggagaaa

SEQ ID NO: 308716 - DNA, 456 bp, Zea mays
tctctatggacgatgggttgtcactggtggggaaggtaacattgacaaggtgtgggatttgacagctggaaagcttctacatgatttcaagttccatagtggacaaatcaactgtattgattttcaccctcaagaatttttgcttgcaacaggctctgctgataggacagtgaaattttgggatcttgaaacttttgaattgataggttcttctggacctgaggtattgcaagtttttttcttaaatcaagctggatctggttatgaaatcgataatttgaagaccacaaactatggcttctcaaattctttagcatgcatgttctataggcatggtaactacagtacattcttgctgtggccttgtattaatatctttgtctttcttataaatcgtaactgtaagaactttctcagaggaatttagctcgcattttcctacagctgattcagttt

SEQ ID NO: 308717 - DNA, 430 bp, Zea mays
cctacgtttccgggcccgggagccgtcgcacctgccggacatggtgcacgcggggaacgtgctaatgcccatggtggagaagtggaggcccttcaaggactaggccgacgactacctgggcatcgacctgcacctgccggtgctgcagatggtgaagagctggcaggacgcggaggccggctgtctgaccgacggcggcgggagcgtcatgagcctggacgacagcaagggcagtatccccacccgccccgccggcttcaccgagtccttcacctcggccgatggccggtgatcggatcggatcggatgcatgcatgcatacatgtgtatattaaatgtctctacgctaccggaacctacctagactgatttcacacattcgttgctgtaggtacaaaataaagcgcggatccacgtccatgtgcacaac

SEQ ID NO: 308718 - DNA, 490 bp, Zea mays
cccacccgctccgttccacaagcgccataccccaaacaggataggctttctaccaaacatgagtgggataacttaactgcaagaacaacaagaggaacatatcaagggtgcagaccttgaaccatgcgcactcaccttgaatgacgttgatgcctatgatctacccatggaggccacccgtacatgagggcctgtggacatacatggggttcttgataacggaatacttgatgacccccacaatcaaaatgaaatagctgaggcactttataagcttgtgtcagataagcacttgtggtcacaatgtctccagaatggcctgaaaaacatccataaattttcatggcctgaacattgccagaactatttggcacgtgtagtcactctcaagcctagacatccccgttggcaaaagaatgatgttgcagctgaaatatctgaagcagattcacccgaggactctttgagggatattcccgacatatcactt

SEQ ID NO: 308719 - DNA, 410 bp, Zea mays
ccggtaccggccctcccgtcccggcccaccccacccggtcggttccattggccacctagagccctccaggcgaggccgcaatactgcggaggggggtgcgagacaggatgggtggcacctgcatggctgctctgctgctggccctggaagtggcggccgtgaccctctccgtggagatccaggccaacacctgttacggttacggaggcggatacaccccgactcccacgcttgccaccccatccccttagtccgagaagccccccaccagggggtctacgcccgacaagccgctcaaggagcacaagccgcccaatgagaacggcccctccccgtatatgccagccatggagcacaatctctcgtcggccacgtacaccctgagccccaaacccacgccgtcgacgtac

SEQ ID NO: 308720 - DNA, 394 bp, Zea mays
cactttttgatcggaaagggtcgggaagaaaagtgatcgaataactgcagcaaacttatgctgctgaacttgcaaataaagattttgcctatgacggtgcgaagagcctgctcacattgggcgccctacctgaaggtacaatggaattcactggtgtggatgaagacgtttcaactggaaagactcctgcgattggcagtccatgcaatgatagatctccttgcagggacaggaaaagggtccgacggccttacattacgaagacatataaggatgaactctctgttgcggcgagaatgcttatgagtgcgatcttacaagctttgaggggtcaggagttagagcacactcaggaagcaatactagcgattgacactatgctgaggcagcaatc

SEQ ID NO: 308721 - DNA, 478 bp, Zea mays
tctatcgaggaggagggcggaggcggtggaggtgtggtgcaccacgtgtggtacatccggacagtggggctcgacgagtccaccattgcgtccatagccgcagtggagtaccgccgcggggtgggccggggcggggactgcaccgtgtgcctcggcgagttcagcgatggggagctggtgcgcctgctcccgcgctgcgcgcacccgttccatgcgccctgtatcgacacctggctccgcgcccacgtcaactgcccaatctgccgttccccctgtcgtcgtaattccctccgatctccccgtcggtgccgtggaggctgaggcaggcggtgacccatcgggagaacaccatgctcacgaggcaatgtcgttgtctcaatctgaatctgagactgagggctcagaggactaggaggactcgtcatccactcaaagagacggcacaacggcaacagcggaggagaatggaagtgccact

SEQ ID NO: 308722 - DNA, 257 bp, Zea mays
gcgtatgttacagcaggattctccgccggttcagccttggttcagcactaggctttaaagtgaggaaaggaacattgactgacacacctgccatccttgtgttggatgttcgaacggttcacaggaagtggctcagccctactcaatgtcttccaggtgcccttgagggacctggggatgtgtggcccgatgttgatgtctacaacttctactagtacggcgccacaaccaaactacctgattaacaacgaccagat

SEQ ID NO: 308723 - DNA, 565 bp, Zea mays
ggttttgatctctggttttgcagtgcgcgcaacaggaagcagactatcatcaaggcaattgggaggggtggtgcccttaaagcatggaagtgatctctgcttttgctgtgcccgagctcggaaataggaagctgaatcgacctcgcaagcggggaatgtatccttttttgctgcaacattaaaaatgctacccaggcatatctgggtacctattaacttctgattgtgggattcgctagagtgatgggttcgatatatagggggactcgactgtctggaatgatacggtctaacacagatatgagggcctggaacaatgaattgctgactgattgacgccgataagacagctaatcgagtgacacgctactgaactggatgatttacgaagatggtgcgacacggatggaccaatatagaacagtagagctagagcattctagacctgagatagatacgctaaaggctagatttgaactgcaactacaggaaaatgatgaccttcgaagttcccaggatgagatggaaaattttatttctgagattcacgctgagaagagtcaac

SEQ ID NO: 308724 - DNA, 415 bp, Zea mays
ggtagtcaagggtgatggccctgcaatccgaaggggtctcgtgacgaccttctcaggcgaggacacttggcagcaaaaccgaccatggaccatccgcagaggccatggttacagaaccacacgctggcgcggggggttgaccgactcctagcgatttatcggacagacccccaaaagacaggtaccgatgaaccctattaacactgcttctgatgcctaaccaataatagcctggatgattagggaggcccatatacaaagggatatcaagccgatgccgttcaaggacgttccaaggaccggctagatgccaaggacagatgcatagcactacgcggaggagaagcagataacgctctaataaaattccggtatagcacggatttaaatgcatgggatcgctgaagtctacctt

SEQ ID NO: 308725 - DNA, 183 bp, Zea mays
ccgaaccagatcccgcttcatataaaagcttctccgacggatattgtagataaataaaagagaaaaatgaaccatgacaacatacacactacattttgagcagagttgatcacatcttcattcaagagaaaagctgacagcaaaaacacaaggcctgccggccgacgacaaccaccacacttt

SEQ ID NO: 308726 - DNA, 416 bp, Zea mays
gctgagagaaggaaggccttctgcagctaccaagtgacaaagccctcctctctgatccatccttccgcccacttgttgacaaatacgcagcggacgaggatgctttctttgctgactacgccgaggcccacctgaagctttcagaattgggatttgctgaggcgtaaagtgagagagaacgaaccagaagagtgtggtggttgtcgacggccggcaggccttgtgttctggctgtctgcttttctcttgaatgaagatgtgatgaactctgctgaagatgtagtgtgtatgttgtcatggttcatttctgtatcatattaatctataatatctgtcggagaagctatgatatgaagcgggatctggttcggaactggaagtgtttgaatttggtgcgacatggaagaaccaatctg

SEQ ID NO: 308727 - DNA, 485 bp, Zea mays
ttttcttttcccacgccaagaaaccacgctgcgaccatccgtcctcctcgtcgtcgatctcaatctctcttcgtcacgatcgcaaacagatattgacccgtccgatcggctccgcatcgccagtttgcatctgcttccttcggtgagggtgtgtctggttcgtgctcccgcagcgaaggctggagccgagatgacaatgccgggctctccggcgaggccgagtttctcggccctccgcggtgcccggtggcgggcctatcttggcgtcatccccggcttcgccgccgtctccaccgacgagctccgccgcgccgacgctgactcccgccggagatatgctaatctccggcgaaggctgctaatagatcctcatctctacaaggatgaagaaggtgcccctgacttgattgtggagaatccactatcgcagagcccagggagcacatggggccattatttcacgagtgcggagctagagaaaatgc

SEQ ID NO: 308728 - DNA, 299 bp, Zea mays
gtcggctctcttatccattaatgtcccaggagtatgccatacctgtgtgaaatcgcaaaacgttttgaacgatcctgttaccgaccaggtgaagcgccgcgaccctgctggcggaaggcactgatgcctgggcgtcacgccatatgagggatatgctctcgttactatggtgcccctgagctcatatttggtgcgacggagtatacaagttcagtagacatatgtacaggtgccatgcttactaactgagtcgttccttggacagccactattttcaggagagagcgctgctgatcagt

SEQ ID NO: 308729 - DNA, 617 bp, Zea mays
  unsure (1)..(617): unsure at all n locations
cccacgtgtccgcaagcaccagttcaaagtaaatctatcaaaatgttcctttgctcaaaccagcctgcattacctcggtcacataatcagtcaagaaggtgtggccactgacccagagaaaatatcagcagttaaatcttggcctacacctcgttcagtcaaggacattcgaagttttttgggacttgccggatactatcgtaaatttgtaaaaaactttggcattatgagtcgccctctcacctctctcctaaaaaaaggccaattgtttgtttggaccgaggaccatgatcaggcttttcaagctctgaaaaccgctttagtctcggctcctgtgcttgccctgccggatttcactaaaacatttgagattgaaactgacgcttgcgattcaggcattggggctgttctccaccaagctggccaccctatcgcttttgttagcaagacattgggtcctagacatcaacccttatcaacatatgaaaagaaatgtctagcaattctcatggcttgtgatcactggcgatcttactngatttgtgaccagttgtgtacacactgatcagaaaagtctacccatcttgatgaccaaagactaacacaccatggcagca

SEQ ID NO: 308730 - DNA, 558 bp, Zea mays
gtattcctcctcgttttcggaggagtccgccgtcatagcagctccactgccctgacgttcttcctctggtcggcatacctactggccgattccacagcgatatacaccctgggctacctatctgttgacagtatgtcagacgagcaccagctggtggcattctgggcgccgttcctattgctgcacctcggtggcccagacaacatcacagcgtatgcactcgaggacaatgcgctctggctacgccacctgcaaactctcgccgtgcaggtcctaggagctgcttatgtgatatacgagtacatcgccagcagaggggcattgctttttctggcctccttgtccatgttctttgccggtcttctcaagtatggcgagaggatatgggctctcaagtgtggcaacatcagcagcatccgcagcagcatcagcatccggaagatcaagactgacccttatcagctattgactctgggtactagcgaagaggatttgctgcttggagcccactcccagtttgatatctgcaaaggtgtcttcgccgatatcataatgcta

SEQ ID NO: 308731 - DNA, 522 bp, Zea mays
cacaacaaacaggaatcatagatcaaccattgcaatattgtttgtaaaaaaatgcaaaaccacatatcaggattaaggtcgcactggaaatatccatgtgaatgcatgtaaatcagatcttgaaatatttgaaagcaccagttttggatttcactctctgagaagggattccttctggttttcatcatctgatagactgcattcctgaaattacaataaataacatgaactttactgaccttacagagtacattgtaaaaacgataggagcaagaggtatgagttgtccatagcatgtactcaaaaatcattctcttatgacttatttgatcttcacaatgtttttatggttcatccttcgcatggactgaacaaaaaaaattcaaaagaatggcatataacattataaatattagacaggttgcgaagcaacaatcaccttcgcttatcgaagatttatgcactctccccaaagaataataatttgtcttctcaaacactttatctaaaagtaagtggaaa

SEQ ID NO: 308732 - DNA, 593 bp, Zea mays
agaagatcttgttgttactgagagtgtgtgtgagagagaggatgggtggcagcggcagggctgctctgctgctggccctggtggtggtggccgtgagcctggccgtggagatccaggccgacgccgggtacggttacggcggcgggtacaccccgacgccgacgccggccaccccgaccccgaagcccgagaagccccccaccaaggggccgaagccggacaagccgcccaaggagcacaagccgcccaaggagcacgggcccaagccggagaagccgcccaaggagcacaagccgacgccgcccacgtacaccccgagccccaaacccacgccgccgacgtacactcccaccccgacgccccccaagccgacgccacccacatacactcccgcccctacgccccacatacccacaccaaaacccactcccactcctccgacgtacaccccgacccccaagcctccgacacctaaaccgaccccgccgacgtacactccatgccccaaactccgacgcccaagccgaccccaccgacgtacaccctttccccaagcctccgacacctaagccgaccccgcctacgaacactcc

SEQ ID NO: 308733 - DNA, 455 bp, Zea mays
cccacgcgtccggtcgtcctcttctctcgcctccaataattcgtaaccattctccttccaggccgggctcctgctggccggagttcccatctccctctttccttctcggttactatccgtgagtgtgcctgcccccgtgtgtgcgcgtgcaagatcgaccgggcgcagcttcacgatggggcgcggcaagatagtgatccgccggatcgacaactccacgagccggcaggtgacgttctccaagcggcggaacgggatcttcaagaaggcaagggagctcgccatactctgcgacgcagaggtcgggttggtcatcttctccagcaccggtcgtctctatgaatacgccagcacaagcataaagtcagtgattgatcgatatggtcgagcaaaggaggaggagcatgtagcagcccccacacagagcttatgttctggcaaagggaggcagcaag

SEQ ID NO: 308734 - DNA, 226 bp, Zea mays
aaagggccctgggtttacaaccgttttattccacgggcttgggggaaagcccccaaattttttaaatatggtaaaacagggggggggctgccccaagaaaatattttgggccagaaaaaccccttttcacttttgttttacaaaggggggggaaaaccaaaactcccgcgctggcaaaaggggtttggggaaaccccccaaaggaaaaaaggcttttttttaacct

SEQ ID NO: 308735 - DNA, 396 bp, Zea mays
aataagaaaagataataagaattgatgaaataatggtaaaataccattctggggaagttcctcacttataaatatcactaggtaggtgcccgtgcgatgccacggaacataaattgcgaacttccaatggacttcatttgagacatcgcacgggtacctacctagtaaatatatactcacaatatactcacagagaagaacaagaaaaccggtcacttagtagaatgcctcctcgatatcctgtcagcatccctgaatgcgctatctagcttgctgtttccactggaggaacttgaccatataccatattttatcgatttgtgcacatctgcttcaccaattgacttgataacaaagaactttgcatacatatagtcgattcagagatcatctatg

SEQ ID NO: 308736 - DNA, 503 bp, Zea mays
cctggaattatgtataacatatattttaactatagacaagcatctgttctcagttttctatatgcaaacctcagaatgtgcattggaaaataaatcgaagctgtatatatatgttactgggctaacaaaaaccctacttcctggtttcaaaacattttcagctcttcagttgttttgcttgagcgtcctccttcggcagaacatctcaatcctgtcgcaagcttctagtattaaactaacaggtgctccgaaaaatatcctaacccagttcttcaacccaatgacagaaccaggtagaaccaggacacattcttctttgatcaactcacgagcaaagtccatgtcgttggcgacgccatgtagaattgaagtgttgatctcaaccatcataaacattgagccttcaggcttggagtagcaccgcagggcttcgatttggttcactcttctgtacagagcatcagctgcagactcgagcggtgaacaacattcctatggaactc

SEQ ID NO: 308737 - DNA, 456 bp, Zea mays
tctggcttttcctccccctcttaccaagtcctcctcgggttagggttccttagggttttgtggaggggcgatggcggcggctgatgtggagtaccgttgcttcgtcggcgggcttgcctgggccaccagcaacgagtcgctggagaatgccttcgcctcctacggcgagatcctcgactccaaggtcatcaccgaccgggagacggggaggtctcgcggcttcggcttcgttaccttctcctccgagaactccatgctcgacgctatcgagaacatgaacggcaaggagctcgacggccgtaacatcaccgttaaccaggcccagtcccgtggcggtggcggtggcggcggtggctaccgcggcggtcgcggcggccgcggctattgtggcgggcgccgtgacggctgttattgcggcggtggccgctaccgcggtcggcgcgagggtggtggcgg

SEQ ID NO: 308738 - DNA, 183 bp, Zea mays
gaagcatcatcgtgcacagggctaattattattaataacccgggagcactgcaggggaattaacagctcttgcaacgtcaggggttgccaaccacacactactttagaccagggacgcataacacgatagcaagagcaactttcgtgtgaccacgggataagggcagcacactggcctgttgc

SEQ ID NO: 308739 - DNA, 361 bp, Zea mays
gtttcgttagcgctttggatgatccccataactattacccacctgagttcctaaacacactaacgcctaatgggctgcccccgcatgttttgaagctcaagattggatgccctgttatattgcttcggaatatagaccctgcgaatggactttgcaacggtaccaggctggtggttcgtggtttccaaagaaatagcattgacgcagaaattgtactgggtcagcatgctggaaaacggattttcctgccacgtatacctctttgtccctctgatgatgagatgttccctttccagttcaaaaggaagcagtttcctatacgtcttagttttgcaatgactggtaacaaagcacaaggtca

SEQ ID NO: 308740 - DNA, 380 bp, Zea mays
aactaaagcattgatcttgatgccctaaattagagactattatgggtacaatacaatttgcaaagtgaggatacaaggacttcagttggtcgatatccaaagctcgagatagacatgacaattaagacaacgaaactaaacatggctaaaaactactactacaaatgtctgcagactggcacataggcatacaaacaataaatcaggcctaactgcagctctacaacctacaaagcgacaaacatagcacggcttctttatctgatcgttacaaacttatttgtaccatgcttagcccaaaacgtcttcaagtcaattggattaacaagattgtacccttcaccagcaagcttctcaagcacctttttgaatgcaccttg

SEQ ID NO: 308741 - DNA, 298 bp, Zea mays
attctcaaaaacccgggagcaatgccggggaattaacaacccttacaacatcagggggtggaaaccacccaatgcttcaaaacagacccacataacacgatagcaggagcaactcttggcagaccacgggataagggcaggacactggcccgatgctgcgtgatcagcaaacttgtttaatactcgggacccttgggggcaacctgggccttattgaacccagaaccggcctcctcggagaccttttggagggcccccaggtcctaacgggccttagagaactcaccttgcttcatac

SEQ ID NO: 308742 - DNA, 482 bp, Zea mays
acgctgcattttgggtttcaactgtctttttacggatataggtgttattgccttcagaagaagtgatgattcagcagcatttaagggagtattagatggccagctatacttagttgattttaatagagccgaactcgatacttgcttaattgctaagactaatatgggttggctctggcatcgccgactagcccatgttgggatgaagaattttcacaaacttctaaagggagaacacattttgggactaacaaatgttcattttgagaaagacagggtttgtagcgcatgtcaagcaggaaagcaagttggctcccaccatctacacaagaacatcatgacgaccgacaggccgcttgagttactccacatggatctattcagcccgatagcttacataagcatcggcgggagtaagtattggctagcaattggggatgactattcttgcctcacttgggtattctttttgcaggaaaaat

SEQ ID NO: 308743 - DNA, 308 bp, Zea mays
gcgctcgcgcgttttcgcctggatcaggaggcgccgtccggccagcacggaccgtcgcacgccgtatccgttctggaggcagtgccccagctcgtggagcgcgcccacgtggcccagcgacgccgcgcgcgcgcacagtgcggctccggcgcggaggtcgcggtcgtccttgcccccgccgctgccgttgaactggaccacggtcagcgagtagagcgcctcgcggtgcccgcccaccgccgtcgccgacatcagtgcagcgcccgagccgcggatccccaggcagtagaaccgaatcatgccaagga

SEQ ID NO: 308744 - DNA, 319 bp, Zea mays
gaactcagaaggtattatgtgggcattacaggaaatcgcagctttggcagtcaactttccaaccaaaccatgatacagaagacctcgtgcaccaagtccaccaactagccaaaatgtgcagctgctcttattgcctagtaaatcatgcaaacaacccaaaagtggcaatgacccatttgttgtaagtggaggcatggattgtattccagctcttgcgcgtacaaaatcccatttactaattcttggatataccccagaagctttagggagcaactcttcgattgcagtgggagattctttatcggaaacagatgaagaa

SEQ ID NO: 308745 - DNA, 245 bp, Zea mays
tcttttttttttttttttttttttttttgcttttttgtttttattttttttggttttacacccaatttatttgcaataccattacaggcccgaacaatacacctgctggtgctaaacatgtaggaccaacaccctagtgaagtaaacgggcgggacagcaaaaaacaggccgggggcagagagctccacgggattgtctccaggatcgactaacggggaccgctgggggcacacacagaggaggg

SEQ ID NO: 308746 - DNA, 278 bp, Zea mays
aaaaaataggttcccaaattagcccttggcatgggaatttgattgaatgcagtccatcggctgtttatcgttccagatgaccgaatgtgttcttttggacgacataataaacttgactttgtatgtgcagatagagggagactatcggaagtacaccgagactagaggaatgtcaatgtcattcccatcgatatcctcgcatgctaccaccacatttatgtgcctccggttttcaggaacctccaccttggccacctccctggggacatcaaccacct

SEQ ID NO: 308747 - DNA, 335 bp, Zea mays
aatatacttgttttttatggttcaattctttacgatgcatgaaattttacatacgtaccgtttttgagtctttgacgaaaaaaaataccttcccttcttttcatgcttcgtgaagaagaattttcatttatcacaacaatacccatagtgttctgatgaagaatatccaagcttcgtgaaaatattttccgaagctacattccgaagatcaatattgtatctccttgtgacttagcatgttttccctttttcaaagcattcttccgaagattgatattgtgtccccttcttgtgccatatgcagcatgatgtatgatgcttatgctatgcgaaat

SEQ ID NO: 308748 - DNA, 178 bp, Zea mays
accctcaaaagttgggatttgaataaaccaaaccgccaaaagggcatgaccgttttttgatcgatcctggctttctttttttttgtctcacacgttacacacttatacatgggcgaggtcgtacgtacattcttccatgcacatgcaagcgtccgtgtacccacggggagattttttt

SEQ ID NO: 308749 - DNA, 119 bp, Zea mays
accgaaccaaaagcacggttccatagcacaagaaaaatacctgcgttaacagcctcggacagggcccagggggtggggaccttagcagacgcaagatcgcaacaccacgaaagggaaca

SEQ ID NO: 308750 - DNA, 336 bp, Zea mays
  unsure (1)..(336): unsure at all n locations
ggggcacactattcaatcatgattaaatggagatgatacatcgatctgccaatgcattcagaagctcattgggctcactcttactcagtacccatatttacaattaaactgacatttttcccgcgaaaatagaaggaaggctgacccccggtcaaaaatcgaggtccggcacgacctggccgccctccaccttggcgtccgggagcgtcagcgccctttgcagcttccggctggagaacacctccaccttcgncgngtacgtggccgtcaccggacggtggtccgacagcgccagctccgaccgccggtagcccagcagcctcagccccttgccgt

SEQ ID NO: 308751 - DNA, 337 bp, Zea mays
ggttcgaacgcgtatacgtacggtttgagaagggtgccgcccgcgcgcctattgaaccatggcaaggaaggcgctggtcggagccgaagtcggcaccggtggtgcagccgtcgtcgctgccggtgctggtgcggtgttggttgtggtgccgcctgggttcggcctctggaactgtatcctgtactgcattttgccgtcgtcctcgccttcatccccgtcgacggtgtactcgtcgctgtccgtttcgtcctccgtggtgaactcccgagacggttgctcgctcaacatcctggcgatgtcttctggcttcttcatgccggagtcggtgtcgaaagcg

SEQ ID NO: 308752 - DNA, 354 bp, Zea mays
gcgcttgtcttttttttttatttgtttacccataaagccgcggcggagagctggataaatttacgtactggaaggaaggaaaacgtaacagcttaaacagtacacggaccaagctaccggatcacacgtacaaattcaccccacaagtacaggaaactgtccctgtccctgtcacatgatcaaagggtagggacacttattcatgggcttatcttattatctatggaacgctgaaaagtacggctttgacgcgccagcacagcacagaacagtcacgtataggcgccgctcagtgctgaccgggcaggttctccttgatcttgtgcataatgcctttcttctcgccggtgccct

SEQ ID NO: 308753 - DNA, 443 bp, Zea mays
ataatatatatttaaatagtttaaaatattttaaatctaaataataaacaaaatgacttaacacggcctaaccccgtactgtctaagctctcgaaaccgggttttcatttctaaagtagtacaagcaaacatagatcagatttgctcaagcaagtgatttctgcaccaagactagggtcttgaacatcaccaaggggtgcgactccagcattgactccttctcttcagctgataaaatggtgaacccgagcttctctgaccagatttgtgtcatttcagggtcaacaggcgcagtaagaaggcttacattccaggctctcaaatttgcctcgatcgactttaggagaagtatgaagtaacccttttttctgcactcgctacgagtagcaatgaggacaagttctgcgatttgttcgatgcgcactttcagaatcgcagcagag

SEQ ID NO: 308754 - DNA, 446 bp, Zea mays
aaatgctatgtatgtatcacaaacaaaagccaatgggaaaatgtatcaacaaaagagccaaaatgcagcatcttaaacccacaatccagcaaacgaacgaagcactgctgcaagacagtaaggccattgccaatgtttacccaaaaaaaacagcacccgatttaatagccaggctcaccaccttgatgaatcgtgtgagggtcaccggataaaagcaacaacgtaaatggaaaaaggcattgtttattacaggcctagaaatactaccacgcacgctccaacaaatggcaggcatccttccgctccctccatcatcattattccaagctccgaggcataggactgtcctctagtacaaagaatgtgtcatagggccatccaaggttctgcctggttgcttcaacctctttggcacccagtgcacttccatgaacactgtatgagtt

SEQ ID NO: 308755 - DNA, 441 bp, Zea mays
gaaaacataatttatttgatctgaaaccatcataccagttcaaccaatcttcacacttctactatgccaaccatgaacaggtgtaatgcaatagcaaacatggaataaatgggaggtacaaccatgcaactcaagcacgcctggttgactgacaccaaaggaaaataaccatgcatccagatcgatgactcaatactcagcttcctcgtcctcatcttcaacttcagctccgacttcctcataatccttctccagtgctgcaagatcctcccttgcctctgagaactccccttcttccatccctcagccacggctgtgttgttgctgatcatgcagactgctcgttgcaccttggccaggtcccctccagggactacagttggtggttggtagtttatcccacacttgaaaccagtagggcaccaatcaacaaactgcact

SEQ ID NO: 308756 - DNA, 420 bp, Zea mays
aagacagggaaagaagagtgatctttagcttttgtacagacacgcgtgcatggagattcaattccactctcaactccactccactccttttgtgttgctaacacccctcctactagtagtaccacaaaataattaaaaaaacaaaagaacaaagcgaccacacatcattccactccactccacttggttggatgcacaaattaaggaggtgtttggcttctagggactaatgtttagttccttcattttgttccattttagtatataaattgataaatatagaaactaaaatagagttttagtttctatatttgataattttgtaactaaagtggaataaaatgtagggactaaaaattagtatgtagaaaccaaacaccctctaaagcttttctatctctctccatctccgccccctcg

SEQ ID NO: 308757 - DNA, 353 bp, Zea mays
tttttattttttttttttttttttttttttttttttggggggggtttgctgctaaccgctgattagctcgttatcatgcatccagagatgagatactgtgccatacatagacacactatatgataagtagacacatgccgaaggtagcaggttgcccctgtttgctgctagcttgatttattcttagttggtagagaggcaacaaaaacacgtgaaggcttgcagcaaccatataattattgttgtccacgtcctcatcctccgtaaggcttctggtccttgcagggcacgttgtccccgtaccccacccggagcatatcgcagtacctcttgtagtagccgacccggtcctt

SEQ ID NO: 308758 - DNA, 386 bp, Zea mays
aacagcagcaacattgtacaaagcagcacaacagaatcaagcatgatactatttgacaagagcgtaaagcgtgcaacttagttatcactgctccatcaaaacaaacagaatacttaacaacaagggagcccataggcgctgaaatgcttcaccctgaacttccactttcccttggcagcatcaaaggacacaaactccgcgccctgctcctccgccttcttcatcagcatttccctgtacctttccacccttgtcccctcacagtactcctccccagtcttcttatttacgcacttgatgttcagtagagtcacctccgcagccttgttcagcccctcacccacagggggcttcttgctgccgtccttgtaaacaaccacctcccg

SEQ ID NO: 308759 - DNA, 370 bp, Zea mays
atggaaaatcaaggtttattatcatcacaaattctatacatttgatctagaaacttacaaactaaaaccagggccaaaagtaggactaagttattcaaccatatcaatccggccctaacacagccaataccctttgttagggcaaaattcaaggcgccatggacaactttttgggttgccaccgtttgggaaacaacaaaggcaaatgtgacaaaagggccaggccattttatgatacagcaaccatcagaatgaacaaagagggcaatagcctggtttactgtgctaatctgaaggaacaaagcagatctgatttcctcatcactgcccattagggatttatgtttgaatttacatgccaaagggtttg

SEQ ID NO: 308760 - DNA, 403 bp, Zea mays
gcaagtatcttatttacattgctgttcgtatttttatacatttttcgtgtgatttacatactgcacttgctgactttagacgaaacaaaaaccaacggttccagcgcggcgaaaggctggccttggctgcgctctgccgcgtgcctgccattgctaagggcaggctaggtggaggcgttcggcgggggtgagcgtgtggcggaagtggcagcggtggccgtaggggcagacctcgccggcgagcaccatgcggcagacctgggtcttgtagcgtgggtggcggatgacggggcggagctcggcgacgccgtgagcgaactggcactggtcgccgtaggggcacgccccggtctcctcccacttgttgcacagctccgtcttcaacatgccctggttgaacacc

SEQ ID NO: 308761 - DNA, 474 bp, Zea mays
  unsure (1)..(474): unsure at all n locations
gtttcattcctccatctctattcaccccgcgctttcgtttctcgagtgctccggttcctgagccgctgcttggtttgattgatctgggcgcgtcgagggatctgagcggaatatatgaggccttggagttgagggatggaggatctgattatcttggcaagggtgttcttaaggctgtcagcaatgtaaataacattattggaccagcaattgttggaaaggaccccactgagcaggttgagattgacaacttcatggtccaacagcttgatggaacctccaatgagtggggctggtgcaaacagaagcttggagcaaatgccatccttgcggtttcacttgctgtgtgcaaagctggagctatggtgaagaagattcctctntaccagcacatcgcaaatcttgctgggaacaaaactctggtgctccctgtacctgcctttatgtgattaatgganggtcacatgctggaaa

SEQ ID NO: 308762 - DNA, 370 bp, Zea mays
gtgtcgtgctgttcgaccagaccgacgcgaatccaaaagcggacgcggcgtcacggccggcgaggtgcccggactggctcagaccggagatgttgcagtgcccgatcgcgctggacctcatgacggaccccgtgactgtgtctactgggcagacgtacgaccgcgagtccatcacccggtggatcaaggccggatgccacacgtgcccggtcaccggcgagcggctccgcaccgccgacgtcgtgccgaacgccgcgctgcgcgggatcatcgagcggatgctgctcagcaacggcgtctcgcttccggacccaagcagctcagggcaccgtcacggcgcgctcggcaacacagccgtgccattcgggcc

SEQ ID NO: 308763 - DNA, 479 bp, Zea mays
tttttacgacagcttcatggccaaggtcgccgactttgggctgtccaagaccgggccggagctggacaagacgcacgtcagcaccgccgtcaagggcagcttcgggtacctcgacccggagtacttccggcggcagatgctgacggacaagtccgacgtctactccttcggcgtcgtcctgctggaggtgctctgcgcccgtccggtcatcgacccgacgctgccccgggagatggtcaacctggcagagtgggccacgcagcggctcaaaaacggcgagctcgacagcatcgtcgaccagcggatcgctgggtcgatacggccggagtcgctcaagaagttcgtcgacaccgcggagaagtgcctcgcggagtacggcgtggagcggcccgccataggggacgtgctctggtgccttgagttcgcgctgcagttgcaggaaggcgttgcggacagctcaggcacagacaacacgcagc

SEQ ID NO: 308764 - DNA, 490 bp, Zea mays
ttctttcgcgtgggcggacgcgtgggcggacgcgtgggtagcaatatcaagttttctatgcagccaccacatggtaatttaaacaagaaaggatctttgatgagctcacctggatcagtttctcactaccataacttgaatggtgatagccatggcattgatgtatctgggcaatatatgaagactcatgcaggcggttttacttcatccatgctgaacaatcaattgaatcctgatggtgactatggcaatgttctttcgaacaatggggtatcgggttaccagggccaacaggagacaatgtatgcacaatacttgcaatcaaactctgattccccccttggtgcagctgcaagcatgagtcctttccaagggaggggttttactggctcaggacacttggatagccctgggtaccaaaaggcttaccttgggacattatttgcccagcaaaagctacagtatgggatgccatacctgggcaagtctg

SEQ ID NO: 308765 - DNA, 303 bp, Zea mays
tttgttgatgtctttgacagcatctggaataaggtctacgacactgagaatgccaaccagaaggagaagttcgaggcggacctcaagaaggagatcaagaagctgcagcggtacagggaccagatcaagacgtggattcagtccagcgagatcaaggacaagaaggtgaggattacggattacctcgagtcctgcccctcccctggcaagcctctatgtctgcacgtggagggcatggttgtttgggatgcaatgctgctgctgtttgctgactatgtgttgtgatcaacgtgccgtcatgct

SEQ ID NO: 308766 - DNA, 433 bp, Zea mays
cccatgcgtccgggcgtggccccgtggcggcgcggtcgcagtcgcagtcgcagggacctgcctcccccgagcccgcgcaatcggcgccggctcccgccgcgaggcccctgacgctggacttcaccaagtcggtgtccggttacagcagggactccgggttcagcgtgtccggcgcgagctcgtcgttcctgtcgtcggtgacgaccggggacgggagcgtgtcgaacgggcgcgcgggaggctcgtcgttcctcatgctcccaccggcgcccggcgcggccagctgcgcgaagccgccgcccgccggtgcggcgcagaagcgcaagtgccacgaccacgcgcactcggagaacgtcgccggcggcaagtacggtgctaacggcgggcgctgccactgctcgaagcgcaggatgcaccgtgtgaagcgcacgat

SEQ ID NO: 308767 - DNA, 436 bp, Zea mays
acattatctgttacccgcctattcacctcaactcacattggcatggcctcggctaccttctcttactctccatctcggcggatggaccacctcacacgccatctcgtatcctgttctgccggcgagctaacctcagtcggcgcccccgccgatgccgcctgacatgccgaccccgtgaaaagcccacgctccactgcctacagggctcacgccgcagagctagtctgcctattcgaggaccctagcagtgggccacgggtgctgcttacacagcgcgcttactccctgtcctaccactccggggaggtgtcgttacccggagagacggtggacgatggagacgcaaatccaaaggccacaattataccgcaggcgaaggaggagattggactggatccagcgctggtctctgatgatacagatgttgagcctttcc

SEQ ID NO: 308768 - DNA, 401 bp, Zea mays
tcgccgacacatgatgagttgtggctcagtatcatgggcggcgcgccaggaggaagagatccattaatcaggacaagacacgttgtgtcatgtagctgtgaacaaggtcatgtggactatggatgaatttgagactctgagatactggtatcatatatgccagagagcccaacccacatgctgatatacagcgtacatacagggcacacagaattggacaatgcaccaggactctggtttacaggcttgcaggaccagctggagaagaagagcgtatcttgcaatgagccacgaagaaattgatgcttgatcaactcttggttcacaaaggagcatcacagaaagaagtggaagatagcattcgctggggagccgaggcactcctggaagatagtgacagt

SEQ ID NO: 308769 - DNA, 340 bp, Zea mays
acttgatctggcaagctgaccggcagcgggccgacgggcgcacctttgctgatcagggcggctgcggcgcacgcactcgtgctgtttgcagcggtgatggaggagcgcgaacattgtcggcggtgacgtgaacctggacgagacctagggtaccttcgcgggcggtcaacattacgctgatcacgaggctagtggactgggtggcgcaactgctggggtccaccgctgtgtgcttactgctcagtttctggacgggcgggcaggccacaggcaccttcgggcctactggcgtgaccttgagggaggggctggtgctggagatcatgatgacctttgggct

SEQ ID NO: 308770 - DNA, 459 bp, Zea mays
cccactcgtccgcccacgcgtccgcccacgcgtccgcccacgcgtccgcccacgcgtccggccaatctggctgatcacaaaagacagtcatcaccctttaccgcacgtagcagcccagtattcgagattaaatcctgaatttgattgttaaaagatatcatcatatcaacgaagctaggccacaagactagcctgatacactgtgatgcctgcaccacttaaggtactactttcctgaagaaagtcaatttgctgacaatgcaatgaccattcccttgcctattcacatggagaaacttgatgttcatatagaaataaatatttctagacacttcaagtaataaaaatacaaaacaacttaagactacgtatgaatggctcaaaataatcattagtcacaaagctgaaaatacaccgtgacctaacttttttaattgtggtctcacagtttgatgtata

SEQ ID NO: 308771 - DNA, 482 bp, Zea mays
ctcacgcgtccgcgtttcacttcttcgggatcacggcgccgtcgtggagcgcctctgcgagtctctgcagcgccgcgtgcgacgacccgccctcctccacggccttccggcacacggccttcatacgcgcggccttctccctcgccctcctcccctgctcgccgtcggcgtccatcagggaccgcacagcgcgctcgagctccgcggccaccacgaagttgccccgtttcctgtccaccttgagcggcacggccacgcccatgtcggccaccagctgaaacgcgttcaggtgctgctccgcgtacagcggccacggcgccatgggcacgccgtgccacaggctctccagcaccgagttccagccgccgtgcgtcacgaagccgcccacggcggggtgcgccaggatctccttctgcggcgcccacgtcggccacaccaggccctggccccccgtcctctccaagaacccctaccggagcagc

SEQ ID NO: 308772 - DNA, 541 bp, Zea mays
ccgccgtcgtcgggcaccgctcctcctggccgccgccggcgccggcgccgcgctggctgccacctctccctccggcgaaaatggtcgaagcgtcgcctccgcgctccaccaaggcatcgctcgctcctcccgttccgtctacacggttcgccctcccgtatctgttgctattactcctgagtttcggatgctgcttttgctcgattttctagccgttggctgtcgcagattggttttgtgatggcagattacaagtattcgctgaggggtctggatgctggatcggcggattaccctgttaagctctccaaggttcatctgcggtcagcaaaaaaactacttaaactatgtgaagtgaatggagggttttatgtcaaagctggtcaatatgtatcttcactaagacaagtgccaaaggagtactcatcaactctctcctgcctgcaagaccaggcaactccatccaagtttcaagatattaaagcagtaatagagcagaacttttggcaggaattgtatgacatgttcatcgaggtcgatt

SEQ ID NO: 308773 - DNA, 397 bp, Zea mays
  unsure (1)..(397): unsure at all n locations
cccacgcgttttatcaggctggcagtggagtgacagcggcggcaacaccacgcccacgcggcgccggagccgaagccgatcccccgatggatctcccgccgctctcccaccaggccctcttcgccgccgtccgatccgncgacgcgcccgccgtccgggcgctcctgggcgacgccgaggcgtcagccacctccttggtcgcgctcgccgccgctcagacggacgccggggaaaccgcgctgtacgttgccgcggaggccggcagcgaggaggttgtgcgcctacttctcccgctctacgacttcgaggcagccaccgtccgctcacgccttgacctcgacgccttccatgttgccgccaagcagggccacaccggggttgtgaaagagttcttggg

SEQ ID NO: 308774 - DNA, 498 bp, Zea mays
gtcacggctgtggtgtatattcccgtgggcggagacgaaaaggcgggagggaaggcatccgggcgcacgctaatgtcaactactaaggacgaggctcttggttcgcgtgataaagcagaatggttacacgaatggcatccggctgtggaaaactcgaaccctaatggtcaacaaggttctggcccaggtgacaaaagagggggctggaacaatgggggctcatagcatggaaacatatgaatgtgagaaacttaagctacatgatgttctctttaagatcccctgcagggttagcatatcagttgacatgtggcggtcaaatacacagatggaatacatgtgcttgacttgccactacattgatcatgccaatgatgagtggaaagtcaggaaaaaaattctcaactttgtgcatatggaggcaccttttacacttgatcagatggttaatatcattgtagagaaggtgcataattggggtattgacagaaagctagc

SEQ ID NO: 308775 - DNA, 457 bp, Zea mays
gccaatcataagagcttgcagttactgagagcgtgtgtgagcagagaggatgggtggcagaggcagggctgctctgctgctggccctggtggtgggggccgcgagcctggccgcggagatccaggccgacgccgggtacggttacggcggcgggtacaccccgacgcctacgccgggcaccccgaccccgaagcccgagaagccccccaccaaggggccgaagccggacaagccccccaaggagcacaagccgcccaaggagcacgggcccaagccggagaagccgcccaaggagcacaagccgacgccgcccacgtacaccccgagccccaaacccacgccgtcgacgtacactaccaccccgacgcccgccaagacgacgccacccacatacacttccgcccctacgccccacaaacccacaccaaaaccgactctcactccttcgacggacacc

SEQ ID NO: 308776 - DNA, 469 bp, Zea mays
  unsure (1)..(469): unsure at all n locations
ccccgccaaggtacagccctccgccgaagcctgggagacccaagccgtgcgcgatgacgtacacgcctcataccaagcctgcgacggccagagccgaccccgccgacgtacacttcaagccgcaagccgaacgcacacccgacggctaagttgaccccaccgacgtacaccgctatcacaaagactccgacgcccaagccgaccccaccgacggacacccattaccgaaagcctccgacacccaagccgaacccaccgacgtacactgccacaccgaaggcggcgaggcaccaagccgcccacctacactccgacaccggcggtgtgtcacaccctcagaccggcggcaccatactgactagaaagcgacgcctaccataccacactgntgacagtctgtggagcattgaggtacgtactaggactacgtatacgttcaagaatggagcatgcaatgggcatgcacact

SEQ ID NO: 308777 - DNA, 291 bp, Zea mays
ctattttccagtccacccattccattgcactaccgacgcccagaattcacgcgaacgcacacgcacccacacgacacatccagatgatgcttagggtgttcccgtaccgggccgccgcggtgccaacccagctctacggtgcgcccgcgacccctgctgccgtcatcagggcggcggtgccgggcggagtcacctcgccgtccggtgacgccgcctgcagggccagaggcaaggggacggaggtgctcagcggggtcgtgttccaccccttccaggagatcaagggggagc

SEQ ID NO: 308778 - DNA, 357 bp, Zea mays
cccactttgtcggcgccatggcccacatagagccaaccagaagcgcttgctgttactgagagtgtgtgtgagagagaggatgggcggcagccgcagggctgctctgctgctgtccctggtggtggtggtcgcgagcctcctcgtcgacagtccagtgcgacgacggctgccgttaccgacctgggtacaccccggcgccgacgtctgccaccccgagcaagaagcccaagaaggtgcctaccaagggcacgcctcccgacgagcccaccacggcgcacgagctccccacggagcacggcaccactgcccagaagcccacgcaggagcacacgacgtccacgccgacgtacacaccga

SEQ ID NO: 308779 - DNA, 372 bp, Zea mays
cggactcgtgggtgcggggtgattctctacgtgatgctcgtagggcacctcccgttcgacgaccggaacatcgtcgttctctaccagaagattttcaagggcgatactcagatcccggagtggctctctcccggcgcacggaaccttctccggaggatccttgagcccgacccggcggagcggatcgccatggcagagatcaaggcgcacccatggttccaggagcactacgtccctgtccttcctccgtacgacgacgacgacgacgacgacgattcagtgaagcaaatcggtgggggtaaaaccactcatcacatcaacgcgtttcagttgatcggaatggcgtcgtccctagacctctcagggtttttt

SEQ ID NO: 308780 - DNA, 404 bp, Zea mays
  unsure (1)..(404): unsure at all n locations
cccacttttccggcgaaagaggggcacagagattgttggtctacgagttcatgcccaataagagcttggaagaccacttgttcaggcgagctaatcctcctctaccgtggaacagaaagcttcaggttatcttgggagctgcagaaggattggctgtacctgcatgaaggggaagttcaggtgatctaccgggacttcaaaacgtccaacgttttactggacaaggacttcagagcaaagctatcagacttcggcctagccagggaggggccaactggagcaaacactcacgtctcgactgcggtcgtcgggacgcaagggtacgccgcaccggagtacatggacacggggcacctgacgacgaagagcgacgtgtggagcttcngcgtggtgctttacgagat

SEQ ID NO: 308781 - DNA, 518 bp, Zea mays
  unsure (1)..(518): unsure at all n locations
agagattgttctactatcatactcaaaagactagagaactggacaaccttcttggagatatttatcataaaattcttgacatggagagagctatcataagggatttagtgtgtcgcgtccttcaatttatacctcaactgacaaaagcagtgaactttgccgcagaacttgattgtattttatcattagcaactgttgcccaccaaaacaattatgtgaggcccatcttaactgaagattcaatactcgagatacataatggcagacatgctttgcaggaaatgactgttgatacctttattccaaatgataccaaaattcgtgatgcaggaagaataaacataataactgggcccaactactcaggaaaaagcatttacattaagcaggtggccttgatagtctttcttgctcatatcggaagctttgttcctgctgattctgctatttgtggatngacagataggatattctgtgcaatggngagcaaatccatgacaaccgacagcaacttttat

SEQ ID NO: 308782 - DNA, 270 bp, Zea mays
ggcaacaaacattgcacccaaaggggcggtttaccggagcattccagacatttaaggccccctttatatggaaaccataactttagcaaatcccacaaacagaagttaaaagggccccaggtttggctgggtagaattttttatgttgcaggaaaaaaggatacattccccgtttgggagggggattcagttttctattttccagcttggggacaggaaaacccgggatcactcccatgctttaagggcaccacccctcccaattgcctt

SEQ ID NO: 308783 - DNA, 290 bp, Zea mays
cccactctaacgcccacgcgtgcgagctggttgcatgctgagcagttcgtgcagacggaactacagatgtagctgtagcacaggccacagttgctgaagaggacaaccacgatgatatccagctttttggtgaggagaccgacggtgacatgaaggacgctgaatagcctgctgaaggtgtcaaggttcctggcacgaagtaagaatctgggaagtgatcagttttacttgatgcgacgacatggtacgatgagactgacatggccgatctctaggaagctgttatgagt

SEQ ID NO: 308784 - DNA, 360 bp, Zea mays
gtagcagagaacccgttcgcatcggcggacgtcgagatggtccgcgggcgggacggtgtttggacggcgcggtccccaactgtggtggtcctgtgggatctcgacaacaagcccccgcgcgggccgccgttcccggccgcaaccgccctcatcggcgccgactctctcctcggccgcgtcgtctcgatttcggccttcgccaaccgccacgccttctcccacctccctggctgggtcaccgccgagcgccgtgcccgccgcgccctcgaccgctccgagcgcgcgggggtcgtcgtcccttccgtgccctactcctgctccgtctgtggccggcgcttccctacccgccccgatctcacc

SEQ ID NO: 308785 - DNA, 335 bp, Zea mays
gtcttttcttatctacatgcaggaaaaaatctacatgttgatggcgtggatcacaaaaatgtggaaggacaagatttaagatgcactgccatggttggcggtctatttactgcatctcgaagcggcttgcattcaaaggttctgcacctctaaatatttctggtcgtgaagctgtctatgaaaggaagatgaaaattcagcaagactatattgtacatgaccttgaaggagctgaccatgtgacagaccttgatcataaccatgttgcagagttgaagatattaggactatattaaacattgctgcatatagcatcagcaacaacttggtttccg

SEQ ID NO: 308786 - DNA, 422 bp, Zea mays
  unsure (1)..(422): unsure at all n locations
ttgtttaacaggcgtattgccatgaccaacaatggtgcagtgaagaaaaacaagaggagcagcaacgggcgatgcgctaaggtgggggcaattgaacaatctgaatgaagcaggtgagcttctgaaggagatcatgccacacaacggctagctcaggtttcacatgtctggaggcgcggcttgcaggtcatcattcggagttggtcatggcctcatggcagagcgcccctcgtttgtggagttcctcgaggcatatttataataatgttatatatttatatcgntaatataatattagtgttacggcgatattttgtcacatggattttacatattatattaatatttgtcaattttgatatatgtttcatcaatacaaaacattgaggaaaatgtggaaacaagactaattttgatttttt

SEQ ID NO: 308787 - DNA, 497 bp, Zea mays
agggcaaaaaataaacatacttatgaattatgatgttgctttacatttactggctcatgtttgtgtagcacagaatgggaagaagaaccagctggtctaattaacaaatgacctcctccaccatacctggaaagctctgctgagattagggcatcctcctgtgcctctagacgcaaagcactgaaaccattctacgaacaagctctgctgtaggtggagcggaagggtgagcagggcctgccccaggttctcctccaggactctcacatccagccccttggagcacctctgcagccagccgaagtccacaagcatgggcctgaaccatccacggaacagctggctcctcgtgtcgctggggcactggattctccctctccccagagccatgaacacgctcgccgatacccggctgagctcgtacctgaacatcggcgatgctcgctcgtgcattctgatgagctcctcctgcgtaccccacagctcaacgtattctt

SEQ ID NO: 308788 - DNA, 106 bp, Zea mays
atgcatcaaccagcatggactgtggatcgatggatgctgttactcctgtcaggattgttctaagttaatcctaaggaaaaaatggtgcttcttggggctgcaattt

SEQ ID NO: 308789 - DNA, 373 bp, Zea mays
tgtcctcgcgtccgcccacgcgtccgcccacgcgtgcgcccacgcgtccgctccctgttcctggacgccggctccggcgccggctcctcatcgtccgcgggtaaggagactgaagtggtgaacacggaagaaggttgccattttactaagttaaagttagatcattggagcaatgccgccccataagatcgagactgggcaccaagatgtggtgcatgatgtcgccatggattactatggcaagcgcctagctacatcctcctctgataatacaataaagatcattggcgtaagtggaacctcacaccagcagcttgcaactttgagtggacaccaggggccagtatgggaagtcgcatgggctcatcccaag

SEQ ID NO: 308790 - DNA, 361 bp, Zea mays
gcggcctcgatccgttccagctcgtcggggcggtcgggcttgtggtccgacgacagcggcagcggcggcgcgccgcccccgcggcacagcagcgcgcggctgtcgccgcagttggccaccacgacgcggcgctcctccacgacggccaccacggcggtggagcccacgtggtcgcacttgtgcgggtcgcagcggcaggcggcgctcccgccggccgacatcgcctcggcgtccatccgcgcgaagctgcgttccatcgcggcggtccaggtcgccgcggagccggagcccggcggcggcggcgagctcctcggtgagcaggtcgtgcattcggtcccggcacgcctcggtcacgtgcgag

SEQ ID NO: 308791 - DNA, 386 bp, Zea mays
aaaacggaactatagtttgatgatattggcaccaacaagtgcagttccacagtttgcaattagtatctccagaaagccacacaactcagaccaatccatcccttccaaagacttgatacaaggtgcgattttcaggaaaatcataggatgctatcatcctgatgtaatcaaactaaccaccatgcaaagtggagatgaaaaccacaacatccttctcttccaactctgcatcaagaccaccacacagctcccagtcacagtcatttataaggacaagaaccccaggcctcacggaatcagccttgaggaacatctccggtcgctccttgatcagattctccttgacccaagagagcaagaacttcatcgtcaccttgccttggccg

SEQ ID NO: 308792 - DNA, 458 bp, Zea mays
ctacgatgacaatatattatagataggcgtccgacattactagggcacatatattacattgctgtcacacgtacgtgtgcgacagatagaagatcgactactcttaatttaggacaaacgacagacatacacggctacacacgtacgctgctagctagaggccgatcttgaacagaccgacgtaaggcgtgtcgacagaaccgagccagagcgcgccgccggggcgctccaggacctcgctgaccgtggcgttgccgagcccgcgcaacgcctcgacgacgacgcccgtctcagcgtggaccctgacggcagccacggaccggggagtggtcccctgctccagccacgacttgtcccggttgagcgccacccagtagtacccaccgtcgccggcgcggcgcacgttgtccgggtaccccggcaggtcggcgaagggctcggtggtgccggcggcgggg

SEQ ID NO: 308793 - DNA, 555 bp, Zea mays
cccatgcgtccgcccacgcgtccgctagagccaaccagaagagcttgcagttactgagagtgtgtgtgagagagaggatgggtggcagcggcagggctgctctgctgctggccctggtggtggtggccgtgagcctggccgtggagatccaggccgacgccgggtacggttacggcggcgggtacaccccgacgccgacgccggccaccccgaccccgaagcccgagaagccccccaccaaggggccgaagccggacaagccgcccaaggagcacaagccgtccaaggagcacgggcccaagccggagaagccgcccaaggagcacaagccgacgccgcccacgtacaccccgagccccaaacccacgccgacgacgtacactgccaccccgacgcctcccaagccgacgccacccacatacactccctcccctacgcctcacaaacccacaccaaaacccactcccactgcttcgacgtacaccccgacccccaagccttcgacaccttagtgcgcccccggcgacctacacttccagtcccaaaccttcgacg

SEQ ID NO: 308794 - DNA, 345 bp, Zea mays
tcatgcgtccggccacgaaggccagagctggggggccttattttggagatgcgggcttggacaacaggatggccaaccaatacgaccaggagttgaagaggaagaacaagagacgatatcacggacagccccagggctctgcaggaggaagaggaccggacgtgagagggcgaagagagccaatggctagactgaccagaccacgaaggagattgagtagatgtataagggcacttaattctactgcaccatcaccagtgccaggttagaggaggtgaacatggacctgtggaggaaatgcgtgaagcctgaaaagaaatgtctgagggaggccatgatggtcaa

SEQ ID NO: 308795 - DNA, 414 bp, Zea mays
cgctcggtctccagctttgaccgcctgccctgccctccggtcctgttgctgcataccccacccccccgcaggagcggcgcggcggcggcggcaaaggcggctaaggcaagatgttcgggcgcgcgccgaagaagagcgacaacaccaagtactacgagatcctcggggtgcccaagtcggcgtcccaggacgacctcaagaaggtctaccgtacggccgctatgaagaaccaccccgacaagggcggcgaccccgagaagttcaggagctcgcacaagcctatgatgttttgagtgatccagagaaacgtgagatttatgatcagtatggtgaagatgcccttaaggaaggaatgggtggcggtgggtcccatgctgatccattcgacatttactgatgatctgttggaccctc

SEQ ID NO: 308796 - DNA, 229 bp, Zea mays
tcagcgcgcgcttgttacctgctcaaacacggaaaggacgaggacggctgttatgcaaagatgaactagctatgctaaagccgatgatccaaggccactgttaccctactacgtaccctccagtgtgtgtgcagccatccggcctcgtcagtcgatcgaggagagactaacgcaaagctctgtgttgccggcctgcctacagtcgtcccgtccgtctaacttactaggg

SEQ ID NO: 308797 - DNA, 369 bp, Zea mays
cccacgcttctttggacgcgtgggcgcacgcccgcgcgcgtgggcataccaccgcgcccgccagccatactgagctccgccctggttccattccacccagagaggctccaagataggggcgcaccacacaagctagcctggcgagacatcgacgggacatcacggagaagctcgcatctatatgcccttgactatgagcaagagttggaaactgccaagaacagctgttcagttgaaaagagctatgagctacctgatggacaagtaatcaccattggtgcagagagattcaggtgccctgaggcccgcttacctccaggggggacaggatatgaggctgaaccgactcctgttactgcacaagcaaac

SEQ ID NO: 308798 - DNA, 397 bp, Zea mays
  unsure (1)..(397): unsure at all n locations
ccctcgttttcgcactctcgtcggctacaccatcagtgtgtgctcaagcatgatcgcgattaagcgcgtcaactgcttccaccgggacggctactgcgccgccggctgcaacccgtcggggagcacgtacatggtggtgtttggtctcttccagctcctgctgtcgcagctgcccagcctccacaacatcgcctggctgtccgtggtggccgtggccacctccctgggctactccttcatcagcctgggcctgtgctccgccaagtgggcctcgcacggcggccacgtgcgcggcacgctggcgggcgccgccgccgtggccggccgggtcgacgacgacaagcaggcggtcttcaacgtgcttctcgcgctcggcaacatcgccttctnctacacc

SEQ ID NO: 308799 - DNA, 436 bp, Zea mays
gcaggaaaaatagcaaggaaataacttattagcatcaccgtgtgctcactaattttaactcaccatcacccactccccttgcatgtaacacacaagaacaacatatctttccaaatttagtgcccaaaatctgagttgcatgttaatatgtcatctgagtaactgacccaaatggtaaaatgagcaagatcaatagaatggattcatgcaacatgcacccagctactcccgggtgtcttactcaaacccctttctgccatcatcttcctcaaacccttaaccttgtcccacttctttgcttgcgcatatatgttacccaagagaatgtaatatccactctcttctggctccagttcaaagcacttggaagcaacaactttcccaagctcaatgttgttgtgcaacctgcaagcaagaagcaaggcaccccaaacac

SEQ ID NO: 308800 - DNA, 423 bp, Zea mays
  unsure (1)..(423): unsure at all n locations
ctcggcattccatcagctgggggacttaaggctcggcttgtgggttgtgattttcatgggctatgtgggggtcgatctggatgatcacttgcgtacagctctggttgatttgtacaccaagagtgggcgaatggatagggctcttgattcgtacacaggattgagatcaaagaatgtggtgtcttacagcgcaatgatagtgggctgtggaatgcatggcaagttaaatgaagctgttggcttgttcaaggagatgtccaaagcaaggattgatcctaatgcggtgacctttgtggggttgctatctgcatacagtcatgcgggactgctggaagaagctcgtgcttgatttacttccatgacaagcagatacagaattaattcntcaatggaacactacactattatggtagacattcttgg

SEQ ID NO: 308801 - DNA, 535 bp, Zea mays
  unsure (1)..(535): unsure at all n locations
ccacgttcctctctgttccaaattatgaacaatacatgcacatcttttgggtctagattgtttagaaactggttaacacgtcccttatgcaatagacatctgatttgtgctcgtcacgatgcggtatctgagatttttgaatcaatgggaccacaacattcagttaacaatctgcaggatggaggggatagatcctgcacagcttcagtgcttagtgatttgtgtactgtcctttcgtcagttttggcattgctgggaaggtcacctgacattcaaagaggaataactaggatttttcattgcaaagctacagctaaagagtttgttggcgttatccagtctatcctcacatctgggaagcagctacagaagcttgttcttgaggatattggcattgtctcgtctccgcataaatctgtgcactcctctntgctaagaaggctaataaatacagcttcatcatccaccatacttaatagtgctgtgaaacttctgtcttgtcttaacaaagatgcggctgatcaaggagatatgc

SEQ ID NO: 308802 - DNA, 542 bp, Zea mays
ccctcgctttcgcccacgcgtccgcttgattgcaagaaaatggcattggcttggatggtttcaaaggagaatagctcacattgtgctggcggaattcttgccgatgatcagggccttgggaagacagtgtctactattgcccttatacaaaaacagaggatggaacagtcgaaatttatgtttgttgattcagatcgtttgaaatctgaagcactaaaccttgatgaagatgatgagggagaacaaactgttagcaatgaacctaaaaaggaccaaggcgcttgttcattgtcaacatctgctggtactagtgctgaactttttgttaatcaaccgaataatgttgtgaataaaatggttgaaaccaaagcagaacgcaagaaaaaagctaaagtttccacatcatctgcatccacctcacgttccatgacaaggccagctgcaggtactctagtagtgtgccctgctagtgttcttaagcagtggtctaacgaattaactgacaaggttagcgaaagtgctaaaatattctgtttagtcta

SEQ ID NO: 308803 - DNA, 495 bp, Zea mays
gattgctgtgaagagatattctcaacagaaacacctttggcatggaagccatggatttcctataaacaaatagctccagtgagtaaaattataaatgggtagtcataagacgtgtaaacgtacctaaagcagagcatatagttcaagaatatttctccacaagtgtctcaaataatcagatccaagcaaccatgagcatgacaaaattaagtattaggtatgtattgtttcatttgataattctaggatgtttgtacttcacatcagagttcagttgtttcaacatctttgtttctctaatgcagctactactacatcctgaatctgatgattcagctcaactttcctagattgagactgaaaagctgctagcccagttagttgagactgagatgaacagacgtttgaaggaggacacttacaaaggaaagaagtttaatgcattctgtcacttcttgggctaccaagctaggggagcactgcctgcaaagttga

SEQ ID NO: 308804 - DNA, 542 bp, Zea mays
tgatatttcttacccaggaataggcaatgcacgtaggttgcaagtgcctaaccaagacatgcagcataaggtactgatagaagctgtggaaaaccatatgcctcaggcgattgttattgatgaaattggaactaaactagaggccatggctgcaagcaccattgcacagaggggcatacagcttgtggcaactgcccatggggtaacgatagagaatctgatcatgaacccatcactagagatgcttgtgggaggaatacagagtgtcacacttggtgatgaagaagctaaccggagaggagttcaaaaaactgttctggagcgcaagggcccatcaacatttacatgtgctgcagagatcgtctccaaaaaagaattacgtgtccatcgtagtttggaagccacggtagatgctttactcgcagtgactctctaaggaatgccagaagaagcttagactctgcatttagtcttgactctgctgaagggcatatagtgaggtcagatggagctgattcaagctttatctttatgcatatggg

SEQ ID NO: 308805 - DNA, 502 bp, Zea mays
ccctcgctttcgaaccccaacaaacttccaggcgacggactgaggattagtgaagaggataaggctgctgcttctgctgagcagcctaagagggcccctaagctcaatgaaaggatcctctcctctctgtccaggaggtccgtagctgctcatccatggcatgatctcgagatcggtcctggtgctcctgctgtattcaatgttgtaagtaccatcattgctttctaacggcttggcatgttatatgtttgctctgctgaaacatttgatgcacctacaacatactggtacatgagtctgttgacagtggtttgcttgttgaggaaaaataagtgcatggttttttttaattacgatatttaacaaatctagttagctccaaacaatgaccgtgttatataattttttattcaggttgttgagatcacaaagggaagcaaagtcaaatacgagcttgacaagaaaactggactgattaaggttgatcgagtcctttactcat

SEQ ID NO: 308806 - DNA, 509 bp, Zea mays
tccactttccttttgcaagccccgaagcttgtgatgtctgtagtggaaaggttgaggatgctaagacacgaaatgagggtataaaaaaagttagaagaggcgaggatgcatgtaataccttgaagtctttcaaagatggagagaagcctcatgaaagcatcttcaaaagtttgacaccagtgtgcacacctcgtcatgctaacaaggtccaaccattggcagtagcaagtccacggggccaaaagaagaaatcagctgttgtcaggctttctttcaagaggcagtctttcgatggagaacaaactactgaaatatgttcctctagaaggtacttgatccgcccacgagctggattattggttccacaagctggtgagaaaatttctgaaggttgttggtctgtgcttgagccttcggcattcaagctgcgaggggaaagttttttcaaggacaaaaagaagtctcctgccccagcttgttctccatacactttatttggtgtggacata

SEQ ID NO: 308807 - DNA, 341 bp, Zea mays
cggacgctttgacggacgcgtggacgctcagcggcatatttgtttgattttccttcaaaacatcactgggctcatggccggctcaaagtctgtagctagtggaattgccaaagctggagcaaagatggtcatggcagtttcctgtgctaaagttcctaaaattacaataatcgatggtggaagatctggggctcgtaattatggaatgtgcggacgtgcatatagtcaaaactctatatttatttggccaactgctactatatctgttacaggcggcatccatgcagctggagttctcgctcaaatagaaacaaacaacaaaaggagacaaggagtggatt

SEQ ID NO: 308808 - DNA, 370 bp, Zea mays
gcctcgctgtcgaccaccccgtatctgtccaccgggggaggtagttgttaccacatgcagttgccggccccaccgacagcgaatactatctacaattagtcagccgttggattacctattcagcgctaagcaagcctctcgcaagcaacaaagaaaagaagctagctagacgtatagctgctgacgaagagaagagctgaagcgacatgccagagctaggatttatgttgagaccaggatagagagaaggcagccgcgatggggcccgagaaagtgcagactgagcgaatcgagaccaagatcaaccgccaggtgacattgtacaagcgccgctcgtggctactgaagaaggcgcacgagacctccgcgc

SEQ ID NO: 308809 - DNA, 395 bp, Zea mays
cccacgtttacctgttctgcgggacctgaatcccatccactgtgcggcctgcatggcgtgctggaagaagggctgacccggacgagtgggagctgtagctcgcacgtctagatccggaggggcatgaaccgctacatgaacttctcgtcaccgatggctgcgtggacaccgccaacaagtctcgcatggagtgcggcacccagcctgagatggacctagcgaccatcactgctcgaatggcggttaatagagcatgacagtcgggcaatgttaacgaggcgatcgctaaaatcaacgacactaaccccacgatcttggacacgaatccccaactatactgtcatctgcagctacagaaactaatagagtagattcgggcgggaaaaataaatgaa

SEQ ID NO: 308810 - DNA, 536 bp, Zea mays
ccttcgcttccgcgggccctcccttctgcccgcgaccgcgttagctaaacccgacccagcaaccaggccaccgctcctttcctctccgatccggatctccccacccgctccggcgagccatcgccgcgtcgcctccacgcgaccgactacttctcatatcaatctatctatccggcttacccgccgccgcacgcaccaaggttgcgttcaccatattacctgtttgcttatcttctcccgagcccagcaaaccctagccgccgccacccatggacatagaggccgacggacgattcggcaacaaacgagtgcacaatcgcctaggcccgggctccggcggcgctccaccatctaccaacggaaaggtctgcaactactggcgtgccggtcggtgcaaccgctttccgtgccccttcctccacagcgagctccccgaggctgcgccgcccaagcgccccactggacccggtgggaacgtatggcgcaaccccaacacccgaggacgaggaggtggccatcacaatagatgggggaag

SEQ ID NO: 308811 - DNA, 483 bp, Zea mays
cctttgttggctgccatgctgccgatcgcacactgcgcgggctggaggcatctacacctccctcccggtccgagtcgagcttaccttcccaatcgccgccgcgtccgatccctggtacgagcgcgccctcccagcgcgggggcgtccggaactgaaaccacctgtaccactagcggcagcgttctgtcgctcctgtgcccgctcctcaaactcctcggggtaaccagtcagagtcggatttgctggctgcccgacttcgggcttggttaggctggggattgctaaaactggtgtcgctctgtgcgagtttgagcgcagggaggcgatccttctcagcaacggaacgacgttgtggaggtcacgacatcttcaatttcaagtttatccagactgccatggagatcaaaagtggctactagcagcggggagaacatcgattcagcaataagcattccaactcttcaactgtatgagcttgaggca

SEQ ID NO: 308812 - DNA, 293 bp, Zea mays
aaaatttcccgtgtcataaatgcgctgattcgtatattgtcttaggaaaacgttaaaatctttgccgccagtttgtcctggatatttaaatgtgtcttttacgtagagactcaccactgcattgaggtggctcgctaagttaaggcattgcttaactgcgggggaagtataacattgcacatcaatttggccacagccgtagcggggcaccaggttcttctggaatggctgaatggagcaaaaaataaacttacgatactggttagctaaatgctcaaaatccctggaggagt

SEQ ID NO: 308813 - DNA, 563 bp, Zea mays
cccgctacccctgctactcgtaacatcactgttgatacggttgcaccggccgtcactattgacagcatcagtgatgatactggcgcacaagctaatgacttcattaccaatgacgacacccttgtcttcaatggcactgcagaagcagatagcacagttgttgtcagcttagatggtattgaaatcggcactgtgactgctaatggtgctggtgagtggaccttggattacaccggcaccctcctggcagatggcgactatgagctgagtgtgactgccaccaatcccactggcaacagcgcaacagcaactcaaacaattgttgttgataccactgctccgactgtcaccatcaatgccattgcggttgatgacatcatcaatgccgtggaagcaggtagtcctgttgcagtcagtggcaccacgactggtgttgaagatggtcaagtcgtcactgtcaccattgatggcaatacctacaccgccaccgttactggtaatgcttggacattcaatatccctgtcgcagacattgccaactttgaagcgactgaagaagtcgt

SEQ ID NO: 308814 - DNA, 498 bp, Zea mays
aagcccacccgttcccgctcttccataaattgaaattgtccgttggcagttttattgagtttttcaatttcttcccggccaactttgccggtgatagccttttgccgtcgatctcgccagaggtgaaattgatgcctcttctccaatgacaccaattgattaaagttcttaatatagttggtaaattgactaccatcgcggtgcaaaaatgcgatgactgttgaggctttagcggtacgaatcaagatatgttctggtaacctttttctgcccagactaagaaaatcagttttgaaagagtgtattgagttaagggcttccaaaataatttttagtttgccaatatcatcggattcagtgattatttgtagtttttgataatcatcttttaagatttcacgattttggcagaagaaatcttttacctgtatttctagcgattgttgcgactgattttctgtaatgaaaaaattgaaattaagatcctttagagtcgac

SEQ ID NO: 308815 - DNA, 489 bp, Zea mays
cccccctgcccgacaaaaaaaaatttccccctaccatggcagagggaaattatatctcagtcctatttagcttggccagatgctggccgagtggcaccgtagttgggcaactaactggcgataatatactctgccatattagcccgccgacgcttcagttgcgcaagggcttggttttctaattggcggaccctttcccggctgatgttgagatgctggccgattttagccaaagatagctcttggccatcgttaagaccaaaacgcatggtcagcacagcctgttgctggggtgttaattccgccagtaaattttgcaggtcttgacgcatggactcctgggtgatgtaagcatcgggggaaaccccttcgtcctccaagagttcggacaattctgtgtcctgattatcccccacccgcacatcgagggagatgggttggcgcgacagactgaggtactcgcgaatttgactagggtcaatttccaga

SEQ ID NO: 308816 - DNA, 497 bp, Zea mays
agaatcggccacatgtggtcaaatattgcctagcagatgcccccaaaggtggcctctttaagcgcaaaaccgcccaactacaactagtctagggcccttgccataacccccgatagcgtgagttaccaggaaattcccgctgatagtcccctgtaaagcaagggagctggaatagtttgttttaccgtaaggtgttgactcccctgccggtcaaaactgtggaaagtaaaatacccacgccgaacctaaaattagagcttgggaattgccgtgacatgtttctacgcctaagctcgaggcaaatggttatagcgttttaaacagatagtaactgttgttccctggtcaactgcactttttagcaagatactgccactgtgtaagtcaacacattttttggcaaccattaaaccgagtcctgttcccgtaatatttctgacatttttgccccgatgaaagggttcaaaaatttgcttttggtcctctggcgaaatgcc

SEQ ID NO: 308817 - DNA, 381 bp, Zea mays
ctttttgggcaacttggtggaaaatctcaatgctagccagttgtttcctagcgggattattggcgcaactacaggtattgcacagttttgatttgcctcagcggaaagatttaggctattccatggtgattgggctcatccttttaggagtggcggggactttatcccaaactctcgcttttgccccctggttattgctttttctcgccgtagctattcccactttggtgttggattaccgttctcgtttggggctagaagaaattccattttccctaccgttctggaaaagtgcagagaaagcttggcgatcggagcggtcggaatattcccccttagtaccgaaaaagttattcgctctgctagcggtcaccctggcct

SEQ ID NO: 308818 - DNA, 344 bp, Zea mays
gagaattttgcttagtcattgccggggctacaccggaggttcaggcccagcttctctgaagaaaatctacgggacgaattgagaagtttaatggctaaagggctaactcgctcccaggctagtcggcaattggcagaagaaactaaactgccccgtcggcaactttatcaactcagtttggaattggaagccgatggttgaaacctgattctttgggaacattcatggcaacatccacctctggaaattcactaaatttttcgctcaggtgcttcagattgggccgatagccacctgctctaattctgcgaaatcagagcagtccaacagcacttttcccaact

SEQ ID NO: 308819 - DNA, 483 bp, Zea mays
gaaattattaaagccactcaaaacaactctattcttagtgtcgtttttagttattactttactcctattgagttggactcagaagaagtgactcaattacgtgatcattatcttaaaatgaaaaattcctggaataagccggacttgctagatcctccaccaaaagaaagagttattgactgtttagagcagctagaatcgggagatttatccgcatggtggcgactaaatcgagaaatgactttactgccacaaagcaaacgttatggtcataacttaaaattagatctgactcagcttccgggatggaaagaagcagagcaagcaacaaaaaaaagaattattcagggggcaattcaatatattcaacagcaaacaaatatagattatagctggataggaacaaatacatataatttttccgaattggatggttgcaaggcattacagttaatcttgacggaagctccaagaactttagac

SEQ ID NO: 308820 - DNA, 464 bp, Zea mays
tggagccccccacggccataatcacggcaatggcattttcaatagctttccgggtcagaatttgactgggcaaaatctgttttttgatggcttccaccaaaaccttggcggactcctcggtgctgtcggctttttccccatccactgcggccatggtagaagaatagggcaagctcatccccatagcttcaaaggcggaggacatggtgttggcggtgaacatccccccacaggaaccagccccaggacaggcattccgttcaatgccgtagagggtttcctcatcaattttgccagcgctgtactggcccaccgcttcaaaggcactgaccactgttaaatcttccccggcataatgtccgggtttaatagtgccaccgtaaacaaagatagagggaatattgaggcgagccatggcaatcattgcccccggcatattcttatcacagcccccgatcgccaaa

SEQ ID NO: 308821 - DNA, 430 bp, Zea mays
atcctcggctccctagggaggaaagccattttctatccctaaccaatggtggctattgtaggtctaactccactctgtaatccattgtcgcaaaattggattaattacctccggagcttcgtcctggggacagtgccccaaccccggtaagctaatgaattgctccacacagttatggtttgccaaagctctccccaaggcgatcggttcccagggatcagcctccccccaaatcagcaccgttgggcaatggatgcggggtagtaaatcctccggtagggggccttgggaatagctggtgaaagccaaaaatacttccgccgccccttcatcctgggctggccgcaggagcatggccaccaactcatcggtcaccgcatttttgtccccataggcttggcagagggcctgacgaacggttttggcccgg

SEQ ID NO: 308822 - DNA, 423 bp, Zea mays
tccccttctaaaaagcgggttaaaaggtcataaagttgcactgtgcccgttcgtttagggaatacatttgccacaggattccgatttgcaaaaatccatataaaactgggccacgtccaccatattggtgctttcatccatgacaatcatgcccccggaacccatcatggtgcccagggctaatagggtgtcatattcgatgggagtatccaatttatcggcggggatacagcctccggaagggcccccagtttgcactgctttgacttggccaccattgggtacaccgacccccatttcctccaccacttgtcgcacggcggatcccatgggcacttcaatcagaccagcgttttccacttttcctgtgagggcaaaaaccttggtgcctttacttttttccgtaccaatggagccatacca

SEQ ID NO: 308823 - DNA, 133 bp, Zea mays
ggttaatgaaacgttttgccccggacaccagcggcagtgttatttcccaaattgaagggcatttggaagggaaacttcccctggtctggcagagggtctcgcctatcaaattcgtggggggattttcatcctt

SEQ ID NO: 308824 - DNA, 552 bp, Zea mays
tttcaacattgaattatttacacggaaggctaaagacgtatctacaggattatcggcagactgaggtgtgctgggactaggctcgtcgggtaggaaattcaatatggctttgacaaagtagcctgactggggacgagcttcgattaatcctcgatcctcaagtaggcgataagcttccaagactgttgaaatacttactgaccactgctgatgtaattttcgcaccgatggtaggcgatcgcctggctggaaagtcccttcgctaatcagtccatgaatttgatccgctaccgtttggtagagggtctgattaggcgaggttgtcataaacttaggcttcattttttgtttctaaattagaaaagcattacagttaagctgattagtaaccataacagttgctgaaaagtaaactgtatccataacaatttattgtaactgcatctttcttatttgaaataaatgagtaaaatttttatataagtcgattaattcttttaaaaaatagaatagttattaatgtccaattaaataatttaatgctattttatt

SEQ ID NO: 308825 - DNA, 339 bp, Zea mays
gctaaccgcaaatctccccagtggaatgtgtttgaaaagtgcaaggctaggtatttctctaaatctcctcactaaggctccggtttaaaaagggagacttcggtaacatttgctcccttcccaaggggggctaggggggattaaacggccaaaactcgacttttgaaacacgctctaacaatggtgttgtaatcaaattttttccccgttttcggtaaggccatggttcccactctccgcttttatattcgtctaatgctcattggccgtggagctatggtggtagctcaagttgataccgtccctatggcagggggggccttggttttagcagattta

SEQ ID NO: 308826 - DNA, 387 bp, Zea mays
atgacccgattttcgggcaaacccttattcctggcagtttgaatgtagacctggcgcaacacatcaagcaattggcctcgcatcaacctttgcaatccagcaaaactggtgatgctcaaagcgagggtaggtaaaatcatgtgccaagccacgtcccaaaccttatggggccaagaaaattcggcaaaatcaatgctggtcatgtcccccaccggcaacaggggtgaaacggattgggcaagaaataataaaagtagggcagtgataaaactaggaaatccttggccgatgtagctgattacccgcaaactccggactatgaatgtgttttgctgtacggcccccacaatgcccaagggaatggcgatcgcccaggcgagaacgata

SEQ ID NO: 308827 - DNA, 457 bp, Zea mays
  unsure (1)..(457): unsure at all n locations
tgggacactggcaaccctggcccggccacttacagctccttggccaatacctacaccccgaccaagaatggccttgaccacttccactttgattaaatccgtcgaaccggcaactccctgcaatgtcccggcggtcatcaccaccaaatctccatcccggagaaaatggttttcctgggccacgttaatggcggcttggaacgtttggctggtggaaggtaaatccaataccaacaggggcttaactccccacaccaactgcaactgacgggacacatccacatggggcgtaacggccagaatgggggttttggggcggaactttgacacatggcgggcggtggatccggtcttagtcaaagacataatagccgncgcgttgagggtttccgcaatctggctaacggcgctggaaatagcattgggaatagaagtgcgactggcttccgcttgggaa

SEQ ID NO: 308828 - DNA, 498 bp, Zea mays
ttgcacaaatcgattcacaacaacagtatgaacaggccacccaggcgatcgccatggaactattagcccagaccagggagaaaagatcgctgtgggacaaaattggcgataatctgcggctcgatgacaagttgctggattggaccatgggtcatcctggattgcgggtgcaattgttcaaatttatcgactgtctgccagcgttgcagagtaacagtgagattgccaaccatctccagcagtatatgagcgaagaggaggtggaattaccagaagcactgaaaaaattgttgaattttgccgatgcccactcgacgccggcccagattgcagcgggaacggtgagtaaagcgacggaacagttggcttttaaatacattgctggggaaacgatcgcccaggtgatcaaaacagtggaacggctccgcaaggaaaaaatgggctttaccattgatttactgggggaagcggtaattacggaatcggaggcggcggaat

SEQ ID NO: 308829 - DNA, 454 bp, Zea mays
ccttctccccaagcggccggggatattagcccagaaatgatgccctaaaccgccaatatcaaactaggctacattcccattgtggaagctgccccattgatcattgctcaagaaaaaggtttctttgccaaatatggcatgaccggtgtggaagtctccaaacaagccaactgggcctccgctagagataacgtcaccattggttcccagggaggcggcatcgatggcggccaatggcaaatgcccatgcctgacctgattacggatgggatcattaccaatggcaacaaggtgcccatgtatgtattggcccaattgattacccagggaaatggtattgccgtagcaccaatgcatgaacgcaaaggggtgaacctggatatcaccaaagcggcggactatatcaagggctttaacaaaaccaatggccgcaaatttaaggcagcccacacct

SEQ ID NO: 308830 - DNA, 296 bp, Zea mays
tggcgccggtggcgttagtccatttggtggggttggggacgggaattgggttatggttatcgccgttggtgtgcgttgtatcaggatattggccgggcaattcccttgttgatgacgccttggttgttgttaacgccggtaatttatccaccaccaactaagggttggtttagtgtgttggtgaactggaatccggtgacgccgttgttggtaacggtgcgggatttggcgacggtggggatggtatcggaaccagcagggttttggtgggctagtgggttgatggtaattttgct

SEQ ID NO: 308831 - DNA, 436 bp, Zea mays
  unsure (1)..(436): unsure at all n locations
agctgaggagtaatattcatttaatccccggtgacatgggcaccattgaagcccacgcagacttgctgcaaaccatggactgcgccattctcattgccaccagttggggagatcgccaggagacctacaacattaacgtggtcaaaaccctgactttgattaatttactcaacccagaacggtgcgaacaggtaatttatttttccaccgccagcattttggaccgccaagggcaaccactaccagaagcaggaagtttgggcactgactatatccgcaccaaatatctctgtcatcaggcgttggaatcccaccatgattctccaccggaagtcacccccattgccgaagccatggctaacaaaatcacangtggtttatcccaccctggtctttggcggcgaacccagtaaaccctattcccatctttccggcg

SEQ ID NO: 308832 - DNA, 414 bp, Zea mays
ttgagcggcaggattttgctgagcaggaatacgacccagaccaagccgcccaatggattgaaaacaattcctttaacttccaaacctatcaagaaattttttccttaccccccagcccagctccacaaaaacagtactacgccgttacttttggcaatattcgtctcatttccttaatggtcaccaatgtttggcgttgcccagggcacgcttcgcgcacgccgcaacaggattcaagcactgcagggcgttaccaagaaagcagtcagcagttacataaaccggaaaattggggccatggtcagcatatttttgaacccattacccccggtagcaggcagtatgaatggctgaagcaggaattggctggggaagaattccgcaagctcggacaaaattgtgatgttccaccat

SEQ ID NO: 308833 - DNA, 286 bp, Zea mays
gggcaacggcgttaatgcactgactaaattgacaggaaataagttacatctatgaccattgaactgtctattgtgattccaatgtacaacgaggaagataaccttgagcatttatttgcccgtttgctggaggtgctgactcccctcaaaattacctacgaaattatttgtgttaacgacggtagtaaggataaaaccctcaaacaattaattgattgctatcaaagtaatcgccaaattaagattgttaatctgtctcgtaactttggcaaagaaattgcccttt

SEQ ID NO: 308834 - DNA, 537 bp, Zea mays
cggcgatcgacctgccccgttccctatttttttccgcttggggcaccagtattatttttgtcatcctagcccgttttgtaattagcctagtcctcagtcccctggaaagtcgtcaagccattcctatttttttaattgctagctcctgccgtattcagcaccttaccgttacttttgaacggcgttcccaataccgagtggtaggagttgccttggccagtacagcccacagccatcacactctgcaacaaattctggcatccggggcccaggaagttctagcggaggctttacctgaagcggatttagcctctagtttgtactggcatttacgaggggaaaacattgccctaagactactgccctccagccgggatatgctctaccgccggggcatgccggagatttttgctggtttaccaacggtgcgggtggaaattcctttattgtggggtttggattaccggctcaaaagagctttggactatggtggagcgttatttggattgtgggtgctttctcccctattttggcgat

SEQ ID NO: 308835 - DNA, 404 bp, Zea mays
aaactgatcgccgcttcaagagacagagcgttacatcaaacgagttagtagggatgtgttttaaactcagtaatcggttgggggaatttgtggaatggcaagttagacccgctgtggtgggactgtttcaggatagaggcattgacgtccatgagtttcattctggcgtatcggtacaacgggaagatgggggattagaaattgacctgttagtagtcaatgaaacccaagctattttaattgaagtaaaaagtaagttaacggaaaaggatgtggatgagcatctggaacggttgggtaaattcaaacagtttatgccccgctaccgggatgttaaagctttaggtgcagtggcagccatggtgttaagcaaagaagtggtcagctatgcctatggtaagggt

SEQ ID NO: 308836 - DNA, 493 bp, Zea mays
aaagcgattaactgacccagggttaaatccccatccaacaccagggatgcccccacccaaagtacgagtaaaccggataactggttgagaaaatgactggaggagctagctagggtagaggtaatgacagtgttgaaaccggcccccacataacgggaatatttgtcctgccattgccagcgggagcgcaactcgatgttttgggctttaacggtctgaatccctgacattacctccactagataggactgggtttgggcgtttctttccgctttgagccgtaactgcctacgaataaggggggaaaataccagagtcaaaataacaaaaatgggcacaattcccagggccaccgccgtcagcagagggctgtagataatcatcacgacgatgtagaccacagaaaaaccggagtccaacaccaccgtagtggccgtacctgttaaaaattgccgaatattttcaggttcgttaaccctggtggaaatttccc

SEQ ID NO: 308837 - DNA, 537 bp, Zea mays
  unsure (1)..(537): unsure at all n locations
aagggatgattataaaatcagcggtctccaaaatcaagaatcaaacaaagtaactattgggttagtctagtacggctaatgcacccgacttcccggaacccaagttaattcccgccggggcattttagtacgttgaataaaacttttcaccgctaatatcggtacagaaaaaattgattacgtcctgggcgagtccacagacatcgcgttcccctgtgggggcaattacggtaacggctcataaatctttgttaaagattacttaacccgtcagtaaaatgccgtaacactaattaccttttccccttactccagaggagaacagcagcggcaagccaccaatctctggtttttggaaagccgcccctggactatggaaaaagtagttacttgttaagtatagtaacagaaaaagcttttctggcaagatttctgcttctggagtgnggggtatcctctggaaatttacccgtcgattgcggtaaattctattttttttgttaaccttaaaactattgccatgggcagggtaaattg

SEQ ID NO: 308838 - DNA, 457 bp, Zea mays
aattgtggcaatttagctaaagaatcattccttggattttcttttactggtcagcccaaaaatgtcaagaaaaacaaacaaagttgaggaacaattgtcagccccagtctatgttgagcttcagcggataacgccttgggtgacagggcggatgtcactgccggcaaaaggaccgggattaccactccagttaaaatcgctgatgcgtagattaatcgaacccacctgcagttgggggttgtagcgcaattgaatgttgtaggtgcggcggctatattccaacacgtaatcggtgctaatttcttcgttggcagtcagactgtaggctccctgcacccggaaccttagtgggccgtaaatttgttgggtcaggccaaagctcagtatttccgtgtcggcaaagcggtcaaagaaaaagggagacgcatcgccccgaataccttgggaataaccaatg

SEQ ID NO: 308839 - DNA, 119 bp, Zea mays
tatggcatcaccaatgtttccttaaaggattatgtgattgcgtccctgggtatgattcccggtactattatgtatgtttacattggctctttagctggtagtttggccacccttggaac

SEQ ID NO: 308840 - DNA, 510 bp, Zea mays
gggcttaaactccagtcccgggccaatatccccaaactcaaaaagctacagagaaaaataatctggtaatcccgggcatcacggtggacagtcagcatgggttttcctggcaaaaaagtattttcatcttagaagatatttgggagccttgaaacctaccaaggacagcataaaatgagggcagtgggtgacgcctagaaacgcctccccgacaggttcaatgccataaatcttcagagcagagggatatgtcttctttttttatgccaacgaaggccaggagccaatgcatgtccatgttaggcacggaggtgggtatgccaagttttagatcgaacccgttgagctggattatgctaaaagcctaaaaacaaaacaaattgttagagcagaaaaattaattgttgataatctagatttgatcaggagcaagtggcacaatgtttttggcatctgaacaaactattcaagccgagagggtatgggtgaaagatcctctagagtcgacct

SEQ ID NO: 308841 - DNA, 438 bp, Zea mays
cacagttgccacaccaattcgatgggggcatccatttacacttgcacgctatgttctaaccaattagccatgggttttgccgatgtttaccaaacttactgagatgccaggactgcagtttgcaaacgggcttggatggccaaaatcgcctgggccgcttgacgaccggacagggtggccccctccatactatcgatgtaatcctgttgggtgtagataccggctaaaaagaagttggatatggtggttgcttgtctggagcggaacaggtacatgcccggtgcttcccggtacagagattgggctagtttaattacgctgtaccaagtcatattcaaatgcgccgctgaggggaaaagggctttgacttgtttgagtacccgataggcgatcgcctcgttggattctttcataaaagggtcacctgaggtcaatacc

SEQ ID NO: 308842 - DNA, 517 bp, Zea mays
tacctgggtggagaaataatgcctggttggaatattgacaccggttatagttaccttgatgcttttgtaagccaagataataccgatatcgtagacaacactttatctaatgttcctagcaaccagtttagcctctggacaacctatgaaattcaatcgggaaatttacaaggcttgggctttggtttaggactattttatgttgatcaacgggagggggacttggacaacacctttgtgttacccagctatttccgcaccgatgctgccattttttatcgtcgggaaaattgggaattacaattaaacatcgaaaatttgtttaatacccagtatttggccgaatcaaatgattttgacctgagtgtttatcccggggctccctttacggtagtaggaaaaattggcgtaacattctaggcattttaagactgctgatgatgagattatcagcagtaaaatttctaatgctccaaaaccaggattggaaagatgaaaaaaaatgtttactacagca

SEQ ID NO: 308843 - DNA, 397 bp, Zea mays
gggatcgcctgacggaggaaattgccaccttgaaaggggaattggcccaggataaaccgggaacggagggctaatttttgaccagtgcggccccttttactccccagttgacggcggatggttcttttacgttctattcgccccaatttggggaaacgttccattcccagcggggtgctaaggcggaggcggacgaaaagtttgttcatccctgtcttttgccccagttggcggccaaaaaatccaggttaactattattgatgtctgctatggcttgggctacaacacagcggcggccctaacagccatctggcaaattaatccccattgccacgtaactctgtacagtttggaaaacgatctgcaagtgccccgccaggcgatcgccaatggctt

SEQ ID NO: 308844 - DNA, 272 bp, Zea mays
aagtttccttagccacggatcgtactgggtctttgaggagcgaggcattgccagggcagatagattgattgccgacattaaactggccgtcgagttggtggagcaaagatgtcacccactgtcacagtagtcaagatattcttcagaaacagattgcgggtttctattctgaagaacccaaagaaattcttaatgaaagacccaatcgcagcaagccgcggggtatgcgcaacccatttttagatcctgtagagtggacctgcaggcatgca

SEQ ID NO: 308845 - DNA, 446 bp, Zea mays
ctggggtggaaggaatcattcatttggaagggggattattagcttggaaacaggctgggttgccgacggttaaaacaaaaaatgcccccatcagcattatgcgtcaggtgcaaattattgccggtagtttggttttgaccggggttttgctgggcagttttgtcgcccctggattttattttctcagtggttttgtcggcgcaggattattatttgccggactttctggcacctgtatgatggctaatcttttgggcaaattaccctacaaccaaattaaggactaataaccatggcactccaagtggtgggctattttttggcaagttgcattggcctaagtttggggctttgggaggtggcggctcggtgttagccctgcccattttggtctatgtcatgcaggttccccccaaggcggcgatcgccatgacgttagtgattgt

SEQ ID NO: 308846 - DNA, 561 bp, Zea mays
aggtcgttgtcaaagtttccttagtcagggatagtaaaggctctgagaggaaagattcagatagttctggagatgatagagttgagactttataagcagattttaaatgcttctcactcactgttcagtccctatcattatcatcaagctttacaaaacgctgttttggcaagtcaacattttgaagaggttagagccatgacggttttatctttattctatttgtactattctacgccatttttgagcctagtgcatggtgattcaagttctgaaaaagcagcttggctcagttgtgttaatactaaccaagaaaagatgcaaaaataggcggaacacgccccaatgaattacttgcacaaatatcatctagttgaagcagaaaaagcgcgggtcttagggcaattctttgaggctgaagagttttatgagcgagcgatcgcaggtgctgctgaaaatgagtttattcaagaagaagcattggcttatgaattagcggctaaacattatctagcgcgaggtcgagaaaaaattgctcgaacttatatgaaagaagcgcac

SEQ ID NO: 308847 - DNA, 590 bp, Zea mays
gcaccatttcagcggtgaacattgaccgttttgccgccctaatcatggataaatatttgcgtcgccaattaattgcagcggggcatgacatcgttgatttgggttacgaaactagcaaagaattagaaacaattttcgatgaatcggaacaaaaaatatttcgcctcacccaatctcgtccccaagcagggctagtaccgttatcagaaaccttagttaatactttcattgaattagataaattacacgaaaaactttccagtccaggggtagaaacccaattctatgatcttgatgcaatgacagggggattacagcgggcagatttaattattttggccggcaggccgtcgatgggaaaaacggcattcggtttaggaattgccgctaacatcgctaaaaaccagaatttgcctgtggctatttttagcttagaaatgtccaaggaacagttggcattaagactagtggctagtgaatccttaattgatagtaaccgtttacggacagggcactttagccaagcagaatttgaacctttaacggcggccatgggcaccctttccagtttacctatctacattgacgat

SEQ ID NO: 308848 - DNA, 475 bp, Zea mays
  unsure (1)..(475): unsure at all n locations
ctcggccgccgcccggataataatgtccgtttccatgctgaggttgtcgttatccaccaggtaacggtcggcaaaaccctcaggtaaggcgggaagatgctcacaatcactgggtttcaggcgatatttaatgccccatacttccatttccacccgccagccaaacacggnccgactatctaaatcaagctggtcaaactcaaacaccgccaccttttgaccgttgacatcatcaatgcggctaaagggtaaacccaccgattcaattttgcgaattctttggcggggggtgaccgccggtagagccatgcgccattccacttgttttaaatcaacggggtccaggggggccagctcctcaacgtaacgcatctccaccaggtaaccgttggaaaaggcacagcactggtgggngtcgttatagaaatagaggaggatganngtnntggtctnccgatacatcaactcatggtta

SEQ ID NO: 308849 - DNA, 520 bp, Zea mays
gcctctggattaccaacgaaattatccataatccttcggtgaatcaacgactgcgggaaatggaagtgaattttattgatgtggttaacggggaaaaggattttagcggcgtggccaagggagacgtggtgattctgcccgccttcggggccagtgtggaggaaatgcagctactcaacgaccgggagtgtaccattgtcgatactacgtgtccttgggtttctaaagtttggaattcggtggaaaaacataaaaagaaagagcatacttccatcatccacggcaaatataaccacgaagaaaccattgccaccagttcctttgctgggacctatttaattgttttgaatatggccgaagcccaaaaggtttgtgattatattctccacggtggcgatcgccaggaatttttagactatttcgccaatgcccattccgctggttttgacccggaccaagatttagttcgttgtggggtcgccaaccaaaccaccatgctgaaaagtgaaacggaaatgat

SEQ ID NO: 308850 - DNA, 505 bp, Zea mays
aatgccccaccggcctggggaatggcaaggagatggcgtcccaaagcccagaggagattttgcttgattttagccactgtgctacgacttagggtcaaagctttgagcacatcggaaagatgggagcgcattaacaccacatcggctgtttccatggccaccgctgtcgccccggagagggaaatgcctacatcggcctgggccagggctggagcatcattaatgccgtcccctaccatcgctatcactgatacagggttaaacccttgcattgccttgattttggccaccttggcctggggggtcatctgggcttgaaattcctcgatacctacttccatggcgatcgcctgggcaatggcgggatggtcgccggttaacagcaagggagcaataccccattgtttcagttgggcaatggtggccttggcttccggtcggagagtatcccgcaaggctaaaaatccctgtaattgctgattgcgagcgacaaaaataacggttt

SEQ ID NO: 308851 - DNA, 419 bp, Zea mays
tgcggctgtatcgagaaggtagggtgcgggctgtatctgacattgaaaaggctgacttggcggactgccacaaggagttactgagccattaccaggtcaaagctaatttggtagtgccggtggttttcaatgaaaatctttggtgtttgctcattgcccatgaatgcaaaaccccccgttattggcaagaagaggatctgcaactgttgatggagttggcaacccaggtggcgatcgccattcaccagggggaactgtatgaacaattggaaacggccaacattcggttacagcaaatttcctccttggatgccctcacccaagtgggtaaccgctacttatttgattccaccctggaacgggaatggcatcgattacaacggattagggaacccttagctctgctgctttgtgacgtg

SEQ ID NO: 308852 - DNA, 447 bp, Zea mays
ggaaattgtcctggccacaggggaaatttaaccgcagctaaccatgaaactgggggagcaatgttcaccattgagctgccctatgaaccgaatatggatgaaaatccctagaattcgaccaacagaaggtcaagctatgcttaaaaaaatccacagacgttagaaaattatgcttcaaaaactcgaagccatatttaacgggacagcccttaaactggaagttcccatagactttaccgcctacactgaatagaagagcgataattttaaaatggtggcggactaagcaatccaaacggttttagcattgacaaattctaaaatgcccatgcggccaagttcccgcccaaagccagagcgcttgatgcctccaaagggaatgcgggggtcagatttagtcataccgttaatgaatacagccccggcttctatgccccggattagttt

SEQ ID NO: 308853 - DNA, 515 bp, Zea mays
attgttaaaacaatttcctacgcgtttttaatggcagagtcaggttacttcacattgtcaccacagattatagcgatgccaccacaaacaacctctaattgagcatcagagagttcacggtacttgggagcggtggactgggatttttgtctcttggacttgtacggacttttcaactttagacatgaaattttcctcgtatggcactagttaaataactaatctttgtaccataacagacgcaaattaatataagattaaattaaggttaaattaaaattaagttttcattattttttgtttacctgcattattgatagaatgcgctaacaataaaaattgtagttgtatcaactactacatttgatttgagatggtatcgcttaagcaaaatttacttggtgtaaaaaatcgcattacttgcatggctaaatatcaatgggttcaacaacagagtggtgaggactgtgcggcggcaagtttggcgatcattgcaaagcatcacggacgcaata

SEQ ID NO: 308854 - DNA, 536 bp, Zea mays
gcctgcaacaatacgaagcggccatggtgaaacaacaggtgcaactggaaacccaaattcaactggctaaggtgcgggaggattttgtctcaaccctgacccatgacctgaaaactccccttttgggggcaattgaaacccttaatgccttccaagcaggacagtttggggctgttacccataaccaacaacgggcgatcgccattatgatgcgtagccaccgcatgaccctgcaactggtggaaaccctgatggatgtttaccgcaatgacacagagggtttatatctgcaccaggaaccggtcaatctcactagtctggcggaggaagtaattctgcaactcacccccctggccacgtcccgccaaatccatttatgtctgcgtcaaggtaactccgactttcgccaagcctattggttacaggccgatgctttgcaactgcaacgggtttttaataacctcattaccaatgccattaatcactccccccggggccgtaaagtggaaatttcccttacttccaaaaataatcat

SEQ ID NO: 308855 - DNA, 456 bp, Zea mays
ttgcccttccagaccgacttaccatcgatcgccgcgatcgccaaccgggattgattattcattggctatgacggagaagaccggggcggtttatacctccaaggtaatttcacccccatcgacacggaaaatgtcacctttcaagttaagcctcaatatttaatacaaaaggtattttttcccgatgctttcccggtagctaaccagagtgatgcagaggtttgtgccctatgtcccgccgcctttggtttaattacggagttgaacgtcaattttaacgaaagactcaatttacttaataccctcaacttttccaacctcaacttagattccatcgacaattccctgcgggctaaattggcggtgcaaaataaactgggggatttgggcaatccctacgatctaaggtttgaatacaactaccgcgagcgtttatacaatggcttcctcggtttc

SEQ ID NO: 308856 - DNA, 527 bp, Zea mays
ttgaaattgccatccaacaggctactttgtacgatgcaggctcaacaagaattggcttctataaaatcagctttttgtacaattaaccaacgaattagagcaaaaaaaagtattgcttaaggaaattcatcatcgagttaaaaacaatttgcaaattatgtctagtttactttatttgcaatttagtaaggcttctccagccatccagcaattgagtgaggaataccagaatcgcattcaatccatggcattgattcatgagcagttatatcgtagtgaagacttagctaatattgattttagtcaatatcttaaaaatttgactcacaatatctgccaaagttacggctgtaatactgatagtattaaaattaaattgttggttgaacaagttaaagttcctttagagcagtccattcctttgggattaattattcaggaattagtttccaatgctttaaaacatgctttcccaacgacggaaggggaaatttcgattaaattcacttcaatgaacagtcactata

SEQ ID NO: 308857 - DNA, 581 bp, Zea mays
gagtacgggcttatcaattaaatcgagtcaacttcgtcaatgatgcaaaaattaaaggggcgctgtaccacttcaatcatggcggtggacatgttgtcccgtaaatagtcaaaccctagttcgctgttggtggtgtaggtaatatcgcaggcgtaattctttttcctttcctcaggattcatgccggactgtactagacccaccgttaagcccaaaaagcgatggatttgccccatccattccgcatcccgccgggccaggtaatcgttcaccgtcaccacatggacccctttgcccgttaaaccgttcagataggaaggtagagtggccaccagggtttttccttccccagttttcatttccgcaatttgccctttgtggagaataatgccccccaacagttgcacgtcaaagtgacgcatacccaacacccgtttccccgcttcccgcaccacggcaaaggcttctggcaaaatttcgtctaggatttcttctgtttccgcatcgctgcgggccttatccaacgctttccgaaattcgacggttttatacttcaactcatcgtcagacagcttttcaat

SEQ ID NO: 308858 - DNA, 469 bp, Zea mays
  unsure (1)..(469): unsure at all n locations
cccccggcatttggctagaatcggcattttttaagctaaatagaccgatttcttcgtcctgaatcccgcttgaaagatattcaaagcgatagttatcgttaatttgatagctggtctagtcaaaatggtgacgaacatttagattaagatgaattgcctataaatcctttgtcattgccgtcgtcttaaacttagcccgactagtcataacgattactagaatcagttttttgacagcttcccttccgtttgactgactaattcaattaaatccatgcctaacattgttgaaattgtcggtgtctgacgagcgattctccaccttggtgaccgctgtcactgcggccaatttggttgaacgtgttgcaaagccctgggccctttacgagttttcgctcccacggatacggcctttgccaaactcncccccggtaccattaccaccctggtacaaaatattccccaattg

SEQ ID NO: 308859 - DNA, 538 bp, Zea mays
taatgaaatcgggctcttctcgcgaaattgtatctatttttacgactggtcggttttgatgtaaggcagaagcgaaggcctcggtggcaacaatatgaagcaaatcattcccgcactgattactttatctttttctccaatggcgatcgccgctttgccccctcaatatcagaacgtcaaagatttggaggcaatggtcaactatgttaaagagaatcctgacgtggcggcaacgttgaaatccatagacctagaaaatcaaaccatcaactacggtcaagactgtcaggtaacgtttgagcgaaaaccttcccccaagccccttggctgggctggccccgccgaactgcttcaattcaaagccattaattgtccaagggaataattcattgccaaacggcgatcgcccgtaaaatttggatatattttacctaagcactccacaagtatttatgcaccaaatatcaatgaagcaaactcgttttgtccaagttctcatagtgtcaatattcctagttttcggaatgccgatcggact

SEQ ID NO: 308860 - DNA, 533 bp, Zea mays
  unsure (1)..(533): unsure at all n locations
atatttccggccatgaatccaaggtgagaacggttcagcctgggaaaccttgacagaccacaccattcataaagtcgtttgcctcgacgacgactatgccattgggaaacaaattgaactttttttaaccaatcaaaaccccaactgtgaggtggtggtgctccaggatcccnctccaggccatgaccaccttattgactttgcagcctgatctgatcctttgtgacatcaccatgccccacctggatggctatgaaatttgtcgaatggtccgccatgcccagcacctaagggcaattccgatcattatgctcactggcaaggaagcctacctcgaccgactcctggcccggatggcaggggcgacggattacctgaccaaacccttcacccaaaaagaactaatttcattagttgaatcttactgtaaaaaatcatgatcttttgatcattatctccatcccccgtcgcagcaccgacaattttgcggtaaattgtcaacaacaatgggctccccaacaaaaaataatact

SEQ ID NO: 308861 - DNA, 573 bp, Zea mays
cccgtcggagttggcgttgtcatttccaagagggaggatatcccctcagcatcctggagtcagccttaccagaagcgggggtcaccctcggattagccagttcaacagccattctttccctgcctttggccctggtcatcaatgtctcattacaaagggaaagtccttggcaatggtttgtgtggacactactcattggtgccctagttttacctgcgcccctggtgggggtaggcttaattgccctggggtatgccccttggggtaatcctttttacggcggcctggccatgcctatccttgcccacctagcccgctttacccccatggccgccctgatactttttgcccaacaacgacaattagaccctggcctctgggacagtacttttttagtgcccgggccccgttggcgtatttggctttatctgcgttttccccttttacttcctgggtctgttggctgctgctggggtcgtctttgccttcagtgcggaggagttgggagcaacattgattgttattcctcccggctattccaccttgaccctgcggatttataactatctacac

SEQ ID NO: 308862 - DNA, 569 bp, Zea mays
  unsure (1)..(569): unsure at all n locations
ttcccaagctcttctggagacaaattaagttcaaccagggattgcagccagttgacagagatgcgcatgggtttccttttctactgatttgtattaatgcttgcttagtttgcgatggcgtcagcggcatctattgtatcgctgaaggcattaccccaggccactccgggtcatgtttacaactttcggaacaaatttatagctctggaagctcaatgaaccaaagtttcccactaactagcctaaaatagagtggccttccccatcccatcaaccctcggaaaatttaacgaatttaatacagcataggttaataggttagtcttacatcacaccatctggtgaaccggaatgagtttttgcgttaatcccaattgtccccatccgaaaaaccccaataatgtgcaggtatgccaggcctgtgggaatagtctgcgcctcaacggccgttaccaaaccttgggtttattaggaaaaggggatnttggggccacctttgccgcagcggacgtggcactgccggggactcccatttgtgtggtgaagcagttacggccccaaaccgatga

SEQ ID NO: 308863 - DNA, 399 bp, Zea mays
ggaaaatttggccagcttgggggtaatggcctttcaaaaagccctggccatggcgggactacaaccggaagacctggatttaattattctggccacctccacccccgatgatttatttggcactgcagcccaaattcaagggggattgggggccaccagagcctttgcctttgacataacggcggcctgttctggttttgtggtggggttgaacgtagcagcccaatttttacgcaccggggtttaccaaagggttttaatagtgggaggggatgtactttcccgttgggtggactggtcggaccgaaccacctgtgtgttattcggtgatggagccggagccgtggtgctacaacgccaagcccaggacaatttgctcgcctttgaaatgtacaccga

SEQ ID NO: 308864 - DNA, 464 bp, Zea mays
atggaatggcgtgaatatcgattaattgttaatggggcttatttgccaccgtccctctgcctgaacttccaaacattgccggtgaaaatttcgcagggtaggtcgatgtcccacgctgatgaaggttgtacccaaatccgtcagagcatggtagagttccgcctcgttattcacatccagagcgctggtggcttcgtcgaggatggcatagcggggttggttgatgaaaactcgggctagggcaatacgttgttggtgccccagggaaaggacgctggaccaattttccaggctatccaaaccaccaaaacgctcggctaagtccggtagattaaccttgtttaaagtttccaagagaaaatcgtcgtccgctatggattgggcactggggtaaatcaactgttcacgcagggtgcccaaaatcatgtagggccgttggggtaaaaataataagtccgccagtt

SEQ ID NO: 308865 - DNA, 551 bp, Zea mays
  unsure (1)..(551): unsure at all n locations
gttatccattaagccaatgggggtagtagttttcagcagcatggccccggtgtccatgccttcgtccatcagcatagtggtgactccggtttccgtttctccgttggcgatcgcccattgcaggggagcagccccacgatatttgggtaagagggatccatggacattgacacatcccagccggggcatgaccaaaatttctggggaaagtagctgcccataggccaccaccacaaagaaatccgcttggcaattttttaacttagctaaggtttcttggcatcgtttgacccgttccggttgccacacaggaataccggcttgtactgcgacttctttaactggggaagggattaacttactccccctaccccgacgncgatcgggctggctcaccaccgccaacacatcaatatccgggtgccccaaaagagcttccagggtaggaacagcaaatctggtgtaccaaagaaacagttttcatcacaaaatatctagaaagtctgnccagttcattacacctttaactaccatggtcttaattaccctta

SEQ ID NO: 308866 - DNA, 400 bp, Zea mays
ttattttgtaatgatgacgaacagaccattgaattggtggcttggtcccgggccaccttggccaactattgtcgtgttgtagccgctagccattatcccgtggaagaagcaggcatttgggccgatgcgttgagactccgtcgcccggtgttgatcaatgattacgccacccaccaagggaaaaaaggtttgccggagggccatgcctatttagcccggttgatcagcgtccctgttatcgacgatggcaaagtggtgatgctcaccggggttggtaatacggacgttttttacactgaccaggatgtggaaaccgtgcaattaatttctaatgaaatctggcgcattgcccgttcccgtcgcctagtcaaaaaattaacggaaagtgaaaaccgttacc

SEQ ID NO: 308867 - DNA, 525 bp, Zea mays
aactattatgcctcccacggcgatcggctccattaccgccgctagcccagctatggctaacatcactaacccggttatggcaaagggaattaaaagccaaaggtaggattgccctgccagccagagataggatttgaaatggtcgcggtaaaccctgaggccgccggaaactacatcaccgacgctgagcttaattaggccaccgggggaaggttggttagacataggggaaggcaaaatacagggagttcttgcttggattctaccccgatcgcctaaaaagtctgaaaaatccggccaaaaatgctgtcaatttagtccaaatttaaatatccccctctaaacaataggattcgtagagattgagatactccatggcgttttgcactgcttgggggcgtaaattacgcttttccggaggaaaattggccaacacattggccggttctagataaagggcacaccaagaaataccaaaccaggcttgccccgtcaccagggagcggacaaattgcactgtgaaat

SEQ ID NO: 308868 - DNA, 140 bp, Zea mays
atctgagtttaccaaagaattcataacggttcctgtaattagaaccttgtcgccaacgttaacatcggtaatgaagttgccgttctcaaagatgaaaatcccttctgaagtagcaacattcccatcaacatctgcatctt

SEQ ID NO: 308869 - DNA, 537 bp, Zea mays
gcgcggcagttggtggaaaagggttatgcggtggccatctgtgaccaggtggaggatgcagcggaagtccaggcagaaaaacgcatggtggaacggcaggtgaccaagttactcacccccggcactttgaccgatgacagtatgcttccggccaagcggaataatttcctggcggcgatcgccatggtggaggataaatggggcctggcccatgcggatatcttcactggggaattttttacgtgccaatccagtaatttggatgacctagcagtggaattacttcgactccaaccgtcggaagtattgatacccacctctgcccccgatattcgcaatattttgcgccctggggaaccttcagagcatattcctaaacagttacccaccagtttttgttattctctgcgttcccaagcgcccttttgcttggtggaagcaaaacagagattactaaccacttttcgagttaaatctttggagggcatgggctgtgaaggtttacccctagcaatccgggcggcggcgggattattg

SEQ ID NO: 308870 - DNA, 523 bp, Zea mays
ccggggactcgccttaatgcacagttatctttatcctgaccatgaattaattattactgaaattgcccaaaacattggctttactcaaatttcccgttcctctgaagttagccccctaattaaatacatttatcgtggcgacaccaccgttgtggatgcctatctttcccctttactgcggcgttacgttgaccaagtgcaaggacaattaccaggcataacagtacagtttatgcagtcccatggaggtctggtggatggtagtcatttccagggacgggatagcattctttctggcccagcggggggcattgtcggcgctgtcaaaacctcccagcgggcaggctttcgcaacattattacctttgacatggggggcacttccaccgatgtggcccattttaacggtacctatgaacgattatgggagacggaaatcgcggggtacgttggcgggtaccaagcttagccattatacagtggcggcagggggcggttccattttgcactttgacgggcaaag

SEQ ID NO: 308871 - DNA, 474 bp, Zea mays
tcgtcttattcacggactaagtaatttggttttcaccacagaacatctgacgaaacaggtgcaatatgcccagcaattaaatcaactttccgatgatttggccctggtggccagggcccaggaattgcaaactcctagagttattcccgcccaaccccaaaaaaccgtcacaaaaccttaggaaacccctaaaattagccttcgaggtgtgccatatcaatcacctgaattattaagtttaattacctttacccatgactgccgtacccccatcctgccaaatccttgacggtaaagccctcgcccaaaaaatgcagggggaattacaacgggacattgcccaactggtggcccagggccatcgatcgccggggttggcggtgttgatggtgggggacaatccagccagtgccgtttatgtccgcaataggaaaaagcctgtgaaaaattgggcatggtttcctttggcaagca

SEQ ID NO: 308872 - DNA, 460 bp, Zea mays
  unsure (1)..(460): unsure at all n locations
aatcctaagactagcaacggaaaaactccatgagtccaacggtttttaaagaggagggctatcgttttttcttcttttctcgtgaagaaacaagaatgcacgtccatatctattgcgaaaagggagaagcaaagttttggcttgaacctgaaattgagttggcaaaaaactacaagttatctcggtcggaactgaaaaccatcgaaaagattattgaggccagacaaaatgagcttagagacgcttggcaaaaacatttcaactgttgaaattacccatatttctagccatggaatttnggttgttgtctggggacaatgagnttatttttgtcctacgacgattttccctggtttaaaaacgctctggtaaaacatattttcaatgtcattgagccaaccgccaatcatttttattggcccgactgggacgtagatttgaccttggacatcatcaaaca

SEQ ID NO: 308873 - DNA, 473 bp, Zea mays
cggtggtccaagctgcggtgcaaaaaacttacaaagcgattcggccgggcatggtggcggagatgttgttattctccaaaaacgccgaattggaacgggtggataaactcagcgacctccatctaccggaactggatttgtgggtgggggattatccagtggtgcgtcgagatatttttcgggatattagtaatgagtttggttccccaattccctgccgccgtcgtcaaccaactccctcttcccgccgacttcgttaagtttgattgcgcaattatgctaatttcccgctgtttggcaaaaattcacatttattcatctttccttggtcttttctggtcaatcggtcattttctcagttgcaactctggtcgtaaccacggcaatcggacaaaatctagttagttcactgactgcttattttcgcctactaatttctgcatagctctgccagcaagagtttaaagtctaat

SEQ ID NO: 308874 - DNA, 282 bp, Zea mays
atgaccacgtcaacatgtcccagtctttttacgatacttttcctacggcgatgcacattgcggcggtggcaggtttacaaaccaagttgattcccagtttgcaagctctgagagatagcctgaatgaaaaagcggaatgttttgcaggcatcactaaaattggccgcacccatttgatggacgcagtgcccctaacgtttgggcatgaattttccgggtacgtggtccagatagaccaagggctgacccaaaataattattggttacccggtcttttggaat

SEQ ID NO: 308875 - DNA, 147 bp, Zea mays
ccccccagctagtggcatcaactgtaccgccacccgcttatttgatttcatccaatttgaccattcaaccctatacccagttaggtatgagtatgggctcgcaaaatttcgatgcgcccaacagttcctcggatgccatggcgtacg

SEQ ID NO: 308876 - DNA, 516 bp, Zea mays
accgtaatggagaaaattattcgcaccggtaatttaaccatcggggccaacctggacaatgtgcctttttcctatatcaacgataacaatgaggtggtgggctactccatcgacattgccgaccgtatccgcgaggaagtgggtaaagaactgggccgggatgtggttttgcagattgttgaagtgcaggatatgagtgatgccttgcccaaactgaaaaccggggagctagacattgtttgtgatactgcttttacctgggagcgggaccgttacgtggacttcacagttagctatgcggtggctggcattcaattattggtgcccaatgatactcccatcaattcccgcgaaacgttaatgggacgccgggtagccatggtacccaacactattgtggaagatgcggtgaaaattgttcaaaatgagatcgaagtggtgcctgttaccagtgtgcgggcggcgatggaagctttgaaaaaaggaactgtagacgcagtggccggagatggtatt

SEQ ID NO: 308877 - DNA, 485 bp, Zea mays
gccatcattccccggacaaaatcccctcaagctagagatggcctgggggattttccttgatagttttgcggtttgattgcagttttttattagtaataattgccgactttgcgatggtgtacggcggttaacccttctgctttagctacccgaccattggttacttggctgtaaacaatccagtgatcactacattccatgcgactagctacttcacactccaaataggctagcgcatcggtcaaaataggcgatcgccgcttacccctggccccattggaacggcgaggctatggctacctgttggattttgtcgtgatttggttattcagcagtttagctacgggttgggtccagctactaatttttttggttggttggcttgccctgagggtagatttagtgtccgctaaccaggggcaaagcttggggggctgggctgtcgacactagggtggtacacctgaaaatgaaacgtttaccggg

SEQ ID NO: 308878 - DNA, 173 bp, Zea mays
ctttagccgctgattggtctcccactctaaattttggcggccttgattgcggagtcccggggcattggtttggcgggcacccacggcaaaaccaccaccagtagcttaattggctatgtattaaaggaagctgggttagaccccaccattgtggtgggaggggaagtggatgc

SEQ ID NO: 308879 - DNA, 503 bp, Zea mays
gggatgcgccagtttactgcttaaagatcgggggaatacgtgaacaagtggcaggggattggcttgatttaaaactaagagcgattgccattcccccttccttataaaaattctcgcgaaaaatcttgtaaaagactaagttttagaccgaataatgatcaattggacgatattaaagcgggagtggtttcgcaataccaaggaagatttgttggccggggctgtggtgggtttggcccttatccccgaggcgatcgccttttccatcattgctggggttgaccccacggtgggactttatgcttccttcaccattgctgtgttgacggccttttttggtgggcgatcggggtctatttctgccgctacaggggccatggccctattaatggtggatttagtcaaagaccacggtttgcagtacctgctggccgccaccgtactgacgggaatttttcaggttttgtgggggtttttaaagttgctaagcaaatgcgctacgt

SEQ ID NO: 308880 - DNA, 275 bp, Zea mays
ccctacctttggctttggctggaggcattttgggtttatacgttacccaatcggtgatcggtgccacggtaattgttggtacagtactcctggtggggattgtggtcaacaacgccatcatcatggtggagttagctaaccaaatctgggccgaagaaggcatcagtcgagaagcagctatcttacgggcagccccccaacgcttacgaccgattttgatgaccaccattaccaccgtgctgggcatgtttcccctcgccctgggcattggacaa

SEQ ID NO: 308881 - DNA, 541 bp, Zea mays
aaggaacggagataacgcaaacttcctgattggatagtacattagtgcttctacaatagagccagggaaaaaattacagctctatcaatggatatgaataaagagaagaattacaaccgataaagatggtactatttatgtggaaagatgactagaactctatctaatgataattaccttaaaaatagctttattcagtgaaagacccaatcgcagcaagctgcggcgtatgcgcaacccatttttagatccaactcaacttaaaaccttttctaactcattttgttgccacagggattgataaagtcctgactgttgcagaagttcttcatggctgcccgtttggacaatgcggacatggtccatgacaaaaatgcggtccgcttgggcagcggcggaaagttgatgggaaacaaagagtaccgtgttattgcggcgggccaggtaatgcaaaatgcggtgggcggtctggttatccacgctggaaagggcatcgtctagcaccaacaggggagcatcaagaattaaagctctggctagg

SEQ ID NO: 308882 - DNA, 408 bp, Zea mays
ttccctggggcaatattagcggccctggaagaaagcctggaaccatttccccaatatggggatgaccaatgtttggcggaggattgggttaccctcagtgtgtggcgacaactacaccaaaaatttgtcaaagctctctattcaattactttggctgacctttattacgatgcccgcagttggcaggcggcccaaggggaagggattaattttattgtttgattgatcgaaaaataaaggcgggatatcaatcttcaaaccgcttaattgttaggcgatcgggctaaacttccccatcaacatggggcaactgggacccttcataggccagccattggttgcgaccttttgctttggcttcatacagcgccaaatccgccgctttgaccagagcgttgggattgatat

SEQ ID NO: 308883 - DNA, 542 bp, Zea mays
cactgttccgtgcttttcttggatgagcccactgccttgctggaccgagatagtcaacaggaattggtattgcaagtacaaaaattagtcaaacaaaggggcatcaccgccctgtgggtaacccatcgcttagacgagctagactattgtgatggagcctttctgttggaggaaggcaaaattgtggcgcagggagatcgcccccatttatttacccaacgacaattccggccctggggcgggtttttcctataatttcaccgatgacctgagtttgggaggtttttattccgccggtaagggtttttcccccaatcaaagtgaaggactatttaacggtcagtttggggtaggggcccagttgaattatgtccccgccgccaacactggagtggctttttcttacctccataactacattccccaggggcaatacgatagtttttccgctttgggttacaccggcttggccaacactgataatccgtttgatgacgccgctagtagtactaatcactatgccgttatttggacttggcagt

SEQ ID NO: 308884 - DNA, 485 bp, Zea mays
ggctggattccaggaattataatccaagtttggtacgctggttacgccgcaaacttagtacataattcgactttagacaaaacggacatctatgtcatcgccttgcaattgatggggagcgcaggggtgatttttgcagcattggttttctactggctttattgcctagtggtggaagtcaatctaggcaaatggatttacattttagtggggggaatttccttgacggcatattttgtctttctacaattcccccaggttgctgagactttgggtcaaagatggcaacaaatatttgattccctgctttgggccatggtgtgagtgatgccatcaaaacctgactaaaaagtgtccgtgggaacaggttaagctccagacaagacagtaaactaagaccatggaagtccgtctaacctttgcaatgtagtcttttggagagtcggttttatgtcagacctgaaccgtggcatcatgaaattcga

SEQ ID NO: 308885 - DNA, 446 bp, Zea mays
agggcatggcctatgtggctcagcccctaggtggtgatctgtttacggtggtggctaatgtacgggctgtaagagtggttagagcttggccagtaaggattaggaagtaatcggcttggtgaaaccatctatctaaaaaattccagaaaagcccatgctatgataatgattatcattatttagaagtttgcccgtgatggccatggggaggaagggcattgtttttcccttggctgttgcctatattctcgataatttgttggctaattcctagggtgtgaggactcctatgttaagaaaactgtcactagtgtggggtttgggtgccctgatggcgatcgccgggggaggtggggaagctctagccgaaccagggggcagaattgaacctttgcagttcgggcaatccgtggaagagatggactccaacctcatgggacagatca

SEQ ID NO: 308886 - DNA, 445 bp, Zea mays
ctgccacaggggtgaaatctccgctttaaaaaagccctcatttctgccgtcgttatcggtttactcaacgccctagtgcgtccagtactgacgtttttcacttttcccctaatttttctgacctttggcctgttttacaccgtagtcaacgccatcatctttgcccttgctgccgcttttgtagatggttttagcctccgctggggcttttggagcgctctcattggcgccattctgctgggatttatcaactctctcctcttccaattactacccatcagcagctagtccacagtttgacttagctatgacattggcatttcaaagtatctaattaatgcggtggggttgattctaacttcaccgttttcatctgttcttgcaaaaattaaaaattgtttgagggaaaaattttgcaagttaccattaaccaagctaaatctat

SEQ ID NO: 308887 - DNA, 399 bp, Zea mays
gatcgccgaggccctcgaagtggatgctaaaaccccagtggtggctggttaagacaacaaccagtcaaatttggctagtattgtaggtcgggtacaatcagaactcgctggctagcctgaaaaaaatttgttaaccattaacaggagacattaataaccatggcccataagaaaggaacggggagtacccggaacggtcgcgattctaacgcccaacgcttgggagtcaaacgctacggtggtcaaaccgttaccgctggcagcatcatcgtgcgtcaacggggtacccaagttcatcccggcaacaacgtcggccggggcaaagatgacacccttttcgctttgatgacggtgtggtttaaagtttgagcataaaaccagaagccgccgcaagtgagt

SEQ ID NO: 308888 - DNA, 512 bp, Zea mays
aacggggatggtcaatggcccaatgggaaagattccagcggggagcacgttgggactgcatcgagggaattcctaactttttctgggtacgattctttgaagatgaattgattcgcacctcggctaatctagcagaacatggccctgggccatccttctcctccggcttctcccatcggccccaacagttaagacccctggaaatctgttaccatccccaaaagataaaccagccccccttgaactagctttttcctaaacttttgtgatctttgagcaaggcattgaaattaaggccagtgccacagtggtagaacagtgtttcactgatttggatctgatgcacctttggctcaacccggccctgcgttgtgaacccatcggtcaatggtccacggcgatcggtggccggagtcgttttactatccaaattcccctgctcaaacccagcctgaaaagcgtcgtggtggagagatcgccagggttagtggtgtggcaattcaaaggatttt

SEQ ID NO: 308889 - DNA, 354 bp, Zea mays
gtctttaagtcttttttttttagtcaaaactcactacaacaccagagtaggaggtttccaatgaaccggaagattttagtaactggtgcaaccgggagcaacggtacggagattgtcaagcgactcgcagcaaagaacgtgcaagtccgcgccatggttcgtgactttgatcgagcaaagaagattgcattcccgaatgttgaagtggtggaggggaactttgatcgccctgagacgctgttggaggcgctggctgaagtagaccgtgcctttctcttaacgaactctacagaacgcgcagaagcccaacaactcgcgtttgttgatgccgctcgtcagaatggtgtcaagcat

SEQ ID NO: 308890 - DNA, 411 bp, Zea mays
ctgcatcatttcctcccatgccactggccctgactgcggtgaattaccaacagccccaccatttcctccccataaaccaaaggtaaaaccaagcgcttatctgcatcgaagggaggaggttccaaacgactacgacgacttaactggcctacccccacgggaactgccggcaaagaaaaatcgtccatcgggggagacacctctccttgtggtagacttattaacccataactttctgactcaaccagcgttgaaccatgggaaaccaccagcggcaccaatccctgttccgtttcttcttgatttagataaacgccgcaccagtccacccgcaatccctgttgcaaaagccgaacctgtgactgacaaagggaaattaacccagcactgggggaatacattgatgagatg

SEQ ID NO: 308891 - DNA, 428 bp, Zea mays
aatgcgacttttaaccgggtcactcagcatacccgctgcccccaattgtttaatacccgggggaaagatgttgggggaaacagctaaataaaagactcgattgcctctggtgttacgtttttcatccaattcccccaggaagtttttcaatttgagatagctttctgggtcatccatattgccagagcagtagaataaaccctgggcaaactcattccacaggtcttcactgccaatgccggtggaaaattcttcgatgcccttacgcatctgctcacgaaaatggtcgtggctccagtcccttctcgcaaaaccgaccaccgttaactctggaggcaagcggcgctctcgtttcatttggtagatggctggcaccaatttccgttgggtaaggtccccggatgcaccaaaaatggtcaaaatgaggg

SEQ ID NO: 308892 - DNA, 468 bp, Zea mays
gggataaaggggatatttatctggcccaacaacagggctggtactgtgtagcttgcgaagaatttaaggaaaaaagagatttattagaagataaccattgccccctgcaccccaaccgcaaggcagaatggcgggatgaagaaaactatttttttcgcctctcccgctatcaacaccccttggaagaactgtacgcccaacgaccggaatttattcaacccagtagtcgtcgcaatgaggtgttgaatttcgtcgcccagggattgcaagatttttctatctcccgggtcaatttggactggggtttccctctccctaatgatcccaaccataccatttacgtttggtttgacgctcttttgggctatgtcaccgctctcttggatgaagatgaagaaccaaatttaactaacgctctggttaagtggtggccgattaatctacacctgattggcaaagatattttgc

SEQ ID NO: 308893 - DNA, 443 bp, Zea mays
agtaattatcaacgcctattggatggtgaaatagatggttatgaaattgataaacgttatatccacaaagatggccataatatttatgtaaatcttggggtacaagcccatcgtaggctagatggcagtcttgatttttgtgtggtgatggttcaagacattggcgatcgcaaagccatggaaaggagcacctccttggcgttacagcgggaaaaagagctgaatcaattgcgttccgaatttattacggccatttcccatcaatttcgcacccccttaacgaccatttcctgtgcggcttcaattatgggaaaatttgaagcaaaactaaccgatgaaaaacgagttcaatatatagagtcaattcttaggggagcgaagcaaattgatgaattaattggcgatattattactattaatcttaaccaagaagaaatcgaacc

SEQ ID NO: 308894 - DNA, 214 bp, Zea mays
ccccaagtagcctatcgggaaaccatccgtaaggcagtacaggcagaaggtaaatttattcaggcagagtgggggcaagggccaatatggccatgtggtcattgaggtggagcctaccgagccagggacgggctgtgcatttgtctataaaatcgtcggcggcgctatttccaaggaatacattgccccgtaggaacaggggatgaaagaagcc

SEQ ID NO: 308895 - DNA, 337 bp, Zea mays
gttgattactgtcccgataggcatcactgtcttgccggagccgatccacctcttccgcttcggtggctaatcttttgatggtcataatgccgctgaggttattggacaaacggctgttcaaattactgaccttttcccgcactagggcataacgggaagtgagcaaagactgaaaatagatcgaccccaacagcacagagggcatgggcaccaccgccatccaagcaatgtccggggtaatgacaaaaaatgctccaccaatcaccaccactgaggtcagcacctgcaaaatttcgttggcccccacatccaaaaaccgctccaactggttgatgtc

SEQ ID NO: 308896 - DNA, 530 bp, Zea mays
  unsure (1)..(530): unsure at all n locations
gtttggggagaaatatggggctgaagtgcgggtcattgacgttccgggagtttctttggaactgtgtggcggcacccatgtggccaatacggcggaaatcggtttattcaaaatcgtcgcagaaacgggcattgccgccggggtaaggcgcattgaagccgtggcagggccgtcggtgttggattacctcaatgtgcgggaagcggtggtcaaagagctcggcgatcgcctaaaagctaaaccggaggaaatcccagaccgggtccaccaactacaacaggaattaaaagccagccaaaagcagttggaagccctcaagcaagagttagctctacaaaaatcggaacagttattaacccaagctcaaactgtgggntgagtttaaaattctggtggcggatctgggtactgtggacggggaatctctcaaaactgcggcggaacggttacaacaaaaattggaggaagtgcagtggtgcttgcttccattccagaagagggcaaagtcagtctagtgggcggctttagtc

SEQ ID NO: 308897 - DNA, 443 bp, Zea mays
taacctatccggtagatttaaggtgatttgcattggacgaccatcaaccattaccctttgattctactgttatgctgttgccatagccacgatcgccaagagggtattgatgaggtaaaaagagcccacaatttgggtttcggtccagccacttaattctaaatggtggtgaattggagccatttttaacaaccttttgccgacgccatcagggcctttggtggctttgtagtaacccacttgggcgatgacggagagggattctgccagaaaaatgccgctgatcttttgggatgattcccccaatcgcttcacctgttttggcggtggcggccaccgtttcccgaattgcgacaatgccatccacggtgcggttcatggcatcttccccttggtccaccgtttgggtcgcccgttgtactgctgattctgcttgggcagca

SEQ ID NO: 308898 - DNA, 515 bp, Zea mays
ccgacagtgcggtgtttgatgtgatgacgactattttgagcagtggccgcacttcccgcctttatcaatccttagtggaagaaaaacagttggcattgatggcccagggctttaacggttttccggcggataaatttcccaatttgttaatgttctatgcccagagtgcccccggtcgcagtttggacgaccttagcgaggcgttacacggggaaattgaacggctaaaaatggaacccgttaccccggaggaattggagcgggcccaaaatttactgcaaacttccgctttgcaatccctcaattccaatatgggcatggcccaactgttggtgaaatataacgtccgcaccggggatcggcgtaatttgcttgcccgcttagaggcgatcgccgcagtgacaccggaggatattcaacgggtggcccaagaaacttttcgtccagaaaacagtaccattggtcggattttaccggaatctaatcgccaatgattcccctagaacatccgattt

SEQ ID NO: 308899 - DNA, 465 bp, Zea mays
gagaaagtattactcctgatttgctgagatttgaacctatgcttgcccgtcaacaaccccgccgtgtggcccgtgaactgtccctgttgagcctgagccaattgagccgcaaggacactaagcccgaaaccttggagcaaggcgacctggaagcattgttgttggccgccacccgcaccctgagtggggaagtccatgaaattttagaaacggcctcggcggaattgagtcgtagccatgaacgcctgttaaacagtgaaatccgggctagcaacctcaacagtgctaaggccatgttggaagaggctatgaccctaacggaaacggtgattaatcgcctagccctagcggtggatttaccggaaacgttgcagttggcggggcaatgggaagtacgaaaatttgcgttggaattgattggcaccgtctgtcgccgccgtcagcagattgatgagcagttgcaag

SEQ ID NO: 308900 - DNA, 520 bp, Zea mays
ctttggtcgccctttttactgttattttcctttgcccaactcagcctgtgttaacttcgcccatgtctgttgccgctgttgttgttgaagaacaggccgctgtgctaaaaactttgccggattttcccctgtctaatcagcggtgtgccagccagttacagcaacgccttgatttgctattactggcgatcgaggctttggatgtgggctcggcgtcgaaaatgttagccagtgcggaaagtttaggtttgcaatccatcattccccatgctctagccctgtggcggttacgctgtactaacccctggcgacgttcctataaccgcaccctactcaccctagaccaagctaaggccctgacggcgatcgcccactaccaggccaagccgttaaatgtaaccatgcggcaattactaattgcggaacgacaaatgcgagccaaacagttgccagtgggcaccaattttttactgtcggattacctagaccaattccgttcccattttagtagccggatgaa

SEQ ID NO: 308901 - DNA, 506 bp, Zea mays
ccaaatgtcccggccggcatagctttggccaatggtttgcaccgttagcagggaaccatagctagtttgtagttgttgtaaaaactggtctatttcctggtaggtgaaatagtgactgaaatcaaagggagaaacggtcatggaggacgcaacgaatcacaaagggtgaataacgatggggattggcgtaaactcagatcccaaagtcgtacatcatcaatctatacctaaacctaatgccatggcgatcgccaattacagagccattacaaccaaacaatggcaaacatgggtagaagctgcccgtcttcaggccctcaacggtaagttaccccaatacattcctcagttgagcttggtcgatccaggtaattttgccctagacattggcgaccaaaacggcattatttacgaagcaggagatacagacttaacgtttagtttgatgagtgtggtcaaaccctttctgtggctttacatactccatcaccggggttggcagtggg

SEQ ID NO: 308902 - DNA, 192 bp, Zea mays
ccagggccgctacttttttgctcataactacatgattaactgcgaaaaatctcccgttaacttaggtgaaaccgtagctttagagagggtctgaaacgtgcaaagctcggtatacatgcttgcaaatgctcccactaaagctccggcttaaaaaggaggtctctagtaacaggtctccccttcccaaggggg

SEQ ID NO: 308903 - DNA, 458 bp, Zea mays
aatgccggtatttccggtgccctattagcccaaaatctacttctattcatcgtcttctacgaactagaattaattcccttctacttaatgattgccatttggggtggggaaaaacggggttatgcctccatgaagtttctgctctacactgccttttctggtttgttggtgttagcagcctttctcggcatgagtttactaagtggtagccattcctttgattacaatccagaaattacccagacctttaccgagtcagcccaaaccattctgttgattctgattttgtgggttttggcatcaagattcccctggttcccctacacacttggttacccgatgcctacacggaagcttccccagccacggccattctattgggaggcattttggccaaactaggaacctacggtattatccgctttgtgctgcaactatttccccaaacctgggcccag

SEQ ID NO: 308904 - DNA, 472 bp, Zea mays
gaagaaaacctccaaagcaaaacgtgatcaacgccgggcccactggcgcagacaagcttcctcccaagcgcaaaaggctttgtccctcggcaaatccattttatctggccgttctactttcctctatccccccgcagaagaagaaggggaagaagagtaaagataaattgtcagttagccgaatttagcatcaaggtgaggggcgatcgccaaggacaaaacggttttgggaaaaataattgaattgattgaacttcaatgcttaaccagttcccgaagcttcgcctaactcccttcacaacgggcattgttgctatttttctgttttccctggttatacgattttggaacctgggacaatttaaccaattagttttcgatgaagtttactacgccaaatttgccagtgactattggttaggcaacgatttttttccctcccatccgcccctgagccattacctaattgcat

SEQ ID NO: 308905 - DNA, 368 bp, Zea mays
atgtgggaaatctgccgaaatgattcccgcttatggatattacttaaatgcacttccacacatggtagttgcacagctgctaaagcatctcgcagggcaatactagtgtgagtataggccgccgcattaaaaacaatgccgtggtaatttcctagggctccatggatggcggtgaccaattgcccttcactattggattggaaagtactcacctctgcctctaaatcgacgccatcttcccgcaggcaggcgtcaatttcccctagggttagggatccataaatacccggttcccgctggcccagcaaattcaaattgggaccgtggagcaccaatactttccacaccgttgtcatactaaaccaaac

SEQ ID NO: 308906 - DNA, 335 bp, Zea mays
ccctttttgggcattgatggtggcccgggaagcactgaccctctgcacggcggcttggtaattatccttagcctgctgtacggcagaccgggaagcagacacactggactggttagcttgaacggtagctttggccgcctggactgttttttgggccgcttcggtgttggccctggcatcttccaattcagtggtgcgattgtccaaatcctgttggggttgcacccccgtttccactaaaaattgggctcgtttgaagttaatttgggccaagttaagattggcctgggcccgttttagatccgcttccctagttttcagcacttcctgggaat

SEQ ID NO: 308907 - DNA, 349 bp, Zea mays
aaactggggacaataattttcacaccaatgccgggaaatttgatggccaaattagctttatggtctttgtctaatatgtgggtacagagccttctacaaaattgttgtgcattacccgatcgcaacattccaaattaggtctttagccggttgagtggactgagaaccagttttttttcgggctttgtttttgggcaatggaaggtcccttgggatcggcggcaggagcattgcgaccagttctacgaccagttgagccattggccaataaatccggtggtaattcctggagaaattgggacggtattttgtgttctaaagaaccccagatgtaacgcatgcgagcatg

SEQ ID NO: 308908 - DNA, 217 bp, Zea mays
attattcgatatatttaaaagcacgaattcgggattgctcatcactataagcataggctattaggcgataaagcacattgactgtggttgggtcactaagacctgataattgacaccatttctttagatgttttggacgattaatttctccaaaatcatcagagctaatatcgggtggactgttgttccggtgattgaactcttcattgactgcacc

SEQ ID NO: 308909 - DNA, 464 bp, Zea mays
  unsure (1)..(464): unsure at all n locations
atttaggtctttcctccgcagaaagtttacccatacctttaagaatcagggacaattccccttttttccctaggtattgcacccgcaatttatccaacccatccaggtcgtcacaaccgctgatcgccgcctgggcagactgttgcagggattttaaatcggcttccaaagaaatagtcatggaaaaatgggtctctcgtaattccgccctagcaaaggccttgtttatggggatggatcaaatactgattagcgctggtcaggttgatcaacaggggataattggtctttcctcggccatggtcaaggccaacatcggctaaacctaggaaaaatcgcccgttaccgattctaccccagcagagagcgcaaatcctttgttatcaagagctaatccttggcaccaggggaatctgccgcaacttaatgccgggaatggtgaacnntgtgttcgatctgatttg

SEQ ID NO: 308910 - DNA, 515 bp, Zea mays
agacctgaaaagaaacctagaactaatctcctctcgcctggggcaaacccaggactatctttgacctgccaggattaaaagccaaagttcaagacttggagcagtgcgccgcccaaccggatttttgggacgatacggaccaagcccaacaaattctccagactttgaacgaaacaaaatcccagttagagcaatggggcatttggcaacagcagtggcaagatagccaggccattgtggagcttttggagttagaggacgaccaagccctactgacggaagcggaaactaccctggaacaactgcaaaaagaattagaccgttgggaactgcagcagttactgtctggcccctatgacgcgaaaggggccactttaactatcaatgcgggggctggaggggaccgatgcccaagactgggcgggaaatgctgctggggatgtacacccgttggagcgaaaaacagggctacaaagtccatttggcggaaatttccgagggagacgaagcgggct

SEQ ID NO: 308911 - DNA, 421 bp, Zea mays
gggcactggattatatggaaatcggcaccccccgtagtcaccgccgctttttagggcgacaaaatggcacctatggccccatcccccgccgtcgcttaccgggtttactgcccatgcctttcaaccgcaccgccataccgggcctatattgcgttggcgatagtacttttccaggccagggtttgaacgccgtcgctttttctggttttgcctgtgcccatcgcctagcggtagatttgggggtacggtgatgaccgccaacattctctggcacaatggggccaagcaatgagctgcaacgatcgccaactgcatgggtaaaaaaccaaaatcttcctttaacgtcaaccaggatgacatcccggaagtaattcgggacaatccagcggggtcgccccagtcccaacccttgtcccccata

SEQ ID NO: 308912 - DNA, 538 bp, Zea mays
gttttccttggcttgattgccccgaaagccatcgcttttactactcattactgcctggtgtactttgagggtcaagatttcgtcctgtcctaggttattgtaaagggcacgcttggcgggagtgtcgatcgccttgggagtatcgtcggactgccctgttgctacttttctgaccagagtggcaagctcttgtagataggcttcatagttgagggcgttctgtttacgctgacgaataatctcatccaagaggatggaagctcaggggccaatttagtacctgaagctttttacatcaacctgcttcccagttttcccggtaggttgcaccaaagatggtgtcgcccagccatttcttgaaggactgattatcactaaactgcttgaacaactctgtgtggtcagccaacaattcaatcatcacccgctgtagggcagcatcatgttcgattctggcagtcctcttgtcgttgttcctcatggcattctgataggctacgtccgccgctaccttggctggaatctcctcagcgatgac

SEQ ID NO: 308913 - DNA, 232 bp, Zea mays
gcgccatttcagcggccctattccggtggttagaaaccctagggattcctacttattacattgactgcccccaaaatgaccaaatgttggtcaaagcggtgaacatcattcccctggaggttgtggtgcgtaatattgccgccggcagtctttgtaagcaaaccggtttgaaggaaggcttagtactgcccaatccgttggtggagttttatttcaaagatgatgccttagg

SEQ ID NO: 308914 - DNA, 527 bp, Zea mays
ttccgcctccccggccacgtccaaccctggttcctggctgagacgggtcaccaatcctaaacggaagagttcatcgtcctccaccaaaagaatccggattgaagttggggaaattgccataaatggttttgattaacaaaggtagtctggataattggcctaaattgggggtcaaaactagccgatccaatgcctgctatctatcccaaaattatgctttctgaaccctatcattttcctttaaaacgtgtttggaaagttttattccgccccctaaatcccccaacactgggggactttcactcagttttccctaaattgagggggccaggggggcttttaaaacagttttaaagatgaatagcaataaactaaagagaacgttaaaccctaggattctatgggtacggaaaaagcaaaaatagccccttggggagagcggggttccgcccagattttaccaccgtgggcttcaataatttggcggctaagatataaccccagtccggctccctttgcttggcgat

SEQ ID NO: 308915 - DNA, 375 bp, Zea mays
aattatgtctaactcccgagttagaagccctcatgaccaccaccgaagccctggcggaagattaccaggacgaccatgaccgtttgctacagctcctaagggttctggaatctctgcaccgtcacattcgcatcgactattttggaccgggccttgcccaatacccgtcggggtctatatggcctactaagggatatcgaagaaagtggcggctggccatacattgagcggggtaagctgagtcatttcatcaagaatttgcaggaaagcctggagcggaggtggagtccctgggggaattagattaggaccataactattctcccaaaaagcaacggccgtgtggggaaaggctgaaaggcttatagattgacg

SEQ ID NO: 308916 - DNA, 177 bp, Zea mays
cccgcgaccatcctaaattctcgacgcagtaaattttcaacctgtgaagtagagcagtttcctaatcgaagccaaataactttgggagggctaccaaacaccagactaagatcgtgcatgtctgcatctttagagacaatcattaagtcattattttttgcataatcccaaacgata

SEQ ID NO: 308917 - DNA, 236 bp, Zea mays
  unsure (1)..(236): unsure at all n locations
caaccccacactgcccgcattgctttgatggtgcaacaggtagcggtaattgtgtttattgtcaccgatacggaagcggaagctttagccttagaagctaatttaatcaaacaacaccaaccccattttaatgttctgcttaaagatgataaaaaatatccttatgtgtgtatcacctggtcagaaacctatccncgtatttttattaccagaaaacgccgtttaaaccaggctaa

SEQ ID NO: 308918 - DNA, 114 bp, Zea mays
tcgaccaaatatttggaaggtaatgccactatccgggaatttgccctgatttcaccctggaatgtggacgctctcatgcatcacattcaggcgatccccgggtacctgtgctcg

SEQ ID NO: 308919 - DNA, 221 bp, Zea mays
agccgcctggtaaaagggattactagcaatgcgtttaccggtgctgccggtcaggttaacatccgcttggctgtagtatttgtgcaagtaagaaataccaaagctgaagttgacgactggattgatgtcaaattgaagccccagtgctatagctaccgttaaagaagccattaccactactgaaggtattgcctccactagtgaaaacatcatcggagggg

SEQ ID NO: 308920 - DNA, 437 bp, Zea mays
ggaggaccaacctccaacaccaccaagctgaacgggggggcagctttcgccttggttgtctcagtggggcggtgataaagctgtggctaggcgtcaacaagacaacaccgacaactgtaactctgccgctccaggttcggtagaagagaatgctaccctctccaggagggttcgattaaactttgacactagctgtactggttaggactgactacgtacccgtttggaggctgtgtgcgtgcccaactcgtctggtcctactggcaccaacatggctcgcctttcccttgacggctccagcccggacaataaacgttgatattaacaaggatgttctatcgctttcccatgggttaccctaccacctggattggcggtactggtttagctctggacgatgtgttcaaaaactataatccctacctagaaagtgggga

SEQ ID NO: 308921 - DNA, 465 bp, Zea mays
ggaccaacccctaattccttcagcttggccgctaggcgaccggccctttgttgtttttcgttagcccgttgcttttctttgaccatttcttgatcaagacttaacctccggggaggacggttaaagtcggccattgctggcaattaggcaaagctggctagagcttgttttaaaagcccccctggccccccaaatttggggggaaacagaacgatagttccccaggattgcggccgctacagtcgctcgattgctggggcagactaacactttccacacacgattctagagcctcattccttgatttatacagcggtggtctaacaacgtggcttctttcaaggccctggggaaccaaaaggctgttgtttttgaaattttcaccagctttaacactactggcacttcaataaatacccccactacggtggccaaagcagttccagaattgaggccaaataacat

SEQ ID NO: 308922 - DNA, 227 bp, Zea mays
ccctgggggaaattgtttttaatgatgctgaataaaaacaatggctggcgtcccaaattcacccctttgttgggcggtgtttgcggtctgccttagctcagttaaaacaagatcaaacggcgttattgagcattcctctattgtttgaagcccagtttacagattgggtaacggaaatttgggtagtgacctgcggaccacatcaacaggtgcgaacgattgatcct

SEQ ID NO: 308923 - DNA, 301 bp, Zea mays
ggaccaacccctaattccttcagcttggccggtaggcgatcggccctttgttgtttttcgttagcccgttgcttttctttgaccatttcttgatcaagctatacctccggggaggacggttaaagtcggccattgctggcaattaggcaaagccggctagagcttgttttaaaagcccccgtggccgcccatatttgggggtatacaggacaaatgcccccaaggcttggcgctttaactgtccctgttggtctaaaatttccgggccataacgcctggcgatccccgggtaccgagctcg

SEQ ID NO: 308924 - DNA, 156 bp, Zea mays
aaatttcctctgccccatgtttgatgtgctcttggccatttagttcttttaacctttcttacaataaatgttgcaacacctccagagccttggtgaaaccggcaatgccttctgacagtgtttccgagggcatcggatccccgggtaccgagctcg

SEQ ID NO: 308925 - DNA, 327 bp, Zea mays
ctgccgggggtactgctcaccgggccgtttatgccggagtttgtactgcaaaagttaaaggtcagagcccagaataatcctgacctcactatcctgccctatttgtctgaaccgaccatgttgatgtgggcggcggaacgggtaatcacgatggggggcgtacaacaccacctgcgaaattctgtccttccaaaaaccagcgctgattattccccgtattaaaccctgccaagaacaatggctgagggccacccgtttaaaacatactgtggctggtagatgtgcttcatacggagcaggtaaatgcccaaaatttgacagcttggc

SEQ ID NO: 308926 - DNA, 261 bp, Zea mays
tgggtgttttggatactggtaacgggggccctgacccgggcttatttgttttgctaatagctatctaccggaggacggagggcaaaagttctgatgccaaaacccgctgcttagggggcaagaatttcattaacaccgaacgtttccgaataacggtgatagcgtttaacaacgtaggcgatggccatggaaaatttacaacggaattgactagcatgcttgggacatgaaacagataccggttgctgggaattgacccag

SEQ ID NO: 308927 - DNA, 522 bp, Zea mays
caggtttactctagaggaccgccgccgcccaggatggagccacctacctagacccccaaattgcccttgttttggcggaaaacctgaagccccccgtgccggaaggccaaaccgtcatgtctagcctttgggaaagggaaattgacacgctgaagacaatcgagggaggcaaaagtaacctagaaatcgtccaaactatatatgtaagcaccaacacatttaaaactgatgtacggagcatcatgaataagctgtccggtgatgaccgggttcaagctgccgtcattgccctccactccggtttggtttgattagcttaaggggctataatccatggcgttcactttacccgtgctaaaccatggtcaaagcaatctggaatggggtcgtcctcgaacagagtgaccagtgcgaaatggtggagggcaactactattttcccctcgacagcatgcatactcagtatttgcagcccagtgacacccacaccgattgcggttggaaaggcaccggcagatacta

SEQ ID NO: 308928 - DNA, 449 bp, Zea mays
tgtagaaattctagattcagatttttggcccaatacctaggtctcaccagtttttgggctggaactcgtcgctatttaaaatgctgacgctttctccggattgggtcagcacgaataagccctggcggtaggcatatttatcggctccttcttcaatgtccatggcggcaacggcaccgtaaacttgtttttgctcatattcgggaaaaaatcttctaaattctgccagattagtcaaaaaatctttgacatcctgcacactaagcttacttttgacttctaccactagggcgtggtcttggttgagcacgagaatatctatttccagggtgtcactgttcaggcgttttttaacccgttgacttacttgatggacgggaataccccggtctaaaaatagggtttcacaggcaggggcgaccatattttcaacaaatcgtccccaggat

SEQ ID NO: 308929 - DNA, 500 bp, Zea mays
caggtttactctagaggatcgccgcggctgatttggccatcaccaagtcgggaacggtgaatctggttattgctttactaaatgtgccccaggttatcctttatcgggttagtcctttgaccatggcgatcgccagacggatttttaaatttaatctacccttcgtttcccctaccaacattgtgctcaaccggggcattatgccggaactactccaggaacaggccaccgccagcaacattgcccaagctggattggaattgcttctaaacggcgatcgccaagcaaaaattgcccaggattaccaagaattaagggaagcattaggggaaccgggggtatttgaggcaggccgcccaggctgcctgggagtttgccaatgggcaacaaaaaagcagggcttaaaccctgccgtggacaattatgaaactatcaaactcactagcccatggccagcattattacccttagtagaggtcttcttctttgtgggtttcaat

SEQ ID NO: 308930 - DNA, 415 bp, Zea mays
attctgccccctaaatttcttcactaaagctccggtaatactgggggattttacttagttttcccccaaattttttttggggggtcaggggggttttcaaacagattcttaagcctagtcaaagtcaaaacaataatggattttaatgggctggggcaggataaattttgactaccaaaggggaggtaataatggtggtaatgatggccataatcacaaacatagtgaaaatcaccggggaaattacacctagtttgagacccacattgagaataattaattccgtcaagcccctcgtgttcatcagccagcccaaggccttggcctcttgcttttccacccctaatgccctggtggtcacataaaccccgcaatatttaccggcgatcgccgctgccaccactaaagcacacac

SEQ ID NO: 308931 - DNA, 444 bp, Zea mays
caggtctgctctagaggaccgccattgcggtgacccgtacggataacattttcggtgcatttcctacttttttgggtattattgtctacactgtcttcatggtcactctagggagaaaattttttaagtatattctccgcaattatggtcaaaaaaattatctcagccagggtctattaacttttatttatatcatggtaattctttccgctatgctgacggaatggattggtattgacgtaatctttggtggatttattttaggggcaattttaccaaaaaatacaaatctaagcacggaattagccactaaaaccgaggattttgtttccacatttcttttgcctattttctttgcctatagtggattaagtacagaccttggtttactcaataagccttatctctgggcggtgtgtgctctagtggtggcagcggcgatcg

SEQ ID NO: 308932 - DNA, 470 bp, Zea mays
aaaacagggcaaaattccccacgctgaccatttactgagggtattggatacgggcattcagtccttagcagagcagtacgattttagttacacggtttttgctttgaccgatgggggccccagtcgagaccacaacgaagatgcttgttttcccgtcagtgaaacccccattgaagggcaacagttggccaacaccatgactctgatttgtgacggggtggggggccaggaagggggagaaattgcttcccagtgggtgattgaacatttacccgttcgggtaatttccaaaattcaaaaacaaatgaatgagccggagcaaatccgcactttcatccagcacctcaaggaagacatccaagaagttaacgagcaactcaatcggcgcaatgaccgggaggaaagaacagaacgggaacggatgggcacaaccctggtgatggccctggcggattttcaacaattttttc

SEQ ID NO: 308933 - DNA, 524 bp, Zea mays
tcgactctatgtggatcattcatctctgcttccgccgccgctttttccgcctgggtaggggtggggactgattggggaaatctgacaatgaattaaagccacggaaacattgtcatggccattaacttggttggccaattcaattaaccggggcaccgcttctgccaccgggcgatcgccttgtagcactgggagaaaatcatcttgccaatactgttcgacccgattgtagtcacaaataccatcggaacagagcaaaaatagacaatccgtcggcacaattaagcgttgaatgatgggatgaagttgggccgagggccccaaacccactgcctgggttaatgcccccgatctgggtaactccaccgcatggcgatagagcatcagtcccagccgtacttcccgggatgccacatcatcgttcaccgtcacctgtttacaactgtccgccgttaaccaatagcaacgggaattccccacattggccaggaaaaattgttgaaaatccgccagggccatcacca

SEQ ID NO: 308934 - DNA, 466 bp, Zea mays
gaatttgtttgtgaacgccacaccctccgccgagaagggttgcccatcagaccagagcacatcaggctttaacttccaggtgacggacaaaccatccgccgccacgccgccattttctacgctgggaatttccgccgccaaaaacgggactaggttgccttcttggtcaaaacttgccaggggttccagggcaatacgactagcttccgcatccttaaagcccgtagccaaatggggatttaaaatcgtgggagcctgccaagagagaattttcagggtttcttgaccattctgctgagagttaccattgccgacattggggctaccacaggcaaacaataataagggcaacagccccccaattagtttttggcaagaacgagacttaacggtggcgggaagatttagcaacacaggcaacagggataatcaaggcttaatttcgctagattgtcccctgattaga

SEQ ID NO: 308935 - DNA, 252 bp, Zea mays
ccccttggtcgaaccttagccactcgcacatccaatgcagcttttttggtggtggaaggtctatctttgttaggcaccagcggcattgcccaacccctcagtgctccggagcaactggcagagttttaacagcatttgactagggcggctcaacaacatcaatgcttagtattctgcctggcagaaaacggtttagacttagctcgacagtggggagtacccctagacctaatggtaaaaacggccaattgg

SEQ ID NO: 308936 - DNA, 461 bp, Zea mays
  unsure (1)..(461): unsure at all n locations
tgggcctcgccattgacggtgtctggacgatttccccgatttaatttgaccacttcatgaccttgggccaccagcacccggcagagatggataccgttaaaacgggtatcctcccataattaaaatgcgcatggtctactgtgtccctccaaatggcaactttcccatcatcccctaggctgtgcctacccggaattgtggggtttatctttaagcacgaagctcaggtcctggtatggtcatgcccaatttatcagccatggcctgaccttgagtactaattgccaccggttggcgatcgccatcaaatagtaaactgcccacttttaattgatgttgactgactntataaacatattccttcgaacggcgatcgacggtgtccgccatggcttggtaaattttgctaacccaaggacaattttgctccgtttgccagtggcgtaatagctttaaccctg

SEQ ID NO: 308937 - DNA, 135 bp, Zea mays
cgggacgatttcattcaaattggcattgcccttgacatagtctaatccgtccacctctggagcaaagcgggttgatcggccgatgaattccccagtgctgggattttcctgctcgatccccgggtaccgagctcg

SEQ ID NO: 308938 - DNA, 255 bp, Zea mays
caggtttgactctagaggacctacctcgatattgctgtgccctcttctgtatcgggtactgaggaagttgttttgggaacccaggacgtctttaaaacccaatttgttgaattggcacccgtcagttagctttaaatccctcccagggagcaagtaagttttctttcccttcctcagctaagggtagagctatccgttggaagattaacaaaaatctgcttgcggatagcttttgatccccgggtaccgagctcg

SEQ ID NO: 308939 - DNA, 486 bp, Zea mays
ggttggcatattgggcgcatcgggcgggtaagtcaacacttttaaagattctcagccggattactgagctcgacggaggggcgcatttctattaagggtcgggtggcgagtctgttggaggtggggacggggttccatcctgagttgacggggcgggagaatatttatctgaatggggcgattttggggatgggcaaggcggaaattaagaagaagtttgatgagattgtggcgtttgcggaggtggagaagtttttggatactcctgtcaagcggtattcttcggggatgtatgtgcgcttggcgtttgcggtggcggcccatttggagccggaaattttaattgtggatgaagtgttggcggtgggagatgcccagtttcaaaaacgttgccttggcaaaatggaggatgttgcagaaaaagagggtagaacggtaatttttgttagccatgctatgcccatgattgcttctttatgtaatagc

SEQ ID NO: 308940 - DNA, 501 bp, Zea mays
tgtagaggaccatccaaactgacgtggacgcctgcgtgcataaacgtgacagccatttccactcgagtcaacaccgacgttcaaaaaattggccgggttatgacaaagggcacgataaactccctcttctagaggagaatttatatcaaccatcgcggcagtcacaaaagcacaattatttttatcatcataaaagtgaaaatttggatagggggtgcctggtgttttttgttgaacttcatattgcatataaaccgctaggggctcatcaatccgaacatctaaagattgctctcctttttcattttcgatccatccacttattaaaactgctaaatggtctccagggggagaaggagatgaagcatagtcaacagagcctggactatgctgtccatcactttggtaataggcaattacagagccgggacttgcttacttaataacttcgacgtgctttaggagaaaacagctattacatctagacgcaatcatgggcat

SEQ ID NO: 308941 - DNA, 202 bp, Zea mays
gatcgtcaagcttgaccattgggaagaccggaactccggtactcctcgttccattccagtgatccgggtcaataatttggatttactcggctctaagcgggacaacgccgaagccaccatgaataattaccccgaagagttctaatcatcggccccattcaccccattggtaaactacggcgatccccgggtaccgagctcg

SEQ ID NO: 308942 - DNA, 339 bp, Zea mays
gcggtcgactctgtggatcgaggagagaattgtattgcaccgtcataaccacaaagacgagaaacgccgttctagctcccctaaaatcaccagggaagactgtaactgttcattgctcgccgccgctgtactgggcagtcgagacaccccggggggaaactccatggcggataaaacttggtcaacttctgtgagagcttcactcaaactagccccttccactaacgtaccagcaattaaaaacaccggccgttggttaatgcgttgaatttcccccggtgcccgaccttggtcaatggtggccacatcccccaaacggatccccgggtaccgagctcg

SEQ ID NO: 308943 - DNA, 454 bp, Zea mays
aatcaggctttaaactgagataaatagagttgaggttaatttttacctatggctgggaaacagcagagtgtaagaataatgaataaatgtcaatgattaaatgtaaataattataaagaaatctcagtttctcgaagtcgttgcctatactggactcaacagcccccagtcggagccttcaatttgggcaccgttgtttggggtctgcctcacccgattgttgttgttggagttaatagttatggagctttcgtcaagggaaggagtaggaatgagctatatgctcgtcctaatgaagagtttttctgtttggactttcaccctgttagtttgtctattggtggtcggtttcccgctggtgtttttggtcgctacagtgggggttttggcgacggtggtattacagtcagttttaccgatgagtgctgggctcttagtagccagcagtcttttg

SEQ ID NO: 308944 - DNA, 455 bp, Zea mays
taacttttacaaaaatcattgccccggggaactagtggaacgcactgatttagacgtggacgccctggcccgctttttctcccaatttgtgctccaagtactgggcaatggcttgctagtggtgggtgttctagtcgtgttgtggttcgagcagtggcaggcgggattgggtttgactctttttgccctagtagccctgggtattctcagccggttgcaatccttggcggtggggccatggcaagtttaccgtggcatcagtgctgatttttacggttttatcactgaatatttagccggattggaagacattcggggcaatggagcggtggactatgtcatgaaccgcttttatacattgataagaaactggctaagggcgtttcatcaagcacggttgcagagcaccctactatggggcagcaccgttggtctattcacggtgggcaatgcta

SEQ ID NO: 308945 - DNA, 403 bp, Zea mays
ccttcactaaccccaccaccaactcctacaagcgcctagtgctcggttttgaagcccccgttaacttggcctattcccaaggtaaccgttctgcttccgtgcggattcccctctccggtggtaaccccaaggccaaacgtctggaattccgttgccccgacgccacctccaatccctatctggcctttgccgccatgctctgtgcgggcattgacgggattaaaaatcaaatcgatcccggcgaacccttggatgtggatatctacgacctcagcccggaagaattggctaagattccttccacccccggctccctggaagcggccttggaagcgttggaaaaagaccatgaattcctcaccggcactggtgtattttcccctgactttgtggaaagttggat

SEQ ID NO: 308946 - DNA, 410 bp, Zea mays
cgcaggtttgctctagaggaccgtcccaacgtccggccatctgctctaattgacggacatggatattttgcttgttttcaatttgttcgtggatgttagctaggcgattggtcaaaacctgcttcagtcgctcttgaacttggttgtagagaaaaagccaagtatgaacagtcattaccgatagcccggctcccgatgagaattggtagtacgggggaaagtaataggcgacgcatgggagatttcatcgatatcacagtggcactaataaccatgataaatacctattcagaccattgattagactcaacatatctttccaaaagaaaaatcgcccccccagaaaaattatcccgtttggcgatcgccgattaatttaattttttgttatttctagaccaccttagtcg

SEQ ID NO: 308947 - DNA, 426 bp, Zea mays
aggaccaacgcccagacggatgtgggcttcggccgtctcatcaaatttggcattgtttgtttccttgagcaactccatggcctctaacgggctatagagtttgctgtcatctaccttggcgatcgccgcctgcatgcgttttgaaagctttttagtcatggatttggtaactccttgggtactggcgaagtagggaacttctccccgaaataaatggaaaacttattgggtctaggccctcaaacttagctgttgacagtaatacccatattgcgggctgtgccttcaataatattcatggccgcatcaatgtcgttggcattaaggtcaggcaattttgtttgggcaatttcccgcagttgctcccgggtaatggaagccactttgtttttattcggttcactagatccccgggtaccgagctcg

SEQ ID NO: 308948 - DNA, 424 bp, Zea mays
ggcttggccatttgggttaagttgacccccatttttcgcattacggtatttgtttccgataccctggggtttttgaccaatcttttgcccaactatgtttctgggcccctgattttggccttgggactattttttgtcttttggggtcaaagtcgcaccgttggttctatttccgaggtgttgcaaccggataacgaccaggagttggtggacgtgctactggcccaccgtcgccttaataagggggctaaaattgtcgtagtggggggaggtacgggcttatcgactcttttacggggcttgaaacattacagcgctaacattactgccattgttaccgtggccgatgacggtggttcctccgggcgtttacgacgggaaatgggtatgttgcccccaggggatattcgcaattgcattgggg

SEQ ID NO: 308949 - DNA, 297 bp, Zea mays
atcgccgtcgcttaaattcactgccaggtcaatgtaaccatgggcataactatttttgttattttgacccttgggaggacgaattttattcaggggtaaaaaagtggcccgtcctgctttggcctgtttgaggatttcaatgcccgccgccgccacaccatcatcttgcacaacaagaaaacccaaacggcccccggccgcaatttccagagccagttgatattggggctccacctgacccaattgggccactaaaccgtagaccccgggtaaatccgacttgaaaatcactttggt

SEQ ID NO: 308950 - DNA, 566 bp, Zea mays
ggtcgactctattaggatcccaccgtgggcattgaagccagaaaaggcaccatcggcgtagtggcgttggatgctaacggcaaaattgcggccggtacttccactgggggcaaagggctagagcgcattggtcgggtgagtgattctgctatgccggcggggaactatgccacccgttttgctggggttagttgcactggagtaggggaagacattatcaatgaatgtttggccgccaaggtggtaatccgggttaaggatggccaaaatttatctcaagccatggcaaaatccatcacggaagctttggaaaataacactgacctgggggcgatcgccttggatcatcaaggccatattgcctggggaaaaacctgccctgtcctattggcggcctatcacaccggtacggagatcggagacacgctggaattaaccgatggcgaccactacggcaacgcctcaatataaaaactgcgaaaaactgttaaaaaaatacagacaaaaacacggggaaaataaacagattcccctggtttctaaccgtgaaaaacatccgagtttta

SEQ ID NO: 308951 - DNA, 473 bp, Zea mays
aggaccttcaacggtccgaccaccgatgtatcctcagcggcgatcgcccggtcttcattggggggattatcggcctgacggcgcagttgttcgataaaatcaatcaaagttttaatgcgcccatcctccacttgtatcgggcccaaaataccttcccgacgggcacggaattgggcggcagccaggagataatcaatccgtttttggacatcaacttcgctaaagtcggaggattcgagggaaatggtggcaatggtttccgcttctcgaaaaacttggcggttgggcaccacgtcaaaaaagacccgaatttccctttcttcctgcacataattccccgctgatagcacccgaataacatattcctggcctggttggagttggcttgtaatactatccacctgggcggtggtcacccggacaatgggttcatcgggcacgggcatattgggggttttaaccagttgtagagc

SEQ ID NO: 308952 - DNA, 274 bp, Zea mays
caggttgactctagaggacctgcctgtttgaaagtccgcaccgccaggatatcaatgtagcggtcttattttctagcggtatcctgaatcggctctccccgacccacttgggtcacgctggggtttaaatccaatacctgccctcccagttgatacatggccgcggtgaaggaaaccctggtacgggtggaggctttgtaaaacagtaaaccgagaattttccgacagtggggcttgagcacaccggatttaagatccccgggtaccgagctcg

SEQ ID NO: 308953 - DNA, 331 bp, Zea mays
gacctccaggcacgcttccatttggataaacttagcttccggcctctcattatggtgggacaagtatcccaggatttggccttaaagcgacgtttatctgtgtgttcggtaccaatgctatggccgtgggcgagtaatccccgcaccgttgctatcacttctggggttaaaccaccagcactagagcccccggcggagctcacaggggcagacttatagccaacggaactgctggaactagaaggtttaccattgccattaccattgggacggtgtacaacaatttctgccacccgccgcttaccggctggatccccgggtaccgagctcg

SEQ ID NO: 308954 - DNA, 259 bp, Zea mays
tcttctaccgctgcattgactaagggcttaaccaacaaaacctacctctttggcggttacggtggtttagaccccacgggtttacccaaggttcaaaggggaggccagattttccttcgctcaaagaatcggagtcaagacaataaatcttagccacggttttgtttagctaaagttctttctagcacgactgtataaatgggtttaccccccaatgcttccgccaccacactgtccactaggcaggtaactaacaaag

SEQ ID NO: 308955 - DNA, 522 bp, Zea mays
gatctgcctcctcggtgacttttgcattgatataagaatagttaccaataattttttcgttcgggtaaaatttctcccacaatatctagttcaatgccttggctttgttgtgttccaatggtagataaaaataggggattaactggatcgctaaccgctacattatttttactaatattaaaataagttaaggttgtgagaagttgttgctcaaatagttccgctttaacgccaatttcaaaaccttctccccgttctggttctaggggattgccactgatatctattccactattgggagtgaaagattgggaatagttgctaaagaagctaatttccggaattggacgatatagtaggcctatccttggtgtaactgcactatctgttcggtgtgtatttcccccttggttaaaatcagtttgtaaatcatctgtgttttgagtgatagtatcgtaacgaagtcctgcaactaaaattagattttctaataaagaacttgatccccgggtaccgagctcg

SEQ ID NO: 308956 - DNA, 439 bp, Zea mays
cggtagattattctggtagcgaagatgcggatagtaagcctctagtctatggcggtcaggtctatgttgcctttggtggcaccggtttaaatggttctttgaacctaggtcaactcaatggcagtaatggtctgattctcaatgggcaagctttttataaccagtccaacctggggggaggcaccccctatgacccgaatttacaggcggacttcactattgcagataacgctggcaccaacgtggtcaatgcgggcgacatcaataatgacggtttcgatgactttattatcagcgccgccaactgtgccgccaatggcattaaaggcttaaggcgagcctatgtggtttttggcaaggctttcggatggaatagtgcgattaatttgcaaaatctcgatggcaccaatggatttatcatcaacggtatttacgatac

SEQ ID NO: 308957 - DNA, 317 bp, Zea mays
aggaccgccgtatcgggggaaccgtctgcattcacgtccccattagaccccttgctttcgccgaatggagtaccgtagttaggattgttaaacaaaaagacccgactattaagagtattgacgtcggataattccagtaccccttgattgaggaaattagcccattgacttgtacctaaaataagataactttggccggtggcactgttaggcccattggttcctaaggttggcgcgctgataataaagtcatcaaaaaagtcgttattgatatccccgacagcggaaatccagtaccctgcattaccccccaattt

SEQ ID NO: 308958 - DNA, 259 bp, Zea mays
ccagggaggcgttcgctgtgtcccgcccacccagaaagaacaccgggtttttgctacgtccaggagggggagaagtacgaagcattttaccactgtggccgcgggtctagagtggtagaagaaatagcccagcaagacgatccgcgagaaccgatctatactgcactggacgcagaattacagcgtatcgactcggaaaaccccttccttcccacacttgattgcacttgcatgggtccccccttcagccgcttgggga

SEQ ID NO: 308959 - DNA, 287 bp, Zea mays
ggaaataattaaaaattaactaaaaatcaacacaccattgcacaacctttgattttgggggtcagcggtgcctctgggctaatttatgccgtcagagccatcaagcatttactggcggcggattacaccatcgaactggtggcttcccgagccagctaccaagtttggcaagcggaacaaaatattcaaatgccaggggaaccctccgcccaggcagaattttggcgctatcaggctggggtagaaaagggtggcaaattgatttgtcaccgttggggagatgtggg

SEQ ID NO: 308960 - DNA, 229 bp, Zea mays
gcgtttgcctgggcaccaccaccaagggtttacctagtgctattgtcacacacgccgccggctccaataggtcgggactgatgcccaccgccaatttagccacggtgctgatgacacagggcaggaccaccatgccggcgcagcgtgtggaaccactggcaatggtggaccccacatttcccgagcggtgacaaataaatttgccacccttttctaccccagcctgaga

SEQ ID NO: 308961 - DNA, 209 bp, Zea mays
cctgaaaaggccccccgctcgacgatgggcttcagagagcacttcctgtggcagcaatccttgatgatacaaatcaacccaatactgaaaagccactctgccggcgggactgataaaagtggcccggacatcactgtgcaccaactgtgccctcatttgcaccaggctttctagggcttctgcggaatcagaaggggaaaacgtgacaa

SEQ ID NO: 308962 - DNA, 331 bp, Zea mays
gaattagcccccctcctgcccaactggcatcaaattaccgttcattctaggcccattttgcaaaaattagccggcaacggtttttgcctgttttacagcaccctagggttacccctcacccttttactgttgattgtgcttagtttgatgtttttggctaatcccagggcttaccgtcagggtttcatccgttgtttccccgctttttatcgagcacgggttgatgtaattctgaaggaatcggaaatcttgctagaagattggctccggttggtggtagtcagtgctgtggtggtcaccgctgccacttggttcggtttagttttacttc

SEQ ID NO: 308963 - DNA, 270 bp, Zea mays
caagtaccaggctctgccatggtggcgaatgcataaaccttggttgtatcgccaaccatgaaacttttggcgccggaggtttccacagagccgtcgtttccccccatggttccaccttgggctgaaatattcccactaaagcgggtagagtcatcggcccaaacgataacggttcccccatttcctgtcagtagggcatcagctttgactactgaattactatcaatcagggtttgggatgcattgggcaaagtgagctggcccctgaaa

SEQ ID NO: 308964 - DNA, 326 bp, Zea mays
caggtttgctctagaggaccggccttaatggtttgaataatttcccggtgtctaagtcccaaaccttgtttttatggggttctggctcatttgcccaggcatccaccgacgccaacgttaccagcttattatcggcgatcggataggctaattctcctccttctaagcgcatttgcactgcaccgttggttaaatcccgcacctgcacttgctgaacagccgcagtgattaactgttggccatccttgctaaattctagagatgaaagaatatcttttagggttactgagctattgggcttggtctaaaggaatataaaccttttt

SEQ ID NO: 308965 - DNA, 418 bp, Zea mays
cgtttggttggcaatgatggcggtattgagcaactatttcgtttggcggaagaagatataactaaagccttgggtaatgaagctcgaacggaatgtgatcgttatgtgcgggaaagaccccgattttatgatgaaggtactttttccatttatcaatttcggcaaactctccagcaaacttgccagggttatgatgcccaggcgatcgtggaagcggaaccagctattaaggagtcgctaaaactagattctgaacctaaagttttcaatactgtacggaaaaatttccgacataccgttaataataccctaagaacccatctgctaccaatggcagaagaacaagcccaaataattttagaacagtatgatgtggcaaggaaatatcgtgagcaaacgttggaacaggatgccggag

SEQ ID NO: 308966 - DNA, 435 bp, Zea mays
cgttgcggtgttgggcgaaacttatacccgtgaagttagcaagtttgtaaatgaaaccgtaactcccctaattctgccggaaggggccagctatgacccagtaaccaatcaacttatttggcagccgacggttgaccaactaggagaacattggctgcaatttaaagttgaaaatcaattcggtgatgtttatctagaaacccaacgggtgcaggtgcttgagtattcccttgaacagcttcaagtgattaatttaccggaagacttcgacatatttgagtaccaaaaaaataatcccattaacctcaattccctgattgatgcttccggaaacggtgatagtctaggggatgacaacctggttatcaatgccaatcctaaacttatcaccatggagaggggaaataatacctttgtagtgggttcttacacgaa

SEQ ID NO: 308967 - DNA, 141 bp, Zea mays
catctactccgtaatgcatttgaccatggtattgaggttgatgtgacccggctggccatgccgaaaccggccagggggaccattgaggtccatgcctatcaccaagggaatcagaccatcattgaaagtgcgggatgatgg

SEQ ID NO: 308968 - DNA, 495 bp, Zea mays
aaaatgtctttctttctgggcgcaacattccctatttgaaaattttacgggcagattacctcaatatctacgacgttctcgttgcagacaccattgtggccaccgccactgccctcgagaaaatccaggaggtttacggtgagtaaggtaattgatcagcgtcgtttggcggacttaattattaaaccgattgtgacggaaaaggccacgctacaactcgaagacaacaaatacgtctttgatgtgcgccctgaagccaccaaaccggaaatcaaagcggcgatcgaacttttgtttgacgtcaaagtaacaggggtaaatactgcccgtatgccccgcagaaagaaacgggttggtcgtttcatgggtttcaaagctcaagtgaagcgggccgttgtcaccctcaaggaaggggacagcatccaactcttccctgacgtgtaagtcacgtttagaccaccactgaatactgaattaactgttatctaaacccat

SEQ ID NO: 308969 - DNA, 157 bp, Zea mays
acccaaaagcccagttggtcaccgggggagatttatggttggaacgggtaatcattgaaaagctcattcaaccctttgtccccgaccaattgagccaatggtctagtctgcctccacggtggcaattgttggggcaacgcaatgaccaaggcttacc

SEQ ID NO: 308970 - DNA, 412 bp, Zea mays
gtggctggctcggagaagaaaagtcgggtgctgtcggataaggagaaaaaaattgttgcctactatgaagtgggccacgcactagtgggagcagtgatgcccggcggtggtcaggtggcgaaaatttccattgtgccccggcggatggccgccctgggttataccctacagatgcccacagaagaccgctttttgttaaacgagtctgagctacgggaccaaattgccactctgctggggggaagggccgccgaagaaattgtttttgacagcatcaccactggcgcggccaatgatttacaacgggccacggacttagcagaacagatggtcaccacctatggcatgagtacgggtttgggccccctcgcctacgataaaggtcagcataataactttctggggcagggca

SEQ ID NO: 308971 - DNA, 254 bp, Zea mays
acatttagttattaaattccccagaaaactaacccttaaccactgttcatgccgcctttcccaaccaagattcggatgggaaagtttaccctttttcaatcctactcagcggtcttgtccttaacaccccggacaatgcgggaaagctcagatttttcatccacactaatgcgggtgggggaaccactgataatccgctcataattgcggaaggaatcgcgaatatcagggccatcatggctaatgctatattc

SEQ ID NO: 308972 - DNA, 468 bp, Zea mays
tgcgtcgatatccacagccagacctagttactgttactaaaaatgaagattcaagttactttgcaattgtggattttaagaatatttctttaaaaaaatatgaagattatgaaaataaatctttagaagaaactgataaagggtacagagtagctttggaaaaacaacttggttatgaattagcattgcaacaagtttttcctcaagccactatcggaaattacttttttattcctttttattatgttgacaaactcgaatctgagagtaattttctgggaattatggaggacagatttcacattagaggtattcaaatatttaaggcaaattttgttgcaatacaaaatatttatttgggtattactgaggcatcagactttgatagcccaattcgtgagaagaattattaccaatttcgaaaaaataatgctcatgctttagttaaaaaaaaagaaattattttat

SEQ ID NO: 308973 - DNA, 363 bp, Zea mays
ctgcccaaccttagaattgaggttatcgccccatgaacagttttgttttaatggcctccgttattcgggaaccggaactgcgcttcaccaaagaaaatcaaacccccgtctgcgaatttctagtagaattccccggcatgagggatgattcccccaaggaaagtttgaaagtagttggttggggcaatttggccaacaccatcaaagaaacctatcaccctggcgatcgcctaattatcgaaggacgcttaggtatgaatatgatagaacggcaggaaggctttaaggaaaaacgagctgagctaactgcttcccgcattagtttggtggatagcggcaatggcattaatcctggtgagttgt

SEQ ID NO: 308974 - DNA, 435 bp, Zea mays
ggtctccccctcagttggttgaccgctgtcgacaattacacatcgccgtggtggaagcccttgcgcccttcaccattccctcgccatgaatctgcctcaaccaatagaaaccgccgccgcaaaaattttggtggtggacgatgacggttttatgaggatgcaactgcgggtttatttgcaaaaggaaggacaccgggtagaactggctaccaatggggaagaagccctaaccaaatttgccgaaattaaaccagaagtggtgctactggatgccgtgatgcccgtcatggatggctttgcctgttgtcaggccctgatgaaaatttatcaaaatccttccccattggtattaatgatcacagggctagatgatgaagcctcggtggatcgggcctttgaagcaggggcgatcgactatgtgaccaaacccattca

SEQ ID NO: 308975 - DNA, 470 bp, Zea mays
agtctgaaaccgccaacttacccttaacttaatcaatggcctcagtagcgtaaaaccaaggcaatacgttgatgttgagagagggtgccatcttcgactaaagccacttccccaccattggctaacaccacttcgatgatttcgtccactgcgtcgtcgatgacttccgtgccaccgggttccgccaccaattcaatgcctccgttagtggagataatggcaggctcatggtagcttttctccaccaccagcaatttacctcgaccttcctgggctaaacgccaggcttcccccacggtggaaacaaatttttgcgcactaactgcttcatccaaggaggttaaggcttgattttgtttagcttccctgaccgtttgcataatctcccacacctggggggtaagttcgctgatgctggcccggtcaaaattccccagtaacgtaccggcgatcgccgctgaatgctggga

SEQ ID NO: 308976 - DNA, 221 bp, Zea mays
tggtgtcattaataatccttaaatgtactgagctaaaacagataggtcaagacgaacgtgactagagtagcaattaacggatttggacggatcggacgcaactttctctcttgctggctggggcgcaccgatagccagttagaagtagtcggtatcaacgacacctgtgatcccagaaccaatgctcaccttttgcgctacgacttcatgttgggtaagtt

SEQ ID NO: 308977 - DNA, 119 bp, Zea mays
gatattgcctacgccgatcgcctgggctttgtgattaaactactggcgatcgccgatggtaatgcgggggaagattcagaagcattgcaacggcgggtacatcccactttaatcgccaa

SEQ ID NO: 308978 - DNA, 516 bp, Zea mays
attttagcagcgatggaagaccggggcattcgtattgattgtgattacttacaaactctgtcccaacaattggccgaaaatttacttaccattgaaacagcagcctatgaagcggcaggggaaagttttaatctcagttctcctaaacaattgggtactattttattcgataaattaggcttagaccggaaaaaatctcgtaaaacaaaaacgggctattccactgaccacgccaccctggagaaacttcaaggagaccaccccattattgatgcgattctggaacatcgtactttggcaaaattaaaatctacctatgtggatgctttgccggaattagttaatggccaaacccagcgcattcacacggattttaaccaagctgtcacttccactggacggttatcttcttccaatcctaatttgcaaaatattcccattcgttcggatttttcccgacagattcggcgagcttttttaccccaaaaagattggcttttggtgtcggcggattac

SEQ ID NO: 308979 - DNA, 294 bp, Zea mays
aactatgtcactcagcttgaaaagccgacaatttaagctcattttccgcttattctgactctaaagtttcaagtgcagccttttttgcagttaactcttcttcttccggacttgtgtagatggtgaggtcagacattgtactgactgctaactttaatgcttatatcctagcttatgtatcaactgtcataacgagctaaaatcaaaaccagctagccactctggggaatactgcagagccgatcttgaccagactgaggtgctagctctacttgctccattaactcaaaaagc

SEQ ID NO: 308980 - DNA, 410 bp, Zea mays
cattaaaatctacggagagtttcaaatagataatgatgtaggatgatagagaatattgtgtaatgagcttttggaaaaatgtctacacactgtcactgtcctcaatgtggtcatgggaatgtcgtcaaaaatggctttgtcaaggataagcaacgattcaaatgtaagagttgccaatatcaattcaccaatctctccaaagaacggggtaaacctctctggatgaaactagaagcggtcttactgtatatgagtggtatgtcaatgaatgccacggcgaaactattgggagtttctactcaatcagtgctcaactggattagggattttggcgaagcaaactacgagaaaccggctccagactcagcaatcgtagtggaattagacgaactgtggcattttcttcaggc

SEQ ID NO: 308981 - DNA, 414 bp, Zea mays
tcgcctgactaaacaaacgggccctagaccggcggcctacttcaatgttttcatgactttggtttctgccatccatggcatggttgccctctcagccatttggcaaacaccgagtgagcaaattgttttccattggctccaggtggcggatttagacctcaccttggcggtggagatttccccggttagtttgggggccctatcggtggtgactggcatcagttttttagtccagatttttggtctgggctacatggagaaggactggtccttagctcggttctatggactactgggatttttcgaagcggccctggggggcattgccctgagtgattccctatttttaagctatggcctgttggaaatgctaaccctttccacctatcttttggtgggtttttggtatgccca

SEQ ID NO: 308982 - DNA, 454 bp, Zea mays
ttaattcttggcaaatgcagggcttgtatgacagtggccctgggtcggaagaacaatcgtcgccatcccaccaggcaacccaagcaaatttgatggcgtctgactctcctagcccggcggaaagccaactcaaatccctggccacatccatcgttgattttgacgcgttgcccattcccgctcctccccccaggccccgcccaagtgaaccaattctgacggtgttgggggcggtggtcccctctcctccgggtacccccctccaagcccacactgagaagaaggaatacaacctgtttgagatccgctcagagattatgcaatataccaatcccttgcgggcaaaagttttacttttttcggtgttgttccaaagttgggacgaacataacccagactggagtttagtgcgtagttatgccctagatgacctagtagagcaacttatcctgag

SEQ ID NO: 308983 - DNA, 243 bp, Zea mays
gcgaggattttactggctaacaccgaaaagctagcggaaaatcaatatccccaatcattaaccgatctggtgtccctggccactggaggccaacctgtgggcattgcttatcccatttttggtacctccgcaacccatgccgcggctctctatgcccattggggaaatgcccaggccgagcaattttatcgttctctccaggaaaagggagtgggggtggtggacggtaattcggtggttagg

SEQ ID NO: 308984 - DNA, 476 bp, Zea mays
atgccttagtcaacttaaagacatcccagattgttagaaagtctaaccacccattgagaactaggcgaaggttttgtcaagtcctgaagatgccgttcaccagatctatctcatcattgctgccgaacaagccccttgagtggacagtccgccaccggtcttttgcattacaattttagggttaccacctgcccctagggccagcgttagcattcagaaaatccacgagaggtgcgtcgcccaatacaaattcatcctttaatacacattcaaagcatgaatactattgattttgaaagagtgatcagagcacttatcaaaagtggatttctcttttcagctgccgacttcaatgagcgcaggcgtgcagctgataaagtagctacatctggattgattgaaaagacaaatttttggtgcaacgttgcaataaaaggtgcgatacctgttatcgaatcatctttcgacgtagacat

SEQ ID NO: 308985 - DNA, 459 bp, Zea mays
gctggaaaaatctctgcatcctaaaatggggtgacggtcactgttgacggattacggggtcgacacttactgacaattattctaggccatggtttacccatccccggggattatcaacactggcggggtttggccccggatttttggcgatcgccggttgtaatttagaatctgccactaccatggggggaaagtatcagcgtcattgcccagtccgattccattggagccattgcatgagtaccacccaagcccctcccctcgtttccctccaagcccccaaggacgtttccctcgaggcgatcgaatctgaattagcccaaatttggcaaaccagtgcccaaaaggaggagggtttaatcgctactagggccaccaccttcagttttttggtctatgaaccggacagagtgcagtccctcctggccgccctaggctactacactggccccattgatg

SEQ ID NO: 308986 - DNA, 455 bp, Zea mays
gtctagaatctctactccaggcaaattatagcctacgaataagaaaatgcagagatattttccccagcatcgttcaaaaatccagaatgactatattaagcggggcaagaattcacctttgttaagctcccttactttcgtaattaaggctccggctaggtaaagttgagttttgactgtttaatcccccctagccccccttgggaaggggggaactgtcacaaaagccctccgccagagctttagtgggttgatttagggggatgaacacctagctttgcacttttcagacactttctagaggaaagggaaaagctagtagtaccagtttggaactaggccggcggcggtgttaatgaaaatgcaatccagagtggtcaactccccctggggaccacggtagggctcagaaacgttccaaaggcgaaagttgaatggcaacaaccaatgggcaa

SEQ ID NO: 308987 - DNA, 394 bp, Zea mays
ttcccccaccagataacccagggccgaccccatcactaaagccggcgcaaataatccttccggcgcatcggtgctgtaggccaggatagtcaaaatgaaatgggccactaaggtcaaaactacctgatgccaactcagttctccggaagtaacaaattccctcagccctgcattgtcccgaaaaaagctcggcaatagggcgatcgccacgccggaaattaagcccacaacaccaatgcgaataaccagggaaaggttctgttttctttgccagttttgcagggagagaatactgcggttgagcaaaacccccaaaatgccagccaaaattcccagtaaaagatagaaaggaatctcccccgtagtaaaacgcaccgttgggctattgcttaag

SEQ ID NO: 308988 - DNA, 389 bp, Zea mays
ggcggacctgagtcgagctttgcaggaacagaatttacaggtggtgtctggacagattggagcagaaccagcacccccaggtcaagaatatcaattggacttgctcgccagtagtcaattagtagaagtaaaagattttgaggacttaattgttaaatccggggccagcggctctgtggttagattcaaagatatcggtcgggtggaattgggggcccaaaactacaatagttttttacgctttcggggcgacgaagcggtggggctaggtatttaccaattgctggatagtaatgcgttggaagtagcccgtttggtgaaagacgaaatggcccgtttggctcaaaacttttccgaaggtattgaatacagcgctgcctttgatacca

SEQ ID NO: 308989 - DNA, 423 bp, Zea mays
ctaccctagagctgaatgacgaagcggaaaaatggacgaaagtccacggagccatcagcgccccccttgggtataacgggtttcccaaggctatttggaccaacataattgaggtatttggccttggaattcccaaccgaaaccggttatggagggcaggaaacataataaccgttgccgtacccccaatgggggacggttaccatggcaactgttcccgaacctttttggtcggtactcccagcccagtggcagaaaaactggtcaaagtcaccgaagaatgtctacgcctaggcattgaagcagttaaacccggcggtaaaattggtgatattggggccgccattcaaagccacgctgaagcccagggattttccgttgttcgagattttgttggccacggcattagcaaaattttccata

SEQ ID NO: 308990 - DNA, 442 bp, Zea mays
cccaacgatgaactggatttagaagcccgtaaacgcagtacctttttttacctgcccacgggcatgatttccatgtttccgccggagttggccacggggccgatgagtttactccaggggcaaagatgtgtggccttaagttttggagtgactttggatgaggtgggggcagtgagggattttaccattgcccctagttgggttaagcctacctatcgcctcacctacgaagatgtggatgagatgttggtgctgaaaattcaaggggaaccggaattgcccctcctagccgaagcagccaaaaaacgggcccaatggcgtaaattccagggggctatcaccatcaaaatgcccgaagccattattaaagttaatgccgacgaggaagtgcaaatttatctacaggaaaccttcgtttctcgtcaactggtggcggaaatga

SEQ ID NO: 308991 - DNA, 477 bp, Zea mays
tccggcaaatccacttgcaactggcggaaaatgcggtggtgaattccccctggctctatgcccgccacctgggtggcccccacatcgaaaataaaaccccgtcgccgaaaggtggatgcacaaccccccactatggccgcctgttcataaactttgactcgataaccctgttgggctaacagggccgccgttgtcagaccaccaatgccagcaccaattacaactacggattgagattcagcattgctagggaccatgggaaaaggacagtggggaaattttctttacatttcttaatgtaactggttgcaacggttcctggcccaggcattgttcaagattctgtcaatagtcaattgatttggtggagtaaatgcgataggctcggctccaacagtggcaagcattggtaaatagttttcaacgttaacaacagcaacttaaatcccccttgaataggatttggaattacccatg

SEQ ID NO: 308992 - DNA, 368 bp, Zea mays
gcgaccctgattttgaccaaggttcccaaccccctggaatttggtttggtcatcaccgacgaaaaccaacgggtgcaaagatttttagaaaagccctccaccagtgaagttttttccgacaccgtcaacacgggcacctatatcctcgaaccggaagttttggcctatctgccccccaaggaagaaatggatttttccaaggatttatttcccctcctgctggaaaatgacgaacccatgtatggttttgtcgccgatggttactggtgcgatgtcggtaatttggacgcctatcgggaagcccaatacgatgccctagaaaaaaaagtcacgctggaattgggtaacctaccccggcactcggacat

SEQ ID NO: 308993 - DNA, 418 bp, Zea mays
cgactatgggcaaattccctagaaggacaaaccacagacatcacttcgtggcgacaactgctattaaaaaagataatagaattattgatgggggtaatggtttgaaacttcggatgggtagtaatggtgttatttttaagctccgtgtcgtagagccttaattctcccccagaaaaagctttcggttcttgataaaaataatagacataggtaatttgtcggctagctgttttttcactacctgcgtcattgtggattctataataacaaccatcattatgggctgtgagttgtaattctatttctgcaacttcaaagggagaaaagtttagttgacccagtaattccggtaacttttgtttgattcgttcccgtattaaagctgataatgcaggaattttttgagaaaaaagcacgt

SEQ ID NO: 308994 - DNA, 447 bp, Zea mays
ctatgcggtgcgtccttgaactgcaaagtaatcggagcactgcctggcactggggcgctaggccaaccgctaatataccaagtagtaccttgaagggattgggacttggaagtttccatggcttgaacagaattgctaggaaaaaagggctgggccttacccatagccaacgcaaatccacccataatggcggcaaaaaacaaagtccgggaaaagctcaggcgcatggttggagtattgcaattagctaaaaaacaagatatctatacccccatgattttaccattgggaatttcttgcctagaattgggacggaacagtttcccaattgcttttgcctttgccattagaggctattgctgaaaccttatttttccctgcaatggcgagcactccgagctaatctcccaaaacttctgccagggaggctttccatggctaacctta

SEQ ID NO: 308995 - DNA, 366 bp, Zea mays
accgatggcggcgggggcaaaaccagcgggggcagttttatccgtaacgcccaaaatgtcaattaggaaaatgaaggtgagaacaaattcaattaacagggcagccaaaaagccgtaaccctggggggaatggtcaccaaaaccgttagtagcgagggggttgctgccgtcaagggaaaagttagggccaccctgggcaacaatgaaaataaataagctcgccacgatcgcccctagaacttgggcaccgatatagggggctaactgggaaccggggaatctcttacccatccagagtccaaaggaaacagcggggttgaaatgaccaccggaaatatgaccaagggcataggccccagtaaaaac

SEQ ID NO: 308996 - DNA, 119 bp, Zea mays
agtgtattgctgtcgggaagccacggtggcctatcgggtacatggccaagcactcaccatggggtcatttcatggagaaacggtgaatattttgctgaggttgtttggggaattggaga

SEQ ID NO: 308997 - DNA, 169 bp, Zea mays
tttggagccctgtaaccatcaaggtcgtactcccccttgtacagtagcaattattcaagcggggatcgccaaggtggtggtgggcatggtggaccccaatcctttggtggcgggtaaaggtattagtcgattgagacaggccggcattgaagtgaaggtgggggtggaa

SEQ ID NO: 308998 - DNA, 483 bp, Zea mays
gggggcaagtcaattgtaaattttctgaaaagcttgtcgccagtcttcgtcatcccgtaaatggtgcaacacggccgctgcaatgagcacatcgtaggtggagtttggcaggcttactgagcgaaaatccccctgtatggtacggactaaacccctatttaattgctggacccgttccgccgctttcatcagcatgggtgcgcttagatcaagtaggtcaacattgaaatcatagttggcagattgacgcaatcgaagggtgttgttaccagcaccacagccaatatctagtacgtggcgaatattcttagtgcaggagatagccgcctcggtaattagggacatcgctaggggagcataatggttgtcgcctggccagtttcgagggaagaaaaacgggccacatctttatcaaaacgggaacggatgtcttcaatggttgactttttttcaaggggtgtggtcatggtgatggcggaaaat

SEQ ID NO: 308999 - DNA, 334 bp, Zea mays
aattggcaatcgccccaacccttcccgaatggcaagcaaaccagtttccggcctttgagaacggggtaaattgtcccaggcataacccccgatcgccgctaagagtaccgcatcactatcctttgcttgggctagggttgcctccggtaggggttgccctgtggcatcaatggccgctccgccaattaaagcctcttgaaaattaaacgcaaagccaaactggtcggccactttgcctaacaccgccaccgccaccgccataatttcggggccaatgccatcaccggggagcagggttacgttataggtctgggacatggtagtggaagaactg

SEQ ID NO: 309000 - DNA, 460 bp, Zea mays
ccggccctggattcattgctaggtagtgatgtgtacgccgaatttcaagatgagttggaattaatcgaataagcgggggccgaatttgatttagccgccgtccatggcggagaaatgaccccggtattttttggcagtgccatgaataactttggcgtagaactatttttgcaagcgtttttgcagtatgccgctaagcccgaagcccatgacagtaaccgaggaactattgaacccacctatgaagaattttccggttttgtctttaaactccaggccaatatggaccctaaacaccgggaccgcattgcctttttgcgggtttgttctggtaaatttgaaaaggatatggtggtaaaacatccccgaacgggcaaaacagtgcgtttatcccgaccccaaaaactttttgcccaggaacgggaatcggtggacattgcctatgcgggggacgtgattg

SEQ ID NO: 309001 - DNA, 374 bp, Zea mays
aaaatatggattaatcatgacagaagtatccagcgatttcgtccttattttcagctgcaagtggtgaccatcacccaactcctgggagttaactcatttttgtggttttcatatattactttgctgggagcttttacatctttttttctgtttgcttttggacgaatcttatttttttcaatcccggtttctttattttttccgatatctaccttgctaggaaagcaatcagaaatttgggttaggccaatgatacccgatgctcaaggtatgttttttttgtcggccgccttattatttattggtttaagctgtaatcatagtaaatattcaaaaatcaactccgtaattgctattattttaattataataat

SEQ ID NO: 309002 - DNA, 482 bp, Zea mays
tctttgctgttaaaaaccaccactggtgaaccttggggctatttaatggtggggcgctccttggtggaatatgaccatcatttgcacacgatccaaggctttttagtttggggtttacccattgtgatgattgtggtcggtggtgctagttggtggttagcaggcttagccatggagccggtttatcgttcctaccaacaaatccagcagttcaccgctgatattgcccacgaattacgtacaccgattacggcgattcaggcaacgttggaaacgacattaaatgcagaacctaatgctgaagaaacccatagcaccttgcaaaccttaaaacgacaaaattatcgtctcagccatttaatccatgatttattactcctctcccgcatggatttaacaacagttaatccgacccagtttaccctttgttgtctcaatgatttagttgaagatttaaccgaagaatttgccagtttggcgat

SEQ ID NO: 309003 - DNA, 407 bp, Zea mays
gctcaccgatagtaattcagaattaacttccgttcaccacaaaactaacactccgaaaaaccaactagaagggaaaagcccagaactattaattggttttcccaccggcggttcttcaggcacaatccgttttgccctccacagtccccagactttgaccatggcagtggacggtttaaagcagttccttggccccctgttacctaggaatggccaaattaatagtttttgtctgcttcccctgtaccatgtggggggctttatgcaatggtggcgatcggccttaactggagggaattttagccctctggattacagcttagtgaaacaatctgcccctccttttccccccgattatgtcacctctttagtgcccacccagttggagtatttgctcgatcgccatg

SEQ ID NO: 309004 - DNA, 445 bp, Zea mays
atttggcgggcaaaacttattagaaaaacgtcaagcggtggaaataacttataaagaatttacccaagccaaacaagctttaacagccaggcaacaatcggaacaaaatcgtttacaacggctggattttttaacctatcagttacaggaattgaccgaagcagaattaaccgatggcgatgaatgggaattgttaatccaagaacaggaaaaactttcccatgtggtggaactacaacagttaagctatcaagccacccagcttttgtaccaaagtgaacgggataccccggcgatcgccgatttgttgggggatgcggaaggacagttgcaaaccatggcggaatttgacagtagccttaatcccttattggaactggtacaaacagctttaacccaagtaattgaagcaggacggcaagtgcaacgctatggagataatttg

SEQ ID NO: 309005 - DNA, 381 bp, Zea mays
gtcgactttttaggatctcgacaatgaaatcactttactgctaaagagcgccggattattttgtgcatattttggctttattgattccaaggcacttagccaaattatgctgaaaataagcgatgctaacgactttgagttgggttaaaaactgacaactattttaaggtacatctctttgaatgaaagtagcgtcatttctgaaaattgtgctttctgtaaatccgctaaatttatcaagccacagttcaaagtttcgatgtcgaatatagtgacctggataattgtttgattcaaatgatactcccccttgggaatttaatccatttcttggacaaaaagttgcatcctgcctaaaaagatccccgggtaccgagctcg

SEQ ID NO: 309006 - DNA, 202 bp, Zea mays
gtcgactttagaggatctccagtccggtcgggggctgagttcccttctaaagggctccggcaacctctattgtcaatcccgtagcttgagcagtttaggccgttttatccggctccgactgcgctgattttttctttgcccgccctatgaacattaaacttctcaattccccccaaacggcgatccccgggtaccgagctcg

SEQ ID NO: 309007 - DNA, 509 bp, Zea mays
gtcgacttttttagaggatctgcccttggccgtagcggggcaaacctgggcggtgacctgtgtgagcatttgtaatccccactgtttgacctttgtggatgatgtggacagcctcaacctgactgagattggtcctttgattgagcatcacccccaattttcccaacgtactaatacggagtttatccaggttttaggaagcgatcgcctgaaaatgcgggtctgggaacggggagcgggtattactctagcttgtggaacaggggcctgtgccacagtggtggcggcagtattgaccggccggggcgatcgccgttgcacggtggaattacccggtggcaacttggaaattgaatggtctgtccaggacaatcggctttatatgacggggccagcccatagagtcttcagcggtcatgcggggatttgaacaaagatactcttgttttactttcttaagaatgatgccaatgggaaagagattatgacattgagcaacgtaaacccat

SEQ ID NO: 309008 - DNA, 412 bp, Zea mays
caggtcgactttagaggatctgtccactggggttggtgaagggagctgccagaataacatcgggttgggccgtattgcttagaccattactattcccgtagaagataaaaacgcccccttgattgccgggccgactcaaataattgggcagattattcggttccccgatcgccgccgcataataattggaagctaggactgctaaatccgcaatgccatctccattgaagtcgccaatattttctaattgattggccgccgccagggtattaattacagaggaagtggtgggagtgggcaatagggaaaaactgccgctggtggaaatctgccctgctattttcctttcgtcactaccaatggcaatttctggaataccatcactgttgagatccccggggtaccgagctcg

SEQ ID NO: 309009 - DNA, 304 bp, Zea mays
gatggggatgttcatcgagctgattaactagttatggggtggtttaatagcggtgttgggctggaaagatgtccatcaaattctagggcatggccgtcccttagttgaacagattagccgaccaccatccatgcagtagctggaaatgggtttacgttgctcaatggctgtatctctttcccattggcaacattccttaagaaagtaaaacaggagtatttttgttcaaatctccgtctggccgctgaagactctctgggctggccccgtcatataaagccgattgtcctgggcagaccattca

SEQ ID NO: 309010 - DNA, 369 bp, Zea mays
gatcatcgccacgattgccatgaatcgaactcagtaactgatccttggtgctgaccttacccatcacccacgttatggcgggcaggtaatcatccgattgatcaactaacccatgggtatagcttgtcagagctttggccgccgccggattgtgggccccgtctaaaaggatttttggtccgttgtagtccacccactgcagtggttcagtccagacagctttacccatgccccgttggataacctacggacataatttattccaaccctggcgttataattcctgcaaagtagtgactggctgtgccagagctgtgtagcctcaaatcacccaataggaccaggggatccataaaaccttgtcaactc

SEQ ID NO: 309011 - DNA, 440 bp, Zea mays
atgctcaggtcgactctagaggatcgtgctctgggcattggccaaacacaagatgtccaggtgcacaaataggcttgttttggcaccttgtacgaaaaaattgacggcacgatggcggttaaacaacacttggcagaacaaaccgaggatgcgggaaaaaattgggtcacctcgctagacaccgataactgtgaggggcgcttaccctgtacgacacccatgtgggttaccaagccgaatcgtccgatcgatgaaggcacacaagaatacagaggggagaataaatctcttactgagggcctttgttgcacttgaggtggagttcttgattatgctaaagcagaacctgtgactagagcatgtatgggaagtcgagtaatggttgtacaataaatcttagacctacttgggaagaggggaacagtcttaaaagtcccatt

SEQ ID NO: 309012 - DNA, 405 bp, Zea mays
ggtcgactctagaggatcgccatggccaaatccaccgccggttcttccacctccagaccccccgccaccgtttggtacgcatccaatttagagaggggtacccccaggcgtttttccaatacagccagaacttgtaaaaggcgattgtagtccaccccagtagtcgatcgccgaggggaagcgtaactggtgggactcactaaagcttgcaattccaccaccaaggggcgggtaccttcacaagccacagtgatggcggtgccggacataaattcctcccgactgcccaaaaataattgggacgggttgagcacttcctgcagccccgattgcaccatttcaaaaatgccgatttcctgggtggccccaaaacgattttttacggatccccgggtaccgagctcg

SEQ ID NO: 309013 - DNA, 419 bp, Zea mays
gcgggggccaaaccctttgtctttactaacttgaaaacagccactggattaagtaccgtggtagattttgttgaacattatttaccaactaaggttttggcaagttaattaattcaagcttaagagcctttttaaaaagttgagttttggctgtttaatcccccctagccccccttagaaaggggggaactcttacaaaagacccccagtattgccggagctttagtgaggagatttagggggcagaataaaacttttcaaataagttctaacgctagtagttcaaagacttaagtaaactttaaccgacagtcaacaagctgctgataagtcatcagttaatctacttattcgttgagcaactatttgataaaggtgattttgaggggatagcggtaccggattccttcattggcttt

SEQ ID NO: 309014 - DNA, 492 bp, Zea mays
ggatcgcctttctaaggctgggctaacgctggccgcttcggtcaaggaacgggacttttttgggcgaggggcataaaccatggtttggtccggaacaaaacaatttttctattaagttttatcaagctaaatggtaaaatttaactttaaaattaacttcaacagctcgtggacataatggcgttactcaaactggggataaaccagctttggctatggaaaaaggtctgttccatggctcaaggttcaccaaatatacacagtggaataccaattatgactaaccaacccaaccaagtgtatccataacgcataaattgggccatgatcgcccatctgagcaacctgtgcctgctacttgatcccttttggtaacatcatcggtcctttggtggtgtggctaatgaaaaaagatgagtccgaatttgttaatgatcaggctaaggaagcgttaaatttccaaattaggatcttaatttatgtgattgtttt

SEQ ID NO: 309015 - DNA, 434 bp, Zea mays
tccctccaacaggtgaccaaggcggtggaagaggccaatgtcaatgctgcgggggggtttttactaactgccgaccaagaagacgtgattcgagggttggggcgcatcgaaaacctatcccaattggcggattctgtggtgacagctagggatgggacaccgattctgctccgggatgtggcggaagtgaccattggcccggccttgatgaggggcgatggcagtgtggatggccaacgggcagtggtgctggtaattgataaacaaccccaggccgatacccccactgtgaccaaagcggtggaaagaaccatggcagaagtaaaggccgccctccctgccggggtcaatcttcaggttacgtttcgccaagaaagttttattgatgcggcgatcgccaatgtgcgggattctttgcgggatggcattatcat

SEQ ID NO: 309016 - DNA, 303 bp, Zea mays
caggtcgactctagaggatcgcctcgggatttttaagccagagttcccgttggggccaagggatgccaatgtcattgcgcttaaagtaaaagcaaatagtgtagcgtagggcactaagaatttccggatgctggcccatgtattgctcttcaatccagacccaaagctcaaattccaacgcattgtcgccaaaattctggaaaatcacctgggctgggggagttttgaccacacaggcttggctataggcacacatcaaaagggtttccgtcaccaacaccggatccccgggtaccgagctcg

SEQ ID NO: 309017 - DNA, 499 bp, Zea mays
caggtcgactctagaggatcgccaaattgtcatcaatcgtccccataaacgcaacgccttccgtccccagaccgtttttgaactttatgacgcattttgtaacgccagggaagataaccgcatcggggttgtactactaaccggagccgggccccacagcgatggcaaatatgccttttgttccggtggggatcaatctgtccggggagaagggggttatatcgacgaccaaggaactccccgcctcaatgtgctcgatttacagcggttaatccgctccatgcccaaagttgtcattgccctagtggctggctatgccattggtggtggccacgttttacatttggtgtgtgacctgaccattgccgcagataacgccattttcggccaaaccgggccaaaagtggggagttttgatggaggctttggctccagttacttagctcgcattgtgggacaaaaaaaagccagggaaatttggtatctttgccgccaatac

SEQ ID NO: 309018 - DNA, 480 bp, Zea mays
gctgttactgagcatcgcaatcagtggccgggggttaacaacttaaacactgtgtaaacacatgctttacccaacaggagcgctatgtacaacatggcactttagccaggtggcgtaatgctgaagaggaacgaaccgaacaggattccaaacagttgtacagactgaatggcgattggaggctgatgcgacattgtctgcatacgaataggggtagccatgtacaccatatatagcgcactctgaatacaatctggtctgatgacgcatccgtaagcgagtctcgacacgggcaaacacccaatgacccgccctgccagtctggtttgatacgggcatccgatgacagacaagatgtcaccatgtccgatagctaacagtggtaaaagcaaacaccggcatcaccgaaacacgcgatacgaacggtacacacgatacaactatgtttataggttactgtcatgatcatcatggtggatt

SEQ ID NO: 309019 - DNA, 318 bp, Zea mays
ggtgacgactctagaggatcggagtagttgcagggggggcatggggtcaaggggagtggtgaggatgcatagtcgtctcctttagcttagaaagggaggagaaggggctccgtattctaagctacacttcagttagagtttgatttaaatatctgatgaccgcatagttgcccagggaaaaatcatggccaatcgtacccaaagtcgttacaccgatgtccaaattgccacttggttgaggggactgctgaccattgcctggagtgatggggactttgatgaatcggagcaacaaatgatccccgggtaccgagctcg

SEQ ID NO: 309020 - DNA, 441 bp, Zea mays
cttcatcagagcgtcaatggtcttggaagaaggctgataaatgtcgatatttttgcggtgggtgcgggtttcaaaatgttcccgggaatccttatccacgtggggagagcgcaacacacaataaattttccgtttggtgggcaaaggaatcggccccacagcggcggcattagtacgattagcggtatcaacaattttgtcgcaggatgtatcgaggaggcgacggtcaaaggctttgaggcggatacggattttttgttgttgcaatgttgccatggaaatttaactcagaattagcggactgtttaattgtcaaggttcagaaagttgaatagtcagtggggctggcccagtcagaaaaaacttaccgtaaccaacccaacaccaactacatcatgaatgttgttctaaggactacttcaaaatcttagaaacaacacc

SEQ ID NO: 309021 - DNA, 274 bp, Zea mays
cccccagactatgccggcatggagggggggctattaaccaaacagaccaagcttacaccgacggaattatcccaggaaccaattcgcgctgactgcctgaaaaggagcaagcggaagacttggatttacatctggaataataaacggaacctgaccccaccatgggataacggatgttggaacatcgggtaagggttcaccgacgttaccgccagaagacaatgcaccaattcatgatccccgggtaccgagctcgaatgtactgaccgactca

SEQ ID NO: 309022 - DNA, 497 bp, Zea mays
accgggggcaactggcggaacccatcaatacggcccaggaaattatcgaaaatccccattgcgcttacaccaaaaaattaattcagtccattccccgttttcctgaaaccctcaattggttgcaatcagcctaggttctttatgctctgggaatcccgatcgccagtcccggccaacatgggataattggtgtaactacccaataaaatttttaacggatttagcgtgcccaatagtatggatgccaatatggattttaaaaccaatctcctagaggcgatcgccggcaaaaaccgggggctattggcatcagatcgggaccgggtggccatcctttctgcggtggaaaaattggaagactataatccccatcccaaaccactccaggagaaaaatttgctggatggtaattggcgactcctctacaccagcagccaaagtattttgggcttgaatcgccttccccttttgcaattagggcaaatttatcagtacat

SEQ ID NO: 309023 - DNA, 590 bp, Zea mays
caggtcgactctagaggatcgagcaaacggtaaaaattaatcacattgacttagatttgagcaaagttcgtcttattaatcctaaaactagcccagaccgagagcgctacgccgaaacctattaccagctacgtaaacataagggggtaaccctggccatggctcgggatatcctcaccgatatttcctattttggaacgatgatggtgcatttgggagaggccgatggcatggtttctggctccgtcaataccacccaacataccgtgcgtcctgctttacaaattattaaaacccagccaggtttttccttggtttcttcagtcttttttatgtgtttagaagaccgagttttggtctatggagattgtgctgttaatcccgatcccaatgcagaacagttagcagaaattgcccttacttctgcggctacggccaagaattttggcattgagcccagggtagctctattgtcctattcttccggttcttctgggcaaggggccgatgtggaaaaagtgcggcaagccactgcgatcgccaaggaaagagagccagatttagcattggaagggccgatccagtatgat

SEQ ID NO: 309024 - DNA, 304 bp, Zea mays
caggtcgactctagaggatcaggctcagactgatgatatacaccgtggaggcggccacaatggagtagcgtgtggccaagggagcaaccagcaagcgattcaaaaaaccaaattcccgatcaaacatcaccggtagaccggcattcaaagcccctgaaaaggcagtaaaaacaataatgcccggtgctagaaattgggcatagttgaggtcattaccaaataggccctggggcgcattgagaaatagggcaccaaatagcactaaccacataaacggctgaatgatccccgggtaccgagctcg

SEQ ID NO: 309025 - DNA, 429 bp, Zea mays
ctttcgttaacctgtacttaacctcccatcaattttgtctagttccctcgatgaattttaaagataaccccaagattgaagtagctcaagaacagccggctcctcctcgtaatgaccaatagcattcacctcatcaggcgcaattaatccccttgtccgcagggcttccgccgacttgtctggatggatagttccatttgtccaagggggccacaaacaatctggctgaaactgatggcccttggcatactcaagcaacctaaactgcccattcgtgcaattccgctccgtgagcaaatagtgcttatttaggcgactctctgacgaaatacgaagaaatttgtctatatatctattgatttcgttatggttcaactgaagaggatactgattaatatttgcatttttcaaccgcgcatacgtgtccca

SEQ ID NO: 309026 - DNA, 477 bp, Zea mays
gaccgtggtcgccgttagctgaatgaagatggtaggcttttttggtcaacggtcactcctcccggagcaaatccggccgacgctggacagtgtgtgaatgttgagcacttcaggcccgttataggaataacgccaggggagctgaattttttgggattaaaaccaactgaaaatcaggttgttattgccaatgtgcgggacttagatggttttgccattgcggtcttttctcgcgattcaattgcagacatgatttttcaagttgttgaggcggatgtaccagaattaggtcgtttaggcattcactctcaggttcgcatgaggcttaaacccggtcaccaggttttactccatcaccaatggccatatgaagcagtgccttacaagattgttgatgagtagtttatttctattcacggcgtgcgctctggccaggaaataggacgaaataattacaacctcgaacttttttaagtg

SEQ ID NO: 309027 - DNA, 501 bp, Zea mays
ggtcgactctagaggatctacaaaaatctaccaaatcgacgctaactccaaaacaaattctggcaatacagttcttaccactgaggctttcaggattttctaaaacttccacagcctgaccaggacgatagatttccacagtgcgagtttggcgatcgattaaccaacccaattgagccccattttcttgatactcttgcatttttttccgcaggggttttagttcatcactgggcgatcttaattcgatcacaaaatccgggcagaggggcacaaatctctgtttttgttccggggttaaactttcccatcgttcccgtttcaaccaggccgcatctggcgatcggtcggctccattgggtaatttgaagcccccagaagaatcgaaaaaattccggtgccatcgcgttctgcccaaagacctagccatagtatcaaaatgcccttacggttactggtttcgcctcctgtgggtgacatgatccccgggtaccgagctcg

SEQ ID NO: 309028 - DNA, 533 bp, Zea mays
ccactttgtcggtcatggcgatcgagcgcaggtctaccaacattaaatggttatcggtgccgccggatactaggtcaaagccccgtttttgtaactggtcggccatggcttgggcgttggcgattacctggccagaataaaccttaaattctggtttcagcgcttccccaaaggccactgctttagcggtaatgacgtgctccaaagggccgccctgggtgccaggaaagacggatttgtcgaattttttgcctaattcctcattattggtcatgatcaaacctaaaagtccgaatatgctggcaaaaaatagttgggcgatgagggtgaccgcgggcagcagggaaacttgcttggccataacaatgggggtcagccaatagctttccacattttgaatgaggaaatagagaattagtacggcaatgattttccagggggcgttcagcacagcaatcatcaggggaaataccacactggcggcggggccaatgttaggaatgaaatttaaaattcccgccatcaaagcatgg

SEQ ID NO: 309029 - DNA, 526 bp, Zea mays
tctgaggatcaccgtccagtggcggtggttttattttttctgttagttattccccctttttgtgaacaactgcaaattctcatcggttccctgcctaaagttggcgatcgcctggagaatttttttgaagactggcacgaccggatggaggtgaaattttttagccaagctttttccgtcgatgatctgccggactccatttccgccctgggggccaatgcccttagttccctgattaacctattttccaattccgtcaccgctgtcctgcaaataatcttcatcctggcgatcgccgtgatgatgttgctttctccccaagcctatcgacagggcaccctaaaattatttccctccttttaccgccgccgggccgacgaaatcctgacccaatcagaatcttccctgggcaattggctcacgggcattgtcattaactctttttttatcgccagtctcagcggcattgggttatggatattgcaaattaaattagtcctagtccatgctttgatggcgggaattt

SEQ ID NO: 309030 - DNA, 441 bp, Zea mays
tttgactttgggaccagtggaaaatttgctcattgcctaaatctttttgctcaattaaactgccgttggaaataacccgatggggtttggctacctgcacccgaatttccgatgtggccaattgtcctgggtaatcaaaacaggggaaccaatagcgggaatcttcatcttccccctgggtccacacttgcaccggcttatcggggtaatggcgatcgggctggataaaataaatgccccggcggggatttttcaattcgtactgaatttccagggtgaccggttccgttcccaggggttgcaatgggttgatggttaatttttccccgtcatagtcaaagctttggctcacccccttaattaagacccaggcaattttcaagtccactgcgtccaacgtcaattgcttaatgccagctcgcaccggcgtgagggcgatgc

SEQ ID NO: 309031 - DNA, 586 bp, Zea mays
caggtcgactctgaggataacctgaaataatgctgactcgaataatttacttgctactcctcactttatttaattttttgtctaagaatctccccccagccggactcctaccatgacaaaccagaatatgcccccggaaacacctatcatttggcttaattttagtcctgctctgcggcgttttgatcgtcctctactacgacaattaggcaaaagtcaggctattttgcaatgggattatcatcaaactgctgacgaacccaattgtctaacagtgggattagatttaatcggagaatacctggaaaattttcaccaacctgtccatttaattggtcatagcaccagtggattgttagctttattgtacgcccgacaatgtcccgaaaaagtccgttccctctccctactctccgttggtgtatatcctgccctcgactggcaagcccattattacagccaatttgatgccatgcgttacagccgtcatttgctccttggtcaaatggcccaccatctatttaattgtcgttccctacgtcaaacccaaaccattgttaatattttggaaaatgatcgacaattg

SEQ ID NO: 309032 - DNA, 466 bp, Zea mays
cactgtccttgtttaatggttgatgggcggttctgccaaatttttgtcgccaacttccacttctcttctgtctttgtctcaatcatttccacccaatttatctactccgtcccagcctgaccaaaccattggggagttaggagaacaagctctgttggcccaactacaaaaattttccccggcggagataacgggggacgatgccgctgtgttcgatttacccaactcggactccctggtaatcagcacggatatgttggtggaaaatgtccattttagtgaccaaaccacctccgattttgacgtgggttggcggggagcagcggccaatttatcggatttagcagccatgggggccacaccgacgggtattactgtggctttggctttgcctccctccactccgttggcttggattttagacgtttacaaaggttagacggcttgattagagccttggcggact

SEQ ID NO: 309033 - DNA, 521 bp, Zea mays
ggtcgactctagaggatcgccatgagccatttttgtgcttccaagggggaatcgtgaggattaattcaatatcttcaccgccatagagagtccattccctggcagtttccagaccgacccaatcggtcaacccctgggggatggggagtttttccgcccataactccgctcccatctgactagcccgacaaatttgcaatacagcatcagcgaggccgtcactgctgtccatggcgccaatgctcgtttccaagctaagaagggagggcactaaatctaagcggggttggggccgttgatgggcccgttgccaaattagtttttgttctggtggtaaatgctcagtcttgtgcggatgaagtaaacattccaggccagctctagacgttccatggtcgccggtggcaataatccaatcccccactatggcttggtgacgatacaaggctttaccctggggcacttgacccaaaactcgaatgctaatagttttaagcggcgatcgggaaacatcccccccc

SEQ ID NO: 309034 - DNA, 472 bp, Zea mays
gctaattgtggcattttcccataaggctttgacctttcccgtcccttttcgccggtgctaactttggtctaaggtatctctctcagcctcacccaggggaacgcaaaaattaaacctccgccaccatttccctaggaggattctttggcgatcgccatttacgccaccaggcccagagggttgtggccatgaaaatactggaataaaccccggaagcaaagccaataatcaaagctaaagcaaagaatttgagactatcaccaccgaaaagaaagattgctaccaggggcaaagaagtggtcaaagaagtgttaatggaacgggtcaaagtttgattgactgcatcatccaccacatggttaatatcccagtcagaatggcgctctagggtttcccgcacccggtcgtatatgaccacggtgtcattgacagaaaagccgatgatggtcagtaacgccaccaggaaaagact

SEQ ID NO: 309035 - DNA, 585 bp, Zea mays
gactctagaggatcagtattttcgccatggcaatttcctgggcacaattccaagctccttttatgttaggtctcgatttcgtcggtggtacccgtttgcaactacaactggaatgcgccagcagcaataattgcccagcggcgatcgatgtggcggaggtgcaggatattctcggcggcgtgggcttaggtaacagtagtgtgcaggtaattgaggactataccctttctatccgtcaacaaaccctggatgtggaacaacgggaagcggtgcaaaaagcattgaatgaaggcataggtaagttcgacccggaaactatccaaattgacaccgttggccccacggtaggcaaagctttattccgttctggggtgttagccctggtgatttccctgctggggattatcatctatttaactatccgttttcagcttgattacgctgtttttgccattatcgccctactttatgatgccttgattaccatgggagcctttgccatttttggcttagtgggaggagtggaagttgatagtctttttctggtggcgttactgaccatcatcgctttttctgtcaatgaca

SEQ ID NO: 309036 - DNA, 371 bp, Zea mays
gcaggtcgactctagaggatcgccgagttggcaattaacgatgtggtgcgggtgcggccgggggaaaaaattttggtggatggcgtggtggtggcgggaaattccactgtggatgaatcgttggtgacgggggaaagttttccggtagataaaaccgttgggacggaagtgattggggccacgttgaataaaagcggcagtttagacattcaagtcagcaagttgggccaggattccgtgctcgcccaaattatccaactggtacagcaagcccaagcttctaaagctcccatccagcactttgttgaccgcatcacccactggtttgtccccacagtaattgtggtggcgatccccgggtaccgagctcg

SEQ ID NO: 309037 - DNA, 550 bp, Zea mays
taaattttggatatgttgggggggcacattgaggcgttctagctcttttattaaccaatggaacgtacctacagaagcttgcaattcattctggtcaatgcccactggcaatggttccgttgacgcgcctaatcgggatggggggaccatttcttcctcattgcccgcctgctcatagaagttggtttcctgggaagcttcccaacgattccgttgttgctcgttttgttcgtagtgctgttcaacgatgttgatcaactggaaatatagggcaaaggcccgagccgcccggatggcatcattgagttctaaatgctcaatgcgctgggtaatacccatgatgacttcttcggaaatttcgctggtgatcgcctcatgggtaccctgaagccttaattccgtcagcaaatccaccaattcctggccacattcgctttggagcaccctttcccacaattcctccaccatctttaaccgctggtaaagcaccgactcttcttcagagttggaaccattgtcataccagaccagttagtggaaagaccgaatg

SEQ ID NO: 309038 - DNA, 268 bp, Zea mays
gactctagaggatcgcctgattacgttcggcggtgttaaactacccagatggagggccgcttgactagtattgtgggccagggtgtggagggcagaaaggcttggggaaataaccatgggttagacgttgacgatgcagatactttagttatttttcggacagggcaactttggggggcaaacagcaaagcgcaggggaaagtatttaaaaatatttacggcttgaacctgggggaatggctttaatgatccccgggtaccgagctcg

SEQ ID NO: 309039 - DNA, 369 bp, Zea mays
gaggatcgtagcgcaccgggttatctttattggtcacattaccgtcatcggcggtgttttattccacaaatactttttcaaaccccacaccatagtcattgttgataaccacggtggcggcgtcggtaaaaccttgtttcttggccaaggcagctagggcctgggcttggtacgtatcgggaggagcggtacgggcccaaaagcctttaaattcgcccttcttggcctggtcagtaaacacaggactagtgctgcccggggaaatcatcataatgttgtttctcactgcgatgggcaccgccgcactggaaacgctgctggcaaaggaacctaccacgccagctacctgatccccgggtaccgagctcg

SEQ ID NO: 309040 - DNA, 482 bp, Zea mays
tcgaaagaagactgacttcactgccgtcaggcaattgcacaaagaaattattgtctttagcaacgacgcttatctcgttttgcacctcgggagtaaggggaggaaccaggaataggttcgttgaagcattggaaagggaatcaatggtgccatagacatcattattgatttggaactggccataggcattgctaaaactaccgccgggactactgggagcagaattattgctgaatgtcagacccgcaccagtcacgaaggaattgtctgtaataaaaatggctccgtccaatgcttgaccggaatttcccccagtttctccttgggtgtgtgttgccactgaactgggaattagtgatggtaaccgaggcctgcttaataaagagcgcaccgtctaaaccagcaccgccgacgtcactactctcatttcgggactacctgcttcaactgaattaccagcgcctccttgagaccttacacta

SEQ ID NO: 309041 - DNA, 411 bp, Zea mays
aaaaagccctatgcagtggtgcaattgcgccaggaagataaggcaggacaattgtggaatatggtgggttttcagaccaatttacgctggggagaacagggacgggttttccgcttgattcccggtttggaaaacgctgagtttgttcgcatgggggtaatgcaccgcaatacttttattaattccccccaacttctgaccgctagtctccatttcggcgatcaaaaattgcctctatggcttcatttaagctttctgccatggcaatttgattaccataaaccaccacaacccgagcgagggtgggcaaactatttttctcagcttccagataaattggttccacataaagtaaggattcttcaatgggaattaccagcaaattaccctgaatggcccgggagccccggc

SEQ ID NO: 309042 - DNA, 494 bp, Zea mays
gctattaatgcttggcagaaaatatttcccgaactgtttttaccttttagtttcatgccctctactttaaaaagtcatattcgttatccagtggatatgtttagtacccaatcggagcgattgttgacctatcacatggaagatattgatgtattttataaccgggaagaccaatggcgtattccccaggaaacctatgccgatgagcaacaacccattgccccgtattacctaattatgaaattggcagggattgatgccaaagaagaggaatttgttctttcccaagtttatactcctaatgcccgcaataacctgattgccctactctttgcccgctgtgatgaacaaaattatggcaaattgttgctctacaccttacccaaggaacgactggtttatggcccagagcaaattgaagctttggtgaaccaagatccagtaattttcgaacggattagtctttggaacctgccgggcttccgggccattca

SEQ ID NO: 309043 - DNA, 543 bp, Zea mays
gcgcaccaggggactatcgtatacatcccgcttagcttttttttgccaacgtcctggctgggtaacttccagcgcaatgccttgagcttgccaacggatagcatcgccttctgctgtttcacaggtggcatggtcttcgagcactaatacttccgccaatatgcttggcacggcccgacggctaatggcaatggtgccctgtttgccctggagagagaccttatctccctggttgataactgcggtaaaggttaaatcatcgttgcccaccccgctaatggtcagttggtgtcggtcttcatccccaaagcgctgcacgacccccacctggagcaccacatccttggcaaaactgggtaaagctcccacagacactaagcccagggcaatgactaagccacccacacgttggacagcaaccttcactaagttactggggggggaaaataacataaataatcaacggccatctatattggccagggaatcaaaggcaatctagcatcctaacctatcatttttgctctgccatcatgaggggat

SEQ ID NO: 309044 - DNA, 250 bp, Zea mays
tggaacctcataagacctttcaatatcttaaaagaaaagtgtgaaagattttacacttttgatgatctgaaagaatctatttacacaaaatgctttgttagcgtagatagtctagataagatatctcgtagcattcttaccgctcaaaaaattactgaagagcaacatgatcaggtagaaaaatacatatacacgattgaggatttttgcagaatgctcatgccaaaatttgagtctatcaacgattcat

SEQ ID NO: 309045 - DNA, 573 bp, Zea mays
caggactattgaggatcatcacgttaaaggatgtattataaagtggattatgtttctctgaaatcgatttttatattttgcctaaacccaagttatgtcaatgaaaaaataaaggatttcaggacaggtcttagatagctattttggcactctcgggttaaagtttaatcaagctatcatttggtgttaattatgattcacactaacagtattgaccatcatcaacaagtgggaggtgcgcagtcatgattacgggcaaaatattcttgcccatgattagagtctctataaacagcatataatccagcgacttcttcttgatagtctgacattaagtatttatcatatagaccatacaatactcttggcgacatataaatatatttctttttaactctctaaggcgatctcggcatacattgaactcactcactatggccaccataagtttgctatcacagagctccttgtgatattgatgactttacttctttacatacaaaaattctatgctatgtacgatatgatgcatacggtgacataaactcgccatgctatacataatatacattt

SEQ ID NO: 309046 - DNA, 497 bp, Zea mays
ggtcgactctagaggatcatcttgaggggactagggcgaccgttcctttgcacaaggcaacggatgcagtatttatactgaccgaggacctcaccatggtcgaggaggtggccactgtaattggactggataaaacctacaatgcggggtaattcagtctaactgttgagcactacataaataggttagaatggttttaaagatgcacataccgtggatgggtcgagtgctaataatgaaatgcctaaaagaattgaaacacaaacataatcctgactgagatggtagccttaccgcaagagaagcccatcatagagaatcccagatagacaagctagtgccaaacctatgccaaaaggaaaacacatggctttacaaactgagtgttatttgccattaacatgaccttgcaaaacgaaaaaatagtatgggcattcacagagtggcctcgcagggctaacaatcattctattgctgctgatatagcgggatttact

SEQ ID NO: 309047 - DNA, 473 bp, Zea mays
ggtcgactctagaggatcgccgcatggaaggcattgcccccttgtttgagcatacatttgcccgctcatgttttttgcgcatggcccgccgccacagcctcaaaggttttacccgccatgaaaagatggtatgacactagaaaattaaaccgacggctcagactttgctcctagggtaattactactgctgcattgcttacgatggccacccgcaccaaaagccctgctcagactagacttgataaacaggaactaccaccatatctggaaaatggcggaggtaaaccggcggtgggcagagctccactgcacacatcactgatgagcagagattgacccactataaatatcactactcccaaaccaacatattgtgtgacccgatggcgacaacgcatggtcacccactgacccatggtggtgaataggccgtggaacgctaaaaaggtaatgcagcctactagcccaaatt

SEQ ID NO: 309048 - DNA, 344 bp, Zea mays
ggtcgactactttagaggatcggctgggggtccacactaaccaggaattccccgacgcatgtgcatcacattatatatatttcgaattgtggccacgctgcccaagggctgatgctagtcgtgcatgtcagttttgagactaataatggcgggtcgccccaaatgggttgtgacatcggcgatgctgacgataatgtggttgtcgctgaggcgagaaagaatatgctatattacccctaccctgtcaatggctttaatgacactgtccaccggataggtttggtgattatcggtgttgggatggcagcacccccgaattaggcgatcccacggtaccgagctcg

SEQ ID NO: 309049 - DNA, 463 bp, Zea mays
gtcgactctagaggatcacccacgggctagatgaagccctcttcgtggtcgatcgccttgcgatgatgattaatggcctccacgccaacattggcgaagggaggaccatacccttttctcgcccccgggaccgggacaggattatggaagacctcacctattaccagctacgtaactacgctctcgactggctctataaccgctatgcccaggacaacttggcttagaaagttatagccaagatactactcccaaattgcgtaggctaattccctgctttttgggagaaattgattccaacagtgcgctaggagtagttcttgagactaatagttgttagtgctacatgcaagaactttgcgggggaacatggggaacatatagatcattaaagggtatgctaatcggcgtaacacacttttgcggatgatatactgaaaagctctggcgatcatggaattat

SEQ ID NO: 309050 - DNA, 349 bp, Zea mays
ggctggtgggctagtgggtcaattgagtgtcgggcggacgatgttgcggttggggctggccaatgctggggggagctggcataaactgagttttcggagccatactttcttgccgaatggacgacgcaggtcgcccagcaggattgttgggaagggggggcaacgggggaacagaggggcgaagaggtaggttcatgggattatttcaccggattttgtacttgtggcacatttgacccccgggaaacctttgatgcacacagaggagacgatacaccctgcaataactgatataaccggtcgaattcaatggggacattgaggacattatttaataggttaaagactt

SEQ ID NO: 309051 - DNA, 432 bp, Zea mays
ccacatgtttcttttttgtgctggagacggcatggggaaggcaattaatttatgactcaattagttctacatttgttaacaatttgtcgcttgaatctcattaaggacatagggacaaacgtggggaaacaaatgcgtcgttttgttaaacaactgacgaaaaacagaaaaaagtctttaacctattaaataatgtccccaatgtacccattgaattcgaccggttatattcgttgctgcaggctgtatagactcctctgtctgcatcaaaggtttaccgggggttagctgtgccacaagtgcaaaatccggtgaaaaaatctcatgaacaaacctccctgaaactatgattcaccgttgccgctcctaccaacaatactgctgggcgacctgcgtgatccattcggcaagaaagtatggttcctgaaactc

SEQ ID NO: 309052 - DNA, 402 bp, Zea mays
ttttatcttggtcaaaccctgtaatggtcaaagcagtgcctccatcaaccactagacagggatagccgtaggtcagccccgtccctaaaccagccagggcccggtcaatgccaaagctggggtaaagattgaccaggggaagattcttcagggtcaaaattttaggctgatatactcgccaaacttcggtttgttccggtaccaccgatgccaacatcagaggaactttccccaacaaaaccggcaactgagctgacttggggttgtaatctgtaacccaggtttgcaggggagcattgccgctacaatatgcccagtgcagacgggagttgcctatcattaggcctaaccaaggtttttgcttgtcattatccagggctaaaccacaacccggctttgatg

SEQ ID NO: 309053 - DNA, 375 bp, Zea mays
tggcatgagaaaattttggaaccggccgctattttgggggtggatgacattgcctctaagggcattcggctccaggtgtggattaaaacccaagcagggcaacattggcccgtgggtcgagaatttcgtctcaggatgaaaaaggcatttgagctggctggtattgccctgggtgccccccagcaaaggattgtgtaccatcaccacggtcaaaaaagtagtcatagcaatggtaaaactgatcactctcccggggcgatcgccttggggccaaatttttccaaggaatataattagcctctaactctactaatgccggccacctcctttcgttcaaaagcccatgagtgaaccagtccagcccattattgaatt

SEQ ID NO: 309054 - DNA, 506 bp, Zea mays
ccaggtgacgaattaaactctcaattctagtggatgccaccgggtttatatctagcggtgggttcatcgtaaagcaaaatatttttatattgatgatgttgttccggattgatgacgatcgcccgggccaaactgacccgtttacgcatgccaccggacaatttcgatgggaatcgatcgccaatgcccggcaagcccaccaactctaaattttcttccacaatggccctaatttccctcggacgtaggtctgaatctcggtagagggtaaagccgacattttccgtcacagtgagggaatcaaacagggccgagtgctgaaacactaaacccacccctaaagctttttcctcttctttaatggaacgttgacggcgatggccatggacgattacctcgccgctgtcggcggtgagttagcccgtcacaatgcgcaaaatagttcgttttgaccgtccccgatggcccaattacccccactggtttctctgggtaaattttcaggt

SEQ ID NO: 309055 - DNA, 341 bp, Zea mays
aaaactcccccaatggtcggggtgtgcccatagtaaatatatactgtagacacttggatggcgaacaccatacccacataaccagcagtcatcaaggcgatcgccatggattcggggccgaccatattcatttgctcccgtgtattgagccgaataatgcgcgcttgtaaaacgagcaaaaaaacttggccggttaaaaaaaaggctggaagcaaacgctggaaccaaagactgagggagtggcgagagcctctatcgtctgggccataacattggtctccacagtggcatggtctgggcctattacattgtcaatgaggggcaattagtgacctataccg

SEQ ID NO: 309056 - DNA, 349 bp, Zea mays
gatttggttacgatgtggccatgcagattgccgcttgtcccaatgtggagtacgttagcgtagccgacattccccaggaaatggtggctaaagagaaggaaattgaaatggggcgcgacgacctgggcaaaaagcccgccaatatcaaagaaaagattgtccaagggcgcattgataaacgcctcaaggagctatctttgctagaccagccctacatcaaagaccaaaatctcaccattgaagagttggttaaacaggcgatcgccgaattgggggaaaacatccaagttcgtcgctttatccgctttaaccttggtgaaagcatcgaaaaagcagaaaccaactttgc

SEQ ID NO: 309057 - DNA, 560 bp, Zea mays
caaaataaatcggtcccaccgctccttcttgggcaatgttttttagtcttaaatgggccggacgtactccatggacttgcatcaaataggcttccacgtcccccaaaccccttgccgaaagggatatactggcgtagccgttggcccgtaggcgtctttggtaacgaccttcataaccaccttctaggggggcatacactgccaaagccccgtcgttttctagagcgcggataaatccttttccgttagcaattaatggcaatggcaacatagcaatgatggcgataattataagttatggaagcctaggacagactaagttacccacgattttgacacactctctgggcaaagcaaagatgggctgccaagattttctggggtttatcccaaaagcaaaaacccaaatcttccctggcctgtggcggtggaaatctgggttcaaaaggttcttagatttagctaataagtagtgcggtaatcaagcctgagttactagcccttagcggcggcggccacttcttcccgcaagttggtttctgctttttcgatgccttcac

SEQ ID NO: 309058 - DNA, 399 bp, Zea mays
  unsure (1)..(399): unsure at all n locations
tttagtttgggacgggcgcacgctngtgactacaacattcattggagagcaccctccaccttngtgctccgctaggggaggcatgcagatctttgtgaaaaccctgaccggcaagactatcaccctcgaggtggagtcctctgacaccattgacaacgtcaaggccaagatccaggacaaggagggcatccctccagaccagcagcggctcatctttgctgggaagcagcttgaggacgggcgcacgcttgccgactacaacattcaaaaggagagcacccttcacttggtgctgacccttaggtgaggcatgcagatcttcgtgaagaccctgaccggcaagactatcacccttgaggtggagtctttagacaccatcgacaacgtcaaggccaagat

SEQ ID NO: 309059 - DNA, 386 bp, Zea mays
gtctggatggggccggctaaagcgtatatttgttctgagtcatgaatagcatcgtaatcatcgccaaattcggacgcaaagattttttgttctttttccccctgcacatcaatggcgtggtaccagtaaataatgtcttcgtccttatcgacaaagcgcatatgctcccgtaaatactccgtacctttttccgacgccttcaaaaattggtcatccccggtcatcataaaggcggtagcaaagccgtacaccaggcgggaaatggtatccgtttcttggcgaaaattcaccgttgaccgctccccactcatggacaaatcggtgcggtaatggcggtaatcaatctaccgtcgccaaattgggctttgataaaaaacttaccgagg

SEQ ID NO: 309060 - DNA, 504 bp, Zea mays
  unsure (1)..(504): unsure at all n locations
ttcctttccacacctcctcgcttccactccgctcgtctgacatctcgtcccgtcctttcgtttcgaagcctcgcgagccccgacgatggccaccgccgcggtgtcggtcgacgagaagctcgacaagcttcgcgccgaggtcgccaagctcgaccagatcagcgagaacgagaagtccgggttcatcagcctcgtgtcacgctacctcagtggggaagcggagcagatcgagtggagcaagatccagacccctacggatgaggtggtggtgccctacgataccgtcgcgtcgcctcccgaagatctcgaggagacgaagaagctgctggataagctcgttgtgctcaagcttaacggagggctcgggacgaccatgggctgcactgggcccaagtctgtcattgaagtccgcaatgggttcacattccttgaccttattgtgattcaaatngaggtattcttcattaaccttgacatcttctctttactgttggatatggaaga

SEQ ID NO: 309061 - DNA, 216 bp, Zea mays
ggccactgccctgacagtgcaatccttattcaccattaatcatttgtgtaattttagtcggtggttttccctcgatacctggcagagtttatggagacatcaaggttggaaaagtgctttgattactggcttaggtctttgtctattactccgagccaaccatttatccactttgatattggcggctagtttggcgatccccgggtaccgagctcg

SEQ ID NO: 309062 - DNA, 399 bp, Zea mays
cgatcgccagagtgcgggcagtggggaatgctacgtacaacggcttaactgggtttccattccagagccaacagaccccatccgctgtgaagtgcaggtgcgctaccgttccgctccagtgaccgtcaatgccattacctggcacgatcaacaaatcaaactggtctttgacgaacctcaatttggcatcactccagggcaagccgcagtgctctatgacggcgatcgggtgttagggggaggtattatttgcccccaaaggtccgaaacagcaggggtctaggcggcatagtcccccaccaccacataccggatgcgtaaactggggccacctgaacccaccgacaaaccattttggtcccctttgccacagtccccagactcatcccaataaaagtc

SEQ ID NO: 309063 - DNA, 261 bp, Zea mays
aattggctggggggtatgaccaacggggaaatgttcacctttatgcttggagaggcctggatgatccgccatggtcagctagcggaaccggttaaagatgtgaccctgtccggcaatgtgtttaaaaccctggctaacatcgaggcgatcgccgacgacttttattgggatgagtctgggggctgtggcaaagggggccaaaatggtttggcggtgggttgcggtggccccagtttacgcatacgggatgtggtggtgggg

SEQ ID NO: 309064 - DNA, 421 bp, Zea mays
gccctttgggtggccctgggctagctacggccactgttggtggcgacttaaggactatattgaccgccaatttatggctggattttctgcgtaacgctgagtgaactcagccagagtaaaataaatggctagacaagttttgatagacaaaaatcaattaaaactagattctgactaaatcgttgcaaggagctgaaaaatattgccatcaacaacccccaagcccaatcaaggctggatttacactgaccgagtcaaccctaaagccgctggccagacagtgctggacttctactcccaacgctatctccactccgagcgccaagcttggcaggaacggattgagcaggggcagattgaagtggatggcaagaccgttgaccccacctatcctttgcaagcggggcagaccctcacctat

SEQ ID NO: 309065 - DNA, 492 bp, Zea mays
aggaacgccacgtagggatagcctaaactagccaaatggatgcgaatttggtgggggtttccagtgcgaatttccacttctagccaggttttttccggggagcgggctaaaatgcgaccgtaactttgggctggtttgccgtgggagctagcggcgtagatatatcccagttgggggtagggaattttcccgatcgcctggtggcattcaaatttttctggcaaatcacaggggccaatcacggtgcggtaaattttgcggcaaatatgctcccgaaattgacggctgagttcccgtcgacccagggtagaacgaccaagcaataaaagtcccgaagtgccagtgcccaaacggtggaggggaaacaaggactcctggggatattggatttttagttgttccaaaacggtgtggtagacaaaatctccccccggtaataccggcaatcctgagggtttatcaatggcccagaggtcttcgtctcgatgcaaa

SEQ ID NO: 309066 - DNA, 345 bp, Zea mays
ctttttattttagcgcttttccatcctcctacctaacgggagtttttgactcggagtgcgattggccttgatttctaccaacggctgatcgattaaggttttaccagtcatttccgccggaacgggcaactgcaaaatatccaaaatagtcggggcgatgtccgccagttttcccccttcccgtagcttgacttcaccgccgtggccaggaattttacgtccttccccttccaccaaaataaacggcaccggattagtggtgtgggcggtccagggattgccggattcatcgctcatatattccgcattgccatggtccgcggtgatccccgggtaccgagctcg

SEQ ID NO: 309067 - DNA, 419 bp, Zea mays
ggtgccaggctttgggcagtttcgccaccatggaccaggcggggcgcagtaatttacaggtaattgcggcggccaacttcttgctggaatgggttaaccaagattggcaagcacggtttaatagtggtcccaaaggggatgcgaccttacccttccgcccccaggcaattcgtccagtggaaccgggggacccccaacccaatcctccggccaccgatgggggagtggaaattcgttttccccaagatatcaatgaagaagtagaacaaattcgccatcggctagtgcccctgttgttggccaatcctcaccacaatgctgccattttagtacgggaaaatcgccagggaaggttcgtggccgatcgcctgaaggatgtggaaaaagatggtggactgaaggttttggacgtgggggac

SEQ ID NO: 309068 - DNA, 432 bp, Zea mays
  unsure (1)..(432): unsure at all n locations
gttcatcgttggcaatggtgtggagttcgctgagcaaatttttttatgtgcgttcgggttgggtttgtacctgtaaacgttccgacaacttttgtaaggtggctaaatctgagctgtcatagttgagggccagacccaaaaaagcaatcaattgataggcgggcagttccaggcgggctttgagcaaactacgacataggccctgggcagaaaccgccggggaggccaggggaggcatcaggggagtggggtagagaaattgttccggcaccgccgccaaagcatntaaatcttgagtgggaattagttggcgctcctgcaacactgttaaggtggctttgaggagatcggnggaatggggggcggtcgataaattgtaaaagactaangattttccctggtatgcgggaattacgatcctggntccccacg

SEQ ID NO: 309069 - DNA, 319 bp, Zea mays
aaaacgtttggacctagcagtagggttactccatcaaccatctgtgttggtgttggatgaaccatcgacaggggctagacattgaaagtagctttattctctgggaatttttgcgcctattgcgagatgcacgcactacggtagtaattacaagccattacctggaggaaattgatgccctagccgatcgcctagccataattgaccagggcacagttatcgccaccggcacccccacggaactaaaagaccgggtaggggtggacagggtcaccctcagaattaaggaatttacggcagaccacgaagcagaaaaagc

SEQ ID NO: 309070 - DNA, 327 bp, Zea mays
cgcatccatcagggttttgccggaggccgttatttacacatcatccaaactaggtcgggattgggccaagctgaaaatcggtaaaccgccagcgagtagggctttttcgatctgactgaggggattactctggggcgtcaccaccagattgcgggaattgccttgggcttggtcgacaatcactaactgaacgaaagctagggagcggagaattcggctagctcatcctgcttactggtctgccgtaaattcctgaattatgagggtgaccctgtccccccctacccggcctgttagtaccgtgggggcgccggtggcgatcactgt

SEQ ID NO: 309071 - DNA, 488 bp, Zea mays
tttgctcgtgtggcccaggaagtggacgaacgcttttttgccaatactcccggaaaatccgtgctggacattggctccaacgatggcacccaactaaaacatttccaagccttgggttacgacgtactgggggtggaatcctccaaaaccactgccaaaattgccaacgatgcgggggtgcccaccctgaatgattttttcaatttggaagtagtcgaaaagttagggcgtaaattttccgccattaatgcggcgggcgtctttttccatctcgaagaactccattccgtaacggaaggtattcgggaagcgttggcagaagatggggtatttgtggtgcagtttctttacatgaaacgcattgtggaaaacctggctttcgaccaaatttaccacgagcatttactgtactataatctccaaaccatcgaagtgttgctcaatcgccatggactgtccatgtttgatgcctacttagctcctatcca

SEQ ID NO: 309072 - DNA, 507 bp, Zea mays
  unsure (1)..(507): unsure at all n locations
agaggaacgatctggccctaggcatcggggggattaacggggaagaaaaattccacttccttgtcaattaaatgctgattattagccaaaatttcccgcttaaagttccacgctaaaacgtaataaatatcgggcaaagtggttagctctttttcaattaaaagcggaatgtgcataccaggagaaaccaagccccgccgtagctcatttttttccaccaaatagtctaaatattgggtaccaatgccaaagtaattgagcaaggtattacccttcaccggagcgccaaagccccaaacggttttaccagcttgcttagcttcgtctaaataggccaggttttctgccttcatcgtttcaatgcgttgggcaaaatcaaagtaggtttggtaatcattacttttttcatctatttccgactggcgcatggcctggagccgntctgtgggttgcccgttgccttgatgggtgacaaaaccgacaatggaaccaccgtggataggagct

SEQ ID NO: 309073 - DNA, 419 bp, Zea mays
gaggatctggcgtcttgcctggagccccaatgggcaatacctcgccagcggaggctatgttatcactgtctttatctggaaggtcgagaaggaggttactagccttcgcaccctggagcatcccactatcctgagtgcgatcgcctggcatcccgatggtgagttgctggccacctcctgccacgacggcaatattcgactttggcactggcaaaccgggcagtgtgtcactcgcatcagcggtcatcaaggagaaattctgacccttaaattttcccccgatggcaagcgactctacagcagcagtcaagacgaaacctggaaaacctgggactggcaaacgggtacctgcctcgccagcgatcgccttgatcgcccctatgaaggaatgaatatttccgaagtccgagggttgaccg

SEQ ID NO: 309074 - DNA, 376 bp, Zea mays
acctgggaaacaatccggccatttaaagcagtttcaacaacagcataaatgtcagccatccttaacccatactgggcagcggcggtacggtcatagtgaatttgcacttggcggataggaagttggggttcgagttgcaggtcaacaattcctggcacagttttcatcgcttcctgtacctgctctccgatggcccgtagttcctttaagtcagggccaaagatttttacggcgatcgcactcctgacccctgataacacctcatccatccgatgggaaataaagccccccatattagaagctacccccggcaattggttgaaggctttccgtaattctttaacactagcttcccgatccccgggtaccgagctcg

SEQ ID NO: 309075 - DNA, 258 bp, Zea mays
  unsure (1)..(258): unsure at all n locations
gaggatcactactcagttgttcgcagggaatggtgtccgaaataatcgagctggcctttantccagtatgaatttctaactgagcgctgggcactgcctcaaatactaaccgttgaccagggaacacaactctttcaaaataccaattagggacattggtaatgcgggccacttggatttgattggtggcattgacgtagcaacagaataaggctgatggctggttgttggggatgggatccccgggtaccgagctcg

SEQ ID NO: 309076 - DNA, 406 bp, Zea mays
ttgctggataccaagggcattcttttggcagaggaaaagccagaccatgactttctcgctgatatccgagctggccaggtaatgaaaacggaggtggaaagcctggagcagagtctcaccctagcccaggtgctaccgattatgtccaattcccatcaccggggctttcccgtggtgcaggggggcaaactggtgggggtatttacccaaacggatttggccaatgcggcccaggagtcggtgcacattgcccttaagcaaattatgacccccaatcccatcactgtagatccggaagcgcccctcagtgatgtgctctatttgctcaaccgttatcaactttcccggttgccggtggtggaaggggacaacaaattagtgggcattatcacccgcacagacatta

SEQ ID NO: 309077 - DNA, 518 bp, Zea mays
aggaacgccaccggcagttccagttatatcgccggggtcggtatgtggaatttattttgttctatgaccggggcaccattttcggtttgcaaaccaatggccgcactgagtccattttgatgtctttacctcccttagtacgttggcaatattgctacagtcccgaagccggtagtcccgaggcggaattaacggaaaaattcttagttccccaggactgggttaatagttagttctctctattcacttctgccttaggctggggattaatcctgctctttggtagaggggccataatggaaactagccatattgcgaggaagaagagccatgttgctagccctagaccgcatcagtgtgcttcccggccagaccttggttttgcgggatgtggattgggacgaatttgaagctttgctggaagaactcggtgaacatcgcagttcccgcattgcttactatggtcaacaactagaaattatggctcccctgcctgaacacgaaattgataaagaact

SEQ ID NO: 309078 - DNA, 411 bp, Zea mays
gtaaaaagcatgctccagcagtgggccttggccaaaactaaacaattgccagaatatgaactaatcaacaccagtgggccaccccatgcccaggaatttacctttaccgtcaaagtagcgggaaaaatccatggccaaggctctggccccagtaagcaaattgccaccaaacaggcagccctagaggcattgaaaagtttggggctattgcaataagcaaagcagaatccacactggtggggagaaacgatggaacacgccttaatcgaactggattgggccgacattggttggatgttgggactcctgggcgcggcgatcgcccttttgcaatggcaggggctaaatctgacggggcaattactgtgggccgggggacgcaccattttgcaactgattgtggtgggctat

SEQ ID NO: 309079 - DNA, 481 bp, Zea mays
agctaacacttgcccggttaacattcccggcaaactgaccaattcattatcatcatttggttcacagtgggaatcagactggctcggatagcggccctacgataactggcgatcgcctggccgggggtagctcctaagcaaaggtgggtttcaatttcccggggattttgctgaatggcactggctaatctttcaccggctaaggaagcgctgttcatggtttgtcccagaatcatgccagtgaggggaatgagatattgaggggaataccattggggcggctggataatcaccaccagggcgtaacccaaactgatggcagtactggcccccaaggaaagccatagccaaccaaacagggatttactgcggggattaatgcgatttctggccaccaccgcggcaatggttaacataatcgccaacactagcaacaactgccagggattattcagggaaaaaccactgcgagaaaatagcc

SEQ ID NO: 309080 - DNA, 253 bp, Zea mays
atgcccgctaaacgggcggcggcgatcgccattagttaattttgttggttatgttgcccaggcattttgaacaggttaatgggggcaattaattccccaaaggcattaacccaattatcctggaggtaaaccccctgtttgggatcacaaagaccagccagatgattagctccctgggtactagtccaatgggcttgggggtaaaggttggggccgtggctgtggagatggggatccccgggtaccgagctcg

SEQ ID NO: 309081 - DNA, 200 bp, Zea mays
gaagcgaaaccatcaagtttttacctgctcttgcagtttttattttctttctttcagttgttgccgatgggtgtccagctcaatttgtcgcttagtcaaatctagatttttagcggccatttcctgacgccaagcttctaccctcctcttttcctgttttaccaaagaggaaagagcttgatccccgggtaccgagctcg

SEQ ID NO: 309082 - DNA, 465 bp, Zea mays
ccggcccaggtttgtgcctactacgggtcggttatgaaaattttcccttgcctgattccctttggtttgatagtcaacccctgtggcaattcacaggctagccaagccaaattagcaaggcaaataattatgtcccgttattaagcgggggtatttttgaaaactatgaacaaaactgtattaccaaccatcgacaacctagaccacaaatggtacgtcattgatgccgaaggtcaacgcctcggccgtctggctaccgaagtggccaccattctgcggggcaaaaataagcctacctttactccccacatggacaccggtgattttgtcattatcattaatgcggaaaaaatagaagttaccggcagaaaacgggagcaaaaactgtatcgtcgccattctggccgtcccggtgggatgaaggaagagacctttgaaaaactccaagttcgtctaccggaaaga

SEQ ID NO: 309083 - DNA, 516 bp, Zea mays
gccttccgctttcaagggttgtcgattttcgggggaaagttgtcatagggcccgggccacaccaagcttcacagcatcagcttggccggttaggccgccaccatgggcattaaccaaaatattgtattccccttctaagcccagggtttcgaggggagctttcaaactttggatgtagttggcaatgcggttgaaataaatttccccaggcttgccgttaacaatcacttccccctgaccgggcactagacgtaccctggcgatcgccgctttacgacggccggtgccccaatagacgactttgttgctggaatcgttagcttgcattagttagctcctgcaggaatggtattgataacaagggtttctggctgttgggccgcgtggggatggctcgggccagcgtagacttttagcttggtgaacaacttacgaccgaagctatttttgggcaacattccccgcacagcactttcaacaattctttccggtagacgaactttgagttttttaaag

SEQ ID NO: 309084 - DNA, 434 bp, Zea mays
tgccccattttcccttaacgctatggaacagggcatccacctgggcatcgtcctgtacgttccccggcaagacgagggtaggatgcaaaggctcggtcaactcccgcactttcttttcaaatctgcctttctcatctggaagataactaacgccaatttcagccccggcctggtgtagttgttgggcaatgccccaggcaatggagcgattattggcgatgccggtaacaaaggcgtgcttgccgctgagatctaacatagaattttccctgggagtgctcaaaatggtagttgctgaaaaattagtctggggagccatcaaccccaacttttcaatataccccccagtccgtacttccaagaagccatcggggtgaagccaactgtcccagtcaatccatttcggcctgaatctgagaccgtgccgattttat

SEQ ID NO: 309085 - DNA, 437 bp, Zea mays
  unsure (1)..(437): unsure at all n locations
tttacaaaaatccggccagtttggcttaattatatgatgtttttgctttgctaacccaattttgctctggttttccaccggggccatggcattactaacaggcactgttatttggcaaaaaatacgtcaattttcctcccagaccatcaatgcacctttgcgggggataaccctttatattgaggtcaattacgccgtcaatctactgccttggttgggcattagtcgttgcacttttttttaccactacctacccgcctacgcctttagtattttagccctcgctttaatcctagaaactttactggacagtccccggcacagtcataacgtcattgcttgggcagttttaaccctagtggcgatagcctttttgtattggttgcctgttttcttgggattaccatngactcctaggggctttgccctgcggatgc

SEQ ID NO: 309086 - DNA, 221 bp, Zea mays
aggaacagaacccatcacccgaccgggaaaggaacgaccatccttaagagttactttcatttcatcggccccatccaccacatgggcattggtgaaaatcttgccatcattactaacaatgaaaccggagcccgttccccgttgcacccgttcgttgggcatggggggcatctgggaaccaaaaaatctttgcaagaagggatccccgggtaccgagctcg

SEQ ID NO: 309087 - DNA, 394 bp, Zea mays
ggaacaaaacagtttaaactgtcgtttactcagtcaaaatcccctggccttacttttgtgtatcattcgccaatttctacaatcctgtcaaagccaatctcccaattttgaggaaattgaacagatagtagggttgattaatgcccccaaccgctcccaaacttcttccctaccaggtcaaggaatagttagggtggaaggggactttttgcgatacatttaccagggtaaatagtaatcatttctccccagctaaactatggataaattggctgaaatttaggctaaaaacccatcgctttagcaacaatttccaaatctggttttaaacccgctttcacttgattgccactattttgcacagcacaatctggatccccgggtaccgagctcg

SEQ ID NO: 309088 - DNA, 234 bp, Zea mays
ctacgtagggggccaccagtccatgccacttttccggcagattgttgttaaaggcaggatgttgcaacactgaagccgatgccactttgagggtaaaaaaattcatgggaggagagccgataaattcccccacaaaacggttggcgggttgattgtacaaagttaaggggggcgcaatttgttgaattaccccttggttaagcaccgcaatacgatccccgggtaccgagctcg

SEQ ID NO: 309089 - DNA, 464 bp, Zea mays
ctatgcttgcattgcttgtctggacgaagacgccgcccaggattgccatcgttcttggcatgacaatctgactcctgcccaaaaagcagagggatggacagcgcaactccgcatggttaattcctgggatgatgtccccgttaatgcccttaagttaagtttttagccaaaatcactcagttattcccactatcattttggtattagaaagggtttattttgcttctttccactggatactggatagtagatatatgccatggtccccaaacctgagtcagagccaatcttaagaaatagccgttgttccgctcaacatttgtctttgacctgtttttggtaagctgaagggtggagtttcaccggcaattgcccatgactgtcgcccctcaccatcccttcaatctgagtattttttgtaaacgtttgctcaattttttgtttttaaccctagtacttttggg

SEQ ID NO: 309090 - DNA, 428 bp, Zea mays
  unsure (1)..(428): unsure at all n locations
gttctcaaactttcagaggtacggtgtttttgttgccagtcttctgtttcttccctttttttggattccatgtggcccctctcctggcatcagttaaaatttcccctagcatttatctgtgcttctacaatccatggagggttactctggttacccttgccccccccagcagcggagttggagcctctcccccccccatcaaaggattctgcttccgaggcgatcgccacagtgcccctcgccgacctagtgacaccggcccccatggcagaacctccgccaaagaaatccccccaagttttagcgcctctccctgggtctcaatctgttcgtgaagtagtgcctgatgttatagcgccaccaccatctnctccccaaaccactcctctaccgaaagcctcccctaaagcagtaaaggcaccccaggg

SEQ ID NO: 309091 - DNA, 196 bp, Zea mays
atcctcggagaaaaattttcggtggtggatgtggccgtcggttttattttggcctatgtccccatcatgctcaaacttaattttgacgactatcctgcggtggcggcctacgtccagggcctagtgcaacgaccggctttccaagcttccatcggtgcccgctgaccagtgaccagatccccgggtaccgagctcg

SEQ ID NO: 309092 - DNA, 227 bp, Zea mays
agcctttaactaaagcggagaaagatttacggcgggctattcatggggcaatcaaagaagtggcggaggatttgaacgacgattaccagttcaacaccgctatttccgaaatgatgaaactcagtaatgccctaattgcggcgacggatttgatttcttttcccgtttaccaagaaggcattgaaaccctgctggtactccttgctccctttgcgccccacttgacg

SEQ ID NO: 309093 - DNA, 261 bp, Zea mays
gcctggcggttagattacctaaagcagaagctcaaaccctccatcaacttttggatggggaaacgggtaaacgactggggaacatttaccgggatgtggcccgccggtgtattttggccttctatatcatggcggcaaccctggccgcagtgcctctcccctttgcaacgacagccagtgttgacggcgctccaagtttccttgctgggactgctgggcaaactgtacggccgagtgttaaccccttcccaggcaggggga

SEQ ID NO: 309094 - DNA, 294 bp, Zea mays
ccacttcaattttgaatgccgtagtggaggtaaaccaggtacaacggttgtttgtggtggaaaaactacagcaggagttaaaaatccttaaaggtaaggtgattggcctgttgggattgacttttaagccggatacggatgatatgcgggatgctccagccctgaacataattcaacaactaaatcgtttgggagccaaggtgaaagcctatgatccgattgtttcccagtctggggtaagccatggtttatcgggggtaaaaattgagtcgaccccggctatgttggcggacc

SEQ ID NO: 309095 - DNA, 374 bp, Zea mays
tcgcattagtcccgcagaaagcgcagaacgggatgccattgaaattctccgcactcagaaaattcccctcattgacgacacagaagatggcagtaaaggctcaggcttaatgcaccataaatttatggtcctggataataaaacggtcattgtaacttctgctaactttacccctagcgaccagcatggcgactatgatgacaattttactcgaggcaacgccaataacctattggtggtccaatcccccgctgtcgcccatcttttcacagaggaatttaatctactttggggggacgggcctggagcagaaaaagacagtctctttggtattaataagcccagcagaccagctaaagtgctaaaagtaggag

SEQ ID NO: 309096 - DNA, 370 bp, Zea mays
taatgacgaacagcccagcctcagtggtgacggtcgctggttggccctagtttttaaccgcaacggcaccagggaaattctggtctatgacctgcgcaacaatcaattggtcaacctaccgggattgaaccaagccaacaccattgccgaaagtcccagtctgagccgcaccggccgttatttggtttatctgtccagcattcaagggcggcctgacatcgccttatacgatcgcctgaccaaaaaaactgacctgttaaccctcaactatcgccagtgggtacgcaatcccaggattagccccgatggtcgctatattgtttttgaaaccgctaaacggggacaatgggacattgaaatccttgatcga

SEQ ID NO: 309097 - DNA, 280 bp, Zea mays
cctcggcgtcactaaaaccaaagttttcggtaaattgaaactagcccgacggttgcgttgggaaccgggcaacacaaacaacacattggggcctaaatcttccaattgggaagtggccaactcctgggctccctggccaatgcccaacatggccaccacggacgcattgccaatgacaatgcccaacatagtcaaactgctacgaagcttattagccagcaacatgctagtggccattttgagactttcccgaaattcaatcaccgttacctcggttcta

SEQ ID NO: 309098 - DNA, 390 bp, Zea mays
gtgcataaaagactaaatatttatagttcaaataaattgaccaacagaattttattttatgtcaatactaagcagcaactcaaaaaacaatgaaataaaaatgaagataaaatgaataaaatatgaattaatgtgggctaaacagttgatgaaaaaaattgagtttatttaaagagaaataacctagatcatgataaattgggcaagtgtttactgcgttgctctggtcctggctgatctatgctgaccggttttactgccggattattgttgataactgtttcggaattaggggataaaacttttcttattggcatgattttagctatgcgctatccccgccgttgggtgttagtcggagtaatgggaggattggcggcaatgactatt

SEQ ID NO: 309099 - DNA, 388 bp, Zea mays
tgctgtggttggtagctacggcgttgaaggccccgacggaggatgtctttgggggttcgggacaattgttaccccgccaacccaacctggggaatgtcagccaggtttggcaagactatgcctttggccgttacctattcaacaccgaggcggtgtccagcatcactgcggcccttaacttgtttttttgcgccctggccgcctatcccctggcccgtttaaactgttgtcggtcgggacatgaccctagcggcgatcgcggccacgttgatgaatgcttcccagttaatcatgattcccctctacattctggcagtgaatttagggctcaggaatagctacgtaggcataatgttccccaggcttgcttctgcctttggtatttttc

SEQ ID NO: 309100 - DNA, 411 bp, Zea mays
tacattgtcttagcggccccgatactcttaccggctagacgtaatatttccgatggcaatgtggcggcggagtatcaaattaaagactatgtcagcgaaattattattcctccccgttctagcctgattggtcaaaccctgcggcagagcgaaattcagcgtaaatttgacattgatgtgttggaaattatccataacgatacccattttccccaaccgttggcggatcgggtgttgaccatgggggatattttgctggtgcgggcggcgcgggaagatttactcagaattaaggacgaacgaggtattgaaatcctggccgatgtgcaatttgttagcgccgaaaccaataatgcagggcctctggaatcttccgaagaaaaggtggcggaggtgttaattctctctaac

SEQ ID NO: 309101 - DNA, 434 bp, Zea mays
  unsure (1)..(434): unsure at all n locations
gacggtgatcgcccccataatgaaacgggaatagcgatgaatccaaggcaccgaacgacgacgaaccataaattaaaagagcaattgatttacaaccaggttagcaaaaacccgccatgggataagctgaccgccctagtccccggtggggcatggttacaaacaccaacggccatggctttccctgcgacttttaaccattctaggggcaacctcccagttccaattcaacggtgccaaattctatcaagggcaaaatttgtgggcaagcaaccatctcgaagaaagcaattgaggatttccaaacggttactgttagntggtgttaaccctagcgtttagtatggctagtgtgggcatatggagagattttcagggtaatttttggctcaaaacttatttgctgctgggggcgttattttggggcaatttgc

SEQ ID NO: 309102 - DNA, 401 bp, Zea mays
atttttggggaatttgaagcggctctagcgatgccctacccggcggcccaaccggcattggattggcacacggtcaacggctggtcattgtctgccattttggcagggttaacggcttggcggggagtgttgagggtgcgaaatccgctgaaaaccagcctgcctttcctcatgctagccactgtatttatggtgttagtatgcatccaaatcttccttggctccctagtggattgggtttatggtctgcacaccctacccgtagtccaagcaaccaaagacggcattattccctagtcttaacaagtttttaaaatagaagttttaccccccatctcattttcactgaggaaattgaccgcaccatgaacccttccctgattgaccaactcaaagaaatt

SEQ ID NO: 309103 - DNA, 378 bp, Zea mays
attctaaactgcgggaggtgtataaccaaattcgcagggaatacgaagttctaacctcagcggaacataaagaagtggtagagttggggggactgcacgtgattggcacggaacgccatgaatcccgtcgggtagataaccaattgcgggggcgggctggtcgccaaggggacccgggctccacacgctttttcctcagcttggaggataacttactccgcatcttcggcggcgatcgggtggcgggactaatgaatatgttccgggtggaagaagatatgcctattggaatccaaaaggctaaccggtttcctagaaggggcccagaagaaggtggaaacctattactacgacatccgtaagcaggtgtttgagtat

SEQ ID NO: 309104 - DNA, 471 bp, Zea mays
aactcataggtttcgttaagaatgggttctaaaagtttatgctgataggaaatttctttccggccgtgtttacggttaatgaaaataggaattagtcctgcatccaacggtccagggcggtataaagccaaaatggatgaactatcttcaatgccagatggttttaaatcccgcacaatctgtttcatgccctgggattccaattgaaaaattccctctaaatcccctgcttctagtagtttgtgggtctttttaacgtcgtcgggtaacttttttgaaccagtgcgggcacgaatctgtagggcttttcgctcctgtaaaggtaacgtcgttcaaatgtagttcaataccttttgtttttgcgactaactccaccgctctctgtagggtagtcagatttttcaagcctaaaaaatccattttcaacagacccatggcttccacatcttccatgtaatattgggtaattac

SEQ ID NO: 309105 - DNA, 398 bp, Zea mays
ctggtcgtgggctaaaagaagctaaagacacagtaaaaaagctgctggaaactttctgattctcatcaaatacccatcactctaggcttatctacttaacctagcagaaccgttaaaggaaattgttttgattatgcttttatcaacgaggaaacaatggctactgactctaatttctttactggcgatcgccgttaatggctgtgatcgaacatctcctcgggaagtagtggtctacgtctccgttgatcgcatttatgcggaaccaattttagaaaagttttctcaggcaactggcatcaaggtattgccggtttatgacgtggaagcaactaaaaccacagggctggccaatcgtctgttactggaaaaaaatcgtccccaggcggatgtctttt

SEQ ID NO: 309106 - DNA, 458 bp, Zea mays
gtttggctccccaccgtcccaccttagatatcatcaaccggagcggtgagcacttattagagctaattaacgacattttggaaatgtccaaaattgaggcagggcgcaccaccctcaatgaaaaaatcattgattgccatcgtttgttggataatctccaggctcttttccaactaagggctcaggaaaaacaactcctccttaaagtggagcgatcgccggaggtgcccgaatggattaagactgacgggggcaaattgcggcaggtgttgattaatttgttggccaatgccattaagtttactgcccagggcggtgtcaccctcaaggttaaatgcctgaccgctccccagactgatgaaggtcaaggagcatccatctggcttcattttttagtgtcggatacggggccgggcattgctgcccatgaaatggatgaactgtttgtaccctttgcc

SEQ ID NO: 309107 - DNA, 366 bp, Zea mays
accccagtcatcacccccaggggcacactaaaaagagcgcccagttcgaccatggtcagagtacccacaatggcattggcaaaaccgttgggttccccttccacccccactggagctggtagatggataaacacttcccaggaaagagtgggcaaacctcgatgaataatggcagctaagatagccaacaaaggcagcagagccacaagggtgagggtaaaggacaacccccccatcacccaggcaaaaccattacggaaaaaggataggggcgcaagtaaactactaggggcagaacttttcatcgctttaattgctctccccttgacgacgaatggttgccaccatcaacaccgccagactatt

SEQ ID NO: 309108 - DNA, 328 bp, Zea mays
tcgcccaccaatagggcagtagcagaggaaccctgttgcaccacgggatatccgtcaatagcctgggtactagccttaaatttattcgccgcagtgggattatttttgacgtcattgatggacatcaccgacacatcttgaccattttgcttgagcttaatttccgcaaagccttgtttttcctgggcaaaaacccgctcatattccccttcagcttgggggaaaaagacgttaaattctcctcccttggtggattcctttgtgaccgcatcggcgccccgttgggtactctcctgttgggcctggtcaaattgggaagggggttgac

SEQ ID NO: 309109 - DNA, 437 bp, Zea mays
gccgctgaccatggtagaaattgtttatccgtcccagtcccaacgggtggactacgaaggggaattggcagtcattattggcaaacaagtaaaagatattactgaagaagaagcggccagcgccatttggggctacaccattgccaacgatattacggctagggatttgcagcggcaggattcccaatggacgcgggccaagggctttgacggtttttgtcccctggggccctgggtagtacgtcacatcgacccagaggcccatttggaaaccaccgttaatgatgaggaaactccccggcaagccacggccatcagcgatatggtttttactcccccggtattagtgagctacatttcccgagtgatgaccctctaccctggcgatgtaattttgactggtactccggaaggcattagtgccctccaagtgggag

SEQ ID NO: 309110 - DNA, 296 bp, Zea mays
ggaaaaataaaataatcgacacaccaaagccgggctctgacccagaaaaagttctctggcgatcgccttagcgttgtgatcggtcaaaaatgaacgaatctaaattttaacaaaatttacaaaaattaaatttttctcccataactcagccaatcacattagccaggcaaaaagctcaccaacggtgacttggaaatcttcagcaaaggctggaactggtataacttcaggtgcttcatcaacgatctggacctgcttatcgggccggtaaaccagtagggtttgctcctttggat

SEQ ID NO: 309111 - DNA, 275 bp, Zea mays
caaattctgtgccctagcccggaatgtaaaatttattatgaatggggctaaccatgccatggaaggatttttcacctatccctttgcaatttttgctaatgcgctggcaaacagcagaactggaagaagaaccgccccataagggagatacagtcattggcaatgatgtgtggattgggtacgaagcggtaattatgcccggaataaaggtgggagacggagtcattattgccgccaaaggcgttgtcactaaccatgtcgcaccctacaccatt

SEQ ID NO: 309112 - DNA, 385 bp, Zea mays
  unsure (1)..(385): unsure at all n locations
ggtgtgcggtattttcgtcgatggtttgctcaataattgggcgaaggaacagtaatcttataatgagcattctaaccgttacacccttagggttatgacctattccccggccatcaagggaggaatttcagtactattgaccattctcggtattctaggcaccatttggctatttggcattaatcctttggtcttagctagttttggcggagttgcctttgtgctagcttttctggggcgcaacgtggtagaagatatgctcaatggcacgctaattctttggacagaccgctatgcncattggtgacgtggtgcaaattggggatgtgttttggtcttggtgggaaaatatgnaatatttacatntactcagttgcggggcccc

SEQ ID NO: 309113 - DNA, 393 bp, Zea mays
tgccctgagccacagcacccaacagcatcggctggttcaaaggcaagcttcatcccttcattgcccatgtcagagatagcatggttagcaacaaggacaacaagctcaattgcaggccccgtcgggtaattatccccaggggagttttaataatttgcatcataatgattgtgggttgttctccagcatagggggcaacagcaaaattttcccacttcaacgcccccatcccctactagaatgttgggtgaacttttgagtcttgcttggcttccatgatatccagtaacgattttcgcacaggtaccagtattgtgatggaccgcgcactctggaaggtggtggaattacttcacgttaaaccaggcaagggttccgcctttgtgcggacca

SEQ ID NO: 309114 - DNA, 365 bp, Zea mays
gcgggcaacttttggattggtaccaaggacggcgttaactatattcctgctgaacaactgctgaaattaggagacaagtaaccatggactttgtcgaagccgagcaaatgtattatgattggtgtcagcagttgcatgagcgtcatatttcagcaacagaatttactgcttggttagaccgtcttcgggtgcaggatgcccaggggaactggtggcacattgaacatcccggtggtatgtggctctgttggaatggccaagcttgggaacgcaagaatccacctaaagaagcaaccgattcaccgccaggaacagcattaacccaacaaatgaaagaaccccaaaacttgggacaactcctcggc

SEQ ID NO: 309115 - DNA, 368 bp, Zea mays
tggcaaaggaaacggagtaaggtgcccaaggcacagattggtctggactctggcttaactaaggagcaaacggaagaatttgtcgctatccgcaatcgcaccgtccatagccagccctatttaccctatgaccagcccctggctggagtggaggaaatattacaggacatcaaagaccgaggcattgatctggcgctaatgaccatgcggcgggaaagggaactgcaagaagccctagaccgcaatcactttaaccatttttttcccattgatcgccgttattgattggctaatgattatgtcaaaaccggcgacactaacgataaaccccggttgatggaacgggccctagcggaattacctccggc

SEQ ID NO: 309116 - DNA, 371 bp, Zea mays
gccgaaggagcagactacattggcgtgggccctgtctatgccactcctactaaagctgggaaaaaacccgctggtttggagtatgtgcagtatgcggtcaccaactctccggtcccttggtttgccattggcggcattgacggggagaacttaggggaagtaatggaggccggggcaacccaggtggcgatcgtccgggccatcatggagaccaccaatcccacccaggccacagcgcaactgttaacccaactaagcaggataaatccttaggcgacggttgggttcatcgccaaagctatccgactgcaaacggtaatgttccaccagttcatgttgcattttccgcacatggggcgatcggggtagca

SEQ ID NO: 309117 - DNA, 355 bp, Zea mays
tgggggatacaatgtctccaaagtgtggctaaagttattcaaaatgcattgaaacgttcttccgatgtgctcgctcgctatggaggtgaggaatttattgtgattttgccctacaccgatcaatcaggggcttacaccgtgggccaacgcatccaccactgcctagccgaggcacagatttcccatgccgattcccctacgagccgttacctcaccataagtttagggattgggaccaccgtgcccctattgcattatcatcccagtgatttaattaaaattgctgaccaggccctctatgcagccaaggcggccgggcgtaaccaaacgaagctgaaaactttatcttttcaat

SEQ ID NO: 309118 - DNA, 257 bp, Zea mays
attaaccccacttctggcgaaagatttttagttttaatgcatgttaaaggtgatatcaatgtgagtgggaacacccatttaaaccattcttgttccggaagttgcgccgactataaaccaacggatttgaatattttcggttatggacaatccgcccattcttgcacgccggcacaaatattggcttctggaggaaataatattgaagctttcattttggctccggactatgtatatggggttaatggtggtggtaa

SEQ ID NO: 309119 - DNA, 254 bp, Zea mays
caacagggagaaacgctaattgtcaccctgccgccgccgcagattcttgaccaaaaaactgatgtggaacgctcccgcatttaccactatgaccggggattttgaaacctaggacccgacactgttccggagctacaaactttggcccaacggcagaccctagccaaaatcaccgccgccgcctgtgaccaaggcattttgaaccaggctaaccagaaggccgaagtggccctagcgagtttattgaaaaacac

SEQ ID NO: 309120 - DNA, 386 bp, Zea mays
tgaatgccctaaccattcctgtacaggtaggcggaggcttaagggatagaaaccgggtcaaacaattgctggatttgggggtgggccgagttattctaggtacgatcgccgtggaaaatcctgacttagtgggggaattatgtgccgaatttcctgggcaaattgtggtgggtattgatgcccgcaatggcaaagtggccactagggggtggttagaaacttctacggtggaagcgggggaattggcccaacgcatggaaaagctaggagcggcggccattatctacactgatattcaccgggatggcacaatgcaggggcccaacttagatgctctgcgacaattagctagtcagttaaccatttcagtgattgcatcgggggga

SEQ ID NO: 309121 - DNA, 353 bp, Zea mays
aaacttgtattggtaattttttcaagaggctacttaatttagttgttgaagattatacaaagagagatgatattgttccaacaataatacgtgtagaactcataaagaaaaaatatcctctccacataaaagaccaactattaaatatagaaattcaagtgaataatataggcaaaggaaaagcttttgatattgaagttactcttgatgtagatgatagtttattgatgctttatgaccctaaaatatatattggaaatctcgagccattagaatctacacatcggatatttgaagccaaaattcttgtgcagaaaaacaaagaaaaactagaagaaattatcttgggtaga

SEQ ID NO: 309122 - DNA, 363 bp, Zea mays
ggagagcaaacccatccccaagcaagtaaagaccaggccattgtcgatcgcctcttgcagtcccccgtcgatactccccacctgctctccttggcaaggctgagaatccgttacaaaaattttcccggggccaggagtttacagcgagatttggacaccgtgcttcaacaatggcatctgactgaagaagaactctttgcccaaactagagccctctatgccagcggtgcggcccatgccaaacagagtaccgaggagcaacaggactggagctagctctcgttaatccattgccccaactaggctgagatgattttccgggtggaaccctcgagtgtgccgatgtcgacctccaccataggc

SEQ ID NO: 309123 - DNA, 407 bp, Zea mays
aattccacaagttggggaaactatcccgaaaaaatccagaaattctgatggtcacatccacccggggacgttttagtacagtggtgggcaaaatttcaaaatcaacaatgcgacgggaagggctatcccacactggttgtactcccaatagggccagaacctgggcaatgtcatccccgccagtacgcatggtggaagtgccccaaatagaaatagctaaagtttggggatattctccgtggtcttgggtgtacctttcaatcagggtttcagcggctcgacggccaatgtcccaagccgtttctgtgggaatggcccggatatccaccgcatagaaattccgtcccgttggcagtacatcagggcgaccacgactaggtgcccccgccggcccactggcaatatat

SEQ ID NO: 309124 - DNA, 438 bp, Zea mays
ggcattgtggacaccggctaggggcaaaggcaaactaactccatcaaggattaaattttccccatccactgtcccgtgcacatctcccccttctaggccataggtaatggtttttccctgccaaaaccgttgggctgtctccattaacaaagcattatcccgattgagaatggcggtgctctcgggcggttggtgggctagtaattcacacttggcttcggcgatcgccaactccgagcctaaaagaccaatgtgggcagtgccaacgttagtaattaaaccgatggtgggcttggcaatatccgccaaaagagcaatttgcccccgaccccgcatggccatttccacaatggcaaaatcatggtctggggatagttccaacaaagttttcggcaccccaatttcattggtgtaattagctctggttttatgcacatt

SEQ ID NO: 309125 - DNA, 448 bp, Zea mays
tcgtggatggtttggcgataggcgttgctggccgcagtggcgggggtagaaataacaccgatgcgccgaccttgacgcactgccgcccgggccccggggagaatcactcccaaaattggcatattgaattcctgttgcacggtttccagggccagagcagaactggtgttgcaggccatgattaccattttcacttcctctgctgccatccaagtaaggatttcccggacatattggaggattacttgcggggatcttttgccgtaaggtagccgtgccgtatcgccaaaataaagaattgactctttaggtaattgtcgatacagctcacgtagaacggttaacccacccacaccactatcaaaaacgccaattcggctacgctggggctcacgcattttgtatggaactatacctgttaattaaggaaagatgcttgtcattgaaa

SEQ ID NO: 309126 - DNA, 350 bp, Zea mays
gggctgccatcccctcggggaccacggtaagggcaatcaatgggtcattcgtgcctatttacccacggctgaagcggtaacggtgttgcttcccaccgatcgccgggaagtgattatgaccacggtccaccatcccaacttttttgaatgcgtgttggagttggaagaaccgaagaattatcaattaagaattaccgaaaatggccacgaaagggtaatttatgacccctatggttttaaaactcccaaactgacggattttgacctccatgtgtttggggaaggcaaccaccaccgtatttacgaaaaactcggtgctcacctgatgacggtggatggagttaaggggt

SEQ ID NO: 309127 - DNA, 472 bp, Zea mays
tgttgtccaccaactcagaaacgaaactttttggccctggggaaagtctccgattccgtcctccaagccctttatcaacgctcggccctggtgctaattcccctcgaagcgggcactggtatgtctgtcaaaaccctggaggcaatggcctgtggtaaggtaatcctcggcacggcgatcgcctttcggggctatccggtggagtcgggggtagattgtttaatcaacaataatttagccacttatgttggggtaattgaagatattatccagcacccccaccaatatgagcagttgggtaattctgcccgcaactttgcccaaaactacgactatcgtcagctttatcaaacctacctagatttgctttcatgaaggtattaatcacagattttgacctatttgccaaagtaggtggcgggcaaacttttacccgcagtttaattcggaaaaaccccgatattgactttta

SEQ ID NO: 309128 - DNA, 381 bp, Zea mays
cgggattttggaggatttaaacaccgccgggatgatgaaaaatcgtcgtctcttccgtgccatttctgaccttggttggcgtagttttcggacgatactagaagctaaggcagtcatgtacggcagggaatttcggacgatttcccgttgggaacccacttctcaacgttgctcctgttgtggtgaaattggcggcaaaaaagaactctctgttagagaatggacttgccttttttgtggggcaaaccacgacagagatataaatgccgcaacaaacatactggtcgccggagggcattcggagactaaaaacggacgtggaggaaagcgtcagactacttcggtagcggcatccggtgaagcgtcaacccaccgaaaagc

SEQ ID NO: 309129 - DNA, 330 bp, Zea mays
cctgttgcccgtgtagtaacgtttttgagcagcactgccgggggttaacccagggggatagtccaccgccacagtgacgggaaatttagaccagagtaaataacctaggggagaaggttgaacttgggagaaataatcagtgccgtcatctccgagtaaactgcggtttttcagactgatgcctaaatctaccaactcgggggggaggggatggatttgcaactccggtaaggcttgcttgctcccattgttggcgatcgccggcagactaaccagtaataaagtcaacaagaatagggctaagcaccaaccccagagcttgattttttt

SEQ ID NO: 309130 - DNA, 435 bp, Zea mays
tcctgttcatgtattaagttatttgaaaataacaaaagaattaattgcagcaaaatagctcttgctaccatttttacgttagtaacaaaaaaaatgttatcctcccattgattgaagttatagccaagaaaaaataaaatcttcaaagctgcgattaaataactgaaagttcaccagtaaaatgatgatttctcgctaagtcttattactaaaaatctactaatatcggcgagatttttccaattcttctaactcgaaaatagaaaattgcataggcatctatagatttcatgagtttctaatttaattttttatttattctcagttgaaagaaatttgtcatcgcaaaagcaatacctaaaaactaaactaggcggccgatgtcttcgttagaacctaggaggactagaatcatcccccggtgtaatcgttcct

SEQ ID NO: 309131 - DNA, 117 bp, Zea mays
aacgtttttgagcagcactgccgggggttaacccagtgtgattgtacaccgccacagagactgcaaatttagaccatagtaaataacctacgggagaaggttgaacttgggagaaat

SEQ ID NO: 309132 - DNA, 375 bp, Zea mays
ctacgtgcaacatttccaatgctttttgcagaaatctagctacgaccaagggcgacggggccccatccccggcaaaaaataggtcagtgccatgaccggctcccatttattagtaaatctttcttttctgctggcccaaccgacggggttgagtgtctatgccagcgatgtttttccccatctgaaacccctcaagccaacattactaacttcccagttggtggcggaggttccctgccaaactgtgccgaataatctcaccccagcccagggcagtcggggccattttaatcgcttagtttggacccagtttcagctaccagaactttaccgacaattaaaagggtctttgcttttttcccccatcccggaagc

SEQ ID NO: 309133 - DNA, 465 bp, Zea mays
tgctgaaatgagacatggtggatttcctccagagaaaaaagtcaacaacaacaattgtgaagtgggaaatgccgccatcaaaacggcttatcttaaactactaacccaacggctagtctttgctcctgcgggaacaggagaaagcttgttagaactccagtcgctgatattcagccacagaagcggaggcaggccgagccctttgtcgggcccagtcacgaagcgcggtgacctgctctaccatagtgcgcgacaggggcaacgtcgatttgatcgctgcgataatgtcgagctggttaaattctctttcttgggcaaaggccttcgtacatagccgctacgatcgcctgctcaatctctgctccggaaaaaccgtcggaggtgcgggccaattcccccaggtcaaaacggaagtgtctttgcgccgtttatggagtgaatgcggaaaatggcttcccgctcttc

SEQ ID NO: 309134 - DNA, 465 bp, Zea mays
cccgcgatcgccctttatatcggtagatttgttgccatagttccccttgtcgaaaccaggcccagtaatcattgggacggatttccagggattttttatagcattgcaaagcttcagcgtaatggccccaacggcgaaaacagtccgcctggcggtaccaagaccaaaaatcgtcctggcgaatggttaacgtctgccgaaaactggcgatcgccgcttcgtactggccagagagtcggtaagattcccccagacgataggtggcccaataatctttaggtaaataatctaaagcccgttgaaaacaagggatagcctgggcaaaatcatcaatttcattgaggtacacacaaccctggtcgtaccaagcccagtagttttccggttggatttggcagggcgttgtcataactttctgccgcatctttgtaacgccccaaatgctccagggtaatgccccttttg

SEQ ID NO: 309135 - DNA, 490 bp, Zea mays
  unsure (1)..(490): unsure at all n locations
gatcgcccctagctgggataggcataatggacagtaatcatccgtccctggtacatatccggcggcggccgcaactggttggcccccagcttccaaaatcagaaaatccggcacattgccccaattgcaagcatcagcctttagttccgcctcgataaactgcaatgcggtggtgccagtaccatccaacaaatcgtcccaaaagcagtgatttaaaggtggtagggaagcctcgtactcaatcctagccagaaatggaatgtcagcagtggttgcttgacgggtatttagcgtggttgacatcacgaccccttggggaaagttttgcgtaaaagatacaatctgtatgtatctcaaaagtagggngaaggttttttttcttgtcaagatacatactgtctgaatgttaaatccatccaccatgccggctaagttaaccaaagcagaacaaactcgacgcacttcgcgngccatccttgaccgggcccgt

SEQ ID NO: 309136 - DNA, 237 bp, Zea mays
aacgtcaaacaccaaacttattcatgatttgtcatagttctgggttgtacccacacaccacaacaaccgttccatttttaaaccaacactgacccgtcttatgacacgaacagcagattctttgacaacccccatttggggggggggccccagtcgacgcaggcccattggcaggttaaacgacccatgacttactgcccaccacggagacggtgcacaagggggggggggcccccc

SEQ ID NO: 309137 - DNA, 350 bp, Zea mays
ccagacaacaaaatacaccgaggcaaacataacatcacaaatctgtatcgtcgagaaaaaaattgcttatcatgagattcaccagcccacaggaggaactctgtattttcattatcctgccaacaacctaactaatttagggcaggctgcaatggcagcttggcaaggacaaaacaccaagcacagacctggattcatccttgttactgcgctcagctgaacaaattgggaatgcaggcccccgagtcagggttctgctgctccttccagatacggcctgtgacgcgcagcttcaactctttcctatctccacctgagaagaaaagagccatgttgcgctgaattattag

SEQ ID NO: 309138 - DNA, 526 bp, Zea mays
ttttataacttagtttactgattacatttttgttatgcagttgtttgaagcccctcttgacgaaaaagaaatatcgctacgatatagctctgctcttggataaggttatcgcagcaaggcgtctatagtgaggtctatcgtgtgctgaaacctgggcagtattgcactggatgaatggtgcctgactgaccgatttgatcccaacaacgctaagcatttgaccgccaaggctgagattgagcttggcgatggcctgcctgacatccgtaccactcgccagtgtgtccaagctatgaaagatgcgggattcgaggtcgtttttgcaaaggatcttgctcaagcgttttccttgcccatggtaccagacgatggatcctaactacttttcatgggctaacttccaatgcacacgcctaggacggatcatcatccgtgcaattgtaagactatgagcctgtttggtttgatgcccgtagtttggttaactttttcttctttactgttgtgggtaaatattgtgaaaagc

SEQ ID NO: 309139 - DNA, 413 bp, Zea mays
ctcttgcgtccgcccacgcgtacggctattctgatgaattcaactgataaatccaacagaatgttgcgtgccaaatccatggaatgcatcagtttagttggtatggcagttgggaaacataagtttaaggatgatgctaagcaggtgatggaggtccttatgacactgcaaggatctcagatggaggctgatgaccctataacaagctacatgctgcaagcatgggcaagactgtgtaaatgccttggtcaggatttcttaccatacatgagtgttgttatgccccctatgctccagtctgctcagcttaaaccagatgtgagtgtgacttttgctggaccagaagatgaaaatggtgaatatgatgaccagggtgttgagaactttacactaggtgattagaggatcggcat

SEQ ID NO: 309140 - DNA, 202 bp, Zea mays
gtcacgcatccgcacgggaaggcggcaaaacggatccgttacttcgggaaaaggattgactctgagggatgggctcgggggttccggtccctaacccagtggctgcatctcgaatgctcgaactgtgcgcgcggcgagagcggaccgactctagcctgccgggggacggaccggtaactgcctcctagctggcctacaccgg

SEQ ID NO: 309141 - DNA, 360 bp, Zea mays
ggtactcgcgcgcggacgcgtgggccgaaggggagggattttttaagagcaggcggcaccttgatgcggatggcaacctagagtgtgaccccatggctagaggattgtatcaaccattctaagaggctgaatgcgcccaagcattagatgctggacaagcttggcggaactattgctctcaagccaccttctggaccttacaagactaaggagtgcctgacactgatcctcatcaataggaacaggctaaagtatgcacttacataccgcgaggtcattctcatcctgatgcaacgccttgtactagaagatgggcaggtaaggacagacaagacttaccctgctgggctcatggatgtc

SEQ ID NO: 309142 - DNA, 523 bp, Zea mays
  unsure (1)..(523): unsure at all n locations
tcttcgcgtccgcccacgcgtccggccaacctgcatctacttcaattgatgctcaagggatgtttgatgaaatgcagcaaagtgatacctctgttgccatcgcacatactgccttcaacactttcttcaacacggaggagctagataggtggcttgaaagctgcgatgaacagggtgaatcaattggagtcaataagatccatgtgaagcctcagttctttgatgtgggcaaggactataactgggcgaggggcattcggagcaccgagatccagctcgctgatggcaagaactgtgagctacataggtgttgggcagatatcttggatgctataagcaaggctcaacattcgactgacatcactggctggttgactatactggtgagggatgatagcaattctgtcgacctgcttacgaaggaaggcttgctgactacccatgatgtggagattgcaaaaggagagcangaaatcatgaacgaagtatttccagcagagagcccgtcatctgggtttggtgt

SEQ ID NO: 309143 - DNA, 508 bp, Zea mays
cggacgtgtgggcggacgcgtgggcgccggcccgcagatcgaggtctgatccgcccgtgtccaggcgaggggcgacgaggctccgccaccggcgctagcgaggaagagcgcgccggcgcagccgtggtcgcacgtcgagaccatgcacctcatcgacgcgtacgaggagcgctggacggcgctgcgccgtggccagctcaaggcgcaccagtgggaggaggtggcgaccgaggtcgccgtccgttgcgccgccaacccgggggtcatcgctcagcgcaagacgggcacccagtgccgtcacaagctcgagaagctacgtaagcgctaccgcaccgagggcgcccgccccgtcacctcgctctggccctacttccgccgcatggatcgcctcgaacggggggtcctagcagcctacccggacgcggctagctcgccgcctgccgccgacggcgacgaagaggaagacgaggaagacgtgcaagaagaggaagacggggaagagctcgtt

SEQ ID NO: 309144 - DNA, 339 bp, Zea mays
cccgggtgatcggccccgccaccgaccccacggaggaggcgaggcggaacgccatcgagggcacgaacggcaaggagctggacggccgcaacaacaccgacaacgaggcccagacccgcggcggccgaggaggcggccgccgcggctacagaggaggccgtggaggcagccgctaccgaggcagcgggccaccggatggccgaggcggctacggcggaggcggaggcagctacagaggcagaggtggcaacagaggcggaggaggcggatacggcaggggcaaaccgaggcggcggctacggcaacaccgacaggaactggaggaacacagcggggggg

SEQ ID NO: 309145 - DNA, 424 bp, Zea mays
  unsure (1)..(424): unsure at all n locations
cgccgttgtttgatgcgctcactcatctaacatgggcgggactctttgctcttggagcaccacctgtctagtgggagctactccagcctctagacaccaactccagcgcccccgtatggaacaacaactcacccttaactgctggacagcaagactcaattacctggcataaaatttcaatgaataaactgcaacttctattggttctgtggtggccctattcaaaaaggatgttactctggtcaactcggagggcaaaagagacctttggtcgctgttgctacaaagaatgcacatttttcttncaatcagccaaagctgccatctgaaaagataaagcttgaagctctcagcagtggcgaatattcacgctttaatagtatgtctgaacatagaggaggaccaaatacatgggtgaagctca

SEQ ID NO: 309146 - DNA, 447 bp, Zea mays
  unsure (1)..(447): unsure at all n locations
cccacgctaatggtggcggttgcctacggattcgggacatgggggtcctttttgagacgtgggccgggaattgcatcgagggccggctcattcgagcgcggcgaccatgaacatgtgctccaagtgccacaaggagatgataacgaagnaggatcaggccaagctggctgccttctctatcgacagcatcgtgaacggcagcgactccttaatggagccggttgttgctggcagcaacacggcagtagctgttgcccaagttgagttgcaaacaatgaacgtgcagcagtccgctgatgttgccggacccagcgagggggtggcggcgatctccaaaggggggaaggtagggccgaaccggtgcagcgcctgcaggaagagggttggccttacgggatttaactgccggtgtgggaacttgtactgcgcacttcaccgatactccga

SEQ ID NO: 309147 - DNA, 357 bp, Zea mays
ctgccgtaaaatgattctttgatgcccctacagccggtacagctctccttttataggtgaagatacccacttatccccgtctaatgcctcatatggcaaccattcctaacatttcccaccgcttgaaatgcggcttgcccccaagccgctgaccatgatcgtcgagttgtcggaggccatgcacaaatctaagcactcaaacgccataggtggaggccatggttgcttaattccactcacaagtctagctcttgcagcttgctcaggagtctcgggaaaaccaaaagcagcagcaccatcaatggatccgacgagttgaacattccatgtgtctccttgctcaaagttgtaaagaac

SEQ ID NO: 309148 - DNA, 458 bp, Zea mays
tcgcccacgcgtttcgtctacgcgtccgccctagccgcctcctgcgggtggcagtgcttaggaatgtgcgccatggcgagtgagacggagaccttcgcatttcaggctgagatcaaccagctgctctcactgatcatcaacaccttctactccaacaaggagatctttctccgcgagctgatctccaactcttccgatgcgctggacaagatcaggttcgagagtctcactgacaagagcaagcttgatgcgcactctgagcttttcatacaccttgtcccagacatggccacgaacacgctctccatcatcgacagcggcattcggatgaccaagtccgaccttgtcaacaaccttggtaccattgtcaggtccgggacgaaggattttatggaagcccttgctgccggcgctgatgtgtccatgattggccagttcggcgttcgtttctactttgc

SEQ ID NO: 309149 - DNA, 553 bp, Zea mays
gctttttgcaggaggccagcctcgcacacacaggccatggaagaagatcattgtaattgtcgagggaatctatagcatggagggggagctatgcaaactccctgaggttatttctgtctgcaagaaatacaaggcctacacatatctagtcgaagcacacagtattggagctgttgggaaaacagggagaggtgtttgtgagctgctcggagtggatccagctgatgttgacattatgatgggtacattcacaaaatcatttggatcatgtggaggttacattgcagcatcaaatgagattattcaccatctaaagcatacatgcccagcccatatttatgcaacatccatgtcacctccagcagtccagcaggtcatttcagctataaaggtcatccttggggaagatggaactaacagaggggccaagaagctcgctcaaattcgagagaacagcaatttcttccgctcggagcttcagaaaatgggttctgaggttcttggagattatgattcacctgtcatgcctatcatgctttacaatcctgctaaa

SEQ ID NO: 309150 - DNA, 325 bp, Zea mays
gtttttataagggagaccttgctgagggtggagctatctatggcaatgctgatctaccctgtgaacttggcagcggcagtgggaatgactccacagagttgtccacagctggcgggggtataatagtgatgggctcatgggattattctttgccaagtcttgccctctatggttcagtagaatcaaatggtggcagctatgctagtggctctgttggaggacctggtggtggttctgggggcacaattcttctatttgtgcacactttgtccttagctgaaagctctgtcctttcaagtgttggtggcttcggaagtactggtag

SEQ ID NO: 309151 - DNA, 538 bp, Zea mays
ttcctcgcgtccgcccacgcgtccgcccacgcgtccggcgccggcgaggccacacgcccaccatcagtcagccgccccgccacagccatgcgcctccccgccggcgcacgcctcgcgctcctgctcgcccgccgctccctctcctcctccccccgcatcccgcgggcgcacacaggtgagccactccatcccccactaggtcgcctggccgccccgctcgtcccctgatttttagcttgtcgcgctctccgctctgcagggatatggagcgaggcgccctcccggagctctcccttctctccgccgagcagcgcccgcaggtccttccacgggaccaggccggtggcggcaagggactactacgatgtgctcggcgtcagcaagagcgccagccaggcggagataaaaaaggcctattatgggcttgcaaagaagctccatccagacacaaataaaggtgatgcggatgcagaacgcaagtttcagaggttcaacgaggctatgagactttaaaggatgaacataaaagatcattata

SEQ ID NO: 309152 - DNA, 525 bp, Zea mays
ggtctcagcactttcacgctcagctccagcaatggctgcctccaccatggcgatctcctccacggcgatggccggcacccccatcaaggtgggctccttcggcgagggccgcatcaccatgcgcaagaccgtgggcaagcccaaggtggcggcgtccggcagcccctggtacggccccgaccgcgtcaagtacctcggccccttctccggcgagcccccgagctacctcaccggcgagttccccggcgactacggctgggacaccgccgggctgtccgccgaccccgagaccttcgccaagaaccgcgagctggagggtgatccactcccgctgggccatgctcggcgcgctcggctgcgtcttccccgagctgctctcccgaacggcgtcaagttcggcgaggccgtctggttcaaggccggctcccagatcttcagcgagggcgggctggactacctcggcaaccccagcctgatccacgcgcagagcatcctcgccatctgggcctgccaggtcgtgctcat

SEQ ID NO: 309153 - DNA, 440 bp, Zea mays
gtgtcctttcttatcccaagaaacttgcattccagtatctcgaagatctcaaaaatgaatttgagaaagtcaatggcagccaaattgaaactgctgcaaggccatatgcatttattaaatctgatgcattcatacagaagaccaagaaactgtatttggataccagaacacagaggaaccttgctaagctgaacgatgagctctatgaggtgcaccagatcatgactcgcaatgttcaagaagttctcggtgttggtgaaaaactagaccgtgagtttgtcgctgtcatcttatctggcttatgtttccctcattatatatgtattttttttctggcatgatagatagacctgttcggttacgttccgtagactggctatatggttcacaattcagtttgctttgagcaaattttgctacagagcaattttgtgctggac

SEQ ID NO: 309154 - DNA, 415 bp, Zea mays
cagcctcgtctcacttcattttctaacttgtgtttgcaagctggaacaggatcacatcgcaaataggttacgtatcagaaaagcattcacatgccctgcccattcaagttaactccaggattaacgtacatacctcatgcacaattacaagacttcttcagagcatcgtagacaccttcaagagtcgcatcttgtaccagcacaaccttttccctcgatttagaacccgagcctatagacacttctcttttcttcaccccaagtaccgagctgataaagtcgacaagcgcggcgttggcttcgccatccctcgccggcgcgtcgatctgcacgcccaccgcctcgtccccaatctctgtgatggtggcgaccttggagccgggcttggcgtgtatagatatggccacggtcgacg

SEQ ID NO: 309155 - DNA, 404 bp, Zea mays
ggtcacccttatttacccattcaaaatgtaaatggtctattatttgagcaagacgactaagtagacacacgcatatatgaccacagaaagttatacacatggcactaggcttggtcttacaaatccaacacatccaacaacaaaaggatgacaaggtcactggggatacaaagataacagacttcgggcagtaaagctcaacacaattcactcacttcacttcaggagggtctttacgatggatttcacgttcagttttttcaggtccttgtgagagctgccagcagccaacgaacatgactggagctccagatatgtaaaccatggaaagcgctgatccaaccttgtcgtcgatggtgtcaaacttggtgagaaggataccatcaatcaatctagcagtagga

SEQ ID NO: 309156 - DNA, 232 bp, Zea mays
aatgggtaatttaataatgtggggggcccaacccatcatgactgtgagcacagcttttataccagttttacaatctgcagaggttgcccatttttacccacaagtcatgttacccatttgccaaggggtcatgaatcccatacacctttactaaggaagcgagatagggtaacactacgaggcctttacaaagttccactagcttcaaaaaacccactacagtttttaggga

SEQ ID NO: 309157 - DNA, 370 bp, Zea mays
  unsure (1)..(370): unsure at all n locations
tctcttatcctctcctctcctctaaccagcgcatggagcgactgcgagtcagcctcaggaccagtcagcaacgtggaggatgacttcaagtgggctcctgaggtagccctgctcgcctacattaatgccatggttgggaccaccagcgccctcaacagcggagggaacntagaccagaacggcaacaaaggcagcctgacggacacctgcaactccgggctctacgcctacgtcaacatcggcgtccatcacaaccaatcaggaacgtacagaccccacgcttcaagctggactgacactccaagacgcggtaccgcagctacaccgagcactgcacgctcatgcagaactgccagctgttcccggagca

SEQ ID NO: 309158 - DNA, 327 bp, Zea mays
ccctcgctttcggtcgtcgccaaaaccctagtcctgcttttttgccatgcatagctgaggtggcctggccagcctcctgctccataatcggctggtggatgctgcgacgaacccaggcgctggataataaggccggttctgacaccacatcatcatcttccaaggatgcgaaaccatcatcggaccgtgctgcaccgtatatgatggaggctacttcaatgcagaactgatgcttcccccagaactattccaacagtccgccattagtaagatatactcctgagatgcggcatacctatgtttatactgatggacgtggatgcatat

SEQ ID NO: 309159 - DNA, 366 bp, Zea mays
cccggaattgaatggccgactcacgcgaccggtactacatcgcgttcggggtgccatttaacggctgaaagagggatttgcccgagcgatggacatggtctgtacggggaccagagtgtgtggcatgctaccgtgttacggacacaccgtgtgctgacgagggatgcatgtgctggatgcacgacatcccctggtgcatggagaggcactgtgagctactgcaggaggataatgaataagctaaacttggactggttggggactttccaagtactccaattccgaagctgtggtttatgtgggctgcggtgtacgaggtaacaagatggctgcggttctaatggactttacccagttgacgatgac

SEQ ID NO: 309160 - DNA, 417 bp, Zea mays
tttttcttaatcaacaggagcaaaggaaaggaaagggagaaaatttcatatcgcaattgttatcgcgtatacgagggagaacacaggtcgcgtctcgaaagttcttgccttgttgggacgggatggcctctgtggtggaggactacctcatgctgccgggcgcgccgctggtccccaatggttcacccgacgctcgccaaacgagggatcaggctaatgcaattttgtccaagctacgctatactaatggacaccaaggacgaacatcacgagcgcttaatgtttaaggtcacacactagctaggtgttcttggattcggctgattttgctatctcttgggagccagaccacacgatgtgccatatgtccacatgcttgtcctatgtcatattcgttccggtccgctggatctacta

SEQ ID NO: 309161 - DNA, 537 bp, Zea mays
tcattcgcccggtctcgtttgagaaaccaagggttccggagcaacggggggtttaataaatgagtaccggcttcacgcccccacccagacagagttcaagctaccaaccagacactggggaatgctcccatttcgccacaacactgcttctcagctccagtaattaagcccactgctacaaatgccgagacctcgagggcgataggcacggaattatctccaccacctggtgtgatggttccagttcataatgcagcaccatctgacttatcagttaaggatgagagggaattgaagcgcgaaaagaggaagcagtcaaatagggagtccgctagacgatcaaggctgagaaaacaggctgcgacagaggagacggctccacaagtggagtctctagcagcaaagaacacgcctcttagatctgcaatcggccggctaacacagagctcagagaagctcagactagagaactcagctctaatggtgaagctgaaggacaccgcacaaccgtctcccagcaagcagccgcatccccat

SEQ ID NO: 309162 - DNA, 523 bp, Zea mays
tatttcagtcacattagaggatgcacagaagatacttggactcaatgttggtggcagagcagtgacaggccaatgtgactctgacggatggagggctagagttgaggcctttcttggtagggagcttcctgctgagggcgttgaacggactgctggagtaggcatcacatggctccgtcagtcttttggtgtgtgccctgctgatgctgatgaggctacagtccagttctattgtcgagcttggatcttgcacatgtttggttgtgtcctcttcccagacgccacaggagactgcgcgtcctggatgtacatcccatgtctaaccgactgggatacagctggacagtacagttggggctccgctgtgctttcttttttgtaccggcagctttgtgaagcttgccgtcgtacgtcctcctcttcgtctataggcggttgcgtctacctgctgcagatatggatgtggtttcgcataccagttggtcgaccacgtgttttccagcctagaccctggccatggatg

SEQ ID NO: 309163 - DNA, 328 bp, Zea mays
tcgaacactgtttatctctccccctcttaccaagtcctgctcgggttagggtatcctaaaggttttgtggatgggcgatggccgcggctgatgtggagtaccgatgcttcgtcggcgggcttgcctgggccaccagcaacgagtcgctggagaatgccttcgcctcctacggcgagatcctcgactccaaggtcatcacccaccgggagacggggaggactctcggcttcagctaagtaaccttctccttcgagaactccatgcttgacgctatcgagaacatgaacgagcacggagctcgacggtcgtaacatcaccgttaaccagg

SEQ ID NO: 309164 - DNA, 494 bp, Zea mays
tgatatgctgcgaggactgatgcaaggactgagctagctggttggacggctgtgagggcatctggccactctggcctaccgttgagcttatcgacaagcttcaggacatgtaagacttcttcatagccctagcgatcttctttattccgttggagctcatatatgaggtgatgaattcggccttgttgccgtacagatgggtcttgatccaggtcggggcgcagataggtgtgtgtgtagcaacccatgtgataaacctgttgacgttcaccacacatacaacgaccgatgcgatggccatgaccatagcaatggccactacagcagttgtgacctgagcagctgcttggatgcttgctcatatgatccccgacttattgagcgtgataactagagagttgactctggagaataaagctgatgagcatgacagagagatggacctagttatgacactggaagagacccgtggacatgctaggatgcttgcacat

SEQ ID NO: 309165 - DNA, 427 bp, Zea mays
cactgatcaactcattttaggggattatcaatggcacgcttcattccaaagctgacgattaggttggcattagacatgtcatacacgcaaagccagctttacttccacacgctaggtgcctgtttgtttcggcttctggcagcttctggccaccaaaagctgctgcggattgccaaacgctcagcttttcagccagcttctataaaattcgttggggcaaaaaccatccaaaatcaacataaacacataatcggttgagtcgttgtaatagtaagaatccgtcactttctagatcctgagttctatgaacaactttatcttcctccacgcgtaatcataatgatactcagattctccctacaaccagattcttcttacagccagattttcagaaaagctgctcagaaaaaagttgaaccaaacaggc

SEQ ID NO: 309166 - DNA, 547 bp, Zea mays
gattaatctgaaatttgatattgaggtgctatttaagaaccttactgttgacataaaggatgtgaaaccaacttccctgctcaaagatcgtctgcgcgaagtcgagggaaatccagatttttcaaataaagatgttactgcatctcaaacccctgtggttgcagaagtcccttcagggaccatcccttcactaactcatatggaacaacaacctgagatcaatatcacatcccgagctatgagccttccaaatatacttaatcagtatgctgctcctgtccgtctacctacaaacagcacggtagaagatgacaaagttgctctgatgatgcctgagcaagtgccctcgttgacccaggtttcgccagcacaaacacaatcaacatcaccatctccattttctgttaaccagcttatggcggctattccacgtgaagagatacgtttcaaaataaatccaaagctcggctcccttggtccacaactgcaatatagcaaaattatggatttggctttggataaggctaacagggagataatactccct

SEQ ID NO: 309167 - DNA, 420 bp, Zea mays
ccattccttcacagggtacaaaagacggccggggcccggcagaagccaacatcatcaattcatagtgtcagcatgatccaatacaagttgttttattgttacaattcatatcaacaaataatatcaaccataattcttaattgaagtaatgcagagttctctgtgtgttgaaacaaccacaagggctttcttcattttggccatcttgccttacgaatttgcctttcatcagacagcagcttcgcaaatctcttgagagcttcgtcattagtcagctctgtcctatgacaggcacgcaccatatagccagtttccaaattcgcctgtgagacaggtttctttagtagcatatctctaactctggcaagtttctccattttttcctcggttgcaacatcaaccgaggacactgtccttgta

SEQ ID NO: 309168 - DNA, 442 bp, Zea mays
ggtttcttgaaccctggctgactgcccacgcggacctcgggcgcgtccacgtcggcggagagagcgcgggcgcgaacattgcccaccacgccgcgatgcgcgctggcagagaggagctgggccacggcgtgaagctcagctcgctcgtgatgatccatccctacttcctgggaggcgagagctccgagacagacgacatgggcgtagcgttgctccgcgagctcgtccggctgtggccggtggtgtgcccgggcacgagcgggtgcgatgacgacccgttgatcaatccgatggcagagggtgcccccaatctcgctagcttggggtgccgacgcgtactggtgtgcgtcgggggaaaggacccgatgagaggcagaggaaggctgtattgtgagaagcttgagagaagtgggtggcgcggggaggtggatgacttgggagg

SEQ ID NO: 309169 - DNA, 520 bp, Zea mays
  unsure (1)..(520): unsure at all n locations
ttctgtcgcgtccgcccacgcgtccgcggacgcgtggggcgcgctggcggcgccggctgccgcggtcgtcactgacggtcttctcccgcgttgggagacgtcgggcttcgtggagtacatcgagtcggggcacaagcagggggacatgctgctggtggtgccgcagggcgcgcacgcggtgcgtctgggcaacgaggcgtccatccggcagcgcctggccgtggcgcgcggcgcctactacgccgtcacgttcagcgcggcgcggacgtgcgcgcaggcggagcggctgaacgtgtcggtgagccccgagtggggcgtgctcccgatgcagaccatctacggcagcaacggctgggactcgtacgcctgggcattcaaggcgaagatggacgcggtgacgctggtcatccacaacccgggcgtggaggaggaccncgcctgcggcccgctcatcgacggcgtcgccatccgtgcgctgtacccgcccgcgctcgccaggcgggcggtgggaaacctgctc

SEQ ID NO: 309170 - DNA, 182 bp, Zea mays
gataactcgggggacattcatcttcaggtagggggggtacatgtatgtgatagcgcaacaataatacacatccacttgactaggcttggcttgtattggtacaaatgcggacacgggcacgggctatacatatatatagagtagagatggccaaacgggccgggccggcccggcccggcccg

SEQ ID NO: 309171 - DNA, 337 bp, Zea mays
ccgattctacttgccgcatggacatttctgcatgcacttggctgcatggccatctctgtcatgattttctccccccttttttttattcgatccccacttaacgtgatgtatgcttgtaagaaatgaataatatgtaatgggaatcgagatttggagggttttgaagcatggatctgattattcgagcttttctgtgatgttattttggtccagatgccctatggatgtgtgaacagtgctctgcgcacttgatctgatttctatacatgttttctgatcacaaatttgaacccaaaaacgatattggaccttcggacagagcgtgcggttctgggat

SEQ ID NO: 309172 - DNA, 513 bp, Zea mays
cccacgcgtttgcatggaagttatttcaagatatccttttttaactatgctgtcgttgctgatcatttgcatttttacatttttcacattatactacagttgaagatacattcctgaggacgatctggtgcagttatgggcttcctgcttgctgccagcggtcttttggtgcttttatattgctattaatttgcttgaaatttattatggcgatgactgggaaggtctttttgaggctattactggctatcgccttggtggctctttttggccgcgttggtggtgtatttataccaaggctgctgatgttggtgccgaccttgtggggaaggtagaaagaaacattcctgaggacgatccaagaaacccagctgtcattgctgacaatgttggtgataatgttggagatattgctggaatgggatcatatctctttggctcatatgctgaatcgtcatgtgctgctcttgctgtggcctcgatctcgtcttttggaatcaaccatcaatttac

SEQ ID NO: 309173 - DNA, 443 bp, Zea mays
  unsure (1)..(443): unsure at all n locations
ggctgcggtgtacgctgctgctcctcgccgtcgccgcgctcaccttccactgcatgatgctcctcgtcgcagcgcgccgccggatcgcggacgcgcaccccaagatcgcctccttcggggacctgggccacgccatctacggcgcgcccgggcgccacgcggtcgacgccatgctcgtgctcagccaggccagcttctgcgtcggctacctgatcttcatctccaacaccatggcgcacctctaccccatcgccatcggggcccagtccccggcgtcgccggctcctcacggccaaggcgctcttcatctggggccatgctggncgttccagctcggggctcaactncatcagggacgctcacgctcctngngccgntcagcatcttcgccgacgtcgttgacctcggcgccatgggcgtcgtcctgggccaggacgcctccg

SEQ ID NO: 309174 - DNA, 388 bp, Zea mays
ccctcgcgttctcccacgcgtccgcccacgcgtacggccgccctatggagctcgggcccaagccggtgaagccgcccaaggagcacatgccgacgcctcccacgtacaccctgtgccccaaacccacgccggcgacgtacactaccaccccgacgcccccgatgccgacgccagccacatacactcccgcccatactgcccacaaacccacaccaaaacccactcccactgctgcgacgtacacccctacccccaagcctgcgacacctaagccgacccctccgacgtacactccaaggcccaaaccttcgacgcccaagccgaccacaccgacgtgcaccccttcctccaagccttcgtcacctatgccgaccccgcctacgtacac

SEQ ID NO: 309175 - DNA, 480 bp, Zea mays
  unsure (1)..(480): unsure at all n locations
cactggcctttcaatcgaataagtaattacgaagtgtctcatagagtgggggataaaagagaaggtgtttactatcacattggataatgcctccaacaatcaatcagcatgtgatctcattcgagaaagtggatgttcggacatgttatttggaggcgagcatcttcatgtccgatgttgtgcacatatcttgaatctcctagttcaagatggaatggcaatttctcatggagcaatcgataagattcgtgatctggtcagacatatcatatcctcaccctctcacatacaagcttttaatgagattgctgagaggtctggattgccttcaaaggccagattaattcttgatgttccaaatcgttggaattcgacacacaacatgattatggaggccattcagtacaaagttgtcttgaagagatatgctaaggaataactngcgccttcaccagatgatgaagagtggacatattctga

SEQ ID NO: 309176 - DNA, 502 bp, Zea mays
  unsure (1)..(502): unsure at all n locations
cttatgcgttcgcccacgcgtccgcccacgcgtccgcccacgcgtccgcactggtgacgacagtgtatgcccagtgtctaattgcagagtccgactaaacacatcctcactcttctccagaggcactcttgaatgctctctgagtaaattagcctctgatttcaagtctgatgatacatgtatggaaatgatacatgctgaaaagcgccctgggatggattcatcctacgcatcttcaaaattgagagctgcattagatattcttctctcattgcctaaaatagatcccactattgatagcaaatgttcaatcgggattgaatctgagaagtttgatggaaagggtatttcagaacaaactgacaccaagttgacagagaaggccattgctttctctcaatggactagaatgctagactngcttgaagtccatttgaaagcttctcatgtgacatatcgaaggctcgatggaacaatgtcttgtgctgcacgggataaagct

SEQ ID NO: 309177 - DNA, 467 bp, Zea mays
aagaaaactggaatatatatttcaactcggtctgcctacctttgaaatatgacctctgaaagtcttgaaactttaatgtactcatacagtgatgagtgatctagtaagacattatacatgacatgactacacgacaaattaagtacgcatttcatagtgagtagtagtacaataatacacctacacgcaagtcgtaacacacgtggtggttgctaattaatttttgcctgcttcttggccatcccaggagctagtagcttccggccgcgcctgacctcctgcagcatggacacgacgtccctcatcgacggccgctcctgcgggcaccggctggtgcagagcagcgccacccgcagcgccagcgccatctcgtcccgcaccgcctcgcgggtctgctggtccgcccactccgccgcgtccatcacgttgccggcggcgaccttacgcctcgtccagtccacgatgtt

SEQ ID NO: 309178 - DNA, 329 bp, Zea mays
ttttatattttttttttttttttttgcgaacgggggccttgctaattcttggggggtgtagattcatagcgggagcaaacaaagggaacaacaggggtaccaacacctaatccaaaggtagaacggacactaacacggtgacagaagcgaacggtaacacgatactatagatagataagataactcggccgaagccaggatgggcccacacatcagtccctccagccgccgccgccgccgccgtagccgacaccaccaccctcgcgccgaccgccgtagccgccaccgacttcgtagccgacggcaccaccctcgtgccgaccgccgta

SEQ ID NO: 309179 - DNA, 296 bp, Zea mays
gggcgacaaatccagctttttagatttacccagcaagtactacagataataaaaaacaacttaaaacaactacagaatgcttgcatccaacacgagaaaccgtttacaatggtccaatccaacacaatgccatttgcatgcccacttagggcttgttcggttattcctaatacatatggattggagggattgggaaaaaattgagaagaaagtttgacttgttttgggattcaaacccatccaatcccactcaatccacatggattgagagctaaccgaacaagtccttatagatg

SEQ ID NO: 309180 - DNA, 446 bp, Zea mays
  unsure (1)..(446): unsure at all n locations
aataaaaatagagacagggtttacctaacatgcaaggctagcgagatgaggagaaggccattctctagaggagagcgggatccttgctatgatgagcaatatgtagagctgctgtccttgatgaaaatagacagggagcagccggtactcgcacagaagcctcggatctttcatgctgatcgtcattcacactatcataaccgggcagctgaagaagccattctcgtaccatatcataatgaggagggtgcgtatggaattcgaccaagctccaggggaccatcactacaagacagttactgtgaagcacattagatggcgtgtacgcacataaggagatagctgaaagtggaaaggatcataaggatatcacaagnttgcttcggctggggaaaacactaacaattgataatgaaactnttgaagaccttgatgaggaaattgac

SEQ ID NO: 309181 - DNA, 430 bp, Zea mays
tgtgtacgcgtgggcggacgcgtgggcggacgcgtgggtgcaaacaccccctaagtaagtgaaggattctttggtcctgtaatccaggcacagggaactgacttgcctttgctgactgaagtttttgtacagctgttactagtgttttgcttgacaagttcctaatcaagcttgaatcatttacggtttgttcccatatagttcaattctatctgttgcttaactcttttttacaggttatgtttctaacgcttaatgttttcctatgttcttttttgtcttaacatttgttgtatgcaggaccatccaggttctaatcgtttttgggaaatgttttattcctttttatataactatattggtaacttaatttaattttttgattaatttgcttttctttggttttgcaggtcaacatctctgattccat

SEQ ID NO: 309182 - DNA, 195 bp, Zea mays
gccccatgggccagctagagccaaccagaagagcttgcggttactgagagtgtgtgttagagataggatgaaggctcaggaacactccagctgattccatcaatccttagatgattctccaagcactccaagagcttgagatgggctcccccaagaatctttgaaaatgaagatgttgggcatctgatcacaccc

SEQ ID NO: 309183 - DNA, 235 bp, Zea mays
caagtagcagggagatctccagggtgcctttgcactcaaggccaagatgattgaaagtggtttgcaacttgatctctattgctacacttgttttatctcgggcttctgtaatatgaatatgatgcaagaagctagaggggttctttcagaaatgattgggactggcattacacctgataagactgcttacaactgtctgataagaaaataccatataatgggaaacatggaggaa

SEQ ID NO: 309184 - DNA, 374 bp, Zea mays
gcttgatatagtgcgcggttgccaagatgcagatctgcgtgaagaccctgacggggaagaccatcacgctggaggtggagtcctcggacaccatcgacaacgtgaaggccaagatccaggacaaggagggcatcccgccggaccagcagcgcctcatcttcgccggcaagcagctcgaggatggccgcaccctcgccgactacaacatccagaaggagtcgacgctgcacctggtgctccgcctcaggggaggcgccaagaagcgcaagaagaagacgtacaccaagcccaagaagatcaagcacaagcacaagaaggtgaagctcgccgtgctccagtttacaaggttgacgacgccaccggcaaggtcaccc

SEQ ID NO: 309185 - DNA, 457 bp, Zea mays
aaccggtccagcactttcacgctcagctccagcaatggctgcctccaccatggcgatctcctccacggcgatggccggcacccccatcaaggtgggctccttcggcgagggccgcatcaccatgcgcaagaccgtgggcaagcccaaggtggcggcgtccggcagcccctggtacggccccgaccgcgtcaagtacctcggccccttctccggcgagcccccgagctacctcaccggcgagttccccggcgactacggctgggacaccgccgggctgtccgccgaccccgagaccttcgccaagaaccgcgagctggagggtgatccactcccgctgggccatgctcggcgcgctcggctgcgtcttccccgagctgctctcccgcacggcgtcaagttccgcgaggccgtctggttcaaggccggctccagatctcaacgagggcggggctgacta

SEQ ID NO: 309186 - DNA, 312 bp, Zea mays
cctacgcgtccgtatagcttgtggaggcgggtgaacaatattaagcgaggacgcgctgtctgccatacataggtattgtgtggagtgcgtgtcctagctagctagctaggataccgccataccacatgtctctttgacaagtttaggagtgacagcaacaagagatcgatggcctatgccaccgtgctcaagtcctccttccttcccaagaagcccgaatggggcgccaccaggcaggccgacacgcccaggccgcccaccgtctacatggttgttcgcgcctccgactacgccgatgaagctcgtgaagac

SEQ ID NO: 309187 - DNA, 373 bp, Zea mays
gctttctaccaaggcgccgaagccggacaagccgcccaaggagcacaagccgcccaaggagcacgggcccaagccggagaagccgtccaaggagcacaagccgacgccgcccacgtacaccccgagccccaaacccacgccgtcgacgtacacttccaccccgacgccccccaagccgacgccacccacatacactcccgcccctacgccccacaaacccacaccaaaacccactcctacttctccgacgttcaccccgaccctccaagccttcgacaccttaagccgaccccgtcgactgtacactccaagccccaaacctccgacgcccaagccgaccccaccgacgtccacccctttccccaagtcttcg

SEQ ID NO: 309188 - DNA, 237 bp, Zea mays
ggagttcaacatggacctgttcaggaagtgcatggggcctgtttagaagtgcctgagggatgccaagatggacaagagcagcgtccatgatgttgtccttgttggtggctccactaggatccccagggtgcagcagctgctccaggactctctcaacggcaaggagcttgtgcaagaacatcaatcctgatgagggcctttgccctattgtgcttcccgtccaggcccgtttttcct

SEQ ID NO: 309189 - DNA, 204 bp, Zea mays
catgataactttcatgatgtgggtccttcagtggtgatggctagtccaggtggtctccagagtggtctctctaggcagcttttcgataagtggtgcacagataagaagaatgcttgtgttattcctggttatgttgtggaggggacccttgcaaagaccattttcaacgagccaagagatgtgacactggctaatgggctcact

SEQ ID NO: 309190 - DNA, 400 bp, Zea mays
tggtaattctacatcaagcagatctcactgtttgattcgtatttcattgacctcatttgacgcaccagagaggaaaagagcaagaaacaaattatggatgattgatctaggtggaagtgaaaggcttgtaaagacaaaggcaactgggaaaaggctcaaggaaggcaaagccataaatctgtcgctgtcagccctagcggatgttatagatgcactacagaccaaaaaatcccacatttcttataggaatagcaagctcacacaagttcttaaagattttataggatttgtgttcaaaactttgatgcttgttcatattcgtccaaatgaggatgatttgtgtgagaagtattatgactttgggtttttgcgttagagatagatttttttctcttttttt

SEQ ID NO: 309191 - DNA, 181 bp, Zea mays
cgagatgctactgcaaggattggaaaatgggctgcagagcacattgaattttgtattgattatgtgcatagatcttcgattcagtcccaagcgttggcagactttattgctgactggacgccaggggctcaggaggaagaaacgaataaagatgccgaagtatggacagtgttttgtgatg

SEQ ID NO: 309192 - DNA, 353 bp, Zea mays
  unsure (1)..(353): unsure at all n locations
ggtgtanttgacggtcatggtggatcacgtgctgcggagtatttgagggagcacttgtttgagaaccttctcaagcaccctgatttcttgacggatacaaagcttgctataagcgaaacatatcagaaaaccgatacagatttcttggaatcggaagcaagtgctttcagagatgatggttcaacagcttcaactgcaattttggtgggtgaaccgctgtatgttgcaaatgttggtgattctcgtgctggtattttaaaagctggcaaaggtattgcatactggaagtaggtattctaagtagtgattttgtgtttcatttccatgtcacatttgtcagatgatgtatgggc

SEQ ID NO: 309193 - DNA, 112 bp, Zea mays
acacccagtatattatctttaccattacatacccttacaagacacctgctgcctggtaaacatatcggacgaacacactagtaaattaaatgggcgggaccgcagaagacag

SEQ ID NO: 309194 - DNA, 406 bp, Zea mays
ctcacgcgtccgcccacgcgtccgcccacgcgtccgtgttgctccccccaccttctcctcctgctcctgccctcggtttctgatcagcgaacatgggaacccgcggcgtcgccctgctgctcctcgcggcggtgctgctcctccaggcgctcctcctcgcgtcgtcggagggcctggtgcgggtcgcgctgaagaagctgcccgtcgaccagaacggccgcgtcgccgcgcgcctctccgccgaggagaggcagcgcctcctcctccgcggcgccaacgccctgggctcaggcggcgacgacgactccgacgtcatcgcgctcaagaactacatgaacgcgcagtactttgggagatcggcgtcggctcgccgcagcagagttcaccgtcatcttcgacaccggca

SEQ ID NO: 309195 - DNA, 338 bp, Zea mays
gtttcgtatgcgtccggctcctaggatcagagggcgctcacggtgcactggtgggtcttcttcagaattgggttgacgacctgggtactgatcgaagtctgccgtattaacatggtcacaaaggttcttggattcagcattcacatgcctatggtgaacggtcattcagacatgcacataatggctcatcatgattgagagcttgtcactgtcaaaattgtatactctggatgaacactagtgactttctacttatggagtacttgcaccgttcaacaggtgatctcacttaggctggggatacgtcttttgagaactattttacggggacaggaaca

SEQ ID NO: 309196 - DNA, 295 bp, Zea mays
tttcacgcgtgcggtcgactacaacatgcagaaggagcgcaccctccactgggcgctgcgcttcaggggcggcatgcagacctgggtgaagaccgtgaccggcaggactatcacgctcgaggtggagcatgaatacaccatccacactgttaaggtcaacatctcatgacgaggaggggatcccacctgaccatcagtgtgtgatcttcgctggcaagctattggaggatggccgcacccttgcggactacatccatcagagtgagagcaccctcgaccaggtgctccgactcag

SEQ ID NO: 309197 - DNA, 506 bp, Zea mays
  unsure (1)..(506): unsure at all n locations
tttggttccaatatttatgtttgtgttccaatatggtgttagtggtgccgccatcgctcatgttatatcacatgtatggtggaacattctgtagatatttcattacatccatactcttatggagattaaggctgcatgttgatttgttgccacctagcttcaaacatctggagtttggctgatttcttaaaaatggttttctgttacttgcacgagctattgccacaacatgttgtgtcacactattcgcttcaatggtcgcacggctaggttcaactccaatggctgcattccagatctgcttgcaaacctggttggcttgctcacttcttgccgatggattggcttttgctggacaggccatacttgcaagtgcatttgctcgtaaggaccatccaaaggccactgccacagcttcttgtatcttgcagctggctttggtcttgggacttcttctaagcatacttcttggtgttggtctgcacatanggtctagattatttaca

SEQ ID NO: 309198 - DNA, 361 bp, Zea mays
tttacgcgtgggctctacttcccgctggacatggtaccgacgctccaaagtccgctccgctacacggactgggcgctgaactgggtcgagaaggggtgcgtgtgcactatcgtgggggtcatcgcgcacgagtgcagtcaccacgccttctcggactactcccttctggacgacgtggtcaaactgatgctgcactcgtcgttcatggcggcatgcttctcgaggaagaacagccaccggacccaccactacaacacggggggcatgaagcacgacgaggtggatgtgcccaagaaggaagaggctctcccatggtacacctcgtgcgtggacaacaacccagtcggtcgactggtgcaca

SEQ ID NO: 309199 - DNA, 334 bp, Zea mays
ctatcaatgacactagtcaattcttccatttcctgtagaagtacatcatcatccatgacctttgtgctctccacagcatcattgacctttggggtgacttgtgatgacgctgacagtgattttcgtaaacgaattcgccattttaaaatatgcttgaaactatgtttatccaacagaagcaagtcctcacagaaattttttatatcatctgttgtaagctcatgattctttatggccagggattctggattatcgaatgaaattgcattgtaagagcccaaaaactctagtggcgcctgggtgtcagaccatataaagtctgatgccaaaccaa

SEQ ID NO: 309200 - DNA, 344 bp, Zea mays
agtagaagccttttttccttgcatatttgcccacatttattatggttttacacccaatatagttgcaataccattacatacccgcacaatacacctgctgctgctaaacatataggacgaacacactagtaaattaaacggccgggacggcagaagacaggccgggagcagagagctctgcgttattctctcctcgatcgtctaacggggacggatggcagcacacaaagaggagggtacgtagtagggaagccagtggcctcttatcatcatcattaccatcagcagctcatctttgccggctggctaggacacaacccttcattgatccagaccacctaaat

SEQ ID NO: 309201 - DNA, 310 bp, Zea mays
tttgacgcgtgggcccggcttacctgttgagaaggcaccgagttttgcatctccaatatgggtccctgacttggctgatgccaaggatgctatggaaggcgttcggactatagtgggtgtacgcactcctgaatagactcctaaccttagcgtgagctgcgtccttatggacgctgaggccaaagaaatcactaactttgcgatagtttctgccggatttttcaagtaaaacaagaactggacccataactacaacattggccgttataatgactattatttttgtggggaagagaaagaaaatcctgtc

SEQ ID NO: 309202 - DNA, 504 bp, Zea mays
gtcgtggagaggggaaccccggcccagggagagttgtggggaggggatcggcggcggaggagatggaggagcgggagaagctcgtgtgcctggccaagcttgccgagcaggcggagcggtacgacgatcatgattatgaagagcaagcaaacctgtacagtgaggaaactgggaatcggtacaacgaggacccagcagattcttaccaggaagagcaggagaatgcattcagtgggggcataaaccaacaggacaacttgcaggtcaacaatgttgacgataacaaatggcctgtatggcctggagagagtgtattccgcatactcgttccagctcagaaggttggagctatcattggccgcacaggggagtttatcaagacgatgtgcgaggagactaaagcgcgcatcaaaatacttgatggcccacctggtgttccagaaagagcagtaatgatttcagcataggatgaaccagatgcacctctttctccagctatggatg

SEQ ID NO: 309203 - DNA, 421 bp, Zea mays
tctatggaacctgcggagaagtgcttgcgcgacgccaagatggacacgagcagggtgcactagatagtgctctgcgggggctgcacccacatacataaggtgcagcaggtgctgcaggacttcttcaacaggaaggaattgtgcaagagcatcatcctagacgaggctggggagtacggtgcggttgttcaggctggcatactaagcggccagggcaactaataggggcaagatctactactgctggacgacacaccactgactatcgtgctggagactgcagggggagtaatgactgcgctgatccccaggaacaccatcattccgaccaagaaggagcgggtgttgtgcacggacttcgagaaccagtcgggcgaactgatccaggagtaccagggtgagcgcgcgaggaccaaggaca

SEQ ID NO: 309204 - DNA, 405 bp, Zea mays
ctcacgcgtccggacgggcatccctccggaccagcaccggctcatttttgctggcaagcagctcgaggacgggcgcacgctggccgactacaacattcagaaggagagcaccctccactaggcgttgcgagtcaggggcggcatgcacatcttcgagaagactctgactggcaagactatcaccctggaggtcgagtctgctgataccattgaccatgtcaaggccaagatccacgacaaggagggcatccatccggaccaccagcggttcatgcttgccggcaagcagctcgaggactggcgcacgctaggcgactacaacattcacaaggagagcaccctacactagaggctgcgttatacgtgtggcatgcagatcttcgtgacgacactcactggcaagac

SEQ ID NO: 309205 - DNA, 404 bp, Zea mays
acacaaacatcaaatttgttatttttatattaattttctacagataagcctgtattctataatccgaatatgagtacatatatattccaacgttgtggatgcgtcaaggtttagatacttgaatatttctggaataacgaaatgtgaggggctgaacagtgacaggtatttcattcttgtgttttcagtaggccgcttaatgctcctaatgagaacacggaactcctctggcaaatacagctgccggatagtatactttggaagtttctccaaaataattgcttcgtagtttatgacacagatagctgcatttttatacgaattcctggcaaaccagtgtttcatggcatagaagttctgagcgtcagttaggatatgaaaagcaaaatagcctggcttcttac

SEQ ID NO: 309206 - DNA, 194 bp, Zea mays
gggggttaagcaaaaaaaaagcttttcatacaaaaaggggggaaacggaaaattgttttgtccaaaattaagctcaggaccagaactgttgtcctcctaaggggcagggccattgctgagccccgtccggatccacaaacaccattaacaatgaaaggtttggtacatgaacagcttgggggttcaatactttt

SEQ ID NO: 309207 - DNA, 425 bp, Zea mays
gcggcgggtgatatacgatgcctaacattggtttgttggttatcgagctaatccagattatgggggggataccttagccacagggcagcttgccggggcagaatggctcgagatgtgtgataccaatgggggtactttaccggggcaaatcagcgaaattaccactaaagttcgacggagtttaggactggacggtcaatccgatcgtcaaccccaactgggtatccatgcccacaacgacagtggcacagcggtggccaattccctcctggcggtggaggctggagcgactatggttcagggcaccatcaatggctacggagagcgctgtggcaatgctaatctctgcactctgattcccaatttacaactgaaactcgattacgattgcattgaaccggaaaagctagcccatctcactagta

SEQ ID NO: 309208 - DNA, 428 bp, Zea mays
tcaatatcaagaataatggggggaagttaaccaatattagggaacatagaaaggggcagagtgattaaaaaggctaggaagaaaattaactgtaaactcaacacgtaacccttggttaacgaccaactacgactgatggcattgaggggactcagggtcggttctaacgctaaacacacatacaccaaagctaaacgggcgaaaatccaaatgtaaacgtaaagggaaaccaaagtccaaacaatggttagtaatcctgacaataaaatggtcactacgtcagggttgtcccccatgaaaataaaggtgaaaagaccaataataatgccgtaacctaggagaattggaataaaaaagaggaaaaacactagggatgcgagtagactaacccagagaaagcgccaaaatctgggcatcaactggatttt

SEQ ID NO: 309209 - DNA, 347 bp, Zea mays
ttcgggcttcttctttactgcataaccttggtattgtgaggggcatttatttaatggtagcggggccccgcaccgcattcggagttttgggggtttatagcctcactgcccgtaaatttaccgaagaagaaattgaatttctcaaggtagctagccatatccttgccgcggccattgatcgccaggaatacgaagagagattattactgttacaacaggcgatcgatgccagctccaacggcattttgatcaccgatgccctgggctcagacaatgcggtagtctatgctaaccaaggttttgaaactattaccggttttaatcgggaggaagtgattgggcaaaac

SEQ ID NO: 309210 - DNA, 348 bp, Zea mays
  unsure (1)..(348): unsure at all n locations
gggtactgcctggcttttctgtngtctaattctttggttgaaaggtgaagatgtttcagcatgttttaattcgtcgctagttgtcgcgcagctatttgccaaatcaattttcccgtctttaaattatctgttgctatgagtctgaccattgccgattatcaatccttcttgcgggaaattgaaccctttgctcaacttcctgccccggcgatcgccgagatagcggcaaaactgaagccgctaaggtttcgcatgggacagataattcttgcccggggaaagctggccaataatgtttatttcttagtcagtgggcaagcaagactactcggttacgaccccggcact

SEQ ID NO: 309211 - DNA, 387 bp, Zea mays
cactaaactcgccacactgggcaggcctacttctaggaaagcggcttttttttgaacaatcatgcaaaggctgaggcgaggcatagacattcaggcaaaattggcaaaaggtcagtcaatcatcctaaccgaattgtccggtaagatgggtgtggtttccaagcaaaatagtcccttacccttgggctagggctaaacggggaacttttgcccccgtaactagaccgattaaattaaattcaactcacaaagactaaacttactagcaattaacgaggaggttgagggtggtggactggaaagttcgggcaattcggggtgcaacgacggtttcggaaaatagctctgaagcaatccgagatgcggtctgtgagctactggatgtca

SEQ ID NO: 309212 - DNA, 478 bp, Zea mays
  unsure (1)..(478): unsure at all n locations
agttcgttgattctgcgctccattcactaaacgggttaagccttgggcgtcaatcaccttgagctctcttgtcgctaccgcaatctaaatcgactcgtgcagcaagccaaacccaccctgatcaatttccaccaaggtgtctgccgctaggatagcgggcgcttcgataaacaccagtcgtcgcaagtcttcctgggcttggttttagaagtggaaaaattttgctcgcttatctaaactgtcccatttgcgatgtttgactttacgagtctgcctaacgagaaatcaaggttttcgggtaattaggcggtgaaattgtctcatttatagtcataaatgggacattgagaattcagataagttataaaatttgatgcctggaagcattggtagataaagctttcagccttaacgacaaaatntttccgttgctaatactaagctacgtccaacaaaaactgctctaacaaaacaatcg

SEQ ID NO: 309213 - DNA, 455 bp, Zea mays
agaccacttcgacattgtgaggtttagtggtacttctggaggcgctatttgtgccctactaatttggtatgccctgaaaaaaggagaaaatccggtctggaaaagattgcttgatttttggctggataacagtgcccaaacctatcaggaaagattttttaatgattttgtcattaggtctctggagttgaccagcaaaggcatcgttccccagtatagtgtgactccctattctcccctagcccagacctggttagcttcggctacccaagggttacggagtcgctttatcaatttagaagaattgttacaggttcatgtcgatttttcagagttagcaacttggggcaagcaattagagcccccggtacttttaattggagcttgcaatattctgacgggaaaactagataagtttaattctcgccaggaagccataagaatagagcatctgc

SEQ ID NO: 309214 - DNA, 409 bp, Zea mays
ccggccctggcttggactgggaccttaaaatacgccgtcgccaccgatgatttatccctggacgaagagcggtctaacctaacattgtaaaaacgctgggctaacttgcccattgccaccaagcaattcaccgctttgttggtttccagtgccataactgtggttgcagtggtgggcaccgggatgatgattgccatttcttcgggtagattccaactgaaaaaccagactctggcggagttggtggtcaccgagggcaactacaacatcaaaattgaccagatgagttttggttttcggggtcaatccgataacctggctattattcaagcggctcgactctacagcgaaaggcaacctattcctgctcctttggcggcccaggtacgggacattttaaaaaatgaga

SEQ ID NO: 309215 - DNA, 323 bp, Zea mays
ggtggaaccagatattattccttccacctatgtgccggggtgttacaccgaatttattgccctaggactatccctagctgaagcacagggagccgaagcggaatctgtgggcatcaatgccatcgactataccggctatcctgaatgccgccccgaatatttagcaacctatccacaattagcagccctgtcttgcaaaggcggggtagaaggaagacccattcaattgctggctcccctgactgaattgagcaaagatgacattgcccataaagctgtggaattgggagctcccattgcccaaacctggtcttgctacaccg

SEQ ID NO: 309216 - DNA, 372 bp, Zea mays
ggcttacagcttagatggaaggctaagggtagtagctgatatttaagctggaggaaaaataactgaggcttccaagatatgtaaaataggaaaagcctcgatatacagatggttaaatagagtagatttaagcccaataaaagtagagcgtcgccataggaaattagactgggaagctctaaaaaaagacgtagaagaaaatcccgatgcaagattgatagacagagccaagaaatttggagtgaggccgagtgccgtatattacgcattaaagaaaatgaaaataaacagaaaaaaaaagaactacgttatcgagaaagaaaccgggaggaacgagttaagtactatagaatgttaagagaactaattaag

SEQ ID NO: 309217 - DNA, 436 bp, Zea mays
tggggatgcttggtttgggcaccgttttttctaatcaaaggcagggttgattgaatggtgtgttttaaccgtagagcagaactaaacatacggccagtggccaacgccacttggataccccggctctgtacctggtgaatggttttcaccactgacgggttaatttgattggatactccggcgatggtgccatcaatgtccaatactactaacttgattgacactgttaaactccctggcaacggattagttgggcaaaaattctgttagaaagctgaaatctaaagcttaaatttacaatgatttatatttccccctccatttaaccattctgagaacagcgcttaacatggacttctagggtcgggcggctatgctggaaaagcaaaaattgctagtctggatggtaaaaattatctttgagtcttccatgact

SEQ ID NO: 309218 - DNA, 447 bp, Zea mays
ggggggagagaagataaaacgcatcccgtcccgcattatcattgacgatgtggagaaattggggtagtttgtcttgccgataaacctcatatacccgcaatcccgtatctcgataactctcactcagacggaagccttgtgcctccaaacgggcttggaggtcttgggtgacgtcccgcaccgtggcccctgccagaaaatgacaatcctctgagccgtagcatcctgattgagctccttctaagtgggcaatgccagcgatgagttccctcttaggctgagggaaggaggagggttcaatacttttaatctcattctcaacctcctgcccttggtcagagcgggattctggaaccgattcaggctcaattttttcgttgtcctgcctttgattcggttcgccctggggtgcctttactgctttaggggaggctctcggtagaggag

SEQ ID NO: 309219 - DNA, 282 bp, Zea mays
cggtcaatgtgggtatgaatgctaaacgatccggcgatattgggcacgaggtaattgtggccattaccgatggtcggggtagatattcccttggcccgttccctgggcgatgaaattcccgaaggagaaaagcctggtatcaaagcggaattgttagaaattgccgccaagattcgcggctgagggatgcaattgttggtgatcaacaccgagaaaaaatttgtttgcactggcttcggtaaagaattggcccacaaagccgggggcaaatattatcaactc

SEQ ID NO: 309220 - DNA, 462 bp, Zea mays
cggtggcaatggaacgctcggcagtaactggcaccccaattctgcccttggcgggggtgctggcggaggtttccttaaagaaaattagacgattattgcgggggataaaacgacttagttcgctgggattttgctcaaaatagtcgattaacttaggcaaagtaacctccccaggctggaaaattccctcttggatggtttccttccctaaacttacgtagggataatccgtcgctccagcaaaggccacggaactttggcctccccccacccagttgattttggcagaaccctgtacctggattagataggcatctagacgattacggaaccaagcaatttcccgtccctgtaactgacttgatttgcctaaaccatccataccttccaagtcagccctagtggggtggggcttagaccaacgagaaaaattattgggcaaaccataaatgggataacgat

SEQ ID NO: 309221 - DNA, 515 bp, Zea mays
  unsure (1)..(515): unsure at all n locations
tgtttttcctgctctacctatccatttttcntattaaattaatacctttaaagctgggcaatcatgtctattatggtcgttctgttcaatttggtgggaaaggtgcaaccaaaaactatccgattaactatggtcgtgccaaagaattagcagtaggtagtgagtttctgacttatatcgtgagtcaaaaagagctagatctccacctaatgtaacccagcctgagcgctgtgatttttttcgggttttatttaggctgattcttaccgataaattgatgatggcttgacaagggaaaactaatggtcggtggtggggaacttttgcccccaaggactggacgaagggaaaaagccaattatgtaaagttttgttattgtgggaaaagggtgggatgtatttatatccagcaccaacccgttgtcaggatggcatttattcatggttaacgaccttatttctccgcagtctcaacagatggagcgccaacttacaactgtttggcagtccctgac

SEQ ID NO: 309222 - DNA, 474 bp, Zea mays
aacggaatacggagctaaaagtggcccaggcgttgcaaaaacaggaagcggtggttgcggaaattcaacggaagaaaaccatcgaggcttcccaactgcaagctaaggcggaaattgccctggccgaacaaaaaacccaaatcaccgaacaaacagcggcgatcgccattgccaataaacagaaggaacggttagaggcggaagccctgcgggccgaggcagaatccggggtaattaccgcccaggaagtggaagcggcggaaagggctcaaaaattagcagtgattgtggcccaacaggatgcccaacaacatcgcatcgctgaacaaaacgtggtggaaattgacgtattccggcggcggcggcaagcggaaagtgccaggcaagcggcggaattggaagcggaatccatccgcaccctggccgatgccaaccgccacaaagctatggctgaagcggagggacaaaaagcca

SEQ ID NO: 309223 - DNA, 466 bp, Zea mays
ccaaaccgctgacaaacgccagtatgtagcccaggtttttgccaatctctacaacattgacattaacgatacctgcctggtgcccacggaggaattggactactggattaactggttgtccctgtcccccgacaactatctagatttccccaacgcgctgaacaatgcttccgccgctgctggtctgaccgatcgcctcgaggcgctgaccaacaaagctgatgtttccctgtcctacaccgaagctctgtccactgcaggggttaatacatttacagaagcccagtatgccgaggctgcgggcatcattgctacggttgatgataccaatgcgagtgtgcttgcggcagaagcccagattgtggaaattgcggcttccctgagcgtcttcaccattgcccaggcccaagccacccccaacctaccccccgcttacaccattagcgatactgctgataacttgatc

SEQ ID NO: 309224 - DNA, 387 bp, Zea mays
aaccatggctgcaagggcaaaccttaatattttgatgacttttttcgtctatgtttaccctatcctctaagcaattattcttatgggaaaggaagattaaatttaacctattgaataaagtaaatgtaaaaaatttactcagctaaattgtctctatatcttaacaaaattgaggccagaactagggtcatggtatttcccctcggttgggaaagttgcaccttggtcggctagcccccacaataaagccaatttgcggggcttcatttccccggtcttggttccgatagtttatacacccgtaacttgaaattacctcttctgtgatcgccatttatcccggtagttttgaccccatcaccctcggccatttggacattattgagc

SEQ ID NO: 309225 - DNA, 244 bp, Zea mays
acagggattgacactttctttctgcagactgcgggactggacgagcttttccagatacgggtaaagaatattgcgatgaatattaattaccctcaaaaccataaattcccaaacgaatagagaatgacccacattttggttttgcaccgcattaatctggtctttaatagattgtaaatcaaagggttgaatttacctgccagtgtaaagacctactcctaccggcacataacgggaagcggga

SEQ ID NO: 309226 - DNA, 429 bp, Zea mays
aaactccgatccgcaccacctgggttccagttaccgtctccgaaccccagagcaactggatgataatgctttttttgaaaagccaacggtgaataccattcattaacggggaactgctcttgtctttggcaaatgcagtggaattgggaaaaatttagccaaagggaaaaagttctgctctgattgcttgaggcggaactattctaacaactctcacaacgggaattgcaaaacctagtcgctctaatagggattttagccaattttttattttgactgggcccgggaataatctcgtttccctaggctttacttctgataaattaggtaaacaaaagttctatttgcctcccccatgaccggagccaaaaccagggacttgtagtggcaatgttactttttcagttagggcagctaaattttttgagg

SEQ ID NO: 309227 - DNA, 423 bp, Zea mays
cgctgccgacaactctggcggtttatattccttttcaaggtatccgggtctggcgggttgagggggctctaaaaaagcggacaggggagaaagctctaaactaaaaaccgcaaccgaggaaagtttatgagccaaaagaaaagacagtatagcgccgaattcaatgccactttggccttgcaagcagtacagcaaagagcgagatagttaggacaattttctcaacgctacatcaaatccagaaatcagcgattctccattactaacaagttgggaaacataacgttttagtttcgcccagaacttctcaattttgttcaagtccggtgaatatgacggtaaaaatataacctcacccccagcttttgctatatcacgcataatcccgattaaaacccccacaggacttacgcaagatagatg

SEQ ID NO: 309228 - DNA, 428 bp, Zea mays
taattaaaggttaattttcaactcaaaatgcagaatttttttgtcattggttttcaatcctgtctgcggctttatggttcgttttggatttttggcggctttctgaccctacaggcggcgcgggaatccctctttttagaccgggccatagaggcgatcgccttaaaaaaacaggataaattactgagctattttttatttttgggtagcattttcactttagccaccgggataactttggtcttagctagtcgctgggtctttttgcccctaaccctgtccattgtttcccaaattgtttatttctccgtgcaaaaacgtcgatttagtcgggccaaaactgaggaagaaagggaagatgcccaggtacaacccactaccatcaatgcttttaagacttcttgcgtggtggcgatcgcctgtgccct

SEQ ID NO: 309229 - DNA, 465 bp, Zea mays
aattactggggtaaatactggtcaattgccaagcttacaatgcccccgctaaaccggcgatcgccccgctttctatgaaggcctgtaacttataccaaaaaacatttttgcccagggcccggggaatttcttcatcttcccggatggctttgagaatacgaccccagggggaatggacccaaaattccaaaccagcataggtaagggccaacaaggttaaagctaataacattagccccgccttaccagagtagttatacaaagaaactaccccaggcacataggcagttaaaatcaacgctgtggtaataattccccaaattagcaaagccaaaggcttacggggctgataactcttaccttggatttttttaccctctttccactgttttaagagacttttaattaaaatactttcagcataaatagtgagaactgtgagccaaatcacaaaaacaatgcgac

SEQ ID NO: 309230 - DNA, 520 bp, Zea mays
  unsure (1)..(520): unsure at all n locations
aggcgctcggnctcacgcaaattttgctgggtctgtttttgggaggcggcaagttcggctaatatttgccagactttatcggcggtggtggccatggtagtagtagcagggactgaaactagggagatagtctattttaactctccgaataaattgtcaaaccactaactctgccatgccaaggaatttaaccccctccggattaaccataaatcgacagggcattacctccaccccagcggcgatcgcctgacggaatagttctccataacggcgatcgtaggcatctccgggggaaaaatgggtacaatcaccccgattgatgaagtaaagcatcactgcccgggctgtagggagaatatctattaactcctggagatgtttttgccctctggtggtttccgtatcgggaaataaagccaatttttcttgggacaaggtagtattttttacttctacataaattgactnttcttctggcttagtgagcaaaaagtcaatacgactttntttatcttta

SEQ ID NO: 309231 - DNA, 383 bp, Zea mays
agtcttgatttaaacaaggtttactaacccctaattttgggcttgcaatttatcgctatactggtgacgtttttttcggagtttgggcaaatcatggaccaacacatagggatgggccggattccgttggacaaaatcctggtgataatcctccgctggataaaaggcatcaaagtcattcacctccgtggcgatcgcctggtcaaaggcctgactttcctctagttggtcaatgtaagcttgggccacctgcttttgctcaggagtggtggcaaaaatggccgaacgatattgacgaccctggtctacgccctggcggataacttgggtggggtcatggccgacagaaaagaaaattttcagcagttcgccgtaacttacct

SEQ ID NO: 309232 - DNA, 500 bp, Zea mays
ccgccaaaaagggaggcatggcttctaagatttctttttttccgtaaaggaacccaatgcccgtgggggcgcactttttgtgaccactggccactaaccaatcacaatcaattagttgtacgtccagagggtaatgaggcgcactttggcaggcgtcaactaacactttagccccagcttggtgggctaattgggcaatttcttccgccgggttaacgcagcccaaggtgttagaaatgtgaacaacagtgaccaacttagtcttttcagaaagtagagttttaaaatgttctaaatcaaagctttcttgctcgtctaattggacaaattttagtacagccccggttttggccgccaccatttgccaaggcactaaattgctgtgatgttccatcacggaggtaatgatttcatcccctgctttgagattattcatcccccagctataggccaccaaattaatcgcttccgtggcgttacgagtgtaaacaatctccctt

SEQ ID NO: 309233 - DNA, 551 bp, Zea mays
cttggcattattccctgtttgtccatgcccctgccccgtttactatctcattgtcctcgctgtcagtttcattttggggattttgatttggctcattgatgccattctgcggctttattcccaggtggcttggacttccccttttttggccaatattgtcattttgctagttattgcggtactagctctgttgattgccacttttttttactatttcaacctggctaatcagcccaaggatagttctggtaaaaaacggcgacgcataaaattacctgagcaaaaaaacgaaacggcggcggctaatttacaagcagtgcggcggcagatgcaacaaatccaagaccaggtggcccaaaaagcgctattggaaaaaacccgtttaattgaggcgcagttaaaacgaggcaatttaaatttagtggtgtttggcacaggatcggcgggtaaaacctctttggtgaatgctttattgggccaaattcagggagaagtagcccccaccatgggcaccacgatcgccggggaaaaatattatctttacttggatg

SEQ ID NO: 309234 - DNA, 453 bp, Zea mays
tcctcttcttaccctaacttacgtgaactggctgaaattgctaaatgtttgcgctctgatactttgtctgatgtcaatgatttagcgaatcttcaaaaggcgatcgccgaagccaggccggagattgtctttcaccttgcagcccagcctctagtgcgccgtagctatcgtgatccagtcggcacttttgccactaacgtgatgggaactgcccaccttcttgaggcgttgcgggcctctgactcagtgcgagtggtggtgattgtgactaccgataaggtttatcgcaatgttgaatggtgttggccataccgagaagatgatcaactgggaggtcatgatccctatagtgcgagcaaggccgcctgcgaaatcgtagtagccagttatcgtgatgcctttcttcgagaacaaggagtggccgtggccagcgcccgggccggcaatgtcatc

SEQ ID NO: 309235 - DNA, 550 bp, Zea mays
cattggcaaattccggtttatgtggaaaaagcccaatcttatgccaactacgagcgcatgactcggctgttactgtaaaaccacgaatatttgtacgccgccattggtagtcataatgtccgttcccaagccctggcctgtgcgatcgccgaagagttgaatattcccaaacgtcgttatgaaatgcagattctttacggcatgggagaacccctggcccgggccattgttaaacggggtcatcgggtgcgggtctatgcaccctacggtcggctgttaccggggatggcttatttaatccgacgcttattggaaaatactgctaacagttcttttctacgccaaaacctagaagagcggcccattgaagaattaattgctccgccccaagttaaaggcattaatgacctacccaccaagggttatggcaacgctcccgacaccgattacgccgatgctgatttacgccagcaagcatttcaagccctaaccagggttaaacaacaattgggcaaaacctatctgccctacattaacggcgagtacgtgg

SEQ ID NO: 309236 - DNA, 229 bp, Zea mays
cgtcttgtgccagataaaatcgaggatgactttgcttactattaaattaaggaaagttattacggtcttcctgtttcagcagttatgattccggcgggcacctggggagtttatgctgtcacctttgaggttcctgtggagattgcccgtgaaccacttcaagcagtatttggttctaactttgaagaaacaagggaatctaatttagggttagcgccacaactgatta

SEQ ID NO: 309237 - DNA, 440 bp, Zea mays
actgaaactgaggtagatggtcgagttttagctgatgcttaggctcacttaaatcgatgtcttgaagaactattaaccgaattagaccgatatctagcagaagagtatgagctaggtttatcgaaaaaagaaaaagcttttcaagagtggaaagaaagtcatcagccttttcattggtttgtagagttttacggaattattcattctggtggttttgatgtcattattggcaatccgccttatgtggaatatagcaaaattaagaaggaatacactattaagggatatcaaacagaaagttgtggaaatttatatgcttattctatggaacgagcttccagtatattaaaattatcaggtcatataggctttatcattccagttgcttcagtctgtacggatggttatttacctttgcggaatatcttagtaacaaatgg

SEQ ID NO: 309238 - DNA, 532 bp, Zea mays
ctcactgcgatactggcgggccgccacccgacgttgttcttccactcccttcacactggaggcatagaggggcggtattctattgagggcgtaggttgccacctcggttaaattgagataatttctcaagtttttggggtaaaaacgcagttgtttatcaatctcttcatagaccaacgtttccatcacattgacatgaacgccggcattgacgggggctgaggactcggaggcgagaaaatccatggcagagagctggggaaagtgataactagacgagaaaaattatcataggggagcgggagcaaaatactggggaaaatacagagcaaatacatccccggattcaagtggcactccgattttagctgaattaagggattctcggcgcagtcattcaacacaatttaactggtgtgggataatgggtcagtgcgtcatttacctaggctcattatgcgactgtcccagatgctctttgtcaccctcagagacgatccagcggatgcggaaatccccagtcataaacttc

SEQ ID NO: 309239 - DNA, 531 bp, Zea mays
ccgtttcttcagattctattaagggataatctccttttttttccgcaaaagccaacacgtcggtgggcggatccttttggcgaaatttacgatttaactcttggatacggcgatcgccggtgaatagtaaggtgagttcgtagctggaggcggggggaagacaatctgccaggtattccagccagcgttgacaccacccttgccagggattggttagtaactcttccacccctgaactcgccatggcggaaccagtcaaatcagtttgtaagcttaattccaccgcaatcttgttaacagaggtaggggccatggccttagcgggttaggtaggaaatccccaccagcactccgaggagggcactggcggacagaaaaaaatgggttagggatttgccctttttgcgcaccatattacgcatagccaacttaacgtaggtcggtgggggttccgctggggcaggattggtcatttccggcgctttccgggtgggtaaatcactcataaaaatctatggcaagggcaaaaac

SEQ ID NO: 309240 - DNA, 398 bp, Zea mays
ggttgaccagggggcggaaagtttactgcggggcttagggtttgctgcccaaatttacgaacccattgctgcaagtttgacggaaaggtgtcccacgggctgtgggctagatgccatccaagcctacgaatttatcctggcaatcgcccatcaattgcgggatcgggggttaggggtaatcctcccgccggggttagaacggggcggcaccgccaaacggttaggggtaaaagtggtgggggaagtgcaacggcaaaggggccagcggctaactctgcaaagtttaattaattacgacttgcaactaatgatggggagcggggacaatgccccgttattgacggccaaagactttgaagcgttactagcccaaaaatctcccctggtggtgctggacg

SEQ ID NO: 309241 - DNA, 415 bp, Zea mays
attccctaaggcatcgggtaatcgagtggtagcgtagacgacattgctccgatgaatttgacgggggttgggcgaatcaaggttaaaataatgttaaggcttgctgattattaactcaaacttgtcgaccctgtgtggtccaactccctgggaaatctcctggggagagtatcgcttttacctgtccctagtaaaaggagcaaaaatcattaataaccattaacattaattaacattaatcccaaaaacctgcaccgatacagaaatgtctgctacaagataaatacgggattttgacaagctaatagctgatactatttttcccccgttaattggcaattatcggcttttttggtcgttttttctgttttattactaggttagtgcaaactaccctaacaccctccccaaaact

SEQ ID NO: 309242 - DNA, 302 bp, Zea mays
cggcccggcggaatatattgccaaggaaatgctctgggactatttggataagtatagctgaccatgccctggactatttaaaagaacagcccgaactgcccgatgtcatccatagccattacgccgatgcgggttacgtgggcaccagactttctcaccaattgggtattcctttggtgcacaccggacattccctgggtcgtagtaagcgcacccgtctcctgctcagtgggattaaagccgacgaaattgaaagccgctacaatatggcccgccggattaacgcggaggaagaaacccta

SEQ ID NO: 309243 - DNA, 433 bp, Zea mays
tggtggcctatagctccattggccacatgggatacatcctagtttccgccgccgccggtaccgagctgagtgttttaggggcagtggcccaaatggttagccacggtctaattctggctctgctgttccatctggtgggcatcgtcgaacggaaagctggcacccgcgacctggatgtattgaatggtttgatgaatcccattcggggtttgcccctaaccagtgccctattaattaccgggggcatggccagcgctggcattcctggtttggtgggttttgcagcggagttcatcgttttccaaggtagttttcccacttttcccattccgactctactttgcattctggcttccggtctaacagcagcttattttgtcattcttttaaaccgcacctgctttggcaaactcgataatcaaagagcctacta

SEQ ID NO: 309244 - DNA, 449 bp, Zea mays
cctggccagcgccattcctgggctacaaatcattaaggataatttttttcagtccattgaactacctggaggcgggatctatgctccgttcctaacgtctgaccagggtaacgggcaagtgaatcacttcttcgccctcattgatgccaatccaggtcaagtggactatgttcgttttgccaatggcacctatagctttgaagatagtgcctttggcgatcgagatttcaatgatctgcgatttgcggtcaatattttgccccagggaggtttcgttcccccagccattggcctcaccgctaacgcgggagttttcaccgccaatgggctcgttgatctcaaaaatggtggagcaacggcgagaagattttcgccggacttatccactcactcaccgaattcaactaggcattgccctatccggccggtttggtgtggactacatcaga

SEQ ID NO: 309245 - DNA, 532 bp, Zea mays
cactgggaattaaacaatatgacatctacggttcttccgttgttgatgccggagtggaggtggattctggagaaccgaagcaggtggaagcgtcaaaccgggccagtgtaattgtgcgagtctggaacgaaaagggtttggtgggggtaaccagcaccacggatttggaccaagccggcattagtttagccctggaaaccgccgccgaagccagtgcttttggcatcacagataatattcccgacttcagccccgaagcccaagtgcccatcggtggcgcagagaatgacgtggcggagccggcccctatgggggatttaattaccacactagttaaagctgagcaggacttattggccagccatcccgccatcaccggggtgccctacaacggtttatcggaacagaccacggaagcggttttacctgaacagtgctggggccaaacgctatgaatgccgttcctatgcttccatttatctttacagtcgggcagaacaggaggtaaaaaaccccgcagtgccggagaaat

SEQ ID NO: 309246 - DNA, 397 bp, Zea mays
ggcattgtctgctattgcaatactggcaggtttttcggcgacgtaacggcaaccattggcggggtgttattcaaagtttgggcgcccaacttcgtcgctgtctaactaccaccttgaaaaattatctggaggaagaattgccccagatttatcaaggtgccctaggctatgtgcaagagaaaaccggccatggtgtggattttcctctaacctgtccctatagcctgcaacagttactagaatcttctccccccaattaaccaaggaaatagccaccatgagttatcggatggaccgccacagctacgcccacacctttggtcccacagtgggagataaggtacgactggcggatacggaattatttatcgaagtagaacaggattacgccacctat

SEQ ID NO: 309247 - DNA, 155 bp, Zea mays
tacactctttttttgaaaaatagggcccaactgcccaaggcgagtcctgtacccacgccgaaggatacacaggctttaactccagccgaaaaggaaaaattagctcctttagagcccctgaccataccccagtaagcggatctaggttttatctg

SEQ ID NO: 309248 - DNA, 395 bp, Zea mays
ccccaaccccggcgatcgccggaaaaagctgcaattatctatctctcaacttattcatggctcagggctacgagaaatcccaatgggatttgggtgagtgaaggttggtgggtggtagaaccgggggagtgtgtggtctattccgacagtgcctttacctacttcaaaattagcgatggggtggctccgaaccgcaaagccattgctgagatggcaggtagtgagtccatcaaactatgccaagtcaatgaccgcttcaccgtctttcaatcggacagtggtgctgtgtgccgcaatgcagggggcaataatcaaacatttatcaacccaggcgccaatctagaattgattgagtccactagtccctaggctagtttttcctggagtgtcttttc

SEQ ID NO: 309249 - DNA, 416 bp, Zea mays
cctcctttgaataataaacaaggggcgaagccgtcagtgtttgtttgaaaagtcaaaatcaaaggattgatccccctaaatctccttactaaagctccggcttaaaaagagggacttgtgtaacagtttcccccttccaaagggggctaggggggattaaacagccaaaacagaactttccaaacactttctcaaggggcaagtattggggattcccaggaagaaaatcccaattccatagaccttaaccttccctttaccatggtctggcttaatgactgtatcatgagcaactgtttagccagattatacaaatccgcgtcgagaacacatcaatgactactttcaagcagattaaaaagttgtccaagcatttagtgcccacagcttctatcctggcactaactggttggtct

SEQ ID NO: 309250 - DNA, 493 bp, Zea mays
  unsure (1)..(493): unsure at all n locations
gtctagagccccatcaattttcccctagttatgacttgtttgtccagaccattcagcccgaatttagagaactgcaccagagtattgctgataaggttattgccaccggaaaaactcaaaccatagagtatgcaataactcgggccgatgcttctatggggtggatttgggccaggattgaagcgattatcgatgaccggggccaagtcaatggattgcaaggggtggccatggacatcagtgatcgcaagatggccgaaatagccttaagggaaagcgaagcccgctttaggaatttgattgagtcgaatattgtcgggatgttttttgcttccaatcaaggggaaattttcgatgccaacgaccgtttcctacaaatgattggtttcactaaagaagaattggacctcggnctggtgcactgggataggctaaccccccccgaatatgatcaaaggatcaagaaattattgcccgtttgcggaatcatgaa

SEQ ID NO: 309251 - DNA, 428 bp, Zea mays
ccactgggttaaagcttccccggcaccggccggtaactgcttttgctccggtttaccaaggtagggaatatagtcaatgatgacgccgtgacggtcgaggaacagggctttgcggagggcactcaaggttatcggtgtgaatatttatttggctagattaaaaatggctttagtatcctacaggacggggacgcagtcctaccccccatcgaactaaatttgatccaccaacacccccgtgccatggagcttaatctgcaccggcttattaaacttactagccatatccctgagcagccggggaaaacgttgcaaaatttcccccaggggcaacatccgggcccacatcagctcatcccgcagggaaaatagcatctgcttttgggcatccactgtttgattggccgccctggaaaatagcaccacat

SEQ ID NO: 309252 - DNA, 505 bp, Zea mays
  unsure (1)..(505): unsure at all n locations
gagggtaacccccatctccgctctctattgagctggcacttccagcagagcggctaccttgtccaacagtgtagcggtttccaccaagcccgccaggcatttaataaccaattgcccaccctggccgtgattgattctgaccttactgatggggatggcattgagctttgccgttggttatatcaacagcaccagtcaatgatttttattctttccgccaaggacacagaaaaagacattgtccatgggttaaaggctggggctgatgattatctaaccaagccctttggcatgcaggaatttttagcccgcatagaatgtctaattcgccgggtccgcactgtggccgcccctttgttgttggattatggagtactaaaaattgatttggtacagcgtcgagtggaatatcagggcaattttgtcgacctcaccccccaggaattcagtttgctctacgtgctgacccaagcnggaggtagtgccctcagccgcacagagctac

SEQ ID NO: 309253 - DNA, 431 bp, Zea mays
acgcttttcgcaatattgaaaaggttcatgctgggcaaatgcttccccccatgcacctagcggaaattgagccgggggtatttgcgggggaaaaaattacgcctctgcccacggtgggtttgtacgtgcccaggggtaagggggctttcccttccatgatgttgatgttggcggtgccggcccgggtggcaggggtaaagaaaattgtggtttgtactccccctgacaaagagggaaaagtggagccggtttccttggtcactgcccgcatggccggagtggatgaggtctataaattgggtggtgtccaggcccttgcggcaatcgcctacggcaccaaaacggttagcaaagtggataagctaattggcccctgcagcatttacggtgcggcggcgaaaagattactgtccggcattgttgatgtgggt

SEQ ID NO: 309254 - DNA, 296 bp, Zea mays
ttctcggattaacttaccttttgcaggggggagctacctttatctttaacctcggtaatggcaatgggggctgtgtgctggaaatgattgcgacagcccaggtagtcaccaatcgccccattcccgtgctacaaggcgatcgccgtccgggagaccccccgattttagtgggcagcagtgaaaaagctcggcaaatcctcggctggcaaccccaatatcccctggcaaaagatattctgacccatgcctgggcttggcaccaacaacgccatggcgataattgcccatgcacacaa

SEQ ID NO: 309255 - DNA, 440 bp, Zea mays
taccaacaactagggttgtgattccttgctggttagttcctttaggggtggccagtggttgatgtcatccaagagcgctttgtagcccgccacgttaggatggagtccatcggccatgagatgatcgttaatccatgcttggccccgctgttgccaaatttcaaagatatctaggtagggaatttggcgatcgccgcaggcctgttgggtaatagttttgaaacgatgttggtcagcgtggttaaagtaaaaacaatcaaggaaaggcatgggagctttgttgacgggcaccataccgacaaaaagcaccgggcaaagttgacgggcgctgtccaatagctgctccacctgtttttgaaagagaatttcatcggtgaaacaccgtccatcaggccgacccaaccggagggaggtcgtttacccccacagagagaatcagc

SEQ ID NO: 309256 - DNA, 340 bp, Zea mays
tttttcattggcatgccgggcaccaggggtggcttttgggagttttggtgcggggccctagaagctggggcgatcgccgctgtggtcagtgagaaggcgttgcaaaaatttccgccccaaaatggagaatgcgtcattgcggtgccggatttagtgccggtgtgtgccggccttgcggcggccttttaccaacatcctgcccaaacgttgcaactggtgggagtaacgggcaccaatggcaaaacgaccaccagccatttgattgaatttttgctcaatcaacaggaacggtccagtgctttgctgggaaccctctacacccgttggcctggttaccaaa

SEQ ID NO: 309257 - DNA, 387 bp, Zea mays
cttccaatcaggatagtcgggatattaaattttttttgtcaaaaatccatgtaggctactgcggaaaatgaaagcaagctttggcactgagagaaactcctttgaagttcaggtatccggaggacgcttgattggctcagtttctgagggacttggctcatttttaggaattccctacgctgccccgccggtgggagcattgcgatggaagcctcctggggctgatatcggctgggatggtgcccgatctgcaacttcctttggcaatccctgcacccagtacctagacacaatccctgtcatcacagaacggcaacgcacaccatccgaagattgtctttacctcaatgtttggacccccgcacccggggattctgcgaaactacc

SEQ ID NO: 309258 - DNA, 501 bp, Zea mays
ggatgaccagtttggtcggcgatcgccagcttacgcgggagaagttgctggggaaactgcggaatttcatggaggtgacggaggacaaaatggattacctggccgccttcattgatatgtccaccaattactacgagcatacgggcattcaaaccttggcccaccgtttaattgagcgtgcggtggcagaaatttaaccccaagctcttatagcttgtttgcaaagttgtattttgccccctaaatcccccaatactgggggacttttaatactttccccccaaacttggggggctaggggggcatttaaaacagactctcataagcaaacccatggccaaaaaactattactggtggggggaggccatagcaatgctttggtgctcaaacattggtgtcgccaccccctggctgatgtggaattaacccttgtcagtgacgttagacaaaccccctattccggtatgttgccggggtatttagctggtttttactcctac

SEQ ID NO: 309259 - DNA, 519 bp, Zea mays
gctatggactggttaccttccaaggggaacagggttccggcgtcactctgcaaacagccgatggttggagccaatttgctgctggcttttttgtgggtggcatgggaggtgcctttgtggcttacttcctgttggaaaacctcagcgttgtggatgggattttccggggtctatttaactaaataaccttataacctttaaactgtttcaattttgccgttgccacgacggcctgagcttacaatcatccaattaataaggagtattaactaatggacggttcctacgctgcatcttacctgccttggattttgattcctatggtgggttggttatttcccgctgtgaccatggggttgcttttcattcacattgagagtgaaggcgaaggttaggctggaaaggtttgaagactaatggtcttttaattgaaaatgtctaaccatctttgggtgggtcaggattcctccgttatgcgggggattggacattttgatttgttactccgccagcgggtgg

SEQ ID NO: 309260 - DNA, 392 bp, Zea mays
aacggtcaggatttggaaaaaaccgttgaaaaacatgttttctgtcggaagcggaagtgcgttgggggctgacggaaatgctaaagattcttagtttcgtccacggcaccggagccattcatcgggatattaaaccgtctaatttaatgcgggaccaagagggcaaattgtatctgttggattttggcgcagtaaagcaagcaaccgccggggtgggggccagtaacgaaggttccacgggcatttactccatgggttttgcgccaccggaacagatggctggtaaccaggtttatcccgccacggatttatatgctttggctgcgacctgcctttacctgttaacgggcaaaacagcccaggatttgtgcgacgcttaccataaccaatgg

SEQ ID NO: 309261 - DNA, 473 bp, Zea mays
  unsure (1)..(473): unsure at all n locations
attgcggngggaaagtcctccactttgggtaggttcctggattgaggtagacatcggactcaaattatccgggtcggcgatcgccatgaggggagccaggggttgcatggggggtaactccaccttgggcaaattgatcgggggcggcggggtcaactctacggccgattgggtcagtgcggccagggcatcggtgtcaatggcggggttggggttaggggaaacatcctccacggcggtattttctgctataaaagcctctgccatgaactcagccccatctatctccggttcctcggtcaaattttccagggaaaccaatgtttttgcttgtgtatctgcctggattccacggtctgcctcatccccgttgatgtcagtttccttgccatcgctaaaccaatccagggcatcccctacctcacttttatcctctccatcgatggtggcaaaagaagcgctggtttccgacg

SEQ ID NO: 309262 - DNA, 292 bp, Zea mays
ccaaccccatcagcgatcgcctggccacggaggtgtttattttacccatctggccggaaatggaaaccgaaacggtgcaaacggtggctgaaaaaattagccaggttttacctagtttgtaaacttctcccaccatcaatcatctatgcccatggaagccggacaacaattcctcacccccgctgagtcccacgctgttgatggggccctgctcagtcagtcggaaaagtttctcacccgcctcaccattttttacttgcggtttttgcataccattgcggcggaagaacaa

SEQ ID NO: 309263 - DNA, 412 bp, Zea mays
cagccctggctccatcccattgatttgcaactgtagggtttttttttggaacaggagcaggtaactaagtcagcggattaccagggtaaaaagttagatgaatggttgaccttggctgtgcaaacctatttggcttttttacccccccatctgctcaaaaaggccttgcagttactcaaaagcctggccgatggacagcaagctctttgtctcaaaaccgaatatcagttactagccgcgctctattctgcccctgaaccggccgcggataacccgccggagtttgcccaagaagacattcagcaattgcagttactgctgaccctattgctccggggcagattaatcattgtgatttcccaggccacattaccctattaccgtctcagtacgactcatttagcccatgctc

SEQ ID NO: 309264 - DNA, 378 bp, Zea mays
gctctggatgaccaaacaagcccgttccctgcggggggttttccaggggcaaattaaccaggcggtggaaaaagaaggagggggtaaagccattgccattgtggttttcattgctgtggtgcgggaaggttttgaaatggtcctattcctagcagcccaacaaaatatggccaatccagcggcgatcggggcggcgttggcgggcattggtacagcggtagtgatggccttcttaattttccgcctaggggtcaaactgaacttgaaacttttcttccaggtgatgggcaccctgttgctgattattgtcggaggattggtgattggggtgctgaaaaatctcgatctggcggtcagtatgatgggcttggccaatct

SEQ ID NO: 309265 - DNA, 350 bp, Zea mays
ttggcttcctatctagcttcatggggggtgtgctaaccggggtggtggtggcgtctgttccgttcgatatccatgtccacgacacctattttgtggtgggacacttacattacgtgctctttggtggcagcgcctttgctttattttctggggtttaccactggttcccgaaaatgactggccgcatggtcaatgagcccctgggtcgtcttcacttcatcctcacttttatcggcttgaatttaacctttatgcccatgcatgagttggggttaatgggaatgaaccgccgcattgccctctacgacgttgaatttcaacccctaaacgttttgagcaccattggagcc

SEQ ID NO: 309266 - DNA, 380 bp, Zea mays
acccttgcctaacggtttccccgacggtattctgcttttatccccggatattcttccccctggcagggtggcgatcgccagtgtggaaattgacggcaaaccctatgaaaatttcgatgcccagggcttaactgtgaccttacccgacagacaagaacgggtcaaaatcaaagttcgtttagtccccactgcctaagccccatggatattcaaattaatcaacaggaagacattaccgttgtcacccttagcggggaagtggacgccaacacggtcccgaaaatccatgaagtgattctgcccctagcggaaccggggtcaaaaattcttctggacatgaccgctgtgccctatatgtccagcgcggagttacggctttt

SEQ ID NO: 309267 - DNA, 278 bp, Zea mays
tggctctgggcccggatgaagcggctggggccgtaggttcctgtttgattgggcaaacccttcggtggcgtggggtttgtgcaccagacttggggctggctcggggataaccacagtggtattgactttttgggacatggccaagctaggactcaaggtaattgccagactaagggaaaaaataaataggcgcatggtgatacctccgagccgaagctagggatgctccatacgcactctctcccggcgatcctatagagtcgacctgcacgcatgca

SEQ ID NO: 309268 - DNA, 529 bp, Zea mays
ggcagtgatgacggtgttatttatttttcggattattctcatttggtatccccaggtagagctgactaaagtggccatggaagctcattgccctacccaccgagccattattaattcccctgcgtaagctagtgccccccatcgggggcggggacctagctcctatcctctgggtcttcatctgtacctttttacgggaaattcttatcggtcagcaggggctgatcaccatggccagtcgcttgcagtaaacccgagttaagccttatttgcctgaactaattgttagataagttaagtaagaccaagcttagctaacactggggtagtagaaaccacatggcggtcaagtcccagctccttgggatcaatgcctagggccaaacctaccaattggggcagatgtaacaccggtaaatttaatggttgccccaatacctgaccaatttccggttgacgggaatccagttgcagatggcataggggacagggggtaactaaacaatcggccccggcggcgatcgcccat

SEQ ID NO: 309269 - DNA, 358 bp, Zea mays
atgctctgcacccagggaatatctcagcggaacggttttgtttgtgaaggaacccccacccggagagtggacattattaaaaatggggtggtaactggcttattacacagcgctggcactgataagcgggttgatacccaacccactggccacgctaacatcgggggtaaaatcaccgtcggagcccacttttaccatgtgtatagcgagaaaactgctgaaaaaagctacagtcttgatcaagcagaaaacgtactttatatcgataaactccaagctctccacgccggggttaattccctccaaggatccttttccttaccttttgatggttggttagtaaataagggtgaaaagc

SEQ ID NO: 309270 - DNA, 243 bp, Zea mays
aactattatttcttaaaaactatgtgttgctctacccatcctggcggttgctggcacgtttcccacctactttgtaggggtctatgttgtgggtttggtggcggcggtgctcatcggtttggtggcctggaacaattccaaacgccctgtgggccgggaaagatcaaagagaccagattttattcccaaaattaacaccggcagtgattcggagccaccccaattcacccctccggaaaactt

SEQ ID NO: 309271 - DNA, 541 bp, Zea mays
ggggaaagcgccatgtttagtagcctagatataatttttgcgttttttctgtgccaacttaagtcgagaatggggcatctttcccaatttagatgactattgggatgaagaattatttggcagtttagttagttgtaaaacctacgtacaggattatttacttagtcaaactgaccgggcgttagtaatggccattgataacctagaccgcttgtttgagtttcccgttattgcccaagacttcctgcccatgttgcgctattggcatgaagaaagtaataacctggctcaatggcaaaagctacgtttaattattgctaattccaccgaagcttacgtcaaactagatgccaaccaatccccttttaatgtgggtcgccaatggaaattgaccggttttaccaaagaacaaattctgcaacttaaagccgcctatggttttgatgacaatcaaattgaagaggaaaatttattaaccctcggtaaactggtggggggccatccgtatctgattcgtttggccttggatgcggtacaaaaa

SEQ ID NO: 309272 - DNA, 428 bp, Zea mays
ccattccccaaaatgttgctcgtcgtacccctggccctagtttgaatcgtttcaaggaaatggctcgccaagttaaggttaaacgctaaaaacctcattgatttactgctttatactcaattaggctaaatcaggggcaacaggggttgataaaaacttttagataagtaacttcagtccataaagcgtaccctgtcttaactaaatcagtcataactttggtctagccatttgtgggggtgccattcccttccactgcttgtgagaataatcacaggcagattttttgttacttcgattcagaatctgttggtaaagtttcaattttcctctcaatcgaaccactaaagctctaggaataccggggaaattttatctagctttccaccaaatttggaggccgcgggggttcttaaaataggctctga

SEQ ID NO: 309273 - DNA, 377 bp, Zea mays
gccactggtcttttcctttccggccccattttaaatttgttttaccccaatccattctgggggaagaatttccgttcccaactccttgtcaaagtgctttgtggccgatgtcccgtcggtaatacataccatcaaagtcaatttgttctactccccgataggcagtggcgatcgccgtggataagtcttttcctagggcggtgactcccaatacccggcctccattggtcaaaactttgccttcctttaattctgtgccagcatggaataccttaacatcttgagcttcggcttcagccaaaccattgatttcattttctttgcggtaactggcgggataaccaccagcggccaccaccacacaaacagcattaccg

SEQ ID NO: 309274 - DNA, 479 bp, Zea mays
gccccattgcggctttcaacctgggttaagccaaggggtttgtctcaaaacgttgcaacctttcaaaaggagtggcccagaaaaaatttcccctgaggaagaagccatggcaacagccaatgaatttgaatgggtttaatcgtttaattgggtgtaattacctgggtgatattttcttaagtgccgtaccgatcgcgcaagtcctggttgaggtgggagcgatcgcccatgacttcaatcagaggaccatgttcggacatggtgacaatactcaccgccgcaacaggcataccaatgcggtctcgaaaacggccaatgtcaatgcccagcaagctacagagcataatgcggatggtggacttgtgggacaccaccaacacattccccgtggtaaaagttggttcaatttcttctagcacctccgagctacggcgggcaatatcaatgcccttttctcccccagaaggagcattccaacc

SEQ ID NO: 309275 - DNA, 194 bp, Zea mays
catcaggaaatcgcagaacagtacgcccaatacgactatttttagccagaccagatgttggttattcccgccggcactgatttagaaaagttttatccccccaaagggaacgagtgggaaacgcccattgttcaagagttgcaacgatttctacggcatccccgtaagcctattatcctcgctttgtcccgacc

SEQ ID NO: 309276 - DNA, 534 bp, Zea mays
ggcggacgtcgtggggtcgtaaccaggggcaatgtccgttactagggggcccttcttgtggaagggagcttcactgcactctgccatttgctttttaacgttgaactcaatttggtcaatggggacgtggccggggccttctaccatcacctggacatcatgctcccaagcccggcgggttaactgaccgagggttttaagttcagacaattgagcatcgtcggaagcatcgtgggtacagccgggacggagggaatcccccaaactgaaagaaacgtcgtactttttgaagatttcaataatctcgtcaaagtgggtgtagagcggattttgcttgtggtgatgcaacatccatttagcaataatgccgcccccccgggaaacgatgccagtgatgcgagatttcactaagggtaaatactcaattaacaacccggcatggatggtcatatagtccaccccctgctgggcatgcttttcaatgatgtggaggaaatcatccggggtcaggttttcgatgctaccgtggacgct

SEQ ID NO: 309277 - DNA, 487 bp, Zea mays
ctcttttaactactatgaccagaatcatgcaagatctattgcatagtaaacttcatgcggtaattgagcaactaaacttagttaagcaagttagtgattccgaattctggataacgacggaagaattgtgtattttgcgggaggttgatgcagacaccttaaatatgttgaaaactcaagaggtattatttcagtttgcttggcgaaattttgtttgcactttagttagccatcagggtaattacaaactttggcaaattattaaccagtctcaagtcgaatcctttttacaatcaactgctagccaagctgaagaatcctacgcaccttcatttctaattaatcacaacttttataaaaacttatctaataattcatctataggtcaaattcagatagagcgacagtctacttcagctactccccaagctttaccagaaattttgccatcccattttattcaggtgaaagattttttgagtgctac

SEQ ID NO: 309278 - DNA, 378 bp, Zea mays
gcctccaacctgccccccggggaaattcttttttccctattcgggttgagtgtaatgtatatcgtctgggtaattgccactctctatttcggcagtcgcattatccgcaatgggccggatttaaccttgcctgctccccgaggttccgaagcttccctttggggcactgtgaccaagcatgaaaccaaccgccgtcccgctgaaattgctgaagttaaggagtaacccatggaaccgttagaaccgctacaacattttctgccccaggtttggtttttcattttggggttatttctctttctctatgtcctgccggatgggcttgatcaatatgaaggcaccttaaagaatggccaacccgacggtgagggaattttt

SEQ ID NO: 309279 - DNA, 323 bp, Zea mays
  unsure (1)..(323): unsure at all n locations
cctgcacttatgaagccgncattattggtatcttccgttttcgttatcgngggtgctccgggagcgggggtatcattaacggcactatcacggccactggtaccttggttaccggcaatatctgtaacaaaggcggcaccggggaagagtacctgggttgggtactgctacctgggtggttactactccggcgttgatttgggcggcggttaagacgatggtttggggagtggtgccatcgctgatagtcaggatatcccctgctaccacaccacctggtatagctatagatacatccactaacccactcaattccccgacac

SEQ ID NO: 309280 - DNA, 424 bp, Zea mays
ggcagatatttacggatttctgcacaaagtttttttttggataaattagcatcctctaagggggcgttattgggcttaccctggatggattcaaaattttccaagccatggagaaacaccttggccacatcccggatatgaatataattgcgtttaaaatgaccttcaaaaataaccaccgcccggtcataaaaagcacggtagacaaagtcattgaccaacaaatccacccgcatccggggagccataccaaatactgtcgccaggcgaaaagtcatactgttatcccgggctaacaccgctttttccgcttccaccttagttactccatagagggaaatgggtcgcaggggactttcttcggtacaaaatttacccttttccccaatgccatagccactattggtaactggcatcaaaatcc

SEQ ID NO: 309281 - DNA, 458 bp, Zea mays
taccctcctgggaaatttgctccgccatacacaggctaattttcggcgcggtaacgctactttttaaatggggaatgttacaggtttgaacagaatcaagaaaggttaaataggacaaaataccatcaaaggcataacgctcttcgttggttaaattccagtaatcggtgacatcctgggtaatgtctaagcgctggggaatccaaaagttctcccgcatttgttgatacaatcccactgcccagttgtagcggacatcattcaactgcatcaagttggtagtgttgccaaaccaaatggtgcggttctcgacggaatcgttgccagtggggttaaaaatgggggtcacaggcatgggcgctgtgggattaacggtgctgacaaccatggaatttgggcagtaaggaaaattgtgaaccgacctattctaacccagtttctttgggcagtcttgatcc

SEQ ID NO: 309282 - DNA, 222 bp, Zea mays
ggaatcactgaagtaatttaccagcctatgatgctagcatttattggaggaaacactgagattttaggggggattgttgccatcggaggagcggggggtatcgttggaggaactatacgtcgtatttggctgaggcttcaaaagaagaacaactggtgtttatattggctttatacccaatgcattcagtcgggtggacatggcactgattgcccaaccaaa

SEQ ID NO: 309283 - DNA, 427 bp, Zea mays
agataatttgtaaaatttcctgctccagggggccctgggacaattgttggggacggtaggggggaatccagctcatggggaggagaaaatactaattctttttggagggaataacccccatcactaatcctaacttcccgcaggaagaaaacaagctatgaaagcaaaaatatcctcagacttaactggttgtcacaataggggacggactggacggaataaatggctatggtcgggatgataaaggcgcgatcgccggggtaaatcagtctttaaagctgggctaatcaggtaaagggtggtgcggattaaattttcccgcaaacttaaggctgccatttctgccaagggcactaaccaaatcttttcatcgggccaacccacccgaaaacaaaccgctacgggagtgtcgccgggataatgctct

SEQ ID NO: 309284 - DNA, 266 bp, Zea mays
agcaaattttttattgctttggttgtggggctgggggcggtgcctttaattttttaatggaactgggtaagcgttcctttacagatgtggctttagatttagcccgtcgctatcaaatccaaattcaaaccctagagccggcgcaaaaacaggagttacaacggcaactatttctgcgggaacagctctatgaaattatggctgcggctgccggtttttatcaccatactgtttttcaaccccaaggacaggaagctctaacttat

SEQ ID NO: 309285 - DNA, 417 bp, Zea mays
atccccgcttccaacgccaaaattttttctacagcggcggccctacaaaggctgggggccaatgccacagtgcgttcccagcccctacgtaattgggtgatgaccacaaataaacgctccaacaacagctatgcagaattgctgctcaacacggtgggaggccctggggctgttaaggcggctgtggcggaattgggagttaacccccagggttttcgcgtagccgacggctctggtttgtcccgcaataatgcggctacgccccgttccctagtagacaccctccaggcaatgtatcgcagtagcaatagtagtttgttcgtttcttccatgccgatcgccggtcaggatggcaccctagcccgacggatgaaagctaccacggctcaaaataacgtctttgcaaaaactggcacc

SEQ ID NO: 309286 - DNA, 393 bp, Zea mays
tggcctaaccgggggcatggcaattcggaactccaacttgtttgaaatgctcctacccgtggcattgtgtgcgatattgggaattcttattgtcttcatcgcccgttttaccctggctaaactgcctaacgtcagaaccgtggatggcctggccaccggcggcttgtttggggcagtcagtggctctacaatggctggcgccctcactacgttggaagaatcaaaaatttcctaccaagcctgggctggtgctctgtatccctttatggatattcctgccctggtaacggcgatcgtcgtagctaatatctatctcaataagagaaaacgtaagtctgctgctgctagtattgaggaatcgttcagcaagcaacccgttgccgccggggatta

SEQ ID NO: 309287 - DNA, 480 bp, Zea mays
gggttataaaattctgctccctctggggtaatgcggtttttttctggttggtaaatttccaccgggtcccgttcttcaatgggaatctgactaccatcatccaaagcaaaatccaccgtagataatggggcggccacaaaaaagggaatggcatgcattttcgccaacaccgctaagccataggtgccaatcttattggctatatcgccatttctcgcaatgcgatcggcccccaccaccacggcgtcaatgcgttgttgttgcatgcaatgggcggccatgttatcggtaatcagggtgacgggaatccctgcctgcacacattcccacacggttaatttcgccccctgcaatctaggtctggtttcatcggcatagaccctggccaagcggcccgcagaccaggccgcccggataaccccgatcgccgtaccgtaaccagcagtggccaaagcgccggcattgcaatgggtgagaata

SEQ ID NO: 309288 - DNA, 271 bp, Zea mays
gggccgggcggccaattcccttaccgtttgtagggttttttggttagtgattagaaaatctaagcccagctgagtggaggagttgtccaaaatccgcaaacaaaccttttccccatagcggctgggtagggtattaacccgaaaatccacctttctgccctggtaaatacggtgaattttgccatcctggggcgatcgcctttccgcaatgtccatgtccgccataattttaaaacgggccaccacggcgggggtaattttgcggggcagg

SEQ ID NO: 309289 - DNA, 223 bp, Zea mays
acgttgccctggcctataccatccgcgatcgcctgttgtttcgtttcatcaagaccggcgccacctatgggcaggtaaaagtgaaggtgggttgttacctgtcggcggaattcctgatgggacggcatttaggcaataacctcattaacctggggttgtacgacaaaatcgaccaggtaatgaaagaatttgacctggacttaaacgaaattattgagcagga

SEQ ID NO: 309290 - DNA, 429 bp, Zea mays
attgggggagttcacttcctcagccacggtttaattttttcttttgttgagaggtggtcaaagcggggggttcaggcattcccatggcctcctgcaactcccgggggggagcggaacgggtaccctgttgtaaatacttgccgtccaaaatcggcgccaccactttcatttggtgggaagtgctgtagtagcgatgggtatgctgagtaatggcccgctcttggatagattcattggccacctttttgcgcagtttaataatggcatcaaaaatggcttcagtgcggcgagggcaaccgggaatatacacatccaccggaatcaatttatctaccccccttaccgctgtggtggaatcactgttaaacataccaccggtgatggtgcacgctcccatggcaatgacatactttggctccggcatttctt

SEQ ID NO: 309291 - DNA, 306 bp, Zea mays
aaacttacttattgggttgcggggtcaaacgcaaataaggcttgatttcttccacccctttggggaattcgaccttaccatcctcggtggaaatggagggcaccaccacacacttgtccccatcttgccagttagcgggggtagctacttggtgataatcggtcaactggagggagtcaattacccgcataatttcgccaaagttccggccagtgctggcgggataggtgaaagttaagcgtaattttttggccggatcgatgatgaatacagaacgcaccgtcaaattattgagggcattggggt

SEQ ID NO: 309292 - DNA, 480 bp, Zea mays
gggccgttaaacgagatttgccagaaacaggggagcttcttataatctgttgatgattccgccccagggtgagttacagaaacggttacgagcactgttgaacaagttagtgagagtattccaacagaagcagaaagtgcaatagaaacagcagaagaagtagtggtggaattgaatcaagccgccgaaaccctggccgaagaagtcgtagaaaaagctgaagaagcggtggaaaaggtcgctgaaatggttggccaaaaggaagaaaagccagttaatcctgctccagagaaagaggaggaggttctgctcaaaaaacctaaatcgaaactgtttcaacgcttatttggtcgtaaaaaggcggcagttcccccagtacagcccaaagcatcccagccagaaacggtggagcagaaagtagccattgagccggagagttccaccgctcaaaccgatgattgggatgacggggaagattgg

SEQ ID NO: 309293 - DNA, 424 bp, Zea mays
tggtggccttaaaacctatggggagaataaaaaagacattaaagagttaatgcccgacctcatggattcagccgagcatttacttaatggcgggggagaacaatggttagaagcggtgggggattgacgcaacttttacatacttttcccaccacaatcagaggactaggttggcccgttaaacccgttccaactaaccgccgtagttccagccagtgctttctagtaataagggatctccttcattaaaaacctgggctccaatgacttcgccgacaaaaacggtgtgatcgccgtgggccacagaccctaccacccgacactccacataaccgagacagtctttgagcacaggacaaccggtttcgggggcatcaagcacatcaaaattttcaaacttgtcccccacccgccgttggggttt

SEQ ID NO: 309294 - DNA, 259 bp, Zea mays
aactgttgatctaaattaaccttcaattgctgagtttcttgctgattactttgctgactaggtgaccgagccgccgccggcgccggattgagcagccattgcccccaataccacacctgccaaattttccttagggatggttccagcttttgataaacttcgtaggattgatacacccgagctagtgaaacttggttgagggtgggggaaaggttggcaacccagcggtccatatcatccactgtgccccggattaaac

SEQ ID NO: 309295 - DNA, 533 bp, Zea mays
tgaattaagtcctgggatatttttaatctaagctattaatttgccctacggaaaccaagctgatgggaggcaaataactgataaactacagacctattcccttaacctaaaccatcctaatggcaaacataaagctagactttttcgagctaaattgggtataacaatagataaccaagactttcttattactaggctcagaaaagtagccgctcattatcaaaatttcgaattgacagattctgaccagtacggagaacgttatgtggctgtttttcccatgaccactaccactggaacagcgaaagtacttagtgcttggataatccgccccggggagacctatcctcgactaaccaatgtttatcccattcgcaattagcatcaaggaaattacacttatggacaaccttcaactacatagtcttgtggcgttaaaagaagatattactgccaagctttttctgacaagccagccaattctattgcgtcagggacaagttgggacaattattgagatcctggggggaggg

SEQ ID NO: 309296 - DNA, 267 bp, Zea mays
tattccatttttttcgatggccaggactatggcttgggtggcttattacgtcttgtagcggaggggcaatgaattagttttggtggccacttctggcaacggccgtggccccaaactcggatttggtaataccaaggggattggcacatgttttatgcaggtacagctcaacccatgctggcagttcactaaactcacctactaaggtcaagttttggggcactactacattagtggcacccaggccggtattttgggcggaaccgc

SEQ ID NO: 309297 - DNA, 357 bp, Zea mays
gggacattaagggcgtagtggaaccaattttgcttatggccctagtgattcgccacctagagagaatggccggccatgccaccaatattgcccaacgggtttcctatatcgtcaccggcaaaagggaatgagatagggtgattaatgggggagtggggagattaggtcggatggccacgaagatttgctaaactggacgcagagtagatacgcaacggtgcggtctgccccaatcttggacttttttccagaagtgggtgtcccccgctttttttatgcccaattgtattcaatgacccatcccgttattcccgacattcttgcattagcacagcccattgccgaggatttggggct

SEQ ID NO: 309298 - DNA, 481 bp, Zea mays
tactccgctgggactggggcagtccctggcggggcattattacctggtgtagttcccatccccttttaggtaagaggctccaggtgttgagtcattacgccgaacagttagacctggacacggaatataacctagtgctcagccgtcgacaaatctccctggaagaagcaaaaaaaagagctttatccttttatcttgaggtacttatttggctgctgcccctctggtttgccctgggcttgggctggtggacccaacaggaaaaccccgttcttaaactgcatctacaccaagccatactggtgggtctaggggcgggcatcttactgcgtactgcctggcaaagtttggggcaaaggaaagtggcggcccccaccgtagtgagtgtgctcagcgaccctaatttaagtcccatctggggtacccaggttaattggcaaggtaaattccgcctggtgcagctagtgtttggagagcgccc

SEQ ID NO: 309299 - DNA, 342 bp, Zea mays
ctggtattgggaaaattcagtcgtgcgtaggccactaattgttgatcattggtgcgaccaaacaggtgccatgattgtttatccaacccgtcattgtctagatataaacatacctgctgtaccacaaacacttgctgccgtagggcatgcattttgtgcattgcttccccagaaatatcattaaaccggtggcaagaccaattaatttccacggggatcgccttttttccatattggcaattattaacctaatttttttgccaaaagctgtcgcaatactgggaaattttgagtcaattgtcccccaacttggtgagccaggggactttttaaacaattttt

SEQ ID NO: 309300 - DNA, 430 bp, Zea mays
aaaccggggggggggggccattttcatcgatggttccaatcttttttacgccgcattacagttgggcattgaaattgattacgccaagctattgcactgtttaacgggcggctcccgcctattgcgggcttttttctacaccggagtagaccgtagtaacgaaaaacaacagggatttttactttggatgcgccgcaatggttaccgagtcattgccaaagacttagtgcaattaccagacggttctaaaaaggctaacttagacgtggaaattgccgtggacttgatgtccctggtgggttcctatgacaccgcattggtggtcagtggcgatggggatttggcctatgcggccgatgcggtcagttatcggggggcgcgcattgaagtggtgagtctccgttccatgaccagcgacagtttaattaat

SEQ ID NO: 309301 - DNA, 294 bp, Zea mays
gtaagccctttttatattcaaaaaaatggtttctggctggggccagacgtttctcaacaggttttggaccagggagttccctggggggatcagcccgttacggcctgacaactgtggcagtttccccccgaagcgggccgaatggaggtgtggcttaccattttgctcggccccaacggtgaagatgggacagtgcaggggttattttgtttgatgcatgtgccctatgtgggcagtggcttgctgggtctctgtgtggtcatggatcaatcggcgatgaaaatggtctttgaa

SEQ ID NO: 309302 - DNA, 179 bp, Zea mays
atttcctaagggtggcaggcagcccatctcaatgtccgtttaaccttaccgcctgattttcctcccttacttgcccccattgtccaacgggctttggagaaattaccccaaagacgatttcccaatgccacagccatggccagtgatttggccacggttcaaaaacaaatattggaaca

SEQ ID NO: 309303 - DNA, 483 bp, Zea mays
aggaagaattcctggctctgaccaatttagcgaccttgttcgtcatccggaaaatttagtcatttctggggtattgatttatcgaatcaatggaccaattttatatttcaatattaataacatcgaaagtgatttatttaaccaccttgctcaacagcaagagccagtagagttagtgatttttgaaatgggaacctcccctggtattgatactcctgctgctcgttggtttaaaaccttatcgcaaagccttaatcaacagggcataactttaaaattagtaaatgctagcgggttcgtgcgggatcgtttgcgggcagaagggttagaaggtgaagtaggaactttccgacgtttagacaccgttgattccctgatttctgagtttaattgccaacgatattcaaatttaccccataccgaaaatgactgaagagtgacattttatttttacttggtaaatataatttattcacatttgaa

SEQ ID NO: 309304 - DNA, 426 bp, Zea mays
tgcccaagtggtgcaattattcgattcttgggccgtcctattaagcccccaagattacgacaccttggccctgccctaccagcaaaaggtggtcaaactggtcaaagaaatccatcccgatacaccgttaattctttacatcagcggcagtgccggaattttggaacgcatgggtaaatccggggtggacattgtcagtgtggactggacggtggacatggccgacgcccgccaacgcctgggcaaagagatgaaagtccaaggcaatatggaccccggcgtactatttggttcccaggacttcatcaaagaacggattttagacacggtgcggaaagcagggcagggggggcatattttcaacctcggccacggtgttttggtgggcaccccggaagataacgtccgcttcttctttgaaacagc

SEQ ID NO: 309305 - DNA, 491 bp, Zea mays
atttaggtacattagtgtaaatgcggccaattcccccgcgccctggccagtcccccagagttttaggtacaggcagagccaacctagggttaattgcaatgaccgacgacttaaacggcgacgttgacggtgatgctgattgtcgccccagttaggttggtctggttggcgtaactgccagagggacggtaatatgcccactacgggaagcaggtataaacaaagttgtaggcgcattagtttcgtgtcggcaaaacgctcttcgttcactctgattttccatcctgcttatgatcccagcttgaccagcgctgattttcccattaaccctaaccttgctgaatttgtccatggcctctacccccaattccgtaactctctacaccgatggtgcctgctccatgaatcctggccctggtggctatggcgcagtgattctctacggtgatggtcgtcgggaggaattgtccgccggttataaaatgaccacc

SEQ ID NO: 309306 - DNA, 399 bp, Zea mays
gcaaggagggttttcttttcctggggcacatggggttcttaaagacgccaccacttccacttctaattgatagcggcggtgtagttcgatatagctcaaaatatagtccttacaatcgtgggtgccctgccaacgttggtctgctgtcaatttggtttcccccacgtaaagcaataatggccaacggcgatcgaggatgaaatataaacaaccttgattttccccggttatattggctgaatccttgccctgtcgccaaaacagggaagactgttggggcaaagtaaatgggtcaatttcgtcggcatggtgccaactggtgaccggggcatcaaacagcgaaatttgctggggttggccagctttccgttgactctgttgatattggtgaattttttc

SEQ ID NO: 309307 - DNA, 269 bp, Zea mays
aaaaaattggggtgggtatggggggcatcactgccagcgaatttttggcggggtttttccttagttccctcaagggtttactcgggttgacggtgcccttaaccgggggattggccttggccccctatatttccgttgccctcacccaagctagtgtggccggagtgtccaccttggcgatcggtcaagtgaccaaaacctatttagccaatggggccgcctggggagaaacggggccaaggacagtggtgcgggatattctcaactct

SEQ ID NO: 309308 - DNA, 430 bp, Zea mays
ttgcttagcccgattttcaatggcctgggcggccgcttgggaactttcctctggattgggaattaaacccacagtgaaggtgacctgggaactgccctgcaaaaacacatcactgcaccagagccggccacaacgtcttgctttattggtatcccaccaaggggtgctagaagtattctgactgccattgtttccccccgaagaaagggttatttgcgctgtagcaggggggatgagcaccgctagggtgaaggccaagagacccagcagaatcagacgcttgacggtggcaaatcggcaacccataggcatgttggggtttttgtaacgttttcgtaaaaattcaccgccatcttaacagtgagtacacttccgaaatagtcaatataaactattgttgctctctgggttggcgattggggtgaaaatc

SEQ ID NO: 309309 - DNA, 425 bp, Zea mays
attggggggcaaaccgttggcaccacacagccagatgactctgccaacccaccaaaatttcactacggttttgttttaaacctttgactaaggattgggccactcgaccggcggtcatggctctgacccagcggaatttttgtaaacccttggccatatccgtgtcggtcagggtgggtagcagggtaaccacagcgatgttatggcgggccagttctccccgcatagcttggctaaagccgagaatggcaaacttagtggcggaataggtggccatggtgggggccgccactttgcccatcaaactagaaacgttgacaatggtgccctctttttgggagaccatgcgtcgggccacgcaacgggtgatgcaatacagacccattaggttaagggaaatttcttggtaaacttccgggaagcgg

SEQ ID NO: 309310 - DNA, 407 bp, Zea mays
tcgaacaactaggcgaaggtgaataaattagtacagactaaaagccttgacccacttccagatagcgggttttaccctgacgggataggatcgcctgctgaccgttaaccgccgccaattgccaaccgctactaccgatcgcctcaccgatttgaatgcgttgggtcatgccattccagcggaacagagccgaagaaagctcaccggattccagaactcctactaaatcgtgtttagttttactgggcaccatcggcactgccgggggagcagcggccacgggttgggggggaattgccatggctggagcagcttggccgttggggtaaacggggtaataatatcgttccaccacagtggtactaccaggagcgactgcggtcagattgccaccattattttggggc

SEQ ID NO: 309311 - DNA, 465 bp, Zea mays
actttttcttgcacccaggcaaaggtcaagggtaaccaatggggaaccgtttttttcggggcgggtaaccccgtaatggtggatagatgggccaaaatccgtggaagactgatattttcatggcccaaaatatagcgatcgcctctggtcagagcagtttttccccgttgccaagccaggagatgccccgccgccacatcccgcacatcgattaaattcaagccagtgttaacgtaggctggcatttgtcgccgcagaaagcgcagaattatttctcccgtgggagtaggtttaatatcccaggggccaatgggagtgctgggattaacaatgacaatgtcttggccttgctgggccgctgtcaatgcctcctgttccgcccaatatttggactgtttataggctccaattaacttttccactggactttgataactttcgtccgccctttgaccgtccccttta

SEQ ID NO: 309312 - DNA, 456 bp, Zea mays
gaactttgttgttggaggagtgccatgaccagctacagcgaacagtattcatctacttcaacaattattgatgaggaatttgatgcgggaggaaattatccaactgcatttgggataaccttcaccccccaggtaagtggcattagctcaggtattcttggcttgctggccatgggttatgttctgctcaattttgtcatgccagctttgggagaatatcaacaactaagacaggactaagaagctaaacaagctcaagtggatcagcagtccccggaagtgtttatgcgtcggctagccaatgcggaggtgcagttacaggaagctcaacagcgtaaagcgacagtgttggaactctacgccaatagcgaggacttgaacacaatcctctataacttcaatactctattcgtaaatagaaacgtgaagttagtcagctttttgccccagggagat

SEQ ID NO: 309313 - DNA, 542 bp, Zea mays
  unsure (1)..(542): unsure at all n locations
ggttttgggttgggcatctagcaccccaaacatggtcacagtatgacccctctgttgcagttccttacccaagggcaacatggtattgagatgacccgtcgttgctggacagagcaaaccaaagtgagtcatagcaaacaagagttagggaacaaatggggggataattggctatggacaggactatagggctccggcggcggttttatccaacactgtgcccaaatggcccatcaaattaatggcttgaataactgggggcttatctagaccctggggatagtcaatgacgctcaccccgccattaccctgtttaacttgccaaaagtgagcgggagtaagacccaacaaataagccaaaatcaccttgttgatggcatcatgggccaccacaatgcccactgtggaaccatccccctggctatagaatttgacccggtcctgccaacaggcgatcgcccggtcccagacctgttgtaaattttccccttccggcatctgcactgtggcggnggcatctttccactgttgcaataatccgg

SEQ ID NO: 309314 - DNA, 500 bp, Zea mays
tccaaactctgctaacggcagaaattgcggaagcagtgcaattccacaatttactcaatcaggttctctacaaaaatacccaacggatggaactgagtgaaaatatgaccctggtgatgttagattatcaatcgggggaattaatccttagtggccaacatgaatccatttttgtggttcgtgctgatggcgccatagaagaaatagataccattgatttaggctttccccttgctttggagaaagatattacgacctttattgcccgcacccaaattaatttacattcaggggatgtggctggtgctatacaccgatggtattcccgaagcagaaaacggggaaaaacaattttatggtttggcaagatttcaagaggtgctcattgccaaccaccagtcaacagccttggaaattagtcaagcagtggtggaggatttaatggcttatattggtgacagccgggtttttgatgacattactttagtcatttttaaaaa

SEQ ID NO: 309315 - DNA, 221 bp, Zea mays
tgagggatgaccagggtaaagtagacggcttagtatgggttttcaccgacctacgccgacaaaagcaaattgaaatgagagcggcaaagacctggattttgtggtcaaaaatagtatccgagttaatcgtcatcacctacctagagcaaaaggtgactttactcaaccaggcctggcaatccttaattggcctggaatatccggaaaccggccaaaccacc

SEQ ID NO: 309316 - DNA, 541 bp, Zea mays
ttgctgacccatggcgggcatggcggtatgttgttcacaagacattgttaaaacattcttcattgcttctactaaatcaggaatggaggctgggggcacaagccagccggaaacccccggtttgaccagttccggtatgccggccacataggtgctgatcaccggacgacccagggcaaaggcttccataattaccaccggtaaaccttcggcgaaactcggcaaaaccatggcccgggaagctaataaatgttgctgcaccatggcactactggcccagccagtaatagtaatgttttcttcgagttgatattgctcaattaattcttcaatgggcgatcgcagttccccatcccccactaaaaccagctttaccgcaataccgttatcccgtaattgtcgcactgcttgtactaaaagcaattgccctttttgttcacacagtcggcctacacagactagttgcggaacctctggtaccggggtgatttcttgctggagataatccgccgccaatgcacaatggactacttgaattttg

SEQ ID NO: 309317 - DNA, 471 bp, Zea mays
tttaccccaagaccacggattgcaccatggccaaatcggcaagggaaattttggtgctaatttaaaactttgggacaaaatccatggtacctatttgaaaaataccttaccaaatcaacttagtatttcttccggaatgggcattaaacttgaattaactttgtggcaaaagcttttctggccattgacctaaaaaatgcaaaaaatcgcttaatcttacggcatctaattgtcaggcaaaatttataatagctaaagttaaaatttcttaagccaactaatctccccgtaccgctatccagactagttcttgtaaccagctatgacgctgttaagtaaactcctagcattatttcccggtctagtaattactttagcccttagttgtgtcattttctgggcaatgactagggcttggtggtggctactattattattattaattatttatgggctgcccctgctaaccta

SEQ ID NO: 309318 - DNA, 450 bp, Zea mays
tcgccggtttggaagtattgcggattgtcaatgagccaacggcggcggctttggcctatgggctagattaacaggaaacggaagagttaattttggtgtttgacttgggggggggcacatttgatgtttccctgctacagcttggtaacggagtatttgaagtgctatccacctctggtaataaccatctggggggggatgattttgataattgcgttgtccagtggatggcagaatcctttaagcaaaaggaaaatattgacttaagcaccgataaaatggcgattcaacgactacgggaggcggcggagaaggccaaaatcgaactctccagcatgctgaatacgaccattaacttgccttttatcaccgcagatgagtcgggacccaaacacttggaaatggaacttgcccggagccagtttgaggagttaactaagcaattactag

SEQ ID NO: 309319 - DNA, 303 bp, Zea mays
tcgcctggttgttggctgtaaaatgcggatgggggttggggagaaacctgtgaaagttataaaaacatgcagttaaagggtcaaggtaacagcactgctttccaaacagcctgggccctaattggtttgttagatgccctcaaatatttacccatgctgggacaagatgccaaactaaccactgcgatctaggggggcgtggcttttcttgaacagggacaaaccccctagggcacctgggaagaagcagaatataccgacacctgttttgcctgtcacttttatatccgctatcactactac

SEQ ID NO: 309320 - DNA, 470 bp, Zea mays
atgcaatcggggaggaatttgaaaatcaaataccgggagtcctttcgcccctttgctttgcccgtgttggccgaaaaagtgggtggttattttgagctagaccaacccagcccctatatgcttattgtggccgatgtaagggaagaattgcgcttgccattgactcctgaacaagagcaactatttggcattgaaaaattaaacattccccggtcccaactacctgccatcacccatgtggacaattctgctcgaattcaaaccgttcatccggaaaccaatccccgctactatcaactactgcgtcaatttgaagccctgacagactgtggagtactggttaatacttccttcaacgtgcgcggggaacccattgtctgcaccccagaagatgcctaccgttgctttatgcggacggaaatggattacttggtgttggaaaattttgttttagctaaaaccgcccaacc

SEQ ID NO: 309321 - DNA, 309 bp, Zea mays
atggcggggaattccagagagtgggctaaggcttttttcctcctgcctcgattaagttttgcgactatttcgccccgtcgtcccataaaaggttcctaaacttgctataagaggatctagagtccagtccagtggcgattggcgtcgatgtttttgatcgaggagacggcggatgaccccattggaattgagctaccccttaagcggattggttttggccttaggcagcggcatatatgtctggaatagtcgtcgcgccctagataaaaaactggcccaatcccaacccttcgatcagcctgccacttt

SEQ ID NO: 309322 - DNA, 274 bp, Zea mays
gggggactgctccagtccgaatttcagctggggcaacaaatccatgcatcccaagcttcagcttattctaacatgtctccagagtattatcagcggatgtctgacatctaccgcatgggtcatgaaactagcatggggattttgaacaatatacgctctgatggtgaatggcattacaactatagtaccggcagagatgaataccagtattactaaaggcggataaaccagtccccagcagtaaatttttgccgagcatcaagttttgatagcg

SEQ ID NO: 309323 - DNA, 541 bp, Zea mays
cctgatgggaaaatctgcccgacgaagttaccccggttattgtctagggctaggctagggcttgcgtggctccccaaagcgaggataaaagtagggactagaatgccagtccggactacgaactgccatcggccaagggactggggcttttccctctggaccctggcgatcgccttccatgggaatagattgggggtgaaaaatttttgacaaattactaaaaaattcattaacattcagctcccatagcacttacctttttccactatacatcagtgcctaagagcctgttggtcgagttttagcttgtccctaaaaccgagccgttagaaatccgatcatgggggagaaattttatttagtttccccaaaaattggagagtcaggagaaattttaaaagcgaactaaattgtggttacctctgccgttaagttcgtcagtcatcctgcagggctaaaagtttttcattcaacacctgtaaatattcatcactgatgtcatcggctaatataccctttgctaaggcatcattaatggcac

SEQ ID NO: 309324 - DNA, 225 bp, Zea mays
gggggttaagccgtttaaaccctgaattagtaagggcaccaaacccttgaccaattgggcatcggaatacccctggtacattactttgccatcttccaggtcagcggtgatataaacctgggaaacacaaccttggactttattagcggcaattttcccttcctgcatcatcggatacagctttttgccgtaccacaacaactgctcataccgttttttggggtc

SEQ ID NO: 309325 - DNA, 194 bp, Zea mays
aaccctgaattaataaggccaccaatcccttgaccaatcgagcatcataatccccctggcacattactttgccatcttccaggtcagcggcgatataaacctgggaaacacaaccttggactctattatcgacaattttcccttcctccatcataggctccagctttttgccataccacaacaactgctcatac

SEQ ID NO: 309326 - DNA, 409 bp, Zea mays
ggtcattgctgggggggttattttagaagcggctccggattgtcaaattaccattgaagccggagtctgcattggtttaggcggggtgattagcgcccatgccggtgacgtgaaaattcaggagcagacggcgatcgcccctggctgtctagtaatcgggccagtgaccattggggcaacagcttgtctcggttcccggagtaccgtttttcagcaggatattgatgcccaggtcctaattcctcccggctccttattaatgaatcgggttgccgatgtccagacggtaggggctagttctccaacaactgacagcgttactgaaaaaaaatccccttcaaccgcaaaccccattgcccctattccttccccctgggacaacgagccccctgcaaaggggacagattcc

SEQ ID NO: 309327 - DNA, 337 bp, Zea mays
  unsure (1)..(337): unsure at all n locations
ttgaatgtcacnatcnacatccagtctttgccatggccagggtggcctctctgagaaactatcacattaaccaggtgatttagatcacagacaaaccacagggacgttgcttgggctaaatcccatgaagagatggtttatggctcctgatgaagttatttagcccattagcaaggcaaatcaaagacgatcccgacttcgttataaaataaacttaacaaatctatacccacctgtagagaagagtccctgaatatcaaaatggtgggataaaaagctcaaaaaggaaagtaggctgtggttccctaggcaacagtctttcctaccccactggaaa

SEQ ID NO: 309328 - DNA, 343 bp, Zea mays
caaaaactcctttgaaaatgaattatcttaattgttgaagtagccaacgcatgacttgtccatgattcgtttggcgtgttttttgcaacgcctcttccaaaacagctaaatttaatccaggtaaaactaaagattctcgaatttggtagctcccttggttttccattttaaaccccatgattttagtggccttcacatccacaatccaatattctttaacgcctaactcttcataaagtagccgtttttttccttgatcatcagctaaggaagtattggcaatttcgataactaaatctgggggaggataatcatttaaattgacaatacctgttccagaggg

SEQ ID NO: 309329 - DNA, 395 bp, Zea mays
ggtcgctcttaggatcgcctccagtggccgggccactgtggcaaaattgggccgtgttgttgcggtatttgcgctagtgtctggcattggtcaatggtggggaatgtaagacagtgcacctatcaatggtccatggacagagctaattcccccctcacccccatcgctatttagctaaaccgggaagtcatgcaatagggacaatcaagccattcctgttgcagttccgccgcacacgtacgacaggttaaagcactcttgcgcttagcccgcatttctgactccagtccggtatcggtgaaagtgacccgttccacctcctctagggtggtgtagccttcctgcactaaattaagactataggccaatagggtgatccccgggtaccgagctcg

SEQ ID NO: 309330 - DNA, 460 bp, Zea mays
aaacaacaaaaaattttgctgatttgtagtttgggctttgatttgtttaatttgtggttgtcctgcatccaccaaggttttgcaataactctgcacgaagccgccaaaatccgcaggcgctttgggacaaatctcggtttttagataggtactgagggtttccactgcgtagtcttcatagtcaggcttgcccggattgccgatcgccatcagagcaccactggccaataccatcacccctccgatcgccccaaacaccgatagcattctcatcagggatgtacactcccatcgggcataattgtttttgccaagtttatgccgctaatgtgactattttgaaaattgacattacgtaggtctgccccccgtaaacaggcatcgattaaattggcgccccggagtatggccccggccaataaagctttttccatcaaagcatactcaaaattagcattct

SEQ ID NO: 309331 - DNA, 511 bp, Zea mays
ggatccgcaattgccgcacttactccaccggggccggccacaatgtcacagccattcttaggtagaccgtataaaggctcaggaaacatgacacagtggagaatatccaaccctttgcccaccttggccaactccaaatgcattttgcgaaactggggcgtttggtagcaccgattttcaatcactaacttttccccttccaggcggccttctacgtagcccaaatcctccggcaattgatagggcttgaggggtaaactttgccaactagcggcgatcgccagggccaactgttgaatcatcgggttcaacgtaggcatcagggaagaattggtcaaacttaaatcagtgacggccatggtaaatactcaaatctagggcaaagcaatgggaataatgggctggaaattaagctaaaacctacgttggactaccgtctccttcttccgttgacagttccaaacaatagcctgcccatacaccgttttaataaagcgaggtcgacggggat

SEQ ID NO: 309332 - DNA, 511 bp, Zea mays
gtcgctcttgaggatcgccgactgccaaatttcttctacggtggcaatggcggttaactgttctaggtcttgtcgttgggcgtggaaaccctgctgaaaattgaccaacatttgtttggccgcggccgggggaggatagtccaccactagcttaaataaaaagcggtctagttgggcttctggcaagggataggtaccttcaaattccaaggggttttgggtggccaccacccagaataaaggcggcagggcataggtatgaccatcgagggtcacctgttgctcttccatcgcttcaagcagggcggactgggttttggggggagtgcggttaatttcatctgccagcaaaatttccgtaaatacagggccctgtttgaggctaaaggcttgctggttgaagtcaaacacgtttacccccaccatatcggagggcaacatatctggagtcagttgtacccgcctaaattgggattgaattgattgggcttgaagttttaccaacagggtt

SEQ ID NO: 309333 - DNA, 289 bp, Zea mays
gatttcactcctgtccttgaagaaggggcggttatatctaccaacagcccggatatcttccccaaaggggtctatttccaagcctaaattttgcagacgttccacctgttctgggttatattcttgcaagaccagaggttgcttcaggggtaaacattgtcaattgccgttgtaactgctcaaacaaaacccgttcatgggccacgtgttgctccactaaccaaatgccctggacatgttccaccaccacataggtttggcaaacctgggctatggcccttaataagcc

SEQ ID NO: 309334 - DNA, 565 bp, Zea mays
agccacacttttcagcagattttacaattgtttgtgaaacaggaagttaaaatatctgccggggggttctacgaactggccagggataacatttttgtgacggaacttctgtccagcgtgaatcaagccgaggttatagaagactatcctgattatcccaaaggagcttgtgtccttgttttacaaaaagatttacaaaatcagcctatccatgccgtttggggaatacccaaaaattcagattctcccgctgttttaattacggcttatcggcctagtaacaacaaatgggaaaacgactacaaaacaagaaaattatgaacaccagaacccaaacaaaaattattcacgaaggggactatatggcagaagttcaagttgagctaacctacactgatcatgattggtctccttacttatctcttacagaagcgcaaaaacttgatcaacttaggctggccctgcgcagaaatgatgttaaaactgcgtctagtcttgctcgtgtctaccatctgaccccccgtgtgggtcgttaataaaagctgattaaacagaaaaatgtgaa

SEQ ID NO: 309335 - DNA, 489 bp, Zea mays
aggatcatccccgggattttctggttcgtactcaaataactccgccaggagtcgtttgatagctttaacttgggtgaaatcggtagagaacttcactaaagttgtaatcaaaagtaaaaaactttgttgcagaccatagatagcgataagttgaccgatgctgagttgattgccaaaaaccaaaacactgccataccacagcataattactgtgcctatccccgccattaattgcgaaaaagtattgttgataatgcgaatttgagcagtgcggtaattaagcttaaattcccgttgcaagcgatgttgaatttctagccataattggggagaagccgccgttgttttggtggccaaggctccattaaatgattcagccaggagtccagcattttcccccgccatagtgatggaacgataggttgtctggcggacaatgggctgaaaagcaatggttgataaggtcataatgcccccgatcgcccgcac

SEQ ID NO: 309336 - DNA, 580 bp, Zea mays
cctgcaggtcgattctgaggatcgctcgggatcaaaatacaaatttgctcctcatagaggggtttaatagctttctctttggtattagttaaattgcgatggcgcataataatggccacatccaccaaaccatcctgtaaaaccttcaaagcccggtcactccccagggccgtcacccgtagttgaatttggggatggcccaggcaaaatttgggcaataaactaggcaaggaagagacacaaactgagtgaattgctgccacacataattccgtttgtttgccttgaaaaagactactaatttcttcgctagccacatcccattcttgacaaattttccttgcccgccgcagaaataattcccctgccaccgttaatttagcctgggctccccgatgaaataattggcacttgagggcagattccaaaccttgaatttgcctactaatggtggattgggtgacttccgattgtaatgccgcctgttgaaaactgcctagctctgcaacttttaaaaaagcctgtaactgttctagtcgcataggttagtttttggggaaaggtggcataataaactatt

SEQ ID NO: 309337 - DNA, 450 bp, Zea mays
cccgaactcgcgttaactaccaaaatttttccgttgcgttttctaagccatgctccacttcaagaatcgggaggcctttgccttgaaggcggttcgtccgaaactgtaactttttgttcaaatgcgcacgttggtcttcttagaaacagcaaccatttcacccttgccagaaggtagcggagagtccagcaattaagatagggactgagaaagcgccatccttcccgatggactcgcctgtgatagaaaaccagcgtgtaagcaaaatcgcgaattcttcgtccccagtagattttttgaatgccaccgagatcaaggcgaatgccatggcgactgtagttggcatagttgagaggattaaggggtgtgagttgctgctgttgcgctagactattcattggagcgttcagggcgagttttaggacaattatcccgtttgattcattcaca

SEQ ID NO: 309338 - DNA, 514 bp, Zea mays
gctgcggttgctctgaggatcgccgggacaatttcatccccatggctttggccacaccggccacgttttaaccaattttccccagccccactacggggggggttttcttataaacttgggtgccaataaattgtttccgttcccacttactttccttaacggatttgttggcatcggggatgtggcgggccagggccatcatcatcgctagagcatgttccgccgccgcaatggtgttaccctcgggggaattgaccaccacaatgccctgacgggtggccgccggcacatcaatgttatccaccccaaccccagcccgaccaatgatttttaactggctacccgcttggataattttctccgtcaccttggtggcagagcgcaacataatggcatcgtactcaggaacaatgtctataatttctgctttcgatagcccagttttgacgtcaacttggggcacttgtttgagatattaatgcccgcttgggcaatgggggtagaaacttaaact

SEQ ID NO: 309339 - DNA, 437 bp, Zea mays
gttacagccgttggctctattttgctccactgtttgcatcaacttcccctcactctgccctgtgtgctggcttgatggttgaggtaggtaaagatttgtcccaacaactgcagcggcctacgaatttttccccaaggatagctagttagacattaaaacaatacgtgtttatgctgaatgcgtcctgggtcactcaatggtgaatggcgttagagaaatatcatcagccacgatatgctccccccaggcttttatctctggtcaggttcagctatgtctaaggctattttcccaaggtattccgttggcgatcgccgattgctagagtcagtccgccactcagctcagcagggtttcaccatgttccaggagctgattgccttgatgatatcctttctatttctgacaggaaccctgaatgccatggtaatggcaac

SEQ ID NO: 309340 - DNA, 496 bp, Zea mays
ccctttgtggcataatgcatctgggaacattggtttgtccctggcgcttagcaacccaagcttttctcatacaaatttcctcgaatggtggggttccctccgctggtattacgcagtctcaggttctaagggtttttctcagcctagctttctagacacccctagctatggcaaattctagcatcatttctctatccccatctcttccttaggcgatcgccaatcccgtgaatcacagttttgcttgatcgataatcattatccctcttccgtcagactgagggaattaaaatggagataaaaggctgaaaagcccggagggagaatgacaaagacaagagaggcgaaaaagacagtacagtgtgtagacacatatagtgaactgcataaagatatatttccagaagtgaggtcttatgagtcatttagatatatcattgtgggaatattaagtgatataaaaagaaagagtttacctgcaatagcatcatcacta

SEQ ID NO: 309341 - DNA, 466 bp, Zea mays
tcgcctctggggagcttgggttagaccgctaaaagcaaaggattgattagttttataaaccagttttaccccgattaaataaaacaacatggcagtgttgctcagcagtagatagcgcagtcccagccaaataattcggggttccctaggataggtcatcaggcaaaaagcggcgatcgccaccacttccagggccacataaagactcataaaatccgcacaaagaaaagcggaattaaggctagcgtggagaatgatcagttgggcataaaaaaaggctgagcggccggtattccagcaatagaccaacaccgccaaagtcaccagggcattggtcaagaggaaataacccgatagggcatccagttgaaaaacaacgccaaaactgtctaacaaataccaagactgggcttccggcaaagaaaatcccaaataggctaaaaatccagtgccaaaacagacggcc

SEQ ID NO: 309342 - DNA, 265 bp, Zea mays
tgcctgcaggtcgattctagaggatcaactccgggtcaccggggcccacactaacaccgtggagaatgccaaatgttatagaaagtgattgcgacaatgattgtgggggttctttactttaccggggcgtaagccggtctatattagactggacgcaaactttttggttaattaatgccatgttgaagcagttctccgccactttcattgggctgttactccctacggggggagcccaagcggcgatccccgggtaccgagctcg

SEQ ID NO: 309343 - DNA, 398 bp, Zea mays
tggacgagttgaacaatcaggcagcggccttaccccaaaccatggtgcaaaacattttccaaagtcgttagtttgccaaaggattaactgggtttataaatactaatcaaagcgctagactttattgacccaaatcttcgggaaagggccctggtcgcactgccatcatttgtggtttttgtccacgcttaacggcgatcgccaaaggttccccaatttgactcacttccacccgttcttgaacgtcagtggcggttttaacccccatgccccccacttcgagaatgatgtcccctggggccaaccctgcctgggccgccggggaacctggactgacttgaataattaaaacccctgtgtccgctgtcacccctgccggtaactccccactagtccgc

SEQ ID NO: 309344 - DNA, 440 bp, Zea mays
  unsure (1)..(440): unsure at all n locations
taaccgtctgagttggtctttattgaatcctgccaacaccattgcttccctactagttaaccagtttgctgaagcttcggggatgcaggtttcggcgttgatgtgtgccggttttgtgctgattgttcttactttcattgtcaatattttggcagaactgattgtgaacaaagtcaaagctaaatattagtttttgctgcaattatttttacttaggggctgtttgagccgtttccctgacttgacaattacgggcgaaatttaaatcaaagctctggattaagccattcagtttaaaagacgaatctcgaactctcaaactcttcccaaacctatatttttgcttagtcntctaggccctggccccccaaacgcatgaccgccgttaacctccaaaagaagaaatctgacctgagagctatctttggttactccatgac

SEQ ID NO: 309345 - DNA, 397 bp, Zea mays
gtcctgaagcaatccgcatgggttggccctccactttgtttagtaattgggcttgcacccgcagtatttccttggcctaggataggattttcgcaggaatacaaagcattattttcccaccagttcaatagccagagacgactaatcggttctcctaagcattacgcagggcgacaatggggtctaatttagccgcttgacgggcgggaacaacaccaaagaatagaccaatactgccagaaatggtgagggaaaccaccacggcggcaggggaaatcactgtaatcaggggggaaagactacccacgattgccacgatggccatgcccaagacgacgccaattactccaccactggcggaaacgattactgcttcaataagaaactgactgagaat

SEQ ID NO: 309346 - DNA, 441 bp, Zea mays
ctgatggggtaaaattcaatggttagtttcgttgtatttattgttagagaaatacatgggtggacggacgctcgcagaatcttcccaagttttgcgccaagaagtattgggagcccgccgcttcagcaactttttctgggctggaatttctaccattggtggtgtcggtttcctgttggccggcctttctagctactttggcaaaaatcttttgattgttagtgacaccaccggactgcagtttattccccagggtgtggcgctacttttctacggtgtggccggcagcacagtggcaggctatctctggctaaccatggctctaaacgtcggcagtggttacaacgaattcaataaaaagtccgggcaagtgaccattttccgttggggcttccccggcaaaaaccgccgcattgagttgatcaataaaattgccgatgt

SEQ ID NO: 309347 - DNA, 439 bp, Zea mays
atggagcggcgctgctaactagtttccccctaatttttcctggggaaacacccataaatatgccgaaaaatattggcaaagattaaggttacggcaggccaggaaaactatccacgtactgaattttaacgtcgggaaaggattcgacaatttgaactttggtatcgggaaaggaggtgacaatttgccattgcccacattgattgggaaaactttccactagttgcaccttaagatcgggaaaagaactgaccacctgcactgtgagatcggggaaagagccaactaattgaattttgccgtagaggggatggccattgaagctacaatcgccaatgttaatggtttcttccgctcccacaccacgattaataaagagggaaaacaaacagttacaaactaatattattcccaacttatttttcatgagcttctgctc

SEQ ID NO: 309348 - DNA, 416 bp, Zea mays
ctgttttaagtgaggttttaggatgggattgggatcatcaagtcaggaatacttgttaaatctcatcgatcgccaggggcgcaggttaagacaggaattaatggctggggccattaccctagcgggcctatttgtggtcggtacggcctggtacagatacgtggaagactggacttggttagatgccttctacatgaccaccattaccctagccaccgttggctttggggaaacccatcccctcagtccggcatcccgtttatttaccattttgctgattttgatgggcttgttgaccatcggctacatggtaaatcgtttcaccgaagcctttatccaaggatactttcaagatagtttacgccggcggcaggagcaaaaggtgattgagcgattagcggaccattatattcttt

SEQ ID NO: 309349 - DNA, 482 bp, Zea mays
aaagaccgcatccgcgatacccaaaaagcaacagtttttacggacgcagtgcaaactggccacggtggccttgacggtctaccgatcgccttgggggtaatggatttccggtttatgggcggtagtatgggctccgtggtaggggaaaaactatgccgcctaattgagtacgccactttggaaagattgcccgtggtaattatttgtgcctccggtggagccagaatgcaggaaggcatgctgagcctaatgcaaatggccaaaatttctggagctttgcaaaaccatcgggagcaaaagttactttacatccctgtgctcacccatcccaccactggcggggtgactgccagctttgccatgttgggggatttgattttagcggaacccaaagccaccatcggttttgcggggcggcgagtgattgagcaaacattgcgggaaaagttacccgacgattttcaaacttccgaatatttact

SEQ ID NO: 309350 - DNA, 388 bp, Zea mays
ttactgccgatggcgcggagctactaattggttactttaccggagagttagtagagctagatttagccaccggtgcccataaaacccttgcaaaagtaaactcatggctgaacgctttggatattaactctgaaaatttagtggcgatcgccgatgatcaaggctttggtaaaattatttccttaaccacgggaaaaatcggcgaagaacataaaatttctactacaggtattaacgctgtcattttcaccgatgaccagacagtggctgccgccgatgccactggcatgatttaccaaggaaaattggccggctccaattaggtaaggcaactgccgtctcaatgtgcaatgcggtctagtgcttgcccaaaattattttgggaaac

SEQ ID NO: 309351 - DNA, 162 bp, Zea mays
atccctcattctgttgcgccagttacctgtgctgccaagctagcactggcaaaggcatagtccagggtaccggtttgaccatcaaagacataggacgtattggtcccgccactgaactgggccccgagattgacataaccagcgctttccagagctttaatg

SEQ ID NO: 309352 - DNA, 464 bp, Zea mays
gatcgcctttttgggcacggagtcgggcgttaccccggcccgttcaaccacaagtccctatcgatactatcgccaagaagtatgtctaaaaagtttttaacaatcctcgctggccttctgctggtggtctccagtttctttttatccgtgagccccgctgccgctgccaatgcaacagcgaaaatgggttctgacagtggtgccctagtttttgaacccagcaccgtcaccatcaaagctggagaggaagtcaaatgggttaacaacaaactctcccctcataacattgtgtttgccgccgatggtgtggatgctgacaccgctgctaagctctcccacaaaggcttggcctttgccgctggtgaaagcttcacctgcaccttcactgagcccggcacctacacctactactgtgaaccccaccggggtgctggcatggtaggcaaagttgtcgttgagtaatc

SEQ ID NO: 309353 - DNA, 182 bp, Zea mays
ggtcgagaaaaactcggctgtaattgaggtagtaattgagaatataaaagctggccaccagtaacaaaccgtcatagagccagccgccgtaggctaaggttctgttgctttgactccggcgcagggttagccaattgagttattgccagacttagcatgattaacagccatagattggcctc

SEQ ID NO: 309354 - DNA, 287 bp, Zea mays
ggtcgactctagaggatcgccctgccggacacggccaccgcttggcaagaagcccgccgcctcaaggatgcagaggaataccgactactctacgtcgctatgaccagggccaagcgtttattgtggctatccgccgcccaggaagggccctttgcctggaaccaaatgcaagcccgcaaattcccccgactacaacccaaacaaccatcccaggccctattggccctacaaaagcgttatggttcctaggggaaggactataatcggatccccgggtaccgagctcg

SEQ ID NO: 309355 - DNA, 383 bp, Zea mays
aatcttcgttttcggtttaaaatgaacgggatttggcggcccgttattggcgcaacccggcccatgatccaggcataactttcctggataaaagtgatttccccttttattacaccttcactcagaatggtgttttttttctggtctgggacgggtcaactcatcttatacctgcggaaaaattggcttgggtagaaaaagctttggccagtgctccggctcggcaagctaagttacgactggcgatcggtcatttgcctctctatggtgtggcggaaggtcgcaataagccgggggaggtgatggccaacgctgagcagttaagggccttgttggaaaagtataatgttcatacctatgtcagcgggcaccaacacgcttac

SEQ ID NO: 309356 - DNA, 467 bp, Zea mays
  unsure (1)..(467): unsure at all n locations
gcgggaataacaaaacctgtacttacattcctcggtagcccgtagtgtgttttcctcccccttcattaagcccaaaaatctctaggaaaacaatatcaaaattactttaggcagactccagcagtttgcttttttttgcttattttcccagaattaaaggcacaaccgtaaagatagaattttacttctttctcacccaaccattaatggtaaatcgactatctgcaaaagcttgggaagggaccagttacttgtagaacttccgtgcatttagcggccgggaaaaaaagccattgctgtaataacctggctgtacagttttaaatgattcagcggctacataaaaattattttcgattttactgtcataaatggctagctctccaccagaaaaggctttaggctctcggtttaagtaataaacataggttaattcacgggtagcagaatcggngctaccattatca

SEQ ID NO: 309357 - DNA, 453 bp, Zea mays
tgcttcctggtctggtcctggattccatggccgacgcacagccaacggtgaacgttttaaccaaaacgctctaacggcggcccatcgaactttgcccttcggtactagggtgaaggtgaccaatcttcgcaacggccagtctgtggtggtgcgtattaatgaccgggggccctttactgggggacgggtaattgatctttccgccggagcggccagggcgatcggtatccatagcagcggcgtgggtaatgttgccctggacattgtgcagtaatagttaaaaacctataatttcgggctatgccattgtccctcagcataatgactttcccagctttccccagggtcttgggggcacaattatccctggcatagtccatgctcaatatttagagcaattaactcctgccggtttgatttgtccaggcgatcggcggttttattttgatgatt

SEQ ID NO: 309358 - DNA, 210 bp, Zea mays
ggaatcctcctgcagtgcttgcaagggaggggcaatataggaaaatacatttttttcgttcgccgtcctgccgaagtcgaggaaaaaccgttatcaggagcgtctatgtacatcgttcaaattgcctcataccgcgcccccgtcattaaggctggtggattgcatgatgttatttacggcctaagcctccaatctttactgcggtgccat

SEQ ID NO: 309359 - DNA, 450 bp, Zea mays
ccgatgtgatagtaggagctatttcgtctaagtcaatgatggctagggtaactattttttcggtggcaggattaaccccatcgctagcagtaaccgtgaatttataactggattgtgtttcaaaatctgggttttcagttaggattacttgtccggtggtggagttgatgataaacaggtcagcatcattccctggctttaaaccaaatgttattcctgcacttacgtcagcatcatctgtggcagtgacttgataaattacttgattcgcaccactattttcggcgatcgccttcgccgtatctcccgatgtgatagtaggagctatttcgtctaggtcaatgatggctaaattaaccaattgttcggtggccgggttaactccatcgtcagcagtaacggtgaatttataactggattgggtttcaaagtcaggattgccaattaact

SEQ ID NO: 309360 - DNA, 153 bp, Zea mays
accttttaaattgattatgtagaagctcaacttactgcttataaccatggaaattattacaaagtacataatgatattggtagccccgattctgctacccgcgaattaacctatgtttattactttaaccgagagcctaaagcctactttggt

SEQ ID NO: 309361 - DNA, 467 bp, Zea mays
gatcgccgggcgggtggggtccgcctttgcggcggaaattggcaccatgcgggtaacagaacaattgtatgctctgtatatgctcaggacagatccgattgattatttggtcgttccccgggtgatcgcctgtggattaatgttaccgattttgaccggattgtctctgtttgtgggcatggcgggaggattggtaatttcctccagtctttatgccattaatccaaccatttttttaaactctgtgcaaaatttcacccagctatgggatgtatttgcttgtttgttcaaatctttggtatttggcgtcatcatcgccattattggttgtagttggggcttaaccaccactgggggggccaagggagtaggcgagtccaccaccactgcagtggtcacgtccctattggccattttcatcagcaactttttcctatcttggttaatgtttcaggggacgggggata

SEQ ID NO: 309362 - DNA, 405 bp, Zea mays
cgaagtgggaaaacaaaggggcattgttgcttattccccagtgtttgtcgacggtaatctggaaaatccccccatgggggtagcagcggtggtgttgcgattgaacgactttttgacccaaacttttggagaaattagttttggtgataaatctctggaattacagtggttgcaactgagtgtggatcgatcgcctctggttttggcttcgtctgccccttctcccttctctatgaacaattggcagagcaataaggagctattccaggtttaccccctgtttatttttggcagggcctatgcactgctgctttggcccgggccagagtttaaccagaactatcccaagcaaatggccatggtcgcttttggtgtgggcacggggatccccgggtaccgagctcg

SEQ ID NO: 309363 - DNA, 532 bp, Zea mays
tgaccatttcaacccttaattattctggttagcaacaaaccgattttccagttcaacatcaatatctaattccttggcaatttcggcaattgtaagacctaatttcttcaacaggggtatggtttctaattttccctctagtttcccagcaattttaccctcctctaaaatttcttgataaacagcggattccttcataatttcactccttaaaattgtcttgataatgtcaggcgacaacagaattcctccaaaaacagaagttgctgccatgagatttgctttaactcgattatcctcaatctgttccagcacagtcgccacttccctcaattttaatgtagggtcagaggtctgcgtcaataccgctaggggcaatagccctgggctttggagaaatgcgttcgatgattgttcccagagccgaattgcttggtaacgatgcacagtcttcccccacctgaaaactatcctgttaaaccaagtcattgttactatgtttcaggtagatcacgaattggtgcattgtctt

SEQ ID NO: 309364 - DNA, 348 bp, Zea mays
  unsure (1)..(348): unsure at all n locations
gatcgctgnggcttccaggttttgaatatttacccccaccgacatcagggccagcaatgagggaacgggtgaccatgcgggagacattgcgttgatcgcgggaaacgacaatttctgctccgggcctgagggaagaaccgtaggcagcccccaatttgacagcaaactccggcgtcatatcaatgttgacaatgccggaaacacctctctgtccgaataggttgcggcggccggtgctgccccaaattaaattaatgttgagaatggctcccggttccacccgtttactgggccaaactttaacatttgagttgatttgggcttcttcgccaatgatggataggggac

SEQ ID NO: 309365 - DNA, 267 bp, Zea mays
ggtcgactctagaggatcggggaagacaccaccattgaccccactgctattctcactccccctctggttaaccggggataccggcaccatcggttcaggacctaattggaaggcggccccaataatggccaataccgtaacaatgggggcggagccagaattaaggcaggccatggtttggatgggcgaactaatgggggatgaagcctatctagctgcctgtgtagtggggcggggctgtctcttagaaagacggatacaggtcct

SEQ ID NO: 309366 - DNA, 449 bp, Zea mays
ccaagttatggggatggccaattcaaacgttcatgttttttttggtacaggggggtaaaattccgcaggccctggccaaaaatgggttggtccaggaacatatcccagctaaattgccattgggtgctacgaagagcagtgcggtaacggtcggggtaaagttcatcggataatctgccccaaaaatatttaggcactatctgtcgcaatggttctttgccaaaggggccaaaggatgcccataacaccatggcagtggctcccccagccagggccactaaccagtaccaacttaaataaatggcgtaggcaatgccaattagtaacccaatgccccaagcactgcgggaaccggtcaacactaaggcgatcgcctctaggatgcaagctactaacagggcccataccaggggaggaagattgaagcggttactgggggcggtgaaatg

SEQ ID NO: 309367 - DNA, 321 bp, Zea mays
gatctttgcctgaagttctggaattgtaccaagcaaaatttagcaaaaaaaatctcaccattacctacgatattcccaaagacttaccaaatgtttttgccgatgaggaattaattcgccaagtaattgccaatcttttagataacgctatcaagtacactcctgcccatggttccattaccgggggagctctccattggactaccccaaaaaggtcaggtcagcatcactgacaacggccccggcattcccaattccaaacaagaaaccatttttgagggacactttcgactgcaacgggatgaacagaccgatggctat

SEQ ID NO: 309368 - DNA, 437 bp, Zea mays
  unsure (1)..(437): unsure at all n locations
tctttgccgtcggtggaaatgcggcccagggaaaagtaattattggcggcctgtttgagggtggcttccacttccgtagcggacactgtcaccggcacactgatgacaatttggttagcaccattgtcgtacacccgattgaacttcactgagccttccaccgtggggcggtcgaacatgcccaaacccaggccaaaaatgcctatcgttaaaactgtcataaagctcgtcacccccaccaggcgaaagcggaacccccaacgaaaaacaaaggccagtaccataaagataaaactggcgatggtagcgtaggcggaccaacggagataaatggtaacgtccataggtagggagagaattacgtcaacaaatctaacagaaaatgcagnttagttaatcttcatccccccgatcgccgcagggcaagtctgctttat

SEQ ID NO: 309369 - DNA, 462 bp, Zea mays
tgctcccagtaagccgacaaacgaaattatttgattatggcggccatttccgttgtgctggtggcggggctgattgcggtggctgtggtagcttccggggctagcacctaattttgtccgtagattaagaaggtatcgccatcgtcactccctagttgcgatggccagtcaacttctagaattaaggaaagggggaaagtggcatggggcaaaaaactacaactttgtacgacaccgatttcaatctttggattgagcaaactgtgcgtcaactcaaacaaggtgatttgcaatccttagacttagagaatttaattgaagaaatagagtccatgggccgcagtgataaacgggaagtttatagtcgcttgaaggtacttttcctgcacctgctcaaatggaaatatcaaccccagaagcgcactggtagctggaaaaacaccatcgatgagcaaagggatc

SEQ ID NO: 309370 - DNA, 486 bp, Zea mays
gctgcggtcgctctgaggatctgaaaagtgcccgggcccaggcctacgatttggtcatgaacggcgtggttattggcggcggtagtttgcggatttaccaacgggaagtacaggaaaaagtttttgccaccatcggtttatcccccgaagaagcccacgaaaaatttggtttcctattggatgcgttcgagtatggcacccctccccacggcggcattgcctacggtttagaccggttagtgatgttgttggctaaagaagattccattcgggatgtgattgctttccccaaaacccaacaggccagttgtctgctcacggaagcaccagcggcggtggataaaaaacaactcaaggaattgtccgtggcttctacttacgtccctaaagttaaagtggacgactaggtagccctgttttttattggccctcatgatggaacgtttttcccctactacggctttatggaataaattgagcctcttt

SEQ ID NO: 309371 - DNA, 561 bp, Zea mays
  unsure (1)..(561): unsure at all n locations
gcggtcgttcttaggatcgcccggctaggacatccaccgattggggacgacctttggggcttttggtctttcagttcatcaccaaggcttcgagggaggcggggattttataacgggcggaaaagggatggggcttagtgtgatgatgggcttcataccaacccccaaaggaagaattgtctgggaacaggggcatttcccccgttagcatttcgtacatcatcacccccagactgtaaatgtccgaacggctatctaactctttgccctccatttgctctggggaacaataggcaagggtacccataaaagcttgggttttcgactcctctgctgcttgtactaatttggcgataccaaaatcgagaattttaaccagttcccccagggcggggtcttccaccaacagtacgttgctgggcttgatatcccggtggacaacggngcaggcttccccttggtaaataattcctttatgggcacaatccaagccaaagcaaatttgcctagctatttttaaaaagcgctctactttgaggggacggtatttaatcacgtcac

SEQ ID NO: 309372 - DNA, 304 bp, Zea mays
cgcccgaataatggttaccactggaccaaaaatttcctcctgggcaatggtggcatgggggtcaacatttttgaacaccgtgggaccgactaaatagccttcactaggagcatcacaggcgatcgccaattcacattccggcttaccctgttggatgtattcctgaatgcgggcttgggccttgtcatcaattaccggaccaacctgggtgctggggtcatcggtggggcccacattgggggaacggtttgcctgtacaaaccggtccacaaaggcatcgtgtacgggggaaagcaccaccacc

SEQ ID NO: 309373 - DNA, 476 bp, Zea mays
gctcccaaacccccaaaacacgaaacgggagggtactatttattctcagcaatatcgcccagcccggcctaaagctgagaaaaacgagccctcagataccaagcctccccgtccaagtggtgtatatgatgctccctaccgggtaattaattcggctcccaatccccccgtggcagaagaaaataacggggctgatgaggaagaagattggatttaagctgttcggcaatcccggcgattatctcgcccatacttttgcttaggagattggagttaggcttggaaagtcccccaatccgctaggctatcaaaaagagcagggtctatgggccactgtgtccccaccattgccgctgttacttccgtccagtcaaaccgccgtgagccaagatctacccgcctctcccaattattttcgcccggtattcttttctacctttttgaccatttttttggcggagatgggtgataaaacc

SEQ ID NO: 309374 - DNA, 314 bp, Zea mays
aatggtcaagcaaaagctaattgaggtcagcaatttctccagctggttgaggagtgattatgactgatagtaatatttttgatggttacacaatcaatctttttcaggatgaacatggggattggttagcttgcttggcggaaatgcccaatgtttcagcgtttgccgattctccccaagccgctcttgctgaattagaaattgcctggcaaggggtaaaggaaagctatcacaaacacggagagccgattcccatcattgaaagggtttatgcaaaaccctaatcctttacttaaattgataaccaattacca

SEQ ID NO: 309375 - DNA, 345 bp, Zea mays
ggtccatcggcaatggtgggattgagcaccacatccagctgtgaaggggccgaatgctcaaaatcctggggcgcagaggtgaagtcaaactgggtgtaatcctggctggaggccgcattggtgcccgccccccttgattcaatggcccggtcaaattgccccatggccaggcggggagtacctttaaacaccctatgctccaaaaagggggcaggacccgttattacatgtgcctcccagcgagaacccaccctcaaccagagctgaaaagatatggcttccaccggcatctgctccgcaataatggtcaaaccattaggcaacacttcaacatggggcagattg

SEQ ID NO: 309376 - DNA, 584 bp, Zea mays
tgcctgcaggtcgattctgaggatcgccccggtaaatttgcccccgacagattagccccattcaaggaagcggttgttaaattagcaccggaaagattcgctggggtcaaatctgcccccgacagattggcccccgataagtccgcccccgtcaaatccgcccgggtgaggttaaccatcaccaagcctgccccccgcaaatcacagaggggacattttttagtggatagcagttgggtcaaatcctcaaagttggccccgtgggcagcgccagcaaaggtagttaggcccagggccacaagaaagggacgaattttcatgggttaacgccaagggaactgcacttaaaattgctctccattctagccaaatatctggatagtccccacccccatggccgcaactcagttatggaggggtcaagccatggagcaaagtgcctagatgggtttgactgcttccagttccgagagccgaaaagtgactaatttgtcccagttgccattttcaaataggactgcggccttaccgtcactaaccccgtgaactaagccttcaaagcgatggtaagtatcattaacatt

SEQ ID NO: 309377 - DNA, 476 bp, Zea mays
tgccggtcgactcttgtggatcgccgtgggactcggtaataattctgcctgttgtaacgccacccctatttttttggcaattttgagggcaaactcgatgtcgggactttttcacacccggggcccatcacactgatgcaccgacaataccccccagaggcgatcgccagaaaagaggggcaccaccaaattagccttggctagtgccaacattgattgatcgaaatccgccctttgatcgtcggtgtcatccatggctaaaatcaatcccttggcaaaatgatcaatccatcgcgatgacaaaggcactttttcctttggaggcaagaggcatagcttgtcgtccgtttgggcttccgcctgaatttcctccccgggaaaaattttattctgcctaactttaaataatatttacccggttctgctaccaacaatttcccgacctccgtcaccgtagtttcgaatgagggagcgtt

SEQ ID NO: 309378 - DNA, 560 bp, Zea mays
gcggtcgactctattggatctacttccctagtctgattacttggccatgttcagggaaggaggcaatctacttcaatctaatgcagatggctcggataaataggggtattatccaacgcatttagggcgtggatctatacgggagataaaacttcgagaaggcttagaactgacgatagctagctatcaactctatcaaaatcttattgttgaaattcccgagcgggaacacccattggaatatgaatttacggttattggagaacaccaccgtcagttaaccggggctgatgcagaaaattatttcttttccggtagtggcttagcagataaaagtgtgaatgaatatctggcgggatggcaggttttaaatgttagttttcatctagagcctgatttatttcgtacctggataggcgatcgcctagagcaagctgaaaccattattcaagaattgctcaaagacctaaactcagttcgctacacccacacagccacacctacagttaagatgcagacggcattgcagcagattttatattgtccctacaggggaatta

SEQ ID NO: 309379 - DNA, 247 bp, Zea mays
ggtcgactcttaggatcgtgcaggcgagcacagagacgaataatcgaactttttcctgcccccgttttcgtcactagggcgactttttccccgggttggagggtgaagtttaaatttttgagcacgtactcgtctggtttatagccaaaccaaacattttcaaagcaaatttccccatggctaccccgcaaagcaccattgatttcaatgggggtaatcaccgcttgatccccgggtaccgagctcg

SEQ ID NO: 309380 - DNA, 578 bp, Zea mays
gtcgattcttgaggatcgcctgtgtaggttgaccactttgggaaccgttagcttcaagttgctctttaatttctaaaccttccaccacttcaccaaaaacgacgtgcttaccatcaagccaagggcaaggtacaaaggttaagaagaattgggaaccgttggtattgggcccggcattggccatggacaatagcccagggcgatcgtgctttaactggaaattttcatcggcaaatttttctccataaatagactcaccgccggtaccgttgccccgggtaaaatctcccccttgggccatgaaatcggtgatgactcgatggaaatgggaacctttgaagtgtaggggtttaccagctttacccacacctttttctccagtgcaaagggcccggaaattttcagcggttttgggggtaacttcgtcaaacaattccatcacaatgcgacctgcggtatcgctgccgatggtaatatcaaaaaaaactttgctcatcatacaaaatttcattgggcaacccattttaccagatttttgaatggcattaggtggcgagccagttttagcccaagcaaaa

SEQ ID NO: 309381 - DNA, 322 bp, Zea mays
gtcgactcttgaggatctgcggcaatagtattttcgccgatttgtatgctgggggagcggcgcaatactaataccgtttgggagaatggaatagttaaccggggtagtttgtttatgattgtgctcctgatcgattaactgcctatttttcctcctaccccctgtgcatggaatctaagttgctgagtgcaaatcaaggctttggcccggttttaagaaattcccgctttttgttcctctgggttggccaaattttctctcagttggccgacaagttttatctagttttgatgattgccctgatccccgggtaccgagctcg

SEQ ID NO: 309382 - DNA, 533 bp, Zea mays
gggaggtggaaaatttactctaccattgcctgggctatcgcaattcttactgtaagcatactagtacagatttgggccatgcttacaatttggtcacttatctagaaaaagttgaccccaatgctgaagctttgaaatacgctccgggcattgaagcattgctaggaacctatcgctctctggattggttacccaaattatctaaattttctccccttaactccatgctaacggctcgcaaactaactaaacaatgggagcaggaacaccaacagtcttggcctgaagatagacttttttctccccattactcaatttttaacgataatcgccacgaacaacattctttcctttggtttacggatattaccgcttctaaaaaataattatgtttaacagaatcaaagataaactcaaattcaaattagcaaaagtccttgctccagaaattgataaaaagctagcagtggaggaaaaactgtcctccgtacaatttttggcattgcccctgggtccaggaaaacctttgggaa

SEQ ID NO: 309383 - DNA, 389 bp, Zea mays
aacaaaagcaaaattattgagaggtttgccttgctaacattgggggttttcatcgatcacgtagccaccattcgccaagcccgccaaacggtggagccagacccgatcgccgccgctgtgttggccgaactggccggggcggatggtattacagcccatttacgggaagaccgtcgccacattcaagagcgggacgtggaaatattgcgaaaaacggtgcgcacccacttaaacctggagatggccgccaccaaggaaatggtggaaattgccctcaaccttaaaccggattacgtcaccctggtaccggaacggcgggaagaagtgaccacggaagggggtttggatgtggctgggaacttgaactatttgctggggagagttgagca

SEQ ID NO: 309384 - DNA, 436 bp, Zea mays
gaggatcgcccctgcgttggcggtgtctggggtgtattgatagctgactaaattattttcaccctggggtaaggttttccaagctcgattgctagccgttgccgttatatcggtggtggtggttgctggcggctgacaggccgcaccgggagttgtaattgtccaacttcctaagttagggagattgtgccagctaggggtactaccagtatcggtacaagtgttactgccagcgtcccaattttgacaatctggcagggcagagatgaaacgattggctggggtattcatcaagttgattatcttggtaatgcccgcttcggcggcattttgagcttggtcggtggccgctttgctggtggagtcattttgctgaaacattgacctttgcatcatcacaatgccaatcactggtagcactaggccaaccataatg

SEQ ID NO: 309385 - DNA, 509 bp, Zea mays
tgcaggttgactctagaggatctgctggaaatcgttttgccgtttctgaaaaactgccaattttgacctatgaagccagcactgaagggggtttggcaaaagtcatcctaccggcggaggtttgcaaagctgaagtgacaatgacctgcaattctgaccctacatagttgcgcccttcttccaccaccaccatggtgccatcttctaggtaacctactccctgggaagcttccttgccttgtttgatgatttttagctccagagaatcccctggtaggtaaatgggccgcactgcctgggccaaatcgttcacgttgagaatttggactttttgcaagttggcaactttgctgaggttgtaatcattggtgagcaaaatgccattgatttcttgggctaaatggactaatttggcatccaccgtggcaatgtcgtcatagtcagcggaatgaataacgatgcttttgggaaaatccccctggatactgccgagaatatctaatcccctt

SEQ ID NO: 309386 - DNA, 356 bp, Zea mays
gaggatcacgggcgctagagcccggcgatcgccacaatttcccaaggcccagatctttcccttgcggacataaccattgaaatcggggggcaaactttgaattagcggttccactatggtcgggtccgtattacgccccaacgcataggccgcactcacccgcaccaggggacagctatcccctaataaattgatcaacggctccaccgcccggcgatcggcaatttcacaaaaagcccgggccgccagcatcctctgtggggcttctctactggtcagaagcaccaacatttcatcagggtccggaggtggaggggctacgtcgtcatctaattgatccccgggtaccgagctcg

SEQ ID NO: 309387 - DNA, 474 bp, Zea mays
cgataatgcgcacatactcattggtgtggtcggccaggaaacgatttaattcctgcaaagcttccccttcccgatgactaccaatggtgcctccagttaaccaagagccggttttgaagcgacgggcactggcatattccaagccgattttataaccctgatgcaacagggcccgcaactggttagcactatccccagctaagttacctgtttggtgggccaccgcactccggccgctaccgccactgcttagggctttggtggtggtggtaccccgactaggagaaccgggaacatcaccgggggcgttgaataatcacttacactacccggcgtttagccccctggtcaatgccaatgaggcggacatattcccccgcaaacttctggagccaacctttcaacgtggcaataacctggtcgggacggaaaccatcggcggtgccacagctttgccaagatttggttttgaaa

SEQ ID NO: 309388 - DNA, 400 bp, Zea mays
ctccggtcgggtggcaaaatgcaacaataaattaaaaatgtcgatggacctaatttgatattcctccttggcaaaattggggtgtctttgggcatcctgtttattactaaagcaaaatatggcggccgcagttttattgcccccttgggcgctcagggtgagtttgactagattgtcattgtggcgaccagtccaaatataaagcgtatccacattcagctttttgccgatttcttcaaacaggggagtcatcaccaactgcaccgcttttttctcttcctcgctcccttgcgcttgttgggactgttgtaggaattcttccttaaattttttcaggctcatagctttttcaatttccagagggtttaagacggtcggcgatccccgggtaccgagctcg

SEQ ID NO: 309389 - DNA, 408 bp, Zea mays
aggatcgactaaacccaattccagagcctgttgcccggtgaaaattcttccttcggctaattctttgactttttccactgccaaattgcgccccgccgccaccgtggagacaaattgcccgtagctgtcgtcaatcaaagcctgcaaaatagactgttcctccggcagcaattcccggtcaaaggacaaaatgtctttgtagggcccggatttaatcactttaaaagaaactcccactttctctagtaatctttccaggttattgccccgtaaaattacgccaatactgccggtgatggtgccagagttcgccatgatgtggggacaacccatggcaatgtacacacctccagaagcagaaatgttaccaaaactggccacaactttgatccccgggtaccgagctcg

SEQ ID NO: 309390 - DNA, 507 bp, Zea mays
cgccattaaaattctctgctacgtttttgagatgttctaaattttcttcttctgtttctaaggtttttccttccttaataattttcttgccttgactggaaagtacttgccagacaaattgagggccgtcttgtttgcgctctttcgctaatagcagtagctgttccagacgattgacagcaatacctgtgccaactaggggagaggctaaaaatgccatttcatcgctatagagagattttgttttgacggcactgttaaaagcatcggaggatttttgtctttgtttccgcaccgtttcatttaccgccggatgggtataaccaatgccagtcatgatgattagggcttggtaaagactgttcaaagtgatgcctttggttttgctgtcttttttgaattcccctaggggtaaaggcccatttttcaaggccttacaaatgggacgataaacttttttcttgagttccaacttttcccagggaaaactgtgtttaagcttgattg

SEQ ID NO: 309391 - DNA, 494 bp, Zea mays
  unsure (1)..(494): unsure at all n locations
ctggtaaaaccatgttggcgcaacaactccagcaaaaactccatcacgggcttttgcaaaatcgggatcatcggcttaggaatggtgtgggtgattggtctgacccgagtgcccttgccggcggccaaaatcatggctttcatcaacaattttcctcaaactcaatcacacaagttggcataactcacccgccagtctatcaagattcttctcactactccaataagcatagctgaaagcttggaggagtaactaaccccatggtgaccgctggcgggaaagcagaatctatctccatcatctttgccctaatcagtgcccaaatggcgactttccatggctaggggcaaaaaaatgggtagctcccagggggcttccgccaccggaatgttagcgttctcaaaggcttgtaccgtttgctcaacgctggttagaaggngacgtttatgggacagttggtttgccacaatggtgagggaatcgccaaagtgtcg

SEQ ID NO: 309392 - DNA, 405 bp, Zea mays
cgacgggcttgggaaactgtcggagaagttgagaagaaatattggggcctatttaagatcgtgtttgaaaagcccccctggccctccaaatttggggggaaatgagtgaaagtcctccagtattgccggagctttagtgggtcgatttagggggcggaataaaactttccaaacaggctcttaaggattaccatgccatgtttgcagttgttcccaggcttcccgttggctcacaagattttcctggtcagagaaaagggctagggccgcttctaggtcagcaatggcttgggcttgctctcctaattgccaataaattttccccctagctttgtaggcttcggccaattgggggtttagggtaatggcctggctgtggtcggtgatccccgggtaccgagctcg

SEQ ID NO: 309393 - DNA, 457 bp, Zea mays
ctgaccaacaacagttagccaaggcggtggcggaacaggtctttctggcgatcgccaatattaaattgcgggaaaggttggaaaatcagagtatccgggaccccctcacggggttatttaaccgtcgttatttagaacaatttttcttacaagagattggccgggccaagcgctataaccattccattggggtaattatgggagacattgaccatttcaagcaattcaatgaccaactggggcacgatgccggcgaccacgtactgaaaaccattgggcgcattctgcaaagcaatattcgcggttctgacattgcttgtcggtatggtggggaagaaatgaccattgttttgccccaaacctccctggaagataccctagtcaaggctgaatccctccgtcaggcgatcgcctcctggaagtggaatacaaaggaaaggaattgggcacattgacc

SEQ ID NO: 309394 - DNA, 519 bp, Zea mays
gaggatcagattcccccaggctggttcatggttaaggggataacggacacattgtagccaacgatgaggctcgctagtctgtccggagcgtccatactctttgataacatcccattccgaaatgtaggtgatgtaaccacgctctgtcatgtagttgaccatatcgtggtgagtgtagctaaagtttggctgggatcggttgtccataaactcgaccataacgacttctggatgatatttcttccagtcaaagccttgcagagcaaaaaaatcagctccttcaatatcaatctttagaaaagtaacttggtctatttttaaggcatttaacgcatcgtctaaacggattgtttctacctcgtaggcaaatttatgggttggatgaaagggtttaagggtatggatgccaaagtgttcttgactggtataaaaggggactttatcaccggtaacattagagacggcttttgggatacaggtgacattatcaaagcctgatagatttttatcaaagacttg

SEQ ID NO: 309395 - DNA, 386 bp, Zea mays
aggatcggcctggatctctaccggccattgacccattctaccgggcccagaccatttatctggattcatcaccagggccttgaattgggggcatattgacaaggtaccatgataaccgggcatggaatccgaacatcctccaccattgatgaacgaaaactatcaagtttaatccaatgatttgatcatcgatgcctacaatatcgtccggctgagctttatttatattggtgcgggactgataaccccattacagctttgatctacatgtgactatcaactgctagatagcctaaagattatatccggaaccacagcgggaggtgcacttgatgactttggaactaaaccaagtgacattattgtctctgcagtatgacaacgct

SEQ ID NO: 309396 - DNA, 514 bp, Zea mays
cgtcatcgacgaaattggtacggaattggaagctttagctgcccgcaccattgccgaacggggagtgcagttggtgggcacagcccacggtaaccgtctagaaaatttgattaaaaatcccaccctttccgacctggtggggggtatccaagcagtgactcttggggatgaggaagcccggcggcggggttcccaaaaaactgtgctggaaaggaaagctcccccgactttttccatggcggtggagatgttggagcggcaaaaatggactatccacagcgatgtggccttgaccattgataatctgttgcggggccggcctccggtggaacagttgcggtatatgaatgagcaaggggagctacaaatcgaaacggtggaagcccagccccaggaaagaacgccccaaccccctccctatttttccttgggtttagtggacgatcgacagttgcgcccaagacctacgggtttacgttccactgggcggatgaaaccccaagctcccctccat

SEQ ID NO: 309397 - DNA, 281 bp, Zea mays
aggatcattcttaactaggtcaaaactgcactgggcaccccgcagttcatccccttcttctccaccaaaaataaattttactgacgatggttcaatttccatcgccccctcttcgtcagcaagacgtaaatggccgttaaacctttgggtaaaactctgaaacttttcgatcgcctggagacgttcaaaggtcatcaccacagtgcgagcgccggtagtagaattgcggcggaggctgacattgctgagttcttcggggagatccccgggtaccgagctcg

SEQ ID NO: 309398 - DNA, 385 bp, Zea mays
ctcccccaagctattatggcgttcgtataatccggtttcgttttaactatggacagcggaggtgccagtgccgggttcgttttacaggtgggaaggtaaattttcaatctctcgccaaggaggggtgaggtaaaaatattgaatacccaccggtagaattagttgttgttccggtctttgggctttgcgtaaatcctccgcacacaaaaatcctaaatgggtaatgctttgttccaggggagaaatgagttcgttatggccgttggtggctccttctggtgcggctgccaagggatattggccgttgagcattaatattccgagcagaccgcaagccagggcggtctaaattcccccgttgaatggaagtgcccccctaacgggg

SEQ ID NO: 309399 - DNA, 437 bp, Zea mays
tggtggtgtccacgggcagccaacaggtgggagatatttatttaggcttagttgacaatattctgcccagcattgacgccgcttttattaacattggggacaccgaaaaaaatggctttatccacgtcagtgacctcggcccagttagattaaggcgcaccgccggttccatttctgaacttttatctcctcaacaaagagtgttggtgcaggtgatgaaggaacccaccggcaataagggcccccgcctaactggaaatatcagtatgccggggcgttatatggtgttgatgccctatggccggggagtgaatctttcccgtcggattaaccgggaggaggaacgcagtcgtttgagggctttggctgtgttaatcaagccaccgggcatgggactgctagtgcggactgaagcggaagatgtgccggaagatgcg

SEQ ID NO: 309400 - DNA, 515 bp, Zea mays
caccccgccaatatttctcagtttcaactgacgcgcaatttccgtcgccgcttcatatttagtccagagcaccgtttcccgggaattggccgaatgggtaaaggaaccagagttaacgtcaattaccgtcaaagcttccgtcggctcaatgattatataaccccccgaaggcagatccaccctgggtttaagggcttcccggatagtggcattgacccggaaatactccagaatactgagggattcccggtgacaatcaattaaaactccctccggcaaacgaccttgatcccagttcatcaactgttgtttaatccgtttcatccccgccggggtatccaccacaatgcgattcacttcgctggagtacatatcccgcagcactcgcttgatgaaatcatcatcccggtccagaagcatgggggcactacgggtcatggcctgttgttgcaccaattcccattgtttttgcagattttccaaatcttcgataatcgcatcttccggcacatctt

SEQ ID NO: 309401 - DNA, 463 bp, Zea mays
gaagccacacgccgggattcaccattgatgaaatcatgggctgcaccacccgtaatgtacagcggcgcaaaagtacccaaccctacgacaaacccaactgtggcagagtgttccgcaatcccacgcccctttattcagcccgttgaattgacgaattaggactcaagggttaccgtattggtggcgcggcagtatcccaacgccatgcgaacttcatcgttgatattgacaatgcttaagcctacgttgtgttcaccctcattttccatgtgcatggcgaggtggataatcactacggaatcctcttagagccagaagtgaaagcgctgggggagtttgctcgatgaacactattaaacctttgttaaatgcctaatccagccataggcctcgcccaacagtttggggactaccttgcccagggtgattttgctaaggcccacgggctactgtgctctgcact

SEQ ID NO: 309402 - DNA, 294 bp, Zea mays
aggatcaaccccatgaaaactttatcttccctgaggaagtactgccccggggtaatgttctctaaaggttttgcaaaacagttatcactcgaagaaatgactaaaaaacaaaactaattgagcaaaacatcatcaattagctaaagttgggagagtgttacagctctcctttttcttttgccctagccgatgattattgccatcactgccctcaaagggggcgttgggaaaaccaccaccgctgtccacctggcagcctatctgcaacaaaaggatccccgggtaccgagctcg

SEQ ID NO: 309403 - DNA, 433 bp, Zea mays
gaggatctagagactgacggatacgctggggcattaccgttaataatgatctttggtggtcttgctcataaggtctgtgttcctgttctttgctatcactaatagcctggagctgcgcccaaaaccttaggaacttgcccataataatccttagcaaaaaccaatcaccgagaacgtagtcaccgacaagaaccattcctggggcgcattccatattcagagtgcaacacttggcctaactgggactctggccaaacattgttattaccgaaaagggtcgggatgtcatagatatgcacaatatttaacaacagcttcgctaccagatttttaaattcttctggagtgtacactaggatatccaaggagggataagtgacataaatatgtttccaagcaatgcggactaaaacataaagaatctggggagaat

SEQ ID NO: 309404 - DNA, 502 bp, Zea mays
  unsure (1)..(502): unsure at all n locations
agaggatcgcctccagcagaattacctaggtgcaaaagcaggacagaccgtacaatgggaaacgattaatcaaatgcacgcataacttgaatggccgccatcaccctcaccctccttctcccgggtaaaagcgttgctgtccagagctggacctttgaatcggaacaaaccatccgtgtgggtcgggcggcggataacgatgttgtactttatagtgctgtagtatcccggcatcatctagaactccgacgggaagaggaagcttgggtcgccattaacttgggagctaatggcacctatatggaagcggaaatggtggaaaagcttgtcctcaaggatggcatggttctacgcttagccagttccggccccaaaatacagattaggcttcagtctgaactcagtaccctggaacaggaactagctcaacagatagttccnctactgggccaggggaagaacanaaatccagccgtctccaccctggggattccaaagagac

SEQ ID NO: 309405 - DNA, 516 bp, Zea mays
cggatattgcgtcaacttagacagcttgagcaaagggggcattctcactggggcaaaccccgccgcctgaatggtggccaaatcccacccactacccttgacatagagaatatcttccttctgccccaccaaattagttacctggcatttcaccgaggtattgccgccgccatggagcactagggatggttcccggcccagcaaacgggatgtatagacccgttggggtaaatccccttggtattggttggcttcctggtcatcccataaactctacataacgcctccggtcaattgctggggttgctgttgctaccaaggctattatccctgctttcggtctgggacaattgagactgttttcttggcaagtcagagacgttgcatatccagataaagtaatccccccatggacgtagagttaggggggaaatatccggataagctttcagagaatacgcagtcggaggatatcaatctaacaaggcttacaccgactcagtttggcaagaatta

SEQ ID NO: 309406 - DNA, 424 bp, Zea mays
catctgcgacaggagttgcaagattatttgttgcagggggttgaagtggatttttctaacttaacggaagaaattcccaaacaggaagaccgagaattggtgttgcgcctgagccaagaaattgtggcggtacaccgacaagaaccagaacctttttgggagtggcaagcctatcaggaattactgcggggtctgaatttacccatcacggctatcagtgttgatgaggatggagattaggggacttgaactattggagttggcaatcaatgaaactctagccaccgggtacaatcgggcaagtacctacaaagcaaaagattatacttaggggttggacgtaaagccaaatctcacagcagcagcaatcattgccccgataatggccacaatcaatgtaatgcccatatctgacggttttgac

SEQ ID NO: 309407 - DNA, 473 bp, Zea mays
tgcttctctgccaacaacatgagccgggtttaatggacaaaagatggtacctgataagccctaggaaagcggaaaaatccttgcttgtcgagaacttatatcgctatactacctgtggctcgctaccacagggcggaacatgcaccagatcacgttgcatacgctcagttaccagatcgcctggtttgctagcagaaaggcagcgaccggagtcacctaatctccatactctaacgagcctgttgacacacatatctggatggggtaatgtgactaggattgaggattgtgccctatatatactaacagtagccctgaatgggcgcaatacatggaaacaattgaaactgacttacatgacattatagcctacatcacgagagactacaccggattgagctaaagctgtatgcccttccgcgcatagaagagatgcagcatggcttgaatggcctaattaattgcctagagga

SEQ ID NO: 309408 - DNA, 293 bp, Zea mays
acaaaaatggtcaaaaattagtcacttttggagactttatcacacatcatgaagcttctgtaatgaatctcataaattatcaatcaaaataatctaagttttctttccattgaatagttgtatttcatattacgtggaacttttcgcaacttaatctaaaaacaaactcagactttgtaggtattaaatctgaccctgatggatatgctttttattcaccaaacggttatgccacttttattgataaatatcaaaatgcagttacttctgaagataccgacaaattcaataaa

SEQ ID NO: 309409 - DNA, 486 bp, Zea mays
aggatctctaactctctgagataaaaattgaatatgctgacttctatcataaatctgttcaagtacatcttcctgcagttgccgaataatttgatcgagaataaaacactaaacatcaactatgtcggagctttcatgacttatcattgaacgcggtacgttcataacatggatataaattgctccattatttaaataaatagctctatctaaatattaataaattgtagaatagtctatttcttcactgcgtggagctcttttttcgatagaattgagcgccaaatcatcataagcctctaatatacgttcaatcatcgaaagctgactgtataaaatacactcgcttgcctctttatagtctaaactaataccacccgcgcttaaatagacctgagcttggttttgcttgataacagcatctttactagtgactctggaattattctcattatcacgatcaaacttgcttagtgttcgatacat

SEQ ID NO: 309410 - DNA, 256 bp, Zea mays
aggatcagaatcggacggtgcccccagccgttacagctcccaatcaacctggacttttccagccgggggatgcccaattgttgatgcggtagctcttcaacggcgggagaataaaacacatataattaaccccgactcgggcataggctgtttcagacggggttgataagaacaggcaagatgttaaacaaaagcgttggggcttcggaaaagctgagaattaaattaagcaaaagatccccgggtaccgagctcg

SEQ ID NO: 309411 - DNA, 462 bp, Zea mays
  unsure (1)..(462): unsure at all n locations
tgaggatcggctttttctttaaaaccctggggctggtcatcgttaacgcggggtttatctccactgcgctttagtttgggtttctgctctccatagcggggcttatctccacgggcagaacggggagaaaatttcttcttgggcatttcagtcatgactttcgggggctaacggggggcggcgtcgggcagttcaattaaggctaatagttcatctagtcgacgggcatccctgaggtataaataacctaaaagagtttctaaaccactggcgggctggtacagttcgggattagctcgccgggaggtagatgtggcggtattacgaccccgacgcacccattccttttctgggtcggttaattggggtaaaagggtggttaaaattagggcctgttgttcagctcgaacttgggccactacccgacggtgaaaatcccctatgcgacggnggggaaacaga

SEQ ID NO: 309412 - DNA, 512 bp, Zea mays
gaggatccgatcggcgctgggggttagtgagggagaaaagtgcccgttggacggcgggtgtatggcagaatgggaggaagccaatctgcgcggaaattcatgactgccactgctgttaaaaccgattacgaagcgattattgggctagaaacccactgtcagctcaacacagttagtaagattttttgtaattgctccactgattttgacagtccccccaacaccaatgtctgtccggtgtgtttgggttatccgggggttctgccagtgctcaatgaagaagtgttggcggcggcggttaaacttggcttagccatcaatggccagattgccccctacagtaagtttgaccgcatgcagtatttttatccggatttacctaagaactattaaatttcccagtttgatttgcccattgtggagcatggctacttggaaattgagttggtggataaaaaaactaaagagattacccgcaaaaccattggcatcactcgtttacatatggagga

SEQ ID NO: 309413 - DNA, 200 bp, Zea mays
ttacgggcactgcttgcggatgtgctttgtcgtggcgaattagtttgtatttctgataggacccgcataattaacagtgaaggtttggactgggcctgaacagagagaattttgagttactacttttaggtggaatggattatgggagaggatattgaacccatcttgaatgtcgagcaatgatcatgccagaccaatgt

SEQ ID NO: 309414 - DNA, 409 bp, Zea mays
cagtattcgcttgcaattcggtttgtggttggctctttccctggaattccaattgggggcagatgtcctttccaccaccatcgcccctaccctagaaagcttgagcaaactagggctaatcgctgtaatcaggacttttttaaactattttcttggtaaagaactggaatcggaaatcagaatggaaattgaacaggaaagacaggaacatggccgttaaccattgagccatggcgatcgccttttcctcgcccaactccagtcaaggccatcaatcgtcgccgccgccaataccaatgcccgtgttgtaaatttccgcattttggatgttcataccctcaacggtggcaccggtcacatccacgtcgtagagtttagcaaaggcaaagttagccgaagtcaaattagc

SEQ ID NO: 309415 - DNA, 495 bp, Zea mays
cgccttgggtactccctgtgtggcaacggatgtgacgggcattcccgaaattattcagcaccaggaaacgggattgctggtggcccaaaatgacccggaacagttagccaaagcgctccaaaccatcttgaaccaagcagatttacgtcatcgttacgcccagcaggcccgccaacgattagaacaggcttttgacctgcgacgcaatagcgcccaactccgtgacttatttcatttaggggaggccaaacgatgaagattgcttacatctgtgtcgatcccggcattccagtctttggttgtaaaggtgcctcaatccatgtgcaagagattatccgcgcttttcagaaccagggggcaacggtgaccctgtttgcggcaaagctggggggggaaccgcccaaggatttagtagatttacctgttcactgcctgcccgaggagcccaaaggagatttagcaatgcgggaacagggcttattttaacacaatcag

SEQ ID NO: 309416 - DNA, 310 bp, Zea mays
aggatcaacccaggcgcatggacctgattttccgagccacggaattggaattaacctccctgccggaattggtggtgcccctgacggggacatccttagaagcggtgttccaagctggcattccccgctggcaaaaacaggcccagcgctataacgtcaatttacaagctcagattccccattctttgccccaggtgtggagtaaccccagtttgttagaccaggtgctggggggcatgattgaaaaatttgtgcggaatttcaacggcggcggagagatcaatttacagatccccgggtaccgagctcg

SEQ ID NO: 309417 - DNA, 430 bp, Zea mays
aaaggttagttacttcaaactctcaggcgctttttgttttgatttatgctataaacgaatatggtcccgataatccacaggacagtcgatcgccgttgccacaggttgagctaaagcttctttgaggatgcggaataaaatccgccgccgcttccacccgatcacctttgagacccatactttcagcaaacttaacaaagtctggattgccagatttaataaagctggattcgccaaattggttgatctgtttccactcaattaggccgtaaccgttgtcgttaaaaatcaacgtgacaaagggagtgcccacccgcatggccgtttccaactcctgacagttcatcataaaaccgccgtcccccgtcactgcaacaatgttgcgctcaggataaaccagcttagcggcgatccccgggtaccgagctcg

SEQ ID NO: 309418 - DNA, 503 bp, Zea mays
cttgggggagcctggcaccaaaatggagacagcctgcaaccgtcccaacaggttattaccatggccgaagctatgcgggagttggaacagttgcgactagaaggactactcacagaatacgaatttgaacaaaaacgtagacaattattgggctaaatgcccgattaaaacagtttcgtagttgcgctcaaaaaatctggttaaccaaaagttaaatattttattgactgttgtctcgtcactactgtagccttggttaaaaaatcagctataaacgccatggcaactcacaacctagacagggtggctgctcccttgatatcaaagcttttcccatttttcttggtgttggcgggcatgttctcggggaccttagcggcccaggcgcaaggtaaaccgaccatttctgtaccagagtttaaaaatgataccaacatgagttggtggtggtggagtggtaataccttcagggaattagccgatgcactcagtaacgaacttac

SEQ ID NO: 309419 - DNA, 404 bp, Zea mays
cggggatatttgccacgttttttattgaggcgggatcgtgctcgggctctgccttaagccgagtcataatggcgatcgcctgtggatccacgactgccgagctcgtattgactggcctgagcattacaacgttgatactgggaaaacctggctgtgaccacagttatgccacatgcaacacatacccattccgccagttggcgcagtgaccaataggcccttaccgttcgggattaagaacagtggcccacacggacaggacagtggaacctgatgcggtatattctccttaggcatttcgactgaatgttacagcgaatggggagcactctcagggcaacttgctctgatgccgtgtagtgtagccacacacggcacccagaaacacgagatgacgcgctctg

SEQ ID NO: 309420 - DNA, 467 bp, Zea mays
aggatctaacacctgcctggacgatggcagaaaatacccgagccagtagcacttcatttccccaactgagtaacgcattcacgggatctttggggggacgacgattccgccccgtaaaagaccagccttccggtaggcaaaattgaaaaacctgatagtaatgtttagcacaaatgccctcaatgcccattaattgatctcgggaagaattaccaagaccggagcgcaatgataaacgataggccccaatcaggtcgatcgcctccgccagggcattattttttttccccgtgtctcggtgacgacgttggaggatggcccgttgattggtcaccttacctaaaattaaccgttgggctaaggctgtgccaaacgtggagtccagcacccgatattgggcaatgcgggtgaggggattggtggcaaactgcccctgtaaacggccccgaaattgaccatcccgccgc

SEQ ID NO: 309421 - DNA, 395 bp, Zea mays
tgtggcctcccccactgtgtataaccgccaagagtattccagccaaattcctgtggagcaaagggctcaggacattgaaagcaaattggaactggctattttcagacgggatatgaaccccgatgacctaagggtagaaacttcccggctcaacaatgtggtggtggttactgttagcaatgacgattatcccctccccttggtgctagcttccgttacggaaaacgatgcagatttcaacggccaacccattgatgttttagcggagcaatggcgggaaaaactggacaaagaaattcggcgaggccaagctagtactaccccagaagccctagaacaatccttcaaacaggctttccaaatatttgtagccctattggtgggaacggctattg

SEQ ID NO: 309422 - DNA, 488 bp, Zea mays
aggatctcgccgttggtcatctcccagattgataaatttgttgaagctggtggaattagtgttttgccaattgtcttttagtaattcaatgatgcgatggctaatacggatagttagaccaacaaaaaaccacagcattagcaattgcaaggggcgacccaaaatggcgccactgagggtggctaagccgggaatttgtcgaaaaatggcgaataagccaaagtaccaaccaaggataattacccagaacaaaagccactggataaatttccaaaagccaattttacggtcgatactgagtatttggggtaatctttgccaaaatatccattgctgttcccccaaaatttccggggcagcataattgacttctatgggatcagggtgattttcttccagaacttcggaattcgcttgtttttcagcggcgatcgcctgtttacgattgaggagtcgttgacgatgccgggaaattaaaatgttgatac

SEQ ID NO: 309423 - DNA, 470 bp, Zea mays
aggatccgccatggtttttgccatagacaccggtcttgctgataaagatttttggtattcatctgagtgaccatccgttttgcctcatatttgcccgatgggtaggggaacaaataaccgattaacgtttgccccctaatgccgattctaaacagatttagcaattacctccggagatggggaaacaccatggttgttaccgttaatttccccacccagagaacgtttcgccagatattcgtacatggcccagcgagtgttcacatccccttgagctaacttcattaagcgtttggcctcctctggttgactgcgggtgagcatggcaaagcgattttccgaatagaccgttttgtcaatggctacttttggcgatcccatatccaattgcaggggatttttaccttcatccgccaacaaagggttatagcggtagagcaaccaacgaccgctgtccaccaacttttttt

SEQ ID NO: 309424 - DNA, 510 bp, Zea mays
agaggatcgcctttcatcttaaacccctagtaattttttagtcataacttgaatcccctagtaaaaaattagaggacaaaatacagccgggcaccatggtacattgtcaatgatatgcatacgcaaataatcaaggaacaaaacctagacaggataaggtcttagaatgcgtactcacataactagcttatcaaactgctgaatcgttaattatttaaactttcaaacaactaagtatgattattaccgttgccagttttaaaggcggggtaggcaaaaccacaacagcagttcatctctcggcctatttggcacttcaaggagaaacgctattaatagatggcgatcgcctctgccagatttacgaagataggcccagtttttgccgggtgaaaccagataactttgcccggatgtttggcattgctccggcggagttcgacgaatttgctagccattgctgtgaagaacagattgaaggagtttatggcccccggagtggggaattaa

SEQ ID NO: 309425 - DNA, 475 bp, Zea mays
  unsure (1)..(475): unsure at all n locations
cagatggttaccgggagccacggcncagggataaatcccgtaccaaaatctgtgagtgaattggggggagaaagggtgacattttccagggcaacggtggcaccaatacgggttgtgataacgttgtggtcaaaaccagtactttccggccgttccaattcattgctggggccatttaaagattcgtaaaattctcctaaacggttaatgctggcggcaaattcagtaatattttgaatctggttggttactagagatagggcagaaaggaccatgccaaaggccaaactagcttgggcgatcgccccgaagtccaggtctcctgcgaggtaaaggggggcgataataatatagggaattagcctggtgaaatagttatagcctagctgaaataggctgattaaagcttgccaaataattagtaaattaaagtttctaatcgcccctagcaaacgatccccgggtaccgagctcg

SEQ ID NO: 309426 - DNA, 489 bp, Zea mays
cataagaacattactgtccacattggttaacaaactcctcgaattttgttaggagatgctgaggaattctgcccaaggaaaaccgttgtcagaacaaccaatagggcaaccaataaaactagtaaccgccacaatttcccaccgagataatgccagggagtccacatttttacagaggacggtaaactcgatagtcaatcttggggaaaatattgtccataacttcaaccttttctagccaacccgcatccactttattggctcgaatatcatcaaacagtttatcgaagcgcaacagatgggaacgggtacgacgcaccgcatagggcaccatagttcctgtccgcataataaatgcccagtcggaggattgggccaacagcaattcccgggcggcctggttcaatgctttttcttctagttcatccaccgcttcccgatggcttaattcaatcatgcgctcagcagctttatgcaaatggggataaa

SEQ ID NO: 309427 - DNA, 505 bp, Zea mays
  unsure (1)..(505): unsure at all n locations
cgggaggccgctttaatccaaactctttttcctaaaatcctctcattacttccagcaaaggggccactggccataccctgggcgcttccggggcgatcgccgtagctttgactttattaagccttcatcagcaaaaattgcccccctgtgttggtttgaaagaacctgaatttcccctcaactttgtccgcattgaatcagttcagccagcaactagccctttaaactatggtctctgcctcagttttggctttggcggccagaatggggcgatcgccgtgggacacgcaccactaccaacaaaatgaaccggacgtcaagtctcgttgacaaaaattaacattatgtttactataaaaaacataaggctatggaaacccgacagaattcctttgcatgaactattaagggcacgggttctaggggtttcggtaccttccattgacattgagttctcctagatatgccctcggtgatgccggngtatttttttgaccgtctgaat

SEQ ID NO: 309428 - DNA, 502 bp, Zea mays
tctcttcggcaaggctctacgatgctgtgctggtgcagagaaattccccttctgccccggtgttgaaaaaatatgccgccgaaaattcccatcccgtttacctggaccggcaagcagtgatcgaaaagggttgccgcattgtgctagccaatgtgatgcaggaggatgaaaaaagccatcaggtacgccatgacccccaacgcttagcccgggtattaatgcgctggtatggcggtcagtaagttggggattgggattctaagcacaagctccaaaaattctacttctgccggtaaacctgttgaatatcaccgatggtgaatagcgcttggaacgtcaaaccctggctttggtaaaattcccggcctccctgttggcgatcgactaaggaaataactgtgtcaacttggtagcccgcattacagaacctttccaccgatagcatggcggattttccggtggtgaccacatcttccaacaccaccacttttgttcccggagc

SEQ ID NO: 309429 - DNA, 498 bp, Zea mays
ctgccttggcgctccaataagtccactgcggttctgtacccattctatgtatctcaccgtcacccccccagcattgaccaagatatcggggaaaacatagatacctttgctagccaaaatatcatcggcggcggtggtggtgggcccattagcaacttcaaaaatgtagcgagctctgacttggtctgcattgtcgcgggtaatttgattttccaaggcggcgggaatgagcacgtccacgtccagagctagtaactcggcattactgatttgttgattttcccctaaatcgcagatggcttggtcacagtacatacccgctaaagtgcgatgccgttgtttgtaatcaatcacagcgggaatatcgatgccttgttcgttataaatgcccccctgggaatcactgatggccaccactttgtagccatcttggtataaacattcggctaccaccatacccgcattaccgaaaccctggacagcaacggtggtattttc

SEQ ID NO: 309430 - DNA, 392 bp, Zea mays
gaagcgggggcagacgagttggtgtttttagacattattgctacccacgagcaacgggacaccatggttgatgtggtttatcgcacggcggaagaggtgtttattcccctaacggtagggggcggcatttctacgttggaacatattaaaaatctgctccgggctggggcagataaggtgagtgttaattcctctgctgtgcgggacccggactttattagtcgagctagtgaccgttttgggcggcaatgcattgtggtggcgatcgatgcccgtcgtcggttagatgcggataatcccggctgggatgtgtatgtgcggggggggcgggaaaacaccggcctagatgtcatcgcctgggcggaggaagtggccaaacggggggcagggga

SEQ ID NO: 309431 - DNA, 340 bp, Zea mays
aggatccatgccccgaaaaagatagctttcttgcactaatcgttccggcagggcaggggataaagcaggcgatcgtttagccatagaactcagagataacgtccagtgccccagttcacggtcgggcaaaccccagctcaatcatgacacagaccgaatcccgacagaacggagaattcacacgaataacaaaacattaacgatgcgagcaaaatatttttatgtgcattttaaaaataaattgcaaaacatttcaaattcaactatgatttatcgagattacacacaggtcacaatttcaaggagttaacgatggctcgatccccgggtaccgagctcg

SEQ ID NO: 309432 - DNA, 303 bp, Zea mays
aggctcgcagttgggccactacggcaattaatttttctagggcttggagaatgggggcagtggcatccataaaaatcagcagggaatcgaaccaatacaacggggaatcagggggtaatttttgaccgggccaaaactctcagatgggttagcaaagtttcaggccaggctaattttccccaactaagttaagcaatctttaggaagcaccggggtaaattcgcccccgccattgtttgggggtttgggaagcggaaatgataatccgggtcaccgccaacggatccccgggtaccgagctcg

SEQ ID NO: 309433 - DNA, 356 bp, Zea mays
gttagagccaaccagaagagctcgcagttactgagagtgtgtgtgagagagaggatgggtggcagcggcagggctgctctgctgctggccctggcggaggaggccgtgagcctggccgaggagatccaggccgacgccgggtacggtcacgggggcgggtacacccctacgcctacgccggtcaccccgaccgctaagcccgatgaagccccccaccaaggggccgaagccggacaagccggccaaggagcacaagccgcccaaggagcacggtcccaggccaggaaagccgcccaaggagcacacgccgacgccagccacgtacaccccgagccccaaacccacgccgccgacgt

SEQ ID NO: 309434 - DNA, 396 bp, Zea mays
aaaagcttttattgaggaagttgaacgatcattctctttttggggcactgctgaaggtgatgctatccacccagctgagtgtatgcaccaactgcttgagcaagttcgatgtcataaagtgaatatcgatggcaatgtttgtactgtcatggtgactacattagttcttgagggctggcaacgtaagttggatccagattataatgttatgaagactctgcaaactttactttttaaggaagattgggcgaagtctcttcaatacactatccaagggctcatggcgccttagggtcgtccgcaatcctttctaaagttttgatctggtttgtgttcggccggaggatccctttttttaccatcacgtgtggcttctttttacattattttacgttt

SEQ ID NO: 309435 - DNA, 333 bp, Zea mays
gcctcgatagcctgatctctatttggagggctattggttaccaagggggatctttctccagaaactaccttgtggacgagctcaccattctttgagtcccgtctggtggcactaaacagcccatcggattatgcgagagcgctagagctaggttcaggaaacggtggcgtcgccgcaattatcgacgagctcccgtatgtcgagatctttctgtcgaagtactgcaagttcaagacggttggtcaggttttcacaaaaagcggatggggatttgccttcccaagaaacttccctttcgccgaggacttgtctacggcaatcctggcgctttcg

SEQ ID NO: 309436 - DNA, 276 bp, Zea mays
gccaaacgctcagcttttcagccagcttctataaaattcgttggggcaaaaaccatccaaaatcaacataaacacataatcggttgagtcgttgtaatagtaagaatccgtcactttctagatcctgagttctatgaacaactttatcttcctccacgcgtaatcataatgatactcagattctccctacaaccagattctcctcacagccagattttcagaaaagctgctcaaaaaaaagttgaaccaaacaggccctagagctatggcttattt

SEQ ID NO: 309437 - DNA, 425 bp, Zea mays
tgttaatactttttgtagttttagttaaaaaagctgttgccttgttttgggttgtatgcatatatttgcaagtcttctggtgtgtttcccttccgtgatatatgttgaagatcacgacagatgtatgacgctaagcttatgactttgattttgcgacagatttcccttgaaagctgttaaggtcatgcacactgttgccctgagaaccgaggcaactattcctggtggggaaacacctgcagaccttggtcaggctttcaagaaccacatgagcgaaatgttcgcataccatgcgacaatgatgtcaaatacccttcgaacatcaatagtggttttcactaggacgggatttatggctatactgcttaatcactaccgtccatctggcactatttttgccttcacagacgaggagagagttaggc

SEQ ID NO: 309438 - DNA, 455 bp, Zea mays
cccatcgcgtccgcccacgcgtccgcccacgcgtccgctccgccgtcgccgccgccgccggggatggggggagcgcaattccccggcgacaacgacgtcgcggaagtagacgcggcccgcgacggagaggtggaccgccgtgacgtgggcaagatgaagcacgggtgcgagcattaccggcggaggtgcaagatcgtggcaccgtgctgcaaccaggtgttcccctgccgccactgccacaacgaggctacggcttccggagatcggcatacaatatgtcgtcaggatgttgaaaaagtagtttgcctactctgtgaaacaaaacagccggtgtcacaagtgtgcataagctgtggagtcaatatgggagagtacttttgtgatattatgcaaattttatgatgatgatacagacaaagggcagtaccattgcatcgattgggcatatgcagggt

SEQ ID NO: 309439 - DNA, 229 bp, Zea mays
aagggggagtacaggaatattgacctgttgtccattgactacccctttcggcctgatcttaggccctgactcaccctccgtggaccaaccttgcggaggaaaccttgggttttcggggcattggattctcaccaatgttttcgttactcaagccgacattctcgcttccgcttcgtcaacccccgctttcgcgtttgcttccctctaagggggaacgctcccctaccga

SEQ ID NO: 309440 - DNA, 463 bp, Zea mays
aaataaagcttccaatgaacaagacaggagctcgacttcgcctggctccgaacatgtggatggcaaccggtagtgaagcctcgaaggcagctgaggctgtggttgaccggcataaacaggacagcaagaagatgctccatgcggtttaccgtgttggggatctggaccgcacaattaagtactacacggaatgctttgggatgaaactgctgaggaaaagggatgttcctgatgagaagtacaccaacgccttccttggctttgggtcagagaacaccaactttgcagttgaattgaccaactttgcggaggtcttcgcgtcctgcggtgcgtcgcgccgttgcctggctccgtcctcgccgttcctctgtagaagctggccgctgaccccgccgtggtggcccgcgcgccgttttttattagatgaagaatgaatcaacccttgtagaagctaaagatagaa

SEQ ID NO: 309441 - DNA, 438 bp, Zea mays
gtctaccagaagagcttgcagttactgagagtgtgtgtgagagagaggatgggtggcagcggcagggctgctctgctgctggccctggtggtggtggccgcgagcctggccgcggagatccatgccgacgccgggtacggttacggcggcgggtacaccccgacgccgacgccggccaccccgaccccgaagcccgagaagccccccaccaaggggccgaagccggacaagccgcccaaggagcacatgccggccaaggagcacggtccacagccggagaagacgcccaaggagcacaagccgacgccgcccacggacaccctgagcccgaaacccccgccgtcgacgtacacttttaccccgacgcccgtcaagacaacgccaccgaaatccaccttctgtccctacgcccctgaaacgcaactccaaaaaccactt

SEQ ID NO: 309442 - DNA, 468 bp, Zea mays
ctctcgcgtccgcccacgcgtccgcccacgcgtccgcccacgcgtccgtgccaaagccagaggagcgttatcggagcagggaggaagaagagcgctgtgttcgacgcaggagcatttcgagggacagcgactcgactcggagctctggagagatctagcggggctccggtacagccagtgcatggcaactcgcaagggctgagctgctcgtcactggcgtagccgcgtaggaaccaaaatcgggcgtcaggaaagtgccgtcgtccaactgggagcgtgacagcagcgggaggcgccatatggacagggacagcagctcgtcggtctcggcgtcggacgggagctcggaggcgggggagcgcggcgggtgctgctcgtcgccgccgtccacgcggagccgcaccgcgtccgacgcgtccacgtccctcttggaccggtgccgcagcgttgacgtcgaccacagcgggc

SEQ ID NO: 309443 - DNA, 421 bp, Zea mays
ctctttatggatggacacgctacgccgcattcctgcccgcagccacttccttcgcccacacgcccgcgcgctcggaatactctgaggatggtgctcgaaccaagggcgatggttcgtctcgctttcgtctcgctgcgtgcgctctctgtcactccccctctctctcctcatcagatccggccatggacaccaaggagcgtctggtcggggtcgagctgctgcacgaggcgcttgacgccgcggcgcgggctgacggcggccgaggtcaccgcgctggtggacacctgcatggatctgacgcgggacgccaacttctgcatcgcccagggcggcctccaggcgctctccgtcgccgccgtcgtcgcgggcgaccactttaagaaccaccttaacgcccttcgtcccgccgacgttgagcgcc

SEQ ID NO: 309444 - DNA, 295 bp, Zea mays
ccttcgaaaaatcaactaaatagagtttttcgtctagtacacccttaaaagctaatgaaccatcactccttctaaagacagacacatctacattggtaaataagcaattgtaacccatattacatagttgacaaacggataacaagttatacccgagcgattcaactaagaacacattagatatggaatgctcagaagaaataactatctttcctagacctttaaccttgccttggttcccatctccaaagatgatcgaatcctaggaatctttactcttgacgtaggaagtgaa

SEQ ID NO: 309445 - DNA, 469 bp, Zea mays
ccctcgcgtccgaagaccttggtcaataagatcaggagctatggaagcacgagatggacggaccacgacatcgtccgacttatgctcatgtccttcactgtacttgatcctcatcttgtgaactctatccatgaaaatcctaggtacaccaagatgacgcccgaggaaatacttggaaagttcgtaagcgggcgtatgatgatcaaggaagcaagatacgttgatgaggcattgaatggtccaatgcccatctacgagcctcaaacggttgctctcaaagcaacaagtagcagggaggcgctacctagcaaggtggaacaagttgaggcggccgggctaaacgaggatgaaatggccctcattatcaagcgcttcaagaccgcattgaagggacgcaaggagtactcaaacaagaacaaggcaaaaggaaagcgttcctacttcaagtgcggcaagacaggtcattttt

SEQ ID NO: 309446 - DNA, 335 bp, Zea mays
agtgctgttctgcgtagtgcacggccagcgcgtcgtgcaggtccagcccctcgcccatcaccatcagcttgacgagctcgatgtcggcggcgtccagcgcgcgccgcatgcgccggatccggtgctcgcggtcggccgccgacgacgccgcgttgatggggaggtagtggtgggtgaggaacggcgagcgcggcccggcgccgcccgcggcggcggcgccgccgggggacttggcgcggatctcctcgatcttggcgaccacgtcgatggggaggtgcttggcgaggaggtcggcggagaggcccgagcgcgccaccaggtgggagcaggcggcc

SEQ ID NO: 309447 - DNA, 441 bp, Zea mays
ttgacgcgtgggcgcgcgcacaattcatgtgaaccaacacgtgatgcaatgtgtatgttctagtctgcccatacatgcgtgggcgaaatatcctagagggagttgccatactgcacgaaaccattcatgagttgcataggaaaaggctaagtggggttattcttaaaatttattttgagaaggcatacgacaaggtcaaatggccattcttattccaaactcttcggatgaaaggatttgcgcccaagtggatttcttgggttagatccttcattatgggaggtagtgttgcggttaatgtcaacgacgacgtgggaaaattcttccaaacaaagaagggattacgccaaagtcgatcccctgcctcccatcctgttcaacatcgtagcagatatgccagcgatcttgattaacaaggctaaagaacatgggcaagtcagt

SEQ ID NO: 309448 - DNA, 440 bp, Zea mays
tgttcgccaagaaccgggagctggaggtgatccactcccgctgggccatgctgggcgcgctcggctgcgtcttccccgagctgctcgcccgcaacggcgtcaagttcggcgaggccgtgtggttcaaggccggctcccagatcttcagcgagggcgggctggactacctcgggaacccgagcctcatccacgcgcagagcatccttgccatctgggcctgccaggtcgtgctcatgggcgccgtcgagggctaccgcatcgccggcggtccgctcggcgaggtcgtcgacccgctctaccccggtggcagcttcgacccgctcggcctcgccgacgaccccgaggccttcgccgagctcaaggtgaaggagctcaagaacggccgcctcgccatgttcttcatgttcggattcttcgtccaggccatcgtcaccgggaag

SEQ ID NO: 309449 - DNA, 547 bp, Zea mays
ctgccccccctgctgccgccgcgccggaaccgccgggtccaacccctccttttatccgtggcttctttgctacagactgctgagcatgcttttaatccatagtcatcttgatgctggcttcaaatggaaagggtgaatatgcttaggcaatgagcactataagccacatcttattttccgaggaagaaagcatttctccgaagaagccgacttcgatagcagaggtggcgaagcagcgcgagctgagcggcacacttctgagcgaggacgacagcacgatgaagaagcagatatcggacctgaaatccaaggagctgagcggccacgacatctttgctcctccggaagacccacggccacgcaactcagagaacggctcgacctcgcagaccccgggcaaaaatgcacacgtcctgacctctgaactcagctcgccgtaatataaactcgcagtcacagaagctgcatgcagtgttgcttactgctgctggctgtcgttctctcacaacaggtaagcaacttcaagttcggcgaggccgacgaggac

SEQ ID NO: 309450 - DNA, 551 bp, Zea mays
ctggtgccgccgcggcgtacctggcgggtccacccccgcctcttgttagaacgcttcagagccgggcgaggcggataggccccctgaccgtccaccggcgactgggccggccgtcgctgccgtcctgcctctccaccgtggccggcgaccagcaccactaggtgtttttgagtctgttgcgagtgtggtggccatgtccatgttcaataggatcttcgggaagcccaaggagcaggccaactccaatgcttgggccactctggacaagttaaatgagacacttgatatgctggagaagaaagaaaaggtgctggagaaaaaagcaaacgctgagcttgagagagccaaggagttctcgaaagcaaagaataaaagagcggttatccaatccttgaagaggaaaaaactttatgagcaacaaattgagcagcttggaaattttcagttgagaatccatgatcagatgatcatgttagaagcagctaaagctacaacagagactgttgatgcattgagaactggcgctgcagctatgaaagcattgcaaaagc

SEQ ID NO: 309451 - DNA, 497 bp, Zea mays
tttcacgcgtccgcccacgcgtccgcccacgcgtccggttgttgtggggaacatggcagccctcaagagagcaccaactcatacataaaagaaatgttgcaagtatccaagtttcttcgtgtcatcaatctacaaggcatcgatatcggtgagagcttaccaacagctattgggaatgtagcacaccttcagtacctcggtgtcactgcttgttccttgaaatatatcccatcgacaattgaaaaccttaaaaaacttcagacgttggatgttcgacacacgtttgtttataaacttccagaagcattttggagtataacgacactgcggcatgtatttggtgagggtcttttcttgcctaagcaggtgggtgacttgaaacacctgcagacacttgaaagcatagatcctgataaggataatggttgggacagcagcacttttgagaaaatggctcaccttcagtcccttcatgtttgggattctaagtacaatgg

SEQ ID NO: 309452 - DNA, 422 bp, Zea mays
agctgggttccattgggccgtacaggaggatctagctcactaggaggatggctacgctgatacaggggatcatacaggagaagaggcggtggtgctaggtcgaccttgaggacggcagcgagggcgagggcgtgcatctgtaccggatcatgaacatgatcataagcgggggcgactagctcaccgacgagatcggactgctcaagaaggtgtaccagctgttcccgctctgggactctgaggtcgcgctcatcgtcttctccaaccggggtatgctatacgagttctgtagtggaccgagcattacgagaacacttgagaggtttgagaaaaacagttttgcaggcccagatactgttgttcagaacaaagagaacgagttttgtccataacacccgcagtgagtaccttaaactgaaagc

SEQ ID NO: 309453 - DNA, 192 bp, Zea mays
ataactttgacttggaggacttgctgagagcttctgctgaagttctcgggaaagggagctatggaactgcctacaaggctatactcgaggatggctctactgtggtagtcaagaggctaaaggatgcctttctgcttcagaatgattccgtgctgtccttgtcctgaccttgctccctgcgctcgccagccg

SEQ ID NO: 309454 - DNA, 495 bp, Zea mays
tttaggccatggctgcaagcaccattgcacagaggggcatacagcttgtggcaactgcccatggggtaacgatagagaatctgatcatgaacccatcactagagatgcttgtgggaggaatacagagtgtcacacttggtgatgaagaagctaaccggagaggagttcaaaaaactgttctggagcgcaagggcccatcaacatttacatgtgctgcagagatcgtctccaaaaaagaattacgtgtccatcgtagtttggaagccacggtagatgctttactcgcaggtaagctgcctaattttgaaattcgaaagttgggttcaaagggatctatgcaggaagtttctgtgcaaaaggaacaatcacatcttggtatttatgatgcaactgaatttggcagtgactctctaaggaatgccagaagaagcttagactctgcatttagtcttgactctgctgaagggcctatagtgaggtcagatggagctgatt

SEQ ID NO: 309455 - DNA, 496 bp, Zea mays
ttcccacgcgtccgcccacgcgtccggcgataaatacctgttatagtggttatgccaatttaagtattgcacttaatatttgtttagtataaatacaacatagattagtagtattcgcatgtcgcgcgctgtttgcgtgtcgccgttacacgttcgcgcgttcgcgccgtgcgtctggtacgtgtatcgtcgcgtgctgttcgtgcgcatcgccttgcgtcctttgctcatggtcacacgtggccgcgcacgctttccgtgtgctcctttgcacgcgacgcgcatgctgttcccacctatggcactcatggttgtcgtgtcgcatactgtcgtgtttcttatcctcgcataaccgtagaagcgctctctattttatattgctcgtttttatgatgttttatcttgtatggtgtaatgttcttatgcatatgtatatgtttgtttgtgcctgttcgcctttgcttcgcgttgcgattagatcgagattctgttccga

SEQ ID NO: 309456 - DNA, 408 bp, Zea mays
ttgtcacgcgtccgctcgcgcgcgccatggttgtggaggccaactcagggagcacgctggcggccgtcggcgtggccggcaccggcagcagcatggccgtgcacagccaccagctttcgaccgtggtgccgagctcggtgaccggggaggaggtgaactacgagctcgcggacgccgacttgctccacaaggtgcactacgtacgcgcggtgcacgtgttccgtgcgccgaccgccgtcgcagcgccgccgctcaccatccgggagctgaaagagcccatgttcccgtggctggacatgtacttccccgtcagcggcccggctcccgcggcgtcaagccgccgagggcgaaaaggccgtcgcggcggcgggggggccggcctacgtgcggtgcaacgactgcggcgtg

SEQ ID NO: 309457 - DNA, 436 bp, Zea mays
tgtgattcctggtccgacgcctggtcctggtactgccagccataatacattgctggcactgagagtgcgtgcacgcgaggggatggctgctagagagagggctgctctgctgatggccctggtggtggtggccgtgagcatggccgcggagatccaggccgacggcgggtacggttacggtggcggtgacaccctgacgccgacgccggccaccccgcccgctaagacggagaagccccccaccaaggggccgaagccgaacaagccgcccaaggagcacaggccgcccatggagcatgggcccaagccggagaagtcgtgaatggagaacaaagctgatgccccccacgtacaccccgagccctaaacccacgccgccgaagttcactcaacccctaagcgccacaagccgttgctaccccatacacttgcgctc

SEQ ID NO: 309458 - DNA, 280 bp, Zea mays
tttttcacgcgtccgcccacgcgtccgcgtgaagcgattcaagctcaggagaatctagcaataacccaaaatgagcgagaagatttacaaagtttgcaggtgaaacttaaagatgaaattgatagtctgagagcccaaaaggttgacctaatggctgatgcagaaaggctattatcagaaaaagaaaggtttgagattgaatgggagttgatcgatgagaagaaggaggaactacaaaaggaggcagccaggattgttgaagaactattagtaatagatg

SEQ ID NO: 309459 - DNA, 255 bp, Zea mays
ggcggcgttctgtggcggagggcgctgcgcaggagcgccagggatgcagttccagcgcccgtcagccgtggcgaccgcgcacccagggcgcgaggtgaagaagttgtcctcgtaggtgaagttcctgagcgtcccctgcaggccgcacaccgccggcggtacggggcccctgagcaggttcccggcgacgttgagctgctggagggcggccatcccgccgacggcgggcgggagcgggccctggaggtggttgcc

SEQ ID NO: 309460 - DNA, 291 bp, Zea mays
ccatacgctgtcttttcactggacacctttccgtgagatcagaggtcagaaccctgcgggactaagcctgactgtgagaagggtctcggacggcgcgatacataacagcatagcctggctcaaatgccgaggggtctgtcaagggctttcagagcgcctactacgtgcgctacggcgggggcgccaaggagcttaacgactgcttcttcaagggcaccggcctctgcgacgagaacatcggcacctttgtgcctcgtttacaaccggttttattccgcccacccgaccccc

SEQ ID NO: 309461 - DNA, 415 bp, Zea mays
  unsure (1)..(415): unsure at all n locations
ttacatccagctatgaccgccgcctcccttccggggcggtactgatcctccccacgggactcccccgcaggagcggcggcggcggcggcggcagccaggtcgtaccccacatcggcgagcggcggcggcaccgccggaggcaaaggcaagatgttcgggcgcgcgccgaagaagagcgacagcaccaagtactacgagatcctaggggtgcccaagtcggcgtaccaggactatctcaagaaggcctaccgcatggatgctatcaagaaccacccagacaggggcggtgaccccgagaagttcaaggagctcgcacaagcctatgaggttttgagtgatccagagaaacgtgagatntatgatcagtatggtgaagatgcccttaacgaaggaatgggcggtggaggatcccatg

SEQ ID NO: 309462 - DNA, 315 bp, Zea mays
tttactcgtccggaacgtgccgtcgtctcacttgggcgaggcccgcgtgacgatgcgcaagacggcggctaaggcaaagccggcggcgagctccggcagcccgtggtacggccccgaccgcgtgctctacctgggcccgctgtccggcgcgcccccgagctacctgacgggcgagttcccgggcgactacggcttgggataccgcggggctgtcggctgacccggagacgttcgccaagaaccgggagctggaggtcatccactcccgctgggccatctgggcgcgttgggctgcgtgttcccggagcttgttcg

SEQ ID NO: 309463 - DNA, 265 bp, Zea mays
  unsure (1)..(265): unsure at all n locations
tcggctaaccagaagagcttgcanttactgaaagtggggtcataaagatgatggggggcatcnacanggctactcttctgctagccctagtagtggtacccttcagccttgccttggacatccaggcctacccctggtacagttaccgcgcttgttccacccctacaccaacgcctgccacccccacctccaatcccaagaatccccccaccaatgggcccaaacctgacaagccccccaattagcacaaaccctccaacgatca

SEQ ID NO: 309464 - DNA, 318 bp, Zea mays
cctacgtttccggccgggaggaagaggaccacggcctggagaattcagatgggtgggcaaatgctcatactagtagagtaacaaatgttcaccggcgacatggccgcgcagtggaaggagctgcagggcagcaaccactgggagggcctgctggacccgctcgacgtgggactccggcgttgcctcatcacctacggggagatgatcatggccacgtacgaggcgttcatcggcgagagccgggccccgaacgccgggatgtgccggtaccgccgcgcctacctgttccagcgcgtggaccttgttccacccggggtg

SEQ ID NO: 309465 - DNA, 242 bp, Zea mays
  unsure (1)..(242): unsure at all n locations
tcggtcgctcagtggcatgtcgcanatgaactgaaggcataaccagctcactgggggcgtaccggcggggttaggctcgatgccggagctcaccctgctggacctttcgtcaaaccagctttccggcgccataccgccggcgctgggaacgcttagggtcaaccagcttaatctgtcctccaaccagctcaccggggagggtcccgatgcgctcgcccgtacctaccaccaaagcttcatgg

SEQ ID NO: 309466 - DNA, 367 bp, Zea mays
tcgtttacgcgtccgcccacgcgtccggctggggtggcaagtgaactacgaggggggcaagtctatgtgctacagccttcgtgtccatgtgctacccttcttcaggttctacagaggagcacagggacgactctgcagcttcagctgtacaaacgcaactgtaagatcctgtccatatttcttctgttcatatgattactgctatgtcctccaataacatgcaacatatccaaaatgctctttagtgaacactagtacataattacagtcaccctctcggagctaaaatgtatggagtcagaaagttgtgaattcgggtagagcttgttgaccacttaacttcagttttggactctgttaagtttgt

SEQ ID NO: 309467 - DNA, 367 bp, Zea mays
tctcttacgcgtccggtgctccgcaaccgctgagtgagaagaagagatggccggcaggggcgatggcccggctatcggcatcgatctcggcacgacgtactcttgcgtcggcgtgtggcagcacgaccgcgtcgagatcattgccaaccgccagggtaaccgcaccacgccctcgtacgtcgccttcaccgactccgagcgccttattggagatgcggccaagaaccaggtcgccatgaaccccatcaacaccgtctttgatgccaagcgttctatcggcaggagggtcagtgatgcctctgtccagagtgatatcaagcttggggcctttaagggcatttttgggcctggggagaagccaatgatt

SEQ ID NO: 309468 - DNA, 435 bp, Zea mays
ctctcccgtacgccgatacccacgggggggggtgtccgaagcctggcgtgtggaacaggagccggcgcggggatgtcgtccatctcgcggaatctccggcgatccctcgccccggaccgcctgcgccggctctcccagcacccgcgagagtatgtgacgtcggagtgccaccgccccgtcggcctccacaagcgcggccccgacatccttcacgacccctggttcaaccggggcacggggttctcgatgaccgagagggacctgctaggcctccgcggtctgctcccgcccaacgtcgtctcctcgcagcagcagatcgacagattcaagcttgatctgaaacggctgccaagatttgcaagagatggcccgtctgatacttattcattgggaaagtgggcgcactcttaacagattgcctgaccgaaatgaaac

SEQ ID NO: 309469 - DNA, 246 bp, Zea mays
gcacaagccgtccaaggagcacgggggccggttttataatccgcggggggggcacatgccgactccttccacttacacctctagcctcaaacccacgctttcgacgtacacttctacccctactgtcctcaagtctactccacccacatacacttccgtccctactctccacaaacccacaccaaaacctactcttactcctccgacgtacaccctcgacccccatgtcttctacacctaatttcg

SEQ ID NO: 309470 - DNA, 279 bp, Zea mays
ttggttgtgccgccgcctccgatcccagcctggggtttttcaccaagcgcgacaccgatgtcaagctaccccgcgccacgcgggtcaagaacaagacccctgcgccgatacagattacggccgagcagatccttcgggaggctagggagcggcaggagcctgagatccgcccacccaagcagaagattacagacccccaagagctctccgagtaccgtcttcgtaagcggaaggagttcgaggatgtcatccgccgagtgcgctggagcgtttcggcct

SEQ ID NO: 309471 - DNA, 360 bp, Zea mays
tctatctctggcagccgcatcgtctcaatctcagtcactcccggacacgcgcacgagccaccccgcacccaaccaaccaacccatggacgcgggcggaacgccgccgctgctgttcctcctggccgcggcagccgccctgctgggcgcggcgctcgggtggctgctcctggccgggcggtcggcggcgaggccggggcggctgccgccgggcagcacggggctgccgctcatcggggagacgctgcgcctgatcgcggcgtacaagacgccgaacccggagccgttcatcgacgagcgcgtggcgcggcacggcagctgtgtgtttacgacgcacgtgttcggcgagcgcaccgtgttct

SEQ ID NO: 309472 - DNA, 480 bp, Zea mays
acaaagagcagtatagggtctcctgctgcaaagctgacatccggcagattgaggttgtcttctgatggaaacgaagatgatcatggtgaagaaactgtttcagattcagatttggatgatataattgggatctcagacagctgtgcactagaggcacttcattggatgctgcagcttgagaaaggtagttcttcccaggatgccgctacaacccttcacccttgttgggaagcatacaaacttgaggataagagggaactcgttttgtacttgaacgtgttttcaggcgatgctacaactgaatttcctagtacattacaactttctagaggaggaattctggcagatgcaatgggactggggaagactattatgacgatagctcttcttctttctgattctagccaaggatgcatcacaactcagaatgctgctcagacccctagagaagctagtgggttgggtgaatcgcatgatgct

SEQ ID NO: 309473 - DNA, 424 bp, Zea mays
cccacgcgtccgcagaagagcttgcagttactgagagtgtgtgtgagagagaggatgggtggcagcggcagggctgctctgctgctggccctggtggtggtggccgtgagcctggccgtggagatccaggccgacgccgggtacggttacggcggcggtgtacaccccgacgccgacgccggccaccccgaccccgaagcccgagaagccccccaccaaggggccggagccggacaagccgcccaaggagcacaagccgcccaaggagcacgggcccaagccggagaagccgtccaaggagcacaagccgactgccgccacgtacaccccgagccccaaacctacgccggcacgtacacttccaccccgtcgcccctatgccggcgccaccccatacactcccgtccctacgccccacaaaccc

SEQ ID NO: 309474 - DNA, 341 bp, Zea mays
tttctttttttttttttttttttcaaaaatttttcttggggcctttgaactgatgccttctggatttcaggacattgccgttataaggcaaactaaaatttacaattatacaccctttggggtcttcttgagcttgtttaatacttagctcttccacgagattatccatccccatccataatctaaatgcctgaacagataccatcgccaaaatgttctccggggtagtggctacttctttgcatacgagagataatgatcttgagtcatggtaaacacatctggcctctctgattgggtgtatgtcaagcaccggcgtatcagatccttcgcctcattcg

SEQ ID NO: 309475 - DNA, 567 bp, Zea mays
  unsure (1)..(567): unsure at all n locations
accgctcattcctgctgggactgtcctggaagttcgacaggtgatagacacattgtctgattcgctacagttatgctctatgtctgagttgtcattgcccgagccagttacaaagttgttgcagacctttgcttctgtctttgatactcccgtttcactacccccaagtcgctcctgtgatcactctatacctttagtggacggggctcggcctatgaacatccgaccctatcggatttctcctgcactgaaggacgaagtggagtcccagattacagagatgctgaatactgggttaatctagcacagttctagctccttttcttcgcctgtcctccttgttaaaaagaaggacaattcttggcgtttttgtgttgattaccgccacttgaatgctctcactgtgaaatctaaatacccggtgcctatcatagatgaactcctcgatgaattatttggagcagcatggttttctatccttgatctaagagccngtttccatcaaatcttactgaaagcccgtgaagagcacaagacagcttttcaagaccatgtgggacactatga

SEQ ID NO: 309476 - DNA, 504 bp, Zea mays
  unsure (1)..(504): unsure at all n locations
gtcggcaggctccccgagctcaacgtctacggccacgattaccccacccgggacggcaccgcgatcagggactacatacacgtcgtcgacctcgccgatgggcacatcgcagcgctcaagaagctcttcgactctcctgatataggttgtgtggcctacaatctgggtacagggcgcggcacatccgttctggagatggtggcggcgttcaagaaggcctccggcaaggagattcccaccaagttgtgccccaggagaccgggtgacgcgacggaggtttacgcgtccactgagaaggctgaaagagagcttgcatggagggcccaatatggaatcgaggagatgtgcagggaccaatggaactgggccaagaagaacccgtatggctactgcggcggtgcaaaaaaatagagtaggttcgtcgcaatgatgaagtgtcgatagtagttctcttctctatactaatcaatggaacattgtatanacacgaaccatctaatctct

SEQ ID NO: 309477 - DNA, 449 bp, Zea mays
cccacgcgtccgcccacgcgtccgcccacgcgtccgcccacgcgtccgcccacgcgtccgctcggccaccgcgttcgtgctgtccacgggcgggttcaccggcaacccgttccacgactacacggacgtgctcatcccggccttcatcacggcgcacccgctccgcggcgaggtccagttcctggtgagcagctacaagtcgtggtggatgaaccgctacatccagatcttccagcagatgagccggcacgaggtggtggacatcgacgcggacgacgaggtccggtgctaccgcagcgtggtggtgggggcgacgttccaccgggagctgggcgtggacgcgtccaaatcgccgccggggtactccacggccgacttccgcaagatgctgcgcgacgcgttcgggctggagcgcgccacggccacgcccagcggcgaccggtgggaca

SEQ ID NO: 309478 - DNA, 493 bp, Zea mays
tgcccacgcgtccggttctgaaaccaaacttgccagagcatgcttttcttcaaaccaaggttttggagataaacttagtgacttacccaaatgttgttgatgccattcttgctaatggtatgttcagtcattatgatcgccctcgtattgcttagctgtgtgaaaaggctgggttgtacttgcgagccctccagctgtcggcgtttcgagacaggggggtccctaagccgacgagtgagtgtgctgcgtgccccagcccagatgggtcgagcgcgtgggcgagcgcggaggggggagaggcgaggcggccggagccgagcgtgagagaggtggaagtcccgcggcctttgtgttcgttccgcgcccaggtcaggcacttgttgagttctttggcacattgtcaagagagtgggctttggaatgcatgaaagaccttctactggttaatctgaggggaaatcttcagaatgttgtgcaggccacgaaagaatac

SEQ ID NO: 309479 - DNA, 422 bp, Zea mays
  unsure (1)..(422): unsure at all n locations
tttttnttttttttttttctatggcagctccagtatagttaaaaatttccccgaggttacattacatatcatatgttccacagcgggcgggcgggcgaggggaggccgggacggatcacggacggacagacctgctcgaccatcctgtggcggaggacgtggttgcggtcgagcaccttgatggcgcggacggcgccggtgcgggagtcgcgcgcgtgcttgaccttggcgaagctgccctcgccgatggtcttgccgacctcgtacgggcccacccgcgttttcctcgccgccgccgccgttttgggctccgccatccttccctccgtgggggaggagggcgcgcgacgaggatcgctgggtctgcgttggcttcctcggctggttcgacgagacgagacagggagagggaggcagcggtg

SEQ ID NO: 309480 - DNA, 399 bp, Zea mays
gcggcaggcgccgtgctggtccgactgcgactgcaaggtgtgccacgcctggagcgggtccccggcgtcgtcgtcccacctgtacgtgcacgtccaggcgccgacgccgttgacgccggcggcgatggcggcggtggagacggaggacgtggtgttcatccacggcttcatctcgtcgtccgtgttctggacggagacggtgttcccggcgttcagcccctcggcgcggtcccggtaccggatgttcgccgtggacctgctggggttcgggcgcagccccaagccggcggagtcgctgtacacgctgcgcgagcacgtggagatgatcgagcgctccgtgctccggcgctaccggatcgggtcgttcaacgtggtggcgcactccctcgggtccgtgct

SEQ ID NO: 309481 - DNA, 348 bp, Zea mays
tctttttttttttttttttttttcgaagataccaatggagttgccttgcaacaattaacgaagctagagatgtactgccttgagactgaatggagtgcacggttccttaagctaaatctgacatactaagaggaggtgcatagggaactcaaacctgacgccggtggtcttaccgatagacattatctagctccttttcttggacagcatatgcttgaaccagaaagctgaatccttggggtacctattcagagtcttgtagtccacgtacaccaagccaaaccgtgaagtgtacccaagcctccactcgaagttgtcaagcagcgaccacgcaaagtacccaatgac

SEQ ID NO: 309482 - DNA, 359 bp, Zea mays
  unsure (1)..(359): unsure at all n locations
tttttnttanttttttgccaccacagattcatcaaggggggagttttgacgngtacggggattattcccgccatgcactgtcttacagagagataagaagataagttctcaggaagcagaaacacgccacatctatttctatgttgggctggccgtcgccggcctcacttgatgaaagagacgcccttctggatactctccgccagctctttctttgccttctccagaccagatctctcgaactcatttaatggtccaagtggtaggatctcctcaatgccacatcgccctagccgcactttggatgcaaagaaaggcaactctgtgacctgagaagccacataagagcactctattat

SEQ ID NO: 309483 - DNA, 203 bp, Zea mays
ggggcaacagaacatccaattgcactctggaacaccggagaccggccaggcttttttcttccaagcaaaaggtgcgcccaattcccaccatactaggaccccggccagggctgcccaaaaaccctgaacctgggaaaaaaaacgggagggaaccaaagttcttggaaaccaagcccacataactccaatacccgactaacaat

SEQ ID NO: 309484 - DNA, 461 bp, Zea mays
cgcgcggctccgtcgaccccgcctgcgccacgcgcggccccgtcgatcctacctgcgccacgcgcggccacgtcgaccacgcctacgccacgcgcggccccgtcgaccccgcctgtgccacgcgcggccccgtcgaccctgcctgcgccacgcgcggccccgtcgaccccgcctgcgccacgcgcggccccgtcgaccccgcctgcgccacgcgcggctccgtcgacctcggctcgcttcgccaaccccgccctcgtctaccatcgccgtggccacgccacttcctcggcacatcccgactcgggcccgtcgacgagcgcggcccgattcgccgacccagccgtcgtctatcaccgccgcgagccgaccatacccgacgccccggggatgcgctccgagtcgtccatataccacccggtcgccatccatcgcgaacccgggcacgtccacccgatggtgac

SEQ ID NO: 309485 - DNA, 427 bp, Zea mays
tctaaatggggtgcagtacaatctgagtatcaacaacccacctaacactcttcatggtgggtttaaagggtttgacaaaactatatgggaagtcgccgagtataacaaaggggacaagccctcaatcaccttcaagtattacagtaaagatggagaggaaggttacccaggtgatgtttctgtcaccgcgagatactcgcttctcccaagcgcgacactgaagcttgagatggaagctataccactgaacaaggccacacccatcagcctagcacagcacacctactggaacctggcaggccacagctcatgagacgtgctctcgcactcggtccagatctggggctctcagataaccccggtagaccagacctcaatacctacaggcgagctcatgccagtgaccggcacccccttcgattttctg

SEQ ID NO: 309486 - DNA, 454 bp, Zea mays
ctttctatattcattcaggatacatcggccattcttgttgcacttcttcttggtatgttactacaatggcgtgttgctcttgttgcattggcaacgttacccatccttatcatttctgcggttgcacagaaaatgtggctttctggcttttccagaggaattcaggagatgcacaggaaggcttctttggttcttgaagacgctgtgaggaatatctatactgtggtggctttttgtgctggtaacaagataatggaactttatagattgcagcttggcaatattctcaagaaaagctttatacatgggatgggcattggttttgcctttggcttctctcagttccttcttttcgcatgcaatgcacttctgttgtggtatacagccgctgctgtgaaagacggacatctcagtctcgtaacagctgtcaaggagtacattgtcttctcttttg

SEQ ID NO: 309487 - DNA, 430 bp, Zea mays
ctttcaggtggataggaagtacaaacactattatcatcagatgcaacttgtaatgtcatcgtttaatatggttgctggtgctggagctgccaagccttatactgcagttgccctccagacaatctcacggcatttccgatgtctaaaggatgctatcaatgatcaaattagtgttatccggaagaaacttggagaggatgacaatacatccggcaaagagggcaaactaacccgccttcgttatattgatcagcaaataaggcaacagcgagctttccaacagtatggtatgctacagcaaaacgcttggaggccacagagaggactacctgaaaattcagtctcgattctccgggcttggctttttgaacactttcttcacccgtaagttttttccgttaacttaaagatatgttcactcacccccttt

SEQ ID NO: 309488 - DNA, 452 bp, Zea mays
tccctcgcgtccggagccgagccctttccctctcctccctctgcgccaccaccctcgccgccgccaagcccccacagcaccccgtccccttcgccccggctcaccgtgcgctcccccaccgcctcgccgccgccatgtcctcctcttcctccccgacccccgccgcatcggtggacgccggtgccccggccccttcggcgtccaacgccatcgacttcctcacgctctgctaccgcctcaagacgaccaagagggcggggtgggtgaagcgcggggtgcaggcgcccgaatcggtggccgaccacatgtaccggatgggcgtcatggcgctcgtcgcggtcgatctacccggcgttaaccgcgacaggtgtgtcaagatggcgattgtgcacgacattgcagaagcaattgttggtgacatcaccccttctgataatgtacccaaggaagag

SEQ ID NO: 309489 - DNA, 513 bp, Zea mays
cctacgcgtccgcccacgcgtccgcccacgcgtccggcgccaaggctcaacgagtgggacatggttgctggcggtggttcctacaaacaaagtagtattgcctgagataatactgcagatatccagataatggcctacagttgcagtactcccatgagcaagaaatatgttttaactcattctagagatggacagcgcaaaaacatatccatccatgaactaattgcatcagaatcaaactgcataagggtgatggttattaggatactgtgaaacatcggtgttattcacagtcctacacgcaaacatgtgcatcccctacccactgctaacaagtagaaaatgctgatatttactctgcttgagaaaaatgcacaatgaaagatagtttttggtatcctatatagttttactctacttgacaccaattctaaaggttaggtacgttgcagcattagttcggttcgtttcagactgggaaaaaaagagaaatggaaaatcaaccagaactgt

SEQ ID NO: 309490 - DNA, 427 bp, Zea mays
ggtgcagaaggacagggagaggttcccgccgaacaacatcctgttcacgctcaccggcgcgggcctgctgtggatggggtgggccggcttcaacggcggagggccgtacgccgccaacgtggtggcgtccatgtcggtgctcaacaccaacatctgcaccgacatgagcctcctcgtctggacctgcctcgacgtcgtcttcttcaagaagccctacgtcgtgggcgccgtccagggcatgatcaccggactcgtctgcatcacgcccgccgcaggtcaccatgcatgcatcatgcgcgagcttgtctcgtttccttgtcaaaaaatttcaccttctcgatcaatcgcccgcccgggatggtgtacctgctctacgtacatgtgcgatgaacgcacacgcgtgctcgctctctagcttgctagattc

SEQ ID NO: 309491 - DNA, 427 bp, Zea mays
  unsure (1)..(427): unsure at all n locations
agcacagccactgacccgtcgcctccccggctcgcgaccgcatctctctcgccccttccaagttcctaatcgccaccgctgtccccaaccagcaaaccctagccctcatcgccggcggccatggccgagaccgtcgacgacaagatcagttacttccaggctgtcaccggcatctgcgacacggacctctgcacggaaatcctcgccgcgcacaactgggacctgcagctcgcggtgtcctccatcaccgccaacccctcctcgccctccgccccggtttccacctcctcacgcgacccggccccttccgcccctttggcagatgcggaggttcgtcgcgccaccgccgccgataccgncgccgcctcagcagcagccggggatcgcgtggaagctggtgacgctccccttctacgtggtctcgggt

SEQ ID NO: 309492 - DNA, 512 bp, Zea mays
  unsure (1)..(512): unsure at all n locations
cccacgcttccgcccacgcgtccgcaggcctcctgcatgttagagaaaaaaaagcttattgtgcatgcatacagtgtagtacaatgtcatgggcaactctgaccttctcctcttccaaattataagacattttagctttcctaatacattgctttaactatgtatctagacagaatgtatatctaagtgcatagcaaaagttatgcatctagaaaagccaaaatgtgttataatttgtaacagagggagtaaaacacaggaatacacaactgtttgtagttcttttatcatttgttggtgtttttatttacatatataaggaataatgataaaagactaattaccataacatatttgaaacaagtaaattcgttcaaagtttcaaacatcaattatggccattcaaaatttggtttatttcatcataccatatattgattgcataatcacttattntgttcagttatgacacctgccagtttgtatttggagagaagtcttggttttggtat

SEQ ID NO: 309493 - DNA, 492 bp, Zea mays
ccgatctttttggtgatatttctggatgatattactgttcaggtgttgttttcacatagcagtgtagcaacatagattttgagagatgtgtatcagtctcagccctgtccgcaatacatagacgtgttatcatcctaaattcggtgaagatgttctcttttgtgagtgtgatccttctatgttggcaggaacatggaaaagcactgaagctccaatttctgtctaaacaattcctcttagcattgataaacagcttcgggcagctccactaccaagatgtgagcactggcgaaatggttgcaaattataggacaggtctgggccgcaccgatgttatgcggggcaatccttacaatgctgtgattggccttgggcatgctggtggcaaagttaccatgtggaagccaaccagtgtgaaaccccttgttaccatgctgtgtcatcatggcccggtgactgctgttgcatttgcaggggtggcaatctcatggc

SEQ ID NO: 309494 - DNA, 451 bp, Zea mays
cctacgcgtccgcctcctcccttcccccccccgccccccctccctccttgctggtcgccgttgaagaggtaggcccacgggccggcgagaatggaggcggctactatggtgtggtcggtggcggtggtcggtgcggggctggtgtactggttctgtctgggtgatgggcgcaggcggaggtgaagggcaagcggtcggtggatctcaagatgggatccatcacgcgtgacaaggtgctggacaagtacactcagtactggtgcttcttccgccgccccaaggagacggccaccacgggggcatctgcggagaaggtgccggtctttttctacaccttctacaagctgttgaccgacatatactagtgggggtggggacagaccttacacttatgccggttcatccgcggtcgctaccaccgtgactccatctgcgttcacgaggagcgcgt

SEQ ID NO: 309495 - DNA, 487 bp, Zea mays
cctcccgtgccctatctcttcgtgccgcaggttccagagactccactgcacagacctactgagctctctcctcttctcaaccattcaccggtaaacgaatccaccgaccaccactcccaggatcagggtattccaactctgattacatggagccaaggaggagatgaggtgttcctggaaggatcgtgggataactggacatcgaggagggcacttgagagatctggaaaagatcacgccgtcttgttggttctgccatccggagtctaccattaccggatcatcgtggacggggagctgaggtacatccctgaactacctcacgcagctgacgaaagagggcgagtggccaacgtcctcgatgtccatgactacgtgccagaaagcctcgacagcgtagccgagttcgaagcgcccccgtcttccgtgcacagctacgacctgcattgcccgggcgacgaggagttcgccaaggaagccgccacgc

SEQ ID NO: 309496 - DNA, 511 bp, Zea mays
tcgcgtacgcgtgggcgccgcctcaacctccatggggaccggctgtcgggcgtcatgcccgccgcgctatccaacgcctcgtcgctccactctctctacctctacgggaaccgcctcacgggcggccttcccgtcgcgctctgcgacctcccacacctccagaacctggacgtctccgggaacgcgctctcgggcgagctgccgctggacctccgtggctgccgcagcctgcagcggctcgtgctggcccggaacgccttcacgggtgagctccccgcgggagtgtggcccgagatgcccaacctgcagcagctcgacctctcctccaacgccttcaacggctccataccgcccgacctcggcgagctccccaggctcgccggcacgcttaacctctcccacaaccacttctctggcgtcgtgccgcccgagctgggccgccttgctgccaccgtgacgctcgaccttcgcttcaacaacctctccggggccatcccacagacgggctccc

SEQ ID NO: 309497 - DNA, 163 bp, Zea mays
aacaaatccgggcgacgcggggctggacctcaggggatcggggcaaaaaggccactttgccacttacaatgccccgtcgggttttaaggcgtttgaaaaggattcaaaacccccccccttggaaagggagcttagagggggcccccccgggcccgtcggccgg

SEQ ID NO: 309498 - DNA, 335 bp, Zea mays
gttctttttaacccacacactgcctggctgcactcgagctagtcctccatgacacctgacgcgttcgtgccggtctcaagacaagtgctcatgccattactgccaaccagaaaactgtagccggaccgtaatgcacggactggcgaggtgaccctactagcaactgtagcatcattcggaccagcaccggagctgacaaggctgcatgtaaaggcctccgtgatctaaatgacatgcttagtgatatgaacttcggggtttctactgaacatgtatcgaatgacgacctaagacctagagaactacatggggcctcataatacggattctagaaa

SEQ ID NO: 309499 - DNA, 544 bp, Zea mays
cccacgcgtccgctcaaactcgccagtaagatgcctcttcacaaatggtgttgaagttcaccctctggattttagcactaactgtggcaaaattcgcttctattgctgggacactgctgggcaagaaaagttcggtggcctcagggatggctactagtaagtgagaaattcatatttcattcaatttgtttgtttttttattcatgtgaagctctgtgtctatgcattactaaagtttttgtattgctccaggctacaatacatcttttagtggttgtcattgggtatattggtactttctttattgatgaactgtactgtgtaagttctattaggggattggagggatttgaaaaattatgtccgcataatggttaagctagtatcccatcagcactccgtttggtgtgtaatgcaccaagctcctataactatatcaagcttttgaattctaatttatggatggtggtctaatcttctagagtgagcttttagccaattttctttcttctagtgtcaagtcttcgacttctccattcatttg

SEQ ID NO: 309500 - DNA, 364 bp, Zea mays
cgctcggcgccggcccccgcgggcctccgcgggggtgtgccggtgcaggcgcacctcccgcgcggcggcctcggcctcgccccccgccgcagcagtcgcgcgctccgcgtgcgcgcgtcggtggcgatcgagaaggagacgccggagagcgagccgccccctgacgttcctccgtgaggacgggcacgggtccgggtccgtgcgggcgcggttcgaggccatgatccggcgggtgcagggagcaggtctgcgccgcgctcgaggaggacgacggaggcggtgcgcgcttcgttgaggacgtctggtcgcgccctgacggtggccgtggcatcagacgcgtcctgcaggacggacgtgtcttcga

SEQ ID NO: 309501 - DNA, 507 bp, Zea mays
cccaagcttacctcatcccctccgccctccgcgtcttgggcctccttagccacccctgcagggcctcctacaccaccgtcctctccgcgctctcccgccacggccgtccccacgacgcgatctccctattcgcgatctccgcgtccgcggtcgcccccgacgccgagctcctctcctgcctcgtctcatgctgccgccgcgcgtccgccttactccccgcgcgcgcggcgcacgcatacgggatcaagaacgtggcggcgctggccttctacgcctcggcaggtccggcgctggtcgccttgtacgcgagccgcgggaaggtcggtgcggccaggagggtgtttggctacatggatggcttggacgtggtgtcctggaacgccatgatcggcgggttcggtagtgccgggatggacgaggagtccggggcctgcttccgggagatgcactcgagaggtgttcgagggaatgcccgcacagctgtggtggtgctgggatcttgtgaca

SEQ ID NO: 309502 - DNA, 474 bp, Zea mays
gttcggctaatgtggaaggacagagtcaggctgaggaggatcaaggagcggcagcacaagcttgccctgcagcaggcagagctgcagaagttgaggcccaagcccatatccgaccaggccatgcgcaagaagatgtcaagggcacacgacgggatcctcaagtatatgctcaagctcatgcaggtgtgcaatgcacgcgggttcgtttatgggatcatcccggacaaggggaagcctgtcagtggcgcttccgataatatcagagcttggtggaaggagaaggtgaagtttgataagaacgggcctgcggcgattgagaaatacgagtctgacaacttagtatccgctactgcccagagtggtggaactaagaaccagcacagcttgatggatctccaagatgccactcttggttcactgctttcctcattgatgcagcattgtgatccacccgaacgcaagtacccattggag

SEQ ID NO: 309503 - DNA, 140 bp, Zea mays
atcacaatcagaatgaaaagggttgggctgccttttggaaaattacccgccggggccatggacaatttttaaacccttacaatcagctttttatcccggtaaaatcaaagacggcatgcagcagcgcatgacttggcatt

SEQ ID NO: 309504 - DNA, 346 bp, Zea mays
gtttggttttcttctcctccccctccggctcgggttcggggccacttggatctccgcggttcggccccgcgggtgagcggatcgagatggcggcgtcggatgttgagtaccgatgcttcttcggcggtctcgtctgggccacggacgaccactccctccacaacgccttcagcacctacggcgagggcctcgagtccaagattatcctcgatcgggagacgcacaggtcccgcggcttcggcttcgtcaccttttccacggaggaagctatgcggcacgccatcgatggcatgaacggcatgggagctgaccggcgcaacattaactgcaacgaggcccagtcccc

SEQ ID NO: 309505 - DNA, 130 bp, Zea mays
gcgccattggccagctagagccaaccagaagagcttgcagttactgagagtgtgtgtgagagagaggatgggtggcagcgcctgggctgctctgttgctggccctggaggtgggtggccgtgagcctggc

SEQ ID NO: 309506 - DNA, 376 bp, Zea mays
ccctcctttttttttttttttttttttttaggcataaaacacaggggtgttataaatcaatccaagttccgcgaatctaagacatttagctcactacgcagcctgcaaaaggtcttctcatctaaaggcttggtaaagatatcgactagctggtcctcggggctaacataaaaaacttggatatctcccttttgctggggggctcttaaaaagggatgccggatgtctatgtgctttgggcggctgtgttcaacaagattatccgccatgcggatagcactttcattatcacataggagtgggactgttgggaccatgcttcgtcgccgaaggtcctgcaagaagaaacaactttggctaaagctgcttatacatg

SEQ ID NO: 309507 - DNA, 509 bp, Zea mays
tgtgcatgtttccgcctgttatcgggagaatcagcttcggagccgaagcagttccagcttggttcttgaacgaagccattgtctcaggaaagtggaagtgagttcaccggaggtgggtgccaatgttggggacttgttctcaaatgctatgaattaagaacaaggcaacataaaatgttaaatattaatacccttcgtccgctgaagcattatctccccaaggatttaatgaacttcgaacgaagaccatgagtagaatatcacgaaggtcgtaccttcgtgattagacttacaaaataatatgaaataatatataaaacatgaaacattaaagatagatgtatcataaataggtaacattattcacatattttattatatgaatctaaaatgtcagaacatagtgtttaagtacatttgtacctttggcttgacagataataattcctgagccaatgtatttgcaattacaggaatgcgtgaacagtaaaggaatactgtttactatt

SEQ ID NO: 309508 - DNA, 337 bp, Zea mays
ctccattggccagctagagccaaccagactagcttgcagttactgagagtgtgtgtgagagagaggatgggtggcaccgcccggcttgctttgctgctatgcctggagatgggggccatgatgaatggacttgaacacacacttcgaccaatgctctggtatctgagcccgtgtcactcaaaaaacagcagggggcccccagccccccgacccaaagctggcacttgccggggcgcatgaaccgcttctttcggatggggagatcaagctggctcagttgttgaggtaaaggccatggcagcactgttaatacgataagggcctaccctgctggggc

SEQ ID NO: 309509 - DNA, 436 bp, Zea mays
acgcctagactatcatgcatattatcgttccagactcggtcccttcttgtatggacacaatacgcatttccgcaacaatgatctattggacatgtagtcttttgtaggccaacattctgcaccgtacaacataaacttgtgttttagcttttgtggtactctcttgtcacatataacactagatggttgtcgccactttatccaccatgctttgattctatggttaatatcttcatcaatatccctgtctctctgtagcattgatactaaatatcgaaaggtattcttactagacactacttgaccttccaaactaacatctgcctcctcatgtgtagtagtgtccgaagtcacatttcgtatatgtagttttaattctaaaaaactcgtctgaggagggaaagaccgccctcccggtattatattaagaagagac

SEQ ID NO: 309510 - DNA, 267 bp, Zea mays
gccttcggtcagctggagccaaccagaagagcttgcagttactgagagtgtgtgtgagagagaggatgcgtgccagcggcagggctgctctgttgctggccctggtggtggtggctgtgagcctggccgtggagctccatgccgacgcctggtacggttacggcgggcggtacacctcgacgtcgacttcggccaccctgacctctgagcccgtgaagcccccgaccaaggggccggagccggaccagcctgtcaaggagcacatgc

SEQ ID NO: 309511 - DNA, 446 bp, Zea mays
gtggaaagtcaattcaaataggtttctagttttgggtcacatggctcgtgacgtgcttgctatacccatcacaacagtagcgtcggagtcagcttttagcacaggtggatgtattttggatgactttcgtacctctcttactccgttcatgttagaggctttagtatgcacgcaagattggcttcgaagacctactgctgacataaaagagagtacggaggaattggcaataatagaaaaggagtggatagaagaatatggtggcaaaggaaaaaagaatgagcagccaactgtgactgtcggcatatccaagtcacaaacaccaaacagtaatgttcagacctcgactatggctccacacagtacttgaaggtctagaactaggctgctgccagtgctagcctgtcaaagtgccaatggagccctggagaacaactgtggatctg

SEQ ID NO: 309512 - DNA, 446 bp, Zea mays
cccacgcgtccgcggacgcgtgggctctgctgctcctcgcaccgccgccgccgccgccgcagcgacgtaatggcttccgccgcggtgctccggaacgccggctcccggcgcctcttctcctaccctactctccgcgccgctgcgatatatgtaccttctgcgctacccgatgcgcccgcggcggcggcagcgccggcccagccgccaccgacggccgggaccctctgggcgaggtctatggccaccttcacgcgcacgaagccccatgtgaatgtcggcaccattgggcacgtcgatcacggcaaaaccactctcactgctgccattaccaaggtcctggccgaggcagggaaggccaaagccgttgctttcgacgagatcgacaaggctccggaggagaaagccagaggaatcaccattgcgacagctcacgtcgagtatgagac

SEQ ID NO: 309513 - DNA, 483 bp, Zea mays
ttgtccacgcgtccggttcggagcgcacacacacacaaccagatctcccccaaatccacccgtcggcacctccgcttcaagatgcagatctttgtgaaaaccctgactggcaagactatcaccctcgaggtggagtcgtctgacaccattgacaacgttaaggccaagatccaggacaaggagggcatccccccagaccagcagcggctcatctttgctggcaaacagcttgaggacgggcgcacgcttgctgactacaacatccagaaggagagcacccttcaccttgttctccgcctcagaggtggtatgcagatctttgtaaagaccctgactggaaaaaccataaccctggaggttgagagctcggacaccatcgacaatgtgaaggcaagatccaggacaaggagggcatccctccagaccagcagcggctcatctttgctgggaagcagcttgaggacgggcgcacgcttgccgact

SEQ ID NO: 309514 - DNA, 368 bp, Zea mays
tctcaaccagaagagcttgcagttactgagagtgtgtgtgagagagaggatgggtggcagcggcagggctgctctgctgctggccctggtggtggtggccgcgagcctggccgtggagatccaggccgacgccgggtacggttacggcggcgggtacaccccgacgccgacgccggccaccccgaccccgaagcccgagaagccccccaccaaggggccgaagccggacaagccgcccaaggagcacaagccgcccaaggagcacgggcccaagccggtgaagccgcccaaggagcacaagccgacgccgcccacgtacaccccgagccccatacccacgccggcgacgtacactcccaccccgacgc

SEQ ID NO: 309515 - DNA, 385 bp, Zea mays
gcgtcgagaggccatctgctcagacaagaccggaacgcttaacactaactagatgctcgaccctaccgtcgtggccgagggaaatcactaggaggaggttaggacctgaagggagaacggtacgactaacaatccctgggactggaaagttcatgactggtctgctgggagcattgacaccaacctggagacgatcgccaagggcgcagctgtgtgcaatgatgccactgtggggcattcttctcataagagtgtagccactggcacgccaacagatgcagatgttaaggactgggttgagaaaatgggaatgcctggaagaaagaatggtctgtcctgggatgcgaatgagatactaagctgctgcgcatggcgggacattgtt

SEQ ID NO: 309516 - DNA, 190 bp, Zea mays
tcgtttgtttgaacccttttttggtctttttattggtttgttgtgaactttcggcacctgcaaaacttataatctagagcaaactagattgaccctgtcattagcaccgggcaggtctaccaccaaaattgatataagaaaaggtgtaagactattttcctctcagagtgccccatcacttgcaggaggg

SEQ ID NO: 309517 - DNA, 276 bp, Zea mays
tcggcgccattggccagctagagccaaccagaagagcttgcagttactgagagtgtgtgtgagagagaggatggctggcagaggtagggctgctctgatgctggcactggtggaggtggtggccagcttggccctgaagatccaggtcgatgccgggtaccgttacggggcccattactcgcaggcgggtgtgccactcacagctagggctaagccgcgtgaagccctcaagaagggaggaggaggcgcataagccgctcaaggagcacaaaccgc

SEQ ID NO: 309518 - DNA, 366 bp, Zea mays
ggcgaggcgtgcgcacctttctgaagaccctgaccgtcatgactatgactctcgaggtcgcatgtcgagacacgagggggcactctgaggccaatagccaagaccaggaggatctcccaccgaactaacagagcttaatcgatgctggaaagtgcatggaggtcaggaggaccctcgccgactactaaagccagaaggagagcactctaaacttgctgactagcctcatgggaggcatgcaaatcttgatgataaccaaaaacgggatgactatcactctcaaggagaagtcttgaaagacaatccaaactaacgtggcaaaaagccacgacacggacgggattctaacgcacgagcatagattga

SEQ ID NO: 309519 - DNA, 323 bp, Zea mays
gattcatgagtgtctgaagatgcaccctaaaatcggttactactacccagagaaaggccaaaatggtagagtttcacgctagttttcatctaattccacatgtattgagttggactatgatgtaaattagttaaatttacacctcaatcaactttaataaacgtggattggggtgaatactagagtactcaaacagggtttaacagaaggttttcaggtttaacatatgagaatccgtttaattacaaccgaaccaaacttgaagctgcaaccgatggtgatggtagttaaacttcatgtgagcatgaagcaagccgccggcc

SEQ ID NO: 309520 - DNA, 346 bp, Zea mays
aaaaacaggggtaactggcattgccgaacccacggtttagttatccaggcttagggtttgttcggttagctctcaatccatgtggatggaggggaatgggatgggtttgaaaccaaaacaagtaaaaccttttttaatttttttccaatcccatccaatccatgtgtttggggaataaccgaacaggcctttaaacggttatgaaaaaaacacccatagagacaaaatgcccacaggggttagtagtgggggaagaaccatccagggggcgcccacccggccgattttcgccggccgtcgtagggtttgatggcaaagatctccagggggcgcccccgttgttttt

SEQ ID NO: 309521 - DNA, 448 bp, Zea mays
gcctgccgggaccggaccggaccggccgggccgggccagcgcgaccggccacgcgtgcggccacgcgtacgcccgcgcgtgcggcgacgacctcctacctaccgatcccgctgcgtctcccccgaccggcaccggtgccgctggcgcctccgccaccgaggtcttgtcttcggcgatccagccggagcccgcggcggcgacgatgcacgggtgggagatgctgtcgttcaacatacacgctgggttcctggaggccatggtgcggggcaaccgctcgggcctcctcaccgccgtcgactacaacaacctttgccagtgcgagaccctcgacgacatcaagatgcacctcaccgccaccgagtgcgggccctaccttcagaagcgaccttcacacttggacacaatgacaattgtggaggaagtgcactcttagactagtcgatgagta

SEQ ID NO: 309522 - DNA, 380 bp, Zea mays
ctggccgcctgcccggcccggtccggaccggccgggccgacccacgcgaccggttttgttccccgaccacaccgttcctccgagcccaggagcagccccgcgccaggaggaagtttgttcttttaacaatttgtcgagggaggagaatgtttacatggccaagttggctgagcaggctgaaaggtatgaggagatggttgagtatatggagaaggtggctaatactgcatatgcggaagcgctcactggggcggaacctaaccatgggtctgttgcatacacgcatgtgattggcgctagccctggtccatggcccattggttgtttcattggacatctggaggcggctcgcttgagctaacaacatgctatcctcatct

SEQ ID NO: 309523 - DNA, 303 bp, Zea mays
cgttcggttacgccgaccacacgctattcctgtcgagcccagaaacagctcccgcaccaggaggaagtatgctcttttaacaatatgccgagggaggagaatgtttacatggccaagttggctgagcacgctgaaaggtctgaggagatggttgagtctatggagaaggtggctaacactgtagatgtggaagagctcactgctgaggagcgtaacctacctgtctggtgcatacatgattgtgattgggggtagccgcgcttcatggcgcattggtacttccattgaacaaaatgaggagtc

SEQ ID NO: 309524 - DNA, 311 bp, Zea mays
gcgcctacgtttccgcccacgcgtgcggcgggtcatcacgggtgatgctctgagcaccttctgcagccagactggtgctgggaagcacgttctacgggcaatccttgatgctctagtacacactgtgatcgatcatgtgcacactggcccgtaccggctggtttacgacgctgggcagctcatgaccggcacggaggatgccggtcacagtcttgcccgtggcccgctcatactgacggcggattcgttgtctgtgctacgtccgccatcgagggattgacttcgactgcacctgcctcgggggcttcctg

SEQ ID NO: 309525 - DNA, 454 bp, Zea mays
tcgcccacgcgtccggggcgagatgctgcgggtgatgccagagtgcaggcacaggttccacctcacgtgcctcgacgcgtggctgcgtcgtagcgcgtcgtgccccgtctgccgttcgtcgcccatcccgacccccgtcgccacgccgctctctaccccactctcggagcttgtcccgctgtcgcagtatgccgccgaccgtcgccggagcaggtttgggtgattaatgggtgatgcagatgtgaactgttcggctagagctaccataactaggacaaaagtttttgcttgacagcagtacattattggacccaggaggaagacatgcagtgtacatacattgttcttctgttctaagatagtgtctatcaagtgaggctacctgtgatcttatagttgtacgcggaagattgttctatgaatcatcttatttcatccatgacttgcattgcag

SEQ ID NO: 309526 - DNA, 232 bp, Zea mays
ccggaggagcgggggagatgacggaggacgagctcgcgcggttccccgggaggttgtgcggcaaaggccccagcgcggaggcgtgcctccacactcagcagggccggaagggcaccaaccaggacgccatggtcgtgtgggagagttttaattcaagcgacagcattttctgtggggtgtttgatggccatggcccatacggtcattttgttgcaaagaaagttagagattc

SEQ ID NO: 309527 - DNA, 388 bp, Zea mays
ttcgttatcgcgtacgcaccacgcgaacaccaacgcatccggtagatgcgcactagctactagggaaagagccgccaccaccaatggcttgttacaacactgcatctttagcggcgactctgctggcgttcgcgctgacatttcaggcctgcctcgccgggaggaggctcaccgcgctggtgcaggagccggccataaccatgaggtaccacaagggcgcgctcctgtcgggccccatcgtcgtcaacttcatctggtacggcgacttctcggcgccgcagcgggcggcgatcaccgacttcgtctagtcgctgacggcggcggccccggccgcggcgcaaccggagccgttcgtggccacgtggttcaagacggcgcgcaagtacta

SEQ ID NO: 309528 - DNA, 263 bp, Zea mays
aatatatatatctggggaggttgcccgctctatctcttgggccaagattgattgatgggggggccaccgccaccgccaccgccacgccgttgatcagttagctgaagagcctgacggtgcacgccaccgcctgcgcccagtacttgagcctcgccttcacctcgtccgggctgccgccagggctggagatcttccagttggtggtggtggccggttgcgccggcgaggccggagcgagcggcggcgcctcctccgccttgccc

SEQ ID NO: 309529 - DNA, 409 bp, Zea mays
cctacgcgtccggcctggcgtcttactctctggggaccaccgcgctgcgggtgtccatccactgcgagggctgcaagaagaaggtcaagaaggtgctccacagcatcgaaggcgtgtacaaggtgacggtggacgcggcgcagcacaaggtgacggtcaccggcagcgtggaagccgacgcgctcgtccggcgcctgcacaaggccggcaagcaggcggcgctctggcccagctcgccggcacccgtcgaggccaagatgaagcccgaggaggtcgcgcctgccgcgttgcctgcggcagccgccaacaaggacgctagggcccaggagaagaagccggccaaggacatgaaggccgactacgccgaggccgcggcgaaaccgagcaaggacaagacggtcgacatagg

SEQ ID NO: 309530 - DNA, 286 bp, Zea mays
atcaatctccagtttgatactgaatggtttgacctcaaatccaacaattctagagagatctgtagtttcatccttgcggtattttactaaaaatgccaagtgattgtggataaaggacttcttatcattgttaccagcgtattggcccttgacaccaacatgatatccagcctggtaaactcagatactcctcaggaggttgaagccggcaaggaaatcatatttacctatgatgtaggcttcgaggagagtgatatcaagtgggcttttcggtgggacacctact

SEQ ID NO: 309531 - DNA, 370 bp, Zea mays
cccacgcgtccggcttttttggcgaaagggcctctagccgagttggttaggtggtctgagtagcactccttaggtcctgagttttaatcccagtgaaagcgaatttcaggctgagattaaaaaaaggttactcgctggttcccctggccatgtgcacacgagatagactggcctatgggggcggatcctcgtgtaggtgctgggagagcttaaagcacgagtaaagatctggcttatagggggtggaccctcatgttgcatgggggaccagctttcgtgacctttctcggacggggattcgattgagcttcttctttatataacaccgtgggggcaggtctttgccctactggccacatttggctttttt

SEQ ID NO: 309532 - DNA, 300 bp, Zea mays
gtttttcgtccgatgcaacggtcggaccttatgggagtattgctagcaaacatacatcaggtccctctttatgtcaaggaagctatacttgagagacttggctgttgatgtgaggcaacattttgagatgcggttgaccatgaccaagtcaatagaatacttacagctgttgttcagggtatgacagcttctgaggaaagctctgatgtcatttttgcagctaaactagcatagaataatgattagggctttgctgagggtaatacctctaatgacatggcgcgcgactatatagtgaga

SEQ ID NO: 309533 - DNA, 518 bp, Zea mays
cccactcgtccggcagcttcaagttgaagagtcaaaggccatggtagttaaggagagggaagctgctagaaaggcaattgaagaagcacctccagtaattaaagagactcctgtgctagtcgaagacacagaaaagattaactcactgacgaccgaagttgaacaactaaaggctttgctgctaactgaaagacaagcaacagaagctgcaaaaagagaacacgctgaatctgaactgagaaatgaagaactaattaagaaatttgagagcgcagagaaaaagattgagcaacttcaggaaactgtccataggctggaggagaaagcaaccaacatggagtctgagaacaaagtgctccgtcaacaagctgttgcaatttctcctacgtcaaaatcattagctgcatatcctaagtctcctttccagctgaaaactccggagaatgggaatgctctaaatggagaagtgaagtcatcaccagatatcacccctatcttaccaaaccccaaggagcttg

SEQ ID NO: 309534 - DNA, 462 bp, Zea mays
  unsure (1)..(462): unsure at all n locations
tgcagaagcagcagactcaggcaccaatatcttctctctccctctcaccaatatgttctaaatcagcagaagcagctgatcgatttactcaccaatatgttctctctccctctcaccctaggagcttttgttggcaactgggggaaccatagtgcgggggttcctcgcccccctctttccatgggagcttagaagctgttggatctctgcaagtgaccatgagccagagttttgacatcaacgtacttcgtgaagaagcaaggagctaggtggttaaagccttctgaagtgtactatatcttgcagaatcacgagaggttccctatcacccatgaggcaccaaagaagcccaccagtggttccctattcctttcaattcgtcgtgtcnatcggtatttccggagagatggtcacacatggcggaggaagcagggatggacgaacagttgnggaggctcatga

SEQ ID NO: 309535 - DNA, 440 bp, Zea mays
gccccccctgctgccgccgcgccagtaattgcctggaccgacccctcctttttttaggcggttgaggagctgagccatggcagatttgttctgtgctgccattaactgcacacactcttggcgaccggtggaaagccgaaagactgtacgaagaagccaaagtattaacttggtcgccagccggtcaacaccaagttgtcaagcagtaggacagcgaggagggaacgtgcatccggaggtgacagcaattgaaaggctcttcccttgatactgggaactacttatggcgaagatgagtgactccctgcaagacccgtatccttgcctgtgcctacactgcatcaaacaattagctcgcgaggacacgcaccttcgtctagagtggcatttggcctgttgatgctgccccattcaagcagtggtacctcactcactatgga

SEQ ID NO: 309536 - DNA, 492 bp, Zea mays
  unsure (1)..(492): unsure at all n locations
cctattcgtccgacgaattgatatctaggctatttatgtggttactaattttgactcctctaagacatatttacacagggttggtcgttatgggagatatggtcaccttggtttggcagtggacttgaccacttacaaagagcgattcaacttatatagtgttgataaacaaaacttggaacggaaattaagacaatacccccacaactagacctgtctgtatactgccaatgatgatagcgacagcttcatgagcgtcagtggaggaggaggtagaggcccatgtcggtggagctggaacccatcgacagcgagcagtggcttatctaggtgcttgaagaggcgcagcagcttcagctactcatcgacctgctctgctgatttctgcggcaaatcgctggcttaaatgcatgctgcttgaaccctatcatcagatagaccatcccgatgcangtgaaggcctggtagtggtctttctgcaattacagagct

SEQ ID NO: 309537 - DNA, 440 bp, Zea mays
ttcttacgcgtccggctggcttctcctccccctcgggttcggtttcgggttcgtgaggttctccggggctcggcttcgtgggtgaacggatcgagatggacgcgtcagatgttgagtacctgtgcttcgtaggcacactcacctgggccacggacgaccactccctccacaacgccttgagcacctacagagaggtcctcgagtccaatattatcctcaatcggcatacgcataggtcccgcggattcggattcgttaccttctacacagaggaggcgatgcggaacgccatcgagggcatgaacggcaaggagctggacggtcgcaacatcaccgacaacgaggcccagaccctcggcggccgtggaggctgcggcggcggctactgcggtggccgtggaggccgcagctacggccgtagctggcgccgtgatagcggc

SEQ ID NO: 309538 - DNA, 351 bp, Zea mays
tctagagccaaccagaagagcttgcagttactgagagtgtgtgtgagagagaggatgggtggccgcggcagggctgctctgctgctggccctggtggtggtggccgtcagcctggccgtggagacccagtccgacgccgggtacggttacggctgctgctacacctctacgcctactccggccaccccgaccctcgatcctgggaaggcccccaccaggggggggaaaccggacaaaccttgcaaggcgcacacgtcgcccaaagcgcacaggcccaagcctggacagccgtccatggtgcatatgccgacgccgactatgtacaccctgagcctgaaatccacgccgacg

SEQ ID NO: 309539 - DNA, 536 bp, Zea mays
  unsure (1)..(536): unsure at all n locations
cccacgcgtccgcccacgcgtccgcccacgcgtccgcccacgcgtccggtggaaagccaactctcctgtcattttctgccagagaggtttcagatggtactttgttcaaaacgatagaggattatgaccctcagagcaaggcacttgtttatcagcttgagaagtattatcagggtgatccagttctgaacgcctgtcacaccatgggagagacccccaataaagaacgtattttgcatttacgggattgattcaaagactgcggtaggatattactttgcaccaagtggcaaaccatatccagacaactggataataactgatattatttatgagcttgaaggttccctactttcaagatcaggtaattctgtttctgggaagcctaacaattgcagtggtgatgggacagtatcatacaactccctctcatggtgcaagaattggcttggaccaaaagtgaacataacgagggctccacaggcagaacatgatggatctgatctgcanacagccatgaatattgatcatcatca

SEQ ID NO: 309540 - DNA, 331 bp, Zea mays
ttcacttgtccggccacgcgtacgctcaggagagcggcttaatttacgagtctgctgcaactatcttggcaagtgccctggggacccctacactagtcgctggcatggttcttccatatgctcttgaacctcatgggcgggaccacccactacgacatcggctctgctcccgtcttctacggtgccgggaatgttccatcggctcagaggtggccctatagatatgtcatctctggtgtaaacatcatcataatgctaggcaggtcggcttatagtggaagataatcgggctgtggttggcagagagcagtacattaactgcgacatccct

SEQ ID NO: 309541 - DNA, 401 bp, Zea mays
ttcacactttatgtgatactgttaaatactgtgtgtcgtttatttataaccatgcacaaactaactaaagcgaccatgatcaggtggaccggcggcaccggagataccgcgagcagatgaggtcagtggaggtgtcgttcgaggcggtggccggagccggcacgtcgcaggtgtacacgcggatggcgctgcgggccatgtcgaggcacttccggtgcatgcggtatgcgctggtggcgcaggcactcgctctgctgaaggccatgggagagagggacggccgcccagctggtgctgcgactagcgccaccaaggtcgacacgtacaggctcaaggtgttggaccagtgcctgcggtatagggagtcgttacagcacccgggcaccatcgacaactacccg

SEQ ID NO: 309542 - DNA, 306 bp, Zea mays
gactcccaaaaacctatttgccattatgtcttataatttgggtcaatactcatgcaacatgtcatacaggacaggaaccgctttgacaaaaaccaacacattccctatcttccaaggttcttttcttctacctcatcaaataggtaaaacaatataattcattagtcccatcagataggtatgatagagcccaacaggcatcagttaggacctcctcatcctgagagtggataagttgctgaagtgctggcaatgctggtttgacctgatcaaagttcggttgtggcttcccacggcagaagtttg

SEQ ID NO: 309543 - DNA, 105 bp, Zea mays
gaatggcaggtcggccaaaatttattatggttttacacccaatatagttgcaataccattaaataccggcacaaaacacatgttgttgttaaacatataggagga

SEQ ID NO: 309544 - DNA, 387 bp, Zea mays
cggccgcccttttttttttttttttttttttttttctaaggggtggtgtctgttgaaccgttctcctccggggcctcctcctccagctaatgcttttttttcttcttcttcttctcagttccaggctcagtttttccaccagcaacgttggagggtttatccacgtccattgcatcaccatcagcctgggtttgggccttttttttctggctttcctggggagatgcatcggtcttctggatataatcatcatccatgggggggccattgaccatgctgtcaatagcggttttaatcacatcagggtttttacgaggcgcaccacccttgtcatagaattccagtttttcttggacttgctaacccaacttttgcccaaagacagag

SEQ ID NO: 309545 - DNA, 169 bp, Zea mays
caaaaaaaacaataccgccaaatttaataccccatttccaaagggggggaataaagttttccaccgtaggtggtaacccccccaccgccggttggataaaacccgccggaaccataccacgatgggagccactcagggcaaatcacaggatagcaggggcacacaagcc

SEQ ID NO: 309546 - DNA, 301 bp, Zea mays
gtcctttttttttttttttttttttgcaacagaatgaaatagtactacatcgaacttcgatgaatagcattgcaaatcaaaacaggatgatatgaacaacagtcatggccaatagggggctacgaacaatgtattagacaatacgaactgaacctgcgggttttaaccagacaatggagtggacccatacagagtatactcaaaataactcaaccattaagcaccagcgaactatttattaaccgtataggaaaagtcatcgccctcgtcaccctcgtcatctgcaccctctgcgccgact

SEQ ID NO: 309547 - DNA, 358 bp, Zea mays
cccactcgtccgaacaagtgaaccttgaggtttctgagggtgcagtggtggatgaagccggaggtgtagttgaagtagtcgtagcgcgtgtgggcgccgtctgcgcggcgctccatcctcgccgggtactcgccgtacgcgacggtgctgttgcccggctcgttggccgtcacccacgacacgatcatggccgtgccctcctggtcgcccagcgtgatgtgcacctgcgcatgcccaacccatccatccatccatcggttgctgagaaaaaaaaaaggagaaaaaggaggcatgcgactcgagtggccaggagcgacggcgtcgggagggaatttggtacctgctgcggcgcattgta

SEQ ID NO: 309548 - DNA, 457 bp, Zea mays
gctcattagggaggcgttctgtgccgagaccttcgtcaacgacgacctgctccgctacatctctcagagggccccctcattgaagagcctccatctctgcctgtgccattacgtcactaatcaaggttttgcagaggcagttaattgcttccctcagctcgaggagctagacattacattctgctcattgtatggcatcgtgtgtgagactgctgggagagcctgcccgcagcttaaatgcttcaggttgaatgagcgctggtctattcttcaaagcgagtttgcaccctacgagggcatggatgatgacacggaagcattagggatcgctagcaccatgcctgggctccaagaactttagttgatcggtaacaacctgaccaacgacggactcgtggcaatcctagaccgttgccctcgccttgaatcccttgacattcgccaatgctacaacata

SEQ ID NO: 309549 - DNA, 446 bp, Zea mays
cttatcacctttccttcgccacttccaccttcccgaaccaccaccgattgggtggttgactccggggcctccttccacactacccccaccactaattcgttactgcactcccatgcaccctacccctcacatcctacctctatcgtcgtcggcaacggttccaccctcccggtcacctcagtaggtacatcggttcttccaggaccattctgccttaacgacatccttgttgctcccggactgactcatcccctccttgtcgtgcgtcgcttcactagtgacaaccagtgctctatggagatcgacccctggggcctcaccatacgtcaccttcccacacatgctgtgctcgcttggtgtgacagctccggccccctctattcttttcacttgcccttcactccccacaccaaagtagcctcatcttctgtacttactactaccac

SEQ ID NO: 309550 - DNA, 405 bp, Zea mays
cttatctcgtggggcgccattggccagctagagccaaccagaagagcttgcccttactgacagtgtgtgtgagagagaggatggctgtcagccacgcacctcctgcgttgctgcccctggagacgggggtcatatcctgggcgcgccgacccacggcgccgacaggtgcagcggccgacgcacctacattcggccaagcggaagctccaccttccattgctcaggaaagcaatccggttatcctatgctggacctgcccctgcttggatgagatgatcttagagaagccaagctgcatccgccatgaggggctgcagatcttattcattgacatccagaccggccgcctccgcttgggcactggaggcggtgatcagaaggttcctatctggcgtatggaatctg

SEQ ID NO: 309551 - DNA, 491 bp, Zea mays
ttcttacgcgtgggcgcgccgccgcagcagcagcagcgacgcgaccgccggtaatggcttccaccgttgtgctccggaacgccggctcccgccgactcttctgctactccactctccgcgccgccgcaatattgggacccgccgcgccacctgatgcgcccgcggcggcgtcggcccagccgccaccgatggcaggaaccctctgggcgaggtccatggccactttcacgcgcacgaagccacatgtgaacgtcggcaccattgggcacgtcgatcacggcaaaaccacactcactgctgccattaccaaggttctggcagaggcagggaaggccaaagcagttgcttttgacgagatcgacaaggccccggaagagagagccagaggaatcaccattgcaacagctcatgtcgagtatgagacggctaaaaggcattatgctcatgttggatgtccaggtcacgcagattatgttcaggacatgatcact

SEQ ID NO: 309552 - DNA, 415 bp, Zea mays
gaaatggaccatcaccctgaatgatatgtctggtcgaagtgttgagcttaccatgtggggtgacttctgcaacagagaaggctcgcagctgcaagaaatggttgaatgtggggcgtttcctgtgctcgctgtcaaagctggaaaagtcaatgattacagtgggaagtctgttggcacaatttcttcatctcaactccacataaaccctgatcttgctgaggctcattctctcaggcagtggtttgattgtggaggaagagatgcttctactcagtctatatccagggattttactccttcagcatcatggaatgaggtccgaaagacagtagcacagataaaggatgatggtcttggaatggggggacaaacccgattgggtcacggtgaaggctgctatttcattcatcaaaac

SEQ ID NO: 309553 - DNA, 450 bp, Zea mays
tggtgtgcgtcaggataaaggtgtcaggccacctttgcattaaatgcccctgcgatttggtcggttagcgtggcgatttgggtagggttgcttcttggcgaagactgggcctcgggcgagccggaagtatgttcgtcgctggaggggggcctcgggcgagacggagatcctccggggtcggctgcccttgcccgaggctaggctcgggcgaggcgtgatcgagtccctcgaatggaccgatccctgacttagtcgcacccatcaggcctttgcagctttgtgctgatgggggttaccagctgagaattaggagtcttgagggtacccctaattatggtccccgacaactttaaatgctagattttaaactataagctatcagggaactgcctaacccaactaaatgaatctacccatctattctacctttttgcacttatattttacttg

SEQ ID NO: 309554 - DNA, 272 bp, Zea mays
ggctggaatgctttatgcgatgagagttacaagggagctctttagtgccggaaaacgtaaagagcgaggtggaaggctaagtgatgaatgatgtcgatcgatcgtctcgaaggggtgccccctaggccttatatactcgaccgtggggcattacatgtggatatgataacaatgtgagccagaataatagtgaactaactgagtctgtattccaataattcagccgactcatcctcgcccagttccgatgtacggggctcctgtgcgggaag

SEQ ID NO: 309555 - DNA, 496 bp, Zea mays
cctactcgtccggggacctgtgcaaagagattgacacattacatgtatcaccagcaaaacaggccacaggacaataacatcgagtactggaggaactttgtcaatgaatactttgccccgagtgccaagaagaggtggtgcgtatctctgtatggcaatggccgtcaaactaccggagttttccctcaggatgtttggcattgtgagatatgcagtaggaagccagggcgaggttttgaaacgacagttgaggtcttgccacggttgtgccaaatcaaatatgccagtggtacacttgaggaacttctgtatgttgatatgccgaaagagtcccagaattcatctggacagattgttttggactataccaagcgatccagagagtgtctttgagcactgcgtgtagttcgtgaggggcatctaagaattgtattcaaccaagaccttaagattgcatcgtgggagttttgtgcttggcgtcatgaggaacttattc

SEQ ID NO: 309556 - DNA, 430 bp, Zea mays
tcccacgcgtccgtatcaggctgcggccggcactggctttgtcctctaccttagtttctgacatcatcacatcgcaccgagggcgaggaggcaaaggaataacctgtgaagctgctgccatccactcatctttctgccgtccttgattgcagtcattcctcccccaagtccatagagaatggaggataatctaccagttaatgtccgggaatatcaagaacttgctaagaaagcactaccaaagatgcactatgattatatcaacggaggagcagaagatgaatatacactgagggagaatattgcagcatatggaagaattctgttacggccacgagtccttatagatgtgagcaagatagacatgtcaacaagcttattaggatacaatatgccatcgccaataattgtcgcacctacaggggcacac

SEQ ID NO: 309557 - DNA, 270 bp, Zea mays
ggcccaaaacgtaaagcttggggcccattaactaaaacgggatcccgttggggcccatgcccgaaacatgttacatgtgggattttttggctaaaatctactcagggccctccaagagtaaaatttgcggggggaagaaaacagtttcacaggacttgggcaaacataaaagcccttgcttcccgcccgtttagtggggctccacaggggcccggattttggcccctgggtaaacagaaatagcgccaagctttttttaaatcctaaaaa

SEQ ID NO: 309558 - DNA, 377 bp, Zea mays
caagaatcctttgggttttttttttctttctttctctgagacagggtcctagctactgatctcctctcggttcacactagccttgtttcaactgcctaacaaaaaaaaaaaaaatctgaacttttgctgcctcagccgtcagcctgcctggcagccgcacgcttcccaggcgcggtggcacaggcacggcggcggcggcgaggtgggcgcgtccggcggaccaacggacaggtcgaggttgaggtcggggcaccgtggctcccccgcgctgttgccgttgccgttgcagctgcagttgctgcgcccgccgtcgtcggacgactccgccggtttcggtttcggcttcgcggcgggggccggaacgagggctgctgctg

SEQ ID NO: 309559 - DNA, 381 bp, Zea mays
ttcttttttttttttttttttgtcaatttttttttggggaacacgaataagtcttttaccaagatcgcttcgggacgaagcggcctacacgaactaccgcacaaaatagactttaaagccgtttttacactagttcttcaccacgccgtttaaaagcgaacaaacagcataggggtacaaattgccctgctccatccttccgccgccactggggccgggcgcgagatacgcctacgcgcgctcgccggggatgcggcgggcgagctggatgtctttgggcatgatggggacccccttggcgtggatggcccaaaggttggtgtcctcgaacaggccgacgaggtaggcctcggcggtttcctggagggccaggacggcttg

SEQ ID NO: 309560 - DNA, 414 bp, Zea mays
  unsure (1)..(414): unsure at all n locations
caggcaccgccccggaatacgtggggagacacacgcgcgcgtcacatgggggtcgagaggctcgccgacggggggtgttgagggcgagcggcccgagaccacggcccgggatggcgagaaccngcagacgcgacaccaggacggagtgagccacggacgacaactgccaggacaacagccacagcacctacggggaggggcaggagtacaggattaagcacgaccgggagacgcacaggcacaggcgcggtgacaagaccaccgtgtccacggaggaggcgatgcggaacgccatcaagggcatgaacggcaaggagctggacggccggaacatcaccgtcaacgaggacccaacccgcggcggccagggaggccgcggcgggcggctacagcggcggcaccggaggcagcggc

SEQ ID NO: 309561 - DNA, 214 bp, Zea mays
aaacagcaaaagacagcttaaggtttttttcaccacaaggtttttgtccaacaatctggcaggggatacatagcctgtccttattaacaccaaacatgtgatgtgcaacactgccagcagatagggcccaccagttccaatgcacacattaacgtccaaataaagcccagtgttttaaagttttacaggccagtttccaatcatccaacaccgg

SEQ ID NO: 309562 - DNA, 299 bp, Zea mays
gcctgggtagcacgaacatgggggacaactgcacctggattaccttatgtcgaggcggcaatcaccaatgctggtgactggttggttggtggggacttggaggttatagaaccaatcaagcacacagatggggtacaccagtatcgagtgcatacgaacagccgagtaaagagattgcccggcacaatgataaggcagtatatacctttaaaataacccgatccaggacacaaaggacctgctgtgcttatgaccgacgcacgcaaacgtgtagctgtgaccagatataaaaaccccac

SEQ ID NO: 309563 - DNA, 492 bp, Zea mays
ccctgcgggtgctgccccccccttcctttttcgacccacgcgcccgcgtccatgctagggactgcgagaacggcaaaggggatcttttggattgtgcaggagtaattctctttgctgctgaaaatgcaacccaagttgcacttcaggcaatccagcgtcttggtggaaatgggtacataaatgagtacccaactggacgtgtcctgagagatgcaaaattgcttgagattggtgccggtactagtgaggtaagaagaatgataattggccgtgagctcttcaaagaggactgacacttctattttgcaagccagatactcagagcatattgttagctggaggaggtgaggccgatttagatatttagcaaatcaccctgtggggtcaatgctttcgtataaccgcacacatacatcaaataaagttcacttgtacttgctgctaaacaaaatagatgaaaaaccaacgccaccacctgccgatcatactccg

SEQ ID NO: 309564 - DNA, 464 bp, Zea mays
  unsure (1)..(464): unsure at all n locations
tcgacttgtttcatcgaanctncaagagagggagctttttttgcaccacaagggcgaggacgtcttgcagctgcggatcaagctgcggctgccgctcatgctgcaagtgcggcaagaagtaccctgacctggaggagacgagcaccgccgcgcagcccaccgttgtcctcggggtggccccggagaagaaggccgcgcccgagctcgtcgaggccgctgaggagtgccgacgaggccgcccacggctgcagctgcggtagcggctgcaagtgcgacccctgcaactgctgatcacatcgatcgacgaccatggatatgattattatctatgtagcttgtggtggtggttgaacaatactaagcgaggccgagctggctgccatacataggtattgtgtggcgcgctcgtgagagagagagaaacagagttcttcagcttgctatctctatctgcatgtacggcg

SEQ ID NO: 309565 - DNA, 366 bp, Zea mays
tcgtgctattggccagctagagccaaccagaagagcttgcttttactgagagcgcgcgtgagagagaggatggccggcagtggcagggcatgccctgtgctgccctgcaggtgacgccgtgagcctaaccttggggaccaaccccctactcaattcagctgcggggacggatacacacaggccgcgagcccagacacctggaccattatgtcctagaaggcctaacggaaagggctggaaccacacaaggaggcgggggcgcacaaggcgaccaaggagctctgatcctagccgtaaccatcggccattgagctctggcggatggctaggacacacaccttgagttgaaacccaacacctaaatgg

SEQ ID NO: 309566 - DNA, 306 bp, Zea mays
aagaatccagaccacattatttccttaatttaacattccccaaactgcctttttgccaatgttggccgttgatgccaacaatggaaacagtaatttaggtccaagcaggcccctttgttggttggcaggggggaccccacacaaaccccccagcccgggggcagaaccacccgccaggggcgccaacggggggggctttccgttttggcccgccaaaggtaaaaataaaccatcccgatggggggggaaactgaataattctagtccatggttttgggctccttttttgggatcgccacggggcct

SEQ ID NO: 309567 - DNA, 431 bp, Zea mays
gctggcatgcgcgcagacaagggcgcgggcgaggtctggtactacgaccccaccgtgcacctcccgctctggccgacgcccgacaccgaacgcgagggcatactcagcatctgccaggaggcccacatggtcaaggtcagcgacaacgaggtggacgtcctgacgcgcggggacgccaacgacgagaagaacgtgctgaagatgcggatagacgggctcaaggtgctcgtcaacaccgacggggacacggaatgcaagtgctcaaccaaggacttcaagggcggcgtgcccggctgcaaggacgacaccgacgacaccaccgacgccgtccacgactccgacggatccctcgtcgtcaacgtacccaaggacgactgcatggtcgacaccgaggagaagctcacggaggctctcaagatggccaacacctg

SEQ ID NO: 309568 - DNA, 407 bp, Zea mays
  unsure (1)..(407): unsure at all n locations
caaaaccggcacccacgggggcggtttcaaagnccctcccaggggagacgccggcagggccagcctacccaccactacacccaancaggggaggnggagctccagctgcngacacagagcggaacgccaatatggttggatttatgggtgctatgatatgcaaccttgcatttgcgtcccgcaacatcttctcgaagaggggcatgaaggggaagaccgaaagcggcatgaattactatgctcgcctgccaataatgacactggacatactgactgcatctgctatagctatggaaggccctcagatgtgggctgcctgttggcaaaaggccattgcagaagccggacccaacgttgtctggtggatcgctgcgcagagcgtgtcctatcactgatataaccaggtg

SEQ ID NO: 309569 - DNA, 415 bp, Zea mays
  unsure (1)..(415): unsure at all n locations
agggcaccgccccccaataccgggggcgacccacgcgaccgctcgatcccgaggaaanacggggaccggcggggggggtgagcggaccaagaccgcggacacaccacgcgagaacgcggngaacagacggcagcacacgccagggccacggacgaccacgcacgccacaacgccagcagcaccgacagagaggaccaagagcccaagaagagccaccaccgggagacacacagggcccgcggacacggcaccggaaccaccaccacggaggaggcgaagcggaacgccaacgagggcaggaacgggaaggagccggacgggcggaacaacaccgncaacgaggccaagccccgcggcggccgcggaggccgccgcagcggggaaggcggaggccgaggaagcagcagccacggag

SEQ ID NO: 309570 - DNA, 486 bp, Zea mays
  unsure (1)..(486): unsure at all n locations
ggttgntcttgctaataacttaagtcaggcatggggttatgggatatacagcagcgatgacatcgaagaggcacaaggatcacttgaacgagatgatgaggatgtgtattttgatgatgaatcagctgaggtggtaatatcttctttgcgtctgggagatgaccaggaaggctccctctttacaaattcaaactggttcacatttgatggagagagaggcattgatgaccgatcatctgcctgtgttccttcatcatcccccaattctgaggagacatcactaaagactgaggaagctgatgatggtaaagtcattggcactgaggatgaaatggaaacagtgtatcttggaaatggcagtgttgaggaggtaaaagatgtagcagaatgtactgaacagccaaattgttgtactgaggaagagcgattgaaaaatgaagaagggatggaatggcatccaaatgcttcaaataacgataccgaggc

SEQ ID NO: 309571 - DNA, 474 bp, Zea mays
cttggccctgccagcgatggccacattggcgccaccggctgtggaggtggagccggaggccgatgccatggccctggcgtcggaagccgcggcgcctgagctcccatcgtcgcattcgcagctcgattttttcaagaccagagttcaattattgtgtgaaagtaacacgagagattttgatgcttgggtatcattaataaatgctgcagagggaacatcagcagatgacatagaagttatgagcttggtataccataacttcttgttggaatttcctttgtgctacggttactggatcaaatatgcagctcataaggcacgactatgcacaaccagatatgtaatggatgtttatgaataagctgtccatgctgtacctcattctgttgatatttgggtcaactactgtgagcttggtatatgtgcatttgaagaacctgctcatgtcagaagtttatctgagagggctttatc

SEQ ID NO: 309572 - DNA, 179 bp, Zea mays
ggtaggactaggtcccaaagacacctaaaagggaccaagaggcattttcaggtagcagggttaacacaacagagatggctgatggggccatactggtgacgcttaaattgctccgctagtaggacccatggccaggaccactgcacacaattctttaccatgttaagaacccaacagtg

SEQ ID NO: 309573 - DNA, 301 bp, Zea mays
gggttgacccacgcggctcctccgacattcagagcagcagacgggggcgggttttggagccggaactgagcgaactcaccgccgccgcggcagcccgaggcgcctacctcgccggcgtcggagacgcggtcctccttgctgcctcctttcttccagtagccgagtcgatctgcgtgcgagataacttattggtgagagacataagccaaatgccgcaaagcagctatgggattgaaggattggcacatataacaattgctggggcgctcaattaagggatgaaggaggtggaagtgtggct

SEQ ID NO: 309574 - DNA, 302 bp, Zea mays
gccttgccagtctaactggctaacttggctacaaggatggcatgactcacattgaccgtgaggtctgggaagccacaatcccaacttcataagaaggaaacttgtgaggctgccaccatcatggaaacccctcctcttgacatggtcgggatcgaggcatatgtcaagactcctcgtggtcttacgacactcagctctgtgtgggcccaacatttttatcggagaaatgaggagaaggttgtacatgagctggtgcaagatcaagaagaaagctttcacaaagtaagctttcaaatatgaaa

SEQ ID NO: 309575 - DNA, 299 bp, Zea mays
ggccgcgtgtgtgaccgcaagggggtgcaggaccccatcatcttcagcgagagcgggctccccctggcgtcccaccactcggtcatgcagttcgaggccttgtaggctacggcgccgggacgcctggacgcggccacggactacctacacggcgagcttacggacgagtgccacgcctactaccgaaacgatgtgggctacgccgtgcgcggggactaccacacatgcggcctgtacgccgaccagctgaatcggaacatcggggagctgctcaaggagggggtacttggtctggagca

SEQ ID NO: 309576 - DNA, 257 bp, Zea mays
  unsure (1)..(257): unsure at all n locations
gcccactggaaacggtntgtaagtaacccgtttgtgaatggaatgggaaccgaactggttcaaagagaacaatttgtatggatcttaactagctccctatggaggttttgctgcagctctgacggaccaaaccgaatgggtcatgaatattgagcccatcgattggccagacactctgcccatcatttacgatcccagattgtttggcatgtaccatgactggtgttaggcttacagcacttacccttgaacccttt

SEQ ID NO: 309577 - DNA, 422 bp, Zea mays
ataggttgctagctttatatggcgtgctgcaaagggccggctgaagaaggctataggtccctggtcttggtgtaggacagcaccaaatcccgaccctgacgcgtcgcagtccactatgaatggacactcgaaatctgggagctgcagtactggcgctgaggagagtgcctgtttgagtgtttggaatgctgagtctgcgtcggttgaccacttgaagccttctttcttgaggagctttgttaatggagcagcgattactccaaaatccttgatgaatttccggtaatagcctgctagtcccaaaaatcctcgcagacctcgtggtgattatgggattggccatgatgttactgcctcaatcttgctactgtccatggccacccctttggctgatattatgtgtaccaaataaagcacagatg

SEQ ID NO: 309578 - DNA, 428 bp, Zea mays
  unsure (1)..(428): unsure at all n locations
gaacttaagatttcttgcaccttccaaacagtcttgaatgaagaaaatagtgtcatcagcatattgaaggcaacaacaaccattccttatgattatatgatatgagaaataagacctttaataaggccctcatcctgagctttatgaattaaacaagcaagaccatctgcaaccaaattaaagagatggggagagaaagggtccccttgtctcacccctttgtgagttgtaaaataggggcccacaacatcattagttntgatggcgactntgcctcctctaacagttctcataacccaatcacaccaagtgctcccaaagccttttttctctagcatacagtacaaaaaatgtcagttaactttatcataagctntttcaaaatcgattttgagaaccactccacctggctgcatgggctgggcatg

SEQ ID NO: 309579 - DNA, 371 bp, Zea mays
tcgccgcgacgacacaccgacgccgacggctcatgtccaagtacggcaccattcccacctgctcctgcgaggccggagggcccgtgcccttcggccgagcctccccgttcgaccgcatgtcccgcgccaaggctcggggcgcctcggcgctggcgacgcgccgaccctggcgcgagctagtggacgtacacgccggaagtctgcccccgagcctccgcgacgcgaacctccgcgtgcgcgccaacctcccccactacgacatgaactacgccatcgttgtgctagccgtcgtgtctctctgcctactctggcaccccgtgtacctcatcgacttgctcagctgcatgctcgcctggctcgtgctctacttc

SEQ ID NO: 309580 - DNA, 452 bp, Zea mays
  unsure (1)..(452): unsure at all n locations
tcgccatgtctggcatcatgcacaagatcgaggagaagcttcacatggtgggcgaccacaacatggatgatgagcaccacaagaaggctgcggagcaccacaagaaggaggagggtgagcaccacaagaaggactgcggtgagcataaggaaggcattgtggcgaagatcaaggacaagatcaccggcgagcaccgcgaccagttcggtgaccacaacgaaacgaaggacaagagaaagaagatggagaagacgaagcacggtgagggccacgaccaccacggctgacacagttgcagctgctgctgacagctgactgacatctggtgtctcaggtaactaagtaagctggggctgnatcttatttttccttcttgcctcgttccgcttattgtattcagatggtgttgatcttttgctcgatctgatgatgttgatgcttgcttataatgc

SEQ ID NO: 309581 - DNA, 391 bp, Zea mays
  unsure (1)..(391): unsure at all n locations
ctacctttgagctgaaactccaggagattcttaactattgctgatattttgtcattctgatgatttttttccagattaaggcaaagatagaggcttcttccctggacaaatggctattaatcaatttgcggacgacagcggaatttagctctcacatgcttaatcgagacacttggggaaatgatgcggaggctcagatgattcggacaaattttattttctggcaggtttattatgacaccagtgaggggaggaaggtatgcacgtactaccatctggtgtccatgcctgctattctcctaattgaccccggcactgggcataaaatgcatgcttgcaatgcgatggttcacccagatcgnttacttgaggatttactaccttacctgga

SEQ ID NO: 309582 - DNA, 389 bp, Zea mays
ggggaggtaaaggtagacgatgaagacaaggagagggcggagagagaaccgaagacgaggaggatcactgaggctgctgacgagaggtcattgatcaaaatgcagaagcccatatggatgaggaagccagaagagatcacaacaggatagaatcatgcttgttctgtctagcaaaaagctctgacaaagtgacgtggtgaggagctatcgtggcttgagaagacactgtctctgatggagtggtcaacatcggaagctaaggcatgccatctgatgccctaacaaggccccgtttgatctttccgacacaaggcagaagcaaaacaacatgaagctatctgtgcgcagggtggatatcatgcacaactgtcaggaactgaaccctgagt

SEQ ID NO: 309583 - DNA, 453 bp, Zea mays
tcataaagcaaggctttgttcaccaaaatcgcctttgtgctataggctgtagtgctggtggtctgttggtgggtgccgtcattaatatgcttccagacttattttctgctgcagttctcaaggtcccctttcttgatatctgcaacacaatgttggatcctactttacctctcactgtcttggactatgaagaatttggtgaccctaatagcccagatgagtttgaggcgatcagcagttattctccttatgataacttagcacctgatgtgtgctatcctccagtcctggtgactgcctcgtttaatgatacaaggtttttccgtagtaaatccttttttttgtagactgcatggatcatatgtatatactttttccacgtgaaactgtgggctcatgtttttttactacctcatatatttatgaatggacggagtacatattttttccttt

SEQ ID NO: 309584 - DNA, 366 bp, Zea mays
aggcgaatattctttcttgcataagggttcacagcctgcagggtttcccttaataactgcttacaagtttacgggccagctaattgacccatactccacccattacacggacattcggcctgcggacaccacggcccatagttccttgctcttggctgcttgcacgtgatagctcatccgacgcgacggagtcactgggcacttccttgctggcttgagggctgacattctcccctccatgagatgccggttgtccccaaacggctgaagaaggaaagcgttgtcgaagagccactttgtcctcccaggtgtccagagcatcatcatagccggaccaccggaccttgacttgatcaacagccatgc

SEQ ID NO: 309585 - DNA, 285 bp, Zea mays
acgcatgggcatagaaggagaggaagacgacgcacatcctacagggcgtttaaatgcaactgtgacagatgaacaagacgattaccatcacaaaggaaatagcgtcattgaagcatcatcaagcggcgaggctggcatgagcacaatgcctataaacactggtgaggaggtcacacaaaaagggaggtacatattaagggatttatatgagatggtcaataaaaatatcggtgtttctggtatgatactcgcgcacttttaaaatattctggtcttacattctat

SEQ ID NO: 309586 - DNA, 417 bp, Zea mays
  unsure (1)..(417): unsure at all n locations
ctttttccctttatcggttcacagtatgatcgcctttcagctgccggaagatctcgnggcgccctcttcaaacgagaaggcaagacaaaagaccatgaggttttggtttgcagattgatagacaggcccctacgacctactatgcctaagggtttctactttgaaactcagattctatcctgggtcttcagttatgatggcattcactccccagactgcttggctatcacagctgctgggccctctctgaaattccaaataaacaaacaattgctggagtaagaattggcctaattaacaaccagtttattgttaacccaactactgaacagatggagaattcagagttagatttgatgatggctgggactgatagtgccattttgatgattgagggctactgtgattttctgactg

SEQ ID NO: 309587 - DNA, 299 bp, Zea mays
  unsure (1)..(299): unsure at all n locations
tgaccaccgcgctgcgggtgtggggcctttgcgagggctgcacgccgtttgtttccaaggcgctccacagcatcgaaggcgtgtacaaggtgacggtggacgcggcgcatcacaaggtgacggtcaccgggagcgtggaagccgacgcgctcgtccggcgcctgcacaaggccggcaagcaggcggagctctggcccagctcgccgggacccgtcgaggccaagatgaatcccgaggaggtcgcgcctgccgcgttgcctgcagcagncgccaacaaggacgctagggcccaagagaag

SEQ ID NO: 309588 - DNA, 381 bp, Zea mays
agcacctgatgggagagggttttgaataatgaatcttatcgcgcttctgcaactagagcaccagctggagagttcactgaaacatatcagaacaaggaagagccagcttatggtcgagtcaatttcagcgctccaacggaaggtaaagacgttgagcttgctaaagttggctgttcgaacttcctcttttaagaattgtatgatttctttagctggccattagatgggcatggtttattgcaagtgttaactacttcgggggccttgatacatacacaaaatatgtctgctcttgcgctaagctgcgatgcattgttaccccaggaaaaagacactgcaggaggagaacaaggttctgacaaaagagctccgcgagaagca

SEQ ID NO: 309589 - DNA, 281 bp, Zea mays
  unsure (1)..(281): unsure at all n locations
ttaccgaccgggagacggggattgttggngtaatggggtaagccaccttttcctccttgaaccccatgctngacgctatcgagaacatgaacggcaaggagctcgacggccgtaacatcaccgttaaccaggcccagtcccgtggcggtggcggtggcggcggtggctacggcggcggtcgcggcggcggcggctatggtggcgggcgccctgacggcggttatggcagcggtggcgggtactgcggtcggcgcgagggtggtggcggcggctaccgaggc

SEQ ID NO: 309590 - DNA, 422 bp, Zea mays
gttcctaatcaccgacgaataatctgttttcatcatactaacaccgcgctagtttctcgctctgccctgcaacaatggccgctcgctcctcctcccagcagctggtcgcggcggcggtcctggcagcggcgctgctgctgctggcggcgggggccgggacggcgtctgcggcggtgagctgcggctaggtgacgtcgtcggtggcgccgtgcctcgggtacgcgatgggcagcgcggcgtcgccctccgcggcgtgctgcagcggggtgcgctcgctcaacagccgcgcgttgtcggcggtggaccggcaggccacctgcaactgcctcaagagcatgacaggccggctccgtcgtggagtcagcatggccaacgcccgccacattcccggcaagtgcggcgtcttcgtcggcgtgcccatc

SEQ ID NO: 309591 - DNA, 376 bp, Zea mays
tttggtccctggtcacgagatcgggggcttgagacggcggtggccccgatctgttcaccagcgccaaggccggggaccgcgtcggcgtgggctgcatggtgaactcgggccacacgagctgacggtgccacgtggacttgcagaacagctgccgggtcggcatcttcacctacaactgcgtggaccgcgactgcaccgttacctacgggggctacttcaggaacggggtggtgcacgagcgctctccggtccggatccccgacgcgatgccgttggaccggagggcgccgctgctgtgcgcaggcattacagggagcagacggctgaagtaccacggtctgaacgtgccgcggaagcacctaagcgtgatggggat

SEQ ID NO: 309592 - DNA, 399 bp, Zea mays
  unsure (1)..(399): unsure at all n locations
gcgtacgatggataacaggggttgttctatggcatgtcgccccttctttccccatggcaccgagaganaggatggaacaatcgcgttaaacagaggtcctagatctggccggttcaagaaccagaaattgtacggtcatactgtcactattgctgtgaaagggcagtctctcccttctagtgaaagcaagaatgatagtgctgtgcctgatagagcaaagtacaatagagatgacttccctgttcagtacgatgctgcaaagttctatgtcattaaattgtacagcgaggatgacatccacaagaacgtaaagtacaatgtgtgggcaagcacaacccacggaaacaagaagcttgatgctgcttaccaagaagcttaggcaagggatctgcatgccct

SEQ ID NO: 309593 - DNA, 331 bp, Zea mays
gggcaaaaggcttcaccggggggtcgaccacgatggccccctcgtttcccccccaagccgcggtcaccttgatgcaaccggccaagatcggcggccgggcgccgtacgactcgttgccgtcgtcccgcccgtcgtcgtaactcggcagggcgttcggcgtcgacgccggcgccgccaggatcacgtgctccctccagtccgacgtcagggacgtaaccagcaagtgcgtcgacgccgccaagctcgccagcttcgcgctcgccacctgggggcttctcgtctacagcgcaagcgcggagggcacgcccaagaggctgacctacgacgagat

SEQ ID NO: 309594 - DNA, 383 bp, Zea mays
ccatcgcaagagccgacgggtgttttctagagaggccgccccccccttcttcccccaagatcttgaaggacgagtccttcgcaaagatgaagaatggtgtccggatcatcaacgtggccaggggtggagtgatcgacgaagacgctctggtcagggcgcttgactccggcaaagttgctcaggcggatcttgatgtcttcaccgtggagcccccgcccaaggacaggaagctggtgttgcgtgagaatgttactgtaacaccccaccttggagctagtactgtcgaggctcaggaaggcgacgctatcgagattgcggaagccgtggttggtgcgctgagaggggagctcgcagcaaccgttgtgaatgcccccattgtccca

SEQ ID NO: 309595 - DNA, 431 bp, Zea mays
gcacgaagcaatctttccctttcccgattatgtggtaacggcttagctcgtctcgtcgcccgcgccgcggtttctcgccggggcatgacgccagcaacctccgcccgccgcgcgctcgccccacccgccgtgccggcggagccccgctgcgggtcccactggctcgtggccgctcgcggccacgtgggccactcgcaccaccacggtggggaggacgagggcgagacatccgagaggatctttcgtctgggactcgccgctgacgtcgtactcaccgcggggaaggccgtcacaggctatctctccggcagcaccgccatcgccgccgatgccgcccactccctctcggacatagtgcttagcggggtggctctgctgtcttacagggcggccaaggctcccagagacaaggaacatccctatgggcatgg

SEQ ID NO: 309596 - DNA, 372 bp, Zea mays
  unsure (1)..(372): unsure at all n locations
cttggacgaccgacgacgcacggggtgtncctgagatgggtaaccccggatttctccactgnaagatggcatgagcagagctttcccgtgaggaaaatgtgcacatggcgaagctctccgagcaggcggagaggtacaaggagatggttgagttcatggagaaggtagccaagactgttgactcggaggagcttactgtggaggagcgaaacctcctgtctgttgcatacaagaacgtcattggagcccggcgagcctcatggcgcaggatatactccatggagcataatgaggatggccgtggcaatgaggaccgagtaacactcatcaaggattattgtggcaagattgagactgagctgaccaagatct

SEQ ID NO: 309597 - DNA, 330 bp, Zea mays
  unsure (1)..(330): unsure at all n locations
gaatcacacaacagcagcgggttttttatacacacctnaccacgtctgttttcccacccggcattagacggcgcggtagcgagagcgagagatggacgggaggatgttcggtctcgagacccccctgatggtggcgctgcagcaccttctggacgtgcccgacggcgacgccggcgcgggcggagacaaggcgagtggtgccgcggcgggcggtgggcccacgcgcacctacgttcgcgacgcgcgcgccatggcggccaccccggccgacgttaaggagctcccgggcgcgtacgcgttcgtggtggacatgcccgggcctgggcacgg

SEQ ID NO: 309598 - DNA, 260 bp, Zea mays
ggggggaaccatcattttttttaaagaccgccacatttacatttgggaaaaagcaattttttcccttattacaaaggtgcctaacaaacaacaagttttttccgggggttttttctaaaaacccattaaaaatgggatgctcggataaaaaagctttttttcctagcccttaaaccttgcctggggtcccatcaccgaatttgattgaattttgggaatttttgtttttgccggggggggggaacatttttttttccccc

SEQ ID NO: 309599 - DNA, 307 bp, Zea mays
  unsure (1)..(307): unsure at all n locations
tatgtcgagaggcaggctgccaagagcatttttttttttagccttgctcgccgngccatcccccaggcgcattacgccatcggcgtgcccgagcctctatacgtgttcgtcgacacgtacggtaccggcgcgatccccgacaaggagatcctcaagattgtcaaggagaacttcgatttcaggcctggcatgatcatcatcaaccttgacctcaagaaaggcggcaacgggcgctaccttaagacggcggcctatgggcactttggaagggacgaccctgacttcacctgggaggtggagaaaccac

SEQ ID NO: 309600 - DNA, 301 bp, Zea mays
  unsure (1)..(301): unsure at all n locations
ggggaagacgcgaccccgtttttttttaaagggnaccccgcgttctttccttcggacagaggnatgaagcgtggcgattgcgtgataatgagggcatgtgatgctttaaagccaccttatgtggtaagagtctaggcaatcgaaggggcaggatcttgaggcaccaatgtgagagtacgagcacggtgggtttatcgaccagaggagtccataagtggaccgcggacatttcatgggcccaaggcggttcttctttctgaccacttttatgggcaaagtgcttacaccattcaggggaaat

SEQ ID NO: 309601 - DNA, 377 bp, Zea mays
gagaccatgaagctggggtgttggctcagacaaggaaccccttgttttcccgcaaacccgagcagataagcaaagctgaacagttgatcaaagaaggtctggcagaggccgatgctgggtcatccggtgctgggactggtggccggaaatacaatgcaacacagccaggtgctgagacgttccagatgaaaattgctaataacaaggtgggactgattattgggaagggtggggagactataaagtccatgcaggccaattctggagctcgaattcaggttattgctatgcatctgcctgctggtgatacttgaactgaaagaactgtgcatatggatcgcacccaagagcaaattgaagctgcaaagcaactgatc

SEQ ID NO: 309602 - DNA, 198 bp, Zea mays
aggatcgaccttcacgccagacttggtctatcccaaaggcgtgaccgcgcgagacgtttgagcaggagagggaggaagatgagggagtgcatctccgtgcacatcgggcaagccggcattcaagtcggacacgcgtgctgggaactttactgcctcgagcacggtatccagactgatggccaagtgcccggagataag

SEQ ID NO: 309603 - DNA, 372 bp, Zea mays
  unsure (1)..(372): unsure at all n locations
acttagggttaggattggtcgcggtgtcanggtagatgagtggatcacgccttttttacccccgacgcggacgacctggtcggcggcgccatggggggcccgcgcggggcgcccgtgaaggagatcgccttcgccgccgggctgctcgccttaggggcgctcggtaccatcggagggctgctaatggccgtcaaccgcatcagaggggaccgggcgcacagaattgtcttgatgatgttgggcattgtaatggtcatccctgggttctactacacaaggatcgcctactatgcttacaaagggtgcaagggcttctatttttcgaacatcccaccgatctgaaagagtgtgctgctgcctgctggttatgaa

SEQ ID NO: 309604 - DNA, 398 bp, Zea mays
  unsure (1)..(398): unsure at all n locations
gtgtccattctttctctaggggtgtgtttttatgganaagcgccctttacttctagagctgagtgctgatgacatagaatacatgtatcagaggagtccagggaatataacagacattagtgttccagcatttgaagtcttaagtcaatatggtactgcaaaggtcacaactaagaatattggtacactggaggctttgtataccttgacatttcactgctcaagtggcatcagttttatggaggagcaatactatattctgaaaccgaatgaagagagtacccgttgattttacttgcacgcatctacagatcaagcagcaaagtatcaatgtacagctattctgaaggcgttggattctagtgaactcgacagacaagaatgtgttttttctacta

SEQ ID NO: 309605 - DNA, 314 bp, Zea mays
gtttgtgtgtgtgagagagaggatgtgaggatcggcagggctgctctgctgtttccctcggggcgcgcaggcgtgagcctggccgtggtgatccaggccgacgccgggtacggttacggcggtggttcacccagacgccgacgccggccaccccgaccccgaagcccgagaagccccccaccaaggggccgaagccggacatgccgccctatgagcacatgccgcccaaggagcacgggcccaagccggagaagccggccaaggagcacatgccgacgccgtccaccttcactctgagccccaaacccacgccg

SEQ ID NO: 309606 - DNA, 399 bp, Zea mays
cccacgttttcgcccacgcgtccgcccacgcgaccgcccacgcgtgcgggccgggcatcctgaagcccgacatcaccggctccggaatgaacatcctggccgcgcgggcgcccatcgagatgcacccgcagttcgaggacgacgtgagcctgcccttcttcatggagtgcggaacgtccatgtcgacgccgcacctgagcggcattgcggacatgatcaagagcctgcacccgagctggttccccgcggcgatcaagtcggcgatcatgacgtcgacgggcacggcggaccacgcgggcgtgccgatcaaggacgagcagtacaggcgggcgagcttctacagcatgggcgccggctacgtgaacccgtcccgcgccgtcgacccggggctggtgtacg

SEQ ID NO: 309607 - DNA, 512 bp, Zea mays
cccacgcgtccggccgcctcctccacctcaaccgcctgctcctacttctcctcgcagccgcagctgccgatctccaccgccgaccctgccgccagcaaaagtaggttgatgcggcagccacggcggagcagcagcttcgtgatgatggaggcgtcctctgccagcggcagcgacggcggggtggccaggacgaagagcctcacggaggacgacctggaggagctcaagggctgcctcgacctcggcttcggattcgcgtacagcgagatacccgagctctgcgggacgctgcccgcgctcgaactctgctactccatgacccggaggttcctcgacgagcagaaggcgccggggcaggaggaggaggttggagcctgcgtcgccgccgctccccaattggaggatctctggcccgggtaaaaatcacttttcccttctcagttttcgaaattggtaacatttcttttttcattcacttgcgaattgggtcattgggatgatgtgaaataata

SEQ ID NO: 309608 - DNA, 479 bp, Zea mays
  unsure (1)..(479): unsure at all n locations
tagagtgatttcacgtgtaactcacgcaataagtggaaataaaatagaagaaacgttgacatcctgtgaattttatggtcccattattttttatgactatacgtggccatatgttgtaccttcgtataatttcatagatttctgagactatttatatattattaatttctttctacataaaatcatcaaagtataattaaaattcataaatacactagttttgatccaaaattgcaaaaagcttaccaaaacaaataaacattctattcaaataaaacctcaagtcaccacatgaaaatgataagtgaaatattaattatgttgaaacttcgatacataaaatgatttcacatgtaactcacgcaataagtgggagtagaatggaagaaacaccaacatcttgtggattttatagtccaaatgtttttgagaactatatgtggatatatgttgtgtncctgtaaaaattcatgaatttt

SEQ ID NO: 309609 - DNA, 416 bp, Zea mays
atcaggagatcaaaaaataggaaatacccggaatgggtgcaccaggcaaatccaactgcagtgtaatggtgataggtttattaatatgtccaatatgctattccctgactccagagttaaactttctgttattggggacagcaaatgccaattggaatgcatgaaaaaatgctcctgcactgcatacacttattctgtattggatggttgcagcctatggtatggcaatttaacaaatatgcaggacggatataataatgggagtggagcaggaactctttatcttcgtgttgctgcatcagagttagagtcaaccaacagttcaggtcacaatttagtttggatagctggtgtacttccttcaattggatttcttattttttgtctgatcttgcttttttgatctcctgatccaa

SEQ ID NO: 309610 - DNA, 419 bp, Zea mays
tggtgatcaggatagggccaggctggccgggcgcggccacgggagaacggtggccactcgtcccacatccgcttcgtcctgtcctgtactgcgtcctgcccccaacgagagccggagccggccatcccgtcgcacactctccccctctatatatgccgtcggtgtgggggagcctactacaggacgacccaagcaagcaagcaagcagcgagtacatacatactaggcagccaggcagccatggcgcccaccgtgatgatggcctcgtcggccaccgccgtcgctccgttccaggggctcaagtccaccgccagcctccccatcgcccgccgctcctccagaagcctcggcaacgtcagcaacggcggaaggatccggtgcatgcaggtgtggccggcctacggcaacaagaagttcga

SEQ ID NO: 309611 - DNA, 354 bp, Zea mays
tcggctgctcaatgttcacgagcaccagtcccctgatattgctcagcccgacatcgtttgacacacaaccaatgttgcggcaggtatccctgacaatcttatcgtattcgacattggccttggtgtgcatggccacttcaccaagcgtaccgaggagattggagctggagaccagggacacatgttcggttatgcgaccgatgagacccctgagttgatgcccctcagccatgtccttgccaccaagctaggtgctcgtattactgaggtccgcacgaacggaacctgcccctggctcaggcctgacgggaagacccaagtgacagtcgagtacccgaatgagggtggtgccat

SEQ ID NO: 309612 - DNA, 415 bp, Zea mays
gttcatccacatccccaatctcatgtgtccaatacacagcaaaagatgcctccttattgaaactggttggcatctgcaatagacgcttcctgttagttccagaggcactgccaaggatctcccccttcatgaggtcatatatgcaggccctgaagttgtccatgctcttatgatcctgagagtcgaggcttaggaagaccagaatttcccagcaccggaggttggtctccttcagagacgagacaatagcaccaagtgcaggtttgatcggatcaaacatgagcaaacagaggcagtcaatggatgatctcacatactgcagttctgtagcagtaagagaaagtaaccatatcatgcttcctgaagcaacaaataatactgcggcagcatactactcgactgtactcgttcagaa

SEQ ID NO: 309613 - DNA, 437 bp, Zea mays
  unsure (1)..(437): unsure at all n locations
tagggaaagcggtgacacctgtgcgtgccccgccgcaatttccggggggacccacacgcgcgcggtcgcgcgggctaaattctcaggcgaggcgctgaaaccgtgaaccgttttccacctctaagcggctccaggagggagagtgtgcgtggactcaggaggcggcgggcgaaatgaatcttaacgtcaagaccctcaagggcaccaacttcgagatcgaggcgagccccgatgcgtcggttgctgaggcgaagaggatcatcgaaactactcagggtcagagtacctacccagcagaccagcaaatgctcatataccaagggaaaattctgaaggatgagaccactttggaaagcaacggagttgctgagaacagcttccttgttataatgctgnccaaggctaaggcatcgtcaagtggagcttccactgctact

SEQ ID NO: 309614 - DNA, 388 bp, Zea mays
cggtcgcgtgggcggacgcgtgggcggacgcgtgggcggacgcgtgggggcgcccgccccaaccgcgccgccgggtccgggtactggaaggccaccggcaccgacaaggccatcctgtcgtcgtccacgcccacgagccacggcggcgccaacatcgtcgtcggcgtcaagaaggcgctcgtcttctacggcggcaggccgcccaagggcaccaagacggactggatcatgcacgagtaccgcctctcgggcgcggcggacgacgactgcaagggcagcaccaggcgcagagtgtcttcctcctcgtcgtcctccatgaggctggacgactgggtgctgtgcaggatccacaagaagagcaacgatttccagttgtcgtcgtcgtcgg

SEQ ID NO: 309615 - DNA, 391 bp, Zea mays
cggtcgcgtgggcggacgcgtgggcggacgcgtgggcggacgcgtgggtgaacctggatctcaagatgaacgaggctgccgccatgaagctccccttccgtggcatgccgtataacatgaaccagatgtacctcaaggggagcaatgccaattccaatgtcaatgcgttcaagatgaatgttggagtcaacaagtactccaatagtccaaacgggaaagacgccaatgggaaaaacaatggcggcagtggcggcaacaacaacaatgggagcgccaacggcacttctgtggctgacaagcgcttcaagacattgccgacgagtgagatgctaccgaggaatgaagtccttggtggatacatctttgtctgcaacaacgataccatgcagga

SEQ ID NO: 309616 - DNA, 377 bp, Zea mays
tcctcgcgtccgcccacgcgtccgcccacgcgtccggtcgagagatggagatctggaggacgctgtgactgcggcggatgggatcttggctgccccatcagagtgctcaacggtgatggctgtggctccttgcctgaaggagagtcacgggacagaagatcggttgagatatcgatcaagggtgcaaagaatgagacgatgttgaagctcgtgaatatcacggaggacttgtacatcctctacttcgactcgagtatttcaccattgcagtgcttctcaacagggatagcgattgtgcacagccgagcgccagagctttgccccaaactgtgaatcgcgcacagccaggcacgcacccgagctttgccccccaactg

SEQ ID NO: 309617 - DNA, 414 bp, Zea mays
  unsure (1)..(414): unsure at all n locations
ctggtgctgccggtccattcctggggggacgaacgaggcgtacgttttatagtacactgggccgtgggcaccgccggcgccaccacctttgcgtttgcggtgactacacgacaccaataatggagggggtatggacaaggagcctgctcgcggcggcgttcctggcgctggcggcggtgccggcggtgctctgccaggcgccaggccccgcggcggcggcgccgcccaacaagggcccgccgaacgttacggcgatcctggagaagggcgggcagtacacgacgttcatgcggctgatgaagtcgacgcagcaggacacgcagctgaacggccagctgaacaactcgttcggcagcgggtacacggtgttcgcgcccaccgacagcgcctttttcagnctcaagcccggcacgc

SEQ ID NO: 309618 - DNA, 393 bp, Zea mays
ccgtcctttggtgcgcgtgcacggcctgaaaccgttatacactacatgacatacggcctgctatcgggccagaatggatgagctggagatggacgaggaggtcaggcccgagttcccctgcccctactgctacgaggaccacgacgtcggatccctctgcgcgcacctggaggaggagcacccgttcgaaccccaagccgcggcctgccctgtctgctctgagatggttacgaaggatatggttaaccatattactacgcaacatggatatttattcaagaatcgccgccggctgcgcagattcatcattccaggcagccaggccctctctttgctgagccgagatctacgggaagcccacttgcaggtgctcctcggaggaggcggacagag

SEQ ID NO: 309619 - DNA, 367 bp, Zea mays
  unsure (1)..(367): unsure at all n locations
gtctggacaaagctcgcgccgcccaccgcacccgagccgcctcgcccaggcgtgctggngtncgctcccttctcccgcgccgtcgcctccgcctacgcccgggccgacccgctggacccagcgtgcgccgctccactcggacgcgccgccgccctctcgggttgaggcggaggtgcttggggacccgcctccatggcgagcgccggcaacagcggcagcggggacgacgatgcaggagggaagctcctggcggatcgctaccagaagggcgaggtcctcggcgagggcacgtatggagtcgtcttcaaggccatcgacaccaagactggaaatacagtcgcggtaaagcggatccggataggaaagg

SEQ ID NO: 309620 - DNA, 375 bp, Zea mays
ttgctggctgggtgcacggtacctgatccccacgggctggaaggtgcagcccctgttccggaacatccaccacaggccctaccactttccctgcccggacaagttcgacccctcccgattcgaggtcagtctctctctgcccctgcttcgccacgttctcatgtggaaaggggggaactgactgactgactgactgatcgaatgggctgacggcctcgcctctgaatctctctgatgcaggttgctcccaagcccaacacgttcatgccgttcggcaacgggacccactcgtgcccggtgaacgagctcgccaagctggagatgctcgtgctcttccaccacctcgtcaccaaatacaggtggtccacctccaag

SEQ ID NO: 309621 - DNA, 373 bp, Zea mays
cggacgcgtgggcggacgcgtgggtgcaggccgcgtccgggagcgtctcttgggccgcctcgcagccgtccgtcctcgaccggtgcggcggcggtgcaccgtccgcttcactcaagtggagagctggcggcatcggaggaggggaatgcagggtccggggccgggacgtcgtcgtgccgcgctcctgcgcgcgcgcgcatgagaagcgcctgccacgggtgcggaaatccaaggaggagaggagggagatggtggagtccttcatcaaaagctaccgagtttcaaatgaaggaaaattcccatcaattaatctgacacataaggaagttggaggatcatattatatagttcgtgaaatcatgagggatatcat

SEQ ID NO: 309622 - DNA, 369 bp, Zea mays
cccacgcgtccgcccacgcgtccgcccacgcgtccgcctgccttcttcttcctccagcaagcagcaagcgcagggagctcagctcctccccgcggccaccatggcgctcgacgcctctccccttcaagcacggctgcagcagggagctgtcttctccagcgcgcaggaactgcagggccgcccagctctccctccccattcccatggcgcgacgcatctgctccctgtcctccactccatgggcgcgagctccactttccatggatggcgcccagaatttttccagcagaggccagcggcgcccttcttccccagctccacctttccccgcgccctctctccatggccgagctcgcccaggcttccatg

SEQ ID NO: 309623 - DNA, 377 bp, Zea mays
ctccacgcgtccgtccacgcgtgcgatactacgcctgttaccaagtcctcctcgggttagggctccttagggttttgcggaggggcgatggcatcggttagggtggagataccgcatgtttaccacggcgggcttgcctgggccaccatcaacaagtcgatggagaatgccttctcctactacggcgagatcctggactccaaggtcatcaccgaccgggagacggggaggtctcgcggcttcggcttcgttaccttctactccgagaactccatgctcgacgctatcgagaacatgaacggcaaggagctcgacggccgtaacatcaccggtaaccaggcccattcccgtggacggtggcggtggctgcagtggct

SEQ ID NO: 309624 - DNA, 382 bp, Zea mays
ttgacttcctgggcgcgagcaggccgccctttttgtttttgattttttgaaacaaaagacaacactttcggggcgctaaggccttctttggattaaaagataattcatgtgtcatggaaccatctcctgtgaaagttatataccatccccataaaattcctacattcgaaaggaagcctaaaactcggctgagccaggaactcggggaaatgggatggcgtctctgatgttgtctattccagtagcaaactgtacaagccgctcaaatccaagaccgaaaccggcgtggggaactgatccatatcgccgtaggtccagataccaccagtagctctccttgttcagattttgctcgtctagtcgggcttcaaggtaatcaaga

SEQ ID NO: 309625 - DNA, 460 bp, Zea mays
cgaccgttccctctgctcgaatcggtaagcccgcatttcgagccccggaggtggccgcgaaccctaaccctacagcgaggcgtcgccggagttgtgggggctccgttggccatgtcgatggactcggacagctcgtcgcacagcggcgccgactacaggagtttccgccagatcacccgagaccgtttgttagttgaaatgctgagatcgactcgaaagagctcaaaatcatcatggaaggttctaatcatggacaaacttactgtcaagataatgtcattttcatgcaagatggcagatatcacagaagaaggggtttcattggttgaagacctatacaaacggaggcagccattgccttcaatggatgcaatttattttatgcagcctactacagaaaatgttgacatattcatgtcggacatgtcaggaaaaaattcattgtacaagaagcttatgt

SEQ ID NO: 309626 - DNA, 470 bp, Zea mays
ccctttcgtccgccctcacctcactcactcgtgaagaaccagagaacccacccaccctccttcatctcctacatccacatctatccaagaaggccatgggcgacgccgtggagcacctcaagagcgggttccagaagttcaagaccgaggtgtatgacaagaagccggagctgttcgagcctctcaaggccggtcaggcccccaagtacatggtgttcgcctgctccgactcccgcgtgtgcccgtcggtgaccctgggcctgcagcccggcgaggccttcaccgtgcgcaacatcgccgccatggtcccggcctacgacaaggtaacgcgcgcgcgcgcgctcgtcgtacacacgccacccggcggcgcaatggacgacgttctcacaacaactcactagcagctactgtgttgcctttcgttacttaccatcaatcaataattgcatgcagaccaagtacaccggcat

SEQ ID NO: 309627 - DNA, 454 bp, Zea mays
gccatcgactgggtccgaccggaggtgtacctgctgttcatgacgatgggtgttgtcgttgcagctcttccagaacatcaccaggaacctagaatccaggtgaacgaagagatctataaccatgacgaattgaaagctaagtttagaactcatgaattctaaactggcagtgattgtgaagtgtagcccatctttacgaagaattcggggaagaatttgtggatatgttggatggaataatctcctttgttcttcttgatacacgtcaaaaaaagcttcgttgcagctcatgatgttgttgccatctgccctttatacatgggatggtgtcttgatgtggtcaataatgcttgaaggtacgaccaacattcctagcaggaactggccagttaccaccaagaacctcctggcatgttctctaggatgagattgaagctgcttcgatggcagcgat

SEQ ID NO: 309628 - DNA, 450 bp, Zea mays
gttttctcacatagttgttgttgcatcgactaacaggatagatgccgttgatcctgcattgagaagggcaggacgttttgactcagaggtagaggttgccgttcctacagttgaagaaaggctgctgattcttaagctttataccaaaaacctacatctggatgaaaaagtcgatcttcagactgttgctgcgttctgcaatggctatgttggagctgatttagaagcattgtgtcgagaagctgccaagcttgcatatcatagaatgttaaacttatgtgagggtgacaaagtacttaaactacttatggaagactgggaatgtgctagatctatggtgggaccaagcataacaagaggggtaaccaaagaaatttcaattgtttcgtgggatgatataggaggcttgaaagatctaagaaagagcttcagaaagctgttgatggccca

SEQ ID NO: 309629 - DNA, 400 bp, Zea mays
gttatctttagaatactcaatttcataattcataatggcatatatctgaaaacccccaaaaaatgtcacgtgtactttggaaaaatgaaagtttatgatttttctggcaaatttttttggatgtgcaaaaaatggtttcgtttgtttgcagataaccgatgatggtgaagttgtcactgatccagatatgactctgggggatgggtctaagttggtatatcatcgttttccttggcaggagccatttgcgccgtatttgctggaagtgctctacgaggatgatgacatggttgcccttaataagccttctggcttgcacgttctgcctaacggactggtggagcagcgaactgttttagcacagcttcaattgaaagactggaagatggcctcatcttgc

SEQ ID NO: 309630 - DNA, 397 bp, Zea mays
cccacgcgtccgctttcgatcgccaatggaggagatgattcctcacccccatctccacgcgttagcgtcgacgacgattgcaatcgtcgccgtcatggtgatggtgctgccatcgacgacagccggcggcgggatctgccgtgagagctgcggcgacatcccggtgcgctacccgctgggcatcgacgacgggtgcggcagcccgtactaccgcaacatgctgacctgcgcggacaacgcgacgctccgcctgcgcacgccgtcgggcacgtacccggtgggcggcgcggactactcggacccgcacctggtggtgacggacccgtccatgtggacgtgcgcgcggcccttcaccttcgtgcacgcggcgcccttcagcctggacacgagcacgcgc

SEQ ID NO: 309631 - DNA, 379 bp, Zea mays
aggaccaaacctagcacatccgagccaaggggtcaaaaaccaatccgatggtccggtcagtttcgaataagacagtcatgccagggcacaacacaacagcaaacgaatcgaagcctacatccgagagcgacggatcatgtcgttctcggtgataacgcgatcgcgggtgatatttttaagcgacgcgcagccgttcagcgccatggggatctcgagctcatccctcagcatccgcagggcattcctaacccttgccttgccgtccacggcgagggcgaacagtacgggccttccaataaacactcctgaggctcccagcgccaaggccttgaacacgtcagtgccacggcggatgccgccgtcgaggaacacaggcaca

SEQ ID NO: 309632 - DNA, 447 bp, Zea mays
gtcttaatggccacggcattggctagtgcacaggtagcttcagcaatagagagttaccatcacctgctaaaacttcggctgctgaatgaggcagatgaaagtgtctactggcgtgctgattggttggtcgataagttgggtacaaaggtccattcttactactggctggatgaattctcaggaaagaacagtttttcacgttactggaggagtgagtggagtagtggcccaaacccatggtgccagggaatgcagattccagattccgatgtcgtcattgaaggcaattatgccagtgtggtcagccagaagaacaaggagaagtcccatgtcgtactgaatccaggttctgagtttgcgttgtgcgattgtagctggtcaatgaaggggaacctttgcaaacatgtaataaagtcggcaaaggtctgccgtgacaggggattggca

SEQ ID NO: 309633 - DNA, 524 bp, Zea mays
  unsure (1)..(524): unsure at all n locations
gggaattgagcatactaactgaatcctctggtgatcaagatgggagcaacaacagaacagtgcctagagccgaggagattacacctgctataatgaacctcctagaaaccatatcaggcgacagggatctagaaactgctttggaagaatcactgcagggaatcattgagtatccacagagggcacccccggcttcaaaggaagttgtcgccaatcttcctgtcattgctgttaccgaggaagtcatgtctagattgggtagtgagacggagtgtgctgtctgccgcgaaaacttggttgtggatgacaagatgcaggagcttccctgcaagcatctcttccatcctctttgtctgaagccatggctggacgagaacaactcctgccctatctgccggcatgagctgaggacggatgaccatgtgtatgagagcaggaaggagcgtgaaagggaagaggacgaagatagaaggggtgcggcaaatgctgctaggggtggagattcanttatatctgaactcaca

SEQ ID NO: 309634 - DNA, 497 bp, Zea mays
cctacgccacgcccgaggagcgcgccgcgcggctggccgtgttcgcggacaacgccgccttcgtcgccgcgcacaacgcccgtgcaggcgccaacgcagctggcggcggcggcggcggtgcgcccccgtcctacacgctcgcgctcaacgccttcgcggacctcacgcacgaggagttccgcgccgcgcgcctcggccgcatcgcccgggggcggcgctccggagccgcgccgcgcccgtgtactggggtctcggcggcggtggcgcggtgcttgatgcgctggactggaggaagagcggggccgtcaccaaggtcaaggaccaaggcagctgcggagcttgttggagtttttccgaacaggtgctatggaaggaataaacaaaataaagacaggctctctggtcagtctttctgaacaggaactaattgactgtgacagatcttataatagtggctgggggggtggcctcatgggatcatgctataagtttgtgat

SEQ ID NO: 309635 - DNA, 415 bp, Zea mays
tcgcctcacgcgtccgtcaacgcgtccattgaggtgtgggctgcagagcatggagctcttcaccttcaagaacaaagttactaagctcatggttgaaggagatatgcacagacgctacatgactgagcaagattactactgagaggaactatacacggtggatattgggcagactgaccatgctgtggagttctattcaggaacagaggaccaggtcatcacagccattgcaactattatgatggaatttgagaatggtctcaagaaactgcatgagcaaggtgctaggaagttctggattcacaacacgggcccacttagttgctagcctcagaacgtggacctcttcgggaaagacccaacccaactggacgagcttcactgtgtggagaagcacaaccgggccgcaaaggtt

SEQ ID NO: 309636 - DNA, 492 bp, Zea mays
tcggtctccgacaacctccgtgcgtggtggaaggagaaggtccgcttcgaccgcaacggaccggccgccattgccaagtaccaggccgacaacgccgtccctggcgccgagaacgagctcgcctcgggcgctgccagcccccattccttgcaggagctgcaggacactacgctgggctcactgctctcagcgcttatgcagcactgcgagcccccacagcggcgctacccgctcgagaagggcgttcctccaccgtggtggccaccagctcgagcgagtatgatgtggacatcatcgatgagtgcaagggggacgaggccggtaaccagaggacggcagtcactgacccaaccgcgttcaaccttggggccgctatcctaagcgacaagttcctcgtgccgacgccgatgaaggaggagaccgccgacgtggagttcatccagaagaggaacgccccccgctgcagccgagccagagctgatgctaaacaac

SEQ ID NO: 309637 - DNA, 471 bp, Zea mays
gggccaccagctttgaccgccgcctcccttcccctccgctactgctcctccccaccccactcccccgcaggagcggcggcggcggcggcggcggcgaggtcgtaccccacatcggcgagcggcggcggcaccgccggaggcaaaggcaagatgttcgggcgcgcgccgaagaagagcgacaacaccaagtactacgagatcctcggggtgcccaagtcggcgtcccaggacgatctcaagaaggcctaccgcaaggctgctatcaagaaccaccccgacaagggcggtgaccccgagaagttcaaggagctcgcacaagcctatgaggttttgagtgatccagagaaacgtgagatttatgatcagtatggtgaagatgcccttaaggaaggaatgggcggtggaggatcccatgttgatccatttgacatcttctcatcattttttggaccctcttttggaggaggtggt

SEQ ID NO: 309638 - DNA, 430 bp, Zea mays
gctttcttgtctgtcacaatgcccactacgttccatccaggttttctgattcatgctatcaaagcaaaacgttatagatattgaatatgttgttctggactgcctttgcttttctgacattttacatcgtaattagtagctacaaacctattaatttcgactattgcatcacggggattgcagaatacttctaatactcagtgcatgacatgaaacctgcagttgcggtcttaaaaaaaactgacatactgtaggcatgttttcaatatccaggttattgctgaaagcctgtctgaggaagagattggaggcctcaaggagttgttcaagatgattgatactgacaatagtgggactataacatttgatgagctgaaagatggcttaaaaagggtaggctccgaattaacagagaacgaaatccaggctc

SEQ ID NO: 309639 - DNA, 409 bp, Zea mays
ttctccccggcggatcgccgccgacggaagcgcgtccctcgatccagatccaggagatatgcctcgcaatgatgaccgctatgggaatacacgcttgtatgttgtaagattgtctccccgcacccgttctcgtgacctagaataccttttgagcaaatatgggaggtaagcatcacattatatgcacatagaactattctgaaactaaaagagcgctggcgtgctgctttttgttatgtggtcggacaccatttatgctctactaccttcgtttttatatatttgacgccatacaattgcacttttacatgccgtcgtcaaataaaaatgaacggagggagtagtatatatcatgagcacgtgatgttaactctgcatggttaaattttgtggtacacaactgcacatc

SEQ ID NO: 309640 - DNA, 430 bp, Zea mays
gcttattgtccgtgacgtaggccagtgggtggagcatgacgtgagggctctgggccgcgcggcctctgcatttattgcagagaggacacaccgtttgtccacccatctgacagacgatgtgcccccacgacatttattgtgtcctgtccattctgctggcaggcggcgccaaggccaccctgcagatggcgcacctgtccagttcgttgtcgaaacagtgcgcccgtgctgcgcggtgcactgtactcatcccttgtgcgagaagcttcccctgcacgccgaggctatgcaagatcttgggtgtcagggcgcaagaagatcgcaccagcagcaagtattagtagctacatctgctatgttcatggacccacatgttggggctcagtactcttgtacatgttcccctttagctataaaaaggggagacatg

SEQ ID NO: 309641 - DNA, 312 bp, Zea mays
attatgtatttatagtgctgattctaccataaataggcaaacaaattctaaagtattggaacatagaatacaaataactctgacgaatcttatcaagttcccttggatctgtttgcatttttgtcttatgagtgttaaaatcaagagaagtaattctagtaggagttactctcataggcattccttgacctgcacggcctgtgtttagtctttagtgcatagccatttagcatgtaactatccttgatgcttttaccgtgagctttcagaatatttatgctcttcaacttatgacatatgaagtggacacta

SEQ ID NO: 309642 - DNA, 421 bp, Zea mays
gtgacatgaagctatggccgttcaaggtcatcccagggcctggtgacaagcccatgattgtagtgaactacaagggcgaggagaagcagtttgctgctgaggagatctcctccatggtcctcatcaagatgaaggagattgctgaagcctaccttggttccaccatcaagaacgcagtggtgacagtgccggcctacttcaacgactcgcagaggcaggccaccaaggacgccggtgtcattgcgggcctcaatgtgatgcgtatcatcaacgagcccactgctgctgctattgcctacggtcttgacaagaaggccaccagctccggcgagaagaacgtgctcatcttcgaccttggtggtggcacgtttgatgtgtcgctcctcaccatcgaggagggcatcttcgaggtgaaggccac

SEQ ID NO: 309643 - DNA, 428 bp, Zea mays
tgcttcgggctgtgggaggcgggctctgtttctgactcatcggccgagggcgatggcggcggcggcggggaaggcgcgggcgatgagcctggcggcggcggtgcgtgtggtggcggcgacggcgcggccggcatcgagcgcagccgcggcggcgggtgtgggtgcgatggcgttgatcgtgcagggcgaggacacagccttcgggtcgctggagtggtgggcgtacgcgggcatctccttcttcctcgtgcttttcgccgggatcatgtccgggctcacactggggctcatgtcgctcggcctcgtcgagctggagatcctccaacgcagcggcactgacgccgagaaggctcaggctgctgccatccttccagttgttcaaaagcaacaccagcttcttgtcaccctgttgttgtgtaatgctgctg

SEQ ID NO: 309644 - DNA, 393 bp, Zea mays
tctgaaagtacacacgtctaccaacctctcaagctcaaccagcatatgaattttgaaataatctttgttcttgcaacttgcagctatggctacgacccttttggcctgggcaagaagccagaggacttcgccaagtaccaggcctacgagctgatccatgccagatgggccatgctcggtgccgctggcgctgtcatcccagaggcctgcaacaagttcggcgctaactgtggccctgaggctgtctggttcaaggtcctgatcaccacctctcagaatcatcacactacagaacgtagttttccaaagatttcacattttgtagctggtagatacaaagtagcaatatctgaatctgaaagtctgaacccaaagctcatggatgatgtgtgt

SEQ ID NO: 309645 - DNA, 445 bp, Zea mays
cccactcgtccgtgggcgtgcagtactcggttccagactacgtccacatatctccggaatgccaggacctcatctccaggatcttcgtcgccaacccgtccaccgtgagtagttccggcttcgtgatgtcgttcacgagcctgcctttgagcggatcgctgacatgcacagcatgacacgccgtgtgcagaggatcaccatgcccgagatacggagccacccttggttcctgaagaacctcccggccgacctggtggacgacagcgcgacgacgacgagcaagcagtacgaggagcccgagcagccgatgcagggcatggacgagatcatgcaagatcctgggcgaggccaccattccggcggcggggtcccgcgggctcaaccagttcctgaacgacggcctggacctcgacgacgacatggaggacctggactcggacgccga

SEQ ID NO: 309646 - DNA, 474 bp, Zea mays
cgttccaccagttcgccgagtgcatcacctgccacgcctggagcccggaccagtcgatgattgccttttgtccaaacaaccatgaagtacatatctataaattcttcacagacaagtgggagaaacttcatgttctgtcaaagcatgatcagatggtttcggggatagactggagtaaatcatccaacaaaatcgtaacagtttcacatgatagaaattcatatgtttggacacaagaaggatctgattgggtacctaccctggttattctaaagttaaatcgtgcagctttatgtgttcagtggagcccaaaagaaaacaagtttgccgtgggaagcggtgccaaatctgtgtgtatttgttactatgaacaagaaaataactggtggattagcaaggttatcaggaaaaaacatgaatcttctgtcactagtcttgcatggcatccaaacaatatatatcttgcaacatcgt

SEQ ID NO: 309647 - DNA, 450 bp, Zea mays
gcaactggtccagcactttcacgctcagctccagcaatggctgcctccaccatggcgatctcctccacggcgatggccggcacccccatcaaggtgggctccttcggcgagggccgcatcaccatgcgcaagaccgtgggcaagcccaaggtggcggcgtccggcagcccctggtacggccccgaccgcgtcaagtacctcggccccttctccggcgagcccccgagctacctcaccggcgagttccccggcgactacggctgggacaccgccgggctgtccgccgaccccgagaccttcgccaagaaccgcgagctgggggtgatccactcccgctgggccatgctcggcgcgctcggctgcgtcttccccgagctgctctcccgcacggcgtcaagttcggcaggccgtctggttaaggccggctccagattttagcggggcgggctg

SEQ ID NO: 309648 - DNA, 461 bp, Zea mays
tttacttttgggcggacgcgtgggcggacgcgtggggttgatttcatgagaagcttccgagtagaattcgatgagtattttgaggatgggatcatctcagaaattgagattggactaggggcttgtggagagctgcgatatccatcttatccagcaaaacatggctggaaataccctggcattggagaatttcagtgctatgacaggtacttacagaaaagtttgagaaaggctgcagaagcacgagggcataccatatgggcaagaggacctgacaatgctggccattataattctgaaccaaatctcactggatttttttgtgatggaggagattatgatagctactatggccgtatgttcctcagctggtactcccaggcattggtggatcacgcggaccgtgtactgatgttagcaaggactggctttgagggtacaaacattgctgctaaggtctc

SEQ ID NO: 309649 - DNA, 468 bp, Zea mays
tttcccacgcgtccgcccacgcgtccgcccacgcgtccgcccacgcgtccgcggacgcgtgggcgccggcgagccagcctaaccaatcgccaatgctcacctcgttgcttccaccgcccacagtcccgatctccaaaccctccgcgtcggcgtcgcccaagaccgccaagcccaggtccgccgtgctctccgcctccgccctcgccctcgcccccgcctcgacatccgattccgacgatgcgcccggcgggggcgagggcggcagcgtccgcctctcctcgctcatccgctccctctgcgccgcggggcgcacagcagaggccgcgcgggcgctgtccgcggcgggcggcggcgcgggcgtcgtcgcctacaacgccatggtggccggctactgccgcgcgggccagctcgaatccgcgcgccgccttgccgctgcggtccccgtcccgcccaacgcctacacctact

SEQ ID NO: 309650 - DNA, 424 bp, Zea mays
  unsure (1)..(424): unsure at all n locations
ctcatcgcgttcgggcttttactaccccttttaccaagtcctcctcgggttagggttccttagggttttgtggaggggcgatggcggcggctgatgtggagtaccgttgcttcgtctgcgggcttgcctgggccaccagcaacgagtcgttggagaatgccttcgcctcctacggcgagatcctcgactccaaggtcatcaccgaccggtagacggggaggtctcgcggcttcggcttcgttaccttctccttcgagaactccatgctcgacgctatcgagaacatgaacggcaaggagctcgacngccgtaacatcaccgataaccaggcccagtcccgtggcggtggctggtggcggcggtggctacggcggcggtcgctgtggcggcggctatcgtggcgggcgccatgacggcggttatg

SEQ ID NO: 309651 - DNA, 456 bp, Zea mays
tttcgctctcggcgacgactgggcgaccgccgccgccgctgccgctgcgccgcccttgtccaggtgcccaggtcttcgccggcgccttcgccaggtcttcgaagattcagggaatataagtaaaatgaggccagttttttgtgggaaccttgactatgatgttcgcatctcagaggttgagcgcctttttgggaagtatggaagggtggaacgagtggatctaaagacaggttagtctgttactctgttcattgttatgtcctcgaatttaattgtgatctataatagcaaaacaattgttgctcctgcagctatatgtagtttttggtcaaaggcagtcctctatttcattaagtgaattacatccagtgtcagcaactgcagctttgaatcattttctctctccaatttagatactgaagcattactgaatgtatatatatccatccataagac

SEQ ID NO: 309652 - DNA, 329 bp, Zea mays
gcgtacgcgtgggcgacccacgcgtccggggacgcgttcgttcacgcgtccgtccacgcctccgaggagccctgctccagcgtcaaggataggattgtttacagcatgataatgaacgcataggataaagggctgattactccaggtgtgagtgttctgatagaaccaactagtggcaacacaggcataggactggcctttatggctgctgccaagggctacaaacgtacactcacaatgtctgtcttcatgagcatggacaggaggatcatattgaaggcttttggtgctgaacttgtagcaggggacgatctagaaccttttgcgat

SEQ ID NO: 309653 - DNA, 329 bp, Zea mays
cccacgcgtccgtggagatctccaacgccgactcggcgacagatgacgaccggagccgggacctggaccgggcggcgctgatgcggcagctggacgagacgcagcagagctggctcctggccgggcccggcgaccaggcgggcaagaagaagaagaggtacgtcgacctgggctgcgtcgtcgtcgaccgcaagatcttcatgtggaccgtcggcaccatcctcggctcgggcgtcttcatcggcttcatatgatggatcgtaaggctcgtcccgcacaagcgcccgtcgtcgtcgttcgccgaccagtacacgcaggcgctgcacaag

SEQ ID NO: 309654 - DNA, 460 bp, Zea mays
  unsure (1)..(460): unsure at all n locations
cagtattattggagttgatttcaaaatccgcactgttgagcaaggtgtgaagacaataaagctgcagatttgggatactgctggccaacaagagcgttaggaccggcacaagcagaagcagctactaccgtggggctcatggcatattgttgtgacacttacccacggggtacgcgggtatgggtactgcacatccgaatccgtacctgctttacccgatgggtagaggtttccgcctaattgcgtatccgtgggttgtccggatgcagggataggaggcaagcccatccatggcctttcataggcctccagttgccactttactcgactgagcccatgggctagctctcacccgtggtcatgtaggatgtgtttggtgggatgtataagaggngatggggagtgcacatgagccgtctccggagccgccacgacgctgacgaccgtggctggaacccgc

SEQ ID NO: 309655 - DNA, 388 bp, Zea mays
gccgccgccgtttacgactaccccgagcgcgccttcgcgggggtgcgcgccttcaacgaactccccgcccacgagcgcgcgccgcactacagccgcgccgtggacggcggggtcaactactcctccaacgtcgacctgtacaactcccccgcggccagctggcgcgacaccatccagatcctgctgggccccaaccgccacccggacctcgccgaccggatcccggccgcctgccgcgccgaggtgctcgagggggaggtccgcgccaccgccgtcgcccgcgccttgctcaggctcctctcccaggggctcggcctccgccccgaggcgctggaggacgcgtcctgcgccgacgggaagctcatggtgtgccactactacccgcact

SEQ ID NO: 309656 - DNA, 454 bp, Zea mays
cctacgcgtccgcccacgcgtccgcccacgcgtccgatcgcgagggccgcccttttttttttttttttttttttttctatacattgccagccggcaatcacaattcacgcatgactatagtatacacgagtctatctaaactcttcgagctggagtcgacactttacggtgacagcttgaagttatcgagtagagccttgctggcaaggtctcgtgagaagaaggtcccgtaaaactcggacatggtgaagttcctgtacttgggcgggttctctgaagagaccagctctggcagcggcccatagaacaccgagtcccctctcttcccagggctgaagaagatgccgatggaaaccctgggttcttaacgcgtgttcatgaccacccgatgctcgagcttctgtactcgtcatagacattatctgaagagggtcccgacgttgatgacgagcgc

SEQ ID NO: 309657 - DNA, 363 bp, Zea mays
gagcagactgcaatgaatcatatcctcaagaggataaaaaaactattacctcctgtgcagggcatcagcgacaggaaaagagagatgaatgaacgaacctaatccatccatcagcagcgtaaccaaatcaggcacaggtttgagtattaaaccagtggaagtgatgagctgggagcaggcctaacccttttccaccaactctacaagagctcccgcgatccagtcaagtgccctataaaatccagccccgcttggcttcacccacccttgggctcgcaatcgcagcaacgatggggagatcgccgtgctgcgagaaggcgcacacgaacaagggcgcgtggaccaaggaggaggacgaccgtc

SEQ ID NO: 309658 - DNA, 302 bp, Zea mays
aacacataatcggttgagtcgttgtaatagtaagaatccgtcactttctagatcctgagttctatgaacaactttatcttcctccacgcgtaatcataatgatactcagattctccctacaaccagattctcctcacagccagattttcagaaaagctgctcagaaaaaagttgaaccaaacaggccctagagctatggcttatttgaggtgatgtgtcaccatacatcacggaggtacctgccttccatctgcatgctctttacatagctctcggttttggagctatccaaagatctctgc

SEQ ID NO: 309659 - DNA, 458 bp, Zea mays
aaaaaagaaagaaaaggcgcatcgaaaaggcaaagagcgagctccctctacccgcgatccccgcacaccggccgccggcgttcgtcgccgccgcggatgagatgcgctccccctccggcggcggcagcgtggtggcccgcgcacgttcgtgaggggccctccgccacgcgcccaggttactgtggctccgagtccgagttcgctccccgcgcccgcgctatcgccgcggggcggagcggatcccccaacatgtggcttttctggcgcactaggaatcgcttctcccttgaggagctccggtatctaacagatcagctacaaaaggttcatgttgtcaatgaagctaataaggaatttgtgattgaagcattgcgatcaattgcggaacttatgatatacggtgaccagcatgatgctttgttttttgaatattttatggagaaacagatcatgggtga

SEQ ID NO: 309660 - DNA, 200 bp, Zea mays
tcggatttcagtcacctgcgccgccgcttcgttcgtgtggaggggagaagagaggaaatggcggcgaccgagggcgtgctcctggggatgggcaaccccctcctcgacatctccgccgtcgtctattaccccttccttacaaagtctgacatcacgctgaacaatgctatcctccctgcggtgaagccctcgctctatct

SEQ ID NO: 309661 - DNA, 424 bp, Zea mays
gagttgaatacagtagccaagattgattgatcttgtcaagcacaccggaatatttcactcgtcatgagtttaatacagtacaccatgaactctggctgctctgctctcgactgttgtaaataaccagaaaaggcaaggaaaaagaagagagctgtgcctaacgtcaaaacagcatccagtttgtatgttcccatcagtcatcaggaaaggataaccataacgaacaaaacagcttctgtgaaaacgcagtcaaacgataacaagtatatcaggaagttcctttatttaaaacgcgctgctaatgcaggctacgtgttacaaatttattattattcaaaaccacggccatgtggataccacgtcgatgcagtttttttggccccataaacaagtaggagcagatgagatcgagttgaggcacgcc

SEQ ID NO: 309662 - DNA, 505 bp, Zea mays
  unsure (1)..(505): unsure at all n locations
gatataaattgtggggaaaagaacgccgggaatgggcaagcagcagcaggcgccaccggctaccaagcctcccacgcccaagccgaccccgccaacgtacaccccttcgccaaagcctccgacacccaagccgaccccgccgacgtacaccccttctcccaagcctccgacgcccaagccgaccccgccgacgtacactccaagccccaaacctccgacgcccaagccgaccccaccgacgtacaccccttcccccaagcctccgacacctaagccgaccccgcctacgtacactccaagccctaagccaccggctaccaagcctcccacgcccaagcctccgacacctaagccgaccccgccgacgtacactccaagccccaaacctncgacgcccaagccgaccccaccgacgtacaccccttccccaaagccttcgacgcccaagccgaccccaccgacgtacaccccttccccaaagcctccgacacccaagccgacccca

SEQ ID NO: 309663 - DNA, 172 bp, Zea mays
tcgtagaaattacccaccattgccattataatctaccgaatcccgccgcgagaagcctctgccgcctggcacaggatcccgccgcctggcactccgacgcgtcccgcgcgcagcagattcccgcacggcacacgatcccgccgccagaagcctccgcgcggtcgacggggac

SEQ ID NO: 309664 - DNA, 185 bp, Zea mays
tcgccctcgcgtccgcgtttgcctcttctccctcttgccggtcccgaataaagagcagcagcgcaagaggtcggtagagcgagaagaaggcaatggcggccgagagcttcctgttcacctcggagtccgtgaacgaggggcaccccgacaagctgtgctaccaggtgtcggacgccgtgcttgac

SEQ ID NO: 309665 - DNA, 474 bp, Zea mays
tcgcccacgcgtccgagcagctaccctcgcaaaaaccctagctttacctccccacaagcgccttcaagatgaagctggtcaggttcttgatgaagctgaacaacgaaacggtgaccatcgagcttaagaacggcaccgccgtacacggaaccattaccggttatgcggtcgattatgggtcacatatacggacagctatcttcagatagttaagtgattatcatgttgcttagaacttaccatatgacactgttattaacacctaagattagagaatatttgtggcattttttggtgagtaaaaaaaattgtccatctaatttgagctcttacaagaactgcacacatggatgtgatcaaaccagcacaaaactccacaaatcttagatgttgcatctttggtagcatcattgggtactccataccggtgtagctaaacatggccatgcctgccaacatgcaaaaatctgaagc

SEQ ID NO: 309666 - DNA, 501 bp, Zea mays
tccacgcgtccgcccacgcgtccgcccacgcgtccgggaggcggtcttacctccacaggtcgagtttttttattagtcacatagcattttctcgacagttttacagttttaacttcaataaatatttctaagtatgaatctttgaggctgtagattgaacactcttgattcattccttaccacttgataaaaactggcaatataacaattgcatatgtcgcacacttataggagcaagagcaatcttatttactatgttatatatttatcttccgtacttcacttgaaaatcatttttcaatcctaaaataatatttgttgcaacattgtgagtagttttgagctgataaaatacaagtatgtgatttggtttgcatctttgtatgatgtgctctgagttggctaattataattgtatgctttgggtgggggattcatctatatttaatacagggacatacttctgcataggttgtcttaaaatgcattacgtagagcatg

SEQ ID NO: 309667 - DNA, 488 bp, Zea mays
tcctcgcgtccggccagctagagccaaccagaagagcttgcagttactgagagtgtgtgtgagagagaggatgggtggcagcggcagggctgctctgctgctggccctggtggtggtggccgtgagcctggccgtggagatccaggccgacgccgggtacggttacggcggcgggtacaccccgacggcgacgccgggcaccccgaccccgaagcccgaggagccccccacccaggggcccaagcccggcaagccgccccagggagcacacaccccgccaagggtgccgggccccaaccgggaaaccccgcccagggagcacaagccgacgccgcccacgtacaccccgagccccaaacccacgccgccgacgtacactcccaccccgacgccccccaagccgacgccacccacatacactcccgcccctacgccccacaaacccacaccaaaacccactcccactcctgcgacgtacaccccgaccc

SEQ ID NO: 309668 - DNA, 232 bp, Zea mays
tcctcgcgtccgtgactgaccacactagcgcagcgcgcacaggagcaaaggggggcatcctctatcgcgcgcgcgccatggccaccaggccgggccctttgactgaatggccatggcaaaggcttggaaacttcaagtacttggtgatggctaccgtggcggtacgctgcttcctgtcttggtacagcgatggtgtcaagggcaccatctttttcacccaagagggagatgg

SEQ ID NO: 309669 - DNA, 278 bp, Zea mays
ttatttcaaatgaagcaaaccaatgtttaaatgttctattggcaaaatacgaccctttcagatgtcttgatgttattgtacctctattggtcagtgatgatgagaagatacttgttgtgtgtataaactgcttgacaaagtttgttgggcgccttctccaagaggaattgattgataaatagcttacatttatgccagctttatttgatgcttttaacatcttatgtcctgattgttttaagattttttgtgttttgtttgattgtctctctctttat

SEQ ID NO: 309670 - DNA, 431 bp, Zea mays
gtggcctgctgtgcgcgtgctctacctgacctccgcccctgtgtctactctgtctctctctctctcatcggaatgcaagctgtgtagctgggagtatttatgagtcctgtgaccacctcaagagaggacagtgcaccaggatatgggcctttataaatgcaggagaatgacaatatgagatgcgagttgagaatgtttacaagcactacaaccaggtgcagcctagaattcaggccaggatatgagctctctgaggaagactggggcaacggggctcgacgtacgaggaattaccagcagggatcgttaaagagacctgaagcctttctaggagaagccagctgttccaggatattgatacagagcttccagggtaacgacactacatagttgatgaagcgaggaacagtaaaggagcagctagcagttga

SEQ ID NO: 309671 - DNA, 487 bp, Zea mays
tttatctttggcccagatgtgaggtcactcgtgctcacagtatgtttgattgtagtcccagtgatcttctttgctgccaccgtttgtccacaacttggtcatgagttccacagccaaattggaggttgggtggcatctgtggctgtcatctttacagcatatattcttattgttctacttatcacatctggccgtgatcctggaattgttcctcgaaacactcatcccccagagcctgaagacatcgatgaatcctccaacttaccagattgcccgggtggtcaacaaggttcgacaggtttaccacctacccgggatgttcttgtcaatggtgtttcagtcaaggtcaaatattgccatacatgcatgctttatcgtccgccaaggtgctcccattgctcaatctgcaacaactgtgtagaacgttttgatcaccactgtccttgggtaggccagtgcattggcaagaggaattaccgattcttct

SEQ ID NO: 309672 - DNA, 171 bp, Zea mays
cttacgcgttttcggacgcgtgtgcttgctatggttactgatgaatccaagagctctacgccatcgacacctaagccgaccccgccgacgtacacttcaagccataaacctccgttgactaagttgacgcccaccgacgtacacccttttcttcatgtctcctacacctaa

SEQ ID NO: 309673 - DNA, 514 bp, Zea mays
  unsure (1)..(514): unsure at all n locations
ttataggtggaccgcagcggcgcctacgtggccaggcaggccgccaagagcatcgtggccagcggcctcgcccgccgctgcctcgtgcaggtgtcgtacgccatcggcgtgccggagcccctgtccgtgttcgtcgactcgtacggcaccggcacgatccccgacaaggagatcctcaagatcgtgaaggagaacttcgacttcaggcccgggatgatcagcatcaacctcgacctgaagaagggcggcaacaggttcatcaagaccgccgcttacggccatttcggccgtgacgacgccgacttcacctgggaggtggtgaagcccctcaagttcgacaaggcatcggcttaaggttgggagtgttcactgtggacatgaggactaccttcctctggctctgctgntacctgcaagcattgctgctgctggatgtgtgtgtttgatcagtgactggcttgtgctccatagaagatgaacggagagaaagatgatgaagggctttggcaattcg

SEQ ID NO: 309674 - DNA, 493 bp, Zea mays
cttacgcgtttgcggacgcgtgggcggacgcgtgggcggacgcgtgggatcgtgggtctgtgggttctctccggagttggaagcagctgtgacttcctcacgttgacatacattgccgtcctgatgctccacacggtgccaatcttgtacgacaagtaccaggacaaggtggaccatttcgctggaagggcacacaccgaggccctcaagcagtacaaggtgctggatgccaaggtcctgagcaaaatccccaggggtgcggtcaaatccaagaagcagaactagttaggataagccgcagattgtgaatgcccgtatcctgagtatcgggcttgtggtttgcatggcatatgtaaatctgtctgttggcttcagcttggttcttctgcgactactttgttgatgttattctagtcctatgtatgtcactgtgtacatgacagagatgttcggatgctacgtctaggctactgctgtgctgtagcttggaaat

SEQ ID NO: 309675 - DNA, 524 bp, Zea mays
  unsure (1)..(524): unsure at all n locations
acacttatggtgaactaaggaccgctactgaaaattttagttctgctaatcttcttggtgaagggggatatggatcagtttataagaaaaattcaccttctggcagggtaaattagttgatggcagtgtggtggcaattaaacaactatctgaaacatctcgccaagggaagaaggaattcgtagctgaaatagaaactatttcccgagtgcagcaccgtaatcttgtgaagttgtttggtttttgccttgagggaaataaaccacttttggtttatgagtacatggagagtggaagccttgataaagcattgtttggaaatggaagattgaacttgaattggtcaacacgatataaaatatgcttggggattgcaagaggcttagcttatctccacgaagagtctagcatccgcattgtgcatagggacataaaggccagcaatgtattacttgatgccactttgaaccctaagatttcngatttcgggctcgccaaactttatgacgataaaaagacacatg

SEQ ID NO: 309676 - DNA, 500 bp, Zea mays
tctttacgcgtccggtgattaccaccgagaactcaacatggtggtggttggattctctagtggagtatttgggctgtaccagatgccagactttgtgtgcctccatctgttgtcaatatcaagggagaagatcaccactgctattttcaacagttcggggagttggcttgtctttggatgtgccaaacttgggcagcttctggtgtgggagtggcggtcagagagctacattttgaaacagcagggacactactttgatgtgaattgcatcgcatactcaccagattctcagatattggccactggggctgatgataacaaagtcaaggtctggacagtttcatctgggttctgtttcataacattttcggagcatacaaatgctgtaactgcggttcattttatggccaataaccattctcttctaagtgcctcccttgatgggactattccagcatgggatttggttcgctatcgcaacttaggacatttacacccct

SEQ ID NO: 309677 - DNA, 499 bp, Zea mays
ttttacgcgtccggctcaaccatgctcgttgtcacaaaggggaccaagttatggttatcgaggtagagtgatgcttgcttttgaagataatggatcctcaaaaattggagtccggtttgacaagcagatccctgatggtaatgatcttggtggtttgtgcgaggaagatcatggcttcttctgctctgctgaattactgcgcccagacttttctgctggtgaagaagttgagaggctagctatgaccgagttaatagaggtcatttcagaagagaacaaatctggacctctgatagtgttacttaaggatgtcgagaaatcattcacgggagttacagagtcactatcatctttgaggagcaaacttgaatcgcttcccctggtgttcttatataggatcccaccccagatggacagccgcaaagagaaggcacatcttggaggttttcttttacgaagtttgcagtagtagccagactcttttgaccttttcccgata

SEQ ID NO: 309678 - DNA, 515 bp, Zea mays
ctctttttctactcaggtgcttttgaatggctcgcctggtaatcatatttttcatcggagaggtcttcgccagggagatcctctttctcccatgttatttgtgatggttatggatgtgcttagcagcttgttccgggttgctgaaaatagaggcttgttgcagggccttgggggagctgatgttcgcagtcgagtctccatctatgcggatgatgtggtccttttcataaagccaattgaagcagatctgaattgtgctaagataatactaaactgttttggttcggcttctggtctggtaaccaatatgctcaagagcagtgctattccaattagatgtgatggtcagcaggtgcttgctggttgcagtgtgctgcattgcagtcccgctgcgtttccttgcaggtatctggggctgcccatttctgataaaaattgaggaaatgtgaccttacgttatggattgagaagattgcaaatcgactgcctaactggaaggctcggttgctcaacct

SEQ ID NO: 309679 - DNA, 429 bp, Zea mays
gtcttggggttggtccttcatggagaggcctggcctgctgctgatggccgcattcgtgatagctcagctgatcgcgtctgtgcttgctgccatggtgagctgggagcttgctggcatcaaaggcatcgggtggcgttggaccggcgtgatctggctgtacaacttggttgtgtacctgctgctggacccgatcaagttcgcggtgcggtacgggctgagcggcaaggcctggaacctggtgatcgaccacaaggtggccttcacgaaccgcaaggactttgggaaggaggcccgggaggcggcatgggcgcacgagcagcgcacactgcatgggctggagagcgccgggacccctggggagaaagcggcgtccgtggaactggggcagatggcggaggacgcccggcggcgcgcggagatcgccaggct

SEQ ID NO: 309680 - DNA, 359 bp, Zea mays
ctttcatgaactcatacagtatggcctccgtgtacggctggcactgggtgattctgatgcagggaactgagcgactctaactagtgacatactccaggatcccaagctgccaacaataaccgcaaggaatgcttgctaccaccatgacgggtaggaggcgggaaggacccaagggcacagggcactaacttttgagaccttgaggggagctgggcacgatgtccgtctatatctagcgaaacaggacctcacactaatacaaatcgtttttgactggaagcccaatgcctgtgcaatccatcacacagcaggaacatgtaaaccacggagcagcaactgattcacgagatgaaagaaca

SEQ ID NO: 309681 - DNA, 471 bp, Zea mays
ttgtctccctgtcgcactcgtgtgccggccggcgacggcgatgatggcgactggcccatcgctcgccggggtatactccgctagagccacccgcctcgtgcctctacgcgccggcgcacgggcgccctgcgccggtgccgccgcggccgagcctgcggccgagcacgtgcggaggctcgtggcggagttcgacccggcggtcccgctggactccgcggtcacgccgccgagcgggtggtacaccgacccggattttctccagctcgagatcgacagcgtcttcttccgcgggtggcaggctgtcgcaggcgtgctagtgatccattcccatcactggatgagtggatgggaccgagagagcgagagggtcgggtttttgcactcgagacttatgcttccatggctttcgtctttcgacacgatttaggtggcgctcggtcagacgttgttaagagaatggtcacatatggc

SEQ ID NO: 309682 - DNA, 427 bp, Zea mays
cttatatataggcgtcttcgtactcgcctacctccgcggatcaaacctttcccccttctcccaattcccgccggcgttccatcccgtaacgcgacaccatgagggagtgcatttcgatccacatcggccaggccggtatccaggtcggaaacgcgtgctgggagctgtactgccttgagcatggcattcaggctgacggccagatgcccggtgacaagaccattgggggaggtgatgatgctttcaacaccttcttcagtgagactggtgctgggaagcacgagccccgtgctgtttttgttgaccttgaacccactgtcatcgatgaggtgaggactggcacctaccgccagctttttcaccctgagcagctcatcactgggaaggtggacgcaggcaacaactttggccggggtcactacaccat

SEQ ID NO: 309683 - DNA, 553 bp, Zea mays
ctgctacccctgcccgtgccggaacggaattcccgacccaacccacgcgtttgctttgtcccccaaagcccattcccctctccgagcgtatagtgatgtatctccaagccgggacgcgacccacgacgcttgtccggatcggaagatggtcaacgactccctggataagtatgtggagaaggcggccgcgtggccccccacatcgagggggtgggcgggccggggatgcaaccaccaccgactagtcgtgccgtcctccatgtcgcgcatccccaagggccgctgctccgaagggaactctgattctgatagtgaagcatcggatgttagcggctctgatggataagacacctcatggatttcatggtattgcaacttaccagggaatgagttcttctgtgaagtcaacgatgattatatgtaagacgacttcaacctttgcggtctcagcagccaatttccttattatgattatgctctcgatctgattgtagatatcgagccatctcatggtgatatgttcactgaggaacaaaatgagctcgtagaatca

SEQ ID NO: 309684 - DNA, 362 bp, Zea mays
tcggtagagcttgcagttactgagagtgtgtgtgagagagaggatgggtggcagacaccggtttgcccaagcctccgacacctaagccgaccccgcctacgtacactccaagccctaagccaccggctaccaagcctaccacgcccaaaggcgacccgagcagcgacaccccgtgactaaagtcatggagaaccgaaagcagccggatgatgtgccaacctattcccaagcctgcgacgcccaagccgaccccgacaacatacactgcaagctccaaggcttccacacacccgacgtccaaggaggaccccacggaggaacaccctttgccaaaggcttcggaggccaaagcggaccccacg

SEQ ID NO: 309685 - DNA, 481 bp, Zea mays
gaagagcttgcagttactgagagtgtgtgtgagagagaggatgggtggcagcggcagggctgctctgctgctggccctggtggtggtggccgtgagcctggccgtggagatccaggccgacgccgggtacggttacggcggcgggtacaccccgacgccgacgccggccaccccgaccccgaagcccgagaagccccccaccaaggggccgaagccggacaagccgcccaaggagcacaagccgcccaaggagcacgggcccaagccggagaagccgcccaaggagcacaagccgacgccgcccacgtacaccccgagccccaaacccacgccgtcgacgtacactcccaccccgacgccccccaagccgacgccacccacatacactcccgcccctccgcccacaaacccacaccaaaacccactgccactcctgcgacgtacaccccgaccccaagcctacgacacctatgccgacccc

SEQ ID NO: 309686 - DNA, 391 bp, Zea mays
ttcggtagagcttgcagttactgagagtgtgtgtgagagagaggatgggtggcagacaccggtttccccaagccttcgacacctaagccgaccccgcctacgtacactccaagccctaagccaccggctaccaagcctaccacgcccaaggccgaccccgagcgacgacaccccgtgactaaagtcttggagaaccgacagcagccggatgatgtgccacagcatgctcatgcggtcctccttgcatgctgaccttaagaagaaagctgaaacacttgacaggttctgcaagccgatcatgacgaaaccgaagccagttcctaagccacagactcggcctccggaagaaacccaagctcctgagcctaagacaccggaccagaagcgacca

SEQ ID NO: 309687 - DNA, 611 bp, Zea mays
  unsure (1)..(611): unsure at all n locations
cgcctcccctgacggtaccggacctggaatggccgacccacgccacgcgtttggtttgaaccggcacctgagaaggccaataggccctctctggttgccggccgctgatgccgagaagccacccgcacccaaggcacaggctgtgggttggccaccagtccggtcataccgcaggaacgtcatgaccgttcagtctgtgaagagcaagaaggaagaggagcctgagaagcagcagtccgctgccaacgccggcggcaacggctccgccttcgtgaaggtcagcatggacggcgcgccctacctgcgcaaggtggacctgaagatgtacaacagctacacggaactctccgttgctctgaagaagatgttcagcaccttcaccacatccgggaacaacatgaatgagggaaaactggttgatccggtcagcggtgctgatgtggtcactacttacgaagacaaggatggcgactggatgctcgttggcgacgtcccgtgggagatgtttgtcgagtcatgcaggcgtctgaggatcatgaagagttctgaagccataggtcttgcaccaagaacgaatgacangtgcatgaacaggagctgaagaggataca

SEQ ID NO: 309688 - DNA, 608 bp, Zea mays
  unsure (1)..(608): unsure at all n locations
gccgcttgctgttctcccgatgtggagtccgcgcggccgtccttcaggatgtgcgtccagtctgtctcacctgcatgatgtcagccngtccgctcgctcgtccgatatatggacctgctgtcagcccggtcgattcaagcctccggccgccctggatttggcctccgccgctcccgattcggcgctgccaccctgaaacagcgccgcccctttcccttcccctatgccctatgccctcttgctgcttctcacctaggcgacggggacgccttggatccttcgggcgcctggacgcctaggcgacgcctttaaaacaagggtcttctctgtattaaatattttctgatgtacagtagctaccttgttaattcatgcctccagcatgattctccgttgtgctccatctgtttgttgcttgaccttgcgccttgttattctgccatttggttgaggatagattaatcctcaattgtctgacaattgttcacgtctaatttaggttttttcggcatttgggtttgttcacaagatagctacttttgagaaagcagctggttccaggcacttatccagatactgatgccccactgctcttgagctaaaactta

SEQ ID NO: 309689 - DNA, 527 bp, Zea mays
tttactcgtccgctcgattgaacaaattggagcggcactacactcctccacgcctccacctccagcctcccactgatctggcctctctcgaggtgagcgcgcctgaatctatggattcgatgtgaagtcccaaagggtagcttttagggagggggaatgatgagatgttggaagttcacaagttgtgtctttcttaaaggctggtaaccttaatcctagatcaatatgagaaggggctacagttacagtccttcaccaccaaggggctacaggagaagggcgcgcagtccaagtcctcatgatcattatggtggtcgtggtagggatctcccaaccagtcttctggtcaggaatctccgtcgggactgcaggccagaagacctccgtcgcccatttggacagtttggtcgagttaaagatatatatctctcaagagattattacactgtggatccccgagggtttgggtttgtccagtattatgatcctgctgatgctgctgatgccgagtactatatggatgggca

SEQ ID NO: 309690 - DNA, 531 bp, Zea mays
tcgcttacgcgtccgcggacgcgtgggtgcgctgcgtcgttccagatttggggaaggaatccggcaccgagattcgagtcgaaaagatccgcggtatcgcttgaccttcaaatacttcggcaacgtcgccggttcaggacatcatttgctagatggcgcgtaccaagcagaccgctcgcaagtccactggaggaaaggctcctaggaagcaactcgctacaaaggcagcccggaagtctgcacccacaactggaggagtgaagaagcctcaccgttaccgcccagggactgttgctcttcgtgagatccgcaagtaccagaagagcactgagttgctgattaggaagctgccgttccagaggcttgtcagggagattgctcaggatttcaagacggatctgcgcttccagagccatgccgtgcttgctttgcaggaggcagcagaggcctacctggttggtctcttcgaagataccaatctgtgcgcgatccatgccaagcgcgtgaccatcatgcccaatgacattcagc

SEQ ID NO: 309691 - DNA, 485 bp, Zea mays
cacccctgacgcttgggtccctctctgcctcatgacctactccgcctgcgcctgcgagctgtgctgtgctgtgctgcgcaacggggagatccaatccacagaacaggatgcagtccaagcaccgggtcttcgcggaggacctgctcctggcggcggcagcggagggcgaggaccacttcgaccgggtgcccgactccctggtgctcctcatcttcaacaagctggccgacgcgcggtcgctgggccgctgctccgcggtgtcgcgccgcttcagcgcgctggtcccgctcgtggacgacgcctgcctgcgcatcgaccgcgtgatccccgccgacgccgccgacgagtgggcgccgcgcccgcgcgccgcgctctcgcacctgctcaagtccgtgctgctcgccgtgctcaagcccttcgcgcactgcgatgccaagttcgcgtcgccgcataagcacgcgcaacagcagcagcagcagcaccac

SEQ ID NO: 309692 - DNA, 424 bp, Zea mays
gttcgttttgccaccagcttggaccgccggctgcctggccctacggtactgctcctccccaccccactcccccgcaggagcggcggcggcggccgcggcggcaaaggtcgaccccacatcggcgagcggcggcggcaccgccggaggcaaaggcaagatgttcgggcgcgcgccgaagaagagcgacaacaccaagtactacgagatcctgggggtgcccaagtcggcgtcccaggacgatctcaagaaggcctaccgcagggctgctatcaagaaccaccccgacaagggcggtgaccccgagaagttgaaggagctggcacaaggctatgaggttttgagtgatcccgagaaacccgagatttatgatcagtatggggaagatgcccttaaggaaggaatgggcggcggaggatcccatgtt

SEQ ID NO: 309693 - DNA, 489 bp, Zea mays
cacgcgtttacttttgggcggacgcgagggcggacgcctgggccatggtactaccgagtgccgagcgcacacacgaatcgccgcggacctgtgccggatgggggcgaagagctgggattccgacgaggaacgctacggatgcaagccccatactgatggtatctacattattaaccttggaaagacgtgggacacggtacacttggtcctaacggaaatggtcgacattgctaatgctcatgatattattgtgcagtctggtcagctctatgttcagagggctgcactcaagtttgagcaatacactggtgcccatgccattgctggcaggcacactactggtgcattcaccaaccagttgaaaacctgcttgagagagccacgccttcttatgctgactgacccgaggactgatcatcagcccattaaggagaaatgtgcttggaaacattcccaccatcggcttatgtgatactggttcccctatgc

SEQ ID NO: 309694 - DNA, 297 bp, Zea mays
cgggtcatgttttctaacagtcccttccattgctatcattgggagagagattacaatgtcagctgtgagagaatgggccgcatctcagaatagtgaagctcttgaggctgttgcagttaacaacttagggaagcggcagacacagacatacatgacacactctgctctgctttctcgaccgcagagacccatgtgctcctgctccaggtgcttttgttgaagcggatcctggttaggataaatttacgctgtactcttccttacgatccttactgctctcctttcctttttttacct

SEQ ID NO: 309695 - DNA, 216 bp, Zea mays
ggggaaaaacacacggagagagaatcctggcttaaagaataaccgggggtgagtagatgttacaaccaatcgggcaatgcttcttggaccttatatatgcattattttttcccctaatattatattttcattaaacctcctgtgaagggactgactgacttactgactttatacaaaggctgcaacggcctcagaggaggccatcagccgggatca

SEQ ID NO: 309696 - DNA, 499 bp, Zea mays
ttcacgcgtccgcccacgcgtccgtggcaagaccatcaccttggaggtggagagctctgacaccattgacaatgtgaaggccaagatccaggacaaggagggcattcccccagaccagcagcgtctgatctttgcgggcaagcagctggaggatggccgcactctcgcggactacaacatccagaaggagagcacccttcaccttgttctccgcctcagaggtggtatgcagatctttgtaaagaccctgactggaaaaaccataaccctggaggttgagagctcggacaccatcgacaatgtgaaggcgaagatccaggacaaggagggcatccccccggaccagcagcgtctgatcttcgccggcaaacagctggaggatggccgcaccctagcagactacaacatccaaaaggagagcaccctccaccttgtgctccgtctccgtggtggtcagtaagtcatgggtcgtttaagctgccgatgtgcctgcgtcgtc

SEQ ID NO: 309697 - DNA, 267 bp, Zea mays
accgttcgtttaaagccaaataagtaaggggggttgcaggcaggaaggcttaaggcgataacttcttatactgtccagttgctactggtattcaagatgatgacatagtgcattttcagatgcattgggcaaagggtgagccagttgttgtttctgatgtccttcagttaacctctggtctgagttgggagccaatggtaatgtggcggccttgcgggaaagaacccaagggcaagccaaagatgagcaatttgctggttgggccaa

SEQ ID NO: 309698 - DNA, 448 bp, Zea mays
tccgaactaccaaggggctcaggcgagacctagcgcaaggccgccagactgcaaaagccgcccatgctataatccgttgctggccagggcgagtcggctgagatcacataaacaatggagaaggatgttgatgtgcttggcagcaacgagggtgtcaagggcatcctcttcttcacctacgagggagaaggccctaccactgccactggaagtgtttctgggctcaagcctggcctccatgggttgcatgtgcatgcacttggggacaccaacaatggatgcatgtaaactggaccacactacaatcctgagagcaaggaacatggtgcaccaagagatgaaaaccgacatgcggtgatcttggaaatgtgacagcttgagcaaacggttttgaaaacattaatgttaacgacagccagatcccactgactgggtcaaacataattat

SEQ ID NO: 309699 - DNA, 447 bp, Zea mays
gctgggtcgaagaaacttcaacacacaacatacgtatacagtcagctgctgcagtacagtaggagctagatcgagctagcatggcggagaaggcgtgggtgttcgccgcggtactgatgatgtgcgctggtgtaggccttggagctgactaccacgacggcagcagtagtgccggtagtatggatgctgctggcagccgccttattagccgctggacactgatctcgcccaactaccgcggcgccctggcaaaggccatcctcttcttcgaggggcagcggtcggggcggctgccggcaaaccagagagtcaggtggcgcggggactcggcgctcaccgacggccaacccgaaaacgtgaacttgacgggtggctactacgacgccggagacaacgtcaagttcggtttcccgatggcgttcagcgtcaccctcctgagctggagcg

SEQ ID NO: 309700 - DNA, 488 bp, Zea mays
  unsure (1)..(488): unsure at all n locations
aattgatggtggcaacaactgcctgtacttggacaagaagttagagaccacagcaagtatcctgcgctttttcacagatatcttctatttactccatatactgtttcagttcagaacaggctttattgctccctcttctagagtgttcggtcggggtgccttggttaaggacacatttgcaatagcaaagcgatatctatcaacattgttcctggtggatttcttagcggttctgcccctccctcaggtgtttgtgttggtggtgctgcctaagctccaaggtcctgaagttatgaaggcaaaaattgtactgttggttattattatttgtcaatatgtgcctcgactgctccgaataataccactttaccttcaaatcacgagatctgctggcatacttacagagacagcatggnctggtgctgctttcaaccttataatttatatgcttgccagtcatggctttggaagctttttgtacattcttt

SEQ ID NO: 309701 - DNA, 520 bp, Zea mays
  unsure (1)..(520): unsure at all n locations
tcgtggacgcgtgggtcctcacctcacacactctcttcttctctccttcgttctccctcgcaaagtcagggtcactgaaaggagcggaagagcccaagtagttcttcgccaccggtaccgcatcgatcatcatggtgttctcctcgctcccgatcttcctagaccctcccaattggggccagatgcagatgcagatgcagccaccgctccagtgtctcctcggcagcggcggtggcagcgaccaccaccacctcatgcctcctccgtccggcctggcgccgctgccgggaggtcctgctgacacagcggcgagcgctccggcgggaggcgtctcgtccacctcggtctcggtgcaagccgcggcgggagcggnggcaggggcgcagcctccccggtggtgtcatggcggaacgcgcccggtcgcgcgcgtgccgctgccggagcccgcacgctacgatgcccgcgctgtgactcgaccaacaccaagttctgctacttcaataactactcgctgtcgcag

SEQ ID NO: 309702 - DNA, 459 bp, Zea mays
tcgtaagatcaagccactgctggactacctgctggcgctcaggtaccagaacactaagctgctcatcagcgacaccctcctcgacacggtgggcaagcttcaggccgcgctgctcctcgcccaggccttcgtctccgagcagcacccggacacgccgttccagcagatggcgcacaggttccacgagtggggactggagaaaggatggggcgacaccgccggggcgtgcggccagacgctgggcttcctctccgagatgctccaggcgccggaccctgtcagcgtggacaggttcttcagcagggtgccgtcggtgttcgacgtcgtcatcttctccgtccatggctacttcgggcagcacaaggtcctggggatgcccgacaccggcggcaggtcgtgtacatcctggaccaagttagagcgcttgaggaggagcttcttcaaagaatcaagggcagg

SEQ ID NO: 309703 - DNA, 462 bp, Zea mays
ttgaagtctgctgatccagggtggaagtatggattttggccggatcttcaaaataaagataaggtggaatgcaccctatgtggtcaggttgttagtggagggataaagaggttaaatcaacatttggcaggggcatatggagatgcaaagttatgtcccaaggctagcagtggattaaggaagtagatgacaagttatttggaggcaaacaagagaaaaagaccaatgtttctagatgaagatgaagaacatgtgaagtgtggaggtggcagcagcagatggagcgaatgatacatctgctgtggagtctcaagcatccaaggtgcagcctagttctggtacagcagccaaaaaaagacaatcaaccttgcaatttaaggcaagtagtaaagcacagccaaagacagccaagtccatagttgagatgttgcggagaacaccaaggaggtggtggatgagaga

SEQ ID NO: 309704 - DNA, 407 bp, Zea mays
ttaccttactctgctgtttataataccgattcttctgcagaagcatctagaagagaagcccttttagtaaaacatgtgaaagaaaagctgagggagcagggttttgtagaggagagcatcaggacagattcatacttgaatttgaggtatgagggaactgatacagccataatggttagacagccagagcaaggatctggaaatgactatgctgatgagtttgaaaaattatttcagcaagagtatggcttcaaattgctaaacaggaaaatactcatatgtgatgtgagagttcagggtgttggtactacaaacatcctgcagcctcgtgaactgacgcaaatatcaaccaaacctgtgcaagaaagttcatgccggatttatttttcaagtggatggcaagatac

SEQ ID NO: 309705 - DNA, 530 bp, Zea mays
ttaaccggtccagcactttcacgctcagctccagcaatggctgcctccaccatggcgatctcctccacggcgatggccggcacccccatcaaggtgggctccttcggcgagggccgcatcaccatgcgcaagaccgtgggcaagcccaaggtggcggcgtccggcagcccctggtacggccccgaccgcgtcaagtacctcggccccttctccggcgagcccccgagctacctcaccggcgagttccccggcgactacggctgggacaccgccgggctgtccgccgaccccgagaccttcgccaagaaccgcgagctggaggtgatccactcccgctgggccatgctcggcgcgctcggctgcgtcttccccgagctgctctcccgcaacggcgtcaagttcggcgaggccgtctggttcaaggccggctcccagatcttcagcgagggcgggctggactacctcggcaaccccagcctgatccacgcgcagagcatcctcgccatctgggcctgccaggtcgtgctcat

SEQ ID NO: 309706 - DNA, 304 bp, Zea mays
tgttcaacccagctaggtcggcccagctgatcaggtcgtgcacctagtagggacctgctcgaccatcaatgtagagggtcgggaggtgtatgtatctcttggtggctggatgaacggtcatggcgacgtgtgtttgaacagatgcccttgctgctgatgtgcctgggcgagctggtgtcctgctcactagcggcgggcaacttggaccaggagctggacatcacattgggtgacggacggggcaaggtgcttgacaacggacggctgttgacgctgtcgctggaccggacgtccggttgcgggt

SEQ ID NO: 309707 - DNA, 343 bp, Zea mays
tttcttctcgacggccgtaacatcaccgttaaccaggcccagtcccgtggcggtggcggtggcggcggtggctacggcggcggtcgcggcggcggcggctatggtggcgggcgccgtgacggcggttatggcggcggtggcggctacggcggtcggcgcgagggtggtggtggcggctacggcggcggcggcgggggctggagggactgatgtgggggcccatcctggctttggccgagctatctgtatctatctatagcttcgtgttaccgatcgtttctgtcaccgtgtgagtgtccgttctaccttgggattaggcgttggtacccctggtgttcccttt

SEQ ID NO: 309708 - DNA, 460 bp, Zea mays
cacgcgtcctttttttcttcccctccgtttcgggttcgggtctcgtgaggatctccggggttcggtttcgtgggtgagcggatcgagatggtggcgtcggatgttgagtaccgctgtttcttcggcggcctagcctgggccacggacgaccactccctccacaacgcctttagcacctacggcgaggtcctcgagtccaagattatcctcgatcgggagacgcagaggtcccgcggctttggcttcgtcaccttctccacggaggaggcgatgcggaacgccatcgagggcatgaacggcaaggagctggacggccgcaacatcaccgtcaacgaggcccagtcccgcggtggccgtggaggcggcggcggcggctacggaggtggccgtggaggcggcggctacagcggaggcgggcgccgtgatggcggctggcggctactgcggtggtggcggcggc

SEQ ID NO: 309709 - DNA, 367 bp, Zea mays
tctggctactaatccccttctgacccagtcctgccgggttcaaggatgcttaggctaatggggaagggcaaagactgcggctgcagaccaataccggatctccatcagcaggcttgcctgggccaccacaaactagtcgctggataaggccttgacctcctacagcgagatcctcctctccaaggatataaccaacccctagacagggacgtcctgcagtttcagctcaagcacctaatcctacgaaaaccacatgctcgagactgtctagaacatgaactggcaggagcttgacggacgcaacatcaccggaaaccatgcccaatccccctgctggcgccatggcctcggcctctaccgcggctgt

SEQ ID NO: 309710 - DNA, 454 bp, Zea mays
tttcaaccgaattgaagcgcgcaacgatccgtccatttaccttaggtaccttggtgtgcatgttggcatgccctcggtacatgtagagtataacgttgaaaatatcacaccacatttttgccgccttactgaccgcacttactctgctcccataaaagttcatatcgaatacactgtcggaaagcagcatgaagtgagaagaaagaataactttatcattggctacatgcctattatgctaagaagccatgcctgtattctgtatgaaaaggatgaagctgaactagcaaatatggtgagtgccctcttgatcctggcggtactttgttgtcaaggaacgagaaggtcattctaattcaagaacagctagcaaagaatcgtattattgctgacactgatagcaaaggaagggtggatcgcatctgttaccagtagcacgcatgcaataaaaagc

SEQ ID NO: 309711 - DNA, 521 bp, Zea mays
ctctatcgcgagcacgacggagcaggagggcggcgacagcaaggggatgtcgggggcgtggggcggcaccacgcagaagtgcgcgtcgtgcggccggagggtgtaccccgtcgaggagcttgccgccgacggccgcgtctatcaccgcccctgcttccggtgccaccactgcaagagcacactccagtttagtaattattcttccgtggaaggtgtcctatactgcaagcctcactatgaccagatattaaaatcaacaggcagtttggagaaaagttttgaaggtgtggcccgatcagctaagtcagaaaaatcaaatggacataagggccaacaaagcagtagattctctaatatgtttgtgggcacacaagagaagtgtgttgtttgcaacaagactgtgtacccgcttgagaaggttgctcttaatggaaattcttatcacaaatcatgctttcgctgcacccatggtggttgtacgctcagcccatccaatcatatcacacatgaaggcaaacttt

SEQ ID NO: 309712 - DNA, 371 bp, Zea mays
gcgcagcaatggtactgcttttccattgagcaatttaaaacagctatcaagctccaattataaacatagaacgctcaacgaagcagtttacataggcaaggaaactcaaatccagtaaacaacaaagaacttgttcatatctacagacaaacaaacatagagaatggtcttgtaaatctggatactacatttttgcccccaagtgtaacagaaaactgaggtgtcttaggtgttacacttccacttggatgttggcacgcagttcaggtagtggcaccaatggcagccatcgttcccgttcttccctttgaaaagcatcaccagtgaaatcacaaacccaactaacagcagaacgagtgccacaacccaca

SEQ ID NO: 309713 - DNA, 324 bp, Zea mays
aacccgaaaaaaaacaaattttttttataaaccaaagggggtcacagatttttttccatacgtccatgcttattgggggagacccagttgcccccctaggggtggatacttactttttcaaactggtcccgcgtggggcaacatgggaaggttacatgcttacagacgaaaaattttcataacaatagcccggcttggctgtttcacagaataaccaaacgacaaccccgaaattgcgaccttttaaaataaaccactcaaaagcaaattgccccccgaagcccgtttttcttataaagccctcccgccttttcctccatggga

SEQ ID NO: 309714 - DNA, 377 bp, Zea mays
agctcctcctgattggaactttagtttataaagtgactaaattttagctcctttttgctttagttcatgggatctaaacagcccctaagataaacactcgggcaaaccattgcagctgacgctgaatgctcagcgaaacgaaaattgtatctcctctagagttctccccttcgtctccggcacccaaaggacaacaaaaacgatggtgaaggcgctcacaaccatgtacgagagaaaagtgcctccaacactccacgtgagcatcaagttcgtcgtcattgttatggcgaaggatgtcagccagttggccagtgttgcgatgcttccgccaaggctcttgatgctaaccgggaggatctcagacatcatgagccatg

SEQ ID NO: 309715 - DNA, 451 bp, Zea mays
tttcttacgcgttcgaccacgcgtccgcccacgcgtgcgcccacgcgtccgagagtgagcagcttcatggttctgcaagtgagcagcaagctagagagcaacttcatggttctgtaagtaaacagcaaactgaagttcttcgctccaatgtcagcagtggcgatgcctcaaaatgtcattttggccctatagttactcagaagctgaaggaacattttgaaaaagatccatatccttgccgtgcaacaaaagagggtctggcacaagagctaggactgacatttaatcagatcagtaagtggttctctgccacccatcattattcaagagatgctgttgccaagaaccaaaaatacccaggagaaaatactactgagaataatagtagcacaatctttatggtatacaagtaatagaacccaaattttttttgatagataaaccagatgca

SEQ ID NO: 309716 - DNA, 513 bp, Zea mays
cgtagatcttcttctcgcagatcccggacttcgaccagatctcctggctctccatcctcgccgccgtcatgtccttcacctactcctccattgggctcggcctgggcgtcgtccaagtcatcgcgaacagaggcgtgcagggcagcctgaccggcatcaccatcggcgtggtgaccccgatggacaaggtgtggcgcagcctccaggcgttcggcgacgtcgccttcgcctactcctactccctcatcctgatcgagatccaggacaccatccgggcgccgccgccgtcggagtcgacggtgatgaagcgcgccacggtggtgagcgtggcggtcaccacgctcttctacatgctgtgcggctgcatggggtacgcggcgttcggcgacggcgcgcccggtaacctgctcacgggcttcggcttatacgagcccttttggctcctggacgtggtcaacgccgtcatcgtggtccacctggtcggcgcctaccaggtctactgccagccgctgt

SEQ ID NO: 309717 - DNA, 423 bp, Zea mays
aacttgaaatagaatttcctgcacataacatatacaaagttgactacaagtgcattctgcacaattacatgtattttgcgggaaaatacaatgatacatttatcaaacacaatgaagcaactaatgctcccgataatgcagtaatgctaactagcaacaaaagtacaactctacaagtggaactgaactcatggtacaagcactttcgagtacccattgatcagagcaaaaggctgacaggcatatcaaccggagcttccacaagaactgccaaagtgtgtcgcaatatcgctaacagataacctgatgacatggctacccgaaagccgtgagatctccatgcattcttccaagtctgaattacacgccaactttacccattcatggtcatcatctagatacttgatatcaaacgtgccaaca

SEQ ID NO: 309718 - DNA, 521 bp, Zea mays
cccacgcgtccgaaaggtagttggtgacagagattcgagtggggtctctcttcaccttagcaatgtgctaaaacttgagaatgaagaattcaagacagatgcacagttagataactctgatggttccctttgccaatcacctaacggtgatagacatggaggatcccatgagtttgatggtgggaacaagaaggctttggatgtgccagagggacaattgttgactgatgacttctctcaaggcaatggtacttctgctggcagaccaaatggtaacggtgcttctgattcttctgtgcttcacaaaaccaacaagccccctgaaaggaaacgtgggaaagccgtaaagactagtcagttagaggtttcttcagcaatatttttctggaagcctgaagaacgcagcttaaagccttggagcttgtcctacaactatgaagcgcatttgcccgcagcatgggatttcttgtggccatctcgaaaaatcatgagagaaattactcaagaaagtggcgaacttt

SEQ ID NO: 309719 - DNA, 496 bp, Zea mays
tggaagtgataaattttctcactcagtgaataatgttattgatcttaaggacaaactctctcactgcttgtcctcacgtttgcttcggaggtggtgtatgtttgaatggttctatagtgcaattgattatccatggtttgcaaaaagtgaatttgtggagtacttgaatcatgtcaagctgggtcatgttccaaggctgactcgtgttgagtggggtgtcataaggagttctcttgggaagccccgccgattgtctaaacaatttttgcatgaggagagagagaagctttctcaatatcgcgattcagtcaggcaacactatgctgaacttcgatctggtgttagggaaggactacccacggatcttgcacgaactctttgcagtggacagcgtgttatagcctgtcatcctagaacaagggaacttcatgatgggaatattctgacagttgacaataattcgtgtcgggttcagtttgatcggcctgagctgggt

SEQ ID NO: 309720 - DNA, 459 bp, Zea mays
tcgtccacgcgtacggtgaatttggagctttctttggtcttgccaacagaattgacagaatacataaaaattcttggatagggttacagtcctggagagctacagtatgaaaggcatacttgtcaaccaatgccgaatgttcaatcttagaagccattcaatctcaaaagcatagagattcctttcatttttgggttcggatggaccaagatccaagaaaccacgctaataaagatttttgggccttctgagatgtgatcaatgctgggaactgcagggtagctgttatggaggccttttaaaggatgcctggtgtacatcttgatcgtgacctggaatctctgttacatatgcctaatgatggagacacgtggtctgtgatgcaaagatggtttttagctacacggacattcctagaatttggtatgcactcaagatgtctgttgatgcactggatgc

SEQ ID NO: 309721 - DNA, 394 bp, Zea mays
tttattttgttggttgtttaagttgtctgccttgtttctggtacacctaactattttctgccatcttaatatgttaatttgtcagaaagattggatcaggacatcagtgggattttggcaactacttgtgatcactctttccgttgctcatgtgtttcagtgtggaccaattcatcctgtccggtatgccagttttgtcagaagcagtctgaaaattctacatgttctgtttgccaaaccactggaaacctctggatatgtgtgatatgtggttttgatggatgcggaccgtatcaagaaggacatgcgaaacagcactggaaagatactcagcattgctattcgctagatttggaaacacaacgatgttgggactatgttggtgacagttttt

SEQ ID NO: 309722 - DNA, 348 bp, Zea mays
caaggagaagccaacgtcattctttcattaaaagggaagataacaaacttacaaatcaactctttatgagtcgatacttccctactactactactacattacattactgctactactactacactacgctatactactctaaattactactacattattctaactatactatactaatatctaaaagaccagtggcatctagccactggccctgttgctgccgccgccgctgccgcctctggtgctgcccctgctgctgccgccccggttgctgcccctgctgccgccgccgtcatcgtccttgctgctgccgctgccatccctgccgctgccgtcgccgtcaccatc

SEQ ID NO: 309723 - DNA, 286 bp, Zea mays
gcgttcattcttataataaatgttatcccatagcgatggtgcctgtgcaccaaactcaacaacatgccatatacttttgtggagcgagattagatgaaatcgcattaaatagctccacctagcgtaatcttcaccatcaaaagttggtggctagcctaatgggacggacaggaaaggtgtgtgtttggaaatgcgcgggtagcgtagggggatcttactatacttattgcgctataggcgcttataagagacggagggcgcatctgagtcggaggtagaagttgat

SEQ ID NO: 309724 - DNA, 190 bp, Zea mays
attctggccccacccattgtttattttatttcgcagccttcgcttaataagacggctaaccgcgcgaaacacgccaggaattgaaataaagcctaaaagaaacaggattacgaaaccgaaccagaataccgttttacttaaaacgcgggccacaataatattgttcaccaacaaaaggttttaacgcgga

SEQ ID NO: 309725 - DNA, 495 bp, Zea mays
tccatgcgttcggatatttttaattctgacaatccagaggaggataaggtgaaacttggagaaccaggatggagggaaaggtactatgaagagaaatttggggcaagaacacccgagcagattgaagaaatacgcagagatgttgttctcaaatacacagaatgattgtgttgggtaatgcactactattatgaaggggtatgctcatggcaatggttctacccttatcattatgctccgtttgcttcggatctaagtggattgggccaacttaatattaaatttgaacttgggacaccattcaaaccttttgatcaacttatgggtgtttttccagctgcaagtgcccatgcgctaccgttacagtatcgacgattgatgaccgatccaaattcaccaataattgattcttatcctacagattttgaagtatatatgaatgggaagagatattcttggcaagggattgcaaaactaccgtttattgatgaagat

SEQ ID NO: 309726 - DNA, 409 bp, Zea mays
ttgctgtcggtgatctcaaccacctcatctatgcaacaatgagtggtgtcacatgctgacttcacttccctggtcagcttaattctgacctccggaaacttgcacagaacctgatacccttcccgtgcctccactttcttatggtatggattcgcttcactgacctcaccgggctaccagcagtaccgtgccctcactgagccatacctgacccaccagatgtggtactccaagaacatgatctgcgctgctgaccctgggtacggtcgctacctcacggtatctgatatgttccgagagaagaggagcacctacgaagtggatgagcacatgcttaacgggcacaacaagagctgttgctactttgacgagcgcaaccgtaacaatgtcaattgcagtgtgtgctaca

SEQ ID NO: 309727 - DNA, 429 bp, Zea mays
atgcgtgttcgcttgggcaggtagatagccatgctgacggccttcgtgtacgcgacggcgagcgccgtgggctctgtgacgccttcgacgtggacgataccaggcagatacgggccgtcagtgctgggccggttgtgggaccggatagactacttctggctgcagagtcaggacgagttgttccggaagtgcgcggcggcgcaccgtaccaccgtgttgcgtaccaacatcccggccaggttatccttattcgtgggcgttgacccgcgcgtggtcagcatcggggacgccggcgccttgaccgcgttccctgacccggaccttgcggacaggaggcgaacattctgatggggccctacaagccgggcgcgggattaactcgcgggacgcgcgtcggtgtgtaccttgacacgcatgatgaggagcacg

SEQ ID NO: 309728 - DNA, 469 bp, Zea mays
aagaaaggagaggagaagagaggagggaggaaggggattgattggtagcgtcgtcgttcggccgcttgcccgccggtagttcgtgctcgctctctcaattctctctcgccggcgcgctcgaccgcccgcggatcgctctcatggtggagtcggaggacgaggcggaggcggtgtgcgcggtcgtgctgacgccgacggtgtagctggagggcggccttgcggtggaactccggccggccaatctcgcccagcgggtgctcaggctattcctcaacgtgcgcccgggctctgacctctaccacttccagctgccggcgacgttcaacctgcccaagtcgcagctgcagctgtactgcgagggcgtgtactgcaccggcgaggacctgctggggcggagcgcgcgggggcgcgacagcctggaacgcctggcgtgcgtggtggcgtggagcatctcactacgcggccccca

SEQ ID NO: 309729 - DNA, 364 bp, Zea mays
tctacttgaccgaggggtgcgcgtggccctttttctcggcgccgaggggccaggtgtacgacccgagggcggaccggtgggaggctatgccggcggggatgcgggaagggtggacggggctcatcgtcgttgccgcgggacgcctgttcgtagtgtcggagtacgagaggatgaaggtcatggtgtacgacctggagacggactcgtgggacacggacggtggtgctctcatgcccgagcgcattatgatgcccttctaggtgagctgggtcgacagtaggatcgcagaacatgggcggggccttcacgttatgattgggcatgtgcagtaggagcccggtggctgtggcactggtagcagggg

SEQ ID NO: 309730 - DNA, 413 bp, Zea mays
tgtttacgcgtccgtccacgcgtccggggatcgcgatcgtgcacgcgctggcgctgttcgtgggcgtgttcgatgcggtgaacatctggggcggccacctgaacccggacgtgacgttcggtctggatgtgggcggccacattaccattctgacgggcgttttttactgggtggaccatgtgttgggcgccaccgaggcgtgcctgctcatggggggggtggctcacggcaagggacatccttcactgcacggccgtctgacgcgggcataagaaagctggagggcgtcttgttctaggacgtcatcaccttcatgctcgtatacaccatgtgcgccagcgatcgagggcatacgaagggctagcttggaaccatcaagcccatcgtcatgggatgcatcgctggagccaaca

SEQ ID NO: 309731 - DNA, 442 bp, Zea mays
  unsure (1)..(442): unsure at all n locations
tctgcacatgcagaagcgccaagagcgagcgcctcatctctttatattgctctcacaccctccgtttctcgctcccacccactgccactgtacttgtgctgtgttgtgtgctgcaagaagaagaggaagaagaggaggaggaggaggaggaagaagagcaggtgctgagaagcctgccggcgcgcgttacgacaagcatatatgggggagatcaccaatgtcatggagtaccaggccatcgcgaagcataagcttccgaagatggcctacgactactacgcgtccggcgccgaggacgagtggacgctgcaggagaacagggaggccttctccaggatcttgttccgtccgcgcatactgatcgacgtgttcaagatcgacatgaccaccaccgtgctggggttcaagatctncatgcccatcatgttcgcccccactgcta

SEQ ID NO: 309732 - DNA, 461 bp, Zea mays
tcgtggacgcgtgggtggactcgtgggcggacgcgtgggctgacctggatgacgaggcggcggacagcgtcaaggatcaagggtacggtcgcggggcctcaaggcgaagacgcggacgttgcggatgaggctctggggatacttaaacatgccctggaggataagccaatggagaccgtgctcctacagattcgccagtttctcaatttatcaaaggagatttgtaggatggaactgcatgacgcactgtacatttggcccatccatgtttgtgattggacgcatcatatggcaagagttgcggaccccgataggtgctaatgattctgatgagaaaggaggcatgaacttaatgaacgattttatgatgggcggtgattaatctgatggtttgaagactgatgctgcatccattgagccggtgaagctgcttattcagaaccaagatgagatgattaagt

SEQ ID NO: 309733 - DNA, 452 bp, Zea mays
ggctttttcgaccagatccgtcgatacccttcttttgggccgcgggcgtggtcaccctgaccgacacagacgcgtgcgctgccgtcggcctctctggcaaggctcctcgacgaccggtcgcgggacgaagcaagaaggccctgaggttgctactgtccttttgtgttgcctcgccgattattgacactcgaacatcgactcctcccgaagatcaggcttctgccacgtgtcttccgatcacggccacctcgacttcggctacctcatcatcaaggggctatcgtcttcttggagcgcacaccagtctctactccagccgcaacactcgcaccctcacgacgttgcgatcgctgggggatttcaaccagacggcttctacctttagcttctactccaagtccatcgtatgcggtgcctccattgtgactgctgcggatgttagactgtgtgtg

SEQ ID NO: 309734 - DNA, 276 bp, Zea mays
tctttcgcgtgggtcgacttcgagttcctgggcggggcgtgctgtgagacctacacgctgcacaccaacgggttcacgcaggggaagggggagcggatgcagctgcatacgcctctggttcgaccccaccgacgacttccagacctactcgatgctctggaacgcccagcacattgtcttcatggtggacgacatgcccatcagggacatccgcaacgtggatagcgagggggtggccttctccaagaggcatgctgagcggaagtacttcagcct

SEQ ID NO: 309735 - DNA, 364 bp, Zea mays
gcgtgttttttaacactacgacgaggaggatagcgagggggaatggggggacgattaggaggcggtggcggcgaataaaccatgcgggtagactgtagaggagaaggtatcgttggcctcgttgatcggctactaggtgctcgcaccgatatgtgctgacgagaatcccttcaagccctacaagccgaggttcggcatctgtcagatcggttggtagtaattcacggtgagcaatggcaactcaatcttcacggagaggttgaagttctgggatgtgaacgacacgttgtttttgaacacagttataatgcttggttcacaaacgtagacaactattgggaggtcaatactacctgatgctgct

SEQ ID NO: 309736 - DNA, 261 bp, Zea mays
tttcttttgtggtcaccgggggcatgaaggggatcggtcaagcactcgtccaagagctggctaggctcggtgcccgcgtacacacgtgcgcccgcagtgctgctgtcctcgtggagtgccggcacaagtgggcccagaaggggctcctcattaccggctacatttgcgacaatccaatcctcacttactgagggaggctcgttctgtagacttatagctgcaccttctactgtgccttcgatgtgctgctcaacatcgctg

SEQ ID NO: 309737 - DNA, 466 bp, Zea mays
atcaatgtttatccccatggagtgggatgtcatattcgaacaactcgagtccaatggccagccaaaaccggttagaagcatatggtctttggcttttgatgacttgccacactacctcaagtcatgtttactatacttggcgtccgattcagaaaatgttattctttacccagatcgtttggtgcgtctgtggattgctgaaggttttgttatgcccaagaaagcagaaacactggaggacgttgggtttgactatctaaaagaactggtcgcgagagggttagtccaggtcgtgcagaaggatgctggtggatccatcaagctggtagccatccacaatctgctccatgcttttgcggagtctgaagcacaggactctagtttccttgaaatccaccatcatgctaatgttgtaaacccaaatgcagtgcggcgcctagacatacaaaactatgtggatgcatat

SEQ ID NO: 309738 - DNA, 264 bp, Zea mays
tttctcaacacagcacaggcagctcgagagagagagggagagaaagatgtcatggttcgggcaccaccaccacaaccaggcggctcccacggcgttggaccccaaccaggtgcacaagaacttttgccgcgccaacgagaactactgcctggccgtccgtgacggcgcagtcgtgctggccccggtcaacctcaaggacgaccaccagcactggtacaaggacatgcgcttcatcacccgggtcaaggacgaggaaggcttgcc

SEQ ID NO: 309739 - DNA, 304 bp, Zea mays
gatggtgagcaccctccacctggtgctccgtctgaggggtggtatgcagatctttgtgaagacactcactggcaagacaatcacccttgaggcggagtcttgggataccattgacactgtcaaggccaagatccaggacaaggagggcattccacccgaccagcagcgcctcatcttcgacggcaagcagctggaggatggctcgacactggcggattacaacatccagaaggagagcactctccacctggtgctccgactcaggggtggcatgcagatttctgcgaagacattgactggcaag

SEQ ID NO: 309740 - DNA, 373 bp, Zea mays
gcggggacgtcaccgccgtggtggtggtggcgccgccagcgcaggccaccgcggcggtcaagcttgcgagctactgctggacggcggcgctcgacggggtgctcatctactggaacttcttggccgcggtggtgatgcggaaggtccaggttgggctccccgtccactccatggtggtttctgacatatataggacctcaaaaggagttgaggtgtcgagcccctttgcattcatctctgtggaggatacgagtaagctggcaagtgaaccaaaagcgctgtgtgggcagatgagagcttatgacctgacaaaggggcgcctagtgggtggcctcctggccgagacacgtagaccagaaaagatcgttgcaag

SEQ ID NO: 309741 - DNA, 331 bp, Zea mays
gctttcttttccttcccctcttaccaagtcctcctcggggtagggttccttagggttttgtggatgggccatggctgcggctgatgtggcgtaccgttgcttcgtcggctggcttgcctgggccaccatcaaacagtcgctggagaatgccttcgcctcctacggcgagatcctcgactccaaggtcataaccgaccgggagacggggaggtcttgcggctaaagctatcttaccttttcctccgagaacttcatgctcgacgctatctagaacatgaacggcaaggagctttgcagtcgtaacaacaccgtttaccaggcccagtccccc

SEQ ID NO: 309742 - DNA, 425 bp, Zea mays
cggtcgcgtgggcggacgcgtgggcggacgcgtgggcggacgcgtgggcgcatctggccgcctcgaccctcggcggcggcggcgacgacgacgatgatggggctggagatggaggcgatggcggggtcgatcggcgtgtcggtgcccgtgctccggttcctgctctgcttcgcggccaccatcccgacgggcctcctgtggcgcgcggtgcccggcgccatggggcgccacctctacgcggggctcacgggtgccacgctctcctacctctccttcggggccacgtccaacctcctcttcgtcgtgcccatgacgctcggttaccttgccatgctcctgttccgccgccacgccgggctcatcaccttcctcggcggccttggcttcctcatcgcatgtcatgtgtactacatgagcggggattg

SEQ ID NO: 309743 - DNA, 492 bp, Zea mays
tcattgcgctgccggccactggcctctcgcaggccggggaccgcatctcgaagtagagggtgctggccgccgctctcggaagcgctctggaaggacacggccatggcgatgcgggccgctgcgcgtcaagccatactctctccaccgcttgggccccgcagtcctcgccccttcctctgtggttgttccttgtctatcgctcctcggttggagccgtgccgagcggcgagctccaccaccgcgccggccgccggaaagcatctccctccattgttcagcgtcgcgccgatgatggactggacggacaaccactatcggacgctcgcgcggcttatctcgcggcatgcctggctttatactgagatggtcgtcggcgagaccatcgtgcatcagaaggataacctggataggtttctagcattttccggggaacaacattctattgtgcttgagattggtggaagtaacctttgaaaatttacaaaagcaaca

SEQ ID NO: 309744 - DNA, 321 bp, Zea mays
gcgggacgagctcacgtgggggctggactccaccacgggcgggcgcatagggggcgcgctgcgtcggatggtggccgagggcgggcgcaccggccgggggagcatgcaccagccgccggggcggctctaccacatgagggacaaggggctgttgctggccgccgacggtcgacccatctactacggacgcgccggcgacgcgctatcctacttcgactgcggcggattagcgtaggcggtctgcctgaaccccgccgacctcatgctcgacctcgacaacggtatcgcgccgcagactactagcggatacgggatggcagc

SEQ ID NO: 309745 - DNA, 394 bp, Zea mays
ttttccacgcgtacgtgcagatctttgtgaaaaccctgaccggcaagactatcaccctcgtggtggagtcctctgacaccattgacaacgtcaaggccaagatccaggacaaggagggcattccttcagaccagcagcggctcatctttgctgggaagcagcttgaggacgggcgcacgcttgccgactacaacattcagaaggagagcaccctccacttggtgctgcgcctcaagggaggcaatgcatatcttcgtgaagaccctgaccggcaagactatcacccttgaggtggagtcttcagacaccatcgacaacgtcaaggccaagatccaggacaaggagggcattcctccagaccagcaacggcttatttttgctggaaaagcatttg

SEQ ID NO: 309746 - DNA, 412 bp, Zea mays
gaagagcttgcagttactgagagtgtgtgtgagagagaggatgggtggcagcggcagggctgctctgctgctggccctggtggtggtggccgtgagcctggccgtggagatccaggccgacgccgggtacggatacggcggcgggtacaccccgacgccgacgccggccaccccgaccccgaagcccgagaagccccccaccaaggggccgaagccggacaagccgcccaaggagcacaagccgcccaaggagcatgggcccaagccggagaagcctgccaaggagcacaagccgacgccgcccacgtacaccccgagccccaaacctacgccgtctacgtacacttctacccccacagtcccccaagccgaagccactcacatacactcccgcccctaccccctacaaacc

SEQ ID NO: 309747 - DNA, 472 bp, Zea mays
cccacgcgttcggcactccatgggtgcgcgggcgacgatgggatgttcgcccttgctgcccttccaagcgctctggctcacagcggccgttgtcgcggcgctcgcgctcgcggccggcgcgcagccgtcgccgtcgctgtcgccggggttctacgacgcgacgtgcccggggctgcagcccatcgtgcgccgcggcgtggcgcgcgccgtccgggcggagccgcgcatgggggcgtccctcctccgcctcttcttccacgactgcttcgtcaatggctgcgacgcctccgtcttgctggacgacgtgcccggtaacttcaccggggagaagaacgcggggcccaacgccaactcgctgcgcgggtactaggccatcgacgccatcaaggcccaggtggaggcgtcctgcaggccaccgtctcctgcgccgacatcctcgccttgaaggcgcgacgccgtaacctgctgggcg

SEQ ID NO: 309748 - DNA, 374 bp, Zea mays
tgtgctacctcgcgcacgcacgtgtggttcctgactggatggctgatgtgctcactcgttcgcgtgatgcagcggtgttccagtcgttgatgtacgaggcggccgggcggacgatcaaccctgtgagcggcgccgaggggctgctgggcgcgggcagctggcagctgtgccagtcggcggtggagacggtgcttcgtggcggcgccatcgggccgctgcccgagttcgacgggggccgcgacaacacgtttgctctggcggcgacggcgaggcgggccgtggggtgcttgacgttctccacggcgaagcgtggggcgccgaccaggactaacctgggggcggcgcctcccgttccggcggagccgtagtgcgac

SEQ ID NO: 309749 - DNA, 389 bp, Zea mays
ggatgttccctttagcattcagtctatttgatttagataatcactgaaagcatagtccagcccaggctctggcaatagtaataagcttatctgtgtggaggcaacaatggatgtcacatcacatgccctcacgtatcatataaatcatatcgcaaccctgacagcacggtggtcggcctcggatatggtcgcttatttatacgtcacagcagggccctgatccggtcgccctcggtctggacgtgcgccctggtgacctccgcgacgctacggtagccgcagagcgccatggccaactccagctccttgttcagcatctcgatcacgtgcctcgcgccggctttcccgcgcgccgccagcccgaagaacaccggcctgcccaccatgac

SEQ ID NO: 309750 - DNA, 496 bp, Zea mays
gagataaagttaagttgaaggattgtaactctggaaacacgataatttatattgattctcaacataaaaaaatagaaaggcaattagacaaaagccacgtatatgacacacctcaagcaggcttgacagccagttatctcctctctcaactgcatctggaagtagcacattagaaatgagattacgctccagaggccctccagatccttcaataagccgacaaattacaatggcaagctgttcatcttgaaggttctttgcacaaacattcactgctgatgaagtatcatcaccaaggaggaaaaaagctatagcaagctcccattggtgccttcccattagtacataagcattttttagagcagcagccttgtgcctttcttctgggaagtttctggacagaaactatttagacgtttatccttttcatctctactaatcttgaaaagaccaaccaacacttttattctgttaatgctatgtagagcaaagcaca

SEQ ID NO: 309751 - DNA, 499 bp, Zea mays
gccatgtactaacaattttaacgaagctacttttggtaaactcaagttaccagaaaatttcaacagtggaaacattgatagcaataatgtcctgctaacaaaccaacatagccactattctcatggtttatggagcttgctgcacatagctcatagattgagtggatcgttggcatcatatcacccaagagcacttatccagtatctttattcaggtgaatggaaacgtgcggatgctgctctgcaccatcttgttcgatccatgaaagtgagtgaaacttcaaagggcatgtcaaattacagtacatgccatagtattccagaacttcctttgtctgaatactttgcggcaacagtgtccaacaacatttctaccaaggggtttatgtggggtgagaatagaagtaacacaacttttaatttgttgtcaccttcaactttatttttttacgaggatggcaatttaagtattaatactacaactagtgcatttgaaaaa

SEQ ID NO: 309752 - DNA, 352 bp, Zea mays
gctattcaaatcgtcacttgtgccattctcatattcttgagtgctggtaatttcggacatccaaagtacaaaataatttaactctctatgtatgatgttccatgctaatccccatggattgtgtagcgttcccacttcttcgttgggtcatagatctcccatcttgaggctgggaatatatgcttatttttctcataccaatgcctctctacaactttccccgcgtgggactcatccttttcttttgttgcgtcggcaatggtacgaacatcctcatgaacgtcaaaatggaaaagtggtccactcttgccccttgctttgttgataattaattcataaaagctgtgttgat

SEQ ID NO: 309753 - DNA, 432 bp, Zea mays
tcgttctattcgttcgctcactcgttctggaggaagagaaagagaggctatataagctgtaacacgaagaagaagaattgcaaatgcagaaaaggaaaaagaggagagtgaagagtgttccacgtttatttttctgtgatgacattgagaatggaagtgacgaagatgattttgagaatcaagaaaccaagaaaaatggctctgccaaacttgggaaggatccaactgtggagacaagttttctacctgatagagtgatccttcagagaaaaggagtcagagggacaagcagaacgagaacgactgaagaagcaatggtcgcatgagcaggaattgattaaaaattaaaccttttcaattacttacagttactgggattggactgggcacaaaagagcaatccaggtccgtaaaggtgacaccattggagaa

SEQ ID NO: 309754 - DNA, 351 bp, Zea mays
tttctctttttttttttttttttttttttttttggttggcacggggtaacagatgttgaattaatatgtccttagaaagcattccgaacacatgaaaataaaagatggtcagcagcatagcataaacaaccaagtttctctcatcaggcggaggtcatcagaacgacactatgctgttctgctactgcctcggtttcctgcatccaccacaccatatcacccactattgctgctgctcgtcaaactcgtggccatgatcaaggaggtagttggctgcaagctcttcgtccttgttgcatgcaaagaaaacttttagcacaagctcacggttgaagcccattccctcaagcc

SEQ ID NO: 309755 - DNA, 534 bp, Zea mays
cttgatcgcgagcggcccggccgcagcatcgcagcgcagcggtacgcgcctcggaggtggagggaatgtcggaggcggtggcgatcctctcgctctccgcgtccgccgtggtagaagacgtgctgcggcagcacgggtgccgcctcagcgaccgcgacctcgcgtcccgcagggccgaggaagctgcggggaggaggaacgaggcggcgggatggctgcgccgcacggtgggggccgttgccgcgcgcgatcttccggaggagccgtcggaggaggagtttcgcctcggcctccgcaacggccagatcctctgcggcgcgcttaatcgtgtccacccgggcgccgtcccgaaggtggtcgtgaatacggcggcggactccgtgctgcaggccgacggcgcggcgctgtcggcgtttcagtacttcgagaacgtgcgcaacttcctggtggcggcgcaagagatcggcctgccgtgctttgaggccttcgatttggaagcaggagggaagagcgccaaggtggtgaactgcgtcc

SEQ ID NO: 309756 - DNA, 486 bp, Zea mays
cttacgcgtccgcttttgccgcttcctttcagaaaaaaaaatgtcagacaggcgtgggcgtggtattgatgtagcaaggtcattcgctggcctttctcagtcgggccttgggtcccaagaatcaagggttgtcgacctacgaaaaggagtacatggctatcctcttggcggtgactcaatggtgatcctatcttcagctagttgaattcattatttacacggaccatcacagtttgactcagttgaatgagcaacgactgaatacggtgtggcaacagaaggtgtatacaaagctagcaggattgcagtacaaggtgatttacaagaagggaacagaaaacggtggtggtgacgctttatctcgacaatgctctgatgagttacagtgctgtgctgtttaacattgcacaccagaatggctgcaagagttggttgtcagttttgatcaggattctgacactaaagagttgctgacccaaatgagtt

SEQ ID NO: 309757 - DNA, 509 bp, Zea mays
ttacattgtcgctcatcacggttccatcgacgtcgagcagctccgtgtcgtccccgaggcttgggcaggcccttcggttctaggcacagtagcaaaatgggtgaacgaaaacgcatggaggcagagtgcaccaccattcacaggttatctgtggaatttattgaatggattttattgaaaatacagtcacctatttgattggtctctctataattggatattctttggacataggaatggtgcatgttaatttgatagatgagcggttacaaaagctaatatacaatggacaacttgatggaaagcaagtagacaggtaaccctatttttttcatgcctataatttaatctttggacatcggaaaggagcatattaatttgatagatgagcagttacaaaagctattttacagtgggcagcttgatggaaaggaagtgaacaggactggctgctgatggtctagaatataacaaagttgtaggtcaatcgacatatctttttacaattc

SEQ ID NO: 309758 - DNA, 536 bp, Zea mays
cggacgcgtgggcagctagctcgggcggcagcaggcagccatcatgtcggaggagaagcaccaccacttcttcaaccaccacaagaaggacgaggagcagcccgccggcgagtacgggtactccgagaccgaggtggtcaccgccaccggcgagggcgagtacgagaggtacaagaaggaggagaaggagcacaagcacaagcagcacctcggcgaggccggcgccatcgccgccggcgccttcgcactctacgagaagcacgaggcgaagaaggaccccgagcacgcgcacaggcacaagatcacggaggaggtcgctgccgcggcggccgtcggcgccggcggctacgtattccacgagcaccacgagaagaagaaggaccacaaggacgccgaggaggccagcggcgagaagaagcaccaccacctcttcggctgaccgtagtaccggccggcgcgcgaccgagctagctagctccggcgcacacaaccacacacctgtttaattctgtactgcatgcgtgtgtaatttgatg

SEQ ID NO: 309759 - DNA, 539 bp, Zea mays
  unsure (1)..(539): unsure at all n locations
gcgtggacgcgtgggcggacgcgtgggcggacgcgtgggcggacgcgtggggaaatggctgccgcgcaggctaaaactgcattggagagactagcatcagtgcaagaacagattaacaaaattgcacaagaaagggaaagttctataagggcagaatttgcctcacattcggagggaaaggaagaggaaataaggaaattagttgctaagattagagaagcggagagtgaagaaagtgtattgactgaacgcttgctggtagcgatgacttttctgttatttcaatcttcccttgaattgatgcattctgagatgcaagggtagttttataatgcttgaacattattcaggctgtggaatcaaaaacacaaggccacaacaaggaaactacaggcttgagggatgaaatcaaagaactaacatgcaagttagagtatctaagagatagagcagtatcatatgaaaagcaagctagaatgctcgagcaagaaaaaaaccatcttcaagagaagntcttatctgaatgtaagacatatgat

SEQ ID NO: 309760 - DNA, 497 bp, Zea mays
ccctcacctgcacattacgtggggcgacgggcggggctcggatctagacaacaggcagcatgatggcgctacccgtggacactacgaccagctccagaaccaaggcctggtacgagaacctgtgcgccaggatcaacatgcagctgggcatggtgccgtgcaactcccgcggaaccatgaccagctactacctgtcttcgcaaggcggcgcgcacgacgagatcgacttcgagttcctgggcaacgcgtacggcgagccctacacgctgcacaccaacatgttcacgcgggggcaggggcagcgggagcagcagttccgcctctggttcgaccccaccggcgacttccacacctactacatcctgtggaaccccaagcacgtcatcttcatggtggacgacatgcccatcatggacttccgcaacctgtagagcaaggaggtggcgatccccagagccaaccgatgcggatctactccagactgaggaacgcggacg

SEQ ID NO: 309761 - DNA, 532 bp, Zea mays
  unsure (1)..(532): unsure at all n locations
gtcttttccaaccaccatccgccgatccacagccaccccacaccagttcccgagcagagcgagcgccccatgccgcgtgccacggcgagcctccgcctgcaggcagcggcgtcgtccacctccaccgcgaccccaagagagcagcaggcgtcgtcctcatcctcgtcatggcctgttccaccaccgcttccccagcagccggcggtgtcggtgaactccgacacggtgatgatcctggcgtccttcctgtgcgcgctcgtctgcgtgctcggcctcgccctcgtctcccgctgcacctgccgccccgcctcgtcctccaccgccacggggatcccgcagcaggcgaggcctccgaaaggactcaagaagaaggccatcgacgcgctgcccaccgcgccattcaccgctgccgcctcctccgactgcgccatctgcctcgacgagttctccgacggcgacgcgctgcgtgtgctcccccgctgcggccacgccttccacgtcgcatgcgtngacgcctggctttcgacgcgcg

SEQ ID NO: 309762 - DNA, 395 bp, Zea mays
gccaaccagaagagcttgcagttactgagagtgtgtgtgagagagaggatgggtggcagcggcagggctgctctgctgctggccctggtggtggtggccgcgagcctggccgtggagatccaggccgacgccgggtactgctacggcaggggatacaccctgacgccaactccgtccaccccgacctctaatcccgagaagccccccaccacggggccgaatccggacaagccgcccaaggagcacaagccgaccaaggagcacgggcccaagcccgagaagccgcccaaggagcacaagccgacgccgaccacgtacaccccgagcccgaaacccacgccggctacgtacactgctacccgaacgccccccaagccgtcgacacccagatacac

SEQ ID NO: 309763 - DNA, 422 bp, Zea mays
cccacgcgtccgcggacgcgtgggtgcgttctggcgaaggtgacgaaaagagaatgtcacggccatgtggagtctgtgtgctaatagctggacatgatgagaatggagctagcctgtactacactgacccatgatggacatgtaggcaatgcagctgagcggccagtggatcaacgcctgagggagctgatagctgcttgcaggaccagtccaacagggaatctaccctacatgaggcagaaaccatatgcctttgtatcctgaagcgagctatggcagagaaagcgaccccaaccagcggatctatcgccacagctgcccccagataccacctatacaccactgcctaggtggaagccgccatcgctaggctgtgaaacgctacctagctcttgctatccacgtcatcaatcggggataga

SEQ ID NO: 309764 - DNA, 367 bp, Zea mays
tttttttttttttttttttttttttttttttttttttttttttttttttttttttttttttttttttttttttttttttttttttttttttaaacaaaaacaaacgggtccggaattaacggttacaagcagttaaacctggcgggaacaactgttggtccaaggaaaagaaaacatttcgggggggcccggcccaaggggggcctgaaacaatttacaatgcttgccccgccccaaaaaaaactaaacgggggtaaccggcccggggaaagaaagctggattctttttgccctggcctgccccccccggggggggggggttttggttttaaaaaaccgggggaggggaccttttcggggggggggg

SEQ ID NO: 309765 - DNA, 453 bp, Zea mays
gcgcgctccgtttagtggcccctggcgacgatgcggtcgaagagctccccgccctcgcagagctccatgacgaggtgcacggcgccgtcgtcctcgcacgcctcccgcagggacacgatgctggggctcctgggcaggtgccgcatgatggccacctcccgccgcacgtcctccacgtcgacgggggtccgcagcttccgcttggagatggacttgcaggccagcagctcccgcgtgccccggtccatgcacaggtacgtcaccccgaactcgccgcgccccagctcccggtccagcgcgtacttttcctcgatcccgccggcgcccacgtcgcacccctcctccccgagcaccgacagacgcttcttctccccggagccggggccgccgttccgcgcctgctggtggggctttttcttcccgccggcggaggccgggaagtgcgacgacttg

SEQ ID NO: 309766 - DNA, 275 bp, Zea mays
aggcaaaatttcatgccttgtaaagaattaaactatagattatatgttacactcaaagttacaatatatttcatatggtacattccaaatgttctacgagaacattcaatccaccttaagcactatttgtgcagattcattcaatagttggtcgacaaccttggccataatggcttcggccatttttgtaattcaatcgtcccccttggggggggggcccggagatgcctcaataggttcagttccatgatactacccacatgcatgttgcaaga

SEQ ID NO: 309767 - DNA, 221 bp, Zea mays
catctgttcttgttttggggggatggaaggaaacacccaaacattacccaggacacaaacaaaggtttttcaacaccacagcctggcttgacagccaaacagattcatgcaagcagatcagtattcctcctacttgtgggcgttataattgccgccctctggggagacctcctacgagtccttttccagggcgggcagggcctcgcgtgcctgggagaact

SEQ ID NO: 309768 - DNA, 349 bp, Zea mays
gggaaggggcgaaagggaattccactaactgcacatgagttacagcaaaggacagtcttgtgcctgtttacaaggaattcaggcattatcagaatgctaagcattggaattgaggtaattttttttcgaaacaatggacattcgggcgatgtatttattccttgtgggtgagcattgtccaaatccgaaatccctcttgagccaagcttaagtccatctggaacttctccttagttttttggaagacctgctcggaaataagcgcgccattgccatcggccttcttgatctccatgttggccttctggttgaacccagggcctctcaaagcatttgcaatgaagccggc

SEQ ID NO: 309769 - DNA, 403 bp, Zea mays
gagaagccaacttaccagtgatattgttcaagggggacactggctgagcattgaatgcacaaccatttttttcaaaatccattcaccagaaattgccacaagagcagacccctgatttgaagtggtggaacctgcagcaatctcgcattacaatctccctatcctcaatttcagagaccattttcatcactggggggccgtccccggacacccgcaggttcttgaaaatgtgaaggggtgccgctggtggtgtagctatcaaaccaaatgcgagggctaggcgctcactgggcattgccagcatagcttctttctggtcttctgccacatcatgaggcacaaagcttgtatcaagacaataaccttcttgctttaacttagctgtcattgccctgagctttgc

SEQ ID NO: 309770 - DNA, 346 bp, Zea mays
acacagacgcattctgaattccatagactgagttccatttacacattacacagaaacacattacacctgatccatagtagtaggcggggacaaattacaaacatcccttctttttcttcggaggtagtttttttcatacaagctctcaattcttgcatgaatgctccatggttggtgaacaaataaaaacatacgattatggttggtgaaccatccctctcaattcttgcatgtatgctccatggacagtcgccacctcgacaataccctgtgtatttcttcggagtactagcctcagtgcctaactcaaattctttttctatgtcatattgccacattgcaagcc

SEQ ID NO: 309771 - DNA, 532 bp, Zea mays
gccgatctgtcttcgtcccaacctgctggagcacccagcagtgccttcctgtgcttcctcttgttcttggtgtgcgccaccttcccgcgcaccgtcacctccttcttcccgaagtccaccatgtagtccagcagcccgttcatcttggagacgacgtcggcgacccgctgccggcagtgcgagcaacccatgttggcgctcatcaccaccacctgcacctgcgcatgcatggttccagcgacgcatcattcattcattcgcatccgcattgcctctacgcgcgtaatgaataaaagaaaatgttgcttctctcgaaataaaacacacgttccgttttctaaaaaaacaaaacaaaacaaaactagcctatacgtaattaataaaaagctagttaattaagagcatctccaagagactggataaatggcttgtcaagttaaattttagctatttaatagcaaaatagctcttcaacagactatccgtttaacttgccaagctatccggctctttaaattgaccctctcactag

SEQ ID NO: 309772 - DNA, 400 bp, Zea mays
cctatgaatttgtgctagaatgataataaggtaaagataacaagatggcgaaacagtgcgtggcaaaggaaaacgacgatggacaccaagaagctgtgaaagctaaagatcacatcacacatagccgccgttggcgcggatgacctggccgttgacccactcggcggcgtcggtgcacaggaagccgaccaccggcgcgatgtcaccgggctcgccgagcctctgcatcgggtttgtctccacggcgtgtcgcaccatggcctcgctcttgcccttgaagaacatgtccgtggccgttgcccccggcgcgacgcagttggccgtgacgcgggtgcccccgagctccttggccatcgtccgcaccagcgcctccaccgtcgccttggacgccgtgtaggcc

SEQ ID NO: 309773 - DNA, 453 bp, Zea mays
cgcagtggctgctacctggaaaccaagaaaatgcagcaaataggacgcaggatattgtcaatctaattacagggatggcccacttgcatggtactgactgctaacactccatactcaatataccgtttcaggactttgtgattttaaccagtatagtggaatttgttgtccgtaatgtcaggttttagcgtcggtaaagggcctagcattcttcccataccagataagcagaatctgggtgaaattatcagcaaaataaattcattgaacaatatgacctctgcggacaagtctcctccatctgaagtcgttgatttggatgctttgcaagagcaacaagtgcaacggcaggattctgtggggaagacgaccaacggaatcgacaagcaaactgtgccatcaaccatggatttgctaggagtttttccaactggccttgcaactttaacacct

SEQ ID NO: 309774 - DNA, 389 bp, Zea mays
ggagaaatggtcagccgagaggtaccttcagtgacaacgtttacagactagagggcggggcccatgccaatgtcaacactcagcacatgagacatgccacgcattagacaatgctaggtcgaacagctaatcaacagataaaacaaccataaatgaaaaatgcaggcttacagactagggaactacacgccatattttggcgccaaggaggtcgtttcttcctttccttcctagcaaggtcgcatcggttgctcacgccctgaccctcttgttggtgcagtctgggcacttgtactgcttgatatgctcggcccgtgcgggcgtgatcttgacacacttcccatggtaccacttctcacagttatcgcagcagatccagaactggtcct

SEQ ID NO: 309775 - DNA, 323 bp, Zea mays
  unsure (1)..(323): unsure at all n locations
tttnttttttttttttttttttttttttttttttttttgtttttttttttttttttttttttaaacccgggggtcggccaaaaccaacgcttgcctactccacgttggggcgtcccaacggacgagggttgcaatcaaccccttttaagggggccaaaaacccacttgaataccacgggggtttggttgctttttctcaattccgtttgggaggaatttccacaacttggagccttttgcccttacaattgaagttcacaaagaaacccagagcagggggaaatgagcaatgcccacaagactttaaaagatcagaggaacaa

SEQ ID NO: 309776 - DNA, 464 bp, Zea mays
  unsure (1)..(464): unsure at all n locations
tccacgcgtccgcccacgcgtccgcccacgcgtccggagccagaggtggctgctgtaggaactgtggctgccaaattagaggatgaaaccgatcaagatgagaatgcctgtttccaggaagctgatcaattcaaggatgccgagctcgaggtctccaatctgctggacaaggacaccccgatgcttccttgcttcctcccctcgccctcagaagccattggcaccgatggaagcagcacaacctgcgtcgcgggcggcagcgtttccaattccatcgtgccatctacaaccaccaacaccttcgccggntctgtttcgcgtccgccacaacgagcaccacttcccggagcagatctctgcgcgaccatncggtgtggatcccaccttcctttgccttgcgatcggggcgccctctctgttcccgcagacaagcgcagcaactcaggcaccttcgctccgccccg

SEQ ID NO: 309777 - DNA, 521 bp, Zea mays
ctaacacttagacaagtatattagtacacaaaaccaatgtactaaggcttagaaacatacctttactcttgatttgcactttgttcatcccttgggcatagattcacatttaagcacttgtgttggcactcaatcaccaaaatacttagaaatggcccaagggcacatttccctttcaatctccccctttttggtgatttatgccaacacaacataaagcaactagaacaagtgcaatatcatttcaaataaaaactcaaatttattttgattcaatttggcatatagtggatcatcctttgccaccacttggtttgtttttgcaaatcaacctcaaaatcctatctctaagtcaaatccactggtagagacataaagagaggctttccaaagaaaattgaaaactccccctttttcccataatcaacacttctccccacaagaggccaacttttgacaaaagagacaatgcaagctctattctactattttcaaaatctctcaagtgtagctgatccatt

SEQ ID NO: 309778 - DNA, 434 bp, Zea mays
caaagtaaaagcatcgtttattcatgagaacgatagtatcagcatatgtacaagcacaacagtttctcaaaagtgttccacatgcgcacaaactggagagcataaaagctacaacccttattgaacagaaaataaccagggatgcaggcaactgggtcagtaagaaagtctaattaagggaggagcagccattggacttgaggtactatgcttgggatttcaggaaatcaggctgattcgtaaccgaccgaacccatgcccatttgtgatcgttcacatcgacagggttcttcgccacagcgacatcttccagcggtatgtaactgtaggtcccgtttatcggaccaggcacgaagccagtaaacccagccatgaccccgtggatggcggaatgcgccagcaaagtgcagtacaagttgtcgctggcgttcgca

SEQ ID NO: 309779 - DNA, 469 bp, Zea mays
gtctatactcaatgatggccatggaaagtttgcaaaaggaaaattttgaccatggaaagaggaagctcatctgggtgttggcctcatcccctgcacaagctgaggaatggggcaaaaggactccaagccttcaaatggatatggctactcttctgattacgggggtacttcatcgggatataacttgagaaatactggaagtacgtcctccagttatggcgcgaggtatgtgccttcttcagagaacaatgtacagccagaaacacatgccaggttgcagaggaagtattccaggattggtgatgactatcgttctctgagttcaggtgactgaagctttggcgcaagcaggccttgaatcttcaaatcttatcgtaggcattgattttacaaagagcaatgaatggacaggtaaaatttcatttaatcgccgctgcctacatgatattggaaacactccgaacccata

SEQ ID NO: 309780 - DNA, 461 bp, Zea mays
tccacgcgtccgcccacgcgtccgcagttgttggcagtgctctttcaaaaatccgaagcctggtgatgttgttgcacgcgtcaacattcttgctgctgaagggatacagaaaaattttgaaggcaaattggttggtgcagatcgtgctaaagatcttgctgttcttaaggttgatgctcctactgatcttttgaagccaattaatgtgggacaatcctcggccctaagagttggtcagcaatgcttagcaattggaaatccttttggttttgaccatactctaacagttggtgttatcagtggtttaaatcgagatattttaagtcaggctggggtgacaattggaggcggaattcaaacagatgcagctattaaccctggtaacagtgggtggtcctttgcttgactcaaggggcatatgattggtattaatgcagcaattttcacacagacagggacat

SEQ ID NO: 309781 - DNA, 452 bp, Zea mays
cccacgcgtccggcagatctttgtgaagacactcactggcaagacaatcacccttgaggtggagtcttcggataccattgacaatgtcaaggccaagatccaggacaaggagggcatcccacccgaccagcagcgcctcatcttcgccggcaagcagctggaggatggccgcaccctggcggattacaacatccagaaggagagcactctccacctggtgctccgcctcaggggtggcatgcagatttttgtgaagacattgactggtaagaccatcacttggagggtggagagctctgacaccattgacaatgtgaaggccaagatccaggaacaaggagggcattcccccagaccaacaggttctgatctttgcgggcaagcagtggagggatggccgcattttgcggacacaacaccagaaggagagcaccctcaccttgttctcgctc

SEQ ID NO: 309782 - DNA, 447 bp, Zea mays
  unsure (1)..(447): unsure at all n locations
tcttcgtcgcttgctcttccggctcacgtcgccgtggtctccggccaaggggtcgtcacatacaaggaccagcgagatggggggcgaggctgagcctgacaacgcggtgctcttcgttggggtgtcgctggtgctgggcatcgcctcccggcacctcctccgcggcacccgcgtgccctacaccggcgcccttctcgtcctcggcgtcgcgcttggatccctcgagtacggaacacaacatggtctaggcaagcttggagctggaattcgtatctgggctaacataaaccctgatcttctgctggctgtttttctacctgccctcctctttgaaagctccttctcatgngaagtacaccaaataaagagatgtatggcacaaatggtgttacttgctggcatnggtgtgctaattcaacagttttacttggcgctgccgtaagctca

SEQ ID NO: 309783 - DNA, 440 bp, Zea mays
  unsure (1)..(440): unsure at all n locations
tccacgcgtccgcccacgcgtccgcccacgcgtccgcccacgcgtccgtttcccccgtcttatcgcttcctcgttcccgcagccgccgcccaaaccctagcaaacccgtcctccgccatggccgacgaccactactcgtccaagcggaagtacgacgacccctcgccgccgccgcggcgcacggggttctcttctggcccgccgcctgcctcgcgctcgcttggtcggcgccctcgtcgtacaacagtcgttgcgtccgccccccgatgtagatccagctcgcgaagccagcgtgccagtggagatcgcggcgtcggatctttaacgccgcagaggccaagcgctttcgcgtcgacaacggcgacgatgacgtcggcgctttcgggtagggaagttctctgggtgcagcngggtggtggatggtgggccgcatcgggggc

SEQ ID NO: 309784 - DNA, 303 bp, Zea mays
ggaacacaaaaatttttttttggctattgaaccctgggacggaaagtaatttacataaggggacaaacgggaaccagggggcgctcacgtgcatccgaacacctaaattttggcagggggggccggggggggggggcgggggcccctccgacccctttatttgccgggcacaaagttgggggggtaggcccatgctttgttgttgacggggtcggcaagggggtcggaaaggtttttgagggggcccttgccggggacaatggcctggacaaaaaacccgaacatggaaaacatggggggggg

SEQ ID NO: 309785 - DNA, 287 bp, Zea mays
gagatgcctgtcgccgcgcgaccggcccacatggttaccgcgctcggtggggagcccaaccccaccgacgactccctggaggacgacccttcgagcgccttcgccgacgagaagcatgttgccactattattgcggcgggtagtgatgcattgacaggccccataatagcgactaccattgggggtaagaatggcgtaccaaagaggaccattagctatatggttgagcgagttagtggaacatgatcgtttgtggtctggcttccaggcagaagtgcattgagact

SEQ ID NO: 309786 - DNA, 411 bp, Zea mays
ggacgaacggtctttctgcttttaacatggtgactcaaaagtcgaaacgatctacagcctacgggggagcaacacagagatggagagaaaactcgagatgaattttgtgtccgtccgagatgttacatctacaacacgcagtacacaacagcctgcccatcctttacgctcgttttacagatgacacaactgctactccagtcccatgaacaggtctacctcctaaaacgagatctcgctcggcgcatggaacgttcgcccacggcagatggcttccaggttctctccggcgtaggaggagagcggagaaacttcgacgcctgtcatatacaagggcacagagtgcgtcaagaagccggcgcgaattcctcctcccgcatgacctcgaaaagtgccgtggacggggagtat

SEQ ID NO: 309787 - DNA, 503 bp, Zea mays
cccacgcgtccgcccacgcgtccgcccacgcgtccgttttgccgttgctggcagcttaaggtatgaggtctctcttacctactactcgtcagtgattgtttgtttcttggttgtcgcttgtggagctggctgctgccctcttgttgtgggctctttagatgtcgcttagtcgtcgctgtggtgctacgaatgctactctctggttgttattgtttggtgtcgctgttggtgttttttgtgactgcccactagttacggacaatgttgtttgttacttggtgatcctcatggagctactctctggttattgcttgtgtgttgttctctgggtatcagcatgttgcagaaagtaaccgttaattgtctacaggcagatgagaggagaggagctccagaggctgagcgtccaacagctacaggagctcgagaagaccctcgaatccggcctcggctctgtactcaaaaccaaggtaggtatgccctgctgatatactcatgagttg

SEQ ID NO: 309788 - DNA, 251 bp, Zea mays
acaaacacaacagaccaccggggtcgaggtctaagcccacatcacattctagacgagaaaatgcaaacagagttttcctgactgatggatcatcgaacagcctcacaagtcgcagggtaatagtatatcttaaagttcatacccagggaaccttgattcaaatggatcaaccatgtccaagaggaggtatgacatcccagctttccctttaaacagtgaaaacgggcgatcaccaccatgcatggccccct

SEQ ID NO: 309789 - DNA, 474 bp, Zea mays
tttccattccattccaatacccatctccccgccggcctttcccctcccgcgtgccgatctgcctccggaggctagctcgaccggccgatctagctcgcgcgccgccgctttcagctcgatcagctgccgcacgtcgtcgaccgacccgccgtcctgtgaggcgatcgacagattactaagatggctggcgcggggggtgcgacagccgtgcagcggccggcggcggcgggggcgccggctgtggcaaggaccggggtcggggcaggcggcgcggtcgccgacccgcgcgcggaggcgctgcggtgcccgcgctgcgactcggccaacaccaagttctgctactacaacaactactcgctgtcgcagccgcgccacttctgcaaggcgtgcaagcgctactggacgcgcgggggcacgctccgcaacgtccccgtcggcggtggctgccgcaagaacaagcgctcctccaggggc

SEQ ID NO: 309790 - DNA, 464 bp, Zea mays
  unsure (1)..(464): unsure at all n locations
cggacgcgtgggcggacgcgtgggcggacgcgtgggttcttcttttgccttctttcttggtggccccatccgactccgcctgctcttcctcggcgccccatccatctgccttgcgtctgctccctctccaccaaaccctagccggccaacagagcttattgaaggccggctaggcgagagcagcatccaccgccgcgctctcatggcggcgcccaaaccgatctgggtgcgccaggctgaggaggccaagctcaagtccgaggcggagaccgctgccgccgccaaggccgccttcgaggccaccttcaaggccctcgctgccgcacccggcgacgacgacaggcgccgaaatccncgtcccgccctccccggccgaacccgcctcccccgagtccgatgacgatgccccggccccgccaggcccggtcgacccgtccaagtgctccgccgctggccccggcatc

SEQ ID NO: 309791 - DNA, 266 bp, Zea mays
ccttgcatatttgcccacattgattatggttttacacccaatatagttgcaataccattacatacccgcacaatacacctgctgctgctaaacatataggacgaacacactagtaaattaaacggccgggacggcagaagacaggccgggagcagagagctctgcgttattctctcctcgatcgtttaacggggacggatggcagcacacaaagaggagggtacgtagtagggtagcagtggccttttatgatcataattaccatg

SEQ ID NO: 309792 - DNA, 390 bp, Zea mays
gctgtctctttggccagctagagccaaccagaagagcttgcagctactgagagtgtgtgtgagagagaggatgggtggctgctgctgggctgctctgctgctggccctggtggtggcggccgtcagcctggccttggagatccaggcctacaccagatccggctactgcgcgagctactccccgacgccgacacgcaccaccccgtccccgaagcccgcgacgccccccaccaaggggccgacgccggccacgccgccctaggagcacaagcctaccagggcgcacggtcccttgccgggatcgccgcccattgagcacatgccgactccgcccacgtactccccgcgccccaatcccacgcctgcgacgtacactcccaccgctactcc

SEQ ID NO: 309793 - DNA, 515 bp, Zea mays
cccatctcgtccgtggatttagtgactcgagggaacttggtgatggtggttttggaactgtttacaaagggaaactccaggatgggagagtagttgcggttaagcgcctctacaaaaacaactacaaacgggttgaacagttcaaaaatgaggtagacattttgtcccgcctcctccaccagaacctagtcatcctatatggctgcacgtctcgtagcagccgtgaccttatgctcgtgtacgagttcatccctaacgggacagtcgcagaccatcttcatggatcccgtgcgtcagaacgcgaccttacatggcctctaagagtgaacattgccatagaaacagctgaagcacttgcatacctccatgcggtcgaaatcatacaccgcgatgtcaagaccaacaacatactgctggacaacagcttccacgtcaaagtcgccgactttgggttgtcgcgtctgtgcccttcttgagtcacacacgtatcaactgtcccgcagggcacaccatgc

SEQ ID NO: 309794 - DNA, 539 bp, Zea mays
ttctgaggcagtgccgtgaccgattcgagacgcatgagaaggatcgagacgaggcggcggttttccggggcagcatcgtctcggccacgaagatgtcttactcaaggggctcaagtgaaaggtatggatctcgctcaccttactcgagaagcacaaggtaccgaagtcgctctaggagtgtcgactctagtgatgctgaaaaccctgggaacaacctgtatgtgactggtttgtcggctcgtgtaacggatcgagatctggagaagcacttctccactgagggtgaggtgattgatgcaagcgttgtgtatgatccttggacaagggaatcacgggggtttggttttgttaccatggctgctgctaaagatgcagatcgctgcatcaaatatctggaccgttctgtgttgcaaggtcgggtcataactgctgagaagtgctctgtccattgaagattttgctgacagcaacagggtagatgttggtagctgctctgcaacatactgatacaacctaacaccaaaccatgccaacctcag

SEQ ID NO: 309795 - DNA, 538 bp, Zea mays
cgcccggctagcacaaccgcagtcccagtcttctagacgaagcgaacgtgcgacgggaaaaacacggcccccattggtcgaatccacgccggcgacgtcccctgccgccgcccaactgagtggtacaggtacaccgtacaccaatccatccgatctctgggcctaataccttggaacaagcaaaggggccggacccctaaggcggtagtgctccactccatcaagcgatgcacgacgtcaatggaagactccgccggccaggaagtctgcgccattcttggcattggggacgccatcatctcctatgattcgtcccctcgctcaacctgcatcctatcataccctatcacgtgccaagtccctgattcacggtggttgtgtggtagtcggtaacgctgcatatgaacctgggtgacatcaagtgcgaggtgttctgcaaccaggtgcctcgcacggcggagaacttcttggccctctgcgctagcggctactacgacagcactgtgttcctccgcaacatcaagggcttcatggtata

SEQ ID NO: 309796 - DNA, 480 bp, Zea mays
cggacgcgtgggttttttttttttttttttttttttttttttttttttttttttttttttttttttttttttttatttaaacccataggcccatcaattttttcacaaagggcccacccatgggcgtaataagacaggtcaaataaaagattggggggggaaacgggcagcgggggaattttgggttgaagggcagttccaagaacaaagggcttatcaggaaaacgctttctatttgggggggtcccacaaagggttctccaccctggggatccttcacgggtaagggggtcaaactgggacgggatagggataatattctgattgggggggaacccggcggcaataatagctccaagggggggacatgcagtctccccaggtgctcgctcactttctggggctatgggggcaaagaacatcgggggtgaaagcttcatgcggccctcacaactaattatttccttcaacccccaattt

SEQ ID NO: 309797 - DNA, 501 bp, Zea mays
aaattttataaatctttgaaaaaatgggttttcaaaatggcccttaaagagaagataaaaatccgagacctctgatcattagcgaccatagaaaaagtgagaagatataaaatctttgaaagttccggattttaccgagcgctaaccatgagcgcctcgcgtgcgttaaattggcagtgtcggcgcagcagaaattcgggatcaactacgggcagatcgcgaacaatctcccggacccgacgcaggtggcgaccctcctccggtcgatgaacgtgaacaaggtgaagctctacgacgcggacccccgggtgctgacggcgttcgccaacacgggcgtggagtttatcatcgccgtgggcaacgagaacctgcagaccatggccggcagccccgccgcggcgcggcagtgggtggcggcgaacgtgcggtcctacatcccgggcacgcgcatcacctgcgtcaccgtgggcaacgaggtcttctccggcacgacacggtcac

SEQ ID NO: 309798 - DNA, 143 bp, Zea mays
aacatccccccactcgattttactggggacaaaagatgaacaagggggtaaaaggaaaacatttccgagatgaagcaacaaccgaaaccgccattattttttttaaaaacccgggagcaaggcaggggaattaacaactttta

SEQ ID NO: 309799 - DNA, 393 bp, Zea mays
ccctcgctttcgaccgctacctcaaaagccagttcaaagaaccgtttccagaaccttctcgtaactctccgcctgctcctatagtgaatgagctggcgaaggaaccgatgcgcgtgcctcgaactggcgccggaggggaaattggatatgctattgctccgatgattgctcggggagttatgcccgctgcaaaccagcccgtgattgtgaacatgctagatattgcggccgcagctgaagccctgaagggggttaagaaggcggcggttgatgctgcataggctgttctgaagggagccgatgcgacaactgctggcgctgaagcgtgcgctgccgtgaatgtggctggcatggccggtggagaccgcatgaaggagggaaaggaaaggaaag

SEQ ID NO: 309800 - DNA, 390 bp, Zea mays
cccggagctcgaggagttccacgcccacgtcgccgcgcacctcgcggacctgagcggccccggcgctgctggggaggaggagttcatgtccatcgcgtggatccggcgcctgctggaggcgttcctgctctgccaggaggagttccgggtggcggtggccgaggcgcgccgccgccgcgccggggccactccccccgccgtcgagaggctggtggccgagttcggcgaccgcgccgtcaaggtcctcgacgtctgcaacgcggcgcgcgacggcgtagaccaagcgcgccgctgggagcgcctcgcgggcatcgcggcgtccgcgctgctggcgcccgccgacggtcagatccacgagggccagctccgtcgcgcgcggaaggcgctctc

SEQ ID NO: 309801 - DNA, 351 bp, Zea mays
  unsure (1)..(351): unsure at all n locations
ggcggcggtttttgccaactctgggggcgtcgacctcagcccccgccgcgcggcgcagcaagaagcgcaaactccccgagaagcagctccctgaccgcgtcgccgcgctgctcccagagtccgccctctacacgcagctgctcgagttcgaggcccgcgtggacgccgcgcttgcgcggaagaaggtagacatccaggaggcgctcaagacgccgccctcgctccagcgcacactccgcatctacgtcttcaacaccttcgctaaccaggggcctcgcaccatcccaccacccaagaatgctgacccgccaacctggtcgctcaagatcattgtncgcgtgctggaggacg

SEQ ID NO: 309802 - DNA, 364 bp, Zea mays
acttgcaaacgctatatcttgaatatgactgtactgggtcaaaagagactttacagtaagcgttccatgagaatgcatgaaaacagaccattacagctgctagactgctacttgggaaggacatgcaagcacatatactagctagctgggtaggtcatcactggctgaagaggcctgtttttcagcaatcaacttttccaaccgtttcttcaggtaagcttgcctgagtttctctctacgagcagcatcctgctcttgtcgtcgagatcttactgttgaggccttctgccttgcctcagttacttcctcatgaacttccctcacaaagcgcttgtgctcatctctgtcgattgtagtgcctgct

SEQ ID NO: 309803 - DNA, 318 bp, Zea mays
ggacacaaaaaaatccccccattggggcatacatggttttaaacaaaattcttataaagggaaaaagcctccgggccagaaggggtttccttttaatactaaggaacccccacaggaggacattaccccaggggctggggggttccaaaaattccaaaacatgggttaagggggaaaaaatcacaaattggccatgaccccgattttaacataaaaaccccccaccggtcttataaccccctttcccacgggttttggacaaaaccaatccttaccagggtccctaaccaccctttttgggttgggttttttttaaaa

SEQ ID NO: 309804 - DNA, 360 bp, Zea mays
gctggggcggtgtagaaggcacgccgccggcgctgctgtgctgctgctgctgcttgacgccgaccgccgcggcccgcttgcaggccccgaggacagcaggcgcgcgctggtcggcggcggcggcgagcgggacgacggggaggttgtcgcagttgcagacctcgatcatgaaggcgttcgggtcgtggaagaagatctggtccacgttgatgccgccctcctccacgcagcgctgcacgtacgggatgcccatctccttgagccgccgttccaccgccaccatgctctcgcactggaaggagatgtgcgttgtccttgggggttgatctcgcccttattctccgggaggctgccggggtc

SEQ ID NO: 309805 - DNA, 479 bp, Zea mays
  unsure (1)..(479): unsure at all n locations
cccacgcgtccgcccacgcgtccgcccacgcgtccgcccacgcgtccgggtagcaccaacttggaatctattcaaattctgaagaaacctggaggatctcttaaggattcctttttggacgaagggttcattcttgacaagaaaattggcattgggcagcccaagcgcattgagaatgccaaaattttggttgcaaacactgctatggacacagataaagttaagatatatggagcacgggtccgggtggattcaatgtctaaggttgcagatattgaagctgccgagaagcagaaaatgagagagaaagtccaaaagatcatagcacacgggatcaactgttttgtcaataggcagttaatctataacttccctgaggaactctttgccgacgctggcatacttgcaattgagcatgctgactntgagggcattgaacggttagctcttgtactggtggtgagatcgcatcaactttt

SEQ ID NO: 309806 - DNA, 377 bp, Zea mays
cctttgtacgtagttggccacccagtggccggacttgttctcgtcgccgcaggtgagcttgggcggcagcctgtcgaggaacgtgatcgtgtacaccgggctcgggttcatgaagaagtagaaggggtccatccccttccaccccctcgccgtggtgccgtggaacatgcccatccggcactccaccgtcaccggcacgacggcgtcggtgagctcggcgaacagcgccgagaaccgcagcaggaacgggtcccggcacgtggtcccctcggggcagatggcgaggtcgccctcggcgagcacgcgcccgatggtggccgcgtcggcgctgcggtcgcgggtgagccgcacggtgcggatcggggacaggaactccg

SEQ ID NO: 309807 - DNA, 364 bp, Zea mays
gacttatatttgttggcattgcaatgcttatcctatcaccctgccttgtgatatttccattggtgtacgtcattctaaggcatgctgaagaaatttataatcaccctagtacagcatcatctagacggtggtcaaacttatcaaggtggatctttagggaatataacgaggttgatcacttctttagacacagaatgaacaacagtgctgttcattctttaaattacttgaagcaatttccaaccccactggtttccatcatggctaaatttgtatcttttgtttctggtggcttggctggtgctctaataatcattggatttgtgggtgaatctattcttgaaggacatatttttggaagaaa

SEQ ID NO: 309808 - DNA, 227 bp, Zea mays
aacctaaaattacaaatcccccaggtaacatgggaaacttgccatagaaaaagctcaaatcccgactttgggatggccaaaaaaagagaccccgttttgaaaatgagattagcagctcccgggaatgcgctaatccgcctaggtgttccccaggaattcccccggccttttttttttcctggggaaggccggcagagagatcatagtccatgggggaaggaagcagg

SEQ ID NO: 309809 - DNA, 227 bp, Zea mays
gggaaaactaaaatttttatttctccttgagggagacaagacaactgttgctcctgggaagaaggacctaagcctttttaacactgcctttttttgggctggcactgagcttttttacagttttactgaacctccaacttaactcacacacagggtaacagtttagtcggggtactcggccaaaaacgcctaatggaaagccctgaagcgggtgatcaccgggggga

SEQ ID NO: 309810 - DNA, 286 bp, Zea mays
ggaacagggcgaggttactattcatctatttataggcacgggacgcagcccgaataaaattatatccgtatccttaaacgcttatttacaagcaactaaagctaataagggctatttagtcttttatttctttgcttgatccgagccgaaggtattgagccttcagcattctgcagcgttgcttatacacaaagtctttgtcttgagatgcaaagccgaggttgatgatagtttcggagagcctttgtattatcttgccgaatgtgtttttgtcttgaggaccttt

SEQ ID NO: 309811 - DNA, 345 bp, Zea mays
gctgaattacagatgtgaactttaagaacgtgtaaaatacaaaacaaaacaggttgaaggcacaaatttacaacaccaaccatttgctaaaaacataacatcagaaaaccctacatccagtgtaaaaaaaaagcccacatgtttgctagaagaaaccaaactccaagtagccgtcgacacctttctggggtgcaccaacggaggcatcgtcagcagcagctccagacggcgatgaaggatgatttgacggcctctcgatctcgacaggctttggtacctccggtgggcttgcgcaccttatgagcgcccaattcacgccctcaaagaagggatgctgtttgatct

SEQ ID NO: 309812 - DNA, 357 bp, Zea mays
  unsure (1)..(357): unsure at all n locations
acagtagaagtagaagcctgggttccttgcatatttgcccacatttattatggttttacacccaatatagttgcaataccattacatacccgcacaatacacctgctgctgctaaacatataggacgaacacactagtaaattaaacggccgggacggcagaagacaggccgggagcagagagctctgcgttattctctcctcgatcgtctaacggggaccggatggcagcacacaaagaggagggctacgtagtagggtaggcagtggcctcttatcatcatcattaccatcagcagctcatctttgccggctggctaggacacaacccttncattgatccagaccacctaaatgc

SEQ ID NO: 309813 - DNA, 352 bp, Zea mays
cccacgcgtccgcccacgcgtccgagcagcagaggcagcgacacgatcgcgagcgcacgcacgtaagcacgttgtcggaagctcaagttagaagaagcaccagtgcctgatcgatggcggcccaggctctcctctccggccggcagctgctgggccgccccgtgcagtcggccgtctctaggtcgtcggcgaggaaggcgcccttcgtcgtcagggccagctccagccctccagccaagcaaggtgccgacaggcagctgtggttcgcgtccaagcagtccctctcctacctcgatggcacgctgcccggcgactatggcttcgacccgctgggcctctcggacccggaggg

SEQ ID NO: 309814 - DNA, 497 bp, Zea mays
cccacgcgtccggttttgttcggatctcacccgattacgagtatatacatcccgcttcgctccttcccgtggcgattcgccgtgttcttgacctgttgcggtgcctttgcgttggtgcagtaaggatgacgggctcaatggatctcccggccaagggcgggttcagcttcgacctgtgccgccgcaacagcatgctggagaagaacgggctcaaactcccgggattcaggaagaccggaacaaccatcgtcggcctcgtctttcaggatggggttgttcttggggcagacacaagagcaactgaggggcctatagttgctgataagaattgtgagaagatccactttatggcgccaaacatttattgttgtggagcaggaactgctgctgacactgaggctgttacagacatggtcagctcacagctacagctgcaccgttatgcaacgggtcgcgaattagagtcgtaactgctttacactgctgagtcacatctc

SEQ ID NO: 309815 - DNA, 355 bp, Zea mays
gcggttggcttctcctccccctgcggctcgggttcgggttcgagcgggtctacggggtccggcttcgcgggcgagcggatccagatggctgactccgactgtggaggccgctggtctggctctgcctgattgcgcacggacgaccacttctccacaacgtcattattacctacaagcaggtgactcggtgcaagatcatgctggatcggcagactcacaggtacctgcaggttcggcttgataagattgtgcacggaggaggcaattccctacgccatggagggcatgaacggtaaggaactggacgggcgcaacatcaccgttaacgaggcccaaacctgatgcagacgtgcag

SEQ ID NO: 309816 - DNA, 418 bp, Zea mays
ggctcgtcctgcccgtctcaccaagtcctcctgggatcagggatccttagggtactgtggaggggcgatggcggcagctgatgtggagtaccgaagctacgacggctggctagcctgagccaccagcaacaagtctgctaaagaatgcctccgcctactactgcgagatcctagactacaaagtcattaccgaccgaactacagagaggtgtatccgcataagaatttttaccttctcctacgagaactccatgctcgacgctatcgagaacatgaacgggaaggagctcgacctccgtgacataaccgtgaaccaagcccagtcccatatcggtggcagtatgctacagtggatacggctgacatcactgtatcagttgctatagtgacctactccgtgaccgcatatatgacctaa

SEQ ID NO: 309817 - DNA, 507 bp, Zea mays
  unsure (1)..(507): unsure at all n locations
cccacgcgtgcgggagtccgtgaagcaacagctgcgcccagagacgcacgagcatgttctgcagctggctgagaggtggagtcacagcgccgagacgaccaaggtgtgcntnattaccgacaggctgacgggcgaggagcagaggagggcgcagggcggcgcccacttggagccctactctgaggtcgctgctggcgccgactgccgcgccgactgcgtctaccacatcaccccggcgctcgcggtgccggacgcctacgaggacctgcactcatgcgagaactggctgacgagcagggtgatgagcgcgtggctcgcggacgccatcgagcactcgctcgaacgctagtacgcgcacgagtgcagcgccagggacaccggctgcgacaaggcctggcgcgacgggctcggccactgctaccgctattacgaccgctatggcgccaagtgactcttgaagagaccattaccaactacgacgactacttcgacacggacctgtgcatg

SEQ ID NO: 309818 - DNA, 366 bp, Zea mays
gtgttactggcgctgggaagcacgtcccccgtggggtttttgttgaccttgagcccactgtcatcgatgaggcgaggactggcacctatcttctgcgtttccattctgagcatctcatctaccggcccggaggatgcatccaacaacttcggttgtggtcactacaccattggcaaggagattgttgacctgtgccttgaccgtatcaggaagcttgcatataactgcactggtctccagggcttcctcgtcttcaacgctgttggcggaagaacgggctctgggcttggatctctcctcctggagcgccttgctgttgactattgcaagaagttcaagctcggtctcaccgtgttccccaccccc

SEQ ID NO: 309819 - DNA, 509 bp, Zea mays
ttttgtactgccaagacgcccaccaatcttgctacaggtcatgtcgtctccttaatcattacaaaactaaccagtactgatacctatgttccccgtgccgtacatcccggcagtttgcaactcacatgcttgtcctttggtccttgtgtaattttgcagccaagaattctgcgaacctggaacccttcgttgtcgtcgactaaaattcgattcttgtgtatgtgtgtgtgtgtgtgattttagcagacgtgtctacggacggccactggtgcttcgtggtgttctgggtggtgccccgctcctcgtccatcagaatccggtgggcgagcctcaagaaccggctcatgtcgatgtgcccttcctcctactccatcccgttctacccggacatgagccagccgggcccctcgcagttctaccttctcaagctcttgtcaccggaccgcaaaggattgctgcacgatgtgacgcacatactatcagacttggagcttataatccacagagtg

SEQ ID NO: 309820 - DNA, 487 bp, Zea mays
  unsure (1)..(487): unsure at all n locations
attggcaggtcactgccgttgccgccgcgatgaagaggtacggactgcagctccgcacgaagccgccatcgtcctcgtcgtcacgcgcgccgccacctcccgcccggcccctggcggccttcgccgacgacgatgacgatgatgtggaggcagaaatcctccgccaggcggccaagaagcgctccctccagaaggttgaggagcagcaaaagaaggccatggaggaggatccctcggtgtacgcctacgacgagctgtacgacgaaatgaaagagaaggaagcccgccctaagatgcaggataaggtcgtccgcgagtcaaagtatattgcacaacttaaggaaaaagcagagctacgcaaacgagaacaagatataatatacgagaggaagcttcagaaagagagaagcaaggaggaccacctttttggggacaaggataaatttgtaacatcagcctacaggaagaaactngaggagcagcaaaa

SEQ ID NO: 309821 - DNA, 530 bp, Zea mays
ttttcgcgtgggccaagatagaaccagataggggcttgcataaaagagtagagattaagacccctgaactaatagaaaggatgagagaaacatgtcgaattgcaagagaggttttagatgcagctgctcgtgttattaaaccaggagttacaacagatgaaattgatagagttgtgcatgaagagacaatggctagagaacttccattgttggtgatcctcaggtggatacccatctccattgaattaccatttcttccccaagtcatgttgcacgtctgtcaatgaagtcatgtgccatggaattccacatgccaggaaacttgaggatggtgacattgtaaatgttgatgtaactgtatactataaaggtgttcatggtgatttaaatgagacatattttgttggaaatgtcaatgaagcttccaaacagcttgtacgttgtacctatgagtgcttgcagaaagctattgcaataggtgaacctggagttcgggtccgagaggtcggagaaatgataaatagacatgc

SEQ ID NO: 309822 - DNA, 425 bp, Zea mays
ctgtactcctgggtgtggtgccgctccattattccgtcgacccacccgtccgctttcttcctccctcctgccgggtccttaataaagggggccatctcaagaggttggtggatcgagcgagaagaaggcaatggcggcggagagcttcctgttcacctcggagtccgtgaacgaggggcacccagacaagctgtgcgaccaggtgtcggacgcggtgctggacgcctgcctggcgcaggaccccgacagcaaggtggcctgcgagacctgcaccaagacgaacatggtgatggtgttcggcgagatcaccaccaaggcgagcgtggactacgagaagatcgtgcgcgacacctgccgagagatcgggttcacctccgacgacgtggggctcgacgccgaccgatgcaaggtgctggtgaacatcg

SEQ ID NO: 309823 - DNA, 521 bp, Zea mays
gctggtgcgcctgggggtgccgccggggaggtactggggggacccacgcggccggctttttattatgattacactcaatttcctgtgtgtgtggatatgttggacaaagaaataggatctctgatagccgaatcagatgatttaagggttacagttcaaagcaaagattctttactacaggttgagagggccaaaattgaggagttgatgcgtaaatcagatggtctagaagcttcattgagccaaaaggattcccagatagggttacttcaccgggacagagcatccaatcagcagagcagatctatagaattgcctgcgacttcagagattgagcaaatgaatgacaaagtgagcccagctgcaggtgtcactcagattcgaggcgcacgaaaagtcatcaatgaccaagttgctattgatgtagagatggagaaggacaagccttttgatgatgaagatgatgacaaagcccatggtgtcaagtcattgactatgtcacgctttgtgctaaattcact

SEQ ID NO: 309824 - DNA, 261 bp, Zea mays
taagaaggtcatgtgattgcttatgcatctcgtcagttgaggaagcatgagttgaactaccccactcatgacttggaattggctgcagttgtacatgcacttaagatttggagacactacattatgagaactaagtgccaagtatacacggatcataagagtttgaagtatatattcactcagaaggatctcaacctgaggcaacgccgctggttggagcttattaaggattatgacttggagatttactattacccaagc

SEQ ID NO: 309825 - DNA, 299 bp, Zea mays
actagatcctcaactcccctgaccgtgcttgcaaccttgcaaagcaggcctttgatgaggcaatctcggagctagacagcctgggagaggagtcctacaaggacagcactctgatcatgcagctcttgcgtgacaacttgaccctatggacttccgacaccaacgaggacggtggggatgagatcaaggaagcagttgctgtccccaaagaatccgcccctgagggccagttagacaatccgattttcttacctgatgcatgttttcctacttctcgttatattttcaatttctgttat

SEQ ID NO: 309826 - DNA, 361 bp, Zea mays
agcgtgggccctcccaatcaagggcccatttaaagagatagatagttgggtttagcccaatccggtcactgatgaccagctgtagaggacacacccaacagtgagttgttcggaacgaactctctagaagcttggcacgaccccgtaggccccggcgtccacgtagaagccgtccctggcgtcgtcggagaaggagagccagaacttggcagcggcgcgcgtggcgtcgttgccgtcgtcgggtgtgccggcgcccgaggaggagggaggaggtgccagcagcgcgcttgacgaagcggtccttgatcctcggccgcacctccggcgtacgccttgcgggacgcgtagcggatggtcttgt

SEQ ID NO: 309827 - DNA, 316 bp, Zea mays
gcaggtagccgccgcgcggaatatcccgggggcgacgccacgcgtccggctaacaacaccgcgttacatcggcgagttcatgcggcccgattgggacatgttccatagcttgcatccggcggcagagtaccacggcgcggcgagggccatcggtggctgcccgatatacgtcagcgacaagccggggaaccacaacttcgagctgctcaggaagctcgtgctccccgacggctccgtgctacgcgcgcaggttcccggccggcccacacgcgactgcctcttcttcgacccggcgcgcgacggtgagagattgctt

SEQ ID NO: 309828 - DNA, 269 bp, Zea mays
aatatgtggaaagaagcccttaacaaacggcttggaactaagggtcttgacctttctgaaatcatagtggaatcagagaaacgtgggataacatttgacaagttactaactgttcctgagaacgatagctgggtctatgaagatggtcagtcagcatcttgtgttggttttctcccctatcttcatcatggatttctgtactctttttcttttaataccagctttttttattttttctttctcctcattacattttatttcttttcttt

SEQ ID NO: 309829 - DNA, 361 bp, Zea mays
acgctagcgtccgcccacgcgtccggacgtacgagctcttttggtgagcacgccggacaacctgccggtaagctacagtgagcttgctatacattggatgacacgattttgtactcgttgtacgaaaatgcgactaattaaaggtggatagggatagaaaaagtccattaattttgttcaactgggcccaccgaggaaatcgtctttaaatagttgagtaactaaattgcttctcaaagcttcagcactggtagaagcctgggttactagattattattttgctgggccaaccactgttgataatctgtcaatagttgtccttggagtcattgtttgatgcgggccaaaattccccttaat

SEQ ID NO: 309830 - DNA, 165 bp, Zea mays
aggcggcgacgccgctgctcgccaacggtgcagtttacgtccgccggaggagggtccaggcgaaggcaatattgtgcacgcagttcgtcaggatcgccaccaaggccgagcagtatgagcgcttcatctttaaggtcacacacttgctgggtgcttcttggattt

SEQ ID NO: 309831 - DNA, 546 bp, Zea mays
tcgtgttcaagtcgagcggcggcgcctgcgcggcgtttttgtccaactaccacaccagcgccgcggcgcgggtggtgttcaacggtcggtgctacgaccttccggtctggttcattatcgtgctgcccgacttgcatggccgcttttttttttctcttttatcttttgttttttttcttcttttttcttattttattttttctctttgttcttattttttcttttttttatttatttcttttactttattttcctgttttctttttttaattttttttttttttcatttttttttgctttttatttttatattttttttttctttcttttttttattctttattttttctatttcttttattttttttttttcttcttttttttttttccttctttttttttttttttttttttttatctttttattttttcttattttctattttttttttttttttatctttttctcttatttttatttccttattttttatctttctattttttactttcttttcttctctttatttctttattttttttctt

SEQ ID NO: 309832 - DNA, 473 bp, Zea mays
tccacgcgtccgaaatgggtgttgtgtcatgttgcagctcgcttatcaggaagcgagtcaaaagctgttcaggagcttgatgcagctacttccaaagaagatggaccagtagcatcatcccttaatcgaaccaagcgttggcttctctctcactcccaacatctcaacttcttctctatcttgattcttgcttcggttggtctcctgtcttccatcctctgttaccaagttcttcagtgtggatattttacacctgtaatttatgatatttggctttgtgtcttcacaattgatcttttttgcacctttggatcatgtgcaagctttagctccacatttaaaagctgtctagataaaatgacaccaacaaataagcgtatggaacattccctatacatcagttgccataagtttctctaaaggatttttattctatttttaaaaataattgcctaattttaatgctcttatta

SEQ ID NO: 309833 - DNA, 446 bp, Zea mays
tttgtcgcgtgggcggacgcgtgggaacgcagtggtgacagtgccggcctacttcaacgactcgcagaggcaggccaccaaggacgccggtgtcattgcgggcctcaatgtgatgcgtatcatcaacgagcccactgctgctgctattgcctacggtcttgacaagaaggccaccagctccggcgagaagaacgtgctcatcttcgaccttggtggtggcacgtttgatgtgtcgctcctcaccatcgaggagggcatcttcgaggtgaaggccactgcgggcgacactcaccttggcggcgaggacttcgacaatcgcatggtgaaccacttcgtccaagagttcaagcgcaagaataagaaggacataagcggcaacccccgtgcactgcgccggctgcgcacggcgtgcgagcgcgccaagcgcacgctgtcatcgactgccc

SEQ ID NO: 309834 - DNA, 354 bp, Zea mays
aatatggcgacacctatattgcctctctagattgcaaatggatccaaaacaaagtcctaggcatgagtgctttaagctctcttatcgggtcattgataaatgcaatcgaggctgaaccaataatcgcaaagtgaaagtcactagcttgaagttcgaacattatgggcactattgaaataatgtgtggtgaatgcgatggttcaagtggtcttgtgagagacccctcccacatatgtgttgaataaacactgttccgctatgtaatatatcggataatacattcctgatgaatgaccactctccagtgtagagagaatctctcatagttgagattatagttcccagctggaacct

SEQ ID NO: 309835 - DNA, 518 bp, Zea mays
tatgacatttattgtctcacgattgtgatcaatataagcattcgctccccctgacgatgacatcagtcaaagtcgttatccctcataactcaagcatatttttcaagatatatgtctcactgttcatctagaataacgagaatggatgaggttggggtgctatcattttctatcttacaccacaatctatacatagttgtgcaaagcaaataacatgtccatcaataggacttaggggataatatagttgcaatagtacatattctaaatatgacacatcgctcaaggcgttcatcgattgcaacatctatgatggtgtaacaaaagtccatcaaaaatcgtaatccatcagggatttttcatcgatcagatacatcgttatagtctgtcagcacaatggggatattttgccagtaacacttaaaccttatagatttctgccatcatggctttagaggataccgtaatccacatctagtggaaaataccatgagttaaactcatggaatgcacatgtg

SEQ ID NO: 309836 - DNA, 351 bp, Zea mays
gggtgctgtgctcccagctccatcactgacacaagagagcacgctactactcatcactcgccaacgtgcagagatcagggaggcggcacactccatccactgaccgctcatggcgaaggtccacctctacgtcgccgcggcctgcgccgtcgtcctcgcgctcgccgccccggccctcgccggcgaccccgacatgctgcaggacgtctgcccggctgactacgcctcccgtgagtcaaaacccgatcggtcttctcaataagctagcttcctggcatcaactctgcttcttgtctggtggtcttgttcttgtgtttttatatgtatcgcgacaaacaatcgacttgctgc

SEQ ID NO: 309837 - DNA, 382 bp, Zea mays
ctcctcttccggccaaccagaagagcttgcagtggcggatagtgtgtgtgagagagaggatgggcggcaacggcagggctgctctgctgctggccctggtggtggaggccgtgagcctggccgcggagagccaggccgacgcccggtacggttacggcggcgggtacaccccgacgccgacgccggccaccccgaccccgaagcccgagaagccccccaccaaggggccgaagccggacaagccgtccaaggagcacaagccgcccaaggagcacggtcccaagccggagaagccttccaaggagcacaagccgacgccccccacatacaccccgagccccaaacccacgccgacaaacaacacttgcaccccaacgccctc

SEQ ID NO: 309838 - DNA, 469 bp, Zea mays
ggttgatgaagaacttaaaaaaacttgaaacagcttattttctaacaaggtccaagttggcgaagcaagttggcaaccagataaatagttgtaatcgagttgttaagaggactactggttcagctgttgggacagaagcaagttcaatagatgatttttctttggaaaggcaatatggtagaaggcaaagaggttgggtgaactcttttcttgagggattgtgcaagtacttgtcattcagtaagttgaaagttcgggcagaattgaagcattgtgattcactgaactcatcaaacttagtatgctccgtagggtttgaccgagatagagagttttttgcaactgctggtgtaaataagaagataaaagtgtttgagtataatatgattgtaaatgaacaccgtgatattcactatcctgtggtagagatgtctaatagatcaaaactgagttgtatttcctggaacag

SEQ ID NO: 309839 - DNA, 317 bp, Zea mays
acgttgctaaacttgtacactcttttttatatataattgtcaccaggttctgtcatgcatcagggatagccaaaaaagaagtgatcattttttccttgtacctaggtcaattcacgtaaaaaactataaacgcgatacatatacattatacaatgcggccaaagtaggcaattaataaatagatagacgaaaccaacgactgatgaacaacagaacgaagtctgaacgcaaggtacaaactactagtttattcgccaagatacatagactagcaaactcattttcctagtacctactgatcaacacgaaatcgtcat

SEQ ID NO: 309840 - DNA, 284 bp, Zea mays
ctgtcgcgtgggttatcccagagaatactgccctcccatgtgtggtctattgccatggaaataggtctatccggcggggattatgtcagtttgggttggcatgagaaagaagacctcaaatgtgcggtgtcatgtcttcgggacaataaacaagtttccactataggcctttgggggcgatcaatgggtgccgttacatgcctactctatggagcagaggacccttctattggtggcatgatattggatagtgccttcactaacctgtatgacttgatgatgga

SEQ ID NO: 309841 - DNA, 440 bp, Zea mays
  unsure (1)..(440): unsure at all n locations
cccatccttccggtttaggcattgctaccaatggggggcattttcaaaccaacaaactctatttatcacaaaagcaaagacacaaaaggggaggcccatggcacaccagcagagcaactgctggcatcaaacaatccaggatctcagaagaataggccacacacaatgtttgcaagtggtccgccgacccaaggtcttccaaatggtggtccgcctgtgccacggccttttggcaatggcacaattccgggacagattcaacacattcgacaaccaccaccaccaccacctgttggaaaattcccccctccaatgcagatgcacgggcaacctgcctggcccgctcaacattctatgcctccccacatgtcatctcaactccagtacaggctcccgatgaggccaccaccaccaaatatgatgccccctcncgttggcat

SEQ ID NO: 309842 - DNA, 501 bp, Zea mays
tttcacgcgcccgcgctccaaaccaacctaggcaattcgccgcagggtctcatttgagcgagtcccggcgctccctcacccgccgcacagatggcacccaaggcggagaagaagccggcggccaagaagcccgcggaggaggagcccgcgacagagaaggtggagaaggctccggcggggaagaagcccaaggccgagaagcgcctcccggcgggcaagtccaaggagggcggcgagggcaagaaggggaaaaagaaggcgaagaagtccgtggagacctacaagatctacatcttcaaggtgctgaagcaggtgcaccccgacatcggcatctcgtccaaggccatgtccatcatgaactccttcatcaacgacatcttcgagaagctcgcggccgagtccgccaagctggcgcgctacaacaagaagcccaccatcacctgccgcgagatccagacctcggtgcgcctcgtcctccccggcgagctcgccaagcacgcc

SEQ ID NO: 309843 - DNA, 467 bp, Zea mays
  unsure (1)..(467): unsure at all n locations
cgctgatgnttttcgatgggtggccacaaaaaaacatgtgggctttgataacacctactttactaaaaaatctgggcagtccggactggaaggtacgattggagtccatagatgcagtcaccaaaattgtggaggaggctaataaacgtatccagcctacaggaacagctgacctgttcagtgcacttagaggccgtctttatgacagcaacaaaaatttagtaatggcaaccttgtccactattggtggccttgcatatgctatgggaccttctgttgaaaagtcaagcaagggtattttggcagatgtcgtgaagtgtcttggtgacaataagaagcacatgcgagaatgcacattgactgctctagattcatggattgctgcagcccaaagacactataatatatggaaccattttgtcaagttgggggatcagaaaacaggttcagaagggcgaaagatctct

SEQ ID NO: 309844 - DNA, 233 bp, Zea mays
agcaaaaaaaaaaagatttgcccaagcagtacggggtatagcgtaaatgggtggttcagagggatgaatgatataatgcctactggtccatatgtacaaaaccccccgggacattttcagattgcctagggaaaatgcggggggcgagggccattttcttccagtcacttgaaagggagagctcattgggaaggtaacctatccacctgaatagctgatcgccctgccccggg

SEQ ID NO: 309845 - DNA, 530 bp, Zea mays
  unsure (1)..(530): unsure at all n locations
cccaattgttcggaacagntacccatagntcttcagggcctgtttagtcaatcacacagttttagatcacttgttctgctcggaagatttcttgacatggggccgtgggcagttgatttggccctgtctgtcggaatatttccttatgtactcaaactgcttcaaacaagtgcaatggagttgcgtcaaattcttgtgtttatatggacaaaaattctctctcttgataagtcgtgccaggttgatttggttaaagatggaggacacacatattttgttaggtttcttgacagtttggatgcttacccagaacagcgtgcaatggctgcttttgttttagcagtcattgtggatgggcataggacaggccaagaggcttgtatgaatgcagggcttatagatgtttgcttgagacacctgcaacctgagaatcctcatgattcacagacagaacctttacttctacagtgggtttgttatgccttgggaaactctgggaagatttcctgatgttcagctgcttactttac

SEQ ID NO: 309846 - DNA, 418 bp, Zea mays
  unsure (1)..(418): unsure at all n locations
cgggcctcgtggctggcggnggccctcaatctgaaggtggccttttaaggaggtccgggcttacttaaccgnccgaatcgccgactccgtcttctctctccacaaggcggtgatggtgcccaagtgcggctacatccgccgggccgtggcggcgagccagacgcagggcccggggggcggcgccgtcgagctggacctctccgcgctgccgggcggcgctgacgccttccagaaggcggcgcgctgctgctacggcgacagacccgagatcacggcgcgcgacgcggcggcactccgctgcgccggaggagttcctcgacgcgccggacctgggccgccgcgccgacgacttactcgcgcaggccgcgctgcgcgcgctcccccgcgccggcggcgtactgcggtcctgcgaggcgct

SEQ ID NO: 309847 - DNA, 344 bp, Zea mays
  unsure (1)..(344): unsure at all n locations
cgccccgatacacaaacaggcagataaggacacggggancttttaaaaacaaaggccgttacataccccaccgncgncgngacagctccaccccattccgaagacaccacgagggagtgcatcgccagccacacaggacaagccaaccatccagggcggaaacgcgagctgacagctgaacggcacacgaacatagcaaccaggctgatggtcagatgccccacgacaagaccactggcggggcagataatacttacaacacctacttcaacgaaaccgacactggcaagcacaagcctctcaccgaggaagaggaccccgaaccaaacgccaacaaacaaaag

SEQ ID NO: 309848 - DNA, 268 bp, Zea mays
  unsure (1)..(268): unsure at all n locations
aaaccgaaccataatacggtattttttaaaacgcgtgggccgataataacgatcaccaacaaaaggttctcacgcgcatacaccgngacgaccaccataaaccgagcagcgactgggccagccagccactgcattatacacactagactgacacaaaccgcttagtccacctcctcgatcttggggccagggccaccgcttacagccggagcgtcctcgtgcatgccgtctgagcctcccatgttggcacccgcgccctggtacattt

SEQ ID NO: 309849 - DNA, 330 bp, Zea mays
gcgtgaacagtacgggggtactgttcatttatttataggcacagggcgcagcctatgtaaaattacattaatggcctttatgtttactattgacttaaggacattaatgttcctttttctgctgctgagccgaagcttccttgcgcgtagcttcaaaactggttcaaccttcgtcccgaccatgcttttcatattggggacaggttcattccgagtccgaaagtttctgtacatatatcatacttgggaaacattggtaatcatgtttttgaggaccttcggaagacgaaggcccccaacagcgcactaatactaaattcactcgaaact

SEQ ID NO: 309850 - DNA, 305 bp, Zea mays
gggcaaaaattttccccccattttcctatttttatttccaaaataggaagttcgagataaaatttgggtcccttagggggggcccttcccctttttaacataaaacttctcccccaattttgtttagcccagcttctcgacctggcattttcccccgggaaggaaaaagaataacaattcccattccccccaaaaccttaggaactccttggtggggggcataaattccaaagccaggtcggttgatcccctttaaaaagggtctaggtctatatattccctttttaggctttctcctttggggg

SEQ ID NO: 309851 - DNA, 410 bp, Zea mays
  unsure (1)..(410): unsure at all n locations
gtccaggttgtcgggcccgacggggtgcgcgtcctggagacgcgcgtcgagggcggcttcctcttcatcgtgccccgcttccacgtcgtctccaagatcgccgacgcgtccggcatggagtggttctccatcatcactacccccaagtaatttgttgtctcgatcgatccatcgatctttttttttattgcgaattgcactggagatttgattgcacgtgaattaatgtttgcattgcattgcagcccgatcttcagccacctggccgggaagacgntcggtgtggaaggccatctcggcggaggtgctgcaggncgtcgttcaacaccacgccggagatggagaagctgttccggtccaagaggctcgctcggagatcttcttcgctcccccatccaactgagcaaata

SEQ ID NO: 309852 - DNA, 283 bp, Zea mays
gggatctcttccacagaataactttgagttcactgttatcttggaggaaacatcttcaagggctgctggtggaagtccagtgcatgaaagccctactcaagctaacaaaaagcgagtcaagcgatcacatctggcaaaaaagttcagtgtagacataagttatgccgcaaagattcctcttcagtcggctgctttggctcttcgaggaagcgagtcagaacatggtcaagatgttctgagagtccttgacgttgttttaaggcaacagcaggctaagagaggt

SEQ ID NO: 309853 - DNA, 316 bp, Zea mays
atccgaaagaggcgcgtgccggcattcaagaagttcatttcctcccattcaatccaactgacaagagaacagcacttacatacttagacgctaggggtaaaatgcacagggttagcaaaggcgctcctgaacagatcctgaacctagcatcgaacaagtctgagattgaaaggaaggtccatcattctattggcaattatgcagagagagggctacgatcgcttgctgttgcctatcaggaagtacctgaagggactaaggaaagttctggtgggccttggcaatttattggtcttctcccactctttgatcctcc

SEQ ID NO: 309854 - DNA, 277 bp, Zea mays
aaagattgtgcaaaacctcgagaaatctgtcagattcatgtttagtccaggacaacacacgcgtacgttcttctactgaagttgtactcccttcgtttttttagttgacagggaatatatacagccacgaccaagtacaattgccaaataactttccgactatatatgtacaccggaaattgggcatagctatttaatctggaacgggggaacagctatagcaggggtataagactgcttcacctatggttgaagaacttggacccccctgaggact

SEQ ID NO: 309855 - DNA, 496 bp, Zea mays
ccttcccggctttccagaaactctaaccttgctacccatgtccgtcgccgccgccgccgcccgcgcggcgcgccggcacttctcttctcggctccagactaccacctcgcgccttctccatgcaagtgattctcaggcagcggcgcgggagacatccgggagcttcatccaccccgccgctgtcgtccacccggatgcagccatcgggcaggctgtctcaataggtcccttttgcactgttgggccttcagccagagttggtgatacctgtcagttacatgccgggagccatgtcatgggccatactgagctaggggagggatgcattgctcaaactggtgctattgttggtgcagatatccctggacggacaattattggggaaaacaatgtcatcggacactatgctgttgtttggtgcataatgccaagatttgaaatataagactggagatgaatgctttctacatattggtagaaataatgagatcagaga

SEQ ID NO: 309856 - DNA, 386 bp, Zea mays
ccggcgcccgccccggagacggggctctgtctacactgatccgcactatctcgcgctcgcccgcgccccggccccggcggccggccgggtgagcagtagctggagctgcgtctgcgtgcatggatccctcggggccagccgggccgtcctcggcggcggggagcggcgacgacgcgctcgcgccgccgcagcatcaggtccagccgctggctcaggcgcagccgcagccgcagcaggccgctccgcctccgcagctcagcaggtgcgaatcgcagaagcggcgggactggaacacgttcctgcagtacctgcggaaccaccggccgccgctcacgctggcgcgatgcatgggcgcgcacgtcatcgagttcctcacgtacctggac

SEQ ID NO: 309857 - DNA, 430 bp, Zea mays
agaaaatatagaatgtgcacctgtatactctggcgcaaggtaccctatattgccagcaagtcttgtgtctatggtctacggagatgcacttcccatcatctggtgtaagactaaccaatctaaagttcgccaccttggctttcatgtcagtatgtttgatggattcaagtctatgtggataaaggtctgctgggcaaggctgggaaggtagtaaggtactcaacggcccttgcaacatcaagcgcaaatgtgcaatagcggcgccgctgtacacacgtacggtgtacgcgtacacgacacaccctcgctcgttcgacccccacatgaaccatgcacagatgaatcgttgcccggcatgccgcctctcgctcctgggaatgctgcgcggcgcacctagtcttgtgggcgaacagcgacaatcttgcccccg

SEQ ID NO: 309858 - DNA, 496 bp, Zea mays
gaagaactggaaactcggagggatttactttattctgaaatgaattatctcgaaaccaaggttgaggagactttgcaagattcaggtaagacagacttcaagaatgagattcatgttatggctgcagcactctccaatgaactgggtatgatggagaatcagttgagtcgatcaaaggatgcagcttctgaagcacttgcattgcgtgagcaagctgaatcattaagatcattggtagctaaaaagattgaggaacacaagaagattttggataaatacaactcacaagtaattgagatcaagtccctcaaggcattggttgaggagttggagcaagaaaagcaggagctggagtttattgcagatatgtacgtgaaagaaagttctgagtctaggacaattgctgatattgaagaatcagaaacccgagctcgcaatcaggctgaatatttgaggaagcatctagaggagcatagtcttgagctccggttaaagc

SEQ ID NO: 309859 - DNA, 423 bp, Zea mays
accgcgtcgggaactcggggtcggctagattgactacccgcttgcgttccgtcgccccgttcgccagaaccatggacggcatcgagggcctgctggcccgcgacttcggcgtccggccgcagggcaaggccgcccccatggccggcgcctcccgctccaccggatccagctgcgcccgcaccggtgacgagcacgactacttccgcgcggcgcaggtcggggacctcgaggccctggaagcgctcctcgacgctgacccctcccttgcccgccgcgccacgctctacgaccgcctctccgcgctccacatcgccgccgcgaatggccgcctcgaggtgctgtcaatggtcttggatcacggggtgccgccggacgtggtgaatcggcacaagcagacgccgctgatgctcgcggcgatgcacg

SEQ ID NO: 309860 - DNA, 469 bp, Zea mays
  unsure (1)..(469): unsure at all n locations
tagacgtttcacggatgtgagatttgatttatagtgatagtatatttgttatcagcaacatgggcttcagttcatcgggagatgtgttaaattgcaagtatattttcttaattatttttaagttttttcgtatgattgtacaatgtatacatcaaaattgtgtagttgtatgcttgctaccaagtcaagcataatatcatatgaatgcaaataattttcgtaaaacttgttcctttgcatatattgcagctaccatactaaacaaaattgatttgtgttgtttgcaataattcagcacctacgaggttgctactgcatgtgctttagccttggaggcagataaacttatctgcgttgtagatggtcaggtatttgatgatcatggacgggccattcaatacatgtctattgaggaggctgatntgttgattagaaagcgtgctaggcaaagtgatattgctgcaagtta

SEQ ID NO: 309861 - DNA, 351 bp, Zea mays
gctgcgaatgccaacccgggccgggtgtatttaccgcgggcgtgccgttcgttgcgcccaagcatagcgcgtcggaccctcgctccccaatctcagagcaatggaggtggaggcggcggcgccggataagctggcgcctccctcgccggtggaaggccccggccagaatggcgcggccaccaaggcgcagaatgtgtaccgcatctaccggacccgccgcatgctcgccgactccgccgtcgtcgtcgaggagctctggcggcaggcgctggactacgcgcgcctggagcacagcaccgtctccttcttcgacgagcccatgaccgataccgacgcctcgcgctggaaccg

SEQ ID NO: 309862 - DNA, 435 bp, Zea mays
gtgattgaggtactcggggtttgggtagttctgaaatctctttgggttgagcccccccaggtgatatctttcgatgggtcatatgtgaactaccggcatctggccattctttgtgatacaatgacatacagaggtcacttgatggctattacaaggcatggtatcaaccgcaacgacactggacctcttatgagatgttcctttgaagagactgttgacatcttacttgatgctgctgtatatgctgaatctgaccacctgagaggtgttactgaaaacataatgcttggtcagcttgctcctattggtactggaggctgtgcactatatctgaatgaccacatgctgcagcaagcaattgaactttaactgccaagctatgtcgaatgcctaaactttggcatgactccaacacgatcacccatcactgggaca

SEQ ID NO: 309863 - DNA, 533 bp, Zea mays
ttatatcatatagtctagatttcttagctcagtacattttgctcctagattcttatggaagaatgtcatcagttgtgttgtgtccctctactctctattgtttcatggtgtgcacccctctgactcaataataatattgttgtatggtgtgcacccctctgacttcaggagaaacttatcctatattttgtagatgtttgggtctgtgatatggtttcctttgtctacaccgaatgttctaattatctatatcgttgctttgtacagctcttggtgtagcttgccactctcaccaatcaagttttcatgtctgatctcgacattcagatcccaactgccttcgatcccttcgctgaggccaatgctggggactctggtgcagcagcagggtcaaaggactacgttcacgtgcgcatccagcagcgtaatggtcgcaagagcctgaccaccgtccagggattgaagaaggagttcagctacagcaagatcctcaaagatctcaagaaagagttctgctgcaatggtacagtggt

SEQ ID NO: 309864 - DNA, 535 bp, Zea mays
  unsure (1)..(535): unsure at all n locations
ttagtaggctcataagtactggagcaggggctgcattttcaagggaatcaatacttagcaatggaaactcatccttcgggaaagctttattgaggtctgtgaaatctatacacgtcatcaactggccatttgatttcttgaccatgactatattggctaaccattctagatttgcaactgctcttatcacaccagtagagagtaatctttttactttagcctttgcaccttcaaccttgtcttctgacattttacaaagcttttgctttcttggtctactgcttaggtgaacattcagagcatgctctataaaaccacgtacaagtcatttgctaaccaagcaaagacatctttgttatgaaacaagaatcttttgaggtctgattcttgctccgaagacaactgattaccgaagaaaaccttttgatcagccacttcttcacataggagaattggattcagctgatctggcaaagatgctttctctttgacttgctttctaggatttgactngcacttangcttcattaatatt

SEQ ID NO: 309865 - DNA, 392 bp, Zea mays
acgccgcctactcgtccgcccacgcgtccgcccacgcgggcgcttataggaaagtggccagactttttcaccaaagtggtgtgaagacacaacacacctgcccacaggacaacaggatttacacccttcaagctgacatcgggcgatgaagcaataactacacaagaggggaagtcagggtcaataagaacaacagagctctcagaagacgaagctgattatcaaggaacaaaggatattatagaagggaccagacttcaggctatagagcacatcaataaatatcaggccgaaacactaaagcgggaggatagaaaagttcgattgaaaaacatcaagccagggcatctagtgctttggagagtggccaacccagatacagtgggcaagtt

SEQ ID NO: 309866 - DNA, 470 bp, Zea mays
  unsure (1)..(470): unsure at all n locations
tgntttttttctctcgtaggacatggatgggcgtgaggttttcgtgaagctagcgttcgacgtcatttccaacaggaaaaacgtgaacctggcccacataacgcccacgaaggaccacatcttcgagaccccgcacaaggtctacgtcggcaacctcgcgtggtctgttcagccgcaagacctgagagagctctttacccagtgcggaaccgttgttagcacgaggctgctgacggaccgcaaagggggcaggaaccgagtctatgggttcctctcgttttcttccgcccaagagcttgaggaagcgttaaagctcgacagaacggtatggttcaattcaagtttgaagtttcctgttccagtagcttggttttttgtttttcacagatttgatcagctctggttactgctgttaattagtctcgcatgatggcgttgttatcaatgatagaggagaacttaaagcatgt

SEQ ID NO: 309867 - DNA, 541 bp, Zea mays
tcacgcgtccgctcctaaataataggctagagaacttttaacagaaaggagttttcccttcctacataataggctagatatcttttattgccttaatcctagcggctaattggtttgggcagccgcctcctgtgctgcatgctcggctgccctgcgtatgtcgcgggcgcgacgtcgcctggagtaggggatgccgtacatgacacataatctcttcactctctgttctgcacttgcttcatattgatattcttcttgtgatggggtttttccatttaacttgcaatgcggaccagtacaaatctctattttctgaccacctaattatttatttctattaactggtgctgtcttttgttcaggaaattctgaagttcagatatgagctatgcccaagatacatgaaagagcgcaaattctggcgggtatattttttgctagtaaacagctatatagccccgttcgagaagaaatccttgtaggagctgaaagtgaaacccgcgaagagaaagggattcccagaagcagcatcccagcatta

SEQ ID NO: 309868 - DNA, 508 bp, Zea mays
gtaccacctccgccaccgggagcaccccgggccataattttagtacacaaccattggtattcccggtggatgcgtgaatactaagaaaccccgacccgagcgcactcaatccctaggcggcggcctccggcgcgaggctagcgggcggcacccatggcgtccgtggcggagctcaaggagaagcacgccgcagctacggcgtcggtgaactccctgcgcgagcgcctccgccagcgccgggagacgctcctcgacaccgacgtggcgaggtactccaagtcgcaggggagggtgccggtgagcttcaaccctacggatctggtctgctgccgcacgctgcagggccatagcggaaaggtatattctctggattggacccctgaaaagaattggatagtcagtgcctctcaagatggaaggttaattgtgtggaatgcattgacaagccagaaaacacatgccataaagctgcattgcccatgggttatggcgtgtgcttttgcaccca

SEQ ID NO: 309869 - DNA, 538 bp, Zea mays
  unsure (1)..(538): unsure at all n locations
ataagtaccaccaaatacaaacccctatcaatgccacttagcacaaagggcccagaatggctgggtccaaccttacaagcaatgcaagccaacataggatgccagacaaccttagttctattgacagtgcttatggcgtatgttgtatggtactttgttttttgtggttggcagatcctgtctgcatgcatctatcatctatgtttgttccctttcttaaattatgccacaataatacaatataagctatgcaatttatttattactcaatttactgtgctgtttattatctctttcagtcgattcctgcagtgtagagggccatttgctcgaaggagacaccccctagttaatgctgcagtggtttcagagattcaaagatgcataaacaatggcattgagttccgtggcgatttattaaatttcagaaaagatggatcgccactgatgaacaggntgcatctgacccctatatantgagatgatgaaaccataacccattatatgggcatccagttcttcactgatgctaatgtga

SEQ ID NO: 309870 - DNA, 432 bp, Zea mays
ggggcaagagccatccaaaatcaacataaacacataatcggttgagtcgttgtaatagtaagaatccgtcactttctagatcctgagttctatgaacaactttatcttcctccacgcgtaatcataatgatactcagattctccctacaaccagattctcctcacagccagattttcagaaaagctgctcagaaaaaagttgaaccaaacaggccctagagctatggcttatttgaggggatgtgtcaccatacatcacggaggtacctgccttccatctgcatgctctttacatagctctcggttttggagctatccaaagatctctgctcttggactattgtatgaagcattttgggtacatctctagccattcccttggcatcaccgcacatatataagtaaccaccatttcagatgatgttccaaatt

SEQ ID NO: 309871 - DNA, 461 bp, Zea mays
aatggagatttgttgagccattcctggatgatgggtgatcatcggttcatcaactagggtgacagagagagagagagaggagactctaaaaggcatgcaccagattacacggtatgcactctgcctcctacaccacatcatctcactgaaaacacaacaaaacttgggagctataatagagcagccaggaagacgacgatccatgggaagctgtctccggaatctgccatgtcaatccaccggcgagatacagggatcccttctcaggacgtcaaaatctacgaatattacggatgtgttgtccttggttcgcagactccgagcttcgtccagcacacggctggctactctggccgccgctgaggtggcgtcgccagagctcctcctctcctttccctcgacgacaagctgtaccgcccttttcgtgctgatgacgtcccagagaccgtcgctagcaatga

SEQ ID NO: 309872 - DNA, 454 bp, Zea mays
gctcaggtgcaggcgtgaccaacagagctggatggatgcaaacgatctgttcatcatgcagcctaaaatgcactacgctgaggacgattggccagttgcaactccagatggctctccgaaggaagatgaacttcaatttgagatcgaaatgctggacctctttaaagccaaggttgtggcagatgatttaggggttgtaaagacgatagctgaagcagggaagggatgggaaacacctagagagccatatgaaataacagcacggataactgcaagaacagcagatggaaaagaaattattccgagtaaagaagaggcatatttcttcactatcggtaaatccgaggcacctaaagggcttgagatgggcatcggaacaatggcacacaaggaacaggcaattatttttgtcagtagtacttatttgacggagcgctcactaatgccacagctt

SEQ ID NO: 309873 - DNA, 197 bp, Zea mays
ggggaccaaaacttatttatttttgggaaggtcaacacagggcccaaattttgggacccctttgtaagaacactttttttacaaacaacctttagaggttagggacttggcaccttaccaaaccaaaccttggaccctaaccaaattaatccccctcctcgaacttgggaccagaaccggtcccaccaaacggggga

SEQ ID NO: 309874 - DNA, 472 bp, Zea mays
  unsure (1)..(472): unsure at all n locations
ctcangcgtccgggaaagactatggccggccgtgggggttgcttggtcgtctacacgctcctccagctcctggtctgggtgccggtccgcgagtgcggctgggaccggtgcgtgcgccagaccgacatcgtcgccgacgacgtcgcgcacgtgggctcgtccaactggaagtacatgacgcgccacagcggcgggccgacgcagagcacgaggcaggcgccggaggtgccgctgcagctcatggtggtggagacgggcggctacgactgcaagtgagtgtgggcggagcgcgaggtgctgccgcggcggcagcgcgccgacgaggtctacgacacgggcgtccagatcaccgacgtctgccgggagggatgcgcnctctgcgacacgcgctagtgggagtgatgcatcatgtggacgaaccacaccagtgacggcagaagcagaagcagaagcagaagcccatgcgctgaag

SEQ ID NO: 309875 - DNA, 460 bp, Zea mays
cctacgcgtccggcacacaccgcccggtctccgatctccgatccccgatcccctcgtcgatccaagatgcagatcttcgtcaagactctcactggaaagactatcaccctcgaggtggagtcctctgacaccattgacaacgtcaaggccaagatccaggacaaggaaggcattcccccggaccagcagcggctcatcttcgctggcaagcagctcgaggacgggcgcacacttgccgactacaacatccagaaggagagcaccctccaccttgttctccgcctcaggggaggcatgcagatcttcgtcaagaccctcactggaaagactatcaccctcgaggtggagtcttctgacaccatcgacaacgtcaaggccaagatccaggacacggagggcatcccttcggaccagcagcggctcatttctgctggcaagcaactcgaggactggcgcacgc

SEQ ID NO: 309876 - DNA, 259 bp, Zea mays
cccttgcctccgcttcgagacccgcggcgagcgctacggctccaccgtggtgcgcatgaacgctccgccggggccattgatggagcgcgacccgacggtggcggcgagactggacgccacgagctctcacaggcgtctagacatggacatggtggtgaagagggaccggaccacggacacctacatgccctccacctccctcaccggcggccaccgcgtctgcgcctacctggacccctacgagcccacccacgccaag

SEQ ID NO: 309877 - DNA, 138 bp, Zea mays
ggggacaacctatcaatatcattggacaaaaatagctgggaacaaaaaccttgctcatttttttttcggttcgtttcatagcgggggcaaacaaagggaacaaccggggtaccaacccctaatccaaagcgggcccgg

SEQ ID NO: 309878 - DNA, 437 bp, Zea mays
  unsure (1)..(437): unsure at all n locations
ccgggccggaagacccgtgacgacccacgcgcccgttcttgtttccgtgaggangccgaccccaaagcgggaaggtgcatggaagacacgcgcaacctcgcaaagaggagggacaccaacgtagaggcaacctgcatcaaataaggcgctgagagagctgaagaagaaagcaaggaaaacaagcacagcactgcgaagacgatgccgacctcaaagagacaaggaacaccccccctgcaaatgcatcatatcacacccagaggtttaaagggatgggtgagacgaggcctgcacaaccacgggaaacaacgatggaacctgagaggcggctggcgaagcagcccacggccgaagatgccgccgaggccaacgaagtgctcccgacactcatgggcacccgggttgaacagaggaaggaactgaaccagaaagccgcc

SEQ ID NO: 309879 - DNA, 389 bp, Zea mays
  unsure (1)..(389): unsure at all n locations
acttacattcgaggccggcccgangcngcacagggcgggcatgatgccaaaccacccgcggaaccacagccaccggagccaccactccaacacggggacccaggagcgcgacgaggcgaccgagcccaagaagaaggaggcgcagccgcggaacaccccggacgcggacaacaacccggccggccggctggcgcacaacgcggagcagctcacccacgggtggacgcagcaccgggcgaccaacgcgacggggcggccgaacccgcgctgaggctgccactaggacccggacgggcccaacgacaacgaccgggagcgcgcccagatcttcgtctgggacgccggcggccgggccgcggcgaacgggctgtacaagcaggcggcggcga

SEQ ID NO: 309880 - DNA, 409 bp, Zea mays
  unsure (1)..(409): unsure at all n locations
aactgtctgggacagnagcgnggggcacgaagagcaaagacggaggggaaggaggaggacgcgcgcccgggcgccaacaaagaacacggagcggcagcccaccggcacggcggcgcagggcagccggggccggagacgacgacaaggacgacaaggagcccccgccggcgccgccgaacgagcccggggagcgcaagtcctgagccccaaccgcgcgggcaaccgccgagggcagacgacacacccgcacttggcacacaagaccgcccagaccgacatgggcgtcgacaagaccaccagcaagagcgccaccgggggcaaccaaagcaaagccagggcccccggagggatgacccccgcgctcgaacacggcaccgccggaagccccagaagacacagcaacccagcc

SEQ ID NO: 309881 - DNA, 418 bp, Zea mays
  unsure (1)..(418): unsure at all n locations
aatcngtttgtaggcagcagccaactccatctgaaatgcttttcatgagaccagagcaaactcagtgaggcagatccagcacttaccaagagaacagcagcgtcctgcacagccacagccatactacgctgaaggttcatacggagaccagcagcagcaacagagaagcttttctgcggttgcgaacaaagctgcagcccctcagcctcaggttcaggtgtcaaggatgtatgctccaggtccacagcagcctgtagacttccagctcaaggaaacaagcccaacgcttggcggcggccgtgtcattggcggccgggtgtaccctggccagaaggctagggcgtacgaccttgtcgagacgatgcaatacctcttcgtgcgcgtggtcaaggcacgcgatcttgccaacatggacatc

SEQ ID NO: 309882 - DNA, 363 bp, Zea mays
gtaggtaaggacagccccggcaggagaccaacgacaggcccaacggaagccaccacacgaacccccaccgcaaggacgacaaggccacggcgacgcaggaacgggcgcagaggcgccggaccatcaaaggcgaggcgtcagggaagccgcacacccacgaggaccgggaacagggagacaaccaccgagacatcaaggccagcaacgcctggcccgacagcgacaggaacggacggcagggggaccacggactcgcaaggctgcacgaccatggagccgacccgcaaacaaccgatgtcaatggcaccacggggaaccccgcgccagagcaggcgcggtcagggaaagcaagccctcacaccg

SEQ ID NO: 309883 - DNA, 248 bp, Zea mays
ctaaacagccataattattttcaataacccggtagcaaggcaggggaattaacaacctttacaacatggggggttggaaaccacacatttcttcagaacagacacacataacacgatggcgggagcaactcttggcagaacacgggataggggcagcacactggcctggtgctgcgtaatcagcaaacttttttaaaactcgtaaccctggtggccatccttgcccttattgaacttagcaccgacct

SEQ ID NO: 309884 - DNA, 417 bp, Zea mays
actactacgcgaccgcccacgcggccggcccaggacgaccaccggcgcggaggcgggcgtgccgcacccggccaaggccaacgccaacgggaacgacaactgctggcaccagctcagcagccacgggcgcaacacccacgccggcgagggagccgacgggatcgccaccaaccggcagcccagcgggacgcaccccgggcacaagaccaaactgccacacgaccgtgacaccaagaacatcaacaacaacgcgcgccagaggcaggacaacgccggcggcagacacgagaccaccgacaccccgcgccagtacgcaggcgagaggaggcacgacaggtacaaggactggaactgcacagagcaggcgcgcccagacgaccgaagcaagagaggcatggcgggcgcagaccccgcgag

SEQ ID NO: 309885 - DNA, 384 bp, Zea mays
  unsure (1)..(384): unsure at all n locations
tcgtcccacgcgttcttttttcttggccgcccacgcgnccgcccacgcgggcgtttgttaggaaatgacaacgttctctggcatcagagaaatcatccccgagatggagatctgcgattttgactatgaaccctgcggctactccatgaatgcgatccatggctctgcattctctacaatccatgtgacgcccgaggacggtttcagctatgccagttacaaggttatgggcttggatgccactgctatatcttatggagaccttgtcaagagggtcctccggtgctttggcccctcggagattcccgttgccgcgaccatcttctgagggcatggacatgccgggacatggggaaaggcactatgtgcagatgtctatgactg

SEQ ID NO: 309886 - DNA, 382 bp, Zea mays
ttctgtaaccgcccacgcgcacgcagctcctgcccaccccactcccccgcaggcgcggcggccgcggcggcggcggcgaggccgtaccccacatcggcgagcggcggcggcaccgccggaggcaaaggcaagacgcacgggcgcgcgccgaagaagagcgacaacaccaaggactacgagatccacggggcgcccaagacggcgacccaggacgatcgcaagaaggcctaccgcaaggctgctatcaagaaccaccccgacaagggcggagaccccgagaagttcaaggagcccgcacaagccaatgaggttgagagtgagccagagacacgtgagagcaatgaacagcatggtgaagacgccccaaaggaaggaacgggcg

SEQ ID NO: 309887 - DNA, 233 bp, Zea mays
  unsure (1)..(233): unsure at all n locations
cacggaaccagaggcgaaccacacagaccaacaacggccagagaaagcacnggctacctcggcaagaagacccaaccccggatcactggacaagaccatcaaagcatggggccttacaactcgggagtgtggacaaacactctttgagcataaagctactgcaacatctgtgctttgccgggatgagaagttattatcttgctcccttgacaagactataaaactctggactc

SEQ ID NO: 309888 - DNA, 358 bp, Zea mays
  unsure (1)..(358): unsure at all n locations
gccgaccggccggaaaccgggcgcccacgcgtcttcttgggcaggnnggangcgccatccgaggccaagattcggagcgtcgccgcagggaggcgacgaaaggcacacgcgggccgaaggacaggagggcctccgccaggtggaggccgcaggagctcagcgcatacagctgcggcaacggcatgcgcaccaccgaccggaactggacagcaccggacaccaggagcgataccacgtctcaacgcgggaggcaagagcaagagctccaactcgcatcagaagattgcaacacaaagaggaagcagggggaagacaaggatacaacgggagaggcaaccaagactcatgaagccacaca

SEQ ID NO: 309889 - DNA, 521 bp, Zea mays
agtcagccaagaccatgcgttgtttggcacttcaataaaagagaacatcttgtttggcaaaccagatgcaaccatggacgaggtctatgcggcagctatgacagcaaacgctcacaacttcataagggggcttccagaggaatatgagacaaaggtacgcgcataaaaaaagaaaaacaaacgttcagccaccttaattccatgtctcatactttatggttccttcttgcagattggtgagcgtggagcactgttatcaggtggccagaagcagcgtattgccattgcgagggcggtaattaagaacactgctatactcttgctcgatgaagccacaagtgcacttgattcagaatcagagaagttggtacaacatgcacttgatcaagcatctatgggacgaacaacactggtaaattgccactgcttccgctcttcatactttatgacccttatatcagaacttgttgaattaattagcactgcatcttttttcaagaaaaaaacatttggcattgaat

SEQ ID NO: 309890 - DNA, 374 bp, Zea mays
  unsure (1)..(374): unsure at all n locations
gcccacgcgtccggnggtgccaaaatacttgatgggaaatctatgacaatgctgcggagaaacaactacaatggcacgcaagccaaatttgctgcgaggctgatgcccgatgattggcaggaaacaagtacacttttggctgcattagagaagattgagtcttggatatcttatcgcattgctgagacagcatggtggcaggcactaactcctcacatgcaaaaacgggcagaaggatcatcaactccaaaggctggtccagtgctaggtcctgctatgggggatcagaagcagggaaccttttctgttaacctgcgcaaggctgcgtgtcatgacgcattcagcagaatgtgcccactcagcgctggcggaca

SEQ ID NO: 309891 - DNA, 477 bp, Zea mays
tttcataattcctgccctcccccctacttctgcagtaccgctctggggcctcagatcggggcagttccccatcgtcgccttgcgtccaccgctatcatgcagcccctcctagatgcctcggcacggctctgtgcccactgcttgtgactgcacccgtcgaccttggtggcccactggttggagtccacgccgcgccgccacctacctccgtccaggacgcatgcctctgttgatcccgtgctggtgaccgcgccgtctccctctgatcatgacatgctggattagcgaggaaactgcaggagagaatgtggatggcttgtggtgcttgtaggggtggtaatggatcacgatcccaatggttcttcacaataacttaaggcccttaaataaatttagttcaaaaatgaatataaatagagtccgatcttaatccgattcgatccttaaattttatagtggaaaatctagagcccatta

SEQ ID NO: 309892 - DNA, 393 bp, Zea mays
ccacgcgtccgtcttgttttcgcccacgcgaccggagctgcgcgccggcttttattgagctggcccggctgtagcacccggccaaggacggcggctcgctcagcctgctcgacgacggcgactggggccgaaagggcacgttcaaccagtccagggtcgcccatcagatgggcagggttggggagcagctcagcatcgacttcggcatatccaccggcgacaacttctacgagaacggtctgacgggcacggatgacgaggcgtgcgagcagtctttcaccgatatctacacggcgaagagcctgcagaagccgaggtacctggtgctgggaaaccatgactacaggggtgacgcgctcgcgcagctgagcccggtcctgcggaagatcgaca

SEQ ID NO: 309893 - DNA, 414 bp, Zea mays
  unsure (1)..(414): unsure at all n locations
actattacgcgcccggccacgcgnccgcccaggggggcgttgacgcgcggggccgcagcacaccacccgccagagccagccatgggggaggcggagcagcaacaggacacgccgaagcacaggaaccgcgggaccaacgaggaggcccaggagaacgacaccgggctgaacgacaacctagcagtgaacgcgacgaagcacgcgaggcacccgccgcacaccgcggggcgctaccccaagaagcggggccgcaaggcgcagcgcccgaacgaagagcgccggacaaactccctcaagatgcacgggcgcaacaacggcaagaaggccacggctgggcgcatcatcaagcacaccctggagagcacccaccggcgcaccgatgccaaccccatccaaggcgacgacgacgcgaac

SEQ ID NO: 309894 - DNA, 475 bp, Zea mays
atcaataaatcatgtactttcttatttcataaacatgaataaatatccacaatatttatattacattgataccttcggcttgtcagaaggtgaaaatgtgagtgacgcgagagcgattacaatgcagtgtgaacagtacgatgctactgttcatctatttataggcacgagatacaacccgagcaaaattacattcatatccctgacatttactggtaatcataaggcgagctatcaagggctaagtagtcttttcccttttaggtcggtttcatcttccaccttcatcatcatactaagccgaaggtccttcggccacagcttcgacgctcgttcacccttccttcagaccgcaccttcatacacgcataccttcgtctcaaagccgaagcctcctgtaacagtctatgttatactgaaaacatgttagttacgtttttgaggacctttggaagaggaaggcccccaacagtag

SEQ ID NO: 309895 - DNA, 371 bp, Zea mays
atgtctcggaccccgcccgggccgagggagggccaaagctacgagataggaaaacccgaccgcggcgggagaagcgcacggcgacggccgcggcggcgaccctgccggagccggcgacgcaggagctcatcccggtcgcggcggccgagggcaccgcagacgcggcggagcagcgggagcagggccccaaggtgcgggacacccccgagcgccaagcggacggcggggcccggaagagcgggcccagcgactaccacaacgaggaggaggagggactcaacgaccacaacgatgccgacaagagcgccgcgatccagaccgccaccggtggaagagctacatccccccctcccactgagaacaggaatgca

SEQ ID NO: 309896 - DNA, 425 bp, Zea mays
cgcgcggtagatcttgtcatgataccgatgccggcttcaacgcgctgtctttgctagcctcacaaacaatccatgttttaggcgatcgcagttagtatggccgatacacacagctgtaaggctgggggttgattcccggccgccgtggcggtagacgaggagcacggtcaccacagacgccagctgaagggaggagcgcatgaggaggctgataacgactaatataataggccggagctgcggcgtggtccttggaccgtagatgaggaccttaccctcggaactacatcgccgacaacggctagggacgctggaacaacctcgcccgtgccgacggtctgaagcggacgggcaagagctgccggctgtggtgggttaactacttttggactgacgtgaagcgtgggaacttaagcgccgacgag

SEQ ID NO: 309897 - DNA, 313 bp, Zea mays
agatccattcaatgtaacgacgaacacagcagggtatactcggatcccagttacgcaacacacccacagggacagaccctggcattccgacactacgggagaaaagagtcttcggggctataagcaaactgaaacggggaacacaagaggaagagaaactagggaaaccgctaacaactagccaactgctctccatccagtagcgatgaggagatcgagcaacgcttatggggccatgctgccagttccacagcctgccttggttggtcaccagatccggacgcgtgggcggacgcgtgggcggacgcgtggg

SEQ ID NO: 309898 - DNA, 447 bp, Zea mays
gttatactgttatgaaaaaatgtttcataatccatttgtgatcctggtcatacataaattttgttattttaatctagttgtttcaccactacattgcaatcatcagtatcatgccgacttcgatatatgccatgatttccatggtctcatcattggatagcacgccccacgcctgctggaagaagttccctcgtacatcgtcagtcatcaggcacgcacctccatacgcgcttgctcaaaaaaacaattgtgtgttggatgcccgtgcgttgtaacggcatacaaaatattcaataaaattttagtgcacaacgattattgtttagatcatctaaatagtgtttagacataataagatggtttagacaacatgacaatgccataatctatacttgagttctcaataaagcaataagagcaaaacatttttggtggttataaaaagaa

SEQ ID NO: 309899 - DNA, 245 bp, Zea mays
ccggtgccttttttaaccggacgcaaaccacaaaatttacaacgttagcgaaaagaagctcgcctccggttactactcggggcatttcctttcgctccgatccctggggacgacgcgcacgaccttcttcttacgggctttgaagagttttgggcctccaacttgggggaccagctggggaagcccaaatcgttgatggccgcaaacgacctcacggggcgcgatctgatgatggccggggccga

SEQ ID NO: 309900 - DNA, 334 bp, Zea mays
caaaaaggaatgcgattaaacatactcggaggatacattccgatgttcagcacaagataggcaagttcacataaggcactgttataccctcaaaacacttgaaattcatgttccacgaagcaaagtaagatacgctaaagcaaaacgtcaggattcgcatccgcacttaagcaacggcatcgaggaaagccttcccaggagcacgcttctcaagtctgccggggttgccgagcagctgtaaaaggtaggggagaagataacattagattatggactgccctcgtagatgagagagcaaacattagaagactgctcagagatgtaaaggtagaaa

SEQ ID NO: 309901 - DNA, 328 bp, Zea mays
atgaacacctgacataaataaaactgaatgcctcaaatcgttcaggcactgccaccagttggtgcatcaaataacaaagcaccctggagcagtaacttttttacgctcagcaacatagagataacgcagctacaccgcagatatgcctttgtacataagggcgttagcagattagctgcagcagccaccaccttgagaagagctaccagcaccttcagattggccagggactacatatccaactttgatcccataagactcattagatacatcgaaaacgccatcttggattttcttgtagattgctccagcagtcttaacaaatgcc

SEQ ID NO: 309902 - DNA, 379 bp, Zea mays
atcatggttttttcgctcgcgaatgggggaaacaagccgggcgactgtcaggacttcgtggggatcatcactctgctcattatcaactccacaatcagcttcattgatgagaacaatgcgggcaatgccgctgctgctctcatggcacgcctcgcccccaaggccaaggttctcagaaatggccggtggaccgaggaggaatcggctatccttgtgccaggagacatcatcagtgtgaagcttggggacatcattccagctgatgctcgtctgcttgaaggggatccactgaaaatcgatcagtctgcactcaccggcgaatcccttccagtcaccaaaggccctggtgatggagtgtattctggctccacttgcaaac

SEQ ID NO: 309903 - DNA, 355 bp, Zea mays
  unsure (1)..(355): unsure at all n locations
tttnnttattttnttttttttttaggacatatcacacgggggacatttgaggttattcagggcagctaggttatttggacagatttgcgtttatagagaacgataaacatgaggatttcaacaataaagccacacgcttgtagatgctacaggttacagatttgactaaggggaatgctaagctaggaagctagctaacaagcggctgttgcacatcatggcagacccccatggcgaagcaaattacagaatcctaaacaacagaaacacccctacaaagctggcgtgcgtgcaacaaaacttgcaccaaacaaatgctgacagacatgtgaaagcaatcgaatcaaaaagaagc

SEQ ID NO: 309904 - DNA, 314 bp, Zea mays
  unsure (1)..(314): unsure at all n locations
gggaaaaaaaactgtttgcacagtgtacgtagctctaatgctagtcgtagatatgtttcatacgtttacagagtttgcaataatggacactcgtagacttcagaaatcggatcataatcatatgatgatataacactcagttcccaagcagagatgtcaagaacgccaaccccgcaatcaggatcatgatgttgaggaagtagttggactgcatggngcttgtccgggctgcctccaaacccctcgtactccgccctgatcttttgcttcatcgcatccgacaactccctctttccatacgagtatttggcagc

SEQ ID NO: 309905 - DNA, 311 bp, Zea mays
  unsure (1)..(311): unsure at all n locations
taaaaatccagnattgattattgtgcgacactatgaactctgtcccggctacaccctcggcatttcactctcgtcactcctcatggtcgcccttgtgaagattgtgcaggatgtagagagaagctgatgacaagaagatgcagatcgagtagctgaggaggtccagccccgtggctatcgtcaccatcttgctcttctcgaacatcttcacaagtagaatcatcacgatgacgtgccccacttttgtcttgagctcgtcaagcgagggtgatgttcatccacttcgggcgttccttcaaagcgaacatccc

SEQ ID NO: 309906 - DNA, 333 bp, Zea mays
  unsure (1)..(333): unsure at all n locations
gaaactcctcgtggtcctcgggggatatttaatggaccttgcccttgttgcccgccgcgttctgcgacgacgagtgcgagtccatctccgccccgaactcctccctgtacatgtgctcgatcatcggcttccacagtcgaacgcgcgcgttgatgaaccagttggacacctgacccctagacaagcctgtctgcctagcgagcatcagcttctcggaatctttcgggtacgggtggaggaaatgctcgaagagccaggcgcggagcacggagacggcggactccgggaggccgcgctgcgggcgcnaggcgtgctgcggctgctgcatcatgc

SEQ ID NO: 309907 - DNA, 349 bp, Zea mays
aaaagaaaataaggagaacaacatgatgcctaccttgcagatcgagaaaaacgtgtcaacccgaaactgtatatttacggatgagaaggagcaatcaccaatcagttcaatcactactacacctcaacaatcaccgtcgtgctggcacacgtgcttagcttttaccgtgcatgcggccctcacgaccccagccggtacatcccgccgtcgtccgccatgaacggcggcgccggcctgtccatgtacagcgctgcggtgccctgcgcgacgtggaacccgcccttcatcatcgcgaacggcatgtcctccgacgccggcttacagtgccgctttcgctggttgatgaacc

SEQ ID NO: 309908 - DNA, 359 bp, Zea mays
  unsure (1)..(359): unsure at all n locations
ttntacctanttttttttttttttttttttaacagtgaacattttttatttagggcgcaccatatgtatcttcaataagtaagcaggattggtgtggcctagcaagcggttgcagggccttcacatgtgcacacagtgtcgttggaatcatggcttgcgctcctagagatgggtaagtatttcattaaaaaaccatgaagtcgctccccctggggggtatgttcattattctgctggggttcttcgagagctccgttttatatgataagccgctcactaagtgaatatgtttcactgccttctaatagccttggcttccatagtctcgtttgggggagccgaacatggctgccgatgct

SEQ ID NO: 309909 - DNA, 262 bp, Zea mays
accataatgctgacgcgtatgcgccaaacattagtttagcaggccctacgactattgtacttacatactcatgtacatcaaaaccagaacgtgtcgacacaacattacccggtacgttttacagcacgcatggtgcatcaacacaatatacatgcacgtcacgatttcaacagttcaacttccgaggaagccgtccacctgggcattcaccgaccccacgcgtccgcccacgcgtccgcccacgcgtccgcccacgcgtccg

SEQ ID NO: 309910 - DNA, 368 bp, Zea mays
  unsure (1)..(368): unsure at all n locations
gttctcgttcagttcccacaccctttcaaagatataggtcgtgccttcgtccagagcattctgatagtttgattcaccagcgacaatctccagcgcgaccacgccaaacgcgaacacatcaaccttctcagtcatatgccctctcatagcgtactcaggcgcgagataaccaaacgtgccagcaacatttgtgatgacgtgagtcttcttgtcgtcgtagagcttggcaaggccgaaatcggagatcttcgggttaagatcggcgntcgatcaacacgttactggcctttatgtccctgtgcacaatgcggatggttgactccttcgtggagataagctatacctcttgctacgcccaaacatatctc

SEQ ID NO: 309911 - DNA, 303 bp, Zea mays
gggcaacaacaatacacaccccaataagctaggtcatggaagccaaaaacatttagaggcaaccgccagcttccaccgttcacaggttgtttgaaaagcttttcgtacatgcatccattttaaaactggtgaagagggttattgttggcagggtcaaaaccaggcgggcccagttggtaacccaggttcaatttgggggcaaacatttggcgctactttccctccaaaatttggtgcaagcttccggggaaaaagcacttcatgtccagcgtcgtaaaggggcccccagggaaaaaacatttg

SEQ ID NO: 309912 - DNA, 114 bp, Zea mays
accaaatagcgtttattcagagatgttttgataaagaagcaggccatcaacgctcgaaagattcctcgtagtacaaggatcgacacgaccgcaacaagcatacacgcagggagg

SEQ ID NO: 309913 - DNA, 305 bp, Zea mays
cccatatgcgtttgtgtagagaggttaggggatgcctaattttatcactcatagaataatcttcaccttcaagcataggtggtttgcctaatggaatggaaagtaatggagtgcgttttgaaatacgaggatagcgaaggggcatcttactatacttcttgcgctcaaggcgtttagaagttgcggatgccgattccgagccggaggtggagggtgataaagagtcggactcgtagcagaccaccttcttcatcttcttcttcttggcacccttccgttgggacttgatggaggaagaggattcc

SEQ ID NO: 309914 - DNA, 334 bp, Zea mays
gttagaagtagaagccttttttccttgcatatttgcccacatttattatggttttacacccaatatagttgcaataccattacatacccgcacaatacacctggtggtgctaaacatataggacgaacacactagtaaattaaacggccgggacggcaaaagacaggccgggagcaaagagctctgcgttattctctcctcgatcgtctaacggggacggatggcagcacacaaagaggagggtccgtagtagggtatacaggggcctcttatcatcatcattaccatcagcagctcatttttgccggctggctaggacacaacccttcattga

SEQ ID NO: 309915 - DNA, 462 bp, Zea mays
  unsure (1)..(462): unsure at all n locations
aattcctgcaatatttaacctatagcaattttatatttgaaatctttcatctaaaatagcttgcatacatcagatcgtttgattgcacggtttaagtgcacattattgtctctaacaaagagtcacaccaatagcatggtcaatcgaccggttcctccatacggtcataaccagcaagatttaccccaatgtcaaacgctacagcatctcaaactaaaatacaacagataacttacaaccagtcgtcagtacattgcccttgcccttgtcccacgttacatacagcgccagccttttcatcatcgcacatcacactgaaacatactcagaagagactttgaggacttcgtgtatcaaagacgaagcaggccaaaatttatctactcttgttagcactcaagttaacgctgcaaccacatgggacangcatgtaccctgcagctcacacanactactcacact

SEQ ID NO: 309916 - DNA, 174 bp, Zea mays
gcagcaccaagaagggcgattttttgcttaggattgggttaaaacacatcctgacaggagtaacaccctccatcgggccacagaccatgctggatgatgcatgggtctgctggagccgagggtgaacacatcactaacaactgccacagagggaccttggaacaaaaagcacag

SEQ ID NO: 309917 - DNA, 169 bp, Zea mays
atcggatccaatggcccccatttaaaatcaataatggtagtgacaaaatgttgcctctgccaatggggatttatggggggggagatatcatttggcctcaaaaatagagattgcaaaaaatggtggggcactactaataatcatgggatcctgaattcctcctgatatc

SEQ ID NO: 309918 - DNA, 299 bp, Zea mays
  unsure (1)..(299): unsure at all n locations
taaaaacatgtgtntnccaacgatagagcacggatttggtgtattcactcaactaattacatgatgccagattaattaaacatataagcatctattgtcgtccgatagctaaggagaatagagaagaacgagtaacacgcacggagatcagtggtcgtgggaagaagacgagcatccgctggtcccctcgccggcgtcaccatgagggcgagggcaccggtggccgccgccgtcgccgggggcctcgtcgtcgctgcagtcctcgtcgaaggggacctccttgtggaatatgcagcact

SEQ ID NO: 309919 - DNA, 336 bp, Zea mays
ggcggtggccagtgtggtcgtcaccgaggcctgcgccgtcgacaaggtgcgcgggttcgccgccgagcgcggcgtgccggtggtcgccgtcgacggcgccttcgacgggtgcctggagctccgggccctggtggacgccgccgagccgctcgccgccgacgaggaggtcggccccgacgacgtcgtcgcgctgccctactcctccggcaccaccgggatgcccaagggcgtcatgctcacgcacagcaccacgtcatccttgctgaagtacaggttcgggttctcgccgtacacctgctgcgcgacgctggtgacgaggctgcgcggacgcgtggg

SEQ ID NO: 309920 - DNA, 406 bp, Zea mays
tctcttttttttttttttttttttttttttttttttttttttttttaagcccaaatcagccaggaggccaggacatggcaagaacacaaacgcgccggggaatcgtgcggatccaataacaatttcacaatttgcaagacatgaccaacttaggactggttcgtttacgtcggattgcatccggaatttttccagctaatcaaagtttatataaattagagaaacaatccggctagaaatcgtttcgacccaccaatccggcacaaacgaacaaagccttaacctatgaggagacggccggatcggatcgcttggcgcacagacgacgacggcaccgcgcgcgatcccgttttagatcagatcatgcatgtcacatcttggcgaaggagacggaggatgcggaacg

SEQ ID NO: 309921 - DNA, 263 bp, Zea mays
gctatgaacaactttatcttcctccacgcgtaatcataaggatactcagattctccctacaaccagattcttctcacagccagattttcagaaaagctgctcaaaaaaaagttgaaccaaacaggccctagagctatggcttatttgaggggatgggacaccatacataacggtggctcctgccttccatatgaaggctctttacatagcttttggtttgggggctatccaaagatctttgctattggactattgtatgaagc

SEQ ID NO: 309922 - DNA, 379 bp, Zea mays
ttcttttttttttttttttttttttttttttgttttgttccctgacaacctcatttggttataacccacagatcgaccagttaacgacaactttttttgcctgctatttacaatgatgcacaaacagggtaaccttcagcagagtacaaaaccactcaaccttttatttttaacttacagagaacacctaaattatgtaggtaatacagttatttgtttgaccactggaactcgatttccaggtttctattggggccgtttttgctctcaggtagcagggtgtattcaccggcgaccgaccccagcatgacaaccctgtctatctggatcgtcactttaccgaacgatttctttccaaatttgctgttgtttttgcaag

SEQ ID NO: 309923 - DNA, 167 bp, Zea mays
caccacgccggccaggccgtcgccgagggcgccaagattatcaacgagcgcgtgagcactcagaactacaaaagtgtgaagcaaacagtgaagcgattggaagaggttgcggtttcatcacgcagggatgagagagttcaagtgctaaggcgctggctcggagccct

SEQ ID NO: 309924 - DNA, 355 bp, Zea mays
  unsure (1)..(355): unsure at all n locations
ggcagctacgatgagccggcggtgcgcaaggggccgtggacgctggaggaggacctcatcctcgtcagctacatctcccagcacggggagggctcctgggacaacctcgcgcgcgcagctggactgaaccgcaacggcaagagctgcaggctgcggtggctcaactacctgaggccgggggtgcggcgcggcagcatcacggcgggggaggacacggtcatccgggagctccacccgaggtgggggaacaagtggtccaagatctccaagcacctccccggccgaaccgacaacngagatcaagaactactggaggatccaggatccagcagaagaagcagcagggagccaagac

SEQ ID NO: 309925 - DNA, 321 bp, Zea mays
ttcgtttatgcagaagtgctcaaacgccttgcgggagtccgggcggtacagcctcaccctggcgcgccggccgctcatgaacttgcgcttgagcagcgacatcgccaccaggagctgctccgagaccggcagcacgaggggcagttgggcagcagcatcgcgcgctcgctcccgacgtagtactgcgacgagaggatctccgtggacaccgtcaggacgcgcgtgcctggcggcgccacctggaggaggttcttggccaggccgatggagacgagccccgcgccgcagcccatcccggacaggttcaggcactgcacgtcg

SEQ ID NO: 309926 - DNA, 357 bp, Zea mays
  unsure (1)..(357): unsure at all n locations
gcggccgctttttttttttttttttcatactaaagagncggtatggtggaagaaatttacaacccacaatctattgcctaaacatcctatgtgcctaagtacaataggttttcctctcctctaggctgtgccacatgaacacacgcacttaaccaaacttacgacaccaagacagctgactgatctaggtcataacttccaagacctggatttacaagagggtaagtccaaacttcaaatatcccacttcttgagctccataccatcatgagggatcgcttccaccgtctttgatccaacatctttccaattgttgtgcagaacggcaccattagattccctgaatgacttgtccat

SEQ ID NO: 309927 - DNA, 405 bp, Zea mays
attgtctacccggtctacggctccgtcggcctgctctggtcgggccagtggcaggcgtgccaggccgccgtcgaggccgtgctcaagggcgaccccgtcgtgcaggtgcaggtcgacgccgcgtccgacgcctcgccgccgctgctgctcggaccccgccgccacgacatccgccacgtcgccagggaccccgccgccgcgcccgacgtcctcctcctccgcagcagcagcagccgccgcaagcgcgccgcgtcgtcttccacctcctccaagcccaaccagcccggcagcagtaagcgcgcgtcgctcggcaagaacaggcaaagggcagaacaagagccggtgcccatggtcgttgagcacggcgaggagtccgccggcagccacgaccacgaccggcaccac

SEQ ID NO: 309928 - DNA, 396 bp, Zea mays
aagaaattatttctccattttattggtcttctttaaatgacaattcggaaccactaattcacttacgcaaaagctggcagcaatatactattacagtgcacactgtacagtcaccatgacgcggccggcacagctaggagcctaggatggtccctccctcctgctcatcagtgctcactctaggtggtcatgcggccgtagcgacatgaacatggccgcgtagtgtctgagccgccggtccccgtcgtcgggcccgcccaccaacggcggcgcggcctgcgccgccaggtccgccgacgtccgggccctgtacctgcgccacgcgagctggatgttgacggcggcccacgtccgccagttggacgaatagtaccgcgccgtgcgcttgagcttctc

SEQ ID NO: 309929 - DNA, 217 bp, Zea mays
aaacaaaggggggcgatttggcattggaaaaaggggtgggggcccttttaggaaaaaggtcaaacttttttatcgatagggggggtctatttaaaaaaaattctaccctagctttttcccgtttaaaggatttggggactaaaactaatggagggggaaaaaggggccccctttttgcccggactttaagcagtttagctttaaccggggtaagggg

SEQ ID NO: 309930 - DNA, 451 bp, Zea mays
  unsure (1)..(451): unsure at all n locations
cccttcantttttttctgcaggcgttagaatggtggaatagtttaagcatttgctcttcaatggtaccacgcatagccaaagtttctacatgtattggacgcgtagcccccattcgatgtgcccgactaataacctgttcctccatactcctatcccatattggttccatgagaaaaacacgagtcacaaaactcaaatcaagccccagtgcagcagtcccatccatgactaaagccatacacgttgggtcctcttgaaacttcataagtgcacttctctcttttgcaaagccttagcagcaagtgaaggctcatttcttagtaaaggcaaggccttctgtgctacccatgcttgattggcattcccataacttatccggctgcttgaagcacatttatgctcattcactaggacggtaaccttactagctagaggcattggactatacat

SEQ ID NO: 309931 - DNA, 399 bp, Zea mays
atattacttttttttttacaaacagctaatatattgcattcaaagttacaaaatattacacacaacaaatgtcacattctaaatgttttttacaataacagctaatcttcccttagaactatatctgcagcttcgtttagtagtcgatcaacaactttatccatgatggcttcggccattttcctaatttcgtcgtcccccttcgcgtgggggtcctcagatggctcggcaggttctgagggaggagaagatacggctatattactattacaaaccgtgaatattacaaaccgtgaacaagttagaaatcaaaaaattacaacaaagaatcaaaaaccactagtcaatacctatttgcccttcgggctctgcacttttttcagcggcctcggctacttt

SEQ ID NO: 309932 - DNA, 303 bp, Zea mays
  unsure (1)..(303): unsure at all n locations
ttntccttacaatttttttttttttttttttttttggttttttttttttgggcagcgaaaccattactttgatcggacacaatactcacatagttttgcatacacacatatgctcctgcaactactatttattaacacacaaacatcaacgggcgaaaaacctcacattaaagcacagccatttcacgattattggcatccttcacagcattcaaattaggcctttctggacacgccttccttggacacatacccaggaggggcttcctcactcattttttcctcacccaacgcgcacttggg

SEQ ID NO: 309933 - DNA, 401 bp, Zea mays
ttttcccttaaatttttttttttttttttttttttggttgttttttttttttttttttttttaggaccaaggctcccctttgctagacacgttagcacattggtacacccccattggacacctgggccctttccttacatttataaaaggaagggccagggctttcgtaccaaaagggggccccgcgggaggacaggctgacccacaggcttacgcttttttttttttttccacgcgaacgcttgtaaccccctactggaagcgcatccgccctgggcgcaggacaacacgaggccggggtttccccttactgttttcccccgttgtgttccgttttgcgccgacccatttgggctgggacacgcagcgacaatttacttgtcggtccagggacccccggg

SEQ ID NO: 309934 - DNA, 323 bp, Zea mays
tgccaccacgagcgagggttccttatggaaactcgctagcttcatataacattaattatttctttttctagacgatttccgcaatgggatcgattcaagagacggtcgaatacaaatcctggattacgatgcggaccgcaatcgggatccgaacccagtggctgcctccgtcgtgccatgccaagctaccgaaggtgtagtcaccctggaaccgacgcgtcgccatgaaagccaccttgaagctctgtgctttcctcttggcatcgaagaccaagaccgacggttcaacggacatctccacgcccggaggcggctggaggact

SEQ ID NO: 309935 - DNA, 253 bp, Zea mays
gatgacaaagaagcaaaattacagcaatcgcatagttccagcaacggctacaagaacatcaaccgaggtgcactgcactctttcataaagaccatcatgtgaaatgtgacttggtaagcattcctcggtacaggaggtgaacaaaacctgcgctctaaaagcgttgccgtcctacaaattattatgcatcaagcgtaaacttttcccagcgcaaaaaagacctatttcgcctgtttaatgagttcctctcatc

SEQ ID NO: 309936 - DNA, 148 bp, Zea mays
ccttgcatattggcccggattaattatgggttgacacgcaatatagctgcaataccattacatacccgtacaatacacctggtgttgttaaacatataggacgaacacactagtaaattaaacggccgggacggcagaagacaggccg

SEQ ID NO: 309937 - DNA, 334 bp, Zea mays
cagcttgaataccacggggttcttctttctttactctttcccgttggcgaggaatctccacaacttagagtctctcgcccttacaataaggatcaaagtgaaagcactagagtaggggagggaagcaacacacacaaatccacagcaatacgcacacacacagccaagacttgagctcaaatgaataacacagggttcaccactagaacggagctcaaatcactaagaatgccaatcgagtgcgcaaagacggagtgtgaatgatcaagaatgcttagagtatgcttggtgttctcctccatgcgcctaggggtcccttttatagccccaaggc

SEQ ID NO: 309938 - DNA, 306 bp, Zea mays
atgaaccttaattgatgctttcctgcaccattcagcaaaacaatgatttctcctcttaggaaccacagaggacagcccaattggaggtaatatattatgccaaaactaccttgcaaagacacaatttgttaagaggtgctgtgcagtttcattttcttggtcacataaagcacaattttcagggtaatctaggcctctcgtttgcagcctgtctactgtccaacatttattgttgatagtaagccaaatgaagaccttacacttaggggctgcccagcttttccaaaccctttccaagacttaaag

SEQ ID NO: 309939 - DNA, 419 bp, Zea mays
gcgacaacatagaacttccattaccattgaaatagtaaaaaaaaaatcacggtccgtagattacaacctactacacatcagtgcacacagcattacacaaagcccggcatctagagaaacatgccgacttggacagagttgcggcttcagaaacctcaacgccaaagtcacagaagtggtgaccaaccaggaacacgatactacagcggcaccatcgttgcatcttcatccatcgaagatcaaacgcaggactcgttggcctgctcaaaccgctccgcctggaccacagcggtatcctcggacaccagcgcctccagcagcagggccttcacctcccaggagtcgaaagggaaccctctcctcgtgtaggcgttgaggagggcggcgctcccttgcttcacgagcttcacgaacgcgct

SEQ ID NO: 309940 - DNA, 392 bp, Zea mays
gaccaattctgcaggataaggatgacataaatcaaatgtaagaatcaatttcagctgcgatgggtgaatgataacatggaccaaagtcgcaattgcatcatgtgcttctactgagactatggcaacatgggtaactgatagatggtggttgaatcaacatttcagagtagctcttgtgatttccaatgctccctcgttgatcttggtgctcccaatgaagccactcatatggacaaacacacagccaggaatgttggtttctgctgaaagtccatcgtctctcatgcccctccacttttctgacagagccttctggctctcgaacctgtcaggaccaactgcgacagcttggactcgccaattcttgctcctctcatctgatacaacacata

SEQ ID NO: 309941 - DNA, 170 bp, Zea mays
ccttggatatttgcccacatttattatggttttacacccaaaataggtgcaaaaccattacatacccgaacaaaacacctgctgctgctaaacatataggacgaacacactagtaaattaaacggccgggacggcaaaaaacaggccgggagcagagagctttgcgttat

SEQ ID NO: 309942 - DNA, 383 bp, Zea mays
gccaaaaaattattattacgttttttttcagggaatcctatagaagacagtaaatttccaagctattgtaattacgcatgcatacatacgtatacgtacgcgtattaccatatactacactatccttttacaaattaaacgtactaccagtctatcacattcacagctgtacgttgcggcttgtatgtattttacacgttgacgaagggcgcgccggtaaggtactcggtgacggcgagcgcgacgaggccgagcatggcgaggcggccgttccagagctcggcgtcggcggtcatgaaccggccgctcctgccctcggcgctctccccctggagcagcggcaccagggacgcggcggacaggacgcgggcggtgtacgcgaa

SEQ ID NO: 309943 - DNA, 183 bp, Zea mays
accttaggcaaagggggacacatttagccacgaaccaaacagccccttagtagtacaaacaaatactcccgaggggggtgggtcaaacatgaactcggtccttttttcctgctccgagatccattccattcgtccatttagcctcgaacgggccacattaggcgacggcgactggggtcgggg

SEQ ID NO: 309944 - DNA, 363 bp, Zea mays
agtattgcacaataatagatccacatcacataaatcatcaacaatcaccacaacaaaatcattcacaaaacctacacatgttattatgttttgcacatatttgcaaacactttacaaaatcatttaacaggctcccaaactccatctgtctagttcgagcagaagaatcccatctctttgaagccagtcgatcctacaacgtgaacaatgggctagttcaaatgatctactcgggtatggaagcctttttgttcccaaaacaccaagatatgcagggattcctctttcgagtgcaaactgaatctgattctgatgcacatcgtttggtgccaaagacattgctatcacattagaagaaagaag

SEQ ID NO: 309945 - DNA, 317 bp, Zea mays
acttgtcagactgtacgattagtcctcttccaatccggccgttaatccaaaagcattccaactcacacaggggcgcagaggagaaagagacagacaggcagcgagagagagagagctcaaagcaggcaggcaggcaggctcgtcgggctcatgagttgctttcattcagttcctgacgaactggaggccgttggcccgggagtaccgctccatgaagcgcatgaagcggtcccactcctgaggcgtgcgcatcacgtacttggcctcgatccgcgccggcttgccgttcacgaacttggcgctcacgtccacggact

SEQ ID NO: 309946 - DNA, 201 bp, Zea mays
ggggcaagaacattctgggctccattccgcagtttctgatcatagggttgcccccgggttcatagtcataggcgtatccggctttacaaaactcatactcaaaacctactgaatgaactgccttatggttacagcaagcaacttaagacccagggtaaccaacgatgggggagcaccagcacaagttcctgggcccccacc

SEQ ID NO: 309947 - DNA, 332 bp, Zea mays
ccctggcatattggcccacatttattatggttttacacccaatatagtggcaataccattacatacccgcacaatacacctgctgttgctaaacatatgggacgaacacactagtaaattaaacggccgggacggtaaaaaacaggccgggagcaaagagctctgcgttattctttcctcgatcgtactaacggggacggatggcaacacacaaaggggagggtccgtactagggtagcaggggcctcttatcatgatggttaccatcagcagcttatttttgccggttggctaggacacaacccttccattgatccagaccacctaaatgc

SEQ ID NO: 309948 - DNA, 262 bp, Zea mays
aaaaaaaggcgaacggggaaactacattttatttagggggcagataatacatgacacccaacatacccaaaccctccagaaacaccccttccctccctttttccaacgaaaagcagggggcgacagtaagggaaggaaaaagcaaattcggggggatatccccgggagagagccccaggggaaggagcaattttcctttcggggaacttttaaaactttgggttttgggccccagctttcaggccctgccatggaaggcttc

SEQ ID NO: 309949 - DNA, 336 bp, Zea mays
ttattttttttttttttttttttttttttttttgttttttttttttttttttttttttttttttttttttttaaggccaaatatcaaacttcataagggttcaagccctactggtgcaaaaaagttttgggtcccacccaaaggacccaacagggccattaaaccaacgaagccccccccccgttttatgacccccaaaccccagatgttttttagacccccccctccattttgggggcccccagggggccccagacgacccaaatccccaggtccaggagcggtttaaatgaaccatggcttactgcccaccggggggggggagccccagggggg

SEQ ID NO: 309950 - DNA, 446 bp, Zea mays
  unsure (1)..(446): unsure at all n locations
ttatanttttttttttttacacacactgctcgtggattaatcagacgctgcagagtttacagtacacaatatatacgcacacacttagatctgagacaaccaaaatacatcacgccgcgccattccacgatacacgcataaccaccgtacgtgccactacatacaggcacatggctcttcaagctcaagcatatgcaccccacgaagggagaacacggcagtattatgtgctcacgcggtggcgatggccgacgacttcatggcctcgaaccggggctccttggcctcgaacttgtggcgcgcgtacaggttcatgtagtcctcgaacacgaacctcgggtacgtggtggccttcttctcggctcgctcctcctcgccgacgagcgcgggggccgggaagatgacggcgtcggcgcccgggttgtagaaggacgcgacggacatgc

SEQ ID NO: 309951 - DNA, 355 bp, Zea mays
  unsure (1)..(355): unsure at all n locations
ttnttttttttttttttttttttttttttttaaggaacaaaaaccgcatgcatgtctaatcaccccacaaagggaacactggagctgactcaaaattacaaggctccagccatgcatgtgggccacgctcgagttcaaccagctcagcgtcgtccatgggggtctactacctcgctcatgcctaattatgtgtggagcaggacgaaccaattacactacactggcttcagtccaagaaggatgtagcctatcaaggcgatcggcagcgctatcagcatgccaaaaattaccatagcgctcacgatggcagggtggacgttgtattctttcgcgaacacgaagggcacgacccctt

SEQ ID NO: 309952 - DNA, 455 bp, Zea mays
agttatgcaatgaatatgccagtggggtttaattaatccacccaatcagttataaaaataaagcatttaacggccttctggcacagtgacactcatatcatatatagacaactccttgttgccaactgcctttccaggttggtaggggtccttaagtgcaaaatatacaggttgacttggagttggaagtgtcgtcattttgttctccagcatggacacaaccaccgacatgagtggcctgaagctcggactgtcttgaacacacaagagtcctatatgtacacattgtgaaacttcatcaagggagtaattctccatgactgatgagtccaccaaatcttctattttcccttctttccacatgttccatgcatatgctctaagattaggaaaatccatgtgaagatgtggtgagctgatcttcaaaccacttacaatctccagcattaaaacac

SEQ ID NO: 309953 - DNA, 379 bp, Zea mays
gtctcggttttcgccttgcgggacgcgtagcggatggtcttgtcgaaccggcggttcttgcgcttctcacggtaccgcatcagccgcgcctcccgctcctcccctctgctcaccaccaccaccaccggcaggccggccgcctgcgcgtccggtaccaccgccacctccgaggatgacgacaaaatgtggttcatggagtgttcggggtagcaaaagctgccggcaccgatgtccagctcgggcggcgcgaccggcacgccgatggccttgacgccgtccatgcaccgggcgaagtcgaggtcggcgccgaggtacgcgtccgaatccgcgaagaacgtgtcggcggcgctgtcctcgtggctgttgtcgggctcgggga

SEQ ID NO: 309954 - DNA, 386 bp, Zea mays
ggacatgaaacgctcgtatgtccacatttcatgcaagtacataggacccaatgcctctatttgtggcaccaagtgcaccacaaggtgcaccataatatcaaagaacgatggagggaaacacatctcaaactgtgctattgtctccactgtgaattcctgaagagatgccagctcatcacggtcaattaccttttgtgaaattctgttgaaaaagtagcacaaccgtgtgattgccatctttaaaaacaaaggattaatagccctgatggcaataggtaggaatgtagtcagcatgacatgacaatcatgtgagttgatagttggggactatcaggtctttcattgacacagtacttcatatgctagagcagaatccggatggaact

SEQ ID NO: 309955 - DNA, 347 bp, Zea mays
gacaacgtaatataaatgtttattattaaacaatcacgaatacatgaaaacaatatcaaattacagttgtaccttgagcacgacagaaggcaagggcaaaagtaagatgtgaaaaagcgtgaacagtacggggttactgttcatctatttataggcacaggacgcagcctgtgagaaattacattcataccctttacaaatggttacaatcataacacaggttgtcatgggccgattggtcatttcatctttaagtcggtgcatctagagatacgctacgaagctccctgattggaagcttcggcattttgtttttggccttccgaaggtgtttcttctcacaggac

SEQ ID NO: 309956 - DNA, 275 bp, Zea mays
tctctttcgtccggctagagccaaccacaaaagcttgcagttactgagagtgtgcgtgagagacaggatgggtggcagcggcacggctgctctgctgctggccctggcggtggtggccgtagagcctgcccgcggagatccaggccgacgccgggtacggttacggcggcgggtacaccccgacgccgacgccggccacccggaccccgaagcccgagaagccccccaccagggggccgaagccggacacgacgaccaaggagcacaagccgtcc

SEQ ID NO: 309957 - DNA, 479 bp, Zea mays
tcgttgacgcgtgggtgtgcgtgggcaccttctgctgcgccgctgacgggctccccccgcgcgagcacggcatggcgtgcctgggcaacgtcgagctcgacctgtcggcgatgccaacgctggagcaggcgcacgcggtgatccggcactacggccccacgctgttcttccaccccaaggaggtctacctgccgtcgtccgtctcttggttcttcaagaacggcgccgcgttgtacaggcgagggggagacaccgcgggcgaggagatcgacggcgaggggtccaacctccctggtggcggttgcaacgacggggagttctggatcgacgttcccagcggcgagcggggccgcgccgtgtgccgcggcagcatcgacagcgcggagctctacgcgcacgtgaagccggccatgggcggcacgtgcaccgacgtggccatgtgggtgttctgcccgttaacggcccggcgaggctaagct

SEQ ID NO: 309958 - DNA, 402 bp, Zea mays
ttacttcttgagagaggagaggcggcgggagagagaagagtcgacgacgacggtaaccggccgccatggaggtgagggtgccgcttcttccgcagcacatattgcggaacggcgacggacgggagaagaagtgcggcgtgaggcggtggagggagctgctagcgcgggaggccgggaaggtcggctgcgtggccctgccgatggcggccgtgagcgtgtcgcagtacgcggtgcaggtggcgtccaacatgatggtcggccacctccccggcgtactcccgctctccgcctccggcatcggcacctccctcgccaccgtatccggtttcagcctcctcattggtatggcaagtggactggaaactctatgcggtcaagcctatggagcaaaacagtatgaca

SEQ ID NO: 309959 - DNA, 463 bp, Zea mays
  unsure (1)..(463): unsure at all n locations
tctcacgcgtccgcccacgcgtccgcggacgcgtgggcgcggagggaaggagggagaagaagcgaagccgcgccgcctcgggctcgcttggtgcagatcgggacccgccgcccggccgacgggacggatcccgccttgcaccaagtgaatcggagccggcggagcgatacagcggccggccgaccgccgcctgcttgcctgcgcgcgctgctctcgactgcggatgccgccctcggtttgtttgtttgtttttttctttctgataaggatcgtgctgattgctgtgactccgtgtcgccgcccgtgggaattgttattaggcgccgtggggatctctgctctaggttagagtaagcagtccggatctggatctggcgcgggtccaaatttctatcctctggtgagacatctccgtttttgtggtgcggngtgcaaaatttgccggtcatgatgccactcggat

SEQ ID NO: 309960 - DNA, 469 bp, Zea mays
acaataaagattgagtaataatattaaagactagagtcatttacataatatgaatcaaagtacacaaaatcgaaacgtagccaacgtaaacaacccaccacaggcagctgactgggggaggtcgctagcctaatcctcgaactcgtcaaagtcctagaactcctggagatccgcctcgacgccttcttctttacctgagcatagattgcaccaaaggcaaccttcaccaaatagatgctcaggatcttcaatctcgtaaaactcgaagagcttgatctcaggaccagagggtcaccaaatcttgatcgtcgattcctcgaagctcggaaacagatcgcaatatattcgcgacgcgcagcgaatacgatcagacatagacaaacaaacatttatatgcataagaacattacaccatacaaagaaaaccattttaaaaacgtgtactataaattagagatcgcttttacag

SEQ ID NO: 309961 - DNA, 446 bp, Zea mays
  unsure (1)..(446): unsure at all n locations
tcgttgacgcgtgggcgcacctcgacgcgcagcgcatggcgactcggctctcgtccacgggcccctgatctaggcagccggaccccgatcggttgcccgtgcagcgcgacccccacgaccaggatccagggagtcgggccacggtcctcggcaaggcatctcatcggcgaacgttttttcgaggccgggctcctgctcccccggaatctagggttcgcctcgccccgcgtcgccctcgatgggcccggccgcgcagccgccggacgccggcggcggtggggacccggaggcgtggtacggcagcatccagtacctcatcaacatctccgccgtgggggccgcctcctgcgtcctgctgttcctcctcgttaagctccggttcgaccaccgccgcatcccggggccctccgcgctcgccgncaagcttttcgccgtctaccacgcca

SEQ ID NO: 309962 - DNA, 455 bp, Zea mays
ccctcgcgtccgcccaaatctcgcagcaacgaattcgcatttcccccacctccacccccactttcccttccgtccccttctcctcgtcgcgatccaaatccgcggccatggacggcggggggcagcccccggacaccgagatgtcggaggccggcgcgggcggcggagggcagccgccgcagcagccactgccgccggtgggcgggggcgtgatgttggacaacatccaggcgacgctcagccacggcggccgcttcatccagtacaacatcttcggcaacgtgttcgaggtcaccgccaagtacaagccccccgtcctccccatcggcaagggcgcctacggcatcgtctggtccgcccgctcccctcgcctccgattcgcgtcgtttggggccgcttctgactggcatctctgatctgtgatttcatggtatgcccactgcccagctcggcgc

SEQ ID NO: 309963 - DNA, 499 bp, Zea mays
gtaaaaatatcttcatctagcaaatagttttcaattagtatgattagaagactttatagttatagccttacaggttttgtgtgtttgcgctttcatcctcatatactggtaactgggcatggaatacttcagtgcaacatgtttctattagatgtcacaaggtgcttatttcagttttctgcatcttcaccatttctacaaattttacttgtagacttcttatttttaggttgtccgacaattcaagcgtcctgaaaacgtgtcggagaaggagattgatgctgcaggagatggttttgccattaatatgctactttgtctatagtttggctaatctctttctgctaacatccctatattgcttttgttataggcgacgttttagtcattttagatctacgagctgaccagtcattgtttgaagctggagtggctcgagaggttgtgaacaggatccaaaaattacggaagactgctcagcttgaacctgctgatccag

SEQ ID NO: 309964 - DNA, 338 bp, Zea mays
tctgtttagccacacccggtgtggttccggcggcgatgtttttggacggacctggccagctcaacctagactaggccccgtcatggggctgccgcagggttgactgatccgagaagctcgagctcatcggcgagggcacttacggtcaagtgttcatggcgaaggtgacggcccccaccgatatcgtcgcgctaaaaaatattcgtatggacaacgagcgggaagggttcccgatcaccgacatacgtcggatggacactcatcagaggctacaccaccagaacgctatctagctagaggagatcgtcacctccccaggcccagatcggtacaagcaa

SEQ ID NO: 309965 - DNA, 469 bp, Zea mays
ttgaaaagggcggcaggccgggggaggggaaggggctgagcatcagagcatgacgtcgggagcggcggcggtgggaggcctcgggcggacgccgacatggaaggagcgggagaacaacaagcgccgggagcgccggcggagggccatcgccgccaagatcttcacgggcctccgcgcgctcggcaactacaagctgcccaagcactgcgacaacaacgaggtgctcaaggcgctgtgccgcgaggcggggtgggtcgtcgaggacgacggcaccacctaccgaaagggatgcaagccgccgccagggatgatgagcccgtgctcgtcctcgcagctgctgagcgcgccgtcctcgagcttcccgagcccggtgccgtcctaccacgccagcccggcgtcgtcgagcttcccgagcccgacgcgcctcgaccacggcagcggcagcaacagccacacccccggccccgcc

SEQ ID NO: 309966 - DNA, 335 bp, Zea mays
cctcatctagcatatcagcaaagaggaccaagggaatgtttttgcaataggtcccgccgatccacggccgcgggatgacttgtacacagtactcgaccacgaaaaccatgacgaaacaatcgcggtctatactacaaagatggttgcagaacttcttggctgcagcattgaagacctcaatcgagatctgacataccgccacatgaaagtacataatgaaacccttacgcacaaacttaccctagctaatgcaactgacacactataggctgtagccaaacaatagtttgccaattggcttgaatggcttgtagaaaaaaaaaagaagtctctct

SEQ ID NO: 309967 - DNA, 530 bp, Zea mays
gctttgaatgtgtaggagttatcagttccatatctccattgtgtatatccttgcattgggtaatttggggaaggaactacaaagaagaatatgcctatgtgtttgtgtatctgtgttttgtctaccatttgatgtgttgacaataatccatgattggtctgttgtcatatgcagtctataaagccagaactgatagtacaagtggagcctattgaggacccttatggcccatccataactgatgagaagttggatgccattattgtcagtaaggagacattaaatggtggactggctgtaaataggaaaagagaagagaaagggttcccactgttgaaggttcatttgtgcttgcttctatattttctttaattgattttattctactactcgatgcactatgtagctggctcaaatgtgaatgatttaaatttcaggttgaggttgttgatctcccttccgccgtgtgggggggaaaattgagttcttctgtttaggaaaactgggcagacatgctcacaaatgaaaca

SEQ ID NO: 309968 - DNA, 453 bp, Zea mays
ttctctgccttttttcgttttgttttttttgcggggtcattaactttagacaaaaaaacatcagtaccgctgtttttaagcccacgcgtccggtcgagcccaaccgcacatgctcgcgaggcaggacagagagagaggcgggcagcaaaacaatgaaggggaaagaggaggacgtgcgcctgggcgccaacaagttctcggtgcgccagcccatcgggacggcggcgcagggcgccgctgacgacaaggactacaaggagcccccgccggagccgctgcttactccggtgtgctgttacctggtccttctaccgctcgggcatggccgagttcgatcacagattgcctgttgtttccttgaagatgatcggagagaaggatgatgacaggtccacctccaagggcgccaccgctggaatccatggcatgcccggttactgattgggaatgatt

SEQ ID NO: 309969 - DNA, 504 bp, Zea mays
ttcttgagcccctgtccgtgttcgtcaactcgtacggcaccggcacgatccccgacaaggagatcctcaagatcgtgaaggagaacttcgacttcaggcccgggatgatcagcatcaacctcgacctgaagaagggcggcaacaggttcatcaagaccgccgcctacggccacttcggccgtgacgacgccgacttcacctgggaggtggtgaagcccctcaagttcgacaaggcatcggcttaaggttgggagtgtcactgtggacatgaggactaccttcctctggctctgctgttacctgcaagcattgctgctgctggatgtgtgtgtttgatcagtgactggctgctgctccatagaagatgaacggagagaaggatgatgaagggctttggcaatcgccgctgcaactgcaacccatgccatgccggcttagtgattgggtataatttggctttgcagcagccagcattattatgtgctgatctgttatcttttacta

SEQ ID NO: 309970 - DNA, 418 bp, Zea mays
  unsure (1)..(418): unsure at all n locations
tgtgacagtggattgtcgacgaacaagttgccgggtacacccaaggatatgaaaagggccttacttttgccactattaagggtgctgggcacacagttcctgagtacaaaccacaggaagcactagctttctacagccgttggcttgccggtgctaaactgtgaggaggcctattttgtgtgcaaaggtcatgcagtactgaatcaaacagaagttggataaagcatgcagcaataaggcagtcgaaggatcaaagtatccaacgcgccaactacaatgttgcattcattttcacatgttataccaatgcagttgctaattacctgcattgttcatgagttcacagtccatctaattggttgaccacaccgtctcatcttgcaccananaaaaatatacaaataaaaaaatgaacaaa

SEQ ID NO: 309971 - DNA, 478 bp, Zea mays
ttgccactccgaggccaagtctagggtttgggaatctgtaggaggggagaggggagcgcgctcagggtcagggaggcgaagatgatcgaggtggtgctgaacgaccgcctggggaagaaggtgcgggtgaagtgcaacgaggacgacaccatcggcgacctcaagaagctggtggcggcgcagacggtgacgcgccccgagaagatccgcatccagaagtggtacaacatctacaaggaccacatcacgctcaaggactacgagatccacgacgggatggggctcgagctctactacaactaggcgccctgaccccaaccgtgccctgatgtaagggaatttcctccctcccaagttcggcgctgttgctggggcgactggcttggtttccattaaccacggttgttgagtgatggctaggagcggataattagttttgtgtgcggcaggggcggatctagatcttttggctaatgat

SEQ ID NO: 309972 - DNA, 525 bp, Zea mays
tttgattaatgacatgcatggtaaaaacttctgggcttttgggtgagggagtaaataaaacgttaggacaatgaactttccaatcaacgtccctcttcagacatgtcataatgttcaagctgaccaatttcagtgctacctttactctgtttaattctgttatattggtttggcccaaatattatggcaggtgaatgtttacatatggttgacgtcaaacaaagcacacatgtagtcttgggtttttatgacccatttttcttatcgattaattattcttatgactattgttttcaatgtttatcaggtggcggtgaatactgtgatccaggatgagaaggaattcttgaatcatattattaagtccacaaacatgaagtgtctaacaccaccatctgcgctcgatggagaatgtgggttccttgctgcaaatctctatgccaagagtgtgtttggcgaggacgctctggtgaatatcagtgttgagaagcaggccgatggcaagttgactggctacatcaggat

SEQ ID NO: 309973 - DNA, 492 bp, Zea mays
tttttggccccgtctacaaggggaagctgccggacggcgccgagatcgcggtgaagcggctggcggcgcattctggacagggcctggaggagttcaagaacgagatccagctgatcgccaagctgcagcacaccaacctggtgcggctcgtcggctgctgcgtccaggaggaggagaagctgctggtgtacgagtacatgcccaaccgcagcctcaactgcttcatcttcgaccagcagcgggggccgttgctggactgggagaaacggcgccgtatcatcgagggcgtcgcgcaggggctgctctacctgcacaagcactcgcgggtgcgcatcatccaccgcgacctcaaggctagcaacatcctgctggacaaggacctcaaccccaagatctccgacttcggcatggccaggatctttggatccaacatgacggatgccaacaccaacagggtcgtcgggacatatggctacatggctcctgagtatg

SEQ ID NO: 309974 - DNA, 538 bp, Zea mays
gttccagcaacccgttcccagagaagcgacccccgccctatctcctctgactgggcgacctcgcctattcctcgcaaaccatgccgtggtgagcgtgcggtgcgataaaggcaattgccacgacggcacggccgcagaagcggaccagaccctcatccggtggcggcacgagcgcgcatcgcagtagcagcagccacagcgacgacggggcggagggtaaaagaggcaaggcttctccagtttttcgaggttggagaccgtatgctcgagggtgccgttctcgatggtctcctcctccaacagcgcggatgtgtagatattagccacgacctcggtcgcggcgtggagcgaagcctggagaggtccccgcggtagcggggcgtgagcagacgaagggaaggcagcccctgcgccgcgtgggaggaggaggcagatcggggagctgcgcttccagctagagctgatttggtggacatggcattagagtggatctatgtgggagcaatccttccctatttaatttgaatagagaggggat

SEQ ID NO: 309975 - DNA, 343 bp, Zea mays
agcccgcccattactatcgtcagacgcagagactggggggcggacgggttaatttattcctggcagacgtgattcgtcggagcgcccccgtgaagggcgtttgccagatgctaagaaagggtgcacaacatctgagggccatctttcatcggatgggcttatcggacaaagaattcgtagctttatcagggggacatactcagggaagggctcaccctgagaggactggatgggccggtgcctggacaaaggagactattaagattgatgacttatacttgcttgagcctgagaaagaggaatctgagggacttttaaagcccccaactgacaaggcactgtt

SEQ ID NO: 309976 - DNA, 327 bp, Zea mays
tttttctgcagcggcgtcacggctccgttctacctcgacccgatcgcgatcggcgcgtacggagccgtctcccggggggtgttcgtggccacctccgctggaaacgaagggtcggccctcaatgtcggtgaccaacctcgccccgtggcttgccaccgttggcgccggcaccatcgaccgtaatttcccggctgaaatcgtgctgggcgacggccgacgcttgttcggcgtgtcgctgtactccggcaagcctcttaccaactcatcggtgcctttgaactaccccgggaggactggcgggctctccgctttgctgtgcatggagaa

SEQ ID NO: 309977 - DNA, 343 bp, Zea mays
ttcctattcgtccgcaggtagttacttctcaagtttggcttaactggaggaatttgctggtgaccatagtgaattggtgatgttctttcaggcaaatgtttcagtagaagaggcttgcaaaaagatctggctggttgattcaaagaccccacttatgtcggaggcttcggcattgggtctgtccttttgattgtaaagaagtctgttaacgttgcagggactaattgaggcctcacgtgaagagactctccatccatttaagaagcgaattgcacatgagcaatgaacctgtcaaagattttttaggtgctgttaaggctattagaccaactgcacttattgg

SEQ ID NO: 309978 - DNA, 446 bp, Zea mays
gtatttgtcggcaagatggctgccgtggtggacaccgagaacccggcggccaccgtcgtcgtggggccgccgtgcgcggtggacgacgacgacctgtcgcagcgcgccaactggctgcgcgcggcggtgctgggcgccaacgacggcctggtgtcgacggcgtcgctgatgctgggcgtgggcgccgtgaaggcggacgcgcgcgccatggtcatctccgggttcgcgggcctcctggcgggcgcgtgcagcatggccatcggcgagttcgtgtccgtgtgctcccagcgcgacgtggagctggcgcggctggaccgcggcgccgaggaggagaaggcactgcccagccccgtgcaggccgccgcggcgtccgcgctcgccttctccgtgggcgcgctcctgccgctgctggccgccgggttcgtcaccgactacaggctgcggat

SEQ ID NO: 309979 - DNA, 400 bp, Zea mays
ttgattcgttccggaagatcctactcgcggacggtgtgcgcggcctgtaccgcggcttcggcatctcggagctgacctacgcgccctccagtgccgcgtggtgggccttctacgtgaccgtgcagcggctcctctggctgcgccgtcggccccgcggtgcacgacagccgtggcgccgcgatagccctgcagggtgcgagcgcggccgtggcgggaagcgcggaggcgctggtgacgatgccgctggacaccgtgaagacgcggtttgcaggatatggacgctggggcgcatgcgccgacgcttgcggccgcggcgcgctgcgcttgttcgggagggaggttggtctgcatgctaccgtgggctcgggccgcggtgggcgatcatgtcgctgtctttggt

SEQ ID NO: 309980 - DNA, 338 bp, Zea mays
gcgtgggtggacccacgattcagatcgactggcagatgaaccaggaccgctcggtacggcggaacctgacagcctagggttcaagatgcaaacctttgtgagaaccactgactggcgagactatcaccctacaggtggagtcgtctgacaccattgacagcgataatgccaagatcgaggacacggagggcatacccccagaccagcaggggctcatatttgctggtaaacagcttgaggacggacgcacgcttgctgactacatcatccagatggagagcaccctccaccttgtgctccgtctcaagggaggcatgcagatctttgtgaaaaccctg

SEQ ID NO: 309981 - DNA, 325 bp, Zea mays
tcatacactttggtcatacctggccagccctccagaccaccattacctcatgatcacatccaccggcactatgtggaaaatagtgagaaaccaaagcacacctataataaagcacacctagatgctgagctgaagctggttggtgagtatggcctgcggagcaagcgtgagcttgtgcgcgtgcagtatgccctgagccgtatcaggaatgcagccagggagctgctcaccctggatgagaagaacccacgccgaatctttgagggcgaggcgctcctccgccgcatgaacagatatggtcttcttggtgagggacagaacaagc

SEQ ID NO: 309982 - DNA, 252 bp, Zea mays
acgcgtgcggatctgcactgccgcgcggacgccgcgcgcctctgcgtcgtgtgcgaccgccacgtgcacgccggcaacgcgctttcgcggaagcacgtgcggacgccgctctgcgcagggtgcgccagacgcgcggacgccgtgcgcgtatggctgggcagccgacccggtgttcctctgcgcggactgctgctagggatgcaccgtcggttcctaagggcgcgggcctagcgagggcttatctgagtgccc

SEQ ID NO: 309983 - DNA, 326 bp, Zea mays
cttttaacacgtggttatcctgcactgtcctccgggccaccagtaccttgtgatcatagccaagggcacggtcggaagactgtgggaagacaaagtacaccgggaatagggcgtacttgaaaactaccctgcagctggttggtgagtctggcccgctgagcaagcgtgagctgtggcgcgagcagtatgcgctgagccgtgtcaagcatgcatccagggagctgctcaccctgcatgagaagaacctacacccaatctttgagggtgaggcgctcctacgacgcatgaacagatatggttttcttggtgagggacagaacaagctt

SEQ ID NO: 309984 - DNA, 457 bp, Zea mays
cccacgcgtccgccgatttctccaagattttgttgtccgtcctatcgcttgcaggatcggattcgccgtctctggccatggttctcgccggcctccgccggcacgtcggccagttcttgaccagcagtaatgagcttatggcggcgtcgctctcggccgtgagctgcgcggacgaggtgcagaaggcggagggggcggggtgccgtgacgacgccgcggcgctgcggctcaagaaggtggccatggcggcgatactggtggccggggtgctcggggtggtcctgccgctcgcggggcggaagcggcgcgcgctgcgcacggacagcgccgcgttcctggcggccaaagcgttcgccgccggggtcatcctggccacggggttcgtccacatgcttcacgacgccgagcacgcgctgtccagcccgtgcctccccggcgcgccgtggggacggttccc

SEQ ID NO: 309985 - DNA, 348 bp, Zea mays
ttcgtccggtttctctcgctctgagaccactggggcgccggcggttggtgctgaggctttcgctggtcggttcggcggccacgagcacccaccaacagctctggaaaaatggctgatggtgaggacattccttctcttgcctgcgacaatggcaccggcatgaacaaggctggttttgctggggacgacgcaccaaaggccgatttccctagcattgacggccgtccttgccacactggtgtcatggtatggatgggacagaaggatgcatatgctggcgatgaggcacagtccaatgaaggtattctcacgctcagtacccgattgagcacggtattgggagcaact

SEQ ID NO: 309986 - DNA, 250 bp, Zea mays
gctgaacgccatcgagggcatgaacggcaaggagctggacggccgcaacataagcgttaacgaggcccaatcccgcgggggccttgtaggctgcggcggtgggtacggtggtggccggggaggccgcggctaccgcggttgctggcgccgtgattgctgtggcggctaccgcggtggcggcagttacagtggcggcggctgctaccgtggtggtggctgcggctacagctgtggcaaccgtggcggcggc

SEQ ID NO: 309987 - DNA, 432 bp, Zea mays
ggctgctgtacctttccctggccgccaaatgcggggaccctcagcgcctggtcggcttcgccgcggtcttcgtcgcggcctgcgtagtcacgtcgctcctgcactgggcgtccccgggcggccccgcctgggggtggtactggtggaccaggcgggccgggctgggcatcgtccgtgccgccatcccgggaccccggggcctgccggtggtcggcagcatgggcctgatgaccggcctggcgcaccgcaagctctcggcggcggccgagagacaggccagcaggcgccgcctcatggcgttctcgcttggcgagacccgggcggtggtcaccgccgaccccgacgtcgcgcgggagctgctcgccagcgccggcttcgccgaccgccccgtcaaggagtccgcgtacgggctactgttccaccgcgccatcg

SEQ ID NO: 309988 - DNA, 327 bp, Zea mays
gcgcgtgaacgtcgacgggcacgacggcatggcggcggcggacccggacaccgaagtgcagggggagttcccacccctcgttcggcagtacaaaagcggccgtgtcgagcgggtcttcaacctggccccgctcccggtcggcaccgacccggccacgggcgtcgtgtccaaggacgtcgtcgtcgacccgggcaccggcctttgggcgcgcctttttctccccgccggcatgcacgggaagaagctccccgtggtcgtctactaccatgggggggcctacgtgatcggctcggcgggcgacccgatgacgcacgggtaccttaacgc

SEQ ID NO: 309989 - DNA, 455 bp, Zea mays
ggcggcactcctcgcccacgggcgacgctgcgcagaggctggcgcactgcttcgccgacggcctggaggcgcgcctcgccggcacgggcagccgcttgtaccagtcgctcatgctccgccgcacctccgtcgccgacttcctcagggcgtaccgcctctacatgaccacctgctgctgcaagagggtggcgttcgccttcgccaacaagaccatccacgacgctttcgcgctcgccggcaggcgccgccggctgcacatcgtcgactacggcctcggctacggcttccagtggcccgggctgctgcgcggcctcgccgccagggagggcggaccgccggagctggtcaggatcaccggcattgacctgccgcagcctggctttcgccccgcacagcagatcgaggacaccgggcgccgcctcagcgattgcgcacgtcagctgggcgtgccgttc

SEQ ID NO: 309990 - DNA, 301 bp, Zea mays
gttctagatcgcgagcggacgcccttttttttttttttttttccctcccacacaatggcggacgagcgcctccacctcgcgctgatgatataaaaggcctatgatgcgcgtgggcacacccacgcctcgagccgaccatccgcctgccgtacaaagcggcggcggcacgacgacgccgacaggacccggagggggcgtgcttaatcgcccggtatcaacggctactacaaaataccaggaaaaaaagcggaaatctgccatgcataccacaacatgaaaaaagggcggactttatgacgag

SEQ ID NO: 309991 - DNA, 459 bp, Zea mays
gctaaatccgcactgatcccaatcactggattgtattacagacctatgtgattctgatgatatttggtcacctagtaccaaaacaggcggaaatggttgttttcctcgagaagctaattattattttttacattttaggcttgttcatttcgccgttaatccatgtggattgggtggtattgagtcggtttaaatccataataggttaaaattcatctcaatccatcccaatacactctaatccacatggaattggaataaccgaacaaggctttagtgagaataatacacgtgtatgcttacatgtgtgttgttataaatcctctttattgattctactctctgtccgagattgagatctaagctttagtgacatttctagttataatggtcttatcaccagtggttttgaaatgtagtcagaagcttgcaacactcaaatataatctactacttatt

SEQ ID NO: 309992 - DNA, 454 bp, Zea mays
ggataaggttgacaaactaaaagcatcattgggaacaacaaacgtatcagagttctgtctttatttggttgatattttgcagcaaagggtaaaatcagtagaagagcgctttcaagcatgtaatcatgaaatgcattcacaaattgaactttatgaacactcaatagtggagtttcatggtactctcagcaaactaataaatgaaagtgagaaaaagtcaatggagcattatgcagaaggcatgccatcagagttctggagtaggatctctcttctgattgatgggtggtcgcttgagaagaaaatatccattaatgatgcaagtatgttgagagaaatggcttgcaaaagggataatcgccttcgggaagcttacttgtcatccagaggaatggaagagagggaactgatagatagttttctaaagatggcactaccaggaacaagttctggt

SEQ ID NO: 309993 - DNA, 457 bp, Zea mays
atctgatcgatttattaagctagttagcccacaccgactgctatgacatcacctgcagcaatgatgggcaaaatgcccgctagatgctatcgcctgatgaagaacatgtgccttccttaagcgcatgtactgacaaggtgaccctgaccccaagatcaggatctacgatgtccgaatgaagaggaatggtggtgatcagttcccctactgtgcgcaccttgactcatgggagaatgagaatgactccagtgaggcgctcgaggctgcccgcattgcctgcaacaagtacatgaccaagtctgcaggaaaggatgccttccaccttagggtccgggttcacccgttccatgtcctccgtatcaacaagatgctttcctgtgccggggctgataggctccaaactggaatgaggggtgcctttggcaagccttagggcacctgtgctagggtggacatt

SEQ ID NO: 309994 - DNA, 452 bp, Zea mays
ctctctgccagtttttcgccgaagacacactcgacagcaatggctgctgctctggccgccatggtcgtcctcgcgcttcgaacagtcgccggcgcagcctcaacgccggctgctgcggcggcgacgacgtccaggagtccggtcatctacattttcggggactccatgtcggacgtgggaaacaacaactacctcctcctctccctcgccaagtgcaactacccctggtacggcatcgattacaagaacggctaccccaccgggaggctcactaatggcaggaccatcggagacatcatggccgccaagtttggctccccgccgacggtgccgttcctctccctgtacatgaccgacgacgaggtcctcggcggcgtcaacttcgcgtccggcggcgctgggctcctcaacgagactggcatctactttgtccagtacctgtcgttcgacag

SEQ ID NO: 309995 - DNA, 485 bp, Zea mays
acccctgcagcccccggaccggccttcccggaatgacccacgcgtccactttttcggtttacaggagcaggctgtgcgccgcccatactggcttccccgcaccctgcactcactcgtcgccgtgctgcttccaaatcaaggggccatggatcccaatgacagggatgaggatattgatgctgtcctagaagccaaatgcattgaactcgactccccagactcatacatgcccttaagcggagactgccctaactggaagatgctctttgtgatggcctgccgttcctcgcttacgcccatgagcctgtctatggcggacttgatctcccctgtctgcagctggtgcggagacacctccgtgcccacctttcagacgtggcacacgtacctcgcgtagccgtactggtccccctggcgcgggtggcagatcatgggcacgcccttcgacacgggctccacggaggagtaccagccgcaacgggtga

SEQ ID NO: 309996 - DNA, 383 bp, Zea mays
ttggcggttgagatggcggctaatccggcggacgtgccgagcctggatctgatgcactagctgctccgtctcatgaagtgcatgtcactgccccacatgcgcctaatcttgataggcccacctggctgtagcaaggtaaccctatctaccattattaaggatgaataccgcttgtgccatttagccactggctatatgctgagggctgctgtgtcgttcaagacacctctatgtatccaggccctacaagctctggatcagtgatagcttgctcaagatgacatggttcaggggattattgatgaagctctgaacaaaccttcatgccacaaaggtttgattcttgatggcttccctagaactgacactcaagcactgaagct

SEQ ID NO: 309997 - DNA, 429 bp, Zea mays
gctcagcgcgaggctcgagccgccaaagcagggaagcagagagcaagcttaataagcaaccgcgtttcccagattccttggcactgcagcagctgcgtccaagcttgctaggtggtggcggcagcagcagcctgcgcctatgtacactgcaatggcagcgcgaccgctgcttcttccccctccggtcctcctcctcctggtggtgctggctgcttcgtcggccgcccatggctacggcgcctacggctacggcgacgctgctgctgagctcagggtcgggttctacaaggactcgtgcccggacgccgaggccgtcgtccgcaggatcgtcgccaaggccgtccaagaagaccccacggtcaacgcgccgctgctcaggctccacttccacgactgcttcgtccggggctgcgacggcttcgtgctcgt

SEQ ID NO: 309998 - DNA, 420 bp, Zea mays
gcctttcgtttttttttttttatcacatatatatcacatatatacatcacagatatcatcacagacataaatagccaacacaaacataaaaccgtgaccacaaacataaatatccatcacaaacataagtgttcaacacaagtattaaacacaaacataagtctcaaacgtcgcaagctctcacataagtatcaaacagaaacataagtattatacataagttgtgaagtctaaaacaacgactcatggaggtgggcggtttggccggggttgcgttgggctgaacccttccggagggttgttggatgccgccccagattggccaggagtgtggaagagagtagggtcaactggggggaacatggaggtggcggagcgatgccctgtgcggcgccaaggctctgcatgtactggaacatc

SEQ ID NO: 309999 - DNA, 437 bp, Zea mays
gtctaactgtttcggtggttggcgcgctcccggcgatcaccgtcaatgccgggcgcatgcacgagtgggtgacggagttcctgcgcgccgcggggctgtcgtacgtcatgaagggcccgtggggatcgccggtggacgtgatcatgacggccgacccggtcaacgtggcgcacgtgttcacgtccaacttcggcaactaccccagggccaggagttcgccgcgctgttcgacgtggtcggcgaccggatcttcaacgccgacggcgagtcgtgggcgttccaaaggcgcaaggcgcacgcgctgctgtcggacgcgcggttccgcgcgggggtcgccgtcagaaccgggcgcaagctccgagacgctctcgtgccgctcctcgacggcatcgccgcgtcgggcgcggtggtggacctgcaggacgtgttcgtgcgcc

SEQ ID NO: 310000 - DNA, 305 bp, Zea mays
atttccggttttagatcgagagcggccgcccttgcttttttttgtctattgttttggacaagaagggtggcgagaagaacattctttgtctttgaccttggtggtggtacttttgatgtcagtatcccgcccatagacgacagtattttttaggggcttaccaccaatggcgacactttttttttactttaggacccccacaaaacgatcatggggcactttatcaatttgaggaacaaaaaaaaccccaaggaaaaaaaaactttcaaccgccctataaaacctttggggattttaggggaaaa

SEQ ID NO: 310001 - DNA, 470 bp, Zea mays
cttgtgtgtgcttgcagcgtcgcagtccttcatgggcatcaactacggcgaagtggccgacaacctcccgccgccgtcgtccaccgcgcgcctcgtccagtccacgaccatcaccaaggtgcgcctctacgggaccgacccggccatcatctccgccttctccggcacgggcgtctccctcctcctgggcgccaccaacggcgacatcgccaacctcgcgtcctcgcccgcggccgcggcggcctgggtcgccgcgcacctcccggcctcgtcgccggccgtctccaccgtctccgtcggcaacgaggtcctctttgccgacgcctcgctcgcgtcgcagctcgtcccggccatgcagaacctgcacgacgcgctgccgcccaactccagcgtcaaggtgtccaccgtgaacgccatggacgtgctggcgagctccgacccgtcctcctccggcgcgttcaagccggagc

SEQ ID NO: 310002 - DNA, 445 bp, Zea mays
gcgcgtgtcgcgtgggttctagatcgcgagcggccggcctgtgttttttttgttttttttgttctgtgtggtgtgtggaagaaacacacccacatgttggattattgactgatgatttttttgcacaataaatatacatttctacgatgtataagcgactgcacagttcataaagaaacctcacgtccatcgactagattcgtagagatgcttgtttgcagcactcatgatttaatggcaaaaccgtcggcagccatatgcccaacctttgttgcctggagccacttcatgtaatattttgacccgcgcgagaggtcgatacgttttttcctaaccaaaggcggggaatggaacgagcactctttaaagccgtgacgaacaaaccaatccgttgtccttgtggtaagcaagaatagtttctcaagtccaagggacaaagcctttt

SEQ ID NO: 310003 - DNA, 379 bp, Zea mays
cgctttcactgtacactacaatcaatcaggcggctggtcctctcttgccctcgacagaagcccccagaaacaaaaccttcccctatccacctagcgtccctatgttccttaacggtggggcgaaggcggccgaaccatgggcggactcggaaaaagcgacacgtgggcggatcaggagcagggcaacggctgaggcagccaccatgaaggctgtggacctggctaggcaaaccggtcggagatctacacgtacgaggccgcctggcacatgtactcaatgaactggagcgtgcggcgcgataagaaataccgacttgccatcgccagccttctcgagcaagtcaccaaccgcgtcgaggtcgtccagctcgatgaggcc

SEQ ID NO: 310004 - DNA, 401 bp, Zea mays
cgttacgctgttgttcctgtacgtgacggcggcgacggtgatcgggtacaaggaccatacggacgcgtgtgcgtcgggggccgggacggacagcggttggcggcggcgcgggcgtgctgggcatcgagtgggccttgagggggatgatcttcgtgctgggctactgcgccgacgtcatctcggtgggccacatggaccgggccgacaccttcggcctgttcctggcgcgcaaggtgtcactggtgcgctcgcttctgtacatgggggcgcagtgcctcggcgccgtctgcggggtctggctcggcatggcgttccaatgcggctacttcgaccggtacggaggcagagccaactcgctcgcgtgcggatactcccggggcgcggggctcggcgccgagatc

SEQ ID NO: 310005 - DNA, 494 bp, Zea mays
ttcctccgctttttaagggggccggcaccgagcggcggcgggtcgccgttggacgacgtgggccacggctcgcacacgtcgtccacggccgccgggagcgcggtgaccggcgcctcgtactacgggctcaccccggggaccgccaaggggggctccgcggcctccagggtcgccatgtaccgggtctgctcccaggcgggctgcgcggggtcggccattctcgccggcttcgacgacgccatcgccgactgtgtcgacgtcatctccgtctcgctgggcgcgtcgccctacttccgcccggacttctgcgcggaccccatcgccatcggctccttccacgccgtcgccaagggggtcacggtcgtgtgctcggcggggaactccggcccgggcgccgccaccgtcgtcaacgcggcgccctggatactcaccgtcgccgacaccaccatcgaccgcgactttgagtccgacgtcttgctcggtggaaataacat

SEQ ID NO: 310006 - DNA, 351 bp, Zea mays
ccctcgcctcctgcgtgtacacctttgtgtgctgcaacaacagcggccagcggacctccaaccagaactacggctagatcgagacttcctccgatactacataccagctgcagcgtcgcctctccactgccgactgtggcgactactgtgactacggcgtccagatgttcttctccatggtcaccccgagctacgtcatcttccaggttatcgtgtgcgctgcacaccttggcccaatcaatggccagcggaggtgctagttcatgctctgctgcatctgccagtgctgctaccgaggctaccaaggcggggccgacggaagcggactaggaagagagcgactacaacatg

SEQ ID NO: 310007 - DNA, 482 bp, Zea mays
ggtctcggcggcctccggttcccgctcgtcgccaagcccgtggaggtggacgggagcgcggcgtcgcacgacctctgcctggtgtaccgccgcgagggcctgcgcggcctgcgcggccgcccgccgctcgtgctgcaggagttcgccaaccacggcggcgtgctcttcaaggtgtacgtggtgggcgaccgcgccacgtgcgtggtgcggagcagcctgccggacgtgccgccggagcgcctccgggaccccgccgccgccgacgaggcccccttcgccaacatctccctcctcgcccccagcggcggcgacgagggctccgagaaggtggtaccgccgccccaggacttcgtcgacagggtcgcccgcgagatccggcgggcagtgggcctgcacctcatcaacttcgacctcatccggacgagggacgacgctgcaagcggcgacgccaataagtacctcgttctcgacatcaactactg

SEQ ID NO: 310008 - DNA, 481 bp, Zea mays
ttcgcgtggccgtcgtcttcgaccgcctcaaccccttcgccgccacggaggcggcgcggctggccaacgccgacgcgttcggcctgcagtgcgtcgccatctcgtacaccgtcgggtggctggacccggggcaccgcctcctcagcgactacggcctccagttcctgccccccgacgactgcatgtccagggagttcgtcgacctggtcttccggatggaggaggaggagcagggcgcgcccgtcgccggcttggtcatgaacacgtgccgcgcgctggagggcgagttcctcgacgccgtcgccgcgcagccgccgttccaaggccagaggttcttcgcggtcggcccgctgaacccgctcctgctcgatgcggacgcccggacggcgccgcggcacgagtgcctggagtggctcgacaggcagccgccggagtcggtgctctacgtctcgttcggcacgacttcgtgcctccacgccga

SEQ ID NO: 310009 - DNA, 454 bp, Zea mays
ttcggagctgcgctgcatttgctgctaccaggcatgcacgatatacagacatgactgagaccccaaatgtgcgcacagcgcacgctggcgctgtgttctcacacaccgtcgacactgtgaacgcatagcattcacgacaaggggggcatcccacttgaccagcagcgtctcatatttgccggcaagcagttggaggatgggaggacccttgctgactacaacatccagaaggagagcaccctccacttggtgctgcgtcttaggggtggtatgcagatctttgtgaaaacccttactggcaagaccatcactcttgaggtggagtcttcagataccattgacaatgtcaaggccaagatccatgacaaggagggcatcccgccggaccagcagcgtcttatctttgccggcaagcagctggaggatggacgcacccttgcggattacaacattc

SEQ ID NO: 310010 - DNA, 471 bp, Zea mays
ttgacgcgtgggcgcggaggttacctctcgccccccctctcctccgtccctcggagtctcctcctgtcttgatttcgggtcgctgctgtttcgatcccctttcctccctgacgatttgcttatttttgcgttggatttgtaacctaaacatctcgtttccgcaccgttttggggccgcgtctactggtggttgggtccctttagatcgagtaggcgcgaggatggggacacatccccgattgatctgacgtgatacgcatccggcgtactgcaaattttgaaaactgaactgtaagatggcatcagcagagctttcccgtgaggaaaatgtgtacatggcgaagctcgctgagcaggcggagaggtacgaggagatggttgagttcatggagaaagtagccaagactgttgactcggaggagcttacttgtgaggagcgaaacctcttgtctgttgcatacaagaacgtca

SEQ ID NO: 310011 - DNA, 469 bp, Zea mays
ttttcgcgtccgaccacgcgtccgcccacgcgtcgcgggggaacggggggaccggagtaggcgtcatcagccatgtcactctggtggaactcggagggtctggcgactctgtgaccactgtgctgggctgggtcgactaagacgtggggtccttcagcttctaccatgaggctctcctcaactacaagcgcaagagtgttgtgggcctgaatttcgatcatctggtgttgaacttgacaaatgattcctcctacctcatatacaatgctgctctcttcttcagcccattcatccagcaacagtatcatgacaaatatggtgataaagagatgattcctgttgctgcaaatgatgttgctttttcactgcatgctgtagcattgacagcctttaccgtttttcaagtattcatatatgagcgaggaacacagaaagtctccaaagtttgcatatcaatttctgctattgg

SEQ ID NO: 310012 - DNA, 459 bp, Zea mays
ttcctaccagagctcgtcggcgtcgccggactggctgaacaagggcgacaatgcgtggcagatgacgtccgcgacgctggtgggcctgcagagcatgcccgggctggtgatcctgtacggcagcatcgtgaagaagaagtgggccatcaactcggcgttcatggcgctgtacgccttcgccgccgtctggctctgctgggtggtgtgggcctacaacatgtcgttcggcgaccggctgctgcccttctggggcaaggcgaggccggcgctcgggcagcgcttcctggtggcgcagtcccagctcacggccaccgccgtgcggtaccgcgacgggtcgctcgaggcggagatgctccaccccttctacccggccgccaccatggtgtacttccagtgcgtgttcgccagcatcaccgtcatcatcctcgccggctcgctgctgggccgcatggacatcaa

SEQ ID NO: 310013 - DNA, 397 bp, Zea mays
ttccacgcgtccgagcaagtgtactgaggacggaggcatcgacccagcagaccaccgataacacactctacatgctccgatcacccaggaggagaatgtatattattctatcgatgcatagatcgatacgattgattgcaggaggacaattttgatgggacgatatgaaattggtaaacagctgtgacaaggaacctacgcaaaggccttttatgctcgtaatcttactactggcctggctgctgccataaatatgattaacaaggacaaggtcatgaaggttgggctagaggaaacccctagggtgaagcctctcaatcctgctgctagagaagcattcaaatattcttcagctttatgaggttatcgctagcaagagcaaaatgtatttcgttct

SEQ ID NO: 310014 - DNA, 459 bp, Zea mays
ttttcgcgccatctcccgcggtgctgcctcctgtggcgccgattcgccgctgggagccccaattctataacccctctgttcgatctgggatccgctagattcgttggggcggtgatgagggcgatggcggaggtgatgcaggaggggtgcgtggagaatcggcagccactggcggcttcgagctcgtccgtgtcggatggcagcagctgtggcggcggagagcgggcggggacgtcgccgccggtgtcaagctccgggaattgcatctccgttctgagacgaacaagtggaccgataagaagaactaagggtggctggacactgaaagaggatgaaacactgcggaaggcagttgaagctttcaagggtagaaattggaaaaaaatagctgaattttttcaggacagaactgaggttcaatgtttgcatcgttggcagaaggttcttaatccggaactt

SEQ ID NO: 310015 - DNA, 468 bp, Zea mays
gttctagtccgcgagcgttcgacctttacggttttagatcgtgagcgggggacctttttttttttttttggtggggcaccaacacaacaaatggtttaagttaaatcgacaatattttagtggttgcatggttccctgcagtaaacgaatttgtttttgttgtaaatactggactcatgcacataatagaaggtttaggtttacactggacaatcctccacacaacttatgttttgtcaaatccaatttgggacctttattttaacatttgcaactactatgcggatgtgcaggatggatcatggatctttgggatgccaacatcttcagaccaaagcaggatattgcttggtctgcaaacaaacacgtcgtttatattttgttggatcctggatgaataggcgataaccatcagtttgggcaggatcagctggattgggatgatcaagcaaatgttgtattccaact

SEQ ID NO: 310016 - DNA, 467 bp, Zea mays
  unsure (1)..(467): unsure at all n locations
ttgacgcgtggggtgaagccgccggcgtccgcgggcacggtgctgcgcgaccacccggggttccagctgctcgagtcggaggaggtgaagctgctgggcgtccgcgcccggccgctggcgcacgacgcgcagctccgcccgggccgcctctacttcctcgtcgcgctgccccggccggccgccccgccgcgccgcgcctggtccggcgcgctccacgtcggcgcgcgggagcggctcgagtcgctcatgctcacgcgccgctccacctccgacctctccctcgccgcctccgcgggcacggcgccgccgtccccgctctccacggcctccgagggcggcgggcccgtccgcctccggatgcgcctgcccaaggcggaggtcgacaggctcatggccgagagccgcgacgccgccgacgccgctgccaggatcatgcagctctgcgccgncgccacgcccgaccggac

SEQ ID NO: 310017 - DNA, 462 bp, Zea mays
ttaggacacaggaaagcatgcagcgacattaactgctacttggcctctgtgtatgtcccgcacctaattaatcacgcgcatgcagaaggtacctgcaacgacctcaagcaaattacagacgatggtggatagcgccatggacgcggcgaggatcataggctacttcaaggataagaccatcctcgtcaccggctcgactggctttcttggaaagatccttgtggagaagatactgcgggtgcagcctgctgtgcgcaggatctacctcctcgtgcgagcggccgacgagccctccgcacagcagcgcgtccagcaagaggttaccggcaccgagctgttcagcctcctgagagacaagtacggcgaagaaggcttcgacctgttcatccgagacaagatcgttcctttggccggagacatcacgaaccaggacctgggcctggagccaaccacactcgacgg

SEQ ID NO: 310018 - DNA, 446 bp, Zea mays
aatatattcaaggctgcttacagcagagagattgagccattgacagataaaacccaatggccacaagtagaactaccttttgctgttggcgcaccacttgctaagggaagtgcagggagacgaaggaaactaacactaaaaggatgtttggaaggtggccaaaaaaagaaaaatgttgaaggtgctaacgaaggcgaaaatggagctgttacaatcaatgcaaagggacagaaaatgacaaggggaccaatgacttgcattcgatgtggagaaaaaggtcatagacaagctagctccaagtgtccactcaatgggactgcataaaagagaaagtggaatcaacctaggaggaatattacaaaagctaagccaagagaactgtgcacaccacacaggccaactagtgaagaaatattacgtgatagtccaggaaggatcactagaag

SEQ ID NO: 310019 - DNA, 421 bp, Zea mays
gcctagtccggatcgacggctgcaatgcccccacccccgtgagggacgggggcgctgacagggtggggtggttgaagcatgatctccgcatcgactaccacccgggcctcgacgacgacgtcttgaagccgctgtgccccgtcgtgccggtgtacgtcttcggccgacgcatcctcgcgggctattcagattaaatgctggaactgatgctattcgctctgaaagatcttaagatgacgttgaaatgtcacgagtctgatttgctgataggcctgggaaacgctgacgatgttgagctgtagcttgagaatgaggtacaagcatgtctcgtttatacagaagaagaagtcgactatggagtgcgcgatgttattgccaatgacgaatcatctatatttaacgaggcatgctgatggggaag

SEQ ID NO: 310020 - DNA, 461 bp, Zea mays
  unsure (1)..(461): unsure at all n locations
gactagaagaccatcttccacctcaacccgtccgggcgcttcgtcatcggcgggccccacggtgacgccggcctcaccggccgcaagatcatcatcgacacgtacggcggctggggagcccacggcggtggcgccttctccggcaaggaccccaccaaggtggaccgcagcggcgcctacgtggccaggcaggccgccaagagcatcgtggccagcggcctcgcccgccgctgcctcgtgcaggtgtcgtacgccatcggcgtgccggagcccctgtccgtgttcgtcaactcgtacggcaccggcacgatccccgacaaggagatcctcaagatcgtgaaggagaacttcgacttcaggcccgggatgatcagcatcaacctcgacctgaagaagggcggcaacaggttcatcaagaccgncgcctacggccactttcggcgtgacgacgccgacttcac

SEQ ID NO: 310021 - DNA, 420 bp, Zea mays
agatcgcgagcggccgcccttttttttttttttttttttttttttttttttttttttttttttttttttttttttttggggaataccgcagtatttttccaaaactggaaaaaaactttgttcccaaaccccccctaagtttccatacatggcactcgatcaaaattttaagcacattttcaagggggtaaacatccttagtccttgggcctaaagccggatgcgttcacctcctaaagggtcggggcgggcctgacgtaggtgaaccccccgaagttgctgggccccccaccagcgggggggcttaccggagagtccagcacgggcgtgttcatccagcacatttcgaatatggcgattcaggtaagcccggggacatttggcccaaagcttggttggatctgccgggcctccaggttt

SEQ ID NO: 310022 - DNA, 461 bp, Zea mays
ctgtaactgaacgcgccggagtggccctacaccatactgggcgctgtcgggtccgtcctgtccgggttcatcggccccacgttcgccatcgtgatgagcaacatgatcgaggtgttctactaccggaaccccagcaagatggagagcaagaccagggagtacgtgttcatctacatcggcaccgggctgtacgccgtcgtcgcctacctcgtccagcactacttcttcagcatcatgggcgaaaacctcacaaccagggtgcggaggatgatgctcgccgtgattttgaggaacgatgttgggtggttcgatcaggaggagaacaactcgaaccttgtcgccgctcgcctcttcacagacgccgccgatgtgaagtcggccattgccgagcggatatcggggatcctgcagaacatgacgtccctgctcgtgtccttcgtggggggcttcatcattgaatg

SEQ ID NO: 310023 - DNA, 449 bp, Zea mays
ccctggagggacccggcccgaatttccggggtggcccaacccgtccgatgttgcgtccaatgtggggctagaagcacttggctagggccacaactcgagacatttgcatctgacaccacgatcctatgacttcagacggataaacgactctgggatactgatgcttgctgacggatgcaagcaactgagaaccattatacttgatgggttctctaaagtaagtgatgcagggtatgcagaccttctgcactatgaaaaggacctgaagaagtttgaggtcagacaagaccaagggcagccagacttgcgatgcatagatcttgataaggtagctccaaatattacagaagtgaggttgcttaactgtgctctcctaaccagtgatgcagtcatatatctagcaccctgcactaacttaaaggttcttgatctttcaggttgcatgagca

SEQ ID NO: 310024 - DNA, 491 bp, Zea mays
cccacgcgtccgggtacggcctcgtcggccccaacggcatgggcaagtccaccctgctcaagctgctggcctggcgccaggtccccgtgccacggaacatcgacgtcctgctcgtcgagcaggagatcatcggcgatgaccgctcggcccttgaggcggtggtcgccgctgacgaggagctcactgccctccgagccgagcaggccaggcttgaggtctctaatgacgctgatgacaacgagcggctcttggaggtgtacgagaagctgaatctccgggactctgatgccgtccgtgcccgagcgtccaagattctcgcggggctggggttcgatcaggcgatgcaggccagatccacgaagtccttcagtggtggctggaggatgcggatttcgctcgcccgtgcgctcttcatgcagccaacgctgctgctccttgacgagccgactaaccacctggatctgcgagctgtgctgtggcttgaggaatac

SEQ ID NO: 310025 - DNA, 438 bp, Zea mays
cccacgcgtccgcggacgcgtgggcggagggagagttcgagccagcaatggcgaggccacggccggcggcggccaccctcctcctggtcaccttcctcctggccgcggccgccgccgagaccacggacgtcatcagcggcggcggcggcatggtgggcgtggacggcacgcggttcgtggtgggcggcgccgccggaggcaggcccgtctacttcagcgggttcaacgcgtactggctcatgctggtggcgtcggagccggcgcggagggacaaggtggtggcggcgttccgccaggcggccgaccacgggctcaacctcgcgcggacctgggccttcagcgacggcggggacacgccgctgcaggcggcgccgggcgtctacgacgaggccatgttccagggtctggacttcgtggtcgccgaggccaggcggcacg

SEQ ID NO: 310026 - DNA, 504 bp, Zea mays
gcctatgtttccgcagtagcgacacgcaaccccccctttccctatcacgccacccggttccacggaggagcgagaccgcgcgccgcagatccttggtcgccgctagggttccggcgagatggacgtggtgaaggcggcgcagctgtcggggcggacgctggaacgtgttgtggtgcaccccctggtgctgctcagtattgtcgtccactacaaccgcgttgtccgcgacacccgcaagcgcgtcgtcggcgttctcctcggcacctcctcccgcggctccgtcgacgtcaccaactcctacgcggtgccgtttgaggaggatgacatggatcctaggatctggttccttgtccacaattaccatgaatcgatgtttcttcatgttcaagaggattaacgccaaggagcatgttgttggcttggtcagcactggcccaacactaatggagaatgaactggatggtcatgcattgttcaacagttttgttctaaccctgtcctatt

SEQ ID NO: 310027 - DNA, 433 bp, Zea mays
tctcttttttggaggctgtcgtcgacgacctgaaggcgttccttggaggccaaggactactacaccacggtcggtatggcgtggaagcgagggtacctgctttatggccccccgggcaccggcatgaccaccatgatcgctgccatggctaactttgtcgactacgacgtttacgacctcgaactcacggtggtcaacaacaacaccgacctgcggaagctatccatcgagaccaccggcaaatccatcatcgtcgtcgaggacaccaactgctccgacgaactcaccggcaagcgcaaggacaagaagcaggcggacaaaaaattccgaacgcgaggccgactacaagcccaagctgccgatggagcctgtaaaggacgaacgcagcacgattaccctctcagggatgctcaactttatcttacgcctgtgg

SEQ ID NO: 310028 - DNA, 324 bp, Zea mays
ttcctcgtccgcccacgcgtccgctccccctctggcctctaccctgcctgccgtttccatctccatccagttctccgcacccacccacgaccacgacccacccacccactcctttccccaacccatggccgccgccgccgtcgccgtcggcacccgggaggagatggcctacatggccaagctagcggagcaggcggagcggtacgaggagatggtcgagttcatggagaaggtcgcggccgccgcatagctcaccgtcgaggagcgcaacctggtcttcgtcgtctacaagaacgtcattggtgcgcgccgtgccttctggcg

SEQ ID NO: 310029 - DNA, 357 bp, Zea mays
cggacttcgttggcggacgggttcctggactccgtggccgggcgcggcgcggtggtgccttggagcccccaggaccgcgtgctggcgcacccgtccaccgcctgcttcctcacgcactgcgggtggaactccaccctggagaccatcgcggcgggcgtgcccgtggtggccttcccgcagtggggcgaccagtgcacggacgccaagttcctggtggacgagctcgggatgggtgtccgcctccgcgggccgctgcggcgggacgccgtgcgggaggcggtggacgccgcatcggcggggcccgaggccgacgcgatgctcgccagcgccaggaggtggagcgcggcggcgcgggag

SEQ ID NO: 310030 - DNA, 553 bp, Zea mays
  unsure (1)..(553): unsure at all n locations
cccacttctctcttccacgcgtccggtcacttacacaactctgatgaaagggtacatcaagaagaaagcttttgacaatgcctacgcccttcttaatgaaatgcgtcagaatggagtttcttgcggcgattatacgtataatattctcataaatggactttacatggtcaatcgtgtttgtgaagttgatgaaatgttgaaaagatttttgagtgaaggttttgttccgaccacaatgacatacaatagtatcattaatggatttgtgaaagctggtatgatgggctctgcattcggtatgtatcggcagatgcgcaagaaaggtataactcccaatatagtaacatataccagttttatagatggttattgtaggaccaactgctgtgatcttgcagtgaagctgctcatttacgtgaggcgcgatggctttcaacctgacattgctgcatacaacgctttcatagatacgttttgcatacaggggaatatgtctcgtgcactccaattttnggttcttctgctgaaagatgggttaacaccagatgtcact

SEQ ID NO: 310031 - DNA, 556 bp, Zea mays
gcccgctctcttcgtccgcggcgtctttgccagcgagcgccgcctctgcttccacatcttccacgaccttcctatctccaccaccaccatctccgccgcctcagcgtccgccacgcacgacatccctttcgccgaagccgtcaagggcgccgcgctgcagctcttcggcttcaccgaggccatcagcatcggtcgccgctcccctgagaagctcttcaagatcatagacctccacgacgcgctctcggacctcctccccgacgtctccgacatcttcgccgcctccaaggtcgcggagtccatatacgtgcaggccgttgagatccggtctcgcctcgccgatgccgtgagagggatactctcggagttcgagaacgccgtgctccgcgacccgcccaagaccgcggtgcctggcggtaccatccacccgctcactcggtatgtgatgaactatagcagcctcatttgcgactacaaggtcacgctctccgagctgatcatatcacgttcatcagctagcgctcgttcttctgctgagggcaatgagctcgcgccg

SEQ ID NO: 310032 - DNA, 553 bp, Zea mays
  unsure (1)..(553): unsure at all n locations
gtgtattctactctcagcattggtgacggtgctaatgatgtgagtatgattcaagctgctcatgttgggattggcatcagtggccaagaaggaatgcaagctgttatggctagtgactttgccattgcacagtttcgttttcttactgattngcttcttgtacatggacgatggtcttacttgagactgtgcaaggttatcacatacttcttctacaagaatctgacatttacactaactcagttctggttcacttttcaaactggtttttctggccagcggttttatgatgactggtttcagtctctatataacgttatttttactgcgctacctgtaattatagttggattgtttgataaggatgttagcgcgtcactgtcaaaaaaatacccacagctctacaaggaaggcatcaagaattcattcttcaagtggaaagtgattgcagtgtggggtttctttgccttctatcagtcaatagtgttcttctacttcactgcagctgcaagtcggcatggtcagggttcaattggcaagattcttggcctat

SEQ ID NO: 310033 - DNA, 497 bp, Zea mays
cctttgtctaaaacacagcaaggctccatgaacaagttggcatcctgcttcctccagcacggagcaccacacacccaaatcttcaagtcctaccatgttcagagatccccttcgctgcagttgcttgagaaccgatccgtttccatgacccggcaccgcgccgcggaccgtgctgccagaggcaccatcgtcgacgtcgccgtcgacagtggcaccagcttcgacttcgagagctacctgtcggccaaggccagggccgtgcacgacgcgcttgaccttaccctgcagggtctgcggtgccccgaggtcctgagcgagtccatgcgctactccgttctcgcgggcggcaagcgcctccgccccgtgctggccatcgccgcgtgcgagctcgtgggcgggaccgcggtcgcggccgtcccggtggcgtgcgccgtcgagatgatccacaccgcgtcgctcatccacgacgacatgccgtgcatggacgacgacgcgct

SEQ ID NO: 310034 - DNA, 281 bp, Zea mays
gcggaccggaataactgggtggacccacgcgaccggggaagtattgataaatatgagcatgacaagaaaactggacggactaaggaagaccgagccctgtactcaacagttgaaaaccctcacaaacaagggagcgacccaaggactcaatgagaagacaaagacccaatggacgcgtcagacctgatgaaggagcctgaagaaacaggtacgaacctgcgagcaagagcaatcggccttatgcccatgaatgaccagggtgaaaaaggacgaacaagaaa

SEQ ID NO: 310035 - DNA, 433 bp, Zea mays
  unsure (1)..(433): unsure at all n locations
tgacttatcaaaatgatacactagaagaagctcaacttagtatggaccaggagatcctcttggagatgaagctaggcgggggcagttcaggtttcagtgcaagatccacaaatgatgaattggcattaattccattagaaccctcaacatcatcattttctattgctggagggcctacattttcaaatggtttttcatctgggattggttctagtttttcgcaagataatagctttagtcctttattaagggatggagaagatggttacaatagtctcagcaatggaactaaagatgacactcacggattgagtggattacataacttgggtaatacatgctttatgaatagtgccatacaatccttggttcatacancctcattggtacagtacttnttggaggactatacttgtgaaataaacaaggaaaa

SEQ ID NO: 310036 - DNA, 433 bp, Zea mays
cccattcgtccggaagctcacgtgctacgtctcggacgacggtggcgctctgctcacgcgcgacgcggtcgccgaggctgcccggttctctgcactgtgggtgccgttctgccggaagcacgcggtggagccgaggaacccagaggcctacttcagccccggcgccagtaatggcttcaaggcgtggagggctgactataagggaacggcgtggccggagctggcaagggaccggaggcgcgtgcgccgggagtacgaagaactgcggctgcggatcgacgctctgcaagccggaggacgtgcggcggtagacgccgtcgctgccgatagaagctgctggcggcgaggcgccgcggaagatcatgccggagctgttgaattgctagtcgataatcccggtcccggcagcacgccacggcttggcgtcagcggc

SEQ ID NO: 310037 - DNA, 575 bp, Zea mays
ccacattctatcacgagtcaagagaatacatagtagagagaagaagatggtggctgccggcaggaacagggcggagcggtggaacctcgccggcgcgacggcgctcgtcaccggcggcagcaagggcattgggcacgcgatcgtcgaggagctcgccgggttcggcgcccgggtgcacacgtgctcgcgcaacgcggcggagctggaggagtgccggcggagatgggacgagaaggggctgcaggtgaccgtgtccgcctgcgacgtgtcggcgcgcgccgaccgcgagcgcctcgtggccaccgtgggggccaccttcggcggcaggctcgatatcctcgtgaacaacgcggggcagtccctgttcaagcggacggccgagtgcaccggcgaggactactcccggatcatggcgaccaacctggagtcgtgctttcacctcagccagttcgtgcacccgttccttcgcctcgtcagcggtagggggggcggcagcgtcgtgcacgtcttctccgacgctggctttgttgggctcccggcgttgtcgtctacttcatgtcccagggcgccctgaa

SEQ ID NO: 310038 - DNA, 495 bp, Zea mays
gcactttatgtaccgtgaagaacaaccccgacggcaccatggatatcgacaagatcgttgccgccatcaggcatcctgatctccattacccgacgaccagattgatctgcttggagaacacacatgggaatactggtggaaagtgtttatctgtagaatacactgacaaggttggtgaaattgccaagagccatggcttgaagcttcatatcgatggagctcgcatcttcaatgcgtctgtggcacttggagttcctgtagatagactcgtgaaagctgctgattcagtttcggtatgcctatcgaaagggttaggcgcacccgtcggatcagtgattgttggttcgaaggcccttattgacaaggccagaattctccggaagacccttggctgtggaatgagacaggagggagttctttgtgctgctgctcatggtgccgttcgtgacactgtgggaaagctttgcggatgaccacaggaaggttaaagctttg

SEQ ID NO: 310039 - DNA, 424 bp, Zea mays
gtttttaaaaggcacaagtccaaatatattgaaagaagatgacatcatttgttgcctggcaaacaaaatcaatgaggccacagctacatgcttccgaggtggggtatttggttctgttcaactccccaaagctgttgtgaagaccgttaaacctcaagtcaaaaggaaagttggagaagcagtgcaagaaaagaaagtaggagaagcagtgcaagctttggtttatacgtgtaatataagtttccaaatagtggcagcagttagacgggcattgcctaaagaaaatggtgctactcaaactgaagtaccagcagatctttctccaaattctgttgcagaaaagctatccgtggcaatggaacgtcttggagaactagctggttttgaagtaaaagcttgtaatgggcatctaaaattctatttg

SEQ ID NO: 310040 - DNA, 452 bp, Zea mays
gtctgttgccacttcgccgtgagtcaaccactgatccagactcgtcgcgccatggccggctggaacgctggccccgaggccgcagccactgccgccggccaccgtttcaacttcgacgtcatcgtcgtgggcgccggcatcatgggcagctgcacggcgcacgcggccgcgtcccgcggcgcgcgggtcctgcttctggagcgcttcgacctgctacaccacctcggctcctcgcacggcgagtcccgcaccatccgcgacgcctaccccaaggcgcagtacccgccgatggtccgcctcgcgcgccgcctctgggccgaggccgaggccgagtcgggctacagcgtgctaaccccggcgccgcagctctccttgggcccgcgcagcaacgcctctctgctcgccgccgtcaggagcgccggcgcggaggaggcagacctgacgcggagatg

SEQ ID NO: 310041 - DNA, 166 bp, Zea mays
gctcgctactggtcctacgcaccccactcccccgctggagcggcggccgtggcggcgaggtcctacccaacatcgtcgagcggccagctgctccgacagatgctaatgcaccaatgctccgtcgcgcaccgaaagagagcgactacacctagttctactgagatcc

SEQ ID NO: 310042 - DNA, 494 bp, Zea mays
  unsure (1)..(494): unsure at all n locations
tcaaaagcaagcggaggttctctggccgcggctggtggccaacaagctcttccggaagacctcgggcagccacgccttcgtcgccgatttcccggccaccgatggcgacggcgatgtcgtctttggtggaacggagttcgacggcggcgggtgcagccccgaccccgacgacgcggacgccagccgctgcgtgaagcgggcgcggccgcagccgcagccgcaggagcgcaacaagaagaccctcaagtacaagctgttcgcgagcacgtggaacgtcggcggcgtggcgccaccggacgagctggacctgtcggactggctggacggcggcggcggcgacgacgacgacgggccctacgacatgtacgtgctggggttccaggaggtggtgccgctgcgcgcgcgcaacgtgctgggtgccgacaagaagcgcgtcgggatgctgtggatcgagctcacccgcgccgngctcaaccggtcgtcgtcatcgcacg

SEQ ID NO: 310043 - DNA, 155 bp, Zea mays
ttgttatcgtcacctccatgatctacgccgtgggacacatttcggtcgcgcacatgaaccccgccatcacgctcgggttcgcagcgtgcccgcattctccatggatccagttgccgttctactgtgcggcgctacgcaacgtcacaatgtgacct

SEQ ID NO: 310044 - DNA, 261 bp, Zea mays
gctgtagaacagagcaacccttgcgccatatgcctgggtgccatgggcgccgacggagggcaggctatggccaccttcacggcagagtgctcccacacgttccacttccactgcatctccgcgagcgtggcgcatggccacctcgtctgcccgctctgcaacgcgcagtggcgcgagctgccctccgtgcgcccgtcgcatccactttctatgccacccattctaccatgagcatcaataggtttgatggctcctactcac

SEQ ID NO: 310045 - DNA, 400 bp, Zea mays
tcgatcgatgcagagagagcgccatatgccatgggggccttgggtacctgaagactgtaacactatgatgaccattaagaggtagttgcacaagctttcataagtgtatcacactattctgaagcactgtggatttgcattcatttgagcctaacatgcataggcttgctgaggtaaccactgttctcttaaccccaagaatcaacctgccagcaggtaaagccagatgttaagaatgatggcaacattgaccatgatgaagtcctcatggatgcagtttcagaccttttgcctgcttttgcaaaagtgatgggatcttattttgatcccatatttgcaaaattatttgatccgttgatgaaatttgctaaatctccccatcctccccaagataagacta

SEQ ID NO: 310046 - DNA, 504 bp, Zea mays
ttctcgatccacaaatgcctgcacactctccatcccgaaccctgaaatcgaggagcgcgggaggacgccgcaaagcgcgttggctcttagggtttgccggtagggttgggaggctccgatccgaccgcgcaggcatgaggattggcctgctacgctatgggctggtggtggagcactaggccttttacgcccagaatcaagctgtcagcaagtagagtcagatggtgaggatgatggcgacattgaccatgatgaagtcctcatggatgcagtttcagatcttttgcctgcttttgcaaaagtgatgggatcctattttgatcccatatttgcaaaattatttgatccgttgatgaaatttgctaaatctccccatcctccccaagataagactatggttgttgcaaccttagctgaggttgctcaagaaatgggtgctccaatatcttgttatgttgataagataaatgcctttggtgttggaagagcttgcattatttgtgc

SEQ ID NO: 310047 - DNA, 398 bp, Zea mays
ttagcccttgcgccgccgcctcctccgccacccagcgctcgagctcctcgcgtcctgcgagcgcgcgccgcaacgccaccatgaagttcaacatcgcgaacccttccaccgggtgccaaaagaagctggaaatcgatgacgaccagaagctgcgtgccttttatgaccgaaggatatcccaggaggtcagtggtgatgctctgggtgaggagttcaagggttatgtcttcaagatcatgggtggatgtgacaagcaaggcttcccaatgaagcaaggagttttgacttctggtcgtgttcgtatgctgctccataggggcactccctgcttgcgtggttatggcaaggcctataacaagcttgactatgaagcttgcactcaccgatgagaactttct

SEQ ID NO: 310048 - DNA, 433 bp, Zea mays
tggaaaccgtcaattggcaaggatgatgaagcttgcgatcgccttcgtcgcgctgctctcttctttcctcgccgactcgtccaccgcggaggagttcgatttcttctaccttgtccaacaggtgctgcggcatgtcgtcgagaccggagcggagatcgaccgaccgatcggccagcctctcctctgaccaatttaacccagcgacgacgacgcacgaatctaatctaactctaacggcgtgttctgttccttgtcgatcgatgcatgcatgcagtggccgggctcgttctgcgacacgcggcagggttgctgcttcccggacggcgcgggcaagccggcggcggcgctcggcatccacgggctgtggcccaactacgccaagtgccgcggccgccaccaccgcgagggcggcggcctcgcccgcgcggtgctc

SEQ ID NO: 310049 - DNA, 452 bp, Zea mays
tctcttggctgcaggaacgctcagtgatgcaggagcttattcgtcagcatcttctgcgcgcccagtccagaatgaaacgacatgctgataaacacaggtcagagcgtacatttcaagagggcgattgggtatatctccggctccaaccatatgtccaagcttctgttatgccacgtgcacatcacaaactgagttacaagtttttcggtccctacaaaattctggacagaattggacaggtggcatatcgactggcattacctgcttccagtcgcattcatccggtggtgcatgtgtctcaacttaagctcgctaaaggattcaaagatccagaacctcttgcactacctgatgatatcccagagatcagcgttccattgcagattattcagtccccaggcatcaccaagggcagtcggctcgtgcaacaagtcctggtggtatgggcccgg

SEQ ID NO: 310050 - DNA, 306 bp, Zea mays
agggtggataaacgtataggataatataaaattgattacaccattattccactataactatagtgtcacaacgcagcgcatgacgcaagctagcacacgcgcactgaacagtggacagcaacgccaaaaatggtgactgggctgcacaaccacttacacattgatcaaggctcggcgtaaaggtgcgccggcagcttgggctgaacgacggcctcgagcgggaacttgcgcggcgtggacaggccaaagatctcctccatgctgagctcctccatgggcacgccggcggggaggctccacgcgaag

SEQ ID NO: 310051 - DNA, 264 bp, Zea mays
ggccgtttctcgccacgctgtcagggcctgcacgacgtcccgcatcgcggggcgcttgtgggacgcgcggctgacgcagcggtaggccacggcggcgacgtcgttgagctcgtccgcgtcgaacgcgcctgctagccgcgcgttcgagaactcttcccacccggtcctcctcccgtcgtcggcgatgatggcggcgagctcggcgtactccatgaggccctgctgtgggttcctgccggcgatcaggtcgaacagcaggacgcc

SEQ ID NO: 310052 - DNA, 264 bp, Zea mays
gttttcttcagctcttcttccacagcactgtctggctgtctgtctcgcaattagctgtactaatccgttagtggcactgctgctactctcgtgtactcccagctatctcctctctatactcttgtacgtacgcacgtgtcgcaaccgcaatggagtgcgagaccgggcttgtccgctccctgaacggcgagggcctgtgcatgtcggcggcggtggcggcgccgcgcgccgacgccctgaactggggcaaggccgcggtggacc

SEQ ID NO: 310053 - DNA, 219 bp, Zea mays
  unsure (1)..(219): unsure at all n locations
gtnttacatcaggttatttgtcttgctgagacgtttccctattgaatctaaggggcggcaaaagaagctttatgaggttgggactgtgacagcaatctgcgttacctgcttcctgataagatgtgttgaggagagcttgtagatcacactcatgactgattggttcgcctttaacgatggctgtcccgctccccctttcaccatgagagcgcccttccc

SEQ ID NO: 310054 - DNA, 260 bp, Zea mays
attagatggagttgattggcaaagctttgatgaagcgtgttatgcaaacgtggctaccagctagcactgctctgcttgagatgatgatattgcaccttcctttcccaggaaagcggtcaaaagtatcgagaggagacacttgtaccagggaccccgtgatgatgtgtctgcacctgagatcagaaactgagatgcagcgggtggtggtatgctgtctgtttcaaaggtgaaagatcgaggggtcaaggctacggtttttg

SEQ ID NO: 310055 - DNA, 353 bp, Zea mays
gccattttcagttgttgctggctttaagaaaattaaggctttggttcaaagtaactccatgcttgcttctgctcttcggacttcatcaaagcttgtggtccgtgacgatggtgcaagagtaaaacgtgagcaaccatttacagaatcggatttagaagaactccaggcccgaattgttgctgcagaaaatgtcccagatgatcattgttaccagaacctgatgaggctcttttcagttgttggcagtgtcaggacaattagaacttgctatgctcagaccccaaatggcactggtccagctactaacagatctgcaaagctagaatatgctatttgccaacaaactttatgct

SEQ ID NO: 310056 - DNA, 276 bp, Zea mays
tgctttttcctctccgtctgcgactacatcgtccagttctacccgtccacgcagaccctgcccgatgggaccaaagttgaggtcatggcgaccagaccaaggtcggacatctacatcaaccttcccgcgctcgagaagctcgacgccatgctcatcgacattctggacagcttgcagaaggcggagttctggtacgcggacgccgggacgaggtcgttcggctcggtcaccttgtcctttttcttgaggatgtcgtgtttgttgcatttacgaggt

SEQ ID NO: 310057 - DNA, 489 bp, Zea mays
tcattcaaccgccgtctcctcgccggcacgcttcgccgccgccgcctctctcctcctcgtctcaaccgccgcctgcacacgcagaaaaggagggagaataagaggatcagcaaaccccaagccctccactcgtcgccccctgctgcaatcgccccacccgcctccgcccgccgccgcttctcctcaccttcctctcccgcgacatctcagttcttcatcaccaaaagatggtcggcggcggcaacgagttccgtttcttcttgtcctgcgacatcagccacccgcttgccttccgtgttctccacgcagaacatatcttgttgaccgaccaaaaagtcccagagctctttgttgagtgcaagctatacatcgatgggatccaatttgggttgcctgtaaaaacaaggttggaaccttctggaccgaaatactgttggaatgagctcataacattaagtaccaaatacagggacctaacatccctctcgc

SEQ ID NO: 310058 - DNA, 378 bp, Zea mays
ggttcgttaacatttaaggttgtggttaaaaaaatcccctcgtttgtctcacgccaaagcacaggtctaaggtcccggtcgcagtcgtgttctcacatgggctacgatgccgctatgtatgggtggggcaggggttcaggcgttttctcgacctatgtgaggtcttcttaatataatgttcgggggctgcgttacccccacaggtcgatgctttttatctacctcatggaaatggttctgttcccacttccaccaaatacaccttgtatgcacatgcctatagaaactacatgatatccatattctttgtgtccgtcttggcccatatggtttcacttttggcaatatattgatgcactctctgaccaacatccattt

SEQ ID NO: 310059 - DNA, 393 bp, Zea mays
gtgttagctgcggcacggaaccagcgccattagaggccacaagcccgcaccacgcctccctcgttctcgcgcgcgcgcacgcatgcacgaggagctgctgcagagaagaggaggcctgtcgatttgattgaactttccaaattcagattcagaagctggccaagatgactgccggtttccagctcggcgtgatcgggtctctcacgctctccgtcgcgtcgtcggttgccattgtcatctgcaacaaagccctcatcagcaccctaggctttccattcgctacgactctgacaagctggcacctgatggtgaccttctgcaccctccacgtggcgcagcgcctgcgctttttcgagcccaaggcgatcgacgggcagacggtagttctgtttg

SEQ ID NO: 310060 - DNA, 381 bp, Zea mays
tgttgtgacaatgaaccagctccttggaccagtgacgatcacggtgaccgtccaagaccattgccaaagataaaggagctgcaaggtgcaactgatataacagagaggaaagggcgcccttcatgggattatgatgataaagatggctggaaatgggtggtgcctccgccagtcagcaggaagcctgttctatctggggatcctgagaccgacaagcaaatccgtagagcaacaaagcgtgttcatttgtctgttgctgaaaggctgcttaaagaatttgcttgttcgatatgccgggcggtgattaaagaaccacttacgactccatgtgcccacaacttttgcaagacttgtttgcttggggcatatgatagccagtct

SEQ ID NO: 310061 - DNA, 428 bp, Zea mays
cagtgatgctgcggcggcctgcacttcagcgacgtggtgacgctggacgtggagacgatggcgtggagcgcgctggccacgacggggcagcggccgggcacgcgggacagccacggcgccgcgctggtgggccaccggatgctcgtgttcgggggcaccaacggcggcaagaaggtgaacgagctgcacgtgctggacctgcgcaccagggagtggagccgcccgcagtgcaggggggcggcgccgtcgccgcgggagagccacagcgtcaccgtcgtcgggggcgaccgcctcgtggtcttcggcgggagcggggagggggagggcaactacctcagcgacgtgcacgtgctggacgtgcccaccatgacgtggtccacgccggaggccatcagggtgcggtggccccgtgcccagggacagtcaca

SEQ ID NO: 310062 - DNA, 417 bp, Zea mays
cctttgttggacctccgcctactgctacccggagccgcgcccggcgttcctcggcagcgtgcccaccaacctcaacgacgtgctggtccagaacaagcgctggatgtccggcatgctcgccgtcggcgtctccaggcgccactccccgctcgcctgccgcccgctcctccgggcctccctgctccaggccatggcctacgcctacttcggcttcgccgcgctctgcgccgtccccgtgctctgctacgccaccctgccgcagctctgcctcctccggggcgtcccgctattcccctgccccgccgccaccgcggcggcgttcgcgtcctcgcttctgcagcacatggcggaggtgtgcgtgtccaggcggggtaggctggacctgcgcacgtggtggaacgagcagaggttctgggt

SEQ ID NO: 310063 - DNA, 410 bp, Zea mays
tcatgctttgaccgacgactccctttcgttacgatactgatactccacacacgaagtaccgcgaacgagcggtgaaagagcagaggagggtataacactaaatatggagagcggaggcagaaccttcagaagggcagggcattaggttgtggctcacgccaaagaagagcgacaacaccaagtactactagatccttagagtgcccaagtgagcgtgccaggacgatctcaagaaggtctaccgcaaggctgctatcaagaaccaccccgacaagggcggtgaccccgagaagttcaaggagctcgcacaagcctatgaggttttgagtgatccagagaaacgtgagatttatgatcagtatggtgaagatgcccttaaggaaggaatgggcgtcgccggaacccatgtc

SEQ ID NO: 310064 - DNA, 320 bp, Zea mays
tttgcagtcggcgcgacggcactgactcctcagaacacggatagccgtagtcacacacactctgctgacttgcggcaagcagggtaacattttccttcaggcatgcgcatggagaagactcacatcaacattgaggtcattggacatgtcgactgtggcaagcagaccaccactggccacctgatctacaagctgggcggtattgacatgcgtgtgattgagaggtttgagaatgagcccacgttgatgaacacgtggacatataagcatgcgagcctgcttgacaagctcaaggccgaccgcgagagaggcctgacaac

SEQ ID NO: 310065 - DNA, 325 bp, Zea mays
tcatacgcacacccagacagcccgacagtacccagctgtgcgttgactcgcatgacacggcactcactccactgtcggcatcacagaccaaatccctgccagcgcagtcgccatggtcctgaacttccacctgcagggccggcacggaaagaaccgcgtccgcgtctcccgcgtgtggcgccggacggccacggcggcgggcgacgcgatggttgagtggaactgccccgccagcgtcgtctaggactgcctgcgcttctacacctgcagcgacaacttcgccatcgtcggcacagattccattaggaacaccgtgtatgtcaag

SEQ ID NO: 310066 - DNA, 426 bp, Zea mays
ccgttccattaccccatatcccagatccaattcgtgtagtaattgctcctctgccgtcatgtgcctctctgaggagaagacctacactggacgcgagcacaagggcaaggatctctcgcacgcggacttcgtgcgactcgagattgagctcaccgcggtcgaaatgcccagcctcatggcctgccgcgccgcgttcgtccctgacagacccttcgccggcgctaggatctgggagcgtgtccacatgaccatccagaccgtcggactgattgagaccctcaccgcgctcggcgccgaggtccgctggcgctactgcaacatgttattgacgcaggaccacgccggcgtcgacatagcgcgcgactcggactgcgtgttcgtctggaagggggagaccctcgaggagtactggtggtgcaccgagcg

SEQ ID NO: 310067 - DNA, 349 bp, Zea mays
tgacaggctcggatctgagacgagacgagacgatcccctttcccctcaaccggaacttgttttaccccatctcatcccactgactccacccacccacccgtccgttgccttcgtcggatctctgcggactcggatccggccgaccacgaccaccccgcgtcgccgcctcgcagcaacagcagatcagagaagatggccggactcgacacctttctcttcacctttgagccccagaaccagggacaccctgacaagctctgctaccaggttttagatgctgttctggacgcttgactcgctgaggaccctgacagataggttgcttgccagacctgcaccaagaccaaca

SEQ ID NO: 310068 - DNA, 325 bp, Zea mays
tataaacaccacccaaacgggaccgacagatcgagagaggtttataatctgggaaacacacctgaccgcccaagactatcacgcctcgaagaggagaatctctgacaccagttgacaaccatgaggccaaagcatccaaagacaagtgagggcacaccgcatagaccagcatgcggctcatacttcgctggcacacagtcctgagcgacgtggtgcacgctacgttgactacaacatgcagaaggagagcaccctccaccttgtgctccgtctcaggcgaggcatgcagaactttgtgaaaaccctgaccggcaagactatcacc

SEQ ID NO: 310069 - DNA, 314 bp, Zea mays
tttgctggtagcagctaatacaacaaggcacagtctactcgtgttgggtcctctccaagctctagaccatcgactgcttgcactgatacaccaggagacgtgatggctgtgccacagctgctgcacaatagccggtcagctcaacccatggtaatgtttggctctgacagaactgggagcttgacatctccagcaaacccattggatgatgctgaccgcttgctagaagatggctcattggatgataatggtgaatcttttctatcacaggatgacatggatcctaaggacaacttggggcgatgcatggatgc

SEQ ID NO: 310070 - DNA, 437 bp, Zea mays
tctccccctttcggcacgcaggcatgggcaaccgtgcgtggggccatcaccgtgacgacaccgagcagcagccagagacgcctgcccttcccaaggctcagatccaggcggcgacggcggcgactcagacgcagcagtactcagaggccccgccgcctccgaagccgaagccggtggcggacgcgagggcggctgggcgcgttctggggcaggccatggaggacgtaaaggcgacctacacctttggccgagagctcgggcgggggcagttctgggtcacctacctcgtcacgcaccgggagactgggcagcgcttgcactgcaagtccatagccacgcggaagctcggtcaccgcgacgacatcgaggacgtgcgccgggaggtgcagattatggactaccttaacggacaccggaacatagtagagctccgggga

SEQ ID NO: 310071 - DNA, 481 bp, Zea mays
tccacgcgtccgcaaacgcaaccgtcccgtcctcggggccgccatgccgccgctcgccgcgcgcctccacgccccgcttctcctcgtccccgccgcctcccctcgccccgccacgcgtctctgcgcagcgagcgggccccgcggcgtcggcggtttcaggagaggcgcgttggcctcggagaagccgccggttgtggccgtcgcggagaaagcgggcggcgagggtggaggaggacagggcgagggtccgtatgacgcgattgtgatcgggtctgggatcgggggcctggtggcggcgacgcagctcgcggccaagggtgcgcgggtgctggtcctcgagaagtacctcatccccgggggaagctctgggtactaccgccgcgacgggttcacgttcgacgtcggctcctctgtcatgttcggcttctccgacaagggtaacttgaatttgatcacacaagcattggaagcagttgggcgt

SEQ ID NO: 310072 - DNA, 406 bp, Zea mays
tccacgcatgcgggagtccagggcaaaatactcgcacgcaagaacacacgcgagaacatcgttatttatctgggaatgtgcctgggaatgcaaatggtggcgatctagttggccaagttgctgatgaagatacgaggggccaatagcacagataccgatccaccttcgacgatactctgggcaatggtcatgccagagggctcagaaaccaaaatgggagtcacgatgaggcttgcctagaggcagacctattgccatgaaagtggctggatatacgggaaggtgagctgtagcgacagatgtgtagatgacagacaccaggacagatacgaggtgaaccctgacatggagacagactttgtgaaggtcgggctccaggatgagagcaaagaagagagtgggaaac

SEQ ID NO: 310073 - DNA, 514 bp, Zea mays
tctcgctataagatcaatgcaaaaatgggagaaggtcagtttggatggccatgtcttctgaaataattgattaaactcgcgtttggcatgctgtgcaacacatgcagcaggttatgtttgtaacgaatgtgtctggaatacattaggtacctttggtcaggtgttggagtgttgggacaaggaaaggaaagaaatggtggctatcaaaatcattaggggcattaaaaagtacagggatgctgcaatgatcgaaattggcatgctcgagcagcttggtaaatatgatgaaagtagatctagttgtgttcaaattcggaactggtttgactatcgtaaccatatctgtattgtctttgagaggcttggaccaagcttatatgattttctgcgggaaaacagttaccgctcattcccaattgccctagttcgggagattgcccaacaactgttggaatgtatagcatttatgcacgaattgtgtctcatacacactgatttaaagcctgagaacatt

SEQ ID NO: 310074 - DNA, 389 bp, Zea mays
tacattcttaatatacacgaacgagcagagaaggggccttgtagagcacgcgagagatgttgactgctggccacgtgaacatcaacgattacatggaggacctgaccgatacggttttatagacctatactaccacgaggaggacggtggccatcggggttgggctttccctgtacgccagagatcgaacaactggtattgtgtaggactctggagatggagggagccacaccgtgccaatctacgaaggttatgcccttcctcatgccatcctgagtattgaccttgctggacgagacctgcctgccaccctgacgaatatcctcaccgagagaggatactggttcaccaccaggttcgagaggaaaatcttgcggtacattagggaa

SEQ ID NO: 310075 - DNA, 503 bp, Zea mays
  unsure (1)..(503): unsure at all n locations
tgtcctaactacctccacccccgcacgcacaactggccgcgccaaggcaaagctagaagaagacaacgcanagggagaggacagaggaggagcagaggacgatgggcagcggcggcgctaacactgcccccctgctcaccccctacaagatgggaaaattcgatgtttcccacagggtagtcctcgcaccactgacgagacagcggtcctacggcaatgttcctcagcctcatgccatactgtactatcagcagagggcgactaaaggaggtcttctgatcgctgaggccacgggggtttcagacactgctcaagggtacgtctgtcgtctgctagaccatcaggctactacggctgcttgagatctgtgtggtcatgctaaatttcatcattcagtagtttagtcgatgtctgaataaagatgtgttttctgtatgcgcacaaggtacaaggacanctctggcatttggacccatgagcaagtcgaagcatggaagccgatc

SEQ ID NO: 310076 - DNA, 330 bp, Zea mays
  unsure (1)..(330): unsure at all n locations
tccttactatgactgggacggagacccaacggacgtcgaaggaaaccaagaagcaccgatgggcaagacagaggagagcagggaccaaggggtgcaggctacactgccctctgctgacacactacaagatgggaaaattcgatgtttcccacagggtagtcctcgcaccactgacgagacagcggtcctacggcaatgttcctcagcctcatgccatactgtactatcagcagagggcgactaaaggaggncttgtgatcgctgaggccacgggggtttcagacactgctcaagggtacgtctgtcggctgctagaccatcaggctacta

SEQ ID NO: 310077 - DNA, 492 bp, Zea mays
tgcccgggctgcgctcgtcggcggcggccccgcggcgcgcgccaatcgacctggtcaccgtgctggacgtcagccagggcatgatgggcgagaagctgcagatgctgaagcgagggatgcgcctcgtcgtggcctccctcggccccgccgaccgcctctccatcgtcgcgttctccggcgccgccaagcgcctgctgccgctgcgcaggatgaccaggacggggcagcggtccgcgcggcagatcgtcgaccgtcttgtcgtctgcgcggctgccgcaaccacggccacggcaacgcaggggcagcagagtgcgtgcatgggcgacgcgctgcgcaaggccaccaaggtgcttgaggaccggcgggaccgcaacccggtggccaccgtcatgctgctctccgacacccagcagcagcagcagcagtcggcagcgccggaaaactcgtcaaggaagcaggttgggcggtcagcggtggccccagcaacgcgct

SEQ ID NO: 310078 - DNA, 462 bp, Zea mays
ttgacgcgtgggggggcggcggcgatggaggcggatgctgcgcacagcgggaggggcgaggcggaggatgaggaggtcgagagcagcgactacacgtcggaggacgagggcaccgaggactaccgtcgtggtggataccatgccgtccgcgtgggagactccttcaagcagggcgcctacgttgtgcagtacaagctcggatggggccacttctccaccgtatggcttgcctgggacacagtccactccagatatgtggcgctgaaggtgcagaagagcgctcaacactacacagaagcagccatggatgaggtcaagatcttgaagcagattgctgatggtgatcctgacgactcaaaatgtgttgttaagcttcttgatcacttcaagcactcggggcctaaatggaaccatgtgtgcatggttttctgagtttcttggtgataaccctgtgaccctgat

SEQ ID NO: 310079 - DNA, 101 bp, Zea mays
tgcgcgccaccgtccgagccgaatcgagctgcagaatctaccttggcatggcgacacaggccgctttcctcgcagggttctcgcagctcgccgcgcagcct

SEQ ID NO: 310080 - DNA, 198 bp, Zea mays
agtatcggggcaccagacacagaaatatgttgtgagggtgagcctattaagagggaggacgaggaaagactcgatgaggttgtctatgacgatgttggtggagccagaaagcacatggcccaaataagggaactggacgaacttccatcgcgagatccccagctctccaagtctataggcgcgaaaccaccaaagggc

SEQ ID NO: 310081 - DNA, 191 bp, Zea mays
tcggcgcgggcggacaaggagcaggcggaggaggagttgcgccaagccacaccgggtacctcgcgtgactcgatgcacaagcgccgagccaccggtggcaagcacaaggcctggaggaagaagcgaacgcatgagcttggccgccagccagccaacaccaagtcgccaagcactaagaccgcgaggaggac

SEQ ID NO: 310082 - DNA, 156 bp, Zea mays
acgctcaagtccttctcctaagcaaagccgcctcgtttttggcgtatgcccccgctggcgcgcccatgattcccgccgattcctccgcccgttcagtccagcaacccttgctgctgcagtgctgcggctagttcggcggcggggaaggaggaggag

SEQ ID NO: 310083 - DNA, 213 bp, Zea mays
tgctccggtccgcggtggaccacctgtcgcagtactttttcgagggcggccgcggaggccatctgtacgtgcccgatgccaagtggttgacaggcctcctcaacctgaccagccacttaatcctatacctgcaccaagacgacgtcatcctaggctcccaggacgtaggcgagtggtcaattgtggatccccttgatttcttacggaagaggt

SEQ ID NO: 310084 - DNA, 446 bp, Zea mays
taaaaaaaaaaaaaaaaaaaaaaaaaaaaaaaaaaataaaaaaaaaaaaaaaaaaaaaaaaaaaaaaaaaaggggcggccgttcgcgatctagaactagccaaaacagaggagcccgtcggccgtcgcaaaaaaaaaaaaaaaccaaaccaggccccccgccccatggaatcgttgacgtttcgggcttcgacggccgcctcgccgttgaagcaaccccggttgttccccggacggaagcgcgcgacttacgtccgccccacggcctccgccggggagccggacctttccgtgcgcgtgaacgggctgaaaatgcccaacccgttcgtgatcgggtcggggccaccgggcaccaactacaccgtcttgaagcgcgccttctacgagggctggggccgccttaattgccaaaactgtggtattggatgctgaaaaagtttcaacgtt

SEQ ID NO: 310085 - DNA, 238 bp, Zea mays
ttcaggtgggcgggaactcgcgtatctgcgggacaaatttgatgacggcaaccccgacactcctgagataagtgaccaccgacggcgatccccctgcacaacaacaccatgagggagtgcatcacgatccacatgggccaggctggtatccagggaggaaacgcgcgctgggagctgtactgcctcgagcatggcattcacgctgctggccagatgcccggtgacaagaccattgggg

SEQ ID NO: 310086 - DNA, 412 bp, Zea mays
ataggccaaagcgggacgggagccacagagatagctagcaagaaaccacagatggcggcgatagcggcggccacccaggcggcggcgacggtgctactgctcgcggcgctggtgctggcggcgggaccgggcggggcgcgggcgcagtcggcgtcgtcgttgagccagtgcacgtcggcgctggtgagcctgtcgccgcgcctgatctacatctacgggaacgagggggctgcatggccgagaggcttcgcggaccttgactgggtgttagcggtggcctcaatgtcccagtgatgcataccccgctctgtgctaatgctcctggtgagaaaggaggcaagaactttatgattgattttatgatggtcggtgttccatctgctgcttcaaagactgtctgttgctcctatct

SEQ ID NO: 310087 - DNA, 449 bp, Zea mays
ttcgacagttctctcctgctcactcactcccttggccttctccagtcctctgtcctcgatcgatcggcttggttacttccttagcttggagatccatttccatggaccctcacctcagctcccacgttcacgcggcagctgcggcggcctcggctttccccgatggtaagaagttggagagtgacgtgctgcctccaggggtcgtgaccctcgacgtcgaggcgggtgcgccgacgaacgcggccggggccgatccgcgcgtacgcgacgacggggacgccggcttcgactacatggcccgcgcgcagtggctcgcgccggccgtcctcggcgcgaacgacggcctcgtctccgtggcctccctcatgatcggcatcggcgccgtgaacgcgacgcgcaaggccatgctggtctccggcatgggaggcttcgttgcccgcgcctgcata

SEQ ID NO: 310088 - DNA, 379 bp, Zea mays
  unsure (1)..(379): unsure at all n locations
ttcgatcgaggtgtacagcggcgacacgctggcggtcagggccgtgaacctggccaggtacaacgtgaccctccactggcacggcctccggcagctgcggaacgggtgggcggacgggccggagttcgtgacgcagtgccccatccgccccggcggcagctacacgtaccgcttcaccgtcgaggggcaggagggcacgctgtggtggcacgcgcacagctcctggctccgcgccaccgtgcacggcgcgctcatcatccaccccaggaggggcgtcccctaccctttccccaagccacacaccgaggcccccgtcatcctagcgnagtggtgcagngaagggaccccatcgccgtgctccgccagtccatgatcaccg

SEQ ID NO: 310089 - DNA, 385 bp, Zea mays
ggccttggactaaactttagtccctacttatttggttttagggactaaacatattctaaaatcattaaatacactgtctaaagactcaaatgcccttggaatatactcacaatattagttgtccatacaaacatgctctcacaaccaaatactacagagagaatgtaagggcaacagggtaattataggcttttagtctattttagcacctatgtgaaaggctaaatcattttagtcatagggtttggcaaaaaagactaaaaactagagactaatctttattctctctaagcaaacaccccctaaccaaatgaatcttgtcgtatttagtcgagggcacgtagccgcgctgactttgatttggacacgtggtaccttcagtacc

SEQ ID NO: 310090 - DNA, 208 bp, Zea mays
ccgcagctcccatcctctcgctcgccaggagaagcaaccgccgctgctgctgccgcgtccacagaatggggggtttcgtgaagactcataagatcaatgcgtattgcaaacgttcccaaattaatggcaaccgaaggggctgagactacagagcctacagggtcaggataaggttgattaaccatgacaaaaaccagtacaacacacc

SEQ ID NO: 310091 - DNA, 396 bp, Zea mays
ttgccatggctggcgttcggccacatcctccccttcacggagctcgccaagcgcatagctaggcagggccaccgggtcaccctcttctccacgccaagaaacaccaggcggttaatccgcatccctccagaactcgcggggcatatccgcgtcgtggacatcgcgctgccgcgcgtggagcgcctgccggaggactgcgaggcgagcatagacctgccatccgacgacctccgcccgtacctccgcgtagcctacgacaccgccttcgccgacaaactctcggccatcctgaaggagccggggccggagaggccggactgggtgctcatcgactacgccgcgtactgggcgccagcggccgcggcgaaacacggcgtgccgtgcgccttcctgagc

SEQ ID NO: 310092 - DNA, 361 bp, Zea mays
gtcgcgccacggcctaagccgaatcgagctgaagaacccaccttgggatggggacacaggccggtcctgtggcaggagtgtcgcaggtagccgcgcaagcggcccgggaccgacctgcgtccgtagctgctgctgcatgtgatacacagggcggagtgcaccgaggcgacgtggccagcgcgaagccaggccgtggcgtgcgcccctgcttgacggtcgtggcgcgaggccaccaaggatgtggcgaagacactcgaggagtgcggcagaatcaccttccccatatcccttaagcagcccgggccttgcgaactgccggtacagtggtttgtgaggagggagagggcgacaatcacataat

SEQ ID NO: 310093 - DNA, 470 bp, Zea mays
ttgcaaggcaggctatctggagcaggccatgaggactatggcagacatggatacagcatgtcttaaaccagacgtttacacatatacaactcttattgatgcgctctgcaagtcaggggaccttgacagggctcacagcctcttgcaagagatgttagataaaggaattaagccaactatagtgacttacaatgttttgatgaatggtttttgcatgtcaggcagggtagaaggaggaaagaagctgcttgattggatgctcgagaaaaacatacatccaaatgctgcaacttacaattctcttatgaagcagtactgcattgaaaataacatgaagtctaccaccgagatctataaggggatgcgttctcgagatgtagggccaaatgagaatacatacaatattgatcaagggtcactgcaaggcaagaaatatgaaagaggcactatatttccacgatgaaatgata

SEQ ID NO: 310094 - DNA, 368 bp, Zea mays
tctcacgcgtccgcccacgcgtccgtggagatctcagaaactgcttcttgtattgcagcttgtttcctgaagactaccccatgtcacgcgaagcccttgtgcggctctgggtcgcagaaggttttgttctgagtaaagaaaagaatacaccagaggaggtggctgagggaaatctcatggaattgatccaccgtaatatgcttgaagttgtagactatgatgagcttggcagggttagcacttgcaagatgcatgatatcatgagggacctggcactttgtgttgccaaagaagagaagtttggttctgcaaacgattatggtgaactgatacaggtggaccagaaggttcgtcgcttgtcgttatgt

SEQ ID NO: 310095 - DNA, 324 bp, Zea mays
  unsure (1)..(324): unsure at all n locations
ttgacccagatggccctgatgccgtgcggctcacctggaacacctggccacggtcaaaggtcgaggccagccgctgcgtcgtgccgctcgccgccaccatctcgcccggtcgcgtcccggacccctccgcggngtccccgccgccgctcccttaccctccgctccgttgcaaggctccctgctccgngctcctcaaccccttcgcgcgcgtcgacttcgccgccaagatctggatctgcccgttctgcttctcccgcaaccacttccccctgcactactctgccatctctgagtccaacgttcctgccgagctctccccgcagt

SEQ ID NO: 310096 - DNA, 542 bp, Zea mays
  unsure (1)..(542): unsure at all n locations
cccacgcgtccggatgtaggatgggctatggcgatgggtgttgattaaccatttcttttctctctctcttgtgcgtgccctgcttcttctctgtgcatgcgcatgtgtcgggcggcgtactcgtgcaggtctgaggcgcaccggcaagagctgccgcctccgctgggtcaactacctccacccggggctccggcgcggccgcatcaccgccgacgaggagcgactcatcctccagctccacgcgcagtggggcagccgctggtcgcgcatcgccaggagcctccccggccgcaccgacaacgagatcaagaacttctggaggacgcgcgccaggaagcagaaggcggcggcgcagcagcagcagcagcagcaggacagccggagcagcaagacggcgccgcgtncngcgttctcagggtcagcgtcggtcgtgactaccaccacgtccagctgctctggctcttctagtccgaccagcgcgggctgtggcacgggcacgtcatcgttcgctctgaccgagtccgcgctgcggcaaagcggcg

SEQ ID NO: 310097 - DNA, 553 bp, Zea mays
tgtacgagtacatgaaccgcggctccctcgacaggtcgctgttcaggccgaccggccctctgctggagtggaaggagcggatggacgtcgccgtcggggcggcgagggggctggcgtacctccacttcggctgcgaccagagggtcatccactgcgacgtcaagccggagaacatcctgctcgcggacggcggccaggtgaagatcgccgacttcgggctcgcgaaattcctcacgccggagcagtccggcctcttcacgacgatgaggggcacccgcgggtacctcgcgccggagtggctcagcaacgcggccatcaccgaccgaccgacgtgtacagcttcggaatggtgctcctggagctggtgcgcggccgcaagaaccgcagcgagcacgtaagcgacggcggcggcgaggcctccaattcctcgaacgggacagcgggcagctcgtcgcgcggcgcgaagagcgactatttcccgctcgccgccctggaggggcacgaggccgggcagtacgcggagctggctgaccctcggctacaggggcgggtg

SEQ ID NO: 310098 - DNA, 538 bp, Zea mays
gtcatcatccagcaggtgaccgctagctctgtacctgtacgacgtgtgaaacgagtagtagttaagcatgacggagaggcgcgccggcatggcggtggcggtggcggtggcgctcctgctgctgtcgtcgttcggcgtggcgtcggcggcggggaggggacgacccaccaagaagacgctgaagccaggggagaagccctcgcccaaatccaagttcttcccgctcagccgcaccaagtttgggcacaagcgaaactacgaggcctcctgcgccgacgagggcgggccggcctgctacgtcggatgccccgctgaatgccccaactcctgcctcgtcttctgcgaatactgcctcagcttctgccaatgtgacatcttccccggcacctcctgcggcgacccgcgcttcaccggcggcgacggctacaccttctacttccacggaagcaaggaccaggacttttgcatcgtcttcgacgcgggccttcacatcaacgcccactttatcggcaaccacaacccggcccttaaccgcgac

SEQ ID NO: 310099 - DNA, 445 bp, Zea mays
  unsure (1)..(445): unsure at all n locations
caaattagtactacccccaatcagacggtttggtaatgctgctgatgttggtactccgatccaaatgtttgtagccacaaccgctagccgtggtgcagctctgctacaaccagctcactgggagcatccccacccagctgggcaacctcagcaggctcaccgtgctggccctgcagtccaaccgcctcaacggcgccatccccgccagcctcggcgacctgccgctgcttgcgcgcctggatctcagcttcaaccgcctcttcggctccatccccgtcaggctcgcgcagctgcccagccttgtcgcgctcgacgtcaggaacaactcactcactggcagcgtgcccgccgaactggccgccaagttgcaggccggcttccagtacgggaataacagcgacctgtgcggcgcggggctgcccgcgcttcgtncgtgcaccccggc

SEQ ID NO: 310100 - DNA, 370 bp, Zea mays
ctcggttcctgtgggtgatgcgcccggacatcgtgagctccgacgacccggacccgctgcccgaggggttcgccgaggccgcggcggggcgcggcctggtggtccagtgttgctgccaggtggaggtgctctcccacgccgccgtcggcgccttcctcacgcactgtgggtggaactccgtcctcgagagcgtgtgggcgggcgtgcccatgctgtgcttcccgctgctcacggaccagctcaccaaccgtcgcctcgtagcgcgggagtggcgtgccggcgtgtccgtcggagaccgtgttgcggtgcgcgccgactaggtgagggcgcggattggagcggtcatggtcgttgaagacggtcttaagct

SEQ ID NO: 310101 - DNA, 615 bp, Zea mays
  unsure (1)..(615): unsure at all n locations
ggcagcagtgagctcagtacacagctaggcacagcgacggggtccggtccagggccatggctaaggaaagcaagctaacggccggggtggccgccgcgctgaccgtcgtcgccgcttgcgcgctatgcctgctgctgccggcgacggcccgcgcgcagctccgggtgggattctacgacaccagctgccccaacgccgaggcgctcgtccgccaggccgtcgcggccgccttcgccaaggacgccggcatcgccgccggcctcatccgcctccacttccacgactgctttgtcaggctaggcagccgacgtcggacttgggatcttgcatggacaaggcccacctcggaggaggcctgttagctctcgacgcgtcgccgcggcctctcggcttcctcaacctgctatcgccgccgacgtcgtccncgccgtttcacaggacaagaacgatggaggccgacgacgtcctcggcgttccaggcaacaagggccgtaagtccatcgaggtggacttcttctccgacgacaaggacaagaagagcgctgccgctgcagctaacgacaagaaggaagacctgacgaccatttaccttttnccggcagcaacgccaacgac

SEQ ID NO: 310102 - DNA, 480 bp, Zea mays
ttcaagggaaggcttttaactggggccatgatagcgttggccattggtggaggtgcttatgtgagtactacagatgaaggaaagttttgcggatggttattcaagtcaacagaacttgtgaacccactctttgcactgttggatgcagagtttgctcatagtttagctgttaaagcggctgcccatggatttgttccaagagaaaagagacctgatccatcagttcttggggttgaggtttggggaaggaagttttcaaacccaatcggtcttgctgctggctttgataaaaatgctgaggcagttgaaggtctcttaggcctgggatttggctttgtggaagttggctctgtgacacctcttcctcagagggaaatccaagcctcgaatttcagattaaggagcatggtgctgtaataaccgtgcggattaacagtgatgattgtagtttgtgctaacgtcttgggcacaacatgcaga

SEQ ID NO: 310103 - DNA, 373 bp, Zea mays
gcggcgatccttggctcactatccaggcagcaggagatggagcacgacgtagactaccatgaccaccaccaccagcagcagcaggaggaggaggaggaggccatggagctgccgccggggttccgcttccaccccaccgacgaggaggctattacgcactacctcgccaggaaggccgtcgacccgcgcttcgacccgcgcgccgtcggcgaggccgacctcaacaagtgcgagccgtgggacctgccatctcgggcgacgatgggcgacaaggggtgggacttcttctgcgtcaaggaccgcaagtacccgacggggctgaatgcgaaccgcgccacggagtcgggctaccggaaagcgaccgggaaagaca

SEQ ID NO: 310104 - DNA, 409 bp, Zea mays
tttttgcagtggtaatacttggctgagaaatcctgtgccaagcgcaaaccttgtacaagtcctggctacttattttaggggctagaatcaggcgacgacagcttatgacttgtttttttacaccaatccagacctggattagcaatgattcttatgcatcttttggttgttactaccactcatgggaccatttatgcatacatgtgaactatttatgctgctgatatgtctctagtgtggcaatgattttcttacatatagaggcttaccaaaagttcaaaatcttgttgggtctgcagcagcagaagcatcacacccaagtttgtcatacactctgctattcttatttcctaaatatgtcttcttatgctaattggaaactctattatgcccaatactagtcacgtgt

SEQ ID NO: 310105 - DNA, 361 bp, Zea mays
ttgcaaagcaggtgtccgtggtgggtcacgactggcgcgccatcatggcgtggtacctatgcctgttccggccgaaccgagcggcggcgctggtcaacaccagcgtgagctatatgcgccacatgttggtgcgcgccgccgccgccgccgtaacgcccatcgactacttgcaccggacctacgggcccagctactacatgtgccgattacagacaaacaatttgtcgacggccggccggacgacggctaccaccgatcgactagcccgaccgatgtgggtcactgcacgcaacacccggtgcgggtgacgacggtgaagcacacaggggccaggtcgggcacgtactgccgcaaggggaag

SEQ ID NO: 310106 - DNA, 356 bp, Zea mays
ttcactcgtaggtgatatcacatcctatgtggacagatagcctgttgtggctcatcaggtcatgctttgtgcccgatctcctttctgtcaattgaagcacaggacagactgttaagacaggaaggaagtgagagtttgtaaccaaaagttggattgtggcaggtcacacagactcatccatttattgtattctaataaacttcatggagactgtcgacgacagcggaaaattatgggggaagcatgcaaagtttgaaagtgcgaggacctgcaaaaagttggggataaagaagttgtgcatcagtaggcctcggagtacaagtcacgaacgacaactgcatatggacaggtaacac

SEQ ID NO: 310107 - DNA, 388 bp, Zea mays
gatcaatggcgttcactctccgcctcgggacagcatttctggtgctcctcctcttctcttgtgccgcagaggcgggcgaggttggtgtgaactatggaatggtggcgaacgacctgccgaaccctgcgtcggtggtgcagctgctcaagcagaacggcatcaccatggtgaagatatatgacgccaacgcaaccgtgctgacgtcgctggccaacacgggcatcaaggcgatggtgatgatgcccaaccagaacctggcccacgcggccagggacccggtgtacgcggcgcagtgggtgcaggacaacgtgaagaagtacttacccaggacgcagatcaacgccgtcgccgtcggaacgaggtgttcgacgaccgaacgtggacagat

SEQ ID NO: 310108 - DNA, 486 bp, Zea mays
  unsure (1)..(486): unsure at all n locations
ttcgccacttcccattcctgtgcgcctgcctcgcctcgcctcgcgtcgcactacccacccccaccagccaccaccaccaccaccaccaccaccaaccaaatggagcgcgcacgccgccacgccagccgcgcgctgctgcgccgcctgctcgcggcggccgcggcctcgcccgccgcgtccccggccacgtcgtcccgcggcatcntccatcccctgtacgctcgtccgcccgccaggcccgcggtggatagcatgcagtctgccgtctgtctgtccctttccatccccgctggtcgctgcatccatgcacgacgcagggcgcgggtcggcggccggtgtcggcgctgcagccgagcgacaccttcccgcggcggcacaactccgcgacgcccgccgagcaggaggccatggcgtccgcgtgcgcgaacgcggcgtcaacacgcccggtgacgccacggtcccgcccgtcatcgcgcgccgcgatgc

SEQ ID NO: 310109 - DNA, 501 bp, Zea mays
cggacgcgtgggggggacgtcgtggaggagctcctcatcggggtgggccgccggggcgagcccgccgcgcacgccgccgcgcccttcaagggcggccgcgccgcgctgcagaagctcctgcacgcggcctacaagcgcggggagacctccgtcgaggtccgcgtgcgccgctcctccgcctccgcgcagctgcagcgccagctcgtcgccggcgacagcggggagctgcaggtggcggacgacgcggccagcatgcaggcctgcatcgtgccgcaggagtccgtcggcgggatcggccggacccgccactacgtgctccgctccatccgcgaccccaacttcgccgtcggcctcgtcgaccgcatggagagcgagtgcatcgccatcagaggctcgaggagtcgagggttggtgtgcgcgctgagcaaggcgcagctgcaggacggctatcgtgtctacccgtgggagaagaagatgcgggaggtgctaccgatccccaac

SEQ ID NO: 310110 - DNA, 301 bp, Zea mays
gctccccgtcgccgagctcgcgcggttcgccgcgcgcctcctcgcccggaggctcttcccgcacctgcagcagcactcgtcgtccggcaagcacaagggcgacactgcggccccgcccaagatcaacttcaaggccggggtggaccacttctgcctccaccccggcggcacggccgtcatcgaggcggtgaagcagagcctgggcctggaggacgaggacgtggaggcggcgcggatgacgctgcaccggtggggtaacacgtcggcgagcagcctgtggtacgtgctgtcgtacatggag

SEQ ID NO: 310111 - DNA, 174 bp, Zea mays
ccagcaacctgaagttccaatcattccactggtacaaaagacatcttttttttttttgatccagacaggccacgccttagcatgcatcatgttccaccaacccgacccatacaaccatacaaacaggcagttgcttgccggattaatcacccaggattcaagttccagagatac

SEQ ID NO: 310112 - DNA, 535 bp, Zea mays
gtgattgcgactattggcgattgtgtaggtgtagtgtgcctgtcgaggaacgagagcctcaagacccgagcgtcttcagatatggaggaggcggcggttgcacggacgaccagcgagacccaggtgggcgacctgccggaggtgtgcctggcgcaggccatcgcgcggacctccccgcgcgacgcctgccgctgcgccgccgtgtccccggccttccgcgccgccgccgactccgaccaggtctggcgcgccttcctccccgagcagctcgaggcggctgaggaccacttggacagccgccgcgtgtctccgccgtcgcaggcggctcacccagcggcgaccgtgcgcggcctcagcaagaaggacgcctacctcagcctctgcgacgctgccggcgccgtggccgtcgacggcagcgggtgcagggtgtggctggagagggccagcggcgccacgtgctacgcgctgtcggctcgcaggctcagcctgccctgggacgacggcgagttcttctgaggttcacgcaccacccacg

SEQ ID NO: 310113 - DNA, 383 bp, Zea mays
tttattcgtacggtcggagcggtgctcatggtcctgtaccacggccccgtggtgcatttcccatggttcatggggcagcaccaccacgacagctccgtgtgccatggagccaacagtgccggctgcggcggttgttctctcacgtgaatcatcacgattacattcgcttgcgtatgctgatcctgcttattcgtgctgcagggcaacacgctcaagagctaccccgccgagctgtcgctgactgcgctgatttgcctgatggggtcgctcatgagcagatcctgctcgctctgatctgtgcgccggaacactcatgcctgagtcatcatctgtgacacgcgcatattgaccgtcgtatacgccgtgatagtgtgctccggcgt

SEQ ID NO: 310114 - DNA, 501 bp, Zea mays
ggtgtatccttagtctgtgtcggttgcgaagatggctgacgaagaattcgagtaccaggagaacacggagggtggtctgattaccccctccaccgccggtgacatcaagaagaaccagttcatgttgatcaagggcgcgccttgcaaggtgatggacaagtccacctccaagaccggcaagcacggtcacgctaagtgcaacattgtcggcatctgccagttgaccggcaagaagtatcaggatgtgctgcctgctcacgccgctgtcatggtgcccaagattactcgtactgagtatcagttgctggacctgactaagagtgatgatggaggaggcttctgctcgctgcttgacgagaagaacaacaccatcgagttgccccttgaaggtgaagaggccgagaagctgattgccgactacgaccccaacaacaccgatgaggatattctggtcgctgttctcgccgttgccgtccttgatggcggtgagactgggtgagc

SEQ ID NO: 310115 - DNA, 392 bp, Zea mays
gttctagatcgcgagcggccgccctttttttttttttttttttttttttttttttatggagcattcatcgataaaaagggccatagcataatccaaaacttgacagtacagaacagcatccaggacaaaacagaacccaaaatcgactccggcagttcttagctataatatagataccgcatttagacaagcacccgacgagtagaggtttccactcaaaccatcctaagcctctactgtctcagttggggcctcgagcacaaggcccttggtgggctttgccagcaggtcggtatactggtggaacggggccatggagaacttggtctggctccagaattcaggagtgaggaagccgtacgtcttcatcaggcagtcgaaggttgccttga

SEQ ID NO: 310116 - DNA, 453 bp, Zea mays
cgtagaggaagaggcgggctgagaaacaggacgtaccactatgtgatggaggaggatgcggactcagaggctgttgccgggtggaatagggaacggccatacaccatggcggatttctccaaggaatcttgcccttctgtgaagaacattttacttctggattctgaaggaaagcgtgctgctgtaaagtatttctcagatgattggccgactaatgcatcaaagttagcctacgaaaagtctgcttttactaaaactctaaagacaaatgcacggacagaagctgagataacattgtttgatggttatattgacgtttacaagtttgtacatgaccttcacttttttgtcaccgctggagatgatgagaatgagctcatcttatcaagtgtgctacatggtttttctgattctgccggccttctactcaagggcgatgttgagaagcggact

SEQ ID NO: 310117 - DNA, 461 bp, Zea mays
atttggttcagcgttgatttatgatgactcagcacaatcctttagatggttgtttgagaccttcaaatctgctatgagtggaaaacaaccaaaaacagttttgactgaccagtctgctgcacttagcgatgcagtttcttcttggcctggaaccatccaccgcttctcactactgcatttgtatctgaatgctactaagataagcagggataccttacaaggcttggagacttttgcatcagattttagtaggtggctgtatgaatatgaggaggacaacttctattcaagctgggaaatcctttcagagaaatacaatataaaggataatgagtggttctgtaaattgtatgaggatagagaaagatgggctttgccttatgggcgtgacacattctgtgctgatattgcaaccacactaagaagggataacacaaatacaatcctcacagatctaatta

SEQ ID NO: 310118 - DNA, 622 bp, Zea mays
cccacgcgtccgcccattctcatcatgcagtgcgaaccaaccaacagcatcgtctgcattgtgcaggttactaagcatgggatagaagcatctctcatggacgatgtgatggccgcgtcacgcgattttttctaccagccgctcgaagcgaagcaggaatacagtaacctgataggcggcaagcggttccagatggagggttatggtaatgacatggtgaaatccaaagatcagatactggactggcaagatcggctgcagctcagggtggaaccccaagatgagaggaacctcgcttattggcccaaacaccctgattctttcaggtttatctctactcgcttactcgaaatttcttccctgtttgttattgaagtctcaaatctgctccatgataaaccttgtgctccaaatataatttaagacagctatgactccccaaacagggccacgcattagctgcatttaatttggcgccgtgtcattcgtagtttaagttcttggaattcgtagcccagatgcttatggggttattaaatggatgatctcgacaaccaaaattagcctaaaatatttggtcaccgaagtgtcacatgatgatttgagccatagttttttcccg

SEQ ID NO: 310119 - DNA, 459 bp, Zea mays
gtccaataccaatcgtgaagaatgtgtttatccctcctgattctgatggtgccttacaagtcgaccttgaagatatcatgcccctttgctcatttttggcttctattgatagctgcaaagaccgcattactgaagcacttgaaacaattaaaccaatgtcttcctgggaagtagcagcaaatgcgcacgatggacaggatcatgtattgcatcacatacgtggttttggtgtagcgttggatgttcttatcaactacctaagttcagaatatggaaatgcatttgagcttgctaggatatttgcgtttttatctggtccacccaattatggggctgggcagctggatataaatgaggaccaaaattctggtaaagcaaggggtgctgatcatatattgcttcaagagcagaccagtttctacagacatctggctactagtgctgctcagcaggtgtatg

SEQ ID NO: 310120 - DNA, 442 bp, Zea mays
ggataaatgaagatatatggtataacaactacagggaaagaagaacataccaaaatgcagcactatacaagtacacaaccatggtaacttaaaggcgcatgtatgtatatcaccatgttctcgttcttgctttttttcacaaaaaggttctaggcaggcagatgctaccaaggcttcaggtcgcctggcggtccggcggtccagttcaggaccctctccccgggcttcaagaagacgttgtcaccatgtgggagcttgcgcgcgagcccgtttaggatctggtggaatgcatctcccgcctgagcaggctgggggaacagcatggcctgcttcatggccgggttcgcgaggagacgctgcttcctcagtataacatctgttgggatggacgtcaggatgctgtccagcttcgggacatcctcctcggcgacaaacacaccaa

SEQ ID NO: 310121 - DNA, 218 bp, Zea mays
aaaaaagctaatctcagggcccattttagcgaggggttttttcccaaatggttccaggaagggaagcaaaagggcaaaacttgtccagactcagcttgaacctggggacccaaaggccccccccctccacattttttttggggatacccaagcggcacccctccttgaaaagcggggggaaaaaacccctttactgggtcttgaacatgggggggatc

SEQ ID NO: 310122 - DNA, 422 bp, Zea mays
gcggaggctcaccctcgacgtcaacatactcatgctcatcgcagtttccggggcgatagctctcaaggactactccgaggctgggttcatcgtgttcctgttcactacggccgaatggctggagaccagggcgagccacaaggcgactgctgggatgtcgtcgctgatgagcatggcgccacagaaggctgtcgtagcagagacgggggaggtggtggcggctcaggacgtcaaggtgggcacggtgctagccgtcaaagccggggaggtcgtgcccatcgacggcgtggtcgtggacgggcggagcgaggtcgacgagagcaccctcaccggggagtccttcccggtcgccaagcagccggagtcccaggtctgggccggcacgctcaacatcgatggctacatcgctgtcaggacaactg

SEQ ID NO: 310123 - DNA, 389 bp, Zea mays
ggaaaacaaaatttaacatctgatggaatcacattacatcattcattttcttactgacaaaagttccatgaaagccataaggcactcttcgtggaaacgttattttcgcgacaggagcatcctcgaatctcttcgcatcaactatgtgcacctgagatgtattagtttcctcatcatgtacaaatgaaactacccacccattttttttatgtgacccaccagctttcggtacaaacgatgctccaaagcaaaactcgtgtttaccaagccaatggttttgcgtttttacaaggctagcacctggtatctctgcgttgcttctctcgtcaaggtagaattttgcaaatcctccatactttgggtttactttcccacaattgccacaggag

SEQ ID NO: 310124 - DNA, 487 bp, Zea mays
gccggtgccaacgtgaaggccattaccctccgggctccatatttcgcggtcccgcttgaggagctggaggctgcagtctccaaggacacgaaagcgataatgataaacacgccgcacaacccaaccgggaaaatgttcaccagggaggagctcgaatccatcgccgccctctgcaaggaaaacgacgttttgctgttctcagatgaggtctatgacaagctggtgtttgaggctgaccacatatccatggcttctatcccgggcatgtacgagaggacggtgaccatgaactctctggggaagacgttctctcttacaggatggaagatcgggtgggcaatcgcgccgccgcacctgacatggggcctcaggcaggcgcactcgttcctgacgttcgccacctgcacaccgatgcatgcggcggccgcggcggctctgagggcaccggacagctactacgacgagcttgagagggactacagcgcga

SEQ ID NO: 310125 - DNA, 457 bp, Zea mays
ctaccagccagctagtttccaagggatcaccgggtctctagcactagcagcaggggcggccgtcggcgctccggggagctctctgcacggagtcacagggcgcgagccggcgttcgccttctccacggagcacgaggaggcggcgagcaatggcggcaagttcgacctgccggtggactcggagcacaaggcgaagagcgtccggctcttctccgtggcgaacccacacatgcgcaccttccacctctcctggatctccttcttcacctgcttcgtgtccaccttcgccgccgcgccgctggtccccatcatccgcgacaacctcaacctcaccaaggccgacatcggcaacgcgggcgtggcctccgtgtcgggctccatcttctcccgcctcaccatgggcgccgtctgcgacctgctgggcccgcgctacggctgcgccttcctcatcatgctg

SEQ ID NO: 310126 - DNA, 433 bp, Zea mays
tctgttaggtgacaggaaaggagatctttcagggggtgaaagaaaagcacggtgacgggttcgaaggtttcgtccaagaaaaaatctgccctctgccaggagacgtcatgcacgagaacttgggcctaggcgctgccaaactgagacaagtgtgcaaggaaatagacatcgttgtaaacggagctgcaactacgaatttctacgaaagatacgatgtggctttcgacacaaatgtcatgggagccaagcacatatgcgagttcgcgaagaggtgcagcaaactcaagatgctgctgcatgtttcaacagcttatgtagctggtgaacaggatggggtggtgctggagtagccattccgtttgggcgaaaccctgagggaaggcacgcacctggacatcgagtccgaactaaacctgataaaagagacgaggag

SEQ ID NO: 310127 - DNA, 408 bp, Zea mays
tcgtgagatggtgcgagtagcgctgctgtgcacggagtaccttcccggccaccggccgaagatgtcggaggtggtccggatgctggaagcaggggaagggctcgcagagcggtgggaagcctcgcactcgcagtcgcagagcgcggactcgcacgagttcaaggccgtcgagctgtcgggcccgagatgatgatgacgacgacgccgccgccagtttgcactttgtacagcatgcatattaaggaccgagaatcctgtgtggactaccatactagaatagctagctatagatgtgtattagattaactgtacaaaaagaagagcgtgtgaggtttgtactgatttggatatttacagaattagtagtcgagacaataagaccaagtaaaaaagagcttttcattgttc

SEQ ID NO: 310128 - DNA, 457 bp, Zea mays
ttcatgcgtccgcggacgcgtggggccgccggggggcctttggcgtcgccctgggtcgcctccttctctcgcagcttctcggtcaacgacaccaccttaatgaaaccaaccagagcaccaacagacgggcgactcctccgtcatcagcgacgtgctcggactcggagcgaggccgtggaacaaagctctgctcgcgcggttgctgagggcgagaggatgtaagtacctgtgagcggaggcggtggttgtcctggagaagggcgtcgtggtccgcgcggagggcgtccaaagaggccttgaggcggtcgaagtcgcgctccagctgcttgggcttccaccgggcgcgccggttctggaaccacacggccacctgccggggctgcaggcccagcttgcgcgccagctccgtcttgcgctccggctccagcttggtctccttctcgaagctcctctccag

SEQ ID NO: 310129 - DNA, 442 bp, Zea mays
ttgtctcgtgggctagccccattccccgtctggcgcggtatcccagctacctggagcgccgccgcgactgcaggataggaggccatggacgacgtgtgcgaggggaaggacttctccttcccggagcaggaggagggggtgatcgagctgtgggcgaagctcgacgccttccacgagcagctccggcgcacggagggcggcgaggagttcgtattctacgacggtccccccttcgccacgggcctgccccattacggccacatactcgccggtaccatcaaggacgtggtcacccggcaccagtcgatgcgaggccgccacgtctcgcgacggttcggatgggactgtcacggactccccgtcgagttcgagatcgataaggcgctcggcatcaccaaccggcagcaggtgttcgaccttcgcatcggcaagtacaacgaga

SEQ ID NO: 310130 - DNA, 481 bp, Zea mays
ggaccttcggaacttccctttcgtttatttcgtctgaaagtctccgacaagaatatttcaaagcacaagtaaggtcaagcgtatcagacacgtatacaaccaacgtgacttcattcgtaaaaaagccccgatcctgatcgtcctcccatgtacatgtactgtacgtctgtacccagtaatatacaataccaacggggctattgtgcaaattaaaaagatcagccaaaagggaagcgtattatacaatattttgcagttctagtaacccttccgcataaatatgtgcaacaccgagcccaagcacctgcgactgctagtcttccagctcaacaagctgagcccgtctctcggcagctttcctcctgacaaagataccccaccgcatcgcagccttgatcttcagccacccgacaacagctttgccggacgagcgagcgcggtcgtcctcatcaaatccgaaggctggggcaggagacgggta

SEQ ID NO: 310131 - DNA, 336 bp, Zea mays
gccggcaatcggcatcgatctgggtgcgacctactcttgcgtcggtgtgtggcagcacgaccccgtcgagatcatcgccaacgaccagggtaaccgcaccacaccctcgaacgtcgccttcaccgactccgagcgcctcatcggagatgcggccaagaaccaggtcgccatgaaccccatcaacaccgtctttgatgccaagcgtcttattggcaggaggtttagtgatgcctttgtccagagtgattttaaagttgtgggcctttaagggcatttcctgggcccggtgagaagccaatgattggtggttagcacaagggggaggagaaacaggtt

SEQ ID NO: 310132 - DNA, 374 bp, Zea mays
ccgagccatcactgatcatagcagctgcatgcttagtataccgtaccgctccacatccccgagctagaagaagaagcccggccagtacctacatctgcctagcggcgcgagcgaagctagcagagatggcgagagcgctgccgctggtgctcgcggcgtccgtcctgctggcggccgccgcgctgctgctggccgcggcgccggcgccggcggccgcggtcgacttcggcgcggaggacctggcgtctgaggaggcgctgtgggcgctgtacgagcgctggcgcggtcgccacgcgctggtgcgggacctgggcgacaaggcgcgccgtttaaacgttctaaaggccaacgtgcgccttattcaccagtttaac

SEQ ID NO: 310133 - DNA, 341 bp, Zea mays
  unsure (1)..(341): unsure at all n locations
aacaactgacggccggaggagatanggtgttgtacgacaagcagaagcttgtgccatcgatcaatggcggcggtgacaaagatctacgtcgtgtactactcgacgtacggccacgtggcgaggctggcggaggagatcaagaagggcgccgactccgtggacggcgttgaggcaaccatctggcaggtggcggagacgctgcctgaggaggcgcttgcgaagttgccctcgccggcgaggtagctggtgccacctcttttatcttttgtctagcttttttgatgcctcttttctgttattttttttgtttttcccttttttgttttttttttatttcccct

SEQ ID NO: 310134 - DNA, 362 bp, Zea mays
ttgttaccaggctgatggggggtggagctttgactacgtgcggggggccgccccaccaccccattgggactgagcacacagacattattcgcgttccctttagaaatgagaatggcatcctccgcaagtggatctctcggtttgatgtctggccatacctggagacatacactgaggatgttttcagtgaaataatgaaagaaatgcaggccaagcctgaccttattattggcaactacagtgatggcaacctatttcacacttttttcccgcacaagttgggagtcacttagttgtaccattcgttatgccttggagaaaaccaaattccccaacctcggtcattatactttggcaaattt

SEQ ID NO: 310135 - DNA, 157 bp, Zea mays
cccagggatgaccccaagaaggctttgcattttactgccttccttgggtacaggcgctccatcacctatattgttcgtgaggttgataagccaggatccaaactccatatgaaggtaacttgtgaggcttgttaccataattgaaaccccttctttt

SEQ ID NO: 310136 - DNA, 272 bp, Zea mays
gcacctgctcctggccgttggcgcgtccgccgacgcgctcgctttctcgggcctccgcgccggcgacctcctcccgcgcgccaacgccgtcgtcgacagggaccgcgcgctccgcgtgctcctgaagtcccccgcggcgtcgccgtcgtcctcgcccaagaagtccgcctcgccgccaccgacgacggcggcagctgcggcgccggagccgaggaaggagtacccgcccgacctgacgctcccagacctgaagagcgggctcttcagcaccg

SEQ ID NO: 310137 - DNA, 459 bp, Zea mays
gctcgccgccggcggctttttcgttgtcgacgtcgacgaggagcgcgccgccagctggatggcgcggcacccgtcggcgctgggcaggttcgagcggatcgtggcggcggccgagggcaagcggatcgtcatgttcctggactacgacggcacgctgtcgcccatcgtggacgaccccgacgccgccttcatgagcgagacgatgcggatggccgtgcgtagcgtcgccaagcatttcccgacggcgatcgtgagcggccggtgccgcgacaagcatgcaggtgttcgagttcgtgaagctggcagagctctactacgccggcagccacggcatggacatcaagggcccggcggccgccaaggcctcctcttcttctcggcacgccgcaaaggcaaaaggagtagtgttccagccggccagcgagttcctgcccatgatagaggaggtgcacgagcgcc

SEQ ID NO: 310138 - DNA, 392 bp, Zea mays
cttaccagggacttagatttcttcagttacattacaaaacgcaaaatcccaagaactgtattctgccatgcatgcggctttcggctagctggaagtgccgttattgacgacggtgatgttgagtttcctgagcgtctcgagcgcgatgagctcgttggccctgtccgtggggtggtactcgtcccagaacacgtacttgctccggtccttacacagcgtggacagcggcgtgcaggtgagcgtcggccggatccggcccagcgtgcagcacggcgcgcgcgagttgttgaagccgtacatgtagggccggtcgatgatgtcctggaagtagtcgtaggcctcgccgaaccggaaagtggcgttgggcagcgacgtggacagccgctccagca

SEQ ID NO: 310139 - DNA, 354 bp, Zea mays
ggcgagcgcgagcgtggttaagtagttggcgaggtacgcctgcgccagcagcagcgcgcggtggaggagcggcaggtacgggcccatccggcgcaccagcgcggtgagcatgaagagcggcagcagcagcaccgccaccgacgccgcggaggcggccaccgccgcccaccggccgcccaggatcgggcgcacgccgtcggcgatcccggcgttcgccgcggacaggtacgccttggagtggtgcgagaggcgcgccaggtccggcatcagcgtctcctgcagccgactgggtaggtcccggaattcggagatgagatcgtccgtgccctcccccgtctccttggccaacaccac

SEQ ID NO: 310140 - DNA, 187 bp, Zea mays
ctaaatgactcccaacttacattttagtagcagcaaagtagcacattattttgcacttgaaaaacgcactttggcatataacagtcgaccataaaggaattgcaatgatccttgtggagcaaaaaaaaaacacttgccaaactgtcataggatgaaacattataacagcacagcagggattcacctg

SEQ ID NO: 310141 - DNA, 317 bp, Zea mays
aggttagcagcagtttgtcgtatcaaaatgcattgttcaattggcaaacaacaatgatacaaatacttaacccttctcagctcacacacaccgtccaacactaatgtgtactccctctgatagaggttgacttaggacaaatctaaaacaactaaatcatgtagatggagggagtacgagggccggagaggaaaggtcggttcttttttgcacatatgaatcagcagtatttagagcatatttggttcgctggctaatttaccacacttttgtgactaaatttagttcttcaattcgaacgactaaccttaagcaaa

SEQ ID NO: 310142 - DNA, 260 bp, Zea mays
ggcccattcttaaaaatgctataacacaaacagggctttgattttcaaaattccccaatttaaaatttttgtctgaattatgtaaacgattgcgacgacaaatcccttttattaactacaaaagaacccccttctttatgacaacaaaaaatttataaaagctggtggtgaataaaacttttttccttctcaaaaaagagctttttttatggggccttggcaggccccaatcatactttttttttaactccagggcccaa

SEQ ID NO: 310143 - DNA, 418 bp, Zea mays
gcgatctagaactaggaaggcgcccgggggctacacgcacctgctggtcgccatcgacaagggaccaacgaggtccagaccccatacagcaaagggccaggtgatgggtatcgtctgcagagcctgagcgggcaggtgggtctgctacgcatagaattggcacccttcgcaggtgcggacaattctagtggcgtcagccaccgctgttggccagtagaagccttgccggaaagcattcccgacaagggctcggggtgctgcgtgatggccgcaagcccccgagtgtatttcttgcaggagtttctgaccttcggcgatggagatgcatcgctggaggatgcccgaggggctccggtggtagagctcctcctcatcacccagcaagacgaatgacttgtcgcgtcacgctacccgtcga

SEQ ID NO: 310144 - DNA, 209 bp, Zea mays
aaaccaccaagatttcctgttccattaaaattagtttaggcaaacgacattaccacgagggcagaccaccccttgtcagaatttagagggggggaagaaaaaaaccgttcttttttggttttggggctcccaccacaaaaacacctgagtgggttttgggcaaacaccaccatacattttttgggaccggacaaacattgtaacaaaag

SEQ ID NO: 310145 - DNA, 297 bp, Zea mays
ggctactatcatgtgaaacatctcgttttcgtcgaacctgttctccatcctggggtcaggaaggtccccgaactcccgatgctcgatcgccttcgtcagaacggagcgggcccattcaaccagactttcatctcccaacggctgagaagcatcaacaggttttcttcctgtgatcagctccaaaagaacaaccccaaaagaatatacatcagactttgctgttaactttcctgacaatgcatactctggagccaaatacccaaatgtccccatgacacgtgtggtaacatgtgtatt

SEQ ID NO: 310146 - DNA, 423 bp, Zea mays
gaatcgaggataattcttgattatttttttctaaagaacggcaaaagctttatcgtaatttttattagacgaagaaaataaaaaaaaaaagacaaacgcattcttgattatagccttggcacagttgcatgtcgattgatactgcatctgtttccatatactagggcgcgcttgtaccacttctgtcttgggtggcaggaaggcgtccatgatttgagcagcttagaagatctggaagtcttctcaactgtggtcctccaagtggtctccccttcacgcgttttggctttatatcctgctccttagagtacccgaacttggaaaggtactcaatggcgttcagaactgcacgcttgtaggccacagatgcgtcaagaaaatgttgcttcccagactcatctacgctgatgccctcaaacacta

SEQ ID NO: 310147 - DNA, 253 bp, Zea mays
gggaagggaacatatcgattacttatttgtagtagtaagttgaacagcgcaacacatgtccatagtccatacataattggcagataacaaggaattacatgatagatccgaaccttcatggtcttctgggagccatgggacctttttttacacagcaacaaacccgcaaatcatcaagcagtctttcacagcccagaaacttaatgaactgaacgtacaaattaaacaacagataatccatgcaccgatgtac

SEQ ID NO: 310148 - DNA, 394 bp, Zea mays
gtgttggtaacatgtgcttttgtatcaaacaagtgctccggtccggcgcgttacaaggcatacacgtagaggtaggtagcaggtgaacatggatgatggatcgatccatcttattagtagtagacttagacatgctccggcgtggcggcggcatcggcctggatgacgtttcgcttgccgcgctctgagcggctgttctcggcgaacttgaggctagcgctatggagtcccttgctcttctcgtcgtcgttccactcggaggcgtagtagccctcctcgtcggcggtggcgctaggcgggaagaacatggacccccactgcgggaagtgcacgaacaccacaggtagcgtgcacgccatgatcatgatgcccatgtactctagccccctgcccg

SEQ ID NO: 310149 - DNA, 263 bp, Zea mays
aaaaagcaaccaaactaaacccatacaaatatttacatacccagatggagttttggaattcacatacatcgagccaccaaacatacttgtgtctgcataaacatcctcagtccttggacaactactccagtcctgccctatggtttcagtagaccccccgcaaataatcaagcagtctttcacagcaccaagtctataatggcatacaaatccacatgaaacaagagataatccatgcaccgatgtactacgtccaccaaggt

SEQ ID NO: 310150 - DNA, 364 bp, Zea mays
acattatacgcagtagtccatttctatcttgcgcaatttatggaacgcatattacaggacacacaaccatatgcaggtagcatagcgacaccgttcaccgggtcacgcacgatcatctgtcgacaagaagctgtagatcaccgcatctttggccccgctgccgcggcgttcagcgatgtagcggcgcagcaccccctccctgtggaagccggccttctccagcactctctgcgaccgcacgttcgccacgtccgtcaccgcctccagccgttccagccccggcaggtcgtcgaacaccgtgcccaccaccatcctgacggcggcggcggcgatgccccggccccactggtcgtgcgcgagggcg

SEQ ID NO: 310151 - DNA, 360 bp, Zea mays
caaagtcgcacctatcgatgcgcacgcgcacgcctgcctggggccgggcggcaaagctaagctcagccagagtcgatcatcacacggcgatggagccggccgccgacggcgacgacgtgcacgggcagcgacgggacggaggacaccacgcgccggtggtgtcgctccgggcgctgggcctggcggacgcggacgccttcatggcgtgggcgtcggacgaccgcgtgatgcggcacctgaagcggccgctctgcgccacccgagagcaggccgtggcgcagatcagggacaccgtgctgggccacccgtggttccgtgccgtctgcttcggcgacgtgcccgtggggcaggtgttcgtgt

SEQ ID NO: 310152 - DNA, 316 bp, Zea mays
cccgttccggtccggacactgtcccggctcgccccacgcgtgtttgttagatcgcgagcggccgaccttgcgacgtagggttttttcccaattcccccccttttcccatttctcaccaccgtcgtcgctcccccggttcaacatcaccatgagggagcgcatctcgatccacatcggccaggctggtgtccaggtcggaaacgcgtgctgggagctgtactgcctcgagcctggcttttaggctgatggccggatgccccgtgacaagacctttgggggaggtgttgatgcttttggcaccttattcagtgagact

SEQ ID NO: 310153 - DNA, 272 bp, Zea mays
ggtctgttttgatcggcgcggctatctccgcggtgaaagctttccccaattcccccccttctcccatttctcaccaccgtcgtcgaccccacggttcaacatcaccatgagggagcgcatctcgatccacatcggcgaggctggtgttcaggcctgaaacgcgtgctgggagctgaactgtctcgggcccggcatttaagctgatcgtcggatgccccgtgacaagccctttggggggggtgttgatgtttttggcacctttttcagcgaga

SEQ ID NO: 310154 - DNA, 447 bp, Zea mays
tcttttatcgtgatgctgttccactacgacggcgaggtggacggtggcgagacctgagtggtcgggccgcgcgatccacgtcggcgtacgcgaccagaccaagtggtggttcgccaagaggttcctgcacccggacctggtggcggagtacgactacgtcttcctctgggacgaggacatcgaggtggacagcttcgacccgctccggtacctgcgggtcgtgagggaggagcggctggagatctcgcagccggcgctcgaccggcggtcgcagatccaccaccggctcacggcgcgcgccgtgcggagcgggggcgtccaccggcggtactacaagacgagcgggcacggtcggtgctacggcaacagcacgggaccgccgtgcgcggggtgggtggagatgatggtgcccgtgttctcgcgcgcggcgtggcggtgcgcgttgca

SEQ ID NO: 310155 - DNA, 431 bp, Zea mays
cccgatcccgccttcaatcctctcggacccgaccctggccgccgccgccacctccctcctcccggccaactacaactttgagctccacaagacggcgcaccgcatacggtccgcggccgctcgccgcgtggcgctgcagctccccgagggcctgctcctcttcgcgctcccactgtcgcacctcctcgcgccctacctcgagcccggcgccgacaacgacgtcctcgtcctcgccgacgccacctacggggcctgctgcctcgctgaccgccccgccagggcgctcgccgccgacctcctcgtccactacggccactcctgcctcgtccccgtcacggcctcactcctcccggtgctctacgtcttcgtcgagatccgcgtggacgctcgccgcctcgtcgtcgtcgtcagagccgtcttcccggacccag

SEQ ID NO: 310156 - DNA, 433 bp, Zea mays
gctgtctgatccaaaacacacacacacacaaaacacgcaatgggcgccatgactctgccgcccggcttccgcttccacccgaccgacgacgagctcgtgggctactacctcaagaggaaggtggacaacctcaagatcgatctcgaggtcatccccgtcgtccatctctacaaatccgagccatgggagctaccagagaagtcgcttctgccgaggcgtgacctggagtggttcttcttctgcccgcgcgaccgcaagtacccgaacgggtcgcgaaccaaccgcgccacgtccacggggtactggaaggccacgggcaaggaccgccgcatcgcctgcgacggcggcgtctacggtctccgcaagacgctcgtcttctaccgcggtcgcgccccgggcggcgagcgcaccgcctgggtcatgcacgagtacc

SEQ ID NO: 310157 - DNA, 287 bp, Zea mays
aatggtatggatccaaatttccctaatataaatggcaacaataataatttacactaagtaccagcggcaacaagtttgagtagaccaatgtcagatactagttcttagcgtgatactcccccgtttctttttagttgtcgctggatagttcaattttgcactattcagcgacaactaaaacgaaacggagggaatatttcattacgattggacttatacaaacatagtttagtgttatcagttacctatcaaattataaatacttaaccaaacaccaccatgtcaat

SEQ ID NO: 310158 - DNA, 480 bp, Zea mays
ggccgcctcaccatcggtgctcgccgcgctgtccgagccggcgaacgcgctctcgctgcccacctgggccgtccacgtctccagcgtcgccgagtgggtgacggcgatgtggctggtttgggactacggcgagaagacggggctcaagggttggaaaggcctctcgtgggggatggttccacttctaggtggagcaatgtgtgcttgcacgtggcatttcttctacaattcagagtctcttgaagtaagatatttcctttgggttaaaagtgcagtttcgtgtttgttgtttgctgatatgattatcaaacgtatctgtccccaatttttatgttcttgattgtgagatgccattgtgttcctgctatgaatgaaacattgattagtgtagaccagcgactattttcagatattcttttcgctgagatccttatgcagtcatgttttactacttcttatgatgacataattattacacat

SEQ ID NO: 310159 - DNA, 387 bp, Zea mays
acgaggaggcgcatgcggtcgtcccgcccgacgaagaccggcggcagacgctgcagcacggcgcggtacgccttggtgggccgcgccacctcgaaggcggaccggaagtcgacgtccaccagcacgcgctcgcgcccggcgcgctccgacgcggccgggaggagcacgtccaggtacgcgtggtccccggcggggtgggacggcgacctgtcccagcgggagaggcagaccgcggcgtcgtggcccgccgcgcggagggaccccgccagcaggcggagcaggtcgcgcttgcgcgcccccgacgcgcggtggcgctccaccagcgtcgacacgtcggccagcaggttgcgctcccggaggctggcgcagtggacgagccccttgatt

SEQ ID NO: 310160 - DNA, 372 bp, Zea mays
agtacctcctacgccacataatcacacggtcaaaacgttcttctcagctccgtctgttgttggcgttgctgcagcagctcacgcgacctccgcgaccggcccagcatgtccagcatcgccggcgtcatgtacgacatcgtgatgcccgacgtctccaacgccccactgcgcacctgcgccgattcgccgccccgagtcgcttctgccacgccaccggacatcacctgccgcgacgtggcgcgctggtgggcgtgcgagctcagcccggcgagcacatacgcgcgcccggacaactcgtactgttgccggctcgccacgcgcgcgcgcatctcccgcagctcgcgcgacagagccaggcacgtggagtccccc

SEQ ID NO: 310161 - DNA, 284 bp, Zea mays
ggaaaaataggtgatctataattcaaaacactacaatggttttgactattaagcacacagcacttgcaacagaatgaaatatactacatcgaacttcgatgaatagcattgcaaatcaaaacaggatgatttgaacaacaatcatggccaatagggggctacgaacaatttatcacaaaatacaaaatggaaacacacagcagcagcacgcaatggagtggacccatacagagtatactcaaaataactcaaccattaagcaccagcgaactaattattaaccg

SEQ ID NO: 310162 - DNA, 267 bp, Zea mays
  unsure (1)..(267): unsure at all n locations
gctctatagaattttttttttttcattcttcttttggtttttagccttttcttcttctattattttttnnnnnnccacagaggacacaacaggtccattaaaccaacgaagccacaaccacgatttatgacacacaaaccactgatgtttattagacgacgacttccatattgaggtacaccagagggcaccagacgacgcagattcccaggtacagcagcagcttaaatgaaccatggtttactgaccaccgcggaggcggagcac

SEQ ID NO: 310163 - DNA, 449 bp, Zea mays
gctccggttcctgacggaggaggcgggcgtcccggaggcggagctccagcgcgtgctccggcggcgcccgcgcctgctcgtgtgccccgtggcggcgcggctgcggcccacgctctacttcctgcgcgcgctcggcgtgcccgacctgcaccgccgcgccgacctgctgtccttctccgtggaggacaagctgctgccgcggatcgagttcctcgagtcgctaggcctgcccgcgcgcgccgctcgctccatggcgcgccgcttccccgcgctcttcggctacggcgtggacgggaacatgcggcccaaggcggagtacctcctgggcgtgggcgccatgggccgccgcgccgacgagctgtacgagttccccgagtacttctcctacgcgctggccgcgcgcatcgtgccgcgccacgaggcgtgcgccgcgagcggggtcgcgatgc

SEQ ID NO: 310164 - DNA, 386 bp, Zea mays
gcatgacgtattcctgtattagaaaaaccacggacagggcacacgcattggctttcagccttcgtccacagacaactcttcctcagacgacgaccacactgcaaccattgacacacacaacgtccggaagcgtgtcacgtccacaacagaaggccgcatcagtcactcatcactcatcaggggtcctccgcaacagaaggctgcacgaaccgtctccagtaccagtggcgctcccagatggcgcccatggcctcgagcggtacccccttggtctccggcaggaacgccacgacgaaggcggtcatgacggctacccaggccgcgtagtagatgaaggtggcgtacttgagcgtgcacagcatggagaggaacgtctgcgtgagcag

SEQ ID NO: 310165 - DNA, 300 bp, Zea mays
ggcagccccaaaaaaccccattttttccttaaaattaacttaaaaaaaagcctggcgggggtaaaaaaatccattgatccccaatccatgctgtttgaagcatgggtttgctaaaacccgggatgaacccagcattaacaactgacccaaagggacctttcaattaaaaacccaaatgggcaacaacaaaccccacccgaacgaaaataacccctttggactagggaaaacatcccgccccggggggggggttacaaaccggccaaacagaatttatcctttttttaaaaaatttggaag

SEQ ID NO: 310166 - DNA, 411 bp, Zea mays
gcttcgctaaaccggagatgataagagagagagagaaaatcaatgacaccaaactgccatgtcctttgtacaaatcaattatgctcactccccctccccgccaaacaagctgattctttaaccctgttttactcacaagaccatgtagatacaactcatgtacagcagaacgtcagggcagctcacacgaaaacagccaaccttgtcgcgtggatcagcacatctattgacagcatccactgccgttctttgcatgactttcctgcttctgtttcaggatgttcctcttgacaaccgaagaagacccttcctccaggagactagggacctcaaggatcttcaatgcaagttcttcaaaacatttctcaacattttctcgtgtttttgcactgctctcaagaaacagacaac

SEQ ID NO: 310167 - DNA, 376 bp, Zea mays
aagaaagatgagatctatttgcttctgcacaatagccctcacgaacctcatcttgtcagccattcccattcctcctgacagttcatcaaagaagggactaatgcttttctgatgcatgcaagttccaattttggagacagggactgccgtgggaatcatcaggtctcatgtttcgaacaagtattgactcatgagctatgaattctcggggaagacggtctggatgaacttcaagaaacgctccgagtaaaaccgggggttgacggcagagatggagacagagtcatattgcatggacttgacagcgtgctcgattttctttgacttgttgtactcttgcaatatgtcaatgatgcccaggtaaagcacgacatcg

SEQ ID NO: 310168 - DNA, 440 bp, Zea mays
aaggctatgaccagtatatctgtatatatctgtgcaaaatactatagaaacactgtctgtaattgtatagtgtggtttcaaatgagagatgagaaaaagtaagctgctcgagataggctaaatgtaaatttctacgtctttcacaagatcagatatcaaataggagtatcaaagtacttggaagagttgggtagttcgttgtagcatgcttgtcgaaattgagcaaaagatgtgggcactagagtttcttgagcatgagatgcgccccgtgttccggctgcagagtggacaccgggaacggcgcgtgagtgtaggactgcgagagggcgaacgagaagtgctgcaggatgctgctgagcgccatcttggcctcgaccagcgcgaagttctggccgacgcagatccgtggaccccagccgaacgggaagaacgccggcgag

SEQ ID NO: 310169 - DNA, 386 bp, Zea mays
ggtacgcgtcgtccattatctctgcggaagtcgccgatgctcttcccctcgggcgtcctcgccgggtccacggtcagctcgccgtggatgcgcaggccggcgatcaactcggggaagcagtgcacgcggcggtcggcggcgaagtcgatcggcgggaacgccgacagctgcgacaccacgtcgccgtacttggtcatccaccagtcgtggtactcgaggatcaccagcaccacgcgccgccggaggtggtgcgccgtcacgaacagcggcaggatgccgtcgttgaactcgtggtacacgttgcccgtgtacccgccggtggagaagagcacggccggcgcgtcgtgccgcacgtcgcaccgcgcggcgtcgccggggagcacgcg

SEQ ID NO: 310170 - DNA, 501 bp, Zea mays
ggctaggttctaattttggaatatatggatgggattcgcttaaatgataatgattcattggaagcatatggtgctgacacgcataaactggtcgaagagagtacccgtgcatacgctcatcaaatatacattgatggctgctttaacggcgaccctcatcctggcaattttcttgtgagcaaggaacctccacataaaccgattctccttgattttgggctcactaagcgcatatctgaatctatgaggcaagcactagcaaaaatgtttttgtcatgtgcagagggagatcacgtggcactgctgtcagcattttcaaagatggggcttaaactgcgggttgacatgcctcagcaggctatggatattgccacagtattctttcgtcagtcaaccacagcaagtgaagcaaaggagaacataaaaacacttaatgaccaaagagagagaaatgtcaaagctctttaagaaagatgaaatgaacaagaggaggttcaacgc

SEQ ID NO: 310171 - DNA, 409 bp, Zea mays
gtgggcgggatccagccttcttcccggcgcttgtgattatcctagcttgtcgggaccaaccgggcctatctggaccgcagcgtggtcatcgtcgttggtctgtacgacgagtgcgacttcgctgtcaagtggcacgtgcagagctacctacggcccggggacgcctttgtgctggtccaggtgcgctccacttccgggctgtacggcgccgactggggctccatgccggtatacggcgcatgacgaggactacgctggcgaggacgccgacggcggcgccgagggcggtgcctatgtggaggagctgtttatgatacgggtggaggactacggcgccttaacctgcaccaaagcgcaggacctcgcgcgaccgatggtggacgaccagatacagtataagatccacgta

SEQ ID NO: 310172 - DNA, 140 bp, Zea mays
gccgaggacgcggagtacattctttacgaccggctgcggagcgcatccgggaggagacacacggtggccggcaacatggccacccccggggagcgcctgcagacattgctcagctggagcgacccaagggcaacgtgcct

SEQ ID NO: 310173 - DNA, 454 bp, Zea mays
  unsure (1)..(454): unsure at all n locations
agatcgcgagcggccgcccttttttttttttttgttttttttttaggaacaaacgcaggcaacttttattcgaaacggcatgggtactcctctcaactctgtaaaaaaaatgaccgtacatggcacacatactgtattcgtagtctatatatatgtatatggtacatggacacttggaacgacagctcttggtggggccttggggttccatccatccaggtccaggccaggccgccccttctcaccatcttagcttggccgggaagtacttgtcgattagggacatgtagtagggcttcacctcctccacgtcgatcctgctgttgctcttgctgtacaggtcatacttgttgaacacatgcagccacttgaggttctccttggcctcatcgcccataggtgtgtgtaggctccatgcttgtgcanggggtagaacgagtggtatttgatgatg

SEQ ID NO: 310174 - DNA, 470 bp, Zea mays
actagttctagatcgcgagcggccgctcgccccacgcgtccggtgagatgctgaatcgtcaggtcgtgaagtctgattcagcgactatcaagattccagagctcgactttgagatccctccagaagctcaacgtggaacactttctactgtggaagggattattatgcgagctgtggatgagctgcaggctcttcaagatgaacggaagaaagtggatcctcagaaggccgaagctatcgatcaatttttactgaagttgagatctcttgggtcaggagaggctgcattcacttttattcttgatgatcctgcaggaaacagctttattgagaatccgcatgctccgttattagatcctttactatctgtgagattctacgaaagaactcgtgaacaacaagcagcacttggctttcttgctgaaccaccaaaagaacaacctggagaggctgtattgcctgctcagcag

SEQ ID NO: 310175 - DNA, 466 bp, Zea mays
  unsure (1)..(466): unsure at all n locations
gcggcagcggatgcggcgggtaaaacacacccatattcatgaccacggtcgtatctgtgaatctgtctgaacgcgtatgtgtatatgacccatccgtcctcgatcgtgcagctgcaagatgttccctgacgtggagaccgccggcgtcgccagcgtgaagcccacggtcctcgccgcccccgccaccaaggcgagcgccggcgggttcgaggcggccgccgagggcggcggctgcgactgcaacacctgcaactgcggcaccagctgcggctgctcctgctgcagctgcaactgagccacccgcgatgacgagacaaccacccggcctcccccccacccatcgtactacaactatgtagcggcgtctaataagatccctccacggccacgncattgttccttcctgtcgctgcatggttgcctcnctcgtgcccgggctaatatcatatctatgtgtttcagcatt

SEQ ID NO: 310176 - DNA, 313 bp, Zea mays
aaattactgaagcatgagcgcggagctgaagagggactacgagatcggcgaggagatcgggcgcggccgcttcggggtggtccaccgctgcacgtcccgcgccaccggggaggcctacgccgtcaagtccgtggaccggtcgcggctgggcgacgacctggaccgcgagctcgcgcagctggagccgaagctggcacagctcgccggcgcgggcaacccgggcgtggtgcaggtgcacgcggcgtacgaggacgaggcgtggacgcacgtggtcatggacctgtgcccgggcccggacctggagtgggtgggg

SEQ ID NO: 310177 - DNA, 356 bp, Zea mays
ggttaaatcaatttggattcaaaccaacattattattgttcttctcgagattcaagatgcctagatgtgttatcactgactgcaagcaatggaacacattttatctgtttacaccggactaaccgtccaagtgaccactggtacaccgtacaccctcaagcccttgccatccgtccgtacacgctacaacggcatggcagcgcaccgctcaactgctacgagtttgacgcccttcttgaaattgagcacgatcccgaactggagctccggcggcgactccatccgtggcgaccgccggaagaggaaacgccggtacaggtgcaacatagagagcttcacctcctgcagcgcgaacc

SEQ ID NO: 310178 - DNA, 486 bp, Zea mays
cccacgtgtacagcaccctatacagatgaggaagaggaggagggcaggatgtcggagcgcaagttgcagcactccatgcacggcttcctcaggtagctttccaggaagcgctgctgccgggaccggggataggtgaaggaataccctagggatgacggccagaagactggctatcttactgacttggttggctacacggatagcgtgactgacattgaccgggaggttgacaagctaggatccaaagtacataggaaggaaacttgcgaggctgataccattattgaagccattgctgttgtcattgctgggctcgaggcatatgtgaagactcgtagaggcctccgtacactggactatgattggacccaacatcttagcgaagaagtgatgataaaagttctacaagaactggagcaagagcatgacaaaggctgtcacaaagtatgctattgaatctgaaaatgatgctggtcagatggaaat

SEQ ID NO: 310179 - DNA, 470 bp, Zea mays
caacaaacaatttcagcgaaaagcttggcgaaggtgggtttggcccagttttcaaggggatactacctgacggccaagagatcgctattaagaggctatctaagacctccgcgcagggactggaggagttcaagaacgaggtgacggtgctatccaagctgcagcaccggaacttggtgaggcttttcggttgttgtgttcatggagaggagaagatgatggtgtacgaatacatgcccaacaagagtctggactcatttattttcaacgaaagtaagaggctcgtgttaggctggagtctgcgatcaagatcattcagggaatcgggagagggttactgtacctccaccaggattccaggctgaaaattattcacagggatctcaaggcgagcaacgttctgctagacgatgatttcagctcaagatctcggactctggcatggtaggattttcggtgacaccagcttc

SEQ ID NO: 310180 - DNA, 288 bp, Zea mays
aaccaacataacacatatatttgtgttttattaaaacaaagttccaagagctgaaaatcatgtgctatactccacgcatgccaacaaccgaagacacgtacgggcatcaagcgccagtatacaggcgagctggcaacctgggctcggccacgaccatgagcgggaatttacgcggtaccgcgagcttgaaggcctcatccatgctcagctcctctgccgtcacgccgtccggaagcctccactcgaagccgtgtagcagattggcaagactcaaagccatcaccttta

SEQ ID NO: 310181 - DNA, 461 bp, Zea mays
tttcaatatatatccggctctctctgtgtgcgtgctctaactgcagcggagcctcacagttgttcgtgtgctgtgtatttgtcactggtggtgctgtgcagaccaagctactgcgggagggagaagggtgtgtgccggcccgccgccaagcactgctacccggccggcggccatggaggtgagctccgtggagttcggtcatcacgcggcggccgtctcaaagtgctttgacgacgacggtcgcctcaagcgcacagggacgatgtggacggcgagcgcgcacattatcacggccgtgatagggtccggggtgctgtcgctcgcgtgggccatcgcgcagctcggctgggtggcaggccccaccgtcatgctgctcttctccttcgtaactactacacattggccctactcgccgactgctaccgcttcggcgacgcctgcaccggcagcgcactacacgt

SEQ ID NO: 310182 - DNA, 359 bp, Zea mays
tttttttttttttttttttttttttttttttttttttttttttttttttttttttttttttttttaaaggaaaggggctccagggcccctacgttttttattcaaggggcaacatcccatccaggaaacaaagggagccccacccctgattggacacacaccaccaccaccaaggttccttttaaaccgacgcaacgcaaattactaacagtccattagactactaaaaaagcgccccccggatcaatgatggaacaagaccttgacaggggaggaaaattaaacttttgaagcaaagagcagcaacgaacgcccgccgcctaaaaaaagcaaactttttttttcccctccgggaaggg

SEQ ID NO: 310183 - DNA, 371 bp, Zea mays
  unsure (1)..(371): unsure at all n locations
atacaattgttccattttttattgatatatctagaaagaatgacagaaagtttacaaagcagtcagttatctcgtgcatgagggttttcaaaacctgtagaagtgcgggtgaatgctgtactgctacaaaatcgtatgtctataaaatcaagcaaacagttaattttgcatgtcagctctatttctcattcatcaggcgctcagccagtagcaagtcttcaggagtagtgaccttaatgtttgtataggagccttccgtgatatagacagggtgttttagatattctacaatggatacatcatcagtgacttcatggttatncccgtttaacaagctcaaaaccatctttgagtaaatttggcttcatgac

SEQ ID NO: 310184 - DNA, 441 bp, Zea mays
gcccccaagggacagaagacgcactgggtcatgcacgagtaccgcctcgagggcgcctacgcctaccatttcctccccagctccacaagggacgagtgggtgatcgcgagggtgttccagaagcccggcgaggtcccacctgcagcccgcaagcaccgcctcggcgcccttagcagcactaccggcaccgccgcgggcgattcctgcttctcggactctacctcggcctccatcggcggcgcgtcgtcgtcatccacgcctggcccgctgttcgcgtcggcggccgccgccgtggccaatgccggcgccgccgacggcgacaccagctcctactgcggcggcgctgccaaccatggcaacctggtcaccggccgtgagctcgtgccctgcttctccactgccaccattaacggccccctagttgccgccgcgctcggcatc

SEQ ID NO: 310185 - DNA, 413 bp, Zea mays
gaggtgccaaggcggcggcggtcgttcggtctgcgatatacgatggcggcgccttactacggaggtcctccggcggcgccggcccccgtggcggtggtgtccccgcagttctgtgcgccgtacgtggtgcccctgacggtgaccaagaaggccatcagcctctccgacggcgacttcaccgtcaccgacgccaacggcgccaccgtgctgcaggtcaagggcgccgtcttcagtatccgccaccgccgcgtcctcctcgacgccgccggccagtccatcctcaccatgctggagaaggtattcagcatgcacaacagatgggaggtgttcagaggggacagctcgaacgagagcgacctgctcttcaccgcgaagaaatcctcgatattccagctgaagacggagatggacat

SEQ ID NO: 310186 - DNA, 159 bp, Zea mays
attactgtcgatgattatcgccgcatcgaggagctccgcgcgcagtggggcagtcggtgggcgcgcatcgtcaggagcctgcccgggcgcaccgacaacgagatcaagaacttctggaggacgcggaccaggtcgaaggcgctcgaggagaggagggct

SEQ ID NO: 310187 - DNA, 483 bp, Zea mays
gcggacaccaccttctatctttgtattttatatttaaggggccaaaaaaaatcaaattctaaaattacatcgttccggcaatcgtgtgcaagcaccaccaaacaagaaactaatgagacatcagcatcagcgacacccatgcatagcatcgctattgtgttgcttctgatttattccaacaatgttacacggatccagacacagaatctatgcggcctgcatatcttcgtccacactgcattcaccgaggtacaccttaacactgcgaggagagccgcagctgccttctgctataagtgctctgtcgttagcagccatgtgctggattattttgtagatcatctcaatatcttcagggcaatggcagcgatctgcaatttcatctagagtcaatggctcagtagggttctcgcagctgggagacaacaagtacatgaatcaacaagcaatccaataactccaatataacattaatgagtgaga

SEQ ID NO: 310188 - DNA, 214 bp, Zea mays
ggaaaacagttttcaaactccaattataaacatagaacgctcaacgaagcggtttacataggcggggaaactcaaaccctgtaaacaacaaagaacttgtttatttttacggacaaacaaacatagggaaggggcttggaaatcgggatactacattttggcccccgggggtacaaaaaactgggggggctaggggttacacttccacttggat

SEQ ID NO: 310189 - DNA, 408 bp, Zea mays
atcatccacggcgagggctcgtgggaggtgacactgtaccagaagctcgacatcaccatggacgacgtgctccgagggctgacgtccgcgaacatgatcggcaccggcagctcaggggccgtgtacaaggtggacacccccaacggctacaccctcgccgtgaagaagatgtggtcgtcggacgaggtgacgtcggcggcgttccgcagcgagatcgcggcgctgggctccatccgccaccgcaacatcgtgcgcctcctcgggtgggccgcgaacggcggcacgaggctgctcttctacagctacctccccaacggcagcctgagcggcctcctgcacggcggccgcgccgccaagggctcgcccgcggacgagtggggcgcgcgctacgagatcgcgctcggcgtc

SEQ ID NO: 310190 - DNA, 262 bp, Zea mays
aaaaaacaaacaacattttttcatgattaaaccatttgcgggggccccaaattttgggggaacgagaacccaccggggccatgaaacccgcttagtctcgattcacggcacaaaccatacagaattctttggaaggccgccccctccaggggcaaggggagagaccctaaaaaacccagatcccgggggtgcttcaacgacgggggggttaaaaacccccccgaaaaccggccccccgggggggggggccccccttttggaa

SEQ ID NO: 310191 - DNA, 377 bp, Zea mays
cacttgttacactgactttattaccgttattgccgctatatgggccacaagaatacaacaaaaaatgagaaatcagcctatcctcatgcgggccagctgcttgaagctgacgggcgaggtgtactgggccgggccatcatagtaggcctgcgcgcccagcatggcggcccgctgcgacgggtgcacggagtcccagaagacgtagcggtcacggtcggcgcagagcgtggccgcgggcgtgcagtcgccctgcgcgcccagccgtccgctcccgcagcacgcgctgtcggcgctcgcgaaccccagccccagcgggtcggccagcgacgcctgcgtgaacccgaagctgtcggccacggagtaggccagccccggca

SEQ ID NO: 310192 - DNA, 405 bp, Zea mays
ccaaaaaattaagaataattttaacttatttgggattcaaactcatctaatctcactcaatacacgtagattaagagctaaccgaacaagcccaagttgagtactcaaacgatgcaaaccattgccatgccctcaagggcatatgatccgaagctgaagaagcaacagagcaaagcagcaccgaatgttaattgcttgtcttcatgcgctgacactctcatctcatcggcaaggagtgagcaactgctgccatgagcatcggacggaccaccgtctgcacgtgacactgtgttacaatttcgtaacacggaatcttcttaacacatgagagagagaaaaaaagaatgggatggtacagcacccgccaaaagaatggaatggccgtggatttggaagagcacaaca

SEQ ID NO: 310193 - DNA, 379 bp, Zea mays
acattcaattaatagaaaacaaaaggtgctgcaaaagaacatcgtactggctgtggtttacactttcatcactcgaacaatcgcaaactcaaatcgtgataatatgcagttggttccgtggctgaaacataaacggcacacgtacgtgcaccgcgcgccacaccgggacaggctcatcagcatcgcgggaggtccggcggaggcgccggcagcgttgtgttcggcccgtcctacacctcgaacaccatcgccaggccgatggaaaggtgagcgtcgatgtggcagtgcatgaaccacattcctgggttatccgctacgaagcggatcacggcccacccgccggtcggcaccgcgatggtgttccgctcctgcgggttga

SEQ ID NO: 310194 - DNA, 440 bp, Zea mays
ataaaccagtttattaaaaactaggtgcttctaaatatgcccttagtagcttccaaccgtaccaacaagaatacacttggagccttggaggaactcagtactgttccctgaaaactcaatcaaaatcacaaatgaacagtcaatgattgcgaagtgctaggaaattatgcagcatcaaaatcatttgaaggctacgatttcctccctcaaacgtgtgatgaggccatcaacgctcattgtggccaggtcggcattatctcttaccctaacgcagacatttccagtctcggcctcctgtgcgcctacgacaagaatgtagttgaattgagctacctgggcttcccgtaccttcttttgtattgtcctgtcactcacatcaatatcaacatggaaatcagcttcatgtagcatggcaagaacctgtttcgcatattccactg

SEQ ID NO: 310195 - DNA, 364 bp, Zea mays
ctaccgaatcaatgttcattcagaatgagaaggaaacgtggtgcacaggttttctgaattctgaacgccggaggacaggggcgagtattttagggccaatgaagaaacattctttcctagaataactacatgggagcactaataagggcatacttccattgagcactctgtgctgcacttcagtgtgtgtgacaacaagaacataacctccccaaccgctgaggcagtcgagatcaacagatgcctgcaatgcttgcgagattgtctcgaaaagttcttcgggttccatggttggcttatacatggactcacaagcaccataaagtgactctgaagcagtaccggagaccacaaaaacttttgc

SEQ ID NO: 310196 - DNA, 308 bp, Zea mays
gtggtggcctgcgtcgtttctacttcgcggaggggccggccagcagcagcagggcgggggcggacgggtacaagtgcgtgctcaactccaaggcgtccgaggacgcgcaggccaacctggcgcggtgggagcccgcgcacggccgcttcggattccgccacccctacggacagtacgccagggtgggcgcggcgatgcgcgcgtgcgcctactgcgtggaggccctgtgcagctgtgcgggcgccgaggcgcaggctcccccgtacgtgaagcggatcctacgagacacgtgcgccacggtggctgtg

SEQ ID NO: 310197 - DNA, 509 bp, Zea mays
ctccaaccacgtcgcgttcggcgagcccacggcgctgctcgccggcgacgcgctgctggcgctcgctttcgagcacgtcgcccgcggcagcgcgggcgccggcgtccccgcggaccgcgctctccgcgccgtcgtggagctcgggagcgtagctggcgtcggcggcatcgccgcggggcaggtcgccgacatggcgagcgagggagccccctccggctccgtgagcctgggcgcgctggagtacatccatgtgcacaagactgcgcggctcgtggaggccgcggccgtgtcgggcgccgtcgtcgggggcgggggcgacggcgaggtcgagcgcgtccgtcggtacgcgcacttcttagggctcctgggccaggtggtggacgacgttctggacgtgacgggcacgtcggagcagctcgggaagacggcgggcaaggacgttgccgccggcaaggccacgtacccacggctgatgggcttaaagggagcgcgcgcatacatgggcgagc

SEQ ID NO: 310198 - DNA, 182 bp, Zea mays
gcagctgcacgtgcattaattcgataactggatacacatacatattgaggtagcaagggtccatgtatgtgatagcgcaataataataataataatacatccactagtcttggcttgaattgatacaaaggcggacacggtcacgggctatacatatatatatggagtatgcccatgcgtgg

SEQ ID NO: 310199 - DNA, 185 bp, Zea mays
agggaagcttcaaaagacatgcctttttattggtttagattagaaaaaaagggtaatccacaagccccaacccacattgggaaagaaaacgaaaatcccaaaaaccctttcccctggtttatctaaaatagactaaaagcttccaacttggtcattcaccagttacagaaacccaacccccagtt

SEQ ID NO: 310200 - DNA, 510 bp, Zea mays
  unsure (1)..(510): unsure at all n locations
gtccaacaccaccacgttactccaaagcctcgtcgccgaagtgtcgcagtggcgggaaatccacctgggcggcggcgcggcggcggcgcatggcgtccggccgagcaccgtcgtggcgtgggcgctctccttcctggccgcgtccgtgtcgagcgccggcggcgtgggcggcgggtcgctgttcctgcccatcctgaacctggtggcggggctgagcctgaagcgcgccactgcctactcgtccttcatggtcaccggcggcgcggcctcgaacgtgctctacaacctcgcctgcacgggcggcggcgggagagggaggctgatcgactacgacatcgcgctactgttccagccgtgcctgctcctgggcgtgagcatncgggtggtgtgcaacgtcatgttcccggagtggctcatcaccctgctcttctccctgttcctcgccttctgcacagccaagacgtgccgcgcggnggtcaagatctggcggtccgagagcagcgggtgcgg

SEQ ID NO: 310201 - DNA, 511 bp, Zea mays
gggattcccggagattctggtgggctacctcggcctcatgctgctccttgacgagcggcaggaggtgctcatgctcgtcaccaactccctcaaacatgcttaatttgggggcagagatctcaaccacacgaaccagttcatcgtgggccttgcattgtgtgctcttgggaacatctgctctgctgaaatggcgcgggatctttcacctgaagtggagaggttgatgcgcagtagggaagtcaatacaaagaaaaaggctgctttgtgctctataaggattgtcaggaaagtgccagatttggcagagaacttcatgggcctggctgcatcattgttgaaggagaaacaccatggggtcctcatatctgcaattcagctctgcacagaactatgcaaagcaagcaaagattctctagagtacctgaggaagaactgcatcgaaggtttggctcgcatactgagagatgtgtccaataggtcatatgctccggagtatgatgtttctggcatt

SEQ ID NO: 310202 - DNA, 144 bp, Zea mays
  unsure (1)..(144): unsure at all n locations
agtcaccaccatcggctttaggccgaaatcagacaggtgcggctcgaagtcggcgtcgaagagaatgttctgcggcttgacgtcgccgtgcaccaccccggactggtgcaggaacgcangaccgcgcgagacgccgagcgcgat

SEQ ID NO: 310203 - DNA, 298 bp, Zea mays
gaggaaaactacactagacaatgacaactgtgcaaagggagcactaccaaggagcatttagagttcatggccaaaagatgacgagaagctgacccaaaactgtactaaaaacgaacttggaaaccaagggcgtgttcgggtggctacaagccgacactgttgcagctgtttggactgctgcagctgcaatccatagagagaaaaatactgtagaagccgcaaccgcagctggattgtagccgtagcaagccgtagagaacaagctgcaaatacaaaaaaaactgcaatctccctgacg

SEQ ID NO: 310204 - DNA, 236 bp, Zea mays
gcggccttttttttttttttttttgttttgttggcggcaccaagaagcaccatggtttccttaagattaacttagagtaaagcctgacgggggtaacagtattcatggatccgcagtgcatgctggttgatgcatgggtctgctgaaaccgaggatgaacacagcactaacaactgccacagtgcgaccttgcagtcaaaaacacaaatgggcaacaacaaacacgacacgaacga

SEQ ID NO: 310205 - DNA, 199 bp, Zea mays
caaaaaacaaaaaaaacactttacaaatccagattgctggtgagactggcaccaaaccaaattttggcgttctacgagtaatactacagtactaaacgtagcaattcaatcttccattaaaaactgaccatccatcgttttatcataaagcccaaaacagaacggcaagaaggcggaaagacaacaactagtaaaggaa

SEQ ID NO: 310206 - DNA, 440 bp, Zea mays
gcgcgctcgggcgcaggatgaggggccgccgccgccgccgctgggcgacgtgtcatacgcgctggtgagcgacggcctccccgtgggcttcgaccggtcgctcaaccacgacgacttcatgggcgctctgttccacgcgctgcccgcgcacgtcgagcagctgctccgccgcgtcgtcgtcgaacccagagccacgttcctcgtcgccgacaccttcttcgtgtggcccgccactctggccaggcgcctcggcatcgcgtatgtgtcgttctggaccgagccggcgctcatcttcaacctctactaccacatcgacttgctcacccagaacggacactttagatgcaacgagcctcgcaaggacacgatcacctacatcccgggcgtggcggccatcgagccgagcgagctcatgtcgtacctgcaggagacggacacca

SEQ ID NO: 310207 - DNA, 329 bp, Zea mays
tccttttttttttttttttttactacagcttcaagcacaggtcgttaatttagcactgccctgcccgtcacgatcgacgtcacgtcacgaacgatgatacatactgtgtactgttcagtatttacatataccaacatttattagcctgtgagatcggctacagctacactacaccagcgtggagcacgccgacgtgtcggggtcgaacagcgccgggagcaggtacttcctcccgcgcgcaccgtgcgcgttgtagctggcgcccgtggcccggtccacgagcagctgcccggcgtacccggggtacgcgccgctgccgtacacgcccg

SEQ ID NO: 310208 - DNA, 407 bp, Zea mays
atcttccaccgcgacgtcaagtccagcaacatcttgctcgacgccgcgctgcgccccaagctggccgacttcggcctgtcccgcgccgtggaccgcctggaggccgcgcgctcgcacgtgtccaccgcgccgcagggcacacccgggtacgtggacccggagtaccaccagaacttccacctctccgacaagagcgacgtgtacagcttcggcgtcgtgctgctagagctcgtcaccgctatgaaggtcgtcgacttcgaccgcccgcccgccgaggtcaacctcgcctccctcgcgctcgaccgcatcggcaaggggccaggtcgccgagatcgtcgacccggccctccttggcgccggcgaggactgggtcatgggctccgtccgccacgtcagcgagctagcct

SEQ ID NO: 310209 - DNA, 401 bp, Zea mays
ccacaaacactttcctttgagcattacatatctttttgaactaatttagttgtccattactattttatttaatattttgtatgccgacgcaacgcacgggcacctacctaatgactttagaatatgtttagtccctagaaccaaacatgtagggactaaagtttagtcctaggactaaaatttagtcctaggactaattgaaaccaaacatggcatcagtagtacaaaaaatcgttggtactatgatcaggggcctcatccaatagaggagacttggtcagtcctacttctacggttctaccttcttgcattgcgttgcgtcgtcttatcagttatcacagccacagcagtagcacatccccaccacgggcgaggagccggggacgtacgggtggaccacg

SEQ ID NO: 310210 - DNA, 340 bp, Zea mays
ggaaccataaatagaatatattttacattcaaagttacaaagttttacacatgtcatgttccaagtttttttacaatagcatttaatcttccctaagaactacttctgcagcttcgtttagtagctgattgacaacttcgtccatgatggcttcgaccatttgtctaatttcgtcgccccccttcgggggagggtccgcaaatgcctcagggggttttattttggcaccacaataagttcgtcaccacgcggtactccatcatctccatgaccacctgaaccagcaacaacttttgggtcatcccgtaaccaatcttgtgcacacactaatccctgaacc

SEQ ID NO: 310211 - DNA, 433 bp, Zea mays
aagggcatcctgaaggcgcatgcggcgtcgagcctggcgcggtcgccgagcaggccgcgcgtgtccatcaacgtccaggacaacgagatctccctggagcggacccggctgtggcgcggcgtcggcggcaacggcaagaggcagcagcagcagcagcagcagcaggcggtgccgcggaggcggagcgtggaggaggtgctgcgcgaggccggcgccgacatcatcgggctgcagaacgtgcgcgccgaggaggagcgcgggatgcggccgctgtcggagctggccgagggcctgggcatgcgctacgtgttcgccgagagctgggcgccccagtacggcaacgccgtgctctcccgctggcccatcaagcgctggaaggcgcaccgcgtcgccgaccagtcggacttccggaacgtgctgcgcgtgacgatcg

SEQ ID NO: 310212 - DNA, 536 bp, Zea mays
gctgcgggacctgcgcctgggcctgccggacgagagcgtcgagccgctcgtgcccaagaagaaggccggcgtcatgtccgtgcaggtgaccaagttcaagtgcggcggcgccgtggttgggtgcaccttcgaccaccgcgtgtgcgacgcctactcgttcaacatgttcctcgtcgcgtgggccgcagccgccagcggcagctcagcgcctccggccccgtgcttccaccgctcgttcctcgcgccgcgtgaaccagctgcggcaccgctccgcaccgccggcagtctcgcggaccgcctcttcgtccccgtgagccgcgcgccggccttgccggacacagtcaccgccaaccgcatcaaccgcgtgtccgccggccgacgtcgcggcgcttcaagcctcggcgggggccgggcgcacgaagctggaggcgttcacggcccacctgtgggggctccacgccaaggccgcagcggcctcgcggcgccagcagctcgcgttcgtgctgcatgggcgtggtgggtggacgggcgcagtc

SEQ ID NO: 310213 - DNA, 488 bp, Zea mays
ctaaaatcggagcgactgagcgggggggggggggggtgagtgaatctcctaagtgtgcttagtgtgttttgattttcggcctcctcttgatgatgctagctaatgcatgcatgcatgccagcctctctcttatgttttggcttggcgcttctcgatcgacactgaaatccgtcttgagagagacggcaagagacttggtttgcatggcgagtgtgtcctccaaggagtccagatgattacctcagggatacgaggatcccaacaccttgattagagagaccacgttttctgtcaaccaactggaggccctctacgagctgtacaagaggataagctattacataaccaaagacggtcttattcacaaggaggaggtccagctcgctcttttccggaacagtaacatgaggaaccttttcaactatcggatatttgacctgtacgacctgaagctccacggaatgattgagttcggtgagtacgttcgc

SEQ ID NO: 310214 - DNA, 586 bp, Zea mays
ccttattcaggaaaactgccctcatgctagcattgtgcagatttctacgcgacaagtatagtcttgcagctgtacgtggcactctgccctcttattcttctacagaagcgatctggtttcctcaccgaactgaaaatgcaatgctacataagattttctgcatgcctggtcatatagtttcgagatattcacctataacccagtgcttcagttttgcttctcatcttcagacttttcacttgtaaaataaagcaggttttatttgtcatatttctgataattcaacttaaaccaaagcgtctttcactttcttaatcagtgattttacctgtgcgatgcactgatatagaaataaagtagtttttcttcttgcgaaaatttccagaacatagaatatctacaatgagccttttctatttgttctcttcacattcaggtcacaaatgatatattcacaaaagaagatggagaattcttaattaaacatggagcgctccctgaagaacgtatacgtgcagtggaaactggaggctgccctcatgcggttattcgcgagacatcagcatatatcttggttctttggagg

SEQ ID NO: 310215 - DNA, 446 bp, Zea mays
ttcacgcttacgctgatgaggagctgagagttcctgagtacctgtaattcaaggaacagcttgttctataaggccccaataccatctttgttcttgatctggactctgagccatgtaatgcctgcttccaccgtccttatgtgttaaagttcattggctacggcgggtagttcctgagcaggcacctgtcatcatagctattacatgacaaggagagcttgtaccggttgctcaacttcctttggtcctacatctacaaggggatgacacgtgctgtttaactacagaagtcgctgtctcagtgctctgtaaggtgcgctgaggaacgctgacgagcacctgtgcaccctacaagctgatacccgatactgtgaatgtcaccagaggttccagtaacttggtatggagaagggttggagtgattgctctaagcgtgcacaggggac

SEQ ID NO: 310216 - DNA, 515 bp, Zea mays
gggaggttcttgatttgggacgcgaagaattctggcaagagtcagaactaccttgggctagaaatccgccaaaagttggtggagcgggcacagttctgggtgaatgaattggagcttatgaacgtctattttatgtttgcaaatgcaacagtgtgttttgagaaaatcatatagtcataccctggtcccttgtcacttgtttcaatactgtgtgctgatccacacttcaaaaagaggcatcacaaaagaagagttctgcagcaaccattggtcgattcaatcataaataatctctgtttaggcggacaggttttcatacaatctgatgtactggaagtatctgtagacatgagggaaaggtttgatgggtactctggtattttggcacatgttacttatgttgatcaagagcttcagtgtgacaatgaaggatggcttctggacaacccaatgggaatactgacagagcgagaaatccatgcatagcttgaaggagcaacgatatacaggagggt

SEQ ID NO: 310217 - DNA, 597 bp, Zea mays
  unsure (1)..(597): unsure at all n locations
ttgtaaagtaaaaccagagttcagagttttgtgcttagttggactttgtaagcataagaaagcaaaatgattgcttttttttgtttcatcatgaacgaccaactgcatcaatgctacatgctgcaggtatttcttagctatatttccaaaatatggaatattaaatatgtgacacttgctattggcagccaacatcatgttgtgtactcacagttgcagtagtgaatgcaaatattgtaatctgaacccctttcactgtcatgcagagtgtgttaagacaagatggtggcgaatggcgacgcacctgctagagggagtgcggcggcagctgcaagcctgcgcaggcgtaggaccacaagcggtgctgctgctggcggaggtggtgccagctcgatgctccagttttacaccgatgaggctgcgggccgcataatgtcaccaaacaccgttctgatcatgagcattgggttcatcgctgttgtcgctatgctccatgtttttgggaagctgtaccgaaccttcaactaagttggtactaccataaccaangaaacagaggccaccaagagaggagccttatagagccatttcaatgga

SEQ ID NO: 310218 - DNA, 408 bp, Zea mays
tttcctctcggcgtcctgccgttcgggtcgagtgtttttaatggagattttttgacgccgttaaaatcgggctgagaacggaactctgtcgcttcagtggtcgaaagatctatcctgggaaaggcatgcggtctattcctgctgagcgtcaggtttgccttttagacaactagaaatggaagcgctactttcataaacgcctgaagcctgcaggggttaactggacagcaatgtacaggaatgcattcaggaaggacattcatgctgaagctgttaataagaggcgccgtgccaccagagactgcatactcgaggtacattgagggtgcttccttggaagtgatccatatgaagagaggtgctaaccttgaagtgcgcgatggtggtagagaagctgcttttcgttag

SEQ ID NO: 310219 - DNA, 451 bp, Zea mays
ttcgtgcctaccgattaccacctgcatactagctacacgtcagggcggtagaggctgaggttcaggaagagcacaggcatccattccacgagtgcttaatggctgcagtcaaggtggcccacggatcgtcagtcacttatctctctgccacctttccctttaccacttttgacggagggctcagagtgacttcgacgtctccatcacggcgctgttctacgggcttcgccacactgacctgcatgtcatcatgaacgagtttggtaacgccaaatacctagtcgttcccggtctccacatccttggcgtcgtaaccgacatcggcttctgaattacacgctttaactctatcgacacggtgttcctggactacttcaccgtctcctgcctcagctttctcagctcgagcacggtatacgagagctactgtccgcacctcgtggagacatcc

SEQ ID NO: 310220 - DNA, 530 bp, Zea mays
actatcatggccgagaagttcggcgtcccgcccccgccgccgttcctgtcgctgaggatgacaggcaaggacgtgctcggcggcgtcaacttcgcctccggcggcgccggcatcctgaacgagacgggcgtctacttcgttcagtacctctcgttcgacgagcagatatcgtgcttcgagatcgtcaagagggcgatgatcgccaagatcggcaaggacgccgcggaggccgctgctaatgcggccttgttccagattggactcggtgagagggcggccatggagcaacgactacatcaacaacttcctgcagccattcatggcggacggcaccacgtacacgcacgaccagttcatccgcctcctcatcaccgccctagaccggcagctcaagcggctgtacgggctcggcgcgcggaaggtggcgttcaacgggctgcccccgctgggctgcatcccgtcgcagcgcgtccgctccacggacggcaagtgcctgtcccacgtcaacgactacgccgtgcagttcaacg

SEQ ID NO: 310221 - DNA, 450 bp, Zea mays
ggttcagcttgctggaggtggctgatcttgctcgccattgcacggcgcgggaaccacaccagcggccagacatgtgccactgtgtgaacaggctttctagcctagtggatcagtggaagccaacgaatgttattgatgacgacgaggagggtgggacaagcgagatgggtcttcaccaacagctagagagatggagatgcggtgatttcactatatcagattcggagtcattcagcacatacaacacatcaaggaagtaccattgacaattagtgagtcctttcctttgtcatatataaatgaggaaccatgatctggggcatcaagaggctctctacagctatgtagatcacgaacagctttgaagggcaacgtgccagcctgtcaggtattgtagttaccccactgaaaacaaggttggttacttgataatcagcatatacattaatg

SEQ ID NO: 310222 - DNA, 386 bp, Zea mays
gatttatttatgtaatatatttgcatattatcctaaatcatatgagagagatagttatatactacatttatgttatagaggcgcaagtagaagaatgtgctataagttgtacatcggaaaaatagcatgtaaatctatagaatcaatttccatctctcaccccatgaatttgaggcaggcttatatgataactctggaaagtggtggaatgtcatattctaaaaaaatagtctattctattagtaagattccaattcctcgaaatgacaggaaacaaacggggccttatattctgttgcaccttttcatttgcacatataactttacagtttttctgagattggtaaaaacacgtgtagtagcacataatattggtgcgaaaatgc

SEQ ID NO: 310223 - DNA, 484 bp, Zea mays
cctttttgtcagcatatggcggatgggctgactgaggtgttctgataactgtcacatatctagttgctgtagccatggataggccagtttggagagaagttactgcatactggaaaccaccttctaggctggggcactcaatgcctgtttatggtggcacgaagaccctgatgtttggcgttccttgctaagagcagccctttgcagtttcggtctagtgatgtgtacacaatggacttgagtgaagaagagttttgctggccatgcctgactggtagcggaatgcctggggctggaaatccatctggtgcaggcccacctcctcgcctggatcatgttgctgcgagcctgccaggcggaagaattttgatatttggcggctcagtggcaggttttcactcagcgtcacagttttatctgttggatccaactgtagaaaagccgacctgaagaatattgaatattcctggacgttcttcccgtt

SEQ ID NO: 310224 - DNA, 436 bp, Zea mays
ctctctcatcgttccctgtcatacggcactacagctgccattaaatcacttgcttgtacgtcaagacagggaattttggaatccccgtctgcgactcatgtcatatgacacgcgctgctcccttagcttatcatgatgattagatgtcatgtcgacgggtgaaacatagttttgttgtacccctctgctgagcatgcttgtccgtgtcacggttgctttggaccaaagaacaaatgtttcccattgcactggattgcaacagttgttatttgtattggacctgcttatggccttgcttttctccatgaggaagcacaaccacggatcgtgcaccgagatatgaaggctagtaacattttacttgataagaagctgctgtcgtaaattggagattttgtattggcgaaactctcttctgatactgtaactcacatta

SEQ ID NO: 310225 - DNA, 449 bp, Zea mays
gtcttcggtaaccagcgagcttatcatcatcgcagctatagctagtcgcatttgcaagtctcaatccacatccacagggatcgctattagctttagccatggccaagagcgcagcatcgtcggtggttaggtgcttgcagctgctcaccgcggctgcggtgctggccgatgctgctgccggcggcgggctgccgacgagcttctacagcaagaagtgcccggacgtgcagagcatcgtgcgggccggggtggcgtccgccgtggcggcggagaagcagcatgggcgccttcatcctccgcatgttcttccacgactgcttcgtcaatggatgtgacgcgtccatcctgctggacgacacggcgaccttcaccggcgagaagaacgccgtgccgaacgccaactcggtgcgcgggtacgaggtcatcgacgccatcaaggtccgggtgga

SEQ ID NO: 310226 - DNA, 567 bp, Zea mays
ttttaatcataaggctggaccttggcaaagaatgtgttcaggactcattccctgatttggtgtcctccatccttcgtgagaagggtccaaaagaagctctgcaatttctgaatgtgttggagccattgctgatggagcatttacttcttgacggtttgagtctaagtctgcgggattttaatgttcccaaggctttattggaggaagcacaaaaggacattcgaaatcagtcccttattcttgagcagtctaggtgctctacaagtcaattcgtagaattccgagttgaaaacaatttgaaaaatgtcaaacaggacaattcagattctgttgggaaattctctgaccttggactgctgattgatccgaaaaaggaagcctcaatgttaaaagttgtctaccaagtcggttttgttggcttgcaactgtattgtgaaggcaagttgtatttaagacgcttggtagaggacctgcttacaaactttgttaataaacacttgagcatggagatgagcatcctcagaagcgtatggtccttgtcaaggttatatttttcatggcctcatt

SEQ ID NO: 310227 - DNA, 429 bp, Zea mays
ctttcacgttgggtgacatccgtccaacttttcgattagtaggacctacatgttttgtgccgatgattgacacagcaattggtattgtgagacagaacttggtggccattagaatgttcatatgttattcgaccatggacagtttaccctgagggtggattcacagtatggacagtggagttaagaggagcgggatacatattggtgcaatatttagagcaagagagttacccctgtagatagctcttgccgggactggagatgaaccatgggtcgtggtctaccagtttgatgacaatatatctgttgggaaatttgactatttcgagtgtgcgatttttacggagattatggctcagtggatagcaactgacagaatggacgcaaagtgtgaattgtcagcgctgttggatatcgcgtacacagtac

SEQ ID NO: 310228 - DNA, 450 bp, Zea mays
cttctatcctctggcggagtacctgaacttcgtcggcgatggtggcttctcggttgatggcgtactgtcggactaccctattactgcatcagaggcaattggttgttttgctaacctgaattcaagtaagactgatcatgttacagggaaacccttagttatctcccacaatggcgctagtggagactacccggactgtacagacctggcctaccacagtgccgttgacgatggcgcagatgtcatcgactgtcctgttcaagtgacaagcgatggagtcctcatgtgcatgagttccattaacctgcttgacaccaccaatgttcagagaacacctttcgccactccttccctggtttcatctatcttaataaatgtaattctttcatcactgatcaatctatcttttctaccgcagaatgctgcgttcaagcaaagtcatagggatcg

SEQ ID NO: 310229 - DNA, 328 bp, Zea mays
tttctggcgggggttcgcctccgaccacccggagctggcgtacggccagcataagtggcgccgttgaatggcacaggactggaagaaggggatttcatggaccgaggaggagctcaggatgtgtttggacgggatgaggaggttgcccaagggggactgaaacagcatgtacaagggcttcgacacgagcaggacagtaacgctggtggccagtgacgccgacaagtacttccttcggtagaccatcccgggtatgaagaagcgccaggggagcttatgcaacgttgggatgacagactacaaggacaaccagttgccaggccctaac

SEQ ID NO: 310230 - DNA, 396 bp, Zea mays
cctatgcgtgcggagaaatggctccaactctcggattagtaggacctacatctttggtgccgatgattgagacagcaattggaattgttgatagcactggtggttaatctcatgttcttgtgataagtcgccgatggacaggttaccctaagggtcgttgcacaatatggacagtggactccacaggagccggatactattggtgcagtagcaagagcaagccagtttcccctggcaatcgattttgtaggggttggggatggaccatgggacatgatgcaccaagttgaagacaatatacctgttaggtcatttcacagtttccagtaagtgaatttgacggagatcaatgacgagagctttaccactgatagaaaggaggcagaatttgcattg

SEQ ID NO: 310231 - DNA, 381 bp, Zea mays
ctgtcccgtctcccgttcccacagcacagcctccatctcccaatctgagcaggcgacgccgacgcgttccaccgggggctccgatgcgggcgatctcgacggccgcggggggcatgctgcgcgcgcggctccgctcctcgtcccgcgtgcgcggtgcgagcagtggctcgaggtgatggacaacgccggcgcacgaggaaaggcccaaggggtacctgttgaaccgcccgacgtcgtcgccggtggagacgcgaaagtgggaggactgcgagctgccctgttacatcacctccttcctaacgcgcagaatgctgagggtcggtctcaacgccaagcccgacctctcgatcgagacctgcgcgcacgggaaggcactggaac

SEQ ID NO: 310232 - DNA, 431 bp, Zea mays
  unsure (1)..(431): unsure at all n locations
tcgcggtcgttcctgtcggccgccgtctacaagaagcatcagaggctgtccaactcggcgaagctgaagcactcttccggcgagatcatgaactacgtcaccgtcgacgcctaccggatcggcgagttcccgtactggttccaccagacgtggacgacgagcgtccagctctgcatcgctctagcgatcctgtacgacgcggtcggcctcgccacggtcgcggcgctggccgtcatcatcgccaccgtggtctgcaacgcgccgctggccaagctgcagcacaagttccagagcaggcttatggaggcgcaggacgtgaggttgaaggcgatgtcggagtccttggttcacatgaaggtcctgaagctttacgcgtgggagacccacttcaagaaggtcatcgaggngctgagggaggtcgagatcaaatg

SEQ ID NO: 310233 - DNA, 494 bp, Zea mays
  unsure (1)..(494): unsure at all n locations
gttttagttcgcgagcggccgcccttttttttttttttttttttttttncattcattcgattattattcaagaaagccccggatacatcaatgtgaagaccgttgaagggtgtatttacagcttctagcctttagctcgtccttgtcccagtcccagcttcacggtcgacctccacacacacgggctggacaagcacttcactcacgtcccgccaccatggccttgaccctcctcaccaactccttccggagcagctgcctgtcgaaggaggaggcggagaggaggcccctgttctcctcggcgcgcctgatgaggtaggggtatgatctgctccaccggcccgtacggcaggtacttgctgacctggaacccggcgttgcggaggttcagcgacagcccgtccgccatgcccatcagctgcgcgaattgcaggttgcggtctcccttggggatccccagttcctgggcacgcgccgccgcgagttggcctgac

SEQ ID NO: 310234 - DNA, 371 bp, Zea mays
gtggagtatcatctagtaatctttcatctacttctagtagtagcgttagtggttcttctgtaagtgcatcggatgattcttaccaaaggcctgctgttcctgcttgggaatttttagaagctgttccttttgtacttgaagctgttctgacagcatgtgctcatgggcggctttccagccgtgacttgactacaagcttaagggatcttgtggactttttgcctgcttctcttgctgcaattgtaagctacttctcagcagaaattacacggggaatctggaaacctgttccaatgaatggaactgaatggcctagtcctggtgcttctcttcattccattgaagctgaagtaaaggaaattcttgcatct

SEQ ID NO: 310235 - DNA, 465 bp, Zea mays
ggttccagaaccgcaggtgccgggagaagcagcggaaggagtcgtcccggctgcaggcggtaaaccggaagctgacggccatgaacaagctgctcatggaggagaacgaccgcctgcagaagcaggtctcgcagctcgtctacgagaacggctactaccgccagcagacgcagagcgcggggctggcgaccacggacacgagctgcgagtcggtcgtcaccagcggcccccagaacgtggccgcggtgctgccacaagcccagccgcgcgacgcgggccctgccgggctcatgtccatagcggaggagacactgacggagtttctgtccaaggccaccggcaccgccgtcgagtgggtccagatgcccgggatgaagcctggtccggattctattggaatcattgccatctcgcatggctgccccggtgtcgccgcgcgagcttgcggcctcgtgggcatggagc

SEQ ID NO: 310236 - DNA, 488 bp, Zea mays
ttctaatccggtaatcccccctcccgagtccaaaccctaaacctaaacctctcacccggcgccgccgccgccaccgccgccgccccgaggccccatcccagcgcaaccgacttccgcctcggattgaagcaatgtcgtcggacgacgaggtcagggaggagaaggagctcgacctctcctccaacgatgtcgtcaccaagtacaagactgccgccgaaatcctgaacaacgctctgaagctggttgtgtctgagtgcaagccaaaagcaaagattgttgacctttgtgagaagggtgactctttcataagagagtaatagatctttctgtgtcttagtgctcttggttgcttctttcttgctaatttgcatccttacttgggcttattgtttggaataggcaaactgggaatgtctacaagaatgcaaagaggaagattgaaaggggcattgctttcccaacctggtgttctgtgaacaacacagtct

SEQ ID NO: 310237 - DNA, 354 bp, Zea mays
acggttttagattttgagcggccgcccttattttttgttttattttattttttgtttgtgttgttgttaaaaactgaaggtacacaagggtgttgatttggcaaccatacagtacagagttatttgaagtactcgacttggatctagaagcataaagataacaattgtaaaacaaaagataacccacagggggaaatcacacaaggcagaaaacatccttttttataccaaccaattccttaaatgggtgggccattggtccttctcgccagtttgggccatttgggggggaaagaacccggacaggcaatgcgctcataggggggggcaccaaacagaaccctctggggttgg

SEQ ID NO: 310238 - DNA, 385 bp, Zea mays
tcgctttatcagtccctcgggccatccctagcttcatcccaattcttgttcgtgcagctgctcgtggcagcctgagaccaggcgcgaggatgctggcggtgttcagcggcgaggtggtggaggcgcctactgtggtagatcgagccaaaggccctcaccctaggtccagtggttgtggacatgggtgtaaatccatccgccgagggtggtgaggaccaaagcgtggaatacacatcatgagaaggaggctgatattgttgacacattccgtctacaggagcaaccttcttttgacaagaaatcatttgtgtcttacattgaacaatacattaagaatctcactgctgtgttggagccagagaaagcggatgagttcataaagggt

SEQ ID NO: 310239 - DNA, 472 bp, Zea mays
tcgggaacggtcaaaggcatagcgtacctgcacgaaggcctggaaccgaaggtggtgcaccgcgacatcaagtcgagcaacatcctgctggacaagaagtggagccccagggtgtcggacttcggcatggccaaggtgctggggtccgggtccagctacgtgacgacccgcgtgatgggcacgttcgggtacgtggcccccgagtacgcgtccacgggcatgctgaacgagagcagcgacatctacagcttcggcgtgctgctcatggagctcatctccgggcgcagccccgtggactacaaccgccccgccgacgaggtcaacctggtggaagtgattcaggggcatggtgggcagccggcgcgtggaggacctgggtggacccgcgcatcgccgtgccgccgccgtcgtggggtgctcaaccgggtgctgctcgtctgccttcgctgcatcgacgccgacgcgcacaagc

SEQ ID NO: 310240 - DNA, 396 bp, Zea mays
ctttcttcatggtaactgcgatcatccatcctgccgcttccactctcccttcacctcctctgcttgctaggtatacgaacatacgatttattacgggttatatgggggcttcgattcccagatctggcatctattatcgtagctccgagtcctcgatctagtaattgtgggatatgcttgtaagaggctctgagatgggttgggttgggttgggtcgctgtgacgattccaacagcctcgtttcttagggttggatcttgtcgaggcttcctttttaattaaataagtacctgatgcagaatggtgcgttctattagatggaaccttgatcttgatgcatctaaccttgatcttgatcgctgagatgatttcaacaggctcgtttcttaggcctgt

SEQ ID NO: 310241 - DNA, 519 bp, Zea mays
  unsure (1)..(519): unsure at all n locations
atatcttggttgagcctgctcggaagcagctgaatcgcaagaggaggagctgcatggaagacggctgttcgtacatgggcacatacagagagctctgcaagcatgtccaaaagaagcaccctactgcaaacccacgagctgtggaccccttgcatgcttacagatggaagcggcttctatttcgaagttcattgcatgatatgatttgttcaactacttcagaggctatgcgaaggttttgttctcacatgctgcagattgaagaggttgtggctgctttgcgagagggtggtgatcatcgtggcgctaccaatgacgatcaactgatccatgatctcttgacctctcgctgaaatgtgagaacctgtgttgatcctgcaggcaatctttgcatgaatccccaacttggcacccctgccgattcacattttctgacccgacaaagcaaactagtcttcatctgtcctcaatgaaacagactgttaangctttgatggatttattcaattacagtgataa

SEQ ID NO: 310242 - DNA, 426 bp, Zea mays
ttgcttatcggaagtgaagcgcctcgcagtcctcctctcggatctcgcggtggaagtcgccggtccactcgatcagcgagcgagtcggtgccgcgcggcggattccccgacccgagcaaaggaaccggacatgcggccgcggctggtgctcttcggggactccataaccgagctgtacttctcgtccggcggatggggggccgcgctcaccgaccgcttcgtccgccaggctgacgtggtgctgcgcgggctcagcggatacaacacgcggtgggcgctcaaggtgctgccgcgggccatggagggcgcggcggtcgccggcgcgggccggacccggcggccgtgacagtcttcttcggcgccaacgacgcctttctgtccgaccaggggcaggcgcaccatcacgtgccgttaaggagtaccaga

SEQ ID NO: 310243 - DNA, 392 bp, Zea mays
gtctcgcctccggcggcgccgacacagcacatggatctgtagatctctgtcttggcgtaagcggtgcagccccaggacgcggcgaagctctcgaaccggtggtccttccactatacccaggtgaacgatctgtcgatcaacgactacctgaatgagactgtggctaagaacgcgacattcctggcgaactccgtggcgcgctactccaagaagtgcttccagaaggggcagcgcaggatgcagtagcgcctcaccaagtggctcatgatctacgtgctcatcaacgggcagaaggtcatggccagggccatgatgaagcacaccctggagatcactctgctgatcactgacgccattactatccaggttgccatggacgccattatgaacag

SEQ ID NO: 310244 - DNA, 424 bp, Zea mays
gttctaccaggacacagcgctcccttcccaaagacaaacaggcgagcagcatacacacacgctcgaaccgagacacgccattctaatactggggaggtctccgtgctgcgagaagatggggctgaagaaggggccatggacgcccgaggaggacaaggtcctggtcgcccatatccagagcttcggccacagcaactggcgcgcgctgcccaagcaagccgggctgctgcggtgcggcaagagctgccggctccgggtggatcaactacctgcgcccggacatcaagcgcggtatcttcagaaggatgagagaggacgccatcatcaggctccacgagcagctcggaacagggtggccggcatcgccgacaggctgtccgggcggacggacatcgagataaagaacgtctggcacacgcacctc

SEQ ID NO: 310245 - DNA, 459 bp, Zea mays
tgctgtaatggcgaggccacacgtcgtggttgtgccgtacccatgctccggcaacatcaacccagcgctgcagatcgccaggctgctccaccgccacggcgtctacgtcaccttcgtcaacaccgagcacaaccaccggcgcgtgcaggccaccgagggcgccggagccgtgcgcggcggggaggggttccgcttcgaggccatcccggacggcctgtccgaggccgagcggggcaagcaggactacgggcgcagcctggccgtgtccacgagcacgcgctgcgctgcgccgctcagggacctcatcgcgcggctcaacggcacgccgggcgtgccgccggtcacctgcgtgctgcccaccatgctgatgagcttcgcgctgggcgtggcgcgggagctcgggatcccgaccatgtcgttctggacggccagcgcggcctcgctgatgacgcacatgag

SEQ ID NO: 310246 - DNA, 447 bp, Zea mays
  unsure (1)..(447): unsure at all n locations
gctactgccagggtcgctgtggtcacaggaggcaacaggggaattgggctagagatatgcaggcaactggcttccagtggagtcaccgtagtgttgacagcaagggacgcggagaggggcgcggaggcagccagcacgcttgggctacccaacgtcgtcttccatcagctggatgtcggcgatccgtcgagcgctgcacgcttagctggttttatcgaggagaagtttggcaggctggatatattggtatgcatggacgtttgatctcccgttcttcctgcagctgcgacctagctatgncgaggtgcagttcattacttcattttttttgaagaatcaggcaggggaggcccctactgagaattttattaaagaagtgaaaagaaaacgttaaaacttagtctttttatacacattaaaaagaaaaaaataagagagcactacttc

SEQ ID NO: 310247 - DNA, 440 bp, Zea mays
ttctagatcgcgagcggccgcccttttttttttttttttttttttttttaagcaccacttattagggcagtacaacacaaacgataagcgcggtgcagatcaagaaagaaccacaacatgtagaagccatataaaagcatgattaagcacagcagaccaccaaaagcttcttactgaaaaaaaggccgccttaggcagaaggtttctccgacttgagtggcttcaccacctcccaggtgaagtcaggtgtcgtcccttccaaagtggccgtaggccgccgtcttgaggtagcgcccgttgccgcctttcttgaggtcaaggttgatgatgatcatgccaggcctgaattcgaagttctccttgacaatcttgaggatctccttgcgggggatcgcgccggtgccgtacgtgtcgacgaacacggagagaggctcgggcac

SEQ ID NO: 310248 - DNA, 445 bp, Zea mays
tctgcatatggaaattatgtcgatcctgagaatatgaaagatccaacctttaaaagtctagtgtacttcatgttggccccaacactttgttaccagccaacttatcctcaaactacatgtattagaaagggttgggtgacccagcaactcataaagtgcgtggtttttacaggcttgatgggcttcataattgagcaagtgagcctcctatattccttaagtaacttgtatttatacataactttggattaaattaccaatttttcttctattttgcagtatataaacccaattgtgaagaattcaaacatccactgaaagggaattttttgaatgctatagaaagagtcttaaaactctcagtgccaacattatatgtatggctttgcatgttctattgcttttttcatttatggttagtatcttgcttcagttcaacagtacc

SEQ ID NO: 310249 - DNA, 464 bp, Zea mays
ctgtcgttcggtcggcagcggtggtagcggccaccaccccagggtatggccgtccgctccctcctcctctacgcgctgctgctcctggccctcgccaccgccgcaccgtcccacggcctcactcaagcggatgttgcgaagcgattgaaggaggtgctgccggagaggaaccgagggcatgagatgctcgattcgcggaatggggatggggacccgtgttctccgtctacctgggaaggcttctcttgcgaacccaaggatggtgcccaggtcgtcgtcaagttgaacttttcttcgaagaaactgcaagggccgattcctgcagagattgctaacttgacggagctaaatgaaatacatctgcagtataataacttcactggatttattccggcatccttttctgctttcagacacctgctgaagctgtcggtgatttgcaaccccttgttgaacaataagca

SEQ ID NO: 310250 - DNA, 469 bp, Zea mays
gcggattaatttccccaaaccctagctcccgatctcgatggcgaaccctcgcgtcttcttcgacatgaccgtcggcggcgccccggcgggccggatcgtgatggagctgtacgccaacgaggtgcccaagaccgcggagaacttccgcgcgctgtgcacgggcgagaagggcgtgggcaagtccgggaagccgctccactacaagggctccaccttccaccgcgtcatccccgagttcatgtgccagggcggcgacttcacccgcggcaacggcaccggcggcgagtccatctacggcgagaagttccccgacgagaagttcgtgcgcaagcacaccgccccggtgtgctctccatggccaacgccgggcccaacaccaacggctcccagttcttcatctgcaccgtcgcgaccccttggctcgacggcaagcacgtcgtcttcggccaggtcgtcgagggcatggacg

SEQ ID NO: 310251 - DNA, 450 bp, Zea mays
ctttcttctcctccccacctcttccacggttccaccccgtccctctcctctcgagaagcacccgcaccagggccagcgggtgcaggaggaggaggagcagcaacagggccgcggccgcttggggctgtgccacatgccgctctggggggccgccgcgtccgcggcgccggcagccgacggcgacgccgcccgcgcgccgtcgggatccggcggcggcgtcaaggtgatccggtcgctgctccccacccggcgccgcctccgcctagatccgcccgccaagctctacttcccatatgagcccggcaagcaagtccggagcgcggtcaggatcaagaacatcagcaagtcccatgtggccttcaagttacaaacgactgcaccaaagagttgcttcatgaggcctccgggcggtgtgcttgctccaggggaaagcatcatagcaacagtttt

SEQ ID NO: 310252 - DNA, 489 bp, Zea mays
ggctaccaagtgactccaacgtggtacgccatgtcggcatctggttcgaaaaaaactagttttagatggttttgaatggactaccaagtcgttttttctggtttagagttcagacttcagagacgtaagtgacaccatatacaaagttcgaggaccgcacacagaaatatttgagctttaatttgtatatgggttgcaaattaagcctagctttggttatgtgatcattggagccacgtcatcagctggactaaccaagctaactaagcctattttttcgcgcaggacctaatcatcgcaggcacggatagtaatgcaaacacgctggagtgggctgtctcggagctcctcaagaaccctaagatcttagccaaggccatggaggagctgaaccatgtcatagggccggaccgactggtgacggaaagtgacctccctcgcctcccctacatcgaggctgtgctcaaggagaccatgcgcgtgcaccct

SEQ ID NO: 310253 - DNA, 468 bp, Zea mays
gcgttcacactcacatccagatctcccccaaatccacccgtcggcacctccggttcaagatgcatatctttgtgaaaaccctgactggcgagactatcaccctagaggtggagtcgtctgacaccattgacaacgttaaggccaagatccaggacaaggagggcatacccccagaccagcagcggctcatctttgctggcaaacagcttgaggacgggcgcacgcttgctgactacaacatccagaaggagagcaccctccaccttgtgctccgtctgagggggggcatgcagatctttgtgaaaaccctgaccggcaagactatcaccctcgaggcggagtcctctgacaccattgacaacgtcgaggccaagatccaggacatggagggcatccctgcagaccagcagcggatcatctttgctgggaagcagcttgaggacgggcgcacgcttgccgactacaaca

SEQ ID NO: 310254 - DNA, 467 bp, Zea mays
  unsure (1)..(467): unsure at all n locations
cggtacgcgtggggccgagccgtccgggccggcggcgccgcctaggcggggggccggatacccgccggtgttcgcgtactacatcacgggcgggcgcggggactgcctccggatgacgcggctgctcaaggccgcgtaccaccccaggaaccggtacctgctgcacctggacgccggggccggcgcctacgagcgcgcgaggctggccaggtacgtccggtcggagcaggtcttcctcgagtacgccaacgtgcacgtcgtcggcaagggggacgcgctcgacggccgcggcccgtccgccgtcgacgcggtgctacgcggcgcggccgtcctgctgagggtcggcgcggagtgggactggctcgtcacgcttagcgccgnggactaccttctcgtcacgcaagacgacctgctctacgccttctcctccgtgccgagggacctcagcttcatcgatcacaggcccg

SEQ ID NO: 310255 - DNA, 474 bp, Zea mays
cagtccgccgtagtttccagacgctcaccaaaactggttgatcgcttccagattcgccagccggctgaccgggatcaaggagaacaccaagttccagaccaagcccgacggcgacggcgacggcgagcaggcgccgggcgggctgaagcgactggtggccgagaccaaggacgcgcacggcgtgaagcaggtgtacgtgtggcacgccatggccgggtactggggcggcgtgacgccgacggcggggacggcgatggagcgctacgagccggcgctggcgtaccccgtgcagtccccgggcgtgacgggcaaccagccggacatcgtcatggactcgctgtccgtcctggggctgggcctggtgcacccgcgccgggtgcgggacttctacggcgagcttcacgcgtacctcgccttctgcggcgtcgacggcgtcaagggggacgtgcagaacatcatcgagacgctgggcgc

SEQ ID NO: 310256 - DNA, 469 bp, Zea mays
  unsure (1)..(469): unsure at all n locations
gtgtacttctcgatgagcaacttcgtcggcgagggcgggttcgggcccgtgtacaagggccgcgtcgacgagcgggtcaggcccggcttgcggcagccgcaggccgtcgccgtcaagctgctcgacctcgagggctcccagggccacaaggagtggctggctgaggtcattttccttgggcagctgaggcatccgcaccttgtcaagctcatcggctactgctaccaggacgagcacaggcttctcgtgtacgagttcatggccaggggcagcttggagaagcatctcttcaaaaggcactctgcttcccttccgtggtcaacgcgaatgaggatcgccattggagcccgcaaaggtttggctttcctccacgacgctgccaaacccgtcatctaccgcgacttcaagacgtccaacatcctgctggactcggactacancgcgaagctgtcggatttcgggctagcga

SEQ ID NO: 310257 - DNA, 495 bp, Zea mays
  unsure (1)..(495): unsure at all n locations
tttcgcttttctactcgacccataatactgatagagtcagattaaatcatcttatcgatgtatcctttgaatttgttaattattatcatggcagtgttcgagattgcctgtgctgtgaacacttgaatgtagctaacattagttttgtccttgagtgtatcttggcaagcatttttattttttcagatgtttttaaaatattaaaatgatgtattttttgttgtaatgatggtccatcgattgagtgacaatatttatatgtttaagaaaaagaaagtgaaagagcctctagctaagttggttaggtggtctgagtagcactccctaggtcctgactatgaatcctagtgggagcgaagtttaagcagaggttaaaaaaaaggttactcgatggttccctggntgtgtgcacacgagatggactggcctatggaggaaggatccttctgtaggggctgggagggctcaaagcacgattgtacgaagtaagatctg

SEQ ID NO: 310258 - DNA, 520 bp, Zea mays
cgtgctctgtgcgaaggttgtcgccctcgacgtcgacgacggcgtcgccctgctcacggggttcctcgagtccaccgacgcgcgcatccaagaagaggctgccggcgccgtcgccgtcgtcgcgagctccgagcgttacaggggaatgctggtgaaggcaggggtgatcgccccgctcgtccagctgctggagaacgcggacaccgccagcgagctgggcaagcagagggcggcgcacgcgctgagggagctgacggagaactccgacaacgtgtgggccgtctgcgcgcacggcggcctcaccacgctgctgcacgcctgcgcccacgccggcagcagcagcaagctcgtcagctcctcttttgcagtgctgaggaacctcagtcgggtggaggaaggtaagatgtgttcatgggtggagcaaggggtgggtcacggagctggtgaagctcttccagaagaaggaggaggtccgcaagctcggcgccgtcgaattgctccacgccatggctctggatga

SEQ ID NO: 310259 - DNA, 410 bp, Zea mays
gaaggccatcctcggccgccgcagccgccgcgtgtacaacctcccgccgggtcccaagccgtggccgatcatcggcaacctcgatcttgtgggcgcgctcccgcaccgctccatccacgagttgtccaggaagtacggcccgctgatgcagctccggttcgggtcgttccccgtggtggtcggctcgtcggtggacatggccaagttcttcctcaagacccacgacgtggtgttcacggaccggccaaagacggccgccggcaagtacaccacctacaactaccgcgacatcacctggtccccctaccgcgcgtactggcggcaggcgcgcaagatgtgcctcaccgagctcttcagcgccaagcggctcgagtcgtacgagtacatccgcgccgccgaggtgcgcgtgc

SEQ ID NO: 310260 - DNA, 443 bp, Zea mays
cttctccgcgttcctcgccttcttcctcttcgcctacgtggcgctcctcctccaccccaagtactcgggcctcctcgaccgaggcgccacctccctggtccggtgcaccttccgcgactgctgcccgccggcgcatccgtctgaccagcagctctcacggaagctgggaggcggggcggctaacaaggcgggggaggaggagcgcatctggaacgcggggcgcgcggcgggcatgtcacgacgagctccggggccggctgcggatggggctggtgaacatcgggcgcgacgagctgctggcgctaggcgtggagggcgactcggtgcgcgtggacttcgagcgcgtgtcggacgcgtgccggtggtcggacctgttaccggagtggatcgacaaggatgaggacgccgagggcccgtcctagccggagctggccatgccggac

SEQ ID NO: 310261 - DNA, 564 bp, Zea mays
  unsure (1)..(564): unsure at all n locations
tttctcgatggcaacttcacagcaaagatctctgacttcggcttagccaaactgctccgaaccaaccagacacaaacaaatacaggtattcggggtacacgaggatatgttgctcctgagtggtttaagaacatcggtatcactgccaaggtggatgtttacagctttggggtcatcctgttggagcttgtttgttgtcggcggaatgttgaattggaggccacagatgaggatcaaaaaatactgactgactgggcaaacgactgttataggtgtggcagaattgattttctggtggagggtgatgaagaagcaatttctgatttgaagaacgtggaaaggtttgttgcagtggcattgtggtgtcttcaggaggacccaactatgagacctacaatgctgaaggtgacacacatgcttgatgaagcagctgcagtccccagccctcctgaacctacttnctttgtcagtgcacttgcatagcatcacacctgcatattgtcatattagtatatgtatgaacatgcgtgttcgaggaaaaaaaaagtatatgtatgaaccaac

SEQ ID NO: 310262 - DNA, 365 bp, Zea mays
ttttacgcgacgcaccaagctctgagagtcgcaatggagagatcagctgagagctggtgggtgcttcccatgaccttgataccggacatgtccggcgagcaacacggtaacatggcaaccgtagccactagcttcgcctacctcgccatcttcgcatgcctcgcatgggtgggcgcgtccctgctctactgggctcacccaggcggccctgcgtggggcaagtactggagggcgagggggaagaagccgtcggcggcgatcccggggcctaaggggctcccggtggtcggcagcctcggcctcatgtccgggctgtcgcaccgctcgctggccgacgaggcgtctcgccgcccgggggccaagcg

SEQ ID NO: 310263 - DNA, 534 bp, Zea mays
aggtaccggtccgcagagtattccgggggcgacaccacgcgtgcgtgtggagacgtcgcctccatcgtaggtgcagattgccaaggccgtggcggagcctaagacacctcctgcgccgccgtcgacgtagaacatgcagtcggcgcggaagacgccactgatgggcaggagcgaacgggacggggccacacctaggagcacgggaagcgcggggatgccggaggtttcgcatctcgggtggggccactggttcacgctccgtgagctggaggaggccaccgacggcctcaccgaggagaacgtcatcggggagggtggctacgggatcgtgtacaagggcacgctgcacgactccactgtgatcgccgtcaagaatgtcctcaataatagggtccaggccgagaaggagttcaaggtggaggtcgaagcaattggtcgtgttcggcacaaaaatctggtcaggttgcttggatactgcgtagaaggcgcttacaggatgcttgtgtacgagtatgaggacaatggtaatcttga

SEQ ID NO: 310264 - DNA, 516 bp, Zea mays
cttatcgctagtagacacagcgcacagcggcaagcaagaaaccaaacattccagtgcccttaccgttgcatgcagccatgacgaggatgagcttggcggtgtcggcgacgttctgtgtgctcgcggtcgcctcggcggcgcagccggcgccgagcatgcccccgccggcggtggccgtgaacagctcccggctggagaaggcgtacgtggcgctgcaggcgctgaggcgcgccatcacggacgaccccaagaagctgacggagaactggtgcgggcccgacgtgtgcaactactcagacgtgtactgcgcgccggcgcccgacgacccctgccagcgcaccgtggccttcgtggacctcaaccacggcgacctcgtcgggacgctacccgaggagctgggcctgctgtccgacctagacgtctttcaccttaactccaaccgcttctgcgggtccctgcccgagtcgctccggtccctgcaccttctacacgagatcgatgttagcaacatcaggc

SEQ ID NO: 310265 - DNA, 311 bp, Zea mays
ttttctcgcatgggctagctaccaactctatcgtgtgcttcacgctcgaccgcacaactgccccaaggggggtggagacctatgaactactacatcttttagctacacatctagctgaagatcgagaggggtaaataacgacgagcgcctgcaagctgaaggagcagatgcaggtactaccatcatcgtcttcatcatcaccaggatgaccgtcttcatctccatgtgctactccaccgatgccggatcccctgctgtcgacgtcaccgtggtgccctcgaggaacgtgctcaccgtgtgcgagaccgtca

SEQ ID NO: 310266 - DNA, 456 bp, Zea mays
ttgacgcgtggggtgaagcccgggaggacgtacatgctccggctcatcaactccgccctcaacgacgagctcttcttcggcatcgccaaccacacgctcaccgtcgtcgaggcggacgccagctacgtcaagccattcaccgtcagcacgctcgtcatttcaccggggcagaccatgaacgtgctcctcacgacggcccccagccccgcctccccggcctacgccatggtcgatcgcgccctacaccaacacgcaggggacgttcgacaacaccaccgccgcggttcgtcctcgagtacgccccgacgacgaccaggaacaacaccctgtcttccctaccgggcctggcgctgtacaacgacaccggcgcggtgtccaacttgtcgcgcaatttccgcagcctgaacagcgcgcgctacccgaggcgcgtgcctgtggcggatgaccggcacctgc

SEQ ID NO: 310267 - DNA, 437 bp, Zea mays
atttcctgcgattcctctcccctcgcctcctcgtgtccccctagggttagcacctcgctgcctccgattcaatcataatatgggatcgtcggcgaggaatcgcaaagagggccgcctcatccgagttaaggaagccatggagcacaaggaggctgggtgccaggcccccgagggacccatcctctgcatcaataactgcggcttgttcggcagcgcggcgaccatgaacatgtgctccaagtgccacacggagatgataacgaagcaagatcaggccaagctggctgcctactctatcgacagcatcgtgaacggcagcgacaccgtcatggatccggttggtgctggcagcacacggcagtagctgttgcccagttgagttgcaaacatgaacgtgcagcagcccgctgatgttgccggacccagcgaggggtggc

SEQ ID NO: 310268 - DNA, 385 bp, Zea mays
gctcttcacacgtacgaagcacgccatcactgtgctaaagattgccccatggcagctccttggcatggagtttgatgttcttgagcctctcaagaagagttatgataacctgcccagtgacaagttaaggctctgcctgctatattgctcattgttcccagaggagttctctatttccaaggattggatcataggctactgcatcggtgaaggtttcatagacgacttgtatactgagatggatgaaatatacaacaaggggcatgaccttcttggtgatctcaagattgcctctctgctggagaaaggtgaagatgaaggatcatatcaagatgcaccctatgggttcgcgccatggctctgtggattgcatcagatttcggca

SEQ ID NO: 310269 - DNA, 434 bp, Zea mays
  unsure (1)..(434): unsure at all n locations
cccacgcgtccggttctagatcgcgagcggccgccctttttttttttttttttttnaggaaacgaatggaccagggcaaaggcacacaatatgggcacatacatgcatacacaaccattaattgaacccggcgaggagcaaaagcaaacgacgacggctttgaatccactcatccagagcggggacggagtggtgaataaattaggcgacctccacatccaagacctggagctaggagccgcacacgaagacgctaccgacgacaaagccacagaggacgccgccgacgagcgacccaagcacaatgaggctatcaagggggccaccattacaccagatgaagcaagggtaaaagcggtcggcttgaaggctatgtggaagagcccaaacggcacaattaggaatatcctgaacggcacagtgctcagagaacc

SEQ ID NO: 310270 - DNA, 422 bp, Zea mays
ctcatggtaaccaaactttgcctgttccagaggaggtgggtgctgcaaacaaaactgtgggtgaaagaatgcgttctgctctgggaatggacgaggacaggtactctgcattcaaagagagtgctggtgaataccgtcaaggtatcataggtactctggagtatctttcatatgtcgagcagtttggactgtcacaccttgttcctgaaatggctaggctattgcctgatcctcaaaaacagagggaacttgctgatgcatattatacaaatactcgatttaaaagcctacaagaaaacggaggtggaactagctcacaagagggcaaccgtaaaaagaaggggaaggggaaagcttctgtcacagaaagcagtgctgctaatgatgtgaatagtgcactagcagataacattctggagact

SEQ ID NO: 310271 - DNA, 416 bp, Zea mays
ttctttcttgccatgctcgggccggtgatcgaccagagcttctactacgcggggctcaagttcaccggccccacgttcgcctgcgcgatgagcaacatcctgccggccatgaccttcgtcctggcagtgatattcaggatggagaagctgcagatggagaaggtgaggtgccaggccaaggtcttcgggacggtggtgaccgtggccggcgcgatgctgatgacgctctacaagggcccgctgatgcagctggcgcggacgaccagcaggcacgcgtcggcgtcgggcgtcgcccgccgcgggagatcatcatcagcggcagggactggttcctcggctcggtgttcgtcggtcgtcgccacgctcgcctgggcctccctcttcgtcctgcaggcgcacaccatcaagcagtactc

SEQ ID NO: 310272 - DNA, 462 bp, Zea mays
atttgtagaagtttataaaggggttcttgatgataggagtttagttgctgtaaagaagtacatccataatgtaaaggaggactttgccaaagaagtgattgtccattgccaaatcaatcaccggaatgtagttagactcattggttattgtataggtgaaaatgcactaatgatggtgactgaatatatctctagaggaaacctcagtgatattcttcactccagtgaaatttctatatctttggaaacacgattgagtattgctatagggtgtgcagaagcattaagctatatgcattcgcaaatgtatgggaaagtcatccatggagacattaagcctgccaacatacttctcgatgacaacctcactgcaaaaatatcagactttgggatatcaaagttactttcaacggataataccttatacaccacacatgtactggggagcataaggtatatgga

SEQ ID NO: 310273 - DNA, 411 bp, Zea mays
  unsure (1)..(411): unsure at all n locations
tctacgcgtccggccgcccacgggcaacttcacggagctggcccagctgttcggcgccaagggcctggacaccagggacctggcggtgctgtcggccggccacaccatcggcacgtcgcactgcttctccttctcggaccgcctctacaacttcacgggcctggacgacgcccgcgacaccgacccggagctggaccgcgcgtacatggcgcgcctccgcgccaagtgcgccagcctggacgacaacaccaccctggtggagatggaccccggcagcttccgcaccttcgacctgggctactacgccaacgtggccaagcgcaggggccttttncactccgacgcccagctgctcggcgacccttccacccgcgcctacgtgctccggcacgccacgggcgcccacaggga

SEQ ID NO: 310274 - DNA, 420 bp, Zea mays
cccttttgaaaaggggtacacctcaagcactgatgggcaagtacggggggtttttagaggatagtattgtaaaagactatacagacttcgccaaggggtgctttgacaacttcggtgacaaagtaaagaactgggttacctttaatgagcccgagactttttgtaccttttcgcacggaactggacaatgcgccccagggcggggctcccctgggataatcactccaacgggatccacaagttgtgctaacccaattggaaactcgctcactgagccatacattgttgggcacaaccttctccgagcccacgccgaggttgttgatctttacaacaagggttacaagatagattacaagggtgagaatggacgcatagggattgtattttacgtgatgggccgtgtgccattcgaaaaat

SEQ ID NO: 310275 - DNA, 406 bp, Zea mays
gcagagacaggcgtcttcgtactcgtctatctccgtgactcaaagctttccccaattaccccccttttcccatttctcaccaccgccgccgctcctccggttcaacatcaccatgagggagtgcatctcgatccacatcggccaggctggtatccaggtcggaaacgcgtgctgggagctggactgcctcgagcatggcattcaggctgatggccagatgcccggtgacaagaccattgcgggaggcgatgatgctttcaacaccttcttcagtgagactggcgctgggaagcacatcccccgcgctgtttttgttgaccttgagcccactgtgatcgatgaggtgaggactggcacctaccgtcagctcttgcatgctgaacagcttatcaacggcaaggaggat

SEQ ID NO: 310276 - DNA, 337 bp, Zea mays
gttttaaatagcgccatctattggtcaggtttgagatacagacttacatacagaaagtattgtttcttgaaacgcctgataggatcgtcgagtgcactgagaccgtactggacaaaggcgatagacgtaaggaccaccgttgttcaagcacaacctgatgtgctagaacttgtgccacctgggacttcgacaggcattggtctgaaggtcctgatgaaccacctgtacattcatacagatgatgcgatggcccttggggaccgatacaaggacagtggaatggcgcaactagcttcagcaggggcagttcttgacaatggagctgacaacacaaaag

SEQ ID NO: 310277 - DNA, 437 bp, Zea mays
  unsure (1)..(437): unsure at all n locations
gtgcgctccatgtgactctcacttatttctcctgtcagcgcagcagcagcagcagcagcctactactactactactgcttttaccggccggtggatcggatcaccaaaccggaacgacagcgatggaggccgggacgtgggcggcggcggccgtggcggccgtggcgctgtacgtggcctggttctggcggatgtcgcgcgggctcagcgggccgcgggtgtggcgctgtcggagcctgccggggctcggcagacgccgggacatgcacgagtggatcgccgccaacctgcgccgcgcggggggcacgtaccagacctgcatctttcgccgtgcccgggngtggcgcgccgtggcggcctggtcaccgtcacgtgcgacccccggaacctggagcacgtcctcaaggcgcgcttcgacaactaccccaagggcccct

SEQ ID NO: 310278 - DNA, 449 bp, Zea mays
  unsure (1)..(449): unsure at all n locations
gtctggtccggacgcgcctgccggtggtggtggcggaggaggaaccagtgagccagcagaggccgggccgtcgccgtcgtcgtcctcggccgccgcagcagcctcctcgtcgagccggcagcaggcagagcaggaagcacagcagcaacaaggagcacagcagagggaacagccagcagtaagggcccaggcgcagccgcagccgcagccgctaacgcagcagcctccggcggggctcagccggtacgagtcgcagaagcgccgggactggaacacgttcctgcagtacctgcggaaccacaagccgccgctgacgctggcacgctgcagcggcgcacacgtcatcgagttcctccgctacctggaccagttcggcaagacgaaggtgcacgctgagggctgcgcctacttcgggcagccgaacccgncggcgccctgcacgtgcccgc

SEQ ID NO: 310279 - DNA, 446 bp, Zea mays
gtaattttaggcaatcctagcctaataagtggagcaactgtactagatgttggttgtggcacaggaattctaagtctttttgcagctagggctggtgcatctagagttgttgctgttgatgggagtgcaaagatggcttctgtggctacccaagttgcaaagaataatggtctgttgtatgatgagaacgtggaagcagaacagaagcaaggcagtgctcaagttataagtgtcgtacatacaaaggctgaagagctaaaccagaaaatacaagtcccacaaaatggctttgatctattaatgagtgaatgaatgggatattgcctgctgtacgaatccatgctaagttctgtcatattgcacgtgatcattttctaaactgggtggtgctattctcccagatactgcaatgattcttgggctggcttcgggaaggtggaactagc

SEQ ID NO: 310280 - DNA, 387 bp, Zea mays
  unsure (1)..(387): unsure at all n locations
tctctccacacataaaaaccaacgaagcgggcgagtgatcaggcagaggcagcaggcaggaaataaatttgaagaaagctagacctctgatcagcaggagctcatgggcgccatgatggcctccataaccagcgagctcctcttcttccttcccttcatcctgctggccctcctcgccttgtacaccaccaccgtcgccaaatgccacggcacccacccgtgncgccgtcagaagaagaagcggcccaacctgcccccgggcgcccgcggatggcccttggtcggcgaaactttcggctacctccgcgcccacccggcccctnccgtgggccgcttcatggagcggcatgtcgcacggtacgggaagattaccggtcgagcctgttc

SEQ ID NO: 310281 - DNA, 510 bp, Zea mays
  unsure (1)..(510): unsure at all n locations
gttgtacgagagggccttcggcgacgaggagaagcgggagcgcttcctcaagtggcgcatccagctcctggagcgcggcatccgggagcagctcgacttctcgcccagcggcatctgctccatggtgcaggtcaccgacctcaagaactcgccgcccatgctcggcaagcaccgcgccgtcacgcgccaggctctcgccctgctacaggacaactacccggagttcgtggccaagaaggtactgtataatttctctttacaatccaaaatactacactttcactaacaagtcgagaattcccccgcgtattcagttttgtgcagttgtgcttggttagaaatggggatctctctaaattctctacgcctctgccgtgcttgtttcagtaaagttgcataggctagtgctactgctaactcgaatgggtggtccaagcaaaggctgggactntttttttcccgccttcctgctttccctcttttctggttttgtttggttcttgattgggg

SEQ ID NO: 310282 - DNA, 442 bp, Zea mays
cgcggaggccgccggcgccgccgtcgacctccaggacgtgctcctccgcctcaccttcgacaacgtgtgcatgatcgcgttcggcgtggacccgggctgcctccgcccgggcctccccgagatcccgttcgcccgcgcgttcgaggacgccaccgaggccaccaccctccgcttcgtcacgcccaccgcggcgtggcgcgccatgcgcgcgctcggcgtcgggcacgagcgcgtgctccggcgctccctggccgccgtcgacgagttcgcgtacgacgtgatccgcaggcgcagggaggagctcggcggcgacgacgccggggccgggcgcaggtcgtcggacctgctgaccgtgttcaccaggatgcgcgacgaggacgggcggccgtacacggacaaggttcttcccgacatctgcgtcaacttattctggccgggcgcg

SEQ ID NO: 310283 - DNA, 493 bp, Zea mays
cggacgcgtgggctgcccgcttctcccctccctcagtctcactcgctccgctctcctccccgagaccaggaggccaagccaagaaccgcaaaccctcaggccgtggccatggcgcaaggagcaggacgggacccggaggagctcttcgaggagctgtggcgcgcctgcgcggggccgctcgtggagttgccccagaccaacgaaagggtcttctacttcctccagggtcacctagaacagctgcaagagccgacggacccggcgctgctggctgagcagatcaagatgttccaggtgcccaacaagatcctctgcaaggtcgtcaacgtcgagctcaaggccgagacagaaacggacgagatgtacgcccagatcactctgcagccggaaccagatcaagtggatctaccccaattacctgaaccgcccctgcaggagacgtcaaggccccgggtgcactccttctgcaagatcctcacaccatccgacacca

SEQ ID NO: 310284 - DNA, 368 bp, Zea mays
gtcctgtgtgtctgagcgaggggtaaccctgccctttggggcctgggctattcctcagggggcgccgctgtcgcctcaccccccaatccaatcctccgcgatcgatcggcgggcgcggatggaggcgctgaagaagcaggccagcaagctccgcgagcacgtcgccaagcagcagcaggcggtcctcaagcagttcagtacgcggtatagtcaagatccttctcttgttgatgaagcggagcttgagtgccaccagaatctccaaaggctttacagtactacaagagcagctaagcatttccagcggaatattgtacgaggggtggaaaggtttcattgcagttagcaccaaacagatggagattgtg

SEQ ID NO: 310285 - DNA, 269 bp, Zea mays
aagggcacatctttactatataaaaggggttctatccaaaataaataaataattcccttataaggggacaacgggccagcaacccaaagttgactgggaaacgatggcctaaatctttcacgaactcataacagcatcctccatgcccctaaacctgggggacctgttcttgacctgggggggggggggagacagcaagagggagctcacatacgttcatggctcaacaaggtggggggaataatgggcatgaaccccccaaagggggg

SEQ ID NO: 310286 - DNA, 316 bp, Zea mays
caatggcaggcaacatggacgaggcgatttattaagtggtatctataaacgccacaatagtaagcggcacacacacacgcagaggctcgatcagctctggccctgcttcttggcggacttcttctggtggtgctcgtggaacgcgaacccggccgagcccagagccgccaccgtcgccacctcctccttcaccttggggccgtgcgcgttctcggggtccttcttcgccttgggcttctcgtgaattgcgtatgcaccggcggctatggcgccgagcccgccgagctgccccaggtgcttgtggtgcttctccttc

SEQ ID NO: 310287 - DNA, 434 bp, Zea mays
acagaaaaatgttttctttacgacatgttctgcgtttatgcttcaaacaaattcatcaacaaataggaactattgcagctagcgaacagggcaaatcaacatcaccgcaataggacaacagcagatattatcaatacattggactagagctcaatcgcttttagaaaacagtgtactaatcaggtctgaaaacatggcataacgctctgaacttgagacgattaaccaaaaaaagtgtactcatcaggacacacatttcggtgcaagacaatccatgagaatgctctaagctacagcgctcttgcccttcttcctctgtagcttcttcatgtagaactcaagctctttaccctcaaggatgtacccatcagctcggccacactgtccagggcgggaagaaatgcatgccagcaaccgtccactgccaaattgct

SEQ ID NO: 310288 - DNA, 136 bp, Zea mays
cggaataggggtatttttgcattacttagggagcgaaaattcacacatccattattcggcttgcccgcgttatttcatcgcatatatattcatttcaagtcctggggcaaggaaaggaaatagcggatagcttata

SEQ ID NO: 310289 - DNA, 291 bp, Zea mays
ataaagaactagaatttttattccatgttaagtacttaagcttgataacattgttaagtacttaagcttgataacatcatatagtattgatgaattagttggctcccttacataccataatcctagctcagcctttgcatacacaaagacacaagactagcacaaaagatccaaaaccctggaaaatatgagcttcaacaaatcctacaggtgcaataatgcaagataacatcacaatcaaaagaaaccaggtatctgaggtcgcgttcccatgactacaccgcctaaacg

SEQ ID NO: 310290 - DNA, 197 bp, Zea mays
ggcaccataacgaacaaggggttttttggttaaaaaaaaaacgggcatacacacgtttgggggggggacttgggaaccccaactgacaatttacctacacagggggggggacccacaaggggggggccgggaaaccccttcccttaaggattttttattaacaaaaagagtttccgttttgtataacccatcgccaa

SEQ ID NO: 310291 - DNA, 273 bp, Zea mays
acccagataataaggtgattcacttctgaatctggatctggatcctttatgatatatggtacaagcagcagagcattgataacaaatgtgaaacgtgcaactgtcagtccctcgaaaaagctacagcctgatcacgccacagcagaatgagcttgtgtcggctaaaagatcgaagacccggacttcccttttcccatcagcatgtccttcgcctcattgatcttggaggcgacgtaatggctgccaccagcatcagggtggttagctaccatg

SEQ ID NO: 310292 - DNA, 463 bp, Zea mays
gcagacggctgctggactgtacagcaacaatagaactaatcttttgtatttcaattggattatacttaatgaaagtatggttcagacactagaaagaatagaaacttcatgtcttcgagacagtggtcttgcaaaccggacaagcgttcttccgagaaagccactgctttatgcagtgcacgtgatagctgtggccacagctcagcttcccagtttcctcgtgtacttcgaactcttcttgacagatgctacatctcctgtccatttccgtagaaaaatgtctggggttgaacgcggagtactttaccatcctaaggctttgaatgatctcgtcctcacgaagccctgtacttacatatccaatccggtcctcaagatcgagcaactcctcatatgtcatgttgtcgacatcgaggcgccaatcctgatactgatcataaatacccattcttcccaataacat

SEQ ID NO: 310293 - DNA, 252 bp, Zea mays
gggcccaaacacaagcaggggggcttttattttattcatataaattaacttacaaagatcaatagacaagttcctgggggaaatcttattaccggcggggggagtaaacacggggcatgccatccggggggcagctaataaggtgggggaaatgttgcccccaattttgaaccacttgggggggaaagggccaggcatgtccaccctcttgtgggggggggccccgaaggagtcccttggggcctgccccag

SEQ ID NO: 310294 - DNA, 264 bp, Zea mays
ggcagcaaacggataataacttaaattctccacgagggaaagaaagaaacatgcccagctgggtacaggaatacacagagtttttgtttcggttaacaaaacggcgcaacagggagccccagccctgaagagaccaccaataggaatcgacagagaaactaggcgggggccgacaagaagacatcacagggggacccccgttttttggactggcatgtctcggcacggccacggcagtttaagacctgcttttgaacgggatgg

SEQ ID NO: 310295 - DNA, 409 bp, Zea mays
cggaacattgtaggggtttttaatgcagacgcgcggccttcgcgtacagcttgtctgcaactaagttcaactccttgtaaacctgcagtgtcgtttcgaatgttttgtcttcagtgtcttcgtcgaagattataaggtcgcctgaaccttggtcaagaatacccttgagtttgccgtccaaaatcaattctgataatttggtctcaaccacggcccgcggtagattaatcagcgcggcgacgtggtcaatttgaacgcgggagaacggctcgatcagacgcagcagattttgctccaataggttctcgtagagctggttgagatgagcgtaaacgatgggatcgtccacaagctgttctttgtatgtctctaacactttcttgtacgcgtgtatcgagcgatccttatg

SEQ ID NO: 310296 - DNA, 400 bp, Zea mays
tttttcttttttttttttttttttttttttttttttttttttttttttttttttttttatcgatattaggatttaatcagttcaaacaacgaaacgattctgatacaccggttttcaggaacagatagtcttgggcgccgttaacaccatctttcagcgaccccttgttgaaaaaacagggcaaatttattcagagacccgaaggactggtccggccgcccctttccttccgttacttgtccttggccatccagaggatgcagggcaaacttttcccctgcaggagcaggtcaaaggccttgttgatgtcctgcagtccaagctcatgcgtgaccagggcgtccagctgcagctcattgtccatgcattttttggcgaggacggggatgtgggtcttggg

SEQ ID NO: 310297 - DNA, 397 bp, Zea mays
tccttttctttttttttttttttttttttttttttttggggttttttttaaaaactcaaagcaaggagccattactgatacttgcataaaaatcaagtccatatttcaaaggagccattatattggctacctcaagagctagcaccacaactcgtttgccataggattcagcagggcagccgtctctggggatagtttactttggggggaacgactccatcggtgcccattcctccggccttgggccttatgtgccgttagacgagtccatagccaacatgagaaagatcgcggagcacctcaagggatgttagttactgtctgccatgcatggaccatggggcaggggtctatagctagctactagttgttttgacagtttgttgtgtttgccttt

SEQ ID NO: 310298 - DNA, 396 bp, Zea mays
ttcttttttttttttttagcaaaaatactttttcatagctttattgaacgaaatacatgcaccagagccaaaaatgcgtatcaaagagaggggcctatagcagatcaggtgggtgcgagatacaggaatttcaaatgaggcccacatgccttctgcttattatgctagtacaacatcaccaccattatttagagcttgcgcgggcagcagctgctgtagccctaatctaatttcgaaggaatccaaatattctctgctgttgatcaggggcttgctgctaatcgtacgatccttggcaaatgctagctcattgtccacacataggtcagggtcgtcacttttctgtgagcgcgaagatcttggtgaaaccttctgtgcttcagcaagagtcatgat

SEQ ID NO: 310299 - DNA, 350 bp, Zea mays
attcgggtcttgtacagggagcagagtccagccacatcattcacgaacagaggcaaaaataagaacaaaaagtttacttgaggggaatgaaacgggaggagtgggtggcaccaataccgggccttccgtgcttcacgggcttgtaggtgatggaaaattcgccgaggtagtgtccgatcatttcaggcttaacttccacaccgttgaaggtcttgccattgtacacaccaatctggcttccgatcatctcgggcacaatgatcatatcacgcaaatgagtcttaatcacttcgggtttgtcaccagcgggagcctccttcttggcagccctcaacttcctgaggaggtta

SEQ ID NO: 310300 - DNA, 339 bp, Zea mays
  unsure (1)..(339): unsure at all n locations
ggancgaatgtcacatttttactatataataggagttttgtccaaaataaataattacattataaggagacaacggtccagcaaaccaaagttgactgggagacgacgacctaaacctttcacgaacacatggcagcatcctccacgcccctaatcctatggaacctgttcttgacctgggacttgagattctaggtaccaacttgcttttcgagattcgaaacctcacacgaatccgggcacaatcggtgcggctcgcgacaagaaaaacctccgtgacaaaaggtccgcccaatccgcaattctgggcgaaaacctgcccggccaaagccacggacc

SEQ ID NO: 310301 - DNA, 350 bp, Zea mays
aaaaacccatccgcttttttttatttggcacttaataaagattggcttatacaccgactggggtataacataactctagccttggatcctacggttttaggggggagattttttttgaatcgagcacgaacaactccattggaaccatggggtctagcaattttaccccacacaacacggacgttggaaccatttttgtttttttttggggcgcgatagacataggcaactcgtttacccaagtagaaactagtatcctccttggtggaaacattctccaacctcaagagagagacattggggtactggtcaactttgctttttcggtatccgaggacctgagctttgac

SEQ ID NO: 310302 - DNA, 289 bp, Zea mays
gagacgcaactgcctctagtataatagttggttctttcacatgaccacaatatgtgccttggtaagctgttggacaattcttccacttccaatgcatacaatcaatactaccaagcattccaggaaatccacgttgttcggcaatactaagtaacctagttgtgtcatcttcatttggagctctcaagtattctgggccaaaaacctcacagatagccttgacaaatttccgtaagctctcaatagcagtgctttcaccaatcctcaagtactcatcaacataatctgc

SEQ ID NO: 310303 - DNA, 229 bp, Zea mays
ggggcaggaaccaatggcacatttttactatataatcgggggtctgtacaaaataaaaaaataattacattatatggggacaatggtccaacaacccgaaattgactgggagacgacaacctaaaccttttacgaacttgtcacagcattctttatgcgcctcatcctgggggacctggtcttgacctgggacttgagataccaggtaccaacttgtttttcaagggac

SEQ ID NO: 310304 - DNA, 349 bp, Zea mays
ggggtcgttatattatcatagagggacagaaacaatactgaattataaatgtaccttcggcttgatagaaggcaaaagtacaagcgtgacgcacaagtgaatacaagtcaatgtgaacagtacgggggtactggtcatctatttataggcacaggacgcagcctgtgtaaaattacattcatgcccctcatattcactattgacttaagaacaaactgtcgaggactagatagccttttcctccttaaggcggttcctctttccgttactgagccgaagctttcacgcgcgcaccttttacactggttcaatccttcgttccaatcctgctttccattccgtatatgct

SEQ ID NO: 310305 - DNA, 245 bp, Zea mays
gaaaaatcaagtatttctgctgttcattagttacgtataccaaacaaaaacaaagtttccaagattcacaagtcgacgccattggtagttatttgagctgcctactgaaatctggtagatcaatgagttggatccttggtatagcctctgtttcttccctctctttttgggggttgtatccccatttcaccaggtagaggttccaattgtccagtgctggttctttgatcacattcttcagagtc

SEQ ID NO: 310306 - DNA, 231 bp, Zea mays
aaaataaaaccaggagtatcgaatgcaatgattaggagtatacatgcatgcatatgtatttataagccttatttgttggatatataatatataatttcaatggggttattgctgcttcttcattcactagctagtgtagaagacacacaacgatggatcgatatccttggagatggaaatgaaatggtacggaaaagtcgttgatcgcgcgtacgacgagtcctttgttat

SEQ ID NO: 310307 - DNA, 333 bp, Zea mays
gcggcctttcttttttttttttttttttttttttttttttttttttgtggacaactaagcaataccgcggcaataacaatatttagctttaacaagcaatccaatcttggacagttttttcttaaaaaaaacctttgagttcagtccaggccgggcagctatagttggggctttaacaatagaacatatataggccccaacatgggtaactaatctagcacttgatctccttaagaccgtgagagaactagaggaatgtcggattagtggcaccatccttggaattggcgaataccacggacgcttcgtccttcatgctctcaccaacaaaaa

SEQ ID NO: 310308 - DNA, 294 bp, Zea mays
aaacgagacaattgccattataaaacaccagacaagcggtttcgacaaattggaggcgttgccgatggcttctctgttttggagacgcagacaacaggcaaactccaaaatggatacgagacagtcaataggagctgagcaaacagagattagtctcctttcgccattaccgtcgccgtgctcacacgccgtctgcgtcgtattcttctctccgtcgcggacagcttttgcgccgcggacaactcttgcgccgcgccgcggacagctcttgcgtctcctttgcgtctggctgcc

SEQ ID NO: 310309 - DNA, 145 bp, Zea mays
  unsure (1)..(145): unsure at all n locations
ttnattaattttttttttttttttttttgcaggagggaataatcaccatttttggcttaggattaacttaaaacaaatcctgacaggagtaacagcatccatcgatccacagtccatgctggttgatgcatgggtctgctggagc

SEQ ID NO: 310310 - DNA, 207 bp, Zea mays
ggggataaaaaacgggattccggcttggcctttttttttccccataaagaaacagcatcggggaattctccgttccagttttattcagggcccctcgcccgcagttcagggcctatggatttgggtctggccaacaaacaagaacgaaacaggggggcccttcatccttttttacaaacttttatacggaaaactaacccgattttt

SEQ ID NO: 310311 - DNA, 314 bp, Zea mays
attggaacttgagggacaaaaaaggaatttaatcgacaacagccataggagaagtagtatccttgatttttcccttttcggcttctcttccagcctttcttctttccaaaatggccttacgatccttatcgagctttaacttggtgatgactactttggatgggtgaactccgatgttgacagtagctccgttagccttttctctggtcaatctttcaatgtagactacatacttctttctgtagacttggatgacctttccttctcttcccttgtatgtacctctgacgacttggacttcgtcatcctttctg

SEQ ID NO: 310312 - DNA, 365 bp, Zea mays
atcataaatattagtgttttattatataaatttgatcaaacctgagatgaattgactctaagaatgttggaatagctcacaattcattcattggcttacagcagcgcatatacaaccccaggagcctgcagaaacaaaatcccacacgaaccactgcggcaaaattgccaaccatcagcccatcaacaatagatgagcttcgatggcatcctgctacggctgctcaaagtaaaacaaccctggtggccagccacaataaatgagctgtcacagctccataacaaaattatcctcaccactggtggcatgagatgaaaggttcgccaagcaatacctctctagctaagatgctgaatccattctat

SEQ ID NO: 310313 - DNA, 274 bp, Zea mays
gggaaggcaacaaagaaatatataaaaccaaaaccacactttaaacccataactgcctagtctcttgattagtgagtgaaacaggtccagaaagctgggacccaagggattagcaaaagaaaagcctcgtaatggctaggggaatggggttttttttttgctaaggcactaaactaacaacctgccgaaactagttgatcccgttgataaacacctgttccaaacatctttacgtttaagatcgcgaaccagggagctaattggggacctaaca

SEQ ID NO: 310314 - DNA, 167 bp, Zea mays
ggaacatcaaccggggggcccttttttataaagaccataatgggaaagggaactttaagcattcctggggccagggggggaacaaaacctgggctttaaagggttgccgccctacaaatttttatgcataaagggtaaacttttcccagggcaaaaaaaaccttttt

SEQ ID NO: 310315 - DNA, 313 bp, Zea mays
tttcctttttttttttttttttttttttttgggttgggtttttataaatgagggttttactcaagctatatatgggtattggcaagtaataagtatacatcgtatctgcaaccggcgctgtaaagtgggtgagtaaagagggaaaattgtatgccaatcaaaatctaggttttatgacgaacggcattttattcaccaacgggggatcagaatacttcccggtcaggatctgcgaggcgatatggaaattcgcagcttccgtgtaatgtatcccatcccagttgacgaattcagtagtggcgctgcacccttt

SEQ ID NO: 310316 - DNA, 451 bp, Zea mays
tttcgttttttttttttttttttttttttttttttttgtattaaagaaaaagtataaatcgttataaaataaaataaatatcattaaatttcaggagatatatcttcataatatatctattcactaggatgcacatgacaaacgattcccatgcgataatgcagaaggtttcacgagcacgacctcccgttaacatggccaaaactccacaacataatcataaccagcacgccatatcaaaaactatcatccatggctgttttagaattggacccaaaaacttttttcctcacttgaagcattttgcatccagcaaggcctctccctcgaacggctcctggtcctcaatcatggcattgacccgctccttctgtgcctcatcagagaggtcaaccttggcccactcataaagctccatatcatagacttcgtccatgacaaacttggggat

SEQ ID NO: 310317 - DNA, 170 bp, Zea mays
accaaacaagtagggactaaagtttactcctaggactaaagtttagtcctaagactaaatgaaaccaaacatggcctcagtttcttacaaaagtgaaaggggagatatatattacaatgtaactatgctatgccaacatgttcataaaatccaggattttgccatgtgaa

SEQ ID NO: 310318 - DNA, 212 bp, Zea mays
ggaatcgaatccaaaggtttagatagagcgtttagacttcagagatttacggattctgaagtcacatcattgagatgagacagaaatgctcatgccccactcaccctgtggggaatcaagagagaaccaaaaggcatacgtatagaccactgagaccagccattgatataggaccactcacaataaacagcgatggaaaaggtaaaatgcaa

SEQ ID NO: 310319 - DNA, 148 bp, Zea mays
taataggaggaacgcgcaggcggcgtactaggcctgcttgcagtacacagccagatagatatgctccacctcagatattatatataataagatgccctgcatgcagggttggtttgatatggacccggcggttgctcaaaaaccatga

SEQ ID NO: 310320 - DNA, 400 bp, Zea mays
  unsure (1)..(400): unsure at all n locations
tttnttttnnnntttaattttttttttttttttttttccgcgcaattggggggctatttttgcatgatgaggccaggtctcgttctcacaatgcagataaaacttaaagcgcaaacaatcaatttccgccgatgaactccttcatgcttttaagccaaacaacatactccttctaatcctttctcatcatgtattcggacagccaatcatgtagtgaatgtttgaaccccctgacctcaaggtacctgtgcaaggccttctgcaagctcttatccaggtccgaaaattggggcccctcatacacattcttagcatcggggttatcacggttcagcgccctcatattttcaattggtagttcatcatcattaaagttgcagtcaaattctaggattggacc

SEQ ID NO: 310321 - DNA, 443 bp, Zea mays
gaaaaaaatggttccggggggtatttatatcaaaacacattaccacactttcaataaaagtatacaaccagtaccttagcttacgacaaccttgcattattaggggtctaatacattaagatcacatagacccaagggttttttactacaactactactcttctattggatccagtttagagattgcagagtaataactatcaccctcgtcatcacaaaaaaatggccttggaggcatttggatgccatcaacaccattttcaaacatttttatgacctcgctcatcatcggccgatcttgcggtttcatttgtatgcaccaaagcccaatgatacatagctttttctctaactcgggcatataaacaccttcactgatctcgttcgcatctccttggctcagctggctgtacaccaaggatgggtagtatgcttgactggag

SEQ ID NO: 310322 - DNA, 299 bp, Zea mays
gggaaaaactccgaatattccccaggaacacttaaaccacaatgaaacattcgctcctggcccaaaactcaaaagtccaagaccccagacaaaacagtttcctccgaactccaaaactaagagcttaaaaaaccatttcagggggcttgcccccatccctgaaagaaaaccgggccccaaaataggttttaagctccggaacaccctaaatagccttgaccaaagcaaaatccacagcctttgggtcatcctttttgaagacaggcaaggacttggatgcctccttttttgtctaaaaa

SEQ ID NO: 310323 - DNA, 272 bp, Zea mays
  unsure (1)..(272): unsure at all n locations
ttttttnnnnnnntnccttttttttttttttttttttttttttttttttggtttttttttggcgattaaaacggggcatttttattggtccaaaacaattccatttttttttattcgttctgacagcagcaggagaccccacgaggggccccccacgggacaaaacacaccggatggggtaactggggcatggggctacacgaacaccacacttacgggacagattaaagctaaccggtcgaaggaagggaatttattcgtccaacaacaac

SEQ ID NO: 310324 - DNA, 398 bp, Zea mays
ggggaaccgcggaaactttaggggctttttatatctcaatccttgttcattatccaaggaagtacataatacatcaacaatgtacccatcaatcaatttaactaatttgcacctaaatatttctacatctagattctaacatctagtcatgttatatactgtcgcctaggggctagggtttgcatacctggggaagtctttactcttcactgatcatggctgcccaaaagttcaatgaacttactgaatcagactcgatttttgtttcaaggttgataatgccactgaaaagaaagctcctgaaccagaagcaacgtatcaactcctgacgaacccagctcgggtgatccctgcacaggagaagttcatcaagtttcttgaaaacagacgatacgtcc

SEQ ID NO: 310325 - DNA, 367 bp, Zea mays
  unsure (1)..(367): unsure at all n locations
tctttntttcttttacctacatctctntttttttttttttttttttattggagggaaagacccattttattccggaaacagatgcccaggctttctccgggtcctctgatagaagctcacataggttcacagttcagacttgacttacaaacagtcgcacaaaacatacagcactctgttctaactcgggacacgaaatcctctctttctctctccctctccgctcactgcctcaatctaggaagactgccggagctccgggcgcacaaagtcggcgttggcaggcacagagatatcaacggtgggcctcagctcagcgcagacctcgatggcaccgtggacagggtccgacaagaagttgctgatg

SEQ ID NO: 310326 - DNA, 313 bp, Zea mays
cttcagatcctctaacagacactactagactacagaggcagcagaaccctgtgctgccggcttgctatgtcgcgagcagaaggacctgagcctgtccaggccgtcttcgagagaggacggatcgatggcgaaggtgatccggagccagtcctcgcatcccacaacacgccctggcagaacaaccactgattcttccttggcgagccggcagcagaagtccatgtcgtcttcgatcccctgcaggcaggacaggtccagtttcaccattacgaacatggaccccatcggtctgcttgggcatgcgatcccgttg

SEQ ID NO: 310327 - DNA, 286 bp, Zea mays
  unsure (1)..(286): unsure at all n locations
tttnnttttnnnntattattattcttttccccccccnttttttttttttgttgggtttaaaaaaaaaggccgggtttagtatatatatataggatcaaaacatatcatcggggaccaaataatatatgggtacaggagacgcaatcggatcaaccaacatgcatggagacacacgtacatgagcacaaagactggccccaaacatgcagagggggatagcaaactgaagaactctggttttttttttttaacacacacaccaaacaatacctatgtatgggagcca

SEQ ID NO: 310328 - DNA, 375 bp, Zea mays
atgctggacaaaagccgtgatgaccaggtatatatatattcttgtgtctgacaaagtgcctcaaaactgaacagaaggtgcgacgagaaactcaacatgatgggtaattggcaaaatcttctctacttctaactaaacattcagcattgccggaaggagccccaccctaaacaaaccaaagcctatgatgagagaaagagcaaggcaagtaacttcctcccttacttcttcttggcatctccagcctttgtcttcttcacaccacggattttcttcgccctgttcttacgttccttcatctgctttcgtgacttctctaccttggtagcaaggccgttcctgatgaggcggtacttgggctcgaacttcttggcg

SEQ ID NO: 310329 - DNA, 255 bp, Zea mays
tattacataggggaagtcttacaaaaataaacgagaattataaagcgaactaaacattcatccttggtgccataaagctgactaggagacgccacctaaatgagctcgtacacttcattgtaaggatcctcctggaccacatgttctttctcctatgggggacggggtttatatattgcaagggtgagctcacaaaagatcatagctcaacaagttgtgggtaataatgtgcatgactcaccaaaggtgggagtt

SEQ ID NO: 310330 - DNA, 296 bp, Zea mays
caaaaccacaaaacatgtttcttttagtcgcaatagccacagcagattccccgggatgcaacacgcaaactcgctcgcacaatgccactggagctttcatttttgagccattttatggtccagaatttagtcaagtacatactggggctgtttggttcaactttttctgaccagcttttttgaaaatttggctggggaaagaatctggctggggggagaatctgagtattattaccattacgtggggagaaaaataaagttgttcaaagggcttaggatctaaaaagggatggatt

SEQ ID NO: 310331 - DNA, 272 bp, Zea mays
gaatgacacactgtctatcaccaaaatggcaatgaatgtgctgatcaattaatctagaaaccgaaataaggttccttcgcaaggaaggtacataaagtacgtttctcaacaacagttcaaaaccattaactaatttaagatgtatatctccaatggcctcgactgctgcttcaactccatttgccactctaattgttcttcggccctttgggagcctttggcttgtacggagtcccactctttagtagatactgcaggaattcagggcactt

SEQ ID NO: 310332 - DNA, 266 bp, Zea mays
cctctcaagacaaaaatttaacaagagactaagcacatatctgctaagatataattactaggattaggattcctcttctcctatactagaagtccgtatgtttttcagaatatcagtcacttggccagagctacacccgagaatttgacacggccgaaccctcactgcagttccaggagcatcagtgtcagaatttacttggcgaaggcttggaccgcttgctgctgagctgggcgaccgggaactctatcaggatgatgaacgaa

SEQ ID NO: 310333 - DNA, 378 bp, Zea mays
gagcacttcatttatgggatatataataaggtacggtaaccctggactggaacaatgcatatggtcctctccactacctcctttggtagggagttatacgtatgggtgcacttcatttatcattcgcagcgatgaagcgtttgtaccacttggctgactgcttcatgtagcgcttgcagccatcgttgcggtccacatagacgatgccgtaaggttgggtgtagccgcaaaaccattcgaagttgtccagcagagaccaaaggaagtagccctttacatttgctcccgactgcactgacttctgaagagcttgcaagtggctctggaggtaatctattcttttctggtcattcaagttattgccaaggtcaacttcag

SEQ ID NO: 310334 - DNA, 316 bp, Zea mays
  unsure (1)..(316): unsure at all n locations
ctactcttaataaatccccccctccaaaaactacantaatgggggggcattaccaagaagcaccactttttctttaggataaacttaaaacaaatcctgacgggggtaacagcatccattgacccacagtccacgctggtagatgcatgggtctgctggagccggggatgaacacagcactaacaacggacacagagcggccttgcaatcaaaaacacagatgggcaacaacaaacgagacgaacgaagataaaccctcgggactagggaaaacaacacgggagcgaacaggataacttggccgcgcgggccccac

SEQ ID NO: 310335 - DNA, 367 bp, Zea mays
gcccgggcagctaaaactatggcatggtctttattaacgctatctgcaaacatctcaatcttgtcccgtacaaaacagggctgattacacgttaaagtaccagccatgttgaagaggattacatccacacttgctagatcttcaagtgcaactgttccccggctagcaatccccagaaaacaaagccttacagatcccaatgccaatgccaggtaaaaaaaagtaggcattgccatcgggattccaccaatcaatggcataaaatgggcgtcgagtggcatgcctctgtaattttgtttttggaacaaaaatcttaagactatctcagcaaaagtgccaacaagtaccagggaagcacagaagcagc

SEQ ID NO: 310336 - DNA, 232 bp, Zea mays
aaaggcaagctccctcgcctaatggtaatttaacattttgaacaaccttaatacaaaaggaaaggcagttttgtcacgacaacataagcattcccacccatttagtccctaggaggcatcaccacacgaacctaaaactggcgggtcctaacagggatccagggaattttatttttgtcccaagcactggggaaaaggacttaggtcttttcctttttttcctcctcctcct

SEQ ID NO: 310337 - DNA, 364 bp, Zea mays
  unsure (1)..(364): unsure at all n locations
ataaatacagtacgtcagttttactcgacaatgacagtacaacgagactctcgaactggtgaaataaaagagaccaaaagagaagaagaagaaaaaaaaaaaagagaaaaggatcacccaacgaaaaatatcagttactacaagcaccaccttgaacaggtcacaatccacggcacacggggatcagattacagagggcgagagtgcaagctctggatggatgagtggatgcagaggtngggtgagcagagcacggagcaccggttggcgtctagtagagcgagtcgaccgtcttgttgagctcctagagcttcttcattcgcatcctctcgctttcgctcacaagctcgattagtctgttcac

SEQ ID NO: 310338 - DNA, 220 bp, Zea mays
ggacgggcccaccgaaattcggcacaaaaaaaaggggatacataagccccatttttgatccctccagaggtaaacattattagcaggctcaagctttaagttggggggaggaaaaacagtttttgttcctgggcaaaagctactagcttacatagcacaggtgggcaaaaaaaagtttgttcgttttcaggggatcattttaaggggacttcacgggggc

SEQ ID NO: 310339 - DNA, 166 bp, Zea mays
aacagaacacaatggggtcttaatttaacattacccaaactggcattttgacaatgttagcccatgatgaccaccatggaaacaggaatttagggacaaggaggggcctttgttgggtggcaagggggaccccccacaaaccccccagaccggggggggaaccccc

SEQ ID NO: 310340 - DNA, 271 bp, Zea mays
acaaaggaagagacaaaatgccctttgtattaaatggacttgcataaacaaacttaaaaaaaggaaggggcgttcaagatactacaatgcaacaagcccgagcaaacagggaaaaaaagggttagacaattattttttaacaatacaaaagcaacacccattgtaaggtttatccgactcccaagtcccaaacatgaaaaaaaaaagggaacagtaacttggggtacaccgtttttattaagggaacaggctacttgagcctcattgggtg

SEQ ID NO: 310341 - DNA, 143 bp, Zea mays
aacccggggggcgggcaaataaaacttgcccacttccacgttgggggatcccaatggacgaggggtgcactcaacccctttcaagggatccaatgatcaacttggatccccccacttttttacttataggctttttcccattt

SEQ ID NO: 310342 - DNA, 389 bp, Zea mays
cctccataaatatatggtgcaatttgcaaaagcaattgacaaatccaactataataaataaatggaccatgtagacaaaccagaggatgcggtgccgcaaacattcctcgctctcatcctcatccttctctctttcttttttgggtcagttcagggccggccctggacaggtgccggcggtgcggtcgcaccgggcctccaagaactaagggacccctctttttttccccaagtttacgatttcccatccgccctttcgcagactgaagctaccgtttgccccggatttcgactttacagttactcctatttctgagttcacctgtgattttgtcctcacttttttccccaagtttacgattttccatccgccctttcgcagactgaag

SEQ ID NO: 310343 - DNA, 414 bp, Zea mays
ttttttttttttttttttttttttttttttttttttttttttttttttttttttttttttttttttttttttttttggcaaaaaagggggggtttgaatcatttcctagaaaaaagccttttacagttttaggggcaaattgggattttttaccttttttaacaagaataaagcttttgctaccaaagactttaaaatttgaaacatggggctttttaccggttgggggttcataagatgtttttttggggattcggggtaaatacaaccggttgagggcgtaacagggggggttgaccgcctccgcccaaaaccgatcctaagttttggactcatcaagcaggggccttaccatggccaataggggtttatttttcctttccactacaccattttgttgggatgggtagggag

SEQ ID NO: 310344 - DNA, 238 bp, Zea mays
ggaggcaagccatactggtgcaaaaaagttttgggtccaacacaaaggacccaacaggtccattaaaccaacgaagccccaaccacgatttatgacacacaaaccacagatgtttattagacgacgacctccatattgaggtccaccagagggccccaaacgacgcaaatccccaggtacagcagcagcttaaatgaaccatgggttactgaccaccggggggggggagccccagggg

SEQ ID NO: 310345 - DNA, 323 bp, Zea mays
agggaatcggtttatatggcataaacgattcgccccgtgaaaatccgcgccctgaacaccaactgtccagaaagagtaaagagaaagatttgttttgatttgatgaagttgaatttcttcttttattcaaccttccgtctgaacgaacattcttcggtcaatcgagcttttccaccagtaggctgacacaacacggtggcgcaagaggcgcaataaaccacagtggctgcatgactgaaaatcgttgtgaactgaaagcagcccgggcacttaacatccatgaagtaactgtttggactttgcacgagacgcttcaacttatt

SEQ ID NO: 310346 - DNA, 325 bp, Zea mays
gggacccaaaccctaaccaagggtgggggatatatttatatgagtagttaggcctaagcccattacacaaagacaccccattacaacaggagaaacgataaccaacacctctgatgactgaagaggaattttttccatcaaactgatatattgcattcactggtagagctcacacctttcccaatacaggagccattcccataataaccgatgccaaagctgaacgaacatgctgagatgaatctgatgaaaattccttgatacacggaaaaaaatgtccaattgcaatttgggggtttaatattttgcaaaattttgtaacttt

SEQ ID NO: 310347 - DNA, 531 bp, Zea mays subsp. mexicana
ctcaaacacatcatcctagagaacaacgagaacaagcctgtcacgaacagccgtgacactcaagagatacacctagaacaaggccttcagatgctcaagatatttaaggagcatgtcagcaagacgtccatcttggatgacttcgccttctatgagagtcgccagaagctgatgcaggataagaggtcgaaacagcagcatgtccaaaagcaggtctgggacagtaggacccccatttctgtcactggaagcgagcaacagaatgggaagcccaatccgtctgcaccagcaccaaacggtgtccctgcagaggtgaaggcagcgaaggcttctgcagagaacggcaccgccactccagctatttcctacgcggcaaaggtggcccaagcagcaacagagaaacccgtgctcgccaacggagtcgctaagaccggttagctggaccgcccaactgatgctccatagctagccgcgaacgacggtcgacgtcctcaagagctcgaccgaatcgctgtacaaggggactggtga

SEQ ID NO: 310348 - DNA, 455 bp, Zea mays subsp. mexicana
tatagtgaaagctgggacgcctgccgggacgcggatccggtaattgactgggctcgagcccagacccaccgtttgccgtcaagacactcgagcaggagaacaccgcgctccgggcacgcaccgacaagctcggcgaccggctccgctaaggctacgaggtgctccgcctcgtcgaggagttcagcggcgtcgccatggacatccaggaggagatgccggcagacgaaccgctggtgcgtccctggcagctgccctacatgacagacgtcatgcccatcggcgccccgaacatgcttcactactgaggatatgattcaccaaccacaccaacgtacatctggagctgccagatggtgctgggagagatcaagacaagatgacatgggtgaatattaagaacattcacatctactacctacctggctgtgttgagaattacagggcctgtactatat

SEQ ID NO: 310349 - DNA, 478 bp, Zea mays subsp. mexicana
ttcagtgctaaccagaactttgaccactacgctcaaccctacaacacgagccgtgtcctcaaccctgattataccgttaacctcacagcctataaggagtactcccctatcctgttgggccctgctttttccctgtcgtatggcatgggctttgccggcctgatctcaacacttacccatattgccttgttctatggcccagacgtctggcgtcggtctgttgactctcgatctgaagagcccgatattcatttgaagcttatgcgcaaatataaagaggctcccgaatggtggtttctcgccgtgtttctggtttcgttcggattcggtttggcggcatgtttgggctggcaaacgcatcttcccgcgtgggcgtacatcctgtgtattatcatcggtctcttcttctttattcctggtggcatggttcaagccatcaccaatcagcatactggtctcaacatcatcaccgagatga

SEQ ID NO: 310350 - DNA, 480 bp, Zea mays subsp. mexicana
tcggttaagcctgaactgaaataagaacgaagtggaataggacgaaggaaggttctgcatctcagattgaatgtcggaaggaaagaagtacttgattgtgttggctcaccatgagcccaagtcgctgaatcactctttcgctcaacgtgctcaacaggtgctcacggctgctggaaacgaggtcaagctgatcgatcttcatgccgtcaacttcaacccggtctcggatcgacgcaacttcaagacgacggccaacccggagtttctcaaacaacagatcgaggagcgacatgctaccgaacacgatgggttcgctgatgacatcaaggagtccctggaggcagtcgactggtgcgatgtattgattctccagtttcccttttggtggttcagcatgcccgccatcctcaaaggatggatcgacatggtctgggccagtggaagagtctacggtccgaacaagaagttcaccgctggagt

SEQ ID NO: 310351 - DNA, 423 bp, Zea mays subsp. mexicana
tcgttgacgcgtggggaactctcacagttctatggatcctcttattcaggcgaacactggttccaaggcgagttcatcactgttatttatgagagggatcctgccgaagtatttcagttcagagtggtcatttgctcagttccatttaccagaagtcacccgttacatagtagcctttggtgctcagaatactgtgatgatggttggcctggatggcaggtacttaccttagtgaattaaattttacaattttaagattttactctcagcagatttggaatacctacatttttattgctggttgtgagcaaaaatttttttttccccacctgagttcacttattgagttatgtgggagtttcatttcagttagtagtagggtagatttggcagactcggttcctacctagcgagtgccaccgt

SEQ ID NO: 310352 - DNA, 456 bp, Zea mays subsp. mexicana
  unsure (1)..(456): unsure at all n locations
aggatcttctaacaaagagtgatacttttttgctaatatctggaatatcagatagtggaatgcctgttccaatttgcaagacagaagtaagaaagaatgatctcaatcctaggtggaggccagtgagtctgaatctgcaacagattggaagtaaggagaaccctctaattgtagagtgctttaacttcagtagcaatggcaaacatgacctagtcggcaagatagtcaagtcagttgcagaattggaaaatatgtaccataggaagaatggtgaaaatttctttgttcctgccagcaatgcacatgaatgtcacagtaaggaggtgttgaagagccagctatatgtagagaaatatgttgagagtaacagacatactttcctagattatatttctgttgggtgccagttgaantttatggtaggcgtagatttcacagcttcaaatggaaatccac

SEQ ID NO: 310353 - DNA, 462 bp, Zea mays subsp. mexicana
gcagttcatttttctctggacaaaacattacataaacaatgggtacaggttgtggcaatgcatttcttgggaatggctggtcacttcggtcttgggaatacaaatagccttgccagcattgatgttgcgggagctttcattggcatttcaagttactccacagttctttctggtatactgatgtttatgataacatatgcatcacctctcatgttataccttgggttggtccttcatgcatcggtgaaagatgtcgatgatgcctccaatctacggcagctgaaatggagctatattctagacaaaattgtcacattgccatgtttgtttcctttgctcatcaattctcttgcgttgacttcatacaccattgttttgctagccatgaggaatcacttatttgtttggagcgtattctcaccaaagtacctctatgcctgcgcagcaacagtgtgcacatat

SEQ ID NO: 310354 - DNA, 417 bp, Zea mays subsp. mexicana
cccacgcgtccgcttcattacgttctacgttagtgtgcaactattaaattcatcactataaactttctctgttactctttctagcactgtgcaaatatggcccaagagttgttgttcgttgcataaaaccaattaacaagggagatgaagtgtgcataacatacattgatcttctccagaccagggtactatttcttgaattttgctgaacccatatttagtcactctgacacatgaagtcagtatacccataatattatagatctccatatattatcaacatcaacatagtcttttagtcccaaacaagttggggtaggctagagttgaaaccccacaagaactcactaaaaagagaaagagagagaaaggggaggggaaaaggcttttgagagaactaaaagggaaaagacctaa

SEQ ID NO: 310355 - DNA, 530 bp, Zea mays subsp. mexicana
ttttcgctgctgcgcacccactggctcgacttcgccaccggcgacgccaccgtcgagtacgacgtctacgtcacggactagctaattaataacataccgccttgctagccctcaccctcactgatgagggccataagcattactacaaagacaggaccacgcaacaacagtggtgccaataaaggctttgaagcatgcttcgccacagagcgcctgttttttcttttaaaaccagtattttcgtttcagcttttatatatagaacgcatgatctgtatctccaatacaagcttcagaaccccttgctaatactagattggatactctagtattgactacaatccacatgtattaagttagattgaggtgtaaattagtttgatttacacctaatctacttcaatacacgtggattacggttaatattagagtgcccaaacaaagccatgtgttttctgaaaaggtcgtccaaaactccggcccacattatgttgctattgaaaactgagcaatatatagcttttacttta

SEQ ID NO: 310356 - DNA, 451 bp, Zea mays subsp. mexicana
tgctgcgccggctggtaccgccgcggcggaaccggcgcgacccacgcggcctccggaggcagcgaggactcgcggcgaagacgcctacgctacgtccacggctgcactccaactctgcgatctgcaggaatccgcggctgaggcgccggcgatggcggctcccatggtcgacgcccaatacctgcgccaggtcgacagggcgcgccgacacctccgcgccctgattttcaacaagggatgcgccccgatcatgctccgcctcgcatggcatgatgctggaacttatgacctgaagacaaaaactggtggtgcagatggttcgatcagatatgaagaagagtacactcatggttcaaatgctggtttaaagattgctatcgatctccttgagcctatcaaagcaaagaatccaaagataacatatgcagacctgtatcagcttgctggagtg

SEQ ID NO: 310357 - DNA, 463 bp, Zea mays subsp. mexicana
cggaatgaaccggctggacccacgcatgcgtatctacatactatcctttctgcaacaacgctggcggacgcgacattactggcggagctacggggcgcgttaacgaatggaactcgcacccaaagaactacgggcccggatcccgcgtctgacgagtctgtgcgaaccctcatggactgaacaggaagtacgggctgatgcgctgcaagcagtgcttacacagcaatgacaaggacattggcttcatcaagtaccgctgaaatcaggtggcaatggaccatgtggtaaaggcgaagctgtagttttatttccagtaatttagatgttttgttcagaagtctgctagtaaagactgctacgtttatgatggagaacttagccatgttggtcatgttggtcatgagttacctatgttgagcttaaactatcttgtgtccaaccatcgctgggtagtatgattact

SEQ ID NO: 310358 - DNA, 553 bp, Zea mays subsp. mexicana
  unsure (1)..(553): unsure at all n locations
ttttcgcgtagcacagtccattattgccgtctgccttttgcgtgagcaaagaaagagagcgagaagagcagtcgccatgtctggcatcatccacaagatcgaggagaagctccacatggggggcaaccacaagaataaggaggatgagcaccacaagaaggccgaggagcaccacaagaaggaggagggggagcaccacaagaaggacggcggggagcacaaggaaggcatcgtggagaagatcaaggacaagatcactggcgagcacggtgacaagtccggcgaccacaaggagaagaaggacaaaaagaagaagaaggataagaagaagcacggcgagggccacgaccacgatggcggccacagtagcagcagcagcgacagcgactgagatctggtgtcgcagcacaggtgcaacacttgtatgcttgctggatggaggattcataccagatggctgatgctgatgtagntgttcacttgtgtcatgcatgtatcgtgctattatatttaaaaaaaaagaaatgaataccgtccgggatgtttgtttgcc

SEQ ID NO: 310359 - DNA, 479 bp, Zea mays subsp. mexicana
  unsure (1)..(479): unsure at all n locations
tcccacgcgtccgccctaatggtgtgtttggtttgtggagtcaccatatgcttcatgaggtgatgcatcataagttcttcccataaattttggtggactcaatccactcatcatgtatatactaattattagcttatgaggaataagatgatgatggatcaactcattctattccataaaccaaataaaaaagtgaggagtgagaagaagatgaaccacttcattcttcaaaccaaacacaccctaagtgattcatgttatgtatatgtatggtagccttttttctctttttgaagatagatgacatgtttaacacttccctaaatactcattgagtcattgaacatattgttgcttcctgtgttcgatagaacaataacttatagcttaattcagctaaattactgatatgtagtactccctccattaaaaaatggtnatcatattagaccagagaaaaagtcattcaaaatagattt

SEQ ID NO: 310360 - DNA, 328 bp, Zea mays subsp. mexicana
  unsure (1)..(328): unsure at all n locations
tcctatcacggatcccggcatcgatgatagtttgactttactaatggagctcagagcacctagtgcgcaaatnattgggctcacgaccatattcggcaacgtcgacacaaagggcgcaacacgtaacgcgctattgctgtgtgagagagcaggatgccctgaagttccagtacgagagggcagccatgagcctctaaagggaggaaagccccgtgttgctgatttagaacatgggtcacatggcattgggaatctcgttctttcctgtaccctttgataagaagggtgaggaaaagtgctgctgactttatgattaataaggtctttg

SEQ ID NO: 310361 - DNA, 501 bp, Zea mays subsp. mexicana
ttttgccagacaagcgacctcccacctccgacgtctagcctcggacagcttttgtctgcgtataacaagaagaacctcaacccaaccgacatggttgcactctcaggagctcacacgatcggacaggcgcagtgctcgagcttcaacgaccacatctacaacgacaccaacatcaactccgccttcgcggcgtcgctcagggccaactgccccagggcaggcagcaccgcccttgcgccgctggacaccacgacgcccaacgcgttcgacaacgcctactacaccaacctgctgtcccagaaggggctcctgcactcggaccaggagctcttcaacagtggcagcaccgacagcacggtcaggagcttcgcgtccagcacgtcggccttcaacagcgccttcgccacggccatggtcaagatgggcaacctcagcccccagaccggaatccaggggcagatcaggcgcagctgctggaaagtcaactcgtaaactactacg

SEQ ID NO: 310362 - DNA, 327 bp, Zea mays subsp. mexicana
ttttactccaagttctggatctgtcaaataacaatttgtctggagaagttccatcaactggatgctactgtttattcacccctatcaggaaagagctcttctagtactggagcaattgctggtggagtggctgctggcacagtcttgctatttgctgagactgcaattagtttcgcctatggggctcacatgacattcacaagaacatttctttgaagtacctgccgaggaagatccagaggtgcattttgggcagactaaaacatcttgactactacaactacaagttgcaacagatggcttctgcaataagaacattcttggaag

SEQ ID NO: 310363 - DNA, 228 bp, Zea mays subsp. mexicana
tgtcaacaatccagagctcaactggatttcccgtgtattaaagttgagcttgaatgatctaccaagttatcttaggagctgcttcctatactgcagcatctttcctgaagattacaagattagaagaaagatgatttccaagctatggatagcggaaggtcttgtggaagagagaggagacggaacaacgatggaggaagttgccgagtgttaccttatggagctcac

SEQ ID NO: 310364 - DNA, 382 bp, Zea mays subsp. mexicana
cttcaccgaccgccgctcccgacccaccgtcaacctcttcgccgccaacgccaccgccttctacgaggcattcgtcgccgccatggccaagctcggcaggatcggcctcaagaccggcgccgacggcgagatacgccgcgtctgcaccgccgtcaactaagcctgcattggctgcttgcttgctgcttgcgtgcgtgggtttcacttatttcacttcttctttctcttgtttatatacgtacgtttgtcggatggattttgttggtagccatgagatgagatccttgttcttaactagccatgatagagattgatccagatgttcttctagattctaattctttatggatgtttcccattgacacgcggttacgcgcgcttc

SEQ ID NO: 310365 - DNA, 530 bp, Zea mays subsp. mexicana
  unsure (1)..(530): unsure at all n locations
tgttgaatatgactggggattttcctatgggtattggagcgggtccaagcagattaaagaggatgagttgtcagagactgctatttattcgaattatttatggtatatttatcataaaaagggggaggtgcaagagactgattcggacttcttgcagagtggaacaatgcagtaccagacacgagatatatctttcaaagaagaaggcttttttcgaataagccaattgatttgggaccttcggatccattctttttcctattcaaagataaggcctttgtctctgtgttttcacgtcgagaattctttgcagatgaagatgaagagatggcaaagcggcttagtaccagtacctggagaaaaaagcctcctaaacatatggctagcaactggttcaccaggagtacgcaagaaaggcaaaagcactacgaattattgatttaagaatgggaatgggctagaaccctgngctcttncttatataattaatggtcttttcattctaatactctatccgagagttctcagta

SEQ ID NO: 310366 - DNA, 534 bp, Zea mays subsp. mexicana
ttttacaatctggaggcgaaggtggttgtggcagggctgtcaacaacctgtagctaggaaattcacaatcaattggtacacaagtggcattgttctcatcctcattgtatctttcatgatcggcgttgaaaagacgcacagggatacaaagtatgtcttgtttcttgacgatgatgtgaggctgcatcctgggactattggagctgtcacaaaagaaatggagaagaatcctgagatatttatacaaactggatatccccttgacttaccttctggcagtttgggcagctattgcatatatgaataccacatgccttgctcgatgggatttgcaactggtgggaagactttcttcttgtggggggctgtatgatgatgcatgctgatgattttaggcaagaccgatatggtgttgtcagtggattaagagatggttgttactcagatgatatgacactcgctgcaatagcagtggcgagaactgtctcacttgagtcaccaagtcatgggtttcaagctgcctctccgtatttg

SEQ ID NO: 310367 - DNA, 459 bp, Zea mays subsp. mexicana
gtttccggaacaattgctggatctacatatggcgttgctaagcaggctagcctaatctccgttaaggtcttctctggagatagctccaccacctctattatcctcgacggctataactgggccgtgaacgacattgtctcgcggaaccgtgctagcaaatctgctattaatatgtcgcttggaggacctgcttcatctacctggacgaccgccatcaacgcagcctttaaccagggtgtgcttaccattgtcgccgctggtaatggagactctctaggaaacccccaaccagtctccagcacttctcctgctaaccgacctaacgccatcactgttgcagcactggacatcaattggcgcactgcttccttcaccaactatggtgctggtgctgacgtttttgcccctggtgttaatgttctgtcctcatggattggaactaacactgccacccacaca

SEQ ID NO: 310368 - DNA, 424 bp, Zea mays subsp. mexicana
gtggagggcccccggcgagtgcgcaagccgtactctatcacatagtgaggcgagagctggaccgaccgcgaacacgacaagttcctagtggcactgacgcttgttgaccgtgactgccaaaagattgaagcatatgctgggtccaagacagagatacatattaggagtcacgcacagaagaactctttgaaggttcaaaagaatggaacaggtgagcatttccccccacctaggccaaagcgaaaggctgcccatccatatccacacaagtgctcaaaaaaggcccttcaagttgtcttaccacaacatggttcacacataatggagcaaggctgttgaacacctatggatgtagctactgttgctacagactctaatgtaaataatgctttccctgttaaacatttcagtccgaggaatacac

SEQ ID NO: 310369 - DNA, 333 bp, Zea mays subsp. mexicana
ttttcgcgtggggttcttcacgtacccgcagtacgtgtggtgccactcggcggcgcgcgaccccgcggaggaggaggacgggcggcggtcaggggtggccgacgtcgaggtgaccctggtggagacgcacgccagcgtccgagtgatgacggcgcggcgggccgggcagctgctcagcctggtcaccgggcttgaggcgctccgcctcgccgtgctccacctcagcgtcaccacgctggacgccctggtcctctacaccaccagtgtcaaggtggaggaagggtgcggtctggcgacgggggacgacatcgccgtcgctgtgcaccacgtgct

SEQ ID NO: 310370 - DNA, 215 bp, Zea mays subsp. mexicana
tttttatggccgaacccaagcggactataacagggggaaggagaaaacgctccaccgcgtgctaaggccccgcggcggaaacattgagccctcgctgcaagcgctcggtcgcaagaacaaccaggacaagatgatccgccgcaaaagctatgcacgcctgcaccctagggctgccaacagccgcaagaagaagagcgggcacagcaacccagctg

SEQ ID NO: 310371 - DNA, 455 bp, Zea mays subsp. mexicana
tcgtctaggacgccgccgtcttcgggctgccggacgaggaggccggcgaggtcccggcgtcgtgcgtggtgcggcgacgtggcgcgccggagagcgaggcggacatgatggcgtacgtggcggtgcgcgttgcgtcgtacaagaagctccggctgctgcgattcgtggacgccatccccaagtcggtgtccggcaagatcctgcggaggcagctcagggacgagttcgtcaagaagacggcagcagcgtaataatgcacatcatcctgtgggtggctgcttgcttatgccagtgcaagatcctgcgttcgccacttgatgaagacaataatacaattagggtacagtcagatgttccaagctactgatacaattgttgtttctgcaaacagtactcccaactagtgcatatacattgacattgtggacccaaaaaaaaaaaaactgctgttcctg

SEQ ID NO: 310372 - DNA, 555 bp, Zea mays subsp. mexicana
cgctatccctgtgtctgttctgttccctgagatccagatccctctctggggagttgtctatgtcccgacagtcataaccctcttgaaggctcttggcacaccgcgttcctttcacctggtgatcctctgggtcctgtttgagaatgtcatgtcgttgcaccggattaaggctgcagtaagtgggcttctggacgctggtgggcgagtcaatgagtgggttgtcactgagaagttgggcgacaccagcaaggcaaagcctggtaccaatggatcagacactgctgtaaaggtgatagatgtgaagctaacagaaccacttgttccgaagctagtgaagaggcgagcaagattttgggagaggtaccactgctcagaacttttcgttggaacctgcataatcctgtgtggtttctatgacctgctatgtgcaaataagggatactacatttttctcttccttcaaggcacggcgttccttgttgttgtgtttgggtatgtcggcacactacctccttgcactgcataagcctgcatggacaactgatattacctgct

SEQ ID NO: 310373 - DNA, 493 bp, Zea mays subsp. mexicana
gctgttatatccgttttgattgttgctgctggtactggtgaatttgaagctggtatttcgaaaaatggtcaaacacgtgaacatgctttgcttgctttcacattgggtgttagcaattaattgttggcgttaataaaatggattctactgagccaccatacagtgaaactcgttatgaagaaatcaagaaagaagtttcttcatacattaagaaaattggttataatccagctgcttgaccatttgttccaatttctggatggcatggtgataatatgcttgaaccatctgataagatgccatggttcaaaggatggaccgttgagcgtaaagaatgaaagacagaaggaaaatgtctaattgaagcttttgatgccattctaccaccatcttgtccaactgattaaccattacgtttaccattacaagatgtttacaagatttgtcggtattggaaccgtttcagtcggacgagtttaaaccgggattttaa

SEQ ID NO: 310374 - DNA, 538 bp, Zea mays subsp. mexicana
cccacgcttccgcggacgcgtgggttctagctgaacagtagcttattgaaagtaaaactcatcatggaagttaagtttacaataaataatcgtcagttttcggtgaatccatcaatagttcctgttgatacgacattaaatacattcatcagaagttatgcaagactaactggaacaaaatttatgtgcttagaaggtggctgtggtgtttgtattataaatattgctggattaaaaacagattcaaatcaaacacgttcaatagctgtaaattcgtgtctatggttggtgtatgcttgtcatggtttgaatgtaacgacgattgaaggtcttggtggtcgtgaatatggctatcatccaattcaacacacattatatgaatataatggtagtcagtgtggttattgctcacctgcaatgattatgaatatgtatagtttactcgagcaaaacaatggaaaagtaacaatgcaacaagttgaaaattcatttggtggaaatatttgtcgatgtactggatatcgacccattttagatg

SEQ ID NO: 310375 - DNA, 398 bp, Zea mays subsp. mexicana
aacaaattttatctgttgcaggtataggaggaaaagagacaggctaattgaacgcgcttctgttgcacgcttgcctttgaaatggggcaatgtccatgcctattgctacaaatctgttattgatggcattgagcatattgccatggtgaaagtaaagtcactgcagtacttatttgcctctgtagaattttgttttgtgacgtattactgtttgtacatcacctgatctaactatcaatcacatgcccaatgatgggcagggtgatattggtgacggccaagacattttggtgagggtgcactctgagtgcctcacaggagacatttttggatccgcaagatgtgattgtggtgatcagcttgcaatggcaatggagatgattgagaaggctggaagg

SEQ ID NO: 310376 - DNA, 518 bp, Zea mays subsp. mexicana
gtgtgtgttttgtataaaaaattaagaaaggattctaaacatggctggcttggcgcgttgtgccactcggatcacatttgttaataaaagaacattatcaaaattgttcaattttcaatcaccttgtacccaacaaatagcaaatatatcgagcaaagcttggagagaattgaatggtattcaacggccgcctccatatgattataaaaacaatacttatgaattgtaccattcctggtacgacagaacatcaaaacgtttcgatgaaaattctaagatcatattagtggaaggcccaattgctgctggaaaaactgagtttgccaagaaattagcagaagatttagacatgtattatatcccgcaagcaagcatggacgatatttacataaatgattatgggtatgatttgcgtgatctagatgatcaattacctccaggagcacgaagtttcgatgaaaagaagtttgtaaatgatcctaataatcgtttgacagcagcctttcaacttaatatgt

SEQ ID NO: 310377 - DNA, 515 bp, Zea mays subsp. mexicana
cttttattcccgaaacgaacacctgaaactacaacatggcggatctgatcaaggcagtcgatatccgaggcggtaaaggcgagcgagatgccctcttcatcaaccctcagacgccaaagccctcgcctactgaaggacaggccctcgtccgtgtcaaagcctttggcataaaccgcatggatatagtccagcgacgcggcttttacccgcttccgcctcaagcccccgcaacgctgggcgtcgagttcagcggcaccatcgagtcccttgggcctggtgaccacggtgcctttaagcaaggtgacgaagtctttgggcttgcctacggtggcgcctacgccgagtaccttgccgtcagcacacgcatgttgctgcacaagccgtcgtccatggactttgtgacatgcgctggcatcccggaaacctggatcacggcgacacaggcactgcaccttgtgcttggcttcaccaaaggtaagtcgatcttgtggcatgctggtgcctcgggcgtgtct

SEQ ID NO: 310378 - DNA, 452 bp, Zea mays subsp. mexicana
gagttcttgagccccgaccaaaccaagcagcgggagggggaactgagaggccgagcccgaagcgggaacagtggaggacgagcggacgacaccctcgaaaaagaccagcggacgggagcgacccacagaaaaccggagatgcagaatggagacagcacggaggcgcaagcgacgagagaggaccagcagaacatcaaacgcttcggacgccacaacaaccgcctccacgagcacgaggacgagaacaaactggcgaaggaaacgaacgagaaccgcgacgaggctgggaacgaagcaaagccggcggacgaagaagcccggcgctaacaaaacggggaggagcaggcaaacaagccgagggacgacagccagacaaggcaggagcagaagaaaaaggatgcggttaagaagctggagaggctagaggaggaaaaggaaaacagcctgcccaa

SEQ ID NO: 310379 - DNA, 443 bp, Zea mays subsp. mexicana
aaaaacagatggcagaaaccgcaaaggcggggaaaaaggaaaacaatggaacttggagggaacgcaccaagcatagttatagatgaagcaaacatagatgttgctgctaaaggcaggcatgcagccaagacccgaaacagtggacagacatgggtaagcgcaaacaggaaataggggcaagaaggtaactacgaaaagttcgcatcggcatacatcaaggctgaacagagacagaaggctgggaatgggctagaagagagtacatcccagggtcctgtgagaaacgaagcagctggacaaaaggagcaaaactgggccactaatatgcaccaacgactaagtcgaccgacacgcctgccgcaaccctaaagagagcaatgacacaagcaagagtgaaacaaaaggtggcccatatacacccccccaaggggagaagggcataa

SEQ ID NO: 310380 - DNA, 420 bp, Zea mays subsp. mexicana
ttctttttcaacaagaaaggcttgcccacgggccggatcaatgtgcctgaagcactatgtcttgttgtggggattatctacttggtcattgctattatatttcagcagtttcactatgccccagactccatttggcttgttgaatataatgcagcgttggcatcagtctgttttatgattcttcttggatttgtcgatgatgttcttgatgttccatggagagtgaaactggcattgccaacgtttgcagcactcccattgcttatggcatatgctggtggcacttccatcatcattccaaagcccttaactccttatgccggactaacggttttggagctaggtttattttacaagctattcatgctcttgttagcaggctttcgtacctactcgataaatatacatgctggcctaaat

SEQ ID NO: 310381 - DNA, 488 bp, Zea mays subsp. mexicana
catttctatgtcggcctgcacacctttaatatgtggctgcatcacacagctgaagcaaacatctttactctttttgccaaggtattcaggtacctgctgctttcagaacttactcctgattcaacttcatatatgagtgttgcattggccctccagaagttggatgactgtgaattgatactcaaatttgtaagagaaattttggaaatcacgcactctagagatgctacagttatgaatcgcattatctttgccacagccaaatacggacacattgataaaagtttggtcattttcgaagagttgaagaaatatgaaaccagcttggatgttgtcacgttcaacactgttttggacatgctagggaaagctggacgggtggaccaaatgcttggtgaggtgaagctaatggaaaaacttaagcattttcctgacattgtgacatacaatacactaataaactgcctgcgaaggcttggtagactaga

SEQ ID NO: 310382 - DNA, 529 bp, Zea mays subsp. mexicana
ctattggtaaagctgctccgcctgcgcgaccgctccataatcgcctggtcccacccctcctccgttttttttatgataaaatgaccaagtcctcaagggctgatggattcacatctggagggaaactactcaacagaagaggcaaccacattggttgaccttgcctctcagtgcctacagtacgaacctagggatcgtcccaacactaaaaagctggtttccgaacttgagcccttgcaaataaaatcagaggtaccatcctacgagatgcttggcattccgaagcatgaagaagaagcacctttccctacacaaccgcaacaccctttttctcccatgggcgaggcctgttccaggatggatctgactgccatccatcagattctagtgaacacgcattacagggatgatgaagggagcaacgagctatcgttccaagaatggacgcagcatatgagggacatgctggaagctaggaaacgtggggactttgctttccgtgacaaagatttcaaggcagccatagact

SEQ ID NO: 310383 - DNA, 536 bp, Zea mays subsp. mexicana
ttctcgtgcaggtgtcgtacgccatcggcgtgccggagcccctgtccgtgttcgtcgactcgtacggcaccggcacgatccccgacaaggagatcctcaagatcgtgaaggagaacttcgacttcaggcccgggatgatcagcatcaacctcgacctgaagaagggcggcaacaggttcatcaagaccgccgcttacggccatttcggccgtgacgacgccgacttcacctgggaggtggtgaagcccctcaagttcgacaaggcatcggcttaaggttgggagtgttcattgtggacatgaggactaccttcctctggctctgctgttacctgcaagcattgctgctgctggatgtgtgtgtttgatcagtgactggctgctgctccatagaagatgaacggagagaaggatgatgaagaagggctttggcaatcgccgctgcaactgcaacccatgccatgccggcttagtgattgggtataatttggcttagcagtagccagcattattatgtgctgatcttttatctttact

SEQ ID NO: 310384 - DNA, 512 bp, Zea mays subsp. mexicana
cgacctctcagctccacccgacccgcggcgaggagcacacgtttggcatggcctcacagctcgagccgaccaaggacgagcacacgacgctcggcgagaagctgaggcgctccggcagctccagctcgtcctccgaggatgacgagcaaggtgggcgccggaagaagagcatcaaggagaagataaaggagaagctcccaggcacccacaagcacgaggagcagaaggctgggcacgtgacgacgacgacagggacagggacgcatgcagcggggacgcacgagaagaagggtttcatggagaagatcaaggagaagctaccgggacaccaccatgctcactgagcgtgtgttcctcagttgaggactcggactcgagggggtccggaatcgtgtgtgtcgtgcacatgtctctgcagtctctatatatgttgtgtacgacttcggtagccttgacctcgatcgcttgtacctagtcatgctcatgcgtgcatattgctgtgctccttatat

SEQ ID NO: 310385 - DNA, 525 bp, Zea mays subsp. mexicana
gtgttcgtgtggatattgggtgcacaaactgcagggctgattctacttgcaaagaagactgtgaatgcaggggtctttctatgagttgttccaagaattgtcgctgctcagatctatgtacaaacaggccattccgcaaggataagaaaattaaaattgtgaagacaaagcgatgtggatggggtgctgttgcgttggagccattggagagaggtgattttgtaatcgagtatgttggtgaagtcattgatgatgcgacatgtgaacaaaggctttgggatataagacggcgtggtgacaaaaacttctacatgtgtgaaatcagcaaagattttacaatagatgcgacatttaaaggcaatgtgtcacgttttctaaatcacagttgtgagcccaactgtaaactcgaaaaatggcaggttgatggtgagacaagagttggtgtctctgcctctcgttccatcgaagttggagagcccttaacttatgattacaggtttgtgcattctggagagaaagtgaagt

SEQ ID NO: 310386 - DNA, 516 bp, Zea mays subsp. mexicana
gccttattgaacggatacatggctacagtgacaaatcttaagaatccagtgaacaagtggcgatgtggtgcgactcctatttcgtattactactttattcgcctgatcggacgcaaggcttctcatgtggcattggaatgtgctcttcaatcacatccaaacatggttatcctaggacaggaggtggctgcttccaaacttacaatttttgatattacgaagcagatttgtgatgtagtttaggcaagggctgaaaaagacaagaaccatgtggttattctttcctgagggccttgtggagaatattcctgaactatatgctctgctttaggaaatccatggccttcatgccaaagggtgtttctgttgagaatatctcttctcagctttcaccatgggcatctgcactctgagtttttgcccccttttataaggaagcagctactactacatcccgaatctgatgattcagctcaacttttctagtgtgttgagacagaattcttccagcttttt

SEQ ID NO: 310387 - DNA, 495 bp, Zea mays subsp. mexicana
agaaactacgccatccaaatattatactcttcatgggagcagttgcatctccagaacgactttgtattgttacagaatttcttccacgggggagtttgttccgcttacttcaaaagaacactgccaagctagatccaagaagacgagttcacatggctatagacattgcaaggggtatgaattatcttcaccattgtagccctcctattgttcaccgtgatttaaaatcgtcaaatttgttggtagacaagaactggactgtaaaggttgcagattttggtctttcacgtctaaaactcgaaacgtttttgcgaacaaaaactggaaaaggaacgccacaatggatggccccagaagtgttatgtaatgaaccttcagatgagaagtctgacgtgtacagctatggggttattctgtgggaacttgtgacccagaagataccctgggataatctcaatacaatgcaggttatcggagctgtcggctttatggatc

SEQ ID NO: 310388 - DNA, 482 bp, Zea mays subsp. mexicana
cgagggtggcagcaacgtgctcaaggtgctgggctactacagcatgattggcctcctaaggatacactgtctcctcggggattaccacactggcctcaagtgcctcgcgcccatcgacctcaaccagcaaggggtctacaccattgtcattgggagccacatctccgccatctaccactacggcttcgcaaaccttatgttgcgcaggtatgttgaggccactcgtgaattcaacaagattcttctgtatatcctcaagtacaagcagtaccaccagatttcccctcagtatgatcagatactgaagaaaaatgagcagatgtatgcattgttggcaatttgcctatctttgtgcccacagaacaagctcattgatgaaaatgttagcacccagctgaaagaaaagtataatgacaagatgacaaagatgcagaggtatgatgatgaagcatacgctgcttatgatgagctattctcgtatg

SEQ ID NO: 310389 - DNA, 308 bp, Zea mays subsp. mexicana
ggttggcttctcctccccctccggttcgggttcgggttcgggttcgtgaggttctccggggttcggtttcgtgggtgagcggatcgagatggcggcgtcggatgttgagtaccgctgcttggtcggcggcctcgcctgggccacggacgaccactccctccacaacgccttgagcacctacggcgaggtcctggagtccaagatcatacttgatcgggagacgcataggtccacggggttcggcttcgggaccttctccacggaggaagcgatgcggtacgccatcgagggcatgaacggcaaggagc

SEQ ID NO: 310390 - DNA, 527 bp, Zea mays subsp. mexicana
  unsure (1)..(527): unsure at all n locations
gactaatttaatattttaaaatagatatgtataaaatttgatgttgatcttttcttatgttatcaagcatattagtacaaatatgaataaaatattacataaattgtttaatgtattatttgctccctacaacacaaaaagttgaaaaaattatcgaatttgtttctgaatccataccgaagtttatatctattatttgagaaaatataggatgaatttgaggtttaccttttatgaatcttaacaagctggatgttaaaaacaagaatacaaatttgtattgtatattctatattttatttattcgcaatcaaagaaaaacgactaaaaaactgattaccgaataaataccgttttcgaccgttttcatcttatggcataaaatactatggtattgtcaaaaccatggtattgcatataaactataaaaaatacttcgttcttacacagaccctgaaacctttncagctccttcgaagagctttgagaagccctaccaaacaaggcctataaagattttcaggttg

SEQ ID NO: 310391 - DNA, 522 bp, Zea mays subsp. mexicana
ggaaatgtttactgctcaagctaaaacaacaagttctgctgacgaccctatggagactgaaatagaccagggtgttgttttaccagattcaaggagacggcaagctgaacggttggactacaaaaagttgtatgatgaggcatatggtgaagcatcatctgattctagtgatgatgaagaatggtctgggaagaacacgccaataataaaaagcaatgaagagggtgaagccaattctcctgcgggaaaaggctccagagttgtgcaccataatgatgaactgactacacaaagcactaaaaaaagcttgcattctattcatggttcagtagatgagaaacctggagaccttacttctaatggcaggaacagcacagccaggaaaggacattttggcccagtaattaatcagaagctacatgaacattttaagacacaaccataccctagtcgttctgttaaagaaagtctggcagaagaactagggttaacaattcgttaggttaacaaatggtttgaaac

SEQ ID NO: 310392 - DNA, 431 bp, Zea mays subsp. mexicana
gaattttattgtgaagtacagttaagtgctcttcaaaatttggatctctgcaccgccaaggtcatctagtgatgcctgacatgctttgaattattaatgcatttttattgtttgaatgcacatttgtctgtactgcttaactcatgcgcatttgtaaatttcaaggaacatgcaacctccaaaaaccaatgtctacttcgagtattggtatagtttcgcttaactaatttcagtgttttgtcattaaacagggttggtgcatcagaatttattgtgccgtattgcaagttcttgaagagcttgaactatcccttttcagttggaaccagatttaaagttggctgcgagaatgaagatgctaacgagaggtcctttggattgatcataggtattagtgaagttgatcccatacactggcctggatcaaaatg

SEQ ID NO: 310393 - DNA, 528 bp, Zea mays subsp. mexicana
tgttatactggaacattttgccattgcagtcacaattgttgttgttgctgttcctgagggattgcctttagcagtgacattgagccttgcatttgcaatgaagaagatgatgagtgagaaggcactggtgcgacagttatctgcctgtgaaactatgggctcagccactgttatctgtagtgataagacaggaacacttacaactaatcgcatgtctgtcacgaaggcctgcatatgtggaaacaccatggaagtgaacaattcatcagtgctttcaagtttttcttccaaagtcccagaatttgctttgcaaattcttatggaatccatttttaacaacactgctggtgaagtggtgattaaccaagatgggaagtgtcagatattagggaccccaactgaggctgctttgttggactttgcattgacaataggtggagacttcaaagaaaaacggcaggaaagtaagattgttaaagtcgagccttttaattcaacaaaaaaaaggatgggcatcattctcgagct

SEQ ID NO: 310394 - DNA, 229 bp, Zea mays subsp. mexicana
gtccgtaccggccccggcgcccgcgccgcccgtggtggtggacacgcatgctcaccacctgcatgagggagagcacaagccgtacttcccggcgccggcgcctcccccgcacgtggagacgcaccaccaccccgtcgttgttcacaagatcgaggaccacttcacgaagacgtaaatcccaccacaggctacagtggtggagaagaaaggcctcctcctcaccatcaag

SEQ ID NO: 310395 - DNA, 501 bp, Zea mays subsp. mexicana
  unsure (1)..(501): unsure at all n locations
tgtttttccgagacccagtcacatcttcttgctactgtcctgatcataagctggtctgtcactgaggtacaaatcacttgatgtgattctctaaatcactcacttatcatcaggtactctttctttgcaatgaaggaggcatttggctctgcaccttcctggctatcatgaaggtagagttgtacacggaactcttcgggtgcaaagccggcaactttccaatcaattaccttggcatcccaattcacttcaaaaaattaagaaatcgggattgggctagagttggagagcgctttgagaagagactcagtagctggaaagggaaacatctctccatcggnaggccgccgactttgattaattcagttcttagtagccttccgatgtatatgatgtctttcttctccatccctaaaggagttatcaagacattagattattttcgttcaagatttttttggaggctgattgaaatccaaaaaaaaggcttgttaatgatct

SEQ ID NO: 310396 - DNA, 378 bp, Zea mays subsp. mexicana
ttttgatcggccctgccattgccaccggtaacaccgttatcatcaagaccgtcgagcatacccctctgtctggtctgtacgcctccaagctgatcggagaggacggcttccctcccggtgtcatcaacgtcatctccggtttcggacgcaccgccggtgccgccatctgcagccacatggacattgacaaggttgccttcactggttccaccctggttggccgtatgatcctccatgccggtggccagagtaacctgaagaaggtcaccctcgaactgggcggcaagtcccccaacattgtcttcgacgatgccgacattgacaacgccatcttgtggtccaactttggtatcttcttcaaccacggccagtgctgct

SEQ ID NO: 310397 - DNA, 415 bp, Zea mays subsp. mexicana
tctttgtcatcgcacgttgactgacatagcaggtcataggcttctgctgacagcggattggatccatgactacgctgaatacaaattggacagtgcaggatggtgggaagatccaatctggtcacaaggacgaaacaatgccgcgaaggacttgccataagctgttggtactccacataagaaagcggactggttagacgccataaatggcaactgattggaacccaaagtttgaaaacatttaccggagaagacaagctgcaggaatctattaacgtgactcttcattatattgctgactcggatatgccaatcaaaaggggtacattcatagaggtccgaagtgcaatgattcatgtatctcctataggaagaaactgtagccaaaaagaacgtgatgaatttgagaagtacg

SEQ ID NO: 310398 - DNA, 536 bp, Zea mays subsp. mexicana
  unsure (1)..(536): unsure at all n locations
gcgtcacctcgccttacgccttatcgcttaaaaggtaaaaaggggtcggtcgcctgacctcgtcttgccactttaacaactatgatggcttcataattaacattttatttatctattaggtcaaatcgaacaaaagatatgcaggggcatcaaactggacagtaaaggaagttgttgaatcagcgaggaatgattttggcagcattgacatactagtgcattctcttgctaatggcccagaggtaacgaagcctttgttggaaacctcaagaagaggctatcttgcggcaatttctgcatccagttactcctatgtttcattgcttcagcacttccttcctataatgaatcccggtggtgctagcatctctctaacatacattgcatctgaaagggcgattcctgggtatggtggngggactgagttctgctaaagcagctcttgagagtgatacacgggtgcttgcattcgaagctgggcgaaaaggcaaaatcagagttaacaccatatcagcatgccctcttgggagccgagc

SEQ ID NO: 310399 - DNA, 176 bp, Zea mays subsp. mexicana
gtcattgactgggccgaggtcggaaagcagcttgagctggaaggtgtggactccttcaagaagagctttgacagcctactcgtgagcctgcaggagaagggcaacagcctcaagacggcaactgtgtaagggggttatttcttccagcactctcttttccgttttacatacattga

SEQ ID NO: 310400 - DNA, 525 bp, Zea mays subsp. mexicana
cttgcctactatgtgatcaagagcaggaaaccatacaacatattttgtgtacatgtgtctttgcaagacagttctggcattccattctgtttggattgaatgttggtaatctctctccatctggagatgagatctcctttgctgattggtggcgaaaaacaagtaagaagattcataaaagcaagagaaagggcatgaacagcatcattatcttaggggcctggtgtttatggatccaccgcaacaaagttgtctttgatggggagaccccttcgctaagctctatcagatgcgtcttccttgatgagattgggtgttggatcacggctggtgccaagcatcttcagagctttggcttagagcttgcgcgtaaccttcacagggtctagggagtggaaacttctgtcaaggactaccagaatttcaatttccgacaaccttattctcaagcttcatactatgtctctctgatattggaagataaaaaatggcctgtcgctgagaaacttgaagctctttctaagc

SEQ ID NO: 310401 - DNA, 403 bp, Zea mays subsp. mexicana
gtcttttcctccccctcttaccaagtcctcttcgggttagggttacttagggttttgtggtggggcgatggcggcggctgatgtggagtaccgctgcttcctcggcgggcttgcctgggccaccagcaacgagtcgctggagaatgccttcgcctcctacggcgagatcctcgactccaaggtcatcaccgaccgggagacggggaggtctagcggcttacgcttccttaccttctcctccgagaactccatgctcgacgctatcgagaacatgcacggccaggagctcgacggccgcaacatcaccgttcaccaggcccagtcccgttgcggcagccgcggcagcggctgcggtggctacggcggccttcgctgcatcggcggctatggtggccgccgccgt

SEQ ID NO: 310402 - DNA, 551 bp, Zea mays subsp. mexicana
atttcgttcatgggtcagatggcattgggaatctgtttcttcctgcaccctctgctaagaaggttgaggaaagtgctgctgatttcctgattaataaggtctctgagtttccaggagaggtctctgtgcttgcgttgggacccctgacaaatgtagcattggtatgttcaggatcataggactaaacctatttatcgtgctgtctatgctgtgctatatgttataagtcagtgtctctgttctttgcttaggccatcaaaagagacccttcctttgcaagcaaggttaagaaaatagttgtactgggtggagctttctttgcggctggaaatgtcaaccctgctgctgaagcaaatgtatgataacatactgcattatacttgaggaggctaatactttaacataagtattgaaccttgagtgcattacactgcagatccatggagacccagaagcagctgacatagtttttacttcaggggcagatatcgttgtggttggcattaacataacaacacaagtctgcctgacagatgaggatctcttggagc

SEQ ID NO: 310403 - DNA, 538 bp, Zea mays subsp. mexicana
cataggcccatagcaaaccaagcgcgaggaggaacaggcgtagctccgtagacatagatggctaacaagcgtcagcgggaagcgcggaagcgcttccgggaggcgaacccagacctattccctccgcaaaccgccccttctgccgacggaaccaagaacaagagcaagaagaagaagaataagagcatgttcaagaaggcgaataagggcggcacgggaaggtttaagcacccgctacgggttcccgggatgcggcccggggaacgctgcttcatctgcaagtccaccgaccacgtcgccaaggcttgccccgagaaggccctctgggacaagaacaagatttgcttgctttgcagggagcggggtcatagtctgaagaactgtcctgacaaaagcgagggaaatttgaagaaattttgctataactgtggtgaatctggacactctctttccaagtgccccaagcccattgagaatgggggtacgacatttgcatgctgctttatctgcaatcagcacgggcatttgagcaagaact

SEQ ID NO: 310404 - DNA, 542 bp, Zea mays subsp. mexicana
  unsure (1)..(542): unsure at all n locations
tgttgaccaggataggaaaaaacactgatggtgttcaggctgttatgaaaacatttgttcactttggagcccctccaaacattttagttgatgggaaaccacacttgggtactgataaacttgttccactgctgcgaaaattcaggcatcacttaagagagttgggtgttaccataagatttaatgctagagtagatgaccttatagtagaagatgggcaggtaaaaggaattgtggtctctgatgtggaactacagccaggtcctgccagccagaaactagcatttgacgcagttgtaatggcagttggtcattcagctcgtgacacatacagtatgctttggcagcataatgtagacatgagcccaaaaagttttgctgttggcttaagaattgagcatccncaagaattgataaacagtatccaaaggttgcacatctttacccacatgccgtgttacccatttgccaaggggactagaatttccattcatctataccgaggagacgaggcagggtagcaatacgaggcctttccaaag

SEQ ID NO: 310405 - DNA, 519 bp, Zea mays subsp. mexicana
attgtgcatggacaaatgatacaacacatatacttaatgctgagcgccttcagcacataaaacctggagcgttcatagtcaacactggtagctgtcagctgatagatgactgtgcactcaaacaactcttgattgatggcactatcgctgggtgtgcattagatggcgctgaaggcccccagtggacggaagcatgggtgcgtgagatgccaaatgtattaattcttcctcgaagtgcagactacagtgaagaagtgtggatggagatcagagagaaagcaatcgcaatattgcattcctttctctatgatggtgttgttccaaacaatgttatttctgatgaagatgaagagataagcgaaatgggatgtgacgatgatcaacttgattaacaagaaaaagaacattctctacagatttgtgatggtgaacagcaaacagaagaaagccaattgactgcatattatgacaagagaagagccatttgacaacctgaagagccttaagcttctgcacaat

SEQ ID NO: 310406 - DNA, 392 bp, Zea mays subsp. mexicana
ctcaccatggtgctcgtcgacaagcgcgagggctcccagctcgacccgatcactgacagccagaccatgctatggcgtgatctaggacacatggaacacaacaacgcctgtctctgcatggttaacggtggtaccaccgtaacccagagcttgaaacagctcgtgcttgaccgcataggagggatggctgtcgttgacgagtccaacctataagcatctgacctggaaaacactgtattggttgacgaacgctgcttggggcggccaatggctgaagcgatcagtcttgttgcacaatagcaggatcacgctgtcaatgctcatccagttggggcgtgtccagcgaataccataaatgcctaaacctagattggttcacagattactggtgt

SEQ ID NO: 310407 - DNA, 529 bp, Zea mays subsp. mexicana
tgccttcagtaagggaaagattgctggttacaaactactggaggtcattcaccagaaaccctccatagtcaatgatcataaggatggaaaatggttggcagaggtccatggaaacatagaattcaaggaagttactttcagttatccatcaagccctgatgttataatctttcgggagttctctattttcttccctgctggtaaaacagttgcagttgttggagggagtgggtctggaaagagcactgttgtggctttgataaaaaggttctatgatcctaatgaaggccaggttttgctagacaatgttgacataaagacactccagctgaggtggtttagagaacagattggtctggtaaaccaagaacctgctctatttgcaacaacaatcctcgagaatatactgtatggaaagctagatgcaactattgcagaagttgaggctgcagcgactgcatccagagtccatgcacatagtttcatatctcttcttccgaatggttacaacacaatggcaggtgagaga

SEQ ID NO: 310408 - DNA, 520 bp, Zea mays subsp. mexicana
tttatttattgattccattgaggccccctttagaacatatggtttgtgaaggaattttgtcggacaggagtcctataggggctgttcctatgcagcccatttggaacaaaggattgaccatccttaaatccaacaaaattcctattgtttagctcaatccaaaatgtagcattctaggagatgtaacatatgaatattgtcttataggctgctcggatctattcattatggaggaattggaatttacttaataaattagtctatttggcttggaatttgacattccaccactttctaaagatcaaatataagtctatctcaatttttaaattaatggggtggagtatggaaaatgattttatgtatcaacggaagtatgtatctactctgcaacttataagacgttcttcgactcactcctctatagtaaaaatgtagcagataaatatctcccacgtatggaaataataatataccaaatattattcacataaaaccatattagctaaattgatctttg

SEQ ID NO: 310409 - DNA, 493 bp, Zea mays subsp. mexicana
tccctcgcgtccgggagacctcaaggagggcgatgacagctggagagatccacccaatgacacgctatgtcatgaactatttgaggttgctggttgtttacagtgagacacttgatgcactcttgtccgatgacagcagtgatcatgatactttcagaagttctgatgatcaggatcaggaacacttggagagaatgaccccttttggaaggcgtcttctgaagctgatatcttacctggaggccaatttggaggaaaaatctaagctctatgacgatgctgccctggagtgcatatttgccatgaacaatttgctctatattgttcagaaggtaaaggattcagagctggggaagggtttgggtgatcacttgataaagaggcggagtgggaagattcgacagtattcaaagagctacctaagggtttcgtggacgaagcctttgtcttatttcaaggaagatggacatggcagtgggagtggtagtggcag

SEQ ID NO: 310410 - DNA, 441 bp, Zea mays subsp. mexicana
ctatttttctaccacacatacaactaaacatggaaatggttattattatggcacgggatgctggtctggactggaccatacaccttgatactgatgagaagattgatccagttgttgccagacagtactccctgaggcgattgcctttatacgtccctgtcaattaagacatctttatcttccccaattatgagagcatcattgaacgtgatgacattaaggatccattcactgatgtttccatgtttaaccaaaatgattaccatattccaaaggacacataccttggcctgtacaaagaagcaacacgtggtaattcaaactacttccttacttatgagaatgcgtaaacagctgaaagggttcaggatcatttgggaccaaacggtgctaatagatggcataattctccttaaaatcccaattgaatatcaattacaa

SEQ ID NO: 310411 - DNA, 426 bp, Zea mays subsp. mexicana
tctctattattgccaggacaggagaaacaaacaaagatgaggcctcagctgatactcgtcggcactctggctgttctcgccatcctcgcagctctcggcgaaggctcgtcgtcctggccgtgctgcaacaactgcggtgcttgcaacaggaagcagccgccggagtgccagtgcaatgacgtgtcggtcaacgggtgccatccggagtgcatgaactgcgtcaaggtcggtgcaggaattcgtcccggcatgggccccggccccgtcgtcacctaccggtgtgatgacgttctcacaaactttctgccagaacagctgcccggaggcgtaattgctgggtggtggagtcttcttctgaccccatgcgacgccaccagtttgcttgtttccaggctccgcagacaagaaattgattaataaataaat

SEQ ID NO: 310412 - DNA, 241 bp, Zea mays subsp. mexicana
gtgcaccccacgctcggatggaaggaactcaggtccactcctggcaggacgtctggatctgaaagctgacactgttcataaccaccagtgggaacaaggagaccatcatggtagaccacatgaggaagatgaagaacaatgccagtgcctgcgaacataggccacttggacaatgaacacgatgtgctaggccttgagacctaccctgacgtcaaacggatgaccaccaagccccaaactg

SEQ ID NO: 310413 - DNA, 524 bp, Zea mays subsp. mexicana
  unsure (1)..(524): unsure at all n locations
atctcaattgtcacttgctctccctccaacaagctaattaaggccggtacgtcatccctcttctcgtttcattatccatggcggaggagaagcaccaccaccaccacctgttccaccacaagaaggacgaggaggagctggagcaggccgcggccggcgggtacggcgagtccgccgagtacacggaggccacggtcacggaggtggtgtccacgggcgagaacgagtacgacgagtacaagaaggaggagaagcagcacaagcacaagcagcacctcggcgaggccggcgccatcgccgccggcgccttcgcactctacgagaagcacgaggcgaagaaggacccggagcacgcgcaccgccacaagatcgaggaggaggtcgcggcggcggcggccgtcggctccggcggcttcgccttccacgagcaccacgagaagaagaaggaccacatggaggccgaggaggccggcngcgaagagaagcaccacttcttcngctagctgattattgatccttccata

SEQ ID NO: 310414 - DNA, 194 bp, Zea mays subsp. mexicana
ggttggttggaataaaaggaacatacagagtggatgttgacattcctgctaatgattggataaacgtcaccaagttctatgatgttctaattttcaacactggacactggtgggatagatataaattcccaaaagacactccccttggtttctacgaagggggaaagccgattgaacctccacttgacatacac

SEQ ID NO: 310415 - DNA, 501 bp, Zea mays subsp. mexicana
ttatttatgttctggccaaaccagcaatatatgcgataatttctggtgaagtactgtcaactgaccagggaaaagcgcaaggttttattgcaaccgtgcagtctgtagctatattgttggcaccactatttatgagtccactgacctcttacttcatttcagaggaagcgcccttcgactgcaaaggtttcagctttattgtggcgagtttcttcttggcaatctcgttctgcctcgcttggatgcttaacccaggaatgaaggacaagggcacaaaagctgccgtttcagacagcgctgatgaggaagcagcgcaagcaccactactggcaaaatggaacagaccatgactccaggaaactaagctataaagctcagctggagtgtgcgtaaaattgtaggatatgtgaattagagtgccaacaacatagggcttgcctgtacctgtagtatagtgtctgtacataccccagaacgagaaagcccgataagcttggtgtt

SEQ ID NO: 310416 - DNA, 554 bp, Zea mays subsp. mexicana
ttattgttaaagagaggtctatctcatcgttggtggtcaatacacctagagtaaccccagcagctttgacagggaggcgaacaagagcggttaccaggaaggctgccgcattgcgtggccttggtcctatcattgtggatcctttaaaaaaggacaacgataacccaaataagcaaactgataattcaagcttgctagatagcttgaacaaaatacctcaaacaagaagacagttattgtcgaatggggacacaacaagtcatctctctgttaaagataaagcaggtgataataaggacctggataagtccgagttctggaaacctttgaattgtcttgtagaagctgcaagcaaaacaaagcccctgacaagtgcaccaaggccagctttgaagggagataagcccagaaaatctccgagtagtgatagcgaacattctagcagaacatagactagggagcctcttcagaagtccaaagctgaagttgacataagcgatcccgggccaatagtgatgcttagaaagagagggcggcctggccggaagaggaaa

SEQ ID NO: 310417 - DNA, 483 bp, Zea mays subsp. mexicana
tgtttgtggttgggtggtatgtttgatagggaaagctttgtggtaacattggaaggttgggcaaaaacagttatcaccggaagagcaaagcttggtggaataccagttggtgtcatagctgtagaaacccagactgtgatgcaagtcattccagctgatccaggtcagcttgattccgctgagcgcgtagtccctcaagcaggtcaggtttggttcccagattctgcaaccaaaacagctcatgcattactggattttaaccgtgaggagcttccgctgttcatcctagcaaactggagaggcttctctggtgggcaaaggtattttatttgaaggaatccttcaggctggttcaacaattgttgagattctgaggacatacaagcagtctgcttttgtatatattccactgggtggatagctacggtgaggggcctgggttgtggtggacagcaagatctatccatacctcatttagatgtt

SEQ ID NO: 310418 - DNA, 553 bp, Zea mays subsp. mexicana
tctgtcgcgtgggcttaggggaagccccttggaggcttggacaagcctcggcgggcgtggcatgctcttctttgttcatcatggacactgaggctacgccaatggattcgagaaggtcaagcactggaaaccaatggcgaaggacaagcttgcaaataacatcactacacagcaggggaagacgttgaaagatgcttggggtgacgtgttctggagcctagaggtggagcatgcttgtggaatgggaacattgcaaatgggcgaatatgaatcaaatgtttctaatgggaacgacaccttcatcattcgggagccacttggtgtttgcgctgggacatgcccatttaattttcctgctatgattccgctatggcgaccaagatcttcatttgaaattaataccagggagccgatgctagagttcgtgatcgctatgtggatcgcagtgcacggaatagccggagctgctcatatcttctactattatagaagaatatatattgctaatttgttatctactgacatcataatcttggtttgattggtgcaatgt

SEQ ID NO: 310419 - DNA, 559 bp, Zea mays subsp. mexicana
  unsure (1)..(559): unsure at all n locations
ccgttgcttgttctgctacaacagtgccatggcagcctcgccacaacactcgcgggagtttgaattccacatgtcggctccacctgacctgtgggagcccgtggcgtccccagcagatgagctcttctacaagggcaagctgctaccgctccatcttcccccacgcatacagatggttgagaagctacttgagagcgcgtctgagaagggcttactttcagcaagcactgccccagcaacaccataccagtcagcagcaaactcatgttatcccagcggcgagctcgctgcagagtactacttccatgattgcatatccactggcagtgatgctgccgaggaggcggcagcctgtgagaagaagccatggtccaagaagctcaagttcatcaggcacctcaacctcggcctcaagcttaaggcgtcgaaggcttatctgaagacaatattngctagtaaaggagggaatccagatggcaagaatggtgtacctagagcaaatgaactgtccagcacacagttcagtacctggaggaagaacccatttggccacatcgga

SEQ ID NO: 310420 - DNA, 439 bp, Zea mays subsp. mexicana
tttgttcgctccctcgacgttttccacccagatacgcccgtggaagaaaagatcgcctttgcgtttcggctgtacgatctgagaggcactggattcattggacgcgaagagctgaaggaaatggtgctggccattctgaacgaatcagaattacttctttccgacgacgccgtcgaagaaatcgtggatcagactttcaggcaagcggacatgaacggcgacgggaagatagatcctgatgaatggaaggtgttcgcgagcaaaaacccggcacttctcaagaacatgacgctcccatacctcaaggacataaccatggcgttccccagctttgttctcaactctggagccagtgacgacgagttgtagtagctgcgagcatgcatggccaagctgcgagcgaggaaggaacgctgacctcactcctcagttcactaag

SEQ ID NO: 310421 - DNA, 377 bp, Zea mays subsp. mexicana
gattcccctttcaaacaaacagggtatagggagaggagaggacagtagaggaaaggatagatttgcccatctcacaccctgtctacgaccaaatctgttctgcacagtgacaatctttacccttactaggtgctcatccccactatatgagtcttgatgctactactacatcttgcccatcaacttggtcaccgtcgagcacaagatctcctaccaccttttccgcaacccgttctggtcagttcccagctctgcatgatggtgacttgtacctcttctaatcacgagcaatctgcaagtacgctgctcgcaataacaagccacagctgttgaaggatggaaacctctaggaggcaccaatggtggatgtctggatc

SEQ ID NO: 310422 - DNA, 438 bp, Zea mays subsp. mexicana
cgtttgtattaaaactatgaccctcgtgctaaagtcataatggaaattggcagatgaggtgttctcaattgtcggacggaatccacttattgaggtgggcattgccctataaaaggcagcgctgtcagacgaatattttatcaagaggaagctgtatccaaatgtggatatgtactctgggccaaccaataggggactggtatttcatgctggggttgttcttgtggcagacacaatagcaactgaggggcctatagttgctgataagaattgtgagaagatccactttatggcgccaaacatttattgctgtggagcatgaactgctgctgacactgaggctgttacagacatggtcagctcgcagctacagatgcaccgttatgcaactggtcgcgaatctagagtcgtaactgctcttacactgctgaagtcaca

SEQ ID NO: 310423 - DNA, 372 bp, Zea mays subsp. mexicana
gcctcccgttcgacctgcattgggcttggcacgctgtgtatgcatccttccggatgaaggtgcttgctgctaggtacatttccactcttgatagcatctctagttatccttggtgtttccaatctaattcatcgggatacactaacccatgcttgattctccaccagaagaggcataggctactcctgctgcaatcgaaggggatttggtcccatcccgaacattatatgtgcagagatatttccgaccaagcattagtggcctctgtattgccatttgtgccgatacattctgaatctgcaatatgatcattacctatacccttactgtcatgttgtgtgctaatggactgtccggtgccttcagcatata

SEQ ID NO: 310424 - DNA, 538 bp, Zea mays subsp. mexicana
  unsure (1)..(538): unsure at all n locations
cccacgcgtccggtgagcagcagatagaaatagctgagcaggagctcattgaaggtaagttgtgcccttgaccactttttacccaataatgttctttaatatcacttattcatgcataggttaattttgatggtgttggggcgaaggcgaagacgctacccttcgctctagccttcgtctatctcgttgcgccaacgggagcagaagaaccggcaaggtccacccttcgccttgcacactacgagacgaaggcctacgacgacgtcgccccatctcacatcctcactcgacctagaggcccacgtgggattcagcccattgtaacaggccccgcacggagaagtgtgttacgggcccgatttgtaataacttttctgtaatgacagtatgtaaccctcctttgtaggaatatntccgngatagtctagctgcctgagggtacatgcgtncttacattgagacgttgtgcactcatgcacctataaatacccccgtacagtgcctttgagaggctagattacagagctattgccatctc

SEQ ID NO: 310425 - DNA, 358 bp, Zea mays subsp. mexicana
tggtcgcgtgggccacatcatgcatcggggacgaagcgctggcccgatcccgcgccagcagctcgcatagattgagctatgcgatccacagcgctcaggtggagaattgggataccagggacaggttctggcaacagggcatcttcaattacctgcggagcgacccagaagatcattattgtcttctaactgagagccctctgactgcccccgagaccccggagtacaccggagagatcatgttcgagacgttcaatggacccggctctatattggcaaccaacctggccttgcgctggctgctggggatactacaaccaagtgtgaaatgacaggtgttgtagttgatgtgggtgat

SEQ ID NO: 310426 - DNA, 498 bp, Zea mays subsp. mexicana
gtccttatgctcaattgggtttggatagaacttctattccaaacttgttcacctacaaggattttgtagaagagcttgtatctgagatcccagcgattagagaagttcctgaacaggtttgcaaattctggcaaaataatgcgaatgataataatatactaacaccaactggcaatcatatgggtgaagaacaatggatcaataaaaaatcagataaggtagatgatggcactctttttcaagaaattgtcttgagaaagcatccaagggacaatcaggaaatcccttgttgtgtggaggatgcaacaagggaagatatggagatcacttttttgggcacaggttcatctcagccttcaaaataccggaacgtaagttccatatatattaacttatttgaacgaggaggtatacttctggattgcggggaaggaactttaggacaactgaaaaggagatttggtgtaaatgatgctgatgaagctgtaaaaggtttga

SEQ ID NO: 310427 - DNA, 492 bp, Zea mays subsp. mexicana
gtgtgacagagaccgaaggggggggttgaccggtgctcgggaggaagatgtttagcgggacgcagcagaagtgcaaggtgtgcaccaagacggtgtacccgatggaccagctctccaccgacggcgtcgtcttccaccgctcctgcttcaagtgccagcactggtgatgcaatgtagcatcgggtagtagatctgcgaattgccgcagcgaacagatctggtgcgagtttcctagtaccaggaaaattctacgcccaggagaggtcatgactttgtccgtttcccattcgctaacttggtgaaagaggattgggcagggaatccatgcaaatggacactcttatctgatcttctacttaggacgacctgtcgatgtctaggcaaagataagcagctgtgcgaggtctgacaatctccgtcttcatcctttccgtctttgacagctgagcaactattcctcgatcgaaggagtgccgtactgcaagacccatt

SEQ ID NO: 310428 - DNA, 388 bp, Zea mays subsp. mexicana
ctggtaaggaccagctcgagcctggatgtgccattctgatgcacatcaaggctctggcagtggttgttgtgtatggagacgaagtcgatcctactgttcctgtgcataaaggtgaaaaggatcttctgcggttgcagggtgacattggtggctgggatgctcaaatctcaagatatctacgatgccgttgcacttctcttaacacatgctaagctatatgaggacattgcgatcaggcctccaaaaggagctatactatgtgggggacccggaacaggtaaaactctactagcaaaggctggtgcctattatactgcatcaacgtttttgcgtcttgttgggagtgctttgatctctaaagagcctaggtggttgcccctaacttgta

SEQ ID NO: 310429 - DNA, 332 bp, Zea mays subsp. mexicana
gcgttatttttgacttccccaagccagggatcatgttccaggacattacgacgttgctgctcgatcccaaggcgtcccgtgacaccatggacctgtttgtcgagcggtacatgcaccaacggacacggtggttgctggtgttgaagcttgagggggcattttcggctctcctatcgctttagccatcggggcaaaatacgtgcctttgagggagccgagatggttgccaggcgaggtgatctactgagagaattcttcggaatgcgttgctggctggagactacagacgtgtcggatctgcacaggccatctgctcatcgtatagctgatgc

SEQ ID NO: 310430 - DNA, 283 bp, Zea mays subsp. mexicana
cgccggctccgcggacgccggtacttctcgaaactcgggtcattccgggtcgccaagatgacgaatctcaccacgaagggtggaattgttgggaaacatggaaccaggtatggtgctagcttggcttagccaaacaagaagaaggggggatctgagactttcaaggacctttgggagctctgggggaagtttgctgcctacaggaaagcagacgggatttgggggcgccaggactgaaggaaggggaaggctgggggcgcttacaccctgaacaccgctaggg

SEQ ID NO: 310431 - DNA, 308 bp, Zea mays subsp. mexicana
tttttggatagctcagtgcaccttcctgtatggggggtaggttcagagaaaaatgctatataggggcgtattgatgaatggacagaccaatttgaatcatgtggggcagatattcattctcttgcggtaggtttgcaaaaaccgcttcgtcctttatggatcttcacaaaggacacgcatatggttaaatgaagtgcctgatcttgagtcatgggatttcactcctataattctaatttctgaatttgatgcatttgctacacaaaggatgtctttagatttaagttggccctattttcctgagccag

SEQ ID NO: 310432 - DNA, 538 bp, Zea mays subsp. mexicana
tgattattgataggaagaggaactaacgcttggaaagctcgaaaccagaagcgctcattagatgatgcagttttgggaataacgcacatcattgtggatgaaatccatgaaagggataggttttctgatttcatgctgactattctaagagacttgttgcctttgtatcctcatcttcgtatggtactcatgagtgcaacaattgatgctgagcgtttttcgcaatatttcaatggatgttcggtcatacaagtccctggttttacctatcctgtcaaatctttctatttggaggacgtgctttctattctgcagtctgcagagcagaacacagaagtctacaattaccagcattcagagactggtataactcctttaatggtttttgctatgaagggtcagcttggggacgtctgtatgcttttatcttttggtgtggattgttcagcacaggatcatgatggaaaatccgcattagattgggcacaacatgagaatcaacaagaggtctgtgaagtaataaagaaacatatggagt

SEQ ID NO: 310433 - DNA, 461 bp, Zea mays subsp. mexicana
ccgcgggtgccccgccgcaatttccggggcgagccacacgcgcgctctgtgttatgacttttggtctacctgggtgcgtagtttgccaataacgcccaaagtgctagcgtcaccaagatgccgctgcctaacgacattgcaatactcaatccaccggcagagtttgagaagctaaagcacaagaggaaccgtctagaccagatccccaactgcttcttgatggatgtgaagagccagggctgttacagcataaccactgtgatcagccactcctagactgaggttgtgtgcccaggctgccaaactgttctgtgccaacctaccggagggaaggccaagctcaccgaggggtgctccatccgtcgcagaggcgagtagggactgagctactcttaatgagagaagagataaatatggagtctacgaactttctcaggagatggactgtactcagtgaggat

SEQ ID NO: 310434 - DNA, 444 bp, Zea mays subsp. mexicana
  unsure (1)..(444): unsure at all n locations
gggttcggagaagcctgcggaagcacattaagaatttgagagtatcaacagttggtgtaggcgcaataggttatattggtaacaagggatcaatatcggtcagcatgtctgtacatgagactcctttctgctttgtttgttgccacctgactgctggtgaaaaagacggagatgacctaaaaaggaattcaaatgccgaagaaatacttcgaagaacagtgtttaacccagagaatgttgtaggcatgcctatgagaatacatgaccataagcggattatatggttaggagacctcaactaccggatcaacttatcctatgaaagggcacatgaactaatctccaaacaggactgggctggattggtcgagagggatcagctgaaaagagaaatgaggaaaggatgcacanttgacggttgggtcgaaggagttatcagctttg

SEQ ID NO: 310435 - DNA, 351 bp, Zea mays subsp. mexicana
cttttccttataagaagaacggtaaacctgctggcgttcaatatcaaaccggtgcaatagctgattttttcagtgaggatagcgatgaattaggtgatctggatctgaatcatcaggaatgtattgcagctacaaaggtgccagaccttaccttgatggttgcaaaatttgatggggttcatgggctaggctatcaggaaatatctgttgagaatgcaacacctgtgtgctataacatggtgaaacaaggtctcatgagtgaccctgtattctctctatggtataaccgacatgctgatgacagagatggtgatgaacttatgtatgacgcaatggattctaagcactaca

SEQ ID NO: 310436 - DNA, 447 bp, Zea mays subsp. mexicana
tttagattgaagatttaatgtttgagctgtctatgtggcgctgcagtgatgaacttcggatccgtgcagatgaactacatcgctcttcaagaaaagctgcaaagcactatatagaattctggaagcaaggtccgccaaatgaaccatatcgtgtcatacttggtgatgtcagggataaactgatctacacacgtgatcatgtctcgtcacctattgacaattggagtctatgagattgcagaggaggcaactgttactaacgagacgctgatgaaccattctcttgagctgtgactaaatcatgagaagaccgctgggctgaacctagatggttttggatccacaccagagatgttgcgacaagaattagctctgtggggttagccaaatgaagctcgacatcagagcaggatccatgctgacgtgatactgctgaagtagatacat

SEQ ID NO: 310437 - DNA, 385 bp, Zea mays subsp. mexicana
gcggtttactacacggccaagcagcgcggcctccgcctcacggaggagcgcgtggcgcacgacagccccgcggcggaggcgccgctggagtccgtccaggttcgcctttcgcacgtgcagtccaagttcgcgggtgccatcagcgacggcggggacgacatcgtcctggagggccgggtcaagtacggcgtgcctcacctgacccttggggggccctacgaggtggacgtcagccttacgggcacattgatcctgtgccgccagatcgaccatccgaggagatcctgctcacgcagagacatactcccagacacctacgtgcaccgctacgtcgtcgaccagggcacggacgttcacgccttcgccaagtatatggtcaagatgg

SEQ ID NO: 310438 - DNA, 460 bp, Zea mays subsp. mexicana
gacacccctgcgggccccgccccaaaattccgggcgacccacacgcgcgctttttcctagatatcaacgacatcgtcaaaccgaggggcgttttcaacccggacacttcctccaaacccaacttacggcagcggatgtacggccagaacaaacaacgggtaggtggaccggacgctgaacccggcgtacgcggcggagctgcggggccggtgcccgcggtcggtcggggacctcaactggatagcgctggacctggtgacccattttcggctcgacaaccagtactaccacaacatcctggccatgaacgggctgctcagctccgacgagatcctgctcacgcagagcatcgagaccatggaccttgtccaccgatacgccggcgatcggggactattctatttcgacttcgccaagtccatggtcaagatgtggaactattttcattctctgcgggagc

SEQ ID NO: 310439 - DNA, 495 bp, Zea mays subsp. mexicana
tacatacgaagctatgaagaagcaaatagctgaaggatccaaggctatgcctttctactgtgctcttccaactttatcggagtatatgaacgagagcggctggacccgcagtaactgtaagagaacaaaaatggagttttctgcgtacctttgttatatggctatgtatcacatattagtggagatgggaattgactgggatgccagagccctgattgacataaagccactatacaaacattggcatgccttcgatgataacagcgtgaatcagaacacctcgtctccgcaagctgaactggattcgcagcgcatggatggtattctgcaagctataccgcatgtgctcgcgctgttctgttttggaacgcgcttcaggacgcacattgctctcgcatgctaggacggcgtgtgtacgacatacgattgtcctatgtttgagtggctgaaatttgaagccaataccaattcgacaatattagattattttgcccg

SEQ ID NO: 310440 - DNA, 540 bp, Zea mays subsp. mexicana
ctttttcgtcggctacaggccttgtggtgaaacgtgggggattttcaagatcctattcgcgttccctgcccccttaatgcaagcaaggacaccgcttctttagcgagctctcgttgtgaagcggcatgaaagatgattaatcttttcaaaataaagggtcaaaagaaagaggaggcagcatgtgctgctggaaaggcccctgttaagaaacagtctgctggggagctccgtcttcataaagatattagggagctcaacctgccgaagaccacgtgaatttcttttcccaatggcatggatgatctgatgaattttgagaccaccatccgacctgatgaaggatattacatgggaggcacttttcgttttcacctttcaagtgtccccatcttatcctcatgatcctccgaaggtcaaatgcaagaccaaggtgtaccatccaaatattgaactggaaggcaatgtttgtattgacattgtgcgcgaagaatgggagcctgttctaacaacaacattgttatttatggtctgaattttttt

SEQ ID NO: 310441 - DNA, 570 bp, Zea mays subsp. mexicana
gtcaaaccgctccggtgcgaggaggcgacaacatcttcttgctctgatccacctctcgtccaacccgctaggccgtcgctgccgagagcgagcagaggcctccctcctccgacgaaggaggaagatgctcacgaagtttgaaactaagagcaactgggtcaagggcttcgccttccactcgtgtcgtcgatggatccagtctagcctccacagcagcgtcattcagatgcgggactaccgcatgggcaccgtcctcaaccgcttcgatgagcacgacgagcccatcaggggcatccacttccatgccacatagtcgctctatgtccgaaggtagtatcgctccccttcctgactggatcgtactcctagcccactagcgtcggccttgaacccgcacgaaggtgacttcttggccgagtcagttgctctgtgtctattgtttccctttctcaagttatttctagatacaaattggtctccttgttgctgaaacagtatgatgtccgctgtttctcagaaaagttttggtcatttctactccctgaatcattatttgctgaaatagcatgc

SEQ ID NO: 310442 - DNA, 397 bp, Zea mays subsp. mexicana
gcgcgcattaacaaggctaggaagaagaacatagctggggggatcaaggatatgcatttgtactgtgctcacccaggcgtgcgcatcgtgtacgccggctactagacgctggacattcattttgacctgcacgccgagaaatactggatgctgaagcagacgccccggacgtgctgtggcacgccggacatgggcgagcacaacttcaacctgacgtccaagtgcggcaagcctgaggcgtacgcgagcccggaccccttcaaccactggagctgggacggcatccacctaacggaggcacgctacggccacatcgtcaggggctggatctacagtcccttcgacgacccgtccattcttgacaccaagcacctcggctaacgttgaccatccaccg

SEQ ID NO: 310443 - DNA, 508 bp, Zea mays subsp. mexicana
atccccgtcgccccaccacgcgcgcgcttttcggctgccagacaaaaaccctaaccggggccgtcgccgacggtcttgcttgagatgggaggcacgtgcccgcaccggcaggtagagaagcgccgcctatctgactcgacggctcgccgcggcaagttcatcctgactgcctactatgccaaggatcccaagctcgccatgcttgccggccagtgtgaggcccctggatccactgttcaccgtgctatgctcaacctcactatgcctggacagtaatactgccttcacgtggatcgctccttctcaggtgcgttgtcatggaaacaagactcccagaacagtgcaccccaacagacccttgtattcccaaaggggaatgcaattccgagcattaaatctctaacgttctataaatcgagtacatttgaagttgatgtttcgtatgtgggtacaggcgactcgcacattccacagaagataagcacttacacgattggtcctttccaac

SEQ ID NO: 310444 - DNA, 504 bp, Zea mays subsp. mexicana
  unsure (1)..(504): unsure at all n locations
acctctacgatgaggctaacgacgacaacgccaacgaaggcaagggcgactatgttacccccaacacacctaccgttgaggagcacgacaagctggaaagactgaatatgaacaccgtcggcagtcacattggtgccgttgccaggatatatgagatgtgcatcgcaaggtgcataacagctactgggaggagcactccaagtgcctgactgtcgagtccatgatgctcgactcccgtgccgccgacctcgacatggaagagcgacccgagatcctggatttgcttccctcttacaaagggaaatcacttatagaacttgtcgctggaataggacgctctactggagatctggcaaaagaagctgggcacgttctggcactagacttcattgtaagtgtgattaagatgaaccaaagcatatatgggcaccacacgaacataacctttangtgtgccgatgtgacatctaacgacttgtagattgaagatacttttgtgatctg

SEQ ID NO: 310445 - DNA, 493 bp, Zea mays subsp. mexicana
  unsure (1)..(493): unsure at all n locations
gctgggacctctaaattctgtggacggcacatatgggggtcagattgactcttcttcatctgagacaatcatcgcggaactttcaaccctcatgagggacatgggtttgcatatgaccgctcttgcatcgaaactcaggtgcacaaaaacggttgacagaaaatctatgcaaaacgttatcatagctgctagagataaagaggtgcctgaggcccttgttgtgatcaggagtgccctgtagcaagggcaggcactgcaggctctttacagggtatttgcatcacttgatcaatcggtaaatactagctaagatgctctgtaggaggcccttatttctgctgctaagccatcacattcaggtagtcttgctaagcaagcactgccttctatagctaagngagatgctgtgctatgcttagcagatggagaccagaagtgtgcatctacaatagaaatgcttaaaggcattatcgaagacgacagcactactaac

SEQ ID NO: 310446 - DNA, 467 bp, Zea mays subsp. mexicana
aaattacccatcaatggacctagcctatgcagctggccgcgctgggggcaccatgacaggagtcctgagcgctgctaatgagaaggccgtggagttgttcattgacgagaagtatgatccttttttttgcatatcgacttttacctgctttgttctagataaatcgttgcatatttttcatgtcatcctttgatttggtttgccaaacattctgcaaattctaaggccagatacgctatgctaatttgctgcaatgaaaagaaaactttggaccaaccaaagccccatggacaatctactgtgctttgctttagaaaagcgagctggaacgagaatgtatgtccttaaagataatatattctcaagcaccttttgggcctacgttacggattagagcagctatataatcttgatttagactacctttttcctgatttaaatacaagttaaatacaccgaccgagggt

SEQ ID NO: 310447 - DNA, 489 bp, Zea mays subsp. mexicana
agcgcctcctgctcagactggtgttctgaaggcttcaggacgactggtggctctcttaactgtatcgtggagaatgaatgttccagattgggtgcaggcgcttgaaatagcgatcacaaagttgctattgaagtcatattacaatattgtcaggaaaaatgtggaggacttcataccaaaagcagttatgcatttcttggttaatcatacaaaaagggcgctgcataattaccttataacaaaactttatagagatgatcttttggaagacttgctcaaagaacctgatgagataaccataaagaggaagcagatacgtgaaaatctcaaggtccttcaacaagcttacaaaactttggacgagataccacttgacgcagaggcagtagagaggggtggatactccctggattctgatgcgattggtctgccagggcccatgggctttcttcatcccttcacgattcaacgatggaagctcaccatatt

SEQ ID NO: 310448 - DNA, 527 bp, Zea mays subsp. mexicana
gacttttcggctcatgcatgtccaaggtcttccatgatggactaacacttcatcagttaccattcaagatgtcatacagggtgaagtactgcttgctgtactttcaaattacatggtggacattgattggttgcttactgcgtgcccaagtttgaggaaggttccacatgtcctggttctacatgggcaagatggtgcttcattagagcttatgaagaagctgaagcctgcaaattggatccttcacaggcctccactcccaatttcatttggaacacaccattctaaggctatgttgcttgtgtatcctcaaggaattcgaattgttgtgcacacagcaaatttgatacatgttgactggaattacaaaagtcagggactatggatgcaagattatccctggaaagacacagtcgatatgaataaaaaaacaccctttgagaatgatctagttgattatctaagtgcacttaagtggcctgaggtcagggtaaatcttccaggggtttgtgatgtcaacataaatg

SEQ ID NO: 310449 - DNA, 521 bp, Zea mays subsp. mexicana
cttgtctgcccacggcccccgattagcatgagtgtccgcgccagtatcattggtcttcctaaccttggcacgtcaaacctcttcaacgccattgttgtgcgatgctttgaggatgacgatatagttcatgtcaatggaagggtcgagcccggatcagacattgatgtcattaacctagagctgatattttcagatctttaacaggaacaagcagagaaatcaggattggaaaaaattcagtaggcacttatggaaggaaagcctgcaagatcggtcgatttggctgagcatgagaaagaagttataaaacatctttatctgctaactatgaaacctgtcatttctgctgctaatgtaatagaatctgatcttgctgaacctgatatcaatcctcgtgtcaaagaggtggctaaagcagcatcatatttgcagtatggtatggttacaatactagctcaggtttggtgtatacatcgaagtacaagaacctttgaagaaatttctgctaaataattttatat

SEQ ID NO: 310450 - DNA, 421 bp, Zea mays subsp. mexicana
gttgtttctctactctggacccgcagacgaactgaagggggtagatttagaaaccccggccgctccacacgaccccaaatattaaatcagcgacagggaactcgcacgcgaaggctgaactcatggctcgcgtctacgttgggaacctggatccgcgtgtaacggttcgagagatcgatgacgagttgcgcactgatggagttatgagtagtgtatgggttgctaggaaaccaccagagaatgacttgattgactttgatgaccgcagggatgcacaagatgccattcgtgaatcggatggtaagaatgaatgaagggttgagctgacaactaatgttgccgggggccactgccgataccctatcggatctaatatgaagagctctgaatgtggtgaagctggccactttgcacgagaatg

SEQ ID NO: 310451 - DNA, 356 bp, Zea mays subsp. mexicana
tcgtttcactcggcagtcggcacgcaggctagcaggacagcattaggcagagccatcccctctcctcgctacgcgttgatcgctcggcgccgattgctcctgctgcgcctacaccctcgtgacgtaccgtgcggcgcgcgagctagcccgagacggggaacgcgagatcggcaggggctgcgaacgatgagtgcatgctgaagcccggcgagctgcagacgaagaggctgaaccgcttcataactgtgaggacggacaacaagacgaaggagatagctgaggaccaggtgggggaccgcgctacccgcgccgatgacttggaacacagcccccctgaggatgactgccggtacgcg

SEQ ID NO: 310452 - DNA, 502 bp, Zea mays subsp. mexicana
gttcgaagctttcagccgagcaccatcgtcacagtcagtagtagctaagcatatttctttctccgagtgatttgcgctgagcgatcagttcatccagagcgagcggagctgagctgagctgagcgagcttgcgtcgttgcttgagagaccctgccatggcttcccaccaggacaaggctagctaccaggccggcgaaaccaaggcccgcaccgagctcgatgtgcaggagaagaccgggcaggcggtgggggcgaccaaggacacggcgcagcacgccaaggaccgggcggcggacgcggcggggcacgcggcgggcaagggccaggacgccaaggaggccaccaagcagaaggcgtccgacaccggcagctacctgggcaagaagaccgacgaggccaagcacaaggccggcgagacgacggaggccaccaagcagaaggccggcgagacgacggaggccgccaagcagaaggcagccgacgccatggaggccgccaagca

SEQ ID NO: 310453 - DNA, 525 bp, Zea mays subsp. mexicana
tcgttattggcttaagacgatggtaagcacccgaaactcggatggggttgtggatccaaagatacccaagaaaccttcttcgagagcactgaagaaggctttgctagtggcgctgagatgcgtagaccctgatgcacttaagagaccaaagattagtcatgtcattcacatgcttgaagtcgatgatttcccatacagagatgatcgccgaggcactagagcaccaggacaagcaaggttaccagaaacaccggcaggcggatcaggtcgacctgagactgacagcagtggaaacggcggttccacacaagctgaacccttcagatggagaaacccagaggcttagtgttcatcggactactgaaaggaaagccaagccctcttgatttgtgaagcaacaagccaacaatggtgtccactgaagtcgtgaaactctcatcttgctgatgataggcatccatggatactgttagatcatctgtaaatgtaaaaaaaaatgtaatttagccctagtaattctttcct

SEQ ID NO: 310454 - DNA, 493 bp, Zea mays subsp. mexicana
tcggtaagacatggttgccagaacaagaatctatcgtctgaggggccgcaatcgaaagctgaaatatacttggaagtctgcagggcatccaactgttagaaaaagaattggtgatgggaagcaatggtacacacaatataacccatgcgtgtgccagcaaatgtgtggtaaagattgcccctgtgtggaaaatggaacttgctgtgaaaagtactgtgggtgcgtcccaagttatgctaactttccctttttattgggcagatagatttctgttgtttctttaccccgttctcctagtgattaagtatgatttgacaattatttcgtgtatttttactaatgaaaatgcagagtaaaaaatgatactgatttcatttctgaagcctcatttgtcatgattaatcaataggtgttcgaagagctgcaaaaacaagtttagaggctgtcattgtgcagaaagtcaatgcagatgcagacagtgcccctgttttgc

SEQ ID NO: 310455 - DNA, 411 bp, Zea mays subsp. mexicana
tcgttctcacctgaccaggaccacccgcccggacaggggcctttgagtagggtacaaggtcaagcaggcatacacagtctaccgagtacgaaatgatcatgatggcgataagaagaccgagcccaacagtatttgttgtggccagcctaatccccaaggtatcacccaaatcaagtgtcagagagaacaagatgtagtactggtttctagagacctagacgtaagcttggtggactgagggttcttaactcctactgggagaatgaggataggacctacaaggattttgagatcatccttgaggacgttgcccacaaaagccatctaaactgacccgaggatcaactggctatgcaacccttggcacaagcaccgcgagcttcgtggacttaccttagcaagcaaaaagtt

SEQ ID NO: 310456 - DNA, 437 bp, Zea mays subsp. mexicana
cgcgtttcgtctattgatacccgtgtcggagcgttgggaagtgattattaatctgttatctgcgctatgcggctgacttgggggtgatggcgcgcgagcagccggccgtgtggatcacgccggcgatgttcggcgcgccggtcaccgagcaggaggccgaggatctgagcaagagccaaaggaaattttgctctggctcaaagttgaaagagataggtgggagtgggataattgctgagaagagtgccaacggggacgcagaggctttaactcctgctaacaagacttccttgaggatgtaccatcaaactgagactggaacaagccagattgcattcagcgctgatggaagtgtttcaccaacgaagccatagtcgatacctgcggaggctaagcagcgagagcttagtggcaccctgtaagatgctggtgataaa

SEQ ID NO: 310457 - DNA, 517 bp, Zea mays subsp. mexicana
ggccggttccggaactgcagggccggcccacgcgacccgttccttttgccctacccgaggatccactaagagtgctatttgttctacgctccagtcatttctgctgagaaggcctaccacaagcagctgtccgagggaggaagtagcaagatggggctcatagccagcctccatgatggccgagcgcgacctccgccatgggaagagcatggcatgctgcctcatgaaccgtggtgaggagggtcccaaggacgtgaacgctggtgtggacacactaaagaccaagcgcaccatccacttcgaggactggtgcccgactggctttaagtgcggcatcaactaccagccttccagcgtgagcacgatgcggagatctgaacaaggtgcagcgtgccttgtgtatgatctccaactacaccagtgtggtggaggtcttgttccgcattgaccacacgttcgaccttatggactcaaagagcgtcttgtatcactgatacaacgggaagggtatggagga

SEQ ID NO: 310458 - DNA, 394 bp, Zea mays subsp. mexicana
ccacgcgtctgttttgcgattacagatgtacataacaccgccccgtgataagtagtcactctaattcttgccggcgaatctatggaaggaagcaagatatctgccagtgctactgttacaggtggaactgaagggtccagcagggttcaatggtacaaggcatcttcctctgaatttaagaatgaacatgagcttgaagcccttactccgtcacgagtttctaagacattccgcattcctcttggtgctgttggatattatatcgttgcaaagtttacacctgtggcacctgatggtgaagtttgtgaaccagcctatgctacattagatggccttgtggaaacactaccacccagcctgaacttcttaacagtcactggtgaattttttgtgg

SEQ ID NO: 310459 - DNA, 290 bp, Zea mays subsp. mexicana
tttatttcatgtcgaaccagatcgagaccacgtgctgtggtgcatagcgagggggtgcacaccaaggaggatgtcgcgtggaaccctggcaagcgcatggtgtacatctacaaggtcaagaccaagtgtatggaaacccggtacaggtgcatctggggcaaggacacccgtccgtacggaaacttaagcgttgaccgcgccaaggtcaagaccatcctgacgcctgtattgataacacaaaaggttagagtgttcatgtacccgcacaggataaaaagtttagctggagt

SEQ ID NO: 310460 - DNA, 505 bp, Zea mays subsp. mexicana
tttgatttttttgatctggagcaacgggcaaccaggaaggtcaatatcgaactaaggtccctttcaaacaacttggctatccagaatggatgttaccgggagcaggaaggctgttgttatacaaggttccataccgcctgcgcaaggccttcaggaagatccatgtcagactcgtcagggagctggagaagaaattcagcggcaaggatgtggtaattgttgctacaaggaggattgtgaggccacccaagaagggttcagctgttctgcgccctcgaacaagaactctgacggtggtcaagaagggatcttggaaggagttggcttaccagctgagattgtggggaagcgtgtcaaatacccgtctggatggttccaagattaataagaatttcttggacccaaaggagaggaacaacactgaatacaagctggagacctgcactgcggtctaccgcaggctgtgtgggaaagatgtggtctttgagtaccctatgaccgaaaa

SEQ ID NO: 310461 - DNA, 473 bp, Zea mays subsp. mexicana
cggtagacggctcatgaaatgaagggcggacctattggatggcgtttgctgtttataacatgacttaccgtgaggtgacaaaccagtcaagtgacgacttaacggctgccaaacccaagtggacagcccgagcataggtcgaacaactagcaccgctgaagcgaccaagtgatggagcggtaagtcacgacatgtacgggagtaccgggcgtccatcagtatgaatcttcagtgggtgtggaacgcgcccctgccgcggaaaaactcatcgttccgggcgatcatgctttggatgctgtcggaaaaaaagaaaacagggggtaagagattgaagaaagcgacgatgatgtgggcatcagcctctgcgaccaggctgcacagtaatcacataattgttttggccaaggaaccagagggaaaccagaggcatgttagattttaagcttgttatatgtggaaagactggaaagact

SEQ ID NO: 310462 - DNA, 436 bp, Zea mays subsp. mexicana
atgctagacggcttgggggatgattgactgatgttttgggtggcggacgtagtttctagcgtcactaacctgtaggtcagaaaaagttctgagacgactgggtagctgcaaaaaccaagttgacagctcgtgcaatggtgtagagactggtgctgctgagactgaattactggagctcgctgaggcacaacaacatcgttagtaccgtgctatgaactgtagtgatattgaggtgatcatgatatgtacacggcaggaaccaaagtgagggttcagtgggaagatgcatcacaatacttaaggaagagaatattactttctcaagttttgacattctttcagatgatgacgttagacaggggctgaaagtgctcttaaactggcccagttacgctgaactgtacataaaaggtgagctggttggcggttcagacat

SEQ ID NO: 310463 - DNA, 319 bp, Zea mays subsp. mexicana
ttgctgtcgcgtgggacaagatccaggaagctgatgaacttgtcatagaggagctcacgatgtttccagaactcaagaacgcttactgagaaaaacatcctaagcgactagctgcatcccctaacgatttacgctggccgtctgaaggacaagagactaacaacttgttgaagacctagcaggagatgtgaaagaagactcaggttcagaatcagaccacagacactgaatattaatcatgtacagcgtgaaatcgtgcaagctaaaatttggaaatcaaagtttgagaagaaactgtaacacatgggcctacataaca

SEQ ID NO: 310464 - DNA, 221 bp, Zea mays subsp. mexicana
tgtttagttccagaccaacctggtaccctacccgaggatccacttaatgcttccttcgtacgctcctgtcatctctgctgagaaggcctaccacgagcagctgtctgtggctgataacacccacagtgccttcgagccatcttacatgatggccaagtgcgacccagtccatggcaacgacatggtctgctgactcatgcaccgcggtgatgtggccccca

SEQ ID NO: 310465 - DNA, 553 bp, Zea mays subsp. mexicana
  unsure (1)..(553): unsure at all n locations
ttttgggtgtggcaacaactgatggtgtagttactaagaatgttgccgttaatgaaggtgatgaccttatgcttggcatatttgataagttcatgtcagaggaaccagaaacatcttcaacctatatgcgcactgagttagatttgtatttggaagagccaacacttccaagaactcaagagcttgacattatttcttggtggcaacacgctggaattaaatacccaacgcttagaaaaattgctcgggatatcatggcaattccggttacaacagtggcatcagaatctgtttttagtactggagggagggtaattagcccacatcgaagtagacttgctccaaaaacagttgaaggcttgatgtgtatgcaagcttggtctcgtgcagacatgttaggtgatcaatcttgttttataaatgcactaacaacttgtttggaggatgaagacgaacaaatggatgaaccaaatgatgctctataggttgatgacttgatgttaaacaaagcagcaggccagcagcactattattggcgttnggacttgacagc

SEQ ID NO: 310466 - DNA, 488 bp, Zea mays subsp. mexicana
tcttttattgtggagatgtgtttatgacaaagagttgagccttacatgcaccagatactgatgtatgaagattcagggggacacgaggcagaacaaaagacagttccgatgtgctaactggaggatgaggcattagtctcactggccaaggaagggaatttcaatcctgatgaatagaagcatgcctttctgctgcaattgcttttttggtttaagcaatcattcagatgggttaatgcagcaccttgtgacagctgtggccgtgagacatccaatgttggaatgggcaccccacttacctcagaaatcaaatttggcgcttcacgtgttgagatgtataggtgtaaccattgatctaatatcacccgtttcccaaggtacaacgatccttgtaagcttatacaaactaagataggtcgctgaggagaatgggcgaattgcttcacattctattgtcgagcttttggatatgatgctcgtttgattct

SEQ ID NO: 310467 - DNA, 626 bp, Zea mays subsp. mexicana
  unsure (1)..(626): unsure at all n locations
tgaacttattatcgtcgcctactgccttgttccttccactcgctgaaaatcagcgctgcgataaagagcaatgtcagaacactggtgcagttcggtgctttggtcacaagagccaggttttggctccaatcactaatgaagttacggcaaacaagagggtatgtcttatggatgagaataggaagagtacggatgctaagagaccatgcactgttcccttggtatcgaggaaaaattccattgctcctgctgatgagatcaataccgagcctgtcaacaagagctgttcctggtgctgcagctctgaagatgattcagctggtgcatgcgaggaacctattgttctgaaacaaagtaccagttcaagaggtcctactcgcttctcaaaggattcacagagcctctacgcaaagaggagaagggagaggatcaatgaaaaactaaggacgctacagcagctaattcctaatggcaccaaagtatgcttctttgtttcgtatgtggtcatcctcaacttcttcgctaccgaattgttgacatgagcactatgctggagggagcagttgagtacgtcaagtttctgcagctgcanataaagctcttgagctctgaagagacatggatgt

SEQ ID NO: 310468 - DNA, 333 bp, Zea mays subsp. mexicana
ctttagagtcaaaccctaagcagggagttgatttatccgctgtagacatgagtaagttgcactctgagactgacatggatgccatctcccagactgttggggatcgccaaggtgaagaataggaagttcactgagactgcgaaacttcagattggactgagaattagatccaagaaggacagcgctcagagctctgaaagttgccccatatccctcgtcccaagatgaaggcacgcatgcttgatgatgcccagcatgttgaggaagccgataaaatggaactcgactacatggatgatgaggctctcaagataatgcacaagaacatgatgc

SEQ ID NO: 310469 - DNA, 542 bp, Zea mays subsp. mexicana
tccttttttttaacagaagattcacgagtgtcagtgccagattccatcatcaacttgaacagcttatgaacaagctaaacacgaccacattccacattattcgatgcataaagcttaacgaaatgcaaaaaccagacatcttcaacgctggctttgtatgcagtaacctagaaacataggaatgtgtactgctcttagattaatgcaacagggattccctacacgctgcattttcgaagatctgtatgaaagatacgctcagttaatgccagcagtaatttctcgtttgaagccttatactttctgtgaagctgagttggtagctttggatctcaacggtggaaaagacttccaaatgggtctcaccaaagtcttctttagagctggaaagttgcaatttcttggatgaccttacatccaactcttaagcaatgatcaatggaatctaatgtaaagtgaaaagttggctttgcagaaagcgcttcaaggttggaatctttggcgtgttgccatgcaaagataattgctcgagttcaaatata

SEQ ID NO: 310470 - DNA, 262 bp, Zea mays subsp. mexicana
ccacactcacagacaaggacaaggaggacatacgtaaatggggtgttccaaacaagattgacatgattgccttgtcattcgttcgggagggaacggatcgtgttttggttacgaaagatgctggtgagcatgcctatggcataatgctgatgtcaaaggttgataatcaagaatggagttgctcactttgcagatgtactggcgatctctactgcttctattgctgcacaatgtgattttatgaatgaaaatcctattgagg

SEQ ID NO: 310471 - DNA, 600 bp, Zea mays subsp. mexicana
gtttgtcaaagaatcgtgttattggttctggaaccagtttagattcatcacgttttcgttttcttatgagtcatcgtcttaatattgctcctacatcatgtcatggatggatcattggtgaacatgctgattcaagtgttcctgtttggactggtgttaatgcggctggtgtacgtttgcgtgaattaaatccaaatgttggcactgattcagatccagaaaaggggaatgaattacacaaagaggttgttaatagtgcctacgaaggtattaaatcaaaaggatacacttcatgggcaattggattaagtgttgcatcacttgcgtcatccatgttacgcaacaccaataatgttgatgctggttcaacattagtgaatggagaacatgatatcaacgaagaagtctatttgtctttgccatgtgttttgacagcaaatggtgtttcacatattgttaaacaaattcttactgaatcggaacatctcaattacaaaaatagctgcgtaatgcataagttcacaggtcttctatggtaaacataacattatgcttttttgtcgacaactgccctagaccacttacccctccccccaacta

SEQ ID NO: 310472 - DNA, 498 bp, Zea mays subsp. mexicana
cccacttgtctttttgggtatttttggaagttctatgagtcccagtgcgagaacctatccacaggctgtgatccacactgggatatccaccatcgatgtgatgaactccattgctcgcgggcaaaaaatcgctgtattttttgctgatgggctccctgacaatgaaatcgctgctcagatctgtcgtgaggctgcacttgtgaagacattgcatacaggaaagcatgcagagggcggcgaagatgacaactttgctattgtgttagctgctatgggagcgaacatggaatcagctcaattcttcaaacatgattgtgaagagaaccggtccatggtacgggtgactctgtttctggatctgactaatgatcccaccattgcacgtattatcacccctacgactgctctaacaacagcataatattgggcatatgaatgtctgaagcatgtactagacatgatgacagatgcgagctcttatgcagacgcactttgtga

SEQ ID NO: 310473 - DNA, 380 bp, Zea mays subsp. mexicana
tttaactcctgcgacttcttcgacatgaccgtgggcggggttccagccggccggatcgtgatggagctgcacgccaacgaggtgcccaagaccgcggagaactttcgcgcgctgtgcacgggcgagaagggcgtgggcaagtcccgggaagccgctccactacaagggctctaccttccaccgcgtcatcccccagttcatgtgccagggcggggacttcacccgcggcaacggcaccggcggcgagtccatctacggcgagaagttccccgacgagaaattcgtccgcaagcacaccggccccggggtgctctccatggccaacgccggcccctacaccaacggctctcaattcttcaactgcaccggggagacccccc

SEQ ID NO: 310474 - DNA, 527 bp, Zea mays subsp. mexicana
cggactcgtgggcggacgcgtgggcaagggggaagtatgctgaagttgataaacaaagatcgtcggggagtggtggatacattggtgggttgcaccagagatatgaaagccggcttggtggatactcaccaaggaaaaagaaaacatcactgcaagctgagcaggcaactaccaagactccttccaaggtcattcagtccccagaaaaaaaatcagccacatgggatcagcctgctgttaaagcaaaccaatctaacttttctaccactttcctgccaactgttggccagatggctcctactccattcagtttcagcgtgataaaggacccttcaactacagctgtgacaatgttggcaggtaatagtttgactgcagattctgtgcagcttacacaagcaacgcgcccactcaggaggttgcacattgaaaatttgcctgattcagctacagaagataagttgattgactgctagaatgacttcttattgactactggcagtaaactacagcggtctaaaccatgc

SEQ ID NO: 310475 - DNA, 417 bp, Zea mays subsp. mexicana
ggagagcgaaattaccggtacttgggggggtttgttaattcagcgggggggcttagaatctatgtatgtgcaatgtgtggattgtacatcaggcttcttatgaataggggtcattattcggtggtggaagccattaaagaatctccagcttcattggcaagtatggcatattgtttcatttgcttctggaacgtcggcggtctcactgggttccacttttatgaaatagtgactaaaatgacatcacttgagaaaatcaaattcaaaatcaggaacgaaccaaaggatgtaaaatcatgcttgagtgctcaacttgccatgaggttttgtgcaaaaaaaaggaaaccttttaagatcaacctaagagctattggtccaaaataacaagaggtttgacgaccacagaccagcttttca

SEQ ID NO: 310476 - DNA, 321 bp, Zea mays subsp. mexicana
caccggactagccatcgactaccagggggggggtcctgaaatggataaggcgggggcaaagaagctcaacgctagtgactatcgtggaattaatgatgtgaggaccacaatcaagaactaagctgatgatgctggagggtctgctcggaaagctggatattcctgaccaccttacaagattataatcctagtcgaaacaccatatacgacagaagatgcccaaaaaggcttgaggcgtaccacggagacctaccccaaagtgaccagaatctttctataagagcaactataccagcaggataatagaaccacttgcattaa

SEQ ID NO: 310477 - DNA, 471 bp, Zea mays subsp. mexicana
  unsure (1)..(471): unsure at all n locations
cgtgattgctcagtgtgcctttgagaggcaaacagatggagatttgctgtcatggaactcaatgctattagggtacgcacaacatggttacagccaaaaggcccttgatgtatttcgacagatggaagttgagggcattgagatggatggtcttacattcttttctgtgattatgggatgcgctcatgctggtcttgttgaagaaggtcagcaatactttgatttgatggtcagagactacgggatcactccaacgatggatcattatgcatgcatggttgatctctatagccgcgcatgcatgctgtatgaaacaatgagccatattgaaggcatgccattcccagcaggtccaacaatatggcgcacattgctaggagcccgtagagttcacaagaatgttgagcttggaaaagtggctgcngagaagctgctgtcacttgacccttttgactcagctacgtacatact

SEQ ID NO: 310478 - DNA, 481 bp, Zea mays subsp. mexicana
cggacgcgtgggcgtgtgcgagcgcctctccatccgggagaggcgcaccacggccgctctcggctgcctcctgtacctcagcctcatcggctacaaggctgcggttccctatttcacagccattcttctcgtcaactacttcgcgtcgttctacgtcatattccggcgcacgtcccagaaccttgaggctctacaggagcagctcagtctcgtagaagaggaaggcatccattcgttgcatggcgcgctcaacacaaagtataccatgttcaagaggtttcagggaacgatgcaggtggccgcagtggcattcatcatggtatacatgagggctgacgacacgccagataactactggtttcgcgtgctagtgcgcgagtgggtacagttctgcatcttcatgtacattgggtggaacttcaggatccctgaggcgtcactccatctgcctgccatgccccttgtgaaagcagcatgggag

SEQ ID NO: 310479 - DNA, 515 bp, Zea mays subsp. mexicana
atcgaggagctaagcaccggcatcgggggcaagctcttccacggcccgctgcagcacctgaggtgcgacggttgtaacagccgcaccctagatgagacgctcgagaacatgcatgctctcaaccggatgttgcagcctcgacacagagaaggcgatcatcgagcagaagatcaaggccatggtggagaagacccaaaattgacgccaggaggcaatgtttatacccgtgtatactaacgctctaacctgatttcatttttatatcctctgacttactgagctcctccccgtcttgcctagacatcaaatgagttgagaattaactccatggcagcgaactccaaatgtcgagagaggtggcaaaatctctctactagagctgcttttctttgtacattttcgcttgagctgctgggggcaagatccccactcttaagttttatactgtagtcggaccaataaacaggaatttcccatggatcagctgatgccgtatctcctttggatcacacttg

SEQ ID NO: 310480 - DNA, 344 bp, Zea mays subsp. mexicana
aaggacttacttgcctacgatggaaccgctgctgctgatgcggacgacgaggaatacacgaactcgaagccctgaaccagctattatgatatgtggcctaagacatgtcctgaaccttaccatgcataggacgatgataggggagactctggtggatcctgtcctgaatcaagtggtgctgttgcaacctccatatcgaacgattatggagggatgaactatccatcactgttcaggtgaaaaccgggaagtgatggggcctgacagcagactatgcgtgaagaaccaccctcatattcgacgtcggttctacagaagaaggaatcatttgaaaacccccttgg

SEQ ID NO: 310481 - DNA, 498 bp, Zea mays subsp. mexicana
agcgatcctaagcggagcgcacgagtggcagcgactggctgcgcggtgatgcctatagcctgctccacgcaccagcgtccagcggcaccacgcctccgatgctcgtgctccccctgcctccctgcgcgactggttgactgcgcgcctgagccgccccacacggcctggggcaccaacgtcttcagcggtccagccctaccccatcactcgctggagagagagggactagaacatgccgccgactgggggtgctgctgcagatgactcttccgttggctcgtcgtcatcggcatccaaggccaagcaccacagttcctatgagtaggaagtttgaaaagtactgaaagaaatcatccactgcactagttgcttgttttctagatcctagatataagagaatacttatagagttctacatgagaaagtttcacggcatctcctctcaagtttatgttgacgaacttcttgatatcatcaagaaactataccagtactatg

SEQ ID NO: 310482 - DNA, 468 bp, Zea mays subsp. mexicana
gcgagcgagggacccggggcggaagaagagggagattgacgactctctccgggtgggaaccacgatccccaacctttcgaatgctgcctgcctgcctgcaaaaaggagttagtcatggcgactaagcgcatcctcaaggagctgaaggacctgcagaaagacccccccacattatgcagagcaggtcctgctggtgaggacatgtttcattggcaagcaacaattatgggaccacctgacagtccctatgcaggcggtgttttcttagtgaacattcatttcccgccagattaccccttcaaacctccaaaggtttctttcaagacaaaggtcttccaccctaatatcaacagcaatggaagtatatgccctgacattctaaaagagcagcggagccctgctctgacaatttataaggacctgctctccatctgctccctggtgacccgaccccaacccggacgaccc

SEQ ID NO: 310483 - DNA, 543 bp, Zea mays subsp. mexicana
cattttcaacgtgaaggccaagatccaggacagggagggcattcacccagaccaggggcggctcatctttgctggcaaacagcttgaggacgggcgcacgcttgctgactacaacatccagaaggagagcaccctccaccttgtgctccgcctcaggggaggcatgcagatctttgtgaaaaccctgaccggcaagactatcaccctcgaggtggagtcctctgacaccattgacaacgtcaaggccaagatccaggacaaggagggcatccctccagaccagcagcggctcatctttgctgggaagcaacttgcggacgggcgcacgcttgccgactacaacatccacaaggagagcaccctccacttggtgctgcgcctaaggggaggcatgcagatcttcgtgaagaccctgaccggcaaaactatcacccttgaggcggagtcttcagacaccatcgacatcgtccaggtcaagatccaggacaaggagggcattccctcagaccagcagcggctcatctttgctggaaagcagcttga

SEQ ID NO: 310484 - DNA, 544 bp, Zea mays subsp. mexicana
catgatccaggacaaggagggcatccctccggaccagcagcggctcatttttgccggcaagcagctcgaggacgggcgcacgctggccgactacaacatccagaaggagagcaccctccacttggtgctgcgtctcaggggcggcatgcagatcttcgtgaagactctgactggcaagactatcacccttgaggtcgagtcttctgataccattgacaatgtcaaggccaagatccaggacaaggagggcatccctccggaccagcagcggctcatttttgccggcaagcagctcgaggacgggcgcacgctggccgactacaacattcagaaggaaagcaccctccacttggtgctgcgtctcaggggtggcatgcagatcttcgtgaagacacttactggcaagacgattacccttgaggtggagtcctcagacaccattgacaacgtcaaggccaagatccaggacaaggagggcattccaccggaccagcagcggctgatcttcgccggcaagcagctggaggatggtcgcaccttggct

SEQ ID NO: 310485 - DNA, 348 bp, Zea mays subsp. mexicana
aaagttcatctatctactcgtgcagattctaaagtatgctcctgtgatccgctacattgttcataccctatttgggaagatgaaggcagtgcatgataagatggatcacgtgcatgaaattcattgacacatggggcctccattggtgacatgggggactacggctacaaattgttttgagaaagaggtgacctgctgcacgctgcgttccagaaggatgcaatgattcacatcattgataggaccaatggtcaaggtgacaagggcgacatcactacgaggtgtgctacccggcttctctgaaggacccacatgggactacggaaggatgcttgcattggtgcatgg

SEQ ID NO: 310486 - DNA, 587 bp, Zea mays subsp. mexicana
gtcttttttcattcgttgttgctcatcaaaaaccagggggtactaaaacattagcccttaataattcccccggaatccaatctaataccgtcaaaatgaaggccgccaccgttctcgctgttacctttgccgctctggcccaggctcatacccgcgctgatatcccctcttgcgctctgccctgcctcgacgctgccgtcacggccaacaccaagtgctctaccaccgactacgcctgtatctgcaaggacttcagcgctgtccagacctctgccacctcttgcgtcatcgagaagtgcggtgctgatgttgccctgaacaaggtcctccccgccactcaggctctctgcaaggcccagtctggctctggctcctctgctgctgccagctccagcgccgctgccaccagcgctgccgctaccttttgtcctgccagctctgcccctgccagcttccgccctgccagctcttgtcccgccatctttgttgcccagacctctgttgctgctaccacctctgccgctggcaccaccttcgtcaccagcagcacttctgctggcacctgtgctccccccgttggcaaccga

SEQ ID NO: 310487 - DNA, 539 bp, Zea mays subsp. mexicana
cacatatgttcggatatgtctccacaagatattaccgtgctccggagatcatgctgacctggcagaagtacgacgtcgaggtcgatatctggagtgcagggtgtatctttgcggaaatgttggagggaaagccactcttccccggaaaggaccatgtcaaccagttttcgatcatcacagagctactgggaagcccaccggaggatgtcatccataccatctgtagtgagaatacactgcgattcgtccagtcgttacccaggcgcgagcgtatcccactctcccaaaagttcaagaacgccgatccagccgcggtcgatctgctcgaacggatgctcgtcttcgatccaaagaagagaatctcggccgcacaggctctagcacacgagtaccttgctccgtatcacgatccgtcagatgagcccgtagcagccgagaagttcgattggtcttttaacgatgccgacctttccgttgacacatggaaaattatgatgtacagcgagattctcgattatcacaacgtcgaccaaaatgat

SEQ ID NO: 310488 - DNA, 547 bp, Zea mays subsp. mexicana
  unsure (1)..(547): unsure at all n locations
tcggatttattgcagttctccaactaggaagatggcagaacttatgtcgacaccatattgaggttgacagtactgaatttttggaaggactgcagtcatccaatcagttgaaatatctttgtctgaggggcatctctagaatcattgaacttcctgcttccattggtggactctcgaatcttaggatcttggaccttcatgcctgtcacaaccttgagagactgagtactagcatcacgtatcttcagatgctcacccaccttgatgtgtcagagtgctacttgctggaaggcatgccaaggggtattggcttgcttactgaactccaagtgctcaaagggtttgtcattggtggttcaactggcaattacaattgccgggtagcagagttggctaggctggacaaactgaagaagctgaccatatatattggaagcaaagctgcagtgacagaaaatgaactgaatgagcttgagaacatcaaaggccttgcgtgctgaaattacatgngctgtatcactttcaaagaaagaacgagtccatcaaa

SEQ ID NO: 310489 - DNA, 475 bp, Zea mays subsp. mexicana
gtccaaggttttctaaattcatattattctgattttgccaactcccgtgtctatgagccagactcgcctttaactcctgaaccagcgacacaacgcctttctaccttgtataatgctgatgttggtctttacatgctagcaaacaagtggatggttgatgaaaaggaattaagaatcatccattacacattgggtccccttaaaccctgggactggttcacagcgtggcttgtaaaacctgttgaaacatggcaggatattaggcaaaaacttgaagaatctcttccaggaactggtgggggaaggaaccctcatgaccagctggttgcaaaatattgttcattctcccattttgcttgctgctatttggttattaccaatcatgttttcagacagaccaggagttgataagtataagatctctatgtgcttttgctagaagagctcgccataaatacaagtctgaagagtcact

SEQ ID NO: 310490 - DNA, 426 bp, Zea mays subsp. mexicana
  unsure (1)..(426): unsure at all n locations
tcgttcacgcgtccgcttcaacaagagctctgtgacaattgggcataccactgctgaatactcatccagtggggatccttttggtcaagactgggttcctgcagaatgtgatgtttccatcagaccaggttggttctggcatgcctcagagaaaccaaaaaacgtgacaactctgcttgacatatactacaaatcagttggtagaaactgtctcctcattttgaatgtccctcccaattcatctggcctcattgccgatgaagacatacaagtcctccaggaattcactgagattcggcgtgcaattttctctcagaactttgctgccaatgccactgttacagcanacagtgtgcgtggtgagcaagataatctgcagtttgcaccatccaaagtgcttgaaagacggatatactcctactgggc

SEQ ID NO: 310491 - DNA, 407 bp, Zea mays subsp. mexicana
gtgtgtgttagctcagcacattgcaaagggaaacgaggatggtctgatcataagctccgttgcctctagagcaaatctgtgggctatggtgatggctgctggcaccggatatactcttcacgcgcctgaactgactgcatatttattcgacaaggaatggatcctggaacatggggagaagaacttctatattacgtgcctagcaggtgcagacaatggcagtgtcactgctggtcacgaccagaggtgaaacaatggtgcctaggatttgacaaactacttcctgtgtaaaatggtgtaacaatatttgagagtttacctattgacaaatcgagagtacaaagttgtactttcggcactcaccatgacatggtagcgagatataccatgctcgactaacgttgcat

SEQ ID NO: 310492 - DNA, 541 bp, Zea mays subsp. mexicana
ctggacgcccgcgggcccgacccgaacgacaggccggccgagcgagcgtttgtgttatgacaaggctgcaaacctcctagaagctcgaggataggctctacaagctgtcggtgtggctcgtgaacccgcagcggaatccgttcgcgcgcgtgcaccggaacgccagagactgccgccttcgaggatacaggctcaggtatgacgacctgtacggattcacatcacgagggtctaaatcagagaagcactggcgcggtgaacaagatatgtggatgactcgctcaaccagcgatgcaaaacggtcatggcacgcatgatgacacacagaagactgccgagaagcattccaactccaacatcgacattcatgctctcaatcatagacagtatcctcgcattgatacacgggacttcttgccacttaccaccggagggaaatctggtatggctggctaggatcctcctggacatggtgatgtgtgtcccactctgaataacaccggaaaactagacatcgcatagtctcaaggcaaggagtatg

SEQ ID NO: 310493 - DNA, 435 bp, Zea mays subsp. mexicana
cgggccggaattccgggttcccgccacgccccacgctgttcgatatgggaggcaaggagggatacccaaccctgagtgctttgagcttgacaggcctcagtctgacccaattgctgctattgggattgagatctggacaatgcaggatggcatcctgttcgacaatatcttgattgctgatgatgagaaagttgccacctccattctcgagaagacatggaagcccaagtatgatgttgagaaggaaaaggagaaggctgaggaggctgctgctggtgcagatggtctttctgacttccagaagaagatttttgaagtcctgtacaagattgctgatattcccgtcttgggaccctaccagaccaagaatttttgatgttatcgagaaagggagagaaagcagtcccaacattaactattggcatttttggtcct

SEQ ID NO: 310494 - DNA, 453 bp, Zea mays subsp. mexicana
  unsure (1)..(453): unsure at all n locations
tgcgtaccgcgcatttangatttttgtagtttcgcagaggtctattagggatcatatatggaactggataactcgtaactacaataaataatgtcgacgctaaaaggctcaggattctatgcatgatgaacgtggggtcaggaactaacggtgaaagattgatgatattgcgtgttctggaccaactaggaccacagcttctctacacagtatattcggcagtatgtgtgggagccttaatatttgtgaggcgccatgtgttggaaacgaagggaaagactctacaagagatagaggtttcacttctgcaaccacaataaaggtacatatttgacgtggctggaaccttgggcaggctgtttgctgaacagaaacaaagctggccctgcagaagctgatttctgaagtcatcggctaattccttgaaatatggccatgcaagattgaatagtg

SEQ ID NO: 310495 - DNA, 447 bp, Zea mays subsp. mexicana
tcggtttcatcaccgatgaaataagtcatcttaaagacttggtaagcttgaatttgagctataattcactgactggaagcttaccacctggtttaggtcaaccttcacttgtgtcactggatatttcatcaaatgagtttactggaggcattcctggaaccataggttcatccaagttacagactgcattactaaacaacaatcaactcgatgggcaagttccagaaagactttactcaattggcgtgcatggtggcgtgatagagtaatatatccttacttagtcttcttgtaaacgaaacttcaacttcttacttgtgatgtcagatatggttagaaagaattactatgctcagatgataatcggcattatttattagcctattttatgctagcttctggacaggtcccagaatgaaaggtttaagttctattcatgttgagtaa

SEQ ID NO: 310496 - DNA, 444 bp, Zea mays subsp. mexicana
gcgggccccggtccgggattccagggacgccccaggcttcccgtctactgtggcgctgccagctgcagaatactgaaaggaagcaaaaccttatatcgaggacggggtgcacccccacagtctaatgcggagtagtagaactgcaggcaaaatggcaatccaaagggttaaagagctggcagttagcatagaaggaaaaagccttgaagagaagaaatcactgctagccaagtgcgctgctacaacactcttttcaaaacttataggtggtgaaaaagaattctttgcttctatggttgtggatgctgtccttgccattggcaacgatgacaggcttaatcttattgggattaaaaaggttcctggaggtaccatgagagactcttttttggtgaatggtgttgcattcaagaagacgttttcataattccggatttgtgcaac

SEQ ID NO: 310497 - DNA, 418 bp, Zea mays subsp. mexicana
ctttatgtggatcctgagaatggatacacacagacagaaccagataaaaggaagtattcaggggggccatgtctaaatgagcattatcgtacagcttttaatgatgaaaacttaaagttcatgaagttgaacgaccaccagattgttctccttctttcatctatttggagtcaagcatctctggatgacaacttacctgcaaattttgaagcaatgggccttgtgtacagcattgctttattatgttcaaaatcaaaaagctccagtcatgtgacacgtattcgttgtttccagttggcgttctctctcaggagaaactctcttagccctgaaagtgatttgaagccatctcgtagaaagtgtctgtatacgatggcatcagcgatgcttatccttttagcaaaaattgctgatcttc

SEQ ID NO: 310498 - DNA, 425 bp, Zea mays subsp. mexicana
cagggtgtggcggagccgcggcctattccttcgggggccttcatggagaactgcgagtcctaaaccgccgacatggggtttgagaagatcaaggtcttcaacccaatcgtcgagagggacggtgatgagatgaccagggtattctggctgtctatcaaggaccagcttattctcccatttatggacctggacatcaagtgctatgatttggggatactgcaccgtgaagcaactgatgacaaggtcacaatggaggctgcagaggctactctcaagtacaacgtggctatcaagtgtgcgaccattacttcagatgaaactcgggtttaggagttcaatcttgaacacatgtggaagagcccaaatggcacaattaggaacattataaatggtactgtgttcagagagcctattatatgcaaaaa

SEQ ID NO: 310499 - DNA, 430 bp, Zea mays subsp. mexicana
tggttcttgccaccgccgccacccaacttggggggcttgatacagtcgtggaccgggcccttcgactgcgccaacttggttcatcgattcttcaagagatcgagctttttttggaccacatgggccacaatggattgcagctgcgcatcaagctgaggttgcggctcaagctgcaagtgccttaagaacctaccctgacctggaggagacgagcaccgccgcgcaggccaccgtcgtcctcggcgtggccccggagaagaaggccgcgcccgagttcgtcgaggcctgcgcagagtccggcgaggccgcccacgcctgcggctgcggtagcagctgcaagtgcgacccctgcaactgctgatcacatcgatcgacgaccatggatatgattattatctatctagcttgtggtggtggttgaacaataata

SEQ ID NO: 310500 - DNA, 444 bp, Zea mays subsp. mexicana
ccctcgtgtccggtcgccgccgccgccgccgtgcgtgggtgaccccgccgagaagccgcgcgccgccaaggctcaggtggtgggatggccaccggtcccggtcgtttccgaagaacaataaggtccgggcagtccgacaggggcgccgtcgccgccaacggcgacaagtcctcgccggcggcaggcggcggtgccgcgttcgtgaaggtgagcttggacggcgcgccctacctgcgcaaagtggacctcaagatgtacaggagctaccagcagctgtccaaggcgctcgagaacatgttcagctccttcaccatcggaagctgtgggtctcacgggacgaactgatagcacgtggcacactgcgggatacttcacaccctggaagggtggaccgtcacaagtgtgcggaccccatggtgcatgctgacaaagcatggtcagctt

SEQ ID NO: 310501 - DNA, 272 bp, Zea mays subsp. mexicana
gttcgggtgcatccccgtcatcatggccgcgacattgagctgccggtcgcggacgccatcccctgggaggacatcagcgcgttcgtggcggagcggcacgtgccgcgcctcgactccattctcacctccattccgctgcccgacatcctgcggaggcagcccctgctggcgcgggactccgttaagcaagcgctgatgctccaccagcccgacagggccggtgacgccttgcaccaagtgctcaacggcctgctgcggaaggtgacggacgg

SEQ ID NO: 310502 - DNA, 426 bp, Zea mays subsp. mexicana
tttgtctgctcgcatttcctcccaatccatcccgcgtccaaacccgagcttccaaggcgccccgcatcgatggcgcccaaggccgagaagaagcccgcggcgaagaagccggcggaggaggagcccgcggccgagaaggctccggccgggaagaagcccaaggcggagaagcgtgtcccagcgggcaagtccgccggcaaggagggcggcgagggaaagaggggccggaagaagggcaagaaaagcgtggagacctacaagatctacattttcaaggtgctgaagcaggtgcacccggacatcggcatttcctccaaggcgatgtccatcatgaactccttcatcaacgacatcttcgagaagctcgccgccgaggccgccaagctcgcgcggtacaacaagaagcccaccatcacctcccgcgag

SEQ ID NO: 310503 - DNA, 399 bp, Zea mays subsp. mexicana
gttgtttatcggctcatgaagagcaacttggaggatgtgatcactgctatcgaggtctccaggaaaacgtttttccggatacagatgaactacgtgtgggcgctcggctacaacgtcattggcataccaattgctgcaggggtgctcttgccatcgacccggattcgcttgccaccatgggttgccggcgccgcgatggcagcttcgtccgtcagtgatgtctgttggtccctcctcttgaggtactacaagagtccaaagaagtttgacaactgatgacaccgcccggaccggagcgaccaaagcagtgttattaaggtaataaaagaagctaatattctaatgggtaaaattatttggtgagcgacaggggaacattctggagttgacaaggtattg

SEQ ID NO: 310504 - DNA, 321 bp, Zea mays subsp. mexicana
cctccccctccggttcgggttcggggtggtgaggttctactgcgttcgggttcgtgggtgagcggatcgagatggcggggtctgatggggagtaccgatggttcagaggaggcctcgcctggggcacggacgaccactctgttcacaacgccttaaggaactaccgcgaggtcctcgagtccaagatcattctacattcgggagacgcacaggtcccgcggcttaggcttaggcaccttatgcacggaggaggcgatgcggaacgccatcgagggcatgaacggcaaggagctggacggtcgcaacatcaccgtcaacgag

SEQ ID NO: 310505 - DNA, 333 bp, Zea mays subsp. mexicana
cctactcttccggtcaaggatgccatctaccagggggtgtgtggatgccaaggagaggtataggaagaccactgtgactgtggaacttcagattgggctgaagaatcatgatccacagaaggacaagcgtttcagtggctgtgttaagtcgccccatatccctcgtcccacgaggaaggtgtgcatgctagctaatgacgagcatgttgagggggccgagaagatgggactagactacatggctgctgacgttctcaagaaaatgatcaacaacaggacgcttgtctagaggcttgccaagaagtgccatgctgttttggcctcagtggccat

SEQ ID NO: 310506 - DNA, 407 bp, Zea mays subsp. mexicana
tgcagagcaggtgagcggtgtgatccatgcgtgccgcgtgtgacacgtccggctcctcctgatcctgtcttaattggcacagcatactacagcatgtgctcactcttctcgaattcatcctcccgcaggacttcctgaacatgttcttcagggatcagtacaggccgatccccaacgtgtacaacctcgtgctggccatgctctggaggcaccccgagaacgtgcagctggagaaggtgaaggtcgcgcactactgcgcggcggggtccaagccgcggaggctcacgggcaaggaggcgaacatggacagggaggacatcaacgccctggtgaagaagtggtgggacatctacaacgacgagacgctggacttgaagggcctgcccgggctctcgcccgacgacgac

SEQ ID NO: 310507 - DNA, 433 bp, Zea mays subsp. mexicana
gtgaaaattgaaatgttcatgatgatatggcattgtgatactaaaaaagaaaactcgacctgcgggggtaaaacaaccccgagcattatgataagaagaagaccttctcactcaggtcgagaacctttgaaccattgtcccactcatacacagcggcactgtagcccatgtgagaaacgaccgtgactaggactagaccttagacctgtgcttgttgtaggatagacgagaggatttttttaaccatggcctggaattcgctcccacggggagtcgaactcaggacctgaggagtgctactcaaaccacccaaccaactcagctagaggccctttcgctggcattgagatacttaactgttaactcacatacttattcatacctgccacaaatcggattaacatacatttctgcagatatctttccaggaact

SEQ ID NO: 310508 - DNA, 428 bp, Zea mays subsp. mexicana
ttcgtcctccgccgacaagtcctccctcgaccccgacgcgctttatgaagaatgaagggagaatatcctgagagagtgggacagccagagtgtcagtattatctgaagaccggaacatgcaagtttggtcctacatgcaaatttcaccatcccagggaaaaggccggaattgcagggagggtgcagctaaacacattaggatatccacttcgcccgaatgaaaaggagtgtgcgtattatttaaaaacaggacaatgtaaatatgcaaatacttgtaaattccaccacccagaacttttcaatgcggtgccttcgtcacgtggttcacctatttatacttctgtacattcctctgcaagcgctggtccacagtcatatactggaactatgtcaagctggacttttccacgagcttcttttataccaag

SEQ ID NO: 310509 - DNA, 431 bp, Zea mays subsp. mexicana
ttagacaggcgctcgcgtgaggccgctcgctccctctcctgcgtggacgcttgtaaccccctactgcaagcgcacccgacctgggcgcgggacgaacacgaaggccgcgggatttccacctctctcacgcccatctccggccacctcacttccccccttcgcgctcggcctcgcgccgacccatctgggctggggcacgcggcgacattcactcgtcggcttagggacaccccggtctcgaaacgccgacaggtacaatcatgataagttggtaacagctagatcatgtatttgtaattaaacaatccccaatgtcatgtcacatatttctatgctacctactaatttattaaaaatgtgatatcttataggtcaaataattttttaatctggttaaggtgtgccaggttatattattttctgcgcacata

SEQ ID NO: 310510 - DNA, 430 bp, Zea mays subsp. mexicana
gtgacttatatctcaatcaatcggcctatcttgcacaaatacgcaaacgaagacgtgtcgcttggatcgtggttcatcggcttggaagttaatcacatcgatgaaaggaacatgtgctgtggaactccaccagactgtgagtggaaagggcaagctggcaatgtctgcgtagcgtctttcgactggagctgcagtggcatatgcaagctctgttgagaggatcaaagatgtacatgctcgctgcggcgaaggggattcagcagcttggagtgctcttgtctagcacataccctcctttgctcgtaaatatgtagcataattggcaagctctcgtggcggtggacaccggcataggcgttaggcatactcccaagtaaacttgacaaaacccagagatcatgatcatgccccgtggaacatacatgacgtt

SEQ ID NO: 310511 - DNA, 437 bp, Zea mays subsp. mexicana
tttttctcagcattgtttgcaacagaggttattttggaagaaacaataaatttgagaaaaatggttgctaaaaacgaaactcaacaacaagatgttgaaatggaaagcgctgaagatattgaaaatcaaaagcgtgaacaagattcagcatccgtacaagagattcgagaacattgcagacaaattgaaaaagctgtattaaccaaggaaccacgttttatattgcgtgtattgagatcattaccaaatacacgtcgtaaattgaatccaattgtgttaagaaatttaacagcacatttgtatccagctggtgttgaacgtgatacaattaatctttttattgatacattgcaaccaggtcaagaattagaagtgttacgaacccgtgcatcaattaatacaccaataccagaagttgatgcttatttgcatttatt

SEQ ID NO: 310512 - DNA, 404 bp, Zea mays subsp. mexicana
tttgcgtttgatcttcgctggcaagcagctggaggatggccgcacccttgcggattataacatccagaaggagagcaccctccacctggtgctccgtctcaggggtggtatgcagatctttgcgaagacactcactggcaagacaatcacccttgaggtggagtcttctgataccattgacagtgacaaggccaagacccaggacaaggagggcatcccaccggaccagcatggcctgatcttagccggcaagcagctggaggatggccgcaccctggcggattacaacatccagaaggagagcactctccacctggtgctccgcctgaagggtggcatgcagacccatgtgaagacattgactggctagaccatgaccttggtagcggagagctctgacacca

SEQ ID NO: 310513 - DNA, 260 bp, Zea mays subsp. mexicana
ccgacaacatagccgacaagaacgagctgacctaagaggacgccagaagaaggaggagatcgccgcgatcgcgccagaagacgacgccctgaggctggacaccatcctcacggacatacccatggaggagatactccgcaagcagaggatgctggccaaccagaacataaagcaggcgaagcagacagcgcagcccgcggagccgagggacgccttacaacaagccctcaacgggcaggcgcgcaagcagacccacgcca

SEQ ID NO: 310514 - DNA, 488 bp, Zea mays subsp. mexicana
  unsure (1)..(488): unsure at all n locations
tctcgnaagcggaggggcgggaggcttttttcgtgtttgtgtagatggtggaccttctagcctcgccccctgcctcggccggctgggtaccgagtaccacncnntccgtgctnncatgacgcnntcgccgtcaatgtatcctcaaccgtagaacacccatccgcacttgggcgtcagctcaagggacagcagcacgcacagcactcagtaggggtaagaaggcacaaggccagcagctctggacatggcagcgattacccaagtcgatgccgtttacacaatggcgtgataaggcgataacgctgcgcgtggcccaacctgatcagacggggtgttcagtgcgtgcgaacaccgacatccacttcaaaggctacgtgatcccaaagggctgcaagatcttcgcgtcgttccgagccgtgcaccttagcctggaccactacgagaacgcccggaccttcgacccttggagatggcagcagggcaagagc

SEQ ID NO: 310515 - DNA, 474 bp, Zea mays subsp. mexicana
aatacacgcgtccgcccacgcgtccgcccacgttgttctttcagtacaaatggctggagcacccccgcacaacagtaccagtgtgataactccttgtggttatttccgaatttctcattttctcttgctactgcacggttttaccttgagtgtgatgcagcgtcagagggttctgatgatgctgacaagtcaacatctcttgatctcatgaagcaagctctgatgcttcatcctatggtgcttcgcaagatagttgacaaggctcctctgaaagactcatcatggacccaaatactcagaaatgtattctttggatcagcaaaaccgggaagcccttcacttgagcatatgatcaatatatatgtggaacgccattatatcatgtggagattcccagaactgcagaacttgctgaaagaggctgctcttttggtgattgaatcactaaagcaggataacagagaagccctggac

SEQ ID NO: 310516 - DNA, 461 bp, Zea mays subsp. mexicana
  unsure (1)..(461): unsure at all n locations
tttgggtgtcccacgcgnaggttgctgcgcaccaaggagancaagaacgggttgttttttatgctcgccttcgggggctggcgcctccaccccgtgtacacgggccagggccccatcgacaacctgctcgcgcacctcgccgaccccggccactgcaacatcttctcggcgttcacgtcccactgatccgatgttgcttcggagctggcggagagactgcgaagaattaaaaaaagggcatcctgttgagggagaaagaacttcgcttggtcggtaccgttttggccctgctggacatgtcaacattttgtttggagtaggtgcgtagaaatgccaaaccacctgtacaaacgtacaaataccaccacagggatcgcgatgatgctagccagcagtccagcacacactagcttgttctgaagatccatccaacaccgtatacagagcanatttggtgacac

SEQ ID NO: 310517 - DNA, 519 bp, Zea mays subsp. mexicana
  unsure (1)..(519): unsure at all n locations
acttctacaagaacattgncgccgcggacgattttccctttctagttgcgcaagaagatcacccccgtcaccgacgtgaccaagctcaaggcaaagtatggccagtacgaggcccagcgcaagctcttcgccgagcacgacgtcttcctcggcgacgaccgcatcatcaaccgcctgcccaagatcctcggcaagaccttttacaagaccaccctcaagcgccccgtccccgtcgtgctcaagccaaaggcccgcaaggtcgacggcaagcgcaccaagccccagaagaaggagggcgaggtcaacgccgccacccccgccgagatcgcaaaggagattgaaaaggccctcggctctgcgctcgtcagcctgtcgcccagcacaaacaccgccgtgcgcgtgggcttctccgactggacgcccgagcagattgccgccaacgtcgaggccgtggccggcgcttgcgtcgagaagtgggttccccagcagtggcgcaacgtcaagagcatctacatcaag

SEQ ID NO: 310518 - DNA, 489 bp, Zea mays subsp. mexicana
  unsure (1)..(489): unsure at all n locations
tttaattcgcgtccgggggacggcgtctagggttttgtggtttgacgnacaccgggagggagccccaggacaccaagcccgnttggctgcggcagcgcgctgcgcagggcgagaagtacgctcgcctgcgggagtccatcggcgagctcaagctcaacaccgtctgcgtcgaggcacagtgccccaacatcggcgagtgttggaacggaggtggaggggccggcggcgaaggggacggcatcgccacggccaccatcatgctgcttggtgacacctgcacgcgcgggtgtcgattctgcgctgtgaagaccagcaacaagccaccgccgtcggatcccctggagcctctaaacacggctttggctgttgcaagctggggagtagattatgttgtgctaaccagtgtcgatagagatgacttacctgatgggggaagtagccattttgctcacacagtgaaagctttaaaggagctcacacctggaatac

SEQ ID NO: 310519 - DNA, 498 bp, Zea mays subsp. mexicana
ccctagcacatcaaaccctagctgtgtttatttttcaccatgtcggcgatgacgcacccgcacatcatcctgctcaaggagggcacggacacgtcgcaggggcgcgctcaggtggtgagcaatatcaacgcgtgcacggtggtgggcgacaccgtgcggaccacgctggggcctcgggggatggacaagctcatccacgacgacaagggcggagtcaccatctccaacgacggcgccaccatcatgcgcctcctcgacatcgtgcaccccgccgccaagatccttgtcgacatcgccaagtcgcaggactccgaggtcggtgatgggacaactactgtggtgcttctagctgcagaattcttaaaggaagcaaaaccttatatcgaggacggggtgcaccctcacagtctaattcgcagttatagaactgcaggcaatatggcaatccaaagggttaaagagctggcagttagcatagaaggaaaaagccttgaagag

SEQ ID NO: 310520 - DNA, 392 bp, Zea mays subsp. mexicana
  unsure (1)..(392): unsure at all n locations
gttcattatattgcccgctattntctggaaacaggtgtttgtttataataaactgacatgcttgggcccactagcacaatgatactcgatattgatcttagatggaacaagagtatctaccttgacataggatacctgcttggatttggcacgagcgaaggaagctacttgtcagcttcccttgtcaagaaacatgaaggtgcttgggttcctattagtctctgcttcatatttatggggatcatgagtgactggcactatggcacaataaagaagtacgagttcgaagagcaaaacaaggtttcagtaaactggctcttaaaccttggaccttcactgggcattggacgcgttcgaggcattggactaatacatacagaactaatgtctgg

SEQ ID NO: 310521 - DNA, 461 bp, Zea mays subsp. mexicana
  unsure (1)..(461): unsure at all n locations
tactgaatcctanggagnggaagatgcgttttctctttttgaggagaggatctcccatgaagccaatgtactggaaaacagagttgatttgctagattgttctttcctgctgaagccaaggtcgccatgcaaatcgcacaagcagacaccacagaagaattcggcggtatagttgcagttgcagcaagcacttctggtaaactgagggaggtggaccttaatgagacgccagtgacacaaaacaaaaggctccgttcaagggtagatgcactgatgaaaacaggtgaaagtttcaaccatgaaccttttccattgtagtgaacatgctctgcagctatctccagaaaatttagtttggacgcaatcacggattctacgtgtaccgaagtattgtggctatgttcaaaatacatgattgatacaatgtatatgatctggtgtttgtccatttttattcgatg

SEQ ID NO: 310522 - DNA, 476 bp, Zea mays subsp. mexicana
  unsure (1)..(476): unsure at all n locations
ttgggcggtccaagcggncgtcttagggccggggaatggcaaataagggcggttcagttaaacggaagcctacggcccagctgccgaaaaataaactggctaatgaggagtttgcagaaacaacttgcaattgctagggaggcaagaagagttgatgtgctttgtgagaggctgtcattgagccataaaatggtaaaaggatctgaacgttataaggaaataacgagcataatcagctcagctgcgaaaacacttgaaaaagaagttggtggtgcattagatcaggtttctgcgatcaccgggcgtggcattgttaaccggcttacttgtggtgctgaagttcagaagctttgttcaagtgcattagaaattgtagactctacagtggatagcatcttggagttcgagtcaaataatagtccaaaactcttaggtacccagccccaaatcctttttgatgagatcactccaatttc

SEQ ID NO: 310523 - DNA, 390 bp, Zea mays subsp. mexicana
aattgccgtgtcgcgcccaacgccgtcaccttgtttactgttatgtactggctcgcgcgggccgctgacgccgacggtgcatgcgggtgtgggcggagatgaaggcgaagagcaggcctaccgtcgtcagctacaccgcgtgcgttaagattctgttcgacgccgggagggcagaggaggcgcggagggtgtttaaagagatggtggtgatagggctgcgccccacctgcaagacctacacgttgctcatggagaatctcgccgacacaggcctgaaacaggaattaggttactaccgaagagaaagaatgaatatgaaatggcatcttcagtatcatggtcagtgctgatgaagataccttatgtaactatctgctctgtggtcttctt

SEQ ID NO: 310524 - DNA, 376 bp, Zea mays subsp. mexicana
  unsure (1)..(376): unsure at all n locations
ggggcggcaaanggcagggggtttgattttaaanggnacgcgcaggggggccagcgccccaaaggagaactggaggggactgaccgtgggacagagcgatggaggaatgtggaagatgcaccactggaacgagcagaggaaaactagatccttctacgacatgcatgacaagggacagatcagcggcgttgttgaggagtagttccgacgtgtaacctcagaaggtttttttttgcagttgttgatgaaaactcactctggagagtacgacaaagagaatgctgtggagatttggcttgaaaataagcataaccatttgagaacaagatgaagaaaaggaagttagtgaccaaagttgggcgggcgatgtagagga

SEQ ID NO: 310525 - DNA, 481 bp, Zea mays subsp. mexicana
  unsure (1)..(481): unsure at all n locations
ttggtcggaccaaggcgccgttattaacccttccgggaaataagaaagaaagtttttaattaaacaagggaaggagcaggggccaatgtaacgcaccaaaacctatnttgctagacactggtgaaatgaaggaaccatatgattgggcgcctgcaattcttccaattcagatcataagaatcggccagctggctatcttgtgtgtacctggagaattcacaacaatggctggcaggaggctacgtgatgccgtcaaagctgtacttacaagtgacaacagtggtgaatttaataacattcatgttgttcttgcggggctaacaaatacatattcgcagtatattacaacttttgaagaatatgagatccaaagatacgagggagcgtcgacgttgtatgggccccacacattgagcgcctacattcaggagttccagaaacttgctacagccatggtggcaaacaaagaggtcccgacaaa

SEQ ID NO: 310526 - DNA, 383 bp, Zea mays subsp. mexicana
gttaattcgacgggaaggaccaggcaccaaagtgtgttaatttcagcaaggatggctttgggccccgcgtacaagaggaatgtgtgatggcgaacaattcttgtgccgacagagagcaagaggcagaagctgacaccggtgagccatcatggatgcacgagttcactggtgtggccaagcatgcaagcgggcccgtcactgttgccaagacgatatatgaggaggaggaagggtacttaatcgtggtgagcatgcttttctgcgaaccacatagtgtcaaagtatcatggaggaacacgctgaccgacggaaaagtgaagataacatgcgcgagcactgcccggatgccctacaataagaaacacgacaggacgttcaagctg

SEQ ID NO: 310527 - DNA, 473 bp, Zea mays subsp. mexicana
  unsure (1)..(473): unsure at all n locations
ataacgcgcgggcttgntttggccttcaacgggctcatatgcacgatccctgctgagatcgcctatctgacggcgctccaagaccttgacctgaacaacaaccggctggaaggtgagctgcctgaaaccctgtcgttgctcaaagatctctacgatctttccttgaacagcaacaacttcaccggcggtgtccccaacttccgtagtagcaagctgaccactgttcaattggacggtaacaatttctcgggaggcttccccctgtcattttgcctgttgacatcattggaggtcttggatctatcgagcaaccaactttccggtcagctccctacctgcatatgggacttgcaagacctcgtgttcatggatctgtccagcaatactctttcaggggatgtactggcttcatccacaaactccaggttgtcgttggaatctttgcatctgtcaaataacagagtctcaggaga

SEQ ID NO: 310528 - DNA, 338 bp, Zea mays subsp. mexicana
cggaccggccgtattttggtttcccaccgacatccggctgcgacggagctcgcacagtcaatttgcgctccatcccgatccgcaccggacacaggtgcaggtcggcgcggacctacaagggccggaggggaaggtggtgcaggtgtaccgcgccgtgggtcatccacgtcgagcggatcacccgtagaaggtgaacggctcaccgtgaacgtgggtatccacccgtccaaggtatcgtaccaagctgaagctcgacaaggaccgtaaggctcttctcgaccgcaaggcccggggccgcgccgtcgacaaggctaagggcaagtttactgccgacgacg

SEQ ID NO: 310529 - DNA, 472 bp, Zea mays subsp. mexicana
  unsure (1)..(472): unsure at all n locations
cggaattctggtttcccacgcgtaatacaacctgccggngcgcttcacagncagtgagcatttccccaaccagaagatcggccccccctacgatgaggtcgtcgcgtcggtgttctacggcgaccagctcgtcgcgacggggtccgtcatgcaccccttctaccaggtgcccaagggagacacgcccgtgcaggggaccctcaccgccaggggccccgtcccgtcggacccgtcgtgggggcggttcgccggcgaggtgtcggcggggagcgtcggcatgcggctggagctcagctccaagctgcagttccaggcgaagatgtgggacagcaagaatcaccacatcaaggtggagtgcgacttcactatgcaaggggatgggacgctcccgaagcaggacaaggactcccagtgcacgctctacttttagcgtgatcgccctgctttttgaattggtgcaggctgacccctt

SEQ ID NO: 310530 - DNA, 388 bp, Zea mays subsp. mexicana
atagaacatgaacggcaaggagctcgacggcggtaatattaccggtaaccaggcccagccccgtggcggtggcggtggcggcggtggctacggcggcggtcgcggcggcggcggctatggtggcgggcgccgtgacggtggttatggcgtgcgtggcggctacggcggtcgtcgcgagggtggtggcggcggctactgaggcggtggcggctacgggggtcggcgcgagggtggttggttggcggagtcagagtgctcaggaggcgaggggctggagggtactggggcgtgggctcatatctggttgcggccgaggttatcttatctatctatagtatccgtgtttaccgttcgtttctgttaccgagttagtgtccgctctaccttt

SEQ ID NO: 310531 - DNA, 300 bp, Zea mays subsp. mexicana
caggaccggtccgtaattctggtttacccacgcgactaggcggcctctacaacgcgaacgagttgtggatcttttgcgacatctgcgagcggcgccccacggcaagtgcgtgcggatcacccctgccaaagcggaccacataaagcactacaagtgcccggactgcagctcgaagaaaataaggcagtaggtcccagtgtgcaccgccggccatcgctgacctgtctgatcccaaaccatactccattgcttgcctgccttgccccaaggtcgcagctagcagatgcgaattccttcatt

SEQ ID NO: 310532 - DNA, 453 bp, Zea mays subsp. mexicana
  unsure (1)..(453): unsure at all n locations
aatatttagatcgcgagcggacgctcgcgatgtttttttttgaannnttaacggttgcatcctcttatatcgaggacggggtgcacccccacagtctaattcgtagttatagaactgtaggcaatatggcaatccaaagggttaaagagctggcagttagcatagaaggaaaaagccttgaagagaagaaatcactgttagccaagtgcgctgctacaacactctcttcaaaacttataggtggtgaaaaagaattctttgcttctatggatgaggatgctgtccttggcatttggaatgatgacaggcttaatcttattgggattaaaaaaggctcctggaggtaccatgagagactcttttttggtgaatgttgttgcgtttaagaagatgttttaatttgcatgatttttactccaatctaataagtttctttattcaaagatttttttt

SEQ ID NO: 310533 - DNA, 500 bp, Zea mays subsp. mexicana
  unsure (1)..(500): unsure at all n locations
caggacaggccggaatttttgggtgacccacgcgtaatagaggtaagctatgncagngngccatttttttttttagaaggtacctgcttcactcgctctcagaaccaaacagagattgaggatctaaatggacgatttgtgagttcaaggacagatgacagaatcaaacaagcttgtgcacttccattggacttctatgaggctatctccagcatcttactcatcttcatctcacatttcaaaatttactgtataaacagtgcagtctataacgcaaaacagtgttttgcacagccatatgcacgatctgctggctatagtctaagccctgtttgtttcctttcaggattatataatccagcttatagattatataagcacctaatgatctgcttatggattatcataatctagctatctagattatataatctacttaaatattgtgttgntttggttgccttttaacttatttaagctgaattatttatctagagggt

SEQ ID NO: 310534 - DNA, 602 bp, Zea mays subsp. mexicana
tttctcctccaccgccactattttctctctctccaaactcccgccatcatcagccaatctcgcccacgccatcaaaaccaaccaccatccttgcgttgctcccatcgccctcctccgagacctcataaaccacaaacactactcctttccacaacgatcacagcacaccatgcctcgcgaagagtaccaggtccccaccacctccggcggcgcctcagccggagccatgacccgtggtgcaaccggcggagagcgacacgacagccgtgccgtcatgacctacatctgcggcgactgcggcggcaacgtcacccttagcaaggatgcgctggttgcctgccctcactgcgctgggcgcgtgctctacaaggagcgcactaagcgaatggtgcaattcgaggctcgatagacgggcgagtggcaaggagaatattacattcgagacggcatgaggagatgaaagcaccaaaattgagaaaaacaacaaaatcatagatcacactcgaggaagttttgtgatacaactagggataatcaaagagcacaaaggatcagagaaacttatacttggaaattttttaaatctactttgaattactctt

SEQ ID NO: 310535 - DNA, 577 bp, Zea mays subsp. mexicana
tttgtcctttgaccttgccatgatgaacttctttttatgaaattaaattctgattacctatttgtgacgcagatataagtgccttttgcttaaaagaacagtactctggggcaccataatgtgcggtttgtgtccagtatcagtataatcaaagatatttcataactgaatccatctctgtccagtttcccctacatattgctgcgctgtttgtttacattcttttacaaattgttggatgcctttaagtgacccaatttttagaacactttattgacctttttatatccagagggatagtatcttatggttatcttcatgcgttttttcagggtaactttgaacctatgggtaacaacatgcctgtgttttttatacgagatgggatgaaattccctgacatggtccacgctttcaagccgaatccaaagaccaatttgctggagaactgcagaattgtagagttcttctctcaccacccagagagcctacacatgttcaccttcctctttacgatgttggcatccaactaactacaggcacattgagggcttggtgtcaatacctacaccttgat

SEQ ID NO: 310536 - DNA, 123 bp, Zea mays subsp. mexicana
ttactactttcgcaacccgaatggtcaggttccagcactgtaggatggtgacttgaacctttcctaatcacgagcaatcggcaagtacgctgattgcaaaaacaagtcagagcagttgtggga

SEQ ID NO: 310537 - DNA, 540 bp, Zea mays subsp. mexicana
ttgatttctaaggttgctatttcttaatcttaattttatttctgtaaacagtatgttgttcagcaatgagtattgaaacacaatatattactagttatttgttatactgattgggtatagactacacttgttgagtgttactataagaatatataatgctcatcctgcccaaagggaatggatggtttgtctatgcattatgctcgttttctagaccttgataatgttattaaatcatataatcaaacctagtcgacaaggtgtcgatcagcgattagttgtcatcaggctcaattagtcgagcctagtggttggtatacttgtcctgaatatatataccagtattgacatgctatttgtacatttgtactccctctgtttttttaatttgtcgtgttttagtttaaaaatgaactagcgggcgacaaatattggagaacggaggtagtactattcaatataattcaatagccaattgtgagatttgatctgtgaactgtccatgtctttgctaactattggaggaacttttgacagggc

SEQ ID NO: 310538 - DNA, 483 bp, Zea mays subsp. mexicana
ctggtttgtatgctgttcttgtcaagtacaaggacaaggagggtgatcttgtgacaatcaccaaccaggatgagctgaaatgggctgaggagttggctgaggctgggagctcacttcgtctgtatgttaccgaggctgatccggaacatgaaccttatgttgacgacaccaatatggagagaaatgtaaacagcaattcggataatggaagtattagaagcaataggcaggatgaggacaggagcactgtgacctgtattgatgattggattgtgcaattcgcccggcttttcaagaaccatgttgggattagctctgatgagtacctggacctccatgaggtcagtatgaagctctacactgaggcaatcgaggacactattactactgaggaagcccaggatgtgtttcatcttgccgagggaaactttcaggagatgacagcacttgcatttttccactggggtaatgttcacatgtccc

SEQ ID NO: 310539 - DNA, 526 bp, Zea mays subsp. mexicana
ggtgttcttttctcaagaaggacggatcgggcgggacagtgatcgactccggcacgagcctcaccaccttaccggaggccgtgtttgagctcctccaggaggagctcgtggcgcagtttccgatgccccgatacgacaacaccttggaggtcggcgacaggttgtgcttccgccggccgaaaggtgggaagcaggtgcccgagccgaagctgatcttgcacctggcgggcgcggacatggatttgtcccgcgacaactacttctgggaggacccggacagcggggtgatgtgcctgcagatcaacggagcgggagacaccatggtgctcataggcagcttccagcagcagaacatgcacgtcgactacgacgtggagaacaacaagctgctcttcgcgcctgctcagtgcgacaagctgtgagtgaccaactcacttgctagcttgtgcgtacgtacgtacgcgctgcacatgtgcatgtgtatgactgaatgcttctaccgctcgacctatgtgtcgttagtgct

SEQ ID NO: 310540 - DNA, 486 bp, Zea mays subsp. mexicana
ccgcgcgacccctacgagcgcgcggcggcgcggttctgggcggcctacatcgacgacaaggtgaagtccgcgtggctgggcatgctagtcgagtgcagggacgagggggagcggtcggaggcggtggcgcgggccggcgaggcgctcgggacgctggagggcgcgctcagggggaagcccttcttcggcggcgacggcgtcggctttgtggacgccgtgctcggcgggtacctcggctggttcggggccgtcggcaggatcatcggccgcaggctgatcgacccgaccaagacgccgctgctggccgcgtgggaggaccggttccgcgccgccgacgtggccaagggcgtcgtaccggacgacgtcgacaagatgctcgcggtcctggagaccctgctcgcgaactactactccaagtgactgtactgagagcgaactacttgctccagtgactaaataagaagggctgcttaattaataattaca

SEQ ID NO: 310541 - DNA, 218 bp, Zea mays subsp. mexicana
  unsure (1)..(218): unsure at all n locations
aaggctncacagctcacaacagggaggatttgttttgaggctatgtgccattcactcggggttatgcaccnngacccaaagcccaaaaaacttccttcccttgggataaagaagatgacctgtcaataaaagcaatcgattttggtctatctgtgttcttcaaaccaggtcaggttttcactgagctggttggaagtccatactatgttgctcctgag

SEQ ID NO: 310542 - DNA, 160 bp, Zea mays subsp. mexicana
attgatcagaaggctgcagagctcataagaagggagggttagttttaggggctatgtgccattcacttggggttatgcaccgtgatctaaagccagaaaactttcctcctttgggataaagaagatgacctgtcaataaaagcaatcgattttggcctat

SEQ ID NO: 310543 - DNA, 447 bp, Zea mays subsp. mexicana
tgcctactcgtccgatcaaaaggaggatctcagggattgtttgagtgctcttaaactttagcaagccgaggcagaaagatgttccacgaaaagatcatatccaacaactgaaaaccgatctcatttcatactatggatataatgattctctagttgaagcattaattgagatgttcccagctgctgagcttgttgagctactggaagcctttgagaaaaggccgtccgagtgcttgcggacgaatacactaaagacccggaggagggatcttgctgctgctcttataccaagaggattcaatttggacccgataggaaaatggccaaaggtaggatctagttggtctatgactccaaccatttagctggtgctactactgaatatatggctggtcattacatgaaaaaaagggcaagttcgtttttaccagtgatggcccttgctcc

SEQ ID NO: 310544 - DNA, 514 bp, Zea mays subsp. mexicana
tctttactgatgtaaaagcattccatctacagaccccttagacaccaattgttcggacaggtacatataccaaatattgtatggatgaatttccatctggaacgaatgctattgttgcagtgctatcatacacaggttatgacatggaggatgccatgattttgaacaaatcagctgttgagcgtggtatgttccgtggacatatttaccagactgaatgcattgacttatcaacaaaaagcagagataatgttccagaaacttttgcaaagagtatattaacaagggatacaagtaatgtgattgattcagatggccttcctcggcttggacaggctgtacattcaaacgagcaatactatagcgttcataatagccttacaaatgtgataaggtctgtcaaactaaaaggcacagagtccagatttattgactatgttgctgtcaacgggacaggttcaaaatgtggcctgcagaaggcgaacattcgtctgcgtcgtgtaagaaccctata

SEQ ID NO: 310545 - DNA, 528 bp, Zea mays subsp. mexicana
tcttcttttcagcctgccctgagctgttgacttgagttcaacttgagctcgatgtgatgtacctttgagacataaattcatttttttggtgcagattgttgcaataagagatatcatacctgctccattgagggaggcattcaatgatgtgtatattgcctatgaattgatggatactgatctgcatcaaattattcgttcaaatcaagctttgtcagaggagcactgccaggtacttgattcgatccatctaagaaatgcttattgatatttttttgctattgcgtggaattagctcgaaatctggtatgtttcgatccagccatatccattgtgacgtttttgcatagaaaggctttgattgggggttgggcctgagaattcgtgctgcatttctgcattttgagagggaatgcagcattttacctattttcttgccaagtatcagatcataactccccaattattgggaaggttatttggtctgggcacatcatgtttggaaattgttggttgattacttttttt

SEQ ID NO: 310546 - DNA, 222 bp, Zea mays subsp. mexicana
actggcccgacgaccccggcgggcctgatcggggcggtttgttgagcacgcgttggctctgctcgcggcggtgtcggtggtcgcgaacatacttgggcgggcacgtgaaacttagccgtgaccttaggcgcctttgtgggcggcaacatcaccctgttacgggggctcctgtactgggtggagcaaaaagttggggtccatcgtggcgagcttactgattcg

SEQ ID NO: 310547 - DNA, 524 bp, Zea mays subsp. mexicana
ttgttcacacactacccgcaaaggaggagcatctgtgttgtgcgaattcaacgccgtgtgtggacacggaagttctgttcgcgttgcggtcgttcgttttattagagacccatcgtagttcgttttgtttttgatcctagtgcacgacaaccagccgaagatggcccgtggtcaacagaagattcagtctcagcagaagaaccaaaagaagatggacgcagcgcggagggcaggtatcgatcagaaagcagctgcaatgaaggctttgatccatacctgcgccgtctgtaaatcacagatgcccgatccgaaaacctacaagcaacattttgaatccaagcatcccaaggcacccatgccaccggagctcattgacgtccaagcctagattctattctagaacaataattctctctgcatcggcaggaggaaatcggcaaggcaaaaaaggtttatcatcaacgaaggggaacatacttacagtcagaaagatcaatgatagtcaggatcttaattgatggata

SEQ ID NO: 310548 - DNA, 396 bp, Zea mays subsp. mexicana
ttgtgagtgggagacccgccagaggctccgggcggcgtttttttagatgactgggcgtttcacctacctgcaaggagggataaggcgatggccggtatcggaccgatcaggcatgactggaagctctccgtcgcgcggaagaaggcacccaccgtcgtcgtcaagaaggatgagatggccgtcaacgccgcgcgccgtgccagtgcggagatcgataccatgaagaagtacaacgctggtacgaacaaggcggaattcagcggtacatccctcaacaccaaacgcctcgacgacgacaccgagaacctcgcccatgagtgagactcaagtgatccgaagaagaatcctatgcaagcaagggcttgttaagaagctgacacagcgcacaaccttgct

SEQ ID NO: 310549 - DNA, 387 bp, Zea mays subsp. mexicana
gatcagctttcgactctgttccgagcacaccaaggcagagatcagcttttgactctgttccgagcacgccgacgccgaaaccactggctggactccttttcaaggacaccaatgcagagatcactgctggcatgtaggccaagtagagccaaatcacgtaccgtccgcagaatgtatggctaagagcccaaaggatacatgcacccatgagtgccgaggactccaatgagcacctgaagacttacgccgaggactagggaaacaagggtcgatgcactacaaaccgtgttccaatacttgctaaggtgattcatgacaacttcagtactgttgaggggctgatgacaactgtagatgccatcactgccacacaaaagactgcagacg

SEQ ID NO: 310550 - DNA, 340 bp, Zea mays subsp. mexicana
tgcttatgtccaatttctttgcccaacctgaggctgttgcttatggaaagactgctgaacagctgcacagcgagaaagttccagaaaatcttatccctcataagacttttaagggcaaccggccatcactggactgggttgtgcgcaccatctgcctgtatgcgggcagcccgctttcattcacctttgagcaccggatcggaatgcaggacttgttatggggcactcacgcatttgacccgtggggaggggagctagggaaggcactcgcttgtcaagtggggaaacagctgcatgggaacctcctggaagggaaggctgtcgaagcccctaaccacaa

SEQ ID NO: 310551 - DNA, 454 bp, Zea mays subsp. mexicana
gcccagcatggaattcgcttcttcaggagcgtggacgcgctgtgcgaggagcagccggacgtgctgctcatctgcagctccatcctgtccacggagagcgtcgtccgagccatccccttccacaagctccgccccgacaccatcgtcgccgacgtgctctccgtcaaggagttcccccgcaacctcctcctcgaggttctcccaccaggattcgggatcatctgcacacacccgatgttcgggccggagagtggcaaacacggctggggcaagcttcccttcgtcttcgacaaggtccgtgtcgcggacgacggggatcaggcggcaacgtgcgaccgcttcttgagcatatttgagcaggagggttgtaggactgtgcgaaatgttcgcgtgccgagcatgatcgctaccccgtggggagccagttcatcacgcacacatttgggagggttct

SEQ ID NO: 310552 - DNA, 458 bp, Zea mays subsp. mexicana
tggggtagtactagtatttggtgtgccacacaaattgaatttgttgttctaagaaacccaaattttttgcttattttctggtaggctaacaagggttgatcaaatgacaggtttctcgttcaagctctgttccttcaaatacaagggatacattataccaaagtttgccaccaaccataaagtcatctctccgttctaagctacactcctttggagtcaaggaagagcttactgtttctcaaatcaaggctgaaatggagaagaccctgcgatggcttgtccctattgcaagtaacaccaccaagtaatctaaattattaattgccttcatagcatgcaaaatagcttgtggcttctgcttatccctttttgttactgcatttttgatgatctgtccatacaagggctcatcatggtttcggttgggttggagagtgggcaagtaccgtgtcagatgt

SEQ ID NO: 310553 - DNA, 427 bp, Zea mays subsp. mexicana
tgtggaatttgatggtcgatggctatgtaaagcatggaaaaattcatgacgctattgagttgtactcaaagatgtctgaaaagaatttggaagcttctactactttgatgtcttgttttatagacaacggaatgcttgataaagctcgggatgtgttctacagtatgcctcaagtagatgtggtttcctgcactactttactctctggatatgtgaaaggagggtatatatatgatgcactggaccttttctgttggatgcacaaaaggactgttgtgacatacaatgtgatgatagctggatggcttcatcaaggcaaggttacggacacttaccagctttttggtgaattttcaacacgagattcagagacctggagctgtttgatcaaggggcttgctcaaatggtttaatcatcgacgcaatt

SEQ ID NO: 310554 - DNA, 435 bp, Zea mays subsp. mexicana
gtatttgcagcagctgcagctgatgttgcagctggtgttgcagctgagggttcttctcctgaagaagcaaaaattcaagcagagaatgctgctcatctctcagtagcactagcagaaaatgcaatagttattctggtgcttgtggaagatcatctgagatcacaagctcaacatttttgcacatcccttacaggtgatagcatcacatcgtccacatcaatgacttcattggctgacagtcagtcaaattctttgagcacagctggtaaagaacccatggctgctggggtctcaagacgggcatctttgtccagtgatgctggtggccttcctctggatgtacgtaacacatggcggctaaatgtcattgcattttatcagttatgaatattaacttcataaaagtaattgcaacttgtgtgggctggctatagc

SEQ ID NO: 310555 - DNA, 463 bp, Zea mays subsp. mexicana
tcgaccaaagaactaggtggcaagattttgcggcagccagggcctctacctgggatcaacactaagatcgcctcttttgttgatccagatggctggaaagtggttctggtcgacaacaccgacttcctcaaggaactacagtgaagactcgggatacccaggtgctgtgctaggatgtagtaatgcttatctggtgtaataagatgtgggtgggtttgtttccgccctgacgaacttataataatgaatgttgctacagaggttgtgcttctgccagtgaggtttgggatttgctatgtaactgtgcctgctactaatgcaattgctacatgtagcaaggtgtctaggactctactaatgcaattgctacatgtagcaaggtgtctaggacttaggccctgttcccatgaaagacggagaaagacaagctgtccatagcataagtggattcacagttatggac

SEQ ID NO: 310556 - DNA, 452 bp, Zea mays subsp. mexicana
tttctctgctgtagcttgcattcttctatacttggagtacaagcacattgccaggctgaggttatatcacatttctagagcaacaagcaatcctagccattttactatccttgtccgaggaattccaaaatcaagtacagagtcattcagcaggacagttgaaagtttctttaccaagtaccatgcatcaagttacctatctcatcaagtcgtttacaaagttgggaaagttcagaagatagtgagtggtgcacagaaggtttacaggaagttcagacatttcaagggtgcgacagttgatcggagatgcagacccattagatttcaatgctgtttttgtggagcttcttctaattcattccagttgttgcctagtgattacgagcaagagagtgaaaagcctgatgtgaatgaatcaagctcgagcttacctgatgaggaatgtggcgctg

SEQ ID NO: 310557 - DNA, 460 bp, Zea mays subsp. mexicana
tcttatagaattttgggaggatgaagacgagtttgacatggatgaggaggaagaagaggatgagaaggaagaacaagatgtgcaatattgtgttgctgagatgacgaaacctgggcagcggttaatcatagcacgaggaggcaaaggtggactggggaatgcttttgtcatgaaggagatgcggccatccaaagcaaacagacatgagaagatagcccgtttgagtactgggcagccaggaactgagagcatccttatcctggaactgaagagcattgcagatgttggtctgtctggattgcccaatgctgggaagagcacattgctcagtgctctatgtagggcgcaaccagagatagctgactacgaattcaccacgctgaggcccaacattggcaggctgacctacgaggactacttctcagttaaagtggctgatatacctggcctgatcaaagga

SEQ ID NO: 310558 - DNA, 455 bp, Zea mays subsp. mexicana
gtcacaagctgcagcccggggtgccggagccgtcgccggtttccacctacgtcgaatacataagggacagcaggggcgtcaccctggccgccttgggcccgttcccgctcatctactccatcgcattcaagctgttcggggtccggacggggctccctttgccgtcggtctgggagacggcgacgcacctggtggtgtactcgctggtggaggactacacgtcgtactggctccaccgcttcctgcacacaaggtgggggtacgagaagatccaccgcgtccaccacgagaagacggcgccgtccgggttcgccgtcgcctacgccacgggcaccgagctcagcttgtacctcaccacgctcttccttgggccggcgatcgtgcccagccacgtcaccacgcactggctcttgttctccatccgcataatggaggccttcgacacacacagcggg

SEQ ID NO: 310559 - DNA, 368 bp, Zea mays subsp. mexicana
ttattctcctagagatcctgatgacgatggttggtgttttattttcatggaaatcataaatatacctatattgcataatctgctacctaaggccttagtgcctatccttaacaaatgttttataatactcgtgaactatatgaggacccacagctggctgtaagacagttcaatgagcacctcattatccaaagtgtcacaatacagatggcttgatttctacagtcgaattatatctccagtcagcattcacatattaactacacaagcaaagggcatagacatattatgtgcctttactgagacaacttattacttacaagaccctccttattgtgtccttttcattgaatttttgcttcatctat

SEQ ID NO: 310560 - DNA, 205 bp, Zea mays subsp. mexicana
ttcttaaagcctgcagactgcactgaggagggtgtttttgattaagaggcggaggcatccaccaagccagacggatggttggatgatgaacctgaggagactgatgatcctgaggcaagcaatccgtgacgactgggacaatgaggaggatggtgaatgggagagcgcgagaagattgccaaaccctcaagatgatgaagtaggc

SEQ ID NO: 310561 - DNA, 370 bp, Zea mays subsp. mexicana
ttcttctcattactcaacttgcaaatgcagggcgggaggagcatgagcgcagtggaggccgccaaggaggcggcaacgaacgtgggtgcctcggcctgggccggcaaggagaagaccaaggccgtcgtgcaggagaaggcggtcaaggcgagggcgcacgaccctgccgagaaggcggtggcggaagccaggatgcatgagcgtgtccacgaggtggaggccatcaagcaggacgccatgcgcaagaacgccaccgtcaaggagcgcgccaccgcggcagagcaccacccgacgccactcgacgtatgggccgcctcagtgacggcgcctgctgccggtgcaggtgtgccggttgctacgaccgagacgg

SEQ ID NO: 310562 - DNA, 352 bp, Zea mays subsp. mexicana
tttcttttcaattcctactctacgatcgacagagccatacattatgggagaggcctatgataacgaccatcatgaagaggagctcctggactacgatgaggacctcgactggacggacgaaggctacactgttaagaccgacctagaggtcgaccataagggctaacgtgatatccacagctgcggttacagagacttgctgctcaagccagagctgctcattgctatccagcattgtgagccagagcatccattgcaagagcaacactagtgtatccctcacgccattcttgtaatggatggaaattgacacgctaaatttggaatggcgaaaaccgctgagtttgtactt

SEQ ID NO: 310563 - DNA, 434 bp, Zea mays subsp. mexicana
tttcctacgtgcgaaccagacctatgtcattgctgggttaactaaagatgacatctgtggtgctgacgtcaccaagtttgatgacaagtactttgccagggagaagaagcacaaggtgaagaagaccgagggccagcttttagagacataaaaggaggcatccaagtcactgactgtcttcaagaaggatgaccagaacgctgttgatattgctcttatcaaggctatcgaggctgtcccggagctgaagacctatcttggggcccggatgtttctcatgaatggtgacatgccttatgagatggtaattctaagcttctagttatggagctcgtaggaagctgatttgtatgagttattgtaatatcgagatttgaaccaatagcgaacttttcattgcgcttggagttgtgctgccatatttttatagatct

SEQ ID NO: 310564 - DNA, 453 bp, Zea mays subsp. mexicana
tcgttcaccgtcccttgatgatcacgagcggaaattctttaccgccgacgaatgggccttcgtcattgcggcgacagcgagattgatcccttccggtggtcaggggcccggtgcgcttgaggcccgggttgccgtcttcatcgatctgcagatggccggcccgttcggcgaaggcgcggactggtacatggaaggtccacaccggcccgacgccccgcccgagcagggctttcagtctccgttgcccccagccgagatttatcggcaggcaatcaaggtcttcaatgcgtggtgccaggaaaaatacaattccatattcgccgatctgcctgaaaatcagcaggatgaagcgctgcatgcccttgagggcggcaaggccgggggtagcaacgcgccgaagggcgaggttgcggaatcatcgtagaaataaaaataagaaaaaaacattaaaaa

SEQ ID NO: 310565 - DNA, 402 bp, Zea mays subsp. mexicana
ttcctacacggattgcgactaatctcgccggcgtgggttaagctcgcacagcgctgccatgacgaatcacactgagacctgtggcactaccaagctcctgctcaccattacaagaatccttgagcttgctgaagagctgtctatgccacttgctgctgtgaagtactcccgagggacgttgatctttcctggcgcacagacagccccccacaggagcttctctgaggaagatgctgcacttaaccgatactttggcggcctgaaatctgtagggaatgctcatgtgattggagatccagcaagacctgtacagaagtggcaagtatcttacgccactgtgtacccagagcaaccaatgattaaacgtgagatgtgcatgactgggctggacaagaagaaagc

SEQ ID NO: 310566 - DNA, 454 bp, Zea mays subsp. mexicana
ttctttatcaccaactgcggagtccaggacaccacccatatccacacccacatgtgctactccaacttcaacgacatcatccactccatcatcgacatggatgccgatgtgatcacgatcgagaactcccggtctgacgagaagctactgtccgtcttccgtgagggtgtgaagtacggagctggcattggccctggtgtctacgacatccactctcctaggattccctccaccgaggagatcgcagaccgcgtcgagaagatgctcgccgtgctcgacaccaacatactttgggtgaaccctgactgtggtctcaagacacgcaagtacacggaggtaaagcccggcctgaccaacatggtcttggccaccaagctcatccgcacccagcttgtcagcgcgaaatgagggtcgttgatagctccatggtttgatagcgcggaatgagccagtt

SEQ ID NO: 310567 - DNA, 430 bp, Zea mays subsp. mexicana
tcctgacagccagttgcccctcgctactcatgtggtctggattatcgatggtgttgaacacaaccttgagagcaaggcgtcactctacaaggatgcagcactgtctcatttgttccttatgaacaacgtgcactatattgtgcacaaagtaaaggattcagctgaacttagggggctaattggggatgagtattagaggcgtctcacagggaaattacggcaggcagttacaagctaccatcgaactgcatggttgaagatcctgaattgtctcagagatgagggtctccatgttaggggaggatattcattcggggtattcaaatcggcactacgggagcgattcaaggctttcaatgctgtatttgaggaggcacacagggtccagtctgcggggtatgtgccagacacacaactgcgagaagagctt

SEQ ID NO: 310568 - DNA, 305 bp, Zea mays subsp. mexicana
cggacttactggctcgaccgacgcagtgcgtttgtgactgcacccgtgggaacggcaccgggggcgagtccatttacggcgagaagtatcccggcgagaagtatcgacgcaagctcaccggccccggggtgctgtacatggccaacgccggccccaacaccgacggctctcagtgcttcatctgcaccgcggatacccactggctggatggcaagcacgtcgtcttccgccagcacgtctagggcatggaggtccgaaaggtcatcgagaaggggggctgcccgaacggcggcacctccaaggag

SEQ ID NO: 310569 - DNA, 334 bp, Zea mays subsp. mexicana
ttgtgcagcatccacaaccacaagccatggcggggtggactaacatccggactaacaactgcgccctcaacgaaatcatagtggacaaggacaccgtcactggcttcttgatgggcgacgttgtcaacgttgatctgcgcaagaaaaccagttacctcctggttgacaacatgacgacagttaaacaaaccaaggacacgatcaaagaatatactgggaggtaggattttgctagtgagctcatgagtcagaatattgccgacatgataagatttctggaggaaagatacaacaagccaaggcctgctattatggacacaccaatcaaggacca

SEQ ID NO: 310570 - DNA, 441 bp, Zea mays subsp. mexicana
tgccaccatgtcccgcggcagtgccgcctccgtatacctcggcgtcgacgttggtactggcagcgctcgtgcaggactcttcgatgaaaagggcaagttgctggggtcagcaagcagccctatacagatatggaaagagaaagactgtatcgagcaatcatcaaccgatatctggcatgcggtctgtgctgcggtgaaatctgcgtgctcactggcaaatgttgctcctgaggacgttgctggccttggctttgccgccacttgctcccttgttgctgtcgatgctgatggttcccctgtttcggtttctttgagtggtgatacaaggaggaatatcattgtgtggatggaccatagagctgtgaatcaggcagagcgaatcaatgctaccaattcgccagtactgcaatactgcggtggggggtgtttccccagaaatgc

SEQ ID NO: 310571 - DNA, 446 bp, Zea mays subsp. mexicana
tcttaaaagaggaaggaaaaggctggcaaatgggatgttcctctgccaaaggtcaggcctgtagctgaagaagaaatgttcaaggttctacgaactggcaagcgaaaaagtaagtgatgatgggatttgtcaatggatgtggaatttggttattggtttaaagggttttatgtggcatgatacttatcaatatgctttgtggaactgttgtgatgtgctacatgagaagttgacaactgatttgagcaatcaatgtgttccatctgttaagacttcataaatgttccataacatagtacacaacattttcctttggtctgaacaatttagctgatcttcttttccttgtactcagccaagcagtggaagagaatggttactaaagccacctttgttggagctggatttacaaggaaaccaccaaagtatgaacggttcattcggcc

SEQ ID NO: 310572 - DNA, 444 bp, Zea mays subsp. mexicana
gtggcggagccagaagacgatccagacagggagcagatgtctggattagctgcccagctatccctgaaggcagacgaaagaaacgtggatgagttgttgtcaagggctgggaaggaccgtggcgacagggttaccatgacccgagactcaagacgttctataggagccgagtacattgagttgctacgatgttgtgtccggtgcaagggcattcgctgagtctggtcaaccggctggtaggacaagcagagatggttaagccatctgaggctgaagaagaacttagttcagatacacgcgacatcaggtggtgcggctacaggtggagcaagaaagccgcatgaggccgatcactagtcagatattactgaagaccaatcaggacaggtatttgaaccatttgggcaagtggagcttgtacagcttcctctagatgcaatgact

SEQ ID NO: 310573 - DNA, 441 bp, Zea mays subsp. mexicana
tttttgacgcgtgggtttccagataggatctctattatttgataatatgtaatcagaaatgatcacttgattaaacattcaactatgcctgtatgatatgaagagataactgatgttgtatcagggtgattgtgtaccttcatatcatcatatgtgtgctgttctgacttgtgaaataattttgtcactatttctctgcagcttgttgagtgggttcaaaaatcacagctattcgaatttgtagagcgtgattatgctgcacatcttgatttaacagctaaggtctatggtcttcataaagcagaacagactattgagaaaattcctgcatcttgtaggggtgagattgtttatagaacacttttggccaattgtgtttctgcatccaatataaaaaaatcggagcaagtttttaataggatgaaggatcttggatttccg

SEQ ID NO: 310574 - DNA, 368 bp, Zea mays subsp. mexicana
tcgttcggatttccttgcaaccgcacaggtagggcgatgtgaacccaagaccgatggcccccaacgccgagacgaagcccgcggcgaagaagccggcggaggaggagcccaggtacaagaaggcgaccagggagcagaagcccaaggaggagatgcgggaggccggggccatgtccgccggcacgttgggactctaggacaagcactgaggcgatgaaggacccgtagagcgcgcacggccacaagatctccgttgtggagggtgccacggaggccgacagcgccagcggcttcttattccaggggcaccacaagaagaagaaggaccactaggacgcccaggaggccagcggcgagaagaagcacca

SEQ ID NO: 310575 - DNA, 425 bp, Zea mays subsp. mexicana
tgacctgagcagctagcgcgcacggtccgaggtgttatttttcactatgctggggttaaatagcgacggggggcactggatgcacaggagggggcatcagttgtcaagcccactgtttcgatgtgtcaaactttgtaagagacgtaatctactggcagtagcactggagatctctaaggacggatccgccacggttctgcccaacagcctgccttccaaaggggctatcgagacattgcggaatgctgatgcggtgtgtttcgatgttgatagcaccgacatgctggacgagggcattgacgagcttgctgatttctgcggggcagggaaagctgttgctgaatggacagcaaaggccatgacagagactgttccttttgaggaggcgctggcagccaggttgtatttaatcaagccatttttct

SEQ ID NO: 310576 - DNA, 446 bp, Zea mays subsp. mexicana
tcgtataaaacagtggttgtttctaccaccatcacaaagtcattgtatatttgataggaacatgagatcttcggtctataacttacatgatgtttctgaaaagcagtttcctgagtttagtaagacagaatggctagaatgcattcaagagcagaatgaaatcatatttgttcccagtggatggtatcaccaagtccataacctggaggacactatatctataaatcataattggtgtaatgcctacaacctacactgggtgtggaacttgctttatgaagactacaaagttgcaaaagaatatattgaagacattcgagatatatgtgatgattttgaaggactttgtcaacggaatttggcagctaatacaggcatgaacttctatgatttctttgttttcatagtgaggtttgccttagccaatgtagttgagctttaccatc

SEQ ID NO: 310577 - DNA, 394 bp, Zea mays subsp. mexicana
tttgagagctgctacacaaggctcggctacagacaagaatgactcccggtcacagcatagttcgtgccatgcttctaaggacgaatgtcgctacacagaagctactgcagacatggcatcatgttctacgacatgggaggcatgcacatcatttctgataactgacaactggagccacggaactgtgagggactgagaaccagagacccctacaggtgcaggacggaagacatactaccacagcatgacgaaagacctcgtgacacgggcttgtgcgacatccgagggagctccgactggcctagggctgcggctgccattgtccatacgctgccatagagatgcaagtagcgcaggagctacgacatggccagcaggccaagaaccgagtcta

SEQ ID NO: 310578 - DNA, 522 bp, Zea mays subsp. mexicana
gttgtcgacctcctccctgacctcctgcaaggccgggtgactgtaagagggcgtcctgatgaagatgctgtcctctgcacaccttgtgcaacttactccatgaagtttgttggcacatcaaattctatgtttttgataccacctggggaaccatctgctaaatgcttaagaccagacaacaccagtggcaatgctaatgcgttggctgctaccattaaactggcaccggggagcattgaattggtccgagtcgctccaagactagataaacttaagagccttctccgggagcggccctacatacttgatgaggatattggggatgatgacctccaacataagaataaggaggggctgtacacatggcaagacctctgcaaacttatccaggccagtgatggcgagctgttagatgcgctgaatgccctctcggctgttgacattgatggattctggaggacagttgatgccagttctgtgaacacgattcttgacatgatcctgcacaactctgtgttgcgt

SEQ ID NO: 310579 - DNA, 569 bp, Zea mays subsp. mexicana
tgtttgatcttaagcaaagaagaaatggaagaggttgtcatgaagaggtgttggttagcccgttattggggtttggctgtccaatatggcatctatccagacatctcaatgtcaaaacatgaatactggtcttcacttgcacctcttccatttgagtatgtaacatctgctggacagagagccaaggatggatccgaagcagaaggtaatggtttggaagacgtggacaagcttgttcatgatttgactgttacagcaggggaaggcatcgtagaaaccatgcttgctgttgataaaggacttcaagaactagctttcctgaaggtggaggatgcggtactttttgcccttgcccaacaccatcgtactaatgttgctggagcagctgatccagatattaaatcatctggggatgaaaaattcactgaggcatctgacctaagcaaggaggaggaagaagatgtacagctcaagcaggcttggctcatatttttctggaggagggcttagaccaacaacgtggaagagatattgccgaggagcgattgacatgtggatcgatcgacacg

SEQ ID NO: 310580 - DNA, 518 bp, Zea mays subsp. mexicana
tttggatacaaggggatctctggtttcttggccgagtcttctttaacaagtcatcttcagaccctcgatcttaaggaaggcaaggggagcaatccgccagaaatatccggtctgcctggtattggagatgttactgaaagaagagcatcaccattagcaggtgaaggtcttcaagctggatccatgggagattcactaggtgctattcgaaatgctgcccaagctgccgctcgtatatatcaagttttcagggtgcagtctttccagagaaagcaagcagttcagtatgaggatgacaatggtgcagtatcagatgaccgtgccatatcactcttatctgttaaaccatctaaacctgtacagctcgatcccctgcatgctgctgcaactcgaatacagaacaagtaccgtggatggaagggaaagaaggaatttctacttatcagacagcgcattgtcaagatccaggctcatgtgcgaggtcaccaagtgaggaaagcatatcgtaaaatcatttg

SEQ ID NO: 310581 - DNA, 455 bp, Zea mays subsp. mexicana
ctctgaaacacgagaatctgcttcgtcctcggtggaatttccgtgggggtccggcgattcttcggaggacaagcgcctcggtttcgttgagctggctaggtcccatggggattagtcaggacactcatgagtcgatggcaacagatgcagccaattacctttgccaccagcttcagcatcttcttgggcctatctcttctgcgacgagccaaagtggcccctgggaggagaggtcggcgatggttaggttgactcagaagctgcagaaatataagagaaataagcggtggcggcagaagaaaaggaagcatgttgcggagctttttcagaaagagcgtgcggattatgatagagttgaccaggaagctgatgaatggagggctaagcaaatagccaaggacattgcacagcggaggggtggaaagcatgcagcagattgctagaaagaaaacaaa

SEQ ID NO: 310582 - DNA, 505 bp, Zea mays subsp. mexicana
  unsure (1)..(505): unsure at all n locations
tgttgctatccttcgcgaccagcgggcacgaaagtgataaggagacggtactagtaaactgactaactgctgcccactcgccggagaaccatggccacggcggcggcgtgtgtgcgggtggcgtctccgttcacgggcccacctatctggcatcccagacacgtcatctcaacgaggcggggacccaggagggccgggctggccgtcacggcggcggcggcgactgtgctcgtcaccggcgcgggcggccgaacaggccaaattgtgtacaagaagttgaaggagagggaaggacagttcgtgggacgtggcctagtcaggacgggagagagcaaaggcaaaattggaggcggtgacgacgtatttgtcggcgacatcagagaccccgagagcattgnctctgcgatcgaaggcattgacgcgctcatcatcctcaccagcgcggtcccaaagatgaaaccggggtttgatcctagcaaggggggcgccctgagtttactttgaa

SEQ ID NO: 310583 - DNA, 501 bp, Zea mays subsp. mexicana
tttccaaaagctgcaccaggaacacaaacacaatcaagcactgctgaaacaattgcgagcgctcgttggtggtgtacagcaggaggccaaggacatatctttcttgactcagagcccggccgcgcaagcattgaatgtggcaggaaaccccgatcaacagttattgaccacaaacaccaaatttgcagtctcacaattacctgccctccaatctttactcgccgacctcagaccaaaactggaggcactcaaatcttcgcgtgggaatgttgcagtaaccagcgcaaaagaggaaattaaggaagagcggcgtggctacatcgaacaacggacacggtcacatctagagcgcaacggcatcaatccagcagaaaactctagcctgctttttgcaaaacgagtcgatgaagaggaggtccaggccctcgagaaggtcgcatcgatatttgaccagacttgaagacatgaaacgtttgcgatcatacacgcacgttcatgagc

SEQ ID NO: 310584 - DNA, 409 bp, Zea mays subsp. mexicana
tgttgcctcgggtcaaaccctaagcagggagttgatttattcgctgcagccatgagtaagttgcagtctgagtctgtcaaggatgccatctcccagattgttggggatgccaaggagaagaataggaagttcactgagactgtggaacttcagattggtctgaagaattatgatccacagaaggacaagcgtttcagtggctctgttaagttgccccatatccctcgtcccaagatgaaggtgtgcatgcttggtgatgcccagcatgttgaggaggccgagaagatgggacttgactacatggatgttgaggctctcaagaaaatgaacaagaacaagaagcttcgtaagaggcttgccaagaagtaccatgctttcttggcattagaggccaatataagcaaattcc

SEQ ID NO: 310585 - DNA, 248 bp, Zea mays subsp. mexicana
ctagatgacggcgcaggctgcggaggagctggtcgtctagatcgagcagcagaagctagcggagcacaagaccgaggcagaagaggtcgtagtggaggaggatgacgaggatgatgaggacgcctgggagacagcttttgcgctttacatgctgcctttgaccaaggctcagcgattcctttgaggatgttattgttcacaagcaggcaattacctttcggagatactgcgtaggtgttgttcgctac

SEQ ID NO: 310586 - DNA, 467 bp, Zea mays subsp. mexicana
gtagcatcccatcaccttcgccgagatgtaccgtcgcatgatggcccgcgacatcgagctcgccaggctcaagaagcaggccaaggccgacaagagtgccaacaaggagttcgccgactccaagcctctcgacgccattcttgcctgatatgatagggcgcgcgactaccgtaccgatccgttgctattgctgcgtgtgattatattcatctataagaacatagctacgtgcgaccgtgtggtgattaattaaggtttgaataaaataatggctgcacaaaactaggaagcgatcgatcacccagataaatatgtgtgtgcgttcctttttctttcaagatgtgtaatttttcaacgtgcggttccagatgcatggactggaccggagtgcattgtaattcttttgtttcccctgttgaatatgcgagaggtgtgcatgcctatgaaaaacacatactacaattcct

SEQ ID NO: 310587 - DNA, 488 bp, Zea mays subsp. mexicana
tttacttgttctgggcatattgctgccgaaactgcaaacggtcactgcctctcttgttacatgaccatcgtatttgtgcttattatgctggaaggcgcaatcactatggatgtatttctgaatagcaactgggaagaggatttccccgctgacccatcaggcaagtttgaggatttcaagcacttcgtgagatcaaatttcgagatatgtgaatgggtaggcctctcactggtggctgctcaggtgttatcgatcattcttgggatggtactcaggacccttgggcctgaccgtgagaccgactatgacagtgatgatgacgtgaccgtgcctgcaaggctgcctcttttgataaatcagtcccagcatggttcatactatgctgaacctaacacgtctggaaggagtgattcatggaaactgcggattttagacaaggtcaataactaagatctaaggatctcatcaacagaccgtcagtaagactc

SEQ ID NO: 310588 - DNA, 450 bp, Zea mays subsp. mexicana
ttaacttttagatcattattgtggatgatggtagtccagatggaactcaggacattgtaaaacagctgcagcaagtatatggtgaagattttgttgtaagtagcttaaaaaaatatgttcctggtccacttgaagtttttgtacatatgatgtcagtctgtttattcagtaccatggcttaatgcattgtctttaacctgatatgatgctagttactgcgagctaggccaaggaagctagggcttggtaccgcatatttacatggactaaagcatgcctcaggggaatttgtcattatcatggacgcggacctatctcaccatccaaaatacttgccaagctttattaggaagcaaaaggaaactggagctgacattgtaactggcacacgttatgttaagaatggtggtgtacatggatggaatctcatgcgcaagctgactagcaaag

SEQ ID NO: 310589 - DNA, 510 bp, Zea mays subsp. mexicana
ttcttccgctctttgctcgggctgtctaaaagtgtctgtttttagggaccttcggggggctgtgcagatctagcacgaccgagaaccgaatctgtgagccatgttcaccaacaagggcagcacgtactatggcgatggaaggaacaagacagaggtgaagaatgagactaagctcgggatgggctataagaaggacgacaacttcggggagtggtactccgaggatgatgaaaacagtgaaatgattgagtactatgacgttcgtggctgttatatattgaggccatgggcgattgaaatctgcgagctactgaaagaattatttgatgcagaaattaaaaagctgaagctcaaaccatattatttccctttgtttgttactgagaatgttctacagaaggaaaaggaccacattgagggcttagcacctggggtagcttgggttactaaatctgggaaaactgacctggaagcaccgattgcaattcgccccacaggtgagactgtaat

SEQ ID NO: 310590 - DNA, 325 bp, Zea mays subsp. mexicana
gtggtttcttgagcccagtgtgtgtactagcaaccagctagctcgggcggcagccggcagccatcatgcacggaagagaagcaccaccacttcttcaaccaccacaagaaggacgaggagcagtccgccggagagcacggacactccgagaccgaggtggtcaccgccaccggcgagggcgagtacgagaggtacaagaaggaggagaaggagcacaagcacaagcagcacctcggcgaggccggcgccatgggatgacggcgccttcgcactctacgagaaggacgaagcgaagaaggacccccagcacgcgcacaggcacaag

SEQ ID NO: 310591 - DNA, 489 bp, Zea mays subsp. mexicana
gcccgacccacccatttcatcttttgacacgggcgcgctcggctacttggtgacctcagagagctccattagtccgtgcgcttgtccgggactgctttcctatcgtctatgctataagcaagccatcggactatgtgctgtgacatggtcagacagctctcttccgcagagcttaactaaacacactcgtgactctgcacgataagaaggctggcatagggggataatctacccatgatgaaactaccataatagcaggagctcttgaactgactgaaaagaaagctaaagatgctatgacacaccttgtgacaaacatttgcaattgatataaatgcaaaacttgacaggaatctaatgcaagaggtacttgagaaagggcatagcacacttcctgagtactatgaacagaaaacgaatattattggactgatattggtaatgttctgctattaaaacatgctacgtatttttcagaaaagtttgaaa

SEQ ID NO: 310592 - DNA, 423 bp, Zea mays subsp. mexicana
gtttttctgcagagcgcggtgacctgaccaccgctgtttctctactcgaggactgccggaggatgatcatggggtcggcgtcaggacagtctggtgaccgtctgtgccaggcactggatgccgagctgaaggagatgcaggatcggatggccaaccggcagaggtacgaggcgtccggtcgagcatatgtgctctcaggcttgagctcgcactcatggcagagggcaaccgcccgcggggactcgacggacagcgagagcctgatccaagcctaccagacttcgtccatggtggacatgctgcttcgctcgcagacaatgagccgctcatcgactcctcgaccaacgccacagatgaggcacgctaagtcattcccggcacgcccgcagccaaggtaactgctatttggtgtcaccaggattt

SEQ ID NO: 310593 - DNA, 530 bp, Zea mays subsp. mexicana
gttaatatataaatctattgtaccatggacgaaataatatgcaggcttggggactaattgtattgttaatatcgaaagcagctggtcaagcaccaggtattccagaaatggaacatgatagaagcgctggcgttttacattcacaacgtgcattggccgaagtttgtgaaatgattcgtatatcacatttggtgcatcaaggtttggttaatttacagccacttacacaagctggacaagatttatcattgcacggtgacatgacatttggtaataaaattgctttattaagtggagattatttgttgggaaattcttgtgctgaattggctggtttaagaaatcaagatttggttgaattgatatcatcagctgtacgtgatttaactgaagctgaatttattggtgatcgagatgaacaaaataatccattaccttcagcaccaccaaaagttccaagacgtgttacatctgatattcatgatgattatgatatacatttggccaatgatgtacttgaaccaattgaa

SEQ ID NO: 310594 - DNA, 368 bp, Zea mays subsp. mexicana
attttaaccttaaaggagcgacgaaagatcggggggaatagtaccagtgaggaggcccaaccccagaaaataaccatttagaattgcttgaggatgacagggagacagcataatttagtgcttttgatggccatggaggaacagaagctgcccaattctgtgcaaaatatctgtaagggcaagttcacaaaaacgaaaacgattcaactggagacctaggcgctgatgtccatagagcattcttcaaaacggatgaaatgacgcaaggacagagaggttggggagaactataagaacttggagacaaaaataacaagcctaggggtatgatagaaagattgatccgacctaaaaggagcagtgattta

SEQ ID NO: 310595 - DNA, 363 bp, Zea mays subsp. mexicana
tcccgaattgcccgacgcgcccaattgaaccattatggagacacatggaattgtcgatgatcgttacaatgatgagcagcatccgtggaatactcgcattcagcattgctagagctcgatagtgcgacagtattctgtggagcttttgatggacatggaggaagagtcgttgccaaatgctgtgcaaaatatctggatggccaagtgctcaaaagtgaagcctattcaactggtgacctaggcgctgttgaccatagagctttcttcagaatggatgaaaggatgcaaggacagagaggttggcgagaactatctgcacttggagacaaaataaacaagatcagtggtatgatagaaggactg

SEQ ID NO: 310596 - DNA, 348 bp, Zea mays subsp. mexicana
attttatggcatggtgcagctatatgaccagagagcagccggaacagcaacaacctatacatagaacgattacagatctggatagcatacaccatagactggtccatggcctagactatagacactaaatattattacaagattggaagcgctaatgcagcttgagaattctggcgtcaaacgcctgcatcaattgacccagatgcatcatacacatttggcattataggtgatctggggcaaacatataatcctatctcaactcttgaacatgatgagaaaactggaggtgaaactgctctatcttgaggcgatatgtcatatgctgatagatatgaacataatgat

SEQ ID NO: 310597 - DNA, 492 bp, Zea mays subsp. mexicana
gtacgacggccgttgctgacgttgtgtgagtgtcctcgaacaagatgtatgtagaggagtagccaaggttattaaaacgataaaacgttggaacgctcatggttgaaattttgacttttaaacgtttaaactttgtttaaacgtagttttaaacaacataggaaaaataccaatacattataatttcatacaataatataaagttaaatatcaaaatagagaggctagtggcttaccaaaacttcacccatgagctggattgaacctcaaaagtaactaatagactaggcccaaaagtagctaatggtctaaaatgcataaaacactgcgttttacagtttagaacgccaaaacgctaaaacgtggtttcaacctctaattagagttttgacgtagttttaataacactgggagtagcacatccggtggtgcaacgactaggtgtactacctcgttgatgagctcggggtgcacttcgtttggcagcccagc

SEQ ID NO: 310598 - DNA, 478 bp, Zea mays subsp. mexicana
gtggctgtacgcctacatcctcaccatgggcggcgcttacaagaactctgcgcccaagacgcaggtgcattgccgcgttgatcggtcgggccttatttcaggagcaccttggataagtgttccctatccctttcagtggggtgctccgacgtttgacgccggagaagctttcgctatgatgatgacttcgttcattgctcttgtagaggtttgtgtccaatactcggctggaaatggaagagaaaactgcattatatatatttatattcgtaatgtacctatttgatatcatacatgttgttactattttcgtgcaaagcttgtcaagtttgagaaagttggacttagtacaccttttgaggttggtttatttgggtcagaaggagtattactttacgagtaggtttacaaatctgatttgttttaccctggagtcaactggcgcctttatcggtgcttcgagatatggcagtgcaac

SEQ ID NO: 310599 - DNA, 511 bp, Zea mays subsp. mexicana
gtttctactaatcttctacttattccattctctttaatgcaaaatgagcggtgaaaatttgatcatgagctcggtgaatggtgttagcagcattcggccggagattgccttgaatggtttggcgaatggtctcaaaagtaatgggattaatgggcatcacgaacacacaaatggacacacaaatggtgttgatcataaacaagcaaatggtcataaacatgcaactgttgacccccgaaattacgatgacatcatccgcctggccgaagttatccgtgacatggttgatcttaaagaaagtccaacaattggtgtcatctgtggctctggacttggtgatctagcagatctgctagttgacaaacaagttgtgccatacacaaaaattcctggtttccctcaaactagtgttgttggacataaaggaaatttggtatttgggtacttatccggcaaatatgttatgtgccttcaggaccatttcatccatatgaacatgatatgggtttag

SEQ ID NO: 310600 - DNA, 389 bp, Zea mays subsp. mexicana
gcacggggtcacggcctcaacggcaatggcatttttagccttctgtgcggggaacacttacctagactggttaagcacagtggaagtgacggaccccagcttacaccttcaaccactacgtgctcgccccctatgcagtagaccaggacagcagggaattcaacaacatggctgagcgtgtgaagcaaaagctgtgggatttctttcagatatgaggttgtatacgaggccagggcggatgtgttggccaccaccagctataagaagctcgtcgaggacatgcattacgaggagcgaatgcaagccaatattatttaccaaggcgcttcgtccttggtgagaaggtgaccaatgtacttgtttttattttattaactatttcccttttc

SEQ ID NO: 310601 - DNA, 272 bp, Zea mays subsp. mexicana
cttcctcggcctcttcttcatggccggttcaagtctcttgatctttcttacactactcgcgggctcgcgcaacaccaccccgcttaacgaagtctacttcctccaggccgatactggtaatatccctggcgcgccgtctacttcacggtggacattctggaatctctgtggggtgacccatggaggtaggaaccactgctgaagctcacacccaggcgttgcccttggacccttcaagccattgtaacttttgatacgacccgaaaatgtgc

SEQ ID NO: 310602 - DNA, 355 bp, Zea mays subsp. mexicana
gttgtccctgctccttttaagcagccctgcgcgcggtccgcagtgaccgattgaacacgaccttaggggttcagatcggatcggaagcttccataagtttccatcgggcgtcgccggtatggcgatccgcaaggggtcttcgtacgccgtcgcggcacttctcgcgctcgcctctgtcgccgccgtcgcaggggaggtcttcttccaggagaagttcgaagatggctgggaaagtcggtgggtcaagtccgagtggaagaaggatgagaacatggctggtgaatggaaccacacttcgggaaaatggaatggagatgccgaggaccaaggtattcaaacctccgaggattacagg

SEQ ID NO: 310603 - DNA, 284 bp, Zea mays subsp. mexicana
gtcgattctaatatcgcggtcaaaaggtggggtctcttgaaagatgaggccggcatatcatattcggtggaccacatctagacgcccacgacacaaattgatgtaacagatgatgacatgccacctcttgtccggcagaattatgccatgacctttctacaccaaagataggactaacagggtgatccttagcgctacatgtcccttgtagcacatactttttttccgaaaaagctgggcataactcatgtacatacgctagcaccttgggatctctggtaagg

SEQ ID NO: 310604 - DNA, 245 bp, Zea mays subsp. mexicana
ttgtactcaccagcgagccatcctggaggggcatagaacaggcgcgttggcaccggtgccactcgatgcgggtctggcatcggtgtcgacagcccgagaacccactgtctctcaatgagaaggaggactcgacattcaagggcactgtctttggtctggacatattgttcatgcacggagagacatttgaggttcttggggcaagggcatattatgtagtttctgaggtactgaaacggcaatat

SEQ ID NO: 310605 - DNA, 289 bp, Zea mays subsp. mexicana
ttttgggcagtctgcgtctgagtaaacccggggtctctataaactccacgggggtgaacatctctccactgtccctaccataggctccaatctagagaaggtccagtacaagaatctatatctcaatgcgtgggatgtcggttgcctccacaaattcaagcccctgaggaggcactacttcaacaacacataggctctgatcaatgtagttgattcactggataatcagagaatccagagagccctagcgcagtctcaggctataaacaatgacccctttatgcttaac

SEQ ID NO: 310606 - DNA, 288 bp, Zea mays subsp. mexicana
gtgaggttggagggccctctacagggccaagagtgactgtgctctggatcttgcacggtgcacaatctggacaaagctgtgcaacaaggaggtgtgactcatataggctctgtgaggcaagctatgctatctattgtgtgaagattgacaacatgacctgtggcactaccaagctcttgctcaccatggcaagaatccttgagctgagctgaagagactgcctatgctactggctgatgcgaagtacttccacgggacgtggatctggtatggcgcacagacagtctg

SEQ ID NO: 310607 - DNA, 505 bp, Zea mays subsp. mexicana
tgagaatagtaatttctttaggtcagagcggaagaagatgggttttgaggttcttggtgacaatgactctcctgtcatgcccataatgctctacaatccggctaagattcctgcattctctagggagtgccttagacaaaaggttgctgttgttactgttgcgtttcctgcgacacctcttcttcttgctagggcacgcatatgcatttctgcttcacatactagggaggacctgatgaaagcccttgatgttatcagcagagttggcgaccttgtgggcatcaaatacttccctgcagaaccaccaaagattgctggagctgatcatgataagctggagtaggaatcaacccttagttgccccatgagtgattgaagttgttagaatcccttggagttgtcaacaaatcattatggaaagaagcacatattgagccatttcatttggatcttgtaatacacaagagtccaggatccgtcatattaagtgactaactgttgttga

SEQ ID NO: 310608 - DNA, 284 bp, Zea mays subsp. mexicana
gaagaagaagatcggactggtgtatgtcttgtatgggccacatggcacgggcaagacctcgtgcgccagggtattcgcaaaggctttgaattgccattccccggagcacccgaggccctgtgattcatgtgcctcttgtattgcacacaatctgggcaagagcaggagcttgctggagattggaccggttggtaatatagatctggatggcattgtggatatccttgacaatgtgatgctctcgccggtgacatcccagcacagggtggttataattgatgact

SEQ ID NO: 310609 - DNA, 379 bp, Zea mays subsp. mexicana
ttcaagcgaacggatgctactgctttattagagaggcataagttaggcatctaggcagacttactgatgatgtttatgcctaagtatgggtggttatgctaagttgaagactctattactaccaattactaggatcgcgcgtatgctccgctatgtaaacacgtgggacgacacaattgggcatgttttagtggcgtccttttatgctgtgatactgagttgaattggatcttacatgatcatgtatcagaagctggtgattcatactcaggtagagctactgcttccttacatgaaaatgcataagcaggtcaggcatatagctctactgactgtaacaagcacacattatgcacgcgacgtgattcttattcctact

SEQ ID NO: 310610 - DNA, 340 bp, Zea mays subsp. mexicana
tcgttcagttgaacgctctaccgatgctgtgaaggatggttgactagattcgttgaagcatataacctttgagggatgcatgaccacctgccacatgatgcagaacatgtcaaacgctggactgcagggggaaagaccgtcctctgacagagctacagcgttgactggactactctattcacaaagttggtcttaaagaagtgggtttctaccactacccatgcagagaatgctggaacgtaagacgaaagcggaatgttggacgatgaacttgtgatattcaagattatccaagatctgcacatattggtgactcatggaaagcatgagaacgacctta

SEQ ID NO: 310611 - DNA, 306 bp, Zea mays subsp. mexicana
tcggtcaccccaactattactgttgccttaggagggtattgttaaaaagcttgtgggcaaatagcgactctacaagtctacgcatcacctcgcattactctgaagccattgatgcctacatttcctagttttgaaaaaatacttgtctcactcatggtgcagccacatggtaactttgggctaagacttgctggagcatatgtaatggctattcctggtctatacagatttgatgatgctaccatcaagaaacaaggggcaagcatgtctttgtggcccaagacgctataagtacctataatggat

SEQ ID NO: 310612 - DNA, 311 bp, Zea mays subsp. mexicana
tcggtgcgaagaagccatactgatgttcctgggggctatgtaatgctagctgctgaggatatcgtggctgacactgtgattgtgaccaatctctttggtctgctgctatcggagaatagaccagctcgctaggcttgctccttggactcacttcatggtgcatctacagcatggcgttgtgattcacctgctccaatggctggtcttggtgctgctgaggctttaccgatctgagctatcgaccatgagggctctgagaagacgcttgagatcacattctctgacgctcctggctctgatgacccttatgg

SEQ ID NO: 310613 - DNA, 391 bp, Zea mays subsp. mexicana
tttgcttctcccgaagccgacggctggtctgcggggcttacctaaacagccttgggcgacatcaagagcggaatgaacggtttgggaaggatcggcaggctcgtggccagggtgcgccctgcagagcgaggatgttgagctcgctggcttcaacatcccgttcatcaccacggattacatgacctacatgttcaagtacgacaccgtgcacggtacaatggaagcacagggacatcgacctcaaggactgcaagacgcttttcttaggctagacgccgggcaccgtctttggaatcaggaacccctgggagatcccgtcgggtgaggctggtgctgattatgtcgctgggtgcaccggtgacctgactgacaaggacaaggctgctggaca

SEQ ID NO: 310614 - DNA, 306 bp, Zea mays subsp. mexicana
tcgtttaggtgcacgctctaccggatctgtgggggagtgttgcaaagatttggtggagcgctgaacctacgttagatgcacgagacctgcccctcggagaagaacatcctttagctggactgggggggaaatgcgtcgactactgtaaggactacagcgatgactggactactctatccgaaaagctggccttcaagaaggcggtatttaccaaaacccataaagagaatgctggaacggaagctgagattgtaatggttgacggttaaattgtggaatacaagaaaatccaagacctgcactttt

SEQ ID NO: 310615 - DNA, 275 bp, Zea mays subsp. mexicana
tcttcacgcgtacgctgtaacttttctgagggggagggttttaaaacctttgggggggactaaccacacataaaatgcactgggctggcccctcccaagatcattgccgtccaaccggctgatggagtgaggatcaactatgtacaaggtgacatgtttagctgcattccacctgctaaaactgtcgagctaaagcttgtgctgtaccacctgaccgatgaggagtgcgccaagactcctggctcaaagccggaaggcgattccttcacctaagg

SEQ ID NO: 310616 - DNA, 398 bp, Zea mays subsp. mexicana
tttttatctcccgtctccgtcgactcgtagggggggcttatctaaacagtcttgggcaagaacaagagcggaatcaacggtttctgaaggatcggcaggctcgtggtcagggtcgccctgcagagcgaggatgtcgagctcgccgccatgaacgaccccttcatcaccgcggattacatgacctacatgttcaagtgccacaccgtgcacggccaatggacgcacagtgacatcgacctaagggactgcaagacgcttcttttacgcgagaagccagtcaccggctttggaatcaggaaccccgcggagatcccgtggggcgaggctggtgctgagtatgctctggagtccaccgctgtctacactgaccaggacaaggctgctgtacatctgaaggg

SEQ ID NO: 310617 - DNA, 404 bp, Zea mays subsp. mexicana
tttgtatctgccgtctccatcgactccccgggggggcttatataaacagtcgtgggcaaaaacaagatcggaatcaacgggtttggcaggatcggcacgctcgtggccagggtcgccctgcagagcgaggatgtctagctcgccgccgataacgaccccttcatcaccacggattacatgacctacatgttcaagtaccaccccgtgcacggccaatggaagcacagcgacatcgacctcaaggactccaagacgcttctcttcggcgagaagccggacaccgtctttggaatcaggaaccccgaggagatcccgtggggtgaggctggtgctgagtatgttgtggagtccacccgtgtcttcactgacaaggacagggctgctccacatcctaagggtggagc

SEQ ID NO: 310618 - DNA, 348 bp, Zea mays subsp. mexicana
ttagtacctgccaaaaacaaggagtcccctggggggctatattaaacagttggggggttgaccccgatcgatccgactaggcatgacaggactgacacaattcgcaaggctcttgtccttggcgttaacgataacatgatcaccgccgatcagctcgctattgttacggagactgcaaggaggctcggcatgagtaccaacatgtatccatcctatgcactgatagggcaaaacaaggatgcgactctagaaccgctttctgtagatgaactcattgacaaggcctatggattagccgcactctttcctgaacacaagtacgagatcgtgcagagactgcacgagaag

SEQ ID NO: 310619 - DNA, 262 bp, Zea mays subsp. mexicana
tcgtttgcagctggagttaatgcgattggggggggtcttaaaatgaatgttggtggtaatgccagctgcactaccaactgccttgctacacttgcccaggctgtccatgaggggtttgctatggctgacggccttatgacaacggttcatgccacaacagctgcccatatgactgtcgatggtcctattgttaatgcttgcataggcggacaagaggctgtccaacatataattcttacatctactcgatcagtaaatgctg

SEQ ID NO: 310620 - DNA, 343 bp, Zea mays subsp. mexicana
tcggtcagttgtcctgagtggcagcctccaggggggcttatatgacagttttgctctgggtgggctgatcacgaacggtgctgggcatgcatcttaccccatggatgctgtccgcagaaggatgaggacgacttcagttgaggctgcctagttcaatagctagttggacgcgttgaatcggatgcttacaatggaaggtccgatgttcctgttcacgggtgctggtgctaacaatggtggtgccattgcatgggctcgcgtgctaggctggatacgaccaactgcagatgctcttggtgggaaagaagaacggctaccgcggtgcttaaacggaaaaaaatga

SEQ ID NO: 310621 - DNA, 278 bp, Zea mays subsp. mexicana
tcgtttgcacacgctttattggaactctagaacgggaactttgagataaagttcggtcttaaagacccgtacatgaacaaagctatccagatggctgcttctactggctggaaaggtgctgggattcaattgccataccgactgtgcaagggctccatgaagacccatgtcagacttaccaggtagctgtggaaaaaattgatgctaaaggatgtagtaattgatgctacatggaggattgtgaggtcacccaacaagggttcaactgtgctgcgccc

SEQ ID NO: 310622 - DNA, 428 bp, Zea mays subsp. mexicana
aatggctggatcgacccacgcctacttaatggctcgagtggaacatggggatggggggggtatgtcagcgcaccagtgtgtagagacactcctaacatcccagacaaaagcgtatgactaccttccatacttctactcgagggtttttgagtactagggaagttcgaggaaagtctggtggcagttttatggcgacaatgtctgcgaagcagtcgaagtagggaactttgatccaaaggttgcgactttctggatcgactctgatagccggctgaagggtgtttttctagagagtggaacctcataggaattctcgcttcttccgcaacttgccaaatcttagcctgttgttgacaagtcaaagctccaggccgtgacttctgttgaagatgcattagagattgcaagaagctcactccggtccagtg

SEQ ID NO: 310623 - DNA, 328 bp, Zea mays subsp. mexicana
actttttgaagattgtttcaagcgctattattgacaaatacattggagaaagggctcgtttgattagagaaatgtttggctatgcacgtgatccccaaccatgccttaatttaaagggatgaaatggaggccatgggggggcaaaattcaaggggggaacctggggttgcccgagagacccaggggccgttgtgggacctccttaatcaattagacggttttgatgagctgggaagggtaaagatgatcatggccacaaatcgacctgatgttctggaccctgcgctcctgcgtctgggacgtttagacaggaagattgaaattccgt

SEQ ID NO: 310624 - DNA, 242 bp, Zea mays subsp. mexicana
tccgttttgttccaccgacagtgggcgaaaaagcctctagagctgctgctaatgccttcatctatttcgatgcttcaaatgctttcaaactagacgagaacacaggaaatatgaatgacttctctggaaagacacggctatagctagcgttgcctgacgctggacttgatgctacctttatgatctggacatcatgatccctatgtagaactttggagaagctgcagctgcggaaacgcatg

SEQ ID NO: 310625 - DNA, 392 bp, Zea mays subsp. mexicana
cttacgcgtgggcggacgcgtgggctgatgatgaggttcctataaaaagtgtaactatccgcaaaattcctcgtgttctagaagaaatgcccctctatgacatcctaaacgaatttcagaaaggtcacagccacatggctgtagtcataaggaaaaacaatccaagttaccaaccagctgaacaagctgctaatgatggtggaacttttgaggcgtccattgctattgatgataagaacaacgaaaaggtcgtgaaaaaccttccgccaccactgcaaagatggaagagctaccctaacactcagaatacatcaaatagaggaaataggcctaaaaaatggtccaaagatcaagcagacgttctgcaggtccataaagagcccttgcccaca

SEQ ID NO: 310626 - DNA, 197 bp, Zea mays subsp. mexicana
ctcgttacctttaattgtgctctgtctgtgtgttggcaaagcaaacgaacgagctggaggatgtcttgcaggtgcggatcaagctgcaactgcggatcatgctgcatgtgcgtcacgatgtaccctgacctggatgaaaaaaacggcgggggcgcttaaggcaagtgcggcggcgtccttcccggggtttcccctgg

SEQ ID NO: 310627 - DNA, 510 bp, Zea mays subsp. mexicana
gggtgagctaaatatctgagaaagtggcgactgggattttgtccggagtggtgaaggtcactggttacttcacaagctgtctggcccactcttatgttggcaacaaaggagacagctttaagcctggagagatcgttcttgcttcgcttgacggatttgggaagatctgcgacgccgtggaggtgggcggaaagaacggtttgtccacgtcgacaactgtgacgaccgggctagtatctcacaggtacggagacaaagccgccgacggaacgaacgaagggctggacgccgccggtcacgccatctgtacggcgatgaccgtggtctacactggtgagaacttgaaccccaagagcgtactcaaacccacggcgctggccacgtacaccatcagggccaacgatgccgagctaactgcgatgcacggcagccataggtaactagcgcttgtcctgcatgcacagaagatctctattatctcgctctgtcacgaccaacgatgcactcgct

SEQ ID NO: 310628 - DNA, 292 bp, Zea mays subsp. mexicana
ttttgttatggacaggacagcatccctcacatgcggggctggtttgaatctacgatggatcaccgcaacatgggcataaataagagagactatcggacctcttaaagttctggcgctgttcctgcgggcaaagaaggagcacaagttccgcgtgtactggaacacgtaccaccactcggtggggtacgccgtcatcgtgctgggcgtcgtgaacatcttcaagggcatgagcatcctgggcgtggagcaacggtggaggaccgcctacattgccggcggctgtgtgctgctt

SEQ ID NO: 310629 - DNA, 270 bp, Zea mays subsp. mexicana
cttgtttatgttaagagtacgctttttcctcattccccatctgcgtgcctcaagtggaaatctcgatcgggagctattcttacagaactaaagagctttgatgctgacttcatgtgcatacaggagttggatgaatatgataccttctataagaaaaacatggaaaactctggatattcaagtatttacaaccagcgatctggagacatactagatggctgtggcatatgctattaacctaaaagtgcataactgatgcaaaaagctgct

SEQ ID NO: 310630 - DNA, 520 bp, Zea mays subsp. mexicana
gtactcctgccgtgggacatcgtggaggacgagaaggaggtgaagatgcggatcgacatgccgggcctcgcgcgcgacgaggtgaaggtgatggtggaggacgacacgctggtcatccgaggggagcacaagaaggaggagggcgcggagggcggcagcggcggcgacggcgacggcgacgggtggtggaagcagcgaagcgtgagctcctacgacatgcggctggcgctgccggatgagtgcgacaagagcaaggtgcgggccgagctcaagaatggcgtgctcctcgtcaccgtgcccaagaccgaggtggagcgcaaggtcatcgacgtgcaggtccagtagaaaaactgagctgtcaagacgggtgtttgtgtagcagtagcgtggctgcgtgggttgggctcttcgcgccgaccgtatcagtactcgtgagtcgtgacccaacgagtggaataatgtgaataaataaacgcttctattctgctattccaagaatctagctcaatatagctattgg

SEQ ID NO: 310631 - DNA, 468 bp, Zea mays subsp. mexicana
cttattcgtctaagcactcggatcctctgccgccgcgatgagctactacggccagcagcagccgcccgtcagcgcgccgccgccgcaaggttatcccgggaaggacgcgtacccgccgccgggctacccgcccgcgggatatcctgcgccggcgcagggctacccaccgcagggctacccgccgcagggctaccctccgcagcaggggtatccgcagcagggatacccgccgcagtactcgcagccgacgccgacgccccgcccgcagcagagcagcgggccctctttcatggagggatgcttggccgccctttgttgctgctgcctattggaagcctgcttctgagttctgagatctaagctgcgcacaacttgttctagaaacaccacttcgcaaggctgatataacctggggattggctcgatagcgaagaaccgaagatacatggtgttcttatgcaaatcaca

SEQ ID NO: 310632 - DNA, 404 bp, Zea mays subsp. mexicana
ccgagtcccaccgcttccccgttccccaccccgaccgactgctttccctcccccgcaccagcctcaaggcatcgccggcgccgcaacatcgctgaggaagcccgcacccctgcccggatccgatggccaacagcaacctcccgcggcggatcatcaaggagactcagcggctgctcagcgagccagcaccggggatcagcgcgtcgccctcggaggagaacatgcgctacttcaacgttatgatccttgggccggcgcagtcgccctatgaaggtggagcttttccgcctgctctctattcacctgaggcctgtccacttccctcccctacaggttaatcatccttccacaccccttcatatacatccttctctactctcgctatcccctcatcccccccccct

SEQ ID NO: 310633 - DNA, 499 bp, Zea mays subsp. mexicana
ggatcgagggacccggggcggaagaagagagagaagacgtctctctcctctcggcgtccccgttccccaaccagtctgctgcctgcctgcctgcaaaaaggagtttgtcatggcgtctaagcgcatcctcaaggagctgaaggacctgcagaaagacccccccacatcatgcagtgcaggtcctgctggtgaggacatgtttcattggcaagcaacaattatgggaccacctgacagtccctatgctggcggtgttttcttagtgaacattcatttcccgccagattaccccttcaaacctccaaaggtttctttcaagacaaaggtcttccaccctaatatcaacagcaatggaagtatatgccttgacattctcaaagagcagtggagccctgctctgacaatttctaaggtcctgctctccatctgctccctgctgaccgaccccaacccggacgaccctcttgtcccggagattgcccacatgtacaagacggac

SEQ ID NO: 310634 - DNA, 579 bp, Zea mays subsp. mexicana
gtgttctctgtaagagaagttatacctcagttttacttcaagaatgggcgtcctcccacaaaagatttgaaggagcagtgcttatcaagaacagatcacctattttttggtggtgggggacttcaagttcaagaattcagatcggtcacgaaggacatatgtaaacttccttcattcttgtctagtgtccttttcaagaaaatcgatgttgaatgcactagaactgtctcaaggcttcatgatttcctgaatttgtttattaagagaagtgttacagcttctagcttacctttcccctaccagtgtcagatctaacatgcactatagctttgatgggatgcatttgttgagtactggattaacgacaataaggttacaatggatatggctagtcaaatatttgaaatattaagaaagccaggttacacatatctcacccaggatgacttcaagcctgtcctgaaagaactactggcaacacaccctggcttagagtttttacaagggacccccgagtctcaggagagatatgcggagactgtaatatacagaatcttttacttcatatatagatctggg

SEQ ID NO: 310635 - DNA, 539 bp, Zea mays subsp. mexicana
cttctggtgcagctgcagctgcggcagttaggcttgctaagaggccagaaaacgccggaaagctatttgttgtcgtgttcccgagcttcggcgagcgctacctctcatcggtgctgttccagtccatcaagaaggaagcggagagcatggtggtcgagccctagagcacacagttctgggcttctgacaaactatttcctgagacgttcaccatttccatctcagaaaaataaagcccgggtgccttctgttgatttcgacgtacatttccctgccgattgtgttcagtccagcccactgttgtcgctggagaacacgtcgtttttagacttgtgatgttttactactgttttgacactcgttgtatttctggccctgtttggcacggcttattttcagcttcttcacaaatttaagcagaagttctgccatacagctagcttctgcagcagcttatcagttcagctgctttttagaatacactaaaagcaatcaacaagcagaagctgttttcaccagcttatcagataagctgcttt

SEQ ID NO: 310636 - DNA, 506 bp, Zea mays subsp. mexicana
tctgctttagcccctcttctctcggtctagagatccgtgcgggcgcggcagcctcgctttcgtttcgcattcagtgacgcatttgcctatatcagccctgtggtcataactctagtagagaaaggagaagatgcaggcatctagggcaaggcttttcaaggagtacaaggaggtacagcgagagaagtcagctgaccctgacatccaattaatatgtgatgattccaacatattcaagtggactgctcttatcaagggcccttctgaaacaccttatgaaggtggggtgtttcaacttgcgttcgcaattccagagcagtatcctctactgcctcctcaagttcgatttttaaccaaaatttttccacccaaatgtgcatttcaagacaggtgaaatttgtcttgatatattgaagaatgcatggagccctgcatggacccttcagtctgtttgtagagcgataattgctctgatggcccatcctgaaccagacaggccacttaac

SEQ ID NO: 310637 - DNA, 572 bp, Zea mays subsp. mexicana
tttaaacttgccctgaactgttgatttaagttttaagttcaagtaacttgagctcgaggtgagatacctttgggacatggaatgaagctcagtgtctctttgaacatttttatgctatggtttcattctgcaccaaaaataaaagtattcgaatcattgcattcttgctgccatagttatattttgttggaacagttttaagtatgacttctaggctctagctgttagaatgctgtttctgaagtgatttcatttttcggtgcagattgttgcaataagggatatcatacctcctgcgcagagggctgcattcaatgatgtgtatattgcatatgaattgatggatactgatctgcatcaaattattcgttcaaatcaagctttgtcagaggagcactgtcagtattttctttatcaaattcttcgtggcttgaagtatatatattcagcaaatgttcttcaccgtgacttgaagcctagcaatcttcttttgaatgcacactgtgacctcaagatatgtgattttgggcttgctcgcaccacctcagaaactgattttatgactgaatatg

SEQ ID NO: 310638 - DNA, 456 bp, Zea mays subsp. mexicana
ggaatttcttagctggtgaaaattcccctacatctatggctggtggatcattttcttgggaagatgagcggtcttttaaagatgttatagcggactctatccttgaacgaccatcatttgtgaagttgcgcttccttgatggcctggatagtgaacttgaagctaaagctagatctaaagatggcgagaggaataaaaacttcagcgaggcagcacccagtactgatgatgaatctgatgatgaatggtggacctgggatgacagtgataattctgactcaccaaaaggaggaagcatatggggacaagcaacttaagctggaagtgcgagatatacttgatctagctttttaaattctttaacaaattatccactatgagggttatacaatcagtcctcggtgaaggtctagcagctataaccagaatccgagactgaccggaactcgaggaaat

SEQ ID NO: 310639 - DNA, 399 bp, Zea mays subsp. mexicana
gtggtgtcatcacctgaattggaattaattttggctgaaggtgctggtcttcgaggcggttatagcactgtagatagtttaagcaatcgagacagatgccgagttggtcaaatatcactgtatgatggaccgctggcacaatttggtgaaggtggcaaatacggtgatcttttcgtagcagctttaaaatcttatggcatgctttgtataggattgtatagatttagagacactagctcgagttgtgatgcaagtagcaaacgatatgttattacaaatccaccggacgatttttcgctactgtcaaccgatcaggtctttgttttaatgcaattcgatcctggacttgaatataaaccgtcgtcagtacgttgtgcaactaatgtgaatacacaaagc

SEQ ID NO: 310640 - DNA, 470 bp, Zea mays subsp. mexicana
cttattttttcgcccacgcgtccgtggacgcgtgggggggacaagctttccggcgccgacgccgacgcggacccggcgccgatacgatccggtggatcaagtgcatcacacctttagggaggccccttggacagtagtttgtgctgcaaattctatatagctctgtcgcagcatggcctcggtgggcgtggcacgctcttctttgggatttcagaatggcacaagttctagcagtgacccagatcgttttcccaacgagttgggcagtatgagcataagggacgacaaggacgttgaagatattgtagtcaatggcaatggggcggagcctggtcatatcatagtgaccagcattgatgggagaaatgggcaggcaaagcagaccattagttacatggctgagcgggtggtaggtcatgggtcctttggaaccgttttccaggccaagtgtcttggaaactggtgagacc

SEQ ID NO: 310641 - DNA, 536 bp, Zea mays subsp. mexicana
caaacgaggaggtccaaaaggctgcagctgcgtggaagggttatgaccaccgccgtgctgctactgaaagatgtagcacatgctgctcagacagaaagctcaaccttcctgtccatatcacagacacacagattcagtagtcagactgaggaactcaagagggtccgtcgtgagtacaaggcaaagaagatctccgaggaggaatacatcagtgccatcaaggaagaaatcagcaaggttgtcaagatccaagaggagcttgacattgatgtgcttgtgcatggagagccagagagaaatgacatggttgagtactttggtgagcaattatctggctttgcattcactgccaacggatgggtgcaatcttatggatcacgttgtgtgaagccacccattatctatggcgatgtcagccggccgaaccccatgactgttttctggtccaagacggcacagagcatgaccgctcgttccatgagggaatgttgactggttcagtcacaatcctcaacttggcatttgtcaagaacgat

SEQ ID NO: 310642 - DNA, 187 bp, Zea mays subsp. mexicana
ttcttcttcctcttacagtccccgagcgcgagatggccacctggtgtgggccctagatcccgatggcctcgcgccgccgcaccctgctcaaggtcatcatcctcggcgacagtggggttgggaagacttccttgatgaaggagctgtgtgaacaagaagatgatcaatcagtacaaggctacgatcg

SEQ ID NO: 310643 - DNA, 571 bp, Zea mays subsp. mexicana
  unsure (1)..(571): unsure at all n locations
tgacggactgtgcatcgttgagactcataaaggccaaatagacaataacaacaacaactcgaatcatggctcgtactaagcagaccgctcgtaagtcaactggaggaaaagctccccgtaagcagcttgctacaaaggccgcgaggaaatccgcgccttcaaccggaggagtcaagaaaccccatcgttacaggcctggtaccgtcgctcttcgtgagatccgtcgttaccaaaaatccactgagcttctgatccgcaagctgcctttccaacgtcttgtccgtgaaattgctcaagatttcaagactgatctccgtttccaatctgccgccatcggagctctccaggaggcctctgaggcttacctcgtcggtctttttgaagacaccaacttgtgcgccattcacgcaaagcgtgtcactatcatgcccaaagacatccagctcgcccgccgaatccgtggagagcgagcctaagcagagatgggaaaattggagaaataaataattctncatttttttaatctggtatcaaaattcattacaacacaaccaccaccaccaacccaaaa

SEQ ID NO: 310644 - DNA, 459 bp, Zea mays subsp. mexicana
agaagctgaatggaacttgcaaagctccctctgcccttgtgcagagcctaaaaatcctgtgtcttcggccctggcaagctgggaagcatattatcagtggagatcccttcccctgcattcacctgttgctgttttacttcattggccacttactctatatcattgtgttcaactctctcggacccaaactccaagatatgatggtcaggacaccctatgcattcactatttagggcctgagaaggagctacttcagcttgcagcgtttggggaactacgtgcattgtttccaagtgtccagattcacattgagcttgtcggaccagaagttccaaagtccagggatggagaaggttgtgaacatttccagatatgcatggttgttctgataagagttgcttgtgtaaatcttctattgggtccaaagactttgagttgcactgcagtgacactcaaact

SEQ ID NO: 310645 - DNA, 553 bp, Zea mays subsp. mexicana
tactgtgggggctgctgcgcctgctggtgccgccgcggcataattgcctggaccaaccactccttttgaggatttcagacacgcccgtagatttgaagactaagacaaggtacactattgacggacttggaacatggcgggccggttgcagggtgactgggaggatgacatccgagcttggaacaagcatgacagccaactaggactagctagcctaggtgataatctggagccaagcaacaccaggcacttcaagaggctcttccaactaacaatgttaagttgaaccctaaaagctgatgagtgaaagatcgtaaagaaccttatgagaactccagctgccaggatgaccttttacatgaacatgccagatgcacgtccaaagacattatcatgaaccacggttgacagatagactacgtctgtggcactgtggtggactgtcacacctaccacatcgttgctaagtgtgctgagcttataccaagatcgacaggcgctctggcaggagcttggagaggagccaaaagttctgagaacggtgatgctgtat

SEQ ID NO: 310646 - DNA, 455 bp, Zea mays subsp. mexicana
gttgttttcagcttgtgtattcccactcaggggcggcgtttaccgtcgccggtgagatcctagctaggaagaaatggagctctctcgcaagctcttcacggccgtcctcctcgtcatgctgctgctgctgtccgcagaggtcgggccggtggcggtggcggaggcgcggacgtgccagtcgcagagccacaggttccggggcccctgcctccgccggtccaactgcgccaacgtctgcaggaccgaggggttccccggcggcaggtgacgcggcttccgccgccgctgcttctgcaccacgcactgccactgattcgctcgcccagcggcccgctggcgagagcctcaagacgggtaaggaccagtccatggctccatgcatgaataacaaggggtgaccgcggcttgagttgtgatggcaacgggcgctacctcaagacggtgagcaacggcca

SEQ ID NO: 310647 - DNA, 451 bp, Zea mays subsp. mexicana
caggtaccggtcctttattcctggtttttcacacccgtgttttatccccccaacattgcccgatgttgggggggaatttgacaacgtctgctgtgactaacaccatacagagcagcactgagctttttcttgaggcacctatggggaaacaacagctgtagcgcaggtgcctcaactaacgcacacgtgtgacaattgcctaatggaagaactgtaatgtagagtgactgacttaccccgccaccaaccagtgcgtcaacccgctgtcagggaagcattgcagaacctgacagggagacattacagtgaggaaactggtgccagactaatccaggaatggctgaacaatgcctgaataagggatgcaaacgttggtaataatgctatcgcaccactgtccatgtaccttctggatccacagacacaatcttaacagggaagattgcttgct

SEQ ID NO: 310648 - DNA, 411 bp, Zea mays subsp. mexicana
  unsure (1)..(411): unsure at all n locations
tcgtattgtacctattccagatgaagatggaactgttggtgcacgaggctttgtcactggaagtgctgatcatgatgtcaagttctgggaataccaattggtgcagaagtctgataatgactctaagcagctgactgtaactaatgtgaggaccttgaaaatgacagaagatgttcttgctgtctcgatcagtcccgaaggaaagcacattgctgttgctctcttggattgccatgtcaaggtcttctacatggacacactgaaaccatctttaaacctttatgggcacaaacttccagttctctgtatggacatatcatctgatggagctttgctagttactggctctgcggacaaaaatttgaagatatggngtgttggattttgtgggactggcacaggtctatattt

SEQ ID NO: 310649 - DNA, 532 bp, Zea mays subsp. mexicana
  unsure (1)..(532): unsure at all n locations
ttcccagccaggtatcattccaaaagctagttcggttaccattgcctatcttttttctacagaacttgtaaacagtatctttaactttcagcagacctttccaaaaatacgaatcatcttgctttttctctaccataataagaggttttaccttaactgtatttcgacctaacgatattctgccaaagcccatctgaggtttctaacttccaaatccacttggcaaggaggccaatattcattttttccaagtcaatcacacccaaacccccttgatcttcagggagacacaccgtgtcccaatccgttaagtggtattttttggtcaattgaccgccctgccacaataatctttttctgtaaatatcaatttttttaatcagacttaggggcagaatacagggatagcatgtataaggaacgttcgaaagctgctgtcagcgagtgatcctaccccctaaaggcgcctctggggggacagtcctggntttcatctttattttaactattatttttgagtaggatttttgat

SEQ ID NO: 310650 - DNA, 516 bp, Zea mays subsp. mexicana
gctttaacagtttggaccagatgcccttttgcggttgttcagtgggtgctgctgatggttacttgtatgttattggcggtttttccaaagctgatgccctgaatcgagtttgtagatacgacccttttctcaatttgtggcaggaagtgagcccaatgatgactgggcgggctttctgcaaggcggcatttttgaatggcaagttatatgtcgttggtggagtcagcaggggtcggaatggcttgcttcccctgcgttcagctgaggcgttcgaccctaaaactggattgtggagcgacctaccagaaatgcctttcgcaagagcgcaggtactccccactgctttcttggtcgatgtgctgaagcctatcgccacaggaatggcaccctacaagggaaagctgtatgtccctcagagcctgtactcatggccattcttttttgacattggaggtgagatctacgacccaaatctgaatgcctggtcaacgatgccggatggtctcggcgatggtt

SEQ ID NO: 310651 - DNA, 542 bp, Zea mays subsp. mexicana
tcgtatcagtgcattgccatttcctgagtacacggatcctcgatatggtccgctgaatcttacagtcaagctacctgatggtgcattgaagccagatcttggaccaaaaacttacatcgcttatggattttaccaagagttaggcaggggtgattctgtgaccaagcttcactgtgacatgtctgatgcggtaaatatattgacacacacagcacaagtgccctatgcgcgttatcaacttgagaagatagaggaaaccagaaagaaaatgaaagaacaagatcttcaggaactttatggtgtttcagaactaaacctatcatcaccttttactgattccaggaatataagtgctgatgaaatgtcaaagacctcatgtttggacgtcaatgatgtaccacctgttaatactgaatctgaggtacaaagtggggcaggccagtgttcagattacattgacaaggatagaagttatgctgggatgcataacggggagagaaccggtggtgccttatgggatattttccgaagagaagattctg

SEQ ID NO: 310652 - DNA, 463 bp, Zea mays subsp. mexicana
  unsure (1)..(463): unsure at all n locations
gttttggttcagaattcacaacaatggctggcaggaggcttcgtgatgccgtcaaagctgtacttacaagtgacaacagcggtgaatttaataacattcatgttgttcttgcggggctaacaaatacatattcgcagtatattacaacttttgaagaatatgagatccaaagatacgaggtatgtatatgcgcggctcatttgatgttcagtctgagaacataatatagaatggtacaactatagctagcttgatgctcggtggcccttgtgcaattaaattatgtcatttttaactgccttagtagcaacatgttctgggcatagctgaattggcactgccattaagattcaatcccttttgttttcatgcttttccccgcatccctgccattctagaattcaagcaataataggtctgcactgcatggtcctcttcgatcntgttggaggggggtacactg

SEQ ID NO: 310653 - DNA, 357 bp, Zea mays subsp. mexicana
gaccggtccggttttcgtttcgacttacgcgcccggcaaatacatccacccggggagcaacctggccaccgtgggcttgggcgccaacctcttcgaccggccgcagcccaactcccccaccgtctacgactggctctacagcgacgagaccaggagcaaccaccgctagatcgggcgagatggatggacagtgaagaggccatgtttgctggtccttgtggttatctaaaacgcatgcatgctctattatagctagtcatcactatatatatacttgtgtttctgtattgctgctctcgatctgctggtgttcgaggataaagactccgccgttaaagccggcctatgacacggagt

SEQ ID NO: 310654 - DNA, 476 bp, Zea mays subsp. mexicana
  unsure (1)..(476): unsure at all n locations
tatctttgtcaagaccttgactggcaagacaatcacccttgaggtggagtcctcagacaccattgacaatgtcaaggcaaagatccaggacaaggagggcatcccacctgaccagcaacgtctcatctttgccggcaagcagttggaggatgggaggacccttgctgactacaacatccagaaggagagcaccctccacttggtgctgcgtcttaggggtggtatgcagatctttgtgaaaacccttactggcaagaccatcactcttgaggtggagtcttcagataccattgacaatgtcaaggccaagatccaggacaaggagggcatcccgccggaccagcagcgtcttatctttgccggcaagcagctggaggatggacgcacccttgcggattacaacattcagaaggagagcaccctccacctggtgctgcgcctcangggaggaatgcagatcttcgtgaagacattga

SEQ ID NO: 310655 - DNA, 451 bp, Zea mays subsp. mexicana
ctccatgtatgtcgcccagctgaggagagtgggcaaggggcacggggtgtggcacttcgatcagatgctgcttgaggaagaggcctaaaaagaagaacggacagatgaatgaaggaaacaagtgtgtaatgttgatcaggcggaggaataatgggtcaactgacaactctgggtcggtggatttgtagttggtttgggttttttagttgtagaacggtgttgccctcctagagagggatgaacacattatgcatgcgatgtgtcagttcggtcggtgctatgctcgttgggatttgattgtcggaaataaactccctaatctatgtcttggtgatgaagttgagaaagccctgcgggtgtaggtggattttgagaggtttttcttcagttggttaggttcgctgttgcctacctcatttgcccctaatcatcatcgccgtaatttatttat

SEQ ID NO: 310656 - DNA, 449 bp, Zea mays subsp. mexicana
  unsure (1)..(449): unsure at all n locations
cggttgtgtttgctggattctatccccgaggatagagattgatgggtaatagttttgatagaaaactcgtatgttaagttctctagttgatgtgatgcggctcgattcatcattgctctcacatcaatgttttcggttccctttttactctcccattttcatagagaaagatgttctgattcagttctctctgaaaaggaggggcccttagggacacagtagtaccattttcattgtgcgaaaggtcgtgtcctggtagcctctctgctgtagacggtctcattggtaaattcttccatttctgaaattgtcaaatcgagattgtgtgggtgttcagtctactctaccgctcatgaaaagaattcgtttggtagaaccaagtctcttttgggagcagattggatttgattttatatagntactccatgatgatgatgactagatggagt

SEQ ID NO: 310657 - DNA, 192 bp, Zea mays subsp. mexicana
cccattcgttttccattcctggctattattgtgaaaggacttaagaaatactcaacgttcgagatccaagttgtggacgacaagaatgttcgatgcccctttctagcattaaattttcaatcctgtacaagggtgaagccatatatgtgctcgatgccggagaaactcgaacgatggctgggacagcatcca

SEQ ID NO: 310658 - DNA, 457 bp, Zea mays subsp. mexicana
tttggttgagccggcaggtgcgcttctccaagcgccggagcgggctgttcaagaaggcccacgagctctccgtgctgtgcgacgccgaggtcgcgatggtcgtcttctcctacgtcggccgactgtatcactacgcctccctaggcaccagcattgagaaaacattttgtcgctactgggaccttgccaacacagacattgatctcaatatcgaggcgcgagactcgagggacaactataatacacagtttcctgagaatggccagccagctgaaggctcgttatctgacctgctaattatgatggatcaatggtctatggaagaaaatctgaatgggctgagcatggctgggatagcaggctcggaggaagcattaacagtcgctctggcagttatcacgaacatgctggcgatgaatgtgactgggtgccgtgtgcctaaacctgaagcacacac

SEQ ID NO: 310659 - DNA, 292 bp, Zea mays subsp. mexicana
accgggacacggaatgtgccggcccgacgccacgcgtccgtctttttcttacaccggatctgtacaagccgacctttgcgggcttccacgacgccgacggctacagcggcaggatagggcttagaagctggagcgatagacgcgcgatacagagcttcttagcgggacgctagcagcgaacgactgaacggattgaccatacacaggagggtactctgggacgcctcacccaacggatatggcacaggtcaggtcagctgaagggcactgcccaccaacaggttgggccatt

SEQ ID NO: 310660 - DNA, 365 bp, Zea mays subsp. mexicana
ccggggccactgacatgacctggataggttattaatctgaacgcctctaccgacacaccacatgttctactggagcgaaaacaaggcagcacagctaaaatggccgtgatagaggacctggttcaacggaaagacctggtggctcacccggactaccacaccaactactacgaggaaactgtagaggctgaacagcccaaaacgatcggggagataccacaggctcgggcatacagatctgcgcaactctgcgagcgcagtgcatgctcgcctaccgtactaaaggacagcattgacaggggacaagggggtgagaaagccgtgaaggagaatatacagggccagatagcaagagctaaacaaga

SEQ ID NO: 310661 - DNA, 511 bp, Zea mays subsp. mexicana
cgcgatgtcttttcgatcccccactcccctcccctcgctgcagggtgcagatctatgtgaagacgctcaccggcaagactatcaccctcgaggtggagtcttctgacaccattgacaatgtcaaggctaagatccaggacaaggagggcatccctcctgaccagcagcggcttatcttcgccggcaagcagcttgaggacggccgcacacttgctgactacaacatccagaaggagtcaacccttcatttggtgctgcgccttaggggaggcatgcagatctttgtcaagaccttgactggcaagacaatcacccttgaggtggagtcttcagacaccattgataatgtcaaggctaagatccaggacaaggagggcatccctcctgaccagcagcggcttatcttcgccggcaagcagcttgaggacggacgcacacttgctgactacaacattcagaaggagtcaacccttcacttggtgctgcgccttaggggaggcatgcagatctt

SEQ ID NO: 310662 - DNA, 505 bp, Zea mays subsp. mexicana
cagtgttttttctcccactatggttctaaccagcaatagtggggggtttagaagaccttgtgcgaggttttatctgtgagtgaagacgctacatacgatgagatccgcgcagcatacaggtctgccgctctgaacacacaccctgacaaagcgcagacaactctcgagtcatcatccgtgccttccactgagcaacaggaattttctagcgtgcagaaagcatgggaagtcctacgccatcctacatccagagcagattatgacaagcagctgcagtcatccagacagagcatcgagatcatcgcatccgaaatccaagtcggggacatgatcgtcgagagcgctgctggtgctctagagctgctgtacccatgcaggtgtggcgattatttctccatcacttcgggtgaacttagcgggatggggattgtcggcactcgggatggagaagaagtagaagagctgcaggcgtcggattctgcatcggcttctgtcgttctgggct

SEQ ID NO: 310663 - DNA, 440 bp, Zea mays subsp. mexicana
  unsure (1)..(440): unsure at all n locations
caggggtaccacaaccggcagagcttttttaaaaanaagggcggtttctaaacaacaaactttcgggatgaagggggttttccccctcacattcacgaaaacaaagaacgcctctaactatcgaaggcagccatagaaaacgctggctacactcgaaaggtgggcattggaatggatgttgctgcttctgagttcttcggggagaaagacaagacttatgatcttaacttcaaggaggagaacaacgatggctcaaacaaaatttcacgcgacagcctgaaagacctgtacaagtcctttgtttatgagtaccctatcgagtcgatcgaagacccatttgatcaggatgactggagcacttatgccaaactcactgatgagattggacacaaagtgcacattgtatgagatgatcttctccttaccaaccccaccagggt

SEQ ID NO: 310664 - DNA, 436 bp, Zea mays subsp. mexicana
atgcatttggtagttggccaggacgcctcatgcaagctaggagggatttttttcttgttgcggaaccttgtaggacaggggcatcatgttttaatattttcacagactcgtaaaatgctaaaccttattcaggaagccataatattagagggctatgcgtttttgcgcattgatggcaccaccaaggtttctgatcgggaaaggattgtgaaggacttccaagagggttgcggagctccagtttttctgctaaccacacaagttggtgggcttggacttaccactcaccaaggcaactcgcgtcattggagttgatcctgcatggaaccctagtacagacaatcaaagtgttgatcgcgcttaccgaattggacagactaaaaatgtgaatggataccgtttgatgacatctgcgaccattgaggaaaagatatac

SEQ ID NO: 310665 - DNA, 424 bp, Zea mays subsp. mexicana
  unsure (1)..(424): unsure at all n locations
attcgtgttcctatttcaaatccttcnatcgcgcaggggggcccgtcctatcgcaggtggcgcctatggcccgcacgaagcanacggcgaggaagtcgaccggcggcaaggcgccgcggaagcagctggccaccaaggcggcgcgcaagtcggctccggccaccggcggcgtgaagaagccgcacaggttccgccccggcaccgtcgcgctccgcgagatccgcaagtaccagaagagcacggagctgctcatccggaagctgcccttccagcggctggtgcgcgagatcgcgcaggacttcaagaccgacctccggttccagtcctccgccgtcgccgcgctgcaggaggccgccgaggcgtacctggttggtctattcgaggacaccaacctttgcgccatccacgccaagaggggcaccat

SEQ ID NO: 310666 - DNA, 544 bp, Zea mays subsp. mexicana
cgactgttatgtctacgccgacgaggactacatcaatgacgcggtgcgcttaaacgtcacgctgcgcgtggaggcgctgttcccaaagatcgacgtcgaccctgccgatggcgccgtcacgggcgctgagctggccgcgtggaacctcgcaaatgcgcggcgggaggtgctgcaccgcaccgcccgggagctcgagctgcacgaccgcgatcacgacggccgggtcgcctacggcgaatacgagcggcccagctgggcctggcgtttcgacgatcataactcaaccgatgacggagtgggatggtggaaagaggagcattttagtgctgcagatatggatggtgatggctttctaaatcttactgagtttaatgactttttacatccagctgatactaccaacccaaagctaatacattggttgtgcaaagaagaagtcagggaaagagataaagacaatgatgggaagctcaatttccaagagttcttcaacggattattttactcaattcgacactatgatgatgaaggcttaacagatgac

SEQ ID NO: 310667 - DNA, 557 bp, Zea mays subsp. mexicana
ctcgtttcttattatcgaccgggaagaacggagcacaagcggggccggtttgtacgaccgggggcggtcttcactatggccgccgtggaggtgtgcgtgaaggccgccgcggggaaccccgacacgctcggcgattgcccgttctcgcagagggtgctgctcacgctggaggagaagaaggtcccgtacgaggtgaagctcgtcgacctcggcaacaagcccgaatggtttctgaacatcagcccagagggtaaggtgcctgtgttcaacggtggagatggcaaatgcattgctgattctgatgtaatcacccaagtcattgaggagaagttcccgactccttctttggtcacccctccagaatatgcatcagtgggatcaaagattttgccagcctttgtcaagctcttgacgagcaacgatgctagtgatggctcagagaaggcgcttctggatgagctgcacgcactggatgatcatctcaaagctcatggcccctacataaatggggagaacgtgtcagcgactgatcttagcctggggccaaagctattcca

SEQ ID NO: 310668 - DNA, 349 bp, Zea mays subsp. mexicana
ggtaggttcgattcaacaagggggactggggtccaggagcgggttgtttggatcaagggccaggggaagaaaccagcgacagaaaagggaataaacgacccattgcatatgcggcagaccatgatgaggggaaggtacccacagcaccaggcaaagcgtcaagaatcaatgatcggtgcatgggtggcgaggttggaggaagagacagaggggaaggatgggaaacaaaagcgacccatatgaagggcttcggacgacgacaggaaccttccggaggtgcacaaggcactctatgaaaaggtcggagtatgcaagcacacacataagaacggatacaaggagcgaatga

SEQ ID NO: 310669 - DNA, 483 bp, Zea mays subsp. mexicana
  unsure (1)..(483): unsure at all n locations
gtttgtttgggtcccaaatccgagccgagctgcgctccccgcgcgaccgacacccaggtcttgtcgtcccatgcagatctgctcctcctcctgaggccatccatggatccgtggcacacaggaagttaagattaatctagacatgataatctacatgcttatgagggcttacataagttcatcttctctacggaaatctgcattgagggctcttgcaaaggcactgatgacagatcaactcttctacctaagagagcagtttacattattcggtccaaacaagagtggccatatatcattgcaaaatatgaagacggccttgatgaaaaattcctcgggtgcaatgaatgattctaggattcttgactttgttaactcaatatgcaatatccaatatggcatgattgantttgaagagttctctgctgcgaccattagtgtatatcaaatggaaggcctggagacctgggaagacatgctcac

SEQ ID NO: 310670 - DNA, 488 bp, Zea mays subsp. mexicana
  unsure (1)..(488): unsure at all n locations
atttgttgctcccaaagccgaacacctctcctagcgtgcggttttaatgaaaccacgcgcgccataaacaaaaccccggngggcgcgccggagccaaacaggatcggcaggatctgcgtcttctgacggcagaaaccccggcaatcgcgccggctacggggacgcagcgctcgacctcggcaaggagctggtggcgaaggggatcgaattggtctacggcggcggcagcgacgggctcatgggcctgatcgcgcagacggtccttggtggcggctgcagtgtcctcggagtgattccgagagcactcatgccgcttgaggtgtgtattaaaattattaactgcccttttctactgttctcttctttgcgcgacactccattgatatctggcgctagcgttggagaagtcaaagttcgctcccacacgcacgagaggaaagctgagatggcaccgcaagctgatgccttcatagcacttcctggaagga

SEQ ID NO: 310671 - DNA, 434 bp, Zea mays subsp. mexicana
tagctcccatatccgctcccctacctctccagcatctcccgtctccgtcgtctcgtctccgctcctcacctcgccagccatgggcaagatcaagatcggaatcaacggtttcggaaggatcggcaggctcgtggccagggtcgccctgcagagcgaggatgtcgagctcgtcgccgtcaacgaccccttcatcaccacggattacatgacctacatgttcaagtacgacaccgtgcacggccaatggaagcacagcgacatcgccctcaaggactccaagacgcttctcttcggcgagaagccggtcaccgtctttggcatcaggaaccccgaggagatcccgtggggtgaggctggtgctgagtattgtcgcggagtccaccggtgtcttcactgacaaggacaaggctgctgcacatctgaggggtggtgcc

SEQ ID NO: 310672 - DNA, 387 bp, Zea mays subsp. mexicana
ctaagatccaggacaaggagggcattccaccggaccagcagcggctcatctttgctggcaagcagctggaggatggccgtacccttgcagattacaacatccagaaggagagcaccctccacttggtgctgcgtctcaggggtggcatgcagatcttcgtgaagactcttactggcaagacgatcacccttgaggtggagtcctcagacaccattgacaacgtcaaggccaagatccaggacaaggagggcattccaccggaccagcagcggctgatcttcgccggcaagcagctggaggatggtcgcaccttggctgactacatcatccagaaggagagcaccctccacttggagctccacctcatgggtggcatgcaaatccttt

SEQ ID NO: 310673 - DNA, 476 bp, Zea mays subsp. mexicana
tttgaaactacatttgcacagaagcctgaacttcgaaggacatcttcatttgacaggacatgggaggaaacagttgctgagtctgtagctaacgaacttgtttcacaaatggagggtcaaacaaatacccaatatgaacctcaagatgctgctaaggattccaagttattacgtcctgtccgctctacccgcgaggataagaaaattgtagagcccaatgagttgaaacaatctagacctcaaaaaatgatggacttccgcaatataaaaataagccaggttgaactgcagctcacatatgaaggattgccatttgctgttagtgatgtaaggctacttatggataccttccatcgtgaggattttacaggaacatgggcaagactgttttctcgagtaaagaaacatattgtatggggtgattgaaagtctgttacaggcatgcagggtaaaaagtttaaagctaaatctagcag

SEQ ID NO: 310674 - DNA, 468 bp, Zea mays subsp. mexicana
tttaaaattcttgtatcttccagtgcaacaacttgcccatccaaccggagcgcttcttgttttgtggattacaaatagggagaaactgcgggcatttgttgagaaaaaactgcttccttcttggggagtggaagattccaccgtgttttattggcttaaggtgaaacctgatggctctctaattggtgatttagacttgttccatcacaggccctatgagtgcctcctccttggctacataaatgttaatgcaaatgctaagaaagggtcaaatttcaagttgttagaaagaagccaagtaatcatgagtgtccctggtgctcactcaaggaaacctccccttgagaaattactctcagaatatattccaggtcctaaaccttcaagatgcatcgagcttttcgcagagagttgtttcccagatggacctcttggggaaatgagccgcttcatttccaggataccatg

SEQ ID NO: 310675 - DNA, 351 bp, Zea mays subsp. mexicana
agttacgtctggtctttcctgttaacgtgcaaggtccaatactgcagcctctatgaccaaggcgtacacaacactgttccaaaccagcttctgcgtgatggccccggcgggtcgtacaggccggcgtacacgctgtcagatgggagtcttgagagggctggtcgagcgaagaagaccgggaagcgagatggctcagctaatggcacgaagaacaacggcaatgaaatggaacagtagccgatcgctggagaactctggttgtttccaggtttattgtgaagaaaaagaatttcgtatgaaaaaaatggcaactgtacatgtgcgcgttcgaaggcaactcacttactactt

SEQ ID NO: 310676 - DNA, 482 bp, Zea mays subsp. mexicana
tttttgattattcgttgtcatagtaaacacatcaagtgtgctatttaaaagcgatacgacaacatttgagtatggaagtcaataaaatgaggataagaatgagaccatatcccaaatgtgttagtgattgggctaccacatcatttttagtcttagccattccaataacttactggtttgaactgtggattgtagtaccggcattgttttcaaaaaattcatttttctataaatttaattttgttcttgggacattcatctttatcagcatacttagtaatttgtttatacttatggtatgtaatacaagtattgttggtgaacgaattattcgaccatccaaagcaaattcatcattatggaaattttgttcagtttgtgaatcgataacgccgccgcgttcttggcactgttcaatatgtggagtatgtattctgaaacgtgatcatcattgtatgtctactggctgctgtatcggtcac

SEQ ID NO: 310677 - DNA, 431 bp, Zea mays subsp. mexicana
tgtggagccgagcctggtcagggtagccaagcccatcctggtcctttccgggcgttttctccctccgcaccggggttccggcaatggcggccgtcggttcccgccttgggtggtttatacttttcggtttaaatggggcgggtttttttggaaggcgcccaaggcttaatacaacggcctgacactttgggagagcgggcacaaaagggcctactcccccgccgagaggccgctgtagattgcgcaaacagacgccatcatggagatcgttcatgggctcgtagggttggggaggtctccggtctctgcgactcttccacagattggatccaggttgttccttacgtggggtgtcttgtggagttttcctgagacccagtcacatcttcttgttactaccctggtcataagctggtctatcactgagatca

SEQ ID NO: 310678 - DNA, 420 bp, Zea mays subsp. mexicana
ttctgtcagaggcctcaagcacaacatccaccaggatcgcctggactcgcacacgccggcgtcggcgaccaagatctcgatccccatctcttcgagcgaggcggcgctgtatcgggaagggtaggtacaaggtgtgggccctcgcggccatcgcgctcctagcgctctggtccatgttcgccgactccgtcacgctgcgcttgtcctccgtcgatctcgccaccacgttcggggacgcgagcgatccgctcatcgacgaacttgatcccctggagatggagcaaagagaaaagctagtgcgccggatgtgggatgtgtacacacgcacagataatcatgtacggctaccacggttctggcaagaagcatttgaggctgcatatgaggagcttgctggtgatgatatgcttactactgatg

SEQ ID NO: 310679 - DNA, 508 bp, Zea mays subsp. mexicana
gtactttattgtgattttttgaaaataataacaaatttcaaaaaaaaaaaaaaaatgaagatccaatccgttggcaagctttccatccccgacaaggtcaccgtcaccggcaagggccgcatcatcaccgtgaagggtacccgcggcaccctcaccaaggacctcaagcacctcaacctcgacattcgcgtcaacgccaagaagaagcttatcaccgtcgtccgctggttcggccgccgcggcgacctctgctgcatcaactccgccatcgccgccgtcaagaacctcatcaccggcgtcaccaagggcttccgctataagctccgcttcgccagcgctcacttccccatcaacgtcaccgttgagggtcaagaagtcgagatccgcaacttcctcggcgagaagcgcgtccgcaagcagcaggtccgcccgtccgtcaaggtctaccgtaccgacgtcaagctcaccaaggacgagcttgttctcgagggcaactccatcgacgacg

SEQ ID NO: 310680 - DNA, 385 bp, Zea mays subsp. mexicana
gcgaggagttgttatggctgcacgttcactcgacacgactagtgcagaatggcgagcagaatataagacgggccggtcctgacgctcttggtgtactctgcatatctaatcccaaggtaaaagatgtggacacactaagcacagtgagacatgacgcatacacacgatgtcgataagggtgcaataatctaatagggtctgattggggctggcacacacaatgccagaatagctggcatgcttagcaatctgtcaagatattactacaaagaagctgctcatctgatgagtggcaaaaacgcccagggcctaggtcacctcagagagggcttgacgaccatttcctcataccatccggatagactggttctttgcccgatggcac

SEQ ID NO: 310681 - DNA, 409 bp, Zea mays subsp. mexicana
ggcaccggcccggaatcccgggggcgccccacgcgccctaatatgtgtttcctctgttcagaacaaggagaaatgcatctttctaaagacaatgggggatggacaggctatgctctattcgagttcagttaatggtaaagaaaccaagattccattcccctggctagttttcaatgagaaggtgaaagtgaattctgttttcctccgggattcaactgctatatctgattctatactgatgttattcggaggctgcataaaacaagggggcttggatggacacttaaaaatgcttggaggttatcttgagttcttcatgaatcgcgatcttggtttaacttatgtgagtttgaagagagaaccttggaaatttaatccttgcgagcttcaaaacccaaggatggatatc

SEQ ID NO: 310682 - DNA, 431 bp, Zea mays subsp. mexicana
agtcgacgctcagccaagacactcgaacctctgggccaaatttttgatccaatgctcgttgacacgatgactagaacccgacctggccatgaggttgttccgacccaataacgggacagatccgttgtccctgaacctgtgggacccatgagagggcttgccattcggctcctgaaggagaacgaggctgttacggtcgatcccgcggaccatctcggataccgctaccttcggtggcgcgcggagcgactgtaccgagactccagaggcggacgtatccacggcagacgtaccgtggctgaagaaggacgacgtcaaggtgaaagtcgagaacgggagcgcccttagatcagcggcaagctgctaaaaggtgcaggaggagaacgactgacacctggcacttggtggaccggagcaaagggaggtaattt

SEQ ID NO: 310683 - DNA, 527 bp, Zea mays subsp. mexicana
  unsure (1)..(527): unsure at all n locations
ggtggagaaatgggaggcggtggtctaggcccgtagtacacaacgataaaggtagcgtcgttggcatagtcgcgttcaagtacgcggacctgcaggacgcgacgaagaaattctcggagaagctaggcgaaggtggctttggctccgtgttcaaagggtgtctaggtgactcgactactaccgtagtagcagtgaagaggctggacggcgctcgacagggagagaagcagttcagggcagaagtgaactcgatcgggatcgtccagcatataaacctagtcagactgatcgggttctgctgcgaaggcgacaggaggctgctcgtgtacgagcacatgccaaacggctccctggactcccatctgttccgaagccatggcggcgccggcgccggggcagctctggactggaacgttaggtacaagatagctgtccgggtcgcgagaggtctggcgtacctgcaccatggctgccgngactgcatcatacactgcgacatcaaaccgcagaacatactttctgacgcg

SEQ ID NO: 310684 - DNA, 520 bp, Zea mays subsp. mexicana
agcgagtcttacgtcgacctccgcgccgaggacctggaggtggtgctccgggaggcgtacgcgcacccggccgtcgagggcgtcatcttctggggctgcatgcagggccacatgtggcgccaggacgcgtgcctcatcgacgccgacggcaacgtcaacgacgccggggagagattcgtcgatctccggagggagtggacatcgcacgcgcgcgggcagatcgacagcgctggacacttcaaattcagggggtaccacggcacgtacatcgtgcagctcgcgacggcgacggggaaggtgcacaagacgttctccgtggagaaaggggacacccctctcgtgctggacatgaacctttgacgatcacttctaccgttccctagttatatacagacacatatggcattgatttgacccaatggaacacaaacagaaagcagcactccgatgctagctacatgtatctatctatgattggtattgcaaggcaaacttaaggtattgtactccttaagaatta

SEQ ID NO: 310685 - DNA, 518 bp, Zea mays subsp. mexicana
tgatttgatttactttgattccatttatgatgatggggatggattatggttataattatgatctctggcatctccctgttgggggtcttcttcttcgccgaaggtcctcaaggcgaaaacaccttcggcaagataatataaaagcatatgcgacatgatgatacagatgaaagccgatgctatggctaaagaagcttcggcctagtattatgacgaagccgaaggtcgtcaccgactcaaggggaaagactatttagtccttgattattcatattatgattgtaagtatagtcagggacatgaatgtaattgtgttcgggctgcgtcccgtgcctataaatagatgaatagtacccacgtactgttcacgctggattctaatctctctctcgtgtcatctttgcattcacaccttctggcgaaccaaaggtattattggattatgaatattattaatggtgattcttctctatggatataaatataaattaactgcgaagacataatcattatctatg

SEQ ID NO: 310686 - DNA, 475 bp, Zea mays subsp. mexicana
aaggtgtgtaccctccacctggtgctccgcctcaggggtggcatgcagatttttgtgaagacattgactggcaagaccatcaccttggaggtggagagctctgacaccattgacaatgtgaaggccaagatccaggacaaggagggcattcccccagaccagcagcgtctgatctttgctggcaagcagctggaggatggtcgcaccctcgcggactacaacatccagaaggagagtacccttcaccttgttctccgcctcaggggtggtatgcagatctttgtgaagaccctgactggaaaaaccataaccctggaggttgagagctcggacaccatcgacaatgtgaaggcgaagatccaggacaaggagggcatccccccggaccagcatcgtctgatcttcgccggcaaacagctggaggatggccgtaccttaactgactacaacattcaaaaggagagcacccttcacc

SEQ ID NO: 310687 - DNA, 280 bp, Zea mays subsp. mexicana
gcccggcttttttcttatgccggcgcgctcgatgcgcgaggcgatcacgcccggtcggcccaccaggatcggccgggccatgccttcggccagcaccgcctgcaccgcacgcagcacccgctcagactcgacctcggcgtagacgacacgcgccgggttgcgcttggccgcggcgaagaccgggcgcatgaacatgccggtctggcagacatagcgggtcagcgagccggggcaggcgtccagatcggcgatcgggcgctcggcgacacccgactcgacc

SEQ ID NO: 310688 - DNA, 234 bp, Zea mays subsp. mexicana
ttcgaggatctcaagtactgcctccccggcacctccatagtcgtcacggccaccaacttctgcgccccgaactacggccttcccgccgacgccggcggtcactgcaacccgcccaaccatcattttctcctccccatccagtcgtttgagaagattgcgctctggaaggccggcatcatgccaatccagtaccgccgtgttaagtgcctccgtgaaggtggtgtcaggttctct

SEQ ID NO: 310689 - DNA, 367 bp, Zea mays subsp. mexicana
cctatgcgaccggccgcgcagagcctcggcgccatctggggcgtatttgctagtcaagggcgttcatagcgacaactacgcgcgctacggccgaggttccaatgaggccagcgccgggtacttcaccggcacggggctggccgccgagatgatcggctccttccggcagctccaaaccgacccgaacgtcagcggacctatccgcgccgttggtgattcccacggtccggtgcgggcgaccgttccgaacgggttagatgtgttcatggtgcacctggcgacgaacccgatcactggcactgggctcaacccggagaggagcctcggcgccgccgccgtgtacaacaacagtaaagcctggagcgac

SEQ ID NO: 310690 - DNA, 387 bp, Zea mays subsp. mexicana
ctctctgggcactccggcggaacgaagagggggcacttataaaaggaacaaggcgtctttgcgggatttaggtatacgagaatgcagatcttcgtgaggagccccagcggcaagatgatttgcctcagggtccaacctgacgataccttgcatacagttaagaaaaagattttagaaaaataccaccttgtttttgaaggagcgcaaatggaggataacctcacactggctgattataacatccagcatcaatccacgctggacctccaagaaaagatgcaaatctatgtgaaggagacgctaaaaggcctaaccatcactttggaggtggaaagctaaaatcctatggacatcataaaggacaagattgaatacaacgagggattt

SEQ ID NO: 310691 - DNA, 357 bp, Zea mays subsp. mexicana
cggactcgtgggcggacgcgtgggctccgcctcccgtccggaaggtttatagtttttaagcggctttgtcggaccaggctacccaacccactgttcttcataagctcgggggctcggttcctaccagctggatcatatctgaagggactcgggggccgctacacatgctgcagctgcgtgatcttatgaacgctgaacctcactggagacaagcatggcccaaagcctttgctaccgaatggttgatggattggtggcatcaatgtaccatggatggacgccgagtgctgggatagtgtttatgcttgaaaaggaggccagaacttcatgaatgatcacatgatggggggggtctca

SEQ ID NO: 310692 - DNA, 328 bp, Zea mays subsp. mexicana
aggttacccccgcagaagaagcgaagccgttcccggggggggatgataaacgaggaggggcatttctccacacgcggacctcgaagaccacctgctgggcgacatcgaaggccagcacatcagcgccggcgtcatcgccgggcacgacgggcgcgtctgggcacagcccgagaactttccccagataaagcctgaggaggttgctgggatgataaaggactttgatgaacctggaactatagcaccaaccgggctttctgggggagggacgaagcacatggtgacccaaggggaacctggagttggcatccgaggaaagaaggggacc

SEQ ID NO: 310693 - DNA, 380 bp, Zea mays subsp. mexicana
cccatttgtccggagatctggtcggatgagccagccaagacgcgcaccaaagagattgccagcatcccctgcctgatccctatgggcattgaccaggacccttatttccgtctgttgagggacaatgctcataggatgcggttcccgtcgccgaagcctgctctcatccactccaagttcctgactgctttgcaaggtgctggcggcaagatgtcctcctcaaaccccaactcggccatcttcatgaccgacaccgccaaacagatcaagaccaagatcaacaaacatgctttcagtggtggccaggagactcttgagcttcagcgtgaactgggtggtaaccctgatgtcgatgtctcatacatttacctgacctattt

SEQ ID NO: 310694 - DNA, 501 bp, Zea mays subsp. mexicana
ccggctaccgcccgcgccgtgcccttgtccacggtggggggggctcttgatccggcgcacggggaccctcctctcctctcccggcgacaagccggcgcccagcaaggtcgaggatgtcatgccgatcgccacggggctggagcgcgaggagctcgaggcggagctccaggtgagaggtcactctgggttcggacttcggaatctcaacgtgattccggcggcatttgatgtggattttgatgcgttttctccaggggaagaagcggccccttcggtactaagattaacttgtgctaagcacaagtaatgacacaatatttcactccagtatggacatggctgtaagtaaaaaagacccaccagatacatctcttgttacttatattaatatccgaaactacaaagtatttgatatgtgcatgcttaagctgcattacctgaagcttggtccaaatacaccagcagtcagcccgacatgaaattcggaggggatgtttataa

SEQ ID NO: 310695 - DNA, 478 bp, Zea mays subsp. mexicana
  unsure (1)..(478): unsure at all n locations
cgtttatacacacaccgtacggatgcggcacatggggtgccctctggctgacagaccccaacaactggcccaccaacggcgaaatcgacatcatggaagccgtcaaccaagcggccagcggcaacataatggccctgcacaccaccgcggactgcaccatggccgacatccgccgcaacatgaccggcgccgcggggcagggcgactgccacaacgcgaccaacttcaacacgggttgcaacgtgtccggggcccccgccacgtacgggcccgagttcaacgccgcgggcggcgggatcgtggcgatggagtggcgggacgaggggatcagggtctgggtgttctcaagaggcggagataaggggggcgatccgttcccggcgcagggggtgccggacccgagcacctggggttcgccgctggcggatttccctgcgacgagttgtgacgtgnggagtcactttcggaatcagagcat

SEQ ID NO: 310696 - DNA, 524 bp, Zea mays subsp. mexicana
  unsure (1)..(524): unsure at all n locations
agtggaactcctacgctgccgcccgctggggtgttgtcgcgggcgatggcttcgggatcgacatcgagacggccgtccgctccgccaacgaccgcgtcgccggcaccttcggcgtggtctcaaaaggtgttaaagggttgccaggcagctttaagtctacaacaagcagtgttccatctggcagatctctcatgtatttcggtctgtttcttggtagtggtgtattcctagttttcattgcattcacgatatttctgccagtcatggtgataatgccacaaaagtttgcaatatgtttcacggtgggatgtgccttcataattggatcattctttgcgctgaaagggcctaagaatcagctctatcatatgatttccaaagagagattacctttcaccatgggatttgtcgggagcatggctgctacgatctacgtgtcaatggtgctncatagctacatactttctgttttcttctctgagcttcaaggccttgctctagcatattatgccatctcatacctt

SEQ ID NO: 310697 - DNA, 359 bp, Zea mays subsp. mexicana
cgcgctttgtagtccctctcctctggaggtggcggcggggggccctttttattcttcttcgtcctgtactacatatatatagggtgccctcgcaaattgtcactgacgttcattcggcttgcttgattgttccaggtattcgcagtcgaccgtgtcctcggagcacgatgaaggttgttgctgcctacctgcttgctgtcctcgctgggaatgccagcccctccgctgaggatttgactggcatcctcgactcagctggctgcgaagctgacaatgaaagggtggaactgctgctgtcccaactgagcggctagggcatcagcgagctcattgccgagggcagagagaaccttgcttca

SEQ ID NO: 310698 - DNA, 542 bp, Zea mays subsp. mexicana
actttatcgtcgccgggctgcgcgccgccggctgcaacccacgccggacgctgttccttgacgacagcgagaggaacatcgccgcggggaaagcgctcggcctccgcaccgccctggttgagtcagttcccccgatttcgtcggacaagtacatgcctgacgagtgtatgccggacggactcaaccctacaaccaaacaggttggcaagagggcgaggagcaaggaagcggactacgcgctggagagcatcggcgcgctacggcgggccatcccggagatctggggcgaggccgctgaacgctcctcggaccgcagcagcatcgacaagctgccggtgccggccgtgagcgtggtgaggtcgacgacgtccgacctggactccatcatcatccagcccacgtccatccacgcctaatatataacctcatcgtccctagctccccacccccaatcagaatcagcgggtgcgtgcatgcgtgcgtgtgtgaatatgtatctctctctgcctgcctgactgacaggcgtgtacatttctgatcag

SEQ ID NO: 310699 - DNA, 438 bp, Zea mays subsp. mexicana
ctcttggtccgtcctctactctctagctaaccgggggcggttcggggaggtggcgattggcttttaggacatgctcgtcgagatccacccccgcgagctccgatattgaattgaggggaaaaatcatagatcatgtggcatccatcttgaccataactgagatcaagagatggcattcaagggtaaaacaacttgtgcaaaaaaatatagagtcctaccaagtataggagttattctgccattgggctcacgtgatatatcagatactatgcgagcgctaaagaaggtctcacctggtttgcagacaaaagacacgctttttgtgcagaccacaggtgttccatttggtacaggtgacgaggacaatcgtcctgcttttttcttcaaagaaactgatcaatatattgaggagaagaagttgaaagttgtcactgtcag

SEQ ID NO: 310700 - DNA, 539 bp, Zea mays subsp. mexicana
tgttttgaattctatgaagtttactgaacagggccgcatttttgttcaagtccatttggtcatggaactaagcaggaaaggaaacaatttttgtgatgtttctgctcataacagagaaattctgtatgattctgacaactcgatgctatggaacacactaagcggacttgaagtagcagatagctggaggtccttagagaattttacgatcttcaagaattcaaatggtgaaacagatacaattaggttagctgtcagagttgaagacaccggcataggaataacaaaagatgctcaaatgcgtatttttacacctttcatgcaagctgacagttccacctcacgaacatatggtggaactggaattggcttgagtattacaaaacgtttagttgaattgatgggtggagaaatagggtttactagttaatcaagagttggtagtacattttcttttactgccattttaagggaaacagaggatgtcctggagatatgaaaagatactattctggacctacttccgtggattttcaagg

SEQ ID NO: 310701 - DNA, 427 bp, Zea mays subsp. mexicana
gggccccggggaccgttttcattcccgggcgttcacacgccggctgtgacccagtaggagagatatacagggaacttttagatatatctatatttgtgtttgcatcacgacattggtgggtggtggaaccggaccagcacatggaaccttgtgccacaacttgcactccagcaccatctcaattgaaattaatgctgcagtccactgatcaattgccaattaacatgggattcacaggcaagggaaatacttcaaaacctgaaggattggctgaaatcattaaagctggagcaatgggtttgaagctgcatgaagattggggaactaccccatccgcgatagataattgtttatctgttgcagaagattttgatattcaggtcaatatacacacagataccttaaatgaatcaggctgcgtggagca

SEQ ID NO: 310702 - DNA, 487 bp, Zea mays subsp. mexicana
accaacgccgtcgtgctcacacacccaaacctttttagcgatcaggccccaaggactcgagatgaagtcgagggcacggtccaccgccggcgactccaggctctcggagaggaagaccaaggctgagaaggacccaaacaagcccaataggcctccgagcgcgttcttcgtcttcatggaggagttcaggaaggactacaaggagaagcaccccagtgtgaagcaagtctccgtgattggcaaggctggtggcgacaagtggaaagcccttgctgatgccgagaaggcttcctacgtgtctaaaggcagagaaagctcaaggctgagtccaccaagaagacggacgcttacaacaccaggcagtctggaagacccaacggccccgggtgattgcgcgaagtccaagttgcgagtcaatctcataggcggagtagggtgaccagtgatgtatgacggatgaaactctgtcaagtgtttgcagtcaggg

SEQ ID NO: 310703 - DNA, 500 bp, Zea mays subsp. mexicana
ttttctcatcaccaatgccgtcttgtacggtcgcaccatcttcaagtccatcagaaagttcgtcgtcttccaatcgaccatcaacttggcctccacgttgatcgtcttcttgggtccattcatgggcttcgacttcccgctcaccatcattcaactcttgtgggtcaacttggtcatggacacgttggctgctttggccttcggaggcgaaccagctttgaagagctacatgaaagaacaccccaccaagcgtaacgaggccatcatcagccctgagatgtggtcatacatcttgttcaacggctctttcatcgccgccttgtcggtcatcttcttgacgtgggacccagtcgccgagcacttcactcgcgacggcaagcccagcgaccccgtgttcttgaccgctttcttctcgttcttcattttcatcagcgtcatcaacgccttcaacgtgcgcactcctcgcttgaacgtcttcaatcacttgtggcagaacagcg

SEQ ID NO: 310704 - DNA, 494 bp, Zea mays subsp. mexicana
gcggttgttgccgcacgatgagggcttcttgctcgggctaatgcgggatggccgggtggactaccgttcgtcgccgcggcctgctgggaggctgctcgtggacatgctgagcacgctgctcacgctttgggtctcgctggtgcccttgatgtggttcatacagcgtcagatgtctggtgcgggcggtgctgacaagcgacgcaaaccgaggaagcagagggtgggctttgatgatgttcagggcatagatgaagccaaggaggagcttgttgagctgcttaccgaaatggatggttttgactcggacatgaaagttattgtaatggctgctactaacagaccaaaagcactggatgctgctctttgtcgacctggccgcttctccagaaaggttgttgttggtatgcctgatgtggagggccgcacaaagattctggatgttcatctaaagaatattcctttggaagaggatcacggaataatcagtgatctgg

SEQ ID NO: 310705 - DNA, 555 bp, Zea mays subsp. mexicana
tataggtaaaggggaaacgccagcaggaccagtttgtatttccgggttgacttacgcgtccggtcgtaaacagagagagacaatgttgctacagccgtgacttgttacatgaaacagtacaagacatcaaaggaagaagcaagtgatctgctgtggaactcagtagagcaagcatggaagagtatgaatcatgagtacctgacttggacttcaataccatcctcattgcttattcgtgtgattaaccttgcacggatgatggagacaatgtacaaggagatagacggatacacggattcgaagttactgaaagagtggatatccaagctccttgatcaaccaattgccttctaaggcaccggtcctaagaatgttttcatccatcacgatgataaaagaatctggtccgcccacaagcaccacccctgcacaacaagagtatctggtacacaaaagcagatttcaagtatttggttcaagagcctcagttcttatttagcagtggcttttttgagttgctcaatgtatgttagaaccaggggttcatgatggatt

SEQ ID NO: 310706 - DNA, 491 bp, Zea mays subsp. mexicana
  unsure (1)..(491): unsure at all n locations
acnttttgcaagaagtgtcttgccagtgccaggtgggccatatcaaatcggactgatgcttgtttcatccgtgtaattggaagtgagttagttcagaagtatgtcggcgaaggtgctcggatggtcagggaacttttccagatggcccgctcaaagaaagcgtgcattgtattcttcgatgaagttgatgctattggtggtgctcgttttgatgatggggtgggtggcgacaatgaggtgcagcgtacaatgttggaaatagtaaaccagcttgatgggtttgatgcaagagggaacatcaaagttctcatggccactaataggcctgatacattggatcctgcacttctgcgtcctggtcgtctggacagaaaggtagaattcgggctacctgacctggagggccgtacccaaattttcaagatccatacacgaaccatgaactgcgagcgagatattcgttttgagcttctggcacggctctgccccaa

SEQ ID NO: 310707 - DNA, 493 bp, Zea mays subsp. mexicana
gtctggtgctgtgacgaggtcgatcccattgccagggacattgtagctgttaacacaattgttagaagacctgatggaaagcttgttggctataatactgactatgttggtgctatatctgctattgaggatggaataaaagcatcagaatcagaaccaacagatccagacaaatcaccactggctggaaggctttttgttgttataggggctggtggtgcgggaaaagcactagcatatggggcaaaagagaaaggagcaagagttgtaattgcaaaccgtacctttgcacgagcacaagaacttgccaacttaattggtgggcctgcattgactcttgcggatttggaaaactaccatccagaggaagggatgattcttgcaaatacaacagccattggaatgcatccaaatgtgaatgaaactcctctatctaagcaagcactcagatcttatgctgttgtgtttgatgcggtctacacaccaaaagaga

SEQ ID NO: 310708 - DNA, 334 bp, Zea mays subsp. mexicana
acccgtcttttcggcgctgggagggcacatcaacgggggggttactttaggcctctgaggggttcccagggcctcgctggtgcgcgcgccgctctacatcgttgcgcattgtctcggcgccaactgcggcgtcgggctcgtcaagggcttccagagcgccctctacgtgcgctacggcggcggcgccaacgagctcagcgccggctactccaagggcaccggactcgccgtggagatcatcggcaccttcgtgctcgtctacaccggatgctcccgcaccgaccccaagcgcaacgcccgtgactctcatgtcctcgtgcttgcccctctcccc

SEQ ID NO: 310709 - DNA, 475 bp, Zea mays subsp. mexicana
tttttatacgcccagtacattgcaacttggggggccctatctgtcattgactattgatattctagcaaagggaaggtgttttttcggacctttggcttaaggccttcgtccatgtcgcagtctgaattcgttattttaacaaattaatacagcgaggggctactgttgggggccttcgatttccgaaggtcctcaaaaacatgatttaacaatgtttcccaagtgtaatatatgaacaggtaccttcagactcgggttaaaaccagtcacgatgtggaaagcatggtcgagatgaaggttgatgctgctccgaagctacgcgcaagggagcttcggctcagcggtggaaaaaggaaccgacttaaaggggaaaagcctatctagtcctcgttgggttgtccttaagtcaatagtaaatataaagggcatgaatgtaattttacacaggctgcgctctgtgcctattaatagatga

SEQ ID NO: 310710 - DNA, 554 bp, Zea mays subsp. mexicana
  unsure (1)..(554): unsure at all n locations
gtcctcacgaggatctctgataagctgcaactgcacagcatggccgatatcaagaaagaatccctcgccctgcatgagatggtcatctccagcggcggcgaacctgatgcctgcgtcgacgagatgtcctccttgctcaagaagcttaaagactgcgtcgtcactgaagcccccaccacagagacgcccaacgcccagtctacctccataaagcatacatctcctatcatccctgatgaattcagatgcccgatatccctcgagctcatgcaagaccctgtcatcgtttccagcgggcagacatacgagcgatctggcatccagaaatggcttgattctggacacaagacatgccctaagacgcagcagctcctctcccatacatcactgacaccaaactttgtcctaaaaagcttaatagctcagtggtgtgaggcccacggcatngagcttcctaagaaccaggcaaactcgcgagataagaaagcagcaaaagctctgactatgaccatgctggtttagtatccctaatgaacaggctgaggagtgggagc

SEQ ID NO: 310711 - DNA, 531 bp, Zea mays subsp. mexicana
tcggaagaaggcaaggtagatgccctctaactcctgaagaggtgggtttgatgttgagagcgctgggctacagaaaggatgtccacatttatgtagcttctggagagatatatggaggtgcaaggactctggcacctcttaaagctctcttccctaatctccacacaaaagaaacaatatctagcaaagaggagctggctccattctctaaatattcttctcgcatggctgcacttgatttcattgtctgtgatgaaagtgatgcttttgtggctaacaacaacggcaacatggctaaaattttggctggacgaaggtatccgttgctgctatgtcatcagtggtttattacttgccctgaccatatttcgtgccctctgcaggagatactttgggcacaagagaacgatccgaccaaatgccaaaaggctctatcccttatttttgaacagaggaaacatgtcgtgggatgcattctcctcaaaagtacacatggttcagaaaggatttatgggagagctcaaagagctg

SEQ ID NO: 310712 - DNA, 341 bp, Zea mays subsp. mexicana
cgctgatctacgcgtgagcggcccggggcgcgggcatactggacgagtacacggcgtttaccggcccctttaccagcatctcctaccaccgcctcatgaagctccacgcaagcagcagcaggcacacctacaactgcgacggtcacacttgcaaatacctaggggaagacggcttcacatactgtgttgttgctgctgaagcggtggggcaacaaagctctattgcttgcatggatagggctaaggaggatttcacataaaggtgtgggggagggcaagatgttcctggtgtacctaacagcctcaatcgagagtggggatcaacaacttacagagacaca

SEQ ID NO: 310713 - DNA, 321 bp, Zea mays subsp. mexicana
ttatcttttctcatcgattctctaagagatcgagctacttttgcaccacaaggcccaggatgtcttgcagctgcggatcaagctgcggctgcggctcaagctgcaagtgcggcaagaagcaccctgacctggaggagacgagcaccgtcgtgcaagccaccagcatactcggcgtgcccccggacaaaaaggcacgatgcctagctcgtctaggccgttgcggaatgcgcgaggccgcccactcctgcagctgcggcagcagctgccagtgcgacccctgcaactgctgatcacatggatccacgaccacggatatgatta

SEQ ID NO: 310714 - DNA, 309 bp, Zea mays subsp. mexicana
ttatttattatgtttttgcgtctgaatttaggggggtggttggtggtctttgtttactgttttactagatgcatgtggaagagtcagaagaaatagtttttgcttgaaatggtataccaacgattggatattatctgtgtggacatcagatgttctgggttattggcagtggactttgacagatttatctatgattctttcattagcagtgtcttcagctaatttactgttactattttccagtatacaaaggcacgtacagctaggggtgggtagaatcattttagatctgttatctgaggcaaattt

SEQ ID NO: 310715 - DNA, 460 bp, Zea mays subsp. mexicana
ttattccaattttctgcttgcctcatgtgggggggggtgatttgtgactaacatatttatcttgcaagaaccattgatgcaaaagagctcaatgttgccatgagagccttgggattagagatgactgaatagcaaattaggcaaatgattgctgatggtgacaaacatggtagaggagcgatcgactacgaggagttttagcacatgatgactggcaaaatcggcgagagggatagtaaagaggagctttcaaaagcatttcgtattattgatcaatatggaaatggaaagatttctaacattgatatccataggattgacagagagctgggtgtgaatctcaccctcgatgagatccaagacatggtgcaagaggctgatcgaaatggtgacggtgaaatagactgtgacgagtttatcaggatgatgaggaggacccagtttggctactaggggtatt

SEQ ID NO: 310716 - DNA, 469 bp, Zea mays subsp. mexicana
tttactcttgggcaacatctccgtctcctgcgggggggaattcatcattgatagggggcggcttcacaaacctgacaaaaagaatatcacgccagagtatgaacgcaaagcgaaacactgtgaactacccaataaaactgggtgctctatgcaatggagtgcttctcgcatcaaagttcttcacgctcaagatgaactatttaacaaaatgaagcactatgccatgagagaacttctacttgtgatgcacaaccaccatgaatacatgaaccttttgaaagacctaatcattcacggtttgctccgtttgcaagagccaacagtattgctccgttccccaaggaagatcactatcattgggaatcagcgctgcattcatcaagcacgactatgcataaaaagcaaatgtccatgaaccaaagatatgtgctgatcataatgtatacctgccacctgccccaagccatca

SEQ ID NO: 310717 - DNA, 312 bp, Zea mays subsp. mexicana
gcgtaatttcggacaaacactgagtctaatgggggcgttaagacaaccggcgttctacaaccagacaagacactaggtgaacaacaagtgcggagcattggaaaaagtagcaaaggcactagagcctccgggaaaggccggcgctagaggaagcccagagaccttcccgcactacaacaagataaagcatgaagcacagtgcaccttgaggccatatgaccgacactatgctggatgagaaagcgctgaggccgatgatagcccatagcctggggcacacatgagggaggaacacaccgcgagctatagcac

SEQ ID NO: 310718 - DNA, 469 bp, Zea mays subsp. mexicana
gtattcaatccaaatgcattcattgctcaagagtgtgccatgattccaatcgaatgggtctcacgtcgagttgccactggttcgtatcttcgtcgtaatccaaatgtgaaggaaggatatcgctttgctccagtcaaactggaaaccttcttcaaagatgacgaaaatcacgatcctttctggtcgatcgactcggtgatcgaagctcgtcttgtgtgcgggggattggaaatcactcgcaatcacgtctacgagatgttccgagtgacagaacttgtgttcgaagtgctggaacgcgcctggtccacagtcgatcacgccttgatcgacatgaagatcgaattcggtgtcatttctcgtaacggcaagctggagattgttttgggcgatgtgatcgataacgacagttggcgattgtgggcctgtggcgacatacgattgatgttggacaagcaagttaccctaactt

SEQ ID NO: 310719 - DNA, 452 bp, Zea mays subsp. mexicana
  unsure (1)..(452): unsure at all n locations
ttatttttttggacctcgtgatagtcggtcggggcaatgttataacggatactggcataccttaagagatacggtattctacttttcggtattagtttctgcatactgacggcaggtattctgtgtttgagcttgccattctttgttaattacgaacttacgccagttaggaggctcattctcatttgatttatcacaattgactaggctgtcatgttatgtggcatttaatgaaattgataaactcccacccagagtagctagcagcttttattgtggtaggtagtttggacctggtattcctggtcctcaaagagttttgggagtcaaacagagaatatatatttcttcctcttatctaattatgtccttatgtccgaaaactttctccgatagtatatctacactgcgaagaagatntacgtaaatttcttatacctactacctggctt

SEQ ID NO: 310720 - DNA, 466 bp, Zea mays subsp. mexicana
gccgggtcggaattcccgggcgcccctcgatggtgttgtttttcgcagctacagtgccagggagcgtgcgggggggaatcgcttaacaagcagctgagtatgacacacgttaagaacaatcataaagcgagatgggtattccgggctcatgaggggatggaagccaagaatgctgctccatgcacctgcaaatgcaatatgctgggctacatactaggcctcaaagccatttttacaaaggaccaatgaggaaaggcggaaatagtctgggggcattacttgtagacccatgtatttcgttttattgaagacaatgtacttgtatacggaagcattctcgctcagttgaatgagaagacgcagctccaggatgcgtttgatggtgatccttgagccacaagagctgccagcggcgaactgagatctaggctaacgaagatctgtctgtgcccaccggttgcttttg

SEQ ID NO: 310721 - DNA, 309 bp, Zea mays subsp. mexicana
atgcgggacgtatatttggcaagacgtaccgccggtacgcggggacggttaccaacaggtcactcaagaccgtccacgagctacacatgggaatatgcaagctctacggacaggtgtggggcgtggacatggtacggaacgggttactgctgccgagctggctaccagcgctgctcgccggcaagagcgccaggttcgtctacgtgcaggctgtgccaccgggcgacgactgggtcaccggctacaagctcatatgagagggcgccctgtggtgaacgtcctgtcctgaggagcggaccctgcccctgc

SEQ ID NO: 310722 - DNA, 529 bp, Zea mays subsp. mexicana
ctcattcgtccgctgcaattgtctgtgaaaaagggtggggctagttacagaaacccggggacagagagaccgagatgctattgaagcaaagaatacaaagcatgtggggaaaatgtcatttattgatcttgctggaagtgagcgtggtgctgatacaacagataatgacaaacaaacaagaattgaaggtgcagagatcaacaagagccttttggctctcaaggaatgtattcgggcactggataacgatcaaatacacattcctttcagaggaagcaagctaacagaggtgcttcgggactcctttggtggaaactcccgtacagtgatgatttcttgcgtttcaccaagttcaggttcatgtgaacacacactgaatacgttaagatatgctgacagggttaaaagtctttcaaaaggtgggaacacaaaaaaggggcaagttgctgtgcagccttgtttatttgggaggaatttacctacacatcggacctcttatcatgggagctggagagactttggagcagac

SEQ ID NO: 310723 - DNA, 344 bp, Zea mays subsp. mexicana
gttgtttgtttcgccgctcgccgattgccccgcgggggcggggtttaatttgatgtccattcttgtgcaccaaaaatgacggctggctacattgttggctcactggtcggatcctttgccatgtgcatacctgtgtgacacatttatctctgacaagaacgcatttggaggtagcacccccaagactgattctgagaaggagtggtgggaagccacagacaccaagttccaggcctgggcttgcactgctgggccaccggttgtaatgaaccccataagccgccagaacttcattggaaagtccactgagtaagtatgggctggagaagctcgttctgggactt

SEQ ID NO: 310724 - DNA, 358 bp, Zea mays subsp. mexicana
  unsure (1)..(358): unsure at all n locations
aattttccggttcgatccacgcgcccgtagatanggaccactcttccaagcatgaataggggacggtttatgtgctctggtctgttcatgcatgccaagctctatgtcatcggcgggaaatctgagagacacaatgagatccttagttgagctgaggagtcggacttgtagagcagcacctggcgcttgatcccagatatggcacagggccttaaaggtgcaagtggtgctcccactcttgctgctgatgtgaataatggactatatgccgctgactattcaaccgaaggagacttggaagtgcccatcaaggaaaaaaaatgcagtggatcactccttggatttgtcacccgggcag

SEQ ID NO: 310725 - DNA, 428 bp, Zea mays subsp. mexicana
gacccacgacgcgctccgtattctttggaccacgtctatgccgcatgaatagggcgacgcatatgtgctatggattcttcatgcatggcaagttctatgtcggccccgtcccaatgcccaccgctttcggctcggatcccaaaccctaaccctactagttcgagcgcagcacctgccgcttgatcccagatatggcacagggccttaatggtggaagtggtgcgtgagattttgttgcgtgagtgaataatgaactttatgctgctgactatgcaacgaaggaggttaggaaatatgacaaggaaaatgaggcgggaatcactgttggagtgttacccgggaggtatacattagttcatggctgcggcattgggctcccgaggtttcggagatatgctaattgaatttggtgcaatgagtgcttggtg

SEQ ID NO: 310726 - DNA, 508 bp, Zea mays subsp. mexicana
  unsure (1)..(508): unsure at all n locations
cactacagtccacagaccaaaacgaccaccgcacccctgcagcagcaaagcgtccaagcggcggcatggcagcgagcaaggcgcgtgccgcgctgttcctggcggcgctcgcggtggcgagcctgctggcgctggccccggccgaagccgcgacgacgtgcgcgccgacgcagctgaccccgtgcgcgcccgccatcgtcgggaacgcggcgcccaccgcggcgtgctgcgccaggctcaaggcgcacccggcgagttgcttctgccagtacaaaaggaaccccagcatgcagcgctacgtcaactcccccaacggcaagaagggtcttcgccgcctgtaagggtgtctctgcccagctgctgatcttgagcgtgagtccgccgctagccccatcagntcgatccatcctctgctcgatcgatcgatcgaccgccttgcgntcgcgtatggtcctactacttgagcactnttggcagagnttagtattgctcgagaataataacgaga

SEQ ID NO: 310727 - DNA, 594 bp, Zea mays subsp. mexicana
  unsure (1)..(594): unsure at all n locations
gcttttagctggacccagaggaatccactaaatggtctcaatcatttaaggaggccaatagctcattgaatgacagggagtggaaagttgctgaggtttgccaaaagctagaacatagcttggagattctaggtgtcagtgcaatagaagatcgcctccaggatggggtaccagaaactatcgaaatactgaggcagtcaggaatcaacttctggatgttaactggtgataaacaaagtactgccattcaaattgctcttttgtgcaacttgatttcttcagaacctaaaggacagctcttgcatatcaatgggaaaactcaagatgaagttgctagaagcttggaaagagatcttcttaccatgaggattacgtcatcagagcctaaggagctggcttttgtagtggatggctgcgcactagagattattctatcacgctatactgaagcttntactgaactagcagttctttcaaaaactgcattatgctgccgtgttacaccttcacaaaaagcacagctagtgaagcttcttgagtcatgtgactatcgaaacttgcaatccgtgatggtgggatgatgtaggatgatac

SEQ ID NO: 310728 - DNA, 441 bp, Zea mays subsp. mexicana
cgctagggaacctcgccgccggggggggggaactgcccgaaaacgcgggaaggcacaacaagaagacgcgcatggtcccgcgccacttgttcctgggattcgaacaacgttgagctcgcaaggctgttgtttggggacaccatcgcgcacggaggtgtcctccccaacatcaacccggttctcctgcccaagaaggtggcggagaaggcgtccagcggcggcagcaaggagagcaagtttctttaggaaggcagccatgtccacaaagaaggtagccaagtccccgaagaagggtgaggaaaggaacgattctctagctctctcttgtaccatgttcgtgtgcagatctgcggaacttatggttccgtcctaatttcctctttgccttgaggctcctgatatgttcattgccatgtctgccgagttgggttccttgttctg

SEQ ID NO: 310729 - DNA, 272 bp, Zea mays subsp. mexicana
ccagctcgccttgcgagagtgggagctattcagctaccggaggggcgagaagcgagacagcatggccacccagcagaagatggctgccgtggggaaagtgacgggaaggacctggtccaggggtcacgtgacccaggtcagagtgtactccttggctgacctgcaccagatcatcattaggaatgataagggcccggctctcgagggtgacatcctcaccctgctctattccaagagggaagccatgaggctgcgcagaagacctagcgttc

SEQ ID NO: 310730 - DNA, 257 bp, Zea mays subsp. mexicana
atggccgcacccttgcggattacaacatggggaatgtgagcaccctccaggtggtgctccgcctcaagggtggcatgcacatcttcgtgaagacactcactggcatgacaatcacccacatggacaagtctacagatgccattgacaatgtcaaggacaagatccaggacacggagggcatcctactcggaccagtaacgcctcatcattacctgctagcatctagaagatggcctcaccatggcggactacaacat

SEQ ID NO: 310731 - DNA, 320 bp, Zea mays subsp. mexicana
atggttatcgtgatgaccttcggcctggcgcactgggtgttcgcaacggagatggagcagaacaagggcagcctgggcactatcacgcacaaagccattagcttcatagcgagggccaacactcctgagggcagcaccttcgaccgaccgttcatgaaccccgccgtgtacttctgccacagcctggtcagcttggattggggctaccagcgggtgtactgggtcgggcccctcattggcggctgcctcaccggcgtcatctactagctggtgttcatctaccacacccacgagcagttcccctccaccgactactaaaa

SEQ ID NO: 310732 - DNA, 506 bp, Zea mays subsp. mexicana
accaccagctagatcggcatagagggggaagccaagtactcctacagtgcatcattcgtcttcttcgtggtggctttcgctgtaaccttcgcctacagcctgctcgccgtcctagtgcgcccggggaccaccgcctccagattagtgctcctaagcgacgtgacggtagggatgcttctgacgggcgccgtggcggccaccggcgccatctctcaggtggggaagagcggcaacgagcacgccgggtggctgcccatctgcgcgcaggtgcaggcctactgcggccacgtgatgggggcgctcatcgccggcttcgtctcgctgctcctctacttcctcatcatcatgtactccctccacgcggtcgccgaacccctgtgctcctgccattagaacggtcaaacgcgcacactattcgttcgattatattcactaggtcatcgacgatgatccaatggtcggtccccagagatacgttgttttccgtctcactactatatatatct

SEQ ID NO: 310733 - DNA, 463 bp, Zea mays subsp. mexicana
  unsure (1)..(463): unsure at all n locations
gcgttgttttcaaggcgtgttatctcaatggctgctggggctgttgttaccaatgtgctaggtgtggccagattgatcatgcctgaagaagaaattgcacaggtggcctcaatatctgcaaatggagaaagggaaatcggtgagcttactgccaaggctatggataaggatggctaagagggtgtcatcactattgcggacggtgacaccctttatactgagcttgatgatgcagagggtatgaaactagacagaatttacatttatccacacttgattacgaactcaaaaaccaacaaacgtgaattgtccgacccatttatcttaattcatgacaagaagggttcgaacatacatgctgaagttatagctttagaaatggcttttaataaacacaagcctctactgatttgtgcagaagatgaaggaagtgaagcattgngcactatgattattaacaagc

SEQ ID NO: 310734 - DNA, 347 bp, Zea mays subsp. mexicana
aaacttattgtgcaaacttctctgggactctgctcagagtggttacattgcaacaagcttgttcgcatatctcctctttggcgaggctaccttggctgatgtgcttgccaatttcgactctgaccttcgcattccgttgagttctgccttcaatgacatagtgagagtgagctatgtcgtccatatcatgcttgtcttccctattgtattctttgcccttaggctcaacttggatggattactctttcccaccgcaaggcacattttcggtgacaacaagaggttcaccattatcaccatctcacttattgctggaatttatcttgctgccatcttcataccaagca

SEQ ID NO: 310735 - DNA, 441 bp, Zea mays subsp. mexicana
ctgtttttttagcaaatgtgaagttcatacaagagagaaagctgattggaaagtattttgaagaaattagtcaagatacgggtaagtatgtgtttggtgttgatgacacactgaaagcccttgaaatgggcgctgtggaaacactgatagtgtgggaaaaccttgatgtcaacagatatgtgcttaagaatactgcaactggagaaactgttatcaaacatctgaataaagagcaagaagctgaccagagtcatttccgtgatccatctaccaatgcttagctggaggttcaggagaaaacttcgctcttggaatggtttgccaatgagtacaaaaagtttgggtgcacacttgagtttgttaccaacaaatctcaagaagggtctcagttttgcagaagatttggtggcattggtggcatgttgcgctatcaactggaca

SEQ ID NO: 310736 - DNA, 547 bp, Zea mays subsp. mexicana
ctgcttctttatattgctcaacaaggtggttctctcggcgacatcttcgatgctggaagtgtggttgatgctataccagaaccttataagtgtggtcattcttcttatacttgagctcttgcgtgtcatttcaacggaggaactcacatggaagctgataaaagtctggattccggtgaatcttgttttcatcggtatgctactaactggaatgtacagtttgaagtacataaacgtcgcaatggtgacaatactaaagaacatgacaaatattataacggctataggagagatatatatattcaggaagggtcagaataagaaggtttgggctgcactttttctgatgattgtatcagctgtatgtggggggattacagatctctcttttcatctagttggctacacgtggcaaattctgaattgctttctaacaacaggctactcgcttacactaaagcgcttgatggatacagctaagcaatcaacaaaatctggcttcctcaatgaagtttctatggtggtactcaacaatgcactcttaatt

SEQ ID NO: 310737 - DNA, 205 bp, Zea mays subsp. mexicana
gcctgcgagggaggagcacaagacggggggcatcctggatcgctcggggggctccagctccagctcgccggaggacgacggcctgggcggacggcggaagacgggcctcaaggagaacatcaaagagaagctgcccggaggccacaaggaccaccagcatgccacggcgacgaccgggggcgcctaccggcagcacggacacacc

SEQ ID NO: 310738 - DNA, 487 bp, Zea mays subsp. mexicana
caggacatgccccagtgggagtcatcagagggctccggtgagttcctgcagatggcgcggtccatgcgcaacggctacgacatcgctaacttctcggagctccggctcactgcgcactccggcacccacatcgacgcgccgggacacgtcttcgagcactactactacaccggcttcgacgtcgacaccctcgacctctttgtcctcaacggaccagcgctgttggttgacgttcctagagataagaacatcacagctgatgttatggcatccctaaacattcctaaaggtgttcgacgtgtactctttcggaccctaaatacagacaggatggtgcacaatggttggttgataatacagacatcaaactagttggagttgactacttgtcagtgggcgcatttgatgaatgcattccagctcatctagtatttcttgaaaaaagggaggtcatacttgtccgagccttgaatcttgagcatgttag

SEQ ID NO: 310739 - DNA, 281 bp, Zea mays subsp. mexicana
ctgcgagggaagagcacaagaggggtggctttattatgacgctgggggggctccaactccagctcgacggacgacgacggcatgggcggaaggaggaagaagggaatcaaggagaagatcaaagagaagctgcccggatgccacaaggacgaccagcatgccacggcgacgaccggtggcgcctacgggcagcagggacacaccggcggcgcctaccgtcagcaaggacacaccggatgcgcctactccaccggcgccgatggcaccggcgagaagaaagg

SEQ ID NO: 310740 - DNA, 380 bp, Zea mays subsp. mexicana
gcttttcttttcgggtttcgtgccgctgaagctgtccgaggtggtgatcctagtggcctacctgggcgcctccgtcttggttttgctcgccgggtggctgggctccggaagatgtgtcagaatatccaagaccgaccgactgctcatgtgctggtgggcattcacaggggtgacccacataatgatcgaggggccctgacgattgactcctgatttcttcaagaaggagaaccccgatttctttgatgaactttggaacgagtattgagagggagactttcagtgtgcaggttggcacactgaaggaggttcgtgctacggagtcatacagggacaaggaccaaacctatgactgcttgctgtctacgcgcatagcatgc

SEQ ID NO: 310741 - DNA, 527 bp, Zea mays subsp. mexicana
  unsure (1)..(527): unsure at all n locations
actggttttatttctatcgtcggtgccgtctctcctgctggtggtgactttgctgagcctgtaacatctgccactcttggtatcgtccaagttttctggcgtttggaaaagagacttgcccaacgtaaacatttccctgctattaactggttgtacagctacagcagatacttgaagtctttggacccttggtatgaggacttcgaccctgaattcgtcggcttgcgaaccaagtgcaaggaaattcttcagatggaagaagatcttactgaaatcgtgcagctcgtcggtaaagactctttggccgaatccgacaaggttacccttgaagttgcccgtttggtccgtgacgactacttgcaacaaaacggtttcgcctcttacgacagatactgccccttctacaagtcagtttggatgatgagaaacttcatcacttactacaactnggcccaacaagctttggagagctcatcggctgacaacaaggtcacttggaacgtgatccgacaacacactcaagatgt

SEQ ID NO: 310742 - DNA, 530 bp, Zea mays subsp. mexicana
gcagatgatagacacgactaaagattacattcaagcgctgagcattgtgccgacaagagagttggccttgcagacgtctcagattttcatcgaagtttcaaagcacttgaaagcccgcgtgatggtgaccaccggaggcacgaatttgaaggacgacataatgcgtatatacgaaaacgttcacgttatcattgcgactcccggtcgcatactcgatctgatggagaagaaggttgccaagatgaacaactgtcaaatgcttgttctcgacgaagccgacaaacttctgtctcgggatttccaggggctcctcgatcgagtcatctcgttcttgccgcaagaaagacaaatccttctctattcagctacgttcccgatgaccgttgaagaattcatgcgccgtcacctcaagaacgcctacgagatcaaccttatggaggagctcacactcaagggagtgacacagtactacgctttcgtacaggaacgccagaaggtgcactgtctcaacacgcttttctcgaaacttc

SEQ ID NO: 310743 - DNA, 407 bp, Zea mays subsp. mexicana
gcccggaattactggctcgatcgacccacgcgttcctttatttcacatatagtcaaggatattcacagctgggggctacattaaattgccaggggggggtatggatcatactcagcctgtaataatctgaggggtttgataccttctcaacatcattctatactaatggttgctgtatgatagatcgcacaaagagagtatatagctaccctatggagattcaagcctctaactttatggcactaaggtgtgctcttcacatacttaaacatcaaaatgaacggaaccaatatgtagagaacattgctacccttcttcacgctttactgtatcacatgcgaagctatttttggctcgatttccaacagctaaatgacatttattgttacaagacagaacaatatttt

SEQ ID NO: 310744 - DNA, 536 bp, Zea mays subsp. mexicana
  unsure (1)..(536): unsure at all n locations
tggtgtcggcaacgctccggcgccggcggtggaggccggttgctcctggtccggggatgggataggtaagagcaacggtggtgggaagagagatgatagacacaggatgcggcagtacaggtcgcagctcgaacaggaggtcaagaaattgcagaggcagcttgaagaagaggttgatctgcacgtggcgttggcggatgctgttacacaaaatgttgcgcctatactgaagtcttctatgaagcttccacacaaggcacaggagctactgattaacatcgcctccttggagattaccgtttcaaaccttgaaaagaagctaaatgatctgtactaccagctttgtcacgaaaggaacgaaaggttacttgctgaaaataatcagggatgcttgccatctacatcctccgatgagcannagttattgtcaacttgcacgtgtacgtgggaagagcacatatcattcgtgagagatttgaagtttggggatctgaatcaatgagatcaatgagacaggacttattccccgagcttga

SEQ ID NO: 310745 - DNA, 394 bp, Zea mays subsp. mexicana
gtcttcattagctgtaaagttaatgtatatttcatgagtttagtgaagttgtgctaagcaaccattctaacatgctccagtagatattcttcttccttagtctttcattaaacagattctgtccagtggtaaccatgacctaaatttaattatgcattaggctgagaagatgtctgattctgaagatgtccatagactgataatgcacagctctttgaattcgtttctgtgcaggaactgggttctgatgttaacttgtatgctttggtgtttggagaatctgttttgaatgatgcgatggcaatttctctttacaggacaatgtcatcagtcagaagtcatgcagcaggcggcgagaacttttttatgatgattctccaatttctcgaaacct

SEQ ID NO: 310746 - DNA, 444 bp, Zea mays subsp. mexicana
ccctttcgtttttcattacttggtagagaaatacatgggctgggcgggcattgccatgggatgaggatatcaacttccacaagactattgcagcagcatataagttgctggaataaatcttccatgcagggaaccatcttgtgtgtgattttccacggctttataattcatcaaatgagaaatatgctactctgggccagtacttcggtgaaacaaagccaacatactttacattggtcacaggagtggaaggcatcactggggtaattatgggtatctggatgattattgctttcactttagctacaccggggttccggtgcagcctggtgaagctttcaaaaccatttgacaaaactgactggcttcaatgccctctggcactctcatcatttattcataattgggtatttggctctcattggttatggtccccttctttac

SEQ ID NO: 310747 - DNA, 487 bp, Zea mays subsp. mexicana
  unsure (1)..(487): unsure at all n locations
acgggatcacagtcatggacccccggcagcatattcctgccacgtgtgcacggaggatctggcatggctgaaggaaagatgcatcctctcctgtaggagcacaagaccgggggccanaagactggctaatggagctactgatggaggtattaatccatataccatcaaggcctacagaaatctcatgaacttgttggtagagaacagcataaacccatttgtagcaattttgcactgggacacgcctcaagcactaccagacaagcctggtggctttttagatcaaacgattgtaaatgattacacagacttcgctaacgtgtgctttgagaactctggtgacaaagcacacaattggttgacctttaatgagccccaaacgatgtgttgtttttcatacagaaccgggctatgcgccccagggcggtgcaccccaggacaaaaatgtgctaacccaattggaaactcgctcactgagccatacact

SEQ ID NO: 310748 - DNA, 333 bp, Zea mays subsp. mexicana
actgtatgaaccaaaccctggatcacttcaacccaggggacgcgtcggcaattcaaacaggggtactgccaagttcttgactactaccgagctgcaaatggggcggtcttgctatacatctgtggagaatctacgtgtaatgggagtggcgctaactacttagctgtggtggcaaagaaatttggggctgcattggttgctcctgagcatcgatactatggaaagagttctgcttttaacagtccgacaacagaaaatgtacagttcttggcatcaaagcacgctttatttgatcttgctgctttccgccaatattatcaggaaacctttaat

SEQ ID NO: 310749 - DNA, 413 bp, Zea mays subsp. mexicana
ggctttacctttacttcatcggctgcctgcacggggtcgactcgtggttcagcgcgcggcaggagaacccgcacgacctcgtcggcgccgtcgtcggcgggcccaacggcgaggacgtcttcaacgaccaccgcggcgcgtacatgcagaccgaggcctgcacgtacaacacggcgcccatggtcggggttttctccaggctcatgcagctggaggggcaggcgccacccccggcaccggcgcccgcagaagatctttgattggagaggtagctatccttgagaggttcccagcgacacgtggtggtgcgaaataaacttttcaaaaaggattaaaaaaaagtgatattgatcgtttaggctggatgtatacatgatgattctttttgttgattcctagatactaccatattt

SEQ ID NO: 310750 - DNA, 468 bp, Zea mays subsp. mexicana
cttgtttcatcgattcttcaagagatcgagcttcttttgcaccacaaggtccaggatgtcttgcagctgcggatcaagctgcggctgcggctcaagctgcaagtgcggcaagaagtaccctgacctggaggagacgagcaccgccgcgcaggccaccgtcgtcctcggcgtggccccggagaagaaggccgcgcccgagttcgtcgaggccgcggcggagtccggcgaggccgcccacgcctgcggctgcggtagcagctgcaagtgcgacccctgcaactgctgatcacatcgatcgacgaccatggatatgattattatctatctagcttgtggtggtggttgaacaataataagcgaggccgagctggctgccatacataggtattgtgtggtgtgtgtgtgtgagagagagagagaggaacagaagtcttcaagttgctatctctctctctctctgcatgcttg

SEQ ID NO: 310751 - DNA, 421 bp, Zea mays subsp. mexicana
ctgatgataaggctgtcatcacagacaaatgaactgtaccatctggaagcgggggcgtgatgaatattattagctaggggataagctggacctgagtgttgagtggcagtgatttgctgctgaagtagtgatatcaacaacagaccttgaacaacatactcattgaacacacattgacgaatgctaaattaagtgtcacatttcgttgacggaagccactgtgcaatataactccattgcagacggtaattcttggtgattaccggacagacatttattgttagtattgtcgtaaaagggtttgggtatagcaacaaaacatgatttcttgtcgggatgtttgttgtacaaataggagagagtgcttatgttcttctaatgcgagctacaaggatgcatctcatctagggcaagctatacc

SEQ ID NO: 310752 - DNA, 493 bp, Zea mays subsp. mexicana
tcgggctttccctaggcctgacaatatgccattgtatttaacagtcaagactggacctagttttactgaagctgctatgggacgcctagcacaagggactaaagttttagcagaaggaggctatgaaaaaatatttaagcagaccttcgaggttcttccagacgaggagctgaaaatatgctatgcgtgctatctctcaacatcagcaggtcctgtcatgggagtcttgtatatttctacagcgaagattgctttctgcagtgacaatcctctgtcatacaaagctggaaataaaactgaatggagttactacaaggtaagggttactcccttcttagcatctagttatccctatcaaaatcaatcttcgttttgcacctcagtttatcatatttggactgaatcgatttctatagttcatcattgttagttttacatagatttataaatttgacttactacatgaggataggtaaacctttttagggtcact

SEQ ID NO: 310753 - DNA, 327 bp, Zea mays subsp. mexicana
ggcattttcaagatcggaattaacggttaaggaaggatcgccaggctaccagccagggccgccctgcagtgcgaggatgccgagctatggcccgacaatgaccgagttataagctctgatggcatgcactacatgtttaagtacgacaccgagcactgtcaatctaagcacagcgacatcactctctgggactacaagacgcttttcttaggagagacgccatacaactgacaatgaatcaggaactacgaagagatcccgtggagtgaggctgagcctgagtatgtcgagtagtccaccgatgtctttactggctaggacaaggct

SEQ ID NO: 310754 - DNA, 344 bp, Zea mays subsp. mexicana
ggctatcttagatgcctatatccaggacaagtagggggtgctaccctaacagacacgtgtgatttttgatgggaagcatatggaggatggcctctctctggctaatttcatcatgctgatggaaagaaccatggagctgatgatccgaataatgtatggcatgcagatctgagggaagaccctgactgatatgacaatcaccctctaagcggagatctggcttaccattgacaatgtataggaaaatatcgatgacaaggagtagagtgctaccgatacatgatggcgtcatctaaggccataatgctctagaaggtggacgttccctgtaggactacaatatt

SEQ ID NO: 310755 - DNA, 533 bp, Zea mays subsp. mexicana
catgtagggaaggtgctggggaaccaataaaatatatgggatgtggtgactgtgaaaccacgagtcgttctatgacgattgcaggtgcaactgacagttttgtcactctccagagaattgcaaaacaattattttcagctcttcatcttgatgtgaaggaagttcgtggaattggactgtcactatcaaagcttgagcatgcagatttgggccggggagcatcgcaaggacatatgcttgaatcgtggcttgcttcaccagccgccaagctcaagaaacagcagagtgagatactggggaatgttaatgttgcagggaccagcggactgaaggatttgagatctggaccatcacatacagcagaagcgaaccttagaaatgataggtctactgtatttcacaatgtcgagctgcctccgttgtcccaacttgatttggaggtcctgaagaaccttcccccagagataatgtctgaaatgaatgaaatgtacaagggagaattacaaagtcttgtggacaccctcaatagtgac

SEQ ID NO: 310756 - DNA, 296 bp, Zea mays subsp. mexicana
ggctttttcagatttctagagcgaggactgggatgcggtgatggttaaagggacactggcgtctcttgagtggcggcaaatgtaggaaggcaacgcgctgagaaagttcgaggaggggagttgaagcaccattaggtatggtatccgcatgatcgacagctacggggattgaagcaagcgcttgcgttcaatgatggacatgtaataaaagtcagtcagggtactaatcgtggcatgaaggtgaaggctgaccgtgatgagtcgtcaccttacgctgctatgcttgctgctcaaga

SEQ ID NO: 310757 - DNA, 472 bp, Zea mays subsp. mexicana
cgattgtaggcaactggagagattgcatactccaagcaatcattctcttggccacaaaattaggcagaaggagcgtggttgatagggtgtaccggggaaaagggaggttggagaaggaggaattccctttcgctcgtaacaatgattttgtcggtaggaaaaaagagctttccgaattggaactcattttgtttggtgatgtcatgggagatggagaaagagaatattttgagctcacgacaaagcagaggagaaaaggccttgcagttaggctgtctgctaacaatcatgagcacatgaatactgatgacagcaaaggtaaggagcctgttatttggaaggagactgagaaagatattgagatgcacaggctgtgtagtacattgtggcatgtgcgtccactgagagtgaagaatggcgtaaggtgttgaagggaaaaaagatctaggaagatactttatggtaagggtat

SEQ ID NO: 310758 - DNA, 346 bp, Zea mays subsp. mexicana
gcctatgtcaagattaaatacatcgggctggccaaggggtcagtttagacgctcacgggagcgcatggagatcaagcaatttacgttgagcatctggtatgataactctgataaacggatgttgaagcttacatagtctccacttgaactgagcttctgattggaatagtggccgacagtccaatttgaaaagaattattggaaagggatcttactctggtcgacaagttttacaataaagattttcccgcggagcttgccatattccatcctgaaaacctggataataacgacgagacttttagtggagataacgataattccactaagaaggagtgcacaccgt

SEQ ID NO: 310759 - DNA, 469 bp, Zea mays subsp. mexicana
  unsure (1)..(469): unsure at all n locations
gtgttggcggcggcggcggcggcggaggcggaggaggaggagccccggcaggcccagaaggtggcggcgccgccgtccacgcccaggggcaagaagcgcgacggcgtcagcggcgtgaccgaccccgcgccgtcggccgccaaggctcaggtggtggggtggccgccggtgaggtcgtacaggaagagctgcttccagcagcagcaggcggcggcgggcgccaagggcaagccagcggcggcggatgagggtgctccgggtccggcggtcggcggggtgttcgtgaaggtgagcatggacggcgcgccctacctgaggaaggtggacctcggcacgtgcgggggctaccgtcagctgcgggaggcgctggaggccatgttcctctgctttccggaccgggctcgggctcgggcgatgcgttcggcggcggcagcccctccgactttgncgttacctacgaggacaagga

SEQ ID NO: 310760 - DNA, 285 bp, Zea mays subsp. mexicana
ctactgcaaagagtgatagcttaaggatgtttgattgggaagatgttacaatcggcgcatggatgcttgctatgaatgtaaagcatgaagacaaccgagcaatgtgtgattcagtatgcacccctacctccatcgctgtatgggacagtaagaaatgttcaggtacttgtaacgtcgctgacaaaataaagcagctccataacaccactgtgtgctcaaagagcccaacgttgccacctgaggtggaggaggaatgaattgaaaccgtaacagttttggcccttg

SEQ ID NO: 310761 - DNA, 99 bp, Zea mays subsp. mexicana
gtcgtaccggaggttgccgccggcgctcccaagaagaggacgttccgcatgtacagctaccgcgtcgtctacctatatgcgcttctcgacatgtccacg

SEQ ID NO: 310762 - DNA, 100 bp, Zea mays subsp. mexicana
agttcgctgtatcttgctcataattactagttcatgagcaaacaacaaacaatggcaccgtggctagcgtgcctcctagctctggccattggctgccatc

SEQ ID NO: 310763 - DNA, 287 bp, Zea mays subsp. mexicana
gagatgggactagatcttctacacaggtaatggaactgtaggacgtatagtgatggcagcagccgcaaagcatctgaccccggtagctctggagcttggtgggaaatcccctgttatcgtggattcaaatgttgatctgcatgttgctgcttagaggattgttgtcttctcattcgttctcttcatccttcacttcttcttttgtatttttattcctctttttttcttatttttttttcttttattttttttacttttctctatattctcttttttttgattttttt

SEQ ID NO: 310764 - DNA, 250 bp, Zea mays subsp. mexicana
ccctcaatgctaagaatatgtcttcactgctcgattccattgtacgacatgttccttcaccaaaagctgatcttgaggctccattccaaatgttggtttccatgatggaacgtgatttttatctaggacggatactcactgggagagttaggtccggagttgtccgtgtttgtagacttattccatttgtttttgcattccatttcacttgtgttctttctatttgcatgtttttttttgtttacctttt

SEQ ID NO: 310765 - DNA, 351 bp, Zea mays subsp. mexicana
tcttctcttacagtatgcttgagaacttgaccagtccagctcataaggagcagcttgaggagaggatggcccgtatcaaggaagatccatccttgaagccaattcttgatgagatagagaatggtggttcatcttctttggtgaagttttggttagactcttatgtcctctattttttctttaattcttctttattctattttctttttctttcttttctatctttatttttctcattttttattctcccttcttttttcttttctttctttttttatattttttctcttctctttttatacttttcttttccctcttttatcactatttctttttttttcttttctttct

SEQ ID NO: 310766 - DNA, 222 bp, Zea mays subsp. mexicana
ttctctactgacaaggacaaggctgctgcacatctcaagggtggtgccaagaaggttggtatctctgccccaagcaaagatgcacccatgtttgttgttggtgttaatgaggacaagttcaccttggatgttatcatttgttccattgcttgctgcaccacaatctgccttgctccccttgcttaggttattcatgacaacttcggcattgttgagggtttt

SEQ ID NO: 310767 - DNA, 202 bp, Zea mays subsp. mexicana
gggtaaagctgctgctgctggaagatgtacttcacaagagggttattggccaagacattgcagttaaatcagtggccaatgccatccgccgttctagggcaggcctattatatcctatccgtccgatagcatgcttcatgtttttgggacctccatgtgttgtatagactgagttttcttagtccttttcttattctctttt

SEQ ID NO: 310768 - DNA, 245 bp, Zea mays subsp. mexicana
tgatactcctcctttggagctgatcaatttgatgacactgaccaagcagagagagctaagaagggttcattcttcaattggttctacttctgtataaatataggttcattcatatcaggcactatgatagtgtggatacaagataacactggttggggaataggctttgcgattcctactatattcatggcattagctatttcattcttttttcttagcttcaaattagttcagattccaaatat

SEQ ID NO: 310769 - DNA, 405 bp, Zea mays subsp. mexicana
gtgttagagcaagaatgccagatctatcaattgagccatcacatctcttgaagcctgttctaaagttggggtggtgccagtggattggtgctgttattttcatctggggctcactccatcagatccgctgccatgcaattcttggatcattgcgtgaacacaaagattctgatgaatatgtaattccgtgcggtgactggtttagtcgtgtgtcttgccctcattaccttgctgaactagtaatatattttggcatgttggtggctactggtggatcagacattccggtgtggttcctgtacctttttgtgataacaaattttgtcctttgcaagcggtacaaaacacatcaaatggtattttcagaaattttgaagaataccctttgttctcgctacgcaattc

SEQ ID NO: 310770 - DNA, 537 bp, Zea mays subsp. mexicana
gatgctgttctcggccatgaacaagctgaaaaagatggctctcagggagaatccagccgctcaaaaccggccgctctgtcctgattgcctggtgcttgtttgcattgccgccattctgggcagagaacgagcagggcatattcgaagaggttttgcacgggaggctcgacttcgacgcggagccatggcccagcgtctccgaaggcgccaaggatcttgtgaggagaatgctcatcagggacccgaggaagagactgaccgctcatgaagttctacgttggtggtttggctcctgacaagccgctggactcggctgttctttctcgcatgaagcagttctcggccatgaacaagctgaaaaatatggctctcaggtgtgaaaagtagcgctcagaagtcacttctgcacctttctgagcatcttgaagtttcgtcgccggcggcaacaacctgtctgtagcgattcgacgttcatgagcgccatgatacggtggactctgacattctcacgaaaggtgacaataatcccggggatga

SEQ ID NO: 310771 - DNA, 325 bp, Zea mays subsp. mexicana
ctgatcgggattcctcgtctctggtctgtctgtgctccacctgctgctgctgctgccatggccatgggtagtctcgccttcgccacggcgctcgtcttcgtcttcgccatcgccgtgccggccgccgccgccgccgcgcaggcccccgccccggcgcccaccagcgacgggacgtcgattgaccagggcatcgcgtacctgctgatgatcatggcgctggtgctcacctacctcatccaccctctggacgcctccgctccgtacaagctcttctgagcgagcagattttttctcctccattttttggtaggctttagtggtggtt

SEQ ID NO: 310772 - DNA, 517 bp, Zea mays subsp. mexicana
tttgtttacgcgcctagcgaccagcacagatggggggcacgcccaccctcctgcggtgtcagatctcgcgcgcgccccgcaaagggtaactttgagccatgggcacagttgtggatgccgctccagcagttgcggctgaggtcactgagaacatgttgggtggtaagaaagttacagttgtatttgatctaggaggtcctggaagtggaaaaggcacacagtgtgccaacattgtggaacactttggattcacccatcttagtgctggagatcttttgcgtgcagagattaaatctggctctgagaatggaaccatgattgaaaacatgataaaggagggaaagattgttccatcagaggtgactataaagctgttgcaggaggcaatgataaaaaatgaaaatgacaaattcctgatcgacggatttccaaggaatgaggaagaatcgggcaccatctgagaatgctaccaaaatttctcctgcatttgtgcctatctttgactgttctgagaaag

SEQ ID NO: 310773 - DNA, 385 bp, Zea mays subsp. mexicana
gccttgtctcgccgtaccgctttaaaaacaatggttagcatgacctctctaatatatgacctatctgagaaattgtggtcgctatttgtcaagataagatactgatttcatttcccccctttcactaaaattaggccatttagtggttgtcaacatgccactcttcatttaagctggacgtttttttttgaattcatagaggatgttgattaacatttttttggttgagtagaactgaaagttggggaagtaaattctgaatggtcatgtcttcgtttcagcttttagtgcctcttgttagtgcgtaccgctatgatggcccagaggtgaacacatctttggcttattctgaagccaaaatacttcatgagaagatccataagaa

SEQ ID NO: 310774 - DNA, 490 bp, Zea mays subsp. mexicana
tgttgtttgaaatgctgcttctctaatactcaagcttttgaagcaaggaggcaccatggtgacatatggtggaatgtccaagagacctgtcactgtccctacttcatatttcatttttaaggatctatccctacgagggttctggctccagaagtggctgaactcagacaaaacagaatactgcataagaatgattgactacctcttgcgccttgcgcatgaaggcaaactcaaatactagatggagtccatttctttcggcgagttcagcttgcctctgcagaaggccctgggcaaacatggaagccagcacgaagcaggttatcaagttctgagaccagggcggtttagaggatctgagagcatgcgattgccatcgatctgtatgaatggtgaatccaacagttagctatgtcaagtgccagagttttaaataaaaataaagtaaaggcagcaatgttaaatggaattgtgaaattagcagcttagc

SEQ ID NO: 310775 - DNA, 413 bp, Zea mays subsp. mexicana
ggatatttcatttggtctgcaacccctgtctaccgtcaagagcaaagagaccaagatgactggaatgcaatggttactctgactaaatcaatctgctggagaacagtggtaaagtctcaagatgtcaatggaatttgagttgttatatatcaaaagccagcatcgaattcttgctatgctgaaagaaagaccaatgagccccctctatgctccgagagagatggatcacgctttccttggtatgctcctcttgatagttgccttttcacaactgccattaccacttcagatgaaagatataattggcctgttccatggcctgaaagacttgatgttagctatgcaagtgtacctgatgattctgcttctaacaaagagaagtttgaagctgataccaagtattggaaacagct

SEQ ID NO: 310776 - DNA, 353 bp, Zea mays subsp. mexicana
ttcgcacccctttatcacacgcacccacctgtcagcagccggggggattttattacagactgcggcggacacccacgacctcctgcggcgtcggcggcgctcaaggaccaggggattgagcagttcaaggcggggagctacctcaaggctgccgcgctctacacgcaggccatcaagctcgaccccgacaacgccaccctctacagcaaccgagctgcagcattcctgcagttggttaagccttagcaaagcgctcgctgacgcagagacaacagccaggctgaagccacaatgggagaagaggcatttcaggaaaggccgcgttctggaggcaatggcgcgctatgaagagg

SEQ ID NO: 310777 - DNA, 720 bp, Zea mays subsp. mexicana
catgtatcatccggtgctcaaactgcgccaagtgctgccccaaggacaaggcgatcaagaggtttcaggtgaggaacatcgtggaacaggcggccatcagggacgtccaggaagcatgcgtctatgatggctacgtcctcccgaagctgtacgccaaggtgcaccactgcgtctcgtgcgcgatccacgctcacatcgtccgtgtccgatcccgtgagaagcgcatggaccgcaagccgccggagcgcttcaggcgcagggaggataggcctgctgttggacaaggtggcccccgccctggtcctggtgcttgttctccatctcttgtacctgtttgctgcttttccattggttttatattttttttaagccttttttccacttagtttcttttctctctatctttctttatactctttgttctttattcgttatattctctcttccttcctttctttattttctttttcttcttttctttttttttttccttcttttctatctcctttcttctgtcttctttcttttctttatttcttttttccctttttttttcttcttttttaattcttcttctctctttttttttttttttcttatttttcttcccatttactttctttctttattctcttcttctttttttttttcttctctttttttttatttttttaaatttaccctccccccccccccccccctctttttatctttctattt

SEQ ID NO: 310778 - DNA, 423 bp, Zea mays subsp. mexicana
cgaccgttggctatataatcgccgacgccaatggtggacttaaccaaatgagactgggaataagtgacatggtcgcggttgctaagctcatgaatgccacactagtaatcccgaccctggaccacaaatcgttctggactgatccaagtgatttcaaagatatatttgacgtgcaacacttcaagcaaactctagaggatgatatcatggttgtggactccttgccgccagatttcaaaaggttcaaaccctacactagagcacccaagtcctgggccagggcttcttattatagggcattcacaaggatactgaagaaggccaaggttgtgagattcacacatacagattcacgcattgccaacaacggtctccctccttccatcccaaggctccgatgccgggcaaactacgaggcgctta

SEQ ID NO: 310779 - DNA, 568 bp, Zea mays subsp. mexicana
cacgagtccttggatacaagattgaattttagttcggcttaccatccacagactgatgggcagactgagaggaccaaccaagtgctggaagatatgttaagagcttgtgcccttcatcatggtagtagtatgaacaagagtctaccttatgctgagttctcaaataatagttaacaggccagtctgaagatgtcatcgttcgaggctatatatgacaggaaatgcaggactcctctatttttggactagactagaggaagacagttctttggacctaaacttactcaagaggcagaagaacaagtacgtataattcgggagaatttgagggtagctcagaccaggcagaagagctacgctggtaatagaagaaaaccacgggagttgaggaaggtggtcatgtgtacctcaaggtgtcaccactttgtggaatgaggagattcaaaatttaggacaaattgtcccctcactatattggaccattctgagtttttaggcaagttggagagatggcctatcaactcgagctacctgctagtctatagaatatgcataatgtgtacacata

SEQ ID NO: 310780 - DNA, 575 bp, Zea mays subsp. mexicana
ggcactttttggttgtaccaaagacaccagacgtaagagacccctctcactttcttagttagacaatagacatgaatgcatatacatgaaaactgatagcaacaaattagacatgtactcgatgattctagtgctttatcgatttgagtttgttatttgtttacattcacaaatttagtattttggatatatgtcatggattctggctttattagatgcattaaaagtcatatataccttctaggtgcttaagagtgtgtttggtttgaggaatgaggtgacccatcttcttctcactcatcattttttttatttggtttgtgaaatagaatgagttgatccatcaccacaccattaatcataagataataattagtatatacattaggaatgagttgattctactaaagtttatcggatgaactcatgatgcatcaccttatgaagcattggttgactccacaaaccaaacacatcattttagtacctcactacttgtcatgcgcgaagagctataccatttgttctttggttacttgatatcttctgttttcatgatatttaaatatatgata

SEQ ID NO: 310781 - DNA, 488 bp, Zea mays subsp. mexicana
tgttgtaagcacaaactctagcacagaggaaggcaaagaattgaatgatcctcgggtgctaactgatgttggagatgtccccattcaagagatccgtgactgtggtgtcgaagatgacagatttatgcatgtaattagtgagtctgtcaaaacagttatggatgaggaacctttttcaccgatgtcgttagtagacgatcaatcaattttcttttcattggttagagctgttttagatcttgcctggattatctgatttcttactttttttctgttccatttatttttttctattgtttgtttttatatattcttttatttatttcttatttgctttttttttcacatttttattgtgttttttattattatttaatttatttggtgttgtttttttttcatcttcacttttttgatttttttcttcttctctagttattttattcctttttatcttgtttttgttatattttattcttttttatttt

SEQ ID NO: 310782 - DNA, 180 bp, Zea mays subsp. mexicana
gaacatagagactttaactatggactatcatcgtgggggtggtgttgaggtgcgtattggccgtatatccaatacatatggtcctagtatgtgcctcgacgatagtcctgtggacagaaatattgttgcacaggtacttcgaaagccaccgctaacagtccatggtgaccgaaaacaaac

SEQ ID NO: 310783 - DNA, 468 bp, Zea mays subsp. mexicana
gtgttggcaagatctgcgccactggataagcatacccttgtcaagcatctccgaactaaactctacgaagttgaggctgtgactggtgacggaacaaacgatgcacctgctcttcatgaggctgatattgggctcgcactgggcattgctggaaccgaggtgatttcgagattgtccttatgttactaaaaataactggccaggtgattccaatgatcacactactgcttatatcttgaagaaagcaccgatgtgaaacatcttggaaatttattttgtagctatatataggatagagactgtggctctgtcactcttttatatggcatgaacatctatgagatctagatacccatgaccatgagtaacaccagtagatacatgatgtctcgagttatctgctattgactcccattttgaatgtggctctataacatgttcttaaaggtggccaaagagagtgctgac

SEQ ID NO: 310784 - DNA, 338 bp, Zea mays subsp. mexicana
tgtttgcacaggtggtgaagaaacttcattgacagaaagtggctcgagtaactttggggttgactctgtggattctgtcaagaaaccgtcttttgatcccaagagaagcaatagctttaacttttctggtgcgtcttcccactccatggagaggcatcaatatttgcagagaggaatatcactattaaagacaagtgttacagccattactacctactattacaactcactgggcttggatgtgccatccaatctttctacttttgaggcgtctgctaagatgctccatatgttgtcgtcatcaaaggccctttcgaactgagtgtgaattgaacatt

SEQ ID NO: 310785 - DNA, 292 bp, Zea mays subsp. mexicana
gtgtaagtaccggttcgagaggtatggaatgttctcacagcatatgagaatttgcctgaattcgtaccaaacctggctatcagtaggattgttcttcgtgataataacaaggttcggataatgcaggagggttgcaaaggcctgctttatatggtccttcacgcccgtgttgttatggatcttcgcgaaaaacatgagcaagagatcagctttgaacaagtcgagggtgatttttacacatttaaagggatatggcgcttataacaacttggggatcagcacaccctgttga

SEQ ID NO: 310786 - DNA, 565 bp, Zea mays subsp. mexicana
ttgctcgtcgacctccaccggctcgtcgtcctgcaccagcggttgccggctccccattctcttttggttctcggttccgccggcgaagcgtttacttcttcggccgcgatctcgaggagggagggagcgagcgggaagaaagaggggcgcgcgcgcccatgttttgaccgcgcccgtgatcaccgagcagcagattattgatgccctagactatgggatggcaaaaattgcagattcgatgatgaagcatattctggttccagcaatcagtaacatacatgtgtcagtgcttgtggaatgtggtccagaacacactgtatcagtcttgagtgtagtccattccgaggaaaacaaagacaataaagatgggtcaaatctgtactcaagaataattgatgtcatcaagtttgtgtgcaaattcatctgcatggaatatagcaagtgggttcaattttttgcgaagttaacctgcccaagaatttctgatctagttatcacacactttctctccaaggctgtaccaaatggggcatccatgctaattgagtttcaagatgtcgtgcaa

SEQ ID NO: 310787 - DNA, 181 bp, Zea mays subsp. mexicana
atgacatctttggcattattgggggggttattacaaatgtacaggggggcactaccacccccaagactgtcaaaggaccgtcagccaaggactggagaggtggaagggcctccagcattaacatcattgccagtagcaccggcattggcaaggctggtgctaattggcatcctttatactg

SEQ ID NO: 310788 - DNA, 357 bp, Zea mays subsp. mexicana
ttcatcatctacccgtacctggcctgggcatacaaccccagcgccatggacatgagctacgcgctcttcacctcctccggcaccgtcgtgcaggacggcgcctacgggtaccagaacctcttcgacaccaccgtcgacgccttctacgtcgccatgggcaataacggcggctccggcgtgccgctcgtggtgtccgagagcgggtggccgtccggcggcggcgtccaggccacgccggccaacgcgagggtgtacaaccagtaccttatcaactcacgtactgcggggagatcgcctctattccggcgccatcgagacctacctcttctccatggtcaacgagaaccagacggagag

SEQ ID NO: 310789 - DNA, 443 bp, Zea mays subsp. mexicana
tggtcttcgtccggacgactacgtgcttgtctacgggcctgcttgccgtctggctggtgatatctacaagacttctgacgaggctgctgcctattacgccttttatgatctgaagaagacacttgccaatgcagattacccgataaactacctggggtcgcgctggggctcgcacgagaactcccttggctcggacacgttcgatggcgtgaacataccccatgacctgtacatgaagctgcacatcctcgtgtacaacctggacttcacgggcgaggccaccagcggcacgtacaccggcacggtgcacagggccttcttcacgggtgtcatggccgccatgcagtgcatgatgcgggttctggagctggtcatacagctcatcatgctgcatatcatccaccatgacatgggcgatgacagccctgtgtttgtcccgctgc

SEQ ID NO: 310790 - DNA, 504 bp, Zea mays subsp. mexicana
cgttaaggagaatagcgcgccggagccaggcccctgccatggcctcactgacgaggagtgggcctccgtgcttaaggccgtcgcgcgtgctgacgagaagccgcaccaggacgcgagcttcgagctcttcctccgcgtctacgctgagatgcagctgcgactcaaggcagtaagcgtctgctccggccgcgccggaggaatcgtgcgctcctcctcctcctctgctgttgccttcctcacggcggccaccaccacgctgcttcacaccatcagcgagtccgagaaggcgtcctatgttggccacatcaacgcttatctcgcggatgatccgtccctgaagagcgccctccccatcgatccggcgaccgatcacatcttccatatcaccaaggacggcgtgctcctatgcaaactcatcaacttggctgtaccgggcaccatcgatgagcgagccatcaataccaagagggtccttaatctttgggagaagaacgagaaccacac

SEQ ID NO: 310791 - DNA, 231 bp, Zea mays subsp. mexicana
gtcttttttataggttgaccttcgtgacaggcacgcggggggggacatattctggtggcacaggttcgaggctgtcattgactttgctgggctgaaggctgatggggagagcgggcacaagcccctaatttactacgacaacaacctggtcggcaccatcaccctcgtggaggtgatggatgacaacggcgtgatgaagctggtgttatcgacatctgcaactgtctatgg

SEQ ID NO: 310792 - DNA, 414 bp, Zea mays subsp. mexicana
gtgctctatgcgaggacagatgaacattgggggggatgttttgtcaaatagagggcatctgaaactattccaattgcacataaagtcgggggaccgatgatggacatcgtgctaaatgaggatggacataaaacatgattcatagcctacgagaaggaggaattcactgaagcgattatcaaggtcttgaggatgctagacactgggaggcaagaaatggcagctgcggctaggaaacgtgcacaaagaatgacagaacagagattccaccaagattgcactgagaccgcgcgccctattttgatagcaagggaaggctgactgacaagctgatgcttccacctaacaatctgaattctctggcatgtttgacatcggatcaggatagactagcaaggggcactgaattggcag

SEQ ID NO: 310793 - DNA, 148 bp, Zea mays subsp. mexicana
tcttatgcgtctgcgtcctagaaggacgcaaactatgctttgctctgctacaatcacagaccaaattgatgaacttgaaccgctatcactaaacaagcctgtacgccatgaagctgatccatctgtgaaacgggctgcaacattgact

SEQ ID NO: 310794 - DNA, 453 bp, Zea mays subsp. mexicana
gcctgcacgcgcccggccgtactggctggacccacccatgcgtttcgttccacggcggcaggggcgggggcggcgccgcgtctgtgcggcaccagacggacaggagctaccggaaggctggagacgaccaatgcagcctaccttcccgccacgtggagggacgactggtgcgcacggaccgcaatgacaacacgcagcactggatcaaggacatgaagtacacaaccagtgtcaaagatgagaaaggctaccctgccatgatcctagacgacaaaaccactggagaggctataaagcattcccttggccagtcgcaccctgttcttctgacccggcataaaacatacaccctggacgagactgtcctgtggacagagagcaaggacgttgctgacgggttcccctgcttgatgatggtcaacaacatctacctgcactttgatgcttgacatg

SEQ ID NO: 310795 - DNA, 237 bp, Zea mays subsp. mexicana
tcgttgcccgtacagcacgggcacaagataggagggattgaaactggctcagatggacgtgtgctgactgcaggaatcaagcctggaatgggtgtcacctacagtccaactggtctgaccactgatgcgaaatctgttgagatgcaccacgaggctctgagcatgcaccttctggagacaatggctgactgaacgactataacgtctgtagtgaatgatctgagacgatgatacaca

SEQ ID NO: 310796 - DNA, 500 bp, Zea mays subsp. mexicana
gtcatttgcagaaattcagactctacctgaagagaattgctcagcatcatgcaggaatacctcatccatttgttgcgcctgtatctagtgctaacgttgctccgttaggaggactggaattccaagctttggctgcttctggtcagatccctcctcaagctctggctgctttgcaggatgaactccttggtcgacctgcaagcagtttggcgttgcctggaagggaccagtcatctttgcgagtggctgcaatcaaaggaaacaagcaccatgaagaaagagaaatagcatttggtcaacccatatacaagtgtcagaataatgcatatggtgcattccctcaaagcagcccagcagttggaggattgcaaccttttgcagtttggcccaataacacagttggtatgactgattcaacaagcacattgggaaatgtgggcaattctcaaaatagcaatatgctattgcatgaattgcagcaacagccagacaccttgctg

SEQ ID NO: 310797 - DNA, 489 bp, Zea mays subsp. mexicana
ttcgtgctctctgttaagggggccatgaccctggccgacaagctacacatgttggaggtggaaggcgaggacatgcttaagatgcggtacggggagcttgagattcagcaggtgaagctgaacatgcatgagggagacaacaggagagccaggcaccgagatcgatgcccagcactagcaggtggtttaaaagatgagacaaatgcttcaatccaatctcctgtggcatggctttactatatattcatgatcctgatcgattgtgcatgaaatgattagctagcgctctgcgacccatctatcagccggcatgttcgtcgccttgccttggtgctataagctgatgcccttactttgaatcagagcgtaatgactggctcctttggcaagcctcagggcacctgtgctagggtggacattggtcaggtcctcctttctgttcgatgcaaggacaacaatgctgcacatgccagtgaagctctgcgtcgc

SEQ ID NO: 310798 - DNA, 488 bp, Zea mays subsp. mexicana
tcgcttacgcgtggggtcggagacccctcgccgccagagaagcggctgcacgcagcacgcctgcactgcacatcctctgccctgctgcttgcttctctcctcccctgttcttcgccgacagagaactcccctggttcttccccgacagataagtacctaacttgctatttcctatttttttatcacttgtattgatgcccaattgcatccaatcagcagatctgcaaggacaaaaggtatgtctactggtccttccctattttttatctataaatgtatatattatataagttggcaaaacgcctagaaaaacgcctagcatcgcctaggcaagcctaggctggactagtctctaggctaagggtcatcgcctagattccgcctagcgcctagcaaaactttggtccttggtacccaattcaggccttgttcggttaatcccattacccatggattagatgagattggaaaaatctaagaagaagttt

SEQ ID NO: 310799 - DNA, 478 bp, Zea mays subsp. mexicana
ttgtttcacttctaccattttggcattcgtggttcgagcaagcaccaaaagtggtccatcagtgcttcctacggccttcgtttcaaggaccgattcttcttcagtggatgctgacagctagacatcccgaaagtcatctgaagagtagctcggcacatgtagcctcctggagtcgttgacaactcagtgccatctgaatcataggacaactgaagcaaagtgaggtagtaatggaagaagaattgcaaagatcaggctgcttgccatcatatatatatacatgggaggaggaggaataattgccaggtgccacacaagatcggcctaggtctgttatatgcaatgtccatggtgttaatccaaaatttattgaggtaggcaagccaaagttgaggcagctgtagaatgtgaagaaagccttcacagaatgggcataatacatcaagaagatggtatggagtaaggtgtacagtgagca

SEQ ID NO: 310800 - DNA, 392 bp, Zea mays subsp. mexicana
  unsure (1)..(392): unsure at all n locations
tttgtcatatcaggtttgaataatgagtacttaggcaaatctgaaggagacaaaagggttctcccccagttccagtataccctgctattaaggcttatgttgatctgaccccaaagccttatgtcaaggatttaaagatctggccccacagttttgcatttataactacttattatttctttcctcctcttggagatctgagtctcacatcccgaatcaggaataccaacacagattntttttgggtnttcttattcatttgcatatcacacatacttctctgtctctgannnaananaaagggcgtgtctaagggctggacacaatggactaccttgacaacttgaaggcaaatnnttttttttttttagaaaggcgatgctattgttttg

SEQ ID NO: 310801 - DNA, 496 bp, Zea mays subsp. mexicana
  unsure (1)..(496): unsure at all n locations
tttgaccagctcagtttgcttgggaagaagatcacaatttctcttgtgcatgaacttgtaggatcagtgtctgatgacgagttgattgagttgcttgatctagcattgtcatctgacacaaccaatactgtaagacgagcccgagaacttatggggtcagcaattgatcctctgcagcttgtttctcagctggccaaccttattatggacattctctcaggacgatgtcaatctgctgtcagtgaagtcagcaaaagtttcttgggtagatatgcattatcagaggttggaataaagaaattaagacatgcactgaagatactatcagaaactgaaaaacaattgaggacatcaaggaatcaggctacttgggttacagttgcgcttttgcagtttggcaccaatgaacctaaccttattgctgaaccgaatgatatgcattcacattcagtaactggatatacagatgactgnngtttcaaggtgcactcaaaca

SEQ ID NO: 310802 - DNA, 320 bp, Zea mays subsp. mexicana
tcgttttcacgcatcgacagtcactcgtcggttaagggacccattgcacgagcatcgcctacactgccggtccacggtaggttgattgccatatttatgggctcgtacaccactcgttatgctgcgtgtaagcatgcgagctctatttcaatctgaccgctatgaatgatgcctggtggacggctagcggctctttagatgttaagtttctacgccctgcttctggatctgaagtgcaaaggggtctaccttcgtcttgatcggatgctgagactacgactatgccggctgctgggctgactgtaagagcacataaccga

SEQ ID NO: 310803 - DNA, 458 bp, Zea mays subsp. mexicana
cttacgcgtccgctcgacgacccattccgggtgctggagcagtcgccgctggcggcgtcatcggtgcccagagccagcctcgactctacgtcggcggccggggtggcgctggcacggtgcgactggaaggagacccccgatgcgcacgtcatctcggtggacgtgcctggggtgcggcgggaggacgtgaaggtggaggtggaggagaacagccgcgtcctgcgggtctcaggcgagcggcgggccgacgaagagaaggaaggcgatcggtggcatcgcgccgagcgcgcggccggacggttctggcgccggttccggatgcccgccggcgccgacgtcgaccgcgtgtccgccagattggagaacggtgtgctcaccgtcaccgtgcctaaggtggccgggcaccgcggccgggagccgtgcgtcatcagcatcgtcggcgccgatatgggcggcgt

SEQ ID NO: 310804 - DNA, 662 bp, Zea mays subsp. mexicana
ctccttgctccccttcgacatcgaagccgccgtccgctccgccaacgacaccgtctccggcaccttaagctcggtgaccaagggcgtgcgggagctgccggggagcttccagagcgccaccagcagcttcccctccggaaaggctctcatgtacttcggcctcttcctcgccaccggcatcttcttcgtcttcatcgccttcgcgctcttcctccccgtcatggtgctcatgccacagaagttcgccatctccttcacgctcgggtgcgcgctcatcattgcctcgctcttcgcgcttaaggggccagccaaccagctcgcccacatgacttccaaggagaggctaccgttttcagttggatttattggatgcatggtcggtaccatttatgtttctatggggcttcacagctatttcctctctgtgatcttctcagtccttcaggttctggcccttgcatattacaccatattctacttccctggaggatctagtggactgaaattcatctcgtctggtctggtgtcctcggcaacaagttgttctgtcgatgaccttctttgcaattgcatacatttattgacaacctgtatcgtttagaatttgatgagctgctgacacctttgagcttgtggtactagatgacctatcacaggtgagg

SEQ ID NO: 310805 - DNA, 356 bp, Zea mays subsp. mexicana
cgcattctcgccgtcgtcggcctcttcggcctcgctgtccccatcctcgtctacaagggcatcgtccgcgaattccatatgcaggacgaggatgcaggtcggccatacaggaagttcctgtaagcggcgtccagggctgcagaatacgtcgattcctcgaccggggctgcgaggaggggagtttctattcagtttgtatcggtattgttttagtctgaatctgatgaagcaatttggaatgctgaattattgtgcctgatccaaaagaataaggtgtaatgactcgtcttttcaattactggaaaaaaaacctttactacaattgcttaaaaaaaaaaaaaggatattatgttagg

SEQ ID NO: 310806 - DNA, 474 bp, Zea mays subsp. mexicana
  unsure (1)..(474): unsure at all n locations
gaagccgnggccagcagcaagcaacagcacttgtgatgcacgctgatcaatgagcatagtacgagtgttcgcgtacacgcatacagcaataacaggaagggaacaatccaagcacggtatgagctgactcggtattattatacagtagtagtacgcacgaatgcaactacgcaaacgccctccgtacacggcacaccaccaccttgcacgcacgtacgtgacggtgacggaatggacggaccgtggacggcaacgcaaagcaagcgcctcatcctcctcgaccattcaggaggcgtggtcgttgaggacgtcgagcgtcagctcgccgggctcggtggcctggaggtccacctgcacgccgtccagctccttgcggaacccctcgcaggagctggcgtacaccatcttgctcctgacgcccgccgnctccggggcccaggccacgaagacgatcctgctgcgcggcgcctcgag

SEQ ID NO: 310807 - DNA, 455 bp, Zea mays subsp. mexicana
ggcgtatgctcccctccgccgcaccgtctttcctccggctcccgaggccgaccagccggctccggcgcgccacgcaagaaattgcggcggggggagaggcggacgtgctgcctggtccgggggccgagggtgaggcggcggttccggggaggctggaggagcagcgggacgagccgctggcgggaagccagctcgacatcggagggctcgccttccagggcgacgtcggcgggggcttcaccggcggcggagcgggctccggggcctccggcggtggcggcgacggcaacaagatgctggaccggggcatcaatacggccatcgttctcgcggccagcacctacgcgctcaccaagctgctcaccgtcgaccaggactactggcacgggtggacgatcttcgagatcctgcgctatatgccggagcacaactggtccgcgtacgaagaggccctc

SEQ ID NO: 310808 - DNA, 561 bp, Zea mays subsp. mexicana
  unsure (1)..(561): unsure at all n locations
gttatgngcaacatgcaggtggatcctagcaagtacagggacattacatctgcctttggtgtcatgctccatgagcaaggaccccgtggcttgttcaggggatggatggccacactggttgggtacagctgccagggggcctgcaagtttgggttctacgagttcttcaagaagtgctactctgacattgctggtcccgagaacgctgaaaggttgaggactttgatctaccttgcagcttccgcgtccgctgaggtgattgcggatgtagctctctgccccatggaggctgtcaaaattcgggtccagacacaaccgggatttgctcgctgcctggtcgatgggcttccgaagattgtccaatccgaaggtgcctttgggctttacaaaggtctacttactctttggggccgccaagttccctacactatgatgaaatttgcttgctttgaaactatttgtgagatggtctacaagcatgcttgttcgaaaccgaaagaccaatgcagtaggccacttcaactagcagtgagctttgcaggggatacattgctgggatat

SEQ ID NO: 310809 - DNA, 280 bp, Zea mays subsp. mexicana
cgttatgcaccattccgggtcaatccttctggagcagagtttcagaagattgtggcctattgtaccgactggcacaagtggatcagcaatcgcggagggattcgtgtagcaccagagaaaagccggtagtcactggagggaaaaggagctagagctcctttgagactccgggaagcgcggtactgttgatgaaataccgcttgcgctgagttgtttaatctaccagtacggacttgtgtaacacctgaatataacgaagaagataaccaaggacaaccag

SEQ ID NO: 310810 - DNA, 501 bp, Zea mays subsp. mexicana
ccatttcgatgggcgctcgggtgagggtcacgcctcaggtgaggaccatgataatgagggcacacactttgatcaagaattcagccgtcgagaccttgtgcacatgattgtccagcatggctaccggttttcgattgtggatgatgtgggcttccaaaagtttgttaagaacctccagcctcagtttaggatggtgtcgtatgaaacagtgagggctgatagcatggaaatatatgaaggtgagaaacttaagctacatgatgttctctttaagatcccctgccgggttagcatatcagttgacatgtggcggtcaaatacacagatggaatacatgtgcttgacttgccactacattgatcatgccaatgatgagtggaaagtcaggaaaaaaattctcaactttgtgcatatggaggcaccttttacacttgatcagatggtttatatcattgtagagaagttgcatagttggggtattgacagaagctagctgctgtt

SEQ ID NO: 310811 - DNA, 313 bp, Zea mays subsp. mexicana
ccgtttcttgatgtttctccggggctcggattcgacgggtgagcggatcgagatggcggcgtcagacgttgactaccgttgcttcgacggcggcctcacctgggccacagacgaccactccctgcacaacgccttcagcacctacggagaggtcctcgagtgcaggatcatactctatcgggagacgcataggcaccgcggcataggctacgccaccttctccacggaggaagcgatgcgaaacgccatcgatggcatgaacggcacggagctggacggacgtaacatcaccgtcaacgaggcccaatccctc

SEQ ID NO: 310812 - DNA, 344 bp, Zea mays subsp. mexicana
tcgtttggcttctccttcccctccgggtcgggtgcgggttcgagaggttctccggggttcaggctcgtgggtgagcggatcgagatgagcagacggggaatgtcgagtaccgctgattcggcagcggcctaggctgggccacggacgaccactccatccacaactccatcattacttacgggcataatacttgagttcaagatcatatctcgatcggtagacgcagaggtcccgcggctacggcttcggcaccttctacacggatgaggcgatgcggaacgccatcgagggcatgaacggcaaggagctggactgtcagaacatcaccgtcaacaaggcccaga

SEQ ID NO: 310813 - DNA, 482 bp, Zea mays subsp. mexicana
ttcttctcccttggtgcctccactgcaattcgggaatgggttcgtgtcgggggctgtcggtcagcagcgaggtggtcccgtgccccccgcggtatcgcccaggcctgtgacggccagcgcgttcgggaagatggagggagacgacttgtcatccctgtcgccatcaccggttccgtacattttcggtggtgggttgaggggaaggaagccaccggctatggagaaggtagttgagaggaggcagcgccggatgatcaagaaccgggaatcggccgcgaggtcgcgccaaaggaaacaggcatatatgatggagctggaagctgaagtggcaaaacttaaagagctgaatgatgaattgcagaaaaagcaggtatgcttatacaatgtttgcatttttgtttcttggggcgcattaacttatgaaagtatttctcctgaaatagtgaaattcaaatagtttgttaatattcattcctgaattc

SEQ ID NO: 310814 - DNA, 539 bp, Zea mays subsp. mexicana
ttaggagaagcaacagcagatcgagtaccccttcttcaccaagggttcgtaggagcttctcaaggcgcgtgtcgacattgtatagtacttgctgccctgggccaaacgacaccacgaggaccccgatgaggatacggaggtggaggccaaactcgtcgtcaagaaggctgggcagtttcgtcctttgcagatgcacatgcttatctagaagtgttgcaaggcttggttattcaggaactgctattatatcacgggtacaaccaatctcagttcaatatgggcttggcataccagagcgtgatcaggaaggcagacttattaccttggagtttgatgatttttacttggtcaatgcttatgtcccaaattctggccgtggtttacgtagactgattgaggcatcagttggtacagatgaggatgatggagaatcaaatccctaagcaaatgaactggagctatctagagtatctgaaatgcagctcatactagcggaccatggtcaatgtatctttttgaattaagtcggccattaaata

SEQ ID NO: 310815 - DNA, 340 bp, Zea mays subsp. mexicana
  unsure (1)..(340): unsure at all n locations
tggtgcgcaccgcagcgaacccaacgggcccggggcagtcgtaccaacgccacccgacgagcccacnccggcggcgcagagccacgggcgccgcccgaacgacgcgcgaaagcacaaggggagcgccaacgaacagggccacgacaaggccggccaaccccagcacgagcaaagcagcccgccgcaggaggggcaggaggaccacgacgccgcaaagcgcacacgcaccgccancaaggccaacgccccacggcaaccaccagaacgagccccagagccccaaccccaaccccaaacaacgggggcaagaacagcccagaggacaacacaagccccaacc

SEQ ID NO: 310816 - DNA, 521 bp, Zea mays subsp. mexicana
  unsure (1)..(521): unsure at all n locations
ttagcagctgcaccagcgtgtgctgccggtgatgcgcctgcatcaggtggtggggcatgtgccgctggcggtctctgtaccgcagcttcgtccggtgccgccgcagccagtccagcgccccccggtcgccgttcccttgaaaccagagtcaccaaaactacgggcaagactgtacgaagggaaagatagtactcccacgaagaagaagtgctgcaactgcaggaactccaaatgtttgaagttgtactgtgaatgctttgcttctggtacttactgtgatggttgcaactgcaccaactgttttaataatcctgataatgaggttgccaggcgtgaagctgttgaagctatattggatcgtaatccagatgctttcaggcctaagattgggagcagcccacttatgcataggaataatgaggtgcctaagtgatcttcctttagtagggaagcataatnagggtgccattgcaagagcaggatgtctaagagtacgggagtgcttcagctaaatactatgc

SEQ ID NO: 310817 - DNA, 570 bp, Zea mays subsp. mexicana
tcttttagtgcaagatggagaaagacgtggggtgaaacgttcaaggtgtgaagatttcaacagcacttggcagttgttgttcaaacttcgctggcccctgggtggtaatactggacataataatttggtcactgtggattggcagcaaaagtattgggaaaagcatttacaagagtgtttaaatgaagctgcagaacatgcttttcttccttttttttgtgggagtattggtgagctgagtatatcagctaaaatcatgaattccatctaccagagcatgggcacatctcaacagcattcaagattagcatatcaatgcagcaaatttggttgctatgtgaggagcttgagactgcaaggtgttctttgcactgcagaaacttatgtcttgttgcaacaatgcaagctggaaagattaatgttcataagaattatatcagacctagaggttaatggtgcatgtttgcttctgagctggcatgcagagacactgctttctcttgaattcatccattgtcagctttatcctaccgtcatggataaaatttgcatgagtgtgtacctgaggga

SEQ ID NO: 310818 - DNA, 388 bp, Zea mays subsp. mexicana
agggggcctacgtcctgcttgtggagcactgaacgtagatcacgagaataactaggattcatgccaagggtgcaggaacgacggcttcgaactcatatgtactatgaagggggctttggagcacactctttggctgatgcgtgagacaggaagatatggaagttgttctgaaagcgagcaaacatgcgtggtgccaagagatatcaatactggctgacgaggaaaccaagtgataatggtttctattggtggtgatgatcataccaaaaggtgtaggatcatacatcatactaaagctgcttgagacgctgggacaaatcagactgagtgcgtgcggggttttatatgcgcttgggtaatgaagtttgaagatctgaaagaactgggc

SEQ ID NO: 310819 - DNA, 215 bp, Zea mays subsp. mexicana
ctcgccgaccccgtagagcgcagcaccataagcgtgccgaccgacggatgggtcgccgtacggatcatcgccgacaacccggacgcgtggatgatgcattgccacttggagccgcacttgaactgaggcctgtccatggcgtgggttgcaaacgacggtcagctgccaaacgagaagatgttgccaccgccatacgacctaccaaaatgctgatg

SEQ ID NO: 310820 - DNA, 500 bp, Zea mays subsp. mexicana
ggtgttttttctggctatgagggagacatttgttggggcattgctgtgtcaagtgaaatgccttgtgtgcaagagagagtctaacaagactgttgagattatggacatcaacctcgatctgcctgggagcagttctgttgctgatgcccatgctcgcttctttcagccggagaaattggaaggtgcaaacaaatatagttttgaaagatgtaaaacactcacctcatcgcagaagcaaatgtttatgctgagggcacctaacgtgcttgtcttacagctcacatggtaatgccagcccctgacttaaaagatcaacaggaatatagaattcaaggatacacttggtctatctgattgcgtgtcacaaaaaaagccaggatccgcaaccagtatataacctttttggttgcatcgtccactcagggcttttaccagaatctggtcactactatgcttatggctaggattctagtggtcaatggttttgttgtaacgattct

SEQ ID NO: 310821 - DNA, 431 bp, Zea mays subsp. mexicana
ttagtttcatctgtatcagacattgagaacacttctgttcctacaagcctcaaagatagtaatttggattcatcgtctgccgtagtaattgaaagtgggaggggaggtgatgagaaaatgtctatgtgggaacggctgcaagcatttgataaatggatctggacttctttttactccatccttactgctgttaaaagtggcaagaagtcatttaaggagtcactacttcgttgtggaagttgtcatgatctatattggagagatgaaaagcactgcagaatatgccattcaactttcgaggttggttttgatcttgaagaaaaatatgctgtacatgtggcgacgtgcatggagcctgaactttacatgaggtaccaaatcataaatttctgccatcacagctacaggcacttatagcagccattcatgct

SEQ ID NO: 310822 - DNA, 418 bp, Zea mays subsp. mexicana
catgtgtggatcgtctcattaaacaaattacccttttcatgtctgacatagcagatgaattcaagatagttgttgttgaagctatacggtctttgtgcctgaagttcccactaaaatatcgctcaatgttgaattttttgagcaacagcttgagggaagaagggggctttgagtataaaaaagccatagtggattccatagttactttggtcagtgaaataccagatgccaaagaaattggcctgcttcatctttgtgaattcatcgaagactgtgaattcacatatctttctagtgaattcatcgaagactgtgaattcacatatctttctagtcagattttgcactttttgagaaatgacggacccaggacatcagatccaagcaggtacattcgctacatatacaaccgtgtgat

SEQ ID NO: 310823 - DNA, 496 bp, Zea mays subsp. mexicana
cttctgtaaacccaggggttctggaacaaatgacaggggagacgatttggcttaacacagaagttattcagcttctgagatcgatcgtattgcacgagttgccatttgaggtcgctcgcatgaaaagagggaaactatgctcggttgataaagcaaatgtgctggaggcatccatgctttggaggaaaaaggtgactgcactagcctctgaattccctgacattgagctctcacacatgtatgttgacaatgctgcaatgcagcttgtcaggaatcctaagcagtttgatacaattgtcacaaacaatatttttggtgacatattatctgatgaagcatcaatgattacgggaagcattggaatgcttccatctgcgagtgtcggtgaatctggacctggtctctttgaacctattcatggctctgcccctgatattgctggacaggttgagatgacttctgtttcaaaaatttctgacaccagaatacttgatgg

SEQ ID NO: 310824 - DNA, 489 bp, Zea mays subsp. mexicana
ggagttttgaccaaatactggatcagtggctttggcgcggcatgcgtcggcagcttagcactcagtggttacaatgctgaccttgggtggccctactatccattcctagcagctgcagctgcccagttagcgtggcaggtttcgaccgtggatctgtctagccgctcagattgcaacaagaagttcgtgtccaacaagtggtttggagctttggtatttagtgggattctatttgggcgtcttgtatcatgatggttagctgatgaagcgtcatgtgcttgcatggtgggtccagtggaacctaagcaatattatgatgagatgctacaaacttttgtgtctgggctagcaaatgcggcgtggtacaggagtggagtggactttgtaagctgcttgatctttcaccgtcatcaaaccttggctatttaacgagcatatcaatcatggtggtggtctgatgtaggacaagtgttacgattttcctagcag

SEQ ID NO: 310825 - DNA, 259 bp, Zea mays subsp. mexicana
cgatttctgcaacggccttcttggtggcttcgcgggggtcaacgggggctggttcgggggccaacccctgggcggccgtaatttgcggtttcgggtcggcgtgggtgcttatagggctcaacgcgctggccgcgaggctccggttcgacgacccgctggaggccgcgcagttgcacggtgggtgcggcgcgtggggggtcctcttcacgggcctgttcgcgcgcagggagtacgtggagcagatctacggcacgccggg

SEQ ID NO: 310826 - DNA, 482 bp, Zea mays subsp. mexicana
cttccttgcgccccagcagcaacggattcccctcccctcgagagatccgaccctggcccggtcgctggggaagcgcatgggctctggatcgctcctactgctgcgggcttgtttttttaagcaagaaaatgggaacctctcccctggttggggttgcagaatgctgggaagacatcgctggtcaatgctgttgctacaggtggctacagtgaggacatgattccaaccgtaggcttcaatatgcggaaaatcaccaaggggaatgtcacaattaaactttgggatcttggtgggcaacgaagattccgcactatgtgggagcgctactgccgtggagtttctgctattctatatgttgtggacgctgctgaccgagatagcatcccaatagcgaaaagtgaattgtttgattctgtgacaaacagtcttagctgggattcccttgcttgtcctgggcaacaaaattgacaagtcagaagcgc

SEQ ID NO: 310827 - DNA, 616 bp, Zea mays subsp. mexicana
gtccatctctggccttcgtgtcgttcttctccatcggcctcgggcccatgacggcggtgtacacctcggagatcttcccgttgcgggtgcgcgcgctgggctacgcggtcggcgtggcgtgcaaccgcgtgacgagcgtcgtcgtctccatgaccttcctgtcgctgtccagcgccatcaccatcggcggcagcttctttctctacgccggcatcgtcgctctcgtgggtgttcttcttcacgtgtctcccggagacgcgcggtcggacgctggaggagatgggagagctgttcggcacgattgacgcgggcaccgaagcagatcgtgactccgccgcgagactcctttcgtcagagttgaccacatgatactccttttgcgctttggtttgtctgcagtaagcggtgcaatcatatgtgcaggggcgggtgccagaaggagagaggggatgaggagggccaggcgcacaggcacacccactgcttggggtgacgttattttctgctcccctaggtgttcggatatgaaggactttactcttactatgatgcatatgtcggggtaaagtaggtggtttcagttttagattattaaaccactaaattggctttctgt

SEQ ID NO: 310828 - DNA, 456 bp, Zea mays subsp. mexicana
gacattttggacccgtagtggcgcgacattagcggtgctgtagccacagaggccgtgtttactcctacgactctcacctccggtggagacgcccaccggtgcactcattcacggttatagttaaagggcttgatttggataatcagtcatcaacacatgggataaaaaatggtggttcttgcagcttcaatcgcttcaaagccggaaaaagcacttgtatcaagacagtttgttgacatgtctcgcataagaatagaaggaatgcttgctgagttcccgaatctgggtggaactgggaagcatcacacttatgtctaaactgaaaatgtgcgagatgttcaccaacctttcgaaggtttatatctgctactgatcacaaccaagcaaagcaatatttctgtagagctggacacttttaggcttctttcaagctcgtgcctgaatacatcatttcat

SEQ ID NO: 310829 - DNA, 559 bp, Zea mays subsp. mexicana
gtcgttatacccgaggatgtcttgaatgacacaaggtttgagagggccatgcaattttatttcgtgtatctccgattggattggctctggtcacttaacctatttgctttgattctattgaatttcctagagaagcctctctggtgtcaaaagtacgccccacatacctgtgatcaaagggatctttactttcttgggcagttgccatacttaagcaaaacagaatcactcatatatgaggcgctaacccttgtcattcttgtcttggatatcttctacccactttcctatgaaggtttaaatctattctggaagaactccatgaataaattgaaggttcttcttctcttcatcttagcatgcgacatacttgtgtttatgcttagttctggacctttcagagtagctccgtacatccgtgttgtgtttctaattatgacaatcagggaactgcgaatgtgtgctgctacgctggttggtattgttgggacatacattaatgttttggctctgtcactgttattcctattatttgcaagctggctagcctatgtaacat

SEQ ID NO: 310830 - DNA, 285 bp, Zea mays subsp. mexicana
agccttccgaggccggtcgcacgcttgccgactacggcattcattatgatagcaccctgcactagcagctgcacctcaggggtggcctgcagatgtgcatgaggacacttactggcaagacgatcacccttgaggtggaggcctaggacaccatcgacgacgacaagggcaagatccaggacaaggaggtgatcacagcggaccagcagcgggtgatctatgctggaaagcagcttgaggatggtcgttccattgccaattacaacacccaaaatgagagcaccc

SEQ ID NO: 310831 - DNA, 577 bp, Zea mays subsp. mexicana
  unsure (1)..(577): unsure at all n locations
gttgtgccacaacgctcctgctcctcctttcggatctccaaaacttccactgcttgtcttcttgtaggccctgcacgccaatcttcgcctaagcgccggcccccatcccccgtacaacactcctacgatccctgcagtgcaggctctaacagattcactactgcttcctttaatttgtggtgtatttatttctctactagttactttcttacttgagaaaatttgcttattaatgtgactttcagagtataaacattgggaagaagagattgataagtggcagaccccggttctccaagatgagaggcttccagaatggtacaagattacactctttaatgagctgtacttcctagttgctggtggaaccgtttggatgaangtggactttggtgtctgatgctgaaacaagtcgaatccaaggaaagtaatttgtcacatgagatcgatgacaagaaaatgttgggaaaccttgtactttgaaggatagatacttatgtggtgcaccatgatgtacactctatgcctcttgctctttgatctgttcctagatgaatgagcattcacgtgattgcta

SEQ ID NO: 310832 - DNA, 320 bp, Zea mays subsp. mexicana
gtgcgcctcctgcaggtagccggtaccggaatgtgccggacccgacccacgcggtgcttccgtttcttcttcgacatgaccgtcggcggtgccccagccggccggatcgtgatggagctgtacgccaacgaggtgcccaagaccgcggagaacttccgcgcgctgtgcacgggcgagaagggcgtgggcaagtccgggaagccgctccactacaagggctgtaccttacaccgggttgtccgccaattaatgtggctcggctgctagttgaccgggggcaccggctacggcagcgagtccatctacggagagaagctgcc

SEQ ID NO: 310833 - DNA, 283 bp, Zea mays subsp. mexicana
gcttttgtttattctctaaacgacctgcctgatgactggctttttgtggaatgcacacccatggtgcatcatggtgggtgtggaacaacagccgcaggtctctatagctgcgtgtcctacgactatggtacctttctgtggtgaccgacctttctgttgcgaccgtgtgcattcattagggctagggcctccgcctattccagttgagcaacttgactcgcagaaactgctggatgctatagtgcatatgacgaaaccagtggtcaaagacaaagctgttgag

SEQ ID NO: 310834 - DNA, 604 bp, Zea mays subsp. mexicana
  unsure (1)..(604): unsure at all n locations
tctcttctgtgtttgagacctgtagcactgaatttgctgtcagagagagaaaaggatgaacttgtgcaattagttgatactatggtctcctattcagttacatacagaaacacatagtttgtccctcaagaaaaggcaaacctatctgtagtgccgcatgaagtttcatcactctctctttatcctccaattaatgatgtcataaattttgagggctatcaatcagagcacattggactgtctttagccatgaaacaggttttggtgcatgaggtggagaagcaaaagatcattaaagatagcgctggcaaattgttgaaccaatctaatgatggaaatatgaagagcgaagctttatcaactataaggaagaaaacagtagctaattccatccgtccagctttacattcttcaaggatagttccaagtgcaattcatctacacttgatatgcagtcaaactcagcctctattgtgaatgataacgattctatatctgccaaataacacttcagccgtgcagcatatttctttgacagatttaggaaggaaagaccagtagacgcataaactcatagtgatgtggngctgcaaagagcaacact

SEQ ID NO: 310835 - DNA, 331 bp, Zea mays subsp. mexicana
gcacgcctgaggcaccgggacgtaattgccggaccgacccacgcggctgttcttttaggtggaggccgcccgagtcgacgtggcagaggatacaatcattggacatccggaggagcgcggacagacggtcgttcccgcagcaaccgacttgtgcgcctaggagcttgggctgcgtgttcctcaccggcgagaagctcaagtcccccggccaggaatgcaaaatggtgtacctggggatcaggcagagcaagctcggggcccccatgctcgagtgcactaaggagtgggacggcaagccgttgcccatcaacatcagctaaaagacgccagg

SEQ ID NO: 310836 - DNA, 364 bp, Zea mays subsp. mexicana
  unsure (1)..(364): unsure at all n locations
cccacgcgtccggaagatccttaggagggagtcctactggtacaacgggatcggcaacgtcgtcaccgtcgatcaggttactagctcactctcctcgtcatagctagagcatatatatatagatagaaaatcaagaatttattttgttaatgtggaacatggcaataccatagttagagaatcgccgttagcattattattatatacaggatcccaacacccgctacccggtggttgtgcggttcaacaaggtgaactacgcctgcgtgtccaccaacaactacgccttggacgaggtcttagaggtgaaatgagtggggccggccggctcaagggctccgcgctgctaccgngtgattgattt

SEQ ID NO: 310837 - DNA, 495 bp, Zea mays subsp. mexicana
aggacctgcccggtatgccggggacgcccggaggcctcggcctccgcgtcctgcagctcctcttcgcagccatctcgctggccgtcatgtcatccaccgccgacttcgccagtgtctccgccttctgctacttaattacaacaaccgtcttgcaatgtgtgtggagccttacggtagctattgtggacatatatgcactgcttgttaagcgttgtttacgaaatcgtcgggctgttactctcttttccattggagacgggatcacatggctagtgtccttatctggagcatgcgctgcggcaggaatcaccgtcctgatcgacgcagatctgatcatgtgctcagagaacccttgtgctagttttcagactgcagtggcaagggggttcatgtgctgtttttctctcttaccatcctttctcctgaacttttattcgatcgcatctagtcacggctagctgaaaagaaagaggaggatagaacctgatctcgagc

SEQ ID NO: 310838 - DNA, 565 bp, Zea mays subsp. mexicana
  unsure (1)..(565): unsure at all n locations
ttcgtatgcgttttcgtgtaaccgtaactcgaaaataatacaaaaaacgttaaaatgtcgggaggattggacgttcttgccctcaaagaggatgatgttacaaaaatgttagctgctaccactcatgttggttcagacaaagttaacttccaaatggaacaatatgttttcaaacgtcgtccagatggtattaatatcatcaatttaggacgtacatgggaaaaattgttgttggctgctcgtgctattgctgccatcgaacacccacaagatgttttcgtcatctcatcacgtttgtatggtcaacgtgctgtcttgaagtatgccaactatactcaagcaactccaattgctggacgtttcactccaggtgcattcaccaatcaaattcaaaaagctttccgtgaaccacgtcttttggtcgtcactgacccattgactgatcatcagccaatcattgaagcttcatatgtcaacatcccagttattgctttctgtaatactgattcaccatngaaatacatcgatattgccattccatgtaacaccaaatcaactcattcaa

SEQ ID NO: 310839 - DNA, 333 bp, Zea mays subsp. mexicana
gcttttacgcatcggcgctgggctttgccgatgaagtggtggaggagcgtgtggcggacgacgagctgctgtacatcaagggctgccgcgccgtcaatgtgcactcactggtgctgcgcggtgccaatatgttcatgctggacgagatggaacgctcgttgcacgacgccatgtgcattgtgaagcgcgttctggagtccggcgaggtagtgcccggcggtggtgccgtcgagacagcgctctctgtgcatctggagaactacgccaccagcgtgggctcacgcgagcagcttgccattgccgagttcgccgacgcactgctggtcatcccga

SEQ ID NO: 310840 - DNA, 601 bp, Zea mays subsp. mexicana
ggcttggccatcttggagctgggcgattacataagaacattgattcaggaatgcaggtgtcaaggataatccagaaactgggacctgaggggactggcaactttgttctgttgtccaacatatttagtgctgctggaagatttgatgaggcagcagaagttcgaataatacagaaggtcaagggctttaagaagagtcctggctacagttggatcgagataaatggctccttacatgcatttgttggtggagaccaatctcatccatgttcacgtgacatatatcatgaacttgataatatcatggtagacattaagaaactaggctaccaggccgacactagttttgttttgcaagatctggaggaagaggaaaaggaaaaggcacttgtttatcatagtgaaaagctagcgatagcttttggtgtcctcagtcttaatgaggatgctaccatttttgttacgaagaatcttcgtgtatgtggagactgccatactgccatcaaatgcatgaccttagttaggaacaggactatcattgttagagataccatagatttcatacttcaagatgggcaatgcagttgtgagatttctgtgac

SEQ ID NO: 310841 - DNA, 591 bp, Zea mays subsp. mexicana
gtgtgatctttggattgaaccaatccttatttcagagccccacccttctatcaaggttctagaaacaggatatgagttttcctggtctgcctgtctctttaccttttttatttttaacttcattgagtttgaaacttatcaaaatacaatgattcaccatattctttatagctgtatagtttcattagtactgcaattgtatgcaagtattttcatcacctgatgttttgttaagcaatctatgtcacagtgagtcatccatgttttgactgtgttgatctgtgcaataaccaataaaatgcaattatagcttcgaaaactacagaggcctatatcatatttttgagttccttatgtgagtcatccatgttttgacttgtgttgatctgtgcaatgaaatacaattatagcttggaaaattacagaggcctatatcatatttttgacttccctacttttgagtacctttttctttcaggtcatgaatttaattggcgacgtgaaaggaaaagtcgctatcctgattgatgatatgattgatacagcagggacaatcactagcgcagcggcttttgtaaagcaggaaggagc

SEQ ID NO: 310842 - DNA, 488 bp, Zea mays subsp. mexicana
  unsure (1)..(488): unsure at all n locations
gatggatgtggttctcgcgacgatgttgatgcacgggtattgcttgcatggagaagttgggaaggcattggatttgtttgatgaggttgtcagtgatggtgtgacaccgaccaatgtgacatatggggtgctaatcaaaggttgtgatgcagaggggatgtcagatgagacatataagctatgccgccagatgatagagcagggattgttactgagcacatatgagttcaatttggtgatcaaaggcctcttgagagacaaacggtggaaggatgccattggcttacttgaacttgtggtagatactggggtaccagatgtcttcacttacggctgtctaattcattggctctgcaagcatcaaaaactccacgaggcagtcaacttatgggataagatgaaggaagcaggagtcaaaccttctattgtgacataccacagcctactgctggngtactgtgagaaagggcgcatggatgaagcactca

SEQ ID NO: 310843 - DNA, 341 bp, Zea mays subsp. mexicana
caagtctccaatcacgaccttcatcgtcgagccatttgtgccacatgatcaagagtgctgcatctattctgtctcagagaggttgggccgtaccatcatcttcacagagtgtggagggatcgtcatatccgaatacatgttgtggtcctattgtattttgcttcctagcagatgtatcttagattgcatctccacaggatgctgaagttaaagtcgtaattctgactgtaagtgacactgtttcatcaggtgctggcccttataggagtggcccaagagctgtatctgtagtgaattctttatcagagaaactgtgtggtgcaactgtggttgccacttgc

SEQ ID NO: 310844 - DNA, 564 bp, Zea mays subsp. mexicana
acctttttaacgatgaccacttatgttgcaggggggcatcgaatgcatgttactgctttgcacatgtgctcatttcttttgtgtggcttcttttctatggacagccaccatagcattcactctgcatcgcacagttgtaaaacacaaaactaatgttgaagaattttgatctattttcacttagggcttgttcgtttcaatattaatccatgtggattggatggtattgagtcggtttaaatccatagcaagtcaaaatccatcccaatccatttcaatacacaacaatccatatggaattaaaataaccgaacaaggccttatatgtgttgggtggggtatgtaaactatcaattacatacttgcctttgcttgaacttatattttccaaattaagtaacattttggacatgttagagaacatattctggagagactttgtgttgaaagaaattacgatttttttggaccaatatgtagttcagtagttgttctctcttatgtctgggtcgaagctttgagtgtcccatccatggatattttgttgcagatcaacatgctcag

SEQ ID NO: 310845 - DNA, 459 bp, Zea mays subsp. mexicana
gtgcatgataagggcgccgtgctgcggcgaggtatttggttgcaggcactgccacaacgaagccaaggactcgctggaggtcagcgtccacgaccgccacgtgcttccccgtcacgacatcaagctggttatctgctctctctgcaacaaagaacaggatgtgcagcaagactgtgcgaactgcggagcatgtctcggcaaatacttctgcgcgaaatgcaacctcttcgacgacgatgactggtggcgcagagaatttctatcactgtggcagatgtggatgctgctacgcgactccgctgaaggattctcaccgctgtgtggacggagctatgcatcacaactgccctgtctgcatggagtatctattcgacttgatgaaagctatcagcgtgctccactgcggacacaccatccacctggaatgcctttacgagatgagagcgcaccagcagtttt

SEQ ID NO: 310846 - DNA, 552 bp, Zea mays subsp. mexicana
aaacttcaaatcgcttatcacttcgctttcttgagcttttacaaaaccagcaattacaattaattagcaatcatgccgatccaaaagattctcgctcgcaccattttcgacagccgtggcaatccaactgtcgaagtcgacttgaccaccgacaaaggtttgttccgtgctgcggttccttctggagcttccaccggcatttacgaagcactcgaactgcgtgatggtgacaaagccaattatcacggcaagtctgtcttcaaagccgtttccaacgtaaacgatgtgattgcacctgctttgttggctcaaaatttcaacttgactcaacaacgcgacatcgacaatttcatgttgaatttggacggaaccgaaaacaaatcgaaattgggagcgaacgctattcttggtgtcagtttggctgtttgcaaagctggtgctgccgaagcttgtttgccattgtacgcatacattgctaagttggccggaaacgacaagatcatcttgccagtcccagctttcaatgtcatcaacggaggtgaacatgccggt

SEQ ID NO: 310847 - DNA, 386 bp, Zea mays subsp. mexicana
aataatttgagacctagacatccccgctggcaaaagaatgatgttgcagctgaaatatctgaagccgatccatcgccaagagacaggaccggagaccatgacagaccagctcaccgacgaccagatctggcaggtcaaagaggcctgcagcctctacgacaaggacggcgacggttgcatcacaaccaaggagctcggaactgacatgcgatcactgggtcagaacccaaccgaggctgagctccaggacatgatcaacgaggtcgatgcggacggcaacggcaccatcgacttcccggagttcctcaacctcatggcccgcaagatgaaggacaccgactccgaagaggagctcaaggaggcgttcagggtgttcgacaaggacc

SEQ ID NO: 310848 - DNA, 360 bp, Zea mays subsp. mexicana
cggtctcttggacccagtacatcacaaacacctgggggctttggttggatacagcaggtcttgaggcacgaggctgctggtctatgagtctggccccagtaccacatcggaattgcacttacacgcgaaagagcgaccagcaattgagtggcctgctagatgaaagatcaccttgggtgcaccccagggtgcagctgacctatatgaagactgccagccaaagatcattcatccagacataaaggcatctaacattctgtctgactaccaatacgaagctaaggctgcctgattttggacttgcaaagctcactactgataacatcacctatgtttcgacaagagtaatgggcatctttg

SEQ ID NO: 310849 - DNA, 553 bp, Zea mays subsp. mexicana
gcgtttttcaacgacacacagctgccaagcccacagggcatattccctaccaaagggccgcctcctgaggcacaaaggacctgcacctgagtaagtataggcagcaaaggccttgacgagcaatacactgtagcacgcacgggaaccaacagcctgacaaggagaaccaaaaagcgaactggtatcgaggaggccggaactacaaacccatgggtctttgacaggaaacagacttggccgcccacagatggtgataaagaggggcgcccacaatccggaggggacaaagccctgctgtatgagccagtaaggcgccctgtagtcgatcagaacgctgggcatgaaaaggctatcatgatttcggaactatgaacgcatgctaaagctctacgaacataggccagccaaggttaaaataaaccctatcttggagtgataacattctgctgccgaatggaatcaagtgggcttttgcatttggagtcaatgtgaacaagcagatggcgaattgcctttctcgtaataaaatttgtcgatgatgagccctaagctg

SEQ ID NO: 310850 - DNA, 538 bp, Zea mays subsp. mexicana
ccctcgcgtccggcgagaaggcacccgcaccgccgaagcaaactggtgaccatcaccaccagaggcgaccacgtcagcagacggcgctggtggaggaggccacctggcgcgcgtactgcaacggccgcaagtgcggctacgcactgcggcgggactgcggcgcggacgagtggcgggtgctgcgcgccgtggagccggtctccgtgggcgccggtgtgctccccgacggcgacaacgtgggcacgggagccgccgccgccggcgagggcgacctcatgtacatgagggccaagttcgagcggtggtggggtccagggactcggaggcgttctacatgctgaaaccccgacggcggaccgggcccgagctcagcatctaccttctcagggtctagatgaccaaatagacatgtataacatagtataataatatgctgttcggttgcgtgccttttgctttttattattgtgaaaacaacatgggcttttttctgcgtggggtttggttggtttggctggattgtgcatgcaattactgg

SEQ ID NO: 310851 - DNA, 486 bp, Zea mays subsp. mexicana
caagtaccaagggagacagtcgagatacgatcgtaatagaagtcagctgggaggggtgcatcatagggttgaaccgcaaatcaagccacctccagtgcaacaaagcaatgatattaaagaaggcgagacaccggacaggagggtccatcaactaagttcatctgcagcagcaatatacagataatctcagagaggagaatgtgatcagagagagtagattaggaagggtttacctagcagagcttcctgatggcaagttattggaggttttaaagattggcaatgctaatggaagaatatcagtagatgacttcctagaacagattgaatgtatctcagatatcaagcatcctaacattcttgagttagtcggatactgtgctgaatatgggcagaggttactcgtatacgaacacttcagcagaacgacactggatgatgcaattcatgatggaaaggatactgaaagggcactgtcatggaatg

SEQ ID NO: 310852 - DNA, 425 bp, Zea mays subsp. mexicana
tttattcgttcggaagtcttcaactctatatagtttgccttagcccatgctgacaggacatcacatatctggaagcctgcttagagaaccatacaaaatctaatctttacatggatcaagttgattttgagtctgcccaacaattggagtgctacaagactggtagctgatgaacatccctcaacagtgaagtctgcaataggggatctctgtaaacaaccgatccttatcagagctgggggaggaatatacaattactcttatcagctaagatcatcatcttatgaagctggtcaaacaaagtctgagggaagcagtatacttggtaaatttcagataacatggcgtacgaacctgggtgaaccaggccgtttgcagactcagaacattcattgcacttcgactgcaagcaaagatgttgatct

SEQ ID NO: 310853 - DNA, 430 bp, Zea mays subsp. mexicana
tcgtttcgcatttccttgcaaccgattgcctaccggcctcccaacccaagaccgatggcgcccaaggccgagaagaagcccgcggcgaagaagcctgcggaggaggagcccgctgcggagaagacgaccgccggtaagaagcccaaggcggagaagcgggtccccgcgggcaagttcgccggcaaggagggcggcgagggcaagcgtggcaagaagaagggcaagaagagcgtggagacgtacaagatctacatcttcaaggtgctgaagcaggtgcacccggacatcggcatgttctgcaaggccatgtccatcatgaactccttcatcaacgacattttttagaagctggtcggcgaggcctgcaagctcgcgcgctacaacaagaaacccaccattactgtccgcgagattcagaccttcgtgcgcc

SEQ ID NO: 310854 - DNA, 228 bp, Zea mays subsp. mexicana
tttttacttcttcatgggtggattcgatccggtggccatcttgggctcctagcagatccggcctgttaccgtgccagagctgacccagcagatgtgggactccaagaacatgatgtgtgcttgctgacgcttgatatggacgctacctcacggagggtgttcatgttccgagggaagaagaccaccaaggatgatgcacagcatatgcttaacgacctaaacatgaac

SEQ ID NO: 310855 - DNA, 302 bp, Zea mays subsp. mexicana
cccattcgttcggccaagctaatagaaatgagatctcgccacgacaaggacttctccgagaccgtgaaaacacattggcagagatagagcattcagcggaccaagaggacaaaacacagacaaaaacagacgaagcagccgacttggaggaccagatggatccaagagagctgcaactctcaggggagtacagccaagcaaaagaagcattggggaagcaagaatcaaagggaacctgtcagataatgagaacacttggctcactaaatagaaagggaccaaacttaaacccgacaagactt

SEQ ID NO: 310856 - DNA, 497 bp, Zea mays subsp. mexicana
atctatccatccataccaaaggaacaacacaacagtgtggcacatttccttgaatcgcgtggcatgttggaggaagcccttgatatagccactgaccctaattacagatttgatctggctgtgcagcttggaagcctcgaagttgcaaaggaaattgctattgaggcacagagtgaatcaaagtggaagcagttgggggaacttgctatgtccactggaaagctcgagatggcagaagaatgtctccttcaagctacagactttagtgggttattgcttctatattcatcacttggagatgctgaagggataacaaaactggcatccatgtctaaagaattaggaaagaacaatgttgctttcctttgcttgtttatgttaggcaaattggaagaatgtcttcaattgtgggtgatagaaatcgtattccagaaacaggactggatggacgatcttaccttccaagcaaagtttctgatattggctcattatggaaa

SEQ ID NO: 310857 - DNA, 323 bp, Zea mays subsp. mexicana
tttccttctcctggcagactatgtgccttcaacagagctcattcatgaagccagctgctccacgcctcaacacgatcctgtactggattatgcacagaaccttgaactggagctggcgttcatcgagcagtccaagcggtctggggtcatctacctcatcgataatcccatcatcaaggccaggaaggactcatggttcttcaagaagctgatgataaactatttcttcgcgttcctgaggaacaactgacgcctggcgatcatgttgatgagctttcctcttttcatacattatgcttgtgcgtatgactccttatgtttga

SEQ ID NO: 310858 - DNA, 924 bp, Zea mays subsp. mexicana
ggaatctgtcgctgacgcgggcggtctactacgtggtgatgcagtgcctgggcgccgtctgcggcgccggcgtcgtgaaggcgttcggcagcgcgctgtacgagtccgcgggcgtgcggctcactttttattatttttttacattctgtttaaattgtattcttattcttttttatttcagatataactattttgctttttttttcatgtatctcgtattttatttttcgttttttctatttatatctcgttgaggattcttctaatttttattatttttttgttcttttttttttccttttgtactatcttctatgaaactacttttgttgtttcttttcttatgtattctttccctagtctttccgattatcaatgtgatattctttatttattgattgttagatctcttttctctttctagttttttcttttttcttttaatttttttaatttcttcctgttacttgttgtttattcttgttatgtttccttatgttggtcttttttgttttactttttaattttttttttagaatttttttttttgttgtttaatattcatgtttttttatatattcattttttttatttatattttttttctatttttatcttatatctttcttttatatatactatttttattttatttattcaatttttttttttttttttttcttttcctatattttttctattctttatattttttgcttctcacatttatatttttttaaagatttgtttcttcgccagcacttctatttttttttttttttatatctttttttataattttttatttttttttttcctctgaaggttgtttttttttttctttttctttcttcctcttgcttctcttttttttaatttattaatatgaaaaataatatttttttttttttttatttttttttt

SEQ ID NO: 310859 - DNA, 424 bp, Zea mays subsp. mexicana
cttgccactcaagctaggtgctcgtctcaccgaggtccgcatgaacggaacctgcccctggctcaggcctgatgggaagacccaggtgacagtcgagtacccgaatgagggtggtgccatgggccccatacgtgatcacaccgttcccatgcccacactgctacgagggccacgacgtcggatccctctgcgcgcacctggaggaggagcacccgttcgaaccccaagccgtggcctgccctgtctgctctgagatggttacgaaggatatggttaaccatattactacgcaacatggatatttattcaagaatcgccgccggctgcgcagattcatcattccaggcagccagggccctctctttgctgagccgagatctacggcaagcccacttgcaggtgcctcctgaaggaggcggacaga

SEQ ID NO: 310860 - DNA, 513 bp, Zea mays subsp. mexicana
gctgtctacaacatccagaaggagagcaccctccacttggtgctccgcctcaggggggccttgcagatctttgcgaagacattgactggcgagacgatcgtgagcgcgatgtgatcctacgagagatggaagaggttgagggacagtctgaagaagttatatttgatcatctccatgcaactgcattccaatatacatgccttggcagaccaatcttgggttctgcagataacgtcaagtcaatcaccaaagaggacctcgagaactacattgcaactcattatacagcttctagaatgggtatcacagctgcaggcaatgttcaacatgaagacattgttgagcaggcaaagaagttgttcagcaagctatcaactgaccctacaacaacaaacatgttggactctaggcagccagcctctttcactggttctgaggtttgaataattgatgatgacatgcccctcgctcaattcgctggtgctttcaatggagcatcatggggtggatcct

SEQ ID NO: 310861 - DNA, 526 bp, Zea mays subsp. mexicana
gataaccgacaaggcctggggggtggtgctccgcctcaggggtggcatgcagatctttgtgaagacattgactggcaagaccatcaccttggaggtggagtcgtctgacacaatcgataatgtcaaagccaagatccaggacaaggagggcattccaccggaccagcagcgcctgatctttgctggcaagcagctggaggatggccgtaccctcgccgactacaacatccagaaggagagcaccctccacctggtgctccgcttgcgaggtggtatgcagatctttgtgaagaccttgactggcaagaccataaccctggaggttgagagctccgacaccatcgacaacgtgaaggcgaagatccaggacaaagagggcatccccccagaccagcagcgtctgatcttcgccggcaagcagctggaggatggccgcaccctagcagactacaacatccagaaggagagcactcttcacctgttgctcccgcttcccggtggtcagtaagccatggttcatttaagc

SEQ ID NO: 310862 - DNA, 346 bp, Zea mays subsp. mexicana
ctcgatgtgtcaagtggctctatcgtgtcaaagccatcaaggacccgtctcgagcaccggtccagagcgcggaatatctgtacttcccgcagcaggtcggaaagcacaatttgaaaatgactgacggcattcaaatccaagaaatgccagtcagctctggaatcatgttcccgtggacaaagcaagttgtcattcacaacggcaagattcgctgcaagggctgggcctattctggaggaggccgatggccagagcgcgtggaattgtctgccgatggcgggctttaactggtacacgattcctctggagaaattttccaagatacggaaatggacttggcgaacat

SEQ ID NO: 310863 - DNA, 700 bp, Zea mays subsp. mexicana
gttttggcggtagccaggggccccctcgccggcgctggcgtccccgaccgggacgacgactctgctcgcggacggagccagccgcggtttttcattgactcccccttctttgtcgtttccaggggtttcttctttactgtaacagttgtcccaaggatctcaagatgctgacctagctgaccttttagcaattgtgtttgctgtgaagaattttaactcttattgtggttttatgtgtattatcatcatttaagatatatttttttattatttttgcttgtttttatttttttttattttttttttgtatgattttaatatttattatttatttattttgttctacattttatttttttttcattttaaattttttatatattttatttattttatttttttttatttattattcttattttatttttttattatagtattttttatatctttttttttttttgtattcttatattatcttttctatttttttttctctatttttgttttcttctttatttattatcatttattattctcttattttaattatttttttattttttttattttttcttatttttaactatctttctttatattacacctttatatttttattacttttctttttattttatctcttccttttattgtattatttttttttcttattattctctatttttatttatatatt

SEQ ID NO: 310864 - DNA, 389 bp, Zea mays subsp. mexicana
tctttgacaaggacaaggcagctgctcatgggaagggtggtgccaagaaggatcgtttctctgccccaaacaaagatgcaccctatgctgatgatggggtcaatgatgacaaggacatcttccatgttaacattgcttccaatgctaactgcaccacacactgccttgctcccccttgctaaggtcatacatgacaacctatggcattattgagggctttgatgaccacagtacatgccatcactgccacccataagactgtcgatggacccttagccaaggactggataggtggcagggctgccaactttaacataattcccagcagcatccgttgctgccaaggctgccggtaaggtttcccctgaaatgaatggcaagctcactgg

SEQ ID NO: 310865 - DNA, 434 bp, Zea mays subsp. mexicana
gccgtctatccggaggctggctaggaggggcggcgtcaagcgcatctccgggctcatctacgaggagacccgcggtgtgctcaagatctttctggagaacgtcatccgtgacgccgtcacctacaccgagcacgcccgccgcatgaccgtcaccgccatggatgtcgtctacgcgctcaagcgacagggccgcaccctctacggcttcggcggctaggtcgcttcctcatctggtggcgaactgcatctgtgtcggcggtggtcgtgttgtgtgcctaatctagtgtagtccgttctctatatcgtcgctgtgttctgtggtgtcttgtatcccatttcctgcaataccaacttgccattatcaatggaaaacccttcggtttcatcccaaagggagcagctgttgagtcacatctatggtccacgcgttataa

SEQ ID NO: 310866 - DNA, 372 bp, Zea mays subsp. mexicana
cgccgtcatttatgctctacaaaatgcgttggacaacagtaagagtgtgtcttttcttcacggcaacgatgacagactgacatctcagatgcatggatcttgaacatgtatcaaatatgtgccatagcaagggagcgttgctttgtatcgacagtactttcgcctcccctatcagtcaaatgggactgacttttggcgctgtcctatctatcactcttggatcaaagtgcatggctgaacactacgagctgattggggatagcgtcagacggcagagatgagttggtttccaaagtccgtatttatcaccatgtggttgtgtgtggactgatgcctggtgggctttgcaccatacatggctgcatgaaaaca

SEQ ID NO: 310867 - DNA, 468 bp, Zea mays subsp. mexicana
gatgtagtatgatgatttatgggattagttagctgtgaacgtatcgtaattgtagctactcctattttagagtgatttctgcaaaatgaacaaaaacacttttgattccatctgctcattattttttacctttaatgtcataagatgcttatctgtttgactggaaatactgagaactcacaataattttaaaaattttatagatgtgtgggaagtggtggaaagaagctattgcctgaatggttctcatagaaagtgcttgatcttatccttattttttaatatgttaaaatttttccttttcaccaaattatccttttttttgcagctggagcaaaacttaccatatgagaatcttgctcattgctacctggctcctcggtcataaagctcaccgattttggcacacaaggaactgattctaacaacattctatattaaaggaaaatgatgttgctgacaagctgt

SEQ ID NO: 310868 - DNA, 209 bp, Zea mays subsp. mexicana
ctggtacggaagcttccataagtttccatcgggcgtcgccggtatggcgatccacaaggggtcttagtacgccatcgagggacttatggcgcttgagtctgtcatcatcgtcaaagaggattgtgtttcttacgagctttctgccctaagtaaaggttacctttttcttacgattgctgtatgactaccaggattatatatatgtttgg

SEQ ID NO: 310869 - DNA, 732 bp, Zea mays subsp. mexicana
ccgtggactagttttttctgaagattcggcgatggcggtgacgatccaatccgtgaaggcgcgccagatctttgacagccgcggcaaccctacagtcgaggtcgacgtgttttgctcagatggaacctttgcaagggcagctgttcccagtggagcatcaactggtgtatatgaagctctggagttgagggatggtggctttgactttttggggatggttgtttccatggcttttatttatgtgttttctagtttttttcctttctttttttggtttggtcttttctgttttatccttttttttgacttcttttggtttatctacttttgtgttcctattatattgttgtgtgtttttagttctttttctttgtattctatttacttattctttttttttatttattatttatccttttttttttttattttttattatattttcttatagttttctatttcattcttttctttattttctttttttttatattatttatttttatatattacatttttttattttttttattattttatttttttttctatacttatctttttttttttattatctttttattctttatttatatattctatttctttttttacttttagtttattctttttttcttaattctttttctttttcttttttttttaatctttattttttatctctcttttttttttttactcttgtttctttttattttttatttttatatt

SEQ ID NO: 310870 - DNA, 438 bp, Zea mays subsp. mexicana
ctcttcgcatttccttgcaaccgattgcctatccccctctcaacccaagaccgatggcgcccaaggcggagaagaagcccgcggcgaagaagccggcggaggaggagcccgcggcggagaagacgaccgccgggaagaagcccaaggcggagaagcgggtccccgcgggcaagtccgccggcaaggagggcggcgagggcaagcgtggcaggaagaaggggaagaagagcgtggagacgtacaagatctacatcttcaaggtgctgaagcaggtgcacccggacatcggcatctcgtccaaggccatgtccatcatgaactccttcatcaacgacatcttcgagaagctggccggcgaggccgtcaagctcgcgcgctacaacatgaagcccaccatcacgttccgcgagatccagaccttcgtgcggcttgtgctcc

SEQ ID NO: 310871 - DNA, 403 bp, Zea mays subsp. mexicana
gacatccttgacccgatggcgcccaaggccgagaagaagccagcggagaagaagccggcggccgaggagaaggcggagaagacgaccgcaggtaagaagcccaagtccgagaagcgcctgccggcctcgaagtcctccggcaaggagggcggcgagaagaaggggaagaagaaggccaagaagagcgtggagacctacaaaatctacatcttcaaggtcctgaagcaggtgcaccccgacatcggcatctcctccaaggccatgtccatcatgaactccttcatcaacgacatcttcgagaagctcgccggcgaggccgccaagctcgcccggtacaacaggaagcccaccatcacctccgcgagatccagacctccgtgcgcctcgtcctccaggagagctc

SEQ ID NO: 310872 - DNA, 368 bp, Zea mays subsp. mexicana
ctctcagtccaaccacgcttctatctccggtgagactcgtgacaccctcgtcaaccgcatccagttcggcggcgatgaggtcgtcaaggccaaggacggcgccggctctgccactctctccatggccatggccggagctcgcttcgctgagtccctcctccgcgccgaccagggcgagaagggtgtcgttgagcccaccttcggcgagtctcccctgtacaaggaccagggcgttgacttcttcgcctccaaggtcgagctcggccccaacggcgttgagaagatccttcccgtcggtgaggtcaacgagtacgagcagaagctgatcgacacctgcctcgtcgacctgaagaagaacatccagaagg

SEQ ID NO: 310873 - DNA, 703 bp, Zea mays subsp. mexicana
  unsure (1)..(703): unsure at all n locations
gccacgggccgcgtgcagaccacgccgctcctccagagcccccagaacccgaccttctactacgtacacttcacgggcctgaccgtcggcgccaggcggctgcggataccggagtcagcgttcgcgctccggcccgacggctcgggcggcgtgatcgtcgactccggcacggcgctcacgctcctcccggccgcggtgctcgcggaggtggtgcgggcgttccgccagcagctgaggctgccgttcgcgaacggcggcaaccccgaggacggcgtgtgcttcctggtgcccgcggcctggcggcgctcgtcgtcgacgtcacagatgccggtcccgaggatggtgctccacttccagggcgcggacctcgacctgccgcgccgaaactacatcctggacgaccacaggaggggccgcctgtgcctcctcctggcagactctggcgacgatggctccacgattggcaacctggtgcagcaggacatgcgcgtgctctacgatttggaggcagagaccttgtcgatcgctccggcacgatgctgacacgcgcgcaactagtagaaagggcgncgactactcgactctactgtatgcaagatangtgtaaccatgcanatgcatgccaccatacccgatcgcactttgcacgcagcaacaaaattttttttcggtctaggggacactacagtaactgattattctg

SEQ ID NO: 310874 - DNA, 435 bp, Zea mays subsp. mexicana
acgcgctgcgaccgccccggaattacttgcccggccgacccacgcgtccgtttatgccaaatatggagcccgaagaaccagtcgggggttttgatacagttggccagctgatactgctgacacgaatgcctatgctgactgtgctaggcaaggaagagggtgcacgtgcagatgtcacagatagtatacgaatgcacttgcatgtagcataagtaggatgcacattctcactcgcaccaagagcgcactactaccgtcgtgctatgctccatgggggagctaaagaccggcctaccaggacgaaaactgtcgtgttccatgcgagctgtactgagaattatgagctggaatccagaagtcaatcagtcagaggatatgagatgatcttacgttcgataggataccacatttttaggagatcttatgctgacaatg

SEQ ID NO: 310875 - DNA, 517 bp, Zea mays subsp. mexicana
tttttcaatcagaaggaggttgggctggctttacagaaactatttgaggatggcgtggtcaagcgtgaagatctgtttgtcacctctaagctatggccaggtaaccatgctcctgaagatgtgcaggaggatctttgctcggccctcgaagatttgcggctcgactacgtagatctgtaccttattcatggcccaatccgtatccagaaaggaaccatgtttatcccggaaaaccttatccccaccgatatccctgctacttggggagcgatggagaagctataccacgcaggcaaagctcgcgcgatcggtgtgagcaatttttcctgcaagaagctgcaggatctgctcgctgttgcgcgtgtgcctccagcggtcaaccaggtcgagtgccatccagtttggcagcaagacaagctacgcaagctgtgccagtcaacgggtgttcatttttctgcatattcgcccttaggcttccccggatcacctggatacagtgggccaaacgttcttagca

SEQ ID NO: 310876 - DNA, 409 bp, Zea mays subsp. mexicana
gtttgagggacctagcctttactggcaatcaatgactctgaggagaccagctatggctctaatatgatgcggaccatgcgccttattgccaagcgttttgataccatcttcgaccttgatgtggatagctgggatgacttttggatatgtgtatggctgtctgataatcacagtggggatgagcataggcatgcatgtgacatattgaataggctttgcattgcactgtatgatacatatatggctggagaagtggccaaagaaagcaagttttgctaggattgctgtcgaggtagattggcatcataaatctaaggttgccgatttactcaggagttttgcattcacatagatagttactaactacactactgtggctacgaacgacaaatattacccatacatatct

SEQ ID NO: 310877 - DNA, 480 bp, Zea mays subsp. mexicana
ctcgcctcctccgcctcgacgagctccagctgtcggaggccgagaaggcccgggtttaccagttctacatccccgtcttcctctggtgcgaggaccaggtcatagagcatagagccaagtacagcgagggcgacgacatcccgccattggtgatcggggtcagcgctccccaaggaagtggaaagacgactctggtcttcgcacttgattatctttttcaggttgctggtaggaaatccgccacattgtctatagatgacttctatttgacagcaaaagagcagaatgaactgagggacagataccctggaaatgctcttttggagctccgtggaaatgctggaagccacaatctccaattcagtgttgaaacacttgagtcactgatgaaactaacaaaagaaggcatcaagatgaaggttccacggtatgacaagtcttgttttgggggaagaggtgatcgtgctgatccttttgtgt

SEQ ID NO: 310878 - DNA, 499 bp, Zea mays subsp. mexicana
tcgtcagattgctgagaattcagcagctgaccgtgttgagataccaacagatggtgctagtgaatgggaaattgatgcaaagcttctcaagtttgggaataaagtagcatcaggatcatatggtgacctttaccggggtacatattgcagtcaagatgttgctattaaagtgctgaaacctgagagaataaatgcagacatgcaacgtgaatttgctcaggaagtatatattatgaggtggttactacactcaactctgtttcaccttgtattacaagatgggttcttattgtgatattggttgtttggcatgctaattaaatatacctttgaagtttctgaggttgcacttgactccttgttattttacctcattttacttaggttttattttcttctgcattgctcatccttaaagtcactttaaaaatcatccttttttgtttgattctctttgctgtcacttcttatctaacttttttatgttatttttcctttt

SEQ ID NO: 310879 - DNA, 225 bp, Zea mays subsp. mexicana
ttgttttaatgagcgtcacaaccttgagaaagctcggcaggaagctgatgctgctggtcttctggataagaatgcttgtggctctggttatgattttgatgtgcatattcattttggtgctgattcgtacatctagttgtgaagagactcgcctactagacagccttgtatggaagcatggcaaaccttggttgaagccacctttcccagtcaatgcttggtttc

SEQ ID NO: 310880 - DNA, 465 bp, Zea mays subsp. mexicana
gcttcacccttgccgccggcggagtccatctcatcagcagtgacgacgacgtcgacgtccactcctccgccggccccagcacgccgacctggcgccggccgcggcccgccaaggaggtgctggaggaggcgcaggccaaaggaagcctcatcgaccgcatagcctctctggaacaccgtgtgctcaaggttatattactgttcattcagtcatcggtcgtcgtcgtcgtcccacctacctactatcactagtacagagaagttctatagtgacggctgtaaacatatttatagtggcgtttttcgtaaccgccagtgctaggggccagtagaaatcatcatttgtacaggcgggtaactgaggaccgccagtgaaaatcgattttcactggcggtcggcgtaataaaaccgccagtgcaaatcgtttccaggtaacagagtaaacaaaaaggatggtggttgacc

SEQ ID NO: 310881 - DNA, 191 bp, Zea mays subsp. mexicana
ttgcatattgacgcaaaattaatggccacgggtctggtttcattacaggagggaccatgactctgtactgggccatacctaacagagcataatcctaatgtcaagctctatggtgtggagccataggagagtgctgtttcgaatggtggataacctggaccacacaagattcatggaattgtagctgggtt

SEQ ID NO: 310882 - DNA, 408 bp, Zea mays subsp. mexicana
gttacactcagcatccttagactgccatcagtggagtgagggctacaagcagagtactgctggaacagacaaccaccctgatctctgcgatctgtacgctttaggcttgactggcagcaacgcggagactctatgtgacctatgcaacattccactgtacactaatgctgctttgggtgacagcagtgcacaatcacactggcggcgtgcgctttgacacacccggtatgacctcgggggggatgtttgagaccgacttcgtgctgatggtcaagtacctccactgagctgagaacatgtggttgagcgtccacgccgggtacggcaggtgcctgacggacttcacgaagggctggtcgcgaagcaagggcataacgctcctgccgggggccagcgactagatctgca

SEQ ID NO: 310883 - DNA, 723 bp, Zea mays subsp. mexicana
ggtgagaacccggcggtggggaggctgcgggagctcttcacaggcgacgcggcagatgggtgggagaagtcctgggagtttggtgtgaccccatgggatttgggaaagccaacacctgtcattgaacatcttgctagatcaggaacactcccaaaagggagagctttggttcctggatgtggaattgggatacgatgtggttgctcttgcaagccctgtacgttttgttgtttggcttggatatttttgattatggttgttatgtaggctatttatttttcttttttttttgtctatttatattttttttattttttttgttcttaatatttttttttatgtgtttctcctatttgattttatttttactctttttatacttatttccttcttttttcttttttttttttttttttttcttttattttttcttttatctttatacttgtattattttctttttaatattattctaggtgtttttttttactatcttttattttttttatgatttctcttatttttttctatttgtttttatttttttttcttcctttattcattttttttaaattatttttatatttcttctttttttcttttatttttctaatttttttttcattattttattttttcttttttttaattctttttttttctccttttatttttttatttttcttattctattttatttttttttctattttcttttttttt

SEQ ID NO: 310884 - DNA, 552 bp, Zea mays subsp. mexicana
tttcctacgcgtccgcccgggagcaggaggagagggtataaggagcaggtgacgtcggcgtcaggaatggagggtgcacagactgatgacagaaaggatggtgatgaacctgatgtggctattataggctctggggacgatgcattggaggagataaaggattcggtggatgagtatgtcatttatgagacaccagaggaagaggagctgagtgagtatgacatggacaaaatgatggggcggccacacccgttcattgatccagcaaaggcaatgtcactaggggagccgaaaaccagtgaagagctctggtggcactggaggaggaagtctcaggaggaggaaatgtggtcaagatggcagaggaggcgtccagatgttgacacggtttttgcaaaggcaatggcggagactgggcaaattaaaatttttggggaccatccttcacggacagaagctgctcttgcaaagacaagaagacatttgtacaaagaggaaaggttagaagcagagcataggagactagaagaaatagggccaatagcgtactac

SEQ ID NO: 310885 - DNA, 508 bp, Zea mays subsp. mexicana
gctccgcctcccagccggggcgtcccttgcgggcgccggggaattggctccggcgcagctcttcttcttcgagaaccgaagaggcttcgcgaaggggaagaaatcgaaggatgatcgaggtgacactgttcaagctgttcctgacattgggccaactgtcaaatcagctgccaccgcacaaatggacgctgcagtgatcgcactgtcacgagagctgagcaaactacggactggaagagctacacctggcatgcttgaccatatcatggtgcagaatgcagatgttaaagttgcattgaatcgcattgccgttgtttctgtcctggacgcacataccctatcagtgatgccttatgatcctacttccatgaagtcgatcgagcatgctattatctcatcaccattgggcattaatccaacacctgatgggaataggattattgcagctatgcctccgttgacaaaggagaacatacaggcactgtgcaggttgttactaaatcagcga

SEQ ID NO: 310886 - DNA, 452 bp, Zea mays subsp. mexicana
tgggttctcgttcagcacagtcctttctgggctggcggtgaccgcgagcttggcgagcggtctgcaagttcacgcccagctcgtgaagagtggcttttgtgacgatgtgtgcgtggggaactccttggtggagatgtatatgaagagcaaatgcctagcagatggcgtcatggcattcgccgagatccgctgcaaagatgttgtgtcgtggacagggctcgccgctggatgcttacactgcggcgagcctgccaaggccattggcattctcggtcagatgatgctggacggagtcatgcctaacaactacacatttgcaacgtcagctaatgcctgcgcgagcctcaccgatctggatgaaggaaggaaagttcacgggtatgtgatcaagctgggagacgactcagactgttggtgtcaacaacgcgctcatcgacatgtatgctaaatgc

SEQ ID NO: 310887 - DNA, 269 bp, Zea mays subsp. mexicana
tttgagatcccaaaattctagctgaattcatggagaataataaaggatttctaccttcgggaccatcagaaatttttatttaaagaatactgttgaaagattttatcttttctttgctgcctgtatgcatggaacttgatcctgacactggtattccttctaaagtcgatgcaattattgcgaacccttctgtgtatggacatacacatgaggtataatgtgttaaaagtaccaatttatatactgttaaccatgccatggacgccaac

SEQ ID NO: 310888 - DNA, 551 bp, Zea mays subsp. mexicana
gtgagaaattcccatttattgtttttgttctaaatcttaagttaagatgggtggtccattgctagctctgagcattctcttaatgctgagttctgacttttctcaagctcagcgcagagcagttaaagaggttccttcattgagtgagcgagtgcagcaattgaccgaaatgagtttgaaaaggtccgtcattcgtttgaatgccgaacgattcaaaacatacgtgaaggcctctcccaggaactactcgatgatagttcaattcactgctctatctccgatgagaagttgttcgatttgtcgtcaagcccacgacgagttcactatcgttgcaaactcgtggagatacacgccctcattttcagacaaagtcttcttcgcaatggtcgattttgatgaagggcaagaggttttccaacaaatgaatttcaactctgccccgattttcatgcatttccccgagaaaggcaaacccaaaaagggagacaacatggacattcaaagaatgggatttcaagccgaagtgtttgccaaatggattcaggagagga

SEQ ID NO: 310889 - DNA, 498 bp, Zea mays subsp. mexicana
tttaaacccatcggagtatggtctggattggatattggacacgtatcaggtactggaagtctagttcaaaacaagctagttggtgctccaggcgggggatcaagtccacatgtagtacaaaatgccgatatccctgttaagcaaaccactagctcttcctcacgtgagcagtcagacgatgatgacatggaaggagatgctgagactactggaaatggaaaccctgttcaacacagattacagagaaggaagcaatccaaccgagaatcagccaggcgttcgagaagcagaaaggcagctcacttgaatgaactggaggcacaggtatcacagttaagagttgagaactcttcgcttctaaggcgacttgctgacgttaatcagaagttcaatgaggctgctgttgacaatagggtgctaaaggcggatgttgaaaccttaagagcaaaggtgaagatggcagaggactcagtgaagcgggtaacttgcatgaacaca

SEQ ID NO: 310890 - DNA, 317 bp, Zea mays subsp. mexicana
cgcgtgccatcctagggtttctttggcgggcggtgcctccccagatttggacgccgccgccgccgccgccgccgccgctgacccaggttgtcttgatggcgcccgctgtagaagccgtgaaggagacaggctcgctccagaaggttgctgccttgaacgaaaggatactgtcatccatgtccaggaggtctgttgctgcacacccttggcatgatctggagataggtactggagctccaaccatattgaactgcgtcattgagataccacggggcagcaaggttatatctgaacttgccacgacaactggactgatc

SEQ ID NO: 310891 - DNA, 285 bp, Zea mays subsp. mexicana
ctttattctctgtttatacatgccacgtttatgaaggtatgtcctttataaccttcgctcaaagatcgttatgttctaagggaaataatgcttcgaaggatgaagaacattgacatttaacattttatgttgccttgttcttaattcatagcatttaagaacaagtccccaacattggtgcccaccttcggtgaactcacttccacttttgagccgatggctttgttcaacaatcaagctgaagttgctttggttactaaactggagcttcctgatacaggcggt

SEQ ID NO: 310892 - DNA, 522 bp, Zea mays subsp. mexicana
tccatgcgtccgaagaactcgtcgtcatgggcgaccttaaccgccgtgccctacgacgacggctacgagtggaggaaatacggcgagaagaagatcaacgggacgctcttcaccaggagttacttcaggtgcacctacaaggacgacgccggctgcctcgccaccaagcacgtccagcagatggacagcgacgacaacagcagcccgcccatgttccacgtcacttaccacaacgaccacacctgcagcagcgccaaagctgcagccaaagccaacacaggaggcagcagcagcaacaacaacagccacctcgctgcattgctggcagactgctgcgacggcagcggctgcaacaagggactgacgaccaccaccaccaatgggcatgctgctgctgatgctgctgccatgaacatgaacatgaagcaagaaccgtcgctgctgctgccgccgcctcttctggccgagcctccttccgcctgctttccttatgaccaaatgccacagcagtgccatcagctg

SEQ ID NO: 310893 - DNA, 212 bp, Zea mays subsp. mexicana
ttcctcccgtctttcctcaagaagtcgattccgtggcgcatgtatcccaagcccccaccatgacaagctcctcctctccttcccgaaaggcgctgagcatgatcgcttgcaatcggctgcagaaggaactcgccgagtggcaactcaacccttctgtttgattcaagtacatggtttcctgatacctacaaaggtgggtaatttgaggatac

SEQ ID NO: 310894 - DNA, 483 bp, Zea mays subsp. mexicana
gtttttcgctgcaacaacacagttacaggggcggggcatctcatctcgctgcaaggctcccgcatggatgtagacttgcagccactggatgaggcgcagctggtcaacctctggcactgggattattcaaaaaagatcgcctccctacttatcgacttcctagctagaagcgcataaatgctggccatgacccgggtgcacagcgcgatggcgtgctcctagatgcggtcacaactgtcgcaatgacggaaacgagaacgcctcacaaactccctaatgatgcacgggcgcaacaacggcgagaaggtcatggctacacgcatcatcaagcataccctggagatcattcacctgctcaccgatgccaaccccatccaggtcgtcgtcgacgcgatcatcaactgtgtaccccgtgtggatgccaccccaattggatcgatggcgttgagaggaggcaggccgagcatatctcacccctgagga

SEQ ID NO: 310895 - DNA, 390 bp, Zea mays subsp. mexicana
gttttcctcagccgtcttcgttcagagttcctgaagaagcggaagaaagggaagctaccgaatggatgctacgacggcgtgaccagactggaggtacacactgtaccgatggacttactcgacggaggaagacaaggtgaggctcctagcagtgaccatggctacaaggatacagacggacaactggacaatcaaccatagtaaaagagaccggaagccatcctgctgacatgcacctcgcgctcatggagagcgtagcccgaacgtcctgtggaacgactgtctagtttgatacaggcacattaggaccctggacgatacacccaatgggttgacaactgggcagctcatactatttacatgacatagcatgaggcacagacgatctgc

SEQ ID NO: 310896 - DNA, 338 bp, Zea mays subsp. mexicana
gtcggttgttgcagcagcgctcgaggtggacggggggctagtctaaagcgtccgggcacacgataccatttacctttacaacctcaaggtgatggccagcaaggaacagttgaacagatcgcttgatgccgtgaggtcgcattatggaaggatactagatgaggaggccctgaaaacacatatactgatagggccagcctgggtggagtgtagggagattacaggtgataccaatgctctccgtgggttgaatgacttggatttttacgtgtaaaaaaggcgagagcactatgcagaggcagaatcatactgtgatgcacaacacgatggtacttatg

SEQ ID NO: 310897 - DNA, 552 bp, Zea mays subsp. mexicana
gttagtatgtatgccttgccttgttttcctgtctgattcatgcttcttaagatcaaatcaatctccatatcctttaggaatttgcgcttcctgcatgttttcatttaagagaggtcgtcctcatctcataagacttgtgctattcacaaactatggttcgtcttagaagtgtgctctatgtgcaggtcactgagaacatgttgggtggcaagaaagttacagttgtatttgttctaggtggtcctggaagtggaaaaggcacacagtgtgccaacatcgtggagcactttggattcacccatcttagtgctggagatcttctgcgtgcagagattaaatctggctcggagaacggaaccatgattgagaacatgataaaggagggaaagattgttccatcggaggtgactattaagcttttgcaggaggcaatgataaaaagtgaaaatgacaaattcctgatcgatggattttcaaggaatgaggagaatcgtgcagcctttgagaattgttccaaaatttctcctgcatttgtgctattctttgactgtt

SEQ ID NO: 310898 - DNA, 595 bp, Zea mays subsp. mexicana
ataatatcatgatccgtggatattgctctttaggacagttggaagaggcagtgagactgctcaaaaagatgtctggtagtggtcttcaaccggatgttgtcacttacagtcttctgatacagtattattgcaagattggaagatgcgcagaagctaggagtgtctttgattcaatggttcggaagggtcaaaaacccaattctactatctatcacatcttgcttcatgggtacgccaccaaaggagctcttattgatgtgcgtgatctccttgatttgatgattcgagacggtattccgtttgaacatcgtgccttcaacatcttgatttgtgcatacgctaaacatggagcagtggataaggcaatgactgcatttacagaaatgcgacagaatggtttgaggccagatgtagtcagctacagcacggtaattcacattctttgcaagaccggcagagtggaggatgctgtgtaccatttcaatcagatggtcagtgaagggttgtctcctacatcataagttttacctcactaatacatgtctatgttccattgtgaatgcaagaagttgaggaactggcttctgaatgatca

SEQ ID NO: 310899 - DNA, 530 bp, Zea mays subsp. mexicana
agagcaaggaacgagtggcaaatgttaggtttaatagggacggcagtcttgtggtatgccaggtggctgggaagacagcagatatttatagggttcttgatgaaacagaggctgcacgtaaggccaaaaggcgggtgaacagaaagaaggagaaagcatctgcgaaatccatgattgctgaagagaatggcactatcattgatcctttaccagttcaaaacttacaaaatcctactgttattgtcaccgatgtatttaagctatttcaagttttacgtgcaagcaaaaaaatatgttcgattacattctctccaagtaatcctccaagaggatgccttgccactttgtctctatcactcaacaataacatgcttgagacatattcagtggataaggagaaggtatcaaagatgtactcagttgagatgcatggacatcgttctgacatcaggagtgtctcccttaattcggaggacaacctccttatgtcgactagtcataacgctgtcaagatatggaaccctagtaca

SEQ ID NO: 310900 - DNA, 444 bp, Zea mays subsp. mexicana
ggctctgtgaccgtgacgagacacgtagccaagaggccacgcccgcttgggatcagtgaggtaaagcgtagatggcagcgccaccgaccagggcccgagccgactactactaccttataaaactgatcctcataggtgacaggggattaggaaaaagaagactcccgttacagatatcaaacggaccatttaccactagctttattaccactatgggcattgactgcaagataaggactgcaagaacagatgggaaacggattaagtcgcagatctgggacactgcatgccatgaacgtttgctgacgattactatctgattactacaggtgagcacaggtgcatcttgcttgggtgcgacgtcacatacaagtcatccttgaataacataagagactggatcagaaacaatgggcaacgtgcttctgataacgtgaacaaaat

SEQ ID NO: 310901 - DNA, 381 bp, Zea mays subsp. mexicana
gcgagcggccgccctttttttttttttttttagactgagatgacatacatagtattacgtacattgacggcgatgcttacaatcggagtacaaatgtacgcaaactgaaaccacacacatttgcgactcttattgagaaagaaaggcaggcgggtgtaaaaggattcacaaatttggactgacgacatctcaatacgttggcgacacaaacccggacatgaaaccgcgacctggctgatcggtcggccgattagatcgggatggccctggtaacgcgcgggtacacgacggtggccgggtgcgccatgatgcgtggatccgtatgcgcactgacattaccataaggtacaacgccaagcgcaggcactggagccgcaccaa

SEQ ID NO: 310902 - DNA, 354 bp, Zea mays subsp. mexicana
ttctgggagcgatgctgtcggagctcatgagcaactggtccatctacaccaacagatttgcagccatgctggacctgatcatgatcggcggcatcaacctgtcactcgggatactcccgcacgttgacaacttcgggcacatcggctggttcgccacaggcttgctcctcggcttcgtgctgctgatccagccccagttcggttggctggagcagcccttcggtgccttgaccaagtaccagttcaaggcatatcatagcatcctcctgcttgctgaccatcgattgctgtctgcagggtgcgctggtgagatcggacatggtgtccagtagagagaacggggacgaccactgt

SEQ ID NO: 310903 - DNA, 394 bp, Zea mays subsp. mexicana
ttcttttttcccctgttatcaagatctactcggggtagtgttccttagggcccagcggaggggcgatggcggcggctgatgtggagtaccgttgcttcgtgggcgggcttgcctgggccaccagcaacgagtcgttggagaatgccttcgcctcctacggcgagatcctcgacttcaaggtcattaccgaccgggagacagggaggtcccgcggcttcaggttcgttaccttctcctccgagaactccaagctcgacgctatcgagaacacgaacggcaaggagctcgacgggcgtaacatcaccgttaaccaggcccactcccgtgggcggtggccgtgtcagcggtggctacggcggaagacgccgctgttgcggctatagaggcgggcgcc

SEQ ID NO: 310904 - DNA, 313 bp, Zea mays subsp. mexicana
gttactcttccggttaaaccgcacactttgtagaccaagctacataagagccgagctttgttactggtgtcatgggagttgcacttgtcgctcctcacccaagaggcggtaaagtagggctcttcggaggagcccgtgagatataaactgcccttatcatgtagctatgaaccatctaggccgagggccatggatgttgctgttgctcatgctgtgaaggagaacgacctcgtgtaggtaatgacttggacagaaaaacgatcgatagtgccggtgtcatacctgacaattagctaattgagagctagtgcac

SEQ ID NO: 310905 - DNA, 404 bp, Zea mays subsp. mexicana
ctgtattaagattgaatgctgtctatgttccagataccgtactttgacgataacattggttttcctacaggagttcaagatcgcagtcctgcccattctgccgtgacaacctgaagaagacctgtcctagtgacctgtggatctatgttgaggaccaagatgtggtcgacatggagacggtgtcgagcgagaacctcagacggctgttcatgtacataagcaagctgcctctgattgtcccagacgtcatcttcagcgtgtatgattcccaaatcaaatgacttccgacgcgaccttcccgacgaccttcagccagtgcccagctccagttaatcttattaccccatgtcctccattttcatgctttgctcaagctttgggaagtgcctgaactgatttggaac

SEQ ID NO: 310906 - DNA, 484 bp, Zea mays subsp. mexicana
taaagctggctcgcccgcctgaccggcccggacacttcctggctggaccgacccacgcgttcgcggtcaatgaaggtgaagtgccctatgaggaagctgggttcaatggctacgctcattttgattccagcgacatgtcaacatggcgcccccttaaaatgctggacagcgcagctctgtccgacaaaaggccagatgaagttccacagctcttggagtccatgctgagcaaacttgttgaagaatttgaaaatcgtctaaacagccaaaatgaactggtcaaagcggctctaaaaaccggcattgataacactagatcctttccaaaatcaaaggttctggttgagaccactcctaatactagtgggagaaagatggatacagcagatatttactgtaaccataaacaaacaaaaaaagtagcatcaagtgaattggcactgaagcaatattcaattctacaacaacagtcaaagaatgttga

SEQ ID NO: 310907 - DNA, 573 bp, Zea mays subsp. mexicana
  unsure (1)..(573): unsure at all n locations
tgtagggctggctcgcctgcatgtacgggcccggacttactggctggaccgacgcatgcgtctcgctctggactaggcgactgcgaccgagcccgagaagtacattgacatggaggaggagcacgaggtctgcaagaagaaggatggccttttcggcaagctgcaccgcaccatgtccatctccagctcgtcgagcgacgaggaagaggaggcgatcgatgagaacggcgagattatcaagaggaagaagaagaaggtgggcctcaaggagaagatcaaggagaagctgccgggccacaaggacggccaccacacggtcgcaccgtccccggcggccaggccccgtggagacccatgcccaccaccaggaggatgggcataacaggccgaacgttggtccgggcccgggttccgtggcctcaaccgtacgtgaagatgcacgttcaccagcacgagcacgacacggngttagtcgccagaaggtcgaggccgacgtgaagaccgggacccctctgcatgcaccggatgaggagaagaaggcctgctggacaagatcaaggagagctccccggt

SEQ ID NO: 310908 - DNA, 330 bp, Zea mays subsp. mexicana
cctagtttttgatgaaaaccgtgatatttttaccacacagaccagtttgactaggatccgtgctgttccaaggtacagtgtcaccattgataatcttgaagctctaaacacagtgtgccccactatagggatcttgccttctgctattccttgtctttggaagagcagtgaagggaaggccaaatccaagggtaggtcatcagtgaagtctatcaggagctcagggagaggtgaaggcctaacagaaatggactgcaatcctttgttaccaccaaagctgtttgacaaggattcttatactttgcccatattatgagcacgcttgctttt

SEQ ID NO: 310909 - DNA, 223 bp, Zea mays subsp. mexicana
cggtatggaagaagatcgccatcggtgcagcaagggggcttgccttcctccaccacagctgcatcccgcacatcatccaccgggacatgaagtcaagcaacgtgctccttgacagcaacctggaggcccgtgtctctgacttcgggatggcaaggctgatgaatgcactggacacgcatctgagcgttagaacactcgcaggtactcccggatacgtgccatc

SEQ ID NO: 310910 - DNA, 147 bp, Zea mays subsp. mexicana
aaagagttccggaactggagacggacctacgcccgacctcggtctttagcagtaatacaacagctatgtatatccagaaggaaaaagaaaaaaaacacctactaggacaaccagaccggagtactgatccaggtctacgagggtgag

SEQ ID NO: 310911 - DNA, 474 bp, Zea mays subsp. mexicana
cggacgcgtgggttcggacaaatgcttgccttgcacaaaataggaaattacgtcgtgattttgtcgcataaaatgggatatttactttgcaaaatgttggtttcgtggtggatttcttgcggggtttagttttttctctatatattatccttttttgttttgaaccttaacaagtgaaatgatttgtttatttgcacactgacatgagcaaactgaatgagaatccataatggatgatgcaggggacacgtttaaggatcttgtgggaagtgcatattatgttgctcccgaggtattgaagcggcactatggggcagaggctgacatatggagtgctggggttattctttacatcctttgatctggcgttcctcctttttgggcagagactgaggatggcatatttgatgctgccttgcacagacacattgatttatcttctgatccgttgccttcaatatctaatggtgcaaa

SEQ ID NO: 310912 - DNA, 324 bp, Zea mays subsp. mexicana
tgggttcgggctcgcgaggttctccggggttcggtttcgtgggtgagcggatcgagatggcggcgtcggatgttgagtaccgctgcttcgtcggcggcctcgcctgggccacggacgaccactccctccacaacgccttcagcacctacggcgaggtcctcgagtccacgatcatccttgatcgcaagacgcagaggtcccgcggcttcggattggtcaccttcttcacggaggaggcgatgtccatcgccatcaagggcatgaacggcatggagctggacggccgtaacattacccgtgaaccaggcccagtccctcggcggt

SEQ ID NO: 310913 - DNA, 432 bp, Zea mays subsp. mexicana
tttgattaaaaaaatcatcagcacaagatcgaggaggctttatttgaacaagggagatggcggactacgtgtatgggccggggcggaaccacctgttcgtgcctgggccggtgaacatcccggaccaggtgatccgcgccatgagccgtcagaacgaggactaccgctcgccggcggtgcccgccctcaccaagaccctacttgaggacgtcaagcagatctttaagaccaccaccggcacccccttgctgttacccaccaccgggacgggggcgtgggagagcgcgctgacgaacacgctgtcgccgggggacaagatcgtgtcgttcctgatcgggcagatcagcctgctgtggatcgaccagcagcaacgcctcaactttaacgtggacgtggtggagagcgactggggctactgagccgaccttgccg

SEQ ID NO: 310914 - DNA, 454 bp, Zea mays subsp. mexicana
ctcctttcgatctccattcgtttttgagttcctcgtgggctccgtctatctttcactcatgggcaagattaagatcggaatcaatgggttcggccgcatcggcaggctggtggccagggtggcgctgcagagcgaggatgtcgagctcgttgccgtcaacgatcccttcatcaccaccgagtacatgacatacatgttcaagtatgacaccgtccacggccagtggaagcatcatgaggtcaaggtcaaggactccaagaccctcatctttggcacgaaagaggttgcggtgttcggctgcaggaaccctgaggagatcccatgggctgcggctggtgctgaatacgttgttgagtctactggtgttttcaccgacaaggacaaggcagcagctcacttgaagggtggtgccaagaaggtcgtcatttctgctcccagcaaagacccccccatg

SEQ ID NO: 310915 - DNA, 272 bp, Zea mays subsp. mexicana
caagatcatatgtcttgttcacctgcgcaagtttgctgagttgactttgcgaagtcctgttctttcttacattaaagtttccagatgctcagtacttcatcgtggtagcataacatcaaatgctcttcagaaattggtgttgcaaaagcaagagagcctatcaagtttgtcattgttatgcaacaacttgatcgatgtcgatcttagtgactgggaattattaacaaatgcagtttgcgacggttttagtgatggaggggggtgcccaattg

SEQ ID NO: 310916 - DNA, 500 bp, Zea mays subsp. mexicana
ctccttcgcatcccgagcaagcaagcctccgccgccgacgacctagctccccgatcgcggccatgtcgaggcgcggcgactgggtctacgagaacaacggcgggacgtgcgtggccatcgccggcgcggactactgcgtggtggccgccgatacccgcctttccgtcggatacaacatcctcacgcgcgaccactccaagatctgcgagctagcggacaaatgcgcactagcatcttccggcttccaaggtgatatcaaagctctgcacaagaacttggctgccagagaattgctgtaccagcaccagcacaataaaaggatgagctgccctgccatggcacaactgctctccaacactctgtactacaagcgattcttcccatattatgctttcaatgtacttggggggcttgatagtgaagggaaaggatgtgttttcacctatgatgcagttggggtctatgagaggactggctacagtgcacagggaacaggatct

SEQ ID NO: 310917 - DNA, 600 bp, Zea mays subsp. mexicana
ttatctttcaccagctagttactagcgtcaaatgggtcatcattataaccatcgttagctgcttgaaaataccatgttatgtggtggcaccgcatcaatgactggttagttgccttttgtttttgatgtgcacctttgctctattcaaccttgtgaggtataggtcaaatagcgaaagggcctctaacgtaatggttaaggcttccgagtagcatcttcaggtcttggttcgatccctaatttcgggcttggttaaaaaaatcccctcgctgtgtcccatccgttctcggttatgtcctgcgcgtcacccctctggctgggccgttgcagagtgggcagaatggattttatcggtcaagaccatgtttcgatctcttcttaatttaatattgggagggcggtctttccctacccggccgagtttttttagctataggccaaatgcatatcaattagctgtatagggtaagtaatatcattttgttttaaactaacatatggtttctagttgaacgcagcttcattcaagatgaaaatctgccttcggtatgaactgattgtatggatgccacctatgcaccactagtctggacattctct

SEQ ID NO: 310918 - DNA, 428 bp, Zea mays subsp. mexicana
gttatagcacttctttctttgaagactgaataggggggggttgttattgacaaggattcgaagtctatgcaaccactttccaataagaaagaaaatgatgaagttttcatcaaactgggatctgacaaggatgctttgaagaagaaagaaaatgctgaacgtgatgagcgtgctaagaagtctgtgagcatcaacgagttcctaaaaccagctgaaggagagaggtactatggcggccgcggtcgtggcaggggccgcggggatcgtggcggtttcaggggtggatatggtgagggccatcgctctgcagctccaccagcttcagaaatcaaagaccatatccaattccccactcttggtcggaagtgaaatgcatgtactgcctgcaatattaagctatgtttgcggccaactctgaattctgtcta

SEQ ID NO: 310919 - DNA, 463 bp, Zea mays subsp. mexicana
attatttatctcttctcttcttctcactactacagctacttttttctcctcctcacacctgcacacacttgcacacttgcacccaccctctctcctccatccagcaccgaccatggccgccgtcacggctgcggccgtctccacctccgccgctgctgcagtcaccaaggcatcgccgtcccccgcccactgcttcctgccatgcccgccaagaaccagagccgcccaccagcgcggcctgctgctgcgcgcgcaggtgtccaccaccgacgccgccgccgtcgtcgtcgcgccggccaagaaggagaagatatccaagaagcctgacgagggcgttgtcaccaacaagtacaggcccaaggagccctacgtcggcaagtgcctcctaacaccaagaacaccggcgacgacccgcccggcgagacatggcacacggttttaacaccgcaggtgagatcccctt

SEQ ID NO: 310920 - DNA, 500 bp, Zea mays subsp. mexicana
ggagggtctttttggcctgtgggctggagcattaccaaccgtcatgcgtaatggcacaaaccaagccgcaatgttcactgacaagaatacatttgatattgttctctggcagaagcatgaaggagatgggaaggttctccagccatggcagacaatgattgcaggttatcttgcaggaactgcaggaccgatctgcactggacccttcgatgtagcgaagactagactgatggcccaggggagaactggtggacggaagtgcacagggatgagatcattgattcttgacaactgcgatagtctgagcactgttgaactgaatagtagttccatggtcaatctctctcttgctggttgccgctccatgacattactaaaactttcatgcccaaatctgcaaaatgtgaatcttgatggctgtgaacacctcgaaagggcgtcattttgtccagttggtcttgaatccctaaaccttggattatgtccaaaactaagtgatc

SEQ ID NO: 310921 - DNA, 368 bp, Zea mays subsp. mexicana
gggacggccaatggcacctcagtttcagtggagaatgttggtttactcactttgacacatgttggcagcaggagagtagtgcaaatatctgctggttgcatgatcttcttggctatccttggaaaatttggagcacttttcgcatccattccattgcctatatgtgcgggcatgtactggattttcttagcttatgcaggagcctgtgggtggagtttgcttgagttttgcaacctaaacagcttcaggaccaaattcatcttgggtttcgctttcttcatggggagctcagttccttagtacttcaatgaggacacagctgctgctggttatggaccagtgcacactggtgccagatggttcaatga

SEQ ID NO: 310922 - DNA, 378 bp, Zea mays subsp. mexicana
ccgattttgtttctctctctctctctcccttgtctcaggggctcttatttaatcctctcttcttattatcgctttcctttatttaaggaaggagttgggctctctctctttctctgagtctgaatccccacgagacgagaaacctagcaaaaatctcgtctttcgccgcgctctccctcctctgattcctgctgttcttgatcttggatctcaattcccaaccaagaacacacagacagagaaaggaaggagaagaagatgtcgaacgacatcaagaaggtgtctaccctggaggaggtcgccaagcacaactccaaggacgactgctggctcatcatcggcggaaaggtttacactgggtcgaaattccttgaggac

SEQ ID NO: 310923 - DNA, 332 bp, Zea mays subsp. mexicana
atgaattatgcggacattgagaaagggataaacgcccttgcaaagaaggctactgagggggcactctcaattgatgagatggcaggaggaacattcaccatctctaacggtggtgtttacggaagccttatcagcacacctatcatcaaccccccacagtctgctattcttggaatgcactccattgtacaacgccctgtggtcgtggacggcaacattctcgcgaggccaatgatgtaccttgcgctgacatatgaccacaggctgatcgacggcagagaagctgtctacttcctgcgccgcattaaggacgtgggtgatgactcacggag

SEQ ID NO: 310924 - DNA, 484 bp, Zea mays subsp. mexicana
tttatttgtagcaaagagcgaagagcgaagctgcggggtgtagttacgcttgttcgctcgagacctagggtacgagcaacaataatagagagtgactgagtgagcgagcactgagtagcaagggcccggcacaaacaggacgcagccggcaacgtgtacgtcgaaccaaacagagaacagctagctaatcgatcggtcgccatgaccaaggacgacgccgtcccggtggccgtggcgccggcgaagcgcccgcccatcaacaagtacgccttcggctgcgctctcctcgcctccatgaactccgtccttcttggctatgatatctcggtgatgagcggcgcgcagatattcatgaaggaggatttgaagaacaccgacacgcagatcgagatccctcgcggcgtcatccacatctactcgctgttcggctcgctggcggcgggcatgacgatcgactggctgggccgcggtacaccatggtgct

SEQ ID NO: 310925 - DNA, 413 bp, Zea mays subsp. mexicana
gaacttccttatcaatgatagcatcgatggtcttgattagagtttgaacaaaatcctcgaactgaaagaaatagaggctgaaatggctaatgttgtagagtgggaaagcaggccacctcaagaaagagaggagagattgcgtgtatttcatcagtgggagaatgctgctcgatttgacatgaagctagcacatgaggatgttgggatgcttgctttcacgtcagagcagattccagcacctttcctccttcctgaaatggtggaaagggtggcaagcacgcttaatcactccctctcgcaacttgctggtcctcagaggaaatcattgacctgaaaagaacccgaaaagtatgagtcaagccaagcagctcttgaaacatattgcccccatctatgtccatatcacaaggggt

SEQ ID NO: 310926 - DNA, 420 bp, Zea mays subsp. mexicana
ccaattatttgctgcggcggcgcgagcacacgaagaggaggcggtgcagccggagccacctccgtcgccgccgccaccatgggtatctcgcgtgactccatgcacaagcgccgggccaccggtgggaagcagaaagcgtggaggaagaagcgaaagtatgagcttggtcgccagccggcaaacaccaagttgtcgagcaacaagacagtgaggagggtccgtgttcgtggaggaaatctgaagtggagggctcttcgcctggatactggtaactattcttggggaagtgaggctgtcactcgcaagaccccgatcccttgatgtggggtacaattgcgtcaaacaatgagcttgggagggccccagacccttgtgaagagtgccattgtgcaagttgtagctgccccattcaagcagtgg

SEQ ID NO: 310927 - DNA, 425 bp, Zea mays subsp. mexicana
aaaatttggttaaaaaaacaaaacacaccaagccaaggaaaagctacaatgggatcgctcaccaccaacatcgtcctcgccgtcgccgtggtggcagcgctggtcggcggcgggtcgtgcggcccgcccaaggtgccacccggcccgaacatcacgaccaactacaacgccccgtggttccccgccagggccacctggtacggccagccctacggctccggctccaccgacaatggtggcgcgtgcgggatcaagaacgtcaacctgccttcctacaacggcatgatcttctgcggcaacgtcccaatcttcaaggacggcaggggatgcggctcatgctacgaggtgaagtgtgagcagccggcggcgtgctcgaagcagccggtgacggggttcatcacggacatgaacttcgaggccatctt

SEQ ID NO: 310928 - DNA, 248 bp, Zea mays subsp. mexicana
ctcttttacaccatatcctataatggcgaactcaccggcgccgtctatgctggcgttcctggctcttgggctagcgctcctcctctccgccaccggccaggcgagcgcgcagaactgcggctgccagtcgaacatgtgctgcagcaaatgggggtactgcggcacgggcaaggactactgcggagatgggtgccgctctggcccgtgctacggcggcggcggcggtggaggaggaggaggcggaggtg

SEQ ID NO: 310929 - DNA, 488 bp, Zea mays subsp. mexicana
cgaatgtcttttggttcttgcggaagcaggtcctgatgggatcgtttttgaaacaattcccaacaaattggaagctcaggcttacgttgaacttcttgacgaatgtaacatcagtatccctgcatggttctcatttaattcaaaagatggagttcacattgtgagtggagactcgttaattgaatgtgctactattgctaatgggtgttcgaaggttggtgcagttggaataaattgcacacctccaagatttatccatggcctgatactcttcattcgaaaggtcacagataagccaattctgatatattccaacagcggagaaagatatgatgctgagaaaaaggagtgggtggaatcaactggcgtgtcagacggtgattttgtttcctacgtaaacgaatggtgcaaagatggggctgtcctcattggcggctgctgcaggacaacttcaaacaccatcaaggccattagtagatcacttaacc

SEQ ID NO: 310930 - DNA, 421 bp, Zea mays subsp. mexicana
ttcttacccccgcgggtgcgcccacccactggggcgccttgttatggaaccagttggtcggtgcccaagctcggatggaccacacataaggtcttccacctcatgaacttccttgtcaacgggggccgcgctctggtattcggcttccatgtccacgtcttcctcctccgcgcaaaagtatacaaggcggtgttgctagaactccctggtctgttgtttttctccacctacaccttgctcgtgctcttctgggcagaaatataccatcaggctaggagtctcccaacagacaagctgaggcctgcatacattgccggtaacaccatcatatacgttggtcaggtttgcatatggatataccttgggataaatgataatgctgtggccgagctagccagcaaaatattcatcgcagctgcct

SEQ ID NO: 310931 - DNA, 448 bp, Zea mays subsp. mexicana
attaacacatagattagaagaaagcaagcaacaatggggtcagtttcggccgcctcttccgcagtgctcctcgtcgtggtcctggtggcgagcctcgccgtcggcggcgccaacgcggcgaccttcaccatcaccaaccgttgctcgttcacggtgtggccggcggcgacgccggtgggcggcggcacgcagctgaacccggggcagacgtggaccatcaacgtgcccgccgggaccagctccggcagggtgtggggccggaccgggtgcagcttcgacggcgccggccgcggcaggtgcgccaccggcgactgcggcggcgcgctgtcgtgcaggctgtccgggcagcccgcgctgacgctggcggagttcacgctggggacgttcggcggcaaccgggacttctacaacctgtcggtgatcgacggggacaacgtcgccatgagct

SEQ ID NO: 310932 - DNA, 122 bp, Zea mays subsp. mexicana
ggccttcgttatccaccacaccaaggagtggtcgtggcagacgatcctgatggccgtgtgcttcctggtgctcctgctcacggcgaggcatgtgagtatgaaatggccaaagcttttctggg

SEQ ID NO: 310933 - DNA, 388 bp, Zea mays subsp. mexicana
ggaattatttactactactctctctatgtgaatgatcggcctttgggtaagggcacacgcgactttgtagcggatatgtcaatttactacagaggttccaagacagatccaccacctggtaaggccgctccaacatctattggacctgacccacaaggattgagattgatggtgcagtacctacaagaaacctatgggaaccttcccatttatatcctcgagaatggttatggatcaagcaatgacactgctcatgacaatgacagggttgattacctgaagagctatatagggagtatcctgactgcactaaggaatggcgccaacgtgaaaggttactttgtgtggacatctcgggacgtgtctcagtacctgacggggtacggtc

SEQ ID NO: 310934 - DNA, 487 bp, Zea mays subsp. mexicana
caatgtatatacttaccaccttatcacaaagaactgggaccacttttgcaaggacatgtgttacaaattgactggtaacaaaattccaaaatgggtaaatcgcctcgccagaataggtgccatttgcaactgccttctgccagaatcactcaagatatccccagtcggccatgatccaaacagtcgacctgaagattgtgagaaaaggcggctgaggaacccgttgagctgcttctcttcgatctcgagccagaggcagctgcccccatcttccccgttcccgacatcacctgtgaaagagcctcttgcgtacagttcatcaaggaaatccagcgctccatcactgaggaataggtagcctggcctcccttgtgtaacttttgataccaagttaggctaatttggtcagtggcaacatctggagggcactaccctgcatgctgccgcaactgtcagctaattctttttgctcggtatcagtcaaaat

SEQ ID NO: 310935 - DNA, 510 bp, Zea mays subsp. mexicana
attcactattttgaaatggatggtgaagaagaaaatgcatgtccagcctctgaggacccacccatttggtctcagataatgcgcttctttacaaatcctaggaagcctatgattctggctgttgctcgtccatatcctgaaaagaatattacatcacttgtaaaggcatttggtgaatgtcgccctctaagggagctagcaaatctgacactgataatgggtaaccgtgaggccatttctaagatgaacaacatgagtgctgctgtcttgacctcagtgcttacattgattgatgaatatgacttgtatggtcaagtggcttatcccaagcatcataagcactctgaagttccggacatttatcgtttagctgccaggacaaagggtgcttttgtgaatgtggcttattttgaacaatttggtgttaccctaatagaggctgctatgaatggtttgcctatcattgcaacaaataatggagctcctgtagaaattaatcaggtgctgaac

SEQ ID NO: 310936 - DNA, 498 bp, Zea mays subsp. mexicana
cagaattgcaataattgacaagaatgctcgtattggagaaaatgttaagataatcaatgtcgacaatatccaagaagcttcaagggagactgatggatacttcatcaaaagtggcattgtcactgtgatcaaggacgccttaatccctagcggaacagtcatataaaggcaaccaatcaccactgtacataaggttgggccttgcagcatatggtgatctgatctccagtgcacatcaagcaatcaacttttaacgctgtggtttattccatgctgccagttcaccaagctctgcatcaacttgcaaggatatcataaaaaaaataaaaaataaaaacaggtgccacttaaaggcaccattttactgttactagtatgagcaaccgctctagagcttagaggtgttgtaagtccgaaaaccgtgtctgaaatgtgggtattttgatgtgtataatctttgtccttttgcatgatcagatctaaatatcctgtgtttat

SEQ ID NO: 310937 - DNA, 395 bp, Zea mays subsp. mexicana
gccactgtcaccggcatgaagcgcagccttcgggccatctacacgacggtggacggcatcctcgaggagatcatcgcctagaggaagggcatccgcgacgagaagatcagcggcggcgcggagaacgttgacgagaaccttgtggacgtgctcatcggcctccaggggaaaggtggctttggattccaccttgacaacagtcaaatcaaggctatcatcctggacatgtttgccggaggaacggggacatcggcgtcggccatggagtgggggatgtcggagctgatgcggaacccctccgcgatgaaaagactacaagcagaaattcgcgaagtgctccgagggaaggcgatggtgatcggggcctatatgctagcaggcaaccttcggtacct

SEQ ID NO: 310938 - DNA, 382 bp, Zea mays subsp. mexicana
tcgtttatatacacaaggtcactgattgctgcgttggggttccatgcataccaacaggcggcgtacatgaccctggcaagagtgtcccctgatactcactcggtgggtaactgtgtcaagcgagtggtggtcattgtgacatactgtctgttctttcgcacccctgtttcgcctatcaactctctgggaaccggagtcgctcttgccggagttttcctgttctcacaattgaagcggcttaaacccaagcccatgactgcctgattgtgtcttggtatctatcgtgaagaaccgtagcagcattgccacacgccatcggaatgagtgtcttagctcagaatgatcctcggagaagctccatccagtgaactgatgctgctgt

SEQ ID NO: 310939 - DNA, 365 bp, Zea mays subsp. mexicana
atttttatgctgtctctcgccgatagcagcagcagcggcaatggtcgccctcgccgccgcatccaccgccttcgccgccaagtcgcgcctggcgcgcgcgccgtcgtccccggccgcgcggttctccgtgtcgtgctccgcgtcgggcaacaacggcggcgccggcgagatggcgcagtcgctggcggcgtaggccaagacgttctccgtggcgctggcgctgccctcggtgctgctctcctcggtggtgacgtcgccgtcccccgctgtctgccacattgccgggctgacgccgtgtatggagtccaaggcgttcgcgacagcggagaagcaatccatcacgaagctccacccgtcgctcaaga

SEQ ID NO: 310940 - DNA, 295 bp, Zea mays subsp. mexicana
cctcggttcggttccgtggttcgtcgggggttttttgggttgagatggcggctccggatgtcgagtaccgctgcttcgtcggcggcctcgcctgggccaccgacgaccgctccctcgaggccgacttcttcacctacggcgagatcctcgactccaagatcatcaacgacagggagacggggaggacacgtgggtttggcttcgtcaccttgttctccgagcagtcgatgcgcgacgccatcgagggcatgaacggcaaggagctcgtcggccgcaacattaccgtcaaagaggc

SEQ ID NO: 310941 - DNA, 448 bp, Zea mays subsp. mexicana
ggcggtgcagccacacagcagcagcaggtgaggaggagaggagacccgccgccgccgccgccatgggtatctcgcgtgattccatgcacaagcgccgcgccacgggcggcaagcagaaggcatggcgcaaaaagcgaaagtatgagctcggaaggcagcctgccaacaccaagctgtcaagcaacaagacagtgaggagggtgcgtgtccgtggaggtaatgtgaaatggagggccctccgtttggatactggcaactactcatggggaagtgaggccgtgacccgcaagacccgtatccttgatgtggtctacaatgcatccaacaatgagcttgtcaggactcagacccttgtaaagagtgctattgtgcaagttgatgctgcccccttcaagccggggtacctcactcactatgggagtgatattggtaggaagaagaaaggctc

SEQ ID NO: 310942 - DNA, 429 bp, Zea mays subsp. mexicana
ttttgggagagagtacgtgcgggcgtccggaggtgtgagcgtacgcccgcggccgggccgtcgcgccgatcgcgatggggtcgtggcggcgcaaggcctacggcgccctcaaggacttcaccaaggtcggtctcgccaaggtcaacagcgacttcaaggagttggatattgcaattgtgaaggccaccaaccatgtagaatgccctcccaaggacaggcacgttagaaaaatattcgtggcgacctccattaaccgccctcgagcggacgttcaatactgcatctatgccttgtcaaggagattgttcaagacaaagaattggacagttgcattgaagacattgatagtggtacataagctcttgagagaaggtgatcctacattcaaagaagagttcctggcctacttatacaagggaagcgttttgc

SEQ ID NO: 310943 - DNA, 483 bp, Zea mays subsp. mexicana
tttatcaacatgatgcctgcccctcagagcacagacgaacttagctccccaaccacatcatcaaacctaccgccaatgcagccacctgctactcggcctcaggagcctgagccaaatgagtcccaaagctcggttcagagaatattgcaagatttgatgatgtcaccgcagatgaatggtattggccagcttgggaatgacatgaaaagaccgaacggacttacatctagtgttaacggagttaattgtttagttggtaatgctgttacaaataactcaggaatgggaggaatggggtttggggccatgggtgggctaggtccaaatcatgcagctagtggattgagaactgcaatggtgaacaatgcgatggcaatcagtggtaggatgggaatgaatcacagtgcacatgacctatcacaggtgggccaactacagcagcaacagcaacatcaacagcagcagcagcagcagtaacatgac

SEQ ID NO: 310944 - DNA, 344 bp, Zea mays subsp. mexicana
ggcggcctccgcggcggtgaggaggaggtgggtctccgtcccgcgcccatcgagcgggaggcggccattctccccaggctgcgccaccgccacgtgatgcgcctccgcgagattctggccacgcgcaagaaggtccacttcgtcctcgacctcgccgccggcggcgagctcttctccctgctcgacgcgtacggccgcatgacggaggacctcgcgcggcactactatcggcagctcatctccgccgtccggaactgccactcccgtggcgggtaccaccgcgacatcaaagcggagaaccttcttcttgacgacgcgggccgacctcaagggtggccgacttc

SEQ ID NO: 310945 - DNA, 150 bp, Zea mays subsp. mexicana
aaggatggtcgccacaggaagcatcatgtgatcagcacacagactgaaacctacaagaaaaaggtgaagcactcctacgaggcgtacaagactctgcagcaggagctggggttgcgcgaggagccggcgtggatcgtggacaacaccggc

SEQ ID NO: 310946 - DNA, 370 bp, Zea mays subsp. mexicana
gtatggtaagatcacagaacaagacatcaacagagcccttcacaacctcttcgctgtcaggatgaggctggggctcttcaacggcaatccaaagtacaaccgctacggtaacattggcccagaccaggtgtgcacgcaggagcaccaaaaccttgcccttgaagcagcacaacatggcgttgtcctactgaagaacgacgccaatgctctccccctgtccaaatcacaagtctcatccattgctgtcattgggcacaacgcataagacgccaccagagtgcttgggaattacttaggccctgcctggattgggtgactcctcttcaagcgctgcaaggctatgtgaaggacaccaggtttctagctgggt

SEQ ID NO: 310947 - DNA, 397 bp, Zea mays subsp. mexicana
ttcactttcgccgccgccgccgtcgcaagtaggggcccgttccgtcgtcgtcgccgttgccggagaaggagaggagcagccatgggtcgcgtgcggaccaagacggtgaagaagacctcgaggcaggtgatcgagaagtactactcgcggatgacgctcgactttcacaccaacaagaaggtgctcgaggaggtgtccatcctgccgtcgaagcggctgcgcaacaaggtggccgggttcaccacccacctgatgcgccgcatccagcgcgggcccgtgcggggcatcttgctgaagctgcaggaggaggagcgcgagcgccgcatggacttcgttccggagaagttggtgctcgaggtggaggagatccgcgtcgacatggagaccatggagatgc

SEQ ID NO: 310948 - DNA, 321 bp, Zea mays subsp. mexicana
ccggcacgcgcccgcggactgtaccggctggacccacccagtccgttcgattgttggaccaaggtgaactacctacttactgggacgagtatgagacatctagacggcggctatgcacggtaaggtggagcacgcgagcgatgggggggctggcgtcactcgaccgaggaggagcagggaccacactgattctgccacacatggagacatggaccagaacacttggggcatcctcatgagggagttcctatcttggtctttccgtgggcctatcaccactgaactgcttgctcccggtaatcatgttcaacaaggcttcct

SEQ ID NO: 310949 - DNA, 162 bp, Zea mays subsp. mexicana
cgcgagctgtgtgttctcatggacgagaagagctgtgcccggggggggttctttctagtgaggccctgggcggggacctttgacgtgtcgtccaagaccggcggcccgttcgggactatgaagaccccggtggagctgtggcacgtcgtcaacgcggggctg

SEQ ID NO: 310950 - DNA, 499 bp, Zea mays subsp. mexicana
ttcttttaatgagcagaggaaggaggcagccaccaaacaaaagattgaacatctccgtgcacaatgtgcagtattgactgataatgacatatcacattttcagaaggttgcagataagaaaatgttagagttggaagcttcacgagatctttcaaagatatggcttcacactgacatggatgccttttatgctgctgttgagacattggagaacccatccttgaagggaaaacccttggcggttggtagcatgtctatgatagctactgccagttatgaggcacgcaagtttggagtgcgtgcagcgatgcctggttttattggatgcaaactatgtcctgacttggtttttgtcccaccaaactttgagagatatactcattatagcgagctgacaagaaaagttttccagaggtatgatcccaacttcattgcaacaagtctagatgaagcatacctcaacataaccaatgtttgcattgagagaggcattacaggc

SEQ ID NO: 310951 - DNA, 405 bp, Zea mays subsp. mexicana
gcgtgggttattaccctcagtgcatcagcaaacaaactttccaagctcaaggaacgagctgatgagtacacggcactcataatggaagaacttgaccgtgacagccttggatacattgagcttgaggatctgaaggcacttttgctgcaatcaccttttcaagttgttgcaagatcaacaacgcatagctcgaaacttagcaaagctcttagcatgaagcttgcattaaacatggacacaggtccattttaccactactggcaagagtttatgtacttccttgaggagaactgtaagcgcatttggctttatgactctttggctctcaatccgcattggcctctttatttggaagttcattccaataccgaaatcttatccattcttcacattatggggtattgt

SEQ ID NO: 310952 - DNA, 224 bp, Zea mays subsp. mexicana
tttctttggcgaaggaggagcagcagcaggcggcgccgaggagcggcatcccactcactgctcgccaccatggctaggggattgaagaagcacttgaagaggctcaatgcgcccaagcgtcagatgctcgacaagctaggctgaaactgttgctcccaagccgtctgacagacctcacaagtccaaatgccaccttcctctgaaacaattgagcaggaacagac

SEQ ID NO: 310953 - DNA, 348 bp, Zea mays subsp. mexicana
ttttctcagagaatccccaagcaaacaaacagggtagagggagaggagaggagaggagaggagaggttgggtctgggacaccatggctcctatgaatctgtacggtgcggtgatgtcgtggatacgtgacgaggtgcgcaacggctctggaggaggctggctccgactacgagatcgtgcccatcaacttctccaccgccgagcacaagagccccgagcaccttgtccgcaacccgttttggtcaggttccagctttgcaggatggtgacttgtacctcttctaatcactagcaatctgcaagtacgcttgctcgtaaaaacaatccagagctgttgagggtaggaaa

SEQ ID NO: 310954 - DNA, 562 bp, Zea mays subsp. mexicana
ttttaagtcaaccaagcctgttgtagatctactaatattggagtgtttctttgcttaaaatgtggagatgttcatagggcacttggacctgacatttcaaagtgatatcgactccatggatgaggttggtggaaactcatatgcaaattcaatttatgaggcttttcttccaaaagatcacccaaaacccaaaccagattcaacgatggaatataggacgaaatttataagagctaagtatgagacacaagattttttgaagccaagtttgcgcattttatcaagatcatcttttaaatctaccaattctgtgaagagtgtagatagcaatttctctagcacttcaaggaaggatatctctgaagatacaagagaatttgttggagagctgaatattacagtcgtgaaaggtactaacttggccgttagagacatgctaacaagtgatccatatgttgttttaacacttggagggcagaaagctcattcgacagttaaaaaagtgatcttatcccggttgaatgaagtgcttatatttctgttctcgaaataccgaccttta

SEQ ID NO: 310955 - DNA, 494 bp, Zea mays subsp. mexicana
taggtaaagctggcatcgcccgcctgcacgggcccggacttactggctggaccgacccacgcgtttttctttgtgtatctgcaaatgggcgcatgaggctggactacctgagggcggtgtgaatgtccgttctggttgtgtgcctaatgatgagcctgttcttgctaaatacattgatgttgtacagatagaatctactgtatataccgataatcgaacaataaacgtggaggtgcctgcaatgagcatccttaacacagtgacactggaactagatggtaagcgctctttaataattatgcacgatgctgatgtacaccatgctgatgagcttgaacactttgccctgctctttaaccagcgacaatggtggtgtgttggatctcggacgttggtacatgagcctattgatgatgacgccgtgacgaaggccatggctcgggcattgaatcccgttgttggcgaaacggttaagaaaggtgttaaacaggccc

SEQ ID NO: 310956 - DNA, 496 bp, Zea mays subsp. mexicana
tgtaaggcatggctcgcccgccggcaccggcccggcctgcccggctcgacccacgcacgcgttctgctgtgcctcctacacatctcgcattcagcgcagcgcaagtgtgaaggaagggggacgcgcaggaagatggcgctcgcgttccggaagctcttcagccggctcttccccaagaaggagatgcggatcctcatggttggcctcgacgccgccggtaaaaccaccatcctctacaagctcaagctcggcgagatcgtcaccaccatccccaccatcggtttcaatgttgaaactgttgagtacaagaacattagcttcactgtctgggatgtcgggggtcaggacaagattagacctctttggaggcattacttgcagaacacccagggtcttatctttgttgtggacagcaatgaccgtgaccgtgtcgttgaagccagagatgagctccacaggatgctgaacgaggatgagctacgtgatgctgcgctgc

SEQ ID NO: 310957 - DNA, 429 bp, Zea mays subsp. mexicana
ggaccgtcccggaacggaattcccgacccaacccacgcgttcttctatgaatatctccaaataggtgaatgaggctggactactctagggtgttgcgaatgtcgtcatctggtttaggccctactgatgaagctgttgttgctagtcacatggatgatattaagatcgcatttactggatctaccgatactggaaaagttattctggagttggctgcaaagagcaaccttaagacggtgacactggagttaggaggcaagccccctttcatgataatgaaccatgctgatgttgaccatgctgttgagcttgcacactttgccctgttttttaaccacggacaagtgtgttgtgctgaatctcccacgtttgtacatgagccttttaatgataagtttatggagaaggccaaggctcgtgccttgaagc

SEQ ID NO: 310958 - DNA, 350 bp, Zea mays subsp. mexicana
tcgctgtgacagcgctaattggaggcatgaagctggactaattccgggatttccgaagctcgtttaccgctaggatactgctaccagtgcgcgcatttcttgatacacggaagctagtgccatcgcatctactggtactaccgatgctagaaaaatcattatcgcgttgcctgcaaagagcaaccttacgacagtgacactgaacgtaggaggcaagtgccctttaatcataatggacgatgctcctgatgaccaggctgttgagcttgcgcacttatccctgtcctttaaacactgacattgttcctgtgctggacctcgcacgttggtacatgagcgcctgtatgata

SEQ ID NO: 310959 - DNA, 386 bp, Zea mays subsp. mexicana
ggtgctggcagtccagagctggacttagggaaggccaagctccttggtggcgtccatggagaaacccatgacgacgtctgagacaacgcacgtgacggacggatcactgaggtccgctagcaggcatgcggaagggaccgaggcaggtctccgtaggtggacttgcacagtgaggggatgtcctgcgtgacgtcgtcgtactctcgactggaggcaggccgaccgggatggtggcgaatcagaagcccgggaggccgggcacgggcggcgccacgcgggtccggacgaggcgcgcctggatgtactcggtgttgaccaaggtgacgtggaagccccggacgtgcagcagtttcttcacgttgagcatcggggtgatgtggccctgc

SEQ ID NO: 310960 - DNA, 322 bp, Zea mays subsp. mexicana
caccgatcatgatgaagggtggtagcaagaaggaggtgggcgcggtggtgaatgctcattcttatctttactcttatactggtccaattcgacatctttatattttttcgcataatcttttaacaatccaccatacacaattaattgccgaccttttaaagctaattaaaacacatcaaatacatcttgactcactgacatttcataatcttttgccgaatactttgcaacttccgtaaccgcattgccttctcgtatcaactccacttttttaatatgtactttgtgttatctctggcatatttcgttgcattcttgccac

SEQ ID NO: 310961 - DNA, 381 bp, Zea mays subsp. mexicana
atcggggacttgccagttcttgggaagatccttggtgtcatgggcttcaaagaagcaaaattcggtcgctctttccaccgccgaagccgagtacattgccgcaggtcattgttgcgcgcaattgctttggatgaggcaaaccctgcgggactacggttacaaattaaccaaagtccctttgctatgtgataatgagagcgcaatcaaaatgggcgacaatcctgtcgagcctagtccgacttagcacatagccattcggatttaatttattagggatcaccaacaaaagggggatttcgtgattttcttctttatcattaaagatcacttcttcgatttttgtactaagtcatttttttgatcaattattttctaaacctt

SEQ ID NO: 310962 - DNA, 387 bp, Zea mays subsp. mexicana
catctatatgatgagaaaaatatacgacgaagagtttatgatgctttgaatgttctgatggctatggacattatatctaaagataaaaaggagatccagtggaagggcttgccgcgtactagtataagtgacattgaagaaatgaagacggagcttgtgggactgaaaggtaggattgaaaagaaaagtgcttacctacaggagctacaagaccaatatgtaggtctgcaaaacctgattcaacgaaatgagcaatcatatggttcaggaaacacgccttctggtggagtggctttgccatttatcctagttcagacccgaccttatgctactgtggaatgtttttatatctaatgattttctattttcgcctttctgtttttatta

SEQ ID NO: 310963 - DNA, 201 bp, Zea mays subsp. mexicana
atttgtacacttgttactccagcaaggtaactcgaaatggactgcgggtttagtgatttaccacacataaacacctatgactaaagcatataactcttatataacgactctgctaccatatttataggcatttactccaaggtaatcattatcaaggaaaggactgtttgacacaacacttttatttttttaatacttcta

SEQ ID NO: 310964 - DNA, 453 bp, Zea mays subsp. mexicana
gcttggacccgtggcaggtggtagataactgggggctgataaaattgttgatgcggtctgggacactgatacaaaagccccaaatgttgagcatgcaagtgcgatctctaaaaggactgtgttactgactaaatctggaaacatggaaatatatacggagtgtgggagcttaataacaacacactggcatctttcataatatgacacagccatggactttgaaagcatgaaccctgtagagcagatatacgaaaaaatgacttctggtatgtatctcggagagattgttcgaagaatcttactgccgatggcacatgaagcttctctatttggggatgacgatccacctaagctggagctgcctttcataatgaggacgcctgcaatgggggtcatgcatcatgactccagacatgaccttaaaactcttggagctaaactgaaggacatagt

SEQ ID NO: 310965 - DNA, 439 bp, Zea mays subsp. mexicana
gcgggacgcccgcaggtaccgccccgcaataatcgcgtcgaccaacgcctcctcctttttatgaaagactaacgcaaacccctagcaagaggtgcttttatcttgggctctttgacagcgaaacagaagcggaaaggtgccacttgctcatgacagggctgcccttcgattcaatgggagggaagccgttactaactttgaagcctagctctctacaatgccactgagataaataacccttgcgtcgacaccccaaaccacctatgataattgatcaatgttgaaatacatctgtaccatgtaatactttaattttagcatgtttcttgtcatggtaataattaagcacaatgtggatgagaaaactgtaactattgttgttgacatggtaacaggaggttctgcaaattgcgaggatcctctttgtgaggcatcgagg

SEQ ID NO: 310966 - DNA, 397 bp, Zea mays subsp. mexicana
tgctgtttgatctgcaccaggctgtggatggacttagggaatcagagcttgaaaattcatttatagggacaactaagagaggcattggtccttgttactccagcaaggtaactcgaaatggactgcgggtttgagatttacgacacatggacaccattgggggtatgtttgcccgattaaactaagacaccgtatatatatctcatggaacgccttattgcgatagacaacctctggtttatgaactacatagactatgactttttatataacttaaatcatcaaaaatccaacctcctgtcttctaagtactccttatgttccctaacttggttagattgttcacctcttaaatattttaaacgttttttgataaaaatatttatctcttttttac

SEQ ID NO: 310967 - DNA, 253 bp, Zea mays subsp. mexicana
cttagtaaagatacggccgacatagcggggagcttatgtggatgtcttgacttccgacagctacatgctgaccgtgttctgcattggaaataccacgaggcgcccaaaccaggacaagagaacctgctatgctcaggcatcccacattcggtcgagacgcagtaagaaggttgggatgataagcaaccgggcttgtacatgagaccttaaagaactagggtgtaagttcatgccggaagttattggcggagag

SEQ ID NO: 310968 - DNA, 495 bp, Zea mays subsp. mexicana
actatcaacggaaccttatgctcatgctcgggggctaatttcaatacttgtttggaagcctccctttgctttcataggggaacactctgagagcgctgaagagctgaaacatttgaaagaagtgctgcttgatcttttcagaggagaggtcgtagagaatctgaaccttgctggtgtggatcggatctatgtgagcactgcaatctctcccactactgtttacatgatgcactgtgctctccgactaaaaaggtcaggtacatctattcctaggatggaactggtcgaagctggaccttcaatggatctggttgtaaggaggcacagacttccagctgaaagcttaaagaaagaagctatgaagaccgctgaacatgctaagaagatgaaaaacgtcactaaggaaccagtgcagggcaagctgggccagggctacaagcccgaccagcaggctggaaagttgacctttacaaacgacaaaagggactaaagagg

SEQ ID NO: 310969 - DNA, 473 bp, Zea mays subsp. mexicana
ctgctccggctgcaggccccgcgccgtaattggggggtcccacccggcgctcctttcttgcgggccctcgtacgcaggacctcaaggggtgggaggaccatcacgagcgccagcgtggcagtcttgttgttcacggaggactacgcgcaggtgaacctgatgtgttactgctggatcactaccaaggagcttgcaacggggagtccaaatgttgagcccatcggtaatccgacaaaggtgctggacatgattcagcctggaccatggcggtggcaatgggaccatccactttcgggggtttctgaacctgatggcgagggagatgaaggacacagactcataggaggagctcaaggcggccttgcgcgtgttcgacaaggaccagaacggttgcatctaggctgcccagctccgccatgtcatgaccaaccttggcgagaagctgaccgacgaggaagtttgactagatgatc

SEQ ID NO: 310970 - DNA, 263 bp, Zea mays subsp. mexicana
ccctctttttcttcgacatgaccgtcggcggtgccgcagcctttcttatcgtgatggagctgtactccaacgaggtgcccaagaccgtggagaacttcttcgcgctttgtttagtctattttggtattattacaattctctattatctttattaattactatcatttttactttttttctctttacttctattcttcttttttctatttcattcatttttatatttttctataacttatttttattctcataataatcatttt

SEQ ID NO: 310971 - DNA, 226 bp, Zea mays subsp. mexicana
gccgctttgccctgcgcgaccgtgctcatcagcgggccgccccgtggtgatacagccgctccttggcactgtgcacgcgctcgtggcggtctggctgccgggaagcgaaggccagggcatcaccgacgtgctcttcggggactacggattcacggggacgctgtcgcggacgtggtttatgtcttctttatcacccttctttttatcttacaactttattagctct

SEQ ID NO: 310972 - DNA, 188 bp, Zea mays subsp. mexicana
ttctttacatctccctgctcctacgcctccttgtcgatccagtcaagccagggatcgccatgtcggactcggaggagccccacttcgaatagagggccgcatcctgagtagacacaaccaacaaaacattgttatttaatgctattagagattcattctgaaatattgagaacctataatggaaggta

SEQ ID NO: 310973 - DNA, 329 bp, Zea mays subsp. mexicana
agatcggcggcgcgggcggacaaggagcaggcggaggaggagttgagccaagccacaatgggtatctcgcgtgactcgatgcacaagcgccgagccaccggaggaaagcagaaggcctggaggaagaagcgaaaggatgagctcggtcgccagtcagtcaacaccaagtttggaagcaacaagacagtgaggagggagaccgaccggagaggaacctaacacggtaatagaaacagttccttcaatgtcaaacgctgctcccatcccacctattattaaagctaaaaccagcacctaatactccaattataccaccaattaagccctaa

SEQ ID NO: 310974 - DNA, 291 bp, Zea mays subsp. mexicana
atctcgtttcaaatccatccggggcgcgttttaacacgtgcttgttggatatcaaccccatggccaagatcaagaacgggaacaatggagtcggcaggatcggacggttgcaggccagcgtggctttgctgagagactatgtcgatgctacgctgtcgtgaacgagcccttcatcacgaccgactccatgacctacatggccaactgcgaccctgtacactgacagtggaagcaccatgagagccaggtgaaggacatcaaaacccttctatctggtgagaacgcggttgc

SEQ ID NO: 310975 - DNA, 382 bp, Zea mays subsp. mexicana
tcgttcggggacttgccagttcttgggaagggggttggtgtcatgggcttggaagaagcaaaattcggtcgctctttccaccgccgaagccgagtacattgccgcaggtcattgttgcgcgcaattgctttggatgaggcaaaccctgcgggactacggttacaaattaaccaaagcccctttgctatgtgataaggagagcgcactcaagggggccccacaatcctgcgggcgtatttcgcacttttcacaatagccccttttggataatttttttttagggatccaccacccaaaagggggattttcgagatttcttacattaacactaaagatcaattagccgatatctttaccaagccacttgatgaacaatctttta

SEQ ID NO: 310976 - DNA, 338 bp, Zea mays subsp. mexicana
cacggtctgcttcgacatcgacgcggggggttttttgaacgtgtttgctgaggacatgacaacgggtgtgttgaacaagattcacaattaccaacgactagtggccttctgttcaaggaggagatcgcgaagatggtgcatgtcgcggagaagttcatgttgtaggacgaggagcacaagaagaaggtggagtccaagagctcgttggagaactactcctacaacatgcgcatcacgatcaatgacgagatgatcgagttcaagctggctgtcgactacaagaagaagatcgaggactccatcgtcgcggccttcagctggctggtctccaactagtt

SEQ ID NO: 310977 - DNA, 508 bp, Zea mays subsp. mexicana
gtcgactgccatcaccaccttctgcagaaagaggaactgtgaaaaccattgtacttccagaaaacagagttagcaccccgcccaggactggaccctcgacatgtgcaacatccctttcgggggcattacttcagcaatatacaaatagatatcaagagcaatatttgataagggagagtatattggggaaagcgtatccgtcagaacttgctgacggcaaattactggaaggtatgaagaatgataatgctaatggaagaataccagtagatgaccttctagagttgcatgctcgcatatcatatattatacaccctaacattcttgaactaccgggatattgtgctgactatgaacagcggttacgtcgtgtataactacttcacgagagaaacattacatgaggaactacatgaagggaaggagctagataaaccattactctggaatgctcggctccacatgctcttcatgcacataagccttagagtatctcctgacacctgtg

SEQ ID NO: 310978 - DNA, 269 bp, Zea mays
ataccctttgggtgtgttggagaagacgacgttctcgagttggttctggactacaacgatcagaagaacattcccgggctccgggaatggatacagtcgatcaacaaagaagccgagagagtgagggacagcgtaaaaggagaggatgggaaccaggacatgtacctgccagctcttctcccaaaagtgcctggccgattctactacactgtcggcagccgattgagatgaaagggatgggcaaccttgtcagagataggaagagcgcg

SEQ ID NO: 310979 - DNA, 265 bp, Zea mays
caacatcctcggctgaaaagaccaagaagaaaaggtgatgatggcccagagcaatcttgggaaaagctagagatgtccactatactttattatggcgaagtacattctccctcacttcgtaggcaagagggaaaagtatcttgggtgacttgagtggccacctaaggctttgtttgggtactctagcattgaccccaatccacatgtgttgaggtggattggggtgtaaattcagttaagttacacctcaatccacctcaataca

SEQ ID NO: 310980 - DNA, 265 bp, Zea mays
cttgagaagctctgtttccactatccatcgtcgtgcagctttaactctcaagaagcattcgttttcgtggtgcctttcctgacctccttggtggtcagctgaggtgcgcacaaaccggcaagtcacaatacggcaatggcggactccattaggagtcgtccttttttatttctttacccctttttacattctagttctgtgattgtgtcaggcggaagcgagaagacaaataacctaagtattcatgtgtgatggattatatacg

SEQ ID NO: 310981 - DNA, 267 bp, Zea mays
gagcttgagggtacgacattccgggttagctactccatgatcactgacaagcttgacgcactctatgagaaggttaagtcaaagggggttacaaagacagtgctgctggtgaaggcggcagctgtggcgctcacccaacaccctgtagtaaatgctagctgcagagatggaaagagcttctcctacaacaatgatgtcaacattggagtggctgttgcactcgagggtggccttcttactccagtattagaggatgctgataagatg

SEQ ID NO: 310982 - DNA, 259 bp, Zea mays
ggcgccgatggtgtagatcacaggaccagtgggcaatgagatgctcatggcctatgaccccaatgcaacagtgatcatgcgcgctacggggattcggtattgctccgtatccgtctcttcttgtggttgatgttcctgtatgagcaagaggactacaagttcaccggtcttgcgtggctgttcttgggagttccgacgagcgacagcctggtgtacaaggaggagtttgagaacactatggacatggcgccgggcaact

SEQ ID NO: 310983 - DNA, 279 bp, Zea mays
aagaaaatgatccgaaggaggttcaagtgtccgaactgtggagaattggggcacagaaaaaatagctccaaatgcccactaaatgggacaaagaagaggaaaagagcgccaaggaagaatacaactaaaggttggtttcctaaagaagtgcctacatcatcacaggcagcacccaatattactcctccaagtgatgatgtgcctgcatcttcagagattgtgctcacaatgcctcctccgccaggagaggatgtgcttgcatcttcacagatagtgcaa

SEQ ID NO: 310984 - DNA, 99 bp, Zea mays
gctgaaggagattaggtgctacaagggcatccggcacaagcttggactcccagttcgtggccagaggacaaagaacaactgccggacacttaagggaaa

SEQ ID NO: 310985 - DNA, 150 bp, Zea mays
agacatcacatttgtcgacccactaaacactttccacggcattgacaactacaagaccatcttctgggcactcagatttcacgggcgcctgctgttcagagaaatcgggctcgatgtatcacgcatctggcagctgacagagaactcgat

SEQ ID NO: 310986 - DNA, 183 bp, Zea mays
gcagcggctcatctctgctggcaagcagatggcggatggccgtacccttgcggattactacatccagaaggattgcaccctccacttggtgcagcgtctcagctgcggcctgcgcatctaggcatgtacattggctggctagaacactacctgggcagaggaaacgtctgacccaacatcact

SEQ ID NO: 310987 - DNA, 270 bp, Zea mays
cgccgaaatcctgttgcgtctctcgcgcgttatccatacactcagtaatgctcgcgccgactgcagtcgaaggatgtggtctgagccgtgaagaccgtcttcatcatggctgtattgttcacccacataactatggcttcattccacgcacactctgtgatgctaatgacccccaggaagtcgtcatactgctgcaagatacaagttgtccctgggtgtatcctgcgagctcgtgctattgggctcatggctatgagcgagcagggcgag

SEQ ID NO: 310988 - DNA, 267 bp, Zea mays
attgatttctgacatggttccttatattgtgctactttaacttcttgtaggacttcctaggtttggtggagaaattttactacctttctggaagatatgaccttgagcttaccgttggtgatgctgtaatggaaaattcatttctacgacctcttggccatttggagttggacctgccagatgccccagaaaaagccccacgtcctcctgcacaagctgttgacccattctcaaaatttgggccaaaggcagagatatcacatatat

SEQ ID NO: 310989 - DNA, 271 bp, Zea mays
ggagattatgggttcgatattgcaggtctgggaagggatcctgttgctttcgcaatctacttcaacttcgaaatcttacattgtcggtgggccatgcttgctgccctcggtgtggttgttcctgagctattagatctatttgggttagtgcattgtgtggagcctgtctggttgtaagttggttatgcataacttcagggtgataaccttgattaccttgggattcctggattccgaattgctggtggtcaaggcgtcgttgtaattgcaa

SEQ ID NO: 310990 - DNA, 271 bp, Zea mays
gtaacccacttttttgtacattcatatatactagtattttggaacttgtttcaggcttaataatatcctgattattcgagataaatatagtgaccagccatgacatgtttacttggctgtttatctttgttttgccttaaggttcgagctggaatattttgatatccagatgttggcaaatcttccttgattaatcgcttgctaaaacgaagaatgtgcccagcagcacctaggccaggtgtcacaagagagctgaagtgggttcgttttt

SEQ ID NO: 310991 - DNA, 261 bp, Zea mays
gaactacaacttaggcctcaacaggacaggaaagagctgccgcctgcgctgggtgaactatcttcaccctggcctcaagcatggccgcatgtcaccacaagaagagcgcattatcattgagctccatgctcggtgggggaacaggtggtctaggatagcaaggaggctgccagggcgcacagacaatgagatcaagaactactggagaacacacatgagaaagaaggcacaggagaggaagatgggcatgccatcaccttc

SEQ ID NO: 310992 - DNA, 266 bp, Zea mays
ggtggacctgtggctgcttccaaagagctcaaacagatggtcaaggcatttcataattctggaattgagtttacaaccatacaaatgaagctgatgatgttaacccttacatgacttcctttcgtggtattgataacaaggtctattacatgttagatctcaacaacagtgcacagctgctgaacttctcgggttgcgggaatacactaaactgcaaccatcctgttgtcaaggagcttgtacttgacagtttaagacattgggtt

SEQ ID NO: 310993 - DNA, 263 bp, Zea mays
gttcctgttctgctttatggagtaagtagtggttttttttttttgctgtaggcacttgacacgttcaacacggcaattgtatctccaatatattatgtaatgttcacaactcttacaatacttgccagcgtcataatgttcaaggattggtcttgtcaaagccctggaagcgtcatttctgaaatttgtggcttggttgtggtgttgtctggtaccattttgttgcatgtgacgaaggattatgaaaggatcccacaatcaag

SEQ ID NO: 310994 - DNA, 268 bp, Zea mays
gttttggactcggttaacatcaccctgggtgctgaggatgaactgaaggatgctgtcgagtcgagttcgccctagaatccagaaacggcgcacatcctggtggccttatgaagagaaggaaggtcgtggagcacatcatccgctcagagccaagcccaacatctcagacgctgaagagaaagacatgctggactacctatacacatcgcagtaccagatgcgagggatactcgcggtctcgctaggccgcatcaggaccccaacagcg

SEQ ID NO: 310995 - DNA, 266 bp, Zea mays
ctcctgctggaattttaacatttaacagaaatagcatgagcggtgttctcaactgatgctgacaatcagacccaagtgggtatctgtgtgttgcaaagtgagcatgaaatggccacatacaataaatgcctggggaatttgacctcatggacattccacccgccccaagaggcttgcctcagattgaggttacattcgacatcgatgccaatggaatcgtgactgtctcaaccaaagataaggctacgaggaaggatcagaccgat

SEQ ID NO: 310996 - DNA, 257 bp, Zea mays
atgagatatatcagttggttgtcttgaagatagaaaagccaatattcacgtgtagtctacctccagacattgagaatgtgctttctggatgttttgaatatgactttagaaaccgtcccttgatgaaagacattttgcatgcatttgagagtgctaaaggtgcagatcatgacaacattggttggggcaattctgaaaatgctatggtagacaggataaccatgccagatcgcatcaattggttacactttaaggac

SEQ ID NO: 310997 - DNA, 282 bp, Zea mays
gacctactccgccaaggagacctgctacctgctgcaggggaaggtgaaggtgtaccccgacggtcacggcgaggagttcgtggagatcgccgcgggggaccttgtcgtcttccccaagggcatgagctgcacctgggacgtcgccgaggccgtcgacaagcactacaacttcgagtagccgccgccgccgccatgtttggattgcttcctctagtttcctaccatgtgcttgtagacttgctgtgctcttatacacctatgctccattccagagttaaacag

SEQ ID NO: 310998 - DNA, 262 bp, Zea mays
cattggcttcagtttacaacgaaaaggctcttaaaagccagtttgataccagtatttaccttcagaacttgtttctgtatggttatggtgcgatatttaactttattgggcttgttgtcactgctatcatccaagggcccagtagttttaacattctagaaggccactcataggccacgatgtttcttatctgcaacaatgctgcacagggcatattatcatcatttttcttcaagtatgcagatacaattttgaagaagta

SEQ ID NO: 310999 - DNA, 266 bp, Zea mays
ggaaagagctaaaaggatggaagaaaagaaagtgtatctgcaactgtacgaagcaatggaggcgctggtccacatctgccgggacggatgcaggacgatcgggcctcgagatcaagcgctcaagggcagcctagcagccgcctgcaagtttcgcgcctgcaagggcattgagctgctcgtgcgccacttctcggcctgcggagtccgggtgcccggcggctgtgccaactgcaggcggatgtggcagctcctcgagctgcattccc

SEQ ID NO: 311000 - DNA, 257 bp, Zea mays
gtcaaatgttgcacttacagtgtgggcaggttttatgggataaccatagctcatgttctggaacatggcaaaccccatgagagatcagccattattgagaagctaattggccaagttgtgcaaatgagccagcaaaagtttgcctcaaatgtcattgagaagtgcttagcctttggaaatcctgtagaacgtcaggttctgattggtgagatgcttggatccactagcgataggaacctcttgaggtaatgatgaaa

SEQ ID NO: 311001 - DNA, 283 bp, Zea mays
ccacgctgcagagtatttgcggcggcgttcccatgctgtgctggcccttcttcgccgagcagcagaccaactgccgatacaagtgcacctgcgtgcgcgagggcccaacgcgctcgacggcacggatgggtttcgcttcacctgcctgccccggtttaaggatctcatcgccaggattaacgccgaggctgaggccgagggacaacccaccgtgacatgcgtcgtcggcgacagcaccatgaccttcgcgctccggccgcgcgagagctcggcctccgctgcg

SEQ ID NO: 311002 - DNA, 275 bp, Zea mays
acttcctctcaaaatggacaaaggtggacctcggactgcagcttttaggctatgcaagagtttacagtggccaattccagaatttgaatttgtggaacaaaggtttaggtatgccaagtaatacccaaacattactttcttgtaaaagaatgtcaaacttcattcacaagagctttggggattcatattcaggccccgtttggtttgagggactaaagattagtctctccattttagtcacatttcgtctctaaattgccaaacagtgggactaa

SEQ ID NO: 311003 - DNA, 267 bp, Zea mays
cagagaattagctccggatatctacaaagtggaacagcaatacaaggatcgtgcaatttgtgatgctgaatgttgacaacacgaagtgggagcaagagcttgacgagttcggggtggaaggcattcctcacttcgcctttctggataaggaaggaaacgaggaaggcaatgttgtcgggagacttccaaagcagtatttccttgacaacgtggttgcgcttgcttctggtgatcccgagataccgcacgcacgagtggtcggtcagt

SEQ ID NO: 311004 - DNA, 274 bp, Zea mays
ctcccatttgtctcacctcgctctcacgcctgcctgcgtcaccggaagcgaacccgcgggcgagcgatccgatccccttcgcggcctcgtcaacgacgccgagcattctgctgcagaacactgaggaatggctgaagaagatgtccagccccttgtgtgcgacaatggcactggaatggtcaaggcaggtttcgctggtgacgacgcgccgagggcagtctttcccagcatcgtaggcaggccacgccacactggcgtgatggtgggcattggc

SEQ ID NO: 311005 - DNA, 226 bp, Zea mays
gctaaaaccctctccaccgtccacctcagctcccatcaccgctcccctacgtctccagcatctcccgcctccgtcgtctcgtctctgctcctcacctcgccgccagccatgggcaagatcaagatcggaatcaacggtttcggaaggatcggcaggctcgtggccagggtcgccctgcagagcgaggatgtcgagctcgtcgccgtcaacgaccccttcatcacac

SEQ ID NO: 311006 - DNA, 251 bp, Zea mays
agttggatctgccattactttggaccagcttattgagcctgctcttttacccccaccacccatttcgtggtacttgagagggattacttcaaggacaactgagatgctggtgaacgatctgatagcggaaactgctcgattgcgcaccatctcaaacaacgcgaatgccaagcaaggtactgaagaaaccggtgatgctaacataggtgatccagttagagagtgtggtgacattaaggaaaggtggcgac

SEQ ID NO: 311007 - DNA, 273 bp, Zea mays
cgaaaatttggacatttccatcaattgccttagaagacatcattgttgcgataaacgacttctctgattttaacatgcttggaaaaggtggattcggaaaagtttacaaggcaatgttggaaggtggcaaggaagtagctgtcaaaaggctcagtaaaggctctacacagggggtcgaggaatttagaaatgaagtagttctgattgctaaactgcagcacagaaacttaggtagacttcttgattgctgcattcataagatgagaagttact

SEQ ID NO: 311008 - DNA, 260 bp, Zea mays
cgggtctcctccccctcttatcaagtcctcctcgggttagggttccatagggttttgtggctgggcgatggcggcggctgatgtggagtaccggtacttcgtcggcggacttgcctgggccaccagcaacgagtcgcttgagaatgccttcgcctcctacgctgagatcctcgactccaaggtcatcaccgaccgggagacggggaggtcccgcggcttcggcttcgctaccttctcctctgagaactccatgctcgacg

SEQ ID NO: 311009 - DNA, 172 bp, Zea mays
aatattaccattatgggcttgctgcttctctttacactcatttcacttctcccatacgcagatatgcagatgtagttgttcatagattgctagctgcagctctgaatattgctaagctcccaccaatcttatatgatggtccacaacttacaggcattgctgacaacctgaa

SEQ ID NO: 311010 - DNA, 150 bp, Zea mays
agtgagaatgatctgcctggtcagactgacactgagaagccaaatctgaggggtcccaatagggcctccacgatcagaaagctgttcagccctaacaaggatgatgatgtacgcaagcacgtgaacacataccgcagacatgcactacca

SEQ ID NO: 311011 - DNA, 251 bp, Zea mays
gaaccgttgagctgagccgagcagggagaaggacgcgagagcagcatggagacggcggagaggggcatcaccgtgtgcgtgaccggcgcggggggctttgtggcatcgtggctcgtcaagctcctcctctccaccggccgctacaccgtcctcggcaccgtgcgtcatctcggtgatggcaagaatgcccatcttaagacactggaagatgctgaggagatgttgcagttggtcaaggctgacatgctgga

SEQ ID NO: 311012 - DNA, 283 bp, Zea mays
tcggctcccaattattgtggtgaatttgataatgctggcgcaatgatgagcgttgacgaaactttgatgtgttccttccaaattctgaaacctgctgagagaaaacaaatttatggggccaaacaaaatgtgagatagtgaacccattttgctccagcagctctgaggtcagttaatcctgtttcaatattttgtcctgctgatttacttgctccacacaattgttgaatcacatcgtttatgcatttgtgggttgtgctacatatatttatgagagaattct

SEQ ID NO: 311013 - DNA, 282 bp, Zea mays
acccaatccaaaccagacaagcaatgaatcccccgatggctcatcgcgttctcctcctcctctctctcgcgtcggccgccgcggttgccgccgccgtcgacgcggaggacccgctgatccggcaggtggttcccggtggatatgacaacgactggagctgaacgcggagtcccacttcctgagcttcgtgcagcggttcggcgtgtactacaaggacgccgtcgagcacggcgtcactaagttctccgacctcggcctccgcaagtcccggcgcgctctcct

SEQ ID NO: 311014 - DNA, 275 bp, Zea mays
gatggggctggtagggcaggagccggtgctgttcaacgacacgatccgcgccaacataacgtacgggaagcacggcggcgccacagaggaagaggtggtggcggtaccaaggcggccaacgcgcacgagttcatatcgggcctccccaagggtacgacaccatggtgggcgagatagggatccagctgtccggcgggcagaaacagcgggtggcgatcgccagggccatagtgaaggacccgaggatactgctcctcgacgaggcgaccagcgcc

SEQ ID NO: 311015 - DNA, 281 bp, Zea mays
ggatgaatgggttgcaaatgaccgcttgttggaattgacggaggaaaacgtgcgcaaacaacaagagcttgataagaatcaggtagttgacaaaacaatgaagtctggacggtcaacacagcataaaccaaaagtctccaatgcggatgcaaaagctgataaagatgacactaagagtctcatttcagtgaaggggaagaaacgtaaaagtcagcttgggactgagtttcctttgccactgaagaagcaacttgtggatgattgggagtttgttacgcaga

SEQ ID NO: 311016 - DNA, 149 bp, Zea mays
ggcaggactcgcttcaagctcctcatctcgcacatgggggtcgcctgagatcacagagacaattgtgaaggcagttgctgtcctcgccggcactgatgtcaagggcaccatcttcttttcacaggatggggatcgtccgagcaccgtga

SEQ ID NO: 311017 - DNA, 102 bp, Zea mays
accgacatgacatatcaggaggtcacagctgatcccagtgctgagacagctgaagagatgctcaacagaatgtccatgaagaaggacgtacacatggcacta

SEQ ID NO: 311018 - DNA, 261 bp, Zea mays
ctgctgcctgcctgcctgcctgcctgcaaaaaggagtttgtcatggcgtctaagcgcatcctcaaggagctgaaggacctgcagaaggacccccccacatcatgcagtgcaggtcctgctggtgaggacatgtttcattggcaagcaacaattatgggaccacctgacagtccctatgctggtggtgtttttttagtgaacattcatttcccgccagattaccccttaaaacctccaaaggtttctttgaggacaagggtc

SEQ ID NO: 311019 - DNA, 132 bp, Zea mays
gtcacgaacaaagcgaattctgaagcccacttcagattgaccgggcctgagatctggaaggacacggcaggcaaggtggatgtattcgtagccggttcaggcacaggaggcactgtttctggcgtcgggaag

SEQ ID NO: 311020 - DNA, 218 bp, Zea mays
tgaagagattcatcagcactggaaacataaagaggttgtgaaagtaattacaaaacagaatcaaactcgacagatcatgtacaccgcgagtctgctcgaggttgagacaggtggaatattaatagcagtagaaaagctcacaaccagccatgccataatactttaccgtggaaaaaactatcgccggccagcaaaatcatcatttagtaatctcctaa

SEQ ID NO: 311021 - DNA, 226 bp, Zea mays
tgaaggacggcaatgtcgcgggaggcgaggcgcagttccagactgaggttgagatgatcagcttggcgctgcacagaaaccttctcaggctctatgggttttgcacgaccgccaccgagaggcttctggtctacccatacatgtctaacggaagcgtcgcgtcgcgcctgaaagggaagccgcctttggactgggcgaccaggaggaggatagctctgggcgcaag

SEQ ID NO: 311022 - DNA, 265 bp, Zea mays
cggcaacggatatctcggctctcgcatcgatgaagaacgtagcaaaatgcgatacctggtgtgaattgcagaatcccgcgaaccatcgagtttttgaacgcaagttgcgcccgaagccttctggcggagggcacgtcgcctgggcatcacgcgcgcgctctcctcttccacgagtccgtcagcctgctaagtcttaagatggcgtcaagcaatggtcagacagaagctccagcaccatctgtccccaaaaatcctgctatggcat

SEQ ID NO: 311023 - DNA, 268 bp, Zea mays
tttgggttaatgactttgcctccttgtattcctcttcgagtgattaagaaccctcgtgtatgtgatgactgccacagttggatgaaatgtacctctaaagtcacaagaagagaaattgtattacgagatgtgtacagactcaccattttaacagtggcagctgttcatgtggagattactggtgaattgggctgttgcaaagtgtttacagcacttttttttatagaaaaatccccccagtgctattcctaatggttttcattttaag

SEQ ID NO: 311024 - DNA, 264 bp, Zea mays
gaaaacactaccagctccagaggcagcattgaactattacctgaatgaggacctttacttatttgatgagtttcagacaacaagaattccatgttctaggaggcctaaaatagataacttgtatgatgtattcgcaatatacgagatgacgaggcagagcactgcaagacaatgaaggcatgtcaaacacatggaactcttcgttctctcactcaatgccgaactgcttagaagctgctacagaatgtgtaatacctgaaaacg

SEQ ID NO: 311025 - DNA, 246 bp, Zea mays
  unsure (1)..(246): unsure at all n locations
ggccagcagttcctcgtcgccggtgacgacgcggcgctcgggctttgggatccagctaaggcgatctccttggtttggtcagaaggccacgtctggacggcgaacacggatttgccggcgaacaggtcgatcgagttcaagttcttgctgcaagatgcctcggggcatgcgcattggcagcatggcgctaacagaactctgcgaattactactgaaaccccaaacaccgnagattgtgcacgaaga

SEQ ID NO: 311026 - DNA, 103 bp, Zea mays
gaaaaatatagcaagagccatcttgttttcaatgatgatatccagggcacagcatcagtggtccttgcaggtttgttagcagcactcaagatggttcgtggga

SEQ ID NO: 311027 - DNA, 275 bp, Zea mays
cttgacaactataggaaattcccaatgtttgcagtaagaacattttttagcaagtttcaaatttgaaaatctacagtttacaactactgtcaagtgcttatctttgttagtaatttgttatcctgtgggactcttttgttgatcacaccctatggcctgcatttagtctaggaaaacttcaggtagggaaaattacttattttagtttttgtttagtttttcaacatgtcgctatgcaacaattgacgacctgtacaactcttgaattgttgatg

SEQ ID NO: 311028 - DNA, 142 bp, Zea mays
ctaccagaaagcaccgtttcccgtccgatcaactgtagttaagcaggtaagagcctgaccgagtagtgtagtggggttgggcaaggtagtcaaaccaaaatttgttgcaacatatcaaaattctcgtgacatttcaaggttt

SEQ ID NO: 311029 - DNA, 265 bp, Zea mays
cagaaaagtagtgaaggtagttgggcgagcttatcaatggaccaagttgtgaagctccggttgggtgaatgtggcccttgtcgagcttttgccttgttggcctactaactagtgtttatgtcatgtgagggttgcaacgcgcaagatttgttggccgctggaggagaacgctttccgcccaatcctcaacaactacgacggcctttaattcaggctggagctcagtgtccctgaggcgctctcccttcttgatatatttgcggag

SEQ ID NO: 311030 - DNA, 268 bp, Zea mays
tggaccactatgcaaattataggcgcattgtggtcccagaaggcacggcggtggcatgattttatcatcctgacttgttcgcagtcccccctcactcgagataacaccgcggtggcacaactgatcaggagctgcttctcgtctttcctggggcctttgtttgatgggcgctcctgctccgtagcaaacagaggagttgcgaatctgctggggcagagttctgatgaaaaagcacacaggcttgctgtagctccagggtttctctaca

SEQ ID NO: 311031 - DNA, 261 bp, Zea mays
  unsure (1)..(261): unsure at all n locations
atcaagaggaatcttagatagtcatactttggcgtaccagaatcgggtggagctagttcaatggctgaagctatatactgatgaagtattagtagaacttggtgaaaagggtgtgaagagcctactggctgttacagtaagccttgagagtaaagacatcgagacattggaagaaattgacatggagtacaaggagttggctctggaatcaggcatcaagaactggggtcgggttcctgctctgatnnacacttcaacatt

SEQ ID NO: 311032 - DNA, 303 bp, Zea mays
cggggctatcaacaactacacggaccagctctacagctacggccagaagacttcgtataacctgacggagagcctgatgttcctggcacacttcgtcggcgacgtccaccagccgctgcacgtaggcttcgaagatgacgagggcggtaacaccatcaccgtccactggtaccggaggaaagcaaacctccatcacgtctgtgcctgctgctgcaactcttcgatgctaaatttcagatgtgtactcaccaggtagccagtctgaatctctgagaatcagaatctgtgttttgctaggtgtgg

SEQ ID NO: 311033 - DNA, 289 bp, Zea mays
ggaagaacaagaaaggcactaggagtactgggagcagcggttaaaaggcagggcagggcagggcaccagctaatttgggcccttcattgcccttttggggtctgagcgagcgtgaggctgcagtgaccgcgacgctacaccaacagctagctcctcggcagattcctcttgcccgtccccgcctcagtttctgacgttgctgcacctgcaccacacagttcactctagcagcagtccaaacagctgcaacagtgtcggcttgtagccagccgaacacgcccggacgatg

SEQ ID NO: 311034 - DNA, 276 bp, Zea mays
ggcggcgaggcctctatttgcaagtcaaatctgaggtggagggctgcatcaactatctgaaggagaagagggaggaggacccctacagaagtatactgcccaggcttctctaccaagcacttcatggtcccgatgcagaaatacccacatttgaaccatgaaatgttcacttcgagaataccaattgtttatattgttcgttcttatggtagtgtttcttgcattgtcaaaaaaaattgattgttaccattgtcctcaaaagaattatgatggctg

SEQ ID NO: 311035 - DNA, 152 bp, Zea mays
cttgttctgtgtacccatcaatatggctgcagagttattcagagagttctggagcattgccatgatcctgtgactcaaagtgctattatgaatgaaattatgcagcagaccttccatttgacagatgataagtctgggaactatgttgttca

SEQ ID NO: 311036 - DNA, 281 bp, Zea mays
tcgagtcggatgctctcttcagccggaaggcaggggaagagattacgcagcaggtctagaacttcgaggacagagggggtcgccgtgttgttctcaggcccgaaattacgccttccctcgcgcgcctagtcataaagcaaggaaaatcagtctcccttccactgagatggttgactataggacaatgctggcgatatgagcgcatgaccagaggaagaaggcgggaacattaccaatggagtatggatatatttggtgtgctaaagttctgggtgaggctg

SEQ ID NO: 311037 - DNA, 247 bp, Zea mays
gtccgattcattggttcatgcacaaagccacctcagttttacataattacagagtgcatgtctagaggaagtctgtttgatttcttgcacaatgagcataatgtgttggacctcccaacgcttctgaagtttgcactagatgtatgccaagggatgtcctacttgcatcagaaaggcattatccacagagatttaaagtctggcaaccttttattggataaaaatgatgttgttaaagtagccgatt

SEQ ID NO: 311038 - DNA, 156 bp, Zea mays
ggctgcagctacggcgactccctggtgcaagggagagcaggtcacctcagagaagaaggttcgtgaggctcatgttgagaaggggatgcaacgcaaccagatgatcaccttccctggtgaagctgatgatgcgcctgatactgtcactggagacat

SEQ ID NO: 311039 - DNA, 265 bp, Zea mays
atcaatggaaccacaagttgaaagagaacttatgcttataaaagtaaatgcagagcgagaaaagttacctgagataatgggtttggttcgcattttcaaagcagaagtggttgatctttcagactacacactaactattgaggtaactggagttcctggaaagatggttgcaatacagaagactctgagcaaatatgggatcagagaaattgctagaactggcaagatagctttgcgccgtgaaaaaatgggagaaactgctcca

SEQ ID NO: 311040 - DNA, 284 bp, Zea mays
agcaacttcagtgatgacaatattgtcggcagaggagggtttgggactgtgtacagaggcattctgtccaatcaagtggttgtggcgatcaagaaggcgcacgagttgatcaaacccagacggaacaattcatcaacgagatgatcattctttcacaggcgaaccacaaaaacgtggtccagctattaggctgctgtctcgagactgaggttcccttattggtctatgagttcatcaccaacggggcccttttccgacatcttcacaatacgtcggtccccatg

SEQ ID NO: 311041 - DNA, 282 bp, Zea mays
gggatacctcaaaaacatttctttgtggagaagtcgatgaagccagtaaacgacttgtgaaggttactgaagagtgcttgctcaggggcatatcaacatgcaaacatggtaccagctttaagaagattggcagaagaataagtgagcatgctgagaggaacggttttggtgttgtggagtgttttgttgggcatggagtcggcagggtatttcactcagaaccaattatctatcaccagaggaacaacagaccgggccagatgattgaagggcagactttca

SEQ ID NO: 311042 - DNA, 284 bp, Zea mays
aaagcatataagcaacgaggttagttaggctgtttggttggtaccagaagcgatgtggcgcatgtaggtttcgtgtaccctttttacagatgctatttctgttctatcacaaaagaggggactgccacaacaccaaaggggagaagaacatgtgcgtggtcggagccatcaacaactacacggcggcgctgaaagactcatcaagtccatttgatccgacggagagcttgatgttcctggcgcacttcgtcggcgacgtccaccagcctctccactgcggccac

SEQ ID NO: 311043 - DNA, 268 bp, Zea mays
ctaaacttagctctggaccttagttttcaaaactgcggtattataaactacggtattgttataactaaagtatagtatagtatttcaaaaactgtagttttcaaaaactttgttcccaaacagggccttatgtgcacaagagacgctgattaaacatgtaacgtaccattagccttggtacaggataggaacagtaagctctggttctatcttgtactcttaaaatatgttcataaggtggcatatggtcatggtaaatgttaaggcg

SEQ ID NO: 311044 - DNA, 142 bp, Zea mays
ggggttctcggcaccgcagctggacaccagcacgccgtccccgatcttcggcggcacacgggcgggctgctacgcaaatcgcaggtggaggagtgctgcgtcatcacgtggacgtcccccaaagagcatgtgtgcgagatgc

SEQ ID NO: 311045 - DNA, 235 bp, Zea mays
agatgaactctaggttaagtggttcctgcaatttatcaacttcgtgttcgtccacaatcctggtggactacgattcacatctacaagttgaaaaccattagtgtactcttcatgtgtagttttgagttgtgactctaggaaatccatattgacaaagtttatacaattaagcacttctggcgctgagctactgtggtctatattctagatttttgaagcagtattggtttgtttc

SEQ ID NO: 311046 - DNA, 223 bp, Zea mays
gtgagtctgtcggacagctggtttcacacttcaagatgtcagtcgatcaatgtagttgtgatctaggatgatcttgatctaccctttgcgaaattccgtctgctaccaaaggggggacatggtggccacaatgggatgaggagtattgttgcccatttgaatcagagccgttattttgcacgcctaatgatcggcattggacggccacctgaggagctgggtg

SEQ ID NO: 311047 - DNA, 276 bp, Zea mays
tcgctgtcttcatgcacgatgacatcgcgcataacccgggcaaatccgaggcctggtgtcaacataaatcatccccagggtggcgacgtccatgccggggggccaaaggattacactgggcgagaaggcaacgtcgacaatttcttcgctgatccgtctggcaacaaaactgctctccagggtgggagcggcaaggtttgtggcaatgggccccatgaccataatattgttttctacagtgaccatggggttctggcgtcttggaatgctacgtat

SEQ ID NO: 311048 - DNA, 279 bp, Zea mays
gtcaggcgtctatcccaatctcaggacatttgagactctgatctggggctacagcgaacagaagcagccatggaaagctgaggaagtccttcagatgatgcgggagactggtgtcaagccgaagcaaagcacctactgtccattgctgatgcatggaaagctgttggtttgactgagaacatcaacaactcaaatggttcccccaatggtccttatgcaattgacaaattggatcattcaaatgacaattgcaacgtgcgaatatcagaagacaataat

SEQ ID NO: 311049 - DNA, 265 bp, Zea mays
aggatttgatggcggtaaaagcgccctcggcagggttaccttggttaattcctttggcaatattgtatatgatgaatatgttcgcgccgaggagcgaattgtggactaccggacatggattagtgggattagacctaagcacatgaacaaagccaaagaattctgggctgtgcagaaggaagtagctgagctgattaaaggaagaattcttgttggtcatgcactgcagcaatgactcaaggtgctgctactaagccacccaaag

SEQ ID NO: 311050 - DNA, 284 bp, Zea mays
ctcgcctgcgctccctcgccgccccagttccccaccccctgctcacccacccgtcccctcctgctcgcccatggctcccatcgctgtcggcgacgccctccccgacggccagctcgggtggttcgacgagaagacctaccccgagaacaagcacgtgaagttcctcgccgacggatctggagcgtacaccaaggcgctcgacctcgagctcgatctcacggacaaagggctgggcgtgcgctcgaagaggttcgctctcctggccgacgacctcacggtcaccg

SEQ ID NO: 311051 - DNA, 277 bp, Zea mays
tgtttgggaggtctattgagattcctcaaagctgtaatggtgtcgcaaggtttgacttcgagtatatatgtggtcgcccagtcggagcagcagattatatagcaatagctaggaactaccatacaattttcatatcagaaattccagcgatgagtatgaagatccgtgacaaggcaagaaggtttatcactcttatcgatgagttgtacaaccaccactgccgccttatatgcctagctgcctcatccattgatgatctttttcaaggaactgagga

SEQ ID NO: 311052 - DNA, 267 bp, Zea mays
gatagaactcctaaaagcagtggttctgccaagaggaaaaggataccatcccttgaagatgacatggtgataccttataaatccgataagctacaaaatgactcaatggttattgacatgggccctcctgctgattgggtgaaaataaatgttaggaaaaccaaagattgctatgaagtctatgcattggttcctggccttctgcgtgaagaggtacatgttcagtctgaccctgctggtcgtttgatagttactggagagcccgag

SEQ ID NO: 311053 - DNA, 237 bp, Zea mays
caatcatgggcagaatcttactacaactatggccttgaatactatccaaagctccagtcttgtgtgcctttgactccagtaactggtcaaagaatattacttcgaaatacatcataccgtgatcaagtttttgacgcactagtcaaaggtttgatgagcctcactaccaagatgaatgtgtcatcattacatattacgtttccgtccgaaggtgaattcagcaaactgaaggatagt

SEQ ID NO: 311054 - DNA, 281 bp, Zea mays
gttaggtccttctcatcccctagtgtgaaggccatgcctccactagtatggctgcactaggaaataccattcctagttacatgaatgggtggcaatatgctggcaattcgtttcaacattagtgccattagctatttcgatgttacagcacggcgtgtttgagattgcgatatgagtatttagtagatttagtgcttctcatcatgtatctgggacatctgatggagtggcattgtgtttgaagcaaatgtcttcatcaatgggaagcatattggcggctg

SEQ ID NO: 311055 - DNA, 107 bp, Zea mays
gacccgccaacatgggccgcgttcgcaccaataccgtgaagaaggcggcccgggtcatcctagaaaagtactacacgcgcctgggcaacgacttccacacaacatac

SEQ ID NO: 311056 - DNA, 308 bp, Zea mays
cctcctcagtctcggtgccaagtatgagcctacaccggcccaagtcgcttcatcttgtgacgtgacattcgcgatgctcgctgatccacaaagcgcggctgaggttgcatgtgggtccagcggagctgctgaagggttggcccctgggaaaggctatgtcgatgtgtcgacggttgatggtgctacatccaagctgattggtgaacgcattacaagtactggagcatctttccttgaggctccagtttcaggctcgaaaaaaccagcagagatgggcttctcatctttcttactgcaggtgatgagtc

SEQ ID NO: 311057 - DNA, 275 bp, Zea mays
cacttcaacaatgttgaggtcaataaacgactcctggaggatatgattgagccttcatttagtgataagttgcctgtacctaagaaattcaagggacaccggaacgaggaaaccgtgaagggggttgacttccttggccccaactgtgattttgttacctctgggtcagactgtggcagcatatttatttggagaaagaaggatgcagaactgatcagagcgatgcgtggagataagcgggttgtaaactgtgtcgaacagcacccttctgggat

SEQ ID NO: 311058 - DNA, 281 bp, Zea mays
gttgctgatggagaagaggatgttactatcaagatattttgtaaattggcttttgaaaatgccacggcttgaagctattctcattgtgatatgcatggtatcttcacattattcaatgagctaaagagagagaaactaaagaatgttgttgccaataaaagaactgtcagaacaaaaactgaacaaaagctgcaggatgagctgcagaggaagggctcaactgcttagagtgatggagacttgcagaacagtcttacgtaaatagcaggctatggcctttg

SEQ ID NO: 311059 - DNA, 283 bp, Zea mays
gagacagatgagaaggctactagcctatcctctgcgtctgttgatgatgctgccgtcattgaagagcttattgcaaagctgcaagcaatttctaaaacattgtcaccaggattccgtatgaaccctatacagtttgagaaggatgatgataccaatttccatatggagctttacaaggtccttgctggtgggcacaaggttgaagactaccggaacacatttgcgaacctcgcaatccccctcttctccagggcggagctgtgccgcccaagaccatgaagca

SEQ ID NO: 311060 - DNA, 265 bp, Zea mays
ggttgatatacttggtgatgaggttgacacccttctaagtgtgctgggaaaaatttatattgcactcgaccattattcgccagttttgaagcattaccctggggttacagagattttgatgcttgtgcagaaggtgttgaaaggagaaagcgtttaacaccgaaccaccatgtgaaaatcttgacagatttcatgtccatattacaaacagtagcgcaagaccctaagaagagttagggtaatgtgctgtgggagaatatttaca

SEQ ID NO: 311061 - DNA, 232 bp, Zea mays
ctcatctctgagactaccaccccgggaatcaacctacgatggttcctcgacgttgctggaaagaaaaattccaaagcatacattgccaacggggttgcaatgtttgttacttggctgatggtccggatagttctgttcgtctactcgtttgatcacatccttacaaattatgatcaggttaagcagatggacacttttgcttgtgttctgatatctgtcgcccccaccatac

SEQ ID NO: 311062 - DNA, 268 bp, Zea mays
gtcgtatctctaccgagactggagtacatctagctgattatgcctgaagctcttcgctcgaatactcagccaccattgttaatcaggcgatctctccggccagacaagttgtccaggcgggtgcaatggagcaaaagagggatatgaaataccagctgggaccgatatatttgtttcggtatacaagctccacagatccccgtatttctgggaccggccaaatgagtttgaacccgagaggcttatccgtccgaagaaggacgagagc

SEQ ID NO: 311063 - DNA, 272 bp, Zea mays
aacaaggtgcagccaccgtttgttatctggcattgcatcctcaggttgctggagtcaccggcaaatactttgtggatttcaatgctgttgaactaaaaccgcctgcaactgacaaggagttgtccaaaaagctctgggattttgtgtcagcctactccagtgatataactgccgattagttctcctacgccagctggtaaataaaggtcgatctgaatgagagatcatgtttcagtaatagaacaaggtgatccagcagtgtaatatctact

SEQ ID NO: 311064 - DNA, 271 bp, Zea mays
gacaacatgagtcttcaaaaggcagaggtctatgaacaatcgcttattcagagcgatggaatgaagactgccgagagtgctcatttcatgcaaatatatcgtagccgtgaagtaggccaatcttacattacatccatcgcacaacattgctagccacattgcatgctatgtggctagtaataagaatcagaccacaagtgatattttgcaatggtccagggacatgctttcctctatgcatctcggcgttccttctgaaggtgcttggttt

SEQ ID NO: 311065 - DNA, 188 bp, Zea mays
agcatacacaaggaggatgtgtatgagaacctgcacactaagaacaagagggaggcgaaagtgaagaagcagcggtcagcagacaaggagaagagcaagggttccctcaagaggaagtgagcggtgctgtcctcagcccagccctgaccctgtggaagcatttcgcgatggacagatacacaacctga

SEQ ID NO: 311066 - DNA, 262 bp, Zea mays
cctcttcaacttcatcagcggtaagcatttgaaaattctgaatcttggagatggacaaggtagaactagtggtgttactgctgttcttcagagcactgatgatgattctgttgatccacatctggagcggataaaaaatcaggccggtaatgaggaaagtgatgaagaggatgaagattttgtggcagacaaggatgatagtggatctccaaccgatgattctgatgcagaaggctctgatgctagtatgagtggaggagaa

SEQ ID NO: 311067 - DNA, 285 bp, Zea mays
ctattggccagctcaaggagttcgagggcaagaagctcgtctcggccaccaaggagggcctgaagctcgatgagagtgaggatgagaagaagcggaagttcgagggcctgtgcaaggtgatcaaggaggtgctgggcgacaaggtggagaaggttgtggtctctgaccgcgtggtggactccccctgctgcctggtgacgggcgagtacggctggacggccaacatggagaggatcatgaaggcacaggcgctcagggactcgagcatgtctgggtacatgtctc

SEQ ID NO: 311068 - DNA, 273 bp, Zea mays
ctcgacccgccggagcttatcacgccgcccaagatctttgtcatcgcaggtctgcacccaatcttcgacgagcgtgtgaacgacctcttagacttcagcatctacttggacatcagtgatgaggttaagtttgcatggaaaatccaggtcagcgagacattgtatgttccttagcttgctccacatgagccagtaaagggtgtctttctgctgtttaatttctagaaaaaatatcaccgctactaatttggcagcgggacatggcagagcgtg

SEQ ID NO: 311069 - DNA, 167 bp, Zea mays
cacgctaagagcgcagaagagcgccgaagatgaacgttatgaaagtgcgtataataatttacgatccgaagttatcaagctgagaaatgaagctttggaaaaagataaaattctgcttacattggtggataaggtgaaaaaagacgaagccgcttcaaaggcccaat

SEQ ID NO: 311070 - DNA, 274 bp, Zea mays
tttcttatgaacactaaaggagagattttgatggagcaaagtggtgtagttaggtccaattgcattgattgcctggaccgtacaaatgtgacacagagtttccttgcaagaagatcattggattctcaattgcagctgatgggagcattattgtcatctgaaagcatttctctctctgataacattcatgatacattcaaaaaattatgggttgagcacggtgatgagctgagcctggagtatgctggctcttatgctttgaaaggggatctag

SEQ ID NO: 311071 - DNA, 251 bp, Zea mays
tcaggacgcaggctagcagcacagcagcagtcagagccatcccctgtcctcgctacgctacgcttcctcggcgccgattcctcctcctcctcctcgatcctcgtccgcccccttaccggcgcaagagctcgcccgagatggcgaacgcgagatcaggtgtcgccgtgcacgctgagtgcatgctgacgtctggcgagctgcagtcgacagacgatgcaccgcttcataactggcaagatggacgacacagt

SEQ ID NO: 311072 - DNA, 259 bp, Zea mays
ctgccaacttaacgcaaggtgttcaagaaatttaaaccatgcactcttcatcgggaataaagatccaaataagtttttgacattgatctgtagccagtactgcaatggctacgaagcttgtggttctcggtatcccctgggatgttgacactgaagggttacgagagtacatggccaagtttggacccctagacgattgtgtcgtcatgaaggagcggtcttctgggcgatctcgcgggtttggctatgtaacattcgc

SEQ ID NO: 311073 - DNA, 275 bp, Zea mays
attctgaatgttttgggctggcttaaacctttgttatcttctggggaagagttattatgttgagctcctgttttttgctacttgagtcaatacggagtactgtagtcacatacacttgagttaccctgcatttttacactcttattactagtcagagtgctactctaccagactcaatttgatcatctcatttttaacgcaggagtgctgtatctgcctatgcccgtacgaagatggcgtggaactgcgtgagctcccttgcaaccacattttca

SEQ ID NO: 311074 - DNA, 257 bp, Zea mays
  unsure (1)..(257): unsure at all n locations
ctcctcctcgcgacgatcccagtcctaatagtcgcgctactcgtcctggtggtgtccaacatcatcgtgacgtacactctccccgtgatgctgaacgtcgtcgggctcgccggcgtctttggggtgtacgccgtcgtgtgcgtcctagccctcgcgttcgtgttcatcaaggtgctctngacgaagggcatgcctctcgaggtcatcaccgagttcttctccgttggggcaaagcaagccaaggaagaggaggagga

SEQ ID NO: 311075 - DNA, 285 bp, Zea mays
ggcgcgtcgagccttcccgatgcaacttcagtgcctgtgctgttggtaaccgcctggtccttttcggaggggagggtgtcaacatgcagcctatggacgacacctttgtgcttaacatggaggctgcaaggccggaatggcgccgcgtgaaggtttccgcctccccaccaggccggtgggggcacatactgtcgtggctgaacgggtcatggctggtggtatttgggggctgcggacagcaaggtttgctcaatgatgtcttcgtccttgaccttgacgctcagc

SEQ ID NO: 311076 - DNA, 283 bp, Zea mays
gtctccgacttcgggctggccaagctggtcaaccccaaggaccaccgccaccggacgctcaccatcgtacgcggcaccaggggctacctggcgccggagtagctcgccaacctgcccataacggccaagtccgacgtgtacagctacgggatggtgctgctggagaccgtcaacgggcgacgcaacttcgacgtgtcggaggagacgcgcgggaagaagttctcggtgtgggcgtacgacgagtacgagaggggcacctcgccggcatcatcgacaggaggct

SEQ ID NO: 311077 - DNA, 266 bp, Zea mays
atgttagagccttggaattgcccaaccaaagggtgtcctcctttatggagctccaggcacaggatagacattgctggcacgtgcggatggttcgggaactctttgttatggccagggaacatgcgccatgcatgatatttatggatgaaattgactctatcggatctgctagaatggagtctggaactggcaacggtgatagtgaagtgcagcgtaccatgcttgcacttctaaaccagcttgatggttttgaagcttcaaacaaa

SEQ ID NO: 311078 - DNA, 269 bp, Zea mays
ggctcttccacagtacagtgatcatattgataagctttccctgcatgttgagattgcaggaaaactcaataacataataagggaacaatgtcttcgggatgttggacagctagagcaagatcttgtgtttggcgatgctggaaccaaagaactaatcaactttttgagaacacaattgcacttaacccagagaagtttgaaagcgacaagggtgcaaaattaatgcagttggcaggattatctgctgatgacatgattgctgtaaataa

SEQ ID NO: 311079 - DNA, 276 bp, Zea mays
cactgactatgcacgaggttacaaaaccatgttttctgatggcttcccttatctgatagtctctcagggctcattggatgcattaaatgagatactcaaagagcctataccaattaaccgcttcagaccaaatattttagtggaggggtgccacccatatgcagaggatatgtggaaatcagtaaagataaacaagttaacatttcaaggtgtgaagttatgtggccgttgcaaggtgtactttgggcaaaatgcagtctgcaaggaatctctgtc

SEQ ID NO: 311080 - DNA, 274 bp, Zea mays
gcggccatcagaagccttcctcctggaattcctgtgcactttcttctctaccctattcatcgtgccggatcatccagaacacggagtcctatttctggttcgagaacttctcaacgttatccaggactatacctgggaggacagtagtgacgacataattcggatctacacctctatcctgcacctgctgtctgccatgagtcaggacacctatctttaccacatagacaaagttgactccaatgacagcctgtacgggggagactccaggttc

SEQ ID NO: 311081 - DNA, 251 bp, Zea mays
tggggatcaaggaaacgtgtgctcctccttggtcacagcaagggtggtgttgatgcggctgcagcactctcactctactggccacaactcaaagacaaagtcgcaggtttagcattcagccaaagtccatatggaggaagccccgttgcttcagacatcctgcgagaggggcagcttggtgactatgtcaggctgcgtaagatcatggagatcttggtatccaaggtccttaagggtgatctgcaggctct

SEQ ID NO: 311082 - DNA, 275 bp, Zea mays
gtgtaagtgtgcgacgaacacgaactactgcagtctgcagcacatgaacgaaaccctgtttgatctagcacacagaccagcaggagtgactctgtcttctgaacacgtgcgcaaccatctaacctgacggagagcctgatgttcctggcacacttcgtcggcgacgtccaccagccgctgcacgtaggcttcgaagatgacgcagggcggtaacaccatcaccgtccactggtaccggaggaaagcaaacctccatcacgtgtgggatgtcagca

SEQ ID NO: 311083 - DNA, 266 bp, Zea mays
ccgatcttttcgtgatgtctaatcccatgagagaagtcacactggagagaaaccctttgtgtgtacagaatgtgggaaagccttcagttattatagctctttccatagacacagaagaactcaccagacagtaaccttgaacacagagcttgagaagacttcataacacccataagattgcatatggagtaaaactgtaaaagttaagcgagtgaaacacctggttctactcatgggtacaggacctttaggccagacatggtgtg

SEQ ID NO: 311084 - DNA, 262 bp, Zea mays
cgaccggggctccacgtcctgcggtaccagcggggcgctgtacgcgctcgtcatgctgctcaccggctgtcagtgcgtctactcctgcttctaccgcctgaagatgcgcgcgcagtacggccttcaggtgagcccctgctccgatgctgcgtgccgtgctgctgccagtgctgcgcgctctgccaggagtaccgcgagctcaagaagcgaggcttcgacatgagcataggatggcatgcgaacatggagaggcaggggcgcg

SEQ ID NO: 311085 - DNA, 284 bp, Zea mays
gaaaggagctatctcagaaaatgagctatgggacttggtaatccttgaccctccaaagttggcgccacgaaagaaggtgctacaaagtgcatccggtatgtatagaagcttgaacgcacttgcaatgcaagtggtgaagccaggggggttactcatgacatgctcttgttctggagctatgacccaaagtggcatgttcctcaaaatcattcagggtgccgcatcaatggctggccgtaaggttacggtcttacgtcaagctggggcagcatgtgatcacccta

SEQ ID NO: 311086 - DNA, 289 bp, Zea mays
caccggaccaacagcgcctgatcttcgccggcaagcagctggaggatggtcgcactcttgcggattacaacatccagaaggagagcaccctccacctggtgctccgcctcaggggtggcatgcacatctttgtgaagacattgactggcaagatcatcaccttggcggtggagtcgtctgacacaatcgatcatgtcaaagccaagatccaggaccaggatggcattccaccggatcagcagcgtcttgatcttcgctcgcaagcagctggatgatcgccgcaccctag

SEQ ID NO: 311087 - DNA, 283 bp, Zea mays
cagtggcataccgacttcagctccccgaaacattgtctgctgtgcataatgtgttccacgtgtcacaattgatgaagtgtcttcgggttcctgatcgaaccgttgaagtgactgatgttgtcctggaactagatttaacatactcagaacatcctattcgggttctggatcaaaaggacagaatcactcgaagaaagactctcaaattctacaagatacagtggaaccagcattctgaagatgaggctacatgggaaacccaagattttctagaaaagaattt

SEQ ID NO: 311088 - DNA, 282 bp, Zea mays
gagacctttgcaccggttgctcgactttaagccattcgtatcctacttgcatatgcatcttgctatgacataaagctttatcaaatgtatgtaaaaagtgcatttttaaatggcttcataaatgaacttgtatatgttgagcaaccactcgggtttgaagaccctagatatcctaatcatgcttacaggttgtccaaggcgctatatgggctaaagcaatctccaagggcttggtatgagcgtcttcgcgacttcctcatcaagaagggcttcaagattggg

SEQ ID NO: 311089 - DNA, 285 bp, Zea mays
aaggaattgctccgacaatagagaacatagcagagtcgctcaatatatcggaaaagaaagtgcacaatgctacagaggctgtgaacaaggttctttcactggatcaacaggcgttcccctccttaaacggtctacctggggacacactccatagttacatagaggatcaaaacgtcgcaaatgatccatggcatggatttgaggaaatgtatctcaaggaggaagttaacaatcttataaattcaaacctcaacgagcgtgagagggacattattcgattatacc

SEQ ID NO: 311090 - DNA, 300 bp, Zea mays
ctacctcatcggagttcccttgggtatcatactcggttggccgctggcactgggggtaagggggatctggtccgggatgattggagggaccgccgttcaaacgctcatactggcatacctcactgccaaatgtgattggcacgaagaggcgaagttagctagtatgagaatgaagaagtgggccgacgagtcgaaataaacccactccactgctgcgctttgtttgttagccaggcacacaggggaacggaacccctgaagctaagataacttctgatacagcgctatgcatattccggc

SEQ ID NO: 311091 - DNA, 113 bp, Zea mays
tgggatattggtgagaagcagtttagcaaagttgcatctggtgatacaaaaccgaattcttggacattacctggatattggtgatgttgtggtcaatatataccttcgacaca

SEQ ID NO: 311092 - DNA, 282 bp, Zea mays
ctcggtgatggggattctttgctgcagccaggttgcaagactgtcatggtagttcagggagtgagtgccgcgatggccggtggtgcatctgcgtttgtgaccatgccactggacaccatcaaaaccaggatgcaagtcatggatggggacggtgagccaattacggtggggaggacagtgcgtaggctgatcaaggaaggtgggttggctgcttgttacaggggcctaggcccgaggtgggcgtccatgtcattgtctgccaccaccatgatcaccacctat

SEQ ID NO: 311093 - DNA, 284 bp, Zea mays
ctgaaagaggagctcagcagcatcgacggcctgtccaaacagaggctggacgagctgtcagagctgtttctcaaggacttcaaggatgggcagctggaggctcaagggtggccgaatgaaggagggttcgccgcgtacaaggcgtccaggcgctcgcgaacgcctattcccggatccttgcgaaggagcacccgtcgctgcgcatcaactgtgtgcatcccggctatgtccagacggacatgaacttcgggtctgggcatctgacggtcgaggagggcgcgcgg

SEQ ID NO: 311094 - DNA, 280 bp, Zea mays
  unsure (1)..(280): unsure at all n locations
caacaccagaggggagaagaagatgtgcgtggtcggagccatcgacaactacacagcgacgccgtcatggagccggttgttgctggcgatgtccaaaggggggaaggtagggccgaaccggtgcagcgcctgcaggaagagggtggacttacggagacnaatgccggtgtgggaacttgtactgcgcactccaccgctactccgacaagcacgactgcaagttcgactaccggactgctgccagggcggccattgccaaggctaatccggtggtgaaggc

SEQ ID NO: 311095 - DNA, 255 bp, Zea mays
taagaagaagatccaagtcctgtatggctctgggagggatgagttactgaagggcatggaggacgagtcacttccggacttctggaagagataagggtcaggttcatccagcgactcgctggatgtagtagattgctactcctacgaggaccctgtgcaggagcagctgtgcaactacatgaagcagcagcaatctctgaatcaggagtccgtttgtcccagagaacaaggcggagtccacgtggatgtgccctc

SEQ ID NO: 311096 - DNA, 299 bp, Zea mays
aaagaagaaaaggccatcttggtagggtgttccacttgctccaacaatcacggctctcaagagatccatgcgatcctcaaataccctgacataaatatagtctacaaatgcagtgaaaggaacatcagcaaatcataatacagttgtccttggttgtttttagtgtttgtattgtgagtaatagcagacctgccgacgcatgggctctgaatgtggaaaagacgtccaaataaaagaagtgtgccagattttatgtttcgggagttgagagtattttagagaactactggagttgctct

SEQ ID NO: 311097 - DNA, 287 bp, Zea mays
tgttttttgtgcaacttagataatataccttggaaagccagatggacctacctgccatacaggagcagaaacgtgttattatacttcagtttatgatgctctacaaagttcaaagcccaatgaaggcaggcaggttatgacaaccctcatactcacttgaagatacaattagtagacgccacgaggagaaagttcactgatggaggtggcaagccatcatggacgaaaaagctactccttgataaccagctactttgctcgaaaatacgtgaagaagctggtgagct

SEQ ID NO: 311098 - DNA, 288 bp, Zea mays
aggccagtaggcgattacaagggtggaagaaacatctagccttaacattccaggctgaagcctaacccctctaatggatagcagcagtggtagccaggacaagaaattcagagacaatgatcgccctgaagcaaaagaagctaatagcaccgcacagcatcttgttgacttcacggaagcagaggaagatcttgactccagaatgcacaggcttgtggggaacaggtgggagattatagcaggaagaatcccaggaaggacagcagaagaggtagagatgttctggtc

SEQ ID NO: 311099 - DNA, 269 bp, Zea mays
gtgctgcatcaagccattgtgtgaccttcttgtctggcctgatccgtgacttgtaacagattgtctggagggtcttgagattattcttatagtagggcagcatgtctagaccatgggtgcaacaggtggcactaacgtcttagctcagatgatcgctgaagcgtaacgtctggaacagatctggggcctactgagctcggattagcatgtggtcttggaagcggctgtgaagcgtccttagacatactgggttgtggatgctcatgccg

SEQ ID NO: 311100 - DNA, 292 bp, Zea mays
ctcccggccttgggcttcttcctcgccgcgcggcgcgtctcggccttgggcttcttccccgccggggccgagaagcgcgtcccggcgggtcagtcgtccggcaaggcaggcggcgacaagaagggtaagaagaaggctaagaagtcggtggagacctacaaactctacatcttcaaggtgctgaagcaggtccaccccgacatcgggcatctcttccaaggccatgtccatcatgaactccttcatcaacgacatcttcgagaagctcgccggctaggctggcaagcttgcg

SEQ ID NO: 311101 - DNA, 265 bp, Zea mays
gcagagtccggagctgcggcggcgtaagtcatagctggacaagctttgaggaagtgtcttccgctatgtgacagagtattggttgaaaggagtgccgctgaaactgtgaccaaaggtggcattatgcttccagaaaagtctcaaggaaaagtattgcatgcaacggtcgtggctgtgggatcaggcgggaaaggaaagggtggagagattcagcctgtcagtgtgaaagttggagataaagttcttcgcccagaatatggaggca

SEQ ID NO: 311102 - DNA, 138 bp, Zea mays
cgcgacgagcgctgctgtgactgacatcgactactgcaagaagaacggggtttggtaccctgtttccaagacgctggcagataaggcagcgtggaggtttgcataggagaacgggctggacgtggttgtggttaatcc

SEQ ID NO: 311103 - DNA, 256 bp, Zea mays
tccgattttactagttctcgatctcacgagctcgtagtgacatgtagattattattatgcagtttattcttatgtttggtgtgatgttaattttgtatataacatgtttgtttgtattgctacgactagcagtgaggtcacgagaacctaaaaatcatcctggtacctagaatctcaagtcccaggcaagttatgcccttgaccacttttatacccaataatgttcttgattatcacttatcaatgcatgggtttg

SEQ ID NO: 311104 - DNA, 228 bp, Zea mays
cccacgcgtcggctgcgagacctgcaccaagaccaacatggtgatggtggtcggcgatatcacgaccaaggcgaccgtgggctacgagaacatcgtgcgcgacacctgctgcgagatcgcggtcacctcgcgactacgtggggctctacgccgaccgctgcaatgtgctggtgaacatcgatcatcagtcctccgacatcgcgcagggcgtgcactggcacttcacga

SEQ ID NO: 311105 - DNA, 228 bp, Zea mays
ccatgagggagtgcatctcgatccacatcggccaggctggtatccaggtcggaaacgcgtgctgggaactgtactgcctcgatcatggcattcaggtaacgaaccgtccatttccactcctgttctcgcgttgttgaggtagatctgtacggatctgtaccgtcacatacatgtagatctataatcggtatggggggatttcgtcgttcatgtgtgcctgatttggtg

SEQ ID NO: 311106 - DNA, 134 bp, Zea mays
cccacgcgtccgccagccgccgtcatgtcgaagcgaggtaggggaggttcggctgggaacaagttccgcatgtcactgggtctaccggtgtcggccacggtgaactgcgcggacaacacgggcgcgaagaacct

SEQ ID NO: 311107 - DNA, 147 bp, Zea mays
ggaggacgaggagaaggcccccaaggccatcgacctcggtcccatggtcagcatcaaggagcagctcgagaaggacaaggacgacgagagcctgcggcgatggaaggagcagctcctcggcggcgtggacttgaactccgtgggaga

SEQ ID NO: 311108 - DNA, 226 bp, Zea mays
ctctcgtagaagcaaagctcgacagtagctaccacaccacttgacttcaccatggcactcgccggcatcaccaaccaggacttgctcgacgcacaggttgagctatggcacagcaccttcgcctacatcaaatccatggcactcaagtccgccttggaccttggcctcgccgacgccatctaccaccacggcggcagcgccacgctgccgcagatagttgacaggg

SEQ ID NO: 311109 - DNA, 120 bp, Zea mays
ggctactggaaggccacgggcgctgacaagcccgtggagcacgatggccggacggctgggatcaataaggcgctcgtgttctaccactgcaagccgccgctcggtgtcaagacggagtgg

SEQ ID NO: 311110 - DNA, 254 bp, Zea mays
cacactcaagacgccttgtcgtagactctgattcacctcaagaagtagatgccaacaaagagatcattttcacctatgatattaactttgaggaaagtcctatcaagtgggcatcacgctgggacacctaccttctgatggcagacgaccaaatccattggttttctattgtcaattcactgatgatagtcctcttcctctctgggatggttgccatgatcatgctccgaactctttaccgcgacatctccaag

SEQ ID NO: 311111 - DNA, 244 bp, Zea mays
cggacggtgggcgcctccctttccccttccctccctccctctccccgcgggccgccagaggcaatttcgccatcgattcgaccccgattcgtccgcccgcgaccgggattccctccgccaagcgcggatctgaacgctgcgctccgtgtcgccgctcgaatccgccatgaagggggccaaatccaagggcgccgccaaggccgatgccaagctggcggtgaagagcaagggggcggagaagccc

SEQ ID NO: 311112 - DNA, 245 bp, Zea mays
caaggtgcagtttgttatattgtttatctgtgcacaaccttacactgatattagatgtcattatgttgctatttgctgtctgaacatgtgcttgatgtaaacagggtgccaggaacgaaatttttgcaatgcagccagcacctatccaagtttcgtacatggggttccctggaacaacgggtgctgcatacatagattacttggtcacagatgagtttgtttctccatctagctatgcacatata

SEQ ID NO: 311113 - DNA, 239 bp, Zea mays
gacctcctcagacccgagaagcgcactgtcggccatggacgccaccggcactggagctggagggaaggcgaagaagggagcggccggtcgcaaggccggcgggccgaggaagaagtcggtgacgaggtccgtgaaggccgggctccagttccccgtcggccgcatcgggcgctacctcaagaagggccgctacgcgcacgcgtcggcagcggtgcccccgtctacctcgcggccgtcct

SEQ ID NO: 311114 - DNA, 243 bp, Zea mays
cccacgcgtccgggtttttgcttgtgcgtggagtccaactagttctcttctagcttctggatcaggagactcaactgctagaatctggacaattccatatggtccatgtggttccgacatgcaaccatattctcctggtgttcatgttttgaaacattttaaaggtcggaccaatgaaaagagcaaggatgtcaccacgcttgactggaatggtgaaggtacactactcgctacgggctccta

SEQ ID NO: 311115 - DNA, 252 bp, Zea mays
ctatcaccaacgagggagctcgctcagcagattgcagatgtacttagtgaggctggtgcaccatgtgggataaaatcagtctgtctttatggtggaactaaaaaggaaccccaaatatctgcccttaaatctggagtggatatagtcataggaactcctggtcgtatgaaagaccttattggaatgggtggttgctgtcttaatgaggtttcgtttgtggttctagatgaagcagataggatgctggatttg

SEQ ID NO: 311116 - DNA, 258 bp, Zea mays
ctagattaaatgtgtcatgttcaattttcacttttataataaatattaacatggtaaatattatcttaactactttctatttacttaacattcgtttagtataaacatgtcgcctgttcagttattctcgtctgtcgcgggtgttgttcctcgcgcggtacgtgctgcttcgcgcgtcgtgcacgtgctgtctgcgtgttgttcgtgcgtgacgtgctcgtggtcgcgtgctgattcgtgcgtgttcgcgctcgtcgc

SEQ ID NO: 311117 - DNA, 173 bp, Zea mays
cggacgcgtgggcggacgcgtggggaaaaaacctgaagaaacagctgttctcaaagtattacgagatggtaaacagcaagaattaggagtaacacttagacctctgcaacctttagtcccagtccatcaatttgataaattaccaagctactacatatttgctggttttgttt

SEQ ID NO: 311118 - DNA, 240 bp, Zea mays
aagaaccttgtgacacgtgaaggcagcgcctggttgtacagtcctgactccaaagcgttgagggaaaagctcaggcttccagtcgggtcctgtgagcttgccgttccactcaaagccaaatgtaagttgcatattaatttgtgtggccatgcatgatgagtatgagatcccatgaaaatgactcttgttctttctcctgcagcgaggcttttctcggtagatcgacgaagagaagcgtac

SEQ ID NO: 311119 - DNA, 189 bp, Zea mays
gctgcagcgcctccgccgccgccgccgcatctaacgcattccctccgccgcagcccgaggcaagatggttctccagaacgacattgatctgctcaacccgccggcagaactcgagaagctcaagcacaagaaaaagagactcgtccagtcgcccaactccttcttcatggatgttaagtgccaggggtg

SEQ ID NO: 311120 - DNA, 235 bp, Zea mays
gaagacctacaatgttaatggtgtatctacggtgggatggttctccgtggactatacgagcactgatctgctgccaaacgtgacactgaagcaatcggtcctatctcgtacccctgtgtatgatggttccatgttgataaattctgttgaaaatgttttcacctcatttaacgcctctgcagtttggttaaatgtccagcaagacagtttctacagccagtttaagcttagcatg

SEQ ID NO: 311121 - DNA, 192 bp, Zea mays
gagaatactaaggaatcaggtattgtcatggagctagagatgaattgggatgccaatccaagtatcatacttgctgtaaaaactagacttggtgtcgcgcttccaatacaggtgaaggacattggctttacaggagttttccgcttaattttcaaaccactaattgaagggctacttgcttgggagcttttt

SEQ ID NO: 311122 - DNA, 113 bp, Zea mays
ggcttggcccatgacaccctgggtgttatttacgaacgagggtttattggcacgtaccatgattggtgtgaggctttctcaacgtacccgaggacctacgacctcatccatgc

SEQ ID NO: 311123 - DNA, 229 bp, Zea mays
cggacgcgtgggcggacgcgtgggcggacgcgtgggtgctggcggacgtgttgcctgtggtatcattgggatccaaggctaaatcggttaacctacgaggcaaacaccatagaaggtcgaagcgagcacctcaggaagttgctgttccatttccccggtattgggcaacacaattttagtactccagataagcgctgatccatgatcagggacactattcatgcaattt

SEQ ID NO: 311124 - DNA, 232 bp, Zea mays
gctgtcgatttcctggtgatttctcttaaaccaatgaggacattaagagagatacacactgatgtgtgccctgccctcagcatacaacagctagagcgaatagttagtatgtactgggatgatgtgaatggaacaaacactatttcagcagagtttacatcaagcttgaaatctgcggtgcgtgatgaatcgaatatggccacaagtttttctatattgctagatgatgatt

SEQ ID NO: 311125 - DNA, 224 bp, Zea mays
gcggggcggctgatggcgcggaggcgtggaagaggaggaaggcggcgtcgacgccggtgatcggcatcaacctgggcaccacgtactcgtgcgtcggggtgtaccgggacgggcacgtggacatcgtcgccaacgaccagggcaaccggatcacgccgtcctgggtggcgttcaccgacgacgagcgcctcgtcggcgaggccgccaagaaccaggcgccgctc

SEQ ID NO: 311126 - DNA, 218 bp, Zea mays
cggacgcgtggctgagaacatggtgacctcaagcaagggcaaggtatgtgtaaccggggcctcaggcatttgttgcctcttggcttatcaaacggctcctcgagtctggatatcatgtggtagggactgtcagggacccaggaaatcaccaaaaaacagcccacctttggaaattacctggcgctaaagagaggctgcaaatcgtgcgagctgatctg

SEQ ID NO: 311127 - DNA, 144 bp, Zea mays
aaaataaggaatgggttgccaaatttgagaaaccaaagggtgacccctctgcctttgtgaaaccttcaacaactgttttgtcaccatatctaaagtttgggtgcctgtcttccagatatttttaccactgcattcaggatgtgc

SEQ ID NO: 311128 - DNA, 244 bp, Zea mays
ctcgagaactccatttcgatcccatttgaaatcaacccatcctcgtttcctccgtctagcagcctctcaccctcatggccaagatcaagatcgggatcaatgggtttggcaggatcggaaggctggtggccagggtggccctgcagagcgacgacgtcgagctcgtcgccgtgaacgaccccttcatcagcaccgattacatgacctacatgttcaagtatgacactgtgcacggacagtggaa

SEQ ID NO: 311129 - DNA, 233 bp, Zea mays
cacacagaagcggcggcggcggacaaacgcaggcgaaggcgagggtgtgagggaaggagcaccagccatggtgcacgtcaacttctaccgcaactatggtaagacgttcaagaaaccaaggcgtccttatgagaaggagcgtcttgatgctgaactgaagctggtcggtgagtatgggctgaggtgcaagcgtgagctttggagggtccagtatgcactgagcaggatccgta

SEQ ID NO: 311130 - DNA, 236 bp, Zea mays
gccagagcttgaaggccttgaagaagttcatttttacattgaattggttcagtttatccaggtgagagacatgcttggtgatggtcgtctaataaaacgacgtgtagttgatggaaaaggtgaatttccaatggactgtcctcttcatgacagcttattaagagtgcattataagggtattctccttgatgaaccaaagtcagtgttttatgatacacgtgccgataatgatggtg

SEQ ID NO: 311131 - DNA, 237 bp, Zea mays
cggacgcgtgtggaaaaccagcttcttcgatgtcatcgaagtgtggaaaatctcttgatgaatattctcaaatcctgggagattgccggcagaaattgtttgatgtccggtcaaaaaggccaagacctcatttggatgataaggttattgtttcctggaatgggctagcaatatctgctttcgcaagggcttcgcaaattctgaagtcaggaccatctggaactatattcaatttcc

SEQ ID NO: 311132 - DNA, 186 bp, Zea mays
gaacacgagtccgcggaccgtggcgaccgtggcggacgcgtgggatcaaacttgtgtggttgctatcttctatgttctgctagtttatgatcggagtccgtaggaatatactagctaattaataaaaagaaaaactgatgtgatgccataatagtataatgtcatggctttttgttatgtttggag

SEQ ID NO: 311133 - DNA, 230 bp, Zea mays
gtcaggttgaaggctgcaaggttgatctctcttctgctaaagagtaccatcggaagcacagagtctctgtacctcattctaaggctcccaaggtggttgttgctggtctggagcggcgcttttgtcaacagtgtagccggttccatggattagctgagtttgaccagaagaagaaaagctgccgcaggcgcctcaatgatcacaatgcccgcagacggaaaccacaacct

SEQ ID NO: 311134 - DNA, 231 bp, Zea mays
cagacggagggcgacgacgcatcaatatcgttttcctcactctctcatccagcacatggaccgacggagacaggaaagcaagatgtacaccgcgaggaagaagatcaagaaggagaagggtcttgagccatccgaattcgaagaatccgttgcccaggctttatttgatctggagaacgggaaccaggagctcaagagcgacctcaaggacctgtacatcaacaatgctat

SEQ ID NO: 311135 - DNA, 240 bp, Zea mays
cggcgtccttcgtgttcggcatcatcccgccctactccgacctcagcggccacggcatcgtcttcttcgtcggcagggacagcttcgccaccgcgctgcccagccagtacctgggcttcctcaactccagcaacaacggcaacttcaccaaccacgtcttcggcgtcgagctcgacaccatccggagcaccgagttcgatgaccccaacgacaaccacgtcggcatcgacgtcaacagcc

SEQ ID NO: 311136 - DNA, 219 bp, Zea mays
caaggagatgatccccccaggtgctcttgttatgctgacaccactgatcgttgggatcttgacacaggttgcgtagtcaggctttgtggtgccctccatgagcccagggatggtgttgaactgccggcggacttcctccaccatcttgagtgcagcactgcctacacttttcattgtcattgccgagaaccagtatgggagcatagcaccaacaataag

SEQ ID NO: 311137 - DNA, 273 bp, Zea mays
cccacgcgtccgcccacgcgtccgcccacgcgtccgcccacgcgtccgtgtgaccctccctcagccgcgtcgcgtcgcatcctacgatccaaagctctctctgctcgcagccatggcgaagaactacccgaccgtgagcgccgagtacagcgaggctgtggagaaggccaggcgcaagctccgagccctcatcgccgagaagagctgcgccccgctcatgctccgcctcgcgtggcactccgcggggacgttcgacgtgtcgtcgaggaccgg

SEQ ID NO: 311138 - DNA, 257 bp, Zea mays
cccacgcgtccgcaacgtggtgcgcgacccacggtggggacgcgccagcgagacccccggcgaggaccccttcgtcgtcggccgctacgccgtcaacttcgtccgcggaatgcaggacgtcgacgaccgcccctacgccgccgccgcagacccgttctcgcggcccatcaaggtgtccagctgctgcaagcacttcgccgcctacgacgtggacgcgtggttcaaggccgaccgcctcacgttcgacgcgccagtgg

SEQ ID NO: 311139 - DNA, 258 bp, Zea mays
ccacgagcagctgtccgtggccgaaatcaccaacagcgccttcgagccatcctccatgatggccaagtgcgacccccgccatggcaagtacatggcatgctgcctcatgtaccgtggtgatgtggttcccaaggacgtgaacgctgctgtggccacaatcaagaccaagcgcaccatccagttcgtggactggtgcccgactggcttcaagtgcggaatcaactaccagcctcccagcgtcgtccccggcggtgacct

SEQ ID NO: 311140 - DNA, 171 bp, Zea mays
gccacgtggatactggattttctgccgaggaagtaaaaaggaaacaagaggatttagctgtggcctatgggttttgctgcattcactaactgtccgaatcggagatggagagagccaaacaacatttacatcaatttgtgatttcatccacaatttcttcatatgtgagga

SEQ ID NO: 311141 - DNA, 229 bp, Zea mays
gtttcgcgcctgctgcaggaaggttcttcagccagtttctagcatactttttaacgcaccagatggctgtggccttgtttcggttgctaggtgcaattttgaagacaatggttgtagccaatacatttggcatgtttgcaatgcttcttatcttcctgttcgcagggattctcctacccagacaggacattaaacattggtggatttgggcctactggtcatctcccat

SEQ ID NO: 311142 - DNA, 230 bp, Zea mays
ccacgcgtccggacagtgcaaactaatgctattaatgaggcctccagcgctaatgaaattgatcccacatttcttgaagcattgcctgaggatcttcgggcagaagtccttgcttctcagcagaaccgttctgccccagctgcttcctatactcccccagctgcagaagaaatagatcctgagtttttggctgctcttccaccagacatacaggctgaggttctagccca

SEQ ID NO: 311143 - DNA, 230 bp, Zea mays
cccacgcgtccgcccacgcgtccgcccacgcgtccgatgtggtatctgtccatcaatgcccagatgtcaaatacgggaagcgtgtgcacatacttccaattgatgacaccattgaaggcatcactggcaacttatttgatgcctttctgaaaccatactttcttgaagcctatcgtcctttgaggaaaggagaccttttcctagtcaggggtggcatgagaagtgtagaa

SEQ ID NO: 311144 - DNA, 175 bp, Zea mays
cccacgcgtccgcccacgcgtccgcccacgcgtccgggaaggtgatgataagaaagaggaggagccccctgcagagaaaactgttgagaaagaggtggtccctgctgtagatgcagcagagaatactgaacaaagcaccggtgggcaagcacagcttaacgatgttgctgcccca

SEQ ID NO: 311145 - DNA, 221 bp, Zea mays
ccaccgtttctttcctcacctcccgcgacacaccggtagctgccatggcctcttgcgacctccttgatgtcgaccctctggagcttcagtttccgttcgtgctcgacaagcagatcccctgcccgctgcggctcgccaacaggactgaccgtaccgtcgcctttaaggtgaagacgacgaacccgaggaagtactgcgtgcgccccaacaatggcatcgta

SEQ ID NO: 311146 - DNA, 226 bp, Zea mays
gctatattatcgttaagattcagtcgtagtaaaaagtaaagattattttatttccctggagtatcaaactgttgcggatctcctctccgccgatccccacgccggtgctctccaaggcgctccgggtggacgccagtgtcgtggatctcatcaagtccaagttcgccggtgggtactgagactgagacccagcatgcatcttgctagcgcactatgcatgcgccga

SEQ ID NO: 311147 - DNA, 215 bp, Zea mays
ggacctggccgagtacggcgcgtccgatggctgggtcggcgccaacgtggagccagagacgccgccggagtccgccaccttcaccgtgctccccaacatcgcctacttcgagttcatcccgctcaaggcggccacctgccactgcggcggcactgctggcgacacgtgctacgccgaggcttagcgcgtgctcttctggctatctggggtcaccg

SEQ ID NO: 311148 - DNA, 250 bp, Zea mays
acgagatcaaggccgcgctcgaggctgcctgcccggccaccgtctcctgcgccgacatcctggcgcttgcagcccgcgactccaccgtcatgactggcggccctgggtggatcgtgccgctggggcggagggactcccgtggcgctagcgtgcagggctccaacaacgacatccctgctcccaacaacactctccccaccatcatcacaaagttcaagctccagggcctcgacatcgtcgacctcgtcgc

SEQ ID NO: 311149 - DNA, 224 bp, Zea mays
cggacgcgtgggatagtttgcgtcactaccagcagatctttgtagaaaaccaaaggaacagaagtggctagcgtggcctaagctgcagctgtcagcgtcgccgtcgccgccgccggcgccgcgatgatcaccgggcgggacatctacgacgttcttgcggcgatcgtgccgctgtacgtggccatgttcctggcgtacgggtcggtgccgtggtgggccatctt

SEQ ID NO: 311150 - DNA, 234 bp, Zea mays
cccacgcgtccgcccacgcgtccgcccacgcgtccgcccacgcgtccgaatggaaggaaacattgttatcggcctcaagcagggaaagcaaagcatctcactagaacctggaggccaatttgaacttagtggcgctcctctcgaaacgttacatcaaacttgtgctgaggtcaactcacatctatatcaggtcaaagcagttggagaagaaatgggaataggatttcttgggct

SEQ ID NO: 311151 - DNA, 219 bp, Zea mays
atcgcgaagtcctacgggaagctcaagaagctcaggttcttgggcctctccggcaacaacctcggccgcgcgatcccggccgaactgttcgagatgtccgcattggagcagctcatcattggctctaatgagttcacaggcacgatcccggccgcgattggcaacctcgccaacctccagtatctcgacctggcgatcggcaaactgcaaggccccatc

SEQ ID NO: 311152 - DNA, 247 bp, Zea mays
ggagctctctatcctctgcgacgcggaggttggcctcatcatcttctccagcaacggcaggctctacgatttctccaacaccaacatgaaagctgtgatagaccgatatgggaaggcaaaagacgagcagcttggcaagaacgatgcaacttcagaactcatggtacggtgaggaaaatgtatacctatttctagctaactagcagttattggtcgtagtacacacgtgccatatgatgtatgttgg

SEQ ID NO: 311153 - DNA, 264 bp, Zea mays
cccacgcgtccgcccacgcgtccgcccacgcgtccgcgagtctcgtccacccgtcatcctcctagctcctctactcgccagtcgccatgggcaagattaagatcggaatcaacggcttcggaaggatcggcaggctcgtggccagggtcgccctccagagcgaggatgtcgagctcgtcgccgtcaacgaccccttcatcaccacggactacatgacctacatgttcaagtacgacaccgtccacggccactgggacacaggga

SEQ ID NO: 311154 - DNA, 165 bp, Zea mays
cccacgcgtccgcccacgcgtccgcccacgcgtccgcattcctccccaaaacacatcctgcgatcctcgaagcctccgccgagcatcgatcatgtcggcttattgcggcaagtacggggttgagctcttaaaaagctggctacattggcacccctggcaaggtat

SEQ ID NO: 311155 - DNA, 226 bp, Zea mays
cccacgcgtccgacggcctggaggcgtgctgcggcgggtccccgagacgctcccgccggaggtgctggagaagatgcaggcgccggtcaaggaccccgcggtccccgtgatcgcgtcggccgcggagctgcaggaggctgacggagtgttgtttggcttcccgacgaggtacggcgccatggctgcgcaaatgaaggccttcttcgactccaccggctcgctctgg

SEQ ID NO: 311156 - DNA, 217 bp, Zea mays
aagtcgataaagtcgccgtcccgtcgagcaacaggtcgagcggcggcgggaacggtaatactaagctggagtacgggtacaactggcgcaagtacgcgcagaagtatgtgaaggggatcgagaatccgcgtacttattacaagtgcacgtatcatagctgctccatgaagtagaatgtggatacggccctgtccgacggccgcatcacgcagatcgt

SEQ ID NO: 311157 - DNA, 220 bp, Zea mays
cccacgcgtccgatttcaaattggtataccctcttcaaaattaatatctaaaaccctcttgaacactaagaggaggatttcattaagggggagttttgtttagtcaaatgaaaagcatttgaaacagggggagaaaatttcaaatcttgaaaatgcttctcaaaatcttattcatatacctttgactagttgcaaaagattttgaaaaagaatttccaaa

SEQ ID NO: 311158 - DNA, 249 bp, Zea mays
gacctatccaggcttatcaactctgacgaggtgcaatctgtagtgaagcccatcaataaggatgtgaagcgtagggagcctaggaagaacccactgaagaatatggctgcagtgctcaagctgaacccgtacctcggtactgcacgcaagatggcagccctagccgaggcagcgcgtgtcaaggccaggaagcagaagcttgattccaagaggaccaagctcagcccagaggaggcttctaaggtcaag

SEQ ID NO: 311159 - DNA, 245 bp, Zea mays
gtgactatatgcgatcaaagaaaggaattacaaggcctgaaatgataattgctgaatcagcacattctgcatatgacaaagctgctcaatacttcaatattaaagtgcggcgtgtacctgtgaacaaagagtttcttgcagatgtgaaaggattcaaacgatgcataaatggaaacaccataatgatggttggatctgcaccaggatttccgcatggtttaattgatcctattgaggaacttggg

SEQ ID NO: 311160 - DNA, 232 bp, Zea mays
agataataagcaatataatactgatctagaatcgagttgttgtactcttcgcagataggttcgttccttcacatagaagcgagtacagactacagaccacacagtatcagctggcacaaaacgaaaatggttacttgcaaattgcatgcacgagctagaattatattcttctaatcttcttcgttgactttctggcttcagcaggcgcgtgatggcgctttcagcttcccga

SEQ ID NO: 311161 - DNA, 233 bp, Zea mays
cgacgatattggatgtccacggtgtgggctggaaaaactttagcaagattgcaagggatttggtgcgttgtatgcaaaaaatagatggtgactattatcctgagacattacatcaaatgtttattgtaaatgcgggacctggtttcaagctgatatggagcactgttaagggacttcttgaccccaaaacgtcatctaagatacatgttctaggaacaaaatatcaaagcaga

SEQ ID NO: 311162 - DNA, 232 bp, Zea mays
gttttatgaattttaacccagtgttttctgctatccaggcgccctggcggagaaaaagtttaccacgtcttcgacaatcaatttcctgtagctattaaacggttgcagtttgataagcaactctctatggaaaatgtaaagaagcttataacagaagctgatggataccagcctcacttaatagctccagaacaaggatatcgacgccttatagaatcttgtcttattagta

SEQ ID NO: 311163 - DNA, 226 bp, Zea mays
cacgtggccatttttttcttgcagcatgaagagagagcgtttgtattgaaattttcagcaatcgaaatatataacgaattgtaagggatcttcttagtgcagaaaacacatcgcttagactttgggatgatgcagagaagggaacatatgtagagaaccttacagaggtgaccttgagggattcagaccacctgaaagaacttatttctacgtgtgaagctcaaag

SEQ ID NO: 311164 - DNA, 225 bp, Zea mays
cgccgagtccggcacctccatgtcgtgcccgcacgtcgccggcatcgccggactcctcaaggccgtccatcctgactggagccctgccgcgatcaagtcggcgatcatgacaaccgccagggtgcaggacaacatgaggaagccgatgagcaactcgtccttcctccgcgcgacgccgttcggctacggcgcggggcacgtgcagcccaaccgcgccgccgaccc

SEQ ID NO: 311165 - DNA, 222 bp, Zea mays
gatgatttgctgttgcaacaagatggatgccaccacacccaagtactccaaggcccgttatgatgagattgtgaaggaagtctcttcctacctgaagaaggttggatacaaccctgacaagatccacttcgttcccatctctggtttcgaaggtgacaacatgattgagaggtccaccaaccttgactggtacaagggcccaaccctacttgaggctttgga

SEQ ID NO: 311166 - DNA, 241 bp, Zea mays
aaagaatcaagctgcagggtctgaacgtgacaccaaagattcttgtgctgactaggctgataccagatgccaagggtacaaaatgcaatgtggagctcgagccagttgaaaatacaaaacattcccacatacttcgtgtgccattcaagactgaaaacggcaaggagttgcgccagtgggtgtcccggtttgacatctacccttacctagagagatatgcccaggattcttgtgccaaaat

SEQ ID NO: 311167 - DNA, 270 bp, Zea mays
  unsure (1)..(270): unsure at all n locations
gcttctatggccactgcttatgaaaagaaatggccattgtatcttagcaccaaanaacagctaaatttttgaagaatatattgatgtgcaggggtctaagggacaaattttccctcggaggggggttgtaaaacaagtgcggggaaaaccaaaaagttttttgccggcaaaaggtatgtgcaccgccttatcgatgacatggtagcatacgcacttaagagtgaaggagggtatgtctgggcttgcaagaattatgatggagatgtgcag

SEQ ID NO: 311168 - DNA, 233 bp, Zea mays
cggacgctggacagcgtcttcacaaacgccggcgcaaactctcgcccgaacccgacagatcttaccattccctattagtccatttttctccgtccccaaatgattcctttcagacttttcggatataacccccccctttttatttaagagaaaagaggaggcatctccgtccacatcggcagccggcatccaatcggcaaccgtgctggactttatcctcgacacggcatcac

SEQ ID NO: 311169 - DNA, 248 bp, Zea mays
acgagatcactaaagccaaggagtcggtcaccaacatcttcaaggccgccgaggcctacctcgtcgccaacccggaagcctacaactagaccatgcatgcgatcggtcgatcgggaacggatttcttccttgtcttttgtgttttctacggctaaaataaaacttgtctaaggtgtgtacgaacgagaggagaggtcggagaccgccgagcagagtatgcatgcaattgacaagtgccaaatgtgtgt

SEQ ID NO: 311170 - DNA, 242 bp, Zea mays
cggacggtgggcggggagaaggaagccgccctcgccaccgacctcaacagcacccccaccatttttgacaaaactattcggaaggagatcccatctcaggtggtttatgaggatgagaaggttcttgcatgtagagacatatcaccacaagctcctacacatattataatcattgcgaaggttaagtatgggctgtctaggttgtcgaaggcagaggaagggcatgtcgagcttctgggcaa

SEQ ID NO: 311171 - DNA, 241 bp, Zea mays
cccacgcgtccgggatatcatcatggttgccagtggtggtcacgaagatgtcagcttcagagacaacgtcctccaagggaaggacctgaagaccctccatcagagcctggagggcacagatggggtcgatctcggtcacaaggatatcatcatgggtgaccacatgagggagatgaagaacaatgccattgtctgcaacattggccactttgacaatgaaattgatatgctcggccttgag

SEQ ID NO: 311172 - DNA, 238 bp, Zea mays
cccacgcgtccgcccacgcgtccgcccacgcgtccgcccacgcgtccggcagagtccagagtccagacgccagacgccctctacttctcttctctctagttatacatttcaaactcttggccgccgcagcggtctctgttcgccgcgccccgccgcagaaatggcgctgccgaatcagcaggttgtggattaccccagcttcaagctcgtcatcgttggcgacggtggaactggcaaa

SEQ ID NO: 311173 - DNA, 241 bp, Zea mays
atgtgatccccatcttcaacggcgagtgcggggcgtgcgcctactgcgagtccgatcggacaaacctgtgcgggacctaccgcgtggacgcttccaagagcaccatggtctctgacggcggcaccaggttctccgtagcggaccgcgtgtccggccgcaccgtgccggtctaccacttcctcaacacctccacctttgccgagtacaccgtgctggacgcggcctgcgccgtcaaggtcaa

SEQ ID NO: 311174 - DNA, 244 bp, Zea mays
tacggtcgaattccgggtcacccgtcgtcaggtccgggacgtggcgagtggcgctgattttggaaagctttttaagtcatctgcacctgtagaattgactgaagctgagactgaatactcagttaatgttgtgaagcatatttttgatggacatgttgtgctccaatacaactgtaccaatacaattcctgaacaattgcttgaacaggttactgtttttgttgatgcttctgaggctgatgaa

SEQ ID NO: 311175 - DNA, 255 bp, Zea mays
agtgctcctcctcctatgaagaaggactctccacgttctcgccgtcaaagcagtggaaaacagatttgggcgaggtagcaacagcgtcttcagcagcgcagaagctctggtatacgaggagcccgcctccaggcagctcctgctccaccatgttgttgcagtcatagaccaaatctgttttccactgctttgacggcgagaactggagtagtgctcctcctcctatgaagaaggactacaaactagctaatcttc

SEQ ID NO: 311176 - DNA, 251 bp, Zea mays
gtgaaggtgatgggcaacagagctaatgcaatcaaccttgacttctcagatgtaattgttgacatctatgtatgatctccttgactactatgggaactgtttagtgagaaactatattgttttcagatattgtctgatgaagagctagaaacatatctaaaggtgattgcagtaatatccatgggaacataagttattgaacatgacttgttaaatatcagagagctatatgatcatgtgttggccctact

SEQ ID NO: 311177 - DNA, 238 bp, Zea mays
ggaacctggtgcgtcttgaaaggggagagagagagagagaagagagagagaagagagagagagagacgaggagtgggagacccgcgagaggctgccgtgtagggaccgtagactcagcgactgcgaaggagggataaggggatggccgggatcggaccgatcaggcaggactgggagccggtcgttgtgcggaagaaggcacccaccgccgccgccaagaaggatgagaaggccgtca

SEQ ID NO: 311178 - DNA, 240 bp, Zea mays
caaaatcaccatcactacaaaggacacatggtatgcttcaattttggcgatcagatgccaacagaaactctcatgattcaccaaaggatctaagtccaccttctgaacaaactatggacaatggaatacctatggttgcaattgaaactgaaaggacaccgtccattaagagacagaatagttttgaaatgaaattacctgatcttcctaaagttgatgtacatcctatacagcggcagt

SEQ ID NO: 311179 - DNA, 241 bp, Zea mays
ccaaccttctcgcagtgggcaacagcagctggagttgatgagaaaactttgcgcaacgcttgaattatggtatttattgcaagaacagaatggtaacatctaatgtgagacttgtaatctctatcgccagagagtttgaaggccctggaatggacttttatgatcttattcaggaaggaatgcagggccttataaggggagctgaaaaatttgattcatcaaaaggttttaggttctctac

SEQ ID NO: 311180 - DNA, 231 bp, Zea mays
cggacgcgtgggcggacgcgtgggcggacgcgtgggcggacgcgtgggcggacgcgtgggtgatgagatcaaggctgcggtcatggccgaggcagaaggtagcctcaagggcatcctgggttacgttgaggaggaccttgtttccaccgatttccagggtgacagcaggtctagcatctttgatgctaaggctggcattgccttgaacggcaacttcgtgaagctcgtgtc

SEQ ID NO: 311181 - DNA, 237 bp, Zea mays
gccggtttgcctcagcggcgaccaggaactcgtacgatgaaatcctgacgggcctcgctaagccaggaggcggagaggagttcggcaagtactacagcctgcctgcgctctccgatccgcggattgatcggctcccatattctataaggattcttctcgactcgagtatgaagaactgtgacttccacgagatcagcggagaggatgttgagaacatcctggattgggagaaaagtg

SEQ ID NO: 311182 - DNA, 229 bp, Zea mays
gtgccatctgtgagtccctcgtcatcgtcgagtacgtcgacgagaccttcgacgggccgtccctcctcccggccgacccccacgaccgtgccacggcccgtttctgggcagacttcatggacaggaagctcctgaagccgttctggctggcgcactggacagagggcgacgcgcagaaggctcaggtggaagaggccaagcagaagctggcgctcatggaggcgcactc

SEQ ID NO: 311183 - DNA, 223 bp, Zea mays
cccacgcgtccgactatgagtcacaaaaggagacagacattgctctttgttcagactgcttccacaatgcaaaatttgttactgggcattcaaacttagattttcagagagtggatgcgatgaaagatggatcagacactgatggggacagatggacagatcaggaaactttgctgttgttggagggcatagaaaagttcaatgataactggaatcatatcgc

SEQ ID NO: 311184 - DNA, 250 bp, Zea mays
cggacgcgtccgcccacgcgtccgcccacgcgtccgcccacgcgtccgctcggaagataaatttaccttgcatcatcatctcatgaacgagaagcatgcagtcgtgtaagtcctgcgatcctaactgattatgcactccaatgggctgcggacacaaaggggagaaaaacaaaaacgagtgggaggtggccgtgggccatgttgctgctgctgacgaggcggcgcgacccatagtaaaggcgtacaacag

SEQ ID NO: 311185 - DNA, 226 bp, Zea mays
cggaccgtggcgttagtgagaaagggtccaacccgaacaggaactccatcagggggttcgaggtggtagaccagatcaaggctgctctcgaggctgcctgcccgggcacagtctcctgcgccgacattctcgccctcgccgctcgtgattccaccgccctggttggtggcccatactgggacgtggcgcttgggcggagggactcgctgggcgcaacatccagggc

SEQ ID NO: 311186 - DNA, 230 bp, Zea mays
cactctccgcttcccgctccgatcgacctgctccctccccaccaccgagcccatggcggaccagctcaccgacgaccagatcgccgagttcaaggaggccttcagcctcttcgacaaggacggggatggttgcatcacgaccaaggagctgggcactgtcatgcgctcgctggggcaaaatcctacagaggctgagctccaggacatgatcaacgaggtcgatgctgatg

SEQ ID NO: 311187 - DNA, 224 bp, Zea mays
ccacggtccgcgaccgtggctagaacgttgaggagaaccgccgtgccctccgtgagctcctaagctgctgccctggtgctctccagtacatcagcggtgtgatcctcttcgaggagaccctgtaccagaagaccaaggatggcaagccttttgttgatgtcctcaaggagggaggcgtcctccctggcatcaaggttgacaagggcaccattgaggttgttggc

SEQ ID NO: 311188 - DNA, 216 bp, Zea mays
cggacctggtctgagatcgcgagccggccgcccttttttttttttttttttgcatagatcgtggtgaaaaaggaaattttcactttagagatacaattccttggacctgtctcgaatgcacataatgtgaatccattacaactcaacaaacgtgcttattattttactacaccccacgcaattattactgccacacgtctaagactcatgcattct

SEQ ID NO: 311189 - DNA, 228 bp, Zea mays
ggttgatgcacatagtaatcttggaaatctgaataaagccttgagctttcatcccacgcgtccgaaaagttttcaagatcataaagattgaggagggaatgactacagatatatatattacttcagtcattccaattggaggaatgtttgcaatgacactttggctagggaacagtgcgtacctctacatatctgtcgcatttgcacagatgttgaaggcaataatgc

SEQ ID NO: 311190 - DNA, 244 bp, Zea mays
gccgccgccgccgccgcctcatctcatccccatcacccactcccggcggatcgtcgatggcggcgccggcgatatggcagccacaggagcaggggctccacgagatctgcaccctcctggaggcgcacatctcccccaactccgaccaggcccgcatctggcagcagctccagcactacagccagttccccgacttcaataattacctaaccttcatcctggcccgcggagaggggaaatcaat

SEQ ID NO: 311191 - DNA, 238 bp, Zea mays
ctccctccttccttccttccccgccactgcgcacgcgagtgcggcgacagcagtcacacactcacactccctcgaccgctctcggccccgtccgcgtcgccgcaggcgaggaggcaatggcggcgggcgggaatggcgccggcggggacaccagggcggccttcgcgcggatctacaagacgctcaaggaggagctgctcaccgacccggccttcgagttcaccgaggagtcacgcca

SEQ ID NO: 311192 - DNA, 242 bp, Zea mays
agtttaccaaatatgctcacttcattcccctataccatccttacacgcctagctcagttgctcagacgttcatgactcatgtgtataggttgcatggtcttccagcttccattgtttcagatagggatccagtcttcaccagcacattttggcaacaactcttcaagctgattggaaccgaattaaaactcagttcctcttacctctcccaaactgatggccaaacggaacgtcaaccaatg

SEQ ID NO: 311193 - DNA, 239 bp, Zea mays
aacgaacggacaggttgttgcacagaagcgacatggctttcggggccaaaacgtcctcctcctcctggctctcctcggcgttgcaggcagctcagtcgccgccgctggtcctgaggcggatgtcgtcgagcgcaacaccgagacggaggtacgacgcggccgtcgtcgtcactaccaccaccagtggtagagctgctgcggctgctgtcacggttcccgccgcgccgccgcagcgcggg

SEQ ID NO: 311194 - DNA, 235 bp, Zea mays
ggaaatggaactagaccctttcctgggcgtcgtgctcgccaccgccgtcctcctcgtcgccgtcctccgccggaagcgcggctccagccgcaagtacaagatgccacccgggcctaggccgtggccggtgatcggcaacctcaacctgatcggcgcgctcccgcaccgctccatccacgcgctctccgcgcggcacggcgcgttcatgtcgctccgcttcggctccgtccccgtc

SEQ ID NO: 311195 - DNA, 156 bp, Zea mays
cccacgcgtccgaatcttccgttctcaaaccaacctaggcaattcgccgcagcctctcaccctcgcgagtcccgacctcccgcagccgccgcacagatggcacccaaggcggagaagaagccggcggccaagaagcccgcggaggaggagcccgcg

SEQ ID NO: 311196 - DNA, 238 bp, Zea mays
cggacgcgtgggtgcgctttctggcttcgttgcttgcgtgaaggattagtaaggcgcgtgatggcgctctcagcttgcccggctcaggaagaactgctgcagcctgctgggaggccgttgaggaagcagcttgctgcagccgcgaggagcatcaactggagctattccctcttctggtccatttcaagcactcaacgaccacgggtgctgacgtggacggacgggttctacaatggcg

SEQ ID NO: 311197 - DNA, 230 bp, Zea mays
cccacgcgtccgtgtcaaccctagccaaaggacagtcaatacataacattagatgatggccggagactctgcttggagtgtctgcatactgctattatggagaccaatgaatgccagccactgtacattgatattcaagaattttatgagggtatgaacatgaaagtagagcaacaagttcccttgcttttggttgagcgacaagctttaaatgaagccatggaagcaga

SEQ ID NO: 311198 - DNA, 228 bp, Zea mays
acacttctcattcaatacaagagcaaaggcaaacactccaaagacacaatcaaagcattcaatccactccaagcttcgaaatcacctcaatttctttgagacttgagagaggataatttgtgttcttttgttgctcttattgcttggattgctttctccttcttattcttattcttctaagtgttttgtaaagctagcaagagatacctaagtgtgtggtgatccttg

SEQ ID NO: 311199 - DNA, 249 bp, Zea mays
cccacgcgtccggcgcttccgcctcgaggcctccgacatgaccgagaccttcctctgcacggtgcccatgttccacgtctacggcctcgtcgccttcgccacggggctgctcggctgcggcgccaccatcgtcgtgctctccaagtacgagctccccgagatgctgcgcgccatcaacgaatacggggtcacctacctcccactcgtgccgcccatcctcgtcgccatgctggcgcaccccaaccgcct

SEQ ID NO: 311200 - DNA, 240 bp, Zea mays
gtaatcacgtctcctccgccgcccttgctaagcaaacgcaacctgcaactgcaaacccctcctccgattcctcccccgcacgcggaagccccccgcagctcttcgtccccggaggaccaagaccaccaccggagatgtcgtacgcctacctcttcaagtacatcatcatcggcgacacaggcgtcggtaagtcgtgcctgctgctgcagttcaccgacaagcgcttccagcccgtccacg

SEQ ID NO: 311201 - DNA, 231 bp, Zea mays
gccgagcccaaccgcacaagcgcgcgaggcaggagagagagagaggcggggagcaaaacaatggaggggaaagaggaggacgtgcgcctgggcgccaacaagttctcggagcgccacccatcgggacggcggcgcagggcgccgctgacgacaaggactacaaggagcccccgccggcgccgctgttcgagcccggggagctcaagtcctggtccttctaccgcgcgggca

SEQ ID NO: 311202 - DNA, 232 bp, Zea mays
gtctttgggaaacactgcaggtgttgatctactgaaaaatgtccatgtgcaagcaatcgtcgggccacagacatctactcaagctaaatttcttgcagagcttgggaacaaggcatcagttccaatcatttccttttctgcaaacagcccatcccgttcacccagccagaccccatatttcatcaggacggcatggaacgactcctgccaagctgaagctattgcttcactt

SEQ ID NO: 311203 - DNA, 232 bp, Zea mays
cagtatttacatggatcggtaatctaagctcatcaatggaccaagagcttgctgagaggcagctagatgtgatcaagccaaatttgcagtccagaatgctcaaagaaggatctgaatatgatcagttttggaagttgcttggagtcaagtctgagtatggcagccagaagattgtgagggaccaagaaagtgaccctcatttatttgcttgtacatttacaaagggggtgct

SEQ ID NO: 311204 - DNA, 182 bp, Zea mays
attgagtatagtacccctcaggaagctgagctggctagggaaaaaaccaatgggtacaaactcgacaagtctcacatctttgcagtcaatttgctcgatgatttcgagaagtacatgaaagttcctgacacatggacccctgctgaaattaagccatacactgctggagaaaatcttctgaa

SEQ ID NO: 311205 - DNA, 224 bp, Zea mays
cgctgcctccgcctctcgagtctcgtccacccgtcatcctcctagctcctctactcgccagtcgccatgggcaagattaagatcggaatcaacggcttcggaaggatcggcaggctcgtggccagggtcgccctccagagcgaggatgtcgagctcgtcgccgtcaacgaccccttcatcaccacggactacatgacctacatgttcaagtacgacaccgtcca

SEQ ID NO: 311206 - DNA, 234 bp, Zea mays
cgctcgtcttcgccgaggcgctcctcgcccccgccatcccctccgtctcggcgcgcgctggcggcatcttcctaccgctcgtcaagtctctctgtgaggcatgcggctcgcgcgccggcgacggcacggagcgccggctcggagcctggctcatgctcacgtgctttcagacctccgtcgtctcgtcagccatgttcctcactgcgatggcggccaacccgctctcggccaacc

SEQ ID NO: 311207 - DNA, 230 bp, Zea mays
cggacggtgggcggagatgtcgtcggcgatggtggagcgggcaaccagcgatatgctcatcggcccggactgggcgatgaacttggagatctgtgacatcctcaaccgcgaacccggacaagcaaaagatgtggtaaagtccctcaagaaacgcattgcacacaagaacccaaaagtccaacttcttgctctcacgttgctggagacgatgataaaaaattgtggggacg

SEQ ID NO: 311208 - DNA, 237 bp, Zea mays
gtggcactatctacaagggggtcctggacgacggccgagcggtggccgtcaagagactgggatacataaggcagcacagcagagaggagttccacgacgagctgcacgtcatcgcaaggatcaaccatatgaacctggtaaggatgtacggcttctgctcggagaggtcccacaggatgctggtcctcgagtacgcggacagagggtccttggctgacgtgctgttcagaggcagag

SEQ ID NO: 311209 - DNA, 234 bp, Zea mays
cttacatgatccgtgctattccaagcaatgcatcagacaatgtctattgcaccctgctcgcacatagtgccattcatggtgcaatggcgggatacagctttacagtcggaatggttaatggcaggcatgcatatataccatttcatagggtaacatctacaaggaacaaggtgaggataactgacaggatgtgggcgaggctgctgtcttcaacaaaccaaccgagtttcctga

SEQ ID NO: 311210 - DNA, 229 bp, Zea mays
gtcagtcacagctcacagcaaacaccgcgaaccgcccccgctcccaaacccgaccgagcaaagcgcaaagccccccaaccgcggatcaatccgcagcatcgatggcgcccaaggcggagaaaaagccggcggcgaagaagcccgcggaggaggagcccgcgaccgagaaggcggagaaggctccggcagggaagaagccgaagcggaggaaacgcctccccgcgggcaa

SEQ ID NO: 311211 - DNA, 230 bp, Zea mays
ttcttccctctcgccttcccctccgccgccaatcccacgtccaatcagccgccgctccagccttccatccatccatcccgtagctgctctctattccgccagcgatcgagagaccaagaggagcaggagcgatggcgaggagctcgttcaagctggagcaccccttcgaaaggaggcaagctgaggctaaccgcatcagggagaagtaccccgatagaattcctgtcatt

SEQ ID NO: 311212 - DNA, 184 bp, Zea mays
cccacgcgtccgcccacgcgtccggagtgggccgggctttgcaagattgactctgagggcaaggaacagtgacctggtgaaggcactctgcgctgagcacaatgttcacctggtcactgttcctgccgcgaagactcttggcgagtgggccgggctttgcaagattgactctgagggcaaggca

SEQ ID NO: 311213 - DNA, 218 bp, Zea mays
  unsure (1)..(218): unsure at all n locations
cggacggtggnttccgcatggagccggatgccttccgtggcactgcaccaatcaacctcacggaacgcctctgccagatcctgcgctggtcgggcggctcccttgaaatgttcttctcacactgcccgctccttgctggccgtcgactgaacttgatgcaacggatcgcctacaccaacatgacagcctacccaatctcatcggtcttccttgtgttc

SEQ ID NO: 311214 - DNA, 216 bp, Zea mays
ccatgatgaagagcatggttgaaaatggagcaaaacaaggcttaaaggataactatgttcaattctctgagctgctggctaaaaattttaggccagttgatgcaaaagatacaacatacagtaatgaagtcctttcttctgtgcaaccagagcaagaatctgactggaagctagcgtttcgagtatttggaaatttcacacttttttcctcagttt

SEQ ID NO: 311215 - DNA, 200 bp, Zea mays
cctgctggtcctccgctcctggccgccctccgacggcaccttctccgcccagcacgaagctaagaagttcacgtttaacctgatggcgaagaacataatgagcatggaccccggcgaggaggagacggagcggctgcggctggagtacatcaccttcatgaagggcgtcgtgtcaacgccgctcaacttcccgggacggc

SEQ ID NO: 311216 - DNA, 266 bp, Zea mays
gtaccctgcagtacgtcggaattccgggtcaccacgcgtccgggacggggcggacgcgtggtcgcctctgtcccttgcaagttcaatctcacctcgtaccatgggtagcgagaagtcccacatcaacattgtggttattggccatgtcgactctggcaagtcgaccaccacaggacaccttatctacaagcttggaggcattgacaagcgtgtgatcgagaggtttgagaaggaggctgctgaaatgaataagcggtccttcaagt

SEQ ID NO: 311217 - DNA, 213 bp, Zea mays
cgacgggcggacgctggcggaccgtggcttcaacatcggcctcacatcctacatcatcggcaacaccaccaacctcgtcgtccacgccgcaaccaacacattcaagatgagggacatggtgcggcgggtctcgatgttcgggagcgtcaaccggctgccgccggagctgagggagcagatgatggcgagcgcgcactctaggttcagcacagc

SEQ ID NO: 311218 - DNA, 228 bp, Zea mays
cccacgcgtccggtttgctgtatgggttcttcattgctataatatgtggacagaggataactgaacggcattaccatgttcttgcaaagcaagagttaaccaaggagtatattgtagaagatcttgaaggcgctgactaggtgccagactgtttttcatgcgcctgttagagagttgaggattggggactatattaaacatagctgcatattacatcagataaacatg

SEQ ID NO: 311219 - DNA, 221 bp, Zea mays
gcgtacccgacgcggcccgacgtgatggtgttcaaggacctgagcctgaggatccgggccgggcagagccaggcgctggttggggcgagctggtccggcaaggtcaccgtcatcgccctcgtcgagcgcttctacgacccgctcgccgggaaagtgatgatcgacggcgaggacatccggcgcctgaacctcgagtccctgcacctcaggatcgggctggt

SEQ ID NO: 311220 - DNA, 219 bp, Zea mays
cacacgcgtccgaatcagaagagcggcggcgcgggcggacaaggagcaggcggaggaggagttgtgccaagccacaatgggtatctcgcgtgactcgatgcacaagcgccgagccaccggtggaaagcagaaggcctgggggaagaaccgaaagtataacctggttcgcaagccagcaaaaacaaggtgtgaagccattagaccgttaagagggtccgg

SEQ ID NO: 311221 - DNA, 240 bp, Zea mays
gtctacctccgcagcttatatgccaactgcataatgtgactatgcatgctgatgctgagacagatgaggtgtatgcacagatgacactgcagccactcagtccacaagagctcaaggacccatttttgcctgctgagttaggcactgccagcaaccagccaacaaattatttttgtaaaacactaactgcaagtgatacgagtacacatggtgggttctctgttccacgccgagcagcgg

SEQ ID NO: 311222 - DNA, 216 bp, Zea mays
gaccagggagcctaaggaggagaatgtgacccttggccccactgtccgtgaaggagagtatgtctttggtgttgctcacatctttgcatccttcaatgacactttcattgtaagtagtgtatgctccaactatggatagacctttttattcctttccctagttaactgtatgatgttgtaatatgcaacatatcactgatttgtctaggagggaaa

SEQ ID NO: 311223 - DNA, 212 bp, Zea mays
gagagagaggcgaggaaggagggagagagcacgggggcttgatcgaagatggatgccggagcaaaggtggtgaagaaggccgcggcggggcgtcgcggcgggggcggccccaagaagaagccggtctctcgctccgtgaaggccggcctccagttccccgtaggccgtatcggccgctacctcaagcagggtcgctactcccagcgtgtcgg

SEQ ID NO: 311224 - DNA, 211 bp, Zea mays
cccacgcgtccgcaccccggcagtgccatccgactccctgcacctgccatggctgccgctctcgtgtctgtgcctcgcatcaagttgggctcgcaggggctggaggtctccgcgcagggcctcggctgcatgggcatgtccgccttctacggcccgccaaaacccgagtctgagatgatcaagcttatcgaccacgccgtcgacgccgggg

SEQ ID NO: 311225 - DNA, 212 bp, Zea mays
ccacgcgtccggcgcaacttctcgattgggatgttttgcatgccggcatcatccatcatcccgctccacaaccatcctggaatgaccgtgctcggcaaggttttgtacggcgcggcgcacgtcagatcgtaccgctggattgaatcagccggatcgtccattaacctgtcgaaagcgaggccagccaaggttgtaagggacggcgagatgtc

SEQ ID NO: 311226 - DNA, 220 bp, Zea mays
gcaaagtctgctgggatgccatgtcctgactataaccgcatgcatgagggcttcaagcttgcatacactgagatggcaagacagtacccttgctttggatttgcagctaagatgccgaacatcgaatggtggaggacatgtgttaagaattcattcgttaaggctggctatgattatgatgaggagacatttgagaaagtcttcaggcgcatttattcgg

SEQ ID NO: 311227 - DNA, 127 bp, Zea mays
cccacgcgtccgatttgatttgcgttcactgcgttgcgtttccttggaggggattgttctctcctctcctttggattggaggtccctccttcttctccgctctctctcagaggaatgcctagggatc

SEQ ID NO: 311228 - DNA, 158 bp, Zea mays
aacaactctcaagccctaagctcggctgtgtgcttcatgctggatcaacgggacggtgataacaccgcatttgttcagttcccacagcgcttcgacaatgttgaccccacggaccgctatggtaaccacaatcgtgtcttctttgatgggaccatgct

SEQ ID NO: 311229 - DNA, 181 bp, Zea mays
gtctggtgtgtcgctgcttgcactcttcaaggagaagaaggagaagccaaggtcttagatcacttttgctggatcatctcacgccaagggcatcgttctggagaagattggtattgaggccaagcagccaaattcggccatccgtaagtgtgcccgtgttcagctggtgaagaatggaaag

SEQ ID NO: 311230 - DNA, 237 bp, Zea mays
acagagatgagttgattggcctcagcattttgttggggatcaactgctgatcactctacgaattagtccttggactatgcaaaattttctacatcaaggatcaccttgcgctgatgatggaactgctaggaatgatgcctcgaaagatcgcgttgggtggtcggtactcacgtgatttcttcaatcggtacggggatttgaggcacatccgacgcttgcggttctggcctctcaaca

SEQ ID NO: 311231 - DNA, 210 bp, Zea mays
cccacgcgtccgatcgatgactgcctctcggttatagcgttacctcttccacatcggccactctttcctgcattctacatgccgatcaatgtgaaggaccaaaagctgctgcaagccctaatagaaaatcgcaaaagatcagctccgtatgctggtgcctttcttgtgaaagatgaagaaggtactgaccctaacatcgtgactggttca

SEQ ID NO: 311232 - DNA, 242 bp, Zea mays
cggacgctgggtcgaccacgcgtccgcccacgcgtccggcctccaaagccactcccaaacccccgtttcgcgagacttctcgaagcggccgccggctcctccactcgcaccgatggcgaaggaaccaatgcgcgtgctcgtcactggcgctgcgagacaaattggatatgccctggttcccatgattgctaggggtgttatgcttggtgcagaccagcctgttattctgcacatgcttgaca

SEQ ID NO: 311233 - DNA, 184 bp, Zea mays
cgctcatcgtcttcctcgtcctgtcccgccgaatggatgaccagctgcgcttcccaccggcgccgtgggcgttgcctgtcatctgccacttgcaccacctcgccggtgcgccaccgcaccgtgccctgcgggaccttgcgaggcgccacggtccgcacatgatgctccgcttctgcgagctccg

SEQ ID NO: 311234 - DNA, 233 bp, Zea mays
gagattccatggttacccatactcatggataccatcttccatggatagctttcagcttgctcttcagtttggaatatcagttatggtgattgcctgtccttgtgccttagggctggcaactccaactgccgtgatggttgcaactggagttggtgcgtcacaaggcgttctgatcaagggtgggcaagctcttgagagtgcacaaaaggtaaactgcatcgtctttgataaga

SEQ ID NO: 311235 - DNA, 252 bp, Zea mays
gactgtccgatgccccctccttcacccgcctcgcaagtgcgcacttgcgatgctggcgccgcgtagtcgcccacgcgcgggacggtgagtgagatggcgcgctacttccgcagcagcaacctcgcctctaggatcttcgaccgtcagctcatctccccgctccctggcgctaccgttaacacgattagacagttttatgaaaatttggtcccaagctatactatatatgacatagattgcccagattattcg

SEQ ID NO: 311236 - DNA, 250 bp, Zea mays
cggacgcgtggcgctgcagaacgccgacggctggtccgcgctccaggaggccgtctgcacgcgcgaggaggccatcgccaccatcatcgcgcgccactaccagccgctcgcctgggccaagtggtgccgccgcctcccgcgcatcctcgcctccatctcccgcatccgcgacttctacatggagatctccttccacttcgagtcctccgtcatcgcgttcatcggccgcatcgcgccctccgacacctac

SEQ ID NO: 311237 - DNA, 240 bp, Zea mays
cccacgcgtccgcccacgcgtccgcggacgcgtgcggacgcgtgggtcccgaccgagcgatccagccagcgagcggttgcgagaagtagccgccgcacggaggagcacgccaaggccgacgcctacgaggacggccatggggttctgggtgaccacgctcatctttctcctcgccggcgtcgccgcatccctcttcacgctcctctgctgcaaccgcgggccctccacaaacctattcca

SEQ ID NO: 311238 - DNA, 235 bp, Zea mays
gaaaaaaggaggaggggatgggaatcggaggagagaggaggatgtggtgtagatggagaccgaggatgccgcgctgcgctggggggacatcatcagggattgcctcgcttcgctgggccggccaaagaaattgttcattatagtgaacccttatggtggaaagagaagtggaaggagtattttccagaatgaagtcctccccctcattgaagcttctggcgtgctttatacgatg

SEQ ID NO: 311239 - DNA, 230 bp, Zea mays
gcggcggcgcgggcggacaaggagcaggcggaggaggagctgtgccaagccacaatgggtatctcgcgtgactcgatgcacaagcgccgggccaccggtggaaagcagaaggcctggaggaagaagcgaaagtatgagcttggtcgccagccagccaacaccaagttgtcaagcaataagacagtgaggagggtccgtgttcgtggaggtaatgtgaaatggagggctct

SEQ ID NO: 311240 - DNA, 211 bp, Zea mays
gacattggaaggttctcaattggatgtggaattggccttctttcatatgtggttccagtctatatatcagagataacaccaaagaatcttagaggaggtttcgcaactgtaaaccagtttatgatatgttgtggggcatcacttgcttatgttctgggaacttttatctcctggcggactttggcaatcatcggagtggcacaatgtttgc

SEQ ID NO: 311241 - DNA, 201 bp, Zea mays
ccacgcgtccgcccaagcgtccggcggcggcggcgcatgcggaggagaaatgcgacatgtctgtggggaaatgggtgagggagccgcggggccctgtgtacacgaacctgacgtgcccgacgctgccggacttcaagaactgccacaagtacggcaaggaccccgggcacctcttctggcggtggcagccgacggctgcga

SEQ ID NO: 311242 - DNA, 226 bp, Zea mays
  unsure (1)..(226): unsure at all n locations
caatgcatcaaacaatgagcttgtgaggacacaaacccttgtgaagagtgccattgtgcaagttgatgctgccccattcaagcagtggtacctcactcactatggagttgacattggtaggaagaagaaaacccctgctgcaaagaaggataatgctgagggacaagaggttgaggcagcagctgaggaaacganaaagagcaacgatgtcacgaggaagcttgag

SEQ ID NO: 311243 - DNA, 216 bp, Zea mays
cgttgagcttcgccgcggccacggcgctccccttaagctccgtgacgcggcggcgcatgtcccgcactttctccccctccatggcatcccgtatgagcgccgtcacctcgccccgccggacgtcattaccgatctccatcccgatgccccactcggtgcgcttgtaccggcagtgggtctgctgctcagcgaagaagggccagcacaccatgggca

SEQ ID NO: 311244 - DNA, 235 bp, Zea mays
cccacgcgtccgcccacgcgtccgcccacgcgtccgcgctagggaggagagagggggaagagagagggctagggtttcgtgctccctcacgcaacgaatccgagccggatcggggggtgcgcggagtcaccggcggcccggcgttgcctgggctgtgatacagttgcaatggcatctgtaactgatgagacagctaagattgagggtttgacatctgctgcagcctttgtggagg

SEQ ID NO: 311245 - DNA, 148 bp, Zea mays
ccacgcgtccgcccacgcgtccgcccacgcgtccggcagtgtgcatgcatataagagcaacaagatactggcgcagaggagcaatgcccggcatggatgccttcgctgctgtgtcactactcgccacactctttctggttcgtgcggc

SEQ ID NO: 311246 - DNA, 238 bp, Zea mays
cccacgcgtccggttgaagcattggaaggatgaatttatttctacactgcagcattattggttgggcactaagctactctgggcagatgttagaatctcatcaaggctgttagttaaacttgctagtggaaagagcctcacaagacgagagaggcagcagctcacacgcacaacagcagatctattcaggctagtaccttttgcagtttttattatcgttccattcatggagctcttg

SEQ ID NO: 311247 - DNA, 182 bp, Zea mays
ctgagctacaattgaccataaagaagctaccagttttctacaaacatagggatttcttattcttccctgcatggacctttggagtggcaaacatactcttaaaagttcctatctcgctcgtggaatcagtagtatgggttgttctcacatactatgtgatgggctttgcacctgctgcaaga

SEQ ID NO: 311248 - DNA, 235 bp, Zea mays
gtcttgaaaggggagagagagagagagaagagagagagaagagagagagagagagaggagtgggagacccgcgagaggctgccgtgtagggaccgtagactcagcgactgcgaaggagggataaggggatggccgggatcggaccgatcaggcaggactgggagccggtcgttgtgcggaagaaggcacccaccgccgccgccaagaaggatgagaaggccgtcaacgccgcgcg

SEQ ID NO: 311249 - DNA, 237 bp, Zea mays
ccgggtccaaggaagagattaactgaggcaagcctttcctccgtaaatggggagaggctgctttgaacacatgacctagtgattgagtgagaccaaacataaaaaaaactcgacatgcgggggctatgacagcccctgggcatcaaattaagaaaaaggccttctcatgtaggtcgagacaaccgtcgaactcctgctccaccatacacagcggcaccgtagcccatgtgagaaacg

SEQ ID NO: 311250 - DNA, 233 bp, Zea mays
cccacgcgtccgcccacgcgtccgcccacgcgtccgttttcgttgaagaggtgtattctcgacattgatgtccaaggagctcgatccgtgagggcttcttctcttgaagcaatattcatctttgtatgccctccatcattcgaggaactagagaagcgccttcgggcacggggtactgaaacagaggagcaaatccagaaacgactcagaaatgctcaggctgaacttgatca

SEQ ID NO: 311251 - DNA, 191 bp, Zea mays
tgggaaaccatggggcaaatttcacatacaggatgggttcctatttcgcgctaacaagctgtgtgtttcagctagctcggtttgtcttttgttgttacaggaagcgcatggaggcggtctcatggggcactttggcgtctacaagacacatgaggtgttggctgcccacttcttttggcctcggatgcgcg

SEQ ID NO: 311252 - DNA, 186 bp, Zea mays
  unsure (1)..(186): unsure at all n locations
cccacgcgtccgcccacgcgtccgcccacgcgtccgcgagcgaggcactgcgtttgcgttgcgcacgagctgagccccagatgacgccgtccgtgcatgccgacgagtacgtccgnccgcctcagcggccgctggcgctcatggcgcacgacaagccngcatcccatcctcaacaggtgcacatct

SEQ ID NO: 311253 - DNA, 215 bp, Zea mays
ggatgaactcaaggcccggaaacgtgttcttcgcacgctggggtacgttacgagtgatgatgttgtggaagttaagggccaagtggcgtgtgagataagttcagctgatgagcttacattgacagagcttatgtgtagtggtgctctgaaggatgctacagtagagcaggtggtggcactgctctcttgcgttgtgtggcaggagaagctccagg

SEQ ID NO: 311254 - DNA, 135 bp, Zea mays
  unsure (1)..(135): unsure at all n locations
cccacgcgtccgctctttcgtgctgctgggctagtagagttggagctggaatattgctgtgtcaagtccgtgaaccgagagagtnngaagacgatgcggcgggtatgggtccatggcaaatgcagaagaccacct

SEQ ID NO: 311255 - DNA, 139 bp, Zea mays
agccaccaagggaaatgagtttgaagactattttctcaagcgtgaactcctaatgggtatttacgaaaagggatttgagagaccctctcctattcaagaggaaagcgttcctattgcgttgactggtagtgacattctt

SEQ ID NO: 311256 - DNA, 232 bp, Zea mays
gtcaagtaccacctgggtacctcctatgatcgcccaactcgaggcggcaacaggatccatttgtccttggtcgccaatcccagccatctggaagccgttgatcctgttgtcattggcaagacgcgtgctaagcagttctactccaatgatgctgacaggacaaagaacatgggtattctgatccacggagatggcagctttgctggccagggtgtggtctatgagacactcc

SEQ ID NO: 311257 - DNA, 153 bp, Zea mays
caaaactcatcctgctgcgttgaccaccagaaaatatgggctttccagctgggaatcactcaaggcagtgatgtcaagagagcagctattgatgaagcgcaactctttcatctatattgtcaaggtcacccagtggatcatccatgcgctcat

SEQ ID NO: 311258 - DNA, 226 bp, Zea mays
ggcgctgctgacgatggcttcgtcggtgaaggggctggtgcctacgtcgtgcgcgtataaggatgtgtgccacccgacggacgcgcaggcggcggtggtgtccgtggcgctgtagctgatctcgctgggcacgggcgggatcaagccgtgcgtgtcctcgttcggcgccgaccagttcgacgagaacgacgagcgggataagaagacgcaagagctccttcttcaa

SEQ ID NO: 311259 - DNA, 229 bp, Zea mays
cggacgctgggagctggccatcctgatggcgcggctgtacaccggctcccacgacatcatctccctccgacaactcgtaccacggcaacgcggccgggaccatgggagccaccgcacagaagaactggaagttcaacgtcatccagagtggcgtgcaccacgcggtgaacccggacccctacagaggcgccttcggctccgacgccgagaagtacgtgcgggacgtgca

SEQ ID NO: 311260 - DNA, 217 bp, Zea mays
gtgacaactccggaccttactctcccagtgagtatccgtgttggtgacaaagtccatggtcttcgcagtacagatgatggagttcataaaattgaggatggaaaggttgtcaaactcatgaaaaagaaaggcacaaatatggtaacagtagaggctgcaggggctggtgatataatttcaatggcaggattggctgctccagcaattggacatactg

SEQ ID NO: 311261 - DNA, 226 bp, Zea mays
cccacgcgtccgcccacgcgtccgcccacgcgtccgcttaccaacaatcagccatgaacacgcttagctgtgacaagtgctgcatggtttggttgatggagcatcattatcagttgttacggttcatcacaaattttcaaacgattcattgtcagctggatggagcatccatcatttgttatgtatactagccctgaatcctgatcatgtaacagcaacttggacg

SEQ ID NO: 311262 - DNA, 214 bp, Zea mays
cggacgcgtggcggacgcgtgggcggacgcgtgggtcaaatccttcgatcgcgcagccgcccgccatctcgcagctcactccgatggcccgcacgaagcagacggcgaggaagtcaactggcggcaaggcgccgcggaagcagctggccaccaaggcggcgcgcaagtcggctccggccaccggcggcgtgaagaagccgcacaggttccggcc

SEQ ID NO: 311263 - DNA, 242 bp, Zea mays
tgaagaatcggcattgatgacagattatatgtaccatacgttagctgccaaagctagtggagagctgtgcttgaaatatatattttccttcggggcatttgcaaggaaacctcttcgtcagtgcgcgaccgaatggaaagagccgaccaccttcaaatatgggcagcaagactggatgaacgatcaaggcgcccatcaagcacggaagggacagaaagaccttgtgtaaaaatcagggccac

SEQ ID NO: 311264 - DNA, 241 bp, Zea mays
agacgacttgtttcattgattcttgaagagatcgagcttcttttgcaccacaaggtcgaggatgtcttgcaactgcggatcaagctgcggctgcggctcaagctgcaagtgcggcaagaagtaccctgacctggaggagacgagcaccgccgcgcaggccaccgtcgtcctcggcgtggccccggagaagaatgccgcacccgagttcgtcgaggccgcggcggaatccggcgaagccgcc

SEQ ID NO: 311265 - DNA, 242 bp, Zea mays
cccacgcgtccgcccacgcgtccgcccacgcgtccgtgcattgtgtgtgacggtaatggaacaagctaccaagttcatgtacgatcaagagcaacaggctcctcggacatagccaactaccattctggaatgctagaggcttccttataagtggatgactcatcaacaacattcactttaggaaagccatacctatcatcaggacgaatagtgctacaatctcgaagattatacggtggacc

SEQ ID NO: 311266 - DNA, 254 bp, Zea mays
gtacggtccggaatccgggtcaccacgcactgacagcgcgcgacctggcgactggctggaagggcgccgacgtcctcgtcttcaactcctacctctggtaggtcgccggacacaaaatccagatcctgaggggcgccgacaacgacccgagcaaggacatcgtggagatgaagtcggaggaggcctaccggctggtgctgcaccaggtggtccggtggctggagcgcaacgtggaccccggcaagtcgcgggtg

SEQ ID NO: 311267 - DNA, 244 bp, Zea mays
tgcgcctctacatttcttctctctctgctcctccgcctccgcctgatccatccaagacaggatcgccatgtcggactcggaggagcaccacttcgaatcgaaggccgacgctggggcgtccaagacctacccgcagcaggctggcaccgtccgtaagaacggcttcatcgtcatcaagaaccgtccctgcaaggttgtggaggtttctacctccaagactggtaagcatggccacgccaaatgc

SEQ ID NO: 311268 - DNA, 262 bp, Zea mays
gaaaatgtgacttggacaataagatgttgcttgagttacttacatttcttaaaagtattgattagtcttgcatctggatgcaggagctctgcagtaaaggaagtgtgtagtcaccatggtccatttcaagaataggtacatggtggtggagatctttatagatgcaggtagaggtgaacaggaccctgtaatcctcacccaatttaatataacaaaagttataaaagacagcattcagctcaactttggagagtgtggccta

SEQ ID NO: 311269 - DNA, 234 bp, Zea mays
gttttcagggggtccggccatttcatccaggtcgtgtgaccactctgatctggattcctcttgcagccgcttcgggcgcgggtgggatcggcccgtggccggcggagatgtccggattcgtcggtgtcgtcgtgtccgacccctcgctgcaggggcagttcacgcaggtcgagctccgatcgctcaaggccaagttcgtgtctctgaagagagattccggccatgtcaccacta

SEQ ID NO: 311270 - DNA, 251 bp, Zea mays
gacgacgagatctcgccctacctcatcgccccggacaccgtcagcgtcctcagggacatcgccgacgtcatgctgcgcgccggctacgcgcccgagctgtgccaggtatacggggaggtgcgccgggacacgctcatggaatgccttgccgtgctcggggtcgacaagatgagcctcgaggaggtgcagcgggtggagtggggcgtgcttgacggcaagatgaggacatggatccaggcgctcaaggtcgt

SEQ ID NO: 311271 - DNA, 265 bp, Zea mays
gctagagacaaccgctgcgtaaacgaatccatcgccatggcgtctcgtctcgttgcggcggcggcctcctcctcctccctctcctcagcgtcccccctcgctcgcctaatctctcgccgcggccttgccggtgccgcagacggccatgggtctgcgaaggtgcccttgtggaaagatccgttgagcccgagcaagtggaaggaagagcactttgttctagcaagcctctcaatgtggggggttattttttatggtggttacaagc

SEQ ID NO: 311272 - DNA, 262 bp, Zea mays
ctcgggtccgacatcctggccggcattgacgccgctgttgctgatggcgtgggcgtgctgtcgctgtccctcggcggcggctcagcgccgtacttccgggacaccgtagcggtgggcgcctttggtgcggcggcggccggagtgttcgtctcttgctccgccgggaactccggcccatccggatccaccgtctcaaactccgctccgtgggtcgccaccgtcggcgccgggacactggaccgcgacttcccggcatacgtga

SEQ ID NO: 311273 - DNA, 254 bp, Zea mays
ggagtagatagcgacaaggagatgctcatgtcccacatgaacttcgagaagcggttcgggcagtccgcggcgttcgtcacgtcgacgctgatggaggaaggcggcgtccctccttcgtcgagccccgccgcgctcctcaaggaggccatccatgtcatcagctgcggctacgaggacaagaccgactgggggctggaggtaaaggcaccgaaaccatcgatttccctaagctctccatgtgcgttgctcctccg

SEQ ID NO: 311274 - DNA, 261 bp, Zea mays
ctctgttacttctccctccgccgccactcccctcccattcaccgccaccgccaattccataccgtcctccgccacctctgctgagagcgagaagagatggcaggcaagggtgatgggccggcaatcggcatcgatctcggcacgacgtactcttgcgtcggcgtctggcagcacgaccgtgtcgagatcatcgccaacgaccagggtaaccgcaccacaccctcgtacgtcgccttcaccgactccgagcgcctcatcgga

SEQ ID NO: 311275 - DNA, 242 bp, Zea mays
gttcaactgctcctacaaatggtagtcctggtggtacgggatatccgcgcccatctctctcaaatggcaatgttctaaaacctggcggacttcctttgctacgccttcctgtggttacaacccaagaaacaagccttgctgcgagttgccgaagagtatatgctcatgcacatgactatcatataaattcaatatcaaataacagtgatggtgagacatttatatcagctgatgatttgcgg

SEQ ID NO: 311276 - DNA, 225 bp, Zea mays
cccaacaccacctcgcctgcgatcttcgtagcctccgtcgcgtcgagcatcgatcatgtcggcctactgcggaaagtacaaggatgagctcatcaagaatgctgcctacattggcacccccggcaagggtatccttgctgctgatgagtccactggcaccattggcaagcgcctttccagcatcaatgtcgagaacgttgaggagaaccgccgtgccctccgtga

SEQ ID NO: 311277 - DNA, 235 bp, Zea mays
cccacgcgtccggagaggggaattcagacttcgcatctttgctctgagtagtgaatactgccatactgcttaggcgtttactaccttgcattgttaatggcgttgggaagaccacaggtatggagtacccagagcgccctggacagccactctgtgagtactatgcaaagaatggcacatgcaaatttggttccaattgcaagtttgatcatcccagggaaagtggttttgtacc

SEQ ID NO: 311278 - DNA, 165 bp, Zea mays
caaagacccctgtcccgctaggattcccccgaaaccctcccccaaaaccccagagcggagaagagcgcaagatgttcggcttcgggcaccacggccaccacggccagaacccgccggcgcacggcggcgtgcaccagcccaccttcaagatcttctgcaaggccg

SEQ ID NO: 311279 - DNA, 234 bp, Zea mays
ggcagctcaactacagcgactcggacgcgctgctcgacttctgcgaccgctacggcaagcccgtgcgcggccactgcatcttctgggccgtcgccaacaccgtgcagcagtgggtcaagaacctggacgacgaccagctcgcgtcggccgtgcgggcccgcctgcagagcctgctcacccgctacgccggcaggttcccgcactacgacgtcaacaacgagatgctgcacggca

SEQ ID NO: 311280 - DNA, 254 bp, Zea mays
gacgcacgcagagccgcagagatccgtcacactgcaagttttgaaaactgaactgtaagatggcatcagcagagctttcccgtgaggaaaatgtgtacatggcgaactcgccgagcaggcagagaggtacgaggaaatggttgagttcatggagaaggtagcgaaaactgttgactcggaggagctcactgtggaggagcgcaacctcctgtctgttgcatacaagaacgtcattggagcccgccgtgcctcat

SEQ ID NO: 311281 - DNA, 175 bp, Zea mays
cccacgcgtccgcgttcacatttattctcagcatagacaagcagcaaagatggtctgcgaccaaaggccatcggggacgaccctcgatagggaggcagaaatatgaacggtgcccctggacgctggatccatgctggttttggacacggttgtctttttgtgtttaacttatctg

SEQ ID NO: 311282 - DNA, 130 bp, Zea mays
accacgcgtccgtgccaaggtccgcctcgtcatgcgtcaggcgaagacgcttaagatctgtgctaaccatcttgtggtggcgacgactaagatgcaggagcacgcagggagcgacaagtcgtgcgtgtgg

SEQ ID NO: 311283 - DNA, 229 bp, Zea mays
gccacggacgggtgcgtgcggctgtacccggaggtgttcctgccgctcgccaccacccgctctccgggcttcctcggcctccacctggggaacgagggcttctggagccgctccggattcgggcgcggggtggtgattgggatcctggacacggggatcctgcgcagccacccgtccttcggcgacgacgggctccagccgccgcccaaggcgtcgaaggggacctgcg

SEQ ID NO: 311284 - DNA, 226 bp, Zea mays
tgaactgcgtgcagcgagacggtcaagtttgggcacgtcatctttttctggaacgggaatcggtccggttacttcgaccagaacctggaaaaatacgaggagattcccagcgatgccggcatccccttcaatgtccagccgaagatgaaggccttggaaatcgcgcagaaggcgagggacgccatcctgagccaaaaattcgatcaggtaagggtcaacattgcaa

SEQ ID NO: 311285 - DNA, 248 bp, Zea mays
tcgggctactcttcaccaacagtttactttatacaccagaaccaaagaaattgtgcgatcagattctacaacgcacaactgatgtctgccaccgattcatgtggagcatattgtttgatgcgaggacatggcatacacctcatgagacacattaactttagattggtgattgacaaagagactggcaagccaaaaggttatggcttttgcgagtacaaggatgaggaaactgttttaagtgcatgtcg

SEQ ID NO: 311286 - DNA, 201 bp, Zea mays
ggccctcgggctgccgtcatggccgacttagccaagacgacgacgaccatcgccattaccacgacgatgatcgacggcgtgagccagatcaccacgaagattgctatgctggaggactccgactccctagcgcacctgctacagcagcccgggacagaggacgtggaggcttcgcgctcgggcttggcctctccgactacc

SEQ ID NO: 311287 - DNA, 239 bp, Zea mays
cgccggcaagcgcaagaaggccaccacgagcggcaagcccaagcgcccgccctccgccttcttcgtcttcatgtctgaattcaggcaggagtatcaagttcaacaccctggcaacaagagcattacggctgttagtcaccttgcactctgctctccctttattttttggtgcgtttgcagatgtcttctttgttcgtattggtggatcaggtgagcaaggcagcaggggagaagtggca

SEQ ID NO: 311288 - DNA, 148 bp, Zea mays
tcctcacatagtgagtggagcaattgctgcactgtcattgcttatatacagtgacgctaatttttgcatggaagtaccgaatctgatagagtcagtattagttttgctgcaacataaagccattgaagtaactaaagcagccttgggc

SEQ ID NO: 311289 - DNA, 222 bp, Zea mays
cggacgcgtgggctctactgttgttaagggcaccccaggctatctcgatccagaatatttcctgacccataaactgacggaaagaagtgacgtgtatagcctaggtgttgtttttcttgaactattgactgggatgaagccaatccagcatggtaaaaacattgttagagaggtaaacatcgcttaccagtcaggcgacgtttccgggatcataaacagccg

SEQ ID NO: 311290 - DNA, 240 bp, Zea mays
cttccaccctgagcagctcatcagtgggaaggaggatgcagccaacaactttgcccgtggtcactacaccattggcaaggagattgttgacctatgccttgatcgcatcaggaagcttgccgacaactgcactggtctccagggcttcctcgtcttcaacgctgttggtggaggaacgggctctggccttggttccctcctcctagagcgcctgtctgttgactacggcaagaagtccaa

SEQ ID NO: 311291 - DNA, 233 bp, Zea mays
cccacgcgtccgcccacgcgtccgcccacgcgtccgcgctcgacctctcgcacaaccacctcaccggcatcataccgccgggcctcttcctgctccgcaacctcacgaagctgctgctcctgtccaatgatctctccgggccgctgccgctggagatcggcaaggctgccagcctcgtgcgcttgcgcctcggtggcaaccgcattgcggggtcgatccccgcgtccgtgtct

SEQ ID NO: 311292 - DNA, 231 bp, Zea mays
gccatatctgttcctctatcactgtatatagagatctacataatggacgagaggaggactattttgatggaccgttacgaaatcgggaggcagttaggccaaggaaacttcgccaaggtatactttgctcggaacctgaccgacgggcagtccgttgcgataaagatgatcgataaggacaagatcacgagggttgggctaatagtgcagataaagagggagatctctata

SEQ ID NO: 311293 - DNA, 241 bp, Zea mays
gactgacgaggcagatcgagcaactgcacaacgaccactgcgcgcacgtcgaggagctcgtctacctcaagtgggtcaacgcctgcctccgccatgagctccgtgaccatgacggccagcccaccgccgagcaacaaggccccagcgccggctccagatacctgtcggccctggagctgagcaagagcatgagcttccggtccagcgataggggcaagcagctcatgctgaggtacggtag

SEQ ID NO: 311294 - DNA, 248 bp, Zea mays
caccaaacacagttttagcaaagcaagttgcctccatcaatgcaacccaatgaaggacagcatatccaagcgccaggagaagactatcatgaaactggtagttgatgctgaaactgacaaagtacttggtgcatccatgtgtggaccagacgcacctgaaattatccagggcatcgctattgcggttaaatgtggagccaccaaagcagacttcgacagcactgtcggaatccacccttccgctgctg

SEQ ID NO: 311295 - DNA, 253 bp, Zea mays
aaaagttttatctcaagcgaacgggggagaagaagaagaattatgttcctgtagggaggagaggggtatttggtggtgtggttctcaacatgcacctccattggaagaagcatgagaccgtgaaggtggtttgcaagccttgtcggcctggccaagtttacgagtatgctgaggaattgacaaggctcagcaaaggcacagtcattgatattaaacctaataatacgattatgttttatcgcgggaagaacta

SEQ ID NO: 311296 - DNA, 248 bp, Zea mays
gcggcgctgcgtcgccagctcgcagcgatttcaaggtgctggtgaatctggcttggccacatagatcttttttattgttgtcctcagaagacaggtttgctgagactgctttctgtctactgtaaattgatgaaattttggtgatcatatactatggaaaaaaagacagttcacgttctggctgagggtaatggtgagattgaaaatggtacgagctctagtcagaatcctgagacccttgagcatcc

SEQ ID NO: 311297 - DNA, 248 bp, Zea mays
gcaaagcgaggccaagccactaacagccaaagccttgcagaaagactagggagaaagaagataagtgagaggatgaagcttcttcaagatcttgttcctgaatgcagtaagatcattggcaaggcaatcatgctcgatgagattatcaactatgtgcagtcattgcaacgacaagtcgagatcatatccaaacaagtaaagccacccactcgatcaccatatctccctctaggatcaagcggccttac

SEQ ID NO: 311298 - DNA, 225 bp, Zea mays
ggcggcgccgcgcgtcgagaagctctccgcagcggctgagaaagcaagagctaagagcaatgggctcaccaaagaggcttcagtgccaaaggatgccaacggcaatgccatctcagcgcagactttcaccttccgtgagctcgccaccgccaccaggaacttcaggcctgaatgcttcctgggagaaggaggttttggacgtgtttacaagggccgcctcgagag

SEQ ID NO: 311299 - DNA, 230 bp, Zea mays
agacgcgtccgcccacgcgtccgcccacgcgtccgccacgcgtccggaattcggaggcgcacgccatccaacttctaccagctcaccgccgagcggaacgaaactcggcgagtgagagcggaagcggcgccgagcaaccaacccctctcctcgtccgtcgccgtctccccggaccatggccatggccgcctcctcctcccggctgctctgggcgtcccgcgccgccgcct

SEQ ID NO: 311300 - DNA, 237 bp, Zea mays
gttgctcgagattctgtacagctttcagaagactgaattctggtacgtcaatgacaaagggcagaaagacgattccgtcgcgacgccgtgccgtccggtgagccaccgcggcgaggagaagtggtggctgcccgtgccgtgcgtcgccaagcccgggctgacggagacggcgcggcgagacctgcagcagaagcgcgactgcgcgagccagatccacaaggcggccatggccatcaa

SEQ ID NO: 311301 - DNA, 145 bp, Zea mays
gacaagatacgggagtacgcggcgccggcggcggtaggcccatggctatgctgagcttcggcggcacggttctgggcgtccggccgtctccggtcgtggcggcgttcagctcccgcggccccaacaccgtggtgccggagatctt

SEQ ID NO: 311302 - DNA, 234 bp, Zea mays
gctcgccgcgctcatctccgcctacggcagggccgccatcccgcaggaggccgttaagctgttccggatgatgcccaacataggcgtcccccgcacggcgctctcctacaacgccgtactcaaggccatactctgccgcggacgcgaggccatggccaggcggatctacaacgccatgatcgcggacggggtggcgccggacgtgtccacctacaacacgctcatctgggggtt

SEQ ID NO: 311303 - DNA, 153 bp, Zea mays
gcaagccggagctcgacaaggacgagcgacgacgcacgcggagatccggcgtactgcaaattttgaaaactgaactgtaagatggcatcagcagagctttcccgtgaggaaaatgtgtacatggcgaactcgctgagcaggcggagaggtacg

SEQ ID NO: 311304 - DNA, 234 bp, Zea mays
cccacgcgtccgagaactagaaacaagtttatgaaggtctcaaaggtctatacgatctgcgattcatgatgattatggagtttacacaagtgtagacatagaaagcgatgagatttatatgtgtgaggacatcgatgcagaaggtgatcccactacatatgaaacagctacgagaatcgcaaattagtgggtctagaagatcaagcgtgactccaaagggaatatagaaagaga

SEQ ID NO: 311305 - DNA, 103 bp, Zea mays
gtcgtttttagacttgtgatattttactactgttttgacactcgttgtatttctgtatatcgcgtcagactgtgaaataaaagcagtacagtgtgtttcttgc

SEQ ID NO: 311306 - DNA, 252 bp, Zea mays
gtcggcaggaaaaccatcgatagctcccaaagattggtgggttgaggacttgtgtgaattggatgttgacctgtataggagagtcatggttgctatcaaatccaaggggagaatgtcacctgaactgataggagaggcacttaaggcatatgcggttagatggctgccagactcctacgatgcactggttgccgagggtcacatgaggaggaaccaatgtctggtcgagacactaatatggttgttgccttc

SEQ ID NO: 311307 - DNA, 254 bp, Zea mays
cccacgcgtccgcccacgcgtccggaagcagcagccaattcgctcgagttcagatcgagcgcgcgccaagcaagtcttccggccggccgcgaagagcgcaatcaagcaagacaagatggtgaagctcgccttcggaagcgtcggcgactccttcagcgccacctccatcaaggcctacgtggccgagttcatcgccaccctcctcttcgtcttcgccggcgtcggttccgccatcgcctacgggcaactgacga

SEQ ID NO: 311308 - DNA, 247 bp, Zea mays
gatcaagggacgatctcctccgtgcagacatgggcgacgacgggtcgtccggcgagatgatccgcgccatcgcggcgtcgcagctgagcttcaagtaccaggagctgcgcgcggcgacggacgagttcagccagacgaacaagctcgggcagggaggctacggctccgtgtacaggggcgtgctggcggacgggcgggaggtggcggtgaagcggctcttcttcaacacgcggcagtgggcggacag

SEQ ID NO: 311309 - DNA, 242 bp, Zea mays
ggatagcctcttctcggaggctggtattcctcttcagtacaccaataatgctgagcccaacctcctcagcggaggtgacctgcaatgtttgttatgatgatgtgccaccctcgtgtgccttggagatggactgcggccacagctactgcagtgattgttggactgaatatttcattgtgaaaattaatgagggtcagagccggcgtgtcagatgcatggctccaaagtgcaatgctatttgt

SEQ ID NO: 311310 - DNA, 229 bp, Zea mays
atgggaggcgccaaagattgacaaccccaagtgtgaagaggcacctggatgtggcgagtggaagaggccaatgaagcagaatcctgcttacaagggcaagtggcatgcacctatgattgacaaccccaactacaagggaatctggaagcctcaggagatccccaaccctgagtactttgagcttgacaagcctgactttgatccaattgctgctattgggattgagatc

SEQ ID NO: 311311 - DNA, 231 bp, Zea mays
ctctgcttgtgcttgtgcaatgcagggattgcggcaagcaggtctatttgggcgggtttgacaccgctcatgcggcggctcgggcgtacgatcgggcggcgatcaagttccgcggcgtggaggccgacatcaatttcagtctggaggattaccaggacgacatgaagcaggtgatttatactcctatacggagcatgtagcgagaaagatacatgtaattttttctttcct

SEQ ID NO: 311312 - DNA, 220 bp, Zea mays
cgacgaaggaggaacgaacggacaggttgttgcacagaagcgacatggctttcgcgcccaaaacgtcctcctcctcctcgctctcctcggcgttgcaggcagctcagtcgccgccgctgctcctgaggcggatgtcgtcgaccgcaacaccgagacggaggtacgacgcggccgtcgtcgtcactaccaccaccactgctagagctgctgcggctgctgt

SEQ ID NO: 311313 - DNA, 164 bp, Zea mays
ggacgggtccgcacataccctccctacctcgccgtcgccgtcgcatctgccatgggggcgtacaagtacgtctcggagttatggagaaggaagcaatccgacgtgatgcggttcgttcaacgcgtgcgctgttgggagtacaggcagcagccggccatcgtccg

SEQ ID NO: 311314 - DNA, 236 bp, Zea mays
aaaatatagtttgcagtcctgatgaatttacaattgcacatccatggaaagatgagaagtcgaagcaacatatatatgatcgtgtttttgatgcaaacacaagtcaagaagaaatatttgaggatactaagtacctggtacaatcagctgttgatggatataacgtttgcatatttgcatatggtcaaactggttctggaaagactttcactatttatggttcagataacaatcct

SEQ ID NO: 311315 - DNA, 272 bp, Zea mays
tgtcgacattggcaggaatgtcattcatggaagtgacagcattgagagtgctaataaggagattgccctgtggtttcccgagggccttgctgattggcagagcagccagcacccctggatctacgagaagtaaacagtgaaagtttcacatgaaaccttgagagctagaggaagcatgtcaccatttgtgctttagcaaagttttggcaaagaaataaatttggtccatggaaataaggttccaagatacagatcataatcttttctttgcc

SEQ ID NO: 311316 - DNA, 287 bp, Zea mays
attcctgcatccccctcccgccgcgccgcctcaccgccgccggagaagatgggtcgcgtgatccgcgcgcagtacaggggtccggggtccgtgttcaagtcccacatccaccaccgcaagggtccccgccgcttccgctccctcgacttcggcgagcgcaacggagtactcaaggctcgtcgtcatcgacgtcatccacgaccccggccgtggcgcgccgctcggcaaggtcactttgcgctaccgatcgagtacaagcaccagaagagtctttgtcgcagccgagg

SEQ ID NO: 311317 - DNA, 286 bp, Zea mays
gtttgtgtggggtagttcatggatgtaccttgcaactggcaattcgtcatacttgactctagccacacaccctaaacttgcaaagcatgctggcgctttctggggtggaccagattatggtgtgttcagctgggataataagctcactggggcacaggttcttctaagccggttgaggcttttcttgagtcctggatatccatatgaagagaccttgagtacattccacaaccagactagcattatcatgtgttcctaccttccaatattagatcttcaacagaac

SEQ ID NO: 311318 - DNA, 279 bp, Zea mays
  unsure (1)..(279): unsure at all n locations
cttgggaggttccacaatgaatcaacaagcatttctgatgacgatgtttctctcgataaaacatctggatcggtagcacaggaattagcacacgtacttgagcacctttgggaggttccacaattacttgaggatctccttgaccgagcgctgtaacctgaggtgccagtactgtatgcctgctgaangagttgaactaaccacaaagtcagagcctctgtcacatgatgagataattcgaatcgctgaccttnttgtacttctggtgtgaataagatc

SEQ ID NO: 311319 - DNA, 196 bp, Zea mays
gctgttcgaagctttcagccgagcaccatcgtcacagtcagtagccaagcatatttctttctccgagtgatttgcgctgagcgatcagttcatccatagcgagcggagtgagctgagctgagctgagcgagcttgcgatgcttgagagaccctgctgccatggcttcccaccaggacaaggctagctaccaggccg

SEQ ID NO: 311320 - DNA, 295 bp, Zea mays
caaatcatccttggcttcacagaaggtcatcacagttataaccgcaaaggatattccaagtggtggagaaaatattggaagcagcttcttgatgcaaggagaagcactatttgcagatccaatcgctgaatttgctggtcaaaatattggtgtcgtgatcgctgaaacacaaagagatgcttacatggctgcaaagcaagctgttgttgagtatagcacagaaaatctgcagccaccaattctgacaatagaagatgccatccagagaaacagctacatccaaattcccccattt

SEQ ID NO: 311321 - DNA, 186 bp, Zea mays
gcagcacggccgtgcctggcgccgtatacaagagcacataggcagcaagactgccgtgcagatcaggagccacgcccagaagttcttctccaaggtcatccgagaatcctctggggacaacaacaacaacagcgtaggtgctccaccgcaactccagattccgccgccgaggccgaagaggaggcc

SEQ ID NO: 311322 - DNA, 100 bp, Zea mays
accttctttctcagccagcacgagcttggaatcaagctagctcctgagagttcagctcgcttctcctccagatgtcgagcagatcagactcctgcgaccg

SEQ ID NO: 311323 - DNA, 159 bp, Zea mays
cagctggataagaagcaggaaatttatacttgggctgaggattgctcctggcttttatgaaggcattcgtgtccgagaagccaagacagaagctttccccgttaaggatcacagaggagaatgtatgtgtgatacattgttgatttactcattagatga

SEQ ID NO: 311324 - DNA, 244 bp, Zea mays
gtggtaagaaaggtgtttggactcctgtagaacaggagtatcttccatccttcctgaagactagtttggagggcaatagataagctaattgaaactcttcaggcctagtttgggtactctagtaatgaaatgaattggaatgaattgagatgtattgtgtgagtctttgatctgttagggatttaaacactctttaatccctccaaaccattcaatagggatttaaattctcttcaatctctcc

SEQ ID NO: 311325 - DNA, 220 bp, Zea mays
atcctcctcaaggtgtggcagacgatgatccaccccttcatcgacgccaacaccagggacaagttcgtgttcgtggatgaccagagcctgcgggagacgctgcggcgggagatcgacgagagccagctcccggagttccttggcgggaagatgacctcgtctccctcaaggatcagacagcagctcagccgttgcgatcatactgctaggatgtggcggc

SEQ ID NO: 311326 - DNA, 318 bp, Zea mays
ctcgagccgctattaccagttgatgttctgtttgctttttgaagaggaaagacatcctgctattacctctctgtctgcccatttgggacttttcagatatcccttaacttgtaatctacacctttcgcaggttgggaagtaattttccaccaaaagcaaatctgcctccatttcgctgtgcaatctgccaagtggaccaagagccattcgaaggtttaatgacggacaatgtaggtggctgctgctcaaccccatcaacaccatggggtggtccttatctttgctcaggctgtaggaaaaagaaggacgcgatggaag

SEQ ID NO: 311327 - DNA, 104 bp, Zea mays
agtctgtggagctatttattttctcgcccaaggttatgaagatgcagagtcaacgtcttctgtcctcacaccttatctatctaatacgattggttgtcctcctt

SEQ ID NO: 311328 - DNA, 239 bp, Zea mays
gctttgagcagcatgaggccccaggctcaagatcatttttcactgagattatagcctcaatttcggacataaagttttcgaaggatgggaggcatcttctcagtcgcgactacatgactctgaaggtctgtacatgtaacttctgatactttaaatttagataaatttgcatctggacatggcaaagagatgagaccctttgttgttttaccatggttcctttttgccaatattctatg

SEQ ID NO: 311329 - DNA, 157 bp, Zea mays
ggagatgaatgagctcaagctcaaggagatcaagaacggcaggctcgccatgctcgccatcctcggttacttcatccaggggctcgtcaccggcgtcggcccgttccagaacctgctcgaccacctcggccgacccgtcaacaacaacgtgctcacc

SEQ ID NO: 311330 - DNA, 100 bp, Zea mays
aaggaggagaacaacgatggctcaaacaaaatttcaggcgacagctgagagacctgtacaagtcctttgtttctgagtaccctatcgagtcgatcgaaga

SEQ ID NO: 311331 - DNA, 274 bp, Zea mays
caggtgttaggattcagacttagaataatactaggtgagtgcccgtgcgttgcaacggaaccgtataataatacgataacttaggtacatatgtgttatattgcaatgagaaaaaatattttggaatccatttgtgatcccatccatacataaatttggttatgttaatccaataacatacatcaattccatgctacagattttcctccttctccttggttaatccgacaatggtgcgtttccagacccgttgcctcacggttttgcaaagagt

SEQ ID NO: 311332 - DNA, 295 bp, Zea mays
gattctagggttttgctgctctccgaccccgagctccgatagccgcagcatcaggcgcgccccccctcgcgtgtgaccgagatggcgctgccgaatcaggggaccgttgattaccccagcttcaagctcgtcatcgtcggcgatggtggaactggtaaaactacatttgtgaagaggcatctcactggagagtttgagaagaaatatgaaccaaccattggtgtggaagttcatccgttggatttcaccactaactgtgtaagatcaggttctactgctgggataccgcaggcaa

SEQ ID NO: 311333 - DNA, 225 bp, Zea mays
gaaatctgacccgggtcacactccgctgctccgccatggcgatccgctccatggcctggatctcgctgctgctcgcgctgaccgttgctctctccgccctggcggaggaggagcccgccgccgtggcggagggcgaggctgtgctcaccctcgatgtcgatagcttcgacgaggccgttgctaagcaccccttcatgtgtcgtcgagttctacgtcccctggtgt

SEQ ID NO: 311334 - DNA, 287 bp, Zea mays
atcggctatgattttagttcactgttggacagtcaggagggtgttgatgtcattcttaatgtgggaggagagaggtttcatgcccataagttagtgttggctgcacggtctcatgtattcagatctcaattttttgatgatgaatctgatggagagaagagtgaggttaatgagactgatgaactaaaagagttttctattgatgatatggagccaaatgttttcaaggcaatgcttcacttcatctataggatacccttgttgatgatgatgagttgggcgcgtca

SEQ ID NO: 311335 - DNA, 290 bp, Zea mays
ctagacattgcaaggtctttgcaaaatgaagccacaaaacaaaagaccgatttattaaaggaagttgaaagtattagaatggagcttcaacgtgcaagggaggaccgtgacactaaatctgctcaagtagattctttgctggttgatattggaacatacaaagaaatgactggaaaatccgtcattgagttagatagcgccatggcaaaaacctctgccctagaggaaacatgttcgtctcaaaggaagatgatagagacattggaaattaagcttgcagctgccaatga

SEQ ID NO: 311336 - DNA, 273 bp, Zea mays
cgaggaaccccagggtacatggaccccgaatatgtggttactcaagagctgacggagaagagtgatatatacagctacggggtgcttcttctggagcttgtgaccggacgtagagcaatccaggacaggactaacttggtggagtgggcacagtcgcacctctcgtcgggagcggtctctcctgaacttgtagacccgaggatcaggggcgctgttgacgtggaccatcgccggccaccagctcaccgtcgttgacgtcgacgcggtctacat

SEQ ID NO: 311337 - DNA, 295 bp, Zea mays
gcgacgggcgcgggcaccgtgctggactctggcaccatgttcacccggctggtggcgccggcgtacgtggccgtgcgggacgaggtccggcgccgcgtcggcgcgcccgtatcctcgctgggagggttcgacacgtgcttcaacaccaccgccgtcgcgtggccgcccatgacgctgctgttcgacggcatgcaggtgacgttgccggaggagaacgtggtcatccacagcacgtacgggaccatcagctgcctggccatggccgcggcgcccgacggcgtcaacaccgtgctca

SEQ ID NO: 311338 - DNA, 261 bp, Zea mays
cggacggtggtcgagacgcgtgggccattctcagccgccgccaatcccttcccgtgctccgcaaccgctgagtgagaagaagagatggccggcaaacgcgatggcccacctatcgggatcgatctcggcacgacgtactcttgcgtcggcgtgtggcagcacgaccgcgtcgagattattggcaacgaccagggtaaccgcaccacgccctcgtacgtcgccttcaacgacatcgagcggctcaacggagatgcgggcaag

SEQ ID NO: 311339 - DNA, 256 bp, Zea mays
cccacgcgtccgctcgacctcggccccgatgccgtgcttccccgcgaactcgaggtcatcaagatggactacgtcaacacggccatggagcggctcgagaagaacgacgtccgctaccgcttcgtcatcgacgtcgccggcagcctcggctctgccgcctaggcatggctgcaaaggtttcaatcagagcccagccgcaataatttgttagctaccgaatgaatgatggtctacgcttgttgatgagttggtgctt

SEQ ID NO: 311340 - DNA, 268 bp, Zea mays
attaaatctgccattccagctgacgtaaaccaattcattactgcttcacaagctggttgcgccatggtgaaggagagaacccagaacatgcctgttgctcgttcgtccaagttcgtaaagtctatcatcctctcaccagaagctttcatcatctgtttccaccattcgtcaatctgttttcctttttgaagctgatcactgttcaaatgttctctaatcgaagtgttgaaagaccaaatgcgcagagtctgactactactgatgaaat

SEQ ID NO: 311341 - DNA, 173 bp, Zea mays
gggatggccgctggtggagccgcttccttcgtactgccggggcagggagctgccgggaccacggtacgccagcttcatccacggggacctcctccgcgacggcgtcattagaggtgacaggggagtcatcgacgttcatggttaggtctggtggaacatgtgtatgattcgga

SEQ ID NO: 311342 - DNA, 189 bp, Zea mays
aagaattggacactgccttagctatgttttgaattcatgtcactatatgcaatgttgtgatttcagctggtaccttaaatctgaagatttagtatctttgttgggttccttctaaaaaaaaaaaaaaaaaaaaaaaaaaaaaaaaaaaaaaaaaaaaaaaaaaaaaaaaaaaaaaagggcggccgctct

SEQ ID NO: 311343 - DNA, 220 bp, Zea mays
tgcttcgtcaggggatgcgacgcgtcggtgatgctgatggcgccgaacggggacgacgagagccacagcggcgcggacgccacgctgtcgccggacgccgtggacgccatcaacaaggcgaaggcggccgtggaggcgctccccgggtgcgccggcaaggtctcgtgcgcggacatcctcgccatggccgcacgtgacgtcgtccccctggtgggcggtc

SEQ ID NO: 311344 - DNA, 249 bp, Zea mays
gccttcctggagatgatcaaggaggaattcaacaggagatattcaggtggcgaacaggaacggctacagccaacagtctcacccgagatttcgggcccaggcttagagaccagatgcagtactgcacggatcacccagaggaggtgagcaagctgtccagagtgaaggcccaggtggatcaggtgaaaagcatcatgatggaaaacatcgacaaggcctttgatcgcggacagcagatcgacgggcttt

SEQ ID NO: 311345 - DNA, 152 bp, Zea mays
gcacttcatccgctgggacaccccgcccaatcagcacccgctctacctcaccgccagggactaccgccggatgctgctcagcggggccgccttcgcgcgcaagttcagggacggcgaccccgtgctggaccgcatcgacaggtacatcctcc

SEQ ID NO: 311346 - DNA, 271 bp, Zea mays
ccgcgaatcggatccgccgacaaggcagagggaagagatggggctcacgttcaccaagctgttcagccggctgttcgccaagaaggagatgcggatcctgatggtgggactcgacgccgccggaaagaccaccatcctctacaagctgaagctcggcgagatcgtcaccaccatccccaccatcggattcaatgttaaaactggggaactaaagaacgtcgtcttcagtgtcgaggatggcggaggctgggacaagttgaggcaactgtgg

SEQ ID NO: 311347 - DNA, 232 bp, Zea mays
gggtcatagtaggttttttgtagaattttatgcaggaatggcttgatactcgttccaccttcctgaaattaaatttgatgcgcacaataatataaaggctcacttgaaattttaactggcaaagcatgcacggatgcgaaacatttgaaaactggttcttgtatgcgcctgcctgactcttgatatggttatctatctctctgcagcgttggtcagttcactctgcagaggt

SEQ ID NO: 311348 - DNA, 232 bp, Zea mays
ccgactgctaccgcacgccggaccccgtccacggcaaacggaaccgcacctacatggacgtcgtccgctcatgcctcgggcctaggatggtggtggtgtgtggactcgcacagtacgcgatcctctgggggacaatggtgggctacaccatcaccactgccacgagcatcatggccgtcgcgcgcacggactgccgccaccacaggggccacgacgcggcctgcgcctcgtc

SEQ ID NO: 311349 - DNA, 254 bp, Zea mays
ctatgatactgctatctatctatgatactactatgatactgctcctaattcttggagcttgagctggagctgtactaaacaggccctatgttaggtgcattgacaacaatggtgacagtttgctgttgggctttaggttctggagtctttacttggagacaactttgttccaaatgacacagagcttcacgccgatggtgagtactgccagattgtcacaggacctaacatgggaggaaagagttgctacattc

SEQ ID NO: 311350 - DNA, 261 bp, Zea mays
ctttaatttcagagctaattgaagaatttggtaatggtggcaaaggaaaaattaaggagtctgcttccacttccaagtctcaagcaacagcaactagcagtaggtgcctctccaaaggtatatatattttgttgtatgagcccataactgtttactggtatgactatgagcgcatgactgtttattgctatgagctgcactgtttacttatactccatccgtttctttttaattgtcgctggatagttcaattttgcacta

SEQ ID NO: 311351 - DNA, 257 bp, Zea mays
ccactctcggcggcgcgcgcatctctcctctcttcttgcccttccttcccccaacccacacagccaggtgggaagcttgtgtaccaatacaccaagaagagggcgagcggtcccaagtgccccgtcaccgggaagaagatccaggggatcccccacttgagacctgccgagtacaagaggtccaggttgtctaggaaccacaggactgttaaccgtccttatggtggagtactctctggaattgctgttagggagag

SEQ ID NO: 311352 - DNA, 255 bp, Zea mays
gcgagagagccgcgcacctatctggcaagcgacgccgcggcctcgatcggagtcggaggcgaacacccccatggcggcggctggcggcggcgcgcgtccttgtagccttttgcgccgccgccctctcgtcggccacggtgaccgtgaacgagcccatcgtcaacggcctctcctggagcttctacgacgcgtcctgcccgtccgtcgagggcatcgtgcgctggcacgtcgccgacgccctccgccgcgacatcg

SEQ ID NO: 311353 - DNA, 250 bp, Zea mays
gacgagttcatggaggcgtactgccgggtgctggagcggtataaggaggagctgtcgcggccattcgacgaggcagcgtccttcctcagcagcgtccggacgcagctcagctccctctgcggcgccgccgcctcgctctcagatgaaatggtagggtcgtcggaggaggacgaagcatgctcgggaggagacacggaggcgacggagccggggcagcaggagcacagctcccgcctggcggaccatgagc

SEQ ID NO: 311354 - DNA, 257 bp, Zea mays
tgtggattacgagtacaagtcggtaaaccctaggacagatccaggtaactgcaacaacttgaaacaattcgtgtattgcgattatgaaaaaatcaatccaatcaaatatattccagcattagtagatggggacatagtcgtttctgattctcttgccatctcattgtatttggaagataagtatcctgagcatccactcctgcctaaagatctcaagaggaaagctcttaatcttcagattgcaaacattgtttgtt

SEQ ID NO: 311355 - DNA, 170 bp, Zea mays
acgggttcttgctgcctcttcgcatacatgtgaatactgtaaataccgttgcctgaataaaagcttcagcctgcaagctacaagcaatataccaatgttctgactctgaagcactggttttacatgtctctacgtgtatatgtgtatgtgatacatgacagattactttc

SEQ ID NO: 311356 - DNA, 262 bp, Zea mays
gaggccttcaacgggaaggcgacgaagaaagcgcggtcccatggcaagaagtttcaggtctcgatccaacaagagacgtctcgtattctgggcaatcttggctgggcttacatgcagcagaacaacttcgaggccgccgagctggtgtaccgcaaggcgcaagctatcgagcccgatgccaacagggcgtgcaaccttgggctgtgcctgatcaagcagggcaggcacgacgaggcacggcaagcgctcgaggacgtccgat

SEQ ID NO: 311357 - DNA, 263 bp, Zea mays
caactcgctgctgaccttcatcgacaaggcagtcgacgagggcttcatcaaccccagcgcccgccgcatcatcgtgctcgcgcccaccgcgcaggagctcatggacaagctcgaggagtacgagccttaccacgacagggtggcgtccacgctcagctgggagaccaccatggaccacctggcctactgacgcccacgccgccagagccgccagcagacaactgggacatctctgatccatcggtggcattcaggaaacatgc

SEQ ID NO: 311358 - DNA, 270 bp, Zea mays
cgctgcctcgtgcaggtgtcgtacgccatcgggtgccggagcccctgtccgtgttcgtcaactcgtacggcaccggcacgatccccgacaaggagatcctcaagatcgtgaaggagaacttcgacttcaggcccgggatgatcagcatcaacctcgacctgaagaagggcggcaacaggttcatcaagaccgccgcctacggccacttcggccgtgacgacgccgacttcacctgggaggtggtgaacccctcaagttcgacaaggcatc

SEQ ID NO: 311359 - DNA, 260 bp, Zea mays
cagggtgtcgtcggcggtgtccaagaccgtggcggcgccgatcgagcgcgtcaagatgctgctgcagaaccaggacgagctgatccggaccggcaggctgtccgaaccgtacaggggcatcggcgactgcttcggccgcaccgtcagtgacgagggcttcctgtcgctgtggcgcgggaacaacaccaacgtcatccgctacttccccacgcaggccctcaacttcgcgttcaaggactacttcaagggcctcttcaact

SEQ ID NO: 311360 - DNA, 181 bp, Zea mays
ctactccaccgccgactccgagatcgaagtagccgtcgatctcggagtcgcgctacttcgtcccagccgggacgcgcgtcctcgtcaacgcctgggcgctcgggagggaccgcacgacgtgggacaagccggaggagttcatgccggagcggttcgtgcaggaaccgggcgccgtggacgt

SEQ ID NO: 311361 - DNA, 265 bp, Zea mays
gtaaaaaaaaaagattgatttcatactgttttataacatgtgtaactaactgcacccttaaatattattggtcagcaaaaatattggatatttaacgagtaccgttgaatagcccttggcggtcaggacctcgttagatgggaaaaatatattacaggtcgcaatacattatggattgagaggaattgaaggggtttcaatcactagcaagtcaaaatctcctccaatctgtatcaatcccctccaatccatatgtattgaaaat

SEQ ID NO: 311362 - DNA, 160 bp, Zea mays
cgctggacgccttcgacgtcatcgacgacatcaaggaggcgctggagaagcgctgcccggggaccgtctcctgcgccgacatcctcgccatcgccgccagggacgccgtctcgctgaccaccaaggtggtgaccaagggcggctggagcagggacggcaa

SEQ ID NO: 311363 - DNA, 271 bp, Zea mays
gttccaaaaagtccctgcagaatgttttccgagacagaagaagccatccaaagatggccatggtaattgatgaccgacttaatgtttgggatgataaagatcaacacagagttcatgtcgtccctgcatatattccatactatgctccacaagcggagatggccaatgctgttccagttctatgtgttgcaaggaatgttgcttgcaatgttcgtggtgggtttttcagagagtttgatgagaatctattgaggaaagtgttcgaactata

SEQ ID NO: 311364 - DNA, 215 bp, Zea mays
ggacaatcaccgcacggcttccagacggagggctcgtacctcttgcgggcgcttcagcatgcagatgaagcgcgtcggcagcgactccgcgggcaccgtcagggccttctacctgtcgtcgcggaactccgagcacgacgagatcgagttcgagttcctgggcaaccggacggggcagccgtacagcgtgcagacgaacgtgttcaccggcggga

SEQ ID NO: 311365 - DNA, 262 bp, Zea mays
caagtacccaaacggctcgcgccctaaccgcaccgccgggaaggggtactggaatgcgactggggccgacaagtcgatcgtgcccatgggcagcaccagggcggcagggatcaagaaggcgctggtgttctactctggcaaggcgtccaggggcgtcaagacggactggattatgcatgagtaccgcgtcgctcaagcggaccacaccctggggaagaagggctcacataagctggacgagtgggtgttgtgccggctgtat

SEQ ID NO: 311366 - DNA, 259 bp, Zea mays
ggcctgctgggggcctccctggtgctgagcctgagctggtggctcctcgtcgccgcgcagttcgcgtacatcgtgatgagccccaggtgccgtcacacctggaccggcttcacctggcaggccttctcgggcctctgggacttcctcaagctctccgccgcgtccgccgtcatgctctgcctcgagacctggtactatcaggtcctggtgctcatcgccggcttgctccccaaccctgaacttgcattggacgcgctgt

SEQ ID NO: 311367 - DNA, 258 bp, Zea mays
cctaattgagcttgagcctaacaacagtgggaactacatactcctgtcgaatatttttgcagaacaggaaaggtggggtgatgtgagcaaacttcgaaaggctatgagagaaaggggactgagaaatgtgccaggggcgagttccattgaagttgatggcatggttcatgagttcacttccagggattggtctcatcctttcatacatacaatatgtgaagtgttatgtgagatcgacactaacatgaaatctgttgg

SEQ ID NO: 311368 - DNA, 126 bp, Zea mays
cggatccgtggcggcgtgatctcgctgggcgtgtccatgaaccgcgtcgacttctcgcccggcggcaccaatccgccccacgtccatccgcgcgctattgatgtcgggctcgtcatccgcggcgag

SEQ ID NO: 311369 - DNA, 266 bp, Zea mays
  unsure (1)..(266): unsure at all n locations
cggcctcgtcaaggcgttccagaccgcctacttcgaccggtacggcggcggcgccaactcgctcgcctccggctactcccgccgcgcgcggctcggcgccgacatcgtcggcaccttcgtgctcgtgtacaccgtcttccccgccaccgacccgacgcgcaacgcccgagactcngacgtccaggttctcgctgccctccccaccggcttcgccgtcttcatcgtccacctggccaccatccacgtcaccggcagtggcatcaacc

SEQ ID NO: 311370 - DNA, 277 bp, Zea mays
gccccgccgcagaaatggcgctgccgaatcagcaggttgtggattaccccagcttcaagctcgtcatcgttggcgacggtggaactggcaaaaccacatttgtgaagaggcatcttactggcgagtttgagaagaaatatgagcccaccattggtgttgaagttcaccctctggattttagcactaactgtggcaaaattcgcttctattgctgggacactgctgggcaagaaaagttcggtggcctcagggatggctactacattcatggtcagtg

SEQ ID NO: 311371 - DNA, 271 bp, Zea mays
agaaaatttagagaagtacttaatcacctactaacctgtttaaaaatgataaacccctctgtataccccattaagatagagtttgccatttaattcaccttgtgcttaaagttaaagaaaatagaaaaggtaatttaaataaaggaccagggagcacccacatttttgttagtttacttattcagtatagttcactagaaaatttattatacccttgtttagtacaaaataaatgggataccttttattttaagaaaacaagaaaaactta

SEQ ID NO: 311372 - DNA, 280 bp, Zea mays
gaacgtcgatgaagggttacgtggttatttgacaaagtatgactgcagttcagctgatgtaaaccccattggaagtgtaagtaagcaagatctgagagcttttttacgatgggcagcaattcatcttaagtattcttccttggccgaggttgaagctgcaccacctactgccgagcttgagccaatacgagcaaattacaatcagttggatgaaatagacatgggaatgacatatgaggagctgtctatatatggaaggttaaggaaaattttccgatgt

SEQ ID NO: 311373 - DNA, 260 bp, Zea mays
ggaggatgctggttttgattggaaaattcttggtccagatgttcaagaggttgatgatgttgcatgggtttgcgatcaggatgcttatgcttgtagcggtcagaaatgctctgctcagtctgttctattcatgcacaagaattggtcttctagtggtctgcttgagaaaatgaagaaactttctgtttggtggtgaaccgttagcgaatcactcaattcccagaatttatggtgccatgaagcctactgctgtagttgtt

SEQ ID NO: 311374 - DNA, 262 bp, Zea mays
gtctggtggggtttggcatcctattctcattccttggtgttatccttttcttcgataggggcttgttagctctgggtaatattttctttttaactggagtgggtctgttactcggttggcaatctatgtggcagcttttcacaaagaaggcaaaccttaagggatcagtgcctttcttcattggtttgtttcttctgtttgtccgttggcctgttgctggtataatcatggaactatatggatcttttgtgctcttcagtgg

SEQ ID NO: 311375 - DNA, 247 bp, Zea mays
ggaacctccacgtcgcctgacctagggcacaggcccgccacgtcaacaggaagcgccatcatcaccctaccccgagccgactcgggccgcagagaacaagaccgatgtcccatctggctagctccgccagataggcaatgatggcgccccgctagccctgtgacgacggcggctctcagctcccttacggaagcagggggacgtcagcaaggactcgaccgctctgatagctgtctctccgcaagct

SEQ ID NO: 311376 - DNA, 252 bp, Zea mays
ccagaagaagagagctgagaagccagaggtccgcgatgctgctagagaagctgctcttcgtgagatcaaggagcgcatcaagaagaccaaggatgagaagaaagcgaagaaggcggaggtgagcaagtcccagaagacgcagacaaagggtgcggtccagaagggttccaagggccccaagttgggcggcggtggtgggaagcgctgaaataacttaaggcctgtttggaggctgacgtcgagcgccacacc

SEQ ID NO: 311377 - DNA, 260 bp, Zea mays
agctggtgccctacaaccccggcttgaccgggtggccctcgccctgggagtgcttgatggcctcgccggtgatcctgttgacgagggccacccggtcaagctggtgccctacaaccccggctaccagtacgagtcggtgctgtggacggagagccgcgacgtcggccacggcttccgctgcgtccgcatggtcaacaacatctacctcaacttcgacgccttccacggcgacaatgaccacggcggcgtgcgcgacggca

SEQ ID NO: 311378 - DNA, 239 bp, Zea mays
attcgactggctcgccttctccgacctctccggcttcgcgcgcctgtcgcttggctccgccgtcatgctctgcctggagttctggttctacatgttcctgatcgtcatcgtcggcaacctggagaacgctcaggtcgccgttgctgcagtctccatttgcacgaacctgttccggtggcagatcatggtgttcttcggattcaacgcggccatcagcgtgcgggtgtcgaacgatctgg

SEQ ID NO: 311379 - DNA, 255 bp, Zea mays
ggcgcgcgccggtcatcgcgcgccacgacatgtacgacaccaacacgggcgccggcggggacggcgagtacctgccgctgtccatcttctggcaggtgccgcagtacgtggtggtgggtgcgtcggaggtgttcacgttcataggccagatggagttcttctacgaccaggcgcccgacgcgatgcggagcctctgctcggggctctccatgacgtccttcgcgctcgggaactacgtcagctccgcgctcgtca

SEQ ID NO: 311380 - DNA, 259 bp, Zea mays
acgtacctgtagatgttagtgactaaaaaataattaaaacaattaaacattgatcgctaaattgtagtaaagaaaaaaagaattgtagaaaagaaaaaaagaattatggtaaagaaaacgaattgtaaaaaaaggatttttaaggttttgaaccttgaatctgtttgactcaatttttaaggttaatcattttgtatataattatttgcaaaaatctcacttttattgttttattgtgacacacgtttgatttaagtgg

SEQ ID NO: 311381 - DNA, 254 bp, Zea mays
ccactatgccggcggacggggaggcgctggcgccggccgtccacttctggggcgagcacccggccacggaggcggagttctactcggcgcacggcacagagggcgagccctcctacttcaccacgcccgacgcgggcgcccggcggctcttcacgcgcgcgtggaggccccgcgcgcccgagcggcccagggcgctcgtgttcatggtccatggctacggcaacgacatcagctggacgttccagtccacggcg

SEQ ID NO: 311382 - DNA, 262 bp, Zea mays
atggattgaagagagatgtggctgcacatgtggctatgtgcgatgtgtgtcaaagagttaaggctgaacactagaggtcagctggactactgcacccactgaagatacccgagtggaagtgggaagagattggcatggattttattactggattgcctcgcacccagaaaggatatgatgctatatgggtgattgtgaatagattgactaaagtagctcattttattcctgtcaagactacttataaaggttctcagctagc

SEQ ID NO: 311383 - DNA, 264 bp, Zea mays
  unsure (1)..(264): unsure at all n locations
atcgcgcactnggagttcttctacgaagaggcgccggaaaccatgaagagcacgtgcacgtcgctcgcgctgctcaccatcgccctgggcagctacctcagctccttcatctacgctatcgtggcagcattcacggccacggcggacagtcccggatggatctccgacaacctcaaccagggccatctcgactacttcttctggaccatggccgccatttcaacgctcaacttcgtcgtgtacagcgtgttcgccaggaactac

SEQ ID NO: 311384 - DNA, 248 bp, Zea mays
agccttcctactgtcccgatggcccgcacgaagtagacggcgaggaagtccactggcggcaaggcgccaaggaagcagctggccaccaaggcggcgcgcaagtctgccccggcgaccggcggagtgaagaagccccaccgtttccgccccggcaccgtcgcgctccgggagatccgcaagtaccagaagagcacggagctgctgatccgcaagctgccgttccagcgcctggtgcgtgagatcgccca

SEQ ID NO: 311385 - DNA, 262 bp, Zea mays
gtgaaagacagggcaccggcagcgacgatgtcggggcgcggcaagggcggcaaaggtctgggcaagggcggagcaaagcgccaccgtaacgtgctccgtgacaacatccagggcatcaccaagcccgcgatccgtaggctggctcggaggggcggcgtgaagcgcatttcggggcttatctacgaggagacccgcggcgtcctcaagatcttcctcgagaacgtcatccgcgacgccgtcacctacaccgagcacgcacgcc

SEQ ID NO: 311386 - DNA, 145 bp, Zea mays
acggcgccgtcaagtcggtgatgcagtccgccatcgccagggagaagcgcatgggggcctccatcctccgcctcttcttccacgactgcttcgtccagggctgcgacgcgtcgctgctgctggacgacacgcccagcttccaggg

SEQ ID NO: 311387 - DNA, 225 bp, Zea mays
cgctgtaccgcgccgtgatcgccgagttcatcgccacgctgctgttcctgtacatcacggtggccaccgtgatcgggtacaagcaccagacggacgcgtcggcgtctggcgccgacgcggcgtgcggcggcgtgggcgtgctgggcatcgcctggtccttcggcggcatgatcttcgtcctcgtctactacaccgccggcatctcggggggccacatcaaccccg

SEQ ID NO: 311388 - DNA, 254 bp, Zea mays
  unsure (1)..(254): unsure at all n locations
atgtccatcatgaactcattcatcaacgacatggccttggcggagatgccgatgtccgggtgcacctgcttcagcaccttgacatcggcatctcctccaaggcatgtccatcatgaactcattcatcaacgacatcttcgagaagctcgccggcgatgcggccaagctcgcccgcgtaataaagaagctcagcatcanctcccgggaaatccagacctccgtccgnctcgttctacccggcgaactcgccaagc

SEQ ID NO: 311389 - DNA, 258 bp, Zea mays
cgacccgtcccacgtctccattggcccgtaccaccacatcaagaacccaaagctcgtcaggaagcaggacaagatccggagcctcaacaccgttatgtcggcggcggcgagagtcgacgttgagtcctacatcgatgtggtcgcgggcatcgaggccaaagccaggagctgctacgccaacacgttcgataaccacatagatagcaacgactttgtgcgcatgctgctgctcgacgcatgctacgtgcttgtcaattt

SEQ ID NO: 311390 - DNA, 230 bp, Zea mays
ctttgactcgagttgcaaggaataaggtgataaagatgtgcaaagtgcaattgagtcaccatggagaagatgaagcaaagtggtaaagagaagaagagcttcacatagaatttccccatctgtttcctagaccttctataatctcgaggacgagattatttttaatgggggtaggatttgtaacacccactttgtaattgctaggaataataccagtagaggaacaattt

SEQ ID NO: 311391 - DNA, 105 bp, Zea mays
gacaaattactctagcagactagcacgcaaactgaatcgcgtttagtttagtttttttggccccggataaaggctgctagcttggttgtagtaatggctggctgt

SEQ ID NO: 311392 - DNA, 247 bp, Zea mays
cagacgcgtgggcggacgcgtgggcggacgcgtgggtccaagcgcccccgcgagccagctccggcgaagtcgacagcaccaagcatggcggacacgacggcgtcacccgcggtgacgctccgcacgcgcaagttcatgaccaaccgcctcctctcccgcaagcagttcgtgctcgaggttctccaccccggccgcgccaacgtctctaaggcggactcaaggagaggctggctaagatgtacgaggt

SEQ ID NO: 311393 - DNA, 241 bp, Zea mays
ggtcgagcgcgcgtccggctccagcaggttttcgtttcccgacaacggatcaaacgaggcactgtttcacgctgtgtgttggataccacaggtgtgtgggtgcaaaacgtggggacgcacctgggtgtggtgagtttgccgagtagtgtcggtccctgtgcccaggtggatgggttggactgtggagcgagcagcgtgagaaatggcagcttgcctggaggtgtgtagtcctacagtgcag

SEQ ID NO: 311394 - DNA, 148 bp, Zea mays
gcggcttccactacttcaccttcccgtcgctcgtgggccacacgctgccctacgcgtgggtcgggcacagcggcgggcgctgcgctgacgtctgcgcgtacccgttcgcgctgccgtcgtacatggcccgaagcggcatggcggcgct

SEQ ID NO: 311395 - DNA, 262 bp, Zea mays
atgctacgaacaatggcatccctgtgctcgtatttcccaagtccaagtctgcgcccgaggggatttcggttgctcaactgctggatactctgaggggaaacaatgtagactttgttcttcttgccggttacctgaagcttatacccactgaattgatccaggaatacccaaaatccatattaaatatccacccttctctccttccggcattcggagggaaaggtttctatggttcaaaggtgcataaagctgttattgcctc

SEQ ID NO: 311396 - DNA, 247 bp, Zea mays
gtcgttcaacgccaagctcggggacttcggcctagcgcgcctcatcgacgacggccgccgctcgcacaccacgggcgtcgccggcacgttcgggtacatggacccggagtccatgctcgccgggaaggccagcgtcgagtcggacgtgtacagcttcggcgtcttcctcctagagatcacgtgtgggcgtcggccggcggtgctcgtgagagaggaggactacgtccacctggtgcagtgggtctgg

SEQ ID NO: 311397 - DNA, 264 bp, Zea mays
agggcactgcttgaacacatacagaaattactggagcagttgggaaggtatccaacgtagagggatgatgcaggacctaagctgggataacgctgctaaactctacgaggaagttcttcttgccgccaaatatcagtggtgactgttgttgaactgtccaaggaactgttgatatttgtcattcatagacctgaaggctttctgtcgcatagaagtcaccgactgtttcaattcttttggtgactgcttcacacagctgctgca

SEQ ID NO: 311398 - DNA, 149 bp, Zea mays
cgagaaccccgccaagctcgttcacctctacattaactccccggggggcgtcgtcacggcgggcctcgccatttacgacacaatgcagtacatccgctcccccgtcaccacgctctgcatcggctcagccgcctccatggcgtcgctac

SEQ ID NO: 311399 - DNA, 226 bp, Zea mays
cctgaattgaacgtggtagtgtttatgatgattagatgtctaggctttctatgtttgcgtgaatcgtttctgctggattgtccattgtcatcaccaccttatgttcaatactttaaatcttgcgcaggtgatcgtcggtgctgtcggtggtggtgcaatgatggtgagcggaggtggcggcggcggtgctgctgcatctggtggtgctgctgccgaggctcccaag

SEQ ID NO: 311400 - DNA, 262 bp, Zea mays
aggtggtggtgcaccgggacatcaaggccagcaacgtgctgctcgacaaggagatgaacgcgcggctgggtgacttcgggctggcgcggctgtacgcacacggcaccgacccgcacaccacgcatgtggtgggcaccatggggtacatggcgccggagctgggccacacgggcaaggcgtccaaggcgtccgacgtcttctccttcggcgccttcatgctggaggtggcctgccggaggacacccgtggtgcaggacgagcg

SEQ ID NO: 311401 - DNA, 250 bp, Zea mays
atccaaattgtgggtgatgatttactcgtcacaaacccaaaacgtatagcagatgctattgataagaaggcttgcaatgctctgttgctaaaggtaaccatttactaaacaatctgaaatggagtactatatacccttaattttttttgcttccttccagttctcaacatcatgactgcagaacagtatctagctcgagataagcttgcactgcaagactaaatgtctttgttaaagttggtgtaccttt

SEQ ID NO: 311402 - DNA, 263 bp, Zea mays
cgtcattcagctaccctgagttatcttccaaaccgaaatggtggtggaggaccctagcatgtgtaccttatcttctgccactgcacaacatgtgggggcatgcagatgctatctatcagcttcatccatacttgcaaagatttagcctgccttacgctttcatcgatacaatggctctgctccctgggtggcttttcctggcgatcttcatgactatatacttctttgttgtgaggcggaagtggtcgccacacttcttgcgc

SEQ ID NO: 311403 - DNA, 244 bp, Zea mays
atgcagcatacctgaggattcatggagagacagtgcttgatgaggcaatttcttttactacgagatgccttcaagatagattagaacatttggaatcaccaatagcagaggaagtgtcgtctgcccttgataccccactttttagaagggttggaactttggaaatgaaggattacattcctatctacgaaaaggacgctaaacaaaacaaatcaatattagagtttgcgaaactggacttcaa

SEQ ID NO: 311404 - DNA, 262 bp, Zea mays
aaatcttttgtgcaggtgaagtggcaaagcttttttctgatgctggtgtcatatgcattgctagcttgatatctccatacaggagagatcgtgatgcatgccgtgctctacttccacattctaactttattgaagtatttattgatttgcccctaaaaatttgtgaagctcgtgatcctaaaggcctgtacaagcttgcacgtacaggaaagattaaaggtttcactggaattgatgatccatacgaaccaccaattaatgg

SEQ ID NO: 311405 - DNA, 169 bp, Zea mays
ctcgaacgtagatgttggcggtgttcatctggcaggtggtggaggtgccggcggagcttgtggcggcgggcagccggactccgtcgcccaagactgatgcgtcgcagcttgtggggcgcttcctggtcgcctccgatccggccgtgtccgtgcagctctgcgaccacgg

SEQ ID NO: 311406 - DNA, 247 bp, Zea mays
gtaagacctgcccctgtaataaccgaggaagtgacagcttcccttgaagaaatgataaagaaaagaatcgcagagagtcattttgatgatgttgagaagccgtctctcttgccatctaaagctccaaaggagcacaaggaactggatgaaactaagagcaagaagggtcttgctgaactgtatgaggatgactatgcacaaaaagcaggcattgcacctgccccactttctatttcagatgaactaa

SEQ ID NO: 311407 - DNA, 235 bp, Zea mays
gggccgcagcagcaacagcagctgcgccacaacctgccgccgccgggccgatgccggcagctcagcctgtgcagcaggaagccgaactgcccaagaccgccccgtcggtaaacaggcctccggagaagcggcagagagtcccgtcggcatacaaccggttcatcaaggacgagatccagcgcatcaaggccggcaacccggacatcacccaccgggaggcgttcagcgcaccgca

SEQ ID NO: 311408 - DNA, 216 bp, Zea mays
ggtttcaatgttgaaactgttgagtacaagaacattagcttcactgtctgggatgtcgggggtcaggacaagatcagacctctttggaagcattacttccagaacacccagggtcttatctttgttgtggacagcaatgaccgtgaccgtgttgttgaaccagagatgagctccacaggatgctgaaccgagatgagctacgtgatgctgtgctgc

SEQ ID NO: 311409 - DNA, 240 bp, Zea mays
gccgacgacgaccagcagacggttgactggaggcagaaatgcgcggtcaccgggatcaagaaccagtgccagtgtggttagtgctgggccttcgctgcggtagcagccgtggaaagcatccaccagatcacgacgagcaacttagtggcactatcgggtcagcaggtgctggactgcgagaccgacggtaacaacggctgcaacagcggctacatcgacaacgccttccaatacatcgtc

SEQ ID NO: 311410 - DNA, 226 bp, Zea mays
agccggagcccctgtccgtgttcgtcaactcgtacggcaccggcacgatccccgacaaggagatcctcaagatcgtgaaggagaacttcgacttcaggcccgggatgatcagcatcaacctcgacctgaagaagggcggcaacaggttcatcaagaccgccgcctacggccacttcggccgtgacgacgccgacttcacctgggaggtggtgaagcccctcaagtt

SEQ ID NO: 311411 - DNA, 216 bp, Zea mays
aattcatgcctatctcgatctccttcttcctggtgctcagcacggtggtctggatcgcgtacggcgcgctgaagaaggacgtgttcgtagcgttccccaacgtgctgggcttcgtcttcggcctcgcgcagatggcgctgtacatggcgtacagaaagcacgcggcgacgctggtgataataccggaacagtccaaggaagaagtgaacgagggca

SEQ ID NO: 311412 - DNA, 280 bp, Zea mays
gaaagatctaaagaaagagcttcagaaagttgttgaatggcccatcaagcatgctgctgcattttctagacttggaataccaccagtccggggggtgctgttgcatggcccaccaggggggtccaagagtaagcctttccaagcctcagcgaagtcgtccaagcctccttcttttctttgagtggtgcagatttatattccaagtatgttggagaaggggaagctctgttgcgtagaacatttcagaaagctcgtcttgcttctcccagcattatatttt

SEQ ID NO: 311413 - DNA, 272 bp, Zea mays
catcgtttctggataaacaggccgaagaaaggtcctgggacatcaacctaggatggttcttagagccagtggttcgtggtgactaccccttctccatgaggtcactggctaggggatggggaaacaccctcacggggtggtacggaggggaagacggcgggggtcccaaaaaaattggggggcaaaccacgacacctcacggttctccaaaaacatcgatatgcaccaaactactcacctgtgctcaacactgacgacgcctacgccagtca

SEQ ID NO: 311414 - DNA, 261 bp, Zea mays
tctcggagagcctgggcctagaggcgagctacatgaaggaggcgctgggcgagcaggagcagcacatggcggtcaacttctacccgccgtgcccggagccggagctcacctacggactcccggcgcacaccgaccccaacgcgctcaccatcctgctcatggacccggacgtcgccggcctgcaggtgctccacgccggccagtgggtcgccgtcaacccgcagcccggcgcgctcatcatcaacatcggcgaccagctgc

SEQ ID NO: 311415 - DNA, 267 bp, Zea mays
tgctaacttcaagagagttgaaattactgaagatgcaaaaccagattggacagacaaagaaactcttcacttgcttgaggctgtcttgcattatggggaagactggaaaaaggtgtctgaacatgttagtagtcggtcagaaaaagattgtattgcaagatttataaggctaccttttggagaacagttcatgggacacaaggaggatagaatgaggtttgagaatactgatgagcctggagcaaatgtctcaaaacgactacgtct

SEQ ID NO: 311416 - DNA, 245 bp, Zea mays
gttcttatgcgtggccattgggctttgggctggtctcgccatcggcttcaccaccgagtacttcaccagcaacgcctacagcccggtccgggacgtcgctgactcatgcaggacgggcgctgcgaccaacgtcatcttcggcctcgccctcgggtacaagtccgtcatcgtgcccgtcttcgccatcgccgtgtccatctacgtcggcttcacgctggcatccatctacggcatcgcggtcgccg

SEQ ID NO: 311417 - DNA, 252 bp, Zea mays
ttttagaaggtcttggatatgaaaggccttcagtaaaaataccagtctctgttatgatgccagtggctcatgttgtagaatggacttaccagaaatttgccaagtatggaatgaaagttcctcagctgaccccttcaaggatcaggctgctttcatgtaacaggacattcagttgctcaagagcaaaggagcagcttggttatgaacctctcgtgtcccttaaggatggagtgaagagaacagtagagtcgt

SEQ ID NO: 311418 - DNA, 266 bp, Zea mays
gggttggtgaatcgacaggtgtcttgcagcgtcttgcaaggccttttgttttgttacggccgcgcgcctcgtggcgcgcctcgggctcgcgataattggcgaatttcgacatctggccgatccccggattgaaacaattgcaggggtccagctcgcgatagaactcggccagcgccggcttggcgcgatacaggtggccgacgttgtgctcggccggatattcggcgccgcgcgcgtcgagcaggcgccacatgcggtgctccaga

SEQ ID NO: 311419 - DNA, 263 bp, Zea mays
cccacgcgtccgggtgggcgagcacggggacagctccgtggccgtgtggtcgagcgtcagcgtcgccgggatgcccgtgctcaagacgctgcgggacagccacagcagcttcggcgaggaggcgctcgagggcatccgccgcgctgtcgtcgacacgcctacgaggtcatcggcctcaagggctacacgtcctgggccatcggctactccgtcgccaacctcgtgtcctcgctcgtccgcgaccagcgacgcatccagccggt

SEQ ID NO: 311420 - DNA, 249 bp, Zea mays
aaaaccaaatggatttctcagcctaaggagccatatctggacagataccgataacaaccgtgcagggatgctcccttttgtctttgacaactcatttgggtttgagcaatatgtggattatgcattagatgtccccatgtattttgtgtaccgaaataataagtatattgactgcaccggaatgtcatttcgggtctatttctgtccttgatgtccttttacttctgtagttctgtattgtaaaggttt

SEQ ID NO: 311421 - DNA, 252 bp, Zea mays
tgcagattaatcgtctcgaagcttccgatacactcagttctcacatgaacgagtgggatggacctccctagaaaccaaacacccctgaatcgcagtcatcatcagagaacgacaatccgtgtgctgttgcgatgtagtagtactactgaagcacagagcgaaccgcacaggctagcccgcacggagcgaaccacacgggaaaagctgatgggaagaaacagaaaagtcaagaaaaggcagttcctgcagctt

SEQ ID NO: 311422 - DNA, 248 bp, Zea mays
gtcgccgacgcgcaggccgtgcgcgtcaactactacccggcgtgcccgcacggcaggggcagggtgctgggcctgtcgccgcactcggacgccgccggcctcacgctgctgctccaggtcagcgccgtcccggggctgcagatcaggaggcgcggcgcgtggatcagcgtcgaccccatccccggagcgctggtggccaacgtcggcgacgtcgtcgaggtgctcaccaacggcaggtacaagagcat

SEQ ID NO: 311423 - DNA, 239 bp, Zea mays
gtgcacgtggccggcggcaacatcctgccgctacagctgccggagctgacgacgtcgcgcgcgcgccagaccgcgttccacctcctggtcgcgctcgccgaggacggatccgcatccggggagctgttcctcgacggcggcgagttaccggagatggccgggtcgcggggcgagtggagtctggtgcggttcaactgcacgcaggggcgcgacggggttaagctcatgtcgcacgtggt

SEQ ID NO: 311424 - DNA, 271 bp, Zea mays
ggggaagaagcctctggcttacacaagagacggagatgcatgggtaattgataatggcaaatatataagtgaatcagcttctatatcaaaagggtttcctctcaaccatatcaatcaggggatatcaggatataaaaacttgagcccttcttgtaagctgcgtgttctgaattttctttgtgatgagaccctctctactgacaagctgaggaactggattgacatgcaaaatgacatagctgctgaaccagtgaatgctgctagagaaaag

SEQ ID NO: 311425 - DNA, 269 bp, Zea mays
gtttccaagacaggacttccgcctgcatttccgcaacatgtctcctggcgcagtcgatttgttggaaaggatgcttgtgtttgatccaagcagacggattacagttgatgaggctctgcatcatccatacttggcttcacttcatgagatcaatgatgaacctacctgccctgcacctttcagctttgattttgagcaaccatcctttacagaagcgcatataaaagaactcatctggagggaatctttagcatttaacccagagcctc

SEQ ID NO: 311426 - DNA, 262 bp, Zea mays
cgccatcacgggcgccacggcgctggacatggccttcttcgaggagcacgggctggcgcgcgccgtgtggagctccggctcgctccacacccagatcgggtggttccgggacatgaagcccaacatctgcagctccccgcaagagtgccgtgagctgttccggcggtcgctgttcgtggtgggcgagttcgggggcaacgactacgggtcgaccatcttctcgttccggccgctggaggaggtgcacgcgctggtgccgcac

SEQ ID NO: 311427 - DNA, 256 bp, Zea mays
gccgtgtgtcgaacacgacacgcgataatggcactcatgcaggagagcagccaggacttgctcgaagcgcacgacgagctcttccaccactgcctgtgcttcgccaaatcgccgccgcattcccgcacgtcaagtgcagcgtgcttgacctcccgcacgttgtcgccggtgctccatccgatgcctgcgtgcagttcgttgcgggcaatatgttccacagtattccacctgcaaccgccgttttcttcaagacaac

SEQ ID NO: 311428 - DNA, 232 bp, Zea mays
gcatcttccaatgttcccctccatcttggaaagactgaaaattctgatgaattgcgagacaaacattttggcatcagacttcagccaccaattggcccagagcgagtcgatgaattgggtcactggacaggaagatctattgaggtgtctggggcaagctgggatgtcaacagtatggacattgctgtttctggccttggatggtactccttgggccttaaaggcactgcca

SEQ ID NO: 311429 - DNA, 226 bp, Zea mays
cgtcgacgaccccatgttcgtggaggccaccaggttcaactccgagcgcaccgcctcgcgcagagcttcgactacaactacggcgacttcatccccgtcctgcgccccttcctgcgcggctacctcgccaggtgcaaggacctgcaggccaggcggctcgccttcttcaacagcaactacgtcgagaagaggaggaaggtcatggacgcgccgggggacaagggca

SEQ ID NO: 311430 - DNA, 233 bp, Zea mays
cacaatcattcccatcccaccttcttgcgagcacagagagtgtgggagagcaggcctccgaaatcgttgtccgcagagctaaacttgcacgggtgtgtgggcgatcaggtttttggggagcgtactcgtgactgctcacttcgtccgtttggccaacgctgatcaggttcctcgtcactggcgctattcgagggactgcactgcgtacatctgtctgcatcgactgcatacga

SEQ ID NO: 311431 - DNA, 274 bp, Zea mays
ccgcgccgcgccgcttgaggccgccacggcgtgcgcgggcgtctacggcaacggcgcgtaccccggctacgccgccagctgctcgtggacgcggccacgggtgccagctacaacgccaacggggcgcgcgggaggaagtacctgctccccgcgctgtacgatcccgacacggctgcctgcaccaccttggtttgagcaaacgcgcggcgccgtgttttggcatctgtcaccgtaggtgggcggggatacagtgaagtgataatgcgcttgtgtt

SEQ ID NO: 311432 - DNA, 260 bp, Zea mays
atgagccacctcaagaggagggcgatgatcaagggggagatgacaatgatcaagacaaggaaaactgagccctcgcgtttaggcggggaattatgtgacccgtttgggggattttttttggttgtttgacttagctggaactcaacttagggaactgtttagtgccttatgaagtcaaccaacttgaaaggagactgctatatcataatctcggtatatctatcaacgcagtttgacctgtgattcagtttgtttgtgct

SEQ ID NO: 311433 - DNA, 281 bp, Zea mays
ggcggcgctctcggagaccctgcgcctgtacccgtccgttcccgaggactccaagcacgtcgtggccgacgactacctccccgacggcacgttcgtcccggcggggtcgtcggtgacctactccatctactcggccgggcgcatgaagacggtgtggggggaggactgcctcgagttccgccccgagcggtggttgtccgccgacggcacccggttcgagccgcacgactcgtaccggttcgtggcgttcaacgccgggccgaggatctgcctcggtaagg

SEQ ID NO: 311434 - DNA, 236 bp, Zea mays
cgcccttcgaccgcctcggcggcggcgcgtccccggcgttcggcggcctccccggcggcagcattcctggcagcagcattcccgggttcagcatgcccggcagcggcagcagcctacccgggttcagcttgcccggcagcggcagcatgcccctcttcggcggcggctccccgggcttcagcggcttcggcggcatgcccgggtcgcccaccgccggctccgtccccgagcacgcc

SEQ ID NO: 311435 - DNA, 237 bp, Zea mays
gagacgaaggcggactcggtgttcttcacgctcgacatgctggacaagttcctcgccctggcgctgccggatggcgcgaccaaggaccacccgttcacttgccccatgggtccgctagcgccgccgctcgagtccgtgccgctgccgccgatgctcgtgtccgtggccgagaacgatctcatccgcgacactaacctcgagtactgcgacgcgctgcgcgccgccggcaaggaagtg

SEQ ID NO: 311436 - DNA, 234 bp, Zea mays
gttaccgtaagcaggctccacgtcactatgtgttgcccgaggatgcgggtggcagcacttgggcgcctacgtcaacctgggctcgttctacctcgtcgggattccaacagcactcgtcctcggcttcgttctgaagatggaagggaaagggctttggatgggcatttcctgcggctccatagtgcagttcttgcttcttgccgtcataacgttcttcagcaactgggagaagat

SEQ ID NO: 311437 - DNA, 263 bp, Zea mays
gcggcgaggagcgtgtcatggtgttcaccatgcgcgggggcaaggacgccgtggacgccgcggtggtgcgcccgggccggctggacgtgcacatccagttcacgctctgcgacttcgaggccttcaaggcgctggccagcaactacctggggctcaaggaccacaagctgtacccgcacgtggaggaggggttccacgccgccgcgcccgcctcatcccggccgagcttggcgagatcatgctggccaaccgcgcgtccccga

SEQ ID NO: 311438 - DNA, 267 bp, Zea mays
gacaaggggagttgcttgggagggaccttgatattcttgtagttgatatgcccccaggcactggtgatgctcaactatcaatgtcccaaaggcttcggttatctggtgctttaattgtttcaactcctcaagatattgctcttatcgatgctagaagaggagccaacatgttccgcaaagttcaagttccaattctgggattggtagagaatatgagttgctttaaatgctcaaaatgtggtgagaaatcttacatctttggggaag

SEQ ID NO: 311439 - DNA, 253 bp, Zea mays
aggcagcccttatcctgctatgcctggtatgcagtatcctggatcatatcccggtggtcccatgggcaaccgtcatttgggaaattctcacaatccgattaaagctccaaattcgaatgccaattccactgtttcttctagtcccagcagcaatgctggtgggcaggttgaaggtcctcctggagccaacctatttatttatcatatcccacaagaatacggtgaccaggagctttccagcgccttccagagt

SEQ ID NO: 311440 - DNA, 135 bp, Zea mays
cgacgtgctgctcaacgactggtggcacaagagcacctacgagcaggccgccgggctcgcgtccgcgccgctcgtctgggtcggggagccgcagtcgctgctcatcaacggccgcggcaggttcgtcaactgctc

SEQ ID NO: 311441 - DNA, 247 bp, Zea mays
cgcgtacctccactccgcggccgtgccgcccatctaccaccgcgacatcaagtccagcaacatcctgctggacgcccgcctggacgccaaggtctccgacttcgggctgtcccggctggcggagccgggctgagccacgtgtccacctgcgcccagggcaccctgggttacctggacccggagtactaccgcaactaccagctcacggacaagagcgacgtctacagcttcggcgtcgtgctgctcg

SEQ ID NO: 311442 - DNA, 240 bp, Zea mays
ggaaaagatgtcaccactattcagccttttaggtatgatccggatgctagtcttagtaaattctatttagcagtaatcatgcatgagtacccattcaacattgttgagcatgattattttgttgatttcatcaagtcgttgaggcctaattttgccttcaagtctagagtgactgctaggaaagatatacttgacatatactttgaagaaaaagaaaaattgtatgcccaattgaaaaat

SEQ ID NO: 311443 - DNA, 237 bp, Zea mays
ggttactatggtctgactccttttctttgcctaactgttcatttgacatgataataacttctttaaaattagatgtgagtgcacaaaactataatttctgccttagactccacaatatcatttgttatatagcatgcctgtaatatgcctaaatcaatgtattgattttcagcaaagctagtgatcattgctaacaactgtcctccgcttcggaagtctgaaattgagtactatgct

SEQ ID NO: 311444 - DNA, 273 bp, Zea mays
ggttcggcttcgatttgtggttccacgacttcctagagttcagctccaccggccgcctgctccggtacgacccgcgcacggcgagacgtccgtcgtgctcgaccgactcggcttcgccaattgcgttgcgctgccgagggacgaggccttcgtcgtcgtctgcgagaccatgaggttcaggtgcatcaaagtgtggctgaaaggggataaggccggcgaggcagagacgttcgtcgaccttccggggtggccggacaacatccgtctcgggtc

SEQ ID NO: 311445 - DNA, 230 bp, Zea mays
cctctcccccatggtcgaaccggagctcgaggccgggcccgggctcccaaccagcggctccgacgagttcaagcccttcatccgtcgcctccccgagttcaagttctggtatgccgtcacaaaagccttttgcattgcctttgtcatgaccttcttctctgtattcgacgttcctgtcttttggccaatacttctctgttattggattgtgctttttgtcctgacaatga

SEQ ID NO: 311446 - DNA, 264 bp, Zea mays
ggcacaggtctatgaacaatcacttattcagagcaacggaacgaaggctggcgagagcgctcatttcatgcagatatatcgtagtcgtgaagtgggccagtcttatgttacatccatcgcaacaacattgctagccacgctgcatgctatgtggctagtgataagaatcagaccacaagcgatattctgcaacggtccagggacgtgctttcctctatgcatctcagctttcgttctgaaggtgcttggcttgggatggtcatc

SEQ ID NO: 311447 - DNA, 254 bp, Zea mays
gccgcaagtgctatgcgcggcttccgcccagggcaaccaactgccgcaagaaaaagtgtgggcacagtaacgagctgaggtcgaagaaaaggttcatgtccaagattggcgggaaatgatcggcttttgtcattgcgtgacatatatggagcatcagctgaaatttcttagacgcttaataatttttactttaacgccgtggatgtgatattttactgaataaagttgtagtagaaacaaaaaattcgtgctac

SEQ ID NO: 311448 - DNA, 122 bp, Zea mays
gggaggacgacggcgacaccctcgcgcacctcgacctcggcttcaagttctacgacctcaccgacgacgtgcacggcgtgctgggccagacctaccgcccggactacgtcaacagcctcaac

SEQ ID NO: 311449 - DNA, 240 bp, Zea mays
catttggaatcttaatcatgcacgcttaaataaatgttatgtaacctagtttttgaaagggaaatgtgcctttgggccatttctaagtattttggtgattaagtgccaacacaagtgcttaaatgtaaatcaatgcccatggatgaacaaagtgcaaatcttcaacaaaggtatgtttctaagtcttagtacattggttttgtgtactaatatatttgtctaagtgttagaaacagaaag

SEQ ID NO: 311450 - DNA, 213 bp, Zea mays
cagatgaaggcgttcctggacgccacaggggtctgtggcagggccaggcgctggcggggaagcccgcgggcgtgttcctctgcacaggcacgcatggcggagggcaggagaccaccgcactcaccgccgtcacgcagctcgcgcaccacggcatgctcttcgtgcccgtgggttacaccttcggcgccggcatgttcggcatcgatcaggtca

SEQ ID NO: 311451 - DNA, 229 bp, Zea mays
  unsure (1)..(229): unsure at all n locations
tccattccatcatcccctttgcaagtatagtctctctgctaagcgaacgnagcttcaagctagtctcggcggctctagaagacgatgggcaaggacgacgtgatcgagagcggcgctggcggcggcgagttcgctgccaaggactacacggaccctcccccggcgccgctgatcgacgcggcggagccggggtcctggtcgctgtaccgcgccgtgatcgccgagttca

SEQ ID NO: 311452 - DNA, 242 bp, Zea mays
tccacttccagttcaacccggtccatgacaagccagcagtcgcgatcgctgcactaagcagccaaaaccctggagttattactattgcgaatgcagtctttggatcaaagccacctatctcagatgatgtcttggccaaggccttccaggtgcaaaaggggacaatcgattggcttcaagctcagttttgggagaacaaccactactaaaacaatctagtctgggttcatcatttgatatta

SEQ ID NO: 311453 - DNA, 234 bp, Zea mays
atttgtaggacgaggacgctttctttgctgactacgccgaggcccacctgaagctttcagaattggggtaagcggtgctgatagatctatcatctatttctatgtattatgactgaatgattgtatctcttgcactatgcagatttgctgaggcgtaacgaaccagaagagtgtggtggctgtcgtcggccggccggccttgtgtttttgttgtctgcttttctcttgaatgaa

SEQ ID NO: 311454 - DNA, 229 bp, Zea mays
  unsure (1)..(229): unsure at all n locations
cgtagatcggtttgtgagaccccaacttgtgagcttaatcattcatccgcaatattctagattgtgttctttcttgttcttgcttgtgtcttcgattctcaggcaggaattagccctcgtggcgaggtcaatcgcgcagcnacggttgataaccagaggagaagtggtgctgcgattgcggggttctagtcgtgttgattggaagccggatcgtttgtgtgacatctcc

SEQ ID NO: 311455 - DNA, 231 bp, Zea mays
agcctctgctcaaggattccgtggataaacaaaatgaagatgaagacgaagttgatgatattgaagaaactgcagatgattctcgcaaacctgcaacatcaattggctcagcataccgattgcttaccccgtcagtgaaggtccagttgttgatatacttcatgctcaaatacgcaatggagattttgctttcggagtcgagtgttatcaccaatcactatttcagttgga

SEQ ID NO: 311456 - DNA, 263 bp, Zea mays
gaagattcaaagtcaaaggaaagttgtcccctcgcttcattggacctttcttgatcttaaagcgagtgggagaagttgcatatcaactgaagttacccgatcatctgtcagatatacatgatgtatttcatgtgtctcagctaaagaagtacctcagggtacctgaggagcagctaccactggaggaccttagtgttcaagatgatctgacttatgctgagtaccctatcaagattctagacaccctgactcgagttacaaga

SEQ ID NO: 311457 - DNA, 255 bp, Zea mays
gtgaaggaagcgctcaggttgcactgcccggtgccgctcctgctcccacgcaaatgccgggaggcgtgccaggtgatgggctacgacatccctaaaggcacatgcgtgttcgtcaatgtctgggcgatctgtagggaccctaggtactgggaagacgccgaggaattcaagccggagcggttcgagaactccaacctagactacaagggaacatactacgagtacctcccgttcgggtctggccgtcgcatgtgc

SEQ ID NO: 311458 - DNA, 245 bp, Zea mays
accgtcgacctgatccgggtgcgccgctacaacgccgagtgggcgctgaccgagcagctcgacgtgatcagcggccacttcgacgacatcgaggacgagtacctgcgcgagcgcaaggccgacatcgagcaggtggtcgagcgcgtgctgaaggcgctggccggcgcgccctcggcctcgcaggcgctgggcggcgcggccggcggcaaggacgacatgatcgtggtcgcgcacgacatcgcgcc

SEQ ID NO: 311459 - DNA, 247 bp, Zea mays
cttatttgttgagtgtcaaactttatatctatatatcaaattgtttactcaatttactataaaattatatatacattagatagaattctacatgaaaattttgttacggcacaccctatgtaaaaatcctaggtccgccactgccggttactaaggtggaactgtataaatggatttactatctttttctaacgacttaagcttttggttctcaaccagtaacatggaccactccactcattggtaa

SEQ ID NO: 311460 - DNA, 131 bp, Zea mays
gaaataaacgaccgaggctgtgtatgttgcccgccgtgtgctcaactggagcaaaaataaagccaacaaaacaagcacgtgtgatctctatgtcaccaactctatcaccttaattaatggggcattatgaa

SEQ ID NO: 311461 - DNA, 256 bp, Zea mays
atcaaggcgttcgtcatcgacgtggtgacgtctggttcagacacgtcggcggccatggcagagtggatgctggcggactgatgaaccacccggagacgctgcgcaaggtggtagaggagatcgacgctgtggtcggcggcggcaggatcgcgagcgaggcggacctgccgcagctgccgtacctgatggcggtatacaaggagacgctgcgtctgcacccggcggggcccatcgcgcaccggcagtcgacggagga

SEQ ID NO: 311462 - DNA, 247 bp, Zea mays
gcgatggccttgttggcctccctcctctcctccgctagctggcgccggagatccgtcctctcggcctccaggacggccaccttctccgacagcctgcggtttttgctttccgcagccgacttctcccgcacagcatccacatgctgcgcccggagactctcgacctcggcagcaaagtccgcagtcaaggcacccgacgcaacgtggtcggcgaagtcggccgcctgacacataaacccatgagacc

SEQ ID NO: 311463 - DNA, 237 bp, Zea mays
attaccatcgagcttgaatttgtacaatcaacttcagggacttggtttccatgttatcctattgactggccggagtgaattccaacgtaatgccacagaattgaatcttttgtttgctggctacaactcatgggaaaaactcatactgaggcaaccttatgatattggcaagaacgctgtgcagtacaaatcagagagacgagcagcaatggaagcggaaggtttcaagatacttgg

SEQ ID NO: 311464 - DNA, 231 bp, Zea mays
cgtccggggagaacgccgagaagttcctgccggaggtgcctgggctggaggcgttccccggccaggtgatgcacgcatggagtaccggtcggccgaggggatgcgcgggaaggccgtgctcgtcgtggggtcgggcaactccggcatggagatcgcctacgacctcgccgccgccggcgccgtcacctccatcgtcgtccgaggcgagctccacctggtgaccaaggagat

SEQ ID NO: 311465 - DNA, 256 bp, Zea mays
gggaggtgaagagctacttcaacaagtccgccggacgggcggcgagcaacaacagccacgggcacgccggcggcgcaagaagggcggcggcggcgggaagcacggcaagaacgagggcaacggcggcgcggtggcggccacggacaagcggttcaagacgctgccggcgtcggaggcgctgccgcggggcgaggccatcggcggctacatcttcgtctgcaacaacgacaccatggacgagaacctcaggagggag

SEQ ID NO: 311466 - DNA, 249 bp, Zea mays
gggtttgccacagaactccattttcatgagcatcctcggtggcaccatcattttaccagttcatcctggtccagttcctaggagattttgccaacaccacgcctctcacccatctccaatggctcgtcagcattctctttggcctcctcgggatgcccattgctgctgccatcaaactcattcctgtggaacctcgcgaagatgatggccggataccataatcatgtacattaagagcaatagatcagc

SEQ ID NO: 311467 - DNA, 247 bp, Zea mays
ctgagaaggaaaagcagcggcttctcgcgcggcgcttcgatctaccggggagtcaccaggcatcaccagcacgggcggtggcaggcgcgcatcggccgcgtctcgggcaacaaggacctctacctgggaacgttcagcacgcaggaggaggccgcggaggcgtacgacgtggccgcgatcaagttccgcggcctcagcgcggtcaccaacttcgacatcacgcggtacgacgtggacaagatcatgg

SEQ ID NO: 311468 - DNA, 226 bp, Zea mays
tgcagggcgatgtgaacctcaaggaggttgaaagagtatgcaaggctgcgtgttggtgcattcaggaaaacgagtctgctcgaccgaccatggccgaggtggtgcagtttcttgagggcctctctgatctcggtatgccaccactgccaagactgctcaatgcggtcacaggagggtcaccgacatgactgtgacatttatagtcttgcctcgaattaggtttagc

SEQ ID NO: 311469 - DNA, 233 bp, Zea mays
ccttgatggcccatcgaagaccgatgcatcaataatccagtgtcaatgaccccgattgccattatttctgaaagggaaatgtgccctttggccatttctaagtattttggtgattgagtgccaacacaagtgtttttgtgttgatctatgcaatgtggtggacaaagtacaaatcatgtcaaaaggtatgtttctagacttagtacattattttatggactaatgtgttgtgt

SEQ ID NO: 311470 - DNA, 226 bp, Zea mays
atcggttccgttccgtcgcagaaatagaaaaaaaaggctttcttgtcccacagggcagggagaccgggagagcagtctagtgattagttgatcaccagacgtcgagacaccatgagctcccgcatggccggagcagcgcttctgcgccacctaggcccacgcctgttcgcggccgggcctgcggtgtccgggctcaccgcgaggggcggcatgtccgcggccacga

SEQ ID NO: 311471 - DNA, 253 bp, Zea mays
gtggacatgagtcatttgttgctggttcttctgcctttgttttatgttactgcattgctatttctctaaactagcttgtctaaatcaaagggtatttcctaagtctgtttaccgcagaagatattgtaaaatcatatcctttacagcaaaggtctgcaacaaaagtgacatttccacttgtctggacaaacacctgctgtagccatcctctctaccgcgagtcagagttgattgagtgaaattgtgcaggggt

SEQ ID NO: 311472 - DNA, 224 bp, Zea mays
ggcgaacgtcgcggcggacgaccccggggccgtcctcagggtgttccggcagatgaggagcgacggcgtggaccccgacctcgtcacctacaacacgctcatcttcgggctcgcgcgcgccgggatggtcgccaaggccagggctttcctggacgccatggccgcggagggccacctccccgagtcggtcacctacacgtcgctcatgaacgggatgtgcgtca

SEQ ID NO: 311473 - DNA, 248 bp, Zea mays
caactgttcaatctttctgctccctaagacacactcccacgagatccatattgagaaatcggttgaaggtcctcactgtggtttgattccgatgggtggaccgtcagctaccacaacaaccacagggctccgatggaatttagataacaccaacatgatgtatggtggattgataagcacatctaacatcgtggatgacgataaagtaacggtgacttcagattctgatctggtttggaccatatcgc

SEQ ID NO: 311474 - DNA, 213 bp, Zea mays
gcccgtgtacccgccgccgcacctcgtgttccacgcgctcaacgccaccccgttcgaccgtgtcaaggcagtcatcatcggtcaggatccataccatggccctggtcaggccatggggttgtctttctcagtaccggaggggataaaaataccttctagcttaggtaacatttttaaagagctcaaaaaagacctaggctgcactgtgccatc

SEQ ID NO: 311475 - DNA, 216 bp, Zea mays
gaccagggaagccatgacttacactatgtcacaccactattctattttggggcttgacaggtcaaggtcagagccattttcagatgctgaaatcaagaatgctttcaggagaaaagcaatggagtatcatccagaccaaaaccaaaataataaagaggttgctgaggcaaaattcaaagaggttatggattcttacgaagcaataaaacgagaacg

SEQ ID NO: 311476 - DNA, 217 bp, Zea mays
aaagactgtgacaacgaaaaggttagcaaaaaattggagtgtatattataagaccataaaactttgttgttccatattatagatcgggccacaaaaagttgtgtagctcattgaaattgttacagtggaaggcaacaaatggtatcactgacaaaagttttaatgagatcttaaaactcataaagaagttcttttcagaggagaacaaattgtcagc

SEQ ID NO: 311477 - DNA, 219 bp, Zea mays
ggcggtcctgcgctacgccaactccgccggcacggcgccgggtcccctccacggcggccccaccatccagatcgactggtcgctcaaccaggcccgctcggtccggtggaacctgacggccagcgggccgcggcccaacccgccagggtcgtaccactacggcctggtgccggtgacccggaccatccgcctggccaactcggcggcgaccatcggcgg

SEQ ID NO: 311478 - DNA, 272 bp, Zea mays
gttacaaatacagtaccggcagtgagagaaactgttgagcaatattgctacaactccaaccaaccaggtgacaaatatgtgtgacagttctccaactgtgtttgatttgaaactatgtcaatgttgatgtcaaagaccatttacatgtcgaattacgacgatattatgtgaatgtcgaactatgaaaatactatgtgtaacggatgttggaactatttgttgatgttaaagacttgttgtaatgtgtttgtgaatgtgagttcatgtttgag

SEQ ID NO: 311479 - DNA, 243 bp, Zea mays
cttcgtgctcgggtgcgccaggtccacggcggcccagctgacgtccccgtcctgcggctcggccgcgcgctacggggtgcggctggtgcaggacgccaaggcgtgcgtggacgacgactacgtgcgctccatggtcgacctcctggaggagcggcgcggcgcccgcccggacctggcggccagcctggtgatctcggcgtggacgcgcctgggcctcgaggacctggacttcagcgccggcag

SEQ ID NO: 311480 - DNA, 222 bp, Zea mays
gaccttctttgcttgaatgtcatacatcttcttgaccgcagcattgatcaggcctgatgggaagaagaaggcttatgtgaaactgacacccgactacgatgcccttgatgtggccaacaaaattggcatcatctaagttaataggcaactggactcgacaactgtgtcctacgagagctgagcataccaacagaaatttctatgagaagagtaattttgttt

SEQ ID NO: 311481 - DNA, 237 bp, Zea mays
cgtctggtcgttcttggacgtgtttgagttgttggctggctactactcgcgatacggcctctaccatgtcgatttccaggacccggagctgccgaggacgccaaaactctctgcgctgtggtacggcaagttcttgaagagtgaaatcgacgacataatagagaacgttgtcgtcagcgctactgacgacgcgcgctcgcatgctgctgaacaatgagttagattgctagcgagcag

SEQ ID NO: 311482 - DNA, 240 bp, Zea mays
gcaagcggccaccatggacacgcgcgtgggcagcctcaccgtgccgccggcgtcgctccccgtcttccctgtcacgttcatcatcatcctcacgcccgtctacgatcacgtcatcgtcccgttcgcgcgccgcgtcacggggaccgagatgggcatcacacacctccagcgtatcggcaccgggctggtgctgtccatcgtcgcgatggccgtggccgccgtcgtcgaggtcaagcgcaa

SEQ ID NO: 311483 - DNA, 231 bp, Zea mays
tgagactaaccgtatgcttgagtctcaaaggtggattgaaagggaaaggtgaacttggtccaatgaaagagtaatttattccaagttcatctccatactcttattgcctttttactcttagttgacgatttttgtgaggcaatggggttttagggccaataatgatcccgttttggtgcttaatgccaaagggggagaaattaaaggccaaagcaaatggatcaactacca

SEQ ID NO: 311484 - DNA, 234 bp, Zea mays
agttcttccccaacaccaccaccgacatggacctcatcacgcccgcgctgctcgacaacaggtactacgtcggcctcgccaacaacctcggcctcttcacgtccgaccaggctctgctcaccaacgccacgctcaagaagtccgtcgacgccttcgtcaagagcgaaagcgcgtggaagaccaagttcgccaagtccatggtcaagatgggcaatatcgacgtgctcacgggca

SEQ ID NO: 311485 - DNA, 250 bp, Zea mays
caaatacgccaccaacagctgcgccgccggcaaggtgtgtggccactacacgcaggtggtgtggcgcgccactacaagcatcggctgcgcgcgcgtcgtgtgccgcgacaaccgtggcgtctttatcatctgcaactacgagccccgcggcaacatcgccgggatgaagccctactgatatattgtgcctgcgatcaatggcaactgatatattatatctagacacgagcttgttgcagcgcatgacttt

SEQ ID NO: 311486 - DNA, 263 bp, Zea mays
tgtactcagagatgatggccaatcacgttattcctgatgataaaactttcacagcactaacccacggtctttgccgaagtggagatattgatggtgctaagaggttattggatgatatgagaagattagatgtgtctccaaatattgttacttataacatgctgataaatgcatgcgtccgtgatggtaagctgcaagaggcattccaactgcatgatgagatgctcagcagtggagtcgtgcctgatgatactacatatgac

SEQ ID NO: 311487 - DNA, 254 bp, Zea mays
agcatgtggtcggaggcgggaggtaggtggttggaggaggatggagaatcgtcaaaattagataaaacaagcaacatcccacaaagcagtgattgtcttggtgccgagaatctaatcaaattgcttaagaattattccagaagccatgagctcaaactggcaattacggtgggtattgttggacttcctaatgttggcaagagcagtctgatcaacagcctgaagaggtcccgagtggtcaatgtcggttctac

SEQ ID NO: 311488 - DNA, 130 bp, Zea mays
atttgatgcaggggctggtgtagtacattgccacaaaaactgcctggagtgggctcctgatgtctactttgaagatgactctgtctttaatcttgcaaatgagttggctagaagtaaaagaatcaaatgt

SEQ ID NO: 311489 - DNA, 151 bp, Zea mays
gtacctcaaggacctcgaggccggcatcatcgacaacaccccggcgccggccatcgccatcgactactggcgcctccccgccgacgccaagctcaaggacgtcgtcaccgtcgtgcgcgccgacgaggcgcaccacggcgaggtcaacaat

SEQ ID NO: 311490 - DNA, 262 bp, Zea mays
cacgactagttctgcgaggctaagagcagaaaaaactccacctgcctggctgatttcatcaactccggcggcttggagaagacgaagctgctccagaatccgatatgaagtttggtgctcgcgtgttgacgggttgatttcggtgcgccgatggggcaggcgttccgcaagctgttcgatgccttcctcggcaccagcgagatgagggttgtgatgcttggtctggatgccgccggtaaaaccaccatcttgtacaagctgc

SEQ ID NO: 311491 - DNA, 259 bp, Zea mays
caaaccctagctcccgatctcgatggcgaaccctcgcgtcttcttcgacatgaccgtcggcgtcgccccggcgggccggatcgttatggagctgtacgccaacgaggtgcccaagacctcggagaacttccgcgcgctgtgcacgggcgagaatggcgtgggcaagtccgggaagccgctccactacaagggctccaccttcaacggcggaatcccctagttcatgtcaccaggcggagatttcacccgcggaaacggc

SEQ ID NO: 311492 - DNA, 227 bp, Zea mays
ctacgagaggctgaggtcgaggtactacgaccacggggcgaagggtggcgagagggtggccgtgttccaaccgtcgcacgaggagcgccaggcgacggacaacatggcgcacaaccagagagcgctcgcggagatctacctgctcagcttctccgaggagcttctcacgtcggggaggtccacgttcgggtacgtgagcagcaacctcgccagcgtccggccgacga

SEQ ID NO: 311493 - DNA, 224 bp, Zea mays
tgggagacagtcccttcacgtcatcttgttggcccgaaagcagccatggcttgtgcagtccttggctgtttgatgtaaaccatagctggggagcttggttggggtcacgtgctgggctgttctatatgcatggtacttgagttaagttatgtttggttcgctacctaacttgccacactttgcctcacttttctgcctaaggttagttcttcaattcgaacgac

SEQ ID NO: 311494 - DNA, 238 bp, Zea mays
gaaggcctaccacgagcagctgtccgtggccgaaatcaccaacagcgccttcgagccatcctccatgatggccaagtgcgacccccgccatggcaagtacatggcatgctgcctcatgtaccgtggtgatgtggttcccaaggacgtgaacgctgctgtggccacaatcaagaccaagcgcaccatccagttcgtggactggtgcccgactggcttcaagtgcggaatcaactaccag

SEQ ID NO: 311495 - DNA, 150 bp, Zea mays
cagctgacagacttcatcgagagtgagtacctcgaggatcattgcaccttgttgccacaccacgcaggttcgtgcagcttctcattgaccagctgcacaacctagagggtgcaaaagtgaagatctcagctcgacagacttcatcgagag

SEQ ID NO: 311496 - DNA, 294 bp, Zea mays
ccctgtcgcgcacaccacggcgcacccgtactgggaggagggaggattcttgtttgagagccgtcgctcacgccgatcgcgcgttttcaggaccaccggcaattcaagcagcgctacttcgagttcctcgactaccatcgggcccccggcggcccggtcttcctgcgcatctgcggcgagtccgcctgcgacggcatccccaacgattacctggccgtgctcgccaagaagttcggcgccgcggtggtgacgccggagcaccggtactacgggaagagttctccattcaagcag

SEQ ID NO: 311497 - DNA, 297 bp, Zea mays
attgggcacaattattatgataagtctctttgggagggcctatcaagatctataccgtcacttcagaagggtccgggcaaagatgatgaaaatgaaactggatttgctgttgatgcttcagagatggggaactttgcaaaatttatcaatcacaattgcaccccaaacatatatgcacaaaacgtcctttatgatcacgaagatatcagtgtgcctcatatcatgttctttgcttgcgatgatattcgacccaatcaagaactagcataccactacaattataaaatagatcaggtt

SEQ ID NO: 311498 - DNA, 286 bp, Zea mays
agaacggcaagcatcgggcgtccaagccaacgaagggctcgcagcgcgtgttagtgggcatggaaggcggagtgaaggaggaggagaagctcaacggcgggctgcagttcgaggtgtacaaccagggcatgctgaagacagagctctgcaacaagtgggaggagaccggcacgtgcccgtacggtaatcagtgccagttcccgcacggcatcggcgagctcccgcctgttatccgccatccgcgctacaagaccgaggtctgccgcatggttctcgctggcgttgt

SEQ ID NO: 311499 - DNA, 307 bp, Zea mays
cgtaaaattagctacgaagaatttgtagcgatgatgaagactggaacagattggaggaaggcgtcgcggcattattcaagagggcgcttcaatagccttagcataaagcttataaaagatgggtctgtaaaactgggtagcgagtgacgttgtagcttgctgccgatgctcttctcctccacgcattgtagtctgcctctgcgggcccgctaagcagaaacccccttccgtttgctaatgattatcttgtctgggatttaggtagaatgtttatgattacctcaaaggcatggtgacttgccacagg

SEQ ID NO: 311500 - DNA, 255 bp, Zea mays
gcagataccaagctgcagattggagattgaggccccttcctgatgaaatgatcaaatatgctagagaggatacacactatctgctatatatatatgacctgatgagattgagactagtgaatgggtcatcatggaaatgatcttctttagagttgcaacgacaacgaattgcttcactgatagagacactgactgtatcattctaataatggtgaagaaaactatcacaactgcatcttcgagactatctcttca

SEQ ID NO: 311501 - DNA, 232 bp, Zea mays
gttcaccagccttgtggacatcttgcctcacattcatgccattttggggactgttcgccttgtatcgtgccagtaatgagagaatgcattgggggacatgtgatgctgaggaatatcccttgcggatcgaaggatatcaggtgcacccaaccatgtgggaagaatcgccaatgtggaatccatgcttgcaacaggccttgccatcctcccccttgtgatcagacacctgcaa

SEQ ID NO: 311502 - DNA, 218 bp, Zea mays
gcatgccagatgctacagaggacaccatcactgcaaagcgataattttcattagaagagctgacttgtagccacccatctagtcgtcatatgtaggctctaacttatcagtatgtaaccttttcctagacatggtatcataggaacactgtgtgatctgggtagaggtgtgggcaattaaactatgtaaataaaggactggcagcgcattgtttgcca

SEQ ID NO: 311503 - DNA, 312 bp, Zea mays
atggttctttgccacctgagctgcaggttagagtatttgctccagcacctccaaactgccgacgcttcattgttgcaacaaatgttgctgaaacttcgctgactgtagatggtgtcgtgtaagaagcaaacacaatcagttcgtgattgattgtggttatgtaaagcagcgccaatacaatccatcaagtggaatgtattcacttgatgttgtccaaatcagcagagtgcaggctgatcagcgagcagggcgagctggtagaactcggcccggcaagtgctataggctatacccaatttccatatatcagaa

SEQ ID NO: 311504 - DNA, 314 bp, Zea mays
ctgccgctcttcgagctgtcccaccggaagaacgtgtgggacgtcgtcggccacgacccgtccgtgagccagctcttcaacgccgggatggtcgcggatacgcgcttcctcatggacatcgccgtcagggagtgcggcgacgtgtttcaggggatacgctccctggtcgacgttggcggcggccatggcgcggcggcgcaggccatctctgcggcgttccctgccatacagtgcaccgtgctggaccttgcacacgtggtcgccaccgctcccgcttgcgccgggctcagcttcgttgctggcgacatgtttga

SEQ ID NO: 311505 - DNA, 251 bp, Zea mays
atgagtatgaggaaatctctttctgttgctggcttacagtgtctctgtgtgcgttgtggttgctgtcatatttgctctagaagaaaaaaaaaaagggagggaaaatgcattttccccagggataaaggcggccattttgggggtcggaactaatggcctgaaaatatttgggatccataactcgaaaaggcgtttactcagactattagggacactttccccttagagccccctaaggtttccccagacga

SEQ ID NO: 311506 - DNA, 294 bp, Zea mays
tctggagacgacgttcagacatggcacatcgcaaggtgaaggaaaacatatgtagaataggtcatgagctttggacctcaggtggctgaatgcgtgcatgtattaggtgtctgccacatctttgcatccttcaatgcatacctttgtccatgttactgatctgtctggcaaggaaaccatctgccgagtaactggtcgaatgaatgtcaatgctgaccgagatgagtgctctccgtatgcagccatattggctgctcaggatgtggcacagaggtgcaatgaactgggcatcac

SEQ ID NO: 311507 - DNA, 103 bp, Zea mays
cgccaacgtgggccgcgttcgcgccagaaccgtgaagaaggcggcccgggtcgtcgtggaggagtgctacacgcgcctgggcagcgacttccacacgacgtgc

SEQ ID NO: 311508 - DNA, 262 bp, Zea mays
atgctaggtaaaattcagttcatcattccttagaactttggtcttgtggtattactgaagcctatttggttgtcagctactatcctctttcaatagtaatggttggggtgggtgatggaccatgggatgcgatgcagcattttgatgactgtatccctgaaagagcttttgacaattttcaggtgattataatactgctctatgatgttgaaattccaaagccttgatgttcctccacttatagcagtaccctgttcttgct

SEQ ID NO: 311509 - DNA, 120 bp, Zea mays
ggtggagtgcggaggagaggacccacagcagaggagtcccagtcaccagcaaccatgacggaccaacaggctgaggccaggtcctacctcagcgagcagataatcgctgagttcaaggct

SEQ ID NO: 311510 - DNA, 310 bp, Zea mays
tgctggagattgcagttcatgtgtgggagtcatgttagagcttgtacggtggagtgccacactgcgtacaagttaggtaagagtggtatctttttttatttaatactggagaagaagatggtcttgatggcgcccatagttttataactcagcaccactggagaaattcagtaatatttgcggttgatctggaagctatgggtatcagtgggaaatccacactcttccagggtactgaccattgggcattggaaagctttgcagctgtagccaaatacccatctgctcagatagcttcacaggatgtttt

SEQ ID NO: 311511 - DNA, 252 bp, Zea mays
ggcgtggaagtcattcctggtgtcaggttcaaggttgttaaggtgtctggtgtgtcgctgcttgcactcttcaaggagaagaaggagaagccaaggtcttagatcacttttcggtagtcaagaatggtgtaaactgcccaaggctctattgtcgaagttaaatttccgctagcaactcagctgttaactcagaatggagtagttctgtttccattttgaagatattaatattgcatcggcatgtgcactgtt

SEQ ID NO: 311512 - DNA, 295 bp, Zea mays
atgggtgtcgggtttgcaagagggctcaatagagtcagggcagagacagttcgcgaaattgtgaccaaccaggacgccacaattccagttggtgctgtcctatctatcttctacacattgatcttaaccaaaattctggcgtacttcatgtgagtggattgtaaaataaaagggctgcttttaagtggtacagcccattgtcacttcataaattttgatcagtggaaaaaggattttcttttgcaaaagtaaagagatggactgattccacaagttccaccagaaatttacaaga

SEQ ID NO: 311513 - DNA, 294 bp, Zea mays
gagccgcagacgcgccgccatgggccgtgtgatcccaggccagaggaacggtgccggttctgtatttcgtgcgcacgtgatagcaccgtaagggagctgcacgtctgcgtgctgaggacttcgcgaagcacaccggccacattataggcatcgtaaaggacatcattcatgacgctggccgcggcgctcccctcgcgagagtagtcattcgtgatccctatcgatctcagaagcggacagagctgcacatcgccgcatagggacatccacactggacagtttgtgtactgcggc

SEQ ID NO: 311514 - DNA, 207 bp, Zea mays
caacctcttctcccctgtttcctctcgtgcgttctccgcaggagctgatgagggctcgcggcagggcagaggtctccggtgtttttgttccagaatctgtagcaaatggctgacggcgaggacatccagccccttgtttgtgacaatggaactggcatggtcaaggctggttttgctggtgacgatgcgccaagggctgttttccca

SEQ ID NO: 311515 - DNA, 269 bp, Zea mays
cgttcataccattcccgtttacatggcccttatagcgttcaagtgaagataaagattcaaacaactcagatgagaagtgtaacacgtttgcatctgctgagtcggaggactcggtgtcaggtgttctatatgatatgttgcaaaaggaggtcatttctctaaggaaggcgtgccacgaaaaggatcagagcctgaaagacaaggacgacgcagttgagatgttggcaaagacagtagatactttgacaaaagctatggagtcagatgcc

SEQ ID NO: 311516 - DNA, 267 bp, Zea mays
cgcagacctcggttacatcttaggggacaccactgagccatgcagaacatataaaggttcaaggtttcgagctgctattgttttcattctaggattctggatgttggacctggcaaacaatacagtgcaaggtcctgctcgtgctcttctagctgatctttcaggtcctgatcagtgcaattctgcaaatgcaatattctgctcatggatggctgttgggaatattcttggtttttcagctggagcgagtggggaatggcacaagtg

SEQ ID NO: 311517 - DNA, 147 bp, Zea mays
atcatacatgagctgtgagacgggccggcaccagagcctgcagtgccgcagccctgaagaacactgcctggatgtggtgacccactggatccaggaaggtgaagaagggactccaaaggattaccgccacctccgtggctgtggcta

SEQ ID NO: 311518 - DNA, 257 bp, Zea mays
cccattcgtagtcctttctcaagtgggtacttcaactttctgtgaacacccagtctgtgtccagggtctgctaggttcgatgatgtcgaactcgtatctacatccggtgcaagttttagctggcagaggtgagaccggtggtgctagtctgcctttgccaactatagccagtctagagacttgatataatacatcagtgagaccagcttctcatcatcttaggcccggcgtgctgagactgaaagtcacactacatg

SEQ ID NO: 311519 - DNA, 210 bp, Zea mays
actattctcgacgtctaagtacgcgtcgccgcttttgtttttcggctgacggaggtgactttgtgcaatgagctacacaggctgacacaggatgcagactggtacttgctaaatgagatttgtggaccgtcaccctgctgattcgatttaaaaaaataaaggattctatatttctagtgtattaaaaaactttctaaggtgttatgtatg

SEQ ID NO: 311520 - DNA, 298 bp, Zea mays
tggagctgaaacgcgatcctggattgtgcggttgcttcatcttgctgtgtcatggcttgccttgtgggctatatgttatgaggaggccaagaagaggatgtatgcttgtagtacgacgacttatgttggttttcaggctgtaatgaccgaggaaatgtcagaaaaatttcgcggtttgcctggagtagtttacatttggcctgattcatatcgatatccagaaacaaaggagtacggaggagacaagatatgaccatggtgtcatcactccaagaccaccacctgttcattatagcag

SEQ ID NO: 311521 - DNA, 124 bp, Zea mays
cctggtgctcgtgcgcgggtagctctgactgcgctgactgtgagctgaatacttcagagaccacgaagctcaagatgtactgctatagatcgataacatctttcgcttcacccaggctggttca

SEQ ID NO: 311522 - DNA, 176 bp, Zea mays
cgtaaatgtcacttacactactgcgaacaatgggatgacaagtctgaaaatatggaccttgacgatctctacctacgtcctatgtgccagcatgcgtccaactgctactgactgggttcaagaaaatgactaaagagtaaaaatcaacacatattaaactgatgatgatgctgaca

SEQ ID NO: 311523 - DNA, 109 bp, Zea mays
cagaggagaatcggcaggatgctgaagcatggtaccttactcagattgatgagctgaacacccaggtcgatgtccacactccgcagatccagataaacaagactgaggt

SEQ ID NO: 311524 - DNA, 259 bp, Zea mays
aaagcacttacgttgtgccaggttccactcaagtaaattatatctgccttcaaggagcttgcagtatagtgagaaaagcctgccaagtaaatgagcaggtatagtagataggtatgtcatttaggcactcaataaatgttgactaatttttacagtttcctattactgaggaaaacctccatacactgaggcagaaacttgtgtcagttggaggaaaatagacttgagtagtctttggttcaggtaaattgggtcattg

SEQ ID NO: 311525 - DNA, 245 bp, Zea mays
gaggagcatggcgaggttaagctggggatacgacgagcacaacggtcctattcactggaatgaattgttccctattgcggatggttatcagcagtctccaattgagattaaaaccaaagaagtgtaatacgactcctcactccgacctctcagtatcaagtatgatcctgcctcggcgaagatcatcagcatcagtggccattccttcaacgttgacttggacgacacagaggacaaatcagttc

SEQ ID NO: 311526 - DNA, 287 bp, Zea mays
cagagggatacatggaaaccccagcgcactatctcgtcctcctgctactctggctcccagataccaccggagaatttgtgttgacgcagtctccagacaccctgtctttgtctccaggggattagagtcacccgctccagcagggccagtgacagtatgagcagcagccacttaggctggtaccagcagaaacctggccaggctcccaggctcctcatctagggtacatccaacagggccactggcatctcagagaagttaagtggcagtgggtctgtgacagactt

SEQ ID NO: 311527 - DNA, 289 bp, Zea mays
gaagatgatcagctagagcatgatgataagactcatttgaaagttgtgggtcagctgaccaggtagaagattcaagactcaatgtggaaaaaatattttaaactactgattgaatgataatggtcaatgctagcacaatattcctatgctgcaatacattaaaataactaagcaagtatattgatctctatcggacagatgtttgtgtttcgagatacttcgttttcattaatggtcttaaaaaggcattatcctttgatctcacgaatacgtagtatcttgcagtatt

SEQ ID NO: 311528 - DNA, 271 bp, Zea mays
gcatgccagatcctacagaggtcaacaccactgcaaatcaataattttcataagaaaagcaaacttgaagccacccatctactcttcaaatgtaatctctaacttaaaagtatgtaaccttttcctagacatggtaccataggaacacttggtgatctgggtagaggtgtgggcatttagacaatgtaaagataggtctggcacctcatgccttgccaacctgagaaaatgagctgtgcttgctacaacataggaaagatagatttcatag

SEQ ID NO: 311529 - DNA, 285 bp, Zea mays
tatcgccattgtagtcggcaagtacgcacaggcaatatagtgtggctggacacagggacggtgtgctagaaaagagtgcgcaattgtttcggcagatgcttaaaaatgcatagagtaatgctgaacttaagggcttggatgtagactctctggtcagtgaacacatccaggtggacaaggctccgaagatgcgcagacgaacctacagagctcacggccggattaacccatacatgagctccccctgccacatcgagatgatcctcactgagaaggatcagattg

SEQ ID NO: 311530 - DNA, 160 bp, Zea mays
ctaagatgaagttacttcctcaagatcacatggttcaggacagacacgagattaaaacctggatccacagactgtgttattcagaaggaataatcggtgtattaagaattgctactcgaaggtgccagaatgacactaagtacagaattcctgtcccagt

SEQ ID NO: 311531 - DNA, 266 bp, Zea mays
gggaaatttgttctgctctgatcatactatccataggcgatttgatctgaaaggatcatctcttggccgtataactgacaagccaccagcagaaattgatgagtatacaactctgaaagaccttgatcttaactttatctttcggttacagaaacaatggtaccaagagtttcaaagcaggcaagtggacaaggactgtgagttcctcgagcaggagaagattatggattacagtctattggtgggtgtactttttaggggtgcca

SEQ ID NO: 311532 - DNA, 140 bp, Zea mays
gagaagatccccacacagatgcaggaggtggactctcgactgatgaagaggaggagaccagctctcaagcagaagcggccaggatactggatgcctcctggactcaaaaccgagaagatgcagagaagcagaagctgaag

SEQ ID NO: 311533 - DNA, 135 bp, Zea mays
gctgcaaagatgggggggggggagtatagagccactttgactgcagtccccaccagcggtggtgaggacaccttaactgcctccaccagcctgctgccagccactaactctgtaccggttcaccaagcatttcat

SEQ ID NO: 311534 - DNA, 139 bp, Zea mays
cggccgttctcctgtacaggaggcagctatggcgcccagtcggaatggcatgatcctgaagcgccacttccaccaggactggcagcagtgagtggatacgtggttcaaccagtcggcccgcaggatccgcagacgcaag

SEQ ID NO: 311535 - DNA, 241 bp, Zea mays
aaaggattatgaggaggttggtgtggattctgttgcaggcgaaggtgaagacgaaggagaggaatactagttataaccttcctattggccctgacgcatgtcatgctcacagaatttcagcttcagcttaactgacagacgttaaagctttctggttagattgttttcacttggtgatcatgtcttttccatgtgtacctgtaatatttttccgtcatatctcagagtaaagtcattaaca

SEQ ID NO: 311536 - DNA, 313 bp, Zea mays
gaagaagcccaaaaacagataaattcctgattgctaatttacatagcaatgtattctcttggttttttaaataatagcaaaattaacaatgatctgtgctctgaaagttttgaaaatatatttgaacaatttgaatataaattcatcatttagtcctcaaaatatatacagcattgctaagattttcagatatctattgtggatcttttaaaggttttgaccatttttgttatgaggaattatacatgtatcacattcactatattaaaattgcacttttattttttcctgtgtgtcatgttggtttttggta

SEQ ID NO: 311537 - DNA, 191 bp, Zea mays
atcggaggaagggactccgagacgagggacatggcggtggcggacctcgctctcattcctgatgtggacatcgactccgactgcgtcttcaactatgtgctgatccgagtccactctgctctccgctctcgggctcaggctgcagagagcaaggagatcgtgcgcggctacaagtggcctgagtaccatgc

SEQ ID NO: 311538 - DNA, 293 bp, Zea mays
cagaaattactcaactgcccagcgcatctcacgacccggcctcgcagctccggcgacgatccctccaatggcctacgccgccgccgttagctctccggcgcgtggtgcttgtgtacgctgcgctgcggctcgcactagtggtgttcggggagtggcaggatgcccaccttgaggtgcgctataccgatgtcgactacctcgtcttctccgacgccgctgcctctctggccacaggcggttccccgttcgcccgcgcaacctaccgctactctccaatcctggccttcctgctt

SEQ ID NO: 311539 - DNA, 162 bp, Zea mays
gccgtaatgttgaacaggattggagtattttctttataatttcttggacagcgaaatgtaagcttatgatagaatgcatgtattctgcgttatctttggaacatcagcaccagtatattgctggcagctattgtattaagaaatacagtatattgtcactat

SEQ ID NO: 311540 - DNA, 290 bp, Zea mays
caggccttgccagaactaccactggcaataaagtttttggtgccctgaagggagctgtggatggaagcttgtctatccctcacagtacccaacgattccctggttatgattctgaaagcaaggaatttggtgcacaagtacatcggaagcacatcatgggccagaatgttgcagattacatgcgctacttaatggaagaagatgaagatgcttacaagaaacagttctctcaatacataaagaacagcgtaactccagacatgatggaggagatgtataacgaagctcat

SEQ ID NO: 311541 - DNA, 113 bp, Zea mays
agatgaatgtacgatgagaaattcaacgttaataattctggattttcttatgcacacacagagaatgaaggacctcaaagcacctgaacagtttatcgaccagtttgaatcta

SEQ ID NO: 311542 - DNA, 180 bp, Zea mays
acgagatcgagctcacgggcgaaggcaacagtcgattcacctacagcacgcttgtggatggctgcacgagtcacaccggaacttggggcaagacagtcatcgaatacagaaccaccaagacctcccgcctgcccatcatcgatgtggctcccgtggacattggtgcgccagaccaggaat

SEQ ID NO: 311543 - DNA, 198 bp, Zea mays
gcgagagcatggcagggattcgatggccgccagaggacccggagatcttcccttccaggatggtcagcggcggggcttgggtccccgtcgcgcccccacgagagatggcgtcggacgacgaccggtcggtggccgcggactcgtggtcgatcaagagcgactacggcagcaccctcgacgacgatcagcgttactccg

SEQ ID NO: 311544 - DNA, 101 bp, Zea mays
gtacattaggagtttggtcatgttatttgcatggaattctggggctttgatttaaatcataccttgtattgtgaattccatttagatgtattgtactaagt

SEQ ID NO: 311545 - DNA, 169 bp, Zea mays
agataatcacctttagtattgtgatgtattcactccatctgtattccacagaagaattatatattaagtagatttgaattgtgtatagtttcacatctccctgttcctctgtaaaattgtgctttatgaggaggatggattgtttttaatgtagaagagactagaaaac

SEQ ID NO: 311546 - DNA, 266 bp, Zea mays
ctggtgaatcacctggctgagcagttcccctggagccccttcgggatcagtgctgtgtcccagatgggcacttctgagccttcagagtacgtcctgcctggcacttactggtccttaccagagacgcccagccccatccctgtcctcatgacccctcgtccaccctgcacacacactataaggctgtgggctgccagcagccccgtctgcccaccattcccggccgtggaccatagtcgggatggcagcagacacacatgggcagg

SEQ ID NO: 311547 - DNA, 282 bp, Zea mays
gttgaagttcccaaatactttataatagtgtatcagatatctctaatttggctatgtccagtttatacagtttacaaaatatagcagatgcaatattatgggggaaatcctatattcagagtactctataaatttgtgtgtatgtgtgtatgtgcgtgtgattaacagagaactactaaaaaaaccaactgctttttagatcctattgtgtagttaaagtgtcatgccttgaccaatctaatgaattgattaattaactaggcctttatacttaactaaata

SEQ ID NO: 311548 - DNA, 284 bp, Zea mays
gactattgcaagaagtccaagctcgggatcaccgtgtacccatctccccaggtgtccacatccgtggttgagccatacaacagtgtcctgtccacgcactctctcgtcgaggacactgatgtcgctgtcctgctcgacaatgaggccatctatgacatctgccggcagtcccttgacattgagcgcacaacctacaccaacctcaacaggattgtgtcccaggtcatctcatccctgtctgcatcactgaggttcgatggtgctctgaacgttgatatgaacga

SEQ ID NO: 311549 - DNA, 278 bp, Zea mays
gcagcgcctgctagtcctagccttggccttggctgggtgctgttgtcttgggtctgccgagtctggcctctggggccacggctggctttccctgatgtatggcaagagcctcgctcgtgtgcttccatttctcctgagcttacagctcacagtcttttatcctacgacagcagtggaaatttacacctccggagccctggaggcagttaacgggacagatattcggttaaaatgcactttctccagactttgccctgtgggagatgcgctaaccgtga

SEQ ID NO: 311550 - DNA, 278 bp, Zea mays
catcaccataccagcagaagacaaagcagaagtaatattgtccatagccaatcctgaagatctgatcaccagatggctgaggctgctttccatcctgcttatgagtcccattgccttgtgctacacatgctgtgacctccagtcttaatcctccttccttgcaccacctaaaaagttgtctctcatcctcatcctcaagagttctcgagccactcaacattacgcaaagtctcattgaatggctaatctttccatggctcaggattcatctgaatggg

SEQ ID NO: 311551 - DNA, 294 bp, Zea mays
cagagaagcatcgcatctctgagtctgaaaccctagccgcctgtctccctgtccggtctccactcgtccgggcgacgagacgacgacggagggtttctgcgggggatttgtttgtcgctgactcgccggcgaccaagatgaggccggttttcgtggggaacctagactatgatacccgccactcggagctcgaccacctcttctaccgctatggcagggtcgagcgcatcgacatgaagtcaggaactaccagggcaaaacatagctccccagggctcctcaactcctgaaatt

SEQ ID NO: 311552 - DNA, 290 bp, Zea mays
gtaagatactaaccttattcatatcttaaatattatgttgtctttagcagatcgtgaataaagccgtgtaaaacattggtttgtactgtagactgcactgttcatagagtgaagtttgaaataggagatgagaaatatgatgagtaagctgctggagacagccttaggagttccattagttgatttcgttagcaactcattgtgaaagtgccttctgacatttctagcctggtacactgacagttgttgcctttgtaggttgagaagtaaactcaaagacattgctgatc

SEQ ID NO: 311553 - DNA, 285 bp, Zea mays
gcatcacttccctctggctcctctcctgcttctcccttagtggggcatcgcctttggctgcggggtcaccgcgatccaccctgtgctcaacggcctctccaggatcgtgcatggggaggacgctgtcaccggctcctggacctcgcaggtgtccctgcaggacaataccggcttccacttctgcggcggctccctcatcagcgacgactcggtggtcaccgctgcccactgcgcggtcatgacctccgacgtggtcgtggctcaggagtttcaccagggctctga

SEQ ID NO: 311554 - DNA, 294 bp, Zea mays
tagtgtggaatcttacaacattgtgatagattgctttgccaaggcaggtgaagtggaaagagcactggagaccatcaaagttatgcaagagtcaggtttctctcctaatcttgtgacttttaacacattgataaatggatatttgaaactaggcaatgtacatgatgcaaaagcatttcttaaaatggtcatggaacatggtttaatgccagatgtcattacttttacttcccttattgacgggctatgtcatacccatcagctggatgatgccttcaattgcttcagtgagat

SEQ ID NO: 311555 - DNA, 275 bp, Zea mays
ccaaaggacctctgtgactcatagaagggctagctaaatcctgaagtagcatagtgggacctggtctacaatgtatgcacatgcactgacagccttgctgtgccacgtgtctcaccaagactcagttgggaaagagcgtcatattgccaacaggttgggtttctctggcctacaactgactaatgggctcgttatctttggagacccctaggagtgtccagtagtctcagtgctatattttgcaattgcagtacttaataaaaattgttgatagg

SEQ ID NO: 311556 - DNA, 294 bp, Zea mays
agcggctggccatcgaattccccttcaggcaggctgtcacggccgcctctctcaccttcaccggcgacacaatcgcgcaagtccgcagccgcatcgtcgaccgccgaagatgctgccccgactccaacaccaaggaactcataccagacatattgctgaaccatgattggattcgtgcacttcgtatggcttcctatggatttcttctttatggtccaggttcatatgaatggtatcagctccttgatcgatgcatgcccaagcagacatttgtaaatttgtctgctaaggtca

SEQ ID NO: 311557 - DNA, 290 bp, Zea mays
caatcttcttggaatggagattgtgcaccgttttgtcaagaagcatattttcagtcttcacatcacggtgcacaatcttcttggaatggagatagcttaatcccctggcgaggtcaagagcgaaaatatgcttcttgacaaaacgagaaccgtgaagatcgctgattttggtgttgctcgccttgaagcttcaaatcccagtgacatgacgggcgaaactggaacgcttggttacattgcacctgaggttctcaatggaaatccctacaacaggaaatgcgatgtttaca

SEQ ID NO: 311558 - DNA, 300 bp, Zea mays
tgcggcctctcgaatctgacccatttccacggttcgcgtgcgccgttgccgcggatctgcgtgcttgtggcatcgggttccgtggatctagttgcggtggctttgtttctagtgttattgttaatcatctgcgcactgtgagtggatccataggctgaaccctttgctttcgtttacatctcagcggagatggggctcacgttcacgaagctgttcaggcggctattcgccaagaaggagatgaggattctcatggtcggtctcgatgcagctggtaagaccaccatcctctacaagctc

SEQ ID NO: 311559 - DNA, 301 bp, Zea mays
tgtggacacctcgacttccagattgagcacgatctttgtcccacgatgcctcgagacaattaccacagagtggctcgcctggtgcagtccttgtgtgccaagcatggcatagagtaccagtccaagcccctgctgtcaggcttcgctcgagatcatccactcactaaaggagtcatggtagctctggtcagatcgctatcttcaccagtaacgacagccaccctgcccagtctggaagaagaggacgaagactctggagtcaatgcagaggggagcttgacggacaatgccactatagttt

SEQ ID NO: 311560 - DNA, 284 bp, Zea mays
  unsure (1)..(284): unsure at all n locations
actcgaagagtaccagcttactatatacatgaccccaactagcgctctgcgagtagtcatgcctcagatctgcttcgtgattaccgttcggagcggctcagaagtccggatcccatacgatggggacnncaacgangtgcccaagaccgcgganaacttccgcgcgctgtgcacgggcgagaagggcgtgggcaagtccgggaagccgctccactacaagggctccacctgataccgcgtcatccccgagttcatgcgccanggcggcgacttcacccgcggca

SEQ ID NO: 311561 - DNA, 322 bp, Zea mays
  unsure (1)..(322): unsure at all n locations
caccaactgaagttttgcataaaggaaaatcgaaattcccctcgctctactctgaatcctgcaagagtttgactgatataacttttacttcagatgataagtcacggatatttgcatctggccttgatggggcagtgtacatgtgggacaggcgatcaagtaagacacactgtcttgagcttgtggcatctccagaagctcagttcaacactgtcaagttaactgtggataatcggactgtgtttggtgcaactaaaaatggcacaattcatgtttgggatctccgtggagggagggcatcagctgcttttcanagccacaa

SEQ ID NO: 311562 - DNA, 303 bp, Zea mays
cagtcttcttacggaccctatgactatatctgctgcatatcttaaaatgaagacattgtgcattaacatgagtcgtgaaattcaagctgacattaagattcacaaccagaatatacttccaagttccatagatctgccaaacatagcagcatccctatatagtaccgaactctgcaagcggctgaaaggttttctttcttcaagtcccccatcaagaccagtacaacatgttgctgaactgataaccgcaacttctgagtttgagagagatcttgaatcttggcaagtgagactgttcatggc

SEQ ID NO: 311563 - DNA, 247 bp, Zea mays
gcatcaggcaaagctgttagattcccattgcaccctggcaatggtacgcatgggtccatgtgcatcgtgaaggcaaatcgtttctttgccgagctgcatgatacagccactcctccaatacgatgtatcaataacgcctgtggttccttcacgtggtgtcaatcgtgctgtcatgaaagagcttgtaaaccttcatagacactcccatttggattagcgtctgcctgcatatgatggaaggaagagt

SEQ ID NO: 311564 - DNA, 304 bp, Zea mays
gttaaggtcataacgatcatgatgtggtggtctcagcctcggttatttgttggtagagggatgcacgaaggtgcattctccctcttcaagtataccatgttctggattattcttttagcaatgaagttgattgtaagcttctatattgagatcaaacctctggtacagccaaccaaagatataatgagagaacctatcaggacattccagtggcacgagtttttccctcatggaactaacaatattggtgttgttatatcactctgggctccaataatcctggtatatttcatggacacccaaa

SEQ ID NO: 311565 - DNA, 289 bp, Zea mays
cccgagtctccagccaaccacatccagtccaccccatccccctcgaccccgacaaccccgagtcccgacccgatggcgcccaaggccgagaagaagccagcggagaagaagccggcggccgaggagaaggcggagaagacgaccgcaggcaagaagcccaagtccgagaagcgcctgcccgcctcgaagtcctccggcaaggagggcggcgagaagaaggggaagaagaaggccaagaagagcgtgggagactacaaaatctacatcttcaaggtcctaaagcaggtgc

SEQ ID NO: 311566 - DNA, 296 bp, Zea mays
caaattcgttccgtccaggcaaggaagaaatcgagcagccaaggagaggagaagatggctcgtacgaagcagaccgcccgcaagtccaccggaggcaaggccccgcgcaagcagctcgccaccaaggcggcgaggaagtctgcgccgacgaccggcggcgtgaagaagccccacaggtacaggcccgggacggtggctctgcgcgagatccgcaagtaccagaagagcacggagctgctgatccggaagttgcccttccagcgcctggtccgtgagatcgctcaggacttcaagac

SEQ ID NO: 311567 - DNA, 271 bp, Zea mays
acacactctgcactccaggaagctacgttgactatttctcctcctctgtgtatcaagctgtggctgacatgctggagacgcaagagccctgatctggccacctggcaagagccgcatttatttctctgaataaatgtgctcctaaaaaaaaaaaaaaagggcggccgccaaaaatccaggtcaccagcccgggaattattcccggcccggaaccttgaggggtaaaacctttcccaagagcgagccgtgtaagaacttggcggaaacatgg

SEQ ID NO: 311568 - DNA, 133 bp, Zea mays
aaagaaattgacgccttagaatccagagtggaatcaattcagcgagtgttagcatatttgaaagttcagttgtatgcaaaattcgggagcaacataaaccttgaagctgatgaaagttaaacattttataata

SEQ ID NO: 311569 - DNA, 118 bp, Zea mays
ctggatcctactctcttattaaaaagatttttgctgacaatagaggaacggtgcctcacgcataatgatcaaggcaagctgagcttcgaccagcttgggggcatatcctcgaggaatc

SEQ ID NO: 311570 - DNA, 269 bp, Zea mays
gtgaagagattccagaaaacactacacgtggaagcagttgttccgagtgtaattgagccctcttttggcctgggcaggatcatgtataccatattggagcatacattccacgtccgggagggagatgagtctagaacgttcttcattttccctgctgtggttgctccattcaaatgttctgtccttccactgtgccagaaccaggagtttatgccatttgtcaaggaattatcggaagctcttactcgaaatggcgtgtctcataaagt

SEQ ID NO: 311571 - DNA, 280 bp, Zea mays
ggctgtctggtgtatagtactgtgttactcagcatccctggcctctgcccactagacatcagaagcactcccccagttgtgacaaccaaaaatatctccagaccttggcaaatgttatctgtgggggtgaattgccctcaattgagaaccactggtctagctagacctgcactgtccagtacagtagccactagatacatgtggctaaacttagatttaagtgacttacgattcaaagctcagtttctcagtcacattagtcattccagtgttcagacag

SEQ ID NO: 311572 - DNA, 299 bp, Zea mays
  unsure (1)..(299): unsure at all n locations
ttcataatcacttttaaaattttatgtagatgtgaactgatgtatcgaagtctgatgtaatcatagatgtcaaaatttaataaattagnnaggaatagnatacaaagtgctctgaaattctaagagctaaatttactcttttgacataaagtcaaatgtagaactctagcaatgtattaatctcctttattattggtatagttattattgnatatctaagttcnacatgggctatgtataattttcactgtcatactggaaaacaataaaatttaaaaaatgcattcaaaatggaaaaa

SEQ ID NO: 311573 - DNA, 238 bp, Zea mays
gcagcctgactgccttcttgtcgcttacaccgttgctccagattcaccagatctcggaatggaccccaactgctcctgctccaccggcgggtcctgcacctgctccagctcctgcggcttcaagaactgcaaatgcacctcctgcaacaagatctgctgctcctgctgccccgtcggctgctccaaatgtgcccagggctgtgtctgcaaaggtgcctcggacaagtgcacctgctgt

SEQ ID NO: 311574 - DNA, 272 bp, Zea mays
gtgaaatagaagattgtcggcagaaacagcccaggcgttggcagcacggttagaacagctgcctgaggctcctccctgaaggacacctgcctgagagcagagatggaggccttctgttcacggcggattctgtgtcttaatcttgcgatgtgctttgcttgttgctgggcggatgatgtttactaacgatgaattctacatccaaagggggataggcacttggacccccattctccaaggcccgatggggcggtttcccatgggatgtaaaa

SEQ ID NO: 311575 - DNA, 290 bp, Zea mays
ggcagtgtgacattgacatccgcaatgattcatatgctaataatgtcgtctctgggggcactaccatgtaccctgggattgctgacaggatgcagaaggagatcacagccttggctcccagcaccatgaagatcaagatcatcgctcctccggagcggaagtactcagtctggattggaggctccatctctggcttctctctccaccttccagcaaatgtggatcagcaagccagagtatgatgaagcggggccctccattgtccacaggatatgcttctaaagtcacag

SEQ ID NO: 311576 - DNA, 186 bp, Zea mays
  unsure (1)..(186): unsure at all n locations
gtcagggtcttgcctgccaatctctacacagcataggccgcgcnacacgtgctctggtctccangtccgattcctcaggctggccttgtngccatgggggcaatgccaacccccacaagtgggtgcgacacctaagccacagcgacgcctatgtcattcggatctgaggctccccaaacgaggaca

SEQ ID NO: 311577 - DNA, 273 bp, Zea mays
tctcagcattcccgccgacatcaaggacttgcccatgatgaatccgcaccgactttacgttaacaagaatgtcaagctggacgacctccaggtctacggcttcgactacgtctacacgctgtcgcatgactccgagcagctgcaatgccttatctacgatcttgccataaggcacttcgtcaatgagttgaagtatccgtagagttgcttgcagtacgagtatgaccgcatcttccccatcacgggtttgtactatgagcgtcttaaagggtg

SEQ ID NO: 311578 - DNA, 258 bp, Zea mays
caatgagtggactgtgaagactgtgatagcagaaagctctgttcctgcctcagctgatgcctatccagaaatagataaattctttcccttcaatcctctagactttgagtgtggtgtcctgtctgaagagcaccagattgcgcacctccccttgagtggagtgcctctcatgatccttgacgaggagagagagcttgaaaagctgtttcagctgggccccccttcacctgtgaagatgccctctccaccatgggaatc

SEQ ID NO: 311579 - DNA, 178 bp, Zea mays
atatggtgagggcagcgtcacattctcaggatatctcgttggttagtcagggttgctagagctgtgattggaggaattgtggcaatggcggatgtgccaatgatgctctttgccatgggcgtcactgctgcggtaatcgcctcgtcgtcgatagcacgcatgatgatgtcggtggcgg

SEQ ID NO: 311580 - DNA, 180 bp, Zea mays
ggtcacctctgtattagtccttactttaatgatgctagcgccgcgttaagtgcttagactcagcagcggggtagcatcaaagttcatgcggtaagatcgtatatgcgggtcgctaccctaggagaatggctgctgatatggctactgcatccacatcttgagatctgtaaattgctaatt

SEQ ID NO: 311581 - DNA, 298 bp, Zea mays
  unsure (1)..(298): unsure at all n locations
gaagctcttggacaacatctctcgttctccttccccatttccactgtatatttctcattggattgccttcagggattcactgtccccaacaggaatttttaaaccacaacaccccaacttggcagctttttctgtggaggacagacggccggtcggacctctgagcacatagtgtcctgcccaccctataagctcctccagtcctgccgggcacatgccgangggacgcctgccctgccaacgtggtctcctggccggtctcagctctgatagactttgtgaatctgaactgcactac

SEQ ID NO: 311582 - DNA, 290 bp, Zea mays
  unsure (1)..(290): unsure at all n locations
ggctcgaggtccgtcctaccaccacagctagccgcggtttggcttactcccctcttccgcaccgctatctcgctccggattccggattccctctgcactttacccaacgaaggtagccatggcggggagaggtaaggtgatctgttcatgtgccgccaagatggccacgtccaggagctccaaggctggcctccagttccccgtgggaaggatcgccaggttcctcaaggccggcaagtatgccgagagagtcggcgccggcgcncctgtcatactcgctgccgtgctcg

SEQ ID NO: 311583 - DNA, 220 bp, Zea mays
ctgtcctataatattcattctttttgaaatgtcaaccccaagttagttcaatctggattcatatttaatttgaaggtagaatgttttcaaatgttctccagtcattatgttaatatttctgaggagcctgcaacatgccagccactgtgatagacgctggcggatcctagcagatggccaatgagatcattgtgaaggcatgcgaatgtatgtgcacatc

SEQ ID NO: 311584 - DNA, 276 bp, Zea mays
gggctactgactctgccaccatagtgtcaccaccaccatgatctcgcccctcatccctcagcacagatcccagccagtctctactcagcctgaagcaaggtgggtgatgggtaggtgggtagggcggggcagggctcatcttctggggtgtgggcaggcacgacagcccctgccttcctccctgatggtgcatcaccggcctgtgatgctccccgtctccccagaaccgctgttgtcccggatgggcagcctgcgggctcccgtggacgaggaccg

SEQ ID NO: 311585 - DNA, 275 bp, Zea mays
catctctggaaatgtacaatttactattacactattgttacttagggctgacaggacaactggatcagtttcattataaagggcaaacttgtagataaatcatttgactccagctctttagaggatctaaagtgaccttgatggacagtggaatatctcacaacatggagttcctcgaataacaatttattgactttaaataattttgtctaatgctacatatacacaattatgaagcctatacactacagaaggagagcaccctccaccttgtg

SEQ ID NO: 311586 - DNA, 297 bp, Zea mays
tgcaccacaggaaagcgctgccaccggcaccatgccccacccatacccagcactgaccccggaccatataaaggagcttgctgacatcgctcaccgcattgtagctccgggcaagggcatcctggctgcagacgagtccactggaagcactgccaagcgcctgcagtccattggcagcgagaacaccgaggagaacaggcgcttctaccgccaactgctgctgactgccgatgaccgtgtgaatccctgcattggaagggtgatccttttccacgagacactataccagaaggcaga

SEQ ID NO: 311587 - DNA, 304 bp, Zea mays
tgggattgctcatgaggttcttcagtggtatttgtgccgtatggagggttggtttgccaccgacgctgattcaatttcactacagggttgggatcaggtatgggttttttggtttgtcgctggccagtatacgtgcgcattatgagattactgtgccttattacatgataatgttgacgggatgtaggaggtgctgcttccaggtggccatggcctcatggttcgtgggtatcgtccggttataaatactctcgcaaaaggcttagatatacgcctcaaccataagtacgcatatctatccttt

SEQ ID NO: 311588 - DNA, 281 bp, Zea mays
  unsure (1)..(281): unsure at all n locations
ggcggcggctgttccgcagcgtgcatggacgctggagcagctgcgcaggagcagctgcccaagaaggacattatcaagtttctgcaggatcacggttcagattcgtttcttgcagaacataaattactgggaaacatcaagaacgtagctacctctgncaataaggaccatttggttactgcctacaaccatctttttgaaagtaagcgcttcaagggtactgaaactataagtagagtatctgaacacgtgaacaacgtgaagcttaatgacgataaaca

SEQ ID NO: 311589 - DNA, 287 bp, Zea mays
ggatgcatgcagaggaacgagaggagagcaaggataagcgccgggacagtgcgccctatggggagtacggcagctggtacaaagcctgtaaagttgacagtcccacagtcaacaccactctgcgaacttcgggcgccctgtaccggcgccagggcaagctggaagctgcacacacactggaagactgtgccagccgcagccgcaaacagggcctggatcctgccagccagaccaaggtggtgacactgctaaaagatggtagtggtggacgacgagaccgccgtggc

SEQ ID NO: 311590 - DNA, 292 bp, Zea mays
gtgagaaatgcagcccagcgcaaactatttgatgagctgggaatagtggctgacgaattacctgtcgaccagttcattccgcttgggaggatgctttacaaggctccttcagatggaaaatggggcgaacacgagtgtacatacttgattgcctcttgccattacatgatgggttcccagttcccatactatttgtgtttgctgtactctgcatgtttcaagggtctgctttgcagttgcgggctttaaaacctttcctatccttgttatttcagtggattacctcttgttc

SEQ ID NO: 311591 - DNA, 285 bp, Zea mays
tttatttgaatgcttatgcttatgatgctcaaattgctggtttgttctattcaatatatcttacttctgctggattccaggtttctttaggtggttacaatgacaaaatgagagctctcttaaatgccatactagtgcaaattgcgagttttgaagttaagccaaacagattttctgccctaaagatttgaattgttgacatgatattttagaagtcctgaaaaagtaccaaggttccatgcaccttgtgcgctgcatgtgttgataaatttgctgaccaactac

SEQ ID NO: 311592 - DNA, 269 bp, Zea mays
actcaagatgaagggtgattactacagatacctttctagctgctccagtcttgaactcagcaaggtatctgtagtaatcacccttcatcttgagaatagaagactggagctgagagaaaggacgccgctgagaacacgatggtacgctacaaggctgcccaggacattaatctggctgagcttgctccaactcaccctattaggcttggactggcacttacattctcagtgttctactatgagattctgaactcacctgatcgcgcctg

SEQ ID NO: 311593 - DNA, 254 bp, Zea mays
tgtgcatcgacaatgttcagctacatcaacctgtatggcaagtatccaccgggcctgttctccagcgagtgcaaagaaggcaagcaggggctctcttgcgcagatgtcctcgagagagacagtgccactgcaagcagtggtcatcacgctcaaatcagcttgcttgcgttgattactgtcttgagtgtggtagtagcgttgttccactgaactatatatgcattctccccaaatatggtgtgctacaactaaat

SEQ ID NO: 311594 - DNA, 265 bp, Zea mays
ctagttctatgcgagcgcccggccgctcgcgatctagaactagctggagggtgccttccccgacaccatgaccaagtgtgccgagctgctgagccgctccgtggaggtggactttgtggacatcaacgtcggctgccccatcgacctcgtgtacatgaagggtgggggctgtgcctcatgaatcgctccaccaagttccagcagatcgtccgtggcatgaaccaggtgctggatatgccgctgactgtgaagatccgcacaggcg

SEQ ID NO: 311595 - DNA, 152 bp, Zea mays
atcgctgcactcggctcccacgacgcccggctacggttttaaatacttaccgatgccgccgtctcagcgagcgacactgcgatatgcttagtaagccatgtcgctgcgcacgagcgagcaggtcgaagtgcggcggaaccgctacaaggtgg

SEQ ID NO: 311596 - DNA, 163 bp, Zea mays
agggcaagctgcagacacagacatgacaacccagctcatttactccaacctagagctccactcactctacactggccgtacttccagagttgtgacagccaatcggatgctgaagcagatgcctttcaggtatcaaggttacattggtgcaggcctagtttta

SEQ ID NO: 311597 - DNA, 135 bp, Zea mays
agcatttttacctgcagaaaaactttgtatggtaccactgtgttggttatatggtgaatctctacgtacatctcactggtataattatatgtagcactgtgctgtgtagatagttcctactggaaaaagagtgga

SEQ ID NO: 311598 - DNA, 130 bp, Zea mays
tgtctgagatctcaacggagcaggctatcgcgctcctcaatgaccaggtgccgggggcctttctcatccgcgacagtcactccttccgaggcgcgtacgggatggccatgcaggtgtcttcgctaactcc

SEQ ID NO: 311599 - DNA, 276 bp, Zea mays
ccaccgcgtcatccccgagttcatgtgccagggcggcgacttcacccgcggcaacggcaccggcggcgagtccatctacggcgagaagttccccgacgagaagttcgtgcgcaagcacaccgcccccggtgtgctctccatggccaacgccgggcccaacaccaacggctcccagttcttcatctgaaccgtcgcgaccccttggctcgacggcaggcacgtcgtcttcggccaggtcgtcgagggcatggacgtcgtcaaggcaatcgagaaggt

SEQ ID NO: 311600 - DNA, 184 bp, Zea mays
gaacgttgaggctcacaagccgcacgagtacaactggactggctacaggcgcctcttccagatgatcagggaactcaagctcaacttgcaggtcgttatgtcatttcatgaatgtggtggcaatgttggagacgatatatccattcacctcccacattgggtaatagagattggaaggagcaat

SEQ ID NO: 311601 - DNA, 270 bp, Zea mays
ggcgaccccaactacctgcaccgactccctacgctcttctgcatgcctgtgccgcacgacgtctgtgcacaggatatcaccaccacgcacatgctacccacggttctgcgcatggctgcggcaacggttgcaaatgtcacgcttcaatgtggcccagtctctgcagaagatagaggccatcctggacaacagcccattgccgagtgaagtcaagcacatcctagagtagctgacacaggaccaggatgtggacgtcaaatactttgccca

SEQ ID NO: 311602 - DNA, 209 bp, Zea mays
caactctcatgacagactgcaccagcctgtgttgcaaacatcactgccccgcttctaacaggaagagatactcttttggaggtcttgcaggtaccaggaccagagccccttctacccagggcccttccaaaggcaaagcacagagtcacatttgggcgtggcatgagagggaaataaacagactatacggtagtgggagggaggtttca

SEQ ID NO: 311603 - DNA, 257 bp, Zea mays
  unsure (1)..(257): unsure at all n locations
cgaaatgcagcacctgtgcatcttcctcccgctggtggcggctcccagatgggtcctgtcccagctgcctctccaggactcgagcccaagactggtgaagccttcggagaccctgcccctcagcggctctgcctctggcggctcctttannaggagtagtttctacggtgggtgaatcggtaattccctaggtaagagactgcagtggattcggagtatctattatagtggcacaacttattacactccgtccctca

SEQ ID NO: 311604 - DNA, 243 bp, Zea mays
gtggactgatcgcaactgatttcctgggcagtgaggacggcgccgagcatcgccaggccgggtggggaggatcgcgcaggggaccaaggtgctggcggagggcggccacgacaggatattccgccaggccttcagcgccccgcccgacgagcagctgcgcaagtcctacgcgtgctacctctccacggccgccggcccggtgatgggcgtcctgtacctgtcgacggccagggtcgccttctg

SEQ ID NO: 311605 - DNA, 157 bp, Zea mays
gaagatgtcgacattcagactgagcgtgcctaggcgaagcagatgaccagctttcaaaacaagaagagggtcctgctggcagaaactggaaaggagaagatcgcgcggtactactagagcatcggtctgggcttcaagacaccgaagaaggctattg

SEQ ID NO: 311606 - DNA, 154 bp, Zea mays
agattgcgggggataaatgagcttagttccgtagcaagagcgctggttcggttgatatagacagcaacagtacccatatttgcactagatactgatgggtgtataaatggttggaatgcaaagattgctgagttgacagggcttccagttgagg

SEQ ID NO: 311607 - DNA, 156 bp, Zea mays
accggcccttgctgccaccaacatggagactttgtaccgtgtcccgttcttagtgctcgaatgtcccaacctgaagctgaagaagccgccctggttgcacatgccgtcggccatgactgtgtatgctctggtggtggtgtcttacttcctcatcac

SEQ ID NO: 311608 - DNA, 253 bp, Zea mays
ccgcatggcgtctgtgtcgctaagcgaggatgtgaacgtctacatcgtgcatggcgtgcaggcagaccttcgggtggatggccgtggctgtgcggactaccgatgcgttgaagtagcgactgccgtggcgtctaacaccagtgggtctgccagagtcgagctgggtcatacagtcatcttggtgggagtgacagcagagatggggacaccgcagctgcagagacgacgcgcaggctacctctagtcctctgtg

SEQ ID NO: 311609 - DNA, 258 bp, Zea mays
cgctcgcctctccgccccgcgtccagctcgcccagctcgcccagcgtccgccgcgcctcggccaaggcttcaacggaccacaccaaaatgccatctcaaatggaacacgccatggaaaccatgatgtttacatttcacaaattcgctggggataaaggctacttaacaaaggaggacctgagagtactcatggaaaaggagttccctggatgtttggaaaatcaacaagaccctctgtctgtggacagaataatgaag

SEQ ID NO: 311610 - DNA, 134 bp, Zea mays
  unsure (1)..(134): unsure at all n locations
gccaatgttgcagacaatggcattgttcttcatcttcctcatgtggtcaaccatgatgaagatgaagaacaatgccagtgtctgcancttggcacctttgacgatgaaattgctatgctcggccttgagaccta

SEQ ID NO: 311611 - DNA, 123 bp, Zea mays
gctggctctgatgggacacatcagggcaggaagactatgatcgactgcggcctctctcctacccggacactgatgtcatcctcatgtgcttgtccatcgacagccctgacagcctggaaaaca

SEQ ID NO: 311612 - DNA, 167 bp, Zea mays
gcaaaatccaagattgagacagcaatcaagaacaagatgcaacaggaatcacagaagaaagcagaacttcttgataatgaaaaaccagctgctgtagttgctcccattacaacgggctatacggtgagaatcagtaattatggatgggatcagtcagataagtttgt

SEQ ID NO: 311613 - DNA, 117 bp, Zea mays
ttcggctcgagaggagtcaccttcgatgttaccaccgttgccaccagaaggcggaccgatacagtgcagaagctgtgcccaggggggaagctcgcattcctgctgtatggcacttaa

SEQ ID NO: 311614 - DNA, 106 bp, Zea mays
gcctcgagtcttgtcgcggcatctccaagaaggatgtgtttagtctgaggcgggaaatccacattcccagcacaggctctgtggagatggctgtggcagtgttcat

SEQ ID NO: 311615 - DNA, 164 bp, Zea mays
gctcctcccacagtgagatcgatcgagcttccacctcctgtcatcctcctcctcttcctcctcttgcaggtcgcagctgagcagcaacaaggccggaaaggatgtcgtggcagacctacgtcgacgcgcacctcatgtgcgaggtcgagggccaccaccacctc

SEQ ID NO: 311616 - DNA, 266 bp, Zea mays
gcctaccacaatggcagatccttctccacctttgacaaggacacagattcagccatcaccaactgtgctctgtcctacagaggggctttctggtacaggaactgtcaccgtgtcaacatcctggggagatatggggacaataaccacagtcagggcgttaactggttccactggaagggccacgaacactcaatccagtttgctgagatgaagctgagaccaagcacagcagacatcttgaaggcaggcgcaatcaggcataaatt

SEQ ID NO: 311617 - DNA, 122 bp, Zea mays
gttcaaagatggctgctgtaatggctttgactgtcctgcgaagtcggataacgcgatggccgcagtgggcctgcgaggggccggccccgtactgcgcggtcagaaggagcgtctttgggttt

SEQ ID NO: 311618 - DNA, 151 bp, Zea mays
gaaagggaagggaaaggtgaccttgtgctgacaggacagcttggagatgtaatgaaagagagtgctcagattgcgcacacagttggcagaactgtattactggagaaagagccagataatcattgttttgcaaactcgaaggtgcacttgc

SEQ ID NO: 311619 - DNA, 150 bp, Zea mays
gaagagttggatgaccataaaattcaggtgactcctccaggcttccagctggtctttttaccctttgatgatgagagaaggaagatgccctttactggaaaaatcatggcaaatcgagagcaggtgggcaagatgagggctatcgttgag

SEQ ID NO: 311620 - DNA, 263 bp, Zea mays
ggaaaccgttgcaaggatcctcaatggcataacttggaccgctactttgaaaaactggcatctgaacgaaccccacaaagttatctgaaagaaaaggcagaatcagtgatgcagaaactggtcacctgcgttcaaaatacagttgaattatatcatgaattgcatgctttggatagatttgagcatgattgtcgtcttaaacagaaagaacaggatggcttgagttcaagaggagacaacctggatatactgaagcaggaatt

SEQ ID NO: 311621 - DNA, 282 bp, Zea mays
cggaatgcatgagccgatctcagagatcaagaagcattgaacttctggagaagcacaaggatttactgaatctttttaatagaatggagagttctataaggttgctacgcttacggaagaggatggctacatttaataatattgccacccaggtggaaatactcgcaaaaaggaagttatcgtactgtcatttggcccaaatgaagtatttgtttccagaagcaatccagattaagagggtacttctacagtgacgagaaacctatgcatgtatgctgatat

SEQ ID NO: 311622 - DNA, 279 bp, Zea mays
acgcagacgggcgaacaagatgagggagatcatcagcatccacatcggccaggccgggatccaggtcggcaacgcctgctgggagctctactgcctcgagcacggcatcgagcacgatggcaccatgcccagtgattcctcggttggcgtcgcacatgatgccttcaacacgttcttcagcgagactggttccggcaagcatgtgcccagggccatcttcgtcgaccttgagcccactgtcatcgacgaggttcgcactggctcgtaccgccagctctt

SEQ ID NO: 311623 - DNA, 152 bp, Zea mays
agcgcttgagggggactggcctggcgtgcactccgcacctcggggacattattgcgcgtggaacggctgcttttggaagactattgcccagaagaaaagatgtttggttttcacaagccaaagatgtaccgaagtatagagggctgctgtat

SEQ ID NO: 311624 - DNA, 170 bp, Zea mays
cccagatcatgcctggcaagtcgtgacgatggactttatttctgggctgcctgtgtcccacaagtacaattgtatcatggttgtggtggataagttttcgaagtatgcacatttcctagcactagctcatccgttcacagctttaaccgtagctaggctttatctgtcag

SEQ ID NO: 311625 - DNA, 198 bp, Zea mays
gactaataaaaagacacctgtattcgaacatggattagagctttggagggatactatagttcggtctcctatgattcaggggaggttgtttgacacgcttctcgagctcatacatagagaaaggactggcgacgtgataaatagaggcttgatgaggactacaactaaaatgttgatggatctagggttgtctgttta

SEQ ID NO: 311626 - DNA, 201 bp, Zea mays
aaataaggtggatccaagactagcagttgaacagaatggacaaaatgctgatgcaacaacaaatggtgcttctgcaacaacacttgaagctacacagcctgttagtccatggggtgatgttgatcatctccttgatggatatgatgaccagcaaaaggctctgatacagaaggaaagggcaagacgaataacagaacaaca

SEQ ID NO: 311627 - DNA, 301 bp, Zea mays
tgagcactatgcgtgcatggttgacatgtttgggcgagcaggccttcaaactgaggcaaagcgattcattcaccagatgggacctaagcaagatgcatcagtccttggggcactcctttgggcttgcatgaactgcagggaccttgagatgggtaaggaggttgccaagaagctttttgtgattgagccaagtaataccgggaactatgtcctgcttgctaatatctatacgtcacatggaagattggaggaggcaaaggaggtgcggaggtggatgatgtttcaggagttaaggaaggaa

SEQ ID NO: 311628 - DNA, 228 bp, Zea mays
atgataattacggaacatatccccataacaaacttgtttacatgcatttggttcaatgaagttgaccgcttcacgtccagagatcagctaagcttcagcacagttagggataaaataaggtggcgagttaattggactgcagacatgttcctggattgtgaaaggcgtgattttattgttcagtcgtaccaccgagaactgttggaacagaggcagtctgccttacga

SEQ ID NO: 311629 - DNA, 132 bp, Zea mays
  unsure (1)..(132): unsure at all n locations
tccaaaccagacaagcaaggaatcccccgatggctcatcgcgttctcctcctcctctatctcgcgtcggcagcagcggttaccgccgccgtcgacgcggaggaaccgacaaacaggcnggtggttcccggtg

SEQ ID NO: 311630 - DNA, 279 bp, Zea mays
gatttatccgctgcagccatgagtaagttgcagtctgagtctgtcaaggatgccatctcccagattgttggggatgccaaggagaagaataggaagttcactgagactgtggaacttcagattggtctgaagaattatgatccacagaaggacaagcgtttcagtggctctgttaagttgccccatatccctcgtcccaagatgaaggtgtgcatgcttggtgatgccagcatgttgaggaggccgagaagacgggacttgactacatggatgttgagg

SEQ ID NO: 311631 - DNA, 216 bp, Zea mays
atcgcgtgccctcgctgcagccatcttccatggcggaccagctcacggacgagcagatcgcggagttcaaggaggccttcagcctcttcgataaggatggcgacggctgcatcactaccaaggagcttggaactgtgatgcgctcccttggccagaaccccactgaagcagagctgcaggacatgatcaacgaggttgatgctgatggcaatggga

SEQ ID NO: 311632 - DNA, 290 bp, Zea mays
cggctcgagaatcttcaatggaccctttgtgaagctcaacaaggcttcgattaacatgctgaagcttgtagagccatatattcgctgggggtaccccatctgcagtcactaaatgaactaatctacaagcgtggttctggcacaatcaataagaagcgaattgctttgacagataacgccttgattgctcgatctcttggtaaatacggcatcatctgcatggaggatttgattcctgagatctatactgttggaaaacgcatccaagaggcaaataacttactgtggcc

SEQ ID NO: 311633 - DNA, 263 bp, Zea mays
caatcacctaatgctcataaggtactctgtggatatctccttggacaaaactgtcgtcagtaacgatgtcttcagagatcctgctcttaaacgcaaggcccgacgggacgccaaggtcaagtttgaagagagatacaagatcggcaagaacaagtggttcttccagaaactgcggttttagatgctttgtctcgatcattagaaattatgtagagaagcggaaaaaatcgagtgccgcaagatccagacccctacggccgggg

SEQ ID NO: 311634 - DNA, 291 bp, Zea mays
gaaagtttgtgagggcggcggcaaagcttcgcaggagacgctcaatcctggttctcgaggctgagcagggatttacacgacaccatgtcgagcacaacacgcgcgaccaacgacatcgagaagcgcgctcacgcgcaacgtccaagcttcgcatgttgaccagttcagatccacgagttcaaagaggccttcaacatgatcgaccagaaccgggacggcttcatcgacaaggaggacctgcacgatatgctggattcaatggtctataatccaactgatgaatacctggac

SEQ ID NO: 311635 - DNA, 282 bp, Zea mays
tcttattcctctgatatgatcctatttgggagcccttctcaacttgcgattgatttacaacagcctcctctcagtcgatatccctgcctaaaggctcgcagcttcagtccagtgtgaagacctctgccacataatcttagatcactgtgatgtccttgtctgacaaagagggtttggatatcagtaggatgactaacatcccagtggacagaatgagcggagaacatgaaagcagagtttctagaacatcaatgtctagcaggcttatgatagtggccatcg

SEQ ID NO: 311636 - DNA, 272 bp, Zea mays
tttgagctactagcccgcctgtgtccaaatcggatgtctctttccacactacttatgcgaaaatgagatctaaagatgtggaaagagacatccgatttgagctacttgcccgcctgtgtccaaacagtactggagcggagattagaagcgtttgcacagaggctggtatgtttgcactccgagcctggagaaagattgctacagagaaggactcttagaagcgtaaataggtcacaatcgtatgcaatttagtgctactcccgctactgaca

SEQ ID NO: 311637 - DNA, 215 bp, Zea mays
gtaatattgttcatgaaggtggatgtagggaatggtcgtttccttcacatgaaagtcctcagaggcctttctggagacgatgatttgaaacttcttgattaccagactaacaaaaccaagaatgatgagctgactgacttctaagcagctaattctaaagtgacctgattcctatcactgtaaagaaatgcagccatcaataaagaaacattctt

SEQ ID NO: 311638 - DNA, 234 bp, Zea mays
atcatgtggctactaaaccatatgccattgttggcacgaagcccagaatatttccaggtgatacaattctggagactggagaagtaattccacacatcatagacttaaccgataaacatcattgaagagctcttaaaaatttaaaaaacttgtgtaacagcacatgtatgttccataatgctgtatttactgaatctatttcctagaaaagtaattaataaaacttattcctgt

SEQ ID NO: 311639 - DNA, 274 bp, Zea mays
  unsure (1)..(274): unsure at all n locations
ggcagagaatccccaagcaaacaaacagggtagaggtagagggagaggagaggagaggagaggagaggagaggttgggtctgggacaccatggctcagatgaagctgtacggggcggtgatgtcgtggaacgtgacgaggtgcgcaacggcgctggaggaggctggctccgactacgagatcgtgccgaccantttcgcaaccgcggcccacaagagccccgagcacttcgtcggaaacccgtttggtcaggttccactctgcaggatggtgat

SEQ ID NO: 311640 - DNA, 302 bp, Zea mays
acgacccaggtctcggactcgggctcggccccggaagacgacgaactccgcactcgacgccccagggctcggactcgggatcagcccggaagacgacgatctccgcctcgcccgaccccagggctcggactcggcctcggcctcagccgacggtatccgtctcgcccgacccaagggctcggactcgacctcgacctcggaagacagatttgacctcgacctcggaggagcctccgcctcgccctacccagggctcggaccaaccagtcacatgaggcgccatcattaccctaccccaagct

SEQ ID NO: 311641 - DNA, 271 bp, Zea mays
ggaagcacctgctgggaattccactgagtccaagctgaagcaacctgcaaatagcaatgcggtatctgccgactctgggatgtcgaaccctggagtgaaaggtgattccagtgtttgtacccctttgaggcaggctaggtctagtctgtctctttcctttgctggtttgactggtgagagtagtgcgggagaccaccaagattgtgtggtatcatcattgcttcttatgggtgagcctccttggcagcctcctggccccgagggctcaatt

SEQ ID NO: 311642 - DNA, 271 bp, Zea mays
ccggcgcctgcacccggacgtaaccatcgtctacgccgactggtacgaggccacgatgagcatcttccaggaccccgggaagctagggttcacaaacgctctgcggacttgctgcgggaaccagaccgtgccgtgtggcaggcccgggtgctccgtctgcacggacccgtccacgtacgggtcctgggacgggacgcacccgacggaggcggtgtacaaggtgatcgccgacggggtgctgcacgggccgcacgcgtcccctgttcctctc

SEQ ID NO: 311643 - DNA, 268 bp, Zea mays
cttctcccttttcagttctatcgataccatcgaatgggaatgcacatatgtttgacatatttatcttcctgtttcccatcacccgcaggattatactgccaaactgtctgactttggcctcgcaaaagatggccctgaaggtgatcagacgcatgtgtcgacacgggtgatgggaacctacggttatgctgcccctgaatatgtgatgaccggtcaactgactgctcggagtgacgtgtacagcttcggcgtggtcctgatggagctc

SEQ ID NO: 311644 - DNA, 116 bp, Zea mays
atcacggatttctggaaagaagctctgatcctaagctcacttcatcatccaaatgtggttgcattttatggtgtagttcgtgatggtccagatggaagcttagcaactgttactga

SEQ ID NO: 311645 - DNA, 136 bp, Zea mays
gggaaattgtagtagtaccagggaagggtaccctgatactaccatttgagtatcttagagatgcagacaaacgtgatcccgtcagcgtccatgacactcccaccctgttagactgctgtcagtagcttccacacaa

SEQ ID NO: 311646 - DNA, 274 bp, Zea mays
ctccaaggcccttggagtatttcgaataggaatgagccaattcgaaatactccaaggcccttgaacgtatttatgagaagtttgatccagatttcattgatattaggacaaaagctcgtgaggtgttgcagagggaggacgatctaaatgaaattgtgcagcttgttggtaaagatgcgctggcagaatctgacaagattacactggagacagcaaagctactgagagaagattatttggcacaaaatgcatttaccccatatgataagttctg

SEQ ID NO: 311647 - DNA, 307 bp, Zea mays
  unsure (1)..(307): unsure at all n locations
cacaaacgcacggcgcaaacgtctcgcccgagtccgacgagatctgtcaatgtccccatatcgcgaacacctgtncgacgcntcacgcgcntactcgtgtctcttaccgaaggtcgtcgcgcgcgagttgacttgagaggagacgtggctgatgagggagtgcatctccgtccacatcgggcaggccggcatccaagtcggcaacgcgtgctgggaactttactgcctcgagcacggcatccagcctgatggccaagtgcctggagataagaccgcgggacatcacgatgatgccttcagcacttct

SEQ ID NO: 311648 - DNA, 269 bp, Zea mays
caggaatgttatggtgtgaggggtaagaagactttacttcatgggtttgtcgggcttgtgaaaaacctgagcaaaagagggagtgctgtctttgccctgtaaaaggtggtgctttgaagccaacaaatgttgataacttgtgggttcacgtgacatgtgcatggtttcagtcacaggttgcttttgctagtgatgagctcatggaacctgctattgggatattgaacattcaacctttgttatttatgaagatgtgtgtgatttgtaag

SEQ ID NO: 311649 - DNA, 281 bp, Zea mays
  unsure (1)..(281): unsure at all n locations
ggcagacttatgagcgggggtacatagagatgtggctggaggctggccatgatacctgtccgaagacacaacagaagcttgccaataaatccctgaccccaaattatgtcttacgtaccctcataactcaatggtgcgaggcaaatggtattgagcctccanaacgccctgctcaaattagggatgcaccactgtcatgtagtgctgctgagcatagcaatgttcttgagcttcttcagaaattgtcttcccaaaaccttgaagatcaacgtggctctgct

SEQ ID NO: 311650 - DNA, 159 bp, Zea mays
gtgctgcgcaagaagggccctacggccgcccaggccagatccaagcaggctatctaagcggcacagagacgaggagaagatgtggagacttccaagaaatgggctgctggccagaacaaacagcatgctattaccaggaacacggccacgctgaaccgg

SEQ ID NO: 311651 - DNA, 294 bp, Zea mays
gagatacagagtcttcgagatctggatctatacgacaaccagatcaagaagattgagaatctggaggcagctaacagagctggagattctagatatttcttttaatctgctgagaaacatcgaaggggttgaaaagttgacacgactgaaaaaactcttcttggtcaacaataaaatcagtacaattgtgaacttaagcaacttacatcagctatagatgctagagctgggatctagccgcatcagggcaatcgcaaatatcggcaccttaagcatcctggagagtttgttttt

SEQ ID NO: 311652 - DNA, 224 bp, Zea mays
tctgccaaacacgcagtgatccatccggaaacaatgactgcatcgtaagttccaaataccagagactgaatcttcagccttgctaagggaacacctcgtttgaatctgttgtgttttgtacagggcaccattctctgtacacgtttgtggttataagattagtacaacagcttacatttgtatttattttctagtccatacttctgtagccccatttttttctc

SEQ ID NO: 311653 - DNA, 120 bp, Zea mays
gcacaaagcacacccacgaccttaccaacaccagagaaacatctaagcaatagaacggaagactaaccaagatttggacattagaatgtttactgctattctctacgagactaacaactg

SEQ ID NO: 311654 - DNA, 183 bp, Zea mays
ctcggcttcggagaggtagtgctgttcctctcggtgctccctcggcttcggcttcctccgcttccgcagggaccgcggaccctggtatatgccctacctctgaccctgctaaagccatgtcgacccctgcccggcgccgcctcatgagggacttcaagaggttacaagaggatcctccggctg

SEQ ID NO: 311655 - DNA, 171 bp, Zea mays
ctttgcttgaatctgttgttgacgctgtcaacggctccctggttgcagctccaaactatgggctgagatcccctgagaaagagctcagagctcaggatgttattcaagccatacggaaatgcagctctactggaggcccgataggaagattttgggtgcttgatcctgtcg

SEQ ID NO: 311656 - DNA, 212 bp, Zea mays
tccgggattctggttgcctgtggccgttgtgttgtcttgcagaactggagtggacagaggctgccaaacgcgccgcgacatcggacttggactgagctgaaaagatgtctggatttctagaaggctccaggtgctccgagtgcatggactggggggagaagcggaacacagttgcctccatcgccgctggcgttctctttttcacaggatgg

SEQ ID NO: 311657 - DNA, 121 bp, Zea mays
acaccttccagcagatgtggatcaccaagcaggagtacgacgaggccggcccctccattgtgcaccgcaaatgcttctaggcgcacccgcgtctgtgtacgcgctgtctctcctcatgacg

SEQ ID NO: 311658 - DNA, 205 bp, Zea mays
aataattactgctattttaaaatttcttgattattgaatgtgagcacctctatctaacatgatttgagaagctgtacactgataggcagagttattttcctgtttacattctgtgttgtttgggggattggtaggtgtctgattactgtttacttcactgttgtgtttcagtaaaagacttaaaacaaccagtgcatgtttgctt

SEQ ID NO: 311659 - DNA, 273 bp, Zea mays
gacttatattagttgtaatgcgtgaaggcagcttcttagttgatggcaaaggtatcttaggagatactgttcactaaactgttttcatgttcttttctccaggagagtatgttggtcttgctggtgccagattggatggtggggaaatgcttgcatgtggtctggcaactcattttgtacagtcaaatagtctgctatcgctggaagaatcacttaaaaaggtggatacttccaatgcttttgcagtgtgtggtatcaccgatcatttggctc

SEQ ID NO: 311660 - DNA, 297 bp, Zea mays
gattggcacatctctgtatgatgaatacggagccaatattgtcaaagatctcatggccaaagctgagaaaaatggtgttaagattaccttgcctgttgactttgtcactgctgacaaatttgatgagaatgcagagactggccaagctactgtggcctctggtatacctgctggctggatgggcttggactgtggtactgagagcagtaagaagtatgctgaggctgtgtctcgagctaagcagattgtttggaacggtcctgttgtggtatttgaatgggaagcctttgccagggg

SEQ ID NO: 311661 - DNA, 268 bp, Zea mays
ccatatccgctcgcctacctctccagcatctcccgcctccgccgtctcgtctctgctcctcacctcgccgcgatccatgggcaatatcaagatcggaatcaacggtttcggaatgatcggcaggctcgtggcgagggtcgccctggagagcgaggatgtcgagctcgtcgccgtcaacgaccccttcatcaccacggattacatgacctacatgttcaagtacgacaccgtgcacggccaatggaagcagagcgagatcagcctcaag

SEQ ID NO: 311662 - DNA, 153 bp, Zea mays
acgtcaacgcgagatagatactaattcaagtgccccaaccgcctcaacctggaggccatcaactacatggcagctgacggtgactgcagtagcaaatgtgcggctgttgactgaaatcagccagcccatggcccccaataaaggcagctgcct

SEQ ID NO: 311663 - DNA, 284 bp, Zea mays
ctggtaatcctgtaacagacagggcccagagatgaaatatttgaggagaacaaaaggtcgagatgcagatgtattaaaaagagaagcctcggaatagggtttcctgtggggcagggttataaaccttatttatcttttaggattattcctaaatgcatcttctttataaacttgactggctatatcagcaagataaattatattaaaaaaataagaattctgcaatgtgtaaggaactcttctgtctaaatcacagacacctcaactagcaagagttaaggaga

SEQ ID NO: 311664 - DNA, 275 bp, Zea mays
  unsure (1)..(275): unsure at all n locations
cggaactgttagngtgttcagagctctgtcatggtgcttgccacgctgtgtagtgatgctgacagttgacgaggtagatgaactgatggctggtcagtgaagactccaatggctgcatcaactatgaagcatttgtgaagcacatcatggccagctgagcctctcaggaagcgcagggcaggctaagctggggacatgccatctctcaaccataatgctgacacgatgtctggagcttcgtgaaggataggagtgtccagactcgagcacatggt

SEQ ID NO: 311665 - DNA, 252 bp, Zea mays
gtcgtctgtacagaggtctgaccagagtcttgggtaagaatgcggtaatacgaggggctagcttgtgggttcctgcctaggaaccagaatcatctatgagcggaaattccttatggagtgtcggaactcgcctgtggccaaaacacccccaaaggacctgccaatcattccagtggtcactagcgctaccagcgatgagcctcccatgcaggccagctagagccatctgcacagcagcccggaagataagcg

SEQ ID NO: 311666 - DNA, 116 bp, Zea mays
ctttaacaacaaccaccaatatattgtttagagacggtttctgcctagtgtacaacttgagtggtctgactctaataactggttttgaactgtgtgactggtattatacaatttgt

SEQ ID NO: 311667 - DNA, 113 bp, Zea mays
gccatcggcaccgtactggatcctggccaccgactatgagaactatgccctcgtgtattcctgtacatgcatcatccacctttttcacgtggattttgcttggatcttggcaa

SEQ ID NO: 311668 - DNA, 291 bp, Zea mays
acaagttcgactgggaccaccgatgcacctgcagccgacgagcccgacggccgtgaagcaggtgagctgcgtgtgggacgcgtacgaggccaccaagggcgcccacgggctgtgcatcctgaccgagtgggacgagttcaagaccctggactaccagaagatcttcgactccgagaagctgagggagatcggcttcatcgtctactccatcggcaagccgctcgacgcctggctcaaggacatgcccgcggtcgcataatcccacccccctcacccatggattggattccg

SEQ ID NO: 311669 - DNA, 214 bp, Zea mays
atggcatatgtgaagactctcgtggcctccgcacactcaactctgtttgggcccaacatcttagcgaagaagtgacgacaaggttctacaagaactggtgcaagagcaagaagaaggctttcacaaagtatgctctcaaatatgaaaatgatgctggcaagaaggaaattcagctgcagcttgagaagatgaagaaatatgcttctgttatccg

SEQ ID NO: 311670 - DNA, 127 bp, Zea mays
attccaggtgctcacgcctggacgacgccgtacggggccagcattttccagtccaaggagtcgtcctcagtcctgagttgtgacatctccagaaatagcaaatacatcgtgacaggctcgggggaca

SEQ ID NO: 311671 - DNA, 115 bp, Zea mays
gattctggaatttgttcaagttttgggtatgtgtaatctgttatgtactagtgttctgattgttattgttctgctaattacaccataatgctaatttagagagactccaaatctc

SEQ ID NO: 311672 - DNA, 168 bp, Zea mays
cagcttgagaatgaattcaccttcaatcaagtttacattatgttgcacaaaaaaatagaaattattctacaccacgcaaagaattgaaaccacatgaaatgacttatgggggatggtgagctgtgactgctttgctgaccactttggatgccattgtaaataaaggtt

SEQ ID NO: 311673 - DNA, 215 bp, Zea mays
ctaggaagtatatggatagccacttcgtctccaagctgctcgatctgtttgattcggatgacccgagagaaagggactgcttgaagacaatattgcataggatatatggcaagttcatgggaaaccgaccgttcatccgtaaggctgtgagcaacatcttctataggtatgtgttcgagacggatcaccacaatgggattgccgaactattggag

SEQ ID NO: 311674 - DNA, 204 bp, Zea mays
gtcggaatcggctcgaggggatctgggccaggggctctgattgccgtatcatccgagtccagatggagttgggggaagatggcagtgtctataagagcattttggtgagggagccttgggatggagttagggtgaaggatggtgtcttgttggactataaatgttgtctgaggtttgggcagccaaatggaattgaatgtagtt

SEQ ID NO: 311675 - DNA, 308 bp, Zea mays
  unsure (1)..(308): unsure at all n locations
gtaaaatttatattgcaactgatagtactccggtggatatgcagacctatgatgttgctgtgattctcagncgtggttattgacatctcctgtatttatggtctcaaagaagatggagcaggaaccccctatgacaaggaatccacagccatcataaagcttaataatacaaccgtgctttatttaaaagaggtgacaaagttcctggctctcgtttgctttgtcagagaggaaagctttgaaagaaaagggctaattgactatagttttcattgcttccggacagccattcatgaagtttttgaggt

SEQ ID NO: 311676 - DNA, 299 bp, Zea mays
cgggccgccaccgccatcagggaggctgagggctagctgagcaagcggtggggacgccgctgccttcctctttgcctggctcgccgccctcatagacacgctcctcatctacggatcctaccctccccgctcttgcaagcattcactcggccggtcgcctgctgaccctccttcgccacaggctcgtagcggaggcagcagcgaggtgtccgatttgggcacgtgaggcccgcgatccccggcggtggacgccaggcagggcatgaagacccccaacgcacaggaagccgaagggcaac

SEQ ID NO: 311677 - DNA, 247 bp, Zea mays
cgccggagcacgacgcacgcagatccgcagagatcagtgacactgcaagtattgaaaactgcattgtaagatggcatcagcagagcttgtcccgtgatgaaaatgtgtacatggctgagctcgcagagcaggccgggatgtacgagcaaatggatgagttcatggataatgtacagagaactgttgaatctgaagaggtcactgtggatgaacgcaacctcctgtctgatggatacaagaacgttta

SEQ ID NO: 311678 - DNA, 275 bp, Zea mays
cattgtgtggaacgtggccaagccagacaatcatgtggttgtagagcagagcatccctgagagcaccagcactcctgacctagcgggtgagcccagtgctgaaggggctgatggacaggcagaaatcatcattaccaaaactccaatcatgacgataatgaaaggcaaagctgaagccaaaaaaattcatacactcaaggagaatgtacctagccagcctgtgggtgatgccttaccaaagctgtcgactggagaaatggaggtgagagaggggg

SEQ ID NO: 311679 - DNA, 106 bp, Zea mays
gagtctcagaagaagagagagcaccatttactggaggcaattgaccacctgacggaacagctgcagccccttgaacaggtgaaagctggcttagacgctcattcgg

SEQ ID NO: 311680 - DNA, 292 bp, Zea mays
cgcagagccgcagagatccgtcacactgcaagtattgaaaactgaactgtaagatggcatcagcagagctttcccgtgaggaaaatgtgtacatggcgaactcgccgagcaggcagagtcgtacgaggaaatggttgagttcatggagaaggtagcgaaaactgttgactcggaggagctcactgtggaggagcgcaacctcctgtctgttgcatacaagaacgtcattggagcccgccgtgcctcatggcgcatcatctcctccatcgagcagaaggaggagggtcgaggc

SEQ ID NO: 311681 - DNA, 275 bp, Zea mays
agtcaaacctctatagtcttaatgcaggatctcggacaatgagtgacaagcgggaatttcctacagtgcccttggttaaattaggcagttcttttacgaaggttcaagattatctacgaagatttgaaagtataccagatatgcttgaattggatcacctcacagtctcaggagatgtgacatttggaaaaaatgtttcattacagggaacggttatcatcattgcatatcatggtgacacttttgatatccctcctggagcagtattagagcac

SEQ ID NO: 311682 - DNA, 225 bp, Zea mays
ctcgagccggttactcctgtcaggattaacagcatccatcgatacacagtacctgctgactgatgcatgggtctgctggagccgaggatgaacacagctctaacaactgacacagagcgaccttgcaatcaaccagcatggactgtggatcgatggatgctgttactcctgtcaggatttgttctaagttaatcctaaggaaaaaatggtgcttcttggtgctgc

SEQ ID NO: 311683 - DNA, 284 bp, Zea mays
gcggaaagtacaaggatgagctcatcaagaatgctgcctacattggcacccctggcaagggtatccttgctgctgatgagtccactggcaccattggcaagcgcctttccagcatcaatgtcgagaacgttgaggagaaccgccgtgccctccgtgagctcctattctgctgccctggtgctctccagtacatcagcggtgtgatcctcttcgaggagaccctgtaccagaagaccaaggatggcaagccttttgttgatgtcctcaaggagggaggcgtcttc

SEQ ID NO: 311684 - DNA, 282 bp, Zea mays
  unsure (1)..(282): unsure at all n locations
ggctgagtgtgatcgagtgtctccggcctcgctggaggtgacctgatcgccataaggaaggcaaccttcatttgttagaaaaagatgataaaaatgagtcacataaatattcagcccacacctacgtatacttccacacaacatattatctatncngcatgnnaacaaatggaaaagaaaccatgaaaacaaagataacttanagactacaacaaaagattacgtgaaaactatgtcagtggtgagtatcggcaaaaaataaaagtaatgtagtggagtagt

SEQ ID NO: 311685 - DNA, 240 bp, Zea mays
aatcacccagctttaaagctgcttttaacaatgaagattgaacatagttcagcaattttgattaaattaagacttgggggtgaatctttccagtttactgaactctagatcatgcttgtagtccactgccatatatcatgctcgcttcgcttggcaacccccgttctcctgccaaatgtccctagaccctctgtcctgcagattcagggtggcttttcccctgactgtgtccgatgccaa

SEQ ID NO: 311686 - DNA, 302 bp, Zea mays
ccggagcctctccttcccggtctcctccgcccgttgccttcgtcccctccatctccggctgcgtcgccggcgagcccgacaccgcgaatcggatccgccgacaaggcgagagggaaaagatggggcttacgttcaccaagctgttcagccggctgttcgccaagaaggagatgcggatcctgatggtgggactcgacgccgccggaaagaccaccatcctctacaagctgaagctaggcgagatcgtcaccaccatccccaccatcggattcaatgttgaaactgtggagtacaagaacatc

SEQ ID NO: 311687 - DNA, 284 bp, Zea mays
cagtattcttgagtgcattcgcttgctccattcagtcagagcatttcttgtgcaaaattcaaatacctgtcacaccaaccatgtctaggtctgtggagcctctcatagtcgggcgggtgattggagaagttctcgactcctttaacccatgtgtcaagatgatagtaacctacaactcaaacaaacttgtattcaatggccatgagatctacccatcagcaattgtatctaaacctagggtagaggttcaagggggtgatttgcggtctttcttcacattggtt

SEQ ID NO: 311688 - DNA, 294 bp, Zea mays
  unsure (1)..(294): unsure at all n locations
catggtcttatccgggatgctgagggtcgaaaaatgtcgaagacattagggaatgtcattgatcccctagataccatcaaagagtacgggacagatgctttgagatttacactatctttgggcactgcaggccaggacctcaatctctctacagaaaggttgacgtcaaataaggctttcacaaacaagcgtggaacgcagggaaatttttgttacagaacttgcctgatanaaatgatgtctctgcatgggatgtcttgttatctaataagttcgactcagaaacatcactcc

SEQ ID NO: 311689 - DNA, 301 bp, Zea mays
ccgatccccaattcctccttcggatctcgcattcagcgcacgcaggtgtgaaggaagggggacgcggaggaagatggggctcgcgttcgggaagctcttcagccggctcttcgccaagaaggagatgcggatcctcatggtcggcctcgacgccgccggtaaaaccaccatcctctacaagctcaagctcggcgagatcgtcaccaccatccccaccatcggtttcaatgttgaaactgttgagtacaagaacattagcttcactgtctgggatgtcgggggtcaggacagatcagacctc

SEQ ID NO: 311690 - DNA, 324 bp, Zea mays
  unsure (1)..(324): unsure at all n locations
gcgtacgaagtcggaatcggctcagggcgagcgngcggtgtcaggtcccgacccgtgcgggagggccggatgccgcctcctcttcttgccgcgccggccacgccgtcggagtctccgccggtcgcggggaggcgcggggacgatgacgacgatgtgaggcagaggtactacctcaacatggggtacgcgatccggacgctcagggaggagctccccgatgtgctctacaaggagcccagctttgacatctacagagatgacattgtcttcacagaccctttgaatacattcaagggcctggacaattacagacgatattctggg

SEQ ID NO: 311691 - DNA, 247 bp, Zea mays
aaatggtgccaatagcacagtggaagtattgaatgataacatgctgaaacttgattgtgccgactctgttgttttacttcttgcagccaccacttcatttcaaagtgcattcatcaaaccttcagaatctaaactggatccaacagtgtctgcttttacgacattaagtattgctaggagaacgtcatattcacaactaaaagcctaccacattgatgattaccagactcttttccagcgtgtttcc

SEQ ID NO: 311692 - DNA, 236 bp, Zea mays
caggaagggttatgctggaactcggcaagtgtgtgatcagtcagatgcagtggcagtgggatggcaaattgccgagttccagggaagggttatgctggtgggtctgctgtgcaaaaatgcagcgacctgcatctgcatatgggagttgcagaagatgactctcctctggaaggaggtggacagaatgccaaatctctggtgcttagagttctacggtaagcacatgaagatgaaat

SEQ ID NO: 311693 - DNA, 248 bp, Zea mays
agtagctctagtttagttctagtttagtatttcaatccccaaattctccgcttctcttcggctctacgtcgattagaggagtctaggtcggcctgccgagcctagacaacatctcggatctctcctccccgacggggtccctcccgggagcgagatccaagcgccgccggctgatgactggagtccaataaccagaacgaaatctgatgtaggatgaggtagaaactccattcccttcccataatggg

SEQ ID NO: 311694 - DNA, 243 bp, Zea mays
cggtttcctcagtctctccgccagctcagggtccggcggcgaagggaaggcaagagggacaccgcgagggagaagaggcagcaggaggagggagcgggggacggccgagagcgagaacgccggggcccaggctgttctatgatctggagaacgggaaccaggagctcaagagcgacctcaaggacctgtacatcaacaatgctatccagatggatgttaccgggagtaggaaggctgttgtca

SEQ ID NO: 311695 - DNA, 238 bp, Zea mays
gtcaactggcaccattggcaagcgcctttccagcatcaatgtcgagaacgtggaggagaaccggcgggctctccgtgagctcctgttctgctgccctggtgccctccagtacatcagcggtgtgatcctcttcgaggagaccctctaccagaagaccaaggatggcaagccttttgtcgatgtcctcaaggagggaggcgtcctccctggcatcaaggtcgacaagggcaccattgag

SEQ ID NO: 311696 - DNA, 249 bp, Zea mays
cggacgctggtctgatgacccaaatgctaaggaagcacggtgctattggcaaattcgttgaattctatggtgtcgatgattgaagcatacctgcgagctaacaaaatgtttgtggacaagcatgagcctgagacggaacgagttttctcttcatatctggagctggaccttagtgaggtggagccttgcgtttcaggccccaaaaggcctcatgatcgtgtccctttgaaggacatgaagtcagactgg

SEQ ID NO: 311697 - DNA, 251 bp, Zea mays
cccacgcgtccgcccacgcgtccggagctggatatcgcatggagttgcaacactatgaacgaatgacaggcacattacaaaaatggtttcctactgtgattttcacagtactcctgacccagacaatgtgttgatagtgaagacacctgaaggtgttttctctacgaaattttttgtccaaaatggtgagaaacagacagctgcaagactcgccaggaaggaaaattaccaggagaaagtgcttcctccta

SEQ ID NO: 311698 - DNA, 235 bp, Zea mays
cccacgcgtccgcccacgcgtccgccacgcgtccgcccacgcgtccgggaaaatgtttaacctgaacaaagttaagctgcactttactgatggtgcacttagattgttagctaagaaggcgatagctaaaagcactggtgctcgtggtttaagagccatcttggaaactgttcttttggaggccatgtatgaggttccagacgaaaaaacaggaaatgagcgagttgacgctgtt

SEQ ID NO: 311699 - DNA, 239 bp, Zea mays
cgatgatcccttcaaatttggactgttttgggtggtgcacatcggatgcattttacaaagctgctgaaccatgtgggattgaggaggaccttcaacgtcggcgtgaaggtggtgtgccaccaaggtttctgattatagatgatggttggcaagagatagttgactattatccagagacgttgcatcagatgtttgttgcgaatgcaggttccagtttcaagctaccagggattctgtga

SEQ ID NO: 311700 - DNA, 211 bp, Zea mays
ccacgcgtccgcggacggtgggtcgaccacgcgtccgcccacgcgtccgcggacgcgtggggccaggccgcctgctaccctcctcggcgcgcccgagtacaactactccatcgccaccaccctgaagaacgcacttgactgggcctctagaggaaagaactgttgggcagacaaagctgctgcgatcgtgagtgcaggcggtggctttgga

SEQ ID NO: 311701 - DNA, 287 bp, Zea mays
cccagccagacgccgctacagtccggcgtagtttcgcctgcgccacgcctcccaagcccccgcacccgcgcgggctatggcggccccgtcctcctcatccgcgacgccctccccgtacacgacgctcgtcgggcgcgtgagctgcgagcgcgagatcaagcgcacaagttcatcgccatcgcggccccggtcaccaacgagcgtgccgccatggccttcctggatcaggtcaaggatccacgtgctacccataattgctgggcatacaagctgggagatcaattccg

SEQ ID NO: 311702 - DNA, 286 bp, Zea mays
atagaatgaagtcctctggttgtaagcctgataccttgttctacaacgccctgatcaaccttctcggtagagcaggtcacttgtttgaagccaaccaagtgtttcgcgtggagatgccaaggaatggcgtgctccgcaacgtggccacctataacacgatgatatcaattctctgccaatatgggcgagatgatgacgctctcggtgtactgaaagagatggaagcacaatcctgcaaacctgatcttaagacatatcagcgacttcttagactgctgcttggtag

SEQ ID NO: 311703 - DNA, 284 bp, Zea mays
ggagctcaagtcgatcatacgtatgctgccgatctgtgctgccggcatcatcctggtgacatcggcgtcgcacaatcacagcttcgccatccagcaggctcgtaccatggaccgtgacatcacgccacacttcaagatcccgccggcctccatgctcatcttcaccaacttcggtatgctgctgaccctggccttctacgatcgcgtgctcgtccgcgtgctgcgccgcttcactggccgcccgaacggcatcactcacctccagcgcacgggcgtgggactga

SEQ ID NO: 311704 - DNA, 153 bp, Zea mays
cccacggtccgcgacggggatctgaacatagaggactggaacccatggcagaaggcatcggttcctccaagcaagctcctaacgatctttttctcttcatggtgctgggaactgtagcaggcagatgccagtgcaatggccatcgatgaacca

SEQ ID NO: 311705 - DNA, 241 bp, Zea mays
gtttatagtggcacaatacagactggacagaccgtgaggtccttggagaaggctattctccagatgatgaagaggatatgactgtcaaagaggtgaccaaattgtgggtttatcaggcacgataccgtgttgcaattagtaaagcccctgctggctcttgggttcttattgaaggtgtagatgcatcaataatgaaaactgctactatatgtcctatgaatatggatgaagacgtgtacat

SEQ ID NO: 311706 - DNA, 154 bp, Zea mays
cccacgcgtccgggactggcaagactaaaggttatggatttgtgagcttttcaaaccctactgacttggctgcagcaataaaagagatgaatggaaagtatgttgggaatcgccctattaaattgcgtaagagtaactggaaggagaggacaga

SEQ ID NO: 311707 - DNA, 114 bp, Zea mays
aatagactgtcaacttgcataatcatcgacatcaacatcaacatagccttttggttccaagcaagttggggtaggctagaattgaaacccaacaagaagttatgcagcaaaagt

SEQ ID NO: 311708 - DNA, 256 bp, Zea mays
tcgaggcccgctcgcgatctagaactagtccggacgcgtgggcgctcgcgatctagaactagtcggagttcaacgcatttgctgatcttcgaaaatgttggaaccatttagaatggctatcttcagctacggcaaagtaaatggtctgttgacgaagcaggatctaaaacgtgccgcatcacatgtttgtggagtggacttgactgataaagtagtagacataattttccatgtgtttgatgctaactgtgatggt

SEQ ID NO: 311709 - DNA, 243 bp, Zea mays
gacaagaagaagaaggataagaagaagcacggcgagggccacgaccacgacggcggccacagtagcagcagcagcgacagcgactgagatctggtgtcgcaggtgcaacacaagtatgcttgctggatggaggattcataccagctgatgctgatgtagtgtttcactggtgtcatgcatgcatgtatcgtgctattataatcaaaaagaaaaaagaaataacagtcagggatggtttgtttg

SEQ ID NO: 311710 - DNA, 234 bp, Zea mays
cccacgcgtccgcccacgcgtccgcggacgcgtgggcgaccgtgggcagttctgttccataactaattacggtcaagaccctcgccttcgtgcaaggctagataccaatgtaatggcgaatttatttgaatgttggcctgacatggagtatactatttcagattgcagccaaattctattgcccttttgtttcttgggtcacttcagtttatatgtatttaacatgaacaccag

SEQ ID NO: 311711 - DNA, 265 bp, Zea mays
cggacgctggacggaacgcgtgggcgcgagcggccgccctttttttttttttttgcaagatttcaatatgtataaatgtgctgcaaatcacaggcaaaaaaagaagctgggcgaagccagcaacacgcctgcactgcgacgtgcagcagttctgagtgagaatctatgaatggagttggagtttctttttttattcaaaacattggggtggcaattgctctctggatgtggtagaatttactcgaggcatgagtaagcaagcgtc

SEQ ID NO: 311712 - DNA, 252 bp, Zea mays
  unsure (1)..(252): unsure at all n locations
nccacgcgtccgcccacgcgtccgcccacgcgtccgcggacgcgtgggcggcgctcgcgcgggcggacattggcggacgacgattacaacgaaatcgacatgggctatgaggatgagcctccagaacctgagattgaggaaggggccgaagaagagcttgagaacaacgaagatgcccctgatgatgtcataggtggagagggtgaagataaggaacaggaaaagaccaagcgtgagcgcaaaacaacaaaa

SEQ ID NO: 311713 - DNA, 271 bp, Zea mays
gtcgctatttcatagtcaccataataattggtagtttggtaccatgttgaatcttacactcctcccaacttcaactcgttgcagggttcctctgccatatcaagtgctgatctatttggccatccagcaaacaattctagcgtggatctcagtgcttcagatttgatcaacagaatatcattccaggccactcaagatctgtcttctctcaagaacatggcaggggaaactgggaaaaggttgacatcgatggcatccaacatcatcactg

SEQ ID NO: 311714 - DNA, 212 bp, Zea mays
ctgacagatatgacagagggcctatgcctatcgaagcatctcacaaactgcgtccactcaaacttgtctttcagccgattcctacaattccgggatccacatgcccaaaggcgacaccccctcgttgatcccatggtcgtttcagagattcggcgatgtctcagcgaggggatcgaattccaaggcgagctgctgaatttccggaaggacgg

SEQ ID NO: 311715 - DNA, 252 bp, Zea mays
cccacgcgtccgcacacgcgtccgcccacgcgtccgcccacgcgtccgcccacgcgtccgcccacgcgtccgctggaggtaactgagatcttcaacttttcccaagatgatttgttaactgaagacatgatgatacttgacacacatggtgaggttttcatttggattggtcagtgcgtggaatcaaaagagaaacagaaggcatttgatattggccagaaatacgtggagcatgcagattctattgatgat

SEQ ID NO: 311716 - DNA, 260 bp, Zea mays
gacagcagcagcagcagcagcatcgagctcgaggccgctccgccaccccgcactcgcctgtcgcctcttctagctttcgccaccggggcagcgctccgccatggctggacctgctgttctcaatgagcgtatcctttcttccatgtcccagaaacatgttgctgctcacccatggcatgatttggagataggtggttgagattcctagaggcagcaaggttaagtacgagttggacaaggcatctggtctgatcaaggtg

SEQ ID NO: 311717 - DNA, 255 bp, Zea mays
cattgtttatgctccatatcgatcgattgaaggatttattgatgacctagaggatttctgcagggcaggtaatggtccattccagcgtttgaaggagttgcgccaggctgctatatcccatgttgacaaaatgatgttgactgatgcacctcttctctatacccctgggcagttggcactggcggctcttcacaagtctaatgatcttctcagggtcgtcgattttgaaagatacttggaaattatcttctcaag

SEQ ID NO: 311718 - DNA, 251 bp, Zea mays
gcaagattaagatcggaatcaacggcttcggaaggatcggcaggctcgtggccagggtcgccctccagagcgaggatgtcgagctcgtcgccgtcaacgaccccttcatcaccacggactacatgacctacatgttcaagtacgacaccgtccacggccactggaagcacagcgacatcacactcaaggactccaagacccttctcttcggtgacaagccggtcaccgtctttggcatcaggaaccctgag

SEQ ID NO: 311719 - DNA, 250 bp, Zea mays
gcccgcgggacttcacgctcctccgccgcgtcggggccggggacatcggcaccgtctacctgtgccgtctcgagagccagagccaggcccccgaggggtccgcgtgcgagtacgccatgaaggtggtggaccggcgcgcgctcgccaagaaggggaagctggcgcgcgccgcggccgagaagcgcgtcctgcggcggctggaccacccgttcctgcccaccatgttcgcggacttcgacgccggcacgga

SEQ ID NO: 311720 - DNA, 239 bp, Zea mays
gatgtgccaagtcgtgctcctgccttggtgtcctgcaccggcttggtgtctcctggacgctcaggagattctgtttcatccgatgagacgatgtcgacttgcgactccatgaaaagcccagactttgagtacgtagacaatcaggacacctcgatgctggcttcgttgcagcgacggacaagtgaacatctgcgaatatcagaggatagagatgttgaagaaaataagcggaagaaaaa

SEQ ID NO: 311721 - DNA, 231 bp, Zea mays
ctcacgcgtccgcgtgaacgtggacgtgtgaacagcagggattttagtttttgttcttccttttggtgtgttcataagaaagagagctctcgccgtctagggcagaaagaagtgttgtttgcaggtcgtggttggtagattagatctctctctctctctctcctttgttgttctttcggcttggttgatctctctccttccctctttgcgtcaggaagcagcagcttgcaa

SEQ ID NO: 311722 - DNA, 225 bp, Zea mays
cccacgcgtccgcattcttgtgcgtttgatgtaatacagaatgatctgttaccttctatagaattggttacaaaaatgatagaggatgttgagcttctagaagaaaaggctaaagtggccaaacatgaattgtccgttgctgggacaggcattctggcaaaagttgaggagctcagagaaatgataacttatgcgaaggaagcaaatgatatgcatgctggtaag

SEQ ID NO: 311723 - DNA, 250 bp, Zea mays
cgcgatgatgtcggtggcgtacgaattcttccggctccccgctgaggagaaggccaagctgtactccgacgacccggccaagaagatgcggctgtccaccagcttcaacgtgcgcaaggagacggtgcacaactggcgggactacctccgcctgcactgccacccgctggagcagtacgtccccgactggccggacaacccaccatccttcaggaggaccgtgagcgtgtactgcagtgcggtccgggaa

SEQ ID NO: 311724 - DNA, 203 bp, Zea mays
cggagtgatcgcacgcaccatcgtcctgccgatcgatagcagccagccagtcttgctgagagacgaactgaagcctgaagtgaaccgatcgatcgatgcgatcgatacgagcgagctcccatgaaggcgttgattctggcggcggtgctgctgctgcacatcgggggatccgcgagcgacggcgtcaacttctaccaggacgt

SEQ ID NO: 311725 - DNA, 246 bp, Zea mays
ctaaatatcggaggcacgaaatgcgtgtcagattgagtggtggtgaaccagaaaaaccattggtaatacatgtgggccgttttggacgtgaaaaaaatttggattttctgaaaagggttatggagaggctcccaggagcaaggattgccttcgttggagacgggccatacagggctgagttggaaaaaatgttcatgggcatgcctgcagtttttaccggaatgctccaaggtgaggagctctcac

SEQ ID NO: 311726 - DNA, 245 bp, Zea mays
cccacgcgtccgctttaagcacaaaatatgttttgctgaggagatggcattcatgagcaggttggcgaggagaagactttaattacccctgtgcagtgcaaaaatttgtggaggcaattcaaggctgaaactgaatatacagtgactcaagccttagctgctcaggtatctccacatttccattccaccagttaactgatatgtgtgctattgacaccttgtggatttcatctcaaaatccctct

SEQ ID NO: 311727 - DNA, 235 bp, Zea mays
gctcatcatacatatttctatggaaatggaactgtatggtagttggttgcagactaattgttgattgtaataaaatccaggtaacaaagctgctggaagaaccccattggactgggagaccagggtgaagatagctctgggcactgcacgcggaatggcttatcttcactccgtgggtagcggcgggaagttcattcacgggaacatcaagtcaagcaacatccttctctcacag

SEQ ID NO: 311728 - DNA, 225 bp, Zea mays
cccacgcgtccgcccacgcgtccgcgacgactaagatgcaggagcacgcggggagcgacaagtcgtgcgtgatggcacgcgctggacttcgccgacgggagctcaaagaggagatgtttgctatccgttttggatctgtcgagaattgcaagaagttcaaggacactgttgaagagatagctgaacagcaaggaaagagcgaggagaaagaaaatgatgaagtct

SEQ ID NO: 311729 - DNA, 243 bp, Zea mays
cccacgcgtccgcccacgcgtccgcccacgcgtccgcaagcccctaaagaaggcatccgcttaagaatgtattgggaagttcactggacatgaggttcatcttcgtctggctctgctgatacctgcaagattgctgctgctgctgccgcccctggatgtgtgtttgatcagtgactggctgctctgctccatagaagatgaatgaagagagagatggtgaagaaggctttggcaaatggcaat

SEQ ID NO: 311730 - DNA, 246 bp, Zea mays
cccacgcgtccgcccacgcgtccgcccacgcgtccgcccacgcgtccgatagctttgttttttttctaggattagctgcgacgaggctgttttttcttggaacagttacattatcttttggtgtggtactgcttgatttaatttgtgttttaacacttcaataggaggtgattcgtcagtacaagaaatttgtatcctccttttcttgacagaatctatgacataataacatctcaagcatgcatg

SEQ ID NO: 311731 - DNA, 233 bp, Zea mays
aggttcttcggcgcctccacgacgccggcctgcccgacgcgcgggcgcccgggttcgacgacgagctctggaatcacttcaaccgcctccctgcccgctacgccatggatgtgaacgtggagagggcggaggacgtgctcacgcacaagcggctcctggagcaggccaaggatccggctcatcgcccggctttcgcggtatctccaattcttgatgggaatcgactgattctg

SEQ ID NO: 311732 - DNA, 237 bp, Zea mays
cccacgcgtccgccgctagcatccgcagttcccccgcgcccgagacgcaaccccgcgccaggagtttgttcttttatcgatattatcgatatggcgagggaggagaatgtctacatggccaagctggctgagcaggccgaaaggtatgaagagatggttgagtatatggagaaggtggctaagactgtagatgtggaagagctcactgttgaggagcgtaacctcttgtcggtcgca

SEQ ID NO: 311733 - DNA, 229 bp, Zea mays
cggacgctggtcgcgacgcgtgggcggacgcgtgggcggacgcgtgggcgaaaccctacctctcgcactcgctccttccagtcccatccccgccgccgtcgagccctactctcagctccaaccatgcaagccccgttgccgcccctacttgccgtcgcagccgcctccgcatctccgccacatccacggctgcgcggctccttcgtcggcttgcgctgcccacgcgtcg

SEQ ID NO: 311734 - DNA, 230 bp, Zea mays
accgatccaagagcgagccgacgacgacgagccgcgcgcgcgacgcggccgtccatcgtgctgttcggggactccatcacggacgaggcgttcggggagggcggttggggcgcgtcgctcgccaaccactactcccgctccgccgacgtcgtgctgcgcggctacagcggctacaacacgcgctgggcggcgcgggtcgccggccgcgccgtggccagcatcgccggccc

SEQ ID NO: 311735 - DNA, 224 bp, Zea mays
cccacgcgtccgaattaaaccgccggcgcctccacttcgcgttctcgcctcatctcctcccgctcaggatccgccggcgaaggtaaggcaagatgtacaccgcgaggaagaagatccagaaggataagggccttgagccctctgagttcgaggactctgtcgcccaggctttcttcgacctggagaacggtaaccaggagctcaagagcgacctcaaggacctt

SEQ ID NO: 311736 - DNA, 240 bp, Zea mays
  unsure (1)..(240): unsure at all n locations
cccacgcgtccgcccacgcgtccgcccacgcgtccgagaaggtgaaggaggatagaaggcagaagggggatggacgggcgacaacgacattggtgcggcgataaagttggtgagcacagaaggggagctaggtgtgccagtgacactgggccacacagnagggggcaggcgacaaagtcacggtgaagtacataagggtacggcgacgacggagtcgagcgcttctaccttgtgtcgatc

SEQ ID NO: 311737 - DNA, 241 bp, Zea mays
cccacgacgtccgcccacgcgtccgcccacgcgtccgcccacgcgtccgccagaccaaggtgttctatttcgatatcggggagaacaagaggggccgattcctcaaggtttccgaggcctctgtcaaccgaaaccggagtaccataattgttccagctggcagctctggtgaagagggctgggaagcattcaggagtgtactgctggagataaataacgaggctaccagattgtatgtcct

SEQ ID NO: 311738 - DNA, 228 bp, Zea mays
acgttggggaagcccaccgcgccgctcatctccttccgcgtcgacctctctgggatcttccgcgagcagatgtacgtcggcttctcggcgtccacgggagtcctcgcgagctcgcactacctcaggggttggagctttcgcctcggcgccggcgccgcgccggcgctggatctctcgtccctgccgtcgctgccccagctcaagagctccaagaaccggacctcgctc

SEQ ID NO: 311739 - DNA, 225 bp, Zea mays
ggtgtaccaccgtccgtgaccgggacacgcgatcgagcaattcagagcaatgaataagctgaaaaaagtggccctaaaggttattgcttcacaccttaacgaggaagagatcaaggggctaaagcaaatgttcatgaacatggacacagacaatagtggcacaatcacatacgaagaactcaaagcaggattagccaaacttggatcaaagctgtcagaagctga

SEQ ID NO: 311740 - DNA, 193 bp, Zea mays
cggacgctggcgagtacctgtccacagggaagtcttccgagaggacagatgtttttggatatggagtcatgcttcttgaacttgtgactggtcaacgggctattgacttctcacggctggaagacgaagatgatgtgctattgctcgatcatgtaaagaagctacagagagaaggggagctggactccatcgt

SEQ ID NO: 311741 - DNA, 266 bp, Zea mays
gccttttctattttagttctctcaaaaggtttttcccctcccctttctctctcttttctctttttgtgacttcttgttgggtttcaactctagcctacccaacttgtttggtactaaaaggctatgttgatgatagtttataatagtgatttcatatggtatgtggtttgatgtgtgccttgcctggtgcccaatttaagctgacaccattatttgcagcaatcaaggaagaagaaggacaatgacttctggtacgatgtttgtgg

SEQ ID NO: 311742 - DNA, 255 bp, Zea mays
ctgcggccgagggtgaacggcgagcccatatgcgacccagaccggaggctcaacatgggggacgtggtggagctgacgccggccctgcctcgaaagtccctcagcgggtaccgggaagagatccagcgcatgtacgatcgcggcggcttcgcgctctcagcccggggcggcggcggcggcggcggcggcgccagacgctgctgagagacagtagcaagacgacgatgcgtaccctttttttttctagtaccattg

SEQ ID NO: 311743 - DNA, 251 bp, Zea mays
gggtttttgattttagccgccgccgctgctcatctcacatccctcgagaagacgcctgctcctcgccgatcgatacgatggccgtcttctccgacctccacaccgccgacggcctcaagtccctcgaggctcacctcgccggcaaaacctatgtgtctggtgactccattactaaggatgacattaaggtcttcgccgcggtgccgtcgaagcctggcgctgagtttcctaatgccgcccgctggtacgag

SEQ ID NO: 311744 - DNA, 216 bp, Zea mays
cccacacgtccgccacgcgtccggttccatgagtcaattgctcagctggagcaagccctgtgcgattttccatatgataaactggatatatctgatgaagctagagagcaggttgagttagtgcatgcacagctcaaaagagccaaagagcgggtcgacatgcccgatgacgagttctacaacgaattatgttcgctgtataacaagagccacgac

SEQ ID NO: 311745 - DNA, 177 bp, Zea mays
cccacgcgtccgcgcacgcgtccgcgctccctctccccgcgcgccgccagacgcaatttcgccctcgattcgaccccgattcgtccgcccgcgaccgggattcgctccgccaagcgcggatctgaacgctgcgctccgtgtcgccgctcgaatcggccatgagaggggccaaatcca

SEQ ID NO: 311746 - DNA, 258 bp, Zea mays
cactcatcttttctcgtttagaacctctaaaatttcccccactcgccagtcgcagcagcacctgtagcagccatggacgccagcggaccggtagcaaggggaagaagggggcggccgggcgcaaggcaggcggccccaggaagaagtcggtgacgcggtccgtcaaggccgggctgcagttccccgtcggccggatcgggcgctacctcaagaagggccggtacgcgcacgtcgtgggcactggcgcccccgtctacc

SEQ ID NO: 311747 - DNA, 237 bp, Zea mays
cccacgcgtccgctgaaggagagcagcccggaagagggggagcaagcagcagccgtccgtggaagaagatgtcgtacctgctgccgcatctgcactcggggtgggcggtggaccaggccatcctcgccgaggaggagcgcctcgtcatcatccgcttcggccatgactgggacgagacctgcatgcagatggatgaagtgctggcagcagtagctgagaccataaagaactttgcgg

SEQ ID NO: 311748 - DNA, 210 bp, Zea mays
tgacgtggcgttcgccgagcaggatgcgtccgggtcgaagccgtcggccgtggcgatatcgaggcgacaattgtggatagccacgccaacctgcgggtgctgtcccggcgccggccgatgcagctgctgcgcctggtgctggggctccagggcgaccgcctcaccgtgctccagctcaacatgagcagcggcgcccacatggtgctctac

SEQ ID NO: 311749 - DNA, 216 bp, Zea mays
tctcgctgggttgcttgtccagaaccttccgtgctacagagacccggatcatcgggccactggtgaagcttcttgatgagagggaagcagatgtctctcgggaggcagcgattgcactgaccaagtttgcgtgcacggataattacctgcacgttgaccacactaaagcgatcatcagtgcaggcggacgaacacctggttcagctcgtgtatttc

SEQ ID NO: 311750 - DNA, 213 bp, Zea mays
tttacttacacttagtaactgctaataaaaatctgaccaacttataaaagcaatgctcagcttcagcgtttattctgttgatcagccttacacaccacatgaactctcacctttggtgagttcatgcacattattccccataacttgttgagctatgaacgtatgtgaactgactcttggtgtctcacaccccccacaggagaagaacaggtg

SEQ ID NO: 311751 - DNA, 236 bp, Zea mays
actagttctagatcgcgggcggccgctcgcgatctagaactagtgtcagcacaggacttctgattcttggtgtgctatgccactctctgccactgatgctgagatatgctgtgagctccggggagcacgcagaatcctcttgggattcaggactggagctgtcccgagcatgcagcattgtcatgctccttgcctatgtagcctaccttttcttccaactgaaaacccaccgccaa

SEQ ID NO: 311752 - DNA, 227 bp, Zea mays
cagtccaaggatggggccgctaacttcgcggtttacagcaagatcgccaagggcatggtgctctgcctcttcggtggtggcggcggggacggacccgcgcttgagattgagctcgacccgtacgtccaccggaccggcgatgtctggcacgtctcgatggagagcgtggaggggtacgcccgctacggcttccgcagcgggctgttcgcaatgtttggcattgaccg

SEQ ID NO: 311753 - DNA, 245 bp, Zea mays
cggacgcgtgggcggacgcgtgggcggacgcgtgggcgcgaatagccgcccttttttttttttttttttttagtttttagatagacatcaaaactcatactatatatagatggaggtgtacatatgtttgataaataaggtaacagtgcctgaagacaagaccggggaagaagataaacaagactgagcgagctactgctctgcttgatgtactatatatgagccgccaaaccttggtgcggaag

SEQ ID NO: 311754 - DNA, 231 bp, Zea mays
cccacgcgtccgcccacgcgtccgcccacgcgtccgcggacgcgtggtgtgtttgcagcacagtcaattcaattgggtatcaatgatattgttgtggctggtggcatggaaagcatgtccaatgccccaaagtacattgctgaagctaggaaggggtctcgttttggtcatgacacacttgttgatgccatgcttaaggatgggctttgggatgtatacaatgattgtgcc

SEQ ID NO: 311755 - DNA, 225 bp, Zea mays
cccacgcgtccgcccacgcgtccgcgcacgcgtgcgctcgcgcgtgcgggagcagcagcagcaggcggcgccgaggatcgggatcccgctcagtccttgcaaccatggctgggggattgaagaagcacttgaagatgctcaatgcgcccaagcattggatgctcgacaatcttggcggagcttttgctgccgagccgtcttctgggcctcacaagtccagggagt

SEQ ID NO: 311756 - DNA, 248 bp, Zea mays
tcggaatccgggtcaccacgcgtcccggacctggtgcgcgggacgcgcatcgggcccgagctatggctcgacttccccctcctccccgaacacgcggactcggatgaggttgacatgactgatgcgcacaagatcacgccctggccgtggaaagctgtgcgcccgagctggctgatctgaggatcgagctctgccccagccacatgagcgaggactgcttctggaagatatacttcgtactgctgcat

SEQ ID NO: 311757 - DNA, 241 bp, Zea mays
cggacgcgtgggcggacgcgtgggcggacgcgtgggtgtattgtgtgcttgtgaggagagaaatcgctgtaagtttggttgaatgaaagcgaagtctcgaggtgtcgttcattaggtactcgacgtatgggctagattgtagctcgacgtggtgcttatagtctccgagctgaatttaattgtgggtgtgttaatcgatcacgtgatgcggaggacaagaaccagatttctctcaaggtga

SEQ ID NO: 311758 - DNA, 190 bp, Zea mays
ccacgcgtccgccagagctcatatttggtgccactgagtataccacagcgattgacatttggtctgctgggtgtgttcttgctgagcttatgctagggcaggtatggtgtcttcgatatttattggcatgtttattttttcaagtcaacaaaaaaagtcgtttgagttcacattttcttacaagaactat

SEQ ID NO: 311759 - DNA, 249 bp, Zea mays
ggaagttgagcagctagcaaggaatttcctttttgacccatacaaggtcactattggttctgaagacttgaaggctaatcatgccattgttcagcatgtagagatattatctgagagtcagaagtataacaagctggttaatctactggaggatataatggatggtagccgaattttaatatttatggacaccaagaagggatgcgatcagactactagacagcttcgaatggatggttggcctgcttt

SEQ ID NO: 311760 - DNA, 240 bp, Zea mays
cccacgcgtccgcccacgcgtccgcggacgcgtggcgagagactcgcccgtgctcaatcccaccactctcgccgactcatccggccgcagcaagtgcacctatcgacatgagccgaacaaccgaagaggagatggcgtcggcgctgtcctccctgcgctacggcgacagctctcggtggtgggcatctccgccgcgacggccgtgctctgcgagtgccatgtcctggctcctcatctacc

SEQ ID NO: 311761 - DNA, 205 bp, Zea mays
cgcgcagacaacagccatcttggaggtatctaattccaatattgtatgtctcggttgaacttgtgaaggcgttgcaagcacatatcattaactgggatattcatatgtttgatgaggagatcggcaataccactcaggtgcacacatcaaacttgaatgagccaatgaggaccttggccgggttcatacaattttgtctgataaa

SEQ ID NO: 311762 - DNA, 200 bp, Zea mays
gccaaaagacaggtactgtgatacctctgaaactcccgacagattgccctctgatgaacatttcgaactatctgcaggtcgagtacctgctaggagacaacccgatgaagatgtcgtacatgatcgggtacggcgaccggtacccgcagcggatccaccaccgggcctcgtcgttgccctcgatcagggaccatcctcag

SEQ ID NO: 311763 - DNA, 246 bp, Zea mays
gcagtgccgcacccgccgatctcggcttatctccactccatctcgagtcacagtcgtgaccatagcgcgtgagcgatctatatgtccgtggaaattgcgagtcggtaggatcgccctgggtagccaccaggatgtttagcacccgggcgccctcaaggcggctttctctgagttcatctccaccctcatcttcgtcttcgccggccgagtctccggcatgggcttcagcaagctgaccggcgtctg

SEQ ID NO: 311764 - DNA, 231 bp, Zea mays
cggacgctcgaggctagagcatttcagttatactaccagggtatctttgatggtccatgtccgacatctctagatcatgctgtgttaatcattggctatggttctgaaggtggcaacgattactggagtgtgagaaactcttggggtgaaagttggggaatgaagggctatatgcatatgcatcgaaacactggtgattccaagggtgtctgcggtataaacatgatggca

SEQ ID NO: 311765 - DNA, 264 bp, Zea mays
atgggcttcagtggcctttggcgcattgtcgtcaggctgctcagtccgctgtctgctgctcccttggtcgctctcgtcggatttggactctatgagctagggtttccaagtgttgccaaatgtgtggagattggtcttcctcagattttactgctggtggcgctttctcagtacataccacatgcggcccccttgctgagtactgcctttgagcggtgtgctgtcataatgtccattgccctcatctggctttacgccttcttc

SEQ ID NO: 311766 - DNA, 124 bp, Zea mays
cttggtgactggacacgggagctcaaacgggtattctcagcagcttgtgagccagctgtgggtgggaagagtagccttcttcgagcagacgaaacaaccaagaaagcgttaccaaaacttttga

SEQ ID NO: 311767 - DNA, 265 bp, Zea mays
cccacgcttccgagggaaccttggtccgatgtgtggcatgaaccttgccttcgacagtgatctcattgtccctgctaggtactttggtctcatgggtgatgtccagcccatcggtcgctacgaggacatgtgggcaggatggtgtgtgaatgtcatctgcgaccaccttagcctgggagtcaagactggcctgccatacatctggcacagcaaggcgagcatgcccttcggtaacttgtagaaggagtacaagggcatcttctgt

SEQ ID NO: 311768 - DNA, 265 bp, Zea mays
tcccactcgtccgctgctgcgtgtgcccttgtgctatgtccacgtctgcgttgatctgccgctcgaccacaagcgctctccgttcctctatgacacgctggactccgcgtgctatcacgacctggaggcgcacctccacctcatcgacgggtaccacgggcgcggtgagcggttcgtgctgtcgagctggctcgacccggcgctggtgaacaaggcgttctacttcctcaaggaccaccacgtcgtgctcccgtgctttcgccat

SEQ ID NO: 311769 - DNA, 221 bp, Zea mays
ccagtactcccacaagcactcccaccacacctacgagtacacgcacgccgccatctccccccacgtcgccaagctcctccccaagaaccgtctcctgtccgagaaccactgccgcgccatcgcactgcagcacgaccgcgggtcggcgcactacgcgatgcaccgcccggagccgcacatcatgctgctccgccgcccgatcaactaccagcagcagcagg

SEQ ID NO: 311770 - DNA, 225 bp, Zea mays
cgagcccatcgccgtcctcgccggggacgcgctgctctcgctctccttccaccacatggccagcgtcgggtcctaccctccggacgtggacccggagaagcaccccgcccgcgtcgtccgagccattggggagctcgcgcgctgcatcggatccgagggactcgtcgccggccaggttgtcgatctcgagatgacgggcacatcagagacggtgcccctcgaacg

SEQ ID NO: 311771 - DNA, 174 bp, Zea mays
gaggaggagtggtttcgggagatattcggggggtccaagaaagaggatgccatccagaaccagtatgagttcctgatccagcgcatgggcggcccgcctctattctcccagaggagaggacaccctgcccttataggacgacatcgaccattcttggttacccaccgagctgca

SEQ ID NO: 311772 - DNA, 248 bp, Zea mays
atgctccatcaagttcatgacagatggtattttgctgcgagaaatccagggtgattttctgttgaagcgctattcagtgatcatattggatgaggcacacgaaaggagcttgaacacagatatacttattgggatgctttctagaattataaagattcgcaaggatttgtatgcaaagcagcaggaaaaattacggtctggatttaagatcaaaccagaggataagatcagtcagttaaaggtggtgc

SEQ ID NO: 311773 - DNA, 230 bp, Zea mays
gtcagttcctccggcatgcgaattggatccacctgctgctatggctaccaatgtgccttcttcgcttgtgaatttgttgctaagttttgggactgacgactcgcttttgattcatctctcaaccgatctagtttatgagggggtgaaatcattctacaaagaagaggacgagacaatgccggtgaacatgtatggagaatctaaagttgcagcggatcaactaatcgttg

SEQ ID NO: 311774 - DNA, 180 bp, Zea mays
ggcgaaaatgctgtgttcaccatcccaccagagcttgcatatggtgaagatggctcagcgccagtcatccctccaaatgccacactgcaatttgatgttgagcttctgtcatgggtgtgtatcaaggacatttccaaggatggaggcatcttaaaaaaggtagtagccaagggcgataag

SEQ ID NO: 311775 - DNA, 236 bp, Zea mays
gaatgagggagatacccattggcgacttggttgtctgattgaagcagcttggtgcagatgttgattgtttccttggcacttactgcccacctgttcgtgtcaatggaatctgagggctacctggtggcaaggtcaagctgtctggctccatcagcagtcagtacttgagtgccttgctgatggctgctcctttggctcttggggatgtggagattgaaatcattgataaattaatc

SEQ ID NO: 311776 - DNA, 235 bp, Zea mays
actgatcagattgtggtcatccatggacgtgttgaggatgttgaccttgaggaaaaggttgatgttataatatcagaatggatgggctatatgcttctctatgagagtatgctgccaagcgtcctatttgcaagacataaatggcttaagcccgggggtcttattcttccttctcatgctacgctcttcatggcccccgtaacaaatcgtgagagatatgaagacagcgtcgatt

SEQ ID NO: 311777 - DNA, 222 bp, Zea mays
ggacgctggctcccaccccgcagccgccctagcacccgcgacgagcaggatgctgcccagttgctcttgcggtagttcccccaactgtcaccatgcagaacgaggagggtaagactgtggacctctatgtccccaggaagtgctcggccacaaacaggatcatcactgccaaggaccatgcctctgtccagatcaacattggccacttggatgcgaatggcc

SEQ ID NO: 311778 - DNA, 210 bp, Zea mays
aggagcgcgagctcgacctccgaggcaacaagatcgccgtcatcgagaatgtcggagccaccgaggaccagtttgacacaattgacttgtcggataatgagattgtgaagcttgaaaacttcccatacttgaatcgtcttggcactctactagttaataataacagaatcacgcgtatcaatcccaatcttggcgagtttttgccaaagc

SEQ ID NO: 311779 - DNA, 215 bp, Zea mays
cccacgcgtccgaatttagagtatacctagcaaacttggttaattgatcgatgttggttgctctgatgtttgcagcatcccgttgacgccatgggtgctggaggagatgagcagcaacccgaacatcgtatacacggacaggtccggacgccggaatcccgagtacatctccctcggctgcgacacacttccagtgctcaggggccggaccccca

SEQ ID NO: 311780 - DNA, 240 bp, Zea mays
cccacgcgtccggcgccgcctctgctgcagcgggcagccgccatggcgcggcgccacgggtggcagctccccgcccacaccctgcaggtggtggctataacagtgtactctgtgctttgtatagcattctatgctttcttctctccatttcttgggaaggacttgtatcaatatatcgctgtcggtatttatagttttttgccaggctttatctgtgctgattctatatgtcagatgtac

SEQ ID NO: 311781 - DNA, 181 bp, Zea mays
ctagggttaacatttcgtcaggttaacaaatggtttgaaactaggcgtcattccgcaagggtagcttcttccaggaaaggcatcagtctagataagcatagcccccaaaatactaatagtcaagtgacagctagtatggaacctaaagaacctgaggggactgtggtggaagaatctaatg

SEQ ID NO: 311782 - DNA, 218 bp, Zea mays
cccacgcgtccgcccacgcgtccgaacacttcaaacgatcagaatgttcctttagcgagaatggaagcatttgaagcatttctgggtcagcatgtgttggcaaaccatatagatcaaatgtcaatcgatccaatcgagcaggtggttaatagggaatcaactgcaccttacaccagaagccaagtagagtttattttggagagatgcaggtgcaaaca

SEQ ID NO: 311783 - DNA, 250 bp, Zea mays
accaccacatccagctgatcaaggagaaggggaacttcagccagcttgagaatgaccacgagaagacattgcgcacgaggggaagctgtactgcaagcaccaccacatccagctgatcaaggagaaggggaacttcagccagcttgagaatgaccacgagaagacatcacaggctgggtcactggaggaggatgaacaagagtattgatcactgagcacaaccacagatgaataatgaatcctcttgcat

SEQ ID NO: 311784 - DNA, 248 bp, Zea mays
gaaggagaaagttcttagcgagaatgccaccgccacaaatgctgccccagtgcttgctgctaggcgcaaggagattgctcacgaagataagcccctggttgccacaaaactcaatgcctttgaaatcatcgcgttctcagcagggttggacctttctggtctgtttatcaaggaatgcaggaaggagacaaggttcacttcagataagcctgcattggccatcatctcaaagcttgaagatgtcgcga

SEQ ID NO: 311785 - DNA, 123 bp, Zea mays
accagttcctctgacggccgccgtgctccgatgaagctgagcgtgctccgtatccgctgctcgcactccttctccgtcgccttcctctactggttctacgtcttctcatgaacgcatctcccc

SEQ ID NO: 311786 - DNA, 238 bp, Zea mays
cccacgcgtccgcccacgcgtccgcccacgcgtccgccaagcgcgtcgccgacggcattgcgtcgccattgcctccaaatccgtgtgcgactcgcgtgatcccagatcccgctcgccgtatcccccgcagtgacctctgaccagagcattttccgcgcggaaaatgccgccgtttcggccggctcttggaagggcgcttcttctgtaggaccgcggcgcgaggctgcgatggcgttcg

SEQ ID NO: 311787 - DNA, 218 bp, Zea mays
tggagactttgatgctggtttgggcatcttcaaggatagcttaaagaggcgtaaggtgccagattttagaacaatgaaaggcttggttgagggattggcaaagggaggcagggtggctgatgccaaagaggttgttgcagaggtaaaaaagatgttcccagagaatttgctgtctggttggaagaaggttgagaaagagcttgggttggactcagata

SEQ ID NO: 311788 - DNA, 222 bp, Zea mays
caactttctgatctttgaagaccgcaagtctgctgacattgggaacacagtaactatgcaatctgaaggaggtatattccgcatcttagactgggcggatattattaatgcgcatatagttcctggacctgggattgtagatggcttgaagctcaagtcactgttgtcttctggcattgaagggtttgcctaaaggaaggggcctacttttgcttgctgaaa

SEQ ID NO: 311789 - DNA, 221 bp, Zea mays
atttaagttggattatataatctagaaggtaaataagttaaaaatcaaacaaacaatacagattattaggtgaattatataatctagatacctagattatgataaatccataaccaggtcactaggtgcttacataatccataagctggattatatgatcctggaagtaaacaaacagggccaagtctcttacaatttgccttgtttgccatgaccttctg

SEQ ID NO: 311790 - DNA, 197 bp, Zea mays
ggtctccggggtgcactggtggtataaaactgccagtcatgctgctgaattgcctgccggattttacaacccgtgtaaccgtgatggctatgctccaattgctgcagtattaaagaaatacgatgctgctttgaactttacatgtgttgaattgcgcaccatggaccagcatgaggtataccctgaggcatttgcag

SEQ ID NO: 311791 - DNA, 264 bp, Zea mays
ggacgcgtacgcccacgcgtccgggtgctccgggggtcggtttcgtgggtgagcgggtcgagagggcgagcgtcggatgttgagtagcgctgcgtcgtcggctgcctcgcctggtccgcggacgacgactccctccacaacgccttcagcacgtacggcgaggtccgcgagtccaagatcagcctcgatcgggagacgcagatgtcccgcggcgtcggcttcgtcaccttctccagcgaggaggcgaggcggaagccatcgagg

SEQ ID NO: 311792 - DNA, 235 bp, Zea mays
gccggtccaccaggtgattgtggtggataacttcttcacggggcgcaagggcaacgtggcgcaccatctccagaaccccaggttcgaggtgatccgccacgacgtcgtcgagcccatactgctcgaggtagaccagatctaccaccttgcctgtccagccagccccgtgcactacaagtacaaccccatcaagaccatcaagacaaatgttgttgggacactgaacatgcttgga

SEQ ID NO: 311793 - DNA, 232 bp, Zea mays
ggtgaccggcaccatcgacctgtccggcaacaatttccggttcaacctcaccggcgtagagatgcccatgcagctgtctttcctgaacctgagccacaaccggatctacggcggcgtgcccgtgtcgctccgggacaccagggtggcggtgctggacctcagctacaacgatctctgcgggaagatacctaccggcgggcatatggtgcagtttaaggcggcggcgtacgag

SEQ ID NO: 311794 - DNA, 233 bp, Zea mays
catccggccagctccgccggatgggcaatgatggcgctccacaagctctgtgacgacggcggcccccagctctcttacggaagcagggcgacgtcagcaaggactcgaccgctccaacagctgtccctccgccaggctccgtcgcacctccgacagccacgacatcacgccagcaaggtgccaagacctctccggctgccacattggcatgtacctagggcgctactcacgct

SEQ ID NO: 311795 - DNA, 228 bp, Zea mays
acccacgcgtccgcccacgcgtccgcccacgcgtccgcccacgcgtccggggtgccgcggttggcgccgggcctgctcctgagtggaaactgtcctcagatccgtgcctccatggggctacccttgtccccgctccgccgctcctcatcagactgtgtacccttgggccggtgactatgctatggtggctggggctagggttggggaccgtgggggtgtggtccttgg

SEQ ID NO: 311796 - DNA, 228 bp, Zea mays
gcatttgaagcgtgatggaaattcctacactgttcctcatgccccctatgtaatgaataggagccaaaagttagttttttgtgacttcttgagaagagtaaaatttcctgatgggtatgcttctaacttagcaaaatctattactagtgatggatgtaaccttcaaggattgaaaactcatgactgtcatatcctactccaaagaattttacctgttgctatccgagg

SEQ ID NO: 311797 - DNA, 228 bp, Zea mays
ggatttcaaaaggatgctcttatgtacatcgcagctggtgaaacttatgggggagataggagactagaaccactacggtctgcttttccaaaccttgtacgaaaggagatgctgctagactctgaagttctgcatcaattccaaaatcactcttcccagatggctgcacttgacttcattgtatccacagctagcgatgttttcattcccactttcgatggtaacatg

SEQ ID NO: 311798 - DNA, 232 bp, Zea mays
cccacgcgtccgcccacgcgtccgcgtgctggcgctggcctggagcgtggcgcactgggctgggtacgccgcgttcggttcgaatgctccgggcaacatcttggcggcaggcgggctgggtcccttgtggctcgtcgacattgccaacatgtgcctcatcctccacctgatcggtgcataccaggtatacgctcagcctgtcttcgcttcggttaaaagttgggcggcttca

SEQ ID NO: 311799 - DNA, 130 bp, Zea mays
gggcacagtcgggggcgggactcagctggcgtcgcagtccgcctgcctggacctcctgggcgtgatgggcgcgagcgggaccgtcccgggtcgaacgcgaggctgctggccaccgtggtcgccggcgggg

SEQ ID NO: 311800 - DNA, 152 bp, Zea mays
cccacgcgtccgcccacgcgtcaggccccacgcgtccgcggaccgtggcgaagtcagaggttgatgacgaggatggcagcagtgacgaggaaaacgatgacgatgagtaaacagtctccaaggtcacgaggtagcaaatcgagtgttaggtc

SEQ ID NO: 311801 - DNA, 252 bp, Zea mays
cccacgcgtccgcccacgcgtccgctagctattcgtctggagacattgggtggcatcatgatatggtttacagcaacatttgctgttatgcaaaatcaacgagcagagaatcagaaggcctttgcttctacaatgggtcttcttcttacttacactctcaatattaccaatttactcacagctgttcttcgtcttgctagtcttgctgaaaatagtttaaatgctgttgaacgggtcggaacatacattgag

SEQ ID NO: 311802 - DNA, 224 bp, Zea mays
cccacgcgtccgttcttatggagatggaggtccctgaatcgtacatggagtccctcccaaagaatggcaagtcaacgcttggagattcagcgtacaagcttataaccgacgactgtttcgacgccgaagaacttctgcgctccgtggacttgtcggacgagcacagcatcgtcgatctgaagaaccgggtcgaagcctcggtggtcatctggcagaagaagatg

SEQ ID NO: 311803 - DNA, 222 bp, Zea mays
gagatgttataaattacgtgattgagaagtcaccagagggagcccagatcagttccccggggtcttcctgtccccccacgcacaccagagttacagttggtagttgctttgctttgccttttttttcattatttcatttgacactagtgtaagtgggtgtttggtttatagggactaaacattagtccctctactttattccattttagttcataaattgtt

SEQ ID NO: 311804 - DNA, 227 bp, Zea mays
cccacgcgtccgcccacgcgtccgcccacgcgtccgcccacgcgtccgcccttccattcgcccaaacccccgccgccgtgacccctgccagcccgcggccttcccctcgttctaggcttcaactgccggcctcgtgtcttctgggcaagtgaagagagagatggcgtcgccaataccgcgcgagtgggtcgggctgcagcagtttcctccggccacccagaccgagc

SEQ ID NO: 311805 - DNA, 206 bp, Zea mays
gcggacacggaggcgaaggaggaggagcagcagcagcaggcgtcgccgaggagcggcatcccactcagtgcttgcaaccatggcctaggggattgaagaagcacttgaagaggctcaatgcgcccaagcattggatgctcgacaagcttggcggagcttttgctcccaagctatcttctggacctcacaagtccagggagtgcctt

SEQ ID NO: 311806 - DNA, 246 bp, Zea mays
agaaattacagagacttcgtgaatttgttcgctctgaatatgatcattcatgcttacggtcttgccgttcacgtgcactctatgaaggcctcaaggtgactgcaaccccagatttaatgctagggtatttagatttcttccttgggggagatgaaaagaggcctgatcttccacctcgtcttcgtcaaaggtttccaatgtctcttatctttggaggcgatggaagttacatgactccgtttttac

SEQ ID NO: 311807 - DNA, 240 bp, Zea mays
gccgacgtgttcggggacccgtcccggctcgcctcgctcccgggtcccgccgccatcggacacgtgcgctactccacggccggcgccgccgcttcgctgcgcaacgtgcagccgttcctggccgggtaccggttcgggcaggtcgccgtggcgcataacggcaacctcgtcaactaccaggcgctacggaacaagctcgaggccagggggtccatcttcaacacgtcctcggacacggag

SEQ ID NO: 311808 - DNA, 245 bp, Zea mays
ggcgcgtctccatcggcgtcgaggccgtgcgtgacccgcccgtgctcatcctcgacgagcccacctccggcctcgacagcgcctccgcgctccacatcgtcggcgcgctccgcgccatggccgaggcgcgtggacgcaccgtgctgctcagcatccaccagccgggagcgcgcatcgtcaagatgttcgactccgtcctcctgctagccgccggctccgtcctccaccatggcaccgtcgaccag

SEQ ID NO: 311809 - DNA, 233 bp, Zea mays
atgatttcttcgccaggaggatggcggagaacgagtccaagcctgagggtatcccgccatcccagggcggcaagtacgttgggttcggatccagcccagcgccagcggctaataggaacggcggtgctgctcaggacgattgggacgaccaaggcaagaagggtgaacctgtgaaaccgcaccaaagcagtgactcctgggctggctgggatgatgggaaggacgatggtttt

SEQ ID NO: 311810 - DNA, 233 bp, Zea mays
ggtctgcagcccccaactacccccagcctcggaaggaaccttccagaagcgcaagactctaaaggccgtcgccttcccattcttcctcgccgcgggggtcgcctgagatcacataaacaatggtgaaggctgttgctgtgcttggtagcagcgatggtgtcaagggcaccatctttttcacccaagagggagatggccctaccgctgtcaccggaagtgtctctggcctcaag

SEQ ID NO: 311811 - DNA, 252 bp, Zea mays
acctcaacctggtccgcctcatcggcttctgctccgagggccggcaccggctgctggtgtacgagttcatgaagaacggatcgctggacgcgttcctgttcggcgacgcgccgccgggcgggaagatgccgtggccgacgcggttcgccgtggccgtgggcacggcgcgcggcatcacgtacctgcacgaggagtgccgcgactgcatcgtgcactgcgacatcaagcccgagaacatcctcctggacgagc

SEQ ID NO: 311812 - DNA, 255 bp, Zea mays
cccacgcgtccgaaccacacacacctccacccactctctgagacaagtgaagcatctcgcgcactgtcgcagtcgcagacggagatgatgaagcactcgagcagcttgtgcttgctcttcctcttggcgctctgcaccaccctgctggcctgcgagctggtccaggcacaagtcctcttccaggggtttaactgggagtcgtgcaagcagcagggaggctggtacaacaggctcaagacccaggtagatgacatc

SEQ ID NO: 311813 - DNA, 251 bp, Zea mays
gcgacatctgctcgtgatattaaattgttttcgcttataatcactcatattaataacgttaattatcaggtcaaatattttaaataatttatttaatgtttgctcgactaatgttgattagattaatattccaattagattaaatgtatagtttcaacttgcgctttgataataaacattaacacagttaatatcaacttaaatactttttgtttgtttaatatttgtttagtataaacatgtaacatgtt

SEQ ID NO: 311814 - DNA, 239 bp, Zea mays
ccagcgtccgggaccgggctagctagctgatccatggacatgccgccgaaccccgacagcccctcgtcaggaaggagcaacaacatcggccggccgagcagcggcaggcatcgccgtccgtcggttctacgatgccgcagtcgtcgccgagccggtacgaggcgcagaagcggcgcgactggaacacgttcggccagtacctgcggaaccaccggccgccactgagactggcgcagtgc

SEQ ID NO: 311815 - DNA, 246 bp, Zea mays
gataattttgacagaattttcctgtttgcatcatgctgtatttttctttttcttgtgttgactcaatttctttaacttagcgtactggttgtgggatttgatggtaacataaatagtatgagagttgcttgggaattagatgattctggagaatcagcttccaaatgttaatgacaacggaaaactcaatgtaggggcttcccctacagtatttctcaaaaaagaaaaaaaacggaaactcaatgc

SEQ ID NO: 311816 - DNA, 137 bp, Zea mays
gtaaaaacattgcccttatggggaactattggatgtttctcaacgtttgaagactgcaagtgaagttaatgctgctattcctacaagccaaagccatgagaaagatccgaagcttccaagcttgttaaagatgttga

SEQ ID NO: 311817 - DNA, 241 bp, Zea mays
gccttcctggtgggagagttttgatatttggtgggtctgtggcaggtcttcattctgcttcaaaactttacctcctggatccaactgaagagaagctgacctggaggcttctgaatgctccagggcatcctccacggttcgcctggggccatagtacttgtgttgttggagggacaaaggcaatagttattggaggaggaactggagaagagtggacactaacagaaatacatgagctttc

SEQ ID NO: 311818 - DNA, 160 bp, Zea mays
gccatgaggtatatacattgatgttcagctgttttgttgcattggcctacattatgaaatgcaactatacaaacacacccaaaaagcgatagggtgctctttacatcaaatgtttggctacaggtatggcttctatgatgaatgcttgcggaaatatgga

SEQ ID NO: 311819 - DNA, 240 bp, Zea mays
ggagaagatctcacggcatgctcgagacggaactacgacatcacgagaaataattgttcaatttaatgctgatgttgctgatggaatgccgtggaagttcatccctacacagagagaggtcagggttaaacctggtgaaagtgctcttgctttttatactgctgagaatcgcagttcagctccaattactggtgtatccacgtataatgttgctcctatgaaggctgcgatttacttcaa

SEQ ID NO: 311820 - DNA, 133 bp, Zea mays
cccacgcgtccgatccactgcggcctggacgcgtgcgagagacttgaccaagcagcagcagcagggatggcgcctctgaagctgtacgggatgccgctgtcccccaacgtggtgcgcgtggccaccgtgctca

SEQ ID NO: 311821 - DNA, 233 bp, Zea mays
ctctcttaatttgtaatattttaatggcatggatttgaatcgcttcactgaatttcttattatagcaataaatcctacctgtgatacatgtttgatgagccttttgaaactgcacaatctattactacttattaaggctacaagggtagcctgcctcttttgtgttctgccttcggacgatctcaaccgcttgttctctcccgcctccgttttggtcatccgtcggatgctgc

SEQ ID NO: 311822 - DNA, 234 bp, Zea mays
cccacgcgtccgcccacgcgtccgcccacgcgtccgctctgattaaaacttgcaaatcatttcaaagtagcaaatagtagaatccttgttttcatgagaatggagggaatgctattattccatctttttgtaacccttttactttgcatgacagttgtctgtacacaccttattccattatgaagcacctgaagtgcatgaatctggatcagtaagcgatcgaagtgatgttta

SEQ ID NO: 311823 - DNA, 199 bp, Zea mays
ctgttgatgcttgctgttctagctgcaacagtcacgtaccaagctggcatcaaccctccaggaggtgtatggtctgatgatagctcagccagtggtaaaccaggagacccaatccttcagcacaacaattccaagcgctatgatgtttccaactactcaaactcactctcattcgtggcatctgtagttatcacaatac

SEQ ID NO: 311824 - DNA, 224 bp, Zea mays
cccacgcgtccgcccacgcgtccgcccacgcgtccgcccacgcgtccgctccattgcccgacagttggaagctgaaggagatctttgctacgggcatcgtgcttggaagctaccttgctcttatgactgtcattttcttctgggctatgcacaagaccgacttcttctcggacaaattcggtgtgaggtcgatcagggacagcgagcatgagatgatgtccgcc

SEQ ID NO: 311825 - DNA, 135 bp, Zea mays
cgctggtggtgaaggagacgctgcggctgcacgtgcccgtgccgttcctgctgccgcgggagtgccgcgaggcgtgccgggtgatgggctacgacgtggcccggggcaccaaggtgctggtgaacgcgtgggcga

SEQ ID NO: 311826 - DNA, 268 bp, Zea mays
cccacgcgtccggcaggaacaagttgtccctgggtgttttctgcgagctcgtgctattgggctcatgcctatgatcgatcagggtgagaaagatgataagatcatagctgtctgtgctgatgaccctgaattccgtcactacaaggacatctcggacctccccccgcatcgccttcaagagatccgccgcttttttgaagattataaaaagaatgaaaacaaagaagttgcagtgaatgatttcctcccagccgaagatgccatcaaa

SEQ ID NO: 311827 - DNA, 234 bp, Zea mays
gttgaagagtgcttcaaaaaacagctctttggtctgcctgcagtccattattcatatgtgaagaatgtaaaacctggtatgcctttgtttctattcgattatattgacagaagactccatggtgtttttgaggctgcaagtcttggtcaggtgtctattgatccgtatgcttggagtaatgaggacttattaaggacgccttttcctgctcaggttcgtatttgcatggggact

SEQ ID NO: 311828 - DNA, 229 bp, Zea mays
caatgagtggagcgcgcgtcgcgctctgggcatgggatatcgtcgtcggcggctgcgctgtctgccgcagccacatcgtggatctatgcgtctagtgccatgctagccgagccagcgcgaccagcgatgagtgcactgttgcttggggagtctgtaatcatgctttgcacttccgctgcatcggcatgtggcttgagactcgtcgagtgtgcccattagatagcagtga

SEQ ID NO: 311829 - DNA, 230 bp, Zea mays
gtgcatctcgatccacatcgtgcaagccggtatccagttcggaaacgcgtgctgggagctctactgcctctagcatgggattcaggctgatggtcagatgcccggtgacaataccattgggggtggtgatgatgctttcaacaccttcgtctgagacttgtgctgggaagcacgtcccgcgtgctgtgttggtgagcttgaaccaactggcatcgatgaggtgatgactg

SEQ ID NO: 311830 - DNA, 236 bp, Zea mays
catcaatgtccttggcgatataacatgagaaacctttccaggctgttcaaacttgccagattacaacaagatttcctttaacaaagttgagagaccgacaggccttgaagcatgtctgcctaacagatctcctactgaggttagcatcataaagcagctagtttgctatgacacagcaaagaggaccagtgctgttgatctgctgaatgatcggtactttaccggaagaccattgc

SEQ ID NO: 311831 - DNA, 199 bp, Zea mays
cagacggtgggcggacgcgtgggcggacgcgtgggtgcgggaagaagtacctgcgcgtccaggatgatactacgactgggagcgcatcgtccgtggcacatcgccaccaaggagaacatggagtctctgatatcgatcggccaggagctgctcaacaagccagtggcgagagtgaacatcgacacagggctgtacgagt

SEQ ID NO: 311832 - DNA, 237 bp, Zea mays
cccacgcgtccgcccacgcgtccgcccacgcgtccgcagtgcaactgtaaccaagatacgtacaggtcattcaccaacatgtcatccaccttctccagcatgcttgtttccacgttgttgtcaaaccctgccatccatgcagccgccaggctcgcagcatcatactggccagcagctgaaggtaacactcctattgatccgaatcaagaaaaccctgcagatggcgtccaaggaagg

SEQ ID NO: 311833 - DNA, 228 bp, Zea mays
cccacgcgtccggaacaaggcattggatacctttaatctggctattgtctctcctatatattatgtaatgtttactacccttacaatagtggcaagtggaattatgtttaaggactgggctggtcaaagcttaagtagtattgcttctgaattatgcggcctgataaccatcctttctgggacaattttgttgcacacagcagaggagggagccaacaattctgcagc

SEQ ID NO: 311834 - DNA, 245 bp, Zea mays
gcaaagcaagaactgatcaaaagttagtagcactgaacaagatcacgttttttttgtggttgatgttcttggggccaggctgttcctccagtaccccttgccgtatttcttcaggcctaagaggaacagcctggccccaagaaatacggcaagggggactggaggaacatatcgcgcaactacgtccagacgcggacgcccacgcaggtggccagccacgcgcagaagtacttcatcaggctcaa

SEQ ID NO: 311835 - DNA, 245 bp, Zea mays
ggtggccgggctcggcgtcgccaaggacctgggcgacagcgtcggcttcctagccggcacgctctgctccgtgctcccgctctgggccgcgctcctcgtcggcgccgcgcagaacctcgtcggatacggatgggtctggctcgccgtcacgcgccgtgtccccgtgcccccgctctgggcgatgtgcattctaatcttcatcggtaacaatggtgagacatacttcaacactgctgcacttgtct

SEQ ID NO: 311836 - DNA, 241 bp, Zea mays
cccacgcgtccgcccacgcgtccgacgactgcttcgtcgagggctgcgacgcgtcggtgatcctggtgtccacggggaacaacacggcggagaaggaccacccgagcaacctctccctggccggcgacggcttcgacaccgtcatccaggccaaggcggccgtggacgccgtgccggcgtgcgccaaccaggtgtcgtgcgccgacatcctggcgctggccacccgggacgtcattgagct

SEQ ID NO: 311837 - DNA, 232 bp, Zea mays
gacaaccgctgcgtaaacgaatccatcgccatggcgtctcgtctcgttgcggcggcggcctcctcctcctccctctcctcagcgtcccccctcgctcgcctaatctctcgccgcggccttgccggtgccgcagacggccatgggtctgcgaaggtgcccttgtggaaagatccgttgagcccgagcaagtggaaggaagagcactttgttctagcaagcctctcagtgtggg

SEQ ID NO: 311838 - DNA, 227 bp, Zea mays
cgctctcctcgctctcagaccacagttgccgccgccgccgccctaagccagggtgctgaggctttcgttggcctcttcgccggcagcgagcacccaccagcagttctgtagaaatggctgatggtgaggacatccagcctcttgtctgcgacaatggaaccggaatggtcaaggctggttttgccggcgatgatgcaccaaaggctgtattccctagcatcgtgggg

SEQ ID NO: 311839 - DNA, 187 bp, Zea mays
  unsure (1)..(187): unsure at all n locations
cggacgctggncgcgacgcgtgggttctcctttgggagcgtccaagaccatggggccagcaaagccaaccaaggaatgcaatcatcaaaattttgcctaaacatcgccggggacaccccttcttccaaccgcctgttcgatgcgatagtgagccactgtgtccccgttatcatcagcgatgacatcg

SEQ ID NO: 311840 - DNA, 233 bp, Zea mays
gtcagcgtgggcatggaggaggaggatcagcggcccctgaaccgggccctgctccaccggagcgccaccaccaacgcctcccaggtggccatggtcggctccaatccctgccctatcgagagcctcgactacgagatgatagagaacgagctgttcgaccagaactggaggacgaggcgcaaggcggaccaggtgcggtacgtggtgctcaagtggaccttctgcttcgccat

SEQ ID NO: 311841 - DNA, 232 bp, Zea mays
cacacgcgtccgcccacgcgtccgcggacgcgtggggtcaagaacgctgcatatgcattgagacaaaatgttaaggttattgcctgcataggcgagcttctggaagagagggaagcagggaaaacttttgaagtatgttttgagcagatgaaggcttttgcagatagtatttcgcactgggccgatgttgtgattgcatatgagcctgtttgggctattggaatcggtaaag

SEQ ID NO: 311842 - DNA, 234 bp, Zea mays
ggacgctggcgacggcgtcgtcggcgtcgacaacttcaacgcctactacgacccgtcgctcaagaacaccgcacagggcgctgctggcctcccacggggtgttcgtcgtcgagggcgacatcaacgacggccgcctcctggccaagctcttcgacgtcgtgccattcacccacgtgctccacctcgccgctcaggccggcgtgcgctacgccatgcagaacccggcgtcgtacg

SEQ ID NO: 311843 - DNA, 213 bp, Zea mays
cccacgcgtccggcctcttctcctccctcctgccgggtccttaataaagagcagcagcgcaagaggttggtagagcgagcgagaagaaggcaatggcggcggagagcttcctgttcacctcggagtccgtgaacgaggggcacccagacaagctgtgcgaccaggtgtcggacgcggtgctggacgcctgcctggcgcaggaccccgacagca

SEQ ID NO: 311844 - DNA, 252 bp, Zea mays
gaccaggagcggacgatattgatgcttcttctcgtcttccacttctcaataatgtttactacagagatattcttggtgaatttggagctttctttgctcttgccaacagaattgacaaaatacataaaaattcttggatagggtttcagtcctggagagctacagcaagaaaggttagctgttctggaggcctttcaaaggatgtatggtgtacatcttgatcgtgacctggattctctgttacatatgcct

SEQ ID NO: 311845 - DNA, 243 bp, Zea mays
tgagaacaacagagttgcaacatttatttctacacaaggtccactagtgaagacatttggagatttttgggaaatggtctttgaatatcagtgccctgcaattgtcatgctcacccactttgacagtattaagtgtgataaatatcttccactgggaagtgaacggcgaacatatggggattatgatatcaagattacaaagacaagaacagatagccaccatttacagttgcgtgatgtcaa

SEQ ID NO: 311846 - DNA, 195 bp, Zea mays
cccacgcgtccgcccacgcgtccgcccacgcgtccgcccacgcgtccgatggaatcacgaaacttgttgtgttgcctctataccctcagttctccatatcaactagtggttcaagtctccgtttattggagagcatattcagagaggatgagtatctcgtgaatatgcaacatacagttataccttcctggtacc

SEQ ID NO: 311847 - DNA, 253 bp, Zea mays
ggagtctgttgagaagtgcctgagggatgccaagatggacaagagcaccgtccatgacgttgtacttgttggtggctccactaggatccccagggtgcagcaactgctccaggacttcttcaacggcaaggagctgtgcaagaacatcaaccccgatgaggctgtcgcctatggtgctgctgtccaggctgccatcctgagcggtgagggcaatgagaaggtgcaggacctgcttctgctggacgtcacccct

SEQ ID NO: 311848 - DNA, 257 bp, Zea mays
gaattccggtcagcggtgcgggagtggcggacggtggcggacggtgggtgaaaggagtgtaatgctgagtgtttagtgagagtgaggcgagatttttcttccaacaactgatttcaggagttagttattgccactcaatgcaaatatgccatagagatttgaaactagaaaacactctcctggatgatagtatagcacctcggctaaagatatgtgattttggttactccaagtcctctgtgctgcactctcaacca

SEQ ID NO: 311849 - DNA, 241 bp, Zea mays
ggacgctggtgagcgcgtacaggtacgagggcccgcgggtggacaaggtggtggcgaaggcggaggccgaggcgctgggtgccgccgtgaagcgcgccgggaacgggaagctggtggagaacgacgaggtgctccgcatcctgaccaccaggagcaagccccacctcgtgcagacgttcatgtactacaaggagatgcacggcaggcacgtcgaggaggacctgggccaacgcggggagga

SEQ ID NO: 311850 - DNA, 120 bp, Zea mays
gatcaacaagggaccttgttattcttgttgatgacaccataagcgatcaccatcgcacagggctggaatctgctgggtggaatgttagactagtacagaggatccggaatcccaaagccg

SEQ ID NO: 311851 - DNA, 217 bp, Zea mays
cccactcgtccgcccacgcgtccgcccacgcgtccgcccacgcgtccgcacgtatgaaccttacctgtgggataatgagaagcaatcttacaagcgttatgttgttctttttggttttttggtccaattgaatcacaagtacactagtactgtacaaaaattaccaacaaaatcaaatacagattcaaatatcatgaggtgctctcaggttccaaga

SEQ ID NO: 311852 - DNA, 264 bp, Zea mays
cggacggtgggcgagtctcgtccacccgtcgtcctcctagctcctctactcgccagtcgccatgggcaagattaagatcggaatcaacggcttcggaaggatcggcaggctcgtggccagggtcgccctccagagcgaggatgtcgagctcgtcgccgtcaacgaccccttcatcaccacggactacatgacctacatgttcaagtacgacaccgtccacggccactggaagcacagcgacatcacactcaaggactccaagac

SEQ ID NO: 311853 - DNA, 255 bp, Zea mays
agggctcccgctccgcgtcgccgctgctgagggcgtggtccaccagcacggcggtcgccgagggcaccgcccccgtggcgaaccggatcgcggacagccggtcgttcccgctgtaccgcttcgtgcgcgaggagctcggctgcgtcttcctgaccggcgagaggctcaagtcccccggcgaggagtgcaacaaggtgttcgtcggcatcagccagggcaagctcgtggaccccatgctcgagtgccttcaggagt

SEQ ID NO: 311854 - DNA, 219 bp, Zea mays
cccacgcgtccgcccacgcgtccgcccacgcgtccgcccacgcgtccgagaaaattgtacagatataacccaatcaacaatgaagtactgtgatataatttatggattatgcatggatattgtcttgtttgaggaattttaattgtaatgttatgtttattttttttccctgtgtactataaaggcatgtccatatacacatgatctgtgtgagacata

SEQ ID NO: 311855 - DNA, 215 bp, Zea mays
cccacgcgtccgtgaatcagagaatgagatacccactgatcctatatccgacccaattgtggactcaagagttctgccgattccagctggcaacttaagctttggatcaggcgcacagctgaagaactctgttgggaattggtccagatggttgactgatacgtttggcatggatgctgctgaatctgaaaagggtggtcaagatgtggaagtta

SEQ ID NO: 311856 - DNA, 214 bp, Zea mays
gctttcagtgcgaaaagaacaggtgaagaagctgctggagcaaattgaggagcttggtgaggctggtaaagtggatgaagctgaggcacttatgagaagggttgacattttaaacgctgagaagacagctttagctaacgaagcagacaacaaagtagctatgcttgagaagaagatggaactttgtgaaccatgtggatcatccttagttgcg

SEQ ID NO: 311857 - DNA, 217 bp, Zea mays
catgacgtcttcgtccaaggaggacctcggaggcggcgcgtccgggtctgccgcggccgtcgcagccgccgcgggggagcagagccggctggtgttcgtggggaagggcgccgggtacagcttcgacctggaggacctgctgcgcgcgtcggcggaggtgctgggcaaagggagcgtggggacgtcgtacaaggcggtgctggaggaaggcacgacg

SEQ ID NO: 311858 - DNA, 211 bp, Zea mays
gggcagtgtgtggtacaagccttctacaacactagtactgcaacttaaatttaagaacggccagctactggatttgaactaagacttcgttacattttattttctggtcctgataatcaatccatctcgcttctaggtgatgctttcgttggaggcttcctctcacagttggttctaggcaagggcattgaagactgcgtgagggcaggtt

SEQ ID NO: 311859 - DNA, 250 bp, Zea mays
gcagcaacgactacctcaacaactacctcatgcccaactacaacacccgcaacgagtacaacggcgaccagtactccacgctgctggtgcgccagtacgccaggcagctcgacgcgctctacggcctgggcgcccgcaggttcgtcatcgccggggtgggctccatggcctgcatccccaacatgcgcgcgcggagccccgtcaacatgtgctcgcccgacgtcgacgacctcatcatccctttcaacac

SEQ ID NO: 311860 - DNA, 249 bp, Zea mays
gtcaggagaaggtctcagcatggacgatgagagggctcatcacagcaatccgaagctctaggctgtcaaccatatctaatactatcgagagctttgatgatgtagatggcatggaacagaaggataaagaaataaatagtgaatgggaggccaaggccgcggcgtatgccatattcaagaatgtcgcaaagcccagctataagcacattgaggaggtggatctgctgagatttttcaccaaggaggagg

SEQ ID NO: 311861 - DNA, 246 bp, Zea mays
ctgacggtgggtcgacccacgcgtccgcaactccaacaaactcgtgttcaatggccatgagatctacccatctgctgttgtgtccaaaccaagggtggatgttcaagggggcgatttgcggtctttcttcacattggttatgacagacccagatgttccaggaccaagtgatccatacctaagggagcaccttcattggatcgtgactgatatacctgggacaacagatgcctccttcgggcgaca

SEQ ID NO: 311862 - DNA, 219 bp, Zea mays
gttctttgggtgacagattttccaatgtttcaatggaacagtgatgagcaaagatacgaggccctacatcatcctttcactgcaccaaatcccgaggatatggacgatctaccatcagctcgtgctctggcttatgacatgatttacaatggtgtggagattggagggggaagtttgagaatctacaaaagtgatgtacaacaaagaatttttgagatc

SEQ ID NO: 311863 - DNA, 238 bp, Zea mays
gaaacatactacctaaagcggatattacctcttgcgaggaagcacaaggtaattcatttcgataaatcagacgcccgccttgcaaacaatggccttccgattcagctgcagatgctgcgttgccgagtgaactttgaggctctgagattcacaccacagatcgaggcccttggcagaaagctcatctccactctccagagacgaagtgggcagtttgttgtgcttcacttgcgctacg

SEQ ID NO: 311864 - DNA, 171 bp, Zea mays
cccacgcgtccgcggacgcgtggccggcggggatccggccctgcgtctcctccttcggcgccgaccagttcgacgagcgcaccccgagtacaagcgccggctcgaccgcttcttcaacctcttctacctcgccgtcacgctcggcgccatcgccgccttcagggccgtggt

SEQ ID NO: 311865 - DNA, 169 bp, Zea mays
gccgcccagcggatctcggggcgccggcgctggcacaggggaaggtggtgtctgcgccttcgtcgcccgcggttgtgtctcctgccgccgggaagaagagccggcgggggcccaggtcgcggagctcgcaataccggggcgtcaccttctacaggaggaccggccgttg

SEQ ID NO: 311866 - DNA, 168 bp, Zea mays
cccacgcgtccgcccacgcgtccgcccacgcgtccgggggacctggttccagcactgtgaaagctgcacagcgcaaaggtcaatctgctgtacccatgaagcagggtgattggaattgtcccaagtatgtttgaaaagttaatatgtgtctctatcgcctatcccccc

SEQ ID NO: 311867 - DNA, 239 bp, Zea mays
ctattgatgaatatggtttgctgagagaaccgaaatggggtcacttgaaggagttgcataaagctatcaagctttgtgaaccagcattggttgcaggagacccaattgtaacttcacttggcaatgctcagcaggcatctgtttttagatcaagcaccgatgcctgtgtggccttccttgagaacaaggatacagtatcttatgctagggtatcattcaatggaatgccgtatgatcta

SEQ ID NO: 311868 - DNA, 232 bp, Zea mays
gaagaaaaatgtatccttgctgcctctcgcgacaatctggacagattgtatcgagactctagcaactcgctaaccatcttggagaggagccaccgttttacgatggaagaactggacaaccagcgtcgcaggctgcaagaatccgcagacgaagtgacccgtctcacgcaattgatatcagcaaaagatgccaccatcaagggactccgagcttctaagaaatccattgctc

SEQ ID NO: 311869 - DNA, 230 bp, Zea mays
gagcaccgtccatgacgttgtacttgttggtggctccactaggatccccagggtgcagcaactgctccaggacttcttcaacggcaaggagctgtgcaagaacatcaaccccgatgaggctgtcgcctatggtgctgctgtccaggctgccatcctgagcggtgagggcaatgagaaggtgcaggacctgcttctgctggacgtcacccctctgtccctgggtctggaga

SEQ ID NO: 311870 - DNA, 227 bp, Zea mays
atgcacgctgaactttaccgctgtcgacaaactcatgaccaccacagctgtcgactgcttcacctcgtttgctcctttcctggccaatgtcatctgctgcccgcagcttcaggcaacactgaccatcctcatagggcagtctagcaagcagacagggtctctcgcattggatcccacggtggccaactactgcctgtccgatgtccaggagctgttgctgagccaag

SEQ ID NO: 311871 - DNA, 242 bp, Zea mays
cccacgcgtccgcccacgcgtccgcccacgcgtccgcccacgcgtccggagaaacaagagctgtgcttctctgttgtctcattgctctggcagaagctcatagcttctcccgaaatgcagatgtctgcagaaagtacatcagctcaccaaggatggaggaaggttgtggatgcactttgtgatgtcgtttcagcctcaccaaccaaggcctcagctgctatcgttctccaggtcaagatatt

SEQ ID NO: 311872 - DNA, 236 bp, Zea mays
caccgaagaaggcttctctggttgcattagcttcttatgcttcagatcctgctgctggcaaggatgagtatgcccaatgggttgtggcaagtcagagaagcctgttggaagtcatggcagagttcccttcggcaaagcctccactaggagtcttctttgcagctgttgcccctcgacttcaaccaagatattattctatttcatcttcacctagtatggcaccaaccaggattcat

SEQ ID NO: 311873 - DNA, 226 bp, Zea mays
ggacgcgtggcgtcgacatgccgctctggtagttgccagtatcccaactgccgaaaagtcaaggggctattccgtcatgggatgcagtgcaaaacgcgtgcttcaggagggtgtgtcctttgcaagaaaatgtggtacatgcttcaactccatgcccgagcttgcaaggattcagactgcaatgtgccgcggtgcagggatctgaaggagcaccttagaaggttgc

SEQ ID NO: 311874 - DNA, 219 bp, Zea mays
caatggcggccttgcgctatctcaggcaggttgctcacgaagataccgcccattctgtgataaccgggtggggacggcagcctgctgctctacgggctctgagccagaagctcaccagagggttcaatgaagctctgaatgggctcgctgacgacgggtggtctttgatcggaagtgacggggtggacgatgtctgcggctctgtcagttcatccccga

SEQ ID NO: 311875 - DNA, 296 bp, Zea mays
gtacggtcggaattccagagagaccacgcgtcccaaacctggtgccacgcgtaccgcttgctggtgcactggcatactgtcacaaaaagcaggtcattcatagggacatcaagccagagaatttgctaatcgatatcgagggccggcttaaaattgcagattttggatgggcggctcgttcaaatgctaaacgccacacactctgtggcacaatcgattatctggcaccagagatggtagagaaaaaagctcatgaccatgctgtggacaactggacattaggaatcctgtgctat

SEQ ID NO: 311876 - DNA, 245 bp, Zea mays
cccacgcgtccgcccacgcgtccggtttgaagattatttcttgaaacgtgaactgcttatgggaatctacgaaaagggatttgaaagaccatctcctattcaagaagaaagcattcctattgcgctgactggaagtgatattcttgcaagggcaaaaaatggcactggaaagactgctgccttttgcatttcggcacttgaaaaaattgatcctgaaaaagatgctattcaagttgttatactag

SEQ ID NO: 311877 - DNA, 254 bp, Zea mays
attaaattgattgactttggaagtgcagcataccatcaccaggatcgcagttacattgtatctaccagacactatcgcgcccctgaagttattttgggtatgaatgtagtcgctgcctaattgcacacgtccttttcattacttgtggagcccagttgcttaatatttgtgttgctgttgtaaggacatggatggagctatccatgtgatatctggagtgttggttgtatacttgttgagctttgctcgggtga

SEQ ID NO: 311878 - DNA, 265 bp, Zea mays
cccacgcgtccgcgctgcaataaatacaaccttttcacacattgaaggtggattcaaagcactgttaactgataggagcaaactaataatgggtattggaggagttactgcactggccgctggagtctatactactagggaaggtgcgagggttacatggagttacatcaataggatcttgggtcagccttcactgatccgtgaatcatcaatgccaaagttcccactaccaatgtctaggttactcaaaccaagttcagcatct

SEQ ID NO: 311879 - DNA, 268 bp, Zea mays
caccacgcgtccgcggaccgtggcagaaagagcacatctgggatccttttctttcttgggaggagtccaatcagatggcaatcaactaagcaaaaggtggtggcgctatcaagttgtgaggcggagtacatcgctgctgctactgctgcatgtcaagctgtttggctggcacgactgcttgctgaaatcaggaactcagagacaagcagacctttgctaagggtggacaacaagtccactatctcgctgattaagaatccagtgcatc

SEQ ID NO: 311880 - DNA, 152 bp, Zea mays
aagaggatgggcgagagaagagacaaggctctcaaggagctcatggaccaggtggccacgaagcagccaaacagcatgtgccatggcaacaaggagaatttctgggagggccagggcttcaagttcatcgcgtctatgtcgatgctggcact

SEQ ID NO: 311881 - DNA, 253 bp, Zea mays
caccggtgacgttggatcaaaagaacctgagaaagttcaacaaattatagtcgatgctggaatttacttgtcagggaggaccaacttctttcgaggaacacagaaacgagcagctcctgaggcttttaagttctttacaggttctccatgggtcatattaaaccggcaatttatagagtactgcattcttgcttgggagaatctccctaggattcttctcatgtacttcaacaatgtaatacaacctcaggaa

SEQ ID NO: 311882 - DNA, 260 bp, Zea mays
cccacgcgtccgcccacgcgtccgcccacgcgtccgcacacgcgtccggaaaaagaagatcaaaagggatatcaaaatacttcagaatctctgtggaggtccaaacattgtgaagttgcttgatattgtcagagatcagcattcaaagactcccagtttgatatttgaattcgtcaacaacacagacttcaaagtcttgtaccccacattgacggattatgacatccgctactacatatatgagctactcaaggctctag

SEQ ID NO: 311883 - DNA, 257 bp, Zea mays
aaaccagatgttcgatttgttattcatcacagccttagcaagtctatggagacatactaccaggagagtggtcgggccggacgggatggattaccttcagaatgtattttgtattatcggcctggtgatgttccacggcagagttcaatggtgttctatgaaaactgtggcctgcaaaatctttatgacatcgtgcggtattgtcagtctaagaggagttgtcgtcatggtgcattctttcgccattttggagaggt

SEQ ID NO: 311884 - DNA, 243 bp, Zea mays
agtacggtcggaatcccgggtgaacacggtccgaaggtgacctgttggggacagcaagatccatgtgaagctccagtactttgacgtctgcaaggaccgtaactgggcgaggggtgtccggagcaccaagtaccctggtgtcccttacaccttcttctcgcagagcaggggtgtaaggttactctgtaccaggacgctcatgtgccggacaactttgttcccaggatccagctcgctgatggc

SEQ ID NO: 311885 - DNA, 224 bp, Zea mays
ggtgggagttcctgttatcaatgttcatatatggtttgacagaaaactgaacaacacatatgaccaccttcttttcagcaggagttcacttttaagtgtctatgcagacatgtcagtaacctgcaagaatactatgacccaaaccgttcaatgctggagttggtctttgctcctgcagacgaatggattggtcgaagtgacactgaaatcatcgatgcaactat

SEQ ID NO: 311886 - DNA, 231 bp, Zea mays
cggacgcgtggcggacgcgtgggcggacgcgtgggcggacgcgtgggcgagctcggccaggaaactctgctgtatcttctcctcagcaattacctcatctacaacttgtatgatcaggcagaaaagcttagatcaaaggcacctcgttttgaagcacattccaaccaacaattctgccgatacttgttctacttgggcaaaattaggacaattcagttggagtacactgat

SEQ ID NO: 311887 - DNA, 242 bp, Zea mays
ggccatattcgggttccacgtcaccgtaatgctccctaccggcgtggtgggctctagggccggcccgttgctggccgggtgcgggttcttcgaggcggtgatcaccggggccggtggccacgccgcgaccccccacaacatcgtcgaccccgtggtggcagcctccagcgtcgtcctcagcttgcagagcctcgtctcgcgggaggcggacccgctggactcgcaggtggtaacagtgacga

SEQ ID NO: 311888 - DNA, 232 bp, Zea mays
gaaaaaggtgatcaacctcctttgtattttgcagctgatgatcttgaataccaggcagcatttccttctgagcggcttgggatgggcgccttcaggatagctttggaaagcatcttcaatgaaataaatgatcatccactgaagtatacatcttatgggaaacctaatccatttgtgttcaagaatgcagcaaacatacttgaaaaacttgttatgagtatgtatcctaatt

SEQ ID NO: 311889 - DNA, 226 bp, Zea mays
ggagctcctaagccgcgcgtcagggctcgccggggccaggcaactgatccacacagcattgcggagaggctccgaaggagaagatctctgacaggatgaagaatctacaggagctcgttccgaactccaacaggactgacaaggcatccatgcttgacgagatcatcgaatacgtcaaatttctccagctgcaagtgaaggttctcagcatgagcaggctgggcgc

SEQ ID NO: 311890 - DNA, 234 bp, Zea mays
caccactccagtccctccatttccctcagctcgcgcagcagctagccggcagccaacaaccgaaccaacgagccaacccacaggccacagcgagcgagtaaagcgtccaatggtagcgatggcggccgggcagcagcagcagcagcagcagcgccgctacgcgaggcggactcaacctgcccccgtgcttccggttccacccgacggacgaggagctggtggctcactagctct

SEQ ID NO: 311891 - DNA, 237 bp, Zea mays
gggcgcgggcgggggcgcgtataaatcccggtaaaattcccccgacgcgagacctcaaatcgctctctgcccccgatcaccggtcgcctcccttccgctcccctgcctgcctaatccctccggccaccccgaaaccgctcgctcgctcgctcgctccccgcgcccagagacaagcccggagaccatggcggaccagctcactgacgaccaaatcgccgagttcaaggaggccttcag

SEQ ID NO: 311892 - DNA, 224 bp, Zea mays
gctggaattatgtgtggccaatttggtgtacctttctgggagttcttttttgcaactttgattgggaaggccatcatcaagactcatattcagacgctgtttatcgtgtccttatgcaacaaccagctcctgtatcttatggaaaaggagctaatctggatattcggtcacatcccggggttctctgccaccctaccatctgtgattgcaaactccatgctgga

SEQ ID NO: 311893 - DNA, 218 bp, Zea mays
  unsure (1)..(218): unsure at all n locations
gtagattttagaaaataatctactcgaaggtcttccccagaaattatctccatttgtgctcctgcatcttggttgaggattggtcttttaatcttgtcccacgccttagaagtcggcactatctcggtttggaatgataatccatggagtgcaccgaagtccananntggatgtagcccccgaccttcaaatggattttttaaggataatccattcga

SEQ ID NO: 311894 - DNA, 246 bp, Zea mays
cccacgcgtcccccacgcgtccgcccacgcgtccgcccacgcgtccgcccacgcgtccgcccacgcgtccgcaaacggaccaggctatgtgatttctggtgacatagcaaaattcatcgtgtcacagcatgccaatcagagtttaagactgtttaagatggaagatgtaagcatgggcctatgggtcgagaagttcaattcaacaaatcctgtccaatattcccacagctggaagttctgccagta

SEQ ID NO: 311895 - DNA, 242 bp, Zea mays
atccatgtagatggtcataacttgtatgaatcagcaaagaggctcagactacgagagcttccagcttttgctctggaacacttgccaaatcggaattccttgatatatggtgacctttatggtatctccaaagaagcatccaccatatatagggctactcttcgttacgaaggtaagcaactgcatacctttttgcttcagtgaggcattgctttgcattgcaagtctgatttccgttcacc

SEQ ID NO: 311896 - DNA, 236 bp, Zea mays
gtgacaggttgaggcatttagatcagggtttaatcaggtgtttggcatgtcatccctcctcatattttcacctcaagaacttgactatctaatatgtggccaacaagaaatttgggaggtaatgctatgcactctttatccaagttattatatgtaaaattgtggcactaaataagccttggaggacaagctactatcgtggatcgagtgcttcgagtcgttgggcctgccgatgt

SEQ ID NO: 311897 - DNA, 233 bp, Zea mays
cccacgcgtccggttgcgctctcttctttgcatttgtgcgtgttgctgctacattgtgctcttgtatgtgtattttattctttcccttactcctgttttgattgtgatcatttgtgtaaggcgtgagagacttcaacttatgaagattcctcacaaccaggatactgtgagatataaggaagaattgtggtactcaagtttgatttttggatcacttgagagtggttgagtgt

SEQ ID NO: 311898 - DNA, 237 bp, Zea mays
gggaccgactacccttcttcactgacgaggagcgagagaagctagtgggctcatatgacatgctggggttaaactactacacctcaaggttctccaaacacatcgatatcacgcaacacaacacactaaggctcaacactgacgatgcatatgccagtcaggaaacgaaagggcctgacggcgagcccattggtcctccgatggggaattggatctacctgtatcctcaaggcctaa

SEQ ID NO: 311899 - DNA, 224 bp, Zea mays
ggacctggcaatttttagtccctccattttattccactttagtctataaattgcaaaatatggacactataactctattttagtttccatatttgacaatttagtgactaaagtggaataaattggagagactaaaaattagtctctaaaaccaaacacccccttagtaggtgtttggtttctagggactaatgtttagtcccatcattttattctattttagt

SEQ ID NO: 311900 - DNA, 233 bp, Zea mays
aactccacagcttgcgcccgcaattgcactcgtctccgcctcctcgtcctccaccaccgccgtcacggcgctccccatgaatgggcagcgggcgtcgtccgcctgcctcgggggggttgatgctgctgagacaggccgaggcggcccggccgtcgttcgccgtgcgcgccgcggcggaccccaacaggccgatctagatccccggcagcacccctccgccgtggctcgacggc

SEQ ID NO: 311901 - DNA, 208 bp, Zea mays
cccacgcgtccgaagtatgctttacaaacttcccaagtaatactgctttccgaggttttggtggtccacaaggcttgttgattgcagagaattggattcaccatatagctacagaactccaacgaagtcctgaagagataaaagaacttaattttcacaatgatggagttgtgctacattatggccagttgctccagaattgtacaat

SEQ ID NO: 311902 - DNA, 237 bp, Zea mays
cccacgcgtccgcccacgcgtccgcccacgcgtccgattgtaacttaaatgagagcttggcatgcaacgtaaagtttaatctacctatatcacaagattttgatcaagagttgacaagcttaatggaccatgactatttttcaccaaaagggctaaaagaactcgtgaaaggacccctactcctggaaaatactgtggtcgaagaggaggatctcaaaggagcccatcaccttaccg

SEQ ID NO: 311903 - DNA, 169 bp, Zea mays
ggcgctccggtggtcccgcttctccggggagtgcgcgtcgtgcctgtgccggatggagcccctggtcgtgggcggcacggcggtgcagtaccggggcctgtccaagacggctctggcgatcatcttcgcgctgtgctcgcggatggtgtgccgcatctacggcgaggag

SEQ ID NO: 311904 - DNA, 173 bp, Zea mays
cactcggcgccagcgacgccatcaacgagtttggctgggacaacaagcacgccggcatcaacgtcctcatctccaaggaggtcctcatgggcaaggacgagttcttccggtcgttccgggagaacgccgacaacttcatctgcagcctcctgccgggcatcttcgggcaacca

SEQ ID NO: 311905 - DNA, 225 bp, Zea mays
cccacgcgtccgcccacgcgtccgcccacgcgtccgcggacgcgtccgcccacgcgtccgccaacatgggtgggttcgctgcttctctagtgaagtaccccgtgtgggtgatgaatgtcgtccctgttaactccgaccgggacaccctcggggcaatatacgagcgagggttcatcggcacgtaccaggactggtgcgaactttctcgacgtatccaagaacata

SEQ ID NO: 311906 - DNA, 227 bp, Zea mays
ctggaccgtccaaatccactgcagcaaaaaagacagatggtgggtcacagtctaaggcatcagctgctcttgagattgaagacgttgagccggcagaaatgagtttcgaggaaatagaagagaggttaaagtctgttgtgaaagctgagacaatttcccagctaaagagctctgtctggaaagagcgtcttgaaggttgccaatatccctgtgttgtctatcctgtg

SEQ ID NO: 311907 - DNA, 234 bp, Zea mays
ggtgaagatggttcccactaagcccatggtggtggagaccttttctcagtatcctcctcttggtcgatttgctgccaagaagaaatgatctatctggctggtgctgtgcttgcttgttggttacctcgtggaagcttaaaatatctcgtcttgttgacatccttgcagttgtcgcgtgaacaagtaatctatgatggcaatgtttgcctggtcatgaagtattattactttcgg

SEQ ID NO: 311908 - DNA, 220 bp, Zea mays
ggagaaagctgtattatctatccagaagaacttcaggtgctggaaaaaacgtaaagaattcctgaagatgcgaaataatgttgtcaggatacaggcccgggtgcgagctcatcaagaaagaaacaagtacaaggaattgatttcaagtgtcggaatccttgagaaggtgatgatacggtggtaccataaaggtgttggtctgcgtggattcaattctggg

SEQ ID NO: 311909 - DNA, 214 bp, Zea mays
cgcagttcttcaagaacgcttgcccgcacgcctagagctacgcctacgacgactctacgtccaccttcacgtgcgccaccggcatcagctacgccatcacattctgcccgagcaccaccagcggcaaatactccggcgagaacccgcaggccgcgggcgtgcagcccacgaacggctcgatggtctacctcggcggcgagcaactcgccacctc

SEQ ID NO: 311910 - DNA, 230 bp, Zea mays
  unsure (1)..(230): unsure at all n locations
cggacggtnggcgagacgcgtgggcggacgcgtgggcggacgcgtgggcggaccgtgggtcgacagcgcgtcggttgtccaaaagttacttgagcatggaagcactacccagataaaggaattggctggtcagcttattggacgtgtccttgctcttagtcttcagatgtatgggtgccgggttatacagaaggctatagaagttgttgatttggatctgcagactaaaa

SEQ ID NO: 311911 - DNA, 231 bp, Zea mays
tacttttgggcctggtgttgtagagtcgagtgtatcataagagagccgtcaaactttgggggctgctggtctcgcgctgcactactctaatatcattgctcagattggcaatattggttcccgaagctccgtcccccctcagagcaccagagattcgctctatcaaagtctgtccccgaacgtcaagtctgctctgcgaacaatgctgataattccgacagagtctcaaga

SEQ ID NO: 311912 - DNA, 239 bp, Zea mays
ttcatcttctaactgaatatgccaagctcctaaaattcaaacccactaagccacctgatgctattgaggtatgttcagagtctttggcctgccaagctgaaggcctcgagaagaagtttcttatggaatccatggtgaagtttccccgtgatgcatgtgatctgcctcctcccttcaacccacatgagctcaagttgctaaagcagaagaaagaaaattcaataaagcagatccatatg

SEQ ID NO: 311913 - DNA, 236 bp, Zea mays
cccacgcgtccgccggaactcaagacgttctaaaggagttgggattgcacactgaaatttaataatttggtctacctgctgggattatcggcaatttacaagtacattgagttttacgacgttatgtctgttccaatggcaattgctctgtctggtcaaccgctgcttggacaagcagtgatggttaaaccatctgaggctgaaaagaacttagttcagtcaaatgcgacatcagg

SEQ ID NO: 311914 - DNA, 175 bp, Zea mays
ggttcgacccatgcttcctgttcctgatgcacgatgtcatgttggcggatacggtgaccaacgttatcgtgccgtctttcgatgtctagtccctgctgcccatcatctgctcgacgtacgatgccaagatcgacaccctcaagaacgcgcacctctccgatatctgcatcagcac

SEQ ID NO: 311915 - DNA, 247 bp, Zea mays
cccacgcgtccgatgcgtccgtggtattcgcctattacaaggatggtgccactaatccgacattcctctatttctctcatggtcttaaggagatcaagtgctaggcttgcggcgagattagttacccatgttgggtactatctatgtactattgttatatccacaactatagttgtcctggttgaattgaactcaaaagggtttgtttgagaaaaaactgtccaagattggattgcttgttaaagct

SEQ ID NO: 311916 - DNA, 243 bp, Zea mays
aatgaacacgagcgccggcgctgcccgtccaaacccgcagactcattccactacggatcgatcaacgtcacgcagaccttcgtcctcaagaacgagcagcccctgagcatcagcgggaagcgccggaggacgatcaacagggtgtcgtactcgcctccggagacgccgctgaggctggccgacctccacaacctgaccggagtctacgcagccgacttccccgcgacgcccagcgacgacgac

SEQ ID NO: 311917 - DNA, 234 bp, Zea mays
gtcatccgcttcatcgtccacgaccatgacaacctcttcgtcgctgccgaggctgcgcacgcgctcggcataggcgtcctcatctacaagctcaccaaggagaagacatgtgccggactatccctcaagtctcaggatttaactgcgttatttctagctgttagactgtactgcagctttgtcatggagtatgacatccatacaattctggacagtgctacacttgtagccaca

SEQ ID NO: 311918 - DNA, 258 bp, Zea mays
gtggccatcgacggcaaggacatccggacgctgaacctgaagtcattgcggctcaagatcggcctcgtgcagcaggagccggtcctcttcgcatcgagcatcctagacaacattgcgtacggcaaggaaggcgcgagcgaggaggaggtggtggaggcggcgaagacggcgaacgtgcacggcttcgtcagccagctgcccgaaggctacaggacggcggtcggcgagcaggggatgcagctgtcaggcgggcagaag

SEQ ID NO: 311919 - DNA, 257 bp, Zea mays
aacgaaagccctgtttatctcctattaaatcctacaatcaacctctcccaaaaagatctccctgtgactatctatgagagtgagttgcatgtcatcgatgggattcctcagctcatcttcgtcagatcaaattatacaattgaggtaagtgtccccccttgtgtttgtctagctatatatgatttttttaacattagtatgcttgatcaaagactgtagaggctgagaggatatctgtggaccatgttgcccatctc

SEQ ID NO: 311920 - DNA, 254 bp, Zea mays
cccacgcgtccgcccacgcgtccgcccacgcgtccgcccacgcgtccgatggggggttttgtcaagacccacaagagcaatgcatacttcaagcgtttccaggtgaagttcaagagaaggcgcgctggcaagacagactacagggccaggataaggctgattaaccaagacaaaaacaagtacaatacacccaaatacagatttgttgtgcgatttaccaacaaggacatcacagcacaaatcatatctgctag

SEQ ID NO: 311921 - DNA, 237 bp, Zea mays
  unsure (1)..(237): unsure at all n locations
attttactatttatgntcttgcagtgattagtagtctgtaataaatctctccattcaatatatataattcacatgccagagcgagcatatcgtcaactggtccggcagttcgcgacaccatgagcgctacggtgtgcggcggcggtggtggtggcgcctagacgtcgtggcttgatgtggtcgtgctgtgcgtggatgacgcctagtaggtgttcctctaggactagtcggacgccg

SEQ ID NO: 311922 - DNA, 248 bp, Zea mays
ctccgcttcccgctccgatcgacctgctccctccccaccaccgagcccatggcggaccagctcaccgacgaccagatcgccgagttcaaggaggccttcagcctcttcgacaaggacggggatggttgcatcacgaccaaggagctgggcactgtcatgcgctcgctggggcaaaatcctacagaggctgagctccaggacatgatcaacgaggtcgatgctgatggcaacggcaccatcgatttccc

SEQ ID NO: 311923 - DNA, 163 bp, Zea mays
aaaggttcggtggagtcaagtttggggaaatggagcgtgattgcctcctcgcccatgggtcagctgccaacctgcatgagcgcctcttcatgctgagtgacttctcccagatgcacatctgccagacgtgcgagcgcgtggctaatgttgtcatgaggtctgt

SEQ ID NO: 311924 - DNA, 203 bp, Zea mays
ttgggctttatgtatgatatttgtttgtttctggacattgacttgttgtcttgtctcatcactccaggaaaacctgctgccattcaatatggaaccggtgcaattgctggttttttcagtgaggatagcgttaaattaggtgatctggatgtgaatgatcaggaatttattgaagctacaaaggagccaggccttaccttcat

SEQ ID NO: 311925 - DNA, 203 bp, Zea mays
gggtattggagcagcatggcttgagtacgacaaatcttcagattcctgaggttttacacagctggagtttctgctgttacctttcctagtcttgactttctacactatactgatttcattaatgcatgtccacaaaaatgatgaatgccaaaatggctttggttgccaacatactttaccaatttgcccccttttaactacaa

SEQ ID NO: 311926 - DNA, 239 bp, Zea mays
caatgcctaggtggaatatggacctgtttcctagtcatatttcttgacgcttattttttttttcgcaggccgagaaggacttgcagccttggattgctagagatgacgaacaaggtcagaagatgtggagagtcaaccagcgtatagtgaagcttatagctgagcttatgaggaaccatgacagccctgaagcgttggtgatactcgctagtgcctccgaccttctacttcgtgctacg

SEQ ID NO: 311927 - DNA, 238 bp, Zea mays
ctcctcataacctggtactactgataggtgtatccaatttatcgatccacttgcttccagttcatgggatatgtttgctgatgagaagacttttattacccctgttcagtgcaaaattttgttgaggcaatttaaggctgatacttaatatacagtgactcatgccttatctgctcaggtagcaaataagatgaacaacaactggctaccacctccatgggcacttgctgcaatggct

SEQ ID NO: 311928 - DNA, 242 bp, Zea mays
gctggctcacttctccaggtaaggaaagtgttcgtcctcatggcgccgccgcagccgaagtcgggcctcttcgtgggcatcaacaaggggcatgtcgtcagcacgtgagagctggctgtacgctcgtgacaacggaattggagagcaacgaagagggtgtccatggtcaggggcctgatcagagaggttgctggctttgctccttatgagaagcgtatcaccgagcttctgaaggttggcaa

SEQ ID NO: 311929 - DNA, 236 bp, Zea mays
ggaccgtccgcccacgagtcgcccacggtccgcggacctggcggcctggtttctctcgtgcacgtgcatgcatcagcgactgtctcaggccgccgctgcgccggcgccgctcgcatcgtttgcttccttggaccagcagtcgtcgccgtcaggctgaactgcttgtaaccgtgaattccggacccgtttgcttctgtaagatttgtgcatttgcctgagtaaaaacaacacaaaaa

SEQ ID NO: 311930 - DNA, 284 bp, Zea mays
acgccgcagtacggtcggaattccgggtcaccacgcgtccgggacggtggccaagagtggtgatgagctgaccagcctcaaggactacgtgaccaggatgaaggagggacagaatgacatatactatatcactggtgagagcaagaaggcagtggagaactcccccttccttgagaagctgaagaagaggggctatgaggttctgtacatggttgatgccattgacgagtatgctgttggtcagctcaaggagtttgagggcaagaagcttgtctctgccacca

SEQ ID NO: 311931 - DNA, 228 bp, Zea mays
tccatttaggacatgcgagcacaggttcgacctggtgtacacaacatttcaggaagcatggattctgaatgacggatgatagcttaagcccataacagcctttggggtttgggcagaagcgcacttgggagttgatgaaggcatgtcctgaggcttcagcttcagtaaatttacggctttcaattcggtgtcttcttcgtcaaagaagactcggtagatgtatggttt

SEQ ID NO: 311932 - DNA, 224 bp, Zea mays
catgtttgctgaaattttgatatgataggaaaatgacgacagatgagaagaggaagctgggtgcaggtatctgtcacttgtctccagatgatcttagcaaggcgctagagattgtcgcacaagacaatcctagcttccagactaaagcagaagaagtggatcttgatatggatgcccaggtaatgttttatgtgttcccttgtgttcaccctttctttctttct

SEQ ID NO: 311933 - DNA, 239 bp, Zea mays
ggcgcgtgccggatcgcgtgcgacgcgtttgcgcggcccgagtactgctgcagcggcgccttcgcgtccccggcggcgtgccggccgacggcctactcgcaggtgttcaagaccgcgtgcccgcgctcttacagctacgcattcgacgatcccacctccacattcacctgcggcggcggcccggactacaccgtgacattctgccccggcgccaccccaagccagaagtcgacgaccat

SEQ ID NO: 311934 - DNA, 100 bp, Zea mays
tgagtccataggctttgttttcagacatgatgtgtaagatgaattgacatctactgttttctgttcagctttatgccaactatgctattggaaaggatgt

SEQ ID NO: 311935 - DNA, 221 bp, Zea mays
cccacgcgtccggcctggcttcgggatgccctgaactcagggccgtcgacctgtgcggctgtgttcttataacagatgagagcgtggttgcgctggcgaacggctgccttcacctgcgctccctgggtctctactactgccagaacatcacggaccgcgccatgtactccctggccgccaacagccgcgtgaggagtcggggccggggctgggacgcgaca

SEQ ID NO: 311936 - DNA, 215 bp, Zea mays
aactgggttttcttctcgtcttgtctttttgctgttgcagtggacccactattcttcttcctacccatcatcaacgattcaaactgcattggtattgataaaaagttggcagtgacatcaacaataatacgtacggttattgattttgtctaccttatacgcgtgtgtcttcaattccgcactgcttatgttgctccatcttcacgcgtgtttgg

SEQ ID NO: 311937 - DNA, 241 bp, Zea mays
cagtacggtcggaattccggatcatcccggtccgcgacggtcgagtgaggtcgcggccacccgatgcctgacatgtaccagaagcacatggtgtggatcctgtgcaacgactgcagcgcgacctcgagcgtgcggttccacgtgctggggcacaagtgccccgcgtgcagctcgtacaacacccgggagacgagggctgcgtgccccaggatctgaggcgaaccagaggccatgtcacaaa

SEQ ID NO: 311938 - DNA, 224 bp, Zea mays
tccgggtccgcggacgcgtgggcggaccgtgggcggacgcgtgggcagtgacgaggttccagggcggcggcgcgttcaacgtgatcccggactccgtggcgatcggcggcacgtttcggtgcgtctccagcgagggcttcatgcggctgaagcgtcgcatcgaggaggtgatcgtttcgcaatccgcggtgcaccgatgcgccgcgtccgtggacttcggcgcc

SEQ ID NO: 311939 - DNA, 106 bp, Zea mays
  unsure (1)..(106): unsure at all n locations
cggancgtacagcaaaccgctctttgttgccccagccatgaacacgttaatgtggaacaacccattcacggagcggcatcttcacacaatcaaccaactgggcata

SEQ ID NO: 311940 - DNA, 103 bp, Zea mays
  unsure (1)..(103): unsure at all n locations
cgacgggcngagacgcgtgggcaagcctagctgacacatctgcgaacataattttcggtgctgtcgttgatgaccgttacactggtgagatacatgtgacaat

SEQ ID NO: 311941 - DNA, 103 bp, Zea mays
gagttacttccaatcgtgtacactccaaccgttggcgaggcctgccaaaaatatggatccatatttagtcgccctcagggtctttatatcagtttgaaggaga

SEQ ID NO: 311942 - DNA, 234 bp, Zea mays
cccacgcgtccgcccacgcgtccgcccacgcgtccgggatgcctccactctttctccctcttctctcctccccttgctcttctctggccgccgccacttgccaggacttcctgcagcagagcgcccctgcagctccttgcacctgcatcctacgcgcgctccagccgaccacgcccaggaaccagtgcagcgctccatcatcagtaggtgactgacggcacatgcgccaccatg

SEQ ID NO: 311943 - DNA, 119 bp, Zea mays
  unsure (1)..(119): unsure at all n locations
tgnacacgcgtccggtcgaccccgcatacgtacactccaagcgccaagccaccggctaccaagcctccaacgatcaagctgagcccgccgacgtacaccccttctcgcaagcctccgag

SEQ ID NO: 311944 - DNA, 228 bp, Zea mays
catatcgtgaacccgccgccgacgcagcagcaggagacgcgccaaggagagcccgcaaggaggcgactattagggccaagtggaagaagaagcgcatgaggaggctgaagaggaagcgccgagagatgaggcagagatccaagtaggctgatgaggattgtggatggtggtgtcggcatagttgggttacgtttcatcgatgcgtgagttcatggagagatgtcacat

SEQ ID NO: 311945 - DNA, 146 bp, Zea mays
ctcacgcgtccgcggacggtgggtgccttccactggatactgtcaaggtatgagtgatctgctgtcaccttttgttgtaatatatgaggatgatgcagatgccttttggtgctttgagatgctactgagaaggatgcgtgaaaatt

SEQ ID NO: 311946 - DNA, 231 bp, Zea mays
  unsure (1)..(231): unsure at all n locations
cccacgcgtccgcggacggtgggcgaccgtggncagcgacgcgtgggtagcgaagaagtgaggagaaggttatacaagcactagtgcaagagcacgaagaaggctttcacaaagtatgctctcaaatatgaaaatgatgctggcaagaaggaaattcagctgcagcttgagaagatgaagaaatatgcttctgttatccgtgtcattgctcatacccagattaggaagatg

SEQ ID NO: 311947 - DNA, 237 bp, Zea mays
ctcgcgacctccgtccaggatgcctgggctcgctaggagcccagctcaccggttccaggtgcagagatgccgcaaagagcctcgtgaggatgctcggtgccaacctcgaggaccagtggatgcagacgatgaacctcgcagtaaccaactggatagtcgagctgagatcctcgagccgctcgtccggcccgccgtcgccgctcttctcatacgccgtctcagcaagcgggctctgga

SEQ ID NO: 311948 - DNA, 228 bp, Zea mays
cccacgcgtccgcgcacgcgtccgggcccccgtgccgaggcccggcgccctgggcaagcagggggtggcgctgcggatatcggcggacagcgcggcgttcgtggggtgcaacttcctgggcgcgcaggacacgctgtacgaccacctcggccggcagtactaccgggactgctacagcgagggctccgtcgacttcatcttcgggaacgcgctctccctctaggaggg

SEQ ID NO: 311949 - DNA, 247 bp, Zea mays
tgcacgacgcagctttcagttttgttttgcttgatggcacctggagcaattctgctgcagtgtacagaaggttgaaggagagatggactgcagtatggggagcatgaagctctaccttgtattgcactatgtacacttagtgcctcagtgatgcataaactacgaccgcagcctgactgggatcgtacctgcactgcagcagctgcagctggcgtcctctgggagttgagctcgcggcctgaggtca

SEQ ID NO: 311950 - DNA, 241 bp, Zea mays
cccacgcgtccgcccacgcgtccgcccacgcgtccgcccacgcgtccgatgaagcccggccccgcctacgagaggaactacggactctaccagccggacatgagcatggtctacaacgtcggagtctcccagctcgccaccacgtcggccgcctccctctccctcgccacgtcgccagcagccaggaccacggatgttgggaaggactatgccggcctatgcctcgtcgcggtatctgtgg

SEQ ID NO: 311951 - DNA, 243 bp, Zea mays
cccacgcgtccgcccacgcgtccggggaggcgcgcttcctgttcaaggagcccgaagccggcggcggcgccgacacgcaggcaacgccggcttcggagatggacacgaggaccaccgtcatgatcaggaacataccgaacaagaacagccagaagctgctgctcaacatgctggacaaccactgcatccaatccaacgagtggatcgtggcgagcggcgaggagcagcccttctccgcctacg

SEQ ID NO: 311952 - DNA, 244 bp, Zea mays
tgacgctggtgatcacgcgtccgtgcccatgctgttgctgagtgctgttggctgcggcactccttacacggaccttcaggtctctcttgcctctgcgacggtcgtcttctgcgacaacgtgagcgctgtctacatggcagctaatcccgttcatcatcgccgcacgatgcacattgagatcgacatccagtttgttcgcgaaaaggtagcactggggctagttcgggtggtccatgtcccctct

SEQ ID NO: 311953 - DNA, 237 bp, Zea mays
  unsure (1)..(237): unsure at all n locations
cggacggtgggtctgcccatacatctgtggcaggcaccttgaccatggtgttctccttgttggatatggttaccagaaatttgattcncgtgcacagacacaacactgttgtgctgagctgaggcgacaantgtgagaagtccaagagtgttgcttcagttcagaacttcagtgttgtgtctgtggacgagctcaaatttctggtaacctcatcaaacatgggccattggcaatcgg

SEQ ID NO: 311954 - DNA, 226 bp, Zea mays
gagctggggtccccggcgaacaacatgccctgtgggcataggttccactcttcttgcatcctgccatggcttgagctccacagctcttgccccgtgtgccggttcgagctgccgtctgaagagacgaaagatctgaacgagcctagcgatgtgcacagaagaacagagagcacccgagagaacgacagcgagagcggtaacagcgcgtggccccttgtcccttggt

SEQ ID NO: 311955 - DNA, 223 bp, Zea mays
gaagcacttgattcaaacgatccgaaaggttgataggagcagatcccttgaaattcttttcagcaggcattgtcccatatggtatggctatggaggtcggcttaaattcctggagagatttgcttatatcaacacaacaatttatccactcacatcaatcccgctcctcctgtactgcatattgccagcagtttgtcttctcactgggaagttcatcatccca

SEQ ID NO: 311956 - DNA, 214 bp, Zea mays
aacccgcacaacggcacgattctcctcctccgtccgcgtactctcggtttcggcgatgtcggggcgcggcaagggcggcaaggggctgggcaagggcggcgccaagcgccaccgcaaggtgctgcgcgacaacatccagggcatcacgaagccggcgatccgtcagctggccaggaggggcggcgtcaagcgcatttctgggctcatctacgag

SEQ ID NO: 311957 - DNA, 162 bp, Zea mays
agcacgcgtccgagcacgcgtccgcggacgcgtgggcgacggatccaagagagagggattgcttgaaaactattctgcacagggtatatgggaagttcatggtacaccgtcctttcatccgcaaagcagtgagcaacatattttaccagtttgtctttgaga

SEQ ID NO: 311958 - DNA, 159 bp, Zea mays
cggacgcgtgggcggacgcgtgggctcgcacacaacatcctatcccgcctgtccccaagagacgttgcgtccaacggatcggtgtgcaccagaatgcatgagctgaccaagaacgatcacctgaggaagatggtctgccagaacgcgtggggaagggac

SEQ ID NO: 311959 - DNA, 250 bp, Zea mays
atctgctggggcaaggaggttttgggtttgttcacaaaggagtgctaccagatggcacagaggttgccgttaagcagttaagagatggcagtggccagggagagcgcgagttccaggctgaagttgagattatcagcagagtacatcacaagcatcttgtatccttggtcggctattgcatttctggagcccacaggttgctcgtctacgagtttgttccaaacaatacattggaattccacttacatgg

SEQ ID NO: 311960 - DNA, 236 bp, Zea mays
gaggacgctggtgaccacgcgtcccgacgtggattttaggggctagaaacaggcgacgacaggttaggacttgtttttttacaccaatccagccctggattagcaatgatttttatgcagctcttgtttgttacgaccactcatggcaccatttatgcatacatctgaactatttatgctgttgatatgtttctagtgtggcaatgatttttttacatatagatgcttaccaaaag

SEQ ID NO: 311961 - DNA, 227 bp, Zea mays
cccacgcgtccggcccatggtcaggttcaggcaggcggccacgttctacggcgtgctcctccgcaccatcaccgtcggcggccagcggctcggcgtggcccccgcggtgttcgccgcgggctcggtactagactcccgcacggccatcacgcgcctgccgccgacggcgtaccaggccctgcgctccgcgttcaggagcagcatgaccatgtaccgctccgccccac

SEQ ID NO: 311962 - DNA, 226 bp, Zea mays
gcctaacatattctgtgcatacgttctgctctcgattcttggccagttcgccatgcacatattcttccttatcacggctgtcaatgaagcatcaaagcatatgccagaggaatgcattgagcctgactcagacttccatccaaaccttgtgaatacggtttcgtacatggtgaacatgatgatccaggtggcaacctttgctgtaaactacatgggccacccattt

SEQ ID NO: 311963 - DNA, 233 bp, Zea mays
atgaaccatctaacattgaggttagcaaagagaaattccagtgcttgagacgtggctgctggttaaatgatgaggttattaatctgtaccttgaattgttgaaggagcgagaaaaaagagaaccaaacaggtttctgaaatgtcatttctttaatacattcttttataagaagcttgcttgtggaaaaaatggttatgattacaaatctgttaaaagatggacctcccaaagg

SEQ ID NO: 311964 - DNA, 236 bp, Zea mays
cccacgcgtccgcccacgcgtccgcccacgcgtccgcggacgcgtgggcggaccgtgggtgaaggtgtgcatgcttggtgatgcccagcacgttgatgaggtaaacaggcagttgatgatgcacttgaaaatgtacttatttatatgttgaacatgcttgcagtagtaaatctgcaaaaacaccaatgcttcgagttactcaactgtggctggcatgtattagtcagtccaagccc

SEQ ID NO: 311965 - DNA, 239 bp, Zea mays
cccacgcgtccggactagttctagatcccctgcgcctgccctcccctcctgcagcgcccgtcgcctccctttccccttccctccctccctctccccgcgggccgccagaggcaatttcgccctcgattcgaccccgattcgtccgcccgcgaccgggattccctccgccaagcgcggatctgaacgctgcgctccgtgtcgccgctcgaatccgccatgaagggggccaaatccaaggg

SEQ ID NO: 311966 - DNA, 237 bp, Zea mays
cccacgcgtccgataatgtagaggatgtagtggtatttccctaggatggtggacttcatatcaaggcacgcgtggagaaataccactacatcctctacattattgtcctggcaatgcagcccaggatgcttttgactgtcgacgaggatctgaagcccctgtcagtacctgtccgcgtcggacaagctgtcgacgtggttggtcaggcaggaaggccgaagacaatcaccggcttcc

SEQ ID NO: 311967 - DNA, 234 bp, Zea mays
cccacgcgtccggcctgctgcctcatgtaccgtggtgatgtggtccccaaggatgtgaatgctgctgtggccaccatcaagaccaaacgcaccatccagttcgtggattggtgcccgactggcttcaagtgcggcatcaactaccagcctcctagcgttgtgcctggtggcgacctggccaaggtgcagcgtgctgtgtgcatgatctccaactccaccagtgttgtggaggtg

SEQ ID NO: 311968 - DNA, 242 bp, Zea mays
gaagcttgtgctcaccgccgagaactacggctcggtgcggcggttctacgtggagaccacggaggacaacacgattcctctgcccctccagcagagcatgtgtggtgccaacccaccggagaaggtgctgcggctgaagggggcagaccacgcgcccttcttctccaagccgcagcgcctgcacaaggcgctggtcgagatcgccaccatgccgcatgtccgggcttcgtgagaacgtgttt

SEQ ID NO: 311969 - DNA, 245 bp, Zea mays
cgatccgatccgccgagtgcacaccacctttccccactccgatcgaatcgatggccgccgagggcgagaagaagatgataaccctcaaaagctccgatggcgaggagttcgaggtggaagaggcggtggcgatggagtcgcagaccatccgccacatgatcgaggatgactgcgccgacaacggtatccctcttcctaacgtcaactccaagatcctatccaaggtaatcgagtactgcaacaag

SEQ ID NO: 311970 - DNA, 229 bp, Zea mays
cttagtggagggatgggtgctgcattactctccaaacctgagcttatacacgatattctgacaacactgcggaggaacttggacacaactgtgacatgtaaaatccgtcttctgaacacacctagagacactgtggagttggcacgccggattgagaaaactggtgttcctgctcttactgtccatggaagacagattaaagatagaccgagagatcttgccaagtggg

SEQ ID NO: 311971 - DNA, 229 bp, Zea mays
gatgatgttgaattgaataatcttcatcgacagataattcataaagaagcatatgttggacaatctaaagtgaagtcagcagctgatgcttgccgggacattaactaaaataccctcagatatgatatagttgttgatgcaactgacaaccttcctactaggtatatgatcagcgattgctgtgttttgctgaacaagccacttgtatctggtgcggcattaggcttag

SEQ ID NO: 311972 - DNA, 231 bp, Zea mays
gggcttcgcgcgggacctgcggttcgagaacatcgtgatgacgaacgtctccaaccccatcatcatcgaccagtactactgcgaccagcccacgccctgcgccaaccagacgcaggcggtggaggtgcgcaaggtggagttcgcgggcatccggggcacgtcggcgacgccgcaggagtcagcatcgcgtgcagcgacgccgtgccgtgccgggacctggatctggcgaac

SEQ ID NO: 311973 - DNA, 225 bp, Zea mays
aaagacttcttccaaattttatcaccttctttgcgtctgctcaggattgctccacgtggatcagggatggtttcatttggagttgaagacttcgtcaagcgatatggaccattgaaaccctcgcagtttgtggatgttgttgcactttcaggagacaaagctgccattatacctggagttgaggggattggagatattaatgcagtaaagctgatatctaagttt

SEQ ID NO: 311974 - DNA, 233 bp, Zea mays
cccacgcgtccgcccacgcgtccgcccacgcgtccgcggacgcgtgggcggacgcgtgggcaagatcccacatagcaaatatttggaagatcccagagcgtactaagagggtgtaccctccatgcgatacttctgctcttacagatgcttcccctggaaagaccaacaacacctcctgttcttatttcagttgcacagttccgcccagaaaaggcccatggccttcagctgga
